United States Patent Application Publication US 2005/0244851 A1 - sequence listing, part 13

SEQ ID NO: 479007 - DNA, 25 bp, Homo sapien
cacttaacctcatcctgtaacagct

SEQ ID NO: 479008 - DNA, 25 bp, Homo sapien
tgcacttaacctcatcctgtaacag

SEQ ID NO: 479009 - DNA, 25 bp, Homo sapien
tgcacagcactgtaatctgccagac

SEQ ID NO: 479010 - DNA, 25 bp, Homo sapien
ggtgacagcccaggattctgtggct

SEQ ID NO: 479011 - DNA, 25 bp, Homo sapien
cagacgtggtgacagcccaggattc

SEQ ID NO: 479012 - DNA, 25 bp, Homo sapien
acagcactgtaatctgccagacgtg

SEQ ID NO: 479013 - DNA, 25 bp, Homo sapien
tagtaggtgaactgagtaattgatg

SEQ ID NO: 479014 - DNA, 25 bp, Homo sapien
ttgatgaagatgatttgccaaaacc

SEQ ID NO: 479015 - DNA, 25 bp, Homo sapien
tgatgaagatgatttgccaaaacca

SEQ ID NO: 479016 - DNA, 25 bp, Homo sapien
gaactgagtaattgatgaagatgat

SEQ ID NO: 479017 - DNA, 25 bp, Homo sapien
tttcaattacagtgagggctggtct

SEQ ID NO: 479018 - DNA, 25 bp, Homo sapien
tgagggctggtctcttggtaagaga

SEQ ID NO: 479019 - DNA, 25 bp, Homo sapien
gtttcaattacagtgagggctggtc

SEQ ID NO: 479020 - DNA, 25 bp, Homo sapien
agggctggtctcttggtaagagaag

SEQ ID NO: 479021 - DNA, 25 bp, Homo sapien
tcacagctgagtatcttagagctat

SEQ ID NO: 479022 - DNA, 25 bp, Homo sapien
tgtaagagctaccaaagaatccttc

SEQ ID NO: 479023 - DNA, 25 bp, Homo sapien
agctattaagctgagaatgctctgc

SEQ ID NO: 479024 - DNA, 25 bp, Homo sapien
acaaattccttgttagactcagttc

SEQ ID NO: 479025 - DNA, 25 bp, Homo sapien
gtaggagcggggaggtggaggaatc

SEQ ID NO: 479026 - DNA, 25 bp, Homo sapien
ctggccctggggtgggtaggagcgg

SEQ ID NO: 479027 - DNA, 25 bp, Homo sapien
ggagcggggaggtggaggaatctac

SEQ ID NO: 479028 - DNA, 25 bp, Homo sapien
cctggccctggggtgggtaggagcg

SEQ ID NO: 479029 - DNA, 25 bp, Homo sapien
tccccaacgagatagaatcaaggag

SEQ ID NO: 479030 - DNA, 25 bp, Homo sapien
tatctggtgggtagaaactaggaac

SEQ ID NO: 479031 - DNA, 25 bp, Homo sapien
cacattacaatgcacagggaatccc

SEQ ID NO: 479032 - DNA, 25 bp, Homo sapien
tgtgacactctgcaaccactagaga

SEQ ID NO: 479033 - DNA, 25 bp, Homo sapien
tccagactagcacagctgccactga

SEQ ID NO: 479034 - DNA, 25 bp, Homo sapien
gactagcacagctgccactgaccat

SEQ ID NO: 479035 - DNA, 25 bp, Homo sapien
cttccagactagcacagctgccact

SEQ ID NO: 479036 - DNA, 25 bp, Homo sapien
agactagcacagctgccactgacca

SEQ ID NO: 479037 - DNA, 25 bp, Homo sapien
cagagctgggaattgccattagtgg

SEQ ID NO: 479038 - DNA, 25 bp, Homo sapien
gagctgggaattgccattagtggca

SEQ ID NO: 479039 - DNA, 25 bp, Homo sapien
agctgggaattgccattagtggcat

SEQ ID NO: 479040 - DNA, 25 bp, Homo sapien
agagctgggaattgccattagtggc

SEQ ID NO: 479041 - DNA, 25 bp, Homo sapien
tgggctcactagattcaaatacgga

SEQ ID NO: 479042 - DNA, 25 bp, Homo sapien
cagaatattttgctccaggtgaagg

SEQ ID NO: 479043 - DNA, 25 bp, Homo sapien
tacacatgttcgcataagctctggt

SEQ ID NO: 479044 - DNA, 25 bp, Homo sapien
agctctggtgactcaaacatttgcc

SEQ ID NO: 479045 - DNA, 25 bp, Homo sapien
ctggagaggctgactttctggcttt

SEQ ID NO: 479046 - DNA, 25 bp, Homo sapien
ctaatcagacttctggagaggctga

SEQ ID NO: 479047 - DNA, 25 bp, Homo sapien
agaggctgactttctggcttttgac

SEQ ID NO: 479048 - DNA, 25 bp, Homo sapien
ggagaggctgactttctggcttttg

SEQ ID NO: 479049 - DNA, 25 bp, Homo sapien
tgtcagaaagctaccaagtattatg

SEQ ID NO: 479050 - DNA, 25 bp, Homo sapien
catagatgacttagggtaaacacag

SEQ ID NO: 479051 - DNA, 25 bp, Homo sapien
tcttgcagattggtacatagatgac

SEQ ID NO: 479052 - DNA, 25 bp, Homo sapien
tttcaaagggacacttcacaactgg

SEQ ID NO: 479053 - DNA, 25 bp, Homo sapien
ggatctgtttgattgccaaattttc

SEQ ID NO: 479054 - DNA, 25 bp, Homo sapien
ttctggatctgtttgattgccaaat

SEQ ID NO: 479055 - DNA, 25 bp, Homo sapien
ctgatttcaataagttctatcttct

SEQ ID NO: 479056 - DNA, 25 bp, Homo sapien
tcaataagttctatcttctggatct

SEQ ID NO: 479057 - DNA, 25 bp, Homo sapien
gaataaagagttacatagattggat

SEQ ID NO: 479058 - DNA, 25 bp, Homo sapien
agaataaagagttacatagattgga

SEQ ID NO: 479059 - DNA, 25 bp, Homo sapien
aagaataaagagttacatagattgg

SEQ ID NO: 479060 - DNA, 25 bp, Homo sapien
cagctagatgcgaattattcacttc

SEQ ID NO: 479061 - DNA, 25 bp, Homo sapien
tattgaccatgacactggaaaagga

SEQ ID NO: 479062 - DNA, 25 bp, Homo sapien
tctttcaagatgactgtgtgactgt

SEQ ID NO: 479063 - DNA, 25 bp, Homo sapien
cacttctccttggtcaatttttgcc

SEQ ID NO: 479064 - DNA, 25 bp, Homo sapien
agggcacggatacaccctggggttg

SEQ ID NO: 479065 - DNA, 25 bp, Homo sapien
tcacagtgggaagcccccgacagta

SEQ ID NO: 479066 - DNA, 25 bp, Homo sapien
ccccgacagtatgggcagtacagca

SEQ ID NO: 479067 - DNA, 25 bp, Homo sapien
ttgagacagtagttgttgcagggcc

SEQ ID NO: 479068 - DNA, 25 bp, Homo sapien
aagcagcccttcatgacgttgagac

SEQ ID NO: 479069 - DNA, 25 bp, Homo sapien
tataaacagattccactctgtgtcg

SEQ ID NO: 479070 - DNA, 25 bp, Homo sapien
ataaacagattccactctgtgtcga

SEQ ID NO: 479071 - DNA, 25 bp, Homo sapien
ctataaacagattccactctgtgtc

SEQ ID NO: 479072 - DNA, 25 bp, Homo sapien
gttctcggatccatttaaacacttc

SEQ ID NO: 479073 - DNA, 25 bp, Homo sapien
acttgctgttgtcccgtctctgttc

SEQ ID NO: 479074 - DNA, 25 bp, Homo sapien
cgtctctgttctcggatccatttaa

SEQ ID NO: 479075 - DNA, 25 bp, Homo sapien
ccatcaagccccataaacacttgct

SEQ ID NO: 479076 - DNA, 25 bp, Homo sapien
taaagcgtcctttctcacgggagtg

SEQ ID NO: 479077 - DNA, 25 bp, Homo sapien
cacgggagtgcatggaacttcaaca

SEQ ID NO: 479078 - DNA, 25 bp, Homo sapien
gaacagttagctcaatatagctggg

SEQ ID NO: 479079 - DNA, 25 bp, Homo sapien
tgggttgcacaatctttaacaggac

SEQ ID NO: 479080 - DNA, 25 bp, Homo sapien
ctgaggcctgttaacctaagcacat

SEQ ID NO: 479081 - DNA, 25 bp, Homo sapien
gaggctgacaaatgccactgctatt

SEQ ID NO: 479082 - DNA, 25 bp, Homo sapien
tgcataaatgacgaaggccctcaga

SEQ ID NO: 479083 - DNA, 25 bp, Homo sapien
tagccaatgggtttcattatcagag

SEQ ID NO: 479084 - DNA, 25 bp, Homo sapien
tttgtgtcagaaggataacttaatg

SEQ ID NO: 479085 - DNA, 25 bp, Homo sapien
ttttgtgtcagaaggataacttaat

SEQ ID NO: 479086 - DNA, 25 bp, Homo sapien
attttgtgtcagaaggataacttaa

SEQ ID NO: 479087 - DNA, 25 bp, Homo sapien
actcaattgatcgaaagcataagga

SEQ ID NO: 479088 - DNA, 25 bp, Homo sapien
atttcacatcaaatcggtatctagg

SEQ ID NO: 479089 - DNA, 25 bp, Homo sapien
atcggtatctaggaaactcaattga

SEQ ID NO: 479090 - DNA, 25 bp, Homo sapien
tctaggaaactcaattgatcgaaag

SEQ ID NO: 479091 - DNA, 25 bp, Homo sapien
aatgcttgaaatcgttccttctgcc

SEQ ID NO: 479092 - DNA, 25 bp, Homo sapien
gaacagtatcttacgcaaatgcttg

SEQ ID NO: 479093 - DNA, 25 bp, Homo sapien
tatggacttttatgcctgagaaggt

SEQ ID NO: 479094 - DNA, 25 bp, Homo sapien
tttcaggaatatcagccagtgtcat

SEQ ID NO: 479095 - DNA, 25 bp, Homo sapien
gctgcgctggttttctcacaagctc

SEQ ID NO: 479096 - DNA, 25 bp, Homo sapien
tttcagctgcgctggttttctcaca

SEQ ID NO: 479097 - DNA, 25 bp, Homo sapien
tctatttcagctgcgctggttttct

SEQ ID NO: 479098 - DNA, 25 bp, Homo sapien
caagtaagtctatttcagctgcgct

SEQ ID NO: 479099 - DNA, 25 bp, Homo sapien
atgtttccacttttggtcccactgt

SEQ ID NO: 479100 - DNA, 25 bp, Homo sapien
ccactgtttctcaaatccaacaaga

SEQ ID NO: 479101 - DNA, 25 bp, Homo sapien
tcagtattcaattggatgtttccac

SEQ ID NO: 479102 - DNA, 25 bp, Homo sapien
tttggtcccactgtttctcaaatcc

SEQ ID NO: 479103 - DNA, 25 bp, Homo sapien
agagggataggtggttttagggcat

SEQ ID NO: 479104 - DNA, 25 bp, Homo sapien
agctttccaaagagggataggtggt

SEQ ID NO: 479105 - DNA, 25 bp, Homo sapien
cagctccctgagtctaaggatcctc

SEQ ID NO: 479106 - DNA, 25 bp, Homo sapien
gaaatgccatccagaagtaggttca

SEQ ID NO: 479107 - DNA, 25 bp, Homo sapien
caagaagctgtaccgttccagggca

SEQ ID NO: 479108 - DNA, 25 bp, Homo sapien
ttccagggcaatgttagggccatgg

SEQ ID NO: 479109 - DNA, 25 bp, Homo sapien
gattaattcgggtttgagactcaga

SEQ ID NO: 479110 - DNA, 25 bp, Homo sapien
gagactcagatcagtccacagctct

SEQ ID NO: 479111 - DNA, 25 bp, Homo sapien
cacaggacgagaataaagctggcat

SEQ ID NO: 479112 - DNA, 25 bp, Homo sapien
cagtcaacaatctgaagaccagctt

SEQ ID NO: 479113 - DNA, 25 bp, Homo sapien
ccattgcttacatattttcacttta

SEQ ID NO: 479114 - DNA, 25 bp, Homo sapien
ctggcacacagactagtaatataaa

SEQ ID NO: 479115 - DNA, 25 bp, Homo sapien
tggcacacagactagtaatataaat

SEQ ID NO: 479116 - DNA, 25 bp, Homo sapien
ctccattgcttacatattttcactt

SEQ ID NO: 479117 - DNA, 25 bp, Homo sapien
gcagaaaactgctttcttgtcttgt

SEQ ID NO: 479118 - DNA, 25 bp, Homo sapien
tgcaaatctggccttcaatatggca

SEQ ID NO: 479119 - DNA, 25 bp, Homo sapien
ttattgcagccacaactctggcttc

SEQ ID NO: 479120 - DNA, 25 bp, Homo sapien
tgtctgtcacttttgttcatctgct

SEQ ID NO: 479121 - DNA, 25 bp, Homo sapien
tgtatcatctacaaagccgtgtgag

SEQ ID NO: 479122 - DNA, 25 bp, Homo sapien
taacaggcaaagcatatgccatgcg

SEQ ID NO: 479123 - DNA, 25 bp, Homo sapien
tatgccatgcgttttacaagtgtat

SEQ ID NO: 479124 - DNA, 25 bp, Homo sapien
cagaggaaagattaacaggcaaagc

SEQ ID NO: 479125 - DNA, 25 bp, Homo sapien
tagtcgttcaatacattctcttaac

SEQ ID NO: 479126 - DNA, 25 bp, Homo sapien
tttatggatagtagtcgttcaatac

SEQ ID NO: 479127 - DNA, 25 bp, Homo sapien
gagtagtaatattttatggatagta

SEQ ID NO: 479128 - DNA, 25 bp, Homo sapien
gatagtagtcgttcaatacattctc

SEQ ID NO: 479129 - DNA, 25 bp, Homo sapien
catccgatctcattttagccacagg

SEQ ID NO: 479130 - DNA, 25 bp, Homo sapien
gattagcagtgggaacaagttacct

SEQ ID NO: 479131 - DNA, 25 bp, Homo sapien
tacagtggctgtgattactcctgcc

SEQ ID NO: 479132 - DNA, 25 bp, Homo sapien
tatatcccgaaagaggctgctgcag

SEQ ID NO: 479133 - DNA, 25 bp, Homo sapien
atgaacatccttaaaacttaatatg

SEQ ID NO: 479134 - DNA, 25 bp, Homo sapien
catgcctggctccactttttctcct

SEQ ID NO: 479135 - DNA, 25 bp, Homo sapien
tctccttaaggatgtttctatgaac

SEQ ID NO: 479136 - DNA, 25 bp, Homo sapien
ccaaaatgctaggatattacgggtg

SEQ ID NO: 479137 - DNA, 25 bp, Homo sapien
tactcatcactaaagagatctgggc

SEQ ID NO: 479138 - DNA, 25 bp, Homo sapien
tactgactacattcgaaaagactcc

SEQ ID NO: 479139 - DNA, 25 bp, Homo sapien
tgaattcgacaactacttaagacgt

SEQ ID NO: 479140 - DNA, 25 bp, Homo sapien
cactaaggtctgttgatggagccac

SEQ ID NO: 479141 - DNA, 25 bp, Homo sapien
gatgccttatgcaacaagagatgac

SEQ ID NO: 479142 - DNA, 25 bp, Homo sapien
tgtgttcccaagattagtatccaat

SEQ ID NO: 479143 - DNA, 25 bp, Homo sapien
tacttcacacactggataaacaggg

SEQ ID NO: 479144 - DNA, 25 bp, Homo sapien
cagggctcattagcatcaaacatgc

SEQ ID NO: 479145 - DNA, 25 bp, Homo sapien
gactccgtgaccgtgatctaatctg

SEQ ID NO: 479146 - DNA, 25 bp, Homo sapien
caaaatctgaggaaggcatgtgcat

SEQ ID NO: 479147 - DNA, 25 bp, Homo sapien
tcagaagggtcccaataacgaggat

SEQ ID NO: 479148 - DNA, 25 bp, Homo sapien
gctgaagccatcgtgtgtaagaaat

SEQ ID NO: 479149 - DNA, 25 bp, Homo sapien
tgaaggtcacatgtgttagtgccaa

SEQ ID NO: 479150 - DNA, 25 bp, Homo sapien
gctccggtagcccatgtctgtaaat

SEQ ID NO: 479151 - DNA, 25 bp, Homo sapien
gaggcaacggctattctgaaggtca

SEQ ID NO: 479152 - DNA, 25 bp, Homo sapien
tgtcctgtgattagggcacccttgg

SEQ ID NO: 479153 - DNA, 25 bp, Homo sapien
ttccaggcagtaagaatattaactt

SEQ ID NO: 479154 - DNA, 25 bp, Homo sapien
gtttgcatgtcaggaacaggtattt

SEQ ID NO: 479155 - DNA, 25 bp, Homo sapien
tgtttgctaggtgctaggcattgct

SEQ ID NO: 479156 - DNA, 25 bp, Homo sapien
ggtattctaatgctctgctccatat

SEQ ID NO: 479157 - DNA, 25 bp, Homo sapien
gagaatgctttggacccaagttctg

SEQ ID NO: 479158 - DNA, 25 bp, Homo sapien
gcagtcggtatctccattgtgtcct

SEQ ID NO: 479159 - DNA, 25 bp, Homo sapien
aacaccatcacactgagagaatgct

SEQ ID NO: 479160 - DNA, 25 bp, Homo sapien
aatatcctttctcacagcttttcct

SEQ ID NO: 479161 - DNA, 25 bp, Homo sapien
tttcgattttaggagaaggcaaggc

SEQ ID NO: 479162 - DNA, 25 bp, Homo sapien
gaacagattaggtcagttctcctgg

SEQ ID NO: 479163 - DNA, 25 bp, Homo sapien
caggtggcgaatgtctatgtcaagg

SEQ ID NO: 479164 - DNA, 25 bp, Homo sapien
cagggaagtggcatggttaatcaga

SEQ ID NO: 479165 - DNA, 25 bp, Homo sapien
tatgaggcaaactcttaagcaagcc

SEQ ID NO: 479166 - DNA, 25 bp, Homo sapien
taagcaagccctaatatctggcagg

SEQ ID NO: 479167 - DNA, 25 bp, Homo sapien
tggcagtgaactcaatattggcagg

SEQ ID NO: 479168 - DNA, 25 bp, Homo sapien
ccatggagaggttgcgtatcatttc

SEQ ID NO: 479169 - DNA, 25 bp, Homo sapien
aaggcaggaggactcataacatcca

SEQ ID NO: 479170 - DNA, 25 bp, Homo sapien
tgggtgcctgtacctcctaacaagg

SEQ ID NO: 479171 - DNA, 25 bp, Homo sapien
atgaatgtaaacagtgggactctga

SEQ ID NO: 479172 - DNA, 25 bp, Homo sapien
tggctgcacagaccaaatatttgct

SEQ ID NO: 479173 - DNA, 25 bp, Homo sapien
aattacacgtatacaaacagtgatg

SEQ ID NO: 479174 - DNA, 25 bp, Homo sapien
gctacctaggagctatttgatcatg

SEQ ID NO: 479175 - DNA, 25 bp, Homo sapien
tgatcatgggtaagctcatgccctt

SEQ ID NO: 479176 - DNA, 25 bp, Homo sapien
cctgagtcaggaaactgggtacatt

SEQ ID NO: 479177 - DNA, 25 bp, Homo sapien
gctcagcagagataatgtaccccat

SEQ ID NO: 479178 - DNA, 25 bp, Homo sapien
tttgagggaggatacacacgttgcc

SEQ ID NO: 479179 - DNA, 25 bp, Homo sapien
caatgtttgcccgatagtggacact

SEQ ID NO: 479180 - DNA, 25 bp, Homo sapien
tttgggctcagcgtcattaaagcac

SEQ ID NO: 479181 - DNA, 25 bp, Homo sapien
actgcacctggcctgcatacttttt

SEQ ID NO: 479182 - DNA, 25 bp, Homo sapien
taaagacagggatggccatgatggc

SEQ ID NO: 479183 - DNA, 25 bp, Homo sapien
ctgcacctggcctgcatactttttt

SEQ ID NO: 479184 - DNA, 25 bp, Homo sapien
ttagtaaagacagggatggccatga

SEQ ID NO: 479185 - DNA, 25 bp, Homo sapien
tgattgactacgtggtaccctttcc

SEQ ID NO: 479186 - DNA, 25 bp, Homo sapien
ttgagctagtactaacccagacccc

SEQ ID NO: 479187 - DNA, 25 bp, Homo sapien
ttccatctttctgatgacatataaa

SEQ ID NO: 479188 - DNA, 25 bp, Homo sapien
taaaaatgaggagccacacactctg

SEQ ID NO: 479189 - DNA, 25 bp, Homo sapien
gaggggccattctgaacagatgtct

SEQ ID NO: 479190 - DNA, 25 bp, Homo sapien
ccatccctctgaggggccattctga

SEQ ID NO: 479191 - DNA, 25 bp, Homo sapien
tctgaggggccattctgaacagatg

SEQ ID NO: 479192 - DNA, 25 bp, Homo sapien
cctctgaggggccattctgaacaga

SEQ ID NO: 479193 - DNA, 25 bp, Homo sapien
gtaattgtgatgttagcctccccag

SEQ ID NO: 479194 - DNA, 25 bp, Homo sapien
ctaatactgtgttggagggactgcc

SEQ ID NO: 479195 - DNA, 25 bp, Homo sapien
tggttccagatacaccagtgacaga

SEQ ID NO: 479196 - DNA, 25 bp, Homo sapien
catgcagtaaggattgggaggctcc

SEQ ID NO: 479197 - DNA, 25 bp, Homo sapien
ccaaacgtctctgatgggcaaaatc

SEQ ID NO: 479198 - DNA, 25 bp, Homo sapien
gaaaagtgaacgtattctccctgct

SEQ ID NO: 479199 - DNA, 25 bp, Homo sapien
tactgaagacggctgctgagactcc

SEQ ID NO: 479200 - DNA, 25 bp, Homo sapien
gaggatcagtaatgtctccaggcac

SEQ ID NO: 479201 - DNA, 25 bp, Homo sapien
agaagtgatgtcttgatagccccaa

SEQ ID NO: 479202 - DNA, 25 bp, Homo sapien
ggtgcactgggattctacaagtctt

SEQ ID NO: 479203 - DNA, 25 bp, Homo sapien
tctacaagtctttgtcaaagaagtg

SEQ ID NO: 479204 - DNA, 25 bp, Homo sapien
ctgtagctgcagaataacggggtgc

SEQ ID NO: 479205 - DNA, 25 bp, Homo sapien
tcttcagaaacagtgccaaggccaa

SEQ ID NO: 479206 - DNA, 25 bp, Homo sapien
ttatgagaggcgatgacacggactg

SEQ ID NO: 479207 - DNA, 25 bp, Homo sapien
tgtgattgactacaccagcccaagg

SEQ ID NO: 479208 - DNA, 25 bp, Homo sapien
ccaaggccaacagccaataggatcg

SEQ ID NO: 479209 - DNA, 25 bp, Homo sapien
ttattctggatgtccctttatcagc

SEQ ID NO: 479210 - DNA, 25 bp, Homo sapien
tcctgacaccagtctaaactttact

SEQ ID NO: 479211 - DNA, 25 bp, Homo sapien
ttctggatgtccctttatcagccat

SEQ ID NO: 479212 - DNA, 25 bp, Homo sapien
actttactgaagcttttccttcaga

SEQ ID NO: 479213 - DNA, 25 bp, Homo sapien
gaaagaatcgctgaattcccttgag

SEQ ID NO: 479214 - DNA, 25 bp, Homo sapien
tttgcagaaagaatcgctgaattcc

SEQ ID NO: 479215 - DNA, 25 bp, Homo sapien
tgcagaaagaatcgctgaattccct

SEQ ID NO: 479216 - DNA, 25 bp, Homo sapien
cagaaagaatcgctgaattcccttg

SEQ ID NO: 479217 - DNA, 25 bp, Homo sapien
ctggagctgaagttatgaggattga

SEQ ID NO: 479218 - DNA, 25 bp, Homo sapien
tggagctgaagttatgaggattgat

SEQ ID NO: 479219 - DNA, 25 bp, Homo sapien
ataagttcttccgaggctgtagagc

SEQ ID NO: 479220 - DNA, 25 bp, Homo sapien
cctgataagttcttccgaggctgta

SEQ ID NO: 479221 - DNA, 25 bp, Homo sapien
tgataagttcttccgaggctgtaga

SEQ ID NO: 479222 - DNA, 25 bp, Homo sapien
ctgataagttcttccgaggctgtag

SEQ ID NO: 479223 - DNA, 25 bp, Homo sapien
ggagacagaggctctagtcctgcct

SEQ ID NO: 479224 - DNA, 25 bp, Homo sapien
catcaacatctgacactgagctcac

SEQ ID NO: 479225 - DNA, 25 bp, Homo sapien
taggagggagcgcagtaaagcacct

SEQ ID NO: 479226 - DNA, 25 bp, Homo sapien
cagacattcaagcagacattctatg

SEQ ID NO: 479227 - DNA, 25 bp, Homo sapien
acaaagagattcataatcagactcc

SEQ ID NO: 479228 - DNA, 25 bp, Homo sapien
gatcaagaacttctaaggattcaag

SEQ ID NO: 479229 - DNA, 25 bp, Homo sapien
ctgatcaagaacttctaaggattca

SEQ ID NO: 479230 - DNA, 25 bp, Homo sapien
gattcaagtttacaaagagattcat

SEQ ID NO: 479231 - DNA, 25 bp, Homo sapien
agaggatctggtaccattctttctg

SEQ ID NO: 479232 - DNA, 25 bp, Homo sapien
ataaaagaaatggataacttcctgg

SEQ ID NO: 479233 - DNA, 25 bp, Homo sapien
tgcaaataaattagaaaatataaaa

SEQ ID NO: 479234 - DNA, 25 bp, Homo sapien
attagaaaatataaaagaaatggat

SEQ ID NO: 479235 - DNA, 25 bp, Homo sapien
aggaacatgatttatttgcaaactg

SEQ ID NO: 479236 - DNA, 25 bp, Homo sapien
tgttaaaatacaggaacatgattta

SEQ ID NO: 479237 - DNA, 25 bp, Homo sapien
catgatttatttgcaaactgggagc

SEQ ID NO: 479238 - DNA, 25 bp, Homo sapien
tatttgcaaactgggagctccaggt

SEQ ID NO: 479239 - DNA, 25 bp, Homo sapien
gacatctatcgggtccatgaccgac

SEQ ID NO: 479240 - DNA, 25 bp, Homo sapien
ttcagaaatcttgacatctatcggg

SEQ ID NO: 479241 - DNA, 25 bp, Homo sapien
tgaccgactcaatgttgaatggccc

SEQ ID NO: 479242 - DNA, 25 bp, Homo sapien
ttgaatggcccctccagtcgctctg

SEQ ID NO: 479243 - DNA, 25 bp, Homo sapien
ttggcagatacattactaatgcaaa

SEQ ID NO: 479244 - DNA, 25 bp, Homo sapien
tattggcagatacattactaatgca

SEQ ID NO: 479245 - DNA, 25 bp, Homo sapien
gtattggcagatacattactaatgc

SEQ ID NO: 479246 - DNA, 25 bp, Homo sapien
atgtattggcagatacattactaat

SEQ ID NO: 479247 - DNA, 25 bp, Homo sapien
tgaaccttctacctccgtctcccaa

SEQ ID NO: 479248 - DNA, 25 bp, Homo sapien
gtgaaccttctacctccgtctccca

SEQ ID NO: 479249 - DNA, 25 bp, Homo sapien
tgtcttttgcagcttgattatacat

SEQ ID NO: 479250 - DNA, 25 bp, Homo sapien
cattgtcttttgcagcttgattata

SEQ ID NO: 479251 - DNA, 25 bp, Homo sapien
ttatcttcttcattgtcttttgcag

SEQ ID NO: 479252 - DNA, 25 bp, Homo sapien
tcttcttcattgtcttttgcagctt

SEQ ID NO: 479253 - DNA, 25 bp, Homo sapien
gatatactgtgaaggtggttgtaac

SEQ ID NO: 479254 - DNA, 25 bp, Homo sapien
agatatactgtgaaggtggttgtaa

SEQ ID NO: 479255 - DNA, 25 bp, Homo sapien
tgagatatactgtgaaggtggttgt

SEQ ID NO: 479256 - DNA, 25 bp, Homo sapien
gagatatactgtgaaggtggttgta

SEQ ID NO: 479257 - DNA, 25 bp, Homo sapien
ccaagcttgtgcctgcagcagttgt

SEQ ID NO: 479258 - DNA, 25 bp, Homo sapien
tttcaggagctgagcgggcagatct

SEQ ID NO: 479259 - DNA, 25 bp, Homo sapien
tgtagggcctgaaacgtgtattaaa

SEQ ID NO: 479260 - DNA, 25 bp, Homo sapien
gtctttcctcaggattgtagggcct

SEQ ID NO: 479261 - DNA, 25 bp, Homo sapien
catggttatcaatctgtgaatactc

SEQ ID NO: 479262 - DNA, 25 bp, Homo sapien
gtaaaacaaagcatccgccatggtt

SEQ ID NO: 479263 - DNA, 25 bp, Homo sapien
taatccaatacatgacccaaaagaa

SEQ ID NO: 479264 - DNA, 25 bp, Homo sapien
gcatgagatgactcttataacaaac

SEQ ID NO: 479265 - DNA, 25 bp, Homo sapien
gatctaagtttatatgacacagtca

SEQ ID NO: 479266 - DNA, 25 bp, Homo sapien
gatgtggttcaagtgctttatgaca

SEQ ID NO: 479267 - DNA, 25 bp, Homo sapien
catcaagataattggcaaagcaaca

SEQ ID NO: 479268 - DNA, 25 bp, Homo sapien
taactggcagtctttgagatctaag

SEQ ID NO: 479269 - DNA, 25 bp, Homo sapien
tttaactaagtgcaaaatgtaccca

SEQ ID NO: 479270 - DNA, 25 bp, Homo sapien
tacttagtttatgctaagctgcaaa

SEQ ID NO: 479271 - DNA, 25 bp, Homo sapien
aacaatacactattgttagctgcag

SEQ ID NO: 479272 - DNA, 25 bp, Homo sapien
gagaaaattctcgaagtgttgatgc

SEQ ID NO: 479273 - DNA, 25 bp, Homo sapien
actatgctgcatagtccgccacaca

SEQ ID NO: 479274 - DNA, 25 bp, Homo sapien
gctgcatagtccgccacacagtcct

SEQ ID NO: 479275 - DNA, 25 bp, Homo sapien
tatgctgcatagtccgccacacagt

SEQ ID NO: 479276 - DNA, 25 bp, Homo sapien
atgctgcatagtccgccacacagtc

SEQ ID NO: 479277 - DNA, 25 bp, Homo sapien
caggttcaggcaagaccgggtcgtt

SEQ ID NO: 479278 - DNA, 25 bp, Homo sapien
tgtctcagtggggtttcgcagcaaa

SEQ ID NO: 479279 - DNA, 25 bp, Homo sapien
tgctgctgttattaccaagggttca

SEQ ID NO: 479280 - DNA, 25 bp, Homo sapien
gcagcaaatagataaagcaggttca

SEQ ID NO: 479281 - DNA, 25 bp, Homo sapien
cgagacagaatacgttgggtggttt

SEQ ID NO: 479282 - DNA, 25 bp, Homo sapien
tgtgacaggcggctctctctgctac

SEQ ID NO: 479283 - DNA, 25 bp, Homo sapien
gcagaaaccgagacagaatacgttg

SEQ ID NO: 479284 - DNA, 25 bp, Homo sapien
tgacaggcggctctctctgctacca

SEQ ID NO: 479285 - DNA, 25 bp, Homo sapien
tgggagttgtggtgcaaatatctca

SEQ ID NO: 479286 - DNA, 25 bp, Homo sapien
catgaacatcacatttgggagttgt

SEQ ID NO: 479287 - DNA, 25 bp, Homo sapien
tcagctctatctctcataagcatga

SEQ ID NO: 479288 - DNA, 25 bp, Homo sapien
tcttcagctctatctctcataagca

SEQ ID NO: 479289 - DNA, 25 bp, Homo sapien
agttgatgtagcaccctccaaatca

SEQ ID NO: 479290 - DNA, 25 bp, Homo sapien
gtactagtccccatcctaaaaatca

SEQ ID NO: 479291 - DNA, 25 bp, Homo sapien
tattgtactagtccccatcctaaaa

SEQ ID NO: 479292 - DNA, 25 bp, Homo sapien
acagtttcttaaatctgccagttag

SEQ ID NO: 479293 - DNA, 25 bp, Homo sapien
ccgtacagcactggccattagtgag

SEQ ID NO: 479294 - DNA, 25 bp, Homo sapien
tggaatcccaggattagcacagaga

SEQ ID NO: 479295 - DNA, 25 bp, Homo sapien
cactggccattagtgagatttatgg

SEQ ID NO: 479296 - DNA, 25 bp, Homo sapien
gctgaccataagatgccgtacagca

SEQ ID NO: 479297 - DNA, 25 bp, Homo sapien
gggataggaactgtacctcttctaa

SEQ ID NO: 479298 - DNA, 25 bp, Homo sapien
tatcttagtttgacaagaggggaaa

SEQ ID NO: 479299 - DNA, 25 bp, Homo sapien
aagggataggaactgtacctcttct

SEQ ID NO: 479300 - DNA, 25 bp, Homo sapien
ttcttaagccgctgtttttatgact

SEQ ID NO: 479301 - DNA, 25 bp, Homo sapien
agctggcgagacagtctaggactga

SEQ ID NO: 479302 - DNA, 25 bp, Homo sapien
ctgcaaccctggacagctgctcttt

SEQ ID NO: 479303 - DNA, 25 bp, Homo sapien
tctttgaagtattgaacggggagct

SEQ ID NO: 479304 - DNA, 25 bp, Homo sapien
tcaggcaaaatcagctgcaaccctg

SEQ ID NO: 479305 - DNA, 25 bp, Homo sapien
cagaagtgcacagcttttaagttgt

SEQ ID NO: 479306 - DNA, 25 bp, Homo sapien
gcatcatgaaaacacgtctgctcca

SEQ ID NO: 479307 - DNA, 25 bp, Homo sapien
gactggggcttttcgaggttccaca

SEQ ID NO: 479308 - DNA, 25 bp, Homo sapien
cttgggtggttgagcctccagaagt

SEQ ID NO: 479309 - DNA, 25 bp, Homo sapien
ggaaaaattgccaccgatatacact

SEQ ID NO: 479310 - DNA, 25 bp, Homo sapien
cagtattgctttcaaggctcaggaa

SEQ ID NO: 479311 - DNA, 25 bp, Homo sapien
gagggatcaccgtggttctctgtcc

SEQ ID NO: 479312 - DNA, 25 bp, Homo sapien
gctttgactggatgctgctaacctt

SEQ ID NO: 479313 - DNA, 25 bp, Homo sapien
tctaagccttcctgattggtgtggt

SEQ ID NO: 479314 - DNA, 25 bp, Homo sapien
caggagtatatgctccgaggatcca

SEQ ID NO: 479315 - DNA, 25 bp, Homo sapien
gatccaattcccttaagtaacagcc

SEQ ID NO: 479316 - DNA, 25 bp, Homo sapien
tgtctctgagacatcactgctgact

SEQ ID NO: 479317 - DNA, 25 bp, Homo sapien
cttccttgtaagtcgtatctacttc

SEQ ID NO: 479318 - DNA, 25 bp, Homo sapien
tccttgtaagtcgtatctacttctt

SEQ ID NO: 479319 - DNA, 25 bp, Homo sapien
cccttccttgtaagtcgtatctact

SEQ ID NO: 479320 - DNA, 25 bp, Homo sapien
ccttgtaagtcgtatctacttcttt

SEQ ID NO: 479321 - DNA, 25 bp, Homo sapien
tcttgaacttcgatgccatgcacag

SEQ ID NO: 479322 - DNA, 25 bp, Homo sapien
catttttgcttgtcggtggtcttga

SEQ ID NO: 479323 - DNA, 25 bp, Homo sapien
gttcccattgctgggtggttcagca

SEQ ID NO: 479324 - DNA, 25 bp, Homo sapien
tggttcagcagaagaaagtcgcgct

SEQ ID NO: 479325 - DNA, 25 bp, Homo sapien
gctttctgctgacctagatccagat

SEQ ID NO: 479326 - DNA, 25 bp, Homo sapien
ggagaggcctctttacgctgaacaa

SEQ ID NO: 479327 - DNA, 25 bp, Homo sapien
gaaagtgttaattagtggagaggcc

SEQ ID NO: 479328 - DNA, 25 bp, Homo sapien
tctttacgctgaacaaacaggcttt

SEQ ID NO: 479329 - DNA, 25 bp, Homo sapien
ctatggcattaagtgcagtaggcat

SEQ ID NO: 479330 - DNA, 25 bp, Homo sapien
cctatggcattaagtgcagtaggca

SEQ ID NO: 479331 - DNA, 25 bp, Homo sapien
tgattgtgcctcattccctatggca

SEQ ID NO: 479332 - DNA, 25 bp, Homo sapien
gtgcctcattccctatggcattaag

SEQ ID NO: 479333 - DNA, 25 bp, Homo sapien
tctttcctgagtagtcactgtgaga

SEQ ID NO: 479334 - DNA, 25 bp, Homo sapien
tcctgagtagtcactgtgagaaggc

SEQ ID NO: 479335 - DNA, 25 bp, Homo sapien
atctttcctgagtagtcactgtgag

SEQ ID NO: 479336 - DNA, 25 bp, Homo sapien
ccacaggaggccccaagtccatcta

SEQ ID NO: 479337 - DNA, 25 bp, Homo sapien
cacaggaggccccaagtccatctac

SEQ ID NO: 479338 - DNA, 25 bp, Homo sapien
cgtacgcaggcgagggttatagaac

SEQ ID NO: 479339 - DNA, 25 bp, Homo sapien
atttctacacaaggacgtacgcagg

SEQ ID NO: 479340 - DNA, 25 bp, Homo sapien
gcaagtgagtattctgctcaggctt

SEQ ID NO: 479341 - DNA, 25 bp, Homo sapien
agcaagtgagtattctgctcaggct

SEQ ID NO: 479342 - DNA, 25 bp, Homo sapien
gaccagacctttttagagagcttca

SEQ ID NO: 479343 - DNA, 25 bp, Homo sapien
ccagcattcctcctcgttggacgtg

SEQ ID NO: 479344 - DNA, 25 bp, Homo sapien
gctgtcacgctctcgtccttgcaga

SEQ ID NO: 479345 - DNA, 25 bp, Homo sapien
tgtagggtaatgctgaccagacctt

SEQ ID NO: 479346 - DNA, 25 bp, Homo sapien
cctgcctcctgttgcagacctgttg

SEQ ID NO: 479347 - DNA, 25 bp, Homo sapien
ctgcctcctgttgcagacctgttga

SEQ ID NO: 479348 - DNA, 25 bp, Homo sapien
tgcctcctgttgcagacctgttgag

SEQ ID NO: 479349 - DNA, 25 bp, Homo sapien
agccatgtttccaacgggtccgatt

SEQ ID NO: 479350 - DNA, 25 bp, Homo sapien
gccatgtttccaacgggtccgatta

SEQ ID NO: 479351 - DNA, 25 bp, Homo sapien
catgtttccaacgggtccgattaat

SEQ ID NO: 479352 - DNA, 25 bp, Homo sapien
tctgtcaggatcaggtgccttgaaa

SEQ ID NO: 479353 - DNA, 25 bp, Homo sapien
ggatcaggtgccttgaaaaacagca

SEQ ID NO: 479354 - DNA, 25 bp, Homo sapien
gggacacaatatttctgtcaggatc

SEQ ID NO: 479355 - DNA, 25 bp, Homo sapien
caatatttctgtcaggatcaggtgc

SEQ ID NO: 479356 - DNA, 25 bp, Homo sapien
tcatggtttgccaatgcggcttgcc

SEQ ID NO: 479357 - DNA, 25 bp, Homo sapien
tccagccttgggagaagccagaagt

SEQ ID NO: 479358 - DNA, 25 bp, Homo sapien
tgaggacaacctggagagttgagca

SEQ ID NO: 479359 - DNA, 25 bp, Homo sapien
tgagcagggatgtcatggtttgcca

SEQ ID NO: 479360 - DNA, 25 bp, Homo sapien
tgctgtctgatgaaagtgtcaggcc

SEQ ID NO: 479361 - DNA, 25 bp, Homo sapien
gttgatctggttggtgagcccatca

SEQ ID NO: 479362 - DNA, 25 bp, Homo sapien
tgttggtcatcacacggagagccat

SEQ ID NO: 479363 - DNA, 25 bp, Homo sapien
tgtcaggccgagtgatgtccacatc

SEQ ID NO: 479364 - DNA, 25 bp, Homo sapien
tacagccataacgtccattgggttg

SEQ ID NO: 479365 - DNA, 25 bp, Homo sapien
gctgataactatgactgaaatgact

SEQ ID NO: 479366 - DNA, 25 bp, Homo sapien
tgatccttaatgaaatagtcgtgtg

SEQ ID NO: 479367 - DNA, 25 bp, Homo sapien
ctaacaagggtgaagcaacaatggc

SEQ ID NO: 479368 - DNA, 25 bp, Homo sapien
ggcctctgtggtgacaaactcaaac

SEQ ID NO: 479369 - DNA, 25 bp, Homo sapien
gacaaactcaaactccgtgggacac

SEQ ID NO: 479370 - DNA, 25 bp, Homo sapien
gtgggacacacgtcatccatgcacc

SEQ ID NO: 479371 - DNA, 25 bp, Homo sapien
ctctccggtcgggatccactgcggg

SEQ ID NO: 479372 - DNA, 25 bp, Homo sapien
caaggtccccacagatagctgaagg

SEQ ID NO: 479373 - DNA, 25 bp, Homo sapien
aagcagttcagtctggcacccggta

SEQ ID NO: 479374 - DNA, 25 bp, Homo sapien
catggtccattgtccaagagtgtaa

SEQ ID NO: 479375 - DNA, 25 bp, Homo sapien
cggtaagtttttgtggcatggtcca

SEQ ID NO: 479376 - DNA, 25 bp, Homo sapien
taccaacttggccttcgtgaaaatg

SEQ ID NO: 479377 - DNA, 25 bp, Homo sapien
gaaggctaatgtctgcagcagggaa

SEQ ID NO: 479378 - DNA, 25 bp, Homo sapien
tgccaattggatacagcggacagac

SEQ ID NO: 479379 - DNA, 25 bp, Homo sapien
gatgatacctccaagacaacagtgc

SEQ ID NO: 479380 - DNA, 25 bp, Homo sapien
tcagtacaaaagaacagcgctacag

SEQ ID NO: 479381 - DNA, 25 bp, Homo sapien
tcccctagagcagggtttatagaga

SEQ ID NO: 479382 - DNA, 25 bp, Homo sapien
tacaatatttagcatgcctgagagg

SEQ ID NO: 479383 - DNA, 25 bp, Homo sapien
tcacagccagtgataaatcccctag

SEQ ID NO: 479384 - DNA, 25 bp, Homo sapien
tgagcattcacagggtaaaagtccc

SEQ ID NO: 479385 - DNA, 25 bp, Homo sapien
gagcttgcgctccttaagcaggcta

SEQ ID NO: 479386 - DNA, 25 bp, Homo sapien
tttatgcttcaaggtatacatgagc

SEQ ID NO: 479387 - DNA, 25 bp, Homo sapien
gcaggcatctaattcctcctggctt

SEQ ID NO: 479388 - DNA, 25 bp, Homo sapien
cttgagaactagtggctgggtccct

SEQ ID NO: 479389 - DNA, 25 bp, Homo sapien
gggtatcgttctaccaggctcagct

SEQ ID NO: 479390 - DNA, 25 bp, Homo sapien
agaagtggagatgaatcagaagact

SEQ ID NO: 479391 - DNA, 25 bp, Homo sapien
caggctcagcttgagaactagtggc

SEQ ID NO: 479392 - DNA, 25 bp, Homo sapien
cttccttgcattctggtatgctcat

SEQ ID NO: 479393 - DNA, 25 bp, Homo sapien
tcacttccttgcattctggtatgct

SEQ ID NO: 479394 - DNA, 25 bp, Homo sapien
gcaatttcatacccatcacttcctt

SEQ ID NO: 479395 - DNA, 25 bp, Homo sapien
actgaattagtaaaatatgtgaatg

SEQ ID NO: 479396 - DNA, 25 bp, Homo sapien
caagagccctttgccctaggactgg

SEQ ID NO: 479397 - DNA, 25 bp, Homo sapien
tgccttggaattgcacaggaatccc

SEQ ID NO: 479398 - DNA, 25 bp, Homo sapien
tgcttggtcaaggaggcagtcctgc

SEQ ID NO: 479399 - DNA, 25 bp, Homo sapien
aatccctttaggtggcgctagctca

SEQ ID NO: 479400 - DNA, 25 bp, Homo sapien
taaacctaggattgcatcgccttct

SEQ ID NO: 479401 - DNA, 25 bp, Homo sapien
tacagagttggacactgaatctagc

SEQ ID NO: 479402 - DNA, 25 bp, Homo sapien
tccgggaagcgcatacactcattgg

SEQ ID NO: 479403 - DNA, 25 bp, Homo sapien
acagtagagcctccttccgggaagc

SEQ ID NO: 479404 - DNA, 25 bp, Homo sapien
atgccccaggtgatgttcaggtatc

SEQ ID NO: 479405 - DNA, 25 bp, Homo sapien
cccaggtgatgttcaggtatctttc

SEQ ID NO: 479406 - DNA, 25 bp, Homo sapien
gccccaggtgatgttcaggtatctt

SEQ ID NO: 479407 - DNA, 25 bp, Homo sapien
cttccttaggatgccccaggtgatg

SEQ ID NO: 479408 - DNA, 25 bp, Homo sapien
tgctggcagctgttgagttcaactc

SEQ ID NO: 479409 - DNA, 25 bp, Homo sapien
ccagtgtgcaaggtgtggcctcctc

SEQ ID NO: 479410 - DNA, 25 bp, Homo sapien
gggtttggcacctcttgttcctgaa

SEQ ID NO: 479411 - DNA, 25 bp, Homo sapien
tgttgagttcaactctctcagtgcc

SEQ ID NO: 479412 - DNA, 25 bp, Homo sapien
catttcatgtcaaggaggtgtgcac

SEQ ID NO: 479413 - DNA, 25 bp, Homo sapien
tgactggtctcgaaaacagaagcgt

SEQ ID NO: 479414 - DNA, 25 bp, Homo sapien
gcttagctgcacaaaagcaggcgtg

SEQ ID NO: 479415 - DNA, 25 bp, Homo sapien
cattctgaagttgacgctgggagta

SEQ ID NO: 479416 - DNA, 25 bp, Homo sapien
gccaatccctgaccttttacatcta

SEQ ID NO: 479417 - DNA, 25 bp, Homo sapien
aagtgtcgatggcttttgctttcca

SEQ ID NO: 479418 - DNA, 25 bp, Homo sapien
ttcccggcacagtaggcagctaggt

SEQ ID NO: 479419 - DNA, 25 bp, Homo sapien
cagggttctggttgccccgtcgcca

SEQ ID NO: 479420 - DNA, 25 bp, Homo sapien
tgcctatctaaagggtctccaggcc

SEQ ID NO: 479421 - DNA, 25 bp, Homo sapien
ctgtggcgatggtcataggctgtcc

SEQ ID NO: 479422 - DNA, 25 bp, Homo sapien
ccaggacggctatgggcaagcaggc

SEQ ID NO: 479423 - DNA, 25 bp, Homo sapien
tcagacaggactctgagcctgccta

SEQ ID NO: 479424 - DNA, 25 bp, Homo sapien
catagtttaagctaatatccagctc

SEQ ID NO: 479425 - DNA, 25 bp, Homo sapien
ccactctgaccatcctgagagcttg

SEQ ID NO: 479426 - DNA, 25 bp, Homo sapien
gtttaagctaatatccagctcttcc

SEQ ID NO: 479427 - DNA, 25 bp, Homo sapien
tttccatagtttaagctaatatcca

SEQ ID NO: 479428 - DNA, 25 bp, Homo sapien
acgaatgtggatagtcacaggcagg

SEQ ID NO: 479429 - DNA, 25 bp, Homo sapien
caggcaggggcagatcgaagggaag

SEQ ID NO: 479430 - DNA, 25 bp, Homo sapien
gaggcgaccccgctgcttcggatct

SEQ ID NO: 479431 - DNA, 25 bp, Homo sapien
cttttcggggagcaaggtgacgaat

SEQ ID NO: 479432 - DNA, 25 bp, Homo sapien
agtctgacgattcctgccccgtaca

SEQ ID NO: 479433 - DNA, 25 bp, Homo sapien
agaggccagtctgacgattcctgcc

SEQ ID NO: 479434 - DNA, 25 bp, Homo sapien
gtattgggcctacacggctcctcac

SEQ ID NO: 479435 - DNA, 25 bp, Homo sapien
cgtacactccttcatccaatcgtat

SEQ ID NO: 479436 - DNA, 25 bp, Homo sapien
tggcactaagtcccagaaactttcg

SEQ ID NO: 479437 - DNA, 25 bp, Homo sapien
gtggcactaagtcccagaaactttc

SEQ ID NO: 479438 - DNA, 25 bp, Homo sapien
tgaagatcttttcactaacaggaaa

SEQ ID NO: 479439 - DNA, 25 bp, Homo sapien
ttgaagatcttttcactaacaggaa

SEQ ID NO: 479440 - DNA, 25 bp, Homo sapien
ctttcctcagataagagaagctcag

SEQ ID NO: 479441 - DNA, 25 bp, Homo sapien
taccattttggcgagttgcaagtcc

SEQ ID NO: 479442 - DNA, 25 bp, Homo sapien
atgtcttcagtttaatctttatacc

SEQ ID NO: 479443 - DNA, 25 bp, Homo sapien
gctgtgcctttcctcagataagaga

SEQ ID NO: 479444 - DNA, 25 bp, Homo sapien
ctattcaatttctccaatttcccct

SEQ ID NO: 479445 - DNA, 25 bp, Homo sapien
tgcagaatgcctcaatctttgggag

SEQ ID NO: 479446 - DNA, 25 bp, Homo sapien
tctcctgattcggacaaccatgagg

SEQ ID NO: 479447 - DNA, 25 bp, Homo sapien
taagggtagccaggaagaagtctcc

SEQ ID NO: 479448 - DNA, 25 bp, Homo sapien
ctttgggagagtttcagtactggca

SEQ ID NO: 479449 - DNA, 25 bp, Homo sapien
tctgattacgcactatattgacgaa

SEQ ID NO: 479450 - DNA, 25 bp, Homo sapien
aagcagttgtgcacttctaccagca

SEQ ID NO: 479451 - DNA, 25 bp, Homo sapien
tacatatgttacagagccttctctg

SEQ ID NO: 479452 - DNA, 25 bp, Homo sapien
caatttatgagatgcttgccaacac

SEQ ID NO: 479453 - DNA, 25 bp, Homo sapien
ttgccctaggtaatttgggtccagc

SEQ ID NO: 479454 - DNA, 25 bp, Homo sapien
tgcacgacctggaccagcttttctc

SEQ ID NO: 479455 - DNA, 25 bp, Homo sapien
ggagggtcctaatgcacgacctgga

SEQ ID NO: 479456 - DNA, 25 bp, Homo sapien
ccttattctgatatggggagggtcc

SEQ ID NO: 479457 - DNA, 25 bp, Homo sapien
ccaggtctgcaccgacgcctcggct

SEQ ID NO: 479458 - DNA, 25 bp, Homo sapien
caggtctgcaccgacgcctcggctc

SEQ ID NO: 479459 - DNA, 25 bp, Homo sapien
catggaactcgaagtggccgatgcg

SEQ ID NO: 479460 - DNA, 25 bp, Homo sapien
ctcgaagtggccgatgcgctggccc

SEQ ID NO: 479461 - DNA, 25 bp, Homo sapien
agcagcacgtgagggccacagccag

SEQ ID NO: 479462 - DNA, 25 bp, Homo sapien
cccgcagggtcttaccctggctgcc

SEQ ID NO: 479463 - DNA, 25 bp, Homo sapien
acgcccagccaccaggttggtattg

SEQ ID NO: 479464 - DNA, 25 bp, Homo sapien
ccacccaacgagtctggcttccttt

SEQ ID NO: 479465 - DNA, 25 bp, Homo sapien
gagccacccaacgagtctggcttcc

SEQ ID NO: 479466 - DNA, 25 bp, Homo sapien
caggagccacccaacgagtctggct

SEQ ID NO: 479467 - DNA, 25 bp, Homo sapien
tgttctggggtagacatattatacc

SEQ ID NO: 479468 - DNA, 25 bp, Homo sapien
tggtatctacgacttttacaaaaga

SEQ ID NO: 479469 - DNA, 25 bp, Homo sapien
ggtagacatattatacctaaaacaa

SEQ ID NO: 479470 - DNA, 25 bp, Homo sapien
aatgtatgtgttctggggtagacat

SEQ ID NO: 479471 - DNA, 25 bp, Homo sapien
ctgacacacagaagagcatggtcac

SEQ ID NO: 479472 - DNA, 25 bp, Homo sapien
ctgggcttggaacaggtagagttta

SEQ ID NO: 479473 - DNA, 25 bp, Homo sapien
tacagctataaccatgactgctttg

SEQ ID NO: 479474 - DNA, 25 bp, Homo sapien
tgctgtagctttagccattcctggg

SEQ ID NO: 479475 - DNA, 25 bp, Homo sapien
ttgtcaactgagctttggataattt

SEQ ID NO: 479476 - DNA, 25 bp, Homo sapien
tataacgagaatggcagcattttgg

SEQ ID NO: 479477 - DNA, 25 bp, Homo sapien
tgatctatcaacagtacctagcagt

SEQ ID NO: 479478 - DNA, 25 bp, Homo sapien
caacaagcccttaagcatgaaggtc

SEQ ID NO: 479479 - DNA, 25 bp, Homo sapien
ggaactatcatgaaccttagggaca

SEQ ID NO: 479480 - DNA, 25 bp, Homo sapien
aataaagatacctgccctgctagtg

SEQ ID NO: 479481 - DNA, 25 bp, Homo sapien
gaggcactgactaacactaacacga

SEQ ID NO: 479482 - DNA, 25 bp, Homo sapien
gaatctgacctgacctaagaggcac

SEQ ID NO: 479483 - DNA, 25 bp, Homo sapien
gagtcttggccttgcgactcagcaa

SEQ ID NO: 479484 - DNA, 25 bp, Homo sapien
cgatattttcacagtttccgggttg

SEQ ID NO: 479485 - DNA, 25 bp, Homo sapien
cttggtctcggcggctgaaactttg

SEQ ID NO: 479486 - DNA, 25 bp, Homo sapien
tggtctcggcggctgaaactttgaa

SEQ ID NO: 479487 - DNA, 25 bp, Homo sapien
tctcggcggctgaaactttgaattt

SEQ ID NO: 479488 - DNA, 25 bp, Homo sapien
gttcccatcattgcggacgggcaat

SEQ ID NO: 479489 - DNA, 25 bp, Homo sapien
gctaggctaccaatgatgaaggaca

SEQ ID NO: 479490 - DNA, 25 bp, Homo sapien
ggccgggcacattggtcatgttccc

SEQ ID NO: 479491 - DNA, 25 bp, Homo sapien
aggaaagtgccaagtctcgccacca

SEQ ID NO: 479492 - DNA, 25 bp, Homo sapien
tggagacggaatctgggacactgtc

SEQ ID NO: 479493 - DNA, 25 bp, Homo sapien
tcggcatctgggtttagtaacacca

SEQ ID NO: 479494 - DNA, 25 bp, Homo sapien
caaatgggatatcttccacctgaga

SEQ ID NO: 479495 - DNA, 25 bp, Homo sapien
cacatgccacgtttgtggagacgga

SEQ ID NO: 479496 - DNA, 25 bp, Homo sapien
ctaggaggaaaaagaactcatgtaa

SEQ ID NO: 479497 - DNA, 25 bp, Homo sapien
taggaggaaaaagaactcatgtaac

SEQ ID NO: 479498 - DNA, 25 bp, Homo sapien
catgtgcatgggtccgcctttctta

SEQ ID NO: 479499 - DNA, 25 bp, Homo sapien
tgtaattagctaaagctgaaccagc

SEQ ID NO: 479500 - DNA, 25 bp, Homo sapien
taacagcaatgcagttgtcagaacc

SEQ ID NO: 479501 - DNA, 25 bp, Homo sapien
cctttcttaatagcctgccacaatg

SEQ ID NO: 479502 - DNA, 25 bp, Homo sapien
taattagatgtaatgatgaacacag

SEQ ID NO: 479503 - DNA, 25 bp, Homo sapien
aaagcaagcataattttggtggact

SEQ ID NO: 479504 - DNA, 25 bp, Homo sapien
tggtggactaattaggattaattag

SEQ ID NO: 479505 - DNA, 25 bp, Homo sapien
ctgaggaattgaagaagagtagtgt

SEQ ID NO: 479506 - DNA, 25 bp, Homo sapien
ttctgccaaacttcccataaatggt

SEQ ID NO: 479507 - DNA, 25 bp, Homo sapien
tctgccaaacttcccataaatggta

SEQ ID NO: 479508 - DNA, 25 bp, Homo sapien
tgccaaacttcccataaatggtacc

SEQ ID NO: 479509 - DNA, 25 bp, Homo sapien
attctgccaaacttcccataaatgg

SEQ ID NO: 479510 - DNA, 25 bp, Homo sapien
gctacggagtaagaaccctgtctca

SEQ ID NO: 479511 - DNA, 25 bp, Homo sapien
acaacgaggagctgtacacattacc

SEQ ID NO: 479512 - DNA, 25 bp, Homo sapien
ggtggatccctcaagcccaagagta

SEQ ID NO: 479513 - DNA, 25 bp, Homo sapien
catgcattagtgtgatgtgccacca

SEQ ID NO: 479514 - DNA, 25 bp, Homo sapien
tgaatttgggaagcgatgtcaaaaa

SEQ ID NO: 479515 - DNA, 25 bp, Homo sapien
ctgaatttgggaagcgatgtcaaaa

SEQ ID NO: 479516 - DNA, 25 bp, Homo sapien
tccaacccatgcatagactcaaaag

SEQ ID NO: 479517 - DNA, 25 bp, Homo sapien
ctgtgtcatgacaatgaatactgca

SEQ ID NO: 479518 - DNA, 25 bp, Homo sapien
caggcgtagaatcccactggagagg

SEQ ID NO: 479519 - DNA, 25 bp, Homo sapien
gaatactgcaatgccagtggatgca

SEQ ID NO: 479520 - DNA, 25 bp, Homo sapien
ctaataccctaagctagacaaaatg

SEQ ID NO: 479521 - DNA, 25 bp, Homo sapien
cattcctatcagaccatagaggttg

SEQ ID NO: 479522 - DNA, 25 bp, Homo sapien
aacattcctatcagaccatagaggt

SEQ ID NO: 479523 - DNA, 25 bp, Homo sapien
cactctaataccctaagctagacaa

SEQ ID NO: 479524 - DNA, 25 bp, Homo sapien
tgtgatgtagaactcccttttgagt

SEQ ID NO: 479525 - DNA, 25 bp, Homo sapien
ttaggaggatccctgctaagttgtg

SEQ ID NO: 479526 - DNA, 25 bp, Homo sapien
ggtagctatgatgactgatatcttc

SEQ ID NO: 479527 - DNA, 25 bp, Homo sapien
cactgtgatgatctgatagagtcca

SEQ ID NO: 479528 - DNA, 25 bp, Homo sapien
aggtgctcgccacaaagcgtggcta

SEQ ID NO: 479529 - DNA, 25 bp, Homo sapien
ggataatcagaataaacgattttct

SEQ ID NO: 479530 - DNA, 25 bp, Homo sapien
gaagccttcaatgcacaggctcaag

SEQ ID NO: 479531 - DNA, 25 bp, Homo sapien
agaaccaagtggataatcagaataa

SEQ ID NO: 479532 - DNA, 25 bp, Homo sapien
taacggccaataactctggacaagg

SEQ ID NO: 479533 - DNA, 25 bp, Homo sapien
catagctgcctcagaataacggcca

SEQ ID NO: 479534 - DNA, 25 bp, Homo sapien
tcttgtcttgcgctcagaagcctga

SEQ ID NO: 479535 - DNA, 25 bp, Homo sapien
gaagttggttcttagggctgcagca

SEQ ID NO: 479536 - DNA, 25 bp, Homo sapien
tgcatgcaagaactggatggcataa

SEQ ID NO: 479537 - DNA, 25 bp, Homo sapien
tggtagtcgctaaaaatgacagaaa

SEQ ID NO: 479538 - DNA, 25 bp, Homo sapien
aatgcatgcaagaactggatggcat

SEQ ID NO: 479539 - DNA, 25 bp, Homo sapien
cttgtctctttggtagtcgctaaaa

SEQ ID NO: 479540 - DNA, 25 bp, Homo sapien
aatgagggcgacttttgtgtccaga

SEQ ID NO: 479541 - DNA, 25 bp, Homo sapien
tgtgtccagatgatatggtcagtgg

SEQ ID NO: 479542 - DNA, 25 bp, Homo sapien
gaaacttcccagtatagactgtgag

SEQ ID NO: 479543 - DNA, 25 bp, Homo sapien
gagtctgtagagaataaccatggaa

SEQ ID NO: 479544 - DNA, 25 bp, Homo sapien
ccttgggcaggaattcatgggtagt

SEQ ID NO: 479545 - DNA, 25 bp, Homo sapien
gctgaacacaacagacaatagctgg

SEQ ID NO: 479546 - DNA, 25 bp, Homo sapien
gaaaaggttatgaccactcagacga

SEQ ID NO: 479547 - DNA, 25 bp, Homo sapien
taatcctgattaagtatccttgggc

SEQ ID NO: 479548 - DNA, 25 bp, Homo sapien
tgcatcacagtaggcacccatctta

SEQ ID NO: 479549 - DNA, 25 bp, Homo sapien
ggtaaaatgcctggtaaaatgcatc

SEQ ID NO: 479550 - DNA, 25 bp, Homo sapien
tgggagcctggttatcacaatagag

SEQ ID NO: 479551 - DNA, 25 bp, Homo sapien
ttatactcagttaaatgggagcctg

SEQ ID NO: 479552 - DNA, 25 bp, Homo sapien
gaagctggcaccctttgtcagagta

SEQ ID NO: 479553 - DNA, 25 bp, Homo sapien
tctagtatgcaccagggagtgtcct

SEQ ID NO: 479554 - DNA, 25 bp, Homo sapien
tagagcaaggtgtaagaggatccca

SEQ ID NO: 479555 - DNA, 25 bp, Homo sapien
tgttgtcccacaggccaagagaagc

SEQ ID NO: 479556 - DNA, 25 bp, Homo sapien
taagccaaacttcacagattaaggg

SEQ ID NO: 479557 - DNA, 25 bp, Homo sapien
ttaagggcccagtcctccatatgac

SEQ ID NO: 479558 - DNA, 25 bp, Homo sapien
gtcaatgtcatgctaccacctgtgg

SEQ ID NO: 479559 - DNA, 25 bp, Homo sapien
tgtggtaccagatcaacagttcatc

SEQ ID NO: 479560 - DNA, 25 bp, Homo sapien
gatcaaaatagtcaaatgtttagga

SEQ ID NO: 479561 - DNA, 25 bp, Homo sapien
cttagggaagatgctagggctgtca

SEQ ID NO: 479562 - DNA, 25 bp, Homo sapien
cccttgctgcactctagcacttagg

SEQ ID NO: 479563 - DNA, 25 bp, Homo sapien
ctctgatctgatcaaaatagtcaaa

SEQ ID NO: 479564 - DNA, 25 bp, Homo sapien
acatatttagactatttccttcaaa

SEQ ID NO: 479565 - DNA, 25 bp, Homo sapien
tctgcacttcagccttgaaaacttc

SEQ ID NO: 479566 - DNA, 25 bp, Homo sapien
gcacttcagccttgaaaacttccag

SEQ ID NO: 479567 - DNA, 25 bp, Homo sapien
tgcacttcagccttgaaaacttcca

SEQ ID NO: 479568 - DNA, 25 bp, Homo sapien
acttcagccttgaaaacttccagac

SEQ ID NO: 479569 - DNA, 25 bp, Homo sapien
tctgcatacaaagggtgggccatcc

SEQ ID NO: 479570 - DNA, 25 bp, Homo sapien
aagaaaatgcctggtcatcattgcc

SEQ ID NO: 479571 - DNA, 25 bp, Homo sapien
caggtgagatgaactctcttctgct

SEQ ID NO: 479572 - DNA, 25 bp, Homo sapien
cattgccacgccagtgtttaatcct

SEQ ID NO: 479573 - DNA, 25 bp, Homo sapien
ccttatctacaagacggcttcgcag

SEQ ID NO: 479574 - DNA, 25 bp, Homo sapien
ttcttctttagcactccccttatct

SEQ ID NO: 479575 - DNA, 25 bp, Homo sapien
acaagacggcttcgcagaaaactgg

SEQ ID NO: 479576 - DNA, 25 bp, Homo sapien
tagcactccccttatctacaagacg

SEQ ID NO: 479577 - DNA, 25 bp, Homo sapien
gctgagagctgtaatgtcattaaat

SEQ ID NO: 479578 - DNA, 25 bp, Homo sapien
tttttctgcttttcgcctcgcagca

SEQ ID NO: 479579 - DNA, 25 bp, Homo sapien
tcgcagcacgccagcctaagctgag

SEQ ID NO: 479580 - DNA, 25 bp, Homo sapien
gccagcctaagctgagagctgtaat

SEQ ID NO: 479581 - DNA, 25 bp, Homo sapien
tgtgaatttcactagacagcctggt

SEQ ID NO: 479582 - DNA, 25 bp, Homo sapien
taaggcgtctagtcggtgccactgc

SEQ ID NO: 479583 - DNA, 25 bp, Homo sapien
gacatctggtgataggcaacttggg

SEQ ID NO: 479584 - DNA, 25 bp, Homo sapien
taggcttagacgttataggatctcc

SEQ ID NO: 479585 - DNA, 25 bp, Homo sapien
tttctctgagaacaagttgctgttt

SEQ ID NO: 479586 - DNA, 25 bp, Homo sapien
ttctctgagaacaagttgctgtttt

SEQ ID NO: 479587 - DNA, 25 bp, Homo sapien
ttttctctgagaacaagttgctgtt

SEQ ID NO: 479588 - DNA, 25 bp, Homo sapien
tttcctctgagaagcagtaactgct

SEQ ID NO: 479589 - DNA, 25 bp, Homo sapien
gctggatgtttgaactggctccccg

SEQ ID NO: 479590 - DNA, 25 bp, Homo sapien
aagggacttctctttgggcaacagt

SEQ ID NO: 479591 - DNA, 25 bp, Homo sapien
ggcaacagtcatgaaacttccagca

SEQ ID NO: 479592 - DNA, 25 bp, Homo sapien
ggcctacaaggattaggagggctct

SEQ ID NO: 479593 - DNA, 25 bp, Homo sapien
gacactaaagacgtgtgagcctctt

SEQ ID NO: 479594 - DNA, 25 bp, Homo sapien
ccattcatctggagtcgcacagcag

SEQ ID NO: 479595 - DNA, 25 bp, Homo sapien
gaagaatgcactttcctgataaatg

SEQ ID NO: 479596 - DNA, 25 bp, Homo sapien
tgctactgcaaaaccaacaaggccc

SEQ ID NO: 479597 - DNA, 25 bp, Homo sapien
cacacactgagtgaccggtctgggc

SEQ ID NO: 479598 - DNA, 25 bp, Homo sapien
tagtcggcttcttagtatccccagg

SEQ ID NO: 479599 - DNA, 25 bp, Homo sapien
ctcagagtctcagcgaggaggcgaa

SEQ ID NO: 479600 - DNA, 25 bp, Homo sapien
atctcccgcttggaaaagtcgccct

SEQ ID NO: 479601 - DNA, 25 bp, Homo sapien
cctgaagccaccgtgtcttcgtctt

SEQ ID NO: 479602 - DNA, 25 bp, Homo sapien
caccgtgtcttcgtctttggaacct

SEQ ID NO: 479603 - DNA, 25 bp, Homo sapien
gaaaagtcgcccttgcgacttgtct

SEQ ID NO: 479604 - DNA, 25 bp, Homo sapien
tttgctttctagacgctgcctccac

SEQ ID NO: 479605 - DNA, 25 bp, Homo sapien
gcgtcacggatctgcgctcactcaa

SEQ ID NO: 479606 - DNA, 25 bp, Homo sapien
gcaggcgtcacggatctgcgctcac

SEQ ID NO: 479607 - DNA, 25 bp, Homo sapien
atctgcgctcactcaactctccggg

SEQ ID NO: 479608 - DNA, 25 bp, Homo sapien
agccggaactgcgaagcagctcgtt

SEQ ID NO: 479609 - DNA, 25 bp, Homo sapien
aagcagctcgttccagatgcgggcg

SEQ ID NO: 479610 - DNA, 25 bp, Homo sapien
gaactgcgaagcagctcgttccaga

SEQ ID NO: 479611 - DNA, 25 bp, Homo sapien
cgccgggagccggaactgcgaagca

SEQ ID NO: 479612 - DNA, 25 bp, Homo sapien
tcggctgctcaaggccgcgtgaata

SEQ ID NO: 479613 - DNA, 25 bp, Homo sapien
gccaactgcttgtccggattgctgt

SEQ ID NO: 479614 - DNA, 25 bp, Homo sapien
cgtgaataaacatgagcgcgcggcg

SEQ ID NO: 479615 - DNA, 25 bp, Homo sapien
aacttagacttgtgtaggtcgagcg

SEQ ID NO: 479616 - DNA, 25 bp, Homo sapien
ggaaggcacgcccagggcggaggag

SEQ ID NO: 479617 - DNA, 25 bp, Homo sapien
ggttcccaacactgacccctccgca

SEQ ID NO: 479618 - DNA, 25 bp, Homo sapien
ttcaggttcacctgcggaaggcacg

SEQ ID NO: 479619 - DNA, 25 bp, Homo sapien
ccagggcggaggagtggcgggactg

SEQ ID NO: 479620 - DNA, 25 bp, Homo sapien
gcaaattatagcctgcccagctgac

SEQ ID NO: 479621 - DNA, 25 bp, Homo sapien
gccgctctctcgacgtcctggacgg

SEQ ID NO: 479622 - DNA, 25 bp, Homo sapien
ggaataatgcaaattatagcctgcc

SEQ ID NO: 479623 - DNA, 25 bp, Homo sapien
cagctgacacgtccctgcgaatgcg

SEQ ID NO: 479624 - DNA, 25 bp, Homo sapien
cagccgtcgaactttccagtcgtta

SEQ ID NO: 479625 - DNA, 25 bp, Homo sapien
cagtcgttatcagcgctgctcctaa

SEQ ID NO: 479626 - DNA, 25 bp, Homo sapien
gaggcgtccatagaggcctttgccg

SEQ ID NO: 479627 - DNA, 25 bp, Homo sapien
tattttcgatggttgctcgccaggc

SEQ ID NO: 479628 - DNA, 25 bp, Homo sapien
ccctcccggctccttgtccttgact

SEQ ID NO: 479629 - DNA, 25 bp, Homo sapien
tctccttggctcctgcccctttccc

SEQ ID NO: 479630 - DNA, 25 bp, Homo sapien
tcccctcccggctccttgtccttga

SEQ ID NO: 479631 - DNA, 25 bp, Homo sapien
tcccggctccttgtccttgactgaa

SEQ ID NO: 479632 - DNA, 25 bp, Homo sapien
ggtccacgcaggatggtcgcttccc

SEQ ID NO: 479633 - DNA, 25 bp, Homo sapien
caggatggtcgcttcccccttgctg

SEQ ID NO: 479634 - DNA, 25 bp, Homo sapien
tgggagaaaggtccacgcaggatgg

SEQ ID NO: 479635 - DNA, 25 bp, Homo sapien
gaaaggtccacgcaggatggtcgct

SEQ ID NO: 479636 - DNA, 25 bp, Homo sapien
atgtgtacacgctttgtccctccgg

SEQ ID NO: 479637 - DNA, 25 bp, Homo sapien
gaatagcggtgcaatgtgtacacgc

SEQ ID NO: 479638 - DNA, 25 bp, Homo sapien
ggtgcaatgtgtacacgctttgtcc

SEQ ID NO: 479639 - DNA, 25 bp, Homo sapien
ctggccggaatgaatagcggtgcaa

SEQ ID NO: 479640 - DNA, 25 bp, Homo sapien
ttggaaaactgttagcattgtgcac

SEQ ID NO: 479641 - DNA, 25 bp, Homo sapien
gaaaccaatcagtggtatttggaaa

SEQ ID NO: 479642 - DNA, 25 bp, Homo sapien
ctgtgtccattgtgaggcgtttctt

SEQ ID NO: 479643 - DNA, 25 bp, Homo sapien
gttagcattgtgcacttcttctgtg

SEQ ID NO: 479644 - DNA, 25 bp, Homo sapien
ttgaagcaagcctcgtatccaaggg

SEQ ID NO: 479645 - DNA, 25 bp, Homo sapien
gaagataggagaaagcaccgcggat

SEQ ID NO: 479646 - DNA, 25 bp, Homo sapien
tctccccggagcagatagggacggt

SEQ ID NO: 479647 - DNA, 25 bp, Homo sapien
tgctggccgcgattgttacttccct

SEQ ID NO: 479648 - DNA, 25 bp, Homo sapien
ctgaaagtggcccacaaatgcagcg

SEQ ID NO: 479649 - DNA, 25 bp, Homo sapien
ttgtgcggctgtttgaggacctcca

SEQ ID NO: 479650 - DNA, 25 bp, Homo sapien
gagcctcctgccaagttagactgtg

SEQ ID NO: 479651 - DNA, 25 bp, Homo sapien
catatcgccaacagattgtgcggct

SEQ ID NO: 479652 - DNA, 25 bp, Homo sapien
gaaacgctccggagttgttgatgaa

SEQ ID NO: 479653 - DNA, 25 bp, Homo sapien
ttatcttgttagttgaagagcccca

SEQ ID NO: 479654 - DNA, 25 bp, Homo sapien
tagaacagagcccattgaaaacatc

SEQ ID NO: 479655 - DNA, 25 bp, Homo sapien
aaaggcattcatgaaccagtagaac

SEQ ID NO: 479656 - DNA, 25 bp, Homo sapien
gcccaagtcgttgtattagctttaa

SEQ ID NO: 479657 - DNA, 25 bp, Homo sapien
tgttgcgttttgacccacggaggtg

SEQ ID NO: 479658 - DNA, 25 bp, Homo sapien
tatgtataggtacgagcgctgcggc

SEQ ID NO: 479659 - DNA, 25 bp, Homo sapien
cgagcaggcctgtgaattcgcagga

SEQ ID NO: 479660 - DNA, 25 bp, Homo sapien
gcagccaactcgaaagcaggcggtt

SEQ ID NO: 479661 - DNA, 25 bp, Homo sapien
tgcgaactgaggtgatggcccgttt

SEQ ID NO: 479662 - DNA, 25 bp, Homo sapien
gggcgaccaacgcttgctcaagcct

SEQ ID NO: 479663 - DNA, 25 bp, Homo sapien
ttgggcgaagttagttgcaagtgcc

SEQ ID NO: 479664 - DNA, 25 bp, Homo sapien
gcgagccgggagaacttcctctgag

SEQ ID NO: 479665 - DNA, 25 bp, Homo sapien
tacttgcacataccacagggctagg

SEQ ID NO: 479666 - DNA, 25 bp, Homo sapien
tcagcagcgcatgtaagtgagacac

SEQ ID NO: 479667 - DNA, 25 bp, Homo sapien
gatgacaccagggtttgccaacgcc

SEQ ID NO: 479668 - DNA, 25 bp, Homo sapien
tgtgccgcagcataccaaaaagtga

SEQ ID NO: 479669 - DNA, 25 bp, Homo sapien
caagaatattgatcccctagaagcc

SEQ ID NO: 479670 - DNA, 25 bp, Homo sapien
tcagtaggtgaaaagctcagggacg

SEQ ID NO: 479671 - DNA, 25 bp, Homo sapien
gagtgtcactcagtttccgactaga

SEQ ID NO: 479672 - DNA, 25 bp, Homo sapien
catatatcactgtggccgcaaggga

SEQ ID NO: 479673 - DNA, 25 bp, Homo sapien
aattctccacgggcagctcagggca

SEQ ID NO: 479674 - DNA, 25 bp, Homo sapien
gaattctccacgggcagctcagggc

SEQ ID NO: 479675 - DNA, 25 bp, Homo sapien
gcagctcagggcacgactccagcct

SEQ ID NO: 479676 - DNA, 25 bp, Homo sapien
tgaggtcccctaggcctttgagaaa

SEQ ID NO: 479677 - DNA, 25 bp, Homo sapien
tgctgaggtcccctaggcctttgag

SEQ ID NO: 479678 - DNA, 25 bp, Homo sapien
cccagcttccagtaatttgataaaa

SEQ ID NO: 479679 - DNA, 25 bp, Homo sapien
ctcaactcccagcttccagtaattt

SEQ ID NO: 479680 - DNA, 25 bp, Homo sapien
atcttcaggctctattatatatttt

SEQ ID NO: 479681 - DNA, 25 bp, Homo sapien
gcaatacaactacatcttcaggctc

SEQ ID NO: 479682 - DNA, 25 bp, Homo sapien
tcatgagactgaagcaatacaacta

SEQ ID NO: 479683 - DNA, 25 bp, Homo sapien
tagattccctctcacgtaaccactt

SEQ ID NO: 479684 - DNA, 25 bp, Homo sapien
tttacatacaacttattatgtgcca

SEQ ID NO: 479685 - DNA, 25 bp, Homo sapien
taatattcctcatgagaaataacaa

SEQ ID NO: 479686 - DNA, 25 bp, Homo sapien
gagaaataacaattgatgttggtaa

SEQ ID NO: 479687 - DNA, 25 bp, Homo sapien
taaatagccaattaatagtgaagtt

SEQ ID NO: 479688 - DNA, 25 bp, Homo sapien
ttggagtgggcacccgaagtttgac

SEQ ID NO: 479689 - DNA, 25 bp, Homo sapien
ccgaagtttgacgttgcttactgta

SEQ ID NO: 479690 - DNA, 25 bp, Homo sapien
tagtactttgtacgttggagtgggc

SEQ ID NO: 479691 - DNA, 25 bp, Homo sapien
gcttactgtagcctgcagagggact

SEQ ID NO: 479692 - DNA, 25 bp, Homo sapien
tcagattccccagtagcataaaaca

SEQ ID NO: 479693 - DNA, 25 bp, Homo sapien
atttctgaattatgccgttttcaga

SEQ ID NO: 479694 - DNA, 25 bp, Homo sapien
ccttaagtgtgtagctctaatggaa

SEQ ID NO: 479695 - DNA, 25 bp, Homo sapien
tgaaagataatgcaaaccttaagtg

SEQ ID NO: 479696 - DNA, 25 bp, Homo sapien
catggcacttctacttgagtgcgag

SEQ ID NO: 479697 - DNA, 25 bp, Homo sapien
tgatgatgctctgaccctggcgagg

SEQ ID NO: 479698 - DNA, 25 bp, Homo sapien
ggtgcagattccgtttgagattcac

SEQ ID NO: 479699 - DNA, 25 bp, Homo sapien
cttgagtgcgagtggccatcttggt

SEQ ID NO: 479700 - DNA, 25 bp, Homo sapien
cagggatgcaagaggctctcgggcc

SEQ ID NO: 479701 - DNA, 25 bp, Homo sapien
tagtaatgctcctgttccatagata

SEQ ID NO: 479702 - DNA, 25 bp, Homo sapien
gttccatagatatttccacgactgg

SEQ ID NO: 479703 - DNA, 25 bp, Homo sapien
tcatagttccatagtaatgctcctg

SEQ ID NO: 479704 - DNA, 25 bp, Homo sapien
tagatatttccacgactgggagaca

SEQ ID NO: 479705 - DNA, 25 bp, Homo sapien
ttgaggcctccatgtggctgcgaca

SEQ ID NO: 479706 - DNA, 25 bp, Homo sapien
tcactttgctaaccgaaaatgcatt

SEQ ID NO: 479707 - DNA, 25 bp, Homo sapien
gagagccatgcctctgtctgaggct

SEQ ID NO: 479708 - DNA, 25 bp, Homo sapien
ggtgcacgatagagccctcagagag

SEQ ID NO: 479709 - DNA, 25 bp, Homo sapien
gaacagggattgggctgtatctgca

SEQ ID NO: 479710 - DNA, 25 bp, Homo sapien
agaacagggattgggctgtatctgc

SEQ ID NO: 479711 - DNA, 25 bp, Homo sapien
tcgtcttccatcgtacagcctgtct

SEQ ID NO: 479712 - DNA, 25 bp, Homo sapien
cttctccaccaagagcgggaactgg

SEQ ID NO: 479713 - DNA, 25 bp, Homo sapien
ggcaaagtcccctcgtcttccatcg

SEQ ID NO: 479714 - DNA, 25 bp, Homo sapien
actggtttggcaggagaccagtttg

SEQ ID NO: 479715 - DNA, 25 bp, Homo sapien
aatggggaatcgcatggccttagct

SEQ ID NO: 479716 - DNA, 25 bp, Homo sapien
taatggctgtacacagagcaaatga

SEQ ID NO: 479717 - DNA, 25 bp, Homo sapien
ttggtagttcctttcaaataatggc

SEQ ID NO: 479718 - DNA, 25 bp, Homo sapien
ctgggtaaaagcaacgaatgtggga

SEQ ID NO: 479719 - DNA, 25 bp, Homo sapien
caacatttccgcaaagtgcttacat

SEQ ID NO: 479720 - DNA, 25 bp, Homo sapien
tcctgccagcggcttcctcaggaca

SEQ ID NO: 479721 - DNA, 25 bp, Homo sapien
gagaacacacgtgcctctgctcgca

SEQ ID NO: 479722 - DNA, 25 bp, Homo sapien
catatcccacgaatctatccaaagg

SEQ ID NO: 479723 - DNA, 25 bp, Homo sapien
tcgggtgaacaaagatgccggttgc

SEQ ID NO: 479724 - DNA, 25 bp, Homo sapien
gtgaacaaagatgccggttgcctcc

SEQ ID NO: 479725 - DNA, 25 bp, Homo sapien
tagccccctcgggtgaacaaagatg

SEQ ID NO: 479726 - DNA, 25 bp, Homo sapien
aaagatgccggttgcctcctctaac

SEQ ID NO: 479727 - DNA, 25 bp, Homo sapien
caatatgcccatcgttttcctaggt

SEQ ID NO: 479728 - DNA, 25 bp, Homo sapien
aatcctttatcaggcaatatgccca

SEQ ID NO: 479729 - DNA, 25 bp, Homo sapien
ggtttgtctcgttcgcatcctgcat

SEQ ID NO: 479730 - DNA, 25 bp, Homo sapien
gtaggtcagcctttcacttccacta

SEQ ID NO: 479731 - DNA, 25 bp, Homo sapien
agtcagtggcaaaggtggatctgaa

SEQ ID NO: 479732 - DNA, 25 bp, Homo sapien
gtgagtcagtggcaaaggtggatct

SEQ ID NO: 479733 - DNA, 25 bp, Homo sapien
agtggcaaaggtggatctgaaggcc

SEQ ID NO: 479734 - DNA, 25 bp, Homo sapien
ctggtgagtcagtggcaaaggtgga

SEQ ID NO: 479735 - DNA, 25 bp, Homo sapien
tcacccaagcaagtgtttctcaagg

SEQ ID NO: 479736 - DNA, 25 bp, Homo sapien
tgttcatcttggtaagatccccagg

SEQ ID NO: 479737 - DNA, 25 bp, Homo sapien
ccaggaccacagctttttggatggt

SEQ ID NO: 479738 - DNA, 25 bp, Homo sapien
gcttaaaacccgatcatgaccttgt

SEQ ID NO: 479739 - DNA, 25 bp, Homo sapien
tcttctgattccaaagcgatgctgg

SEQ ID NO: 479740 - DNA, 25 bp, Homo sapien
tacagtcgctctgatgggttaggag

SEQ ID NO: 479741 - DNA, 25 bp, Homo sapien
gagagagaaattgccccttaccaac

SEQ ID NO: 479742 - DNA, 25 bp, Homo sapien
cctgccttagcttgtgtgggtggca

SEQ ID NO: 479743 - DNA, 25 bp, Homo sapien
gcaggagcgggagagcttggaggga

SEQ ID NO: 479744 - DNA, 25 bp, Homo sapien
cactgcaagggcaggagcgggagag

SEQ ID NO: 479745 - DNA, 25 bp, Homo sapien
cagctgccgtcaggctgctcttctg

SEQ ID NO: 479746 - DNA, 25 bp, Homo sapien
tgttgggcgctttgctttcctacaa

SEQ ID NO: 479747 - DNA, 25 bp, Homo sapien
attgaggtcagcttgcttagcatca

SEQ ID NO: 479748 - DNA, 25 bp, Homo sapien
ttgcttagcatcagccatgggcctt

SEQ ID NO: 479749 - DNA, 25 bp, Homo sapien
cttagcatcagccatgggccttaca

SEQ ID NO: 479750 - DNA, 25 bp, Homo sapien
tagcatcagccatgggccttacatt

SEQ ID NO: 479751 - DNA, 25 bp, Homo sapien
ctccacagctttcgatcctgcaccc

SEQ ID NO: 479752 - DNA, 25 bp, Homo sapien
cacagctttcgatcctgcacccagc

SEQ ID NO: 479753 - DNA, 25 bp, Homo sapien
agccttttatgaagggctagagtgg

SEQ ID NO: 479754 - DNA, 25 bp, Homo sapien
gcagccttttatgaagggctagagt

SEQ ID NO: 479755 - DNA, 25 bp, Homo sapien
tcttcgtggaatttaagatggagtt

SEQ ID NO: 479756 - DNA, 25 bp, Homo sapien
gttgaaggaaggctgaatttctcag

SEQ ID NO: 479757 - DNA, 25 bp, Homo sapien
tcagataatatgtgcctgggggaat

SEQ ID NO: 479758 - DNA, 25 bp, Homo sapien
tctcaggttgagaaattcttcgtgg

SEQ ID NO: 479759 - DNA, 25 bp, Homo sapien
gtgccagtgtattcgaaagaagggt

SEQ ID NO: 479760 - DNA, 25 bp, Homo sapien
tcatgaagctctccataggttagat

SEQ ID NO: 479761 - DNA, 25 bp, Homo sapien
tcgaaagaagggttctcagtgagga

SEQ ID NO: 479762 - DNA, 25 bp, Homo sapien
cataggttagatggtgaaacagcct

SEQ ID NO: 479763 - DNA, 25 bp, Homo sapien
gcaatgaatgatatacaccaagcag

SEQ ID NO: 479764 - DNA, 25 bp, Homo sapien
gaagatacaagcttgatatttcaga

SEQ ID NO: 479765 - DNA, 25 bp, Homo sapien
cagagcatcagctatgaatccaggg

SEQ ID NO: 479766 - DNA, 25 bp, Homo sapien
gatgttctggttttgcagctgaaat

SEQ ID NO: 479767 - DNA, 25 bp, Homo sapien
agcagcattttatgagacggttata

SEQ ID NO: 479768 - DNA, 25 bp, Homo sapien
cagcattttatgagacggttataac

SEQ ID NO: 479769 - DNA, 25 bp, Homo sapien
gcagcattttatgagacggttataa

SEQ ID NO: 479770 - DNA, 25 bp, Homo sapien
tatgtggtgaaaagtagggatctag

SEQ ID NO: 479771 - DNA, 25 bp, Homo sapien
tctgttccatcggtgtatatgtcta

SEQ ID NO: 479772 - DNA, 25 bp, Homo sapien
caaatagggagtgcttttcccactg

SEQ ID NO: 479773 - DNA, 25 bp, Homo sapien
gaaaactgacttggtagtttcatag

SEQ ID NO: 479774 - DNA, 25 bp, Homo sapien
aacacgggcaccttggacagctctt

SEQ ID NO: 479775 - DNA, 25 bp, Homo sapien
gagcaggacctctccttacagaagc

SEQ ID NO: 479776 - DNA, 25 bp, Homo sapien
ctcttgtttgctctgaccatcctgc

SEQ ID NO: 479777 - DNA, 25 bp, Homo sapien
ctgttttctcttgtttgctctgacc

SEQ ID NO: 479778 - DNA, 25 bp, Homo sapien
aggagtctagtgatgttcctgaact

SEQ ID NO: 479779 - DNA, 25 bp, Homo sapien
ccactcccttgcaaactgtggtggc

SEQ ID NO: 479780 - DNA, 25 bp, Homo sapien
tcctgaactctgaatgaactccgca

SEQ ID NO: 479781 - DNA, 25 bp, Homo sapien
aactctgaatgaactccgcaaatgc

SEQ ID NO: 479782 - DNA, 25 bp, Homo sapien
gttaggtacatctgagaggcaatag

SEQ ID NO: 479783 - DNA, 25 bp, Homo sapien
agagaaatgaggttaggtacatctg

SEQ ID NO: 479784 - DNA, 25 bp, Homo sapien
ggtacatctgagaggcaatagcttt

SEQ ID NO: 479785 - DNA, 25 bp, Homo sapien
gagaggcaatagctttaagtgctaa

SEQ ID NO: 479786 - DNA, 25 bp, Homo sapien
caagatagggaggagctgcttcaag

SEQ ID NO: 479787 - DNA, 25 bp, Homo sapien
tgcttcaagggtccagatgagcagg

SEQ ID NO: 479788 - DNA, 25 bp, Homo sapien
ggagctgcttcaagggtccagatga

SEQ ID NO: 479789 - DNA, 25 bp, Homo sapien
agcaagatagggaggagctgcttca

SEQ ID NO: 479790 - DNA, 25 bp, Homo sapien
ggcataggatctttgagagtcacaa

SEQ ID NO: 479791 - DNA, 25 bp, Homo sapien
tggacatccttgaacaacaaggtgc

SEQ ID NO: 479792 - DNA, 25 bp, Homo sapien
caactcaggacacttgctatggaaa

SEQ ID NO: 479793 - DNA, 25 bp, Homo sapien
ttctcaggacgccttgggagtgcca

SEQ ID NO: 479794 - DNA, 25 bp, Homo sapien
ctcccatttggcagactggacatca

SEQ ID NO: 479795 - DNA, 25 bp, Homo sapien
tcttcggatgagtgggcatggtcac

SEQ ID NO: 479796 - DNA, 25 bp, Homo sapien
tgactgccagacactataaaattgt

SEQ ID NO: 479797 - DNA, 25 bp, Homo sapien
tagatgtccatccttatgatccacc

SEQ ID NO: 479798 - DNA, 25 bp, Homo sapien
ccagcctgggcaatggagtagaatg

SEQ ID NO: 479799 - DNA, 25 bp, Homo sapien
gacttgtgaacaagccgagccgaaa

SEQ ID NO: 479800 - DNA, 25 bp, Homo sapien
tagtaattgtcatcctgggacccac

SEQ ID NO: 479801 - DNA, 25 bp, Homo sapien
cacgttggatttcaagaggcccctg

SEQ ID NO: 479802 - DNA, 25 bp, Homo sapien
cacttgcatcattgggttggctcac

SEQ ID NO: 479803 - DNA, 25 bp, Homo sapien
gccatgaaagaagggaatcctgtca

SEQ ID NO: 479804 - DNA, 25 bp, Homo sapien
tctgctggtagatttagtgttggcc

SEQ ID NO: 479805 - DNA, 25 bp, Homo sapien
tgcaacatggatggaaatcgagggc

SEQ ID NO: 479806 - DNA, 25 bp, Homo sapien
tggaaaacttctagagagctgctgt

SEQ ID NO: 479807 - DNA, 25 bp, Homo sapien
agggtggaacttcagtggtatctca

SEQ ID NO: 479808 - DNA, 25 bp, Homo sapien
ccaaggacccgactgatggatgaca

SEQ ID NO: 479809 - DNA, 25 bp, Homo sapien
tggtatctcacactcctttagctcc

SEQ ID NO: 479810 - DNA, 25 bp, Homo sapien
cagccatgttatctggccgggtacc

SEQ ID NO: 479811 - DNA, 25 bp, Homo sapien
agcagctctgagtctacaaacatca

SEQ ID NO: 479812 - DNA, 25 bp, Homo sapien
cagctctgagtctacaaacatcaca

SEQ ID NO: 479813 - DNA, 25 bp, Homo sapien
gagtctacaaacatcacatctttac

SEQ ID NO: 479814 - DNA, 25 bp, Homo sapien
tctgagtctacaaacatcacatctt

SEQ ID NO: 479815 - DNA, 25 bp, Homo sapien
agcagcagggtaaggcttatcagtg

SEQ ID NO: 479816 - DNA, 25 bp, Homo sapien
ggaagcagcagggtaaggcttatca

SEQ ID NO: 479817 - DNA, 25 bp, Homo sapien
gggggttggtggcaattgtaggcat

SEQ ID NO: 479818 - DNA, 25 bp, Homo sapien
gggtaaggcttatcagtggaggcgg

SEQ ID NO: 479819 - DNA, 25 bp, Homo sapien
gttgcatttgccctggcgtcttcag

SEQ ID NO: 479820 - DNA, 25 bp, Homo sapien
agcacaggggatgccatattacagg

SEQ ID NO: 479821 - DNA, 25 bp, Homo sapien
gccctggcgtcttcagacctgagca

SEQ ID NO: 479822 - DNA, 25 bp, Homo sapien
ggtgagtggcggcttcctttcaata

SEQ ID NO: 479823 - DNA, 25 bp, Homo sapien
tgtctctcatgctccttggacaagc

SEQ ID NO: 479824 - DNA, 25 bp, Homo sapien
gtctctcatgctccttggacaagcc

SEQ ID NO: 479825 - DNA, 25 bp, Homo sapien
tctctcatgctccttggacaagccc

SEQ ID NO: 479826 - DNA, 25 bp, Homo sapien
tctggaggccgctgttgtgatcaac

SEQ ID NO: 479827 - DNA, 25 bp, Homo sapien
gatcaactccccatagaagtgggca

SEQ ID NO: 479828 - DNA, 25 bp, Homo sapien
cctctggctggtacatagactcaaa

SEQ ID NO: 479829 - DNA, 25 bp, Homo sapien
gagtccttcctcagcagaggcaggg

SEQ ID NO: 479830 - DNA, 25 bp, Homo sapien
tgaatagttctacttactgagggtt

SEQ ID NO: 479831 - DNA, 25 bp, Homo sapien
gctgtccttgggctcaaagaggcat

SEQ ID NO: 479832 - DNA, 25 bp, Homo sapien
agaaatcaatgctgttgcttacggg

SEQ ID NO: 479833 - DNA, 25 bp, Homo sapien
ggagcagaaatcaatgctgttgctt

SEQ ID NO: 479834 - DNA, 25 bp, Homo sapien
tcttccgaatactgcattgtctgct

SEQ ID NO: 479835 - DNA, 25 bp, Homo sapien
catcttccgaatactgcattgtctg

SEQ ID NO: 479836 - DNA, 25 bp, Homo sapien
taacatcttccgaatactgcattgt

SEQ ID NO: 479837 - DNA, 25 bp, Homo sapien
tccgaatactgcattgtctgctgtt

SEQ ID NO: 479838 - DNA, 25 bp, Homo sapien
ggaaaaggaggacggcaaagctcac

SEQ ID NO: 479839 - DNA, 25 bp, Homo sapien
tcagacttgaggggtaatggggaaa

SEQ ID NO: 479840 - DNA, 25 bp, Homo sapien
gggaaaaggaggacggcaaagctca

SEQ ID NO: 479841 - DNA, 25 bp, Homo sapien
ttttctgcctgccatagtaggtggt

SEQ ID NO: 479842 - DNA, 25 bp, Homo sapien
cattggacccatatgcaacaagagg

SEQ ID NO: 479843 - DNA, 25 bp, Homo sapien
ttttgaaaatcagggcattggaccc

SEQ ID NO: 479844 - DNA, 25 bp, Homo sapien
taatggacccaggattcaaagccaa

SEQ ID NO: 479845 - DNA, 25 bp, Homo sapien
gagggaaggctctagatcacaagaa

SEQ ID NO: 479846 - DNA, 25 bp, Homo sapien
cagttacttcctagacgtgacccaa

SEQ ID NO: 479847 - DNA, 25 bp, Homo sapien
tgtcctcgaatccttcctaaataga

SEQ ID NO: 479848 - DNA, 25 bp, Homo sapien
gaatgttccagtgaaccacacacac

SEQ ID NO: 479849 - DNA, 25 bp, Homo sapien
ttgtaattattcacacgccgatcct

SEQ ID NO: 479850 - DNA, 25 bp, Homo sapien
gtgtcataaacgctgcactgcagta

SEQ ID NO: 479851 - DNA, 25 bp, Homo sapien
ttacacatgccccactataataggg

SEQ ID NO: 479852 - DNA, 25 bp, Homo sapien
caacttttaccttgagctttgagcc

SEQ ID NO: 479853 - DNA, 25 bp, Homo sapien
ttgattgtgttcttgcatgctcaga

SEQ ID NO: 479854 - DNA, 25 bp, Homo sapien
tgaccatccctttgattgtgttctt

SEQ ID NO: 479855 - DNA, 25 bp, Homo sapien
taatgtgcccgtatttgaccatccc

SEQ ID NO: 479856 - DNA, 25 bp, Homo sapien
cttgtactagttgccagggttctct

SEQ ID NO: 479857 - DNA, 25 bp, Homo sapien
tgctaggatgccagtttgagagacc

SEQ ID NO: 479858 - DNA, 25 bp, Homo sapien
gaggttttctctggtgatctcactg

SEQ ID NO: 479859 - DNA, 25 bp, Homo sapien
gagagacctgttcttctacggccac

SEQ ID NO: 479860 - DNA, 25 bp, Homo sapien
gagctgatgactcaagattctggga

SEQ ID NO: 479861 - DNA, 25 bp, Homo sapien
tgtcctattaaccaagccaataaat

SEQ ID NO: 479862 - DNA, 25 bp, Homo sapien
taaattccttctctaggctgtaaga

SEQ ID NO: 479863 - DNA, 25 bp, Homo sapien
tctctaggctgtaagagaaacccgc

SEQ ID NO: 479864 - DNA, 25 bp, Homo sapien
ctgtaagagaaacccgctgtcaagg

SEQ ID NO: 479865 - DNA, 25 bp, Homo sapien
gctgcgcagaacctggacccagaat

SEQ ID NO: 479866 - DNA, 25 bp, Homo sapien
gaaatctggctcatcagtgattctg

SEQ ID NO: 479867 - DNA, 25 bp, Homo sapien
gaatgcaggtagatccatgtggcca

SEQ ID NO: 479868 - DNA, 25 bp, Homo sapien
catttggcattactatgctttggaa

SEQ ID NO: 479869 - DNA, 25 bp, Homo sapien
taggctctgctaacgtgatgagaca

SEQ ID NO: 479870 - DNA, 25 bp, Homo sapien
gaccgtagtagctgttcaactccta

SEQ ID NO: 479871 - DNA, 25 bp, Homo sapien
gcagtacgttctcaggatgcatcca

SEQ ID NO: 479872 - DNA, 25 bp, Homo sapien
taaggtgtcacctccctgaaattgc

SEQ ID NO: 479873 - DNA, 25 bp, Homo sapien
gtgcaggccaccagttaaatgccgt

SEQ ID NO: 479874 - DNA, 25 bp, Homo sapien
aatgccgtctatcaggttttgtgcc

SEQ ID NO: 479875 - DNA, 25 bp, Homo sapien
gagactacagagtcaaagctcattt

SEQ ID NO: 479876 - DNA, 25 bp, Homo sapien
ggatccattatttcccctgaaggct

SEQ ID NO: 479877 - DNA, 25 bp, Homo sapien
tctttagtaggaaacctggtgtcat

SEQ ID NO: 479878 - DNA, 25 bp, Homo sapien
gctctttagtaggaaacctggtgtc

SEQ ID NO: 479879 - DNA, 25 bp, Homo sapien
cttgctctttagtaggaaacctggt

SEQ ID NO: 479880 - DNA, 25 bp, Homo sapien
agtaggaaacctggtgtcatttgga

SEQ ID NO: 479881 - DNA, 25 bp, Homo sapien
cacaacaagtttcatgactacaagt

SEQ ID NO: 479882 - DNA, 25 bp, Homo sapien
gagagataccacacaagggattcag

SEQ ID NO: 479883 - DNA, 25 bp, Homo sapien
tacttcctggtgattgtaaacgtga

SEQ ID NO: 479884 - DNA, 25 bp, Homo sapien
gagggtcttctcgtagagaattcca

SEQ ID NO: 479885 - DNA, 25 bp, Homo sapien
ttgagcatttctccagtacctgtgg

SEQ ID NO: 479886 - DNA, 25 bp, Homo sapien
cttgagcatttctccagtacctgtg

SEQ ID NO: 479887 - DNA, 25 bp, Homo sapien
tccagtacctgtggaagagtctcac

SEQ ID NO: 479888 - DNA, 25 bp, Homo sapien
gacttatgtttttggtggcaccctg

SEQ ID NO: 479889 - DNA, 25 bp, Homo sapien
gaaacatcatgtgaccagtgacttt

SEQ ID NO: 479890 - DNA, 25 bp, Homo sapien
cagtgcttttggaaggatattggcc

SEQ ID NO: 479891 - DNA, 25 bp, Homo sapien
cacaaagtgcccattttaccgtcgt

SEQ ID NO: 479892 - DNA, 25 bp, Homo sapien
atgagctgccctgaatcaaggtctt

SEQ ID NO: 479893 - DNA, 25 bp, Homo sapien
tgagctgccctgaatcaaggtcttc

SEQ ID NO: 479894 - DNA, 25 bp, Homo sapien
gtcactcttgaccacaccattagca

SEQ ID NO: 479895 - DNA, 25 bp, Homo sapien
ggttaggattaagcagcaaggacct

SEQ ID NO: 479896 - DNA, 25 bp, Homo sapien
caccattagcaactcaaattcgtgg

SEQ ID NO: 479897 - DNA, 25 bp, Homo sapien
ctcaaattcgtggttaggattaagc

SEQ ID NO: 479898 - DNA, 25 bp, Homo sapien
cctttttcttccgaggcctcgctgg

SEQ ID NO: 479899 - DNA, 25 bp, Homo sapien
gagctcagagccctttttcttccga

SEQ ID NO: 479900 - DNA, 25 bp, Homo sapien
ccctttttcttccgaggcctcgctg

SEQ ID NO: 479901 - DNA, 25 bp, Homo sapien
cttgtgggagctcagagcccttttt

SEQ ID NO: 479902 - DNA, 25 bp, Homo sapien
tagctcttgctgaaagcaaggtttc

SEQ ID NO: 479903 - DNA, 25 bp, Homo sapien
tgattcctcattatctacccagcat

SEQ ID NO: 479904 - DNA, 25 bp, Homo sapien
cccagcatccttgtgagtgtgaaga

SEQ ID NO: 479905 - DNA, 25 bp, Homo sapien
tcatgcccagaagatacccagggaa

SEQ ID NO: 479906 - DNA, 25 bp, Homo sapien
gattccttggatcgcaatacccttg

SEQ ID NO: 479907 - DNA, 25 bp, Homo sapien
tattttttggaaacgtcaagagatg

SEQ ID NO: 479908 - DNA, 25 bp, Homo sapien
tcagacattgctacaagtggttggt

SEQ ID NO: 479909 - DNA, 25 bp, Homo sapien
tcaagagatgtgaagcgcctggaat

SEQ ID NO: 479910 - DNA, 25 bp, Homo sapien
gaagccgatagtgccgcttgtgcat

SEQ ID NO: 479911 - DNA, 25 bp, Homo sapien
gggttcattgacttagtgttctctc

SEQ ID NO: 479912 - DNA, 25 bp, Homo sapien
ttgagtcatgaagccgatagtgccg

SEQ ID NO: 479913 - DNA, 25 bp, Homo sapien
tctctctcatttgcgttgagtcatg

SEQ ID NO: 479914 - DNA, 25 bp, Homo sapien
tagcacatgtagaaagcagtactgt

SEQ ID NO: 479915 - DNA, 25 bp, Homo sapien
ttttccagtgtgatagcacatgtag

SEQ ID NO: 479916 - DNA, 25 bp, Homo sapien
cattagtgtggtgacagttaatcac

SEQ ID NO: 479917 - DNA, 25 bp, Homo sapien
tttaatgaaagatgcaatggttggg

SEQ ID NO: 479918 - DNA, 25 bp, Homo sapien
tcctttaaggaccagcgaaagtctc

SEQ ID NO: 479919 - DNA, 25 bp, Homo sapien
taccactccattctgtaataaaaca

SEQ ID NO: 479920 - DNA, 25 bp, Homo sapien
cgcattagtgatgcttttctttacc

SEQ ID NO: 479921 - DNA, 25 bp, Homo sapien
aagtctctctttcgcattagtgatg

SEQ ID NO: 479922 - DNA, 25 bp, Homo sapien
gcagcacagttatccgtagccggtc

SEQ ID NO: 479923 - DNA, 25 bp, Homo sapien
taaaggcactcgcattagtggcagg

SEQ ID NO: 479924 - DNA, 25 bp, Homo sapien
ggcaggttcctgagagctacatttg

SEQ ID NO: 479925 - DNA, 25 bp, Homo sapien
tcagcaagagtttcatggaggagaa

SEQ ID NO: 479926 - DNA, 25 bp, Homo sapien
cctcattgccgcctgccttgggcat

SEQ ID NO: 479927 - DNA, 25 bp, Homo sapien
ctggtaacccgcaccagctggtgat

SEQ ID NO: 479928 - DNA, 25 bp, Homo sapien
ggcatggtccgtgctttcttatttc

SEQ ID NO: 479929 - DNA, 25 bp, Homo sapien
cctggtaacccgcaccagctggtga

SEQ ID NO: 479930 - DNA, 25 bp, Homo sapien
catcaatacattctcttccctcttt

SEQ ID NO: 479931 - DNA, 25 bp, Homo sapien
cccatgagggctgaccccgcctcac

SEQ ID NO: 479932 - DNA, 25 bp, Homo sapien
tcaggccctgttcccatgagggctg

SEQ ID NO: 479933 - DNA, 25 bp, Homo sapien
tttccaaattctcaggccctgttcc

SEQ ID NO: 479934 - DNA, 25 bp, Homo sapien
ccgggatgagttagtgtgggctctg

SEQ ID NO: 479935 - DNA, 25 bp, Homo sapien
gttgcctgctctcagtgaggaaggc

SEQ ID NO: 479936 - DNA, 25 bp, Homo sapien
caccgggatgagttagtgtgggctc

SEQ ID NO: 479937 - DNA, 25 bp, Homo sapien
cagttgcctgctctcagtgaggaag

SEQ ID NO: 479938 - DNA, 25 bp, Homo sapien
aatcgtctgcgtctagggaaatggc

SEQ ID NO: 479939 - DNA, 25 bp, Homo sapien
ccctgtgcataggagcagctgaaca

SEQ ID NO: 479940 - DNA, 25 bp, Homo sapien
caacaaggacttgcagacgccctgt

SEQ ID NO: 479941 - DNA, 25 bp, Homo sapien
taagtaggtgtggtcagctgtccag

SEQ ID NO: 479942 - DNA, 25 bp, Homo sapien
tgacccaggcaaattgggtgctgag

SEQ ID NO: 479943 - DNA, 25 bp, Homo sapien
tgagtgtccacgtcgagctgaatgc

SEQ ID NO: 479944 - DNA, 25 bp, Homo sapien
gatgcatgtgatggatagactggat

SEQ ID NO: 479945 - DNA, 25 bp, Homo sapien
gatggtgtctccaggaatggatgca

SEQ ID NO: 479946 - DNA, 25 bp, Homo sapien
cctgaagaacccgtgcaaattggag

SEQ ID NO: 479947 - DNA, 25 bp, Homo sapien
ggctgcatttgacccgcaggtgcct

SEQ ID NO: 479948 - DNA, 25 bp, Homo sapien
tgtccacatcgtgctttaaggagtg

SEQ ID NO: 479949 - DNA, 25 bp, Homo sapien
gacctgtgtcttgtgaaccctttgc

SEQ ID NO: 479950 - DNA, 25 bp, Homo sapien
ctttcggtgcttgccggagctccat

SEQ ID NO: 479951 - DNA, 25 bp, Homo sapien
ttgacatcaacgtttggtgacctcc

SEQ ID NO: 479952 - DNA, 25 bp, Homo sapien
catcaacgtttggtgacctccttca

SEQ ID NO: 479953 - DNA, 25 bp, Homo sapien
caacgtttggtgacctccttcatcc

SEQ ID NO: 479954 - DNA, 25 bp, Homo sapien
ctttgattgacatcaacgtttggtg

SEQ ID NO: 479955 - DNA, 25 bp, Homo sapien
tgttttgaatttgaccactgggtat

SEQ ID NO: 479956 - DNA, 25 bp, Homo sapien
ttgttttgaatttgaccactgggta

SEQ ID NO: 479957 - DNA, 25 bp, Homo sapien
ctacacagcttgccctcatgcttct

SEQ ID NO: 479958 - DNA, 25 bp, Homo sapien
cctacacagcttgccctcatgcttc

SEQ ID NO: 479959 - DNA, 25 bp, Homo sapien
cccctacacagcttgccctcatgct

SEQ ID NO: 479960 - DNA, 25 bp, Homo sapien
ctgtaacagggtcaagtttctgggt

SEQ ID NO: 479961 - DNA, 25 bp, Homo sapien
taatgcaaccaggttttgaatgctg

SEQ ID NO: 479962 - DNA, 25 bp, Homo sapien
ctttgatgtcgtgcagaagcctgat

SEQ ID NO: 479963 - DNA, 25 bp, Homo sapien
aacacagttaaggtcatggtctgca

SEQ ID NO: 479964 - DNA, 25 bp, Homo sapien
gcttgtgcaatatagctcttaggag

SEQ ID NO: 479965 - DNA, 25 bp, Homo sapien
cctcagaggattcttaaattctttg

SEQ ID NO: 479966 - DNA, 25 bp, Homo sapien
tttgggcaaaaacacccggatgata

SEQ ID NO: 479967 - DNA, 25 bp, Homo sapien
tgcttttatactgcacctcagagga

SEQ ID NO: 479968 - DNA, 25 bp, Homo sapien
tacatgtggagctttatatttatgg

SEQ ID NO: 479969 - DNA, 25 bp, Homo sapien
ctcgtgatctgcccgcttccacctc

SEQ ID NO: 479970 - DNA, 25 bp, Homo sapien
tcgtgatctgcccgcttccacctcc

SEQ ID NO: 479971 - DNA, 25 bp, Homo sapien
tcctgcctttctcttctgctcctcg

SEQ ID NO: 479972 - DNA, 25 bp, Homo sapien
cctttctcttctgctcctcggaggg

SEQ ID NO: 479973 - DNA, 25 bp, Homo sapien
ttctcttctgctcctcggagggcat

SEQ ID NO: 479974 - DNA, 25 bp, Homo sapien
tgcctttctcttctgctcctcggag

SEQ ID NO: 479975 - DNA, 25 bp, Homo sapien
tttcctgccgttggacaaccaggga

SEQ ID NO: 479976 - DNA, 25 bp, Homo sapien
ttgccatgcaagaccagtcctccag

SEQ ID NO: 479977 - DNA, 25 bp, Homo sapien
taagtcctcgaatggcaaattgccc

SEQ ID NO: 479978 - DNA, 25 bp, Homo sapien
tgaatttctcacgtctgcctgtctg

SEQ ID NO: 479979 - DNA, 25 bp, Homo sapien
cagatgggctattgtggaaacatca

SEQ ID NO: 479980 - DNA, 25 bp, Homo sapien
tcagatgggctattgtggaaacatc

SEQ ID NO: 479981 - DNA, 25 bp, Homo sapien
agtgcgtgaacacccgattatcatg

SEQ ID NO: 479982 - DNA, 25 bp, Homo sapien
cacacaagtgcgtgaacacccgatt

SEQ ID NO: 479983 - DNA, 25 bp, Homo sapien
tttgaggtaaagtatctgtctgtcc

SEQ ID NO: 479984 - DNA, 25 bp, Homo sapien
gatagtttgaggtaaagtatctgtc

SEQ ID NO: 479985 - DNA, 25 bp, Homo sapien
gctgtttgcagacttttttgcagaa

SEQ ID NO: 479986 - DNA, 25 bp, Homo sapien
tattctggataaaactgctcgtctt

SEQ ID NO: 479987 - DNA, 25 bp, Homo sapien
ccaggatagatctgagcctgaatgc

SEQ ID NO: 479988 - DNA, 25 bp, Homo sapien
tgagcctgaatgctaaacatctgaa

SEQ ID NO: 479989 - DNA, 25 bp, Homo sapien
cttgacttagggccaggatagatct

SEQ ID NO: 479990 - DNA, 25 bp, Homo sapien
gagcctgaatgctaaacatctgaat

SEQ ID NO: 479991 - DNA, 25 bp, Homo sapien
acttcagtgaaattggatctatgaa

SEQ ID NO: 479992 - DNA, 25 bp, Homo sapien
tggacttggtggtgttagatctacc

SEQ ID NO: 479993 - DNA, 25 bp, Homo sapien
aacatactgaagcaatgtcctgtgg

SEQ ID NO: 479994 - DNA, 25 bp, Homo sapien
gggtttgtgccaatatctccattca

SEQ ID NO: 479995 - DNA, 25 bp, Homo sapien
gatctaccgactcttggagtttgga

SEQ ID NO: 479996 - DNA, 25 bp, Homo sapien
tttctgctgtgtttaatttttgact

SEQ ID NO: 479997 - DNA, 25 bp, Homo sapien
caatttctgctgtgtttaatttttg

SEQ ID NO: 479998 - DNA, 25 bp, Homo sapien
tgtttaatttttgactccacactac

SEQ ID NO: 479999 - DNA, 25 bp, Homo sapien
gctgtgtttaatttttgactccaca

SEQ ID NO: 480000 - DNA, 25 bp, Homo sapien
tacagtttggccgtcttgcttcttg

SEQ ID NO: 480001 - DNA, 25 bp, Homo sapien
cctggttgcccttggcactcctgag

SEQ ID NO: 480002 - DNA, 25 bp, Homo sapien
tccgtgttatgacccattgtactgg

SEQ ID NO: 480003 - DNA, 25 bp, Homo sapien
gtaaacgtccagattttcatctcag

SEQ ID NO: 480004 - DNA, 25 bp, Homo sapien
ggtcatccctcttgccgtttgaatc

SEQ ID NO: 480005 - DNA, 25 bp, Homo sapien
atccctcttgccgtttgaatcatac

SEQ ID NO: 480006 - DNA, 25 bp, Homo sapien
ctcttgccgtttgaatcatactcac

SEQ ID NO: 480007 - DNA, 25 bp, Homo sapien
gtcatccctcttgccgtttgaatca

SEQ ID NO: 480008 - DNA, 25 bp, Homo sapien
cactgccaggtagcttgtccgttct

SEQ ID NO: 480009 - DNA, 25 bp, Homo sapien
tgttaccccgaagggcctctcttga

SEQ ID NO: 480010 - DNA, 25 bp, Homo sapien
aaagacagtgttctgcctaggcaca

SEQ ID NO: 480011 - DNA, 25 bp, Homo sapien
gaagaaggtccgaggactgtgcacc

SEQ ID NO: 480012 - DNA, 25 bp, Homo sapien
cctgcaggcgcttaaagagggttgc

SEQ ID NO: 480013 - DNA, 25 bp, Homo sapien
tggagagtcactcactcgttcaccc

SEQ ID NO: 480014 - DNA, 25 bp, Homo sapien
tcgttcaccccgcagttttgagtgg

SEQ ID NO: 480015 - DNA, 25 bp, Homo sapien
ttttgagtggctcgcctggtccctg

SEQ ID NO: 480016 - DNA, 25 bp, Homo sapien
tggctgataaccaggatgtgctggg

SEQ ID NO: 480017 - DNA, 25 bp, Homo sapien
ctggctgataaccaggatgtgctgg

SEQ ID NO: 480018 - DNA, 25 bp, Homo sapien
ggctgataaccaggatgtgctgggt

SEQ ID NO: 480019 - DNA, 25 bp, Homo sapien
tctccttgcagagagtgttcctggg

SEQ ID NO: 480020 - DNA, 25 bp, Homo sapien
ccagccacgtgggccatctccttgc

SEQ ID NO: 480021 - DNA, 25 bp, Homo sapien
ccatctccttgcagagagtgttcct

SEQ ID NO: 480022 - DNA, 25 bp, Homo sapien
cttgcagagagtgttcctgggacct

SEQ ID NO: 480023 - DNA, 25 bp, Homo sapien
acatgttgtcgggattctttgaaca

SEQ ID NO: 480024 - DNA, 25 bp, Homo sapien
tgtacttcttctgccccgatcttgg

SEQ ID NO: 480025 - DNA, 25 bp, Homo sapien
cacaaaaagatagttcagacatgtc

SEQ ID NO: 480026 - DNA, 25 bp, Homo sapien
tctgccccgatcttggattcagcca

SEQ ID NO: 480027 - DNA, 25 bp, Homo sapien
gctaggtgggctaaagactcacaac

SEQ ID NO: 480028 - DNA, 25 bp, Homo sapien
cctgagtctgctaggtgggctaaag

SEQ ID NO: 480029 - DNA, 25 bp, Homo sapien
ccagggaactggtggcacaccctga

SEQ ID NO: 480030 - DNA, 25 bp, Homo sapien
tggtggcacaccctgagtctgctag

SEQ ID NO: 480031 - DNA, 25 bp, Homo sapien
ttctgcgggacacgttttgtgatct

SEQ ID NO: 480032 - DNA, 25 bp, Homo sapien
tctctcccttctgcgggacacgttt

SEQ ID NO: 480033 - DNA, 25 bp, Homo sapien
tcccttctgcgggacacgttttgtg

SEQ ID NO: 480034 - DNA, 25 bp, Homo sapien
ttctctcccttctgcgggacacgtt

SEQ ID NO: 480035 - DNA, 25 bp, Homo sapien
gtgtcatgatcttggcgtaccacaa

SEQ ID NO: 480036 - DNA, 25 bp, Homo sapien
cttggcctcccgagccttagccctt

SEQ ID NO: 480037 - DNA, 25 bp, Homo sapien
gcagtgtcatgatcttggcgtacca

SEQ ID NO: 480038 - DNA, 25 bp, Homo sapien
ctcctgattacaagtgattcacctg

SEQ ID NO: 480039 - DNA, 25 bp, Homo sapien
gccaaaataggatctcttcccctct

SEQ ID NO: 480040 - DNA, 25 bp, Homo sapien
gctgtctctctcgagtggattttgg

SEQ ID NO: 480041 - DNA, 25 bp, Homo sapien
gtcatttctgctaagtttgcccaga

SEQ ID NO: 480042 - DNA, 25 bp, Homo sapien
atgtccacagttcctcgggaggaat

SEQ ID NO: 480043 - DNA, 25 bp, Homo sapien
tacagcccacaagcctcacaaagat

SEQ ID NO: 480044 - DNA, 25 bp, Homo sapien
agcctgagcagactatattacagcc

SEQ ID NO: 480045 - DNA, 25 bp, Homo sapien
cacaagcctcacaaagatattgcct

SEQ ID NO: 480046 - DNA, 25 bp, Homo sapien
cagactatattacagcccacaagcc

SEQ ID NO: 480047 - DNA, 25 bp, Homo sapien
cccttttgtggcctgcgacgtagct

SEQ ID NO: 480048 - DNA, 25 bp, Homo sapien
tttgtggcctgcgacgtagctcctt

SEQ ID NO: 480049 - DNA, 25 bp, Homo sapien
tggcctgcgacgtagctccttgttc

SEQ ID NO: 480050 - DNA, 25 bp, Homo sapien
cctgcgacgtagctccttgttccat

SEQ ID NO: 480051 - DNA, 25 bp, Homo sapien
gcaggggatgagatgtccaggtcac

SEQ ID NO: 480052 - DNA, 25 bp, Homo sapien
ctggcaggggatgagatgtccaggt

SEQ ID NO: 480053 - DNA, 25 bp, Homo sapien
gggatgagatgtccaggtcacagaa

SEQ ID NO: 480054 - DNA, 25 bp, Homo sapien
caggggatgagatgtccaggtcaca

SEQ ID NO: 480055 - DNA, 25 bp, Homo sapien
cttggatggagaaggtgggaaatcg

SEQ ID NO: 480056 - DNA, 25 bp, Homo sapien
cttcctgttggagcttggatggaga

SEQ ID NO: 480057 - DNA, 25 bp, Homo sapien
ttcctgttggagcttggatggagaa

SEQ ID NO: 480058 - DNA, 25 bp, Homo sapien
ggatggagaaggtgggaaatcgttc

SEQ ID NO: 480059 - DNA, 25 bp, Homo sapien
tcccctgttgctggccatatctcag

SEQ ID NO: 480060 - DNA, 25 bp, Homo sapien
cctgccctagagagctgatgacatg

SEQ ID NO: 480061 - DNA, 25 bp, Homo sapien
actggtgaccagacagactctctgg

SEQ ID NO: 480062 - DNA, 25 bp, Homo sapien
tgagagggatctccagatgcatctg

SEQ ID NO: 480063 - DNA, 25 bp, Homo sapien
cttctcttggttgtttggcggcctt

SEQ ID NO: 480064 - DNA, 25 bp, Homo sapien
cactcagtgggtgtaggaacttctc

SEQ ID NO: 480065 - DNA, 25 bp, Homo sapien
cttgtttcgattgtggtacactcag

SEQ ID NO: 480066 - DNA, 25 bp, Homo sapien
tggtacactcagtgggtgtaggaac

SEQ ID NO: 480067 - DNA, 25 bp, Homo sapien
aggggattccaagaggatgagtcgc

SEQ ID NO: 480068 - DNA, 25 bp, Homo sapien
ctaggggattccaagaggatgagtc

SEQ ID NO: 480069 - DNA, 25 bp, Homo sapien
gattccaagaggatgagtcgcttac

SEQ ID NO: 480070 - DNA, 25 bp, Homo sapien
gggattccaagaggatgagtcgctt

SEQ ID NO: 480071 - DNA, 25 bp, Homo sapien
cacgtcccgttgtacctctctgtgt

SEQ ID NO: 480072 - DNA, 25 bp, Homo sapien
gtacctctctgtgtcccggtgtctc

SEQ ID NO: 480073 - DNA, 25 bp, Homo sapien
tgtgtcccggtgtctctgtatcttt

SEQ ID NO: 480074 - DNA, 25 bp, Homo sapien
gagacagctcgatccaactccacgt

SEQ ID NO: 480075 - DNA, 25 bp, Homo sapien
cttacacgcccacccttcgctggct

SEQ ID NO: 480076 - DNA, 25 bp, Homo sapien
ctgctctgggactcgcagtctcctg

SEQ ID NO: 480077 - DNA, 25 bp, Homo sapien
ggactcgcagtctcctgaactcaaa

SEQ ID NO: 480078 - DNA, 25 bp, Homo sapien
tctcctgaactcaaacgcacctttt

SEQ ID NO: 480079 - DNA, 25 bp, Homo sapien
ctctgctcacgcgtgttcttctggt

SEQ ID NO: 480080 - DNA, 25 bp, Homo sapien
ggagcgctttcctacgccacgcggt

SEQ ID NO: 480081 - DNA, 25 bp, Homo sapien
gagtgtccccgcccgaaacaggtca

SEQ ID NO: 480082 - DNA, 25 bp, Homo sapien
cacgccggccgcgtggtccctgcct

SEQ ID NO: 480083 - DNA, 25 bp, Homo sapien
cgcccggcaagatgctgcccgtgta

SEQ ID NO: 480084 - DNA, 25 bp, Homo sapien
tgcccgtgtaccaggaggtgaagcc

SEQ ID NO: 480085 - DNA, 25 bp, Homo sapien
cccggaagcggctgcttcacaggct

SEQ ID NO: 480086 - DNA, 25 bp, Homo sapien
aggtgaagcccaacccgctgcagga

SEQ ID NO: 480087 - DNA, 25 bp, Homo sapien
tcccggccgcgctcgcacgcggtgc

SEQ ID NO: 480088 - DNA, 25 bp, Homo sapien
tttggcgtcgccagcttcgcctcct

SEQ ID NO: 480089 - DNA, 25 bp, Homo sapien
tctgggctccctttggcgtcgccag

SEQ ID NO: 480090 - DNA, 25 bp, Homo sapien
ctgggcgtagctctgggctcccttt

SEQ ID NO: 480091 - DNA, 25 bp, Homo sapien
gactcggatagtgaatttcggaaag

SEQ ID NO: 480092 - DNA, 25 bp, Homo sapien
ctgctagagcacgaggcagctgtct

SEQ ID NO: 480093 - DNA, 25 bp, Homo sapien
tccaccttctgtgtcggcgcctaga

SEQ ID NO: 480094 - DNA, 25 bp, Homo sapien
gaaagtttcactcgggttcgtgcac

SEQ ID NO: 480095 - DNA, 25 bp, Homo sapien
tacaaggataatctgtggctaaact

SEQ ID NO: 480096 - DNA, 25 bp, Homo sapien
ggctaaactttgctgtcgtccaagg

SEQ ID NO: 480097 - DNA, 25 bp, Homo sapien
gaggtcttgcagctctacaaggata

SEQ ID NO: 480098 - DNA, 25 bp, Homo sapien
acaggttgaagagcctcccatggca

SEQ ID NO: 480099 - DNA, 25 bp, Homo sapien
ggcttgacgacagaaatcatcaggc

SEQ ID NO: 480100 - DNA, 25 bp, Homo sapien
gaggtccaccgtagcatgcaacatg

SEQ ID NO: 480101 - DNA, 25 bp, Homo sapien
aacatgtgagatgcctaaagcccgc

SEQ ID NO: 480102 - DNA, 25 bp, Homo sapien
tggtattctggaacccacgtgtcgt

SEQ ID NO: 480103 - DNA, 25 bp, Homo sapien
tgggagtacacaagcttggaacaag

SEQ ID NO: 480104 - DNA, 25 bp, Homo sapien
ggagacaggccatgcttagacatag

SEQ ID NO: 480105 - DNA, 25 bp, Homo sapien
actatgctggctagcctgtgcttga

SEQ ID NO: 480106 - DNA, 25 bp, Homo sapien
gctctaagactggacaagttctgcc

SEQ ID NO: 480107 - DNA, 25 bp, Homo sapien
cgaagggactgagcactttggcaat

SEQ ID NO: 480108 - DNA, 25 bp, Homo sapien
gaactggtagctcagcatttactgg

SEQ ID NO: 480109 - DNA, 25 bp, Homo sapien
tagggagagcattctgggacagtct

SEQ ID NO: 480110 - DNA, 25 bp, Homo sapien
tgaaacatgagctggtatgctggcg

SEQ ID NO: 480111 - DNA, 25 bp, Homo sapien
caggttttgttacatatgtctacat

SEQ ID NO: 480112 - DNA, 25 bp, Homo sapien
ggttttgttacatatgtctacatgt

SEQ ID NO: 480113 - DNA, 25 bp, Homo sapien
cccacccacaacagtccccggtgtg

SEQ ID NO: 480114 - DNA, 25 bp, Homo sapien
ccacccacaacagtccccggtgtgt

SEQ ID NO: 480115 - DNA, 25 bp, Homo sapien
actgaggctgcagtgcaggggcata

SEQ ID NO: 480116 - DNA, 25 bp, Homo sapien
gcaggggcataatcacaactcacta

SEQ ID NO: 480117 - DNA, 25 bp, Homo sapien
ctgcagtgcaggggcataatcacaa

SEQ ID NO: 480118 - DNA, 25 bp, Homo sapien
gcagtgcaggggcataatcacaact

SEQ ID NO: 480119 - DNA, 25 bp, Homo sapien
ggaagccaatacaaggggatttcaa

SEQ ID NO: 480120 - DNA, 25 bp, Homo sapien
cttgtagggagtagagaagtaagac

SEQ ID NO: 480121 - DNA, 25 bp, Homo sapien
cagaaaacacttgtagggagtagag

SEQ ID NO: 480122 - DNA, 25 bp, Homo sapien
aaaagttcatggaatcacaaccagt

SEQ ID NO: 480123 - DNA, 25 bp, Homo sapien
tgaagcacagggttcgagcctcctc

SEQ ID NO: 480124 - DNA, 25 bp, Homo sapien
gccctggaggtaactgtgaagcaca

SEQ ID NO: 480125 - DNA, 25 bp, Homo sapien
agcacagggttcgagcctcctccat

SEQ ID NO: 480126 - DNA, 25 bp, Homo sapien
atccagccctggaggtaactgtgaa

SEQ ID NO: 480127 - DNA, 25 bp, Homo sapien
ataaggccctgagtgttcggtcggc

SEQ ID NO: 480128 - DNA, 25 bp, Homo sapien
taaggcttggtgagtgagtactccc

SEQ ID NO: 480129 - DNA, 25 bp, Homo sapien
gatgaagtccaagtggtcctcgggc

SEQ ID NO: 480130 - DNA, 25 bp, Homo sapien
gaggctcaatggcaggataaggccc

SEQ ID NO: 480131 - DNA, 25 bp, Homo sapien
ctcctcttccacaggcctgcccaca

SEQ ID NO: 480132 - DNA, 25 bp, Homo sapien
ggcctgcccacaggccacaggttgg

SEQ ID NO: 480133 - DNA, 25 bp, Homo sapien
tggcccagggtgtcccttggtacca

SEQ ID NO: 480134 - DNA, 25 bp, Homo sapien
caggccacaggttggcccagggtgt

SEQ ID NO: 480135 - DNA, 25 bp, Homo sapien
gacaatcaagctgtaaaatagcatc

SEQ ID NO: 480136 - DNA, 25 bp, Homo sapien
aagttctgcatggtcttttcacagg

SEQ ID NO: 480137 - DNA, 25 bp, Homo sapien
ttcctcatctaagttctgcatggtc

SEQ ID NO: 480138 - DNA, 25 bp, Homo sapien
tagcatcagtgatacgaagttctcc

SEQ ID NO: 480139 - DNA, 25 bp, Homo sapien
ttatgtcaggggcacgaggttctga

SEQ ID NO: 480140 - DNA, 25 bp, Homo sapien
tgacaccagggcattcccattgcca

SEQ ID NO: 480141 - DNA, 25 bp, Homo sapien
caggggcacgaggttctgacaccag

SEQ ID NO: 480142 - DNA, 25 bp, Homo sapien
ttgccaccaaagaagacaacaggca

SEQ ID NO: 480143 - DNA, 25 bp, Homo sapien
tgttctggctggtttgtgatgatga

SEQ ID NO: 480144 - DNA, 25 bp, Homo sapien
ctggctggtttgtgatgatgattca

SEQ ID NO: 480145 - DNA, 25 bp, Homo sapien
actgtgttctggctggtttgtgatg

SEQ ID NO: 480146 - DNA, 25 bp, Homo sapien
ggctggtttgtgatgatgattcatg

SEQ ID NO: 480147 - DNA, 25 bp, Homo sapien
ccagctccgcctctacgtttattga

SEQ ID NO: 480148 - DNA, 25 bp, Homo sapien
cctgtataaaggaggcttctgctca

SEQ ID NO: 480149 - DNA, 25 bp, Homo sapien
tgaatcccatttgcgtgtccccagc

SEQ ID NO: 480150 - DNA, 25 bp, Homo sapien
tctacgtttattgactggaatttcc

SEQ ID NO: 480151 - DNA, 25 bp, Homo sapien
cagattacgggactggatggtgtca

SEQ ID NO: 480152 - DNA, 25 bp, Homo sapien
tgagattatccctaggagcaatggg

SEQ ID NO: 480153 - DNA, 25 bp, Homo sapien
ggtcaggtcggagataaagttatac

SEQ ID NO: 480154 - DNA, 25 bp, Homo sapien
gatggtgtcagttggtgcatcagaa

SEQ ID NO: 480155 - DNA, 25 bp, Homo sapien
caaggatgaggcaattggctgaaca

SEQ ID NO: 480156 - DNA, 25 bp, Homo sapien
ggctgaacaaagcagatgggctccc

SEQ ID NO: 480157 - DNA, 25 bp, Homo sapien
gagtaatgaattctgcccagcaagg

SEQ ID NO: 480158 - DNA, 25 bp, Homo sapien
atccttttgcatgagcagcttggag

SEQ ID NO: 480159 - DNA, 25 bp, Homo sapien
aaaaacctgccggacaactctgttg

SEQ ID NO: 480160 - DNA, 25 bp, Homo sapien
gatggaaagtcgattcctacagttg

SEQ ID NO: 480161 - DNA, 25 bp, Homo sapien
ggatctgtcccagaaacgtctgagg

SEQ ID NO: 480162 - DNA, 25 bp, Homo sapien
accacggctctggagcgagcagctg

SEQ ID NO: 480163 - DNA, 25 bp, Homo sapien
taaacatacagagattactccagaa

SEQ ID NO: 480164 - DNA, 25 bp, Homo sapien
tgggagccaggaattttgctgccat

SEQ ID NO: 480165 - DNA, 25 bp, Homo sapien
gatccttgtgggatattcttcctgt

SEQ ID NO: 480166 - DNA, 25 bp, Homo sapien
cactcttgtttgctataaagtcggg

SEQ ID NO: 480167 - DNA, 25 bp, Homo sapien
ggtccagacaagtgtgagctcggct

SEQ ID NO: 480168 - DNA, 25 bp, Homo sapien
tctatctcctataatctgtccccgg

SEQ ID NO: 480169 - DNA, 25 bp, Homo sapien
cggcccatacactccagttcaccag

SEQ ID NO: 480170 - DNA, 25 bp, Homo sapien
gatgtacaacattgtcacctggctt

SEQ ID NO: 480171 - DNA, 25 bp, Homo sapien
tgctcacctccggtttcacgatgta

SEQ ID NO: 480172 - DNA, 25 bp, Homo sapien
gcctgaaggcctgtagaatttcctg

SEQ ID NO: 480173 - DNA, 25 bp, Homo sapien
cacgcgtggctacagagtgaagatt

SEQ ID NO: 480174 - DNA, 25 bp, Homo sapien
tgacttcccagaaagggtccttgca

SEQ ID NO: 480175 - DNA, 25 bp, Homo sapien
taacgtaggtggcaactcaatggct

SEQ ID NO: 480176 - DNA, 25 bp, Homo sapien
gaacactttgacaagcgtcacagcc

SEQ ID NO: 480177 - DNA, 25 bp, Homo sapien
gacagcgtttcatgctcggatggcc

SEQ ID NO: 480178 - DNA, 25 bp, Homo sapien
gcatgcagccgatagagaacacttt

SEQ ID NO: 480179 - DNA, 25 bp, Homo sapien
gagtcgttctgattttctacacgga

SEQ ID NO: 480180 - DNA, 25 bp, Homo sapien
ttctccagtgacactgtccggtcag

SEQ ID NO: 480181 - DNA, 25 bp, Homo sapien
gacactgtccggtcagaacgctttg

SEQ ID NO: 480182 - DNA, 25 bp, Homo sapien
cagtgacactgtccggtcagaacgc

SEQ ID NO: 480183 - DNA, 25 bp, Homo sapien
tgtccggtcagaacgctttggtggt

SEQ ID NO: 480184 - DNA, 25 bp, Homo sapien
aggaggctcgcgtggtcactttcca

SEQ ID NO: 480185 - DNA, 25 bp, Homo sapien
tggctgttatcaccgaggaggctcg

SEQ ID NO: 480186 - DNA, 25 bp, Homo sapien
cactcattggacgtggtagcagcaa

SEQ ID NO: 480187 - DNA, 25 bp, Homo sapien
cacagaccctggtaaacccaagtgg

SEQ ID NO: 480188 - DNA, 25 bp, Homo sapien
tactttgaagatagtaaaatgcggt

SEQ ID NO: 480189 - DNA, 25 bp, Homo sapien
gaagatagtaaaatgcggtcggcaa

SEQ ID NO: 480190 - DNA, 25 bp, Homo sapien
tagtaaaatgcggtcggcaatggaa

SEQ ID NO: 480191 - DNA, 25 bp, Homo sapien
tgcggtcggcaatggaaagaaccca

SEQ ID NO: 480192 - DNA, 25 bp, Homo sapien
ggccttttggaatgctcagtgtgac

SEQ ID NO: 480193 - DNA, 25 bp, Homo sapien
cttacaggccttttggaatgctcag

SEQ ID NO: 480194 - DNA, 25 bp, Homo sapien
tttggaatgctcagtgtgactccaa

SEQ ID NO: 480195 - DNA, 25 bp, Homo sapien
aatttgccatcgtttgccagttcca

SEQ ID NO: 480196 - DNA, 25 bp, Homo sapien
catcttcaccactgtaaggctaggg

SEQ ID NO: 480197 - DNA, 25 bp, Homo sapien
cagcattgtgccttcttccaaccat

SEQ ID NO: 480198 - DNA, 25 bp, Homo sapien
cactgtaaggctagggcacttttca

SEQ ID NO: 480199 - DNA, 25 bp, Homo sapien
aaggctagggcacttttcagcattg

SEQ ID NO: 480200 - DNA, 25 bp, Homo sapien
ccgctgctatggcaattgaggtcat

SEQ ID NO: 480201 - DNA, 25 bp, Homo sapien
ccagtccagtcgtccgctgctatgg

SEQ ID NO: 480202 - DNA, 25 bp, Homo sapien
tcgtccgctgctatggcaattgagg

SEQ ID NO: 480203 - DNA, 25 bp, Homo sapien
ctatggcaattgaggtcattctgac

SEQ ID NO: 480204 - DNA, 25 bp, Homo sapien
gaggacactctttctcgggctccac

SEQ ID NO: 480205 - DNA, 25 bp, Homo sapien
ctggcaagggagaggcggcatagct

SEQ ID NO: 480206 - DNA, 25 bp, Homo sapien
ctgtcacggacaccccagacttgaa

SEQ ID NO: 480207 - DNA, 25 bp, Homo sapien
gactcctggggaggacactctttct

SEQ ID NO: 480208 - DNA, 25 bp, Homo sapien
agcttggcgaaagcctgggatcagc

SEQ ID NO: 480209 - DNA, 25 bp, Homo sapien
aggaagcttggcgaaagcctgggat

SEQ ID NO: 480210 - DNA, 25 bp, Homo sapien
ggaggaagcttggcgaaagcctggg

SEQ ID NO: 480211 - DNA, 25 bp, Homo sapien
gaagcttggcgaaagcctgggatca

SEQ ID NO: 480212 - DNA, 25 bp, Homo sapien
ctccatctgtccacgggcctgtctg

SEQ ID NO: 480213 - DNA, 25 bp, Homo sapien
acgggcctgtctgcagctgatgcca

SEQ ID NO: 480214 - DNA, 25 bp, Homo sapien
tgcagctgatgccagtacttatcat

SEQ ID NO: 480215 - DNA, 25 bp, Homo sapien
atctgtccacgggcctgtctgcagc

SEQ ID NO: 480216 - DNA, 25 bp, Homo sapien
gccatactgcaagtcaccactaggg

SEQ ID NO: 480217 - DNA, 25 bp, Homo sapien
caagttagtgatgaacgcggaacct

SEQ ID NO: 480218 - DNA, 25 bp, Homo sapien
gaatacaagcatccgggtaagaacc

SEQ ID NO: 480219 - DNA, 25 bp, Homo sapien
gaaaccgccagcgacagctgtgcca

SEQ ID NO: 480220 - DNA, 25 bp, Homo sapien
gatgctcacaggacatgattcttag

SEQ ID NO: 480221 - DNA, 25 bp, Homo sapien
tgcttggccagtgacctataactcc

SEQ ID NO: 480222 - DNA, 25 bp, Homo sapien
gggagcaactcctgaagtcacatgg

SEQ ID NO: 480223 - DNA, 25 bp, Homo sapien
tataactccctgaggctccttgtga

SEQ ID NO: 480224 - DNA, 25 bp, Homo sapien
gagactgctctaccgaaggaagtgt

SEQ ID NO: 480225 - DNA, 25 bp, Homo sapien
gccagcttcagacgcttcctatttc

SEQ ID NO: 480226 - DNA, 25 bp, Homo sapien
tcattatctctcttccgcatctggc

SEQ ID NO: 480227 - DNA, 25 bp, Homo sapien
ttctcctctaatacagggccttcag

SEQ ID NO: 480228 - DNA, 25 bp, Homo sapien
tggtgaaatgtagtatgacagcatc

SEQ ID NO: 480229 - DNA, 25 bp, Homo sapien
catgattattcgtgccacctattgg

SEQ ID NO: 480230 - DNA, 25 bp, Homo sapien
gagataaacgtcaacaccaagaaat

SEQ ID NO: 480231 - DNA, 25 bp, Homo sapien
taccaactggatttagcaaatgtca

SEQ ID NO: 480232 - DNA, 25 bp, Homo sapien
tccctctcaggaagaacctgatcca

SEQ ID NO: 480233 - DNA, 25 bp, Homo sapien
ttccctctcaggaagaacctgatcc

SEQ ID NO: 480234 - DNA, 25 bp, Homo sapien
cgttgtggatccctggaggattcaa

SEQ ID NO: 480235 - DNA, 25 bp, Homo sapien
gaatgaggatctggagtttggcgtt

SEQ ID NO: 480236 - DNA, 25 bp, Homo sapien
tccctggaggattcaatgaaacagt

SEQ ID NO: 480237 - DNA, 25 bp, Homo sapien
ggaatgtttcctactgtgatgctgc

SEQ ID NO: 480238 - DNA, 25 bp, Homo sapien
tgcctgtcagcatgcagatccaaat

SEQ ID NO: 480239 - DNA, 25 bp, Homo sapien
gtctgccccggtgcctgtctatctg

SEQ ID NO: 480240 - DNA, 25 bp, Homo sapien
ggtgcctgtctatctgcctgtcagc

SEQ ID NO: 480241 - DNA, 25 bp, Homo sapien
aggtctggatcgctcagtctgcccc

SEQ ID NO: 480242 - DNA, 25 bp, Homo sapien
cttcctccacacattcctgaaacat

SEQ ID NO: 480243 - DNA, 25 bp, Homo sapien
gtcctgactgacaggaacgggtcca

SEQ ID NO: 480244 - DNA, 25 bp, Homo sapien
gaacgggtccaccttgagcagagaa

SEQ ID NO: 480245 - DNA, 25 bp, Homo sapien
ggttcaccaactgttgtcctgactg

SEQ ID NO: 480246 - DNA, 25 bp, Homo sapien
gtgagggcctgaggcttgaatctct

SEQ ID NO: 480247 - DNA, 25 bp, Homo sapien
gacaagtccgtctacagtctcagag

SEQ ID NO: 480248 - DNA, 25 bp, Homo sapien
gcatccatgagataagcacagctaa

SEQ ID NO: 480249 - DNA, 25 bp, Homo sapien
tatagaagaacgatccaggagatcc

SEQ ID NO: 480250 - DNA, 25 bp, Homo sapien
ggcagccaggcctaaactccgtata

SEQ ID NO: 480251 - DNA, 25 bp, Homo sapien
tttgcttcctctagctgatatcctt

SEQ ID NO: 480252 - DNA, 25 bp, Homo sapien
tggatcatccatccagttctttgct

SEQ ID NO: 480253 - DNA, 25 bp, Homo sapien
ctagctgatatccttctttgctgta

SEQ ID NO: 480254 - DNA, 25 bp, Homo sapien
ttggatcatccatccagttctttgc

SEQ ID NO: 480255 - DNA, 25 bp, Homo sapien
ctgtttgatcttacttgttgctgat

SEQ ID NO: 480256 - DNA, 25 bp, Homo sapien
tctgtttgatcttacttgttgctga

SEQ ID NO: 480257 - DNA, 25 bp, Homo sapien
gtttgatcttacttgttgctgatac

SEQ ID NO: 480258 - DNA, 25 bp, Homo sapien
tgtttgatcttacttgttgctgata

SEQ ID NO: 480259 - DNA, 25 bp, Homo sapien
ctgggtagagtctgggtagagggac

SEQ ID NO: 480260 - DNA, 25 bp, Homo sapien
agcctggcagacagagctctgggta

SEQ ID NO: 480261 - DNA, 25 bp, Homo sapien
tggcagacagagctctgggtagagt

SEQ ID NO: 480262 - DNA, 25 bp, Homo sapien
gagctctgggtagagtctgggtaga

SEQ ID NO: 480263 - DNA, 25 bp, Homo sapien
gccgccggctgcagccgcgctcgct

SEQ ID NO: 480264 - DNA, 25 bp, Homo sapien
gccgcgctcgctctccggctcccac

SEQ ID NO: 480265 - DNA, 25 bp, Homo sapien
cgcgctcgctctccggctcccactc

SEQ ID NO: 480266 - DNA, 25 bp, Homo sapien
cagccgcgctcgctctccggctccc

SEQ ID NO: 480267 - DNA, 25 bp, Homo sapien
gaccatgaaggcgatgatctccgaa

SEQ ID NO: 480268 - DNA, 25 bp, Homo sapien
aagtccttgcagttggagacgcccg

SEQ ID NO: 480269 - DNA, 25 bp, Homo sapien
gtaacgcacgccttccacaggttgg

SEQ ID NO: 480270 - DNA, 25 bp, Homo sapien
gaccgtgccgtcgatggtagacacc

SEQ ID NO: 480271 - DNA, 25 bp, Homo sapien
ctgggagtcaccaacccgggcctgt

SEQ ID NO: 480272 - DNA, 25 bp, Homo sapien
gcctagcgggctggccatcaaggaa

SEQ ID NO: 480273 - DNA, 25 bp, Homo sapien
cctggctccctaaggccctgttggg

SEQ ID NO: 480274 - DNA, 25 bp, Homo sapien
ccccgcgagacagccatcaggagag

SEQ ID NO: 480275 - DNA, 25 bp, Homo sapien
gacaaatcatcgaaaccacaaagaa

SEQ ID NO: 480276 - DNA, 25 bp, Homo sapien
ctgacaaatcatcgaaaccacaaag

SEQ ID NO: 480277 - DNA, 25 bp, Homo sapien
ggactgacaaatcatcgaaaccaca

SEQ ID NO: 480278 - DNA, 25 bp, Homo sapien
tcaaggactgacaaatcatcgaaac

SEQ ID NO: 480279 - DNA, 25 bp, Homo sapien
ccaaaggcaatgtcaggaccagcac

SEQ ID NO: 480280 - DNA, 25 bp, Homo sapien
ggagggctgttccactcaggccacc

SEQ ID NO: 480281 - DNA, 25 bp, Homo sapien
aaggcaatgtcaggaccagcaccca

SEQ ID NO: 480282 - DNA, 25 bp, Homo sapien
ggcaatgtcaggaccagcacccacc

SEQ ID NO: 480283 - DNA, 25 bp, Homo sapien
tctcttgacacaagcatgagaggag

SEQ ID NO: 480284 - DNA, 25 bp, Homo sapien
tacaaggacgatcattggccagatt

SEQ ID NO: 480285 - DNA, 25 bp, Homo sapien
cttttgtgccaaccagaacccggat

SEQ ID NO: 480286 - DNA, 25 bp, Homo sapien
cagggcagattctgatctggtcagg

SEQ ID NO: 480287 - DNA, 25 bp, Homo sapien
tactcggacagtgtggtttcgctct

SEQ ID NO: 480288 - DNA, 25 bp, Homo sapien
tctggtcatttagaacgcggaatgc

SEQ ID NO: 480289 - DNA, 25 bp, Homo sapien
gtcccagccctggtattggcagcag

SEQ ID NO: 480290 - DNA, 25 bp, Homo sapien
ccttgcaagtttgaagagagcctgt

SEQ ID NO: 480291 - DNA, 25 bp, Homo sapien
agtcctctacatgcctgtatataac

SEQ ID NO: 480292 - DNA, 25 bp, Homo sapien
aagtcctctacatgcctgtatataa

SEQ ID NO: 480293 - DNA, 25 bp, Homo sapien
ttcattccaaagagcgcaaatatgg

SEQ ID NO: 480294 - DNA, 25 bp, Homo sapien
gcctccgactttggtacacttcatt

SEQ ID NO: 480295 - DNA, 25 bp, Homo sapien
tcggagcctccgactttggtacact

SEQ ID NO: 480296 - DNA, 25 bp, Homo sapien
tagctttggctttatcggagcctcc

SEQ ID NO: 480297 - DNA, 25 bp, Homo sapien
ggaacatccagtcattgagcacagc

SEQ ID NO: 480298 - DNA, 25 bp, Homo sapien
gaattccgttgtgattttgtttgca

SEQ ID NO: 480299 - DNA, 25 bp, Homo sapien
ttttgtttgcatatagggaacatcc

SEQ ID NO: 480300 - DNA, 25 bp, Homo sapien
caacaaagagaggatcaaagaattc

SEQ ID NO: 480301 - DNA, 25 bp, Homo sapien
catgatgtacagcaaacgatgaagt

SEQ ID NO: 480302 - DNA, 25 bp, Homo sapien
gagtgggcaacaatcaaggcaaggt

SEQ ID NO: 480303 - DNA, 25 bp, Homo sapien
gatgccttgaactgtttcgagacaa

SEQ ID NO: 480304 - DNA, 25 bp, Homo sapien
tcgagacaagacactgcaacactag

SEQ ID NO: 480305 - DNA, 25 bp, Homo sapien
agaagatccaattaacacggcatac

SEQ ID NO: 480306 - DNA, 25 bp, Homo sapien
ttatgtagagttgtcctggaaatct

SEQ ID NO: 480307 - DNA, 25 bp, Homo sapien
gaagatccaattaacacggcataca

SEQ ID NO: 480308 - DNA, 25 bp, Homo sapien
tagagttgtcctggaaatctacaaa

SEQ ID NO: 480309 - DNA, 25 bp, Homo sapien
tgaaagacagggttgagaaagagat

SEQ ID NO: 480310 - DNA, 25 bp, Homo sapien
aaactgacgtgtgttattgaaagac

SEQ ID NO: 480311 - DNA, 25 bp, Homo sapien
taccctagaacttagaggtacacac

SEQ ID NO: 480312 - DNA, 25 bp, Homo sapien
gatgaacataatatccactccagtt

SEQ ID NO: 480313 - DNA, 25 bp, Homo sapien
tgttgttgtcagatattgaaaagca

SEQ ID NO: 480314 - DNA, 25 bp, Homo sapien
caccaattatgcacagtgaggctcc

SEQ ID NO: 480315 - DNA, 25 bp, Homo sapien
atccaataaacagagcggctcctaa

SEQ ID NO: 480316 - DNA, 25 bp, Homo sapien
gcaaaatatgacaccaccaattatg

SEQ ID NO: 480317 - DNA, 25 bp, Homo sapien
ccaccatgatactttgtccgagaag

SEQ ID NO: 480318 - DNA, 25 bp, Homo sapien
gacagatgtggccccgttgtatgtg

SEQ ID NO: 480319 - DNA, 25 bp, Homo sapien
tactttgtccgagaagacatgacag

SEQ ID NO: 480320 - DNA, 25 bp, Homo sapien
agatgtggccccgttgtatgtgtat

SEQ ID NO: 480321 - DNA, 25 bp, Homo sapien
tagttttgagtgttaattatgggag

SEQ ID NO: 480322 - DNA, 25 bp, Homo sapien
tgttaattatgggagggccttgatg

SEQ ID NO: 480323 - DNA, 25 bp, Homo sapien
taactatgtaagaacacttacatcc

SEQ ID NO: 480324 - DNA, 25 bp, Homo sapien
aagaggcagcttgccagcgagctct

SEQ ID NO: 480325 - DNA, 25 bp, Homo sapien
acctagatagaactcggcccgtcag

SEQ ID NO: 480326 - DNA, 25 bp, Homo sapien
tggccatgaatgagcaagatcctct

SEQ ID NO: 480327 - DNA, 25 bp, Homo sapien
caatctactgagtggccatgggcat

SEQ ID NO: 480328 - DNA, 25 bp, Homo sapien
tcagttctgagtgaggcacgtacca

SEQ ID NO: 480329 - DNA, 25 bp, Homo sapien
gaacaatggtctctttaatggcacc

SEQ ID NO: 480330 - DNA, 25 bp, Homo sapien
taactgtgactgattggagcgacac

SEQ ID NO: 480331 - DNA, 25 bp, Homo sapien
taaaggtgtttaagacttccgctgc

SEQ ID NO: 480332 - DNA, 25 bp, Homo sapien
tcagaagattattccagaagccagc

SEQ ID NO: 480333 - DNA, 25 bp, Homo sapien
ccttatggttcagtgttagatgctc

SEQ ID NO: 480334 - DNA, 25 bp, Homo sapien
gactgggacatatcatccctagagg

SEQ ID NO: 480335 - DNA, 25 bp, Homo sapien
ggaacctccacctgcgaaaaatgaa

SEQ ID NO: 480336 - DNA, 25 bp, Homo sapien
gatgctcagtctaaccaataaaatg

SEQ ID NO: 480337 - DNA, 25 bp, Homo sapien
agatcttcttcactaccctggcatg

SEQ ID NO: 480338 - DNA, 25 bp, Homo sapien
ggttttcaagatcctgtcacatgta

SEQ ID NO: 480339 - DNA, 25 bp, Homo sapien
ccctggcatgagaccttaggtactt

SEQ ID NO: 480340 - DNA, 25 bp, Homo sapien
acaaagaaatttgtgactggccaga

SEQ ID NO: 480341 - DNA, 25 bp, Homo sapien
aagatggtagtttggaatcactgac

SEQ ID NO: 480342 - DNA, 25 bp, Homo sapien
caatgtaagatggtagtttggaatc

SEQ ID NO: 480343 - DNA, 25 bp, Homo sapien
tcttccagtcaatgtaagatggtag

SEQ ID NO: 480344 - DNA, 25 bp, Homo sapien
tagagttcttccagtcaatgtaaga

SEQ ID NO: 480345 - DNA, 25 bp, Homo sapien
tgcttgcaagtaacatgcttccgct

SEQ ID NO: 480346 - DNA, 25 bp, Homo sapien
tttgagttctgaataatgacacatc

SEQ ID NO: 480347 - DNA, 25 bp, Homo sapien
tgcttccgctctcctacatacatat

SEQ ID NO: 480348 - DNA, 25 bp, Homo sapien
tacatatcatttactgatgtccaag

SEQ ID NO: 480349 - DNA, 25 bp, Homo sapien
tgagccgccatcactggctatggaa

SEQ ID NO: 480350 - DNA, 25 bp, Homo sapien
caacatttagcagggctgagccgcc

SEQ ID NO: 480351 - DNA, 25 bp, Homo sapien
tttatgtaggcgtttaagcttctga

SEQ ID NO: 480352 - DNA, 25 bp, Homo sapien
tggaagcaacctccggtttgccata

SEQ ID NO: 480353 - DNA, 25 bp, Homo sapien
tgggaatagtcacccaaagacctca

SEQ ID NO: 480354 - DNA, 25 bp, Homo sapien
gctggcaggcttccttgtgtatgca

SEQ ID NO: 480355 - DNA, 25 bp, Homo sapien
catttctctgggaatagtcacccaa

SEQ ID NO: 480356 - DNA, 25 bp, Homo sapien
ggcttccttgtgtatgcatataaca

SEQ ID NO: 480357 - DNA, 25 bp, Homo sapien
tatgggagccacgttcaggagtctc

SEQ ID NO: 480358 - DNA, 25 bp, Homo sapien
aactcttcctctgtacacagaggga

SEQ ID NO: 480359 - DNA, 25 bp, Homo sapien
cagaacctggcagtttatcctgact

SEQ ID NO: 480360 - DNA, 25 bp, Homo sapien
tccccagcccttgttatgggagcca

SEQ ID NO: 480361 - DNA, 25 bp, Homo sapien
taaggtaggcacgatgaagtccagc

SEQ ID NO: 480362 - DNA, 25 bp, Homo sapien
cagtggcctttgtgatggtccagaa

SEQ ID NO: 480363 - DNA, 25 bp, Homo sapien
tggtccagaaaggtacaagccactg

SEQ ID NO: 480364 - DNA, 25 bp, Homo sapien
cctgccaagtgcagagaacagctgt

SEQ ID NO: 480365 - DNA, 25 bp, Homo sapien
tggcctgaccagagcgtctccaaag

SEQ ID NO: 480366 - DNA, 25 bp, Homo sapien
tgaccagagcgtctccaaagctccc

SEQ ID NO: 480367 - DNA, 25 bp, Homo sapien
ggagagctgggctatgggaggcttg

SEQ ID NO: 480368 - DNA, 25 bp, Homo sapien
aattggagagctgggctatgggagg

SEQ ID NO: 480369 - DNA, 25 bp, Homo sapien
gagatgtgagggaagtgaggttggt

SEQ ID NO: 480370 - DNA, 25 bp, Homo sapien
ttgtagccgctgagtgttcctgagg

SEQ ID NO: 480371 - DNA, 25 bp, Homo sapien
gggcagtttgtagccgctgagtgtt

SEQ ID NO: 480372 - DNA, 25 bp, Homo sapien
ggttgagggcgttcatggcagctgt

SEQ ID NO: 480373 - DNA, 25 bp, Homo sapien
catgacaggtggtatgctctagact

SEQ ID NO: 480374 - DNA, 25 bp, Homo sapien
tggatgtgccaacaggatctcctgg

SEQ ID NO: 480375 - DNA, 25 bp, Homo sapien
tgtcaggtgaccatgcttatgtgca

SEQ ID NO: 480376 - DNA, 25 bp, Homo sapien
cactgggtaatgacaactgtggacc

SEQ ID NO: 480377 - DNA, 25 bp, Homo sapien
tcaaagcaagtattctacatcttga

SEQ ID NO: 480378 - DNA, 25 bp, Homo sapien
tctcaaagcaagtattctacatctt

SEQ ID NO: 480379 - DNA, 25 bp, Homo sapien
caaagcaagtattctacatcttgaa

SEQ ID NO: 480380 - DNA, 25 bp, Homo sapien
ctcaaagcaagtattctacatcttg

SEQ ID NO: 480381 - DNA, 25 bp, Homo sapien
ggcctcccgaaagagcactgacttt

SEQ ID NO: 480382 - DNA, 25 bp, Homo sapien
caagcaaatgaggaaatgctggtct

SEQ ID NO: 480383 - DNA, 25 bp, Homo sapien
gctgtctcaattagagccagtgact

SEQ ID NO: 480384 - DNA, 25 bp, Homo sapien
cataacattgtggtgtggattcaac

SEQ ID NO: 480385 - DNA, 25 bp, Homo sapien
gttccagatcaggtagccagctcag

SEQ ID NO: 480386 - DNA, 25 bp, Homo sapien
taaatgcagagtgccctagggactg

SEQ ID NO: 480387 - DNA, 25 bp, Homo sapien
tccatgggcttctcaagtgcgacat

SEQ ID NO: 480388 - DNA, 25 bp, Homo sapien
gctcagtactcgacatctccatggg

SEQ ID NO: 480389 - DNA, 25 bp, Homo sapien
tccaccactgattaagagtaggttg

SEQ ID NO: 480390 - DNA, 25 bp, Homo sapien
ccactgattaagagtaggttggcag

SEQ ID NO: 480391 - DNA, 25 bp, Homo sapien
ctgaaggttttacgatgcattggta

SEQ ID NO: 480392 - DNA, 25 bp, Homo sapien
gaaggttttacgatgcattggtatc

SEQ ID NO: 480393 - DNA, 25 bp, Homo sapien
cacagtatcttccaatttccctagt

SEQ ID NO: 480394 - DNA, 25 bp, Homo sapien
tcattaacctcacagtatcttccaa

SEQ ID NO: 480395 - DNA, 25 bp, Homo sapien
taacctcacagtatcttccaatttc

SEQ ID NO: 480396 - DNA, 25 bp, Homo sapien
ctcacagtatcttccaatttcccta

SEQ ID NO: 480397 - DNA, 25 bp, Homo sapien
gacgctgcaggagaacatcatgaac

SEQ ID NO: 480398 - DNA, 25 bp, Homo sapien
caagctggaagacgagaagtgccca

SEQ ID NO: 480399 - DNA, 25 bp, Homo sapien
tcaaggaagagtgcaaacgccggaa

SEQ ID NO: 480400 - DNA, 25 bp, Homo sapien
gctgatgatcgaggccaaagccaac

SEQ ID NO: 480401 - DNA, 25 bp, Homo sapien
cactcgggctcgtccaagaggtctt

SEQ ID NO: 480402 - DNA, 25 bp, Homo sapien
gctgctatagcaacgtcctggacgc

SEQ ID NO: 480403 - DNA, 25 bp, Homo sapien
taccctcttcgggtgaacggctgtg

SEQ ID NO: 480404 - DNA, 25 bp, Homo sapien
tctctggtcccgcagggttctgggt

SEQ ID NO: 480405 - DNA, 25 bp, Homo sapien
gttattaaccatcaaagataaactg

SEQ ID NO: 480406 - DNA, 25 bp, Homo sapien
ccatcaaagataaactgatcttggt

SEQ ID NO: 480407 - DNA, 25 bp, Homo sapien
tggttatgctaacagataggaacat

SEQ ID NO: 480408 - DNA, 25 bp, Homo sapien
gataaactgatcttggttatgctaa

SEQ ID NO: 480409 - DNA, 25 bp, Homo sapien
aattctgtatctaccccagagggag

SEQ ID NO: 480410 - DNA, 25 bp, Homo sapien
gagcaggaaggcacatcagaggaaa

SEQ ID NO: 480411 - DNA, 25 bp, Homo sapien
aaagcagcatggaagcgtagtgaac

SEQ ID NO: 480412 - DNA, 25 bp, Homo sapien
tgcaggagctgccactgaaatgggc

SEQ ID NO: 480413 - DNA, 25 bp, Homo sapien
agagtagatctaattggcagaaacc

SEQ ID NO: 480414 - DNA, 25 bp, Homo sapien
gatctaattggcagaaaccaatttg

SEQ ID NO: 480415 - DNA, 25 bp, Homo sapien
gtagatctaattggcagaaaccaat

SEQ ID NO: 480416 - DNA, 25 bp, Homo sapien
tctaattggcagaaaccaatttgtt

SEQ ID NO: 480417 - DNA, 25 bp, Homo sapien
acctttgcacgtgagaactaatatt

SEQ ID NO: 480418 - DNA, 25 bp, Homo sapien
actgtcagtacagcaaccagaatgc

SEQ ID NO: 480419 - DNA, 25 bp, Homo sapien
agctttgccacctttgcacgtgaga

SEQ ID NO: 480420 - DNA, 25 bp, Homo sapien
aagccacactgtcagtacagcaacc

SEQ ID NO: 480421 - DNA, 25 bp, Homo sapien
agtgactaacttccaaagaacagag

SEQ ID NO: 480422 - DNA, 25 bp, Homo sapien
gaagggcaattcacctctgtggtat

SEQ ID NO: 480423 - DNA, 25 bp, Homo sapien
taacttcatagtacagaaacctgga

SEQ ID NO: 480424 - DNA, 25 bp, Homo sapien
gctgtgttgaactggatcctagaga

SEQ ID NO: 480425 - DNA, 25 bp, Homo sapien
gatcctttccaggttcgccagcgtg

SEQ ID NO: 480426 - DNA, 25 bp, Homo sapien
gagcgtcccggaacaaatactgtct

SEQ ID NO: 480427 - DNA, 25 bp, Homo sapien
tagaacatttcagggactaccagag

SEQ ID NO: 480428 - DNA, 25 bp, Homo sapien
taaaggagtcagatccaggaaaccc

SEQ ID NO: 480429 - DNA, 25 bp, Homo sapien
gatccaccaggactagcaggaaggg

SEQ ID NO: 480430 - DNA, 25 bp, Homo sapien
cttcgtactgcagatccaccaggac

SEQ ID NO: 480431 - DNA, 25 bp, Homo sapien
ccagccggctggtcacggagccggg

SEQ ID NO: 480432 - DNA, 25 bp, Homo sapien
aggggaataccgagcccagccggct

SEQ ID NO: 480433 - DNA, 25 bp, Homo sapien
tgacgtgagttacaatcaagactgg

SEQ ID NO: 480434 - DNA, 25 bp, Homo sapien
tggaagaaccagactaaaggaggca

SEQ ID NO: 480435 - DNA, 25 bp, Homo sapien
aggtttctccttagacaagcagtga

SEQ ID NO: 480436 - DNA, 25 bp, Homo sapien
cagaagacagtggaatctagccaaa

SEQ ID NO: 480437 - DNA, 25 bp, Homo sapien
agcacctaaacagtgtaaaggtttg

SEQ ID NO: 480438 - DNA, 25 bp, Homo sapien
gtgagtattgtaaggtctagttgac

SEQ ID NO: 480439 - DNA, 25 bp, Homo sapien
cagattgctctaaatatggtggtaa

SEQ ID NO: 480440 - DNA, 25 bp, Homo sapien
acttgaagtggagagtgctaccatt

SEQ ID NO: 480441 - DNA, 25 bp, Homo sapien
ggatgatggatcccgaacacataaa

SEQ ID NO: 480442 - DNA, 25 bp, Homo sapien
tggatgatggatcccgaacacataa

SEQ ID NO: 480443 - DNA, 25 bp, Homo sapien
atgatggatcccgaacacataaata

SEQ ID NO: 480444 - DNA, 25 bp, Homo sapien
gtggatgatggatcccgaacacata

SEQ ID NO: 480445 - DNA, 25 bp, Homo sapien
tgtggtttcaataataaggtattta

SEQ ID NO: 480446 - DNA, 25 bp, Homo sapien
tggtttcaataataaggtatttaga

SEQ ID NO: 480447 - DNA, 25 bp, Homo sapien
tatttagagtaaaagcctattagga

SEQ ID NO: 480448 - DNA, 25 bp, Homo sapien
taaaagcctattaggaaaggcatac

SEQ ID NO: 480449 - DNA, 25 bp, Homo sapien
tagttagaagactgagctccattgc

SEQ ID NO: 480450 - DNA, 25 bp, Homo sapien
tacaaacagctgttaaggaggtggc

SEQ ID NO: 480451 - DNA, 25 bp, Homo sapien
cattgctagcaaaatccctaggtta

SEQ ID NO: 480452 - DNA, 25 bp, Homo sapien
aagggctcaggtattggtatatcac

SEQ ID NO: 480453 - DNA, 25 bp, Homo sapien
catcatgtagagatgttggatggtg

SEQ ID NO: 480454 - DNA, 25 bp, Homo sapien
catgtagagatgttggatggtgtgg

SEQ ID NO: 480455 - DNA, 25 bp, Homo sapien
ggtgtggggagatcaataaatgaat

SEQ ID NO: 480456 - DNA, 25 bp, Homo sapien
gtgtggggagatcaataaatgaata

SEQ ID NO: 480457 - DNA, 25 bp, Homo sapien
gaagagaaagcagttaaggtgtccg

SEQ ID NO: 480458 - DNA, 25 bp, Homo sapien
caccgttagcgtgaaaatagtggac

SEQ ID NO: 480459 - DNA, 25 bp, Homo sapien
tattctgccgtagtttacaactcgg

SEQ ID NO: 480460 - DNA, 25 bp, Homo sapien
tacaactcggttgatatgggcaact

SEQ ID NO: 480461 - DNA, 25 bp, Homo sapien
ggtttctagggacataagtgaccca

SEQ ID NO: 480462 - DNA, 25 bp, Homo sapien
catgtgactgtaagcaagtccgcca

SEQ ID NO: 480463 - DNA, 25 bp, Homo sapien
ggtgaaaagtcatgcaatagtggct

SEQ ID NO: 480464 - DNA, 25 bp, Homo sapien
tagagaatagaagggccagtacacc

SEQ ID NO: 480465 - DNA, 25 bp, Homo sapien
tgtccagctgcaagtaatttcttgc

SEQ ID NO: 480466 - DNA, 25 bp, Homo sapien
gataaagcatcagctagctgtccag

SEQ ID NO: 480467 - DNA, 25 bp, Homo sapien
tcttgcccaattcaagatgtttctc

SEQ ID NO: 480468 - DNA, 25 bp, Homo sapien
aactgagataaagcatcagctagct

SEQ ID NO: 480469 - DNA, 25 bp, Homo sapien
tgttatgaacaatgtgttctacatg

SEQ ID NO: 480470 - DNA, 25 bp, Homo sapien
gttatgaacaatgtgttctacatga

SEQ ID NO: 480471 - DNA, 25 bp, Homo sapien
tatgaacaatgtgttctacatgaac

SEQ ID NO: 480472 - DNA, 25 bp, Homo sapien
ttttctatagtttgttatgaacaat

SEQ ID NO: 480473 - DNA, 25 bp, Homo sapien
taagcaatatagttatcagggtcac

SEQ ID NO: 480474 - DNA, 25 bp, Homo sapien
gcaatatagttatcagggtcaccat

SEQ ID NO: 480475 - DNA, 25 bp, Homo sapien
taaaaagacagtagccctccgataa

SEQ ID NO: 480476 - DNA, 25 bp, Homo sapien
gccctccgataataagcaatatagt

SEQ ID NO: 480477 - DNA, 25 bp, Homo sapien
agtgaagtccatcttcaattgaatc

SEQ ID NO: 480478 - DNA, 25 bp, Homo sapien
tgaagtccatcttcaattgaatcac

SEQ ID NO: 480479 - DNA, 25 bp, Homo sapien
gcagtgaagtccatcttcaattgaa

SEQ ID NO: 480480 - DNA, 25 bp, Homo sapien
tgcagtgaagtccatcttcaattga

SEQ ID NO: 480481 - DNA, 25 bp, Homo sapien
gtttgagtaataagtgacctctctg

SEQ ID NO: 480482 - DNA, 25 bp, Homo sapien
tccttgtttgagtaataagtgacct

SEQ ID NO: 480483 - DNA, 25 bp, Homo sapien
ataagtgacctctctgtaatcttgc

SEQ ID NO: 480484 - DNA, 25 bp, Homo sapien
tgagtaataagtgacctctctgtaa

SEQ ID NO: 480485 - DNA, 25 bp, Homo sapien
aagttttagatcctacggcgtagtg

SEQ ID NO: 480486 - DNA, 25 bp, Homo sapien
gacatgacaccaaacgcacagtcca

SEQ ID NO: 480487 - DNA, 25 bp, Homo sapien
gacgagaggcatctgaaagtcacct

SEQ ID NO: 480488 - DNA, 25 bp, Homo sapien
tctaggagagaacgctggagtccca

SEQ ID NO: 480489 - DNA, 25 bp, Homo sapien
tacgatagacgtgtgtgagagctcc

SEQ ID NO: 480490 - DNA, 25 bp, Homo sapien
ttgtgactcacgtagcaagctgcag

SEQ ID NO: 480491 - DNA, 25 bp, Homo sapien
taacagtggtgtctcggccaatcat

SEQ ID NO: 480492 - DNA, 25 bp, Homo sapien
caaaggcctagctgtaaccagtcaa

SEQ ID NO: 480493 - DNA, 25 bp, Homo sapien
tgtcaacttctcacaagtttctctg

SEQ ID NO: 480494 - DNA, 25 bp, Homo sapien
gctcatatgtcaacttctcacaagt

SEQ ID NO: 480495 - DNA, 25 bp, Homo sapien
ctagacagctcatatgtcaacttct

SEQ ID NO: 480496 - DNA, 25 bp, Homo sapien
acttctcacaagtttctctgtattg

SEQ ID NO: 480497 - DNA, 25 bp, Homo sapien
gagccactgagccaggcccattttt

SEQ ID NO: 480498 - DNA, 25 bp, Homo sapien
cactgagccaggcccatttttttat

SEQ ID NO: 480499 - DNA, 25 bp, Homo sapien
gccactgagccaggcccattttttt

SEQ ID NO: 480500 - DNA, 25 bp, Homo sapien
gtgagccactgagccaggcccattt

SEQ ID NO: 480501 - DNA, 25 bp, Homo sapien
gcaaatacatgtaggcacgtgaaag

SEQ ID NO: 480502 - DNA, 25 bp, Homo sapien
aatacatgtaggcacgtgaaaggac

SEQ ID NO: 480503 - DNA, 25 bp, Homo sapien
catgtaggcacgtgaaaggacagag

SEQ ID NO: 480504 - DNA, 25 bp, Homo sapien
gaagcaaatacatgtaggcacgtga

SEQ ID NO: 480505 - DNA, 25 bp, Homo sapien
ccaaaagcgttaagtgcttgtgaac

SEQ ID NO: 480506 - DNA, 25 bp, Homo sapien
gaacgcaaacgctgcatttcatcag

SEQ ID NO: 480507 - DNA, 25 bp, Homo sapien
cgttaagtgcttgtgaacgcaaacg

SEQ ID NO: 480508 - DNA, 25 bp, Homo sapien
tagcagcagtataatctccacttcc

SEQ ID NO: 480509 - DNA, 25 bp, Homo sapien
tcactgcagcgacaaattcttgggc

SEQ ID NO: 480510 - DNA, 25 bp, Homo sapien
tacaggcacatactatcaactcttt

SEQ ID NO: 480511 - DNA, 25 bp, Homo sapien
cagctcactgcagcgacaaattctt

SEQ ID NO: 480512 - DNA, 25 bp, Homo sapien
ttagaggcagggtcccattctgtcg

SEQ ID NO: 480513 - DNA, 25 bp, Homo sapien
tctgtaaatgtcaccgccttaaaag

SEQ ID NO: 480514 - DNA, 25 bp, Homo sapien
agagctgctctaaagtcgtatcgac

SEQ ID NO: 480515 - DNA, 25 bp, Homo sapien
tcttagctgggcacattgactcatg

SEQ ID NO: 480516 - DNA, 25 bp, Homo sapien
agaaaaaataccgtgagagggcagg

SEQ ID NO: 480517 - DNA, 25 bp, Homo sapien
gaagttcccgtagttctgcatccca

SEQ ID NO: 480518 - DNA, 25 bp, Homo sapien
ggacagttcgtggtctcctagttgg

SEQ ID NO: 480519 - DNA, 25 bp, Homo sapien
ttataaaacattcagctcgaagttc

SEQ ID NO: 480520 - DNA, 25 bp, Homo sapien
caactttgacgcagcttttaagtca

SEQ ID NO: 480521 - DNA, 25 bp, Homo sapien
gatcctggtcaagtttaagacattc

SEQ ID NO: 480522 - DNA, 25 bp, Homo sapien
tgagctcttcagctgactcaatcag

SEQ ID NO: 480523 - DNA, 25 bp, Homo sapien
gatgagctcttcagctgactcaatc

SEQ ID NO: 480524 - DNA, 25 bp, Homo sapien
caaaacaccttttatgatcctggtc

SEQ ID NO: 480525 - DNA, 25 bp, Homo sapien
gaacgaactgtatattcagcaatgc

SEQ ID NO: 480526 - DNA, 25 bp, Homo sapien
catatttgctggtagcatctgtgta

SEQ ID NO: 480527 - DNA, 25 bp, Homo sapien
gaaaagcagtggcaaatcctctcct

SEQ ID NO: 480528 - DNA, 25 bp, Homo sapien
tcctctcctttgaacgaactgtata

SEQ ID NO: 480529 - DNA, 25 bp, Homo sapien
tcaaataggcctctgctcgatcttt

SEQ ID NO: 480530 - DNA, 25 bp, Homo sapien
aacttcagaacaaaccctaatagct

SEQ ID NO: 480531 - DNA, 25 bp, Homo sapien
caaaccctaatagcttcaacaggct

SEQ ID NO: 480532 - DNA, 25 bp, Homo sapien
taatagcttcaacaggcttctcgtc

SEQ ID NO: 480533 - DNA, 25 bp, Homo sapien
cctggaaactgggaacttgcttagg

SEQ ID NO: 480534 - DNA, 25 bp, Homo sapien
ctgggaacttgcttaggagcaagat

SEQ ID NO: 480535 - DNA, 25 bp, Homo sapien
caagatgtcccacaaatagtagtga

SEQ ID NO: 480536 - DNA, 25 bp, Homo sapien
caaggtctgaatcccccacaagatg

SEQ ID NO: 480537 - DNA, 25 bp, Homo sapien
ctaatttcgcagtgagagctaaggg

SEQ ID NO: 480538 - DNA, 25 bp, Homo sapien
tagacacggtagctcaaaaggaaag

SEQ ID NO: 480539 - DNA, 25 bp, Homo sapien
aaagggattttctatgtggactaca

SEQ ID NO: 480540 - DNA, 25 bp, Homo sapien
aaaaccatctcaccgagtagacacg

SEQ ID NO: 480541 - DNA, 25 bp, Homo sapien
aagacatatcaattgggcagggcca

SEQ ID NO: 480542 - DNA, 25 bp, Homo sapien
ggcagggccaattgatcctagcact

SEQ ID NO: 480543 - DNA, 25 bp, Homo sapien
tagacagctggcaactattctctct

SEQ ID NO: 480544 - DNA, 25 bp, Homo sapien
acttcaaagacatatcaattgggca

SEQ ID NO: 480545 - DNA, 25 bp, Homo sapien
acttcaagccaagttataatgaaag

SEQ ID NO: 480546 - DNA, 25 bp, Homo sapien
gaaagaaaggcctaaaatcaatgac

SEQ ID NO: 480547 - DNA, 25 bp, Homo sapien
tctagcaaaagcacaaggtacaacc

SEQ ID NO: 480548 - DNA, 25 bp, Homo sapien
tgtgaaaggtgcaactttaaatgct

SEQ ID NO: 480549 - DNA, 25 bp, Homo sapien
acaacctgtatcccttgcatattgc

SEQ ID NO: 480550 - DNA, 25 bp, Homo sapien
cccttgcatattgcaggaaccagga

SEQ ID NO: 480551 - DNA, 25 bp, Homo sapien
cactgaagacaacagcagaccagca

SEQ ID NO: 480552 - DNA, 25 bp, Homo sapien
taatataatcatagtagcactgaag

SEQ ID NO: 480553 - DNA, 25 bp, Homo sapien
cgaagtgacgaaaagtaatataatc

SEQ ID NO: 480554 - DNA, 25 bp, Homo sapien
tccttgccaccgaagtgacgaaaag

SEQ ID NO: 480555 - DNA, 25 bp, Homo sapien
tgtctataacgagcttccctggtag

SEQ ID NO: 480556 - DNA, 25 bp, Homo sapien
tccatggtaagaatgactcatgcct

SEQ ID NO: 480557 - DNA, 25 bp, Homo sapien
cgtgtctagtgactagttccccaaa

SEQ ID NO: 480558 - DNA, 25 bp, Homo sapien
tgcaggccagacagaacgtgtctag

SEQ ID NO: 480559 - DNA, 25 bp, Homo sapien
taataatctcgtttctgcgactgtt

SEQ ID NO: 480560 - DNA, 25 bp, Homo sapien
tataataatctcgtttctgcgactg

SEQ ID NO: 480561 - DNA, 25 bp, Homo sapien
ataatctcgtttctgcgactgtttc

SEQ ID NO: 480562 - DNA, 25 bp, Homo sapien
tctttgtgctttctctagaccttct

SEQ ID NO: 480563 - DNA, 25 bp, Homo sapien
cagtgctaattttcggtatgcttta

SEQ ID NO: 480564 - DNA, 25 bp, Homo sapien
tcattctggaagttatctgggtgcc

SEQ ID NO: 480565 - DNA, 25 bp, Homo sapien
gaggacttctttagcagctgctata

SEQ ID NO: 480566 - DNA, 25 bp, Homo sapien
ctggatcagagaggacttctttagc

SEQ ID NO: 480567 - DNA, 25 bp, Homo sapien
gtgcctgacattcaaatccaggctc

SEQ ID NO: 480568 - DNA, 25 bp, Homo sapien
gcttgataactacccaatgaaatta

SEQ ID NO: 480569 - DNA, 25 bp, Homo sapien
cttttcggttatcaagagttgtgcc

SEQ ID NO: 480570 - DNA, 25 bp, Homo sapien
tatttattgagattcaggcccctaa

SEQ ID NO: 480571 - DNA, 25 bp, Homo sapien
ttaagaaccagataatatctaaggt

SEQ ID NO: 480572 - DNA, 25 bp, Homo sapien
cagaaaattaagaaccagataatat

SEQ ID NO: 480573 - DNA, 25 bp, Homo sapien
accagataatatctaaggtataggg

SEQ ID NO: 480574 - DNA, 25 bp, Homo sapien
taatatctaaggtataggggcaggg

SEQ ID NO: 480575 - DNA, 25 bp, Homo sapien
gaacccttgccatgagttccagctt

SEQ ID NO: 480576 - DNA, 25 bp, Homo sapien
caaaggatcttctccgtcgtcaaac

SEQ ID NO: 480577 - DNA, 25 bp, Homo sapien
ccgcctgagctgaagggattgaacc

SEQ ID NO: 480578 - DNA, 25 bp, Homo sapien
ttaaatctaaatggtccgcctgagc

SEQ ID NO: 480579 - DNA, 25 bp, Homo sapien
tactcacaagtgacgagactgacca

SEQ ID NO: 480580 - DNA, 25 bp, Homo sapien
tgaccacatcgaagcacagttgtcc

SEQ ID NO: 480581 - DNA, 25 bp, Homo sapien
gaatacgtgagcacttccacgggtg

SEQ ID NO: 480582 - DNA, 25 bp, Homo sapien
taggcactgacttactctgcaaggc

SEQ ID NO: 480583 - DNA, 25 bp, Homo sapien
taatgctaccctacagtgagacagg

SEQ ID NO: 480584 - DNA, 25 bp, Homo sapien
caacagctgtggctagggtacgcct

SEQ ID NO: 480585 - DNA, 25 bp, Homo sapien
ttgggtggacaccagaaaactgccg

SEQ ID NO: 480586 - DNA, 25 bp, Homo sapien
gaagggccggtctgctgtttaacac

SEQ ID NO: 480587 - DNA, 25 bp, Homo sapien
tccctgtcaacttgtgtaaaggaag

SEQ ID NO: 480588 - DNA, 25 bp, Homo sapien
cactggttttgcgtgaagcaaagct

SEQ ID NO: 480589 - DNA, 25 bp, Homo sapien
ttttaatagcactgaaatggaagac

SEQ ID NO: 480590 - DNA, 25 bp, Homo sapien
gcccttttgtcacctcagtcactgg

SEQ ID NO: 480591 - DNA, 25 bp, Homo sapien
aagtaaaagttcgtgctagccaggc

SEQ ID NO: 480592 - DNA, 25 bp, Homo sapien
catataaatcctaaactgctcggtg

SEQ ID NO: 480593 - DNA, 25 bp, Homo sapien
cgcagtgaagggctaacatccattc

SEQ ID NO: 480594 - DNA, 25 bp, Homo sapien
gatttgatcctcaagcgcagtgaag

SEQ ID NO: 480595 - DNA, 25 bp, Homo sapien
gaattggtaggacgtatttaacagc

SEQ ID NO: 480596 - DNA, 25 bp, Homo sapien
ttttgcctccggatattaagctgga

SEQ ID NO: 480597 - DNA, 25 bp, Homo sapien
tggaaagtcactagagtaacttcac

SEQ ID NO: 480598 - DNA, 25 bp, Homo sapien
cgtggatttccctgtctgaattgtg

SEQ ID NO: 480599 - DNA, 25 bp, Homo sapien
gggcccagatgacgctaccatgatg

SEQ ID NO: 480600 - DNA, 25 bp, Homo sapien
ccctgcgtggtggagaaaatctgct

SEQ ID NO: 480601 - DNA, 25 bp, Homo sapien
tctgcttggtcagaggagctccaaa

SEQ ID NO: 480602 - DNA, 25 bp, Homo sapien
gaagtcatccagagtaccaagagca

SEQ ID NO: 480603 - DNA, 25 bp, Homo sapien
tttgttaaacagaccctgcaaggca

SEQ ID NO: 480604 - DNA, 25 bp, Homo sapien
ccctccgcccagcagccgccccatc

SEQ ID NO: 480605 - DNA, 25 bp, Homo sapien
gccccatctgggaagtgaggagccc

SEQ ID NO: 480606 - DNA, 25 bp, Homo sapien
gcccctccgcccagcagccgcccca

SEQ ID NO: 480607 - DNA, 25 bp, Homo sapien
ctccgcccagcagccgccccatctg

SEQ ID NO: 480608 - DNA, 25 bp, Homo sapien
gaggaacacctcttcccggccgtca

SEQ ID NO: 480609 - DNA, 25 bp, Homo sapien
ggaacacctcttcccggccgtcatc

SEQ ID NO: 480610 - DNA, 25 bp, Homo sapien
gcatctctgcctggccgcacatcat

SEQ ID NO: 480611 - DNA, 25 bp, Homo sapien
tggagtctcgctcacttagtgctca

SEQ ID NO: 480612 - DNA, 25 bp, Homo sapien
tctgagtaacttatgtgaggcattc

SEQ ID NO: 480613 - DNA, 25 bp, Homo sapien
ggaatacgtattcgcataaaactct

SEQ ID NO: 480614 - DNA, 25 bp, Homo sapien
tacctgcaccttaggaggctattgt

SEQ ID NO: 480615 - DNA, 25 bp, Homo sapien
gctattgttagcagaatcattcaga

SEQ ID NO: 480616 - DNA, 25 bp, Homo sapien
taaattgtaggcttgagcatatctc

SEQ ID NO: 480617 - DNA, 25 bp, Homo sapien
gatgcaaaactctgctgttaatctg

SEQ ID NO: 480618 - DNA, 25 bp, Homo sapien
attgcttaatggctaaattgtaggc

SEQ ID NO: 480619 - DNA, 25 bp, Homo sapien
taaaaccacttggtagacaatctgt

SEQ ID NO: 480620 - DNA, 25 bp, Homo sapien
tgactgcccacttggccgcgaagtg

SEQ ID NO: 480621 - DNA, 25 bp, Homo sapien
ttttctctccgtgccatggcgccag

SEQ ID NO: 480622 - DNA, 25 bp, Homo sapien
tcttcgtgctcgcagcgggtgtctg

SEQ ID NO: 480623 - DNA, 25 bp, Homo sapien
cacagactgtgggtaccgggtccga

SEQ ID NO: 480624 - DNA, 25 bp, Homo sapien
tctaaaggaatttgctcagtgttat

SEQ ID NO: 480625 - DNA, 25 bp, Homo sapien
tagggggcaccaagaataacagcaa

SEQ ID NO: 480626 - DNA, 25 bp, Homo sapien
agggggcaccaagaataacagcaat

SEQ ID NO: 480627 - DNA, 25 bp, Homo sapien
cttctaaaggaatttgctcagtgtt

SEQ ID NO: 480628 - DNA, 25 bp, Homo sapien
ccagactttacacgggttggcagtt

SEQ ID NO: 480629 - DNA, 25 bp, Homo sapien
ggaacactcactagaccagacttta

SEQ ID NO: 480630 - DNA, 25 bp, Homo sapien
gatctgacaccttaaaatgggcagc

SEQ ID NO: 480631 - DNA, 25 bp, Homo sapien
tctctgtctggtagtggccggcctt

SEQ ID NO: 480632 - DNA, 25 bp, Homo sapien
agaggaggccccgaggtaagcgtcg

SEQ ID NO: 480633 - DNA, 25 bp, Homo sapien
tggcagaaaggcaaaggtggggcga

SEQ ID NO: 480634 - DNA, 25 bp, Homo sapien
caggggaggagtccgctgctccgcg

SEQ ID NO: 480635 - DNA, 25 bp, Homo sapien
cttcggccgggagcaaggagagatt

SEQ ID NO: 480636 - DNA, 25 bp, Homo sapien
aggtacggagcatgcgccaaagcct

SEQ ID NO: 480637 - DNA, 25 bp, Homo sapien
taggtacggagcatgcgccaaagcc

SEQ ID NO: 480638 - DNA, 25 bp, Homo sapien
ctaggtacggagcatgcgccaaagc

SEQ ID NO: 480639 - DNA, 25 bp, Homo sapien
gtacggagcatgcgccaaagcctcc

SEQ ID NO: 480640 - DNA, 25 bp, Homo sapien
cgcggcatcccgccggcggcttgca

SEQ ID NO: 480641 - DNA, 25 bp, Homo sapien
tcaggcgacgcgcggcatcccgccg

SEQ ID NO: 480642 - DNA, 25 bp, Homo sapien
ggcttgcaggcgctcaggcgctggg

SEQ ID NO: 480643 - DNA, 25 bp, Homo sapien
tcccgccggcggcttgcaggcgctc

SEQ ID NO: 480644 - DNA, 25 bp, Homo sapien
cgggcgcccgctcggaagtttcgcg

SEQ ID NO: 480645 - DNA, 25 bp, Homo sapien
cgctcggaagtttcgcggactccgg

SEQ ID NO: 480646 - DNA, 25 bp, Homo sapien
ggcggcagggcggacgggcgcccgc

SEQ ID NO: 480647 - DNA, 25 bp, Homo sapien
gtcccgctctcaggccggcaggcga

SEQ ID NO: 480648 - DNA, 25 bp, Homo sapien
ccggcgtcagcagccacttgttgaa

SEQ ID NO: 480649 - DNA, 25 bp, Homo sapien
agccacttgttgaacctttcatcca

SEQ ID NO: 480650 - DNA, 25 bp, Homo sapien
gaggagagtgagcaccggcgtcagc

SEQ ID NO: 480651 - DNA, 25 bp, Homo sapien
gtgagcaccggcgtcagcagccact

SEQ ID NO: 480652 - DNA, 25 bp, Homo sapien
tgctccccgaagttggtgcaggagc

SEQ ID NO: 480653 - DNA, 25 bp, Homo sapien
actcctccggcggcgcctgagcccg

SEQ ID NO: 480654 - DNA, 25 bp, Homo sapien
gctgctccccgaagttggtgcagga

SEQ ID NO: 480655 - DNA, 25 bp, Homo sapien
ctccccgaagttggtgcaggagctg

SEQ ID NO: 480656 - DNA, 25 bp, Homo sapien
ctcgtcctcctcctccggcgccgcg

SEQ ID NO: 480657 - DNA, 25 bp, Homo sapien
tcgtcctcctcctccggcgccgcgg

SEQ ID NO: 480658 - DNA, 25 bp, Homo sapien
tcctcgtcctcctcctccggcgccg

SEQ ID NO: 480659 - DNA, 25 bp, Homo sapien
gctcctcgtcctcctcctccggcgc

SEQ ID NO: 480660 - DNA, 25 bp, Homo sapien
cacgaatcggggcagggagccgttt

SEQ ID NO: 480661 - DNA, 25 bp, Homo sapien
ctgaagttgaagcgcggcacgaatc

SEQ ID NO: 480662 - DNA, 25 bp, Homo sapien
cgcggcacgaatcggggcagggagc

SEQ ID NO: 480663 - DNA, 25 bp, Homo sapien
ttgaagcgcggcacgaatcggggca

SEQ ID NO: 480664 - DNA, 25 bp, Homo sapien
tgtggaggaacacgatcacgtcgcg

SEQ ID NO: 480665 - DNA, 25 bp, Homo sapien
tgaaatccacgaagcgggtcaggtc

SEQ ID NO: 480666 - DNA, 25 bp, Homo sapien
cacgtcgcgccctttgatgttgaaa

SEQ ID NO: 480667 - DNA, 25 bp, Homo sapien
tctgacccgctttgcagctacaagg

SEQ ID NO: 480668 - DNA, 25 bp, Homo sapien
agacgccaggaaaccatcggcaggg

SEQ ID NO: 480669 - DNA, 25 bp, Homo sapien
gctgaagacgccaggaaaccatcgg

SEQ ID NO: 480670 - DNA, 25 bp, Homo sapien
gccaaccgctgaagacgccaggaaa

SEQ ID NO: 480671 - DNA, 25 bp, Homo sapien
aagccacggcgccaaccgctgaaga

SEQ ID NO: 480672 - DNA, 25 bp, Homo sapien
tttgcattgtgaaaaggtaccctcc

SEQ ID NO: 480673 - DNA, 25 bp, Homo sapien
ttatgtaccaatagattatctgcca

SEQ ID NO: 480674 - DNA, 25 bp, Homo sapien
tagagtcagccctatttgaagtaga

SEQ ID NO: 480675 - DNA, 25 bp, Homo sapien
ttatccaggctaatctagttgactg

SEQ ID NO: 480676 - DNA, 25 bp, Homo sapien
gaaggattttatgctccctgggaga

SEQ ID NO: 480677 - DNA, 25 bp, Homo sapien
ttgttttaggcaagtacagtaagac

SEQ ID NO: 480678 - DNA, 25 bp, Homo sapien
cagtaagacaagcagacacataaac

SEQ ID NO: 480679 - DNA, 25 bp, Homo sapien
ctttccaatcttgataactgtttta

SEQ ID NO: 480680 - DNA, 25 bp, Homo sapien
gcccaaatttgtcctgagtctcaat

SEQ ID NO: 480681 - DNA, 25 bp, Homo sapien
tgctatcctgaactctaataataaa

SEQ ID NO: 480682 - DNA, 25 bp, Homo sapien
tatttagcatcaaatcttacttcat

SEQ ID NO: 480683 - DNA, 25 bp, Homo sapien
cttaaaatctattatccgcccaaat

SEQ ID NO: 480684 - DNA, 25 bp, Homo sapien
cactcagataatagacagaggagcc

SEQ ID NO: 480685 - DNA, 25 bp, Homo sapien
tctggctcacagtcttcaagattaa

SEQ ID NO: 480686 - DNA, 25 bp, Homo sapien
gatagatccgatgcaaatttcactt

SEQ ID NO: 480687 - DNA, 25 bp, Homo sapien
tccactgtacagagtgaaaactggg

SEQ ID NO: 480688 - DNA, 25 bp, Homo sapien
cagtccctttattagtgtcctagga

SEQ ID NO: 480689 - DNA, 25 bp, Homo sapien
ttttattaggtgacatagatgccta

SEQ ID NO: 480690 - DNA, 25 bp, Homo sapien
taataggacagagcatatagaatgt

SEQ ID NO: 480691 - DNA, 25 bp, Homo sapien
taggattgcctagtactgttaatac

SEQ ID NO: 480692 - DNA, 25 bp, Homo sapien
tgcatgtttacttcccatggcatcc

SEQ ID NO: 480693 - DNA, 25 bp, Homo sapien
agtacaaaacgatcttcttgcagaa

SEQ ID NO: 480694 - DNA, 25 bp, Homo sapien
catccttcctcagaagtacaaaacg

SEQ ID NO: 480695 - DNA, 25 bp, Homo sapien
ctggatgcatgtttacttcccatgg

SEQ ID NO: 480696 - DNA, 25 bp, Homo sapien
agtttctggcaaaggatttcaaggc

SEQ ID NO: 480697 - DNA, 25 bp, Homo sapien
ggcagttttaatggaaagctgaggg

SEQ ID NO: 480698 - DNA, 25 bp, Homo sapien
ctgagggcagtgagctgaggaaagc

SEQ ID NO: 480699 - DNA, 25 bp, Homo sapien
tttctggcaaaggatttcaaggcag

SEQ ID NO: 480700 - DNA, 25 bp, Homo sapien
aaaataattagatggtctccacgcc

SEQ ID NO: 480701 - DNA, 25 bp, Homo sapien
agactagggagatgttgatctgatc

SEQ ID NO: 480702 - DNA, 25 bp, Homo sapien
aaaagtagattttaggcattctcac

SEQ ID NO: 480703 - DNA, 25 bp, Homo sapien
tatttcaaaacgtcatgagtacatc

SEQ ID NO: 480704 - DNA, 25 bp, Homo sapien
tggagaattcacactaggcatatgg

SEQ ID NO: 480705 - DNA, 25 bp, Homo sapien
cacactaggcatatggagagagatt

SEQ ID NO: 480706 - DNA, 25 bp, Homo sapien
ttcacactaggcatatggagagaga

SEQ ID NO: 480707 - DNA, 25 bp, Homo sapien
gaattcacactaggcatatggagag

SEQ ID NO: 480708 - DNA, 25 bp, Homo sapien
tcgatgttcccaaaccactttgtgt

SEQ ID NO: 480709 - DNA, 25 bp, Homo sapien
actttgtgtacaccagtaacacagc

SEQ ID NO: 480710 - DNA, 25 bp, Homo sapien
aaactcatttcctcctcgatgttcc

SEQ ID NO: 480711 - DNA, 25 bp, Homo sapien
cacatactttgtgaggctttctctc

SEQ ID NO: 480712 - DNA, 25 bp, Homo sapien
tcctgtcttggagggaaacgtgtcc

SEQ ID NO: 480713 - DNA, 25 bp, Homo sapien
tcttgaggaacttgccctcccattc

SEQ ID NO: 480714 - DNA, 25 bp, Homo sapien
tcctgctctttatcccagccagctg

SEQ ID NO: 480715 - DNA, 25 bp, Homo sapien
ccttcattgatccttgtgtctttcc

SEQ ID NO: 480716 - DNA, 25 bp, Homo sapien
tcaggcaagagttgaaaacgagggc

SEQ ID NO: 480717 - DNA, 25 bp, Homo sapien
tgctccctcaggcaagagttgaaaa

SEQ ID NO: 480718 - DNA, 25 bp, Homo sapien
ccctcaggcaagagttgaaaacgag

SEQ ID NO: 480719 - DNA, 25 bp, Homo sapien
tccctcaggcaagagttgaaaacga

SEQ ID NO: 480720 - DNA, 25 bp, Homo sapien
tgtacatccatctgccccatcagat

SEQ ID NO: 480721 - DNA, 25 bp, Homo sapien
ccatctgccccatcagattgtacac

SEQ ID NO: 480722 - DNA, 25 bp, Homo sapien
ctgtacatccatctgccccatcaga

SEQ ID NO: 480723 - DNA, 25 bp, Homo sapien
tctgccccatcagattgtacaccct

SEQ ID NO: 480724 - DNA, 25 bp, Homo sapien
tggttttggtagctgaacactcagg

SEQ ID NO: 480725 - DNA, 25 bp, Homo sapien
gaggtttcaagagccacactcatcc

SEQ ID NO: 480726 - DNA, 25 bp, Homo sapien
tgaacactcaggaatcggttaggct

SEQ ID NO: 480727 - DNA, 25 bp, Homo sapien
cggttaggctgtatcagtgagctga

SEQ ID NO: 480728 - DNA, 25 bp, Homo sapien
aagagcacatggcactttgcagccc

SEQ ID NO: 480729 - DNA, 25 bp, Homo sapien
tgcagccctgtttgacttagagcag

SEQ ID NO: 480730 - DNA, 25 bp, Homo sapien
cagatgagttgcatgggagattctt

SEQ ID NO: 480731 - DNA, 25 bp, Homo sapien
gattcttgggcgatgaggaaagata

SEQ ID NO: 480732 - DNA, 25 bp, Homo sapien
tgagtacttgcacgattcagcatga

SEQ ID NO: 480733 - DNA, 25 bp, Homo sapien
cccagtggcctgacagataatgctc

SEQ ID NO: 480734 - DNA, 25 bp, Homo sapien
gataatgctccaatctgttctgcac

SEQ ID NO: 480735 - DNA, 25 bp, Homo sapien
caccacggcttagtaaatgacccag

SEQ ID NO: 480736 - DNA, 25 bp, Homo sapien
tttgtcagttattctttgaaactga

SEQ ID NO: 480737 - DNA, 25 bp, Homo sapien
catatactatatgacacttgcatat

SEQ ID NO: 480738 - DNA, 25 bp, Homo sapien
tatatcagagataccacatctttag

SEQ ID NO: 480739 - DNA, 25 bp, Homo sapien
tataaataggctcaaggagaaattt

SEQ ID NO: 480740 - DNA, 25 bp, Homo sapien
ggccatgtcaacccttcttaggcaa

SEQ ID NO: 480741 - DNA, 25 bp, Homo sapien
aggccatgtcaacccttcttaggca

SEQ ID NO: 480742 - DNA, 25 bp, Homo sapien
tggccccaggccatgtcaacccttc

SEQ ID NO: 480743 - DNA, 25 bp, Homo sapien
cagccctgccagtaccaaagtagag

SEQ ID NO: 480744 - DNA, 25 bp, Homo sapien
agcagccctgccagtaccaaagtag

SEQ ID NO: 480745 - DNA, 25 bp, Homo sapien
ctgccagtaccaaagtagaggacat

SEQ ID NO: 480746 - DNA, 25 bp, Homo sapien
gccctgccagtaccaaagtagagga

SEQ ID NO: 480747 - DNA, 25 bp, Homo sapien
gccaatcaaagggtggttcctcgtg

SEQ ID NO: 480748 - DNA, 25 bp, Homo sapien
aagaagttgctagccaagtcagcag

SEQ ID NO: 480749 - DNA, 25 bp, Homo sapien
cttgggtagcaagttctcggacagc

SEQ ID NO: 480750 - DNA, 25 bp, Homo sapien
tggaacaccaacacggcattggctg

SEQ ID NO: 480751 - DNA, 25 bp, Homo sapien
agtgaggcaactccagaggtgccgt

SEQ ID NO: 480752 - DNA, 25 bp, Homo sapien
tgaggcaactccagaggtgccgtgg

SEQ ID NO: 480753 - DNA, 25 bp, Homo sapien
gtgaggcaactccagaggtgccgtg

SEQ ID NO: 480754 - DNA, 25 bp, Homo sapien
cacatgacacatcgcaaggagggag

SEQ ID NO: 480755 - DNA, 25 bp, Homo sapien
gatgaattgactagaactccaggag

SEQ ID NO: 480756 - DNA, 25 bp, Homo sapien
gatatgcagcgtcaccagttggaca

SEQ ID NO: 480757 - DNA, 25 bp, Homo sapien
gatatggttacatgtgcacagctcc

SEQ ID NO: 480758 - DNA, 25 bp, Homo sapien
cattggatcgaagaaggagatgagc

SEQ ID NO: 480759 - DNA, 25 bp, Homo sapien
gcgaggacaagccattggatcgaag

SEQ ID NO: 480760 - DNA, 25 bp, Homo sapien
caagccattggatcgaagaaggaga

SEQ ID NO: 480761 - DNA, 25 bp, Homo sapien
tcaggcctgcgaggacaagccattg

SEQ ID NO: 480762 - DNA, 25 bp, Homo sapien
gcttctttgtgagtctgcatcctga

SEQ ID NO: 480763 - DNA, 25 bp, Homo sapien
tctgagtgaagctcccaggtaaaca

SEQ ID NO: 480764 - DNA, 25 bp, Homo sapien
tgttgatgtgctatggtgtgtccca

SEQ ID NO: 480765 - DNA, 25 bp, Homo sapien
ttcaggtaccaagtcattatcagct

SEQ ID NO: 480766 - DNA, 25 bp, Homo sapien
gtgggccagagagtggtccccacaa

SEQ ID NO: 480767 - DNA, 25 bp, Homo sapien
tcctagccctggaaggtgggccaga

SEQ ID NO: 480768 - DNA, 25 bp, Homo sapien
ctggctggctcctagccctggaagg

SEQ ID NO: 480769 - DNA, 25 bp, Homo sapien
ggtgggccagagagtggtccccaca

SEQ ID NO: 480770 - DNA, 25 bp, Homo sapien
agtccagggaggcatagtgatacct

SEQ ID NO: 480771 - DNA, 25 bp, Homo sapien
ggaagatgcattcgcagcattcttt

SEQ ID NO: 480772 - DNA, 25 bp, Homo sapien
gcattcgcagcattctttgctataa

SEQ ID NO: 480773 - DNA, 25 bp, Homo sapien
aacatggaagatgcattcgcagcat

SEQ ID NO: 480774 - DNA, 25 bp, Homo sapien
tcattttgctgaacccttctttaaa

SEQ ID NO: 480775 - DNA, 25 bp, Homo sapien
aatcattttgctgaacccttcttta

SEQ ID NO: 480776 - DNA, 25 bp, Homo sapien
caatcattttgctgaacccttcttt

SEQ ID NO: 480777 - DNA, 25 bp, Homo sapien
atcattttgctgaacccttctttaa

SEQ ID NO: 480778 - DNA, 25 bp, Homo sapien
aaataaacactctgcatcaccatca

SEQ ID NO: 480779 - DNA, 25 bp, Homo sapien
ttatagatcaaacatttgcttgcat

SEQ ID NO: 480780 - DNA, 25 bp, Homo sapien
tatagatcaaacatttgcttgcatt

SEQ ID NO: 480781 - DNA, 25 bp, Homo sapien
taaacactctgcatcaccatcatca

SEQ ID NO: 480782 - DNA, 25 bp, Homo sapien
tgattctacccttgtccagaatgtt

SEQ ID NO: 480783 - DNA, 25 bp, Homo sapien
caggcctgtgttcctttgattctac

SEQ ID NO: 480784 - DNA, 25 bp, Homo sapien
tcaggcatctttcctgtgccataca

SEQ ID NO: 480785 - DNA, 25 bp, Homo sapien
tccaaatacctatagaccttgatat

SEQ ID NO: 480786 - DNA, 25 bp, Homo sapien
tctgaatctcctttgtatttacttg

SEQ ID NO: 480787 - DNA, 25 bp, Homo sapien
tatttggtgtatgaattttggatcc

SEQ ID NO: 480788 - DNA, 25 bp, Homo sapien
tgttgcctatctgttgtgcagccaa

SEQ ID NO: 480789 - DNA, 25 bp, Homo sapien
tgaattttggatcctaacattgatg

SEQ ID NO: 480790 - DNA, 25 bp, Homo sapien
gccagggaagcatggtacaagctca

SEQ ID NO: 480791 - DNA, 25 bp, Homo sapien
gagggttgaatctgccacggactga

SEQ ID NO: 480792 - DNA, 25 bp, Homo sapien
taagtgaaacctaccagcatggttg

SEQ ID NO: 480793 - DNA, 25 bp, Homo sapien
tgctgggaaagtccaatgaagtgac

SEQ ID NO: 480794 - DNA, 25 bp, Homo sapien
gcacacatgacacctcctgcaccag

SEQ ID NO: 480795 - DNA, 25 bp, Homo sapien
ggcacacatgacacctcctgcacca

SEQ ID NO: 480796 - DNA, 25 bp, Homo sapien
cagccacccccagttagtaacaaca

SEQ ID NO: 480797 - DNA, 25 bp, Homo sapien
tttaacctgcaagagttcctgggac

SEQ ID NO: 480798 - DNA, 25 bp, Homo sapien
tcctgggacacctcacattggatgt

SEQ ID NO: 480799 - DNA, 25 bp, Homo sapien
cacattggatgtcgtttctaccttc

SEQ ID NO: 480800 - DNA, 25 bp, Homo sapien
tctgggtgactctagaaacttttca

SEQ ID NO: 480801 - DNA, 25 bp, Homo sapien
atctatatcccaacgtacagcaggc

SEQ ID NO: 480802 - DNA, 25 bp, Homo sapien
catccttggtaagcacaacatctat

SEQ ID NO: 480803 - DNA, 25 bp, Homo sapien
taagcacaacatctatatcccaacg

SEQ ID NO: 480804 - DNA, 25 bp, Homo sapien
ccctaatatttcatccttggtaagc

SEQ ID NO: 480805 - DNA, 25 bp, Homo sapien
agatacacagatgaggatcaagagc

SEQ ID NO: 480806 - DNA, 25 bp, Homo sapien
gattgtctgaagagctgggcagcca

SEQ ID NO: 480807 - DNA, 25 bp, Homo sapien
cacagggcccacagatagatacaca

SEQ ID NO: 480808 - DNA, 25 bp, Homo sapien
tgatcgtctgccttctaaagtcttg

SEQ ID NO: 480809 - DNA, 25 bp, Homo sapien
acagaagaacatctagcgccttata

SEQ ID NO: 480810 - DNA, 25 bp, Homo sapien
ccttatctatgtctaacagaagaac

SEQ ID NO: 480811 - DNA, 25 bp, Homo sapien
tccttatctatgtctaacagaagaa

SEQ ID NO: 480812 - DNA, 25 bp, Homo sapien
tctaacagaagaacatctagcgcct

SEQ ID NO: 480813 - DNA, 25 bp, Homo sapien
aaggccctacatgaccagcaaagtg

SEQ ID NO: 480814 - DNA, 25 bp, Homo sapien
taaatgtcccaggtgataccgagct

SEQ ID NO: 480815 - DNA, 25 bp, Homo sapien
cctgaaagcctatgtgtcaatgaaa

SEQ ID NO: 480816 - DNA, 25 bp, Homo sapien
gatgagctgttcaatactctgacag

SEQ ID NO: 480817 - DNA, 25 bp, Homo sapien
tgctcagtggtggaataggggtggc

SEQ ID NO: 480818 - DNA, 25 bp, Homo sapien
cctgctcagtggtggaataggggtg

SEQ ID NO: 480819 - DNA, 25 bp, Homo sapien
gaataggggtggctggagtgtatcc

SEQ ID NO: 480820 - DNA, 25 bp, Homo sapien
gtggctggagtgtatccttgttcct

SEQ ID NO: 480821 - DNA, 25 bp, Homo sapien
tgtaccccaacaatggagcactgaa

SEQ ID NO: 480822 - DNA, 25 bp, Homo sapien
ttttggcccagatgctaaggtcctc

SEQ ID NO: 480823 - DNA, 25 bp, Homo sapien
taatcattcacaatccctagaggga

SEQ ID NO: 480824 - DNA, 25 bp, Homo sapien
tctgtatcctccctacaaagtggaa

SEQ ID NO: 480825 - DNA, 25 bp, Homo sapien
ttaacatctaagaagtggaactgtc

SEQ ID NO: 480826 - DNA, 25 bp, Homo sapien
aactgacgtctagaacagtcttgaa

SEQ ID NO: 480827 - DNA, 25 bp, Homo sapien
ttcaaggttaactcatttacatccc

SEQ ID NO: 480828 - DNA, 25 bp, Homo sapien
cttcaatgtaactgacgtctagaac

SEQ ID NO: 480829 - DNA, 25 bp, Homo sapien
gactgccagccccttacttttggat

SEQ ID NO: 480830 - DNA, 25 bp, Homo sapien
tagggtcgtcctatgactgccagcc

SEQ ID NO: 480831 - DNA, 25 bp, Homo sapien
tcaatccaaatagggtcgtcctatg

SEQ ID NO: 480832 - DNA, 25 bp, Homo sapien
tgccagccccttacttttggatggg

SEQ ID NO: 480833 - DNA, 25 bp, Homo sapien
aattaggtcccttaaggcatctgct

SEQ ID NO: 480834 - DNA, 25 bp, Homo sapien
gtgtcctcagacagctgttaagaat

SEQ ID NO: 480835 - DNA, 25 bp, Homo sapien
gctgttaagaatacctaaggcaatt

SEQ ID NO: 480836 - DNA, 25 bp, Homo sapien
ttgctccaagcagtgtctgcccctc

SEQ ID NO: 480837 - DNA, 25 bp, Homo sapien
caaggtctttgcagaagatggaaat

SEQ ID NO: 480838 - DNA, 25 bp, Homo sapien
aaaaaggacaaggagtgttcctgca

SEQ ID NO: 480839 - DNA, 25 bp, Homo sapien
aagcccattggagggatgacttgaa

SEQ ID NO: 480840 - DNA, 25 bp, Homo sapien
gagtgttcctgcaagcccattggag

SEQ ID NO: 480841 - DNA, 25 bp, Homo sapien
tcacagcatctatttggtggaagcc

SEQ ID NO: 480842 - DNA, 25 bp, Homo sapien
gcctggattatgttgatcattcggg

SEQ ID NO: 480843 - DNA, 25 bp, Homo sapien
cattcggggttccatatgcttctgg

SEQ ID NO: 480844 - DNA, 25 bp, Homo sapien
actggagtcacagcatctatttggt

SEQ ID NO: 480845 - DNA, 25 bp, Homo sapien
tgtctaaacctaacaccagggcgag

SEQ ID NO: 480846 - DNA, 25 bp, Homo sapien
tgaaccctgttgagttagccctgac

SEQ ID NO: 480847 - DNA, 25 bp, Homo sapien
tatctcaggcagtcctcaagaggtg

SEQ ID NO: 480848 - DNA, 25 bp, Homo sapien
tgccgcaagtaaggtcagaactcag

SEQ ID NO: 480849 - DNA, 25 bp, Homo sapien
ggcgaaacctacaccagatggctgg

SEQ ID NO: 480850 - DNA, 25 bp, Homo sapien
aatcaaggaacctggcacagtcacc

SEQ ID NO: 480851 - DNA, 25 bp, Homo sapien
ccagatggctggcaatcaaggaacc

SEQ ID NO: 480852 - DNA, 25 bp, Homo sapien
ctaagactcagaggcgaaacctaca

SEQ ID NO: 480853 - DNA, 25 bp, Homo sapien
gttctgcaggactggggaggcctca

SEQ ID NO: 480854 - DNA, 25 bp, Homo sapien
agttctgcaggactggggaggcctc

SEQ ID NO: 480855 - DNA, 25 bp, Homo sapien
ttctgcaggactggggaggcctcag

SEQ ID NO: 480856 - DNA, 25 bp, Homo sapien
aagtcccatcacgttgtcgattaga

SEQ ID NO: 480857 - DNA, 25 bp, Homo sapien
cagttttggaagctgggaactccag

SEQ ID NO: 480858 - DNA, 25 bp, Homo sapien
ggaccaagggactggtagacacact

SEQ ID NO: 480859 - DNA, 25 bp, Homo sapien
gcagcactcagaggtcttttatatg

SEQ ID NO: 480860 - DNA, 25 bp, Homo sapien
tgtaacaaatgagaatgcaatgcta

SEQ ID NO: 480861 - DNA, 25 bp, Homo sapien
caagcgagcatagagaatgaagtgc

SEQ ID NO: 480862 - DNA, 25 bp, Homo sapien
aatgagaatgcaatgctatcaagcg

SEQ ID NO: 480863 - DNA, 25 bp, Homo sapien
gcaatgctatcaagcgagcatagag

SEQ ID NO: 480864 - DNA, 25 bp, Homo sapien
taagatcactctttgccaaaattac

SEQ ID NO: 480865 - DNA, 25 bp, Homo sapien
acgtgactaagatcactctttgcca

SEQ ID NO: 480866 - DNA, 25 bp, Homo sapien
gtgactaagatcactctttgccaaa

SEQ ID NO: 480867 - DNA, 25 bp, Homo sapien
gactaagatcactctttgccaaaat

SEQ ID NO: 480868 - DNA, 25 bp, Homo sapien
taggcagtaagggccacaggcatag

SEQ ID NO: 480869 - DNA, 25 bp, Homo sapien
cagtaggcagtaagggccacaggca

SEQ ID NO: 480870 - DNA, 25 bp, Homo sapien
agtaggcagtaagggccacaggcat

SEQ ID NO: 480871 - DNA, 25 bp, Homo sapien
tcagtaggcagtaagggccacaggc

SEQ ID NO: 480872 - DNA, 25 bp, Homo sapien
ctcttctggctctataacagcacat

SEQ ID NO: 480873 - DNA, 25 bp, Homo sapien
acagaaggaagtggcataaatgaaa

SEQ ID NO: 480874 - DNA, 25 bp, Homo sapien
cagaaggaagtggcataaatgaaac

SEQ ID NO: 480875 - DNA, 25 bp, Homo sapien
aacagaaggaagtggcataaatgaa

SEQ ID NO: 480876 - DNA, 25 bp, Homo sapien
gcacaaaacagagagcgtggccctg

SEQ ID NO: 480877 - DNA, 25 bp, Homo sapien
gcctggagttagagtcgagaagcaa

SEQ ID NO: 480878 - DNA, 25 bp, Homo sapien
aagcgtggaatgacccagtgaagcc

SEQ ID NO: 480879 - DNA, 25 bp, Homo sapien
tcgagaagcaagaacctggcacaaa

SEQ ID NO: 480880 - DNA, 25 bp, Homo sapien
caatgatctaagaggctggtgccat

SEQ ID NO: 480881 - DNA, 25 bp, Homo sapien
cagagctcttcaaggctttaggcag

SEQ ID NO: 480882 - DNA, 25 bp, Homo sapien
taggtagtctctcactagggccggt

SEQ ID NO: 480883 - DNA, 25 bp, Homo sapien
aagaggcttcgacaggtcatttgcc

SEQ ID NO: 480884 - DNA, 25 bp, Homo sapien
tagtatcatgagcaacaagggactg

SEQ ID NO: 480885 - DNA, 25 bp, Homo sapien
gacatcagtgcagaatgggtggcca

SEQ ID NO: 480886 - DNA, 25 bp, Homo sapien
catcttgagttggtaaatgcagaac

SEQ ID NO: 480887 - DNA, 25 bp, Homo sapien
gctactacagccttctagaacattg

SEQ ID NO: 480888 - DNA, 25 bp, Homo sapien
cctattgtatcatccagcatctcta

SEQ ID NO: 480889 - DNA, 25 bp, Homo sapien
ccaatgtaataggtttgacctatta

SEQ ID NO: 480890 - DNA, 25 bp, Homo sapien
cacaacctattgtatcatccagcat

SEQ ID NO: 480891 - DNA, 25 bp, Homo sapien
caatgtaataggtttgacctattat

SEQ ID NO: 480892 - DNA, 25 bp, Homo sapien
caaactaagcagtcttgtctgccca

SEQ ID NO: 480893 - DNA, 25 bp, Homo sapien
gatacagaaatatgttcctattgat

SEQ ID NO: 480894 - DNA, 25 bp, Homo sapien
agcagagggcaaactaagcagtctt

SEQ ID NO: 480895 - DNA, 25 bp, Homo sapien
acagaaatatgttcctattgatcaa

SEQ ID NO: 480896 - DNA, 25 bp, Homo sapien
tttttgccgcttaggactccggcga

SEQ ID NO: 480897 - DNA, 25 bp, Homo sapien
taggactccggcgatgactgcctgc

SEQ ID NO: 480898 - DNA, 25 bp, Homo sapien
gactccggcgatgactgcctgcctt

SEQ ID NO: 480899 - DNA, 25 bp, Homo sapien
ccgcttaggactccggcgatgactg

SEQ ID NO: 480900 - DNA, 25 bp, Homo sapien
gtcgtttgatcattatgggcttcta

SEQ ID NO: 480901 - DNA, 25 bp, Homo sapien
tcaagtcgtttgatcattatgggct

SEQ ID NO: 480902 - DNA, 25 bp, Homo sapien
aagtcgtttgatcattatgggcttc

SEQ ID NO: 480903 - DNA, 25 bp, Homo sapien
caagtcgtttgatcattatgggctt

SEQ ID NO: 480904 - DNA, 25 bp, Homo sapien
ttctggccagctataactggaacac

SEQ ID NO: 480905 - DNA, 25 bp, Homo sapien
ctggccagctataactggaacacag

SEQ ID NO: 480906 - DNA, 25 bp, Homo sapien
tctggccagctataactggaacaca

SEQ ID NO: 480907 - DNA, 25 bp, Homo sapien
gtttctggccagctataactggaac

SEQ ID NO: 480908 - DNA, 25 bp, Homo sapien
gaaatgatggatgccacgtgttctg

SEQ ID NO: 480909 - DNA, 25 bp, Homo sapien
catcatgtttgatggcttccgcggc

SEQ ID NO: 480910 - DNA, 25 bp, Homo sapien
tatttcacctagtgctgagtaaaca

SEQ ID NO: 480911 - DNA, 25 bp, Homo sapien
aacagatgcagaacataatgcttgc

SEQ ID NO: 480912 - DNA, 25 bp, Homo sapien
ccctttgaaaccatcactgtccacc

SEQ ID NO: 480913 - DNA, 25 bp, Homo sapien
tttcccctttgaaaccatcactgtc

SEQ ID NO: 480914 - DNA, 25 bp, Homo sapien
ttcccctttgaaaccatcactgtcc

SEQ ID NO: 480915 - DNA, 25 bp, Homo sapien
tcccctttgaaaccatcactgtcca

SEQ ID NO: 480916 - DNA, 25 bp, Homo sapien
acacagtgtaagcattacagttgca

SEQ ID NO: 480917 - DNA, 25 bp, Homo sapien
taggtgaagcataaccttcaagata

SEQ ID NO: 480918 - DNA, 25 bp, Homo sapien
tgtaagcattacagttgcatcagtc

SEQ ID NO: 480919 - DNA, 25 bp, Homo sapien
tccattataggtgaagcataacctt

SEQ ID NO: 480920 - DNA, 25 bp, Homo sapien
ctggggcaccataagaatgaaatct

SEQ ID NO: 480921 - DNA, 25 bp, Homo sapien
cataagaatgaaatctatcctccat

SEQ ID NO: 480922 - DNA, 25 bp, Homo sapien
ccataagaatgaaatctatcctcca

SEQ ID NO: 480923 - DNA, 25 bp, Homo sapien
gcaccataagaatgaaatctatcct

SEQ ID NO: 480924 - DNA, 25 bp, Homo sapien
catactctgagtaaacccttgtaag

SEQ ID NO: 480925 - DNA, 25 bp, Homo sapien
gcttcaaagaattagcatactctga

SEQ ID NO: 480926 - DNA, 25 bp, Homo sapien
tatatttgtctctctgatcactaga

SEQ ID NO: 480927 - DNA, 25 bp, Homo sapien
ttacatgacagattgggacagagtt

SEQ ID NO: 480928 - DNA, 25 bp, Homo sapien
atgcccatttaattcaccctgtgta

SEQ ID NO: 480929 - DNA, 25 bp, Homo sapien
cttttcttccttacatgcccattta

SEQ ID NO: 480930 - DNA, 25 bp, Homo sapien
taattcaccctgtgtaaaactaagc

SEQ ID NO: 480931 - DNA, 25 bp, Homo sapien
caccctgtgtaaaactaagcacctc

SEQ ID NO: 480932 - DNA, 25 bp, Homo sapien
ttcatgatgctctcacaattgcaca

SEQ ID NO: 480933 - DNA, 25 bp, Homo sapien
tattgtaccaatagtctctgagtca

SEQ ID NO: 480934 - DNA, 25 bp, Homo sapien
gctgttaccttcacagctcttcatg

SEQ ID NO: 480935 - DNA, 25 bp, Homo sapien
tctctgagtcagctggattcaaaac

SEQ ID NO: 480936 - DNA, 25 bp, Homo sapien
tttatacctgaaggggctatgacca

SEQ ID NO: 480937 - DNA, 25 bp, Homo sapien
tacctgaaggggctatgaccaatta

SEQ ID NO: 480938 - DNA, 25 bp, Homo sapien
tcatttatacctgaaggggctatga

SEQ ID NO: 480939 - DNA, 25 bp, Homo sapien
cctgaaggggctatgaccaattata

SEQ ID NO: 480940 - DNA, 25 bp, Homo sapien
caaggtgctaaagcaaagcacccaa

SEQ ID NO: 480941 - DNA, 25 bp, Homo sapien
gagacattcattatgcaaggtgcta

SEQ ID NO: 480942 - DNA, 25 bp, Homo sapien
ttaaatgatgcttaagcagtgtgcc

SEQ ID NO: 480943 - DNA, 25 bp, Homo sapien
taagagtcactcctagtcaaatagg

SEQ ID NO: 480944 - DNA, 25 bp, Homo sapien
tctatacgacgaaaaaccaacatgt

SEQ ID NO: 480945 - DNA, 25 bp, Homo sapien
cactgatttgcatgcacatgcagga

SEQ ID NO: 480946 - DNA, 25 bp, Homo sapien
tggccatagcagattacgatgaaca

SEQ ID NO: 480947 - DNA, 25 bp, Homo sapien
tgaacagaccaacaaataactgatc

SEQ ID NO: 480948 - DNA, 25 bp, Homo sapien
ttaaatagtgctcagtttgaagtta

SEQ ID NO: 480949 - DNA, 25 bp, Homo sapien
taaatagtgctcagtttgaagttac

SEQ ID NO: 480950 - DNA, 25 bp, Homo sapien
gagcagaaaagcttacgcagcccct

SEQ ID NO: 480951 - DNA, 25 bp, Homo sapien
tatcagctgtccttaaatgcaatgg

SEQ ID NO: 480952 - DNA, 25 bp, Homo sapien
ggagctgccattccattagactggg

SEQ ID NO: 480953 - DNA, 25 bp, Homo sapien
gcaatggctaacgtattccctgaga

SEQ ID NO: 480954 - DNA, 25 bp, Homo sapien
tgaaaaccagtgtcaggtccttggg

SEQ ID NO: 480955 - DNA, 25 bp, Homo sapien
tccacttgacgagttttctgagatg

SEQ ID NO: 480956 - DNA, 25 bp, Homo sapien
tggcgtggcacccaatccacttgac

SEQ ID NO: 480957 - DNA, 25 bp, Homo sapien
caaacaagtgaagaacaagcaaggc

SEQ ID NO: 480958 - DNA, 25 bp, Homo sapien
cacctaagagtaattgttgccccat

SEQ ID NO: 480959 - DNA, 25 bp, Homo sapien
ttccagaaacttgacggcgatgcct

SEQ ID NO: 480960 - DNA, 25 bp, Homo sapien
gacctagaacacttgcacagtaatg

SEQ ID NO: 480961 - DNA, 25 bp, Homo sapien
tgtggcctgtgcaccctgtcatcac

SEQ ID NO: 480962 - DNA, 25 bp, Homo sapien
catcagtgccttcgtcaagtgtgtg

SEQ ID NO: 480963 - DNA, 25 bp, Homo sapien
tgtggaaggcaattcagcttcagct

SEQ ID NO: 480964 - DNA, 25 bp, Homo sapien
tgtgtggaaggcaattcagcttcag

SEQ ID NO: 480965 - DNA, 25 bp, Homo sapien
cagtgccttcgtcaagtgtgtggaa

SEQ ID NO: 480966 - DNA, 25 bp, Homo sapien
gatgccattaaaccgacatctgctc

SEQ ID NO: 480967 - DNA, 25 bp, Homo sapien
caaaatcatataatgtgccatgcca

SEQ ID NO: 480968 - DNA, 25 bp, Homo sapien
tctatttcagagaatctacttatgg

SEQ ID NO: 480969 - DNA, 25 bp, Homo sapien
tgctcccagacacgtgaaccttaaa

SEQ ID NO: 480970 - DNA, 25 bp, Homo sapien
tcaatactggaatattttaaagccc

SEQ ID NO: 480971 - DNA, 25 bp, Homo sapien
aatttggtaaatgatgtagaaatcc

SEQ ID NO: 480972 - DNA, 25 bp, Homo sapien
caggagagaaaaaatttggtaaatg

SEQ ID NO: 480973 - DNA, 25 bp, Homo sapien
tttggtaaatgatgtagaaatccta

SEQ ID NO: 480974 - DNA, 25 bp, Homo sapien
ggtaaatgatgtagaaatcctagaa

SEQ ID NO: 480975 - DNA, 25 bp, Homo sapien
ctgataggtaagaataccctcaggt

SEQ ID NO: 480976 - DNA, 25 bp, Homo sapien
cctcaggtcctagaactgataagaa

SEQ ID NO: 480977 - DNA, 25 bp, Homo sapien
taatatatctccactgataggtaag

SEQ ID NO: 480978 - DNA, 25 bp, Homo sapien
ctgataagaagtggagtggagcctt

SEQ ID NO: 480979 - DNA, 25 bp, Homo sapien
attataggctcctataatccatagg

SEQ ID NO: 480980 - DNA, 25 bp, Homo sapien
ttataggctcctataatccatagga

SEQ ID NO: 480981 - DNA, 25 bp, Homo sapien
tataggaggcacgtaatatccggtc

SEQ ID NO: 480982 - DNA, 25 bp, Homo sapien
cagaatccggattttacagaacaca

SEQ ID NO: 480983 - DNA, 25 bp, Homo sapien
gatccagagaagcatcagactcaag

SEQ ID NO: 480984 - DNA, 25 bp, Homo sapien
catgactattagtggcatttggcag

SEQ ID NO: 480985 - DNA, 25 bp, Homo sapien
caccaatactgccactgatatgttg

SEQ ID NO: 480986 - DNA, 25 bp, Homo sapien
atactgccactgatatgttgctggg

SEQ ID NO: 480987 - DNA, 25 bp, Homo sapien
gctggggcctgccaactgtcaacct

SEQ ID NO: 480988 - DNA, 25 bp, Homo sapien
ttgtttacaccaatactgccactga

SEQ ID NO: 480989 - DNA, 25 bp, Homo sapien
ccttatttagtactggtgacacaaa

SEQ ID NO: 480990 - DNA, 25 bp, Homo sapien
acaaaacaagccattccgatgtgag

SEQ ID NO: 480991 - DNA, 25 bp, Homo sapien
ccgatgtgagcttttactgactgac

SEQ ID NO: 480992 - DNA, 25 bp, Homo sapien
gtgcatatcagcaatgacagatggg

SEQ ID NO: 480993 - DNA, 25 bp, Homo sapien
agggttaacccatgttctgatgcca

SEQ ID NO: 480994 - DNA, 25 bp, Homo sapien
gagaacatttaccagaagtgagcag

SEQ ID NO: 480995 - DNA, 25 bp, Homo sapien
gaagtgagcagcactacagggttaa

SEQ ID NO: 480996 - DNA, 25 bp, Homo sapien
attgtgagaacatttaccagaagtg

SEQ ID NO: 480997 - DNA, 25 bp, Homo sapien
acttcacactcactcggttccccat

SEQ ID NO: 480998 - DNA, 25 bp, Homo sapien
aacttcacactcactcggttcccca

SEQ ID NO: 480999 - DNA, 25 bp, Homo sapien
tgtccaccgtcaaggattctttaca

SEQ ID NO: 481000 - DNA, 25 bp, Homo sapien
agcatgtccaccgtcaaggattctt

SEQ ID NO: 481001 - DNA, 25 bp, Homo sapien
gctgccatgtaaggttccgtaggat

SEQ ID NO: 481002 - DNA, 25 bp, Homo sapien
ctcattgagtatttctggtattagc

SEQ ID NO: 481003 - DNA, 25 bp, Homo sapien
tgtgtcctcgtgaatattgtctaac

SEQ ID NO: 481004 - DNA, 25 bp, Homo sapien
gcatcagacaggcattactttacca

SEQ ID NO: 481005 - DNA, 25 bp, Homo sapien
gagccagcaggtcttattatgtcag

SEQ ID NO: 481006 - DNA, 25 bp, Homo sapien
gaatgtagcagcgacagtagctctg

SEQ ID NO: 481007 - DNA, 25 bp, Homo sapien
aatgtgagctcagatgggttccggc

SEQ ID NO: 481008 - DNA, 25 bp, Homo sapien
tctaaatgtcaaagtgccctgaggc

SEQ ID NO: 481009 - DNA, 25 bp, Homo sapien
cacttgggtaggcaacaatctgtcc

SEQ ID NO: 481010 - DNA, 25 bp, Homo sapien
cactttagccttagaacagagggtc

SEQ ID NO: 481011 - DNA, 25 bp, Homo sapien
atatatgcagggagattgtcaggtt

SEQ ID NO: 481012 - DNA, 25 bp, Homo sapien
gggagattgtcaggttccacatatc

SEQ ID NO: 481013 - DNA, 25 bp, Homo sapien
tgcagggagattgtcaggttccaca

SEQ ID NO: 481014 - DNA, 25 bp, Homo sapien
tatgcagggagattgtcaggttcca

SEQ ID NO: 481015 - DNA, 25 bp, Homo sapien
ttccagcagcaatatagccaagcag

SEQ ID NO: 481016 - DNA, 25 bp, Homo sapien
cactgagggtaatgtttgaacagaa

SEQ ID NO: 481017 - DNA, 25 bp, Homo sapien
ctttgtccaggtagtcagcacagac

SEQ ID NO: 481018 - DNA, 25 bp, Homo sapien
catgaaaatagacccatgactttgt

SEQ ID NO: 481019 - DNA, 25 bp, Homo sapien
gggttagaataaagctctatatcaa

SEQ ID NO: 481020 - DNA, 25 bp, Homo sapien
tatcaagtgagcgtctcttctccgc

SEQ ID NO: 481021 - DNA, 25 bp, Homo sapien
taaagctctatatcaagtgagcgtc

SEQ ID NO: 481022 - DNA, 25 bp, Homo sapien
gagcgtctcttctccgctattcctt

SEQ ID NO: 481023 - DNA, 25 bp, Homo sapien
taagatatacagggtttaacttata

SEQ ID NO: 481024 - DNA, 25 bp, Homo sapien
ttcaagtttcccctatgggcccata

SEQ ID NO: 481025 - DNA, 25 bp, Homo sapien
caagtttcccctatgggcccataga

SEQ ID NO: 481026 - DNA, 25 bp, Homo sapien
cccctatgggcccatagaaggacca

SEQ ID NO: 481027 - DNA, 25 bp, Homo sapien
tatgggcccatagaaggaccatcag

SEQ ID NO: 481028 - DNA, 25 bp, Homo sapien
agaggatgctgtttgcttgcctgtg

SEQ ID NO: 481029 - DNA, 25 bp, Homo sapien
cacgaacaaggacttgctttgggaa

SEQ ID NO: 481030 - DNA, 25 bp, Homo sapien
ctttgggaaggaatgcacaaagcag

SEQ ID NO: 481031 - DNA, 25 bp, Homo sapien
ctgtgaggttcctcccatgccacga

SEQ ID NO: 481032 - DNA, 25 bp, Homo sapien
tgggtggacggagactgagcatgct

SEQ ID NO: 481033 - DNA, 25 bp, Homo sapien
tgctgccttggagacaccggctcct

SEQ ID NO: 481034 - DNA, 25 bp, Homo sapien
agacaccggctcctgctctggtgag

SEQ ID NO: 481035 - DNA, 25 bp, Homo sapien
cttggagacaccggctcctgctctg

SEQ ID NO: 481036 - DNA, 25 bp, Homo sapien
aatcagcaaaagtttagtgatggaa

SEQ ID NO: 481037 - DNA, 25 bp, Homo sapien
aacccacagctggagactcgatgag

SEQ ID NO: 481038 - DNA, 25 bp, Homo sapien
ggagactcgatgagactagagtcac

SEQ ID NO: 481039 - DNA, 25 bp, Homo sapien
ggtaaaatcagcaaaagtttagtga

SEQ ID NO: 481040 - DNA, 25 bp, Homo sapien
ataatatcgcctttccattcctttg

SEQ ID NO: 481041 - DNA, 25 bp, Homo sapien
tgtccttcattgataggccttctcc

SEQ ID NO: 481042 - DNA, 25 bp, Homo sapien
tataatatcgcctttccattccttt

SEQ ID NO: 481043 - DNA, 25 bp, Homo sapien
ccttcattgataggccttctccata

SEQ ID NO: 481044 - DNA, 25 bp, Homo sapien
tatcgacatatgaaattgagtcacc

SEQ ID NO: 481045 - DNA, 25 bp, Homo sapien
cgatttggatggcaggccaactctt

SEQ ID NO: 481046 - DNA, 25 bp, Homo sapien
tatgaaattgagtcaccttgatcga

SEQ ID NO: 481047 - DNA, 25 bp, Homo sapien
tgagtcaccttgatcgatttggatg

SEQ ID NO: 481048 - DNA, 25 bp, Homo sapien
gagggagccgtagaccagaatttgc

SEQ ID NO: 481049 - DNA, 25 bp, Homo sapien
gaataaaatcacacctactgagtcc

SEQ ID NO: 481050 - DNA, 25 bp, Homo sapien
aactgtagtggaccttcggaagcca

SEQ ID NO: 481051 - DNA, 25 bp, Homo sapien
tactgagtcctttaaatgaactggg

SEQ ID NO: 481052 - DNA, 25 bp, Homo sapien
gattgtaggatccattggctgtgga

SEQ ID NO: 481053 - DNA, 25 bp, Homo sapien
tccacgattgtaggatccattggct

SEQ ID NO: 481054 - DNA, 25 bp, Homo sapien
atctccacgattgtaggatccattg

SEQ ID NO: 481055 - DNA, 25 bp, Homo sapien
cacgattgtaggatccattggctgt

SEQ ID NO: 481056 - DNA, 25 bp, Homo sapien
cttgtggctgaagcactaatttgac

SEQ ID NO: 481057 - DNA, 25 bp, Homo sapien
aggagcactaccttcctcaacacga

SEQ ID NO: 481058 - DNA, 25 bp, Homo sapien
cctcaacacgactttcatgaattct

SEQ ID NO: 481059 - DNA, 25 bp, Homo sapien
cactaatttgactttgatctgagga

SEQ ID NO: 481060 - DNA, 25 bp, Homo sapien
caacaattggagctaaaattagcat

SEQ ID NO: 481061 - DNA, 25 bp, Homo sapien
gaatctaaagacgtgaatgtgagta

SEQ ID NO: 481062 - DNA, 25 bp, Homo sapien
gataatgaggcttggtttcaggtgc

SEQ ID NO: 481063 - DNA, 25 bp, Homo sapien
catgtactcaatagaaaaggcttta

SEQ ID NO: 481064 - DNA, 25 bp, Homo sapien
gaatcattaggtttctcctcctgta

SEQ ID NO: 481065 - DNA, 25 bp, Homo sapien
gtacatctgctttctccattctgag

SEQ ID NO: 481066 - DNA, 25 bp, Homo sapien
aaatgtacatctgctttctccattc

SEQ ID NO: 481067 - DNA, 25 bp, Homo sapien
tgagctggaatcattaggtttctcc

SEQ ID NO: 481068 - DNA, 25 bp, Homo sapien
gcctaatgtattcaggagttttttc

SEQ ID NO: 481069 - DNA, 25 bp, Homo sapien
gattatgagtatcaaaagcagtcat

SEQ ID NO: 481070 - DNA, 25 bp, Homo sapien
tgagtatcaaaagcagtcatgtcag

SEQ ID NO: 481071 - DNA, 25 bp, Homo sapien
gaagtctgtcttcaggttgatgcct

SEQ ID NO: 481072 - DNA, 25 bp, Homo sapien
tggacatttagtgccgtaaaattcc

SEQ ID NO: 481073 - DNA, 25 bp, Homo sapien
gtggacatttagtgccgtaaaattc

SEQ ID NO: 481074 - DNA, 25 bp, Homo sapien
cagcctctgggctagattggtaaat

SEQ ID NO: 481075 - DNA, 25 bp, Homo sapien
tgttcatggcgactgttttggagaa

SEQ ID NO: 481076 - DNA, 25 bp, Homo sapien
agaaaatcggtaatccttaactctg

SEQ ID NO: 481077 - DNA, 25 bp, Homo sapien
gctttaagattaacgtatataaaca

SEQ ID NO: 481078 - DNA, 25 bp, Homo sapien
atcccccttagtattttcacaatct

SEQ ID NO: 481079 - DNA, 25 bp, Homo sapien
tctagtccaaatccttgtttaataa

SEQ ID NO: 481080 - DNA, 25 bp, Homo sapien
cttgtccatttctagtccaaatcct

SEQ ID NO: 481081 - DNA, 25 bp, Homo sapien
tggcaagtgaccacctagcagccca

SEQ ID NO: 481082 - DNA, 25 bp, Homo sapien
taaatgagggtgtcaatgaccaagc

SEQ ID NO: 481083 - DNA, 25 bp, Homo sapien
gggtgtcaatgaccaagcccctgga

SEQ ID NO: 481084 - DNA, 25 bp, Homo sapien
cctgtccataaatgagggtgtcaat

SEQ ID NO: 481085 - DNA, 25 bp, Homo sapien
ccataaatgagggtgtcaatgacca

SEQ ID NO: 481086 - DNA, 25 bp, Homo sapien
aacagatatatcaggaaaccaaggc

SEQ ID NO: 481087 - DNA, 25 bp, Homo sapien
ctgtcaacagatatatcaggaaacc

SEQ ID NO: 481088 - DNA, 25 bp, Homo sapien
tcaacagatatatcaggaaaccaag

SEQ ID NO: 481089 - DNA, 25 bp, Homo sapien
acagatatatcaggaaaccaaggcc

SEQ ID NO: 481090 - DNA, 25 bp, Homo sapien
catcaaggactatgatgatggcagt

SEQ ID NO: 481091 - DNA, 25 bp, Homo sapien
tactgcttaaaacccgtgaatcata

SEQ ID NO: 481092 - DNA, 25 bp, Homo sapien
ggtaacagacatattggaaacagat

SEQ ID NO: 481093 - DNA, 25 bp, Homo sapien
caatactaatggtgacatcaaggac

SEQ ID NO: 481094 - DNA, 25 bp, Homo sapien
aaaatctcccttgtgcatccttgtc

SEQ ID NO: 481095 - DNA, 25 bp, Homo sapien
agcaggaccccgtttactgggacag

SEQ ID NO: 481096 - DNA, 25 bp, Homo sapien
gacagtctggccatcagatggtgcc

SEQ ID NO: 481097 - DNA, 25 bp, Homo sapien
atccttgtctgggaactgggtgact

SEQ ID NO: 481098 - DNA, 25 bp, Homo sapien
tcaaaaccagtaatagcctcctgta

SEQ ID NO: 481099 - DNA, 25 bp, Homo sapien
gttcccgcttcttaatctgacatgt

SEQ ID NO: 481100 - DNA, 25 bp, Homo sapien
cagtaatagcctcctgtaaaaagtt

SEQ ID NO: 481101 - DNA, 25 bp, Homo sapien
aaagttcccgcttcttaatctgaca

SEQ ID NO: 481102 - DNA, 25 bp, Homo sapien
caggctcccaagagacatgttctgg

SEQ ID NO: 481103 - DNA, 25 bp, Homo sapien
ttgttaaacaaatccctggctcagg

SEQ ID NO: 481104 - DNA, 25 bp, Homo sapien
ggaaggccagtgttctcactcaggc

SEQ ID NO: 481105 - DNA, 25 bp, Homo sapien
taatcagggtcttcacgcatcatgc

SEQ ID NO: 481106 - DNA, 25 bp, Homo sapien
aaggaaagttgagcataggtctgcc

SEQ ID NO: 481107 - DNA, 25 bp, Homo sapien
ggaaagttgagcataggtctgccac

SEQ ID NO: 481108 - DNA, 25 bp, Homo sapien
ccaaggaaagttgagcataggtctg

SEQ ID NO: 481109 - DNA, 25 bp, Homo sapien
caaggaaagttgagcataggtctgc

SEQ ID NO: 481110 - DNA, 25 bp, Homo sapien
ttctcctacatcgtgcaccccccaa

SEQ ID NO: 481111 - DNA, 25 bp, Homo sapien
gggcagcgggaagttgcgacagcca

SEQ ID NO: 481112 - DNA, 25 bp, Homo sapien
agcagttaaaatgcaatgacccttt

SEQ ID NO: 481113 - DNA, 25 bp, Homo sapien
gagggtgacacagcagttaaaatgc

SEQ ID NO: 481114 - DNA, 25 bp, Homo sapien
tccacagcttctaaagagtaaagtg

SEQ ID NO: 481115 - DNA, 25 bp, Homo sapien
gagtaaagtggttgctgctcaacac

SEQ ID NO: 481116 - DNA, 25 bp, Homo sapien
accaagaaggatagtgtgggagctt

SEQ ID NO: 481117 - DNA, 25 bp, Homo sapien
gaagtttcaacacactgtagtcatg

SEQ ID NO: 481118 - DNA, 25 bp, Homo sapien
cacagggtgagggatttgtttctac

SEQ ID NO: 481119 - DNA, 25 bp, Homo sapien
aatgccatgattttcgggtggttgt

SEQ ID NO: 481120 - DNA, 25 bp, Homo sapien
catgattttcgggtggttgtcacat

SEQ ID NO: 481121 - DNA, 25 bp, Homo sapien
tgccatgattttcgggtggttgtca

SEQ ID NO: 481122 - DNA, 25 bp, Homo sapien
aagtggctgctgcaagaataaattt

SEQ ID NO: 481123 - DNA, 25 bp, Homo sapien
aacttaaatgtaacagtcttggtca

SEQ ID NO: 481124 - DNA, 25 bp, Homo sapien
acttaaatgtaacagtcttggtcat

SEQ ID NO: 481125 - DNA, 25 bp, Homo sapien
taacttaaatgtaacagtcttggtc

SEQ ID NO: 481126 - DNA, 25 bp, Homo sapien
tgcacttttaacttaaatgtaacag

SEQ ID NO: 481127 - DNA, 25 bp, Homo sapien
ggaagagcatcagtagttgacaact

SEQ ID NO: 481128 - DNA, 25 bp, Homo sapien
tgtaggtgcaatccataaactcccg

SEQ ID NO: 481129 - DNA, 25 bp, Homo sapien
gaaagtcaagttatagcagcccacc

SEQ ID NO: 481130 - DNA, 25 bp, Homo sapien
ttgatctccacgttagaagcccgcg

SEQ ID NO: 481131 - DNA, 25 bp, Homo sapien
tagatcctcaatgcgttggcgggca

SEQ ID NO: 481132 - DNA, 25 bp, Homo sapien
ttctaaaatggcctatatgggatgc

SEQ ID NO: 481133 - DNA, 25 bp, Homo sapien
tccaaggtacctcaacagaaagtca

SEQ ID NO: 481134 - DNA, 25 bp, Homo sapien
gatgtgggtctctagcaatggtcaa

SEQ ID NO: 481135 - DNA, 25 bp, Homo sapien
cagatgtcctcagaatggctcagct

SEQ ID NO: 481136 - DNA, 25 bp, Homo sapien
ctgtcctggatccactccccgttcc

SEQ ID NO: 481137 - DNA, 25 bp, Homo sapien
ccctgtcctggatccactccccgtt

SEQ ID NO: 481138 - DNA, 25 bp, Homo sapien
gttacaacctcccctgtcctggatc

SEQ ID NO: 481139 - DNA, 25 bp, Homo sapien
tcatttctcaggggttacaacctcc

SEQ ID NO: 481140 - DNA, 25 bp, Homo sapien
gataccaatcccgaggtgcctaagg

SEQ ID NO: 481141 - DNA, 25 bp, Homo sapien
gagagacgaacattaatcccagctg

SEQ ID NO: 481142 - DNA, 25 bp, Homo sapien
ggcctaggcgtctggtaacatcaca

SEQ ID NO: 481143 - DNA, 25 bp, Homo sapien
tagacctagcttacaacctgtggag

SEQ ID NO: 481144 - DNA, 25 bp, Homo sapien
gatggagtagacaacctgctagaag

SEQ ID NO: 481145 - DNA, 25 bp, Homo sapien
tgcagcaccgcccatctcttggata

SEQ ID NO: 481146 - DNA, 25 bp, Homo sapien
cccttaatagggagttgtgagcaca

SEQ ID NO: 481147 - DNA, 25 bp, Homo sapien
tgttgctgacaaagtaccaggagcc

SEQ ID NO: 481148 - DNA, 25 bp, Homo sapien
aaaccttggagtcacagctgcgatc

SEQ ID NO: 481149 - DNA, 25 bp, Homo sapien
taggtccccacataaagatccagat

SEQ ID NO: 481150 - DNA, 25 bp, Homo sapien
caatctggagtactgctaggttagc

SEQ ID NO: 481151 - DNA, 25 bp, Homo sapien
cataatgcagcagaacatgtagctc

SEQ ID NO: 481152 - DNA, 25 bp, Homo sapien
ttaatgactgcttgtagtctaacac

SEQ ID NO: 481153 - DNA, 25 bp, Homo sapien
tgggagtgatgccctaatttgcaag

SEQ ID NO: 481154 - DNA, 25 bp, Homo sapien
gggagtgatgccctaatttgcaagg

SEQ ID NO: 481155 - DNA, 25 bp, Homo sapien
gcccaggaaccacatgctaacaaga

SEQ ID NO: 481156 - DNA, 25 bp, Homo sapien
ccacatgctaacaagatagtgagtc

SEQ ID NO: 481157 - DNA, 25 bp, Homo sapien
acagcccaggaaccacatgctaaca

SEQ ID NO: 481158 - DNA, 25 bp, Homo sapien
caggaaccacatgctaacaagatag

SEQ ID NO: 481159 - DNA, 25 bp, Homo sapien
cgcctgcttggtaaaccattggctt

SEQ ID NO: 481160 - DNA, 25 bp, Homo sapien
aaaccattggcttgagtgtataaac

SEQ ID NO: 481161 - DNA, 25 bp, Homo sapien
cttgagtgtataaacataggtacca

SEQ ID NO: 481162 - DNA, 25 bp, Homo sapien
gcttggtaaaccattggcttgagtg

SEQ ID NO: 481163 - DNA, 25 bp, Homo sapien
agtgttccacaaacaaccggttgct

SEQ ID NO: 481164 - DNA, 25 bp, Homo sapien
tcctcagaataagctgggagctgct

SEQ ID NO: 481165 - DNA, 25 bp, Homo sapien
gatgaggggctcttgaaaagtgttc

SEQ ID NO: 481166 - DNA, 25 bp, Homo sapien
cacaaacaaccggttgctggttgct

SEQ ID NO: 481167 - DNA, 25 bp, Homo sapien
atgatgatgaacagtgagcctggga

SEQ ID NO: 481168 - DNA, 25 bp, Homo sapien
aatgatgatgaacagtgagcctggg

SEQ ID NO: 481169 - DNA, 25 bp, Homo sapien
catgaactcagctgcagagacagcc

SEQ ID NO: 481170 - DNA, 25 bp, Homo sapien
tcatgaactcagctgcagagacagc

SEQ ID NO: 481171 - DNA, 25 bp, Homo sapien
ctcatgaactcagctgcagagacag

SEQ ID NO: 481172 - DNA, 25 bp, Homo sapien
gtgtatgtgtagcaagacgtcttga

SEQ ID NO: 481173 - DNA, 25 bp, Homo sapien
acgtcttgatgggtcattcgggcca

SEQ ID NO: 481174 - DNA, 25 bp, Homo sapien
tgatgggtcattcgggccagagtta

SEQ ID NO: 481175 - DNA, 25 bp, Homo sapien
tgtagcaagacgtcttgatgggtca

SEQ ID NO: 481176 - DNA, 25 bp, Homo sapien
ttgacctccactccggtgccgtcca

SEQ ID NO: 481177 - DNA, 25 bp, Homo sapien
gagctgctgctcattcgtcttgtac

SEQ ID NO: 481178 - DNA, 25 bp, Homo sapien
gacgttatgccaatcttgacctcca

SEQ ID NO: 481179 - DNA, 25 bp, Homo sapien
tcgtcttgtacttaagaacccagag

SEQ ID NO: 481180 - DNA, 25 bp, Homo sapien
tgggaacccgactacaacatagacg

SEQ ID NO: 481181 - DNA, 25 bp, Homo sapien
tcagaacacattgtcttctttgaca

SEQ ID NO: 481182 - DNA, 25 bp, Homo sapien
tcagctaacacagcaatgttcagtt

SEQ ID NO: 481183 - DNA, 25 bp, Homo sapien
atagacgccaggcacgaccttcaga

SEQ ID NO: 481184 - DNA, 25 bp, Homo sapien
atctcattgtgatggacggcggatg

SEQ ID NO: 481185 - DNA, 25 bp, Homo sapien
gaccctgcaactatgcttctgcaga

SEQ ID NO: 481186 - DNA, 25 bp, Homo sapien
tcttcatattgcgtagaattcaagc

SEQ ID NO: 481187 - DNA, 25 bp, Homo sapien
cgtagaattcaagcatctcattgtg

SEQ ID NO: 481188 - DNA, 25 bp, Homo sapien
tgtacaaccgtagcagtgcccctgt

SEQ ID NO: 481189 - DNA, 25 bp, Homo sapien
caaaagactgcgtggtgtagatctc

SEQ ID NO: 481190 - DNA, 25 bp, Homo sapien
cagggcgacggtgttcagaggaatt

SEQ ID NO: 481191 - DNA, 25 bp, Homo sapien
tgcccctgtctggatcagggcgacg

SEQ ID NO: 481192 - DNA, 25 bp, Homo sapien
aagagagagagtcctggaaagtcca

SEQ ID NO: 481193 - DNA, 25 bp, Homo sapien
tccaaagaagacaatactgcttcca

SEQ ID NO: 481194 - DNA, 25 bp, Homo sapien
ctactctgtccaaagaagacaatac

SEQ ID NO: 481195 - DNA, 25 bp, Homo sapien
tctgtccaaagaagacaatactgct

SEQ ID NO: 481196 - DNA, 25 bp, Homo sapien
ttccttaattgtttagcataaagat

SEQ ID NO: 481197 - DNA, 25 bp, Homo sapien
ctatcacataaacgagattccttaa

SEQ ID NO: 481198 - DNA, 25 bp, Homo sapien
tatgctgaggaacatctatcacata

SEQ ID NO: 481199 - DNA, 25 bp, Homo sapien
tggaactgaagctgtttttgggctg

SEQ ID NO: 481200 - DNA, 25 bp, Homo sapien
tggaggacgaagatcattatgatat

SEQ ID NO: 481201 - DNA, 25 bp, Homo sapien
aggacgaagatcattatgatattcc

SEQ ID NO: 481202 - DNA, 25 bp, Homo sapien
tgtggaggacgaagatcattatgat

SEQ ID NO: 481203 - DNA, 25 bp, Homo sapien
ctgtggaggacgaagatcattatga

SEQ ID NO: 481204 - DNA, 25 bp, Homo sapien
tttgaagtaggcgaagtacagggcc

SEQ ID NO: 481205 - DNA, 25 bp, Homo sapien
gggtaaaaccacacagtagcgattg

SEQ ID NO: 481206 - DNA, 25 bp, Homo sapien
tcctgttccacaaggcagattagct

SEQ ID NO: 481207 - DNA, 25 bp, Homo sapien
ggcagaccgcttgggcattcaagga

SEQ ID NO: 481208 - DNA, 25 bp, Homo sapien
aaatgtaccggttcagtagcgcgcc

SEQ ID NO: 481209 - DNA, 25 bp, Homo sapien
aagtttacagtttatgaccgcggcg

SEQ ID NO: 481210 - DNA, 25 bp, Homo sapien
gagtctggtagggaaggctcacaca

SEQ ID NO: 481211 - DNA, 25 bp, Homo sapien
tggcagaacaaaactatggtccggg

SEQ ID NO: 481212 - DNA, 25 bp, Homo sapien
aagatgtcatataatcagggataaa

SEQ ID NO: 481213 - DNA, 25 bp, Homo sapien
ttccgttttcgattttgcagcccaa

SEQ ID NO: 481214 - DNA, 25 bp, Homo sapien
tgcataaccggctgcgagaagtgga

SEQ ID NO: 481215 - DNA, 25 bp, Homo sapien
ggacttttaagcatagtcctgcccc

SEQ ID NO: 481216 - DNA, 25 bp, Homo sapien
aagaaaataagatcccaggctacat

SEQ ID NO: 481217 - DNA, 25 bp, Homo sapien
gatgcaaatgcttccggttcctatg

SEQ ID NO: 481218 - DNA, 25 bp, Homo sapien
agcctgcactcgaccacagatgcaa

SEQ ID NO: 481219 - DNA, 25 bp, Homo sapien
tcccaggctacatattcagaaaaag

SEQ ID NO: 481220 - DNA, 25 bp, Homo sapien
tgatctggctgagacgtctgttacc

SEQ ID NO: 481221 - DNA, 25 bp, Homo sapien
aaaaagcaccttcagccattcatgg

SEQ ID NO: 481222 - DNA, 25 bp, Homo sapien
tgcacgctccgtggaagaggtcgtc

SEQ ID NO: 481223 - DNA, 25 bp, Homo sapien
gtctgttaccctattgatcgccagg

SEQ ID NO: 481224 - DNA, 25 bp, Homo sapien
atttcaagcgtttgctgcagcagcc

SEQ ID NO: 481225 - DNA, 25 bp, Homo sapien
gactgaatttcaagcgtttgctgca

SEQ ID NO: 481226 - DNA, 25 bp, Homo sapien
tttttcggaggactgaatttcaagc

SEQ ID NO: 481227 - DNA, 25 bp, Homo sapien
ggaggactgaatttcaagcgtttgc

SEQ ID NO: 481228 - DNA, 25 bp, Homo sapien
gagtatgaccagattcccacagagt

SEQ ID NO: 481229 - DNA, 25 bp, Homo sapien
aaacagcatatggatctaccctctg

SEQ ID NO: 481230 - DNA, 25 bp, Homo sapien
gatgggccccacaaaacagcatatg

SEQ ID NO: 481231 - DNA, 25 bp, Homo sapien
tttttcaaagcccaagcatgagtat

SEQ ID NO: 481232 - DNA, 25 bp, Homo sapien
tccattgataggcacttgggctgca

SEQ ID NO: 481233 - DNA, 25 bp, Homo sapien
ggtgacacctgtgccgctcaagtag

SEQ ID NO: 481234 - DNA, 25 bp, Homo sapien
gcataggtgggaacaaaacagggtc

SEQ ID NO: 481235 - DNA, 25 bp, Homo sapien
gacctcgggcttgtcatttggacca

SEQ ID NO: 481236 - DNA, 25 bp, Homo sapien
tcatgctctgaaccacaaaagaatc

SEQ ID NO: 481237 - DNA, 25 bp, Homo sapien
gaaaacccaattatcatgctctgaa

SEQ ID NO: 481238 - DNA, 25 bp, Homo sapien
gggaggttcatctcacacatagcat

SEQ ID NO: 481239 - DNA, 25 bp, Homo sapien
gaggttcatctcacacatagcatga

SEQ ID NO: 481240 - DNA, 25 bp, Homo sapien
cgctccaaagctgggatcagtaata

SEQ ID NO: 481241 - DNA, 25 bp, Homo sapien
ggatagagcgcaagaaattggttcc

SEQ ID NO: 481242 - DNA, 25 bp, Homo sapien
ttccacgtgtgagagaagagttgca

SEQ ID NO: 481243 - DNA, 25 bp, Homo sapien
cagtcaggagtcacccaaagaaagg

SEQ ID NO: 481244 - DNA, 25 bp, Homo sapien
tggcgaatggataccgcctgttctg

SEQ ID NO: 481245 - DNA, 25 bp, Homo sapien
gagtccgctggcgaatggataccgc

SEQ ID NO: 481246 - DNA, 25 bp, Homo sapien
aatggataccgcctgttctgtttcc

SEQ ID NO: 481247 - DNA, 25 bp, Homo sapien
atgggtcaatgggagtccgctggcg

SEQ ID NO: 481248 - DNA, 25 bp, Homo sapien
tggaaaatctggggaccatcccaaa

SEQ ID NO: 481249 - DNA, 25 bp, Homo sapien
atactggaaaatctggggaccatcc

SEQ ID NO: 481250 - DNA, 25 bp, Homo sapien
tactggaaaatctggggaccatccc

SEQ ID NO: 481251 - DNA, 25 bp, Homo sapien
actggaaaatctggggaccatccca

SEQ ID NO: 481252 - DNA, 25 bp, Homo sapien
ttgtgccaaacaccgtgagggcagg

SEQ ID NO: 481253 - DNA, 25 bp, Homo sapien
ccttattaaagtgtaggtgacttgg

SEQ ID NO: 481254 - DNA, 25 bp, Homo sapien
ttcctgcagcggacgggcctggatt

SEQ ID NO: 481255 - DNA, 25 bp, Homo sapien
ggcctggattgctgaccttattaaa

SEQ ID NO: 481256 - DNA, 25 bp, Homo sapien
cctgattgataacacagcgctgaca

SEQ ID NO: 481257 - DNA, 25 bp, Homo sapien
tccagaagcagtaaacagacggcct

SEQ ID NO: 481258 - DNA, 25 bp, Homo sapien
ggttccagtggtcacaaccaagcta

SEQ ID NO: 481259 - DNA, 25 bp, Homo sapien
taagccagtgggtggagtttcccgc

SEQ ID NO: 481260 - DNA, 25 bp, Homo sapien
ctttatcaacagcaccgccaaactc

SEQ ID NO: 481261 - DNA, 25 bp, Homo sapien
ttatcaacagcaccgccaaactctg

SEQ ID NO: 481262 - DNA, 25 bp, Homo sapien
ttttggaacatctccctatagaagg

SEQ ID NO: 481263 - DNA, 25 bp, Homo sapien
cctccagctctagaatctttatgtt

SEQ ID NO: 481264 - DNA, 25 bp, Homo sapien
tgtttgtctacacaggtgtctctct

SEQ ID NO: 481265 - DNA, 25 bp, Homo sapien
cttgtttgtctacacaggtgtctct

SEQ ID NO: 481266 - DNA, 25 bp, Homo sapien
ttgtttgtctacacaggtgtctctc

SEQ ID NO: 481267 - DNA, 25 bp, Homo sapien
ctgtgatatgaagtccagacttttc

SEQ ID NO: 481268 - DNA, 25 bp, Homo sapien
gtgatatgaagtccagacttttcaa

SEQ ID NO: 481269 - DNA, 25 bp, Homo sapien
tgtgatatgaagtccagacttttca

SEQ ID NO: 481270 - DNA, 25 bp, Homo sapien
gattaatagatacgccagaaagctt

SEQ ID NO: 481271 - DNA, 25 bp, Homo sapien
ttctctctttgggaattatgcttat

SEQ ID NO: 481272 - DNA, 25 bp, Homo sapien
tatttagtttataggtctctttctc

SEQ ID NO: 481273 - DNA, 25 bp, Homo sapien
gagaaggcttgtttcagatgggcat

SEQ ID NO: 481274 - DNA, 25 bp, Homo sapien
tggccagctgatcccatttgaacac

SEQ ID NO: 481275 - DNA, 25 bp, Homo sapien
cataggacccgtgctaatgtccaca

SEQ ID NO: 481276 - DNA, 25 bp, Homo sapien
cagcagatcttgttgtaccccaggc

SEQ ID NO: 481277 - DNA, 25 bp, Homo sapien
tggatggaaccccaagcccatagga

SEQ ID NO: 481278 - DNA, 25 bp, Homo sapien
gggcccctgtctgcttcggcacagg

SEQ ID NO: 481279 - DNA, 25 bp, Homo sapien
agggcccctgtctgcttcggcacag

SEQ ID NO: 481280 - DNA, 25 bp, Homo sapien
cgtatggcacacaccaacatcaatg

SEQ ID NO: 481281 - DNA, 25 bp, Homo sapien
ctttctgtattcagcaggcctatgg

SEQ ID NO: 481282 - DNA, 25 bp, Homo sapien
cctatgggtgacgtatggcacacac

SEQ ID NO: 481283 - DNA, 25 bp, Homo sapien
aatggaacgactcctcagctcagac

SEQ ID NO: 481284 - DNA, 25 bp, Homo sapien
tgagaccttgaggaatgtaactctt

SEQ ID NO: 481285 - DNA, 25 bp, Homo sapien
ttctgaaacattgaatttgctcccc

SEQ ID NO: 481286 - DNA, 25 bp, Homo sapien
tttgctccccagtagtccaactttg

SEQ ID NO: 481287 - DNA, 25 bp, Homo sapien
tagaagcatccgagttcttggctcc

SEQ ID NO: 481288 - DNA, 25 bp, Homo sapien
aatcttaggagagataaacattatg

SEQ ID NO: 481289 - DNA, 25 bp, Homo sapien
catctgtccccagtgacggaactca

SEQ ID NO: 481290 - DNA, 25 bp, Homo sapien
cttcctgattatacttaaagtagac

SEQ ID NO: 481291 - DNA, 25 bp, Homo sapien
aggagtatttctcagacgccaaatc

SEQ ID NO: 481292 - DNA, 25 bp, Homo sapien
cagctctccattctctgcgcagcct

SEQ ID NO: 481293 - DNA, 25 bp, Homo sapien
tgggtgaatgttccaaggctcctca

SEQ ID NO: 481294 - DNA, 25 bp, Homo sapien
ctgggtgaatgttccaaggctcctc

SEQ ID NO: 481295 - DNA, 25 bp, Homo sapien
cctcagacacagctctccattctct

SEQ ID NO: 481296 - DNA, 25 bp, Homo sapien
tgaatattctgagctatagccaagg

SEQ ID NO: 481297 - DNA, 25 bp, Homo sapien
tgatcacacggtggccttcctctac

SEQ ID NO: 481298 - DNA, 25 bp, Homo sapien
gaatattctgagctatagccaagga

SEQ ID NO: 481299 - DNA, 25 bp, Homo sapien
atgcattataatgaatattctagaa

SEQ ID NO: 481300 - DNA, 25 bp, Homo sapien
gtcacctgggaacaacacatcctga

SEQ ID NO: 481301 - DNA, 25 bp, Homo sapien
tgaatattctagaatgtggctttgg

SEQ ID NO: 481302 - DNA, 25 bp, Homo sapien
cacctgggaacaacacatcctgagc

SEQ ID NO: 481303 - DNA, 25 bp, Homo sapien
ccatcagtgctcttgttgggtcact

SEQ ID NO: 481304 - DNA, 25 bp, Homo sapien
ctcatccatcagtgctcttgttggg

SEQ ID NO: 481305 - DNA, 25 bp, Homo sapien
catccatcagtgctcttgttgggtc

SEQ ID NO: 481306 - DNA, 25 bp, Homo sapien
cagtgctcttgttgggtcactggcc

SEQ ID NO: 481307 - DNA, 25 bp, Homo sapien
gcaagagagccaaccatagtagttc

SEQ ID NO: 481308 - DNA, 25 bp, Homo sapien
tctgtttccaatgtaatcttgtatc

SEQ ID NO: 481309 - DNA, 25 bp, Homo sapien
tctgtttggataactgccattatgt

SEQ ID NO: 481310 - DNA, 25 bp, Homo sapien
cttgtctctgtttggataactgcca

SEQ ID NO: 481311 - DNA, 25 bp, Homo sapien
gctgccaaggctgaatcttgtccta

SEQ ID NO: 481312 - DNA, 25 bp, Homo sapien
tacacccacacagttcactggcaaa

SEQ ID NO: 481313 - DNA, 25 bp, Homo sapien
caaacatattgcgtggaaagtcccc

SEQ ID NO: 481314 - DNA, 25 bp, Homo sapien
cttcagcacaggcttgtttcaccaa

SEQ ID NO: 481315 - DNA, 25 bp, Homo sapien
tggtatctggacctcgatttgtcct

SEQ ID NO: 481316 - DNA, 25 bp, Homo sapien
tacatggtatctggacctcgatttg

SEQ ID NO: 481317 - DNA, 25 bp, Homo sapien
aatacatggtatctggacctcgatt

SEQ ID NO: 481318 - DNA, 25 bp, Homo sapien
tatctggacctcgatttgtcctttt

SEQ ID NO: 481319 - DNA, 25 bp, Homo sapien
gcccgtgatcctggtggataccaca

SEQ ID NO: 481320 - DNA, 25 bp, Homo sapien
tcctggtggataccacaaaaacaag

SEQ ID NO: 481321 - DNA, 25 bp, Homo sapien
cgtgatcctggtggataccacaaaa

SEQ ID NO: 481322 - DNA, 25 bp, Homo sapien
tgcccgtgatcctggtggataccac

SEQ ID NO: 481323 - DNA, 25 bp, Homo sapien
ggtggctttgtattctgtgtattga

SEQ ID NO: 481324 - DNA, 25 bp, Homo sapien
gtggctttgtattctgtgtattgag

SEQ ID NO: 481325 - DNA, 25 bp, Homo sapien
tggctttgtattctgtgtattgagg

SEQ ID NO: 481326 - DNA, 25 bp, Homo sapien
caagtagctcattggacataaccat

SEQ ID NO: 481327 - DNA, 25 bp, Homo sapien
tcttgggcactaaaacttctcaacc

SEQ ID NO: 481328 - DNA, 25 bp, Homo sapien
caaagctttcacaagtagctcattg

SEQ ID NO: 481329 - DNA, 25 bp, Homo sapien
tgatggaaggacaactttcttgggc

SEQ ID NO: 481330 - DNA, 25 bp, Homo sapien
tgtgaacagggactaaatctcagtg

SEQ ID NO: 481331 - DNA, 25 bp, Homo sapien
cattcctaatgtttgctgccacagc

SEQ ID NO: 481332 - DNA, 25 bp, Homo sapien
gcaacagacaggtttggcttcctaa

SEQ ID NO: 481333 - DNA, 25 bp, Homo sapien
tacattaggcagtactatgcatggc

SEQ ID NO: 481334 - DNA, 25 bp, Homo sapien
cgtgtggttctgaaagtaaacatta

SEQ ID NO: 481335 - DNA, 25 bp, Homo sapien
tgcacatgctgtgcgtgtggttctg

SEQ ID NO: 481336 - DNA, 25 bp, Homo sapien
gtaaacattaataaccatttgctga

SEQ ID NO: 481337 - DNA, 25 bp, Homo sapien
tagcaggtggcccacgcagagtcac

SEQ ID NO: 481338 - DNA, 25 bp, Homo sapien
cgtggtttgaactcctctgcccaaa

SEQ ID NO: 481339 - DNA, 25 bp, Homo sapien
caggctgagctatctggtgtttttc

SEQ ID NO: 481340 - DNA, 25 bp, Homo sapien
aaaaacatatcaggctgagctatct

SEQ ID NO: 481341 - DNA, 25 bp, Homo sapien
acactgctgacactcgtggtttgaa

SEQ ID NO: 481342 - DNA, 25 bp, Homo sapien
aagccaggggtccactgcggcaggt

SEQ ID NO: 481343 - DNA, 25 bp, Homo sapien
gggtccactgcggcaggtggcccga

SEQ ID NO: 481344 - DNA, 25 bp, Homo sapien
gctgtggctggttggaatccgcttt

SEQ ID NO: 481345 - DNA, 25 bp, Homo sapien
gctggttggaatccgctttctgcca

SEQ ID NO: 481346 - DNA, 25 bp, Homo sapien
gaaaatgtactcagatcaccgtcag

SEQ ID NO: 481347 - DNA, 25 bp, Homo sapien
gcatgggttgctttcaggaagggct

SEQ ID NO: 481348 - DNA, 25 bp, Homo sapien
caaagggttcgcacttctgtggctc

SEQ ID NO: 481349 - DNA, 25 bp, Homo sapien
tcataaagtgctagggatcgctgct

SEQ ID NO: 481350 - DNA, 25 bp, Homo sapien
aaactgtggtgtgccatccaacggg

SEQ ID NO: 481351 - DNA, 25 bp, Homo sapien
tacatagggtgctggtgacaactct

SEQ ID NO: 481352 - DNA, 25 bp, Homo sapien
gttcctgggcccaccctaagtcaga

SEQ ID NO: 481353 - DNA, 25 bp, Homo sapien
tgggcccaccctaagtcagaatctc

SEQ ID NO: 481354 - DNA, 25 bp, Homo sapien
tctttggtgtctaaaggctcttttc

SEQ ID NO: 481355 - DNA, 25 bp, Homo sapien
tcaggtccttggctaattctaatct

SEQ ID NO: 481356 - DNA, 25 bp, Homo sapien
taaagtacttttcgtcatccacaat

SEQ ID NO: 481357 - DNA, 25 bp, Homo sapien
tacttttcgtcatccacaatgccga

SEQ ID NO: 481358 - DNA, 25 bp, Homo sapien
tttcgtcatccacaatgccgaacat

SEQ ID NO: 481359 - DNA, 25 bp, Homo sapien
aagtacttttcgtcatccacaatgc

SEQ ID NO: 481360 - DNA, 25 bp, Homo sapien
ccctttgaatagaaaaggataggtg

SEQ ID NO: 481361 - DNA, 25 bp, Homo sapien
gaaaaggataggtgtcttaggacag

SEQ ID NO: 481362 - DNA, 25 bp, Homo sapien
agagtctccctttgaatagaaaagg

SEQ ID NO: 481363 - DNA, 25 bp, Homo sapien
tcttaggacagatggtagtgtttgg

SEQ ID NO: 481364 - DNA, 25 bp, Homo sapien
taaactctgttgctgtaagctgcag

SEQ ID NO: 481365 - DNA, 25 bp, Homo sapien
aacatctggcagaaccaagtggccg

SEQ ID NO: 481366 - DNA, 25 bp, Homo sapien
tgtactctgaaagccgtctgccgta

SEQ ID NO: 481367 - DNA, 25 bp, Homo sapien
gaggcttctccaccgcatcatgaga

SEQ ID NO: 481368 - DNA, 25 bp, Homo sapien
caaacaggcggcatagattcaagct

SEQ ID NO: 481369 - DNA, 25 bp, Homo sapien
tcgaaaacttgccagaaagctacct

SEQ ID NO: 481370 - DNA, 25 bp, Homo sapien
gtttggccaaacattcaaccgatga

SEQ ID NO: 481371 - DNA, 25 bp, Homo sapien
caaaggctcagacatgccaggaaaa

SEQ ID NO: 481372 - DNA, 25 bp, Homo sapien
cctggatcctaaatagtggctctgg

SEQ ID NO: 481373 - DNA, 25 bp, Homo sapien
taggcacttgctcaaaactacgtga

SEQ ID NO: 481374 - DNA, 25 bp, Homo sapien
cgatctctgtgaccaaggttgccac

SEQ ID NO: 481375 - DNA, 25 bp, Homo sapien
catgtggcaggtacaagaagatgcc

SEQ ID NO: 481376 - DNA, 25 bp, Homo sapien
ggaattctcttaagctcagcatcta

SEQ ID NO: 481377 - DNA, 25 bp, Homo sapien
gctctgacatgtagctgtacctgaa

SEQ ID NO: 481378 - DNA, 25 bp, Homo sapien
tgaacagggcgaactgtcctctcct

SEQ ID NO: 481379 - DNA, 25 bp, Homo sapien
ggaatcttgagtacctgatcttgaa

SEQ ID NO: 481380 - DNA, 25 bp, Homo sapien
tctcaccaaatagcaaaagccaggg

SEQ ID NO: 481381 - DNA, 25 bp, Homo sapien
tgtgggacaggagtctaagacttcc

SEQ ID NO: 481382 - DNA, 25 bp, Homo sapien
aacaggtttccttgctagagataga

SEQ ID NO: 481383 - DNA, 25 bp, Homo sapien
caaaactcagtatgctgagactcag

SEQ ID NO: 481384 - DNA, 25 bp, Homo sapien
caagtaggcacatcagacttctggg

SEQ ID NO: 481385 - DNA, 25 bp, Homo sapien
gctattgtattctggagcctcctgg

SEQ ID NO: 481386 - DNA, 25 bp, Homo sapien
caggtgattcgcaggcacatgagag

SEQ ID NO: 481387 - DNA, 25 bp, Homo sapien
aaatgtagaatcttgacctcagccc

SEQ ID NO: 481388 - DNA, 25 bp, Homo sapien
aggccgatgcccctctagcgtctgc

SEQ ID NO: 481389 - DNA, 25 bp, Homo sapien
agggttcggacaacagcactgactg

SEQ ID NO: 481390 - DNA, 25 bp, Homo sapien
tgttaacctgacaaagcgcacaggc

SEQ ID NO: 481391 - DNA, 25 bp, Homo sapien
agccacagagggttcggacaacagc

SEQ ID NO: 481392 - DNA, 25 bp, Homo sapien
aacggtaacatgttcactagaaggc

SEQ ID NO: 481393 - DNA, 25 bp, Homo sapien
cgcccatcaccgtcaaatttgcgga

SEQ ID NO: 481394 - DNA, 25 bp, Homo sapien
gataggctgacggttattatttaac

SEQ ID NO: 481395 - DNA, 25 bp, Homo sapien
cagtgtattgaacatatggttttga

SEQ ID NO: 481396 - DNA, 25 bp, Homo sapien
tggaaggcttccagcgacatgccat

SEQ ID NO: 481397 - DNA, 25 bp, Homo sapien
gcagcaactgtcacttcaaagcagg

SEQ ID NO: 481398 - DNA, 25 bp, Homo sapien
aaagcatgcccctaggactacctag

SEQ ID NO: 481399 - DNA, 25 bp, Homo sapien
gaaataagtcggtaaatgcagtcct

SEQ ID NO: 481400 - DNA, 25 bp, Homo sapien
caatgagagaggttatgaggcccat

SEQ ID NO: 481401 - DNA, 25 bp, Homo sapien
actttcccaaaggtcagaggcgttg

SEQ ID NO: 481402 - DNA, 25 bp, Homo sapien
ggaagccttaatctatgacacagtg

SEQ ID NO: 481403 - DNA, 25 bp, Homo sapien
ttctgcacctcataggactgggccc

SEQ ID NO: 481404 - DNA, 25 bp, Homo sapien
ggccgaggacaagtctcagacacca

SEQ ID NO: 481405 - DNA, 25 bp, Homo sapien
ccgaggacaagtctcagacaccact

SEQ ID NO: 481406 - DNA, 25 bp, Homo sapien
ggatgtttctgtgttccacatgggg

SEQ ID NO: 481407 - DNA, 25 bp, Homo sapien
atgtttctgtgttccacatggggcc

SEQ ID NO: 481408 - DNA, 25 bp, Homo sapien
tgaagtctccatgctcctagtagtt

SEQ ID NO: 481409 - DNA, 25 bp, Homo sapien
taaattgttgactgtagtaaccctg

SEQ ID NO: 481410 - DNA, 25 bp, Homo sapien
gcccagtagctgcaccaaatccaaa

SEQ ID NO: 481411 - DNA, 25 bp, Homo sapien
gaaaactcctaagttctgcccagta

SEQ ID NO: 481412 - DNA, 25 bp, Homo sapien
cattcctaaacgatcatgctcacag

SEQ ID NO: 481413 - DNA, 25 bp, Homo sapien
gatgtgcaagtcagtaggtagatta

SEQ ID NO: 481414 - DNA, 25 bp, Homo sapien
taatccaactgttctgtcagccttg

SEQ ID NO: 481415 - DNA, 25 bp, Homo sapien
agggaagcactttagttaccaagag

SEQ ID NO: 481416 - DNA, 25 bp, Homo sapien
caaatgaccttacatacctgctgag

SEQ ID NO: 481417 - DNA, 25 bp, Homo sapien
taaattccagttactgggacaagca

SEQ ID NO: 481418 - DNA, 25 bp, Homo sapien
ggactaaagtccagaagttgattat

SEQ ID NO: 481419 - DNA, 25 bp, Homo sapien
aatatagtcagtaagttcagatgtc

SEQ ID NO: 481420 - DNA, 25 bp, Homo sapien
tcttcatccactcataaggtcaggg

SEQ ID NO: 481421 - DNA, 25 bp, Homo sapien
taggccgcaataaaagcatgctcag

SEQ ID NO: 481422 - DNA, 25 bp, Homo sapien
caatatcatggcactccttgggaga

SEQ ID NO: 481423 - DNA, 25 bp, Homo sapien
cccacttaaagatggtaggccgcaa

SEQ ID NO: 481424 - DNA, 25 bp, Homo sapien
gtctgcagacttctaatgtcagcca

SEQ ID NO: 481425 - DNA, 25 bp, Homo sapien
cagccattttgtatctctgactggg

SEQ ID NO: 481426 - DNA, 25 bp, Homo sapien
cattcttcatcagagcgtgagcatg

SEQ ID NO: 481427 - DNA, 25 bp, Homo sapien
gcgtgagcatgttcctctttgaaac

SEQ ID NO: 481428 - DNA, 25 bp, Homo sapien
tgacacataaaacgcattctcttac

SEQ ID NO: 481429 - DNA, 25 bp, Homo sapien
acttctgtaaaaatgcaatgaaaag

SEQ ID NO: 481430 - DNA, 25 bp, Homo sapien
ctgtttgcaattccaatgtggtatt

SEQ ID NO: 481431 - DNA, 25 bp, Homo sapien
gcaattccaatgtggtattgaaatg

SEQ ID NO: 481432 - DNA, 25 bp, Homo sapien
gctttcttctatggactccatagaa

SEQ ID NO: 481433 - DNA, 25 bp, Homo sapien
tgtagatacttgctgatatgctgaa

SEQ ID NO: 481434 - DNA, 25 bp, Homo sapien
ttcttgaaacagtctgttggaaacc

SEQ ID NO: 481435 - DNA, 25 bp, Homo sapien
ggcatgtgtccccttcttgcattgt

SEQ ID NO: 481436 - DNA, 25 bp, Homo sapien
cccggcctacactgctttttcatag

SEQ ID NO: 481437 - DNA, 25 bp, Homo sapien
gctgataatcgtagaggcaaataca

SEQ ID NO: 481438 - DNA, 25 bp, Homo sapien
taaccatgcttgtactgttatagtt

SEQ ID NO: 481439 - DNA, 25 bp, Homo sapien
gtttctattgctgataatcgtagag

SEQ ID NO: 481440 - DNA, 25 bp, Homo sapien
tggctgggagccacacttacctgga

SEQ ID NO: 481441 - DNA, 25 bp, Homo sapien
gatgccctaaggcaaagcctgcttg

SEQ ID NO: 481442 - DNA, 25 bp, Homo sapien
gaattcactgctattaaggagccca

SEQ ID NO: 481443 - DNA, 25 bp, Homo sapien
tctactgagatactgacaccagggc

SEQ ID NO: 481444 - DNA, 25 bp, Homo sapien
caggaaaggggctttctctctccag

SEQ ID NO: 481445 - DNA, 25 bp, Homo sapien
ctaaattgtaaactgggctagaatg

SEQ ID NO: 481446 - DNA, 25 bp, Homo sapien
ctagaatgtaggcatcttgctggag

SEQ ID NO: 481447 - DNA, 25 bp, Homo sapien
ggctttctctatggtgcatatgtgc

SEQ ID NO: 481448 - DNA, 25 bp, Homo sapien
tgaattttattggaacagttagaat

SEQ ID NO: 481449 - DNA, 25 bp, Homo sapien
tctttgtacaaagcctgtagcactg

SEQ ID NO: 481450 - DNA, 25 bp, Homo sapien
gtcagccagaaaagcgatttgaatt

SEQ ID NO: 481451 - DNA, 25 bp, Homo sapien
aaactgagtaatagtcagccagaaa

SEQ ID NO: 481452 - DNA, 25 bp, Homo sapien
tgttggaatactgttgattacccca

SEQ ID NO: 481453 - DNA, 25 bp, Homo sapien
tgcaaggtccacgaaagcaaggtcc

SEQ ID NO: 481454 - DNA, 25 bp, Homo sapien
caaatcaagctaggttcaggtcaca

SEQ ID NO: 481455 - DNA, 25 bp, Homo sapien
cacatctgaggtcttgctggctatg

SEQ ID NO: 481456 - DNA, 25 bp, Homo sapien
gtatttccagcggtgtgcccactgc

SEQ ID NO: 481457 - DNA, 25 bp, Homo sapien
ctagaatgaaaatcccacgaggtca

SEQ ID NO: 481458 - DNA, 25 bp, Homo sapien
ccaaggagggctgtttctgctgatt

SEQ ID NO: 481459 - DNA, 25 bp, Homo sapien
ttgctaaagagtaaaccgaggtaca

SEQ ID NO: 481460 - DNA, 25 bp, Homo sapien
ggtacttatcatactgtacggcagt

SEQ ID NO: 481461 - DNA, 25 bp, Homo sapien
tgtacggcagttggctgatactcat

SEQ ID NO: 481462 - DNA, 25 bp, Homo sapien
tcctggtacttatcatactgtacgg

SEQ ID NO: 481463 - DNA, 25 bp, Homo sapien
tatcatactgtacggcagttggctg

SEQ ID NO: 481464 - DNA, 25 bp, Homo sapien
ggtctgatgggtcgtcttggctggg

SEQ ID NO: 481465 - DNA, 25 bp, Homo sapien
gagtggtctgatgggtcgtcttggc

SEQ ID NO: 481466 - DNA, 25 bp, Homo sapien
agagtggtctgatgggtcgtcttgg

SEQ ID NO: 481467 - DNA, 25 bp, Homo sapien
gtggtctgatgggtcgtcttggctg

SEQ ID NO: 481468 - DNA, 25 bp, Homo sapien
tatatctaatatactgaagaggtcc

SEQ ID NO: 481469 - DNA, 25 bp, Homo sapien
tactgaagaggtccgagaaagttca

SEQ ID NO: 481470 - DNA, 25 bp, Homo sapien
gaggtccgagaaagttcacaatgtg

SEQ ID NO: 481471 - DNA, 25 bp, Homo sapien
tcacaatgtgtagtatacactcagt

SEQ ID NO: 481472 - DNA, 25 bp, Homo sapien
tacttttccggcacaaacagaagaa

SEQ ID NO: 481473 - DNA, 25 bp, Homo sapien
caagggacaagcaatccttaatgcc

SEQ ID NO: 481474 - DNA, 25 bp, Homo sapien
cctgagaatgagctgtaatgcatca

SEQ ID NO: 481475 - DNA, 25 bp, Homo sapien
tgtattcctctagtacttttccggc

SEQ ID NO: 481476 - DNA, 25 bp, Homo sapien
caatataacggtatgtcggcttcca

SEQ ID NO: 481477 - DNA, 25 bp, Homo sapien
caaccaactaggatggcaggtcaaa

SEQ ID NO: 481478 - DNA, 25 bp, Homo sapien
caaagttggcctctacaagtatcac

SEQ ID NO: 481479 - DNA, 25 bp, Homo sapien
gagtctagggaaaatacgctccagg

SEQ ID NO: 481480 - DNA, 25 bp, Homo sapien
ctcagagctaaagttctatctaata

SEQ ID NO: 481481 - DNA, 25 bp, Homo sapien
cttaactgccaggaaactcagagct

SEQ ID NO: 481482 - DNA, 25 bp, Homo sapien
agagctaaagttctatctaataaag

SEQ ID NO: 481483 - DNA, 25 bp, Homo sapien
ggaaactcagagctaaagttctatc

SEQ ID NO: 481484 - DNA, 25 bp, Homo sapien
tcctttccagtccaagccctgcttt

SEQ ID NO: 481485 - DNA, 25 bp, Homo sapien
tgccagagagtgagcttcctttcca

SEQ ID NO: 481486 - DNA, 25 bp, Homo sapien
gccagagagtgagcttcctttccag

SEQ ID NO: 481487 - DNA, 25 bp, Homo sapien
tttccagtccaagccctgctttctt

SEQ ID NO: 481488 - DNA, 25 bp, Homo sapien
ccacgagcaaggccttccacatcct

SEQ ID NO: 481489 - DNA, 25 bp, Homo sapien
cactgtggtccaccctcagtagata

SEQ ID NO: 481490 - DNA, 25 bp, Homo sapien
tcttcactgtggtccaccctcagta

SEQ ID NO: 481491 - DNA, 25 bp, Homo sapien
ggtccaccctcagtagatacctgct

SEQ ID NO: 481492 - DNA, 25 bp, Homo sapien
caccctcagtagatacctgctaatt

SEQ ID NO: 481493 - DNA, 25 bp, Homo sapien
acgggtggggtcatcttcgctggca

SEQ ID NO: 481494 - DNA, 25 bp, Homo sapien
cacgggtggggtcatcttcgctggc

SEQ ID NO: 481495 - DNA, 25 bp, Homo sapien
tgacacgggtggggtcatcttcgct

SEQ ID NO: 481496 - DNA, 25 bp, Homo sapien
ccgtgacacgggtggggtcatcttc

SEQ ID NO: 481497 - DNA, 25 bp, Homo sapien
atagatgtgcattggcagagtctca

SEQ ID NO: 481498 - DNA, 25 bp, Homo sapien
tagatgtgcattggcagagtctcac

SEQ ID NO: 481499 - DNA, 25 bp, Homo sapien
agatagatgtgcattggcagagtct

SEQ ID NO: 481500 - DNA, 25 bp, Homo sapien
gatagatgtgcattggcagagtctc

SEQ ID NO: 481501 - DNA, 25 bp, Homo sapien
gcaggatggaagtcaaagaaaatgg

SEQ ID NO: 481502 - DNA, 25 bp, Homo sapien
tggccagcaattaatttggagttgc

SEQ ID NO: 481503 - DNA, 25 bp, Homo sapien
caggatggaagtcaaagaaaatggg

SEQ ID NO: 481504 - DNA, 25 bp, Homo sapien
tgaatgtggccagcaattaatttgg

SEQ ID NO: 481505 - DNA, 25 bp, Homo sapien
tttatgggatgaaacagaggcacag

SEQ ID NO: 481506 - DNA, 25 bp, Homo sapien
gcttttaagaaactcacgatggaac

SEQ ID NO: 481507 - DNA, 25 bp, Homo sapien
tgtgccgtcagcactacccagagct

SEQ ID NO: 481508 - DNA, 25 bp, Homo sapien
caagctcttagcagaggtaatgtta

SEQ ID NO: 481509 - DNA, 25 bp, Homo sapien
gggtgagccgattcttattagtcca

SEQ ID NO: 481510 - DNA, 25 bp, Homo sapien
gctgagtctaacatttggcctgaac

SEQ ID NO: 481511 - DNA, 25 bp, Homo sapien
gctctactctaaggcaagtgacaga

SEQ ID NO: 481512 - DNA, 25 bp, Homo sapien
acgtataatagtctgtgcctgtgcc

SEQ ID NO: 481513 - DNA, 25 bp, Homo sapien
atgacaggagtatcaaatctgatgt

SEQ ID NO: 481514 - DNA, 25 bp, Homo sapien
ttgccctcatgacaggagttcctcc

SEQ ID NO: 481515 - DNA, 25 bp, Homo sapien
gccctcatgacaggagttcctccca

SEQ ID NO: 481516 - DNA, 25 bp, Homo sapien
caaatctgatgtcatgatgtgacat

SEQ ID NO: 481517 - DNA, 25 bp, Homo sapien
ggaaacataaattgcatctgctggg

SEQ ID NO: 481518 - DNA, 25 bp, Homo sapien
tgcagttctctctcgaacaacggcc

SEQ ID NO: 481519 - DNA, 25 bp, Homo sapien
tcggagggtgaagatacttgcagtt

SEQ ID NO: 481520 - DNA, 25 bp, Homo sapien
taagtgtgtcggagggtgaagatac

SEQ ID NO: 481521 - DNA, 25 bp, Homo sapien
aactcatcactgaataaagatgtac

SEQ ID NO: 481522 - DNA, 25 bp, Homo sapien
aacgtggcatcatccataccaacac

SEQ ID NO: 481523 - DNA, 25 bp, Homo sapien
aacactgtaaccatccaactcatca

SEQ ID NO: 481524 - DNA, 25 bp, Homo sapien
ctaggtcaacgtggcatcatccata

SEQ ID NO: 481525 - DNA, 25 bp, Homo sapien
ggttcctggctactctgtacagaag

SEQ ID NO: 481526 - DNA, 25 bp, Homo sapien
atcttatttatcttggagccctctg

SEQ ID NO: 481527 - DNA, 25 bp, Homo sapien
gttcctggctactctgtacagaagc

SEQ ID NO: 481528 - DNA, 25 bp, Homo sapien
tggttcctggctactctgtacagaa

SEQ ID NO: 481529 - DNA, 25 bp, Homo sapien
tagccgtatttgtccctatcgcggg

SEQ ID NO: 481530 - DNA, 25 bp, Homo sapien
tgggcagaatttccgttgggaccaa

SEQ ID NO: 481531 - DNA, 25 bp, Homo sapien
gtaaggagcaaagctaatagccgta

SEQ ID NO: 481532 - DNA, 25 bp, Homo sapien
tccgggaacaataacaggcgtggtg

SEQ ID NO: 481533 - DNA, 25 bp, Homo sapien
taatatgccagaacacactagagca

SEQ ID NO: 481534 - DNA, 25 bp, Homo sapien
tggccttaacttcaaaccacagagt

SEQ ID NO: 481535 - DNA, 25 bp, Homo sapien
tggttgctgggctcctgatccacca

SEQ ID NO: 481536 - DNA, 25 bp, Homo sapien
tccagggtcttgcaaggattacacc

SEQ ID NO: 481537 - DNA, 25 bp, Homo sapien
aataattatgagtagaatcgtaagt

SEQ ID NO: 481538 - DNA, 25 bp, Homo sapien
tatgagtagaatcgtaagttattta

SEQ ID NO: 481539 - DNA, 25 bp, Homo sapien
tatgccctgcatatagataacataa

SEQ ID NO: 481540 - DNA, 25 bp, Homo sapien
tataattcttctctgctcataaata

SEQ ID NO: 481541 - DNA, 25 bp, Homo sapien
tgcaacgcccctttatgtaatccat

SEQ ID NO: 481542 - DNA, 25 bp, Homo sapien
tacggtgttgtcacttgtgtcgatc

SEQ ID NO: 481543 - DNA, 25 bp, Homo sapien
tgtgcaaagcggcagtcggtctctc

SEQ ID NO: 481544 - DNA, 25 bp, Homo sapien
agtttcctcgctggaactccctgca

SEQ ID NO: 481545 - DNA, 25 bp, Homo sapien
cgcagcttggttggcttggtgctgc

SEQ ID NO: 481546 - DNA, 25 bp, Homo sapien
atgactgtggccgcggccgcggctg

SEQ ID NO: 481547 - DNA, 25 bp, Homo sapien
catgactgtggccgcggccgcggct

SEQ ID NO: 481548 - DNA, 25 bp, Homo sapien
tgactgtggccgcggccgcggctgc

SEQ ID NO: 481549 - DNA, 25 bp, Homo sapien
caagtgcctgatgcatggtctcata

SEQ ID NO: 481550 - DNA, 25 bp, Homo sapien
cttcttgagggaggactggccactg

SEQ ID NO: 481551 - DNA, 25 bp, Homo sapien
taaaaactgccactgtcgccaggta

SEQ ID NO: 481552 - DNA, 25 bp, Homo sapien
caagctttgcgatgcattggaatca

SEQ ID NO: 481553 - DNA, 25 bp, Homo sapien
gaggagtcgctttatggagcagcaa

SEQ ID NO: 481554 - DNA, 25 bp, Homo sapien
cagggttttagaggactgtctccca

SEQ ID NO: 481555 - DNA, 25 bp, Homo sapien
taacattgcaggctacagagaaatc

SEQ ID NO: 481556 - DNA, 25 bp, Homo sapien
tgaccaaggatagccactgggaccc

SEQ ID NO: 481557 - DNA, 25 bp, Homo sapien
taatcgataaacgtcatgcctggtc

SEQ ID NO: 481558 - DNA, 25 bp, Homo sapien
aacagccttattgccagtgtgggaa

SEQ ID NO: 481559 - DNA, 25 bp, Homo sapien
gactttatccaacagcacctaggct

SEQ ID NO: 481560 - DNA, 25 bp, Homo sapien
tcgaaacgtatctagctgacggcag

SEQ ID NO: 481561 - DNA, 25 bp, Homo sapien
cagagaagagatttagaacggccaa

SEQ ID NO: 481562 - DNA, 25 bp, Homo sapien
tagaaaggactacaggcagagaaga

SEQ ID NO: 481563 - DNA, 25 bp, Homo sapien
gaaggtagttttgatcggagtcatc

SEQ ID NO: 481564 - DNA, 25 bp, Homo sapien
cacattgagaacatgaactggatcg

SEQ ID NO: 481565 - DNA, 25 bp, Homo sapien
catgggaacggcattgcattgtgga

SEQ ID NO: 481566 - DNA, 25 bp, Homo sapien
taacatacaggtaaacagcaagcag

SEQ ID NO: 481567 - DNA, 25 bp, Homo sapien
cttttaataacaggcagcgagcaca

SEQ ID NO: 481568 - DNA, 25 bp, Homo sapien
ccaatgggattcaagcgaattaaca

SEQ ID NO: 481569 - DNA, 25 bp, Homo sapien
gtcgcttcattgctttggcagtcga

SEQ ID NO: 481570 - DNA, 25 bp, Homo sapien
caggtctacagttgcttcgagaggt

SEQ ID NO: 481571 - DNA, 25 bp, Homo sapien
tcgagaggtcgcttcattgctttgg

SEQ ID NO: 481572 - DNA, 25 bp, Homo sapien
cagttgcttcgagaggtcgcttcat

SEQ ID NO: 481573 - DNA, 25 bp, Homo sapien
caactgtgcgctggtgagagcctgc

SEQ ID NO: 481574 - DNA, 25 bp, Homo sapien
ctgttggaatgaacgcggcgtgttg

SEQ ID NO: 481575 - DNA, 25 bp, Homo sapien
ttaaagaccgcgctggtaccattgc

SEQ ID NO: 481576 - DNA, 25 bp, Homo sapien
tgcttgtctctttggtaaaggatga

SEQ ID NO: 481577 - DNA, 25 bp, Homo sapien
gtttctcatgggttaaatctgtctc

SEQ ID NO: 481578 - DNA, 25 bp, Homo sapien
aagaaaccaaaagccctaactgctg

SEQ ID NO: 481579 - DNA, 25 bp, Homo sapien
tacatttagatagctaggacaacga

SEQ ID NO: 481580 - DNA, 25 bp, Homo sapien
ttacagggcttgtgcaaatacaaga

SEQ ID NO: 481581 - DNA, 25 bp, Homo sapien
tgtgtatatataggcgggcccaggt

SEQ ID NO: 481582 - DNA, 25 bp, Homo sapien
gaactcaatggatggtcttcccacc

SEQ ID NO: 481583 - DNA, 25 bp, Homo sapien
cactgggatgtcactaattaaggct

SEQ ID NO: 481584 - DNA, 25 bp, Homo sapien
tatctagtggccaagaggtctacaa

SEQ ID NO: 481585 - DNA, 25 bp, Homo sapien
tactggtagcgggtgtcatgcacaa

SEQ ID NO: 481586 - DNA, 25 bp, Homo sapien
gcgggtgtcatgcacaaaactgacc

SEQ ID NO: 481587 - DNA, 25 bp, Homo sapien
actggtagcgggtgtcatgcacaaa

SEQ ID NO: 481588 - DNA, 25 bp, Homo sapien
caatactggtagcgggtgtcatgca

SEQ ID NO: 481589 - DNA, 25 bp, Homo sapien
cattgatgaaattagcctgcctcgc

SEQ ID NO: 481590 - DNA, 25 bp, Homo sapien
tgaatatcagagcagcaagccatca

SEQ ID NO: 481591 - DNA, 25 bp, Homo sapien
taaagacagacgtttgtaccaaggc

SEQ ID NO: 481592 - DNA, 25 bp, Homo sapien
tgcctcgctgatagagtaagctctg

SEQ ID NO: 481593 - DNA, 25 bp, Homo sapien
gagttgttgctgcagagacagtggc

SEQ ID NO: 481594 - DNA, 25 bp, Homo sapien
ctgcagagacagtggcggacgtagc

SEQ ID NO: 481595 - DNA, 25 bp, Homo sapien
gacgtagcgctgtgcatcatgggta

SEQ ID NO: 481596 - DNA, 25 bp, Homo sapien
tgctgcgaaggggacacttgttgca

SEQ ID NO: 481597 - DNA, 25 bp, Homo sapien
gctcttaggccagtattggagcaga

SEQ ID NO: 481598 - DNA, 25 bp, Homo sapien
taaaccaacagagttaaatgctcct

SEQ ID NO: 481599 - DNA, 25 bp, Homo sapien
tcttcattccggatggtttggctct

SEQ ID NO: 481600 - DNA, 25 bp, Homo sapien
cctttgtgagttcagcggcacccat

SEQ ID NO: 481601 - DNA, 25 bp, Homo sapien
gagagaccatttagaatcatacctg

SEQ ID NO: 481602 - DNA, 25 bp, Homo sapien
tcagcctgaggatagagtggcttgt

SEQ ID NO: 481603 - DNA, 25 bp, Homo sapien
tatctaattacaaatgcctgtgaga

SEQ ID NO: 481604 - DNA, 25 bp, Homo sapien
tagcactagacctaagaagctgtca

SEQ ID NO: 481605 - DNA, 25 bp, Homo sapien
tagtagaggttaggaacaaagtcta

SEQ ID NO: 481606 - DNA, 25 bp, Homo sapien
tacctcttctaatgtacactctaag

SEQ ID NO: 481607 - DNA, 25 bp, Homo sapien
gattgactaatttacatgctaccta

SEQ ID NO: 481608 - DNA, 25 bp, Homo sapien
tctggtccttggtcaatggactcag

SEQ ID NO: 481609 - DNA, 25 bp, Homo sapien
tatcgttagcatttccccaacctgg

SEQ ID NO: 481610 - DNA, 25 bp, Homo sapien
aatgtcaccccagaggaatgccaga

SEQ ID NO: 481611 - DNA, 25 bp, Homo sapien
ggagctgtgaccaaacatgtgacgt

SEQ ID NO: 481612 - DNA, 25 bp, Homo sapien
tctagagtggtcagcagacccagtc

SEQ ID NO: 481613 - DNA, 25 bp, Homo sapien
tacaatgatcgccttaaagatgctg

SEQ ID NO: 481614 - DNA, 25 bp, Homo sapien
tctcaccagttagcttgacttgggc

SEQ ID NO: 481615 - DNA, 25 bp, Homo sapien
tcactttgtcgatgaagcagctttc

SEQ ID NO: 481616 - DNA, 25 bp, Homo sapien
gacctacaatgcctgatgtgcctgt

SEQ ID NO: 481617 - DNA, 25 bp, Homo sapien
attctgaactgcaagcattattttc

SEQ ID NO: 481618 - DNA, 25 bp, Homo sapien
cagggtatgcgtaagtcagagaaac

SEQ ID NO: 481619 - DNA, 25 bp, Homo sapien
ggaaaactcatagggtctgccaggg

SEQ ID NO: 481620 - DNA, 25 bp, Homo sapien
tgtgggacagatctagccggaagac

SEQ ID NO: 481621 - DNA, 25 bp, Homo sapien
taaaataccaggcttatatgtggcc

SEQ ID NO: 481622 - DNA, 25 bp, Homo sapien
aagaatgaaattcctaaccatctgg

SEQ ID NO: 481623 - DNA, 25 bp, Homo sapien
agaatgaaattcctaaccatctgga

SEQ ID NO: 481624 - DNA, 25 bp, Homo sapien
caattcatatttgctacggtgatca

SEQ ID NO: 481625 - DNA, 25 bp, Homo sapien
caaaggagaaggaacttggcccgtg

SEQ ID NO: 481626 - DNA, 25 bp, Homo sapien
gagagtcagctaatacttctgcaca

SEQ ID NO: 481627 - DNA, 25 bp, Homo sapien
ggcccgtgtggtccaatccattaaa

SEQ ID NO: 481628 - DNA, 25 bp, Homo sapien
caatgtttagttattctcaatgcag

SEQ ID NO: 481629 - DNA, 25 bp, Homo sapien
tagtatgtacagtaacaatgtttag

SEQ ID NO: 481630 - DNA, 25 bp, Homo sapien
agttattctcaatgcagattcttgg

SEQ ID NO: 481631 - DNA, 25 bp, Homo sapien
ggaaacaggatagtatgtacagtaa

SEQ ID NO: 481632 - DNA, 25 bp, Homo sapien
tagactgttggcatgggcctctcaa

SEQ ID NO: 481633 - DNA, 25 bp, Homo sapien
gagctagaatcgaacctgcccttgg

SEQ ID NO: 481634 - DNA, 25 bp, Homo sapien
gttttcagaacaggcgatgatccca

SEQ ID NO: 481635 - DNA, 25 bp, Homo sapien
taaactggctggactttctgcatca

SEQ ID NO: 481636 - DNA, 25 bp, Homo sapien
gagtgaactgaatattacaaccaaa

SEQ ID NO: 481637 - DNA, 25 bp, Homo sapien
gagggaattctttaagtgttacaga

SEQ ID NO: 481638 - DNA, 25 bp, Homo sapien
cattggttgtacattgggtgagtga

SEQ ID NO: 481639 - DNA, 25 bp, Homo sapien
tagactcctgtttacactgtaaggt

SEQ ID NO: 481640 - DNA, 25 bp, Homo sapien
aggactcaaagtgtgactcagtgtc

SEQ ID NO: 481641 - DNA, 25 bp, Homo sapien
ctcaaagtgtgactcagtgtcatca

SEQ ID NO: 481642 - DNA, 25 bp, Homo sapien
tcaaagtgtgactcagtgtcatcat

SEQ ID NO: 481643 - DNA, 25 bp, Homo sapien
gactcaaagtgtgactcagtgtcat

SEQ ID NO: 481644 - DNA, 25 bp, Homo sapien
cttgatctgagttttagtaagtttt

SEQ ID NO: 481645 - DNA, 25 bp, Homo sapien
tgtggtttagtaagacagctggaat

SEQ ID NO: 481646 - DNA, 25 bp, Homo sapien
ttagtaagacagctggaattctact

SEQ ID NO: 481647 - DNA, 25 bp, Homo sapien
tgtttagtgtggtttagtaagacag

SEQ ID NO: 481648 - DNA, 25 bp, Homo sapien
ttctcttgggatcagtgatgacacc

SEQ ID NO: 481649 - DNA, 25 bp, Homo sapien
gatgtgattggtgtagaggcattca

SEQ ID NO: 481650 - DNA, 25 bp, Homo sapien
tcactgacctgtgtagggttttcct

SEQ ID NO: 481651 - DNA, 25 bp, Homo sapien
cacggtagcttcagtcaagatgtga

SEQ ID NO: 481652 - DNA, 25 bp, Homo sapien
agtcaaagcgctgtctctgtgcaat

SEQ ID NO: 481653 - DNA, 25 bp, Homo sapien
tctgtgcaatggcattgatggtgaa

SEQ ID NO: 481654 - DNA, 25 bp, Homo sapien
gtctctgtgcaatggcattgatggt

SEQ ID NO: 481655 - DNA, 25 bp, Homo sapien
ttagtcaaagcgctgtctctgtgca

SEQ ID NO: 481656 - DNA, 25 bp, Homo sapien
tgaggctcctaatacagttgagaat

SEQ ID NO: 481657 - DNA, 25 bp, Homo sapien
tataaggagagcagacgatggtttc

SEQ ID NO: 481658 - DNA, 25 bp, Homo sapien
ggtttcttgacctgtgaggctccta

SEQ ID NO: 481659 - DNA, 25 bp, Homo sapien
aaacgctgctggcaagtataaggag

SEQ ID NO: 481660 - DNA, 25 bp, Homo sapien
ggtcatcatgcagaggggattttgg

SEQ ID NO: 481661 - DNA, 25 bp, Homo sapien
ccgttcctctttcccacaaggtcat

SEQ ID NO: 481662 - DNA, 25 bp, Homo sapien
ctctttcccacaaggtcatcatgca

SEQ ID NO: 481663 - DNA, 25 bp, Homo sapien
tgagttaaaagccaggtattctttc

SEQ ID NO: 481664 - DNA, 25 bp, Homo sapien
catttcctgcgaataacacgtttct

SEQ ID NO: 481665 - DNA, 25 bp, Homo sapien
ctgttcgttactgtcgcacatttcc

SEQ ID NO: 481666 - DNA, 25 bp, Homo sapien
tgtagttctgttgttagagcctggc

SEQ ID NO: 481667 - DNA, 25 bp, Homo sapien
cgaataacacgtttctgtagttctg

SEQ ID NO: 481668 - DNA, 25 bp, Homo sapien
caaccaatcgtaggtgagctggcga

SEQ ID NO: 481669 - DNA, 25 bp, Homo sapien
ttttcacgtcgcctccgtggcattc

SEQ ID NO: 481670 - DNA, 25 bp, Homo sapien
gtgacggaagcttcggccaagccaa

SEQ ID NO: 481671 - DNA, 25 bp, Homo sapien
caagatgcgttgcaagccagaatga

SEQ ID NO: 481672 - DNA, 25 bp, Homo sapien
tccttcaaccaatcgagaaaaacgc

SEQ ID NO: 481673 - DNA, 25 bp, Homo sapien
ttactccttcaaccaatcgagaaaa

SEQ ID NO: 481674 - DNA, 25 bp, Homo sapien
gctagtcgtaggatccgcaagccca

SEQ ID NO: 481675 - DNA, 25 bp, Homo sapien
tcgagaaaaacgctagtcgtaggat

SEQ ID NO: 481676 - DNA, 25 bp, Homo sapien
tgtcagccacgggtgagttgaaaac

SEQ ID NO: 481677 - DNA, 25 bp, Homo sapien
cgcccctttcggtgccgaactgaag

SEQ ID NO: 481678 - DNA, 25 bp, Homo sapien
ccgaactgaagtcgagctcttccca

SEQ ID NO: 481679 - DNA, 25 bp, Homo sapien
gaaaacctggagagcggaatcccga

SEQ ID NO: 481680 - DNA, 25 bp, Homo sapien
cccgtaggcaccgggtgggactgag

SEQ ID NO: 481681 - DNA, 25 bp, Homo sapien
cgatgcggccccgtaggcaccgggt

SEQ ID NO: 481682 - DNA, 25 bp, Homo sapien
gcagagagagagaccgggagccgct

SEQ ID NO: 481683 - DNA, 25 bp, Homo sapien
cagagagagagaccgggagccgctg

SEQ ID NO: 481684 - DNA, 25 bp, Homo sapien
tcagggcggatttgcctaccccgcc

SEQ ID NO: 481685 - DNA, 25 bp, Homo sapien
cacggtcagggcggatttgcctacc

SEQ ID NO: 481686 - DNA, 25 bp, Homo sapien
gtcagggcggatttgcctaccccgc

SEQ ID NO: 481687 - DNA, 25 bp, Homo sapien
tcgatctccttgcggtagaagtcct

SEQ ID NO: 481688 - DNA, 25 bp, Homo sapien
cgatctccttgcggtagaagtcctc

SEQ ID NO: 481689 - DNA, 25 bp, Homo sapien
ctcgatctccttgcggtagaagtcc

SEQ ID NO: 481690 - DNA, 25 bp, Homo sapien
tgcagccgccaagcccccgtgtgcc

SEQ ID NO: 481691 - DNA, 25 bp, Homo sapien
gcagccgccaagcccccgtgtgccc

SEQ ID NO: 481692 - DNA, 25 bp, Homo sapien
ttactgtcaaacattgccaaggcag

SEQ ID NO: 481693 - DNA, 25 bp, Homo sapien
tgttctgtgggctaacacgatgcca

SEQ ID NO: 481694 - DNA, 25 bp, Homo sapien
aaatgtctcgactatacctgcacag

SEQ ID NO: 481695 - DNA, 25 bp, Homo sapien
caagcaatgctaacaacgtccaaga

SEQ ID NO: 481696 - DNA, 25 bp, Homo sapien
aacatgcacgattttagttcagcga

SEQ ID NO: 481697 - DNA, 25 bp, Homo sapien
tatcagcaggcattaactaacaaga

SEQ ID NO: 481698 - DNA, 25 bp, Homo sapien
tacaatgtgactgtgtctacggtgc

SEQ ID NO: 481699 - DNA, 25 bp, Homo sapien
gaatttttgatcatcccctgggtac

SEQ ID NO: 481700 - DNA, 25 bp, Homo sapien
tacaaagctatcaaatttacaaatc

SEQ ID NO: 481701 - DNA, 25 bp, Homo sapien
agtacaaagctatcaaatttacaaa

SEQ ID NO: 481702 - DNA, 25 bp, Homo sapien
caaatttacaaatcttagcagcaga

SEQ ID NO: 481703 - DNA, 25 bp, Homo sapien
atcaaatttacaaatcttagcagca

SEQ ID NO: 481704 - DNA, 25 bp, Homo sapien
tgtggctcacgttatatctctattg

SEQ ID NO: 481705 - DNA, 25 bp, Homo sapien
taaagctgaatactgaatttgacag

SEQ ID NO: 481706 - DNA, 25 bp, Homo sapien
gtgctgacctagacctaaagctgaa

SEQ ID NO: 481707 - DNA, 25 bp, Homo sapien
aaaaatcagctactaggaatgttaa

SEQ ID NO: 481708 - DNA, 25 bp, Homo sapien
agacctctgttgtccaatatggcag

SEQ ID NO: 481709 - DNA, 25 bp, Homo sapien
tagagaaataagcaagcatttcccc

SEQ ID NO: 481710 - DNA, 25 bp, Homo sapien
tctggaaggtgcatgctaatctcta

SEQ ID NO: 481711 - DNA, 25 bp, Homo sapien
tttaattctaacaaggactctggaa

SEQ ID NO: 481712 - DNA, 25 bp, Homo sapien
atgtgtaacaattggtaatatgctt

SEQ ID NO: 481713 - DNA, 25 bp, Homo sapien
catcttttgatgtatactctcgttt

SEQ ID NO: 481714 - DNA, 25 bp, Homo sapien
agacatcttttgatgtatactctcg

SEQ ID NO: 481715 - DNA, 25 bp, Homo sapien
tctcgtttcggctctccagcaccaa

SEQ ID NO: 481716 - DNA, 25 bp, Homo sapien
ttgatgtatactctcgtttcggctc

SEQ ID NO: 481717 - DNA, 25 bp, Homo sapien
ttatgcaagataagtaagtcccaga

SEQ ID NO: 481718 - DNA, 25 bp, Homo sapien
cacaagtgtatgcttatctctaaac

SEQ ID NO: 481719 - DNA, 25 bp, Homo sapien
cactgagctcttcgagtcattttca

SEQ ID NO: 481720 - DNA, 25 bp, Homo sapien
tctgggccacataaagtgattcact

SEQ ID NO: 481721 - DNA, 25 bp, Homo sapien
gaaagtctgctcgtattcaaactct

SEQ ID NO: 481722 - DNA, 25 bp, Homo sapien
agtctgctcgtattcaaactcttat

SEQ ID NO: 481723 - DNA, 25 bp, Homo sapien
cttgtttgaaagtctgctcgtattc

SEQ ID NO: 481724 - DNA, 25 bp, Homo sapien
tgtttgaaagtctgctcgtattcaa

SEQ ID NO: 481725 - DNA, 25 bp, Homo sapien
gattcggtcatgatggctccaccct

SEQ ID NO: 481726 - DNA, 25 bp, Homo sapien
gggactttaggaagtgattcggtca

SEQ ID NO: 481727 - DNA, 25 bp, Homo sapien
catttgtgacacgaattttgctggt

SEQ ID NO: 481728 - DNA, 25 bp, Homo sapien
gggagccattttgccctttacacca

SEQ ID NO: 481729 - DNA, 25 bp, Homo sapien
cactgtggcctataaagaaaagctt

SEQ ID NO: 481730 - DNA, 25 bp, Homo sapien
gagacatacagtcacctttggagaa

SEQ ID NO: 481731 - DNA, 25 bp, Homo sapien
gaacaacaagcatagacctgaactg

SEQ ID NO: 481732 - DNA, 25 bp, Homo sapien
gcttcaggactcattacttagtagg

SEQ ID NO: 481733 - DNA, 25 bp, Homo sapien
ttaaagctacctctgaatgaagaag

SEQ ID NO: 481734 - DNA, 25 bp, Homo sapien
aaaacaggcctgactattgtacttg

SEQ ID NO: 481735 - DNA, 25 bp, Homo sapien
gaggtattcggacatacaacatcca

SEQ ID NO: 481736 - DNA, 25 bp, Homo sapien
aggaaaactgaagctcgggcacata

SEQ ID NO: 481737 - DNA, 25 bp, Homo sapien
cttaagaaagatgggtgagacgctg

SEQ ID NO: 481738 - DNA, 25 bp, Homo sapien
gactgcactgcatgaggaagctggt

SEQ ID NO: 481739 - DNA, 25 bp, Homo sapien
gaaagaagccaagacctgtgttgac

SEQ ID NO: 481740 - DNA, 25 bp, Homo sapien
gaaaccaaacagactaggactcctg

SEQ ID NO: 481741 - DNA, 25 bp, Homo sapien
cttacgatttcgggccttagatcat

SEQ ID NO: 481742 - DNA, 25 bp, Homo sapien
tttcgggccttagatcatgctgaca

SEQ ID NO: 481743 - DNA, 25 bp, Homo sapien
gggccttagatcatgctgacagctc

SEQ ID NO: 481744 - DNA, 25 bp, Homo sapien
acgatttcgggccttagatcatgct

SEQ ID NO: 481745 - DNA, 25 bp, Homo sapien
gcttgatacttagatctgagggcat

SEQ ID NO: 481746 - DNA, 25 bp, Homo sapien
gggctattccaacataaatggtatc

SEQ ID NO: 481747 - DNA, 25 bp, Homo sapien
aaaatgatttgtaccacttggcttg

SEQ ID NO: 481748 - DNA, 25 bp, Homo sapien
gcacaaagttaaacaggtcacgtgt

SEQ ID NO: 481749 - DNA, 25 bp, Homo sapien
ggctgagcagcatagttcatctgcc

SEQ ID NO: 481750 - DNA, 25 bp, Homo sapien
acagcatgggtcatctttgtcaggc

SEQ ID NO: 481751 - DNA, 25 bp, Homo sapien
tctgccttcgctggacgatacttct

SEQ ID NO: 481752 - DNA, 25 bp, Homo sapien
cactttgttcccaaccaagatgact

SEQ ID NO: 481753 - DNA, 25 bp, Homo sapien
ttttctatcacctacgacattgggc

SEQ ID NO: 481754 - DNA, 25 bp, Homo sapien
acgacattgggcaaatcccatccag

SEQ ID NO: 481755 - DNA, 25 bp, Homo sapien
agtggagtaggcgagttttctatca

SEQ ID NO: 481756 - DNA, 25 bp, Homo sapien
ggagtaggcgagttttctatcacct

SEQ ID NO: 481757 - DNA, 25 bp, Homo sapien
gaatctccctgtaatgctgttggca

SEQ ID NO: 481758 - DNA, 25 bp, Homo sapien
ccctgtagatcgatggactatgcct

SEQ ID NO: 481759 - DNA, 25 bp, Homo sapien
tgttagctgagcaaagaatctccct

SEQ ID NO: 481760 - DNA, 25 bp, Homo sapien
caaacgggaacatgtggatgcaaca

SEQ ID NO: 481761 - DNA, 25 bp, Homo sapien
gggtcacactacaaccatagccctt

SEQ ID NO: 481762 - DNA, 25 bp, Homo sapien
tgaaagcaggttagccacgggtcac

SEQ ID NO: 481763 - DNA, 25 bp, Homo sapien
catagcccttaaaggcgagaaggaa

SEQ ID NO: 481764 - DNA, 25 bp, Homo sapien
ccagctttatttgacgcttcagtaa

SEQ ID NO: 481765 - DNA, 25 bp, Homo sapien
tggtcactaaatatgcagggctgcg

SEQ ID NO: 481766 - DNA, 25 bp, Homo sapien
ggctgcgtggaaacactcatcaggc

SEQ ID NO: 481767 - DNA, 25 bp, Homo sapien
taactaagttagctgaagacccctc

SEQ ID NO: 481768 - DNA, 25 bp, Homo sapien
cagttacacacgtaagaccagaggt

SEQ ID NO: 481769 - DNA, 25 bp, Homo sapien
ttagtgatattgctaattaatgtta

SEQ ID NO: 481770 - DNA, 25 bp, Homo sapien
tataaaatcatttgtagagataagt

SEQ ID NO: 481771 - DNA, 25 bp, Homo sapien
tgatgaactctcaaatcagctaaaa

SEQ ID NO: 481772 - DNA, 25 bp, Homo sapien
ttgtatgaagagtactaaattcatt

SEQ ID NO: 481773 - DNA, 25 bp, Homo sapien
gaatgctgccagaggatttcaacag

SEQ ID NO: 481774 - DNA, 25 bp, Homo sapien
gcatctgtcaactttcatagggccc

SEQ ID NO: 481775 - DNA, 25 bp, Homo sapien
tcctagaggtcagttgggttccaaa

SEQ ID NO: 481776 - DNA, 25 bp, Homo sapien
tagggccccatatagaacaagcagg

SEQ ID NO: 481777 - DNA, 25 bp, Homo sapien
caggtgaagataccacataggtgac

SEQ ID NO: 481778 - DNA, 25 bp, Homo sapien
tctccatgattcgatccaggtgaag

SEQ ID NO: 481779 - DNA, 25 bp, Homo sapien
aaggctacctctttcccttggcaag

SEQ ID NO: 481780 - DNA, 25 bp, Homo sapien
gaatttgatggagctatgttgcaca

SEQ ID NO: 481781 - DNA, 25 bp, Homo sapien
tgtatatttggaaagaagtcggtca

SEQ ID NO: 481782 - DNA, 25 bp, Homo sapien
aattacacagcgaatactattggta

SEQ ID NO: 481783 - DNA, 25 bp, Homo sapien
gcccaaggctatggccatgggcagc

SEQ ID NO: 481784 - DNA, 25 bp, Homo sapien
gatctaatggcaaacagtgacaacc

SEQ ID NO: 481785 - DNA, 25 bp, Homo sapien
ctctcccttggtccttcccaagaag

SEQ ID NO: 481786 - DNA, 25 bp, Homo sapien
gactctcccttggtccttcccaaga

SEQ ID NO: 481787 - DNA, 25 bp, Homo sapien
tgaaaaaattataaggtggcggtca

SEQ ID NO: 481788 - DNA, 25 bp, Homo sapien
catattgtacttggtagagctggac

SEQ ID NO: 481789 - DNA, 25 bp, Homo sapien
cacacggccagtgtttttggtcatc

SEQ ID NO: 481790 - DNA, 25 bp, Homo sapien
tatattgcgccctctgttcccggga

SEQ ID NO: 481791 - DNA, 25 bp, Homo sapien
tgtcactcctgtgatcacacggcca

SEQ ID NO: 481792 - DNA, 25 bp, Homo sapien
tagacccgagtaatatcagcaattc

SEQ ID NO: 481793 - DNA, 25 bp, Homo sapien
tctgtgtatagacccgagtaatatc

SEQ ID NO: 481794 - DNA, 25 bp, Homo sapien
cagcattctgtgtatagacccgagt

SEQ ID NO: 481795 - DNA, 25 bp, Homo sapien
tgtatagacccgagtaatatcagca

SEQ ID NO: 481796 - DNA, 25 bp, Homo sapien
cttgtacacccgagggcctagttct

SEQ ID NO: 481797 - DNA, 25 bp, Homo sapien
aattgcggttgccactgtgttcaaa

SEQ ID NO: 481798 - DNA, 25 bp, Homo sapien
ggaatttcaactgtaactactcgaa

SEQ ID NO: 481799 - DNA, 25 bp, Homo sapien
tcggcttgtttaactcctgctgcag

SEQ ID NO: 481800 - DNA, 25 bp, Homo sapien
gaagccgactgagtcattcaatgac

SEQ ID NO: 481801 - DNA, 25 bp, Homo sapien
cattcaatgacatctgcttcagcat

SEQ ID NO: 481802 - DNA, 25 bp, Homo sapien
ggtagaccacaggatgtttgaagaa

SEQ ID NO: 481803 - DNA, 25 bp, Homo sapien
ttttgcatgcaataaggtagaccac

SEQ ID NO: 481804 - DNA, 25 bp, Homo sapien
ggttaagatgatttctgtcgtgggc

SEQ ID NO: 481805 - DNA, 25 bp, Homo sapien
gagttcctgtaacttgcacagcatg

SEQ ID NO: 481806 - DNA, 25 bp, Homo sapien
ggtgtaagtgtcaaggcagctctca

SEQ ID NO: 481807 - DNA, 25 bp, Homo sapien
gactctcagttgccattgaacccag

SEQ ID NO: 481808 - DNA, 25 bp, Homo sapien
aggtttcctggtatgtgtttctcca

SEQ ID NO: 481809 - DNA, 25 bp, Homo sapien
taaagcactcccaagttgacaagga

SEQ ID NO: 481810 - DNA, 25 bp, Homo sapien
acaagtgtgatgttaaagcactccc

SEQ ID NO: 481811 - DNA, 25 bp, Homo sapien
agaggtttcctggtatgtgtttctc

SEQ ID NO: 481812 - DNA, 25 bp, Homo sapien
tccatgagtcccatgacatcttgtc

SEQ ID NO: 481813 - DNA, 25 bp, Homo sapien
catgagtcccatgacatcttgtctc

SEQ ID NO: 481814 - DNA, 25 bp, Homo sapien
ttattctggtatagcttggatctct

SEQ ID NO: 481815 - DNA, 25 bp, Homo sapien
tcttttcctgttgcatcattcaagt

SEQ ID NO: 481816 - DNA, 25 bp, Homo sapien
tttaataagtatccacaccattcct

SEQ ID NO: 481817 - DNA, 25 bp, Homo sapien
ccggtcagcaggttataagaacaca

SEQ ID NO: 481818 - DNA, 25 bp, Homo sapien
tgcaagaccagcttctaagtaagtg

SEQ ID NO: 481819 - DNA, 25 bp, Homo sapien
tgaggagaactttgataaaccggtc

SEQ ID NO: 481820 - DNA, 25 bp, Homo sapien
tgtcgatgaccaagaaccaagattc

SEQ ID NO: 481821 - DNA, 25 bp, Homo sapien
taagcaccatattgacataggcagg

SEQ ID NO: 481822 - DNA, 25 bp, Homo sapien
tcctttgaatcagtgcaggcaactg

SEQ ID NO: 481823 - DNA, 25 bp, Homo sapien
tcctaggtccggttgtttgctgtgg

SEQ ID NO: 481824 - DNA, 25 bp, Homo sapien
tcttgaaaatagagggggcttcacg

SEQ ID NO: 481825 - DNA, 25 bp, Homo sapien
ccaaatgccttagcttatgaactga

SEQ ID NO: 481826 - DNA, 25 bp, Homo sapien
gaactgattcactagagagcccttt

SEQ ID NO: 481827 - DNA, 25 bp, Homo sapien
cttcacgtcatagcccaaatgcctt

SEQ ID NO: 481828 - DNA, 25 bp, Homo sapien
taggggatgatctagcatttccagc

SEQ ID NO: 481829 - DNA, 25 bp, Homo sapien
gcttaggggatgatctagcatttcc

SEQ ID NO: 481830 - DNA, 25 bp, Homo sapien
tgcatctgcctgcttaggggatgat

SEQ ID NO: 481831 - DNA, 25 bp, Homo sapien
tctgcctgcttaggggatgatctag

SEQ ID NO: 481832 - DNA, 25 bp, Homo sapien
ctacagagtctttgggtatgcactg

SEQ ID NO: 481833 - DNA, 25 bp, Homo sapien
tctttgggtatgcactgccatctgg

SEQ ID NO: 481834 - DNA, 25 bp, Homo sapien
cagagtctttgggtatgcactgcca

SEQ ID NO: 481835 - DNA, 25 bp, Homo sapien
tgggtatgcactgccatctggatct

SEQ ID NO: 481836 - DNA, 25 bp, Homo sapien
tgtgcacgatccagaggagacatcc

SEQ ID NO: 481837 - DNA, 25 bp, Homo sapien
ccagtgcacagccatatccatatgc

SEQ ID NO: 481838 - DNA, 25 bp, Homo sapien
tggcgcatggattggaacaaaacca

SEQ ID NO: 481839 - DNA, 25 bp, Homo sapien
tccaggtgttggatacatgggcccg

SEQ ID NO: 481840 - DNA, 25 bp, Homo sapien
gagtgtatcgtttacctacactgag

SEQ ID NO: 481841 - DNA, 25 bp, Homo sapien
gagttgcaatagctgcctgagtgta

SEQ ID NO: 481842 - DNA, 25 bp, Homo sapien
atgctgactgagtggggaatattgt

SEQ ID NO: 481843 - DNA, 25 bp, Homo sapien
tggaagagttgcaatagctgcctga

SEQ ID NO: 481844 - DNA, 25 bp, Homo sapien
caggacgcagcctggatctatttca

SEQ ID NO: 481845 - DNA, 25 bp, Homo sapien
tttgctgtacccatgcagcccttgt

SEQ ID NO: 481846 - DNA, 25 bp, Homo sapien
cacggtaagcacaggaggaacccat

SEQ ID NO: 481847 - DNA, 25 bp, Homo sapien
tatttcagcggtctccgtgggaaca

SEQ ID NO: 481848 - DNA, 25 bp, Homo sapien
ttttagaaagagtagtaggtatctc

SEQ ID NO: 481849 - DNA, 25 bp, Homo sapien
taggtatctcagatgaaaatgtgtg

SEQ ID NO: 481850 - DNA, 25 bp, Homo sapien
tcaaacatgctctaaaggtcatggg

SEQ ID NO: 481851 - DNA, 25 bp, Homo sapien
gctgagactccgcatttagttttag

SEQ ID NO: 481852 - DNA, 25 bp, Homo sapien
tggaggccgaaagtctgaaaccagg

SEQ ID NO: 481853 - DNA, 25 bp, Homo sapien
tccttttgtcatcaccgctggctgg

SEQ ID NO: 481854 - DNA, 25 bp, Homo sapien
ccttttgtcatcaccgctggctggg

SEQ ID NO: 481855 - DNA, 25 bp, Homo sapien
atccttttgtcatcaccgctggctg

SEQ ID NO: 481856 - DNA, 25 bp, Homo sapien
ttttgtcatcaccgctggctggggc

SEQ ID NO: 481857 - DNA, 25 bp, Homo sapien
cagttctgcctttatagtgaggagc

SEQ ID NO: 481858 - DNA, 25 bp, Homo sapien
tccttgaatgcacttggcggtgcct

SEQ ID NO: 481859 - DNA, 25 bp, Homo sapien
agacctgaactgtccatgcccttgt

SEQ ID NO: 481860 - DNA, 25 bp, Homo sapien
gcatgcagcgctctttgtcacagca

SEQ ID NO: 481861 - DNA, 25 bp, Homo sapien
aatgtttctcggttgtcaagaattt

SEQ ID NO: 481862 - DNA, 25 bp, Homo sapien
tgtttctcggttgtcaagaatttat

SEQ ID NO: 481863 - DNA, 25 bp, Homo sapien
atgtttctcggttgtcaagaattta

SEQ ID NO: 481864 - DNA, 25 bp, Homo sapien
gcagatctgactccaccgagaggat

SEQ ID NO: 481865 - DNA, 25 bp, Homo sapien
tgggatcagatcacaaagtgaacat

SEQ ID NO: 481866 - DNA, 25 bp, Homo sapien
gactccaccgagaggatctttgctg

SEQ ID NO: 481867 - DNA, 25 bp, Homo sapien
tagtccttggccatttgttttaatc

SEQ ID NO: 481868 - DNA, 25 bp, Homo sapien
cagcgctgggcgtctcctggattct

SEQ ID NO: 481869 - DNA, 25 bp, Homo sapien
cacacagaccctgattggcatgcag

SEQ ID NO: 481870 - DNA, 25 bp, Homo sapien
gcagaaagccagaagtagcagcgct

SEQ ID NO: 481871 - DNA, 25 bp, Homo sapien
tggcatgcagaactctagctgtggt

SEQ ID NO: 481872 - DNA, 25 bp, Homo sapien
gaatgaggaagctgccactgaccct

SEQ ID NO: 481873 - DNA, 25 bp, Homo sapien
ctcttgacacccttagagttagtgt

SEQ ID NO: 481874 - DNA, 25 bp, Homo sapien
tgcctcttgacacccttagagttag

SEQ ID NO: 481875 - DNA, 25 bp, Homo sapien
ctacctctgttccaaccaggaaggg

SEQ ID NO: 481876 - DNA, 25 bp, Homo sapien
tgttggccctcagttcaccttcctg

SEQ ID NO: 481877 - DNA, 25 bp, Homo sapien
ttacttctgagctgatacgtttgac

SEQ ID NO: 481878 - DNA, 25 bp, Homo sapien
tctttgctcagttctcttagggatg

SEQ ID NO: 481879 - DNA, 25 bp, Homo sapien
gtcaaatcctctccttggtatcggt

SEQ ID NO: 481880 - DNA, 25 bp, Homo sapien
ctactggagtagtgatatgaactaa

SEQ ID NO: 481881 - DNA, 25 bp, Homo sapien
tggctactggagtagtgatatgaac

SEQ ID NO: 481882 - DNA, 25 bp, Homo sapien
tgttttggctactggagtagtgata

SEQ ID NO: 481883 - DNA, 25 bp, Homo sapien
ctggagtagtgatatgaactaatgt

SEQ ID NO: 481884 - DNA, 25 bp, Homo sapien
aatggtttgtcgctgctactggaag

SEQ ID NO: 481885 - DNA, 25 bp, Homo sapien
gagaggaaatggtttgtcgctgcta

SEQ ID NO: 481886 - DNA, 25 bp, Homo sapien
tactggaagggggcttcctgccttc

SEQ ID NO: 481887 - DNA, 25 bp, Homo sapien
gaaatggtttgtcgctgctactgga

SEQ ID NO: 481888 - DNA, 25 bp, Homo sapien
ttctctctccttcaagcttaatctt

SEQ ID NO: 481889 - DNA, 25 bp, Homo sapien
ttttctcagaagggataagaattta

SEQ ID NO: 481890 - DNA, 25 bp, Homo sapien
gcttttctcagaagggataagaatt

SEQ ID NO: 481891 - DNA, 25 bp, Homo sapien
tgcttttctcagaagggataagaat

SEQ ID NO: 481892 - DNA, 25 bp, Homo sapien
gctctgcctactgcattcatggcat

SEQ ID NO: 481893 - DNA, 25 bp, Homo sapien
gcctactgcattcatggcattctcc

SEQ ID NO: 481894 - DNA, 25 bp, Homo sapien
tctgcctactgcattcatggcattc

SEQ ID NO: 481895 - DNA, 25 bp, Homo sapien
aagctctgcctactgcattcatggc

SEQ ID NO: 481896 - DNA, 25 bp, Homo sapien
tccatgtgttccgatgatgccacag

SEQ ID NO: 481897 - DNA, 25 bp, Homo sapien
cttttgttcagggtaactcctgcca

SEQ ID NO: 481898 - DNA, 25 bp, Homo sapien
gggcaccaacgtccgcagaagatgt

SEQ ID NO: 481899 - DNA, 25 bp, Homo sapien
gcttggcagatgaaaccttttgttc

SEQ ID NO: 481900 - DNA, 25 bp, Homo sapien
gagctaagaaatctacattctctga

SEQ ID NO: 481901 - DNA, 25 bp, Homo sapien
tccattagtaaacactctgtgggaa

SEQ ID NO: 481902 - DNA, 25 bp, Homo sapien
ttccagatgtgcaattagcttgacc

SEQ ID NO: 481903 - DNA, 25 bp, Homo sapien
ctgtggctactaaatccattagtaa

SEQ ID NO: 481904 - DNA, 25 bp, Homo sapien
acccaggggccctctttgccagtca

SEQ ID NO: 481905 - DNA, 25 bp, Homo sapien
ggggccctctttgccagtcaactgc

SEQ ID NO: 481906 - DNA, 25 bp, Homo sapien
caggggccctctttgccagtcaact

SEQ ID NO: 481907 - DNA, 25 bp, Homo sapien
cccaggggccctctttgccagtcaa

SEQ ID NO: 481908 - DNA, 25 bp, Homo sapien
gctgctgacccatcagtattgtttt

SEQ ID NO: 481909 - DNA, 25 bp, Homo sapien
ctgacccatcagtattgttttcctc

SEQ ID NO: 481910 - DNA, 25 bp, Homo sapien
ccgctgctgacccatcagtattgtt

SEQ ID NO: 481911 - DNA, 25 bp, Homo sapien
tcaccgctgctgacccatcagtatt

SEQ ID NO: 481912 - DNA, 25 bp, Homo sapien
gggtcctgcgcacagtgctcttctg

SEQ ID NO: 481913 - DNA, 25 bp, Homo sapien
tgagcccacggcagccgctctcgct

SEQ ID NO: 481914 - DNA, 25 bp, Homo sapien
cctccattccactttcgcctctcct

SEQ ID NO: 481915 - DNA, 25 bp, Homo sapien
ttccactttcgcctctcctctgagc

SEQ ID NO: 481916 - DNA, 25 bp, Homo sapien
acggaatcctgtctcccctccattc

SEQ ID NO: 481917 - DNA, 25 bp, Homo sapien
agctctggaaggcttctgagtgctg

SEQ ID NO: 481918 - DNA, 25 bp, Homo sapien
tggttctctccggaggcacaggtgt

SEQ ID NO: 481919 - DNA, 25 bp, Homo sapien
tggaagcccagctgtcttccagagt

SEQ ID NO: 481920 - DNA, 25 bp, Homo sapien
taatggaagtggagcggttgtcttc

SEQ ID NO: 481921 - DNA, 25 bp, Homo sapien
gggcttgcagcttaatgacttcaag

SEQ ID NO: 481922 - DNA, 25 bp, Homo sapien
cagataaaaggtcccttgagtggac

SEQ ID NO: 481923 - DNA, 25 bp, Homo sapien
gaaaaatgacaacagataaaaggtc

SEQ ID NO: 481924 - DNA, 25 bp, Homo sapien
tgcgagcctacgctgctgtgtcagg

SEQ ID NO: 481925 - DNA, 25 bp, Homo sapien
aagccagggtggtgcgtagtgatgg

SEQ ID NO: 481926 - DNA, 25 bp, Homo sapien
gggtggtgcgtagtgatggtttcca

SEQ ID NO: 481927 - DNA, 25 bp, Homo sapien
ctgaagccagggtggtgcgtagtga

SEQ ID NO: 481928 - DNA, 25 bp, Homo sapien
ccagggtggtgcgtagtgatggttt

SEQ ID NO: 481929 - DNA, 25 bp, Homo sapien
ggcatttatacacctggtagagggc

SEQ ID NO: 481930 - DNA, 25 bp, Homo sapien
actactgtttctaggtcaagctgga

SEQ ID NO: 481931 - DNA, 25 bp, Homo sapien
ttacttggacaagagaacactaggg

SEQ ID NO: 481932 - DNA, 25 bp, Homo sapien
gatcaggtactctatttcaggaagc

SEQ ID NO: 481933 - DNA, 25 bp, Homo sapien
gccagagatgcactatccgacagga

SEQ ID NO: 481934 - DNA, 25 bp, Homo sapien
cagccagagatgcactatccgacag

SEQ ID NO: 481935 - DNA, 25 bp, Homo sapien
ggaagagaaactgtttgcctgcagt

SEQ ID NO: 481936 - DNA, 25 bp, Homo sapien
gagaaactgtttgcctgcagttttg

SEQ ID NO: 481937 - DNA, 25 bp, Homo sapien
atgctagatgacacgttagtgggtg

SEQ ID NO: 481938 - DNA, 25 bp, Homo sapien
atacctaatgctagatgacacgtta

SEQ ID NO: 481939 - DNA, 25 bp, Homo sapien
agatgacacgttagtgggtgcagcg

SEQ ID NO: 481940 - DNA, 25 bp, Homo sapien
cctaatgctagatgacacgttagtg

SEQ ID NO: 481941 - DNA, 25 bp, Homo sapien
tgtctatcctgaaggtgggttcctt

SEQ ID NO: 481942 - DNA, 25 bp, Homo sapien
tgggatgccacctgtgcaaccaggt

SEQ ID NO: 481943 - DNA, 25 bp, Homo sapien
tgtggaacacggtgggtgtctatcc

SEQ ID NO: 481944 - DNA, 25 bp, Homo sapien
agtcccgtctgggtttgatgtaaat

SEQ ID NO: 481945 - DNA, 25 bp, Homo sapien
ggcatcaacaagaaaccctcgcagt

SEQ ID NO: 481946 - DNA, 25 bp, Homo sapien
ccaggtggcctgattgcttgtctca

SEQ ID NO: 481947 - DNA, 25 bp, Homo sapien
taagccatttgtgaaccagggatct

SEQ ID NO: 481948 - DNA, 25 bp, Homo sapien
gatcccagaacaaagtgccatgttt

SEQ ID NO: 481949 - DNA, 25 bp, Homo sapien
aatatttgcgaatctgtaagtggcc

SEQ ID NO: 481950 - DNA, 25 bp, Homo sapien
cgctggccttacacaggtctctggg

SEQ ID NO: 481951 - DNA, 25 bp, Homo sapien
ccacaactgatagaaaggatggtca

SEQ ID NO: 481952 - DNA, 25 bp, Homo sapien
cgagggacttgagcaccacattgaa

SEQ ID NO: 481953 - DNA, 25 bp, Homo sapien
tgctgagctgctgtattgacgagat

SEQ ID NO: 481954 - DNA, 25 bp, Homo sapien
tgcattggccacattgaactccagt

SEQ ID NO: 481955 - DNA, 25 bp, Homo sapien
gacagaaggcttccaagtagaagtc

SEQ ID NO: 481956 - DNA, 25 bp, Homo sapien
gcaaccctgtttgcatacaaatagt

SEQ ID NO: 481957 - DNA, 25 bp, Homo sapien
cccactctgtgaatccagactgagt

SEQ ID NO: 481958 - DNA, 25 bp, Homo sapien
gctgtcactgtagtgaagggagcac

SEQ ID NO: 481959 - DNA, 25 bp, Homo sapien
ctgagtcagcttggccccaaggatt

SEQ ID NO: 481960 - DNA, 25 bp, Homo sapien
tatgcttgggatgaacagtgtctgc

SEQ ID NO: 481961 - DNA, 25 bp, Homo sapien
cctgtctacaaaattcatgggtcac

SEQ ID NO: 481962 - DNA, 25 bp, Homo sapien
tagctctgtgactgttgcctttatg

SEQ ID NO: 481963 - DNA, 25 bp, Homo sapien
ggctgtttaaccactcatctcatga

SEQ ID NO: 481964 - DNA, 25 bp, Homo sapien
tcttccagtgtttccgagaattgaa

SEQ ID NO: 481965 - DNA, 25 bp, Homo sapien
cagaatgaaagttcgctcaggtcag

SEQ ID NO: 481966 - DNA, 25 bp, Homo sapien
gcatggtttcagctaccggcagtaa

SEQ ID NO: 481967 - DNA, 25 bp, Homo sapien
caatagaatcagcttgtggagagtc

SEQ ID NO: 481968 - DNA, 25 bp, Homo sapien
agctttatcctaggcaactgggttc

SEQ ID NO: 481969 - DNA, 25 bp, Homo sapien
tgataggcagaagaaggctcggagc

SEQ ID NO: 481970 - DNA, 25 bp, Homo sapien
caggtattggatgataggcagaaga

SEQ ID NO: 481971 - DNA, 25 bp, Homo sapien
agaaggctcggagccattggctgct

SEQ ID NO: 481972 - DNA, 25 bp, Homo sapien
ctgttgtgtggagcaggtattggat

SEQ ID NO: 481973 - DNA, 25 bp, Homo sapien
ctggtggttggaccagtgacttagt

SEQ ID NO: 481974 - DNA, 25 bp, Homo sapien
gttggaccagtgacttagttccaca

SEQ ID NO: 481975 - DNA, 25 bp, Homo sapien
catttctggactgctcaagttccat

SEQ ID NO: 481976 - DNA, 25 bp, Homo sapien
caccacatttctggactgctcaagt

SEQ ID NO: 481977 - DNA, 25 bp, Homo sapien
atcccacactgggaagccacagtgg

SEQ ID NO: 481978 - DNA, 25 bp, Homo sapien
tcccacactgggaagccacagtgga

SEQ ID NO: 481979 - DNA, 25 bp, Homo sapien
gggaagccacagtggagcaactaac

SEQ ID NO: 481980 - DNA, 25 bp, Homo sapien
actgggaagccacagtggagcaact

SEQ ID NO: 481981 - DNA, 25 bp, Homo sapien
tccgggcggcattccgcctgagagc

SEQ ID NO: 481982 - DNA, 25 bp, Homo sapien
ggatgtcttccgggcggcattccgc

SEQ ID NO: 481983 - DNA, 25 bp, Homo sapien
tgaagttgagggatgtcttccgggc

SEQ ID NO: 481984 - DNA, 25 bp, Homo sapien
ccgcctgagagccttcccctcctgc

SEQ ID NO: 481985 - DNA, 25 bp, Homo sapien
cactctgggacttgagtcattgctt

SEQ ID NO: 481986 - DNA, 25 bp, Homo sapien
gctgcttttccctgatgcctttctg

SEQ ID NO: 481987 - DNA, 25 bp, Homo sapien
tgtttagacttatctccaaagctgc

SEQ ID NO: 481988 - DNA, 25 bp, Homo sapien
ccagatagggtttcagccactctgg

SEQ ID NO: 481989 - DNA, 25 bp, Homo sapien
aggcattacgcttctgccagccagt

SEQ ID NO: 481990 - DNA, 25 bp, Homo sapien
agaacgcgttgttcccatcacgctg

SEQ ID NO: 481991 - DNA, 25 bp, Homo sapien
ccttctgctcgcaggcattacgctt

SEQ ID NO: 481992 - DNA, 25 bp, Homo sapien
agccagtgggcggaggcagaacgcg

SEQ ID NO: 481993 - DNA, 25 bp, Homo sapien
gatgtcatggtataaacccagtcgc

SEQ ID NO: 481994 - DNA, 25 bp, Homo sapien
gactgcgtatagacagggctgttgc

SEQ ID NO: 481995 - DNA, 25 bp, Homo sapien
gcgagactgggatgtcatggtataa

SEQ ID NO: 481996 - DNA, 25 bp, Homo sapien
taaacccagtcgctgtagggtgact

SEQ ID NO: 481997 - DNA, 25 bp, Homo sapien
tagctgctcttgacttgccagttag

SEQ ID NO: 481998 - DNA, 25 bp, Homo sapien
ttagctgctcttgacttgccagtta

SEQ ID NO: 481999 - DNA, 25 bp, Homo sapien
catgccataggataccgaatagttg

SEQ ID NO: 482000 - DNA, 25 bp, Homo sapien
tgccataggataccgaatagttgga

SEQ ID NO: 482001 - DNA, 25 bp, Homo sapien
atgccataggataccgaatagttgg

SEQ ID NO: 482002 - DNA, 25 bp, Homo sapien
ctttcgtctctgagatgctctgcat

SEQ ID NO: 482003 - DNA, 25 bp, Homo sapien
tgattcctcaaggtaccggacaagg

SEQ ID NO: 482004 - DNA, 25 bp, Homo sapien
ccatttcatgggatgacctcttctg

SEQ ID NO: 482005 - DNA, 25 bp, Homo sapien
ggtgattcctcaaggtaccggacaa

SEQ ID NO: 482006 - DNA, 25 bp, Homo sapien
tggaggggaagttttccatttcatg

SEQ ID NO: 482007 - DNA, 25 bp, Homo sapien
agctgtagatgccaaagcaatgtct

SEQ ID NO: 482008 - DNA, 25 bp, Homo sapien
tgccaaagcaatgtctaagcatttg

SEQ ID NO: 482009 - DNA, 25 bp, Homo sapien
tagatgccaaagcaatgtctaagca

SEQ ID NO: 482010 - DNA, 25 bp, Homo sapien
tcccacagcagtgtcatgaggaagg

SEQ ID NO: 482011 - DNA, 25 bp, Homo sapien
aaaatgaattcaaaagaagcagtta

SEQ ID NO: 482012 - DNA, 25 bp, Homo sapien
gaagcagttacaaaaccttcacact

SEQ ID NO: 482013 - DNA, 25 bp, Homo sapien
aagcagttacaaaaccttcacactt

SEQ ID NO: 482014 - DNA, 25 bp, Homo sapien
tgaattcaaaagaagcagttacaaa

SEQ ID NO: 482015 - DNA, 25 bp, Homo sapien
catcaaggagatcaaggggagaagc

SEQ ID NO: 482016 - DNA, 25 bp, Homo sapien
ttttagtcatcaaggagatcaaggg

SEQ ID NO: 482017 - DNA, 25 bp, Homo sapien
ctgattttagtcatcaaggagatca

SEQ ID NO: 482018 - DNA, 25 bp, Homo sapien
gattttagtcatcaaggagatcaag

SEQ ID NO: 482019 - DNA, 25 bp, Homo sapien
tgctgatctgcatgtgccctgattt

SEQ ID NO: 482020 - DNA, 25 bp, Homo sapien
tgcatgtgccctgatttggaccgag

SEQ ID NO: 482021 - DNA, 25 bp, Homo sapien
ctgatctgcatgtgccctgatttgg

SEQ ID NO: 482022 - DNA, 25 bp, Homo sapien
gtgccctgatttggaccgaggctgc

SEQ ID NO: 482023 - DNA, 25 bp, Homo sapien
aattctagggccaacagcccttctt

SEQ ID NO: 482024 - DNA, 25 bp, Homo sapien
acttcaccgtcagaatacagagggc

SEQ ID NO: 482025 - DNA, 25 bp, Homo sapien
gaaccacaaacttcaccgtcagaat

SEQ ID NO: 482026 - DNA, 25 bp, Homo sapien
tcttctggcggccattccaggaggc

SEQ ID NO: 482027 - DNA, 25 bp, Homo sapien
tgtttccgaatgcctttgccctcct

SEQ ID NO: 482028 - DNA, 25 bp, Homo sapien
ctgtttccgaatgcctttgccctcc

SEQ ID NO: 482029 - DNA, 25 bp, Homo sapien
gaaaacacacaagccagagtctttg

SEQ ID NO: 482030 - DNA, 25 bp, Homo sapien
gcatcgtgggtgttcttttgccaca

SEQ ID NO: 482031 - DNA, 25 bp, Homo sapien
tctttgtaagccctaagcatcgtgg

SEQ ID NO: 482032 - DNA, 25 bp, Homo sapien
caagccagagtctttgtaagcccta

SEQ ID NO: 482033 - DNA, 25 bp, Homo sapien
caagaggacccatgtctgtaaaggc

SEQ ID NO: 482034 - DNA, 25 bp, Homo sapien
ggaagaatgtcagccaaacaatgta

SEQ ID NO: 482035 - DNA, 25 bp, Homo sapien
gagaattcttggatcgctggtgaca

SEQ ID NO: 482036 - DNA, 25 bp, Homo sapien
gggatcatgggtgctaattctgacc

SEQ ID NO: 482037 - DNA, 25 bp, Homo sapien
aatcgtcacacttaggagctacaag

SEQ ID NO: 482038 - DNA, 25 bp, Homo sapien
cacacttaggagctacaagaggatc

SEQ ID NO: 482039 - DNA, 25 bp, Homo sapien
tcgtcacacttaggagctacaagag

SEQ ID NO: 482040 - DNA, 25 bp, Homo sapien
gtcacacttaggagctacaagagga

SEQ ID NO: 482041 - DNA, 25 bp, Homo sapien
gcattagtgtccacctggctcctgg

SEQ ID NO: 482042 - DNA, 25 bp, Homo sapien
gactatgggaatgtctcggttctgc

SEQ ID NO: 482043 - DNA, 25 bp, Homo sapien
ggtgctcatcaggtgaaccattggc

SEQ ID NO: 482044 - DNA, 25 bp, Homo sapien
tctttgaatttagctgcctcctgag

SEQ ID NO: 482045 - DNA, 25 bp, Homo sapien
catacatgccagtgtttgacagact

SEQ ID NO: 482046 - DNA, 25 bp, Homo sapien
ccaacattagaaggtcaattatttt

SEQ ID NO: 482047 - DNA, 25 bp, Homo sapien
aatgatcttagtgctcatacatgcc

SEQ ID NO: 482048 - DNA, 25 bp, Homo sapien
tttttcctagtgaaacctgtgtgga

SEQ ID NO: 482049 - DNA, 25 bp, Homo sapien
ttaaaggaccggcagtctcagtggg

SEQ ID NO: 482050 - DNA, 25 bp, Homo sapien
cagtggaatccacacatgtgcagtc

SEQ ID NO: 482051 - DNA, 25 bp, Homo sapien
tgataatgaactaggagactcccat

SEQ ID NO: 482052 - DNA, 25 bp, Homo sapien
tcagtagctgtttgactggccaatg

SEQ ID NO: 482053 - DNA, 25 bp, Homo sapien
tgagcttagcaatgagagccataaa

SEQ ID NO: 482054 - DNA, 25 bp, Homo sapien
ttatcccagtttggcgacaagttct

SEQ ID NO: 482055 - DNA, 25 bp, Homo sapien
gatagaatgttatccccaatgatag

SEQ ID NO: 482056 - DNA, 25 bp, Homo sapien
gaggaaacatcccaccagtctggct

SEQ ID NO: 482057 - DNA, 25 bp, Homo sapien
ctggcaccaagattcttatacaatt

SEQ ID NO: 482058 - DNA, 25 bp, Homo sapien
tctggcaccaagattcttatacaat

SEQ ID NO: 482059 - DNA, 25 bp, Homo sapien
tggcaccaagattcttatacaattc

SEQ ID NO: 482060 - DNA, 25 bp, Homo sapien
tgacatttagaatgtatccaatgcc

SEQ ID NO: 482061 - DNA, 25 bp, Homo sapien
catttagaatgtatccaatgccaga

SEQ ID NO: 482062 - DNA, 25 bp, Homo sapien
gacatttagaatgtatccaatgcca

SEQ ID NO: 482063 - DNA, 25 bp, Homo sapien
tttagaatgtatccaatgccagagg

SEQ ID NO: 482064 - DNA, 25 bp, Homo sapien
gatgttgtgaccaaacagcaccatt

SEQ ID NO: 482065 - DNA, 25 bp, Homo sapien
caagtggatgttgtgaccaaacagc

SEQ ID NO: 482066 - DNA, 25 bp, Homo sapien
tgtgaccaaacagcaccattcaaaa

SEQ ID NO: 482067 - DNA, 25 bp, Homo sapien
gtggatgttgtgaccaaacagcacc

SEQ ID NO: 482068 - DNA, 25 bp, Homo sapien
gttcccggctgctccagttgtggga

SEQ ID NO: 482069 - DNA, 25 bp, Homo sapien
ttcccggctgctccagttgtgggag

SEQ ID NO: 482070 - DNA, 25 bp, Homo sapien
tcccggctgctccagttgtgggagg

SEQ ID NO: 482071 - DNA, 25 bp, Homo sapien
taatcaagtgatgcctccttaagga

SEQ ID NO: 482072 - DNA, 25 bp, Homo sapien
agctaaagggacctcctggatctca

SEQ ID NO: 482073 - DNA, 25 bp, Homo sapien
tatgactgtggtgacgtcaggagac

SEQ ID NO: 482074 - DNA, 25 bp, Homo sapien
gttagtccccagctcacgtaaggca

SEQ ID NO: 482075 - DNA, 25 bp, Homo sapien
acatgggtcctggaaaggcttctcc

SEQ ID NO: 482076 - DNA, 25 bp, Homo sapien
catgggtcctggaaaggcttctccc

SEQ ID NO: 482077 - DNA, 25 bp, Homo sapien
cctgatcagggaaaacagttgtgcc

SEQ ID NO: 482078 - DNA, 25 bp, Homo sapien
ttgagtgccgcaagtatcctgatca

SEQ ID NO: 482079 - DNA, 25 bp, Homo sapien
gagtgccgcaagtatcctgatcagg

SEQ ID NO: 482080 - DNA, 25 bp, Homo sapien
gccgcaagtatcctgatcagggaaa

SEQ ID NO: 482081 - DNA, 25 bp, Homo sapien
gggagattcagatatgatttggtct

SEQ ID NO: 482082 - DNA, 25 bp, Homo sapien
gagtgataaccattcataaccttca

SEQ ID NO: 482083 - DNA, 25 bp, Homo sapien
ccatctttttgctacttacagcaag

SEQ ID NO: 482084 - DNA, 25 bp, Homo sapien
cttagttctgaatccttgagtgata

SEQ ID NO: 482085 - DNA, 25 bp, Homo sapien
cttggctaggctgttggagccccgt

SEQ ID NO: 482086 - DNA, 25 bp, Homo sapien
taggctgttggagccccgttgtttg

SEQ ID NO: 482087 - DNA, 25 bp, Homo sapien
gctaggctgttggagccccgttgtt

SEQ ID NO: 482088 - DNA, 25 bp, Homo sapien
tgttggagccccgttgtttggtcaa

SEQ ID NO: 482089 - DNA, 25 bp, Homo sapien
catgctgcagtactttctgagcagt

SEQ ID NO: 482090 - DNA, 25 bp, Homo sapien
tgctgcagtactttctgagcagtgt

SEQ ID NO: 482091 - DNA, 25 bp, Homo sapien
tgaagacatgctgcagtactttctg

SEQ ID NO: 482092 - DNA, 25 bp, Homo sapien
acatgctgcagtactttctgagcag

SEQ ID NO: 482093 - DNA, 25 bp, Homo sapien
tagttttccaacttgatcctcaggc

SEQ ID NO: 482094 - DNA, 25 bp, Homo sapien
gttttccaacttgatcctcaggcat

SEQ ID NO: 482095 - DNA, 25 bp, Homo sapien
gcttctagttttccaacttgatcct

SEQ ID NO: 482096 - DNA, 25 bp, Homo sapien
ttattgtgttttctgttgcttctag

SEQ ID NO: 482097 - DNA, 25 bp, Homo sapien
tgacttttccccaggtgaaatcagt

SEQ ID NO: 482098 - DNA, 25 bp, Homo sapien
gtgacttttccccaggtgaaatcag

SEQ ID NO: 482099 - DNA, 25 bp, Homo sapien
ttcctcccgtcgcgctctccagtga

SEQ ID NO: 482100 - DNA, 25 bp, Homo sapien
actcacggacttctcgctttcagac

SEQ ID NO: 482101 - DNA, 25 bp, Homo sapien
cttctactcacggacttctcgcttt

SEQ ID NO: 482102 - DNA, 25 bp, Homo sapien
ttctcgctttcagaccctccgacct

SEQ ID NO: 482103 - DNA, 25 bp, Homo sapien
gggagacaggagccgtgaggcgcgc

SEQ ID NO: 482104 - DNA, 25 bp, Homo sapien
ctctgcctgtttccggaccacattg

SEQ ID NO: 482105 - DNA, 25 bp, Homo sapien
cctgtttccggaccacattgtcggg

SEQ ID NO: 482106 - DNA, 25 bp, Homo sapien
tctgcctgtttccggaccacattgt

SEQ ID NO: 482107 - DNA, 25 bp, Homo sapien
tgcctgtttccggaccacattgtcg

SEQ ID NO: 482108 - DNA, 25 bp, Homo sapien
cagaactctggtcctctaaggccaa

SEQ ID NO: 482109 - DNA, 25 bp, Homo sapien
gacaatgaatagcagacagaactct

SEQ ID NO: 482110 - DNA, 25 bp, Homo sapien
gaatccacatctagcttaaaccttt

SEQ ID NO: 482111 - DNA, 25 bp, Homo sapien
ctctggtactgaaagctctgtttca

SEQ ID NO: 482112 - DNA, 25 bp, Homo sapien
gaagcctcttagtaaatagataatc

SEQ ID NO: 482113 - DNA, 25 bp, Homo sapien
ctcttagtaaatagataatccattc

SEQ ID NO: 482114 - DNA, 25 bp, Homo sapien
gcctcttagtaaatagataatccat

SEQ ID NO: 482115 - DNA, 25 bp, Homo sapien
aatagataatccattcttatctagc

SEQ ID NO: 482116 - DNA, 25 bp, Homo sapien
atttctgatggcttgtaagaggaat

SEQ ID NO: 482117 - DNA, 25 bp, Homo sapien
tcagcagctgttgtatttctgatgg

SEQ ID NO: 482118 - DNA, 25 bp, Homo sapien
gatctttgactggcctgggatattc

SEQ ID NO: 482119 - DNA, 25 bp, Homo sapien
gctgttgtatttctgatggcttgta

SEQ ID NO: 482120 - DNA, 25 bp, Homo sapien
tgcagaggacaagagacgtcttagg

SEQ ID NO: 482121 - DNA, 25 bp, Homo sapien
gatggcagtctgaacatcagaggga

SEQ ID NO: 482122 - DNA, 25 bp, Homo sapien
cgtcttaggagaacggcggccattt

SEQ ID NO: 482123 - DNA, 25 bp, Homo sapien
taaattcctggccagttctgccgca

SEQ ID NO: 482124 - DNA, 25 bp, Homo sapien
accttcgggccactggttattgcca

SEQ ID NO: 482125 - DNA, 25 bp, Homo sapien
ttcccgcagtcccacattttgagag

SEQ ID NO: 482126 - DNA, 25 bp, Homo sapien
ttgagagctgactgaatcaaaaagg

SEQ ID NO: 482127 - DNA, 25 bp, Homo sapien
gagctgactgaatcaaaaaggaact

SEQ ID NO: 482128 - DNA, 25 bp, Homo sapien
ctaaatagtgttgttgctggttccc

SEQ ID NO: 482129 - DNA, 25 bp, Homo sapien
gaactaacattcgtttgatgacatc

SEQ ID NO: 482130 - DNA, 25 bp, Homo sapien
gtttgatgacatctaaatagtgttg

SEQ ID NO: 482131 - DNA, 25 bp, Homo sapien
cctgatcttgcatacactgaactaa

SEQ ID NO: 482132 - DNA, 25 bp, Homo sapien
tcccggtagcaagtctgcaaaatgt

SEQ ID NO: 482133 - DNA, 25 bp, Homo sapien
gtaggaatcccggtagcaagtctgc

SEQ ID NO: 482134 - DNA, 25 bp, Homo sapien
tagcaagtctgcaaaatgtttgaac

SEQ ID NO: 482135 - DNA, 25 bp, Homo sapien
gctcatttgcaagtataaatgcagc

SEQ ID NO: 482136 - DNA, 25 bp, Homo sapien
taatgcctcattagccaaaagattc

SEQ ID NO: 482137 - DNA, 25 bp, Homo sapien
gtcggtgctgaagattcactttata

SEQ ID NO: 482138 - DNA, 25 bp, Homo sapien
agatgaaacagaaagtcggtgctga

SEQ ID NO: 482139 - DNA, 25 bp, Homo sapien
gattcactttataatgcctcattag

SEQ ID NO: 482140 - DNA, 25 bp, Homo sapien
tcaacgagggattttaggacagaat

SEQ ID NO: 482141 - DNA, 25 bp, Homo sapien
caaatactttggaacagtatctgca

SEQ ID NO: 482142 - DNA, 25 bp, Homo sapien
tctggtagcacgagtcatttaccgc

SEQ ID NO: 482143 - DNA, 25 bp, Homo sapien
gcttccaagtgaggacgcaaatact

SEQ ID NO: 482144 - DNA, 25 bp, Homo sapien
tgttgaggctagtgtctccacacaa

SEQ ID NO: 482145 - DNA, 25 bp, Homo sapien
gttttcttaacatagcagctgcagt

SEQ ID NO: 482146 - DNA, 25 bp, Homo sapien
cagtctcagagagggtgacgatcac

SEQ ID NO: 482147 - DNA, 25 bp, Homo sapien
tagtctgtgcaacaatattggtatg

SEQ ID NO: 482148 - DNA, 25 bp, Homo sapien
aatcacacaaccctcagcaaattta

SEQ ID NO: 482149 - DNA, 25 bp, Homo sapien
tccaaaaatttggccacaatacaca

SEQ ID NO: 482150 - DNA, 25 bp, Homo sapien
attatattctcaacaatctgagaaa

SEQ ID NO: 482151 - DNA, 25 bp, Homo sapien
aatacacataaactatctgaagacc

SEQ ID NO: 482152 - DNA, 25 bp, Homo sapien
caacatgaacagtgataaaggagat

SEQ ID NO: 482153 - DNA, 25 bp, Homo sapien
tttatctcttaatgcatcagctggg

SEQ ID NO: 482154 - DNA, 25 bp, Homo sapien
tcagtgtaagacaaaaggtaggtac

SEQ ID NO: 482155 - DNA, 25 bp, Homo sapien
tcagctggggcagtcagtacaacat

SEQ ID NO: 482156 - DNA, 25 bp, Homo sapien
gctttgttcccatgtgagcggatct

SEQ ID NO: 482157 - DNA, 25 bp, Homo sapien
gagcggatcttctcctacactctac

SEQ ID NO: 482158 - DNA, 25 bp, Homo sapien
ggccccaagaacttttgatcaatta

SEQ ID NO: 482159 - DNA, 25 bp, Homo sapien
actcagcagctcacataatttaccc

SEQ ID NO: 482160 - DNA, 25 bp, Homo sapien
ttttaactagttccagcgtgcaagg

SEQ ID NO: 482161 - DNA, 25 bp, Homo sapien
aatattcaggtcttgagtagacccc

SEQ ID NO: 482162 - DNA, 25 bp, Homo sapien
ggtggaataagcgtcctctcagttc

SEQ ID NO: 482163 - DNA, 25 bp, Homo sapien
tgagacttagcagggttcattagct

SEQ ID NO: 482164 - DNA, 25 bp, Homo sapien
gttcatctgcatttgcccagtcctc

SEQ ID NO: 482165 - DNA, 25 bp, Homo sapien
tctagttcatctgcatttgcccagt

SEQ ID NO: 482166 - DNA, 25 bp, Homo sapien
tagttcatctgcatttgcccagtcc

SEQ ID NO: 482167 - DNA, 25 bp, Homo sapien
ttctagttcatctgcatttgcccag

SEQ ID NO: 482168 - DNA, 25 bp, Homo sapien
taaaagcagtattgaaagagcctca

SEQ ID NO: 482169 - DNA, 25 bp, Homo sapien
ggtagcagcacattacagtaactga

SEQ ID NO: 482170 - DNA, 25 bp, Homo sapien
aatgtataatcttccccactgtgag

SEQ ID NO: 482171 - DNA, 25 bp, Homo sapien
aggaaattcgacctagccctggtct

SEQ ID NO: 482172 - DNA, 25 bp, Homo sapien
accaagtccgcaagccattcgatct

SEQ ID NO: 482173 - DNA, 25 bp, Homo sapien
ttgaagcatttgcataatgtgttcc

SEQ ID NO: 482174 - DNA, 25 bp, Homo sapien
cattcgatctagagcactctcgcct

SEQ ID NO: 482175 - DNA, 25 bp, Homo sapien
gatcatcggcagaacgagctttcca

SEQ ID NO: 482176 - DNA, 25 bp, Homo sapien
gaatttaagctttagaaagggcaca

SEQ ID NO: 482177 - DNA, 25 bp, Homo sapien
cgaaatcctgtgtcaacaacaacag

SEQ ID NO: 482178 - DNA, 25 bp, Homo sapien
aatctaaatacttttggctaggaag

SEQ ID NO: 482179 - DNA, 25 bp, Homo sapien
cacatacaacaataaactttgggat

SEQ ID NO: 482180 - DNA, 25 bp, Homo sapien
aaattacagatggaatagcaattac

SEQ ID NO: 482181 - DNA, 25 bp, Homo sapien
tgaacagaaaaagtgcgtgactact

SEQ ID NO: 482182 - DNA, 25 bp, Homo sapien
atgtcattctggtagagggagatgt

SEQ ID NO: 482183 - DNA, 25 bp, Homo sapien
cattctggtagagggagatgtataa

SEQ ID NO: 482184 - DNA, 25 bp, Homo sapien
tggtggcacccttcaccaatggcag

SEQ ID NO: 482185 - DNA, 25 bp, Homo sapien
tttacgatctcatttagaattcctt

SEQ ID NO: 482186 - DNA, 25 bp, Homo sapien
aaggccatcaatcctgcatgccggt

SEQ ID NO: 482187 - DNA, 25 bp, Homo sapien
cctgcatgccggtatttccagtcag

SEQ ID NO: 482188 - DNA, 25 bp, Homo sapien
aggctgcataccttactcttggatg

SEQ ID NO: 482189 - DNA, 25 bp, Homo sapien
caggctgcataccttactcttggat

SEQ ID NO: 482190 - DNA, 25 bp, Homo sapien
acaggctgcataccttactcttgga

SEQ ID NO: 482191 - DNA, 25 bp, Homo sapien
ccttggtcttccatggtctgcagca

SEQ ID NO: 482192 - DNA, 25 bp, Homo sapien
catgggcctgcacacgttgattgcc

SEQ ID NO: 482193 - DNA, 25 bp, Homo sapien
taaagttaatgagggcagcagctgc

SEQ ID NO: 482194 - DNA, 25 bp, Homo sapien
cttgaagcttcagtaccataatgga

SEQ ID NO: 482195 - DNA, 25 bp, Homo sapien
cacacctgtaatcccagcactttgg

SEQ ID NO: 482196 - DNA, 25 bp, Homo sapien
aaaaaagaagccaggcacggtgact

SEQ ID NO: 482197 - DNA, 25 bp, Homo sapien
aggcccaggtgggcggatgacttga

SEQ ID NO: 482198 - DNA, 25 bp, Homo sapien
gggaggcccaggtgggcggatgact

SEQ ID NO: 482199 - DNA, 25 bp, Homo sapien
tgaaccgcattctcaacgatgtgct

SEQ ID NO: 482200 - DNA, 25 bp, Homo sapien
ggatgtcacaacttgttccaaaact

SEQ ID NO: 482201 - DNA, 25 bp, Homo sapien
ctaacttggtgcctttctgaatcag

SEQ ID NO: 482202 - DNA, 25 bp, Homo sapien
tcttctgcagtatcggcaactgatg

SEQ ID NO: 482203 - DNA, 25 bp, Homo sapien
ttccatatcattgaagtctgtctgg

SEQ ID NO: 482204 - DNA, 25 bp, Homo sapien
tccatatcattgaagtctgtctggg

SEQ ID NO: 482205 - DNA, 25 bp, Homo sapien
cctttgtctgttcgttggcggagag

SEQ ID NO: 482206 - DNA, 25 bp, Homo sapien
agcagtgtgtcctgagattcttggg

SEQ ID NO: 482207 - DNA, 25 bp, Homo sapien
gcagtgtgtcctgagattcttgggt

SEQ ID NO: 482208 - DNA, 25 bp, Homo sapien
aaatgcctttgtctgttcgttggcg

SEQ ID NO: 482209 - DNA, 25 bp, Homo sapien
cccatgctgagatcatgtaagagat

SEQ ID NO: 482210 - DNA, 25 bp, Homo sapien
ggcccatgctgagatcatgtaagag

SEQ ID NO: 482211 - DNA, 25 bp, Homo sapien
tggcccatgctgagatcatgtaaga

SEQ ID NO: 482212 - DNA, 25 bp, Homo sapien
tctggcccatgctgagatcatgtaa

SEQ ID NO: 482213 - DNA, 25 bp, Homo sapien
gtcttcattaaaggccccataacca

SEQ ID NO: 482214 - DNA, 25 bp, Homo sapien
gccgtcttcattaaaggccccataa

SEQ ID NO: 482215 - DNA, 25 bp, Homo sapien
ccactggaaggtattgctgaaattc

SEQ ID NO: 482216 - DNA, 25 bp, Homo sapien
ttcgggcttaattgaagccgtcttc

SEQ ID NO: 482217 - DNA, 25 bp, Homo sapien
ggttcacaaattcccaaccatcatc

SEQ ID NO: 482218 - DNA, 25 bp, Homo sapien
caaggttcacaaattcccaaccatc

SEQ ID NO: 482219 - DNA, 25 bp, Homo sapien
agtcctgcagttttaataccaaagc

SEQ ID NO: 482220 - DNA, 25 bp, Homo sapien
tttcttctagtcctgcagttttaat

SEQ ID NO: 482221 - DNA, 25 bp, Homo sapien
caacctgttcggtgtactccacaaa

SEQ ID NO: 482222 - DNA, 25 bp, Homo sapien
cctttaactccttagcatagcaaac

SEQ ID NO: 482223 - DNA, 25 bp, Homo sapien
catcagtttgacaacctgttcggtg

SEQ ID NO: 482224 - DNA, 25 bp, Homo sapien
tgttcggtgtactccacaaagcctt

SEQ ID NO: 482225 - DNA, 25 bp, Homo sapien
catcgtggaaataaaatttcagtaa

SEQ ID NO: 482226 - DNA, 25 bp, Homo sapien
tagacatgttttgtattcagaagtt

SEQ ID NO: 482227 - DNA, 25 bp, Homo sapien
ctagacatgttttgtattcagaagt

SEQ ID NO: 482228 - DNA, 25 bp, Homo sapien
aaagggttcaatgcactaaaaggag

SEQ ID NO: 482229 - DNA, 25 bp, Homo sapien
gagcttgtgttaaatataaagcatg

SEQ ID NO: 482230 - DNA, 25 bp, Homo sapien
gagtgctaggcaacttctgtttatc

SEQ ID NO: 482231 - DNA, 25 bp, Homo sapien
caatgcactaaaaggagtgctaggc

SEQ ID NO: 482232 - DNA, 25 bp, Homo sapien
cattatttctgagaggacgtctgaa

SEQ ID NO: 482233 - DNA, 25 bp, Homo sapien
aagaggcatggattccgctgctgcc

SEQ ID NO: 482234 - DNA, 25 bp, Homo sapien
accaatggccttaattagagcatca

SEQ ID NO: 482235 - DNA, 25 bp, Homo sapien
tggttctgtaccaatggccttaatt

SEQ ID NO: 482236 - DNA, 25 bp, Homo sapien
atgaacatacaaccttatacatatt

SEQ ID NO: 482237 - DNA, 25 bp, Homo sapien
ctttgctttcaatatacctcccagt

SEQ ID NO: 482238 - DNA, 25 bp, Homo sapien
agctttgctttcaatatacctccca

SEQ ID NO: 482239 - DNA, 25 bp, Homo sapien
gctttgctttcaatatacctcccag

SEQ ID NO: 482240 - DNA, 25 bp, Homo sapien
aagctttgctttcaatatacctccc

SEQ ID NO: 482241 - DNA, 25 bp, Homo sapien
tagtgactcttcgacctgttcatca

SEQ ID NO: 482242 - DNA, 25 bp, Homo sapien
ctcatcttgtagtgactcttcgacc

SEQ ID NO: 482243 - DNA, 25 bp, Homo sapien
cttgtagtgactcttcgacctgttc

SEQ ID NO: 482244 - DNA, 25 bp, Homo sapien
gactcttcgacctgttcatcatagt

SEQ ID NO: 482245 - DNA, 25 bp, Homo sapien
aatttgggcctacaagcatgtgggc

SEQ ID NO: 482246 - DNA, 25 bp, Homo sapien
cctcaagtgtgggttatcatgtctc

SEQ ID NO: 482247 - DNA, 25 bp, Homo sapien
tagagaccggagtaaccctcaagtg

SEQ ID NO: 482248 - DNA, 25 bp, Homo sapien
caaaggccagtcttacctcgaaaga

SEQ ID NO: 482249 - DNA, 25 bp, Homo sapien
gttgacaattaatggaagcagctgt

SEQ ID NO: 482250 - DNA, 25 bp, Homo sapien
gaggttgacaattaatggaagcagc

SEQ ID NO: 482251 - DNA, 25 bp, Homo sapien
aatgaggttgacaattaatggaagc

SEQ ID NO: 482252 - DNA, 25 bp, Homo sapien
tactgaatattgagtgtaaaatatc

SEQ ID NO: 482253 - DNA, 25 bp, Homo sapien
tcacatacatattggagcattggtc

SEQ ID NO: 482254 - DNA, 25 bp, Homo sapien
ggcgataattatctccaccgtactg

SEQ ID NO: 482255 - DNA, 25 bp, Homo sapien
tatgcagctgcttgcctgacttctg

SEQ ID NO: 482256 - DNA, 25 bp, Homo sapien
accgtactgtgccatgactcccagg

SEQ ID NO: 482257 - DNA, 25 bp, Homo sapien
tccgcagactgaataactcttacca

SEQ ID NO: 482258 - DNA, 25 bp, Homo sapien
taactcttaccagcaggggaagtgc

SEQ ID NO: 482259 - DNA, 25 bp, Homo sapien
agactgaataactcttaccagcagg

SEQ ID NO: 482260 - DNA, 25 bp, Homo sapien
cttagaatccgcagactgaataact

SEQ ID NO: 482261 - DNA, 25 bp, Homo sapien
aaggacctcttcaacgtttacacag

SEQ ID NO: 482262 - DNA, 25 bp, Homo sapien
tcttcatgtagtggaagccaagaca

SEQ ID NO: 482263 - DNA, 25 bp, Homo sapien
gccaagacaaccagtgtggaaggac

SEQ ID NO: 482264 - DNA, 25 bp, Homo sapien
caacgtttacacagtcaggcttgaa

SEQ ID NO: 482265 - DNA, 25 bp, Homo sapien
tgcctgtgcaaaacagttaagacct

SEQ ID NO: 482266 - DNA, 25 bp, Homo sapien
ctgtgcaaaacagttaagaccttgt

SEQ ID NO: 482267 - DNA, 25 bp, Homo sapien
acctgcctgtgcaaaacagttaaga

SEQ ID NO: 482268 - DNA, 25 bp, Homo sapien
ctgatatttggggggaacttggact

SEQ ID NO: 482269 - DNA, 25 bp, Homo sapien
tgtgttcactaaaatcaatggcctt

SEQ ID NO: 482270 - DNA, 25 bp, Homo sapien
gaaaaccagccaatcttatatatga

SEQ ID NO: 482271 - DNA, 25 bp, Homo sapien
taatgggaaaaaacctgatagcgaa

SEQ ID NO: 482272 - DNA, 25 bp, Homo sapien
ttttaagggccaaacaacagaatgc

SEQ ID NO: 482273 - DNA, 25 bp, Homo sapien
tgtacttggcgaacgacattggcca

SEQ ID NO: 482274 - DNA, 25 bp, Homo sapien
tttgggccaagaacaattggatgat

SEQ ID NO: 482275 - DNA, 25 bp, Homo sapien
ttcatgtttaattgcctcgtgcatt

SEQ ID NO: 482276 - DNA, 25 bp, Homo sapien
tcgtgcatttctccttccgcaatta

SEQ ID NO: 482277 - DNA, 25 bp, Homo sapien
agtataatccatttgaggcttggag

SEQ ID NO: 482278 - DNA, 25 bp, Homo sapien
gcaccaactggtaagctcaaaatgt

SEQ ID NO: 482279 - DNA, 25 bp, Homo sapien
gtacatacggatggattacattaag

SEQ ID NO: 482280 - DNA, 25 bp, Homo sapien
cataagcttgtgttaagcaccaact

SEQ ID NO: 482281 - DNA, 25 bp, Homo sapien
aaagaaacattttcacagacttagg

SEQ ID NO: 482282 - DNA, 25 bp, Homo sapien
ctagggaaagaaacattttcacaga

SEQ ID NO: 482283 - DNA, 25 bp, Homo sapien
agggaaagaaacattttcacagact

SEQ ID NO: 482284 - DNA, 25 bp, Homo sapien
ggaaagaaacattttcacagactta

SEQ ID NO: 482285 - DNA, 25 bp, Homo sapien
gagctcctgaatggcggcctgctgc

SEQ ID NO: 482286 - DNA, 25 bp, Homo sapien
actcagtccacagtcctccagaagt

SEQ ID NO: 482287 - DNA, 25 bp, Homo sapien
tgtgctatgcactcagtccacagtc

SEQ ID NO: 482288 - DNA, 25 bp, Homo sapien
tgctgctcaggactgagctgtgcta

SEQ ID NO: 482289 - DNA, 25 bp, Homo sapien
ttggagttagttttctggtgggtga

SEQ ID NO: 482290 - DNA, 25 bp, Homo sapien
ttctggtgggtgacattaaggccct

SEQ ID NO: 482291 - DNA, 25 bp, Homo sapien
ggagttagttttctggtgggtgaca

SEQ ID NO: 482292 - DNA, 25 bp, Homo sapien
agttagttttctggtgggtgacatt

SEQ ID NO: 482293 - DNA, 25 bp, Homo sapien
tagtcttcagtgctagctaccgcag

SEQ ID NO: 482294 - DNA, 25 bp, Homo sapien
tcaggtgggcgggttataccaatag

SEQ ID NO: 482295 - DNA, 25 bp, Homo sapien
ccttcagtggtctggtagaaatcca

SEQ ID NO: 482296 - DNA, 25 bp, Homo sapien
tgtgaacacacatctacgctgagta

SEQ ID NO: 482297 - DNA, 25 bp, Homo sapien
ccaaatctttttgagctgatcagaa

SEQ ID NO: 482298 - DNA, 25 bp, Homo sapien
ggtaaaaactcgatgcttaagtctg

SEQ ID NO: 482299 - DNA, 25 bp, Homo sapien
tcaacagaagtctattaagatgcct

SEQ ID NO: 482300 - DNA, 25 bp, Homo sapien
tgaatccaagccagacagtactgag

SEQ ID NO: 482301 - DNA, 25 bp, Homo sapien
catgaatcggctttgcagatgctac

SEQ ID NO: 482302 - DNA, 25 bp, Homo sapien
gctagattcggaagcctccgggcaa

SEQ ID NO: 482303 - DNA, 25 bp, Homo sapien
tgacatgcaagacccctaaatttgg

SEQ ID NO: 482304 - DNA, 25 bp, Homo sapien
gaggttcttgctcccaaagtgctta

SEQ ID NO: 482305 - DNA, 25 bp, Homo sapien
gaagtcctcagctttgacgcatttc

SEQ ID NO: 482306 - DNA, 25 bp, Homo sapien
cagccgcgccgtacacctggagaga

SEQ ID NO: 482307 - DNA, 25 bp, Homo sapien
cagctgaaacggcagccgcgccgta

SEQ ID NO: 482308 - DNA, 25 bp, Homo sapien
gccctctgaattcagttgagcatgg

SEQ ID NO: 482309 - DNA, 25 bp, Homo sapien
gttctattgttcatgatgagcttca

SEQ ID NO: 482310 - DNA, 25 bp, Homo sapien
gcccctagggttctattgttcatga

SEQ ID NO: 482311 - DNA, 25 bp, Homo sapien
tagggttctattgttcatgatgagc

SEQ ID NO: 482312 - DNA, 25 bp, Homo sapien
ctttcttgcccctagggttctattg

SEQ ID NO: 482313 - DNA, 25 bp, Homo sapien
gcacaggtagcaacccctgcagtgg

SEQ ID NO: 482314 - DNA, 25 bp, Homo sapien
tactatggcacaggtagcaacccct

SEQ ID NO: 482315 - DNA, 25 bp, Homo sapien
tcactccggagtccacggttgggtg

SEQ ID NO: 482316 - DNA, 25 bp, Homo sapien
ttgtctgcacacagccgaagcagtg

SEQ ID NO: 482317 - DNA, 25 bp, Homo sapien
gcaggtcaggtccatactttgtggg

SEQ ID NO: 482318 - DNA, 25 bp, Homo sapien
ggttttcagatggaacttgagttct

SEQ ID NO: 482319 - DNA, 25 bp, Homo sapien
ttttcagatggaacttgagttctac

SEQ ID NO: 482320 - DNA, 25 bp, Homo sapien
ctaggttttcagatggaacttgagt

SEQ ID NO: 482321 - DNA, 25 bp, Homo sapien
aggttttcagatggaacttgagttc

SEQ ID NO: 482322 - DNA, 25 bp, Homo sapien
gggctgccaacgtggggcgaaccat

SEQ ID NO: 482323 - DNA, 25 bp, Homo sapien
ctgccaacgtggggcgaaccatgag

SEQ ID NO: 482324 - DNA, 25 bp, Homo sapien
ctagaggtggtctagggctgccaac

SEQ ID NO: 482325 - DNA, 25 bp, Homo sapien
ccaacgtggggcgaaccatgaggat

SEQ ID NO: 482326 - DNA, 25 bp, Homo sapien
ccatcgtgcgtgtctttagttgctc

SEQ ID NO: 482327 - DNA, 25 bp, Homo sapien
tttctgtccatcgtgcgtgtcttta

SEQ ID NO: 482328 - DNA, 25 bp, Homo sapien
tagttgctctatggcagctgctcat

SEQ ID NO: 482329 - DNA, 25 bp, Homo sapien
gcgtgtctttagttgctctatggca

SEQ ID NO: 482330 - DNA, 25 bp, Homo sapien
gggtcccgatgaggcgtgctcacaa

SEQ ID NO: 482331 - DNA, 25 bp, Homo sapien
agcagatctcagtaggtcctccgga

SEQ ID NO: 482332 - DNA, 25 bp, Homo sapien
agacaaggtaagctctgacccacgg

SEQ ID NO: 482333 - DNA, 25 bp, Homo sapien
caaactgcatgtctctgtaggctcc

SEQ ID NO: 482334 - DNA, 25 bp, Homo sapien
ggagtcagggaaagtagtcttcatc

SEQ ID NO: 482335 - DNA, 25 bp, Homo sapien
tcagggaaagtagtcttcatctttc

SEQ ID NO: 482336 - DNA, 25 bp, Homo sapien
aaggagtcagggaaagtagtcttca

SEQ ID NO: 482337 - DNA, 25 bp, Homo sapien
gagtcagggaaagtagtcttcatct

SEQ ID NO: 482338 - DNA, 25 bp, Homo sapien
gcatattcaaccaagggaactacat

SEQ ID NO: 482339 - DNA, 25 bp, Homo sapien
tggccttgcctagcagcaaatgctg

SEQ ID NO: 482340 - DNA, 25 bp, Homo sapien
attgcacatgagcatattcaaccaa

SEQ ID NO: 482341 - DNA, 25 bp, Homo sapien
ccgtggccttgcctagcagcaaatg

SEQ ID NO: 482342 - DNA, 25 bp, Homo sapien
tgcattggtattcaatgtggcgact

SEQ ID NO: 482343 - DNA, 25 bp, Homo sapien
ggtattcaatgtggcgactagctca

SEQ ID NO: 482344 - DNA, 25 bp, Homo sapien
gtggcgactagctcattcagcaaaa

SEQ ID NO: 482345 - DNA, 25 bp, Homo sapien
cacccactgaaagggacgggctgtg

SEQ ID NO: 482346 - DNA, 25 bp, Homo sapien
gtttctggccggcttgttgtttgct

SEQ ID NO: 482347 - DNA, 25 bp, Homo sapien
ccaggttttagcgtgtgtgttctgt

SEQ ID NO: 482348 - DNA, 25 bp, Homo sapien
ggcttgttgtttgctcggaccaggt

SEQ ID NO: 482349 - DNA, 25 bp, Homo sapien
tgctcggaccaggttttagcgtgtg

SEQ ID NO: 482350 - DNA, 25 bp, Homo sapien
tgtgagataatctgaccaccagccc

SEQ ID NO: 482351 - DNA, 25 bp, Homo sapien
ttctctgaaccagtgcagcgggcat

SEQ ID NO: 482352 - DNA, 25 bp, Homo sapien
tgcagcccttccacagataatacct

SEQ ID NO: 482353 - DNA, 25 bp, Homo sapien
cagcgggcatctgtgagataatctg

SEQ ID NO: 482354 - DNA, 25 bp, Homo sapien
atgtcaggtccgtgcacctgcgccg

SEQ ID NO: 482355 - DNA, 25 bp, Homo sapien
cctgcttagggcaagcgaactgcca

SEQ ID NO: 482356 - DNA, 25 bp, Homo sapien
tagggcaagcgaactgccagcaagg

SEQ ID NO: 482357 - DNA, 25 bp, Homo sapien
ttccaggccctgcttagggcaagcg

SEQ ID NO: 482358 - DNA, 25 bp, Homo sapien
ctcgaaaatcctgaacctggaaaat

SEQ ID NO: 482359 - DNA, 25 bp, Homo sapien
ctggcctcgaaaatcctgaacctgg

SEQ ID NO: 482360 - DNA, 25 bp, Homo sapien
gcctcgaaaatcctgaacctggaaa

SEQ ID NO: 482361 - DNA, 25 bp, Homo sapien
tggcctcgaaaatcctgaacctgga

SEQ ID NO: 482362 - DNA, 25 bp, Homo sapien
atagaagggcgggttgagacaagaa

SEQ ID NO: 482363 - DNA, 25 bp, Homo sapien
tgggcagaagtggagtgtagggacc

SEQ ID NO: 482364 - DNA, 25 bp, Homo sapien
tgtagggaccctgatagaagggcgg

SEQ ID NO: 482365 - DNA, 25 bp, Homo sapien
gaagggcgggttgagacaagaacag

SEQ ID NO: 482366 - DNA, 25 bp, Homo sapien
agaccgagagggcagatttcacggg

SEQ ID NO: 482367 - DNA, 25 bp, Homo sapien
tcagaccgagagggcagatttcacg

SEQ ID NO: 482368 - DNA, 25 bp, Homo sapien
cagaccgagagggcagatttcacgg

SEQ ID NO: 482369 - DNA, 25 bp, Homo sapien
gaccgagagggcagatttcacggga

SEQ ID NO: 482370 - DNA, 25 bp, Homo sapien
agtcttcagggacccaccgagccct

SEQ ID NO: 482371 - DNA, 25 bp, Homo sapien
gagccacaggcacgggcttccggca

SEQ ID NO: 482372 - DNA, 25 bp, Homo sapien
ctgcgcgggacttaagcttggggga

SEQ ID NO: 482373 - DNA, 25 bp, Homo sapien
cgccctccgcccgagcgaatcccat

SEQ ID NO: 482374 - DNA, 25 bp, Homo sapien
gtcgctttttgaggtcctgcctggg

SEQ ID NO: 482375 - DNA, 25 bp, Homo sapien
ctcggactctgcaggtcgctttttg

SEQ ID NO: 482376 - DNA, 25 bp, Homo sapien
agagcgggagacgtgtgcacggcga

SEQ ID NO: 482377 - DNA, 25 bp, Homo sapien
tgtgcacggcgaagccgggagcggc

SEQ ID NO: 482378 - DNA, 25 bp, Homo sapien
aatccagcagctgtggcgaaaaacg

SEQ ID NO: 482379 - DNA, 25 bp, Homo sapien
ctggcgagacgcgaatccagcagct

SEQ ID NO: 482380 - DNA, 25 bp, Homo sapien
tccagcagctgtggcgaaaaacgaa

SEQ ID NO: 482381 - DNA, 25 bp, Homo sapien
gggagcgccactggcgagacgcgaa

SEQ ID NO: 482382 - DNA, 25 bp, Homo sapien
gcgctactcgcgcagggaggagcgg

SEQ ID NO: 482383 - DNA, 25 bp, Homo sapien
cggcggcgccggctattaatacccg

SEQ ID NO: 482384 - DNA, 25 bp, Homo sapien
tgaggtccgagccatcaaaggtggc

SEQ ID NO: 482385 - DNA, 25 bp, Homo sapien
ggaggagcggcgcaaagcgggcagc

SEQ ID NO: 482386 - DNA, 25 bp, Homo sapien
gcagcccgacgtcggcggaggtgag

SEQ ID NO: 482387 - DNA, 25 bp, Homo sapien
aagcggcgtccagcgctgtcagcgg

SEQ ID NO: 482388 - DNA, 25 bp, Homo sapien
tcagcgggcgggtaggacggaagga

SEQ ID NO: 482389 - DNA, 25 bp, Homo sapien
tcaggggccgagattgcggcccgag

SEQ ID NO: 482390 - DNA, 25 bp, Homo sapien
ctgggcggtcaaacctggtaaactg

SEQ ID NO: 482391 - DNA, 25 bp, Homo sapien
atgaaacggccagaggccaccggta

SEQ ID NO: 482392 - DNA, 25 bp, Homo sapien
aaggagaagagccttaacaacaata

SEQ ID NO: 482393 - DNA, 25 bp, Homo sapien
caatataatgaaacggccagaggcc

SEQ ID NO: 482394 - DNA, 25 bp, Homo sapien
aatacgataccaagtgctgacaagg

SEQ ID NO: 482395 - DNA, 25 bp, Homo sapien
gaaattatttagtcacatcttcagg

SEQ ID NO: 482396 - DNA, 25 bp, Homo sapien
tgacaaggatttcacttctagctat

SEQ ID NO: 482397 - DNA, 25 bp, Homo sapien
caggtaagcccttcttaaagatgtt

SEQ ID NO: 482398 - DNA, 25 bp, Homo sapien
ccattctgggcctcgagattttaca

SEQ ID NO: 482399 - DNA, 25 bp, Homo sapien
tttacacacaaattgctctttccaa

SEQ ID NO: 482400 - DNA, 25 bp, Homo sapien
actccttcaaaacgcaggcagccaa

SEQ ID NO: 482401 - DNA, 25 bp, Homo sapien
tcccgctggcgctgttccattctgg

SEQ ID NO: 482402 - DNA, 25 bp, Homo sapien
gaattaaacctacatgccccatcag

SEQ ID NO: 482403 - DNA, 25 bp, Homo sapien
gagaattaacaaaatagttactgga

SEQ ID NO: 482404 - DNA, 25 bp, Homo sapien
atcacctacaggactgacatcttat

SEQ ID NO: 482405 - DNA, 25 bp, Homo sapien
tagttactggaattaaacctacatg

SEQ ID NO: 482406 - DNA, 25 bp, Homo sapien
tcagataggtcagtatcttcaaagg

SEQ ID NO: 482407 - DNA, 25 bp, Homo sapien
aggtgaaatgctgcaagcaacctct

SEQ ID NO: 482408 - DNA, 25 bp, Homo sapien
ccacagtgactctcacaggctttca

SEQ ID NO: 482409 - DNA, 25 bp, Homo sapien
gcaacctctggtaccaacaactgtg

SEQ ID NO: 482410 - DNA, 25 bp, Homo sapien
tatccatatgccaatttcctgggcc

SEQ ID NO: 482411 - DNA, 25 bp, Homo sapien
cacaggacttagtgccaacaggatt

SEQ ID NO: 482412 - DNA, 25 bp, Homo sapien
ggtacagtcaagcaatccagcaatt

SEQ ID NO: 482413 - DNA, 25 bp, Homo sapien
caaggtggcccgcaaattaacaaat

SEQ ID NO: 482414 - DNA, 25 bp, Homo sapien
tgggatttcaccgtgttggccaggc

SEQ ID NO: 482415 - DNA, 25 bp, Homo sapien
acagtcatgcaccaacacgctcagc

SEQ ID NO: 482416 - DNA, 25 bp, Homo sapien
attacagtcatgcaccaacacgctc

SEQ ID NO: 482417 - DNA, 25 bp, Homo sapien
atgggatttcaccgtgttggccagg

SEQ ID NO: 482418 - DNA, 25 bp, Homo sapien
tatctcagactgatggacaatggtc

SEQ ID NO: 482419 - DNA, 25 bp, Homo sapien
gacaatggtctccagactaaatgga

SEQ ID NO: 482420 - DNA, 25 bp, Homo sapien
tatgttagaagacaacggagcaatg

SEQ ID NO: 482421 - DNA, 25 bp, Homo sapien
taaaaggatctacaccgaagtacat

SEQ ID NO: 482422 - DNA, 25 bp, Homo sapien
tgctcagtggcactgccggagacca

SEQ ID NO: 482423 - DNA, 25 bp, Homo sapien
tgggccgacagccaccgagacatcc

SEQ ID NO: 482424 - DNA, 25 bp, Homo sapien
catgacgccctattttcagagcctt

SEQ ID NO: 482425 - DNA, 25 bp, Homo sapien
gccttccaagcactctgggccgaca

SEQ ID NO: 482426 - DNA, 25 bp, Homo sapien
tcctcttcaaaaagcctggacggaa

SEQ ID NO: 482427 - DNA, 25 bp, Homo sapien
gggctgcaggcctcagaaagcgccc

SEQ ID NO: 482428 - DNA, 25 bp, Homo sapien
cttcctcttcaaaaagcctggacgg

SEQ ID NO: 482429 - DNA, 25 bp, Homo sapien
gctgcaggcctcagaaagcgcccgg

SEQ ID NO: 482430 - DNA, 25 bp, Homo sapien
caacttgaagataaactcaagaaaa

SEQ ID NO: 482431 - DNA, 25 bp, Homo sapien
acaacttgaagataaactcaagaaa

SEQ ID NO: 482432 - DNA, 25 bp, Homo sapien
gaagtgctatctgcaatgaaacggc

SEQ ID NO: 482433 - DNA, 25 bp, Homo sapien
tgtggacctaaaccagcagggagaa

SEQ ID NO: 482434 - DNA, 25 bp, Homo sapien
tcacagcgccaggatgtaacctcag

SEQ ID NO: 482435 - DNA, 25 bp, Homo sapien
cagccaagctacgttaacatgtgag

SEQ ID NO: 482436 - DNA, 25 bp, Homo sapien
tacaatggattattacgcagccttt

SEQ ID NO: 482437 - DNA, 25 bp, Homo sapien
caatggattattacgcagcctttaa

SEQ ID NO: 482438 - DNA, 25 bp, Homo sapien
tgctacaacatgaagcacgaagaga

SEQ ID NO: 482439 - DNA, 25 bp, Homo sapien
gcacgaagagattatgctaagtgaa

SEQ ID NO: 482440 - DNA, 25 bp, Homo sapien
actagattatttcaacagccacacg

SEQ ID NO: 482441 - DNA, 25 bp, Homo sapien
tttccactcagctataaccatgttg

SEQ ID NO: 482442 - DNA, 25 bp, Homo sapien
ccagctccatatggtaatccagcaa

SEQ ID NO: 482443 - DNA, 25 bp, Homo sapien
caaggccctgtaaggtgacatgaac

SEQ ID NO: 482444 - DNA, 25 bp, Homo sapien
aagtcttctctaatcgacaccagtc

SEQ ID NO: 482445 - DNA, 25 bp, Homo sapien
tagaaagcacccaacccttgcctgg

SEQ ID NO: 482446 - DNA, 25 bp, Homo sapien
acaccagtcagcctctccaaatatt

SEQ ID NO: 482447 - DNA, 25 bp, Homo sapien
atttgtagaaagcacccaacccttg

SEQ ID NO: 482448 - DNA, 25 bp, Homo sapien
gcaaagggcgtgtgatcaatctcca

SEQ ID NO: 482449 - DNA, 25 bp, Homo sapien
gacacccaggagagcaaagagcaaa

SEQ ID NO: 482450 - DNA, 25 bp, Homo sapien
aacagctccgtgcatctggctctgc

SEQ ID NO: 482451 - DNA, 25 bp, Homo sapien
ttatgagccggaagctgccacaaag

SEQ ID NO: 482452 - DNA, 25 bp, Homo sapien
caccaccaccagttagtatgcacaa

SEQ ID NO: 482453 - DNA, 25 bp, Homo sapien
cagttagtatgcacaaagtcttgct

SEQ ID NO: 482454 - DNA, 25 bp, Homo sapien
cagaagaatgttagccaatcccttc

SEQ ID NO: 482455 - DNA, 25 bp, Homo sapien
aagaatgttagccaatcccttctca

SEQ ID NO: 482456 - DNA, 25 bp, Homo sapien
aaaccatccggtttccaaatctcat

SEQ ID NO: 482457 - DNA, 25 bp, Homo sapien
gctgtcaccatagacacaagggctg

SEQ ID NO: 482458 - DNA, 25 bp, Homo sapien
cctaatgaattccttacttcctctg

SEQ ID NO: 482459 - DNA, 25 bp, Homo sapien
tacttcctctgcaatgaaacctcta

SEQ ID NO: 482460 - DNA, 25 bp, Homo sapien
cagtcgtgatcctggggtcggcctc

SEQ ID NO: 482461 - DNA, 25 bp, Homo sapien
tgatggacacgagttttcctgaagg

SEQ ID NO: 482462 - DNA, 25 bp, Homo sapien
gtcggcctctgctctatttctccca

SEQ ID NO: 482463 - DNA, 25 bp, Homo sapien
ggcttctgtccacgttccaaggtac

SEQ ID NO: 482464 - DNA, 25 bp, Homo sapien
aagaacagcagaagtgaggagcacc

SEQ ID NO: 482465 - DNA, 25 bp, Homo sapien
gatgctctcgggactgttcttgcca

SEQ ID NO: 482466 - DNA, 25 bp, Homo sapien
tcctgccgggaataagatgtgcacc

SEQ ID NO: 482467 - DNA, 25 bp, Homo sapien
taagagttctctggactgagccgat

SEQ ID NO: 482468 - DNA, 25 bp, Homo sapien
aaagccctgcttgagagagtaggca

SEQ ID NO: 482469 - DNA, 25 bp, Homo sapien
aacaggcaggcagttggacgtgcat

SEQ ID NO: 482470 - DNA, 25 bp, Homo sapien
caggctcccttgtgcatctgacagg

SEQ ID NO: 482471 - DNA, 25 bp, Homo sapien
tagagagcatgagaaaggttccttc

SEQ ID NO: 482472 - DNA, 25 bp, Homo sapien
tgatatgtgactttctacagccagt

SEQ ID NO: 482473 - DNA, 25 bp, Homo sapien
gaggtactgactcagaatcagctcc

SEQ ID NO: 482474 - DNA, 25 bp, Homo sapien
tcttaaacagcatgaggtactgact

SEQ ID NO: 482475 - DNA, 25 bp, Homo sapien
tacagccagttaaggaatacatctg

SEQ ID NO: 482476 - DNA, 25 bp, Homo sapien
caaaggacgtttccagggtcagaca

SEQ ID NO: 482477 - DNA, 25 bp, Homo sapien
tgagccatgagaagtcattcacttg

SEQ ID NO: 482478 - DNA, 25 bp, Homo sapien
gggacttctggccacgtgcccagct

SEQ ID NO: 482479 - DNA, 25 bp, Homo sapien
ggtcagacacttggccttgaattcc

SEQ ID NO: 482480 - DNA, 25 bp, Homo sapien
ctgcttcatcctactaatgtcagtg

SEQ ID NO: 482481 - DNA, 25 bp, Homo sapien
atagaaacactgctaatgaaaatac

SEQ ID NO: 482482 - DNA, 25 bp, Homo sapien
taatgtcagtgggaactgtgtttgt

SEQ ID NO: 482483 - DNA, 25 bp, Homo sapien
ttcctatagaaacactgctaatgaa

SEQ ID NO: 482484 - DNA, 25 bp, Homo sapien
gggacacatgattcacccaggaaca

SEQ ID NO: 482485 - DNA, 25 bp, Homo sapien
aaaacgcagtaaacgagcttggcag

SEQ ID NO: 482486 - DNA, 25 bp, Homo sapien
cacagaagctgcacgtaagtccaca

SEQ ID NO: 482487 - DNA, 25 bp, Homo sapien
aatttctgagcgcaaagtgcaaccc

SEQ ID NO: 482488 - DNA, 25 bp, Homo sapien
ttttaggagccagacaagagggcaa

SEQ ID NO: 482489 - DNA, 25 bp, Homo sapien
tttcagtcagtaccttgtgtgccac

SEQ ID NO: 482490 - DNA, 25 bp, Homo sapien
tgacctccccaagagtgcatgtggg

SEQ ID NO: 482491 - DNA, 25 bp, Homo sapien
taaagactctaacagcccggttggc

SEQ ID NO: 482492 - DNA, 25 bp, Homo sapien
gtgctaggtatattcgcattgttgt

SEQ ID NO: 482493 - DNA, 25 bp, Homo sapien
tgttgtgaaaaagatctcccaatgt

SEQ ID NO: 482494 - DNA, 25 bp, Homo sapien
taagtgcacattcagtagtgctagg

SEQ ID NO: 482495 - DNA, 25 bp, Homo sapien
tgtaccccatattagtagaatcata

SEQ ID NO: 482496 - DNA, 25 bp, Homo sapien
tagaagcgtactgacttggtggcaa

SEQ ID NO: 482497 - DNA, 25 bp, Homo sapien
tccttgaagaaaacgctgacctgca

SEQ ID NO: 482498 - DNA, 25 bp, Homo sapien
gaaatacatgaagcgagtccttgcg

SEQ ID NO: 482499 - DNA, 25 bp, Homo sapien
ggtaaaactgcaggactcggccaga

SEQ ID NO: 482500 - DNA, 25 bp, Homo sapien
tagaaatgcacgtaggagatgttgg

SEQ ID NO: 482501 - DNA, 25 bp, Homo sapien
tctgcataacattggacttgagaag

SEQ ID NO: 482502 - DNA, 25 bp, Homo sapien
ggctctgagcaggtatcatattact

SEQ ID NO: 482503 - DNA, 25 bp, Homo sapien
aacgtctatgcattttccgtgcaag

SEQ ID NO: 482504 - DNA, 25 bp, Homo sapien
acagcagcttcagatcttgtaactc

SEQ ID NO: 482505 - DNA, 25 bp, Homo sapien
tgtgcatctcaaacagcagcttcag

SEQ ID NO: 482506 - DNA, 25 bp, Homo sapien
cagagtcctgctgtgcatctcaaac

SEQ ID NO: 482507 - DNA, 25 bp, Homo sapien
aaacagcagcttcagatcttgtaac

SEQ ID NO: 482508 - DNA, 25 bp, Homo sapien
tgactttccatcctacagagctaca

SEQ ID NO: 482509 - DNA, 25 bp, Homo sapien
ggaaaatgaaccacagttcctcatg

SEQ ID NO: 482510 - DNA, 25 bp, Homo sapien
cattccacaatgcaccacgctttgg

SEQ ID NO: 482511 - DNA, 25 bp, Homo sapien
gctacatgcattgagactggcacac

SEQ ID NO: 482512 - DNA, 25 bp, Homo sapien
ttcagtgactgtgaccgctaagctt

SEQ ID NO: 482513 - DNA, 25 bp, Homo sapien
tggtgcttgggcttcatggagcatc

SEQ ID NO: 482514 - DNA, 25 bp, Homo sapien
atggagcatctcagtacccaacccg

SEQ ID NO: 482515 - DNA, 25 bp, Homo sapien
tgtaagaaatagagcctgtaagatg

SEQ ID NO: 482516 - DNA, 25 bp, Homo sapien
tctagtagatcaaaccaagcctcct

SEQ ID NO: 482517 - DNA, 25 bp, Homo sapien
gaaaaatcacttattgggcactgaa

SEQ ID NO: 482518 - DNA, 25 bp, Homo sapien
tgaatttaactctggccattgccaa

SEQ ID NO: 482519 - DNA, 25 bp, Homo sapien
cgtttaggagtggatgggcccctct

SEQ ID NO: 482520 - DNA, 25 bp, Homo sapien
gtctgttgtatccttctccgtcttc

SEQ ID NO: 482521 - DNA, 25 bp, Homo sapien
tctctgggaaaggttcctcccctgc

SEQ ID NO: 482522 - DNA, 25 bp, Homo sapien
tcactgtctgttgtatccttctccg

SEQ ID NO: 482523 - DNA, 25 bp, Homo sapien
ctgtctgttgtatccttctccgtct

SEQ ID NO: 482524 - DNA, 25 bp, Homo sapien
gcctggactttcttatcggctccca

SEQ ID NO: 482525 - DNA, 25 bp, Homo sapien
aatccgcatcatctacactctggct

SEQ ID NO: 482526 - DNA, 25 bp, Homo sapien
ttctgtttgcctggactttcttatc

SEQ ID NO: 482527 - DNA, 25 bp, Homo sapien
tttcttatcggctcccaatccgcat

SEQ ID NO: 482528 - DNA, 25 bp, Homo sapien
catacgactgctgatcaagtgtcca

SEQ ID NO: 482529 - DNA, 25 bp, Homo sapien
caggaatctgcgactcttctgagaa

SEQ ID NO: 482530 - DNA, 25 bp, Homo sapien
caagtgtccagcattcaatacacag

SEQ ID NO: 482531 - DNA, 25 bp, Homo sapien
gctcttcacaaggatcgctggaagc

SEQ ID NO: 482532 - DNA, 25 bp, Homo sapien
aatcctgggcaggtccacaaatgac

SEQ ID NO: 482533 - DNA, 25 bp, Homo sapien
caaatgaccaggaaagcaccacaag

SEQ ID NO: 482534 - DNA, 25 bp, Homo sapien
tatccagtgtggtaaggactcagca

SEQ ID NO: 482535 - DNA, 25 bp, Homo sapien
aaaaggcacctgtttccagcgcgag

SEQ ID NO: 482536 - DNA, 25 bp, Homo sapien
caggcgtaagaataccatgcccggc

SEQ ID NO: 482537 - DNA, 25 bp, Homo sapien
attacaggcgtaagaataccatgcc

SEQ ID NO: 482538 - DNA, 25 bp, Homo sapien
tacaggcgtaagaataccatgcccg

SEQ ID NO: 482539 - DNA, 25 bp, Homo sapien
aggcgtaagaataccatgcccggcc

SEQ ID NO: 482540 - DNA, 25 bp, Homo sapien
cagcctcagggttctacttcttaaa

SEQ ID NO: 482541 - DNA, 25 bp, Homo sapien
atcctaccaggtccaaaagcttcca

SEQ ID NO: 482542 - DNA, 25 bp, Homo sapien
tcttaaagagggattcaaacagatg

SEQ ID NO: 482543 - DNA, 25 bp, Homo sapien
gattattgacactgccaagactagt

SEQ ID NO: 482544 - DNA, 25 bp, Homo sapien
cctgggttgcctgatctagaatttg

SEQ ID NO: 482545 - DNA, 25 bp, Homo sapien
tacatatgaaggatcctaccagatg

SEQ ID NO: 482546 - DNA, 25 bp, Homo sapien
tgtcatctcatcaagagggtaagaa

SEQ ID NO: 482547 - DNA, 25 bp, Homo sapien
cccagccctgatgattttttaggta

SEQ ID NO: 482548 - DNA, 25 bp, Homo sapien
aaagcatgggaccacagcagtggtt

SEQ ID NO: 482549 - DNA, 25 bp, Homo sapien
gaccacagcagtggttccttccagt

SEQ ID NO: 482550 - DNA, 25 bp, Homo sapien
acagcagtggttccttccagtgtct

SEQ ID NO: 482551 - DNA, 25 bp, Homo sapien
ctagaaaagcaaagcatgggaccac

SEQ ID NO: 482552 - DNA, 25 bp, Homo sapien
ctgccagcacttctctgtgggagcc

SEQ ID NO: 482553 - DNA, 25 bp, Homo sapien
gggtcgcccacacatgagctctgcc

SEQ ID NO: 482554 - DNA, 25 bp, Homo sapien
gagctctgccagcacttctctgtgg

SEQ ID NO: 482555 - DNA, 25 bp, Homo sapien
ggccaggggtcgcccacacatgagc

SEQ ID NO: 482556 - DNA, 25 bp, Homo sapien
aaggatgggccaggtcctgacaaat

SEQ ID NO: 482557 - DNA, 25 bp, Homo sapien
caggtcctgacaaatcccccagttg

SEQ ID NO: 482558 - DNA, 25 bp, Homo sapien
atgggccaggtcctgacaaatcccc

SEQ ID NO: 482559 - DNA, 25 bp, Homo sapien
ccaaggatgggccaggtcctgacaa

SEQ ID NO: 482560 - DNA, 25 bp, Homo sapien
tcaaggtgaacggacacccggatgt

SEQ ID NO: 482561 - DNA, 25 bp, Homo sapien
aaaaggttgcatccaatgggaggtc

SEQ ID NO: 482562 - DNA, 25 bp, Homo sapien
gaatgtgatctggtcaacgaaggga

SEQ ID NO: 482563 - DNA, 25 bp, Homo sapien
gagtaagatgctatggaccaaaagg

SEQ ID NO: 482564 - DNA, 25 bp, Homo sapien
cagagaatcaactagtcccagcgta

SEQ ID NO: 482565 - DNA, 25 bp, Homo sapien
tatgtggccgaactgggactgaagc

SEQ ID NO: 482566 - DNA, 25 bp, Homo sapien
tcagatggatcacacaggaatggga

SEQ ID NO: 482567 - DNA, 25 bp, Homo sapien
tgacacagaatgctcacccagtggt

SEQ ID NO: 482568 - DNA, 25 bp, Homo sapien
gcctcatgccatccgtgtagaattt

SEQ ID NO: 482569 - DNA, 25 bp, Homo sapien
ccatccgtgtagaattttcaatgtg

SEQ ID NO: 482570 - DNA, 25 bp, Homo sapien
ccggcctcatgccatccgtgtagaa

SEQ ID NO: 482571 - DNA, 25 bp, Homo sapien
catgccatccgtgtagaattttcaa

SEQ ID NO: 482572 - DNA, 25 bp, Homo sapien
ttgagaaggatccacgggcctcatc

SEQ ID NO: 482573 - DNA, 25 bp, Homo sapien
ctgcagtcctcggtgggaaggcaaa

SEQ ID NO: 482574 - DNA, 25 bp, Homo sapien
agcagccctccataggccgagagtc

SEQ ID NO: 482575 - DNA, 25 bp, Homo sapien
tgaaggcttctgaactgtgaggcac

SEQ ID NO: 482576 - DNA, 25 bp, Homo sapien
taaggagtaaagtactcggctgatg

SEQ ID NO: 482577 - DNA, 25 bp, Homo sapien
cagaggatttctgccaagtgatgca

SEQ ID NO: 482578 - DNA, 25 bp, Homo sapien
ggcagaggatttctgccaagtgatg

SEQ ID NO: 482579 - DNA, 25 bp, Homo sapien
aactaaggagtaaagtactcggctg

SEQ ID NO: 482580 - DNA, 25 bp, Homo sapien
gctttttgcctgagcacgcccagga

SEQ ID NO: 482581 - DNA, 25 bp, Homo sapien
tgatctgccccggacagggagaagc

SEQ ID NO: 482582 - DNA, 25 bp, Homo sapien
tctctccagacaacgatgttatagg

SEQ ID NO: 482583 - DNA, 25 bp, Homo sapien
tcctcaaatgcccagaccttggtca

SEQ ID NO: 482584 - DNA, 25 bp, Homo sapien
attccccttcctcaggtgatgcatt

SEQ ID NO: 482585 - DNA, 25 bp, Homo sapien
tcctcaggtgatgcattcgctgcac

SEQ ID NO: 482586 - DNA, 25 bp, Homo sapien
tcaggtgatgcattcgctgcaccac

SEQ ID NO: 482587 - DNA, 25 bp, Homo sapien
cccttcctcaggtgatgcattcgct

SEQ ID NO: 482588 - DNA, 25 bp, Homo sapien
cagtcagtctgggaagtcttcatta

SEQ ID NO: 482589 - DNA, 25 bp, Homo sapien
tcttcattattatcccatagttcat

SEQ ID NO: 482590 - DNA, 25 bp, Homo sapien
gggaagtcttcattattatcccata

SEQ ID NO: 482591 - DNA, 25 bp, Homo sapien
gaagtcttcattattatcccatagt

SEQ ID NO: 482592 - DNA, 25 bp, Homo sapien
tgggtctgtggctgtgaggggatgg

SEQ ID NO: 482593 - DNA, 25 bp, Homo sapien
cttaaagctgggtctgtggctgtga

SEQ ID NO: 482594 - DNA, 25 bp, Homo sapien
aaagctgggtctgtggctgtgaggg

SEQ ID NO: 482595 - DNA, 25 bp, Homo sapien
ggtctgtggctgtgaggggatggga

SEQ ID NO: 482596 - DNA, 25 bp, Homo sapien
taaggctctcaacccacagaacaga

SEQ ID NO: 482597 - DNA, 25 bp, Homo sapien
tagttaagatggaaagggctttata

SEQ ID NO: 482598 - DNA, 25 bp, Homo sapien
aatactttcgccatcgcacctcaag

SEQ ID NO: 482599 - DNA, 25 bp, Homo sapien
tttatacttgttgaaggcatgaaca

SEQ ID NO: 482600 - DNA, 25 bp, Homo sapien
gcagatccaggctgtccgtgctcaa

SEQ ID NO: 482601 - DNA, 25 bp, Homo sapien
caaaggttcttgacttaatgaggaa

SEQ ID NO: 482602 - DNA, 25 bp, Homo sapien
gagcagatcagctttcgagataagc

SEQ ID NO: 482603 - DNA, 25 bp, Homo sapien
taagaataatcttccgtctgggaaa

SEQ ID NO: 482604 - DNA, 25 bp, Homo sapien
gtcccaccctggacataacttctcc

SEQ ID NO: 482605 - DNA, 25 bp, Homo sapien
gaggaaatctctcgccgtcctctct

SEQ ID NO: 482606 - DNA, 25 bp, Homo sapien
ctgttctgagtagtgaggaaatctc

SEQ ID NO: 482607 - DNA, 25 bp, Homo sapien
aagttttgaatttcccgctgttctg

SEQ ID NO: 482608 - DNA, 25 bp, Homo sapien
tgctcttggagtacaggaggcccct

SEQ ID NO: 482609 - DNA, 25 bp, Homo sapien
gcgtttctacaataccccgcaggcg

SEQ ID NO: 482610 - DNA, 25 bp, Homo sapien
taaacttgcagaatgaacgtgtcac

SEQ ID NO: 482611 - DNA, 25 bp, Homo sapien
ctgtgataggcagcgcagcgtttct

SEQ ID NO: 482612 - DNA, 25 bp, Homo sapien
tctccttgggctcagtggtctaatg

SEQ ID NO: 482613 - DNA, 25 bp, Homo sapien
actgcttgtagaaagtaggacacca

SEQ ID NO: 482614 - DNA, 25 bp, Homo sapien
tagtcccgtgactcagcagaaaggt

SEQ ID NO: 482615 - DNA, 25 bp, Homo sapien
taggacaccacttccagcaagagca

SEQ ID NO: 482616 - DNA, 25 bp, Homo sapien
gtcacatcccagaatgcaaaatggt

SEQ ID NO: 482617 - DNA, 25 bp, Homo sapien
tttgtaaatccacgttcacagaaga

SEQ ID NO: 482618 - DNA, 25 bp, Homo sapien
ggatacagcgatctcacttctgagt

SEQ ID NO: 482619 - DNA, 25 bp, Homo sapien
aagctagaagcaacccaggtgtcca

SEQ ID NO: 482620 - DNA, 25 bp, Homo sapien
tcggttaatgtagggagcaatgagc

SEQ ID NO: 482621 - DNA, 25 bp, Homo sapien
agcatttcccaggtcggttaatgta

SEQ ID NO: 482622 - DNA, 25 bp, Homo sapien
ccaggtcggttaatgtagggagcaa

SEQ ID NO: 482623 - DNA, 25 bp, Homo sapien
taatgtagggagcaatgagctgctc

SEQ ID NO: 482624 - DNA, 25 bp, Homo sapien
tgactgcgtggaacccccattcttc

SEQ ID NO: 482625 - DNA, 25 bp, Homo sapien
caggaatgtcaggagtcacatgtga

SEQ ID NO: 482626 - DNA, 25 bp, Homo sapien
ggagtcacatgtgactgcgtggaac

SEQ ID NO: 482627 - DNA, 25 bp, Homo sapien
tgcaggaatgtcaggagtcacatgt

SEQ ID NO: 482628 - DNA, 25 bp, Homo sapien
agcaggagtcaaagcccgccaagta

SEQ ID NO: 482629 - DNA, 25 bp, Homo sapien
aattagtaaccctggagactgagtg

SEQ ID NO: 482630 - DNA, 25 bp, Homo sapien
gagcattttaggaaccaattagtaa

SEQ ID NO: 482631 - DNA, 25 bp, Homo sapien
caagtacacggatggacatgtccat

SEQ ID NO: 482632 - DNA, 25 bp, Homo sapien
tgtgagcagaaacaacaggggttat

SEQ ID NO: 482633 - DNA, 25 bp, Homo sapien
tgagcagaaacaacaggggttatcc

SEQ ID NO: 482634 - DNA, 25 bp, Homo sapien
gtgagcagaaacaacaggggttatc

SEQ ID NO: 482635 - DNA, 25 bp, Homo sapien
ctgtgagcagaaacaacaggggtta

SEQ ID NO: 482636 - DNA, 25 bp, Homo sapien
gaaactcgaggccaaaatagtcacc

SEQ ID NO: 482637 - DNA, 25 bp, Homo sapien
aatagtcaccttccacgaggttgag

SEQ ID NO: 482638 - DNA, 25 bp, Homo sapien
tgtgatcaggaaactcgaggccaaa

SEQ ID NO: 482639 - DNA, 25 bp, Homo sapien
ggttgaggtggttgcaaactgcatc

SEQ ID NO: 482640 - DNA, 25 bp, Homo sapien
gatgaacagacagtaaaatagtaac

SEQ ID NO: 482641 - DNA, 25 bp, Homo sapien
gaacagacagtaaaatagtaacatt

SEQ ID NO: 482642 - DNA, 25 bp, Homo sapien
aagatgaacagacagtaaaatagta

SEQ ID NO: 482643 - DNA, 25 bp, Homo sapien
tgaacagacagtaaaatagtaacat

SEQ ID NO: 482644 - DNA, 25 bp, Homo sapien
ctgggagtcagggaatcttggattt

SEQ ID NO: 482645 - DNA, 25 bp, Homo sapien
cagggaatcttggatttgaagtaca

SEQ ID NO: 482646 - DNA, 25 bp, Homo sapien
ctgtggtcatatgccacactgtaaa

SEQ ID NO: 482647 - DNA, 25 bp, Homo sapien
gagtcagggaatcttggatttgaag

SEQ ID NO: 482648 - DNA, 25 bp, Homo sapien
tgccagacacagtgtaggcacaaaa

SEQ ID NO: 482649 - DNA, 25 bp, Homo sapien
tcatgtgaagtctgatgccagacac

SEQ ID NO: 482650 - DNA, 25 bp, Homo sapien
cagacacagtgtaggcacaaaataa

SEQ ID NO: 482651 - DNA, 25 bp, Homo sapien
gtgaagtctgatgccagacacagtg

SEQ ID NO: 482652 - DNA, 25 bp, Homo sapien
aggctgtcctcgatcctgtgacatt

SEQ ID NO: 482653 - DNA, 25 bp, Homo sapien
ctgtcctcgatcctgtgacattctc

SEQ ID NO: 482654 - DNA, 25 bp, Homo sapien
ttctccatcctttacacctcccatg

SEQ ID NO: 482655 - DNA, 25 bp, Homo sapien
attctccatcctttacacctcccat

SEQ ID NO: 482656 - DNA, 25 bp, Homo sapien
aaatctatgccgctgatctcttgaa

SEQ ID NO: 482657 - DNA, 25 bp, Homo sapien
cgctgatctcttgaacacactcaca

SEQ ID NO: 482658 - DNA, 25 bp, Homo sapien
tctcactgaaatctatgccgctgat

SEQ ID NO: 482659 - DNA, 25 bp, Homo sapien
aaaccgtagcccctgttctcactga

SEQ ID NO: 482660 - DNA, 25 bp, Homo sapien
gaagaggatgaatggcttcgtcaag

SEQ ID NO: 482661 - DNA, 25 bp, Homo sapien
tgaatggcttcgtcaagaaacttgg

SEQ ID NO: 482662 - DNA, 25 bp, Homo sapien
tgggtctgaacgtctggtgcatggg

SEQ ID NO: 482663 - DNA, 25 bp, Homo sapien
caggtcacttgacccagggttgggt

SEQ ID NO: 482664 - DNA, 25 bp, Homo sapien
ctgtttcacaatgggttttaggaga

SEQ ID NO: 482665 - DNA, 25 bp, Homo sapien
tctgtttcacaatgggttttaggag

SEQ ID NO: 482666 - DNA, 25 bp, Homo sapien
gtttcacaatgggttttaggagatc

SEQ ID NO: 482667 - DNA, 25 bp, Homo sapien
tgtttcacaatgggttttaggagat

SEQ ID NO: 482668 - DNA, 25 bp, Homo sapien
caaacttaacaacaacgtgctttgg

SEQ ID NO: 482669 - DNA, 25 bp, Homo sapien
caggcggaaagaatttcaccacaaa

SEQ ID NO: 482670 - DNA, 25 bp, Homo sapien
tcaccacaaacttaacaacaacgtg

SEQ ID NO: 482671 - DNA, 25 bp, Homo sapien
ttcttggagttgtgtgtggtcaggc

SEQ ID NO: 482672 - DNA, 25 bp, Homo sapien
tgcatgggctggaacggattccagc

SEQ ID NO: 482673 - DNA, 25 bp, Homo sapien
atgcaaaccccaaccacgaagtctg

SEQ ID NO: 482674 - DNA, 25 bp, Homo sapien
ttcactgcagtgtaaatatctccct

SEQ ID NO: 482675 - DNA, 25 bp, Homo sapien
gcagtgtaaatatctccctccaaaa

SEQ ID NO: 482676 - DNA, 25 bp, Homo sapien
gagagctgcgctggtgtcattacac

SEQ ID NO: 482677 - DNA, 25 bp, Homo sapien
tgcacaatgtgtgaaatcaagagag

SEQ ID NO: 482678 - DNA, 25 bp, Homo sapien
tgtcattacacgtcaacctgccttg

SEQ ID NO: 482679 - DNA, 25 bp, Homo sapien
gtcaacctgccttgagccaagtcct

SEQ ID NO: 482680 - DNA, 25 bp, Homo sapien
gcaaggaccacacgacctgcacaaa

SEQ ID NO: 482681 - DNA, 25 bp, Homo sapien
agagcaaggaccacacgacctgcac

SEQ ID NO: 482682 - DNA, 25 bp, Homo sapien
gacctgcacaaacgcagccctgcct

SEQ ID NO: 482683 - DNA, 25 bp, Homo sapien
tcagagcaaggaccacacgacctgc

SEQ ID NO: 482684 - DNA, 25 bp, Homo sapien
ctgaaagtgtcacatcagcttatgc

SEQ ID NO: 482685 - DNA, 25 bp, Homo sapien
taataaatggatgcaacttccccag

SEQ ID NO: 482686 - DNA, 25 bp, Homo sapien
gcatatactatattccttagcagtc

SEQ ID NO: 482687 - DNA, 25 bp, Homo sapien
gacaggcgtggacaaacctgcctta

SEQ ID NO: 482688 - DNA, 25 bp, Homo sapien
tcctcatcatccgaaagaccaacaa

SEQ ID NO: 482689 - DNA, 25 bp, Homo sapien
tcatcatccgaaagaccaacaacac

SEQ ID NO: 482690 - DNA, 25 bp, Homo sapien
ctcatcatccgaaagaccaacaaca

SEQ ID NO: 482691 - DNA, 25 bp, Homo sapien
ttcctcatcatccgaaagaccaaca

SEQ ID NO: 482692 - DNA, 25 bp, Homo sapien
gcagacaacataaggtgagcccagt

SEQ ID NO: 482693 - DNA, 25 bp, Homo sapien
tgagccaaacagaagctagcagaca

SEQ ID NO: 482694 - DNA, 25 bp, Homo sapien
gaaagaagcttcaaggtcaggcaca

SEQ ID NO: 482695 - DNA, 25 bp, Homo sapien
cagatctcagagacgggatgccagg

SEQ ID NO: 482696 - DNA, 25 bp, Homo sapien
tctagtgcgtcttgctgaggtatgt

SEQ ID NO: 482697 - DNA, 25 bp, Homo sapien
tggtgaaattccacgattttgtcct

SEQ ID NO: 482698 - DNA, 25 bp, Homo sapien
tttgtcctctagtgcgtcttgctga

SEQ ID NO: 482699 - DNA, 25 bp, Homo sapien
ttttttgctaagtgctctctgtcca

SEQ ID NO: 482700 - DNA, 25 bp, Homo sapien
gggctacccgatcagatgacaccca

SEQ ID NO: 482701 - DNA, 25 bp, Homo sapien
tgtaacccaaagtctagcagctagg

SEQ ID NO: 482702 - DNA, 25 bp, Homo sapien
aacctccactgctcatggaacataa

SEQ ID NO: 482703 - DNA, 25 bp, Homo sapien
tacaaaggcatttcatcacaaacac

SEQ ID NO: 482704 - DNA, 25 bp, Homo sapien
tggccgggtgcaaccggattccata

SEQ ID NO: 482705 - DNA, 25 bp, Homo sapien
gattccatacatctctagccgacgg

SEQ ID NO: 482706 - DNA, 25 bp, Homo sapien
ccgtgttggcaacggccagattgat

SEQ ID NO: 482707 - DNA, 25 bp, Homo sapien
tagccgacgggcaatctctaggagc

SEQ ID NO: 482708 - DNA, 25 bp, Homo sapien
gatactcagaggctatgcgtgcagg

SEQ ID NO: 482709 - DNA, 25 bp, Homo sapien
tgtggattccccaaacagggcaaag

SEQ ID NO: 482710 - DNA, 25 bp, Homo sapien
tgaagtcccgaccaaataagctggc

SEQ ID NO: 482711 - DNA, 25 bp, Homo sapien
tatgaatcagagttgaagggccagc

SEQ ID NO: 482712 - DNA, 25 bp, Homo sapien
gccggagcttgatgagaaagcgctt

SEQ ID NO: 482713 - DNA, 25 bp, Homo sapien
cttgatgagaaagcgcttcctcttg

SEQ ID NO: 482714 - DNA, 25 bp, Homo sapien
tggcccagttgaaggcattgatctt

SEQ ID NO: 482715 - DNA, 25 bp, Homo sapien
cagttgaaggcattgatcttagtga

SEQ ID NO: 482716 - DNA, 25 bp, Homo sapien
atcccatggctcaacgggtcccctt

SEQ ID NO: 482717 - DNA, 25 bp, Homo sapien
gacacacgccatcccatggctcaac

SEQ ID NO: 482718 - DNA, 25 bp, Homo sapien
acacgccatcccatggctcaacggg

SEQ ID NO: 482719 - DNA, 25 bp, Homo sapien
gccatcccatggctcaacgggtccc

SEQ ID NO: 482720 - DNA, 25 bp, Homo sapien
tcttagacgggtaacagaaacagcc

SEQ ID NO: 482721 - DNA, 25 bp, Homo sapien
gacgctcggcgttcatgtggacaaa

SEQ ID NO: 482722 - DNA, 25 bp, Homo sapien
tgtttaccaacgatgacagccgtag

SEQ ID NO: 482723 - DNA, 25 bp, Homo sapien
tacatctgtcctagagacgctcggc

SEQ ID NO: 482724 - DNA, 25 bp, Homo sapien
tggtttgggctcttcaaaaagtcta

SEQ ID NO: 482725 - DNA, 25 bp, Homo sapien
gaattccaaggtatcctggtacgca

SEQ ID NO: 482726 - DNA, 25 bp, Homo sapien
gaaatcccgactggccatcaggaat

SEQ ID NO: 482727 - DNA, 25 bp, Homo sapien
tgaaccgaaatgatgacccccggct

SEQ ID NO: 482728 - DNA, 25 bp, Homo sapien
tctgagttagagactcccgctaggc

SEQ ID NO: 482729 - DNA, 25 bp, Homo sapien
agatgcagggttgcttggctagcca

SEQ ID NO: 482730 - DNA, 25 bp, Homo sapien
tgaaacagagaccacaacagggaag

SEQ ID NO: 482731 - DNA, 25 bp, Homo sapien
ccactgggattaagatacaagcgcc

SEQ ID NO: 482732 - DNA, 25 bp, Homo sapien
tttaacatagtcgagaacctgcttc

SEQ ID NO: 482733 - DNA, 25 bp, Homo sapien
tctttaacatagtcgagaacctgct

SEQ ID NO: 482734 - DNA, 25 bp, Homo sapien
taacatagtcgagaacctgcttctg

SEQ ID NO: 482735 - DNA, 25 bp, Homo sapien
ttctttaacatagtcgagaacctgc

SEQ ID NO: 482736 - DNA, 25 bp, Homo sapien
aaactgttacctggcgagtctgagc

SEQ ID NO: 482737 - DNA, 25 bp, Homo sapien
taccatgtctgtaacgagagctgca

SEQ ID NO: 482738 - DNA, 25 bp, Homo sapien
gaggattgatcgagtcccagaggct

SEQ ID NO: 482739 - DNA, 25 bp, Homo sapien
tgcttagcagctatgagacctggac

SEQ ID NO: 482740 - DNA, 25 bp, Homo sapien
cgctctgtggcccagagatggaggg

SEQ ID NO: 482741 - DNA, 25 bp, Homo sapien
ctgtggcccagagatggagggcagt

SEQ ID NO: 482742 - DNA, 25 bp, Homo sapien
ttgggacaggatctcgctctgtggc

SEQ ID NO: 482743 - DNA, 25 bp, Homo sapien
ctctgtggcccagagatggagggca

SEQ ID NO: 482744 - DNA, 25 bp, Homo sapien
gatagaatgaatcttgctgtgcttc

SEQ ID NO: 482745 - DNA, 25 bp, Homo sapien
gctccggatagaatgaatcttgctg

SEQ ID NO: 482746 - DNA, 25 bp, Homo sapien
tgaagcaaggctccggatagaatga

SEQ ID NO: 482747 - DNA, 25 bp, Homo sapien
taggctgtgaagcaaggctccggat

SEQ ID NO: 482748 - DNA, 25 bp, Homo sapien
caggcaggagttacacccattggtt

SEQ ID NO: 482749 - DNA, 25 bp, Homo sapien
cccaagtggacccatttagctggag

SEQ ID NO: 482750 - DNA, 25 bp, Homo sapien
gtaatacaagctctgggaactcgcc

SEQ ID NO: 482751 - DNA, 25 bp, Homo sapien
gaactcgccgaccagttctgtgcca

SEQ ID NO: 482752 - DNA, 25 bp, Homo sapien
gtggggaaaaaggtgcggagagata

SEQ ID NO: 482753 - DNA, 25 bp, Homo sapien
gagaagagggagactgttattccaa

SEQ ID NO: 482754 - DNA, 25 bp, Homo sapien
tagagaagagggagactgttattcc

SEQ ID NO: 482755 - DNA, 25 bp, Homo sapien
aaaaaggtgcggagagatagagaag

SEQ ID NO: 482756 - DNA, 25 bp, Homo sapien
tggagattcggcaccttctccaaat

SEQ ID NO: 482757 - DNA, 25 bp, Homo sapien
ggttcctttcctcgccggcagctct

SEQ ID NO: 482758 - DNA, 25 bp, Homo sapien
aaatgtaaggctggtgctctgctga

SEQ ID NO: 482759 - DNA, 25 bp, Homo sapien
gcagggctcgggtgcgaccccggct

SEQ ID NO: 482760 - DNA, 25 bp, Homo sapien
tgctgggtcctatccttaacgacct

SEQ ID NO: 482761 - DNA, 25 bp, Homo sapien
gaggcggctccgtccgcctgcttgt

SEQ ID NO: 482762 - DNA, 25 bp, Homo sapien
ggctgaggtttactctgctgggtcc

SEQ ID NO: 482763 - DNA, 25 bp, Homo sapien
ggtttactctgctgggtcctatcct

SEQ ID NO: 482764 - DNA, 25 bp, Homo sapien
gatagacaccgctggtcagatcacc

SEQ ID NO: 482765 - DNA, 25 bp, Homo sapien
ccgggatcgggacgcttgttctcta

SEQ ID NO: 482766 - DNA, 25 bp, Homo sapien
tgttctctaagaaggtcgtattcgc

SEQ ID NO: 482767 - DNA, 25 bp, Homo sapien
aaaggaatggaagtactgctgcctc

SEQ ID NO: 482768 - DNA, 25 bp, Homo sapien
agagtgcggggaagccctacgccca

SEQ ID NO: 482769 - DNA, 25 bp, Homo sapien
aagccctacgcccagcctctcttcg

SEQ ID NO: 482770 - DNA, 25 bp, Homo sapien
aggccgggaggacttcgcagagtgc

SEQ ID NO: 482771 - DNA, 25 bp, Homo sapien
acttcgcagagtgcggggaagccct

SEQ ID NO: 482772 - DNA, 25 bp, Homo sapien
gaccagcgttcataaggaggaccct

SEQ ID NO: 482773 - DNA, 25 bp, Homo sapien
gaagattccgcatgtatggccttgg

SEQ ID NO: 482774 - DNA, 25 bp, Homo sapien
cattttccgaaacatagccttgaga

SEQ ID NO: 482775 - DNA, 25 bp, Homo sapien
agggctcccgctcatatcaaaggtg

SEQ ID NO: 482776 - DNA, 25 bp, Homo sapien
caggcttctaccctcgggagcagct

SEQ ID NO: 482777 - DNA, 25 bp, Homo sapien
aaggatgagtggatctgtctctgac

SEQ ID NO: 482778 - DNA, 25 bp, Homo sapien
taaatgctacctggctaaggatgag

SEQ ID NO: 482779 - DNA, 25 bp, Homo sapien
tggtggagccctcggtcacttgcag

SEQ ID NO: 482780 - DNA, 25 bp, Homo sapien
gaacgcagcactgcggggttaccaa

SEQ ID NO: 482781 - DNA, 25 bp, Homo sapien
gttaccaaatatgaggggctgactc

SEQ ID NO: 482782 - DNA, 25 bp, Homo sapien
tcactcaaacgcaggccacccaagg

SEQ ID NO: 482783 - DNA, 25 bp, Homo sapien
agcagggacggggaacgcagcactg

SEQ ID NO: 482784 - DNA, 25 bp, Homo sapien
tctggaaagcaagccacttatgtga

SEQ ID NO: 482785 - DNA, 25 bp, Homo sapien
gtctcgtgaccccaggttgctcggg

SEQ ID NO: 482786 - DNA, 25 bp, Homo sapien
taggacttgctgtttatcttgccca

SEQ ID NO: 482787 - DNA, 25 bp, Homo sapien
tgctcgggctgaagacttggctcct

SEQ ID NO: 482788 - DNA, 25 bp, Homo sapien
taaaacataacaatatgatccacca

SEQ ID NO: 482789 - DNA, 25 bp, Homo sapien
gcaatccctagtagatcacaattca

SEQ ID NO: 482790 - DNA, 25 bp, Homo sapien
aaccaaaccagcaatccctagtaga

SEQ ID NO: 482791 - DNA, 25 bp, Homo sapien
tccaccaatgcaaacctaaaccaaa

SEQ ID NO: 482792 - DNA, 25 bp, Homo sapien
ccctgcatccacactcaataggatt

SEQ ID NO: 482793 - DNA, 25 bp, Homo sapien
catccacactcaataggatttcagt

SEQ ID NO: 482794 - DNA, 25 bp, Homo sapien
ctatttcaaggtgttgctcttccct

SEQ ID NO: 482795 - DNA, 25 bp, Homo sapien
tatttcaaggtgttgctcttccctg

SEQ ID NO: 482796 - DNA, 25 bp, Homo sapien
tgagatcaaaatccctagggtcagg

SEQ ID NO: 482797 - DNA, 25 bp, Homo sapien
cagtacaaacagctgggaagcccaa

SEQ ID NO: 482798 - DNA, 25 bp, Homo sapien
cagggtcccggcatcactaattttt

SEQ ID NO: 482799 - DNA, 25 bp, Homo sapien
cactagattcgagacagcctgggta

SEQ ID NO: 482800 - DNA, 25 bp, Homo sapien
taaaaccgacttctggacattcatg

SEQ ID NO: 482801 - DNA, 25 bp, Homo sapien
catttgtcaatgagacgagccgatc

SEQ ID NO: 482802 - DNA, 25 bp, Homo sapien
cagtgtcctaagcacgcctggtgct

SEQ ID NO: 482803 - DNA, 25 bp, Homo sapien
tatggtggcacatcagggagctatc

SEQ ID NO: 482804 - DNA, 25 bp, Homo sapien
ccttgttggaagagcaaagttcacc

SEQ ID NO: 482805 - DNA, 25 bp, Homo sapien
ttaacaagcggcagcaaaggcaacc

SEQ ID NO: 482806 - DNA, 25 bp, Homo sapien
gattttccatgaccgcactggcggc

SEQ ID NO: 482807 - DNA, 25 bp, Homo sapien
taagatagcacgtcacagagcagcc

SEQ ID NO: 482808 - DNA, 25 bp, Homo sapien
gaacagctcaggattagcccacagg

SEQ ID NO: 482809 - DNA, 25 bp, Homo sapien
cagtggaatacgcaaagctggcggt

SEQ ID NO: 482810 - DNA, 25 bp, Homo sapien
tatggttccataagagagcctgcct

SEQ ID NO: 482811 - DNA, 25 bp, Homo sapien
gatcagtcacacaccgaaagtctgg

SEQ ID NO: 482812 - DNA, 25 bp, Homo sapien
tccactctcaaaggccaacagcgag

SEQ ID NO: 482813 - DNA, 25 bp, Homo sapien
tagggggagcacactccgatacagc

SEQ ID NO: 482814 - DNA, 25 bp, Homo sapien
gacagcatccggcaacagagaggaa

SEQ ID NO: 482815 - DNA, 25 bp, Homo sapien
gaaaagaactgccactcggggcaag

SEQ ID NO: 482816 - DNA, 25 bp, Homo sapien
acagaaaaagcattcacctcatcat

SEQ ID NO: 482817 - DNA, 25 bp, Homo sapien
gcaaggaaatagcaactaacaggcc

SEQ ID NO: 482818 - DNA, 25 bp, Homo sapien
accttgactttgcagtgacgtggaa

SEQ ID NO: 482819 - DNA, 25 bp, Homo sapien
gagttggagccgagaataaaaggta

SEQ ID NO: 482820 - DNA, 25 bp, Homo sapien
cttcagctctcgcactgtgcgtgag

SEQ ID NO: 482821 - DNA, 25 bp, Homo sapien
gatcgggtgaggcagttataagtga

SEQ ID NO: 482822 - DNA, 25 bp, Homo sapien
actgtgcgtgagatcgggtgaggca

SEQ ID NO: 482823 - DNA, 25 bp, Homo sapien
ggtgaggcagttataagtgagagca

SEQ ID NO: 482824 - DNA, 25 bp, Homo sapien
tttatttgtccaccgtaatctggca

SEQ ID NO: 482825 - DNA, 25 bp, Homo sapien
gaaattctggcagtctgtctagagg

SEQ ID NO: 482826 - DNA, 25 bp, Homo sapien
caaaggaagtggaacgtgtcaaaca

SEQ ID NO: 482827 - DNA, 25 bp, Homo sapien
gaactgcagttgtttcaaggtacta

SEQ ID NO: 482828 - DNA, 25 bp, Homo sapien
gtggagggcggttttctaggagcac

SEQ ID NO: 482829 - DNA, 25 bp, Homo sapien
tggagggcggttttctaggagcacc

SEQ ID NO: 482830 - DNA, 25 bp, Homo sapien
ggtggagggcggttttctaggagca

SEQ ID NO: 482831 - DNA, 25 bp, Homo sapien
ggaaagacaaagtcagcgctttctc

SEQ ID NO: 482832 - DNA, 25 bp, Homo sapien
caggctcgctgctacttggtacgct

SEQ ID NO: 482833 - DNA, 25 bp, Homo sapien
tttcaggctcgctgctacttggtac

SEQ ID NO: 482834 - DNA, 25 bp, Homo sapien
cagtcctgtctactaccatgataag

SEQ ID NO: 482835 - DNA, 25 bp, Homo sapien
tcagcagcgggctgatcaagggaga

SEQ ID NO: 482836 - DNA, 25 bp, Homo sapien
cagacagctcggaaaggtgaggact

SEQ ID NO: 482837 - DNA, 25 bp, Homo sapien
caggcctggtcattcagcagcgggc

SEQ ID NO: 482838 - DNA, 25 bp, Homo sapien
ctcaggttgggagacaaggtcacgt

SEQ ID NO: 482839 - DNA, 25 bp, Homo sapien
gatccttcagatatgttcgctcggt

SEQ ID NO: 482840 - DNA, 25 bp, Homo sapien
cgctcggtggtagacacttccttag

SEQ ID NO: 482841 - DNA, 25 bp, Homo sapien
cacttccttagctatgaagtacgct

SEQ ID NO: 482842 - DNA, 25 bp, Homo sapien
tatgaagtacgctttatcagttggg

SEQ ID NO: 482843 - DNA, 25 bp, Homo sapien
gaggtctcccgtgaacaaaaatcag

SEQ ID NO: 482844 - DNA, 25 bp, Homo sapien
cgacatgttctggactggtgcacac

SEQ ID NO: 482845 - DNA, 25 bp, Homo sapien
cagcagttatacttggcaatgggca

SEQ ID NO: 482846 - DNA, 25 bp, Homo sapien
tgaatctcctgttcacctccgaggt

SEQ ID NO: 482847 - DNA, 25 bp, Homo sapien
tggaaagatcaatgacgagtgtctg

SEQ ID NO: 482848 - DNA, 25 bp, Homo sapien
gaaagatcaatgacgagtgtctgca

SEQ ID NO: 482849 - DNA, 25 bp, Homo sapien
ggtggaaagatcaatgacgagtgtc

SEQ ID NO: 482850 - DNA, 25 bp, Homo sapien
aagatcaatgacgagtgtctgcagt

SEQ ID NO: 482851 - DNA, 25 bp, Homo sapien
tccggcatggcgtcctctttgctca

SEQ ID NO: 482852 - DNA, 25 bp, Homo sapien
aaggttcaaaattcgggaatatgag

SEQ ID NO: 482853 - DNA, 25 bp, Homo sapien
cagggcaagtcgttgctcaatttcc

SEQ ID NO: 482854 - DNA, 25 bp, Homo sapien
tatgagacttttcagtgcttccggc

SEQ ID NO: 482855 - DNA, 25 bp, Homo sapien
acagatttagcccaagggttgcctg

SEQ ID NO: 482856 - DNA, 25 bp, Homo sapien
tcttaataatcttccctgtgatcca

SEQ ID NO: 482857 - DNA, 25 bp, Homo sapien
tgaacacacacatgcgcagtctgtc

SEQ ID NO: 482858 - DNA, 25 bp, Homo sapien
tgatccattcttctcactgaacaga

SEQ ID NO: 482859 - DNA, 25 bp, Homo sapien
tcacggcaacgtgaggaaaggcatg

SEQ ID NO: 482860 - DNA, 25 bp, Homo sapien
aaaggcatgggtacacatacatgca

SEQ ID NO: 482861 - DNA, 25 bp, Homo sapien
atcccaatcgacaggagccaacctg

SEQ ID NO: 482862 - DNA, 25 bp, Homo sapien
tgcgcttccgtatcacggcaacgtg

SEQ ID NO: 482863 - DNA, 25 bp, Homo sapien
ttcacccaggaggaaatgcggttca

SEQ ID NO: 482864 - DNA, 25 bp, Homo sapien
tgttcaaaactctaggtggcctccc

SEQ ID NO: 482865 - DNA, 25 bp, Homo sapien
gtttggagcactttatcacagggcc

SEQ ID NO: 482866 - DNA, 25 bp, Homo sapien
gagggcctctttgtacgactgactg

SEQ ID NO: 482867 - DNA, 25 bp, Homo sapien
gctgccatgatctacgtttatggaa

SEQ ID NO: 482868 - DNA, 25 bp, Homo sapien
tatagtcgagaagattctgccctca

SEQ ID NO: 482869 - DNA, 25 bp, Homo sapien
tatggaaagcaagctgccataaagg

SEQ ID NO: 482870 - DNA, 25 bp, Homo sapien
tgtggataacttccaaacctacacc

SEQ ID NO: 482871 - DNA, 25 bp, Homo sapien
caccaggtcgaattgaataagagga

SEQ ID NO: 482872 - DNA, 25 bp, Homo sapien
gacaacccggtcacaggcaggtttg

SEQ ID NO: 482873 - DNA, 25 bp, Homo sapien
ggtttgatagcatccaggtgagccc

SEQ ID NO: 482874 - DNA, 25 bp, Homo sapien
ttgaataagaggatccaaagtgaca

SEQ ID NO: 482875 - DNA, 25 bp, Homo sapien
tcaatgggccgggaacgccgcgcct

SEQ ID NO: 482876 - DNA, 25 bp, Homo sapien
tgtcaagatgacatttgtgcgagag

SEQ ID NO: 482877 - DNA, 25 bp, Homo sapien
gcatcttcaatgggccgggaacgcc

SEQ ID NO: 482878 - DNA, 25 bp, Homo sapien
acatttgtgcgagaggcatcttcaa

SEQ ID NO: 482879 - DNA, 25 bp, Homo sapien
ctgctgcccatctagaaacatcctc

SEQ ID NO: 482880 - DNA, 25 bp, Homo sapien
gctgcccatctagaaacatcctcat

SEQ ID NO: 482881 - DNA, 25 bp, Homo sapien
cctgctgcccatctagaaacatcct

SEQ ID NO: 482882 - DNA, 25 bp, Homo sapien
tgctgcccatctagaaacatcctca

SEQ ID NO: 482883 - DNA, 25 bp, Homo sapien
ggatctgccatttgagaacatacag

SEQ ID NO: 482884 - DNA, 25 bp, Homo sapien
atagacacacccctacccaagagaa

SEQ ID NO: 482885 - DNA, 25 bp, Homo sapien
ggaatgagatggaagccaaatgtca

SEQ ID NO: 482886 - DNA, 25 bp, Homo sapien
tattctagtgagagtctggattgcg

SEQ ID NO: 482887 - DNA, 25 bp, Homo sapien
tcttagctgctttaattggcaccgc

SEQ ID NO: 482888 - DNA, 25 bp, Homo sapien
tctgctaattaaacgaatctctccc

SEQ ID NO: 482889 - DNA, 25 bp, Homo sapien
tcctcagtcctctgcgttctcttag

SEQ ID NO: 482890 - DNA, 25 bp, Homo sapien
tcctcctatattcgggctctccggg

SEQ ID NO: 482891 - DNA, 25 bp, Homo sapien
gctaagaaccctccggcaacgcgag

SEQ ID NO: 482892 - DNA, 25 bp, Homo sapien
caatctccgatacatcaaggatctt

SEQ ID NO: 482893 - DNA, 25 bp, Homo sapien
aacgcgagaaatggcttccactggg

SEQ ID NO: 482894 - DNA, 25 bp, Homo sapien
tgttgactcaatctccgatacatca

SEQ ID NO: 482895 - DNA, 25 bp, Homo sapien
aatgttcttcagcatgacatcgccg

SEQ ID NO: 482896 - DNA, 25 bp, Homo sapien
tgacatcgccgattctttggtaatc

SEQ ID NO: 482897 - DNA, 25 bp, Homo sapien
cgccgattctttggtaatctctgat

SEQ ID NO: 482898 - DNA, 25 bp, Homo sapien
gtaatctctgatttgggcatttgag

SEQ ID NO: 482899 - DNA, 25 bp, Homo sapien
atggcagccccgctcgattctcctt

SEQ ID NO: 482900 - DNA, 25 bp, Homo sapien
tcgattctccttggtgaaccttgct

SEQ ID NO: 482901 - DNA, 25 bp, Homo sapien
agccccgctcgattctccttggtga

SEQ ID NO: 482902 - DNA, 25 bp, Homo sapien
ccgctcgattctccttggtgaacct

SEQ ID NO: 482903 - DNA, 25 bp, Homo sapien
cctccaaggcctcgctgtgcttcca

SEQ ID NO: 482904 - DNA, 25 bp, Homo sapien
gcggtaggtaacacaccttctgcag

SEQ ID NO: 482905 - DNA, 25 bp, Homo sapien
cttgtagtgcatgagccggtgcagt

SEQ ID NO: 482906 - DNA, 25 bp, Homo sapien
caggacctgcttgtagtgcatgagc

SEQ ID NO: 482907 - DNA, 25 bp, Homo sapien
tgaagtcggcgtggctcggcgggtg

SEQ ID NO: 482908 - DNA, 25 bp, Homo sapien
cgtggctcggcgggtggtgtttgca

SEQ ID NO: 482909 - DNA, 25 bp, Homo sapien
gtccctgaagtcggcgtggctcggc

SEQ ID NO: 482910 - DNA, 25 bp, Homo sapien
gtggctcggcgggtggtgtttgcac

SEQ ID NO: 482911 - DNA, 25 bp, Homo sapien
ttccgttcagaagagcacgcgtggc

SEQ ID NO: 482912 - DNA, 25 bp, Homo sapien
tacaagctatgttctgtggccatgg

SEQ ID NO: 482913 - DNA, 25 bp, Homo sapien
gaagacttccgattttagcctgagg

SEQ ID NO: 482914 - DNA, 25 bp, Homo sapien
gtcacgtgggtagaagcaagcttcc

SEQ ID NO: 482915 - DNA, 25 bp, Homo sapien
tccagtgggtcctgtgaggtcaggg

SEQ ID NO: 482916 - DNA, 25 bp, Homo sapien
tgcagaccctccagtgggtcctgtg

SEQ ID NO: 482917 - DNA, 25 bp, Homo sapien
ggtcaggggccgcactgttccttct

SEQ ID NO: 482918 - DNA, 25 bp, Homo sapien
acacgcccagtacaggtgctcgctg

SEQ ID NO: 482919 - DNA, 25 bp, Homo sapien
tatttttcgatagaggcacggctcc

SEQ ID NO: 482920 - DNA, 25 bp, Homo sapien
caactaatttgtaggagtccgccat

SEQ ID NO: 482921 - DNA, 25 bp, Homo sapien
tggtggccaggactctaagcagaag

SEQ ID NO: 482922 - DNA, 25 bp, Homo sapien
catgggcgacagatctgaggagtcc

SEQ ID NO: 482923 - DNA, 25 bp, Homo sapien
gtaccgtggagctgtgccaccatct

SEQ ID NO: 482924 - DNA, 25 bp, Homo sapien
ccttcccggaaccacaagattgtca

SEQ ID NO: 482925 - DNA, 25 bp, Homo sapien
gagttcgtgcagcttctggaaattc

SEQ ID NO: 482926 - DNA, 25 bp, Homo sapien
catcttgatcatcgtaccgtggagc

SEQ ID NO: 482927 - DNA, 25 bp, Homo sapien
aagaagcgaatcaccccgtaaggag

SEQ ID NO: 482928 - DNA, 25 bp, Homo sapien
ggtctctcttcaaaaggttcaaatg

SEQ ID NO: 482929 - DNA, 25 bp, Homo sapien
gctttatctcctccgaacacaatga

SEQ ID NO: 482930 - DNA, 25 bp, Homo sapien
tgattctgaactaacgacactgttg

SEQ ID NO: 482931 - DNA, 25 bp, Homo sapien
taatgcactacctttctggctttat

SEQ ID NO: 482932 - DNA, 25 bp, Homo sapien
tctggctttattactatttacctaa

SEQ ID NO: 482933 - DNA, 25 bp, Homo sapien
cataatttaatgcactacctttctg

SEQ ID NO: 482934 - DNA, 25 bp, Homo sapien
ttctagcataatttaatgcactacc

SEQ ID NO: 482935 - DNA, 25 bp, Homo sapien
tgagacgcagcaactgaatgatacg

SEQ ID NO: 482936 - DNA, 25 bp, Homo sapien
ggcgccacagggtaaagatcccaga

SEQ ID NO: 482937 - DNA, 25 bp, Homo sapien
tgagttgtctctcgacctgggtgac

SEQ ID NO: 482938 - DNA, 25 bp, Homo sapien
cctgggtgacgtagcatttgaaatg

SEQ ID NO: 482939 - DNA, 25 bp, Homo sapien
caatctctcacaacgtggcttctgg

SEQ ID NO: 482940 - DNA, 25 bp, Homo sapien
taattaggcttcctgacagaaatgc

SEQ ID NO: 482941 - DNA, 25 bp, Homo sapien
cgcttaccgcatggctcttctgaca

SEQ ID NO: 482942 - DNA, 25 bp, Homo sapien
gaaaattacatcgattccacagggc

SEQ ID NO: 482943 - DNA, 25 bp, Homo sapien
catcatcacctgatcggccagtgtg

SEQ ID NO: 482944 - DNA, 25 bp, Homo sapien
gcgacacggagcgattacaggagct

SEQ ID NO: 482945 - DNA, 25 bp, Homo sapien
aaaatgcttcccgttgtgctctgca

SEQ ID NO: 482946 - DNA, 25 bp, Homo sapien
gtagagcgagactttgaacccaggg

SEQ ID NO: 482947 - DNA, 25 bp, Homo sapien
tttactaataacaatggcctcctct

SEQ ID NO: 482948 - DNA, 25 bp, Homo sapien
cctaagtgtggagtcctaataaggg

SEQ ID NO: 482949 - DNA, 25 bp, Homo sapien
gatgcgcctggcttgtcctaagtgt

SEQ ID NO: 482950 - DNA, 25 bp, Homo sapien
agcacatgggatgcgcctggcttgt

SEQ ID NO: 482951 - DNA, 25 bp, Homo sapien
tgaggctgcccagacggatgaactc

SEQ ID NO: 482952 - DNA, 25 bp, Homo sapien
caggaagaacatgcgctgctggagc

SEQ ID NO: 482953 - DNA, 25 bp, Homo sapien
gctgaggctgcccagacggatgaac

SEQ ID NO: 482954 - DNA, 25 bp, Homo sapien
ctgaggctgcccagacggatgaact

SEQ ID NO: 482955 - DNA, 25 bp, Homo sapien
acaatccttgtgaggacaagccgct

SEQ ID NO: 482956 - DNA, 25 bp, Homo sapien
ttgtgaggacaagccgctctctcca

SEQ ID NO: 482957 - DNA, 25 bp, Homo sapien
ttgcccaggtgacacaatccttgtg

SEQ ID NO: 482958 - DNA, 25 bp, Homo sapien
ggagccttgcttgcccaggtgacac

SEQ ID NO: 482959 - DNA, 25 bp, Homo sapien
tcgtgtatagcaggacgtcgttgaa

SEQ ID NO: 482960 - DNA, 25 bp, Homo sapien
ggagctgcccgtggactttaaactg

SEQ ID NO: 482961 - DNA, 25 bp, Homo sapien
cgtcatgccatagagcgggagctgc

SEQ ID NO: 482962 - DNA, 25 bp, Homo sapien
gtcagcccccggctcgtgtatagca

SEQ ID NO: 482963 - DNA, 25 bp, Homo sapien
ggccacgagcctgtgctgtactcac

SEQ ID NO: 482964 - DNA, 25 bp, Homo sapien
tggccacgagcctgtgctgtactca

SEQ ID NO: 482965 - DNA, 25 bp, Homo sapien
aggaggcagccccaaaccaactcgg

SEQ ID NO: 482966 - DNA, 25 bp, Homo sapien
tcatccttgtgtgtggcgaggactg

SEQ ID NO: 482967 - DNA, 25 bp, Homo sapien
gacaggaggcagccccaaaccaact

SEQ ID NO: 482968 - DNA, 25 bp, Homo sapien
gggagcgggcgctgtcatccttgtg

SEQ ID NO: 482969 - DNA, 25 bp, Homo sapien
gaagatcgcggcacactgaatgttt

SEQ ID NO: 482970 - DNA, 25 bp, Homo sapien
ggcactctgagttggaaaaacccaa

SEQ ID NO: 482971 - DNA, 25 bp, Homo sapien
cccaaatcggaaaggcgacaggaag

SEQ ID NO: 482972 - DNA, 25 bp, Homo sapien
gatgcacttccaaacatccctgagc

SEQ ID NO: 482973 - DNA, 25 bp, Homo sapien
tgtgggcaagagaagataacgtcac

SEQ ID NO: 482974 - DNA, 25 bp, Homo sapien
ctgtgggcaagagaagataacgtca

SEQ ID NO: 482975 - DNA, 25 bp, Homo sapien
tggcggccacgatgatggactgccg

SEQ ID NO: 482976 - DNA, 25 bp, Homo sapien
ctggcggccacgatgatggactgcc

SEQ ID NO: 482977 - DNA, 25 bp, Homo sapien
ggcggccacgatgatggactgccgc

SEQ ID NO: 482978 - DNA, 25 bp, Homo sapien
cgccaggtcaatggccatctggatg

SEQ ID NO: 482979 - DNA, 25 bp, Homo sapien
ccacttctccatctcggaccgagaa

SEQ ID NO: 482980 - DNA, 25 bp, Homo sapien
ttctccgccaggtcaatggccatct

SEQ ID NO: 482981 - DNA, 25 bp, Homo sapien
ccatgaaccagacccctgcatggga

SEQ ID NO: 482982 - DNA, 25 bp, Homo sapien
cctccatgaaccagacccctgcatg

SEQ ID NO: 482983 - DNA, 25 bp, Homo sapien
ggctttagatgcagaaatgctgtcc

SEQ ID NO: 482984 - DNA, 25 bp, Homo sapien
tccctccatgaaccagacccctgca

SEQ ID NO: 482985 - DNA, 25 bp, Homo sapien
gtgcgcgaggcgctcaggtcatcct

SEQ ID NO: 482986 - DNA, 25 bp, Homo sapien
tgccagcacacgtgcaccattgtgt

SEQ ID NO: 482987 - DNA, 25 bp, Homo sapien
actgcgatgctgaagtccaccatgg

SEQ ID NO: 482988 - DNA, 25 bp, Homo sapien
tccaccatggagacgctggtgttgc

SEQ ID NO: 482989 - DNA, 25 bp, Homo sapien
cagccaccgcgggtaggtggggcca

SEQ ID NO: 482990 - DNA, 25 bp, Homo sapien
agaagtttgcctgggttctgcctgg

SEQ ID NO: 482991 - DNA, 25 bp, Homo sapien
ctgctcagccaccgcgggtaggtgg

SEQ ID NO: 482992 - DNA, 25 bp, Homo sapien
cccagaagtttgcctgggttctgcc

SEQ ID NO: 482993 - DNA, 25 bp, Homo sapien
ctgtgttctgggctaactgcatgag

SEQ ID NO: 482994 - DNA, 25 bp, Homo sapien
ggcggttcaggacatgacagccatg

SEQ ID NO: 482995 - DNA, 25 bp, Homo sapien
gatggcaataggactgatgagcacc

SEQ ID NO: 482996 - DNA, 25 bp, Homo sapien
gaaaacgaccttgtggatggcaata

SEQ ID NO: 482997 - DNA, 25 bp, Homo sapien
ctgcttgccatcgtgcagactctcc

SEQ ID NO: 482998 - DNA, 25 bp, Homo sapien
tgcttgccatcgtgcagactctcct

SEQ ID NO: 482999 - DNA, 25 bp, Homo sapien
agaaacaagcggcttgtagcaggaa

SEQ ID NO: 483000 - DNA, 25 bp, Homo sapien
caagcggcttgtagcaggaaactca

SEQ ID NO: 483001 - DNA, 25 bp, Homo sapien
gcggcttgtagcaggaaactcaata

SEQ ID NO: 483002 - DNA, 25 bp, Homo sapien
gtagcaggaaactcaataaaggcag

SEQ ID NO: 483003 - DNA, 25 bp, Homo sapien
cactcaggggaaccccatgggacag

SEQ ID NO: 483004 - DNA, 25 bp, Homo sapien
cggatgtgtccccttgaggatgtct

SEQ ID NO: 483005 - DNA, 25 bp, Homo sapien
ctgcacctcggatgtgtccccttga

SEQ ID NO: 483006 - DNA, 25 bp, Homo sapien
tccccttgaggatgtcttcagaagc

SEQ ID NO: 483007 - DNA, 25 bp, Homo sapien
ctacacgagtcagacgggagtggga

SEQ ID NO: 483008 - DNA, 25 bp, Homo sapien
tacacgagtcagacgggagtgggaa

SEQ ID NO: 483009 - DNA, 25 bp, Homo sapien
cacgagtcagacgggagtgggaact

SEQ ID NO: 483010 - DNA, 25 bp, Homo sapien
acacgagtcagacgggagtgggaac

SEQ ID NO: 483011 - DNA, 25 bp, Homo sapien
agaggccagtgaggccacacggtcc

SEQ ID NO: 483012 - DNA, 25 bp, Homo sapien
ggtccccagatacgccccttcctca

SEQ ID NO: 483013 - DNA, 25 bp, Homo sapien
tgccggcttgcccacaacttttagc

SEQ ID NO: 483014 - DNA, 25 bp, Homo sapien
acaacttttagcagaggccagtgag

SEQ ID NO: 483015 - DNA, 25 bp, Homo sapien
cactggctctagtgcccacaggctg

SEQ ID NO: 483016 - DNA, 25 bp, Homo sapien
acttgcattgctttgcctctggccc

SEQ ID NO: 483017 - DNA, 25 bp, Homo sapien
tgtctgctgaacaacttccctgctg

SEQ ID NO: 483018 - DNA, 25 bp, Homo sapien
cagccttaaaagacaacttgcattg

SEQ ID NO: 483019 - DNA, 25 bp, Homo sapien
tgccacccgttgctgtttttgaatt

SEQ ID NO: 483020 - DNA, 25 bp, Homo sapien
acaggcagaagtttgtgaacaccac

SEQ ID NO: 483021 - DNA, 25 bp, Homo sapien
ccccgcatcagacagggacttggga

SEQ ID NO: 483022 - DNA, 25 bp, Homo sapien
tttgcctgtacgtgatggcccgggt

SEQ ID NO: 483023 - DNA, 25 bp, Homo sapien
ccgggtggcaagtcccgccaggact

SEQ ID NO: 483024 - DNA, 25 bp, Homo sapien
gcaaagtggcttttcggggtcagct

SEQ ID NO: 483025 - DNA, 25 bp, Homo sapien
gcttgaacacgtagtctttctggat

SEQ ID NO: 483026 - DNA, 25 bp, Homo sapien
tctggatgttctcggactcagaggg

SEQ ID NO: 483027 - DNA, 25 bp, Homo sapien
gcgagtagccgagcagaggcaggct

SEQ ID NO: 483028 - DNA, 25 bp, Homo sapien
cttgaagtgcagcttgaacacgtag

SEQ ID NO: 483029 - DNA, 25 bp, Homo sapien
ctttcgaacgtgtactcgctttccg

SEQ ID NO: 483030 - DNA, 25 bp, Homo sapien
cgctttccgccctgaagtagtagac

SEQ ID NO: 483031 - DNA, 25 bp, Homo sapien
aacgtgtactcgctttccgccctga

SEQ ID NO: 483032 - DNA, 25 bp, Homo sapien
gtgtactcgctttccgccctgaagt

SEQ ID NO: 483033 - DNA, 25 bp, Homo sapien
gacgtgtcccatcctgcttagtgga

SEQ ID NO: 483034 - DNA, 25 bp, Homo sapien
cactttggtgggcatcgcttacaga

SEQ ID NO: 483035 - DNA, 25 bp, Homo sapien
aacacaaggtgaagtcaggccgcct

SEQ ID NO: 483036 - DNA, 25 bp, Homo sapien
tggacggactcctgacactttggtg

SEQ ID NO: 483037 - DNA, 25 bp, Homo sapien
tgtgactcaacacgtggggtcgcga

SEQ ID NO: 483038 - DNA, 25 bp, Homo sapien
tggcactgcggatcacttccatcca

SEQ ID NO: 483039 - DNA, 25 bp, Homo sapien
agctggtggcactgcggatcacttc

SEQ ID NO: 483040 - DNA, 25 bp, Homo sapien
tctttgtgactcaacacgtggggtc

SEQ ID NO: 483041 - DNA, 25 bp, Homo sapien
ctgcggaaacgagtgtgtccggcca

SEQ ID NO: 483042 - DNA, 25 bp, Homo sapien
cagaagaaaggaaacgtcttccagg

SEQ ID NO: 483043 - DNA, 25 bp, Homo sapien
tttcaggtgagcgtgaaaccccgca

SEQ ID NO: 483044 - DNA, 25 bp, Homo sapien
tgccctgtcttgtgttgaacggatg

SEQ ID NO: 483045 - DNA, 25 bp, Homo sapien
tactggcactagctaaagaacagcg

SEQ ID NO: 483046 - DNA, 25 bp, Homo sapien
gaagtccacttcgtaaaatgcagca

SEQ ID NO: 483047 - DNA, 25 bp, Homo sapien
attgtgtacaccactcacaggacgg

SEQ ID NO: 483048 - DNA, 25 bp, Homo sapien
gacggtgacagtccaggtattgcac

SEQ ID NO: 483049 - DNA, 25 bp, Homo sapien
tcacggaacataccacaaatggtgc

SEQ ID NO: 483050 - DNA, 25 bp, Homo sapien
ggatctcggctttgcttaacagaaa

SEQ ID NO: 483051 - DNA, 25 bp, Homo sapien
ttcaaaccacagttgcaggaggata

SEQ ID NO: 483052 - DNA, 25 bp, Homo sapien
gtttttgaagacaggcacgatatat

SEQ ID NO: 483053 - DNA, 25 bp, Homo sapien
tatatactactagagaatgcgcagt

SEQ ID NO: 483054 - DNA, 25 bp, Homo sapien
tataggaataacgacaggtgccggg

SEQ ID NO: 483055 - DNA, 25 bp, Homo sapien
gagactctcgttagaaagggcttag

SEQ ID NO: 483056 - DNA, 25 bp, Homo sapien
cgtgttccctgtgcagtccgactga

SEQ ID NO: 483057 - DNA, 25 bp, Homo sapien
acaggcagacgtttcccgagtaggg

SEQ ID NO: 483058 - DNA, 25 bp, Homo sapien
gccaaagccactggaaaccgtgttc

SEQ ID NO: 483059 - DNA, 25 bp, Homo sapien
ctttgttagtactggaaaccgtctg

SEQ ID NO: 483060 - DNA, 25 bp, Homo sapien
catcttgtaaggcaaatgattaaca

SEQ ID NO: 483061 - DNA, 25 bp, Homo sapien
tcttcgtccgtttgcaagttgctgt

SEQ ID NO: 483062 - DNA, 25 bp, Homo sapien
ttaacacacggcaggctcttcgtcc

SEQ ID NO: 483063 - DNA, 25 bp, Homo sapien
ttttgccttaaaacatcaatatgct

SEQ ID NO: 483064 - DNA, 25 bp, Homo sapien
ttgccttaaaacatcaatatgctgg

SEQ ID NO: 483065 - DNA, 25 bp, Homo sapien
tgccttaaaacatcaatatgctgga

SEQ ID NO: 483066 - DNA, 25 bp, Homo sapien
tgttttgccttaaaacatcaatatg

SEQ ID NO: 483067 - DNA, 25 bp, Homo sapien
cagcctttgagacgggtttactgtc

SEQ ID NO: 483068 - DNA, 25 bp, Homo sapien
ttccaggcctgcattaagagagagc

SEQ ID NO: 483069 - DNA, 25 bp, Homo sapien
gtcaccagtagcctctcagtgccag

SEQ ID NO: 483070 - DNA, 25 bp, Homo sapien
taagggcatcttagccaaggaagct

SEQ ID NO: 483071 - DNA, 25 bp, Homo sapien
ccccgtagagcaacaagtggttctt

SEQ ID NO: 483072 - DNA, 25 bp, Homo sapien
tttaagtgagccagggcggacagca

SEQ ID NO: 483073 - DNA, 25 bp, Homo sapien
tgctagtaacagtgggtgagccgct

SEQ ID NO: 483074 - DNA, 25 bp, Homo sapien
gccgctcgagggactgggttctaat

SEQ ID NO: 483075 - DNA, 25 bp, Homo sapien
actgtttccttacgtgaggccggcg

SEQ ID NO: 483076 - DNA, 25 bp, Homo sapien
caaagatgagttttgtccttgcgaa

SEQ ID NO: 483077 - DNA, 25 bp, Homo sapien
gtactcattactccatacaagaatg

SEQ ID NO: 483078 - DNA, 25 bp, Homo sapien
gaggccggcggcataagtcaaagat

SEQ ID NO: 483079 - DNA, 25 bp, Homo sapien
cctatgcttgctaggcaggcagcca

SEQ ID NO: 483080 - DNA, 25 bp, Homo sapien
tctgtgcgattgctgtagcggttgc

SEQ ID NO: 483081 - DNA, 25 bp, Homo sapien
tgctgtgggaccttgcttggcgagg

SEQ ID NO: 483082 - DNA, 25 bp, Homo sapien
atgcagttggaggttgctgatctgt

SEQ ID NO: 483083 - DNA, 25 bp, Homo sapien
caccttgtagtggattctgcatatc

SEQ ID NO: 483084 - DNA, 25 bp, Homo sapien
gtttctccccatgaagcgctctcgt

SEQ ID NO: 483085 - DNA, 25 bp, Homo sapien
gtgccactgctggtctgcgccagat

SEQ ID NO: 483086 - DNA, 25 bp, Homo sapien
catttgtttggaatcgtgccactgc

SEQ ID NO: 483087 - DNA, 25 bp, Homo sapien
ccttttggtacacctagaggttgat

SEQ ID NO: 483088 - DNA, 25 bp, Homo sapien
gccttgcctttattacatgtacatt

SEQ ID NO: 483089 - DNA, 25 bp, Homo sapien
atttcctttttcatcgatggtacta

SEQ ID NO: 483090 - DNA, 25 bp, Homo sapien
taattaatgcccctctcttacagaa

SEQ ID NO: 483091 - DNA, 25 bp, Homo sapien
cggaaaccctttcggcgtgcataag

SEQ ID NO: 483092 - DNA, 25 bp, Homo sapien
cagtggagtaaatattcgacaggcc

SEQ ID NO: 483093 - DNA, 25 bp, Homo sapien
taagttgataactccctctgggagc

SEQ ID NO: 483094 - DNA, 25 bp, Homo sapien
ttcgctgactccaccgaagaggtgc

SEQ ID NO: 483095 - DNA, 25 bp, Homo sapien
tgtctcagctggaattaatgtttgg

SEQ ID NO: 483096 - DNA, 25 bp, Homo sapien
ttgtgtgacatcaactcatcccgtg

SEQ ID NO: 483097 - DNA, 25 bp, Homo sapien
taggctccgtggctaatgtgtgctt

SEQ ID NO: 483098 - DNA, 25 bp, Homo sapien
tcttgatagttgagtcttaggctcc

SEQ ID NO: 483099 - DNA, 25 bp, Homo sapien
tcccactgagcgttcaccccgatgg

SEQ ID NO: 483100 - DNA, 25 bp, Homo sapien
agctcccactgagcgttcaccccga

SEQ ID NO: 483101 - DNA, 25 bp, Homo sapien
gaagctcccactgagcgttcacccc

SEQ ID NO: 483102 - DNA, 25 bp, Homo sapien
ctcccactgagcgttcaccccgatg

SEQ ID NO: 483103 - DNA, 25 bp, Homo sapien
gcctcttgaggtgcttatcatctct

SEQ ID NO: 483104 - DNA, 25 bp, Homo sapien
cctcttgaggtgcttatcatctctc

SEQ ID NO: 483105 - DNA, 25 bp, Homo sapien
ctgcctcttgaggtgcttatcatct

SEQ ID NO: 483106 - DNA, 25 bp, Homo sapien
tgcctcttgaggtgcttatcatctc

SEQ ID NO: 483107 - DNA, 25 bp, Homo sapien
ccattcagacgcagcacattttacg

SEQ ID NO: 483108 - DNA, 25 bp, Homo sapien
cctcgggcgggtctgtagctacctg

SEQ ID NO: 483109 - DNA, 25 bp, Homo sapien
cattttacgtgctcactgggcatcg

SEQ ID NO: 483110 - DNA, 25 bp, Homo sapien
gaagccaagttggtgctctctttcc

SEQ ID NO: 483111 - DNA, 25 bp, Homo sapien
tttgcagctggtgtgcttcatgcca

SEQ ID NO: 483112 - DNA, 25 bp, Homo sapien
ggtagtgtcgtggtccacacgccgt

SEQ ID NO: 483113 - DNA, 25 bp, Homo sapien
cacacgccgtgttgttccttgaaca

SEQ ID NO: 483114 - DNA, 25 bp, Homo sapien
tcatgccattcttcctgttcgtgtg

SEQ ID NO: 483115 - DNA, 25 bp, Homo sapien
gattgccctgtgtatacataactgc

SEQ ID NO: 483116 - DNA, 25 bp, Homo sapien
gagaggacagtccatcacggtgaga

SEQ ID NO: 483117 - DNA, 25 bp, Homo sapien
tgattatggtctgatgattgccctg

SEQ ID NO: 483118 - DNA, 25 bp, Homo sapien
cttgggaaaggcacacagagagcta

SEQ ID NO: 483119 - DNA, 25 bp, Homo sapien
cctttctctcagtgtttatctacaa

SEQ ID NO: 483120 - DNA, 25 bp, Homo sapien
aggcctttctctcagtgtttatcta

SEQ ID NO: 483121 - DNA, 25 bp, Homo sapien
tgtttatctacaattatttctcctc

SEQ ID NO: 483122 - DNA, 25 bp, Homo sapien
tctctcagtgtttatctacaattat

SEQ ID NO: 483123 - DNA, 25 bp, Homo sapien
tgaactggaaatcatgagcaaactc

SEQ ID NO: 483124 - DNA, 25 bp, Homo sapien
tcccactgggcgtggctctggactg

SEQ ID NO: 483125 - DNA, 25 bp, Homo sapien
gagcaaactcttatgttgatgtgaa

SEQ ID NO: 483126 - DNA, 25 bp, Homo sapien
tggcagctcttgtcgcaagcagggc

SEQ ID NO: 483127 - DNA, 25 bp, Homo sapien
ctctgatgttgttgtctttctccat

SEQ ID NO: 483128 - DNA, 25 bp, Homo sapien
ctgcactctggaggtccctgcacag

SEQ ID NO: 483129 - DNA, 25 bp, Homo sapien
cccagagcatgatgggggtgtccct

SEQ ID NO: 483130 - DNA, 25 bp, Homo sapien
tgcacagctctcactttgacacact

SEQ ID NO: 483131 - DNA, 25 bp, Homo sapien
tcactttgacacacttcccgtgctg

SEQ ID NO: 483132 - DNA, 25 bp, Homo sapien
tggggggcgcaggggaggctcagtg

SEQ ID NO: 483133 - DNA, 25 bp, Homo sapien
cctggagacacacggtagggggtgg

SEQ ID NO: 483134 - DNA, 25 bp, Homo sapien
acctggagacacacggtagggggtg

SEQ ID NO: 483135 - DNA, 25 bp, Homo sapien
gggtggggggcgcaggggaggctca

SEQ ID NO: 483136 - DNA, 25 bp, Homo sapien
ggaggtgctagaattggctgccctt

SEQ ID NO: 483137 - DNA, 25 bp, Homo sapien
tttgggaggtgctagaattggctgc

SEQ ID NO: 483138 - DNA, 25 bp, Homo sapien
gctttgggaggtgctagaattggct

SEQ ID NO: 483139 - DNA, 25 bp, Homo sapien
gcagctttgggaggtgctagaattg

SEQ ID NO: 483140 - DNA, 25 bp, Homo sapien
gctgctcgccgtggccaggctcttg

SEQ ID NO: 483141 - DNA, 25 bp, Homo sapien
ccatgggttcttggctgctcgccgt

SEQ ID NO: 483142 - DNA, 25 bp, Homo sapien
tgtgaacccaaactctggcggtggc

SEQ ID NO: 483143 - DNA, 25 bp, Homo sapien
ggcgtcccgtgccagccatgggttc

SEQ ID NO: 483144 - DNA, 25 bp, Homo sapien
taagtggaaaatgcagagaagtaaa

SEQ ID NO: 483145 - DNA, 25 bp, Homo sapien
gttaagtggaaaatgcagagaagta

SEQ ID NO: 483146 - DNA, 25 bp, Homo sapien
aagtggaaaatgcagagaagtaaac

SEQ ID NO: 483147 - DNA, 25 bp, Homo sapien
ctgttaagtggaaaatgcagagaag

SEQ ID NO: 483148 - DNA, 25 bp, Homo sapien
ttagcgcctccctagagtcaacacg

SEQ ID NO: 483149 - DNA, 25 bp, Homo sapien
atttactgagctcgagcacaccagc

SEQ ID NO: 483150 - DNA, 25 bp, Homo sapien
tgagctcgagcacaccagcgctgtc

SEQ ID NO: 483151 - DNA, 25 bp, Homo sapien
cacgagttactcttccttggtcaca

SEQ ID NO: 483152 - DNA, 25 bp, Homo sapien
ctgaaggacactcttgatgatggaa

SEQ ID NO: 483153 - DNA, 25 bp, Homo sapien
cattgtggaagcctgcaggcgagcg

SEQ ID NO: 483154 - DNA, 25 bp, Homo sapien
atgaaggtgtgctgaaggacactct

SEQ ID NO: 483155 - DNA, 25 bp, Homo sapien
gatgatggaagcttccctgaaatca

SEQ ID NO: 483156 - DNA, 25 bp, Homo sapien
tggtcagattgagagagcagcgaac

SEQ ID NO: 483157 - DNA, 25 bp, Homo sapien
cttcgtggtcagattgagagagcag

SEQ ID NO: 483158 - DNA, 25 bp, Homo sapien
agcagcgaactgaggagggcggagc

SEQ ID NO: 483159 - DNA, 25 bp, Homo sapien
cagattgagagagcagcgaactgag

SEQ ID NO: 483160 - DNA, 25 bp, Homo sapien
agcagagttgcagtttcgaattcct

SEQ ID NO: 483161 - DNA, 25 bp, Homo sapien
tgcagtttcgaattcctgttttaaa

SEQ ID NO: 483162 - DNA, 25 bp, Homo sapien
tggtgggttcgtgtgacctctgcca

SEQ ID NO: 483163 - DNA, 25 bp, Homo sapien
caatgattccgggttcttaggaggc

SEQ ID NO: 483164 - DNA, 25 bp, Homo sapien
gctgttgctgtttgtcctggcagag

SEQ ID NO: 483165 - DNA, 25 bp, Homo sapien
cagtgccacttctagaaccgttttg

SEQ ID NO: 483166 - DNA, 25 bp, Homo sapien
gttgctgtttgtcctggcagagctg

SEQ ID NO: 483167 - DNA, 25 bp, Homo sapien
catcagtgccacttctagaaccgtt

SEQ ID NO: 483168 - DNA, 25 bp, Homo sapien
catttgagtaagtaaagacacctgc

SEQ ID NO: 483169 - DNA, 25 bp, Homo sapien
cagggtcatcttcaccgaggcgttg

SEQ ID NO: 483170 - DNA, 25 bp, Homo sapien
tcaaaataaggaaagtgggctgcgg

SEQ ID NO: 483171 - DNA, 25 bp, Homo sapien
ttgttgctgacatcggacctggttt

SEQ ID NO: 483172 - DNA, 25 bp, Homo sapien
ttttcgacggtgtgcctctgaaccc

SEQ ID NO: 483173 - DNA, 25 bp, Homo sapien
ctccccagtcgttcaaggcacaggg

SEQ ID NO: 483174 - DNA, 25 bp, Homo sapien
caataaagcaggtgatgactgtccc

SEQ ID NO: 483175 - DNA, 25 bp, Homo sapien
ttgctttctgccgttgagtcaggcc

SEQ ID NO: 483176 - DNA, 25 bp, Homo sapien
ttctggcgttctcattgagcgcaga

SEQ ID NO: 483177 - DNA, 25 bp, Homo sapien
cttctggcgttctcattgagcgcag

SEQ ID NO: 483178 - DNA, 25 bp, Homo sapien
caaattctggtagccatgatcttgc

SEQ ID NO: 483179 - DNA, 25 bp, Homo sapien
ttctgcaaattctggtagccatgat

SEQ ID NO: 483180 - DNA, 25 bp, Homo sapien
ttttaaaggtccgtggatttctgca

SEQ ID NO: 483181 - DNA, 25 bp, Homo sapien
taaaggtccgtggatttctgcaaat

SEQ ID NO: 483182 - DNA, 25 bp, Homo sapien
cagtggagtagagccttctttcctg

SEQ ID NO: 483183 - DNA, 25 bp, Homo sapien
gcagtgccagtggagtagagccttc

SEQ ID NO: 483184 - DNA, 25 bp, Homo sapien
gcaattggccttttgtctaacatcg

SEQ ID NO: 483185 - DNA, 25 bp, Homo sapien
gtctaacatcggcttccttctccag

SEQ ID NO: 483186 - DNA, 25 bp, Homo sapien
ctcagtgtttggagtcggatggcca

SEQ ID NO: 483187 - DNA, 25 bp, Homo sapien
gatggccataggttcctgttcaggc

SEQ ID NO: 483188 - DNA, 25 bp, Homo sapien
tgtgcccttgtgttgtatgttgctg

SEQ ID NO: 483189 - DNA, 25 bp, Homo sapien
tatgttgctgtcagagctccggaga

SEQ ID NO: 483190 - DNA, 25 bp, Homo sapien
caggcttgagtcacgaagccctgct

SEQ ID NO: 483191 - DNA, 25 bp, Homo sapien
tatagatagtagatgctagcactag

SEQ ID NO: 483192 - DNA, 25 bp, Homo sapien
tctttaggagatttaggaaatatta

SEQ ID NO: 483193 - DNA, 25 bp, Homo sapien
gctagagcatttctatcttaagtat

SEQ ID NO: 483194 - DNA, 25 bp, Homo sapien
gaccttgcggagcttcaaacagtgg

SEQ ID NO: 483195 - DNA, 25 bp, Homo sapien
tgtccagactggaccccatggtgtc

SEQ ID NO: 483196 - DNA, 25 bp, Homo sapien
gcattattctctctagggtcacctt

SEQ ID NO: 483197 - DNA, 25 bp, Homo sapien
ccatggtgtctgagcattattctct

SEQ ID NO: 483198 - DNA, 25 bp, Homo sapien
ggcttctagaatagtcagtttcctg

SEQ ID NO: 483199 - DNA, 25 bp, Homo sapien
caaaacgatttggtctggcttctag

SEQ ID NO: 483200 - DNA, 25 bp, Homo sapien
cttcgaggcctctaaaagctaaaag

SEQ ID NO: 483201 - DNA, 25 bp, Homo sapien
gcgttattaattgaaatctgcatac

SEQ ID NO: 483202 - DNA, 25 bp, Homo sapien
ttccctcttgcccttgctgccccac

SEQ ID NO: 483203 - DNA, 25 bp, Homo sapien
gttccctcttgcccttgctgcccca

SEQ ID NO: 483204 - DNA, 25 bp, Homo sapien
ggaggacaggcggaggagtgtggct

SEQ ID NO: 483205 - DNA, 25 bp, Homo sapien
ggacaggcggaggagtgtggctggg

SEQ ID NO: 483206 - DNA, 25 bp, Homo sapien
ggaggacaggcggaggagtgtggca

SEQ ID NO: 483207 - DNA, 25 bp, Homo sapien
gcggaggagtgtggcagccggacag

SEQ ID NO: 483208 - DNA, 25 bp, Homo sapien
cagtgtaggctgaagaacgctggct

SEQ ID NO: 483209 - DNA, 25 bp, Homo sapien
tcacagcggccatagggtaacgcca

SEQ ID NO: 483210 - DNA, 25 bp, Homo sapien
gaatgagcccgctgctgttcaaagc

SEQ ID NO: 483211 - DNA, 25 bp, Homo sapien
actgtctagagaggtggcactgcac

SEQ ID NO: 483212 - DNA, 25 bp, Homo sapien
cactctgagaggtgcagtttgggca

SEQ ID NO: 483213 - DNA, 25 bp, Homo sapien
gcagctgtgtttgtgcttggagacc

SEQ ID NO: 483214 - DNA, 25 bp, Homo sapien
gcttctggagggtcgaggtttctca

SEQ ID NO: 483215 - DNA, 25 bp, Homo sapien
gttgagttgtactgagagagccgca

SEQ ID NO: 483216 - DNA, 25 bp, Homo sapien
aagccattgatgaccggcaccgcat

SEQ ID NO: 483217 - DNA, 25 bp, Homo sapien
gcggtgatccgttcaatagaagcca

SEQ ID NO: 483218 - DNA, 25 bp, Homo sapien
ggtgaccgagtctgccggatactga

SEQ ID NO: 483219 - DNA, 25 bp, Homo sapien
gatactgagtcgtggatggcagctt

SEQ ID NO: 483220 - DNA, 25 bp, Homo sapien
tcatctgggatagcactgcctttgg

SEQ ID NO: 483221 - DNA, 25 bp, Homo sapien
atcatctgggatagcactgcctttg

SEQ ID NO: 483222 - DNA, 25 bp, Homo sapien
gatcatctgggatagcactgccttt

SEQ ID NO: 483223 - DNA, 25 bp, Homo sapien
cagatcatctgggatagcactgcct

SEQ ID NO: 483224 - DNA, 25 bp, Homo sapien
accaggtggaaggacacgcagccca

SEQ ID NO: 483225 - DNA, 25 bp, Homo sapien
gcctgcttatctctgggttggttga

SEQ ID NO: 483226 - DNA, 25 bp, Homo sapien
tggaggataagctggcctgcttatc

SEQ ID NO: 483227 - DNA, 25 bp, Homo sapien
ctgcgtttgtagggttgaagctcag

SEQ ID NO: 483228 - DNA, 25 bp, Homo sapien
cctgttgtgggcgatgtttggagga

SEQ ID NO: 483229 - DNA, 25 bp, Homo sapien
gaatttgactttccgtgataggggc

SEQ ID NO: 483230 - DNA, 25 bp, Homo sapien
actttccgtgataggggctgcccca

SEQ ID NO: 483231 - DNA, 25 bp, Homo sapien
tgcttggttcttgacatctcattgg

SEQ ID NO: 483232 - DNA, 25 bp, Homo sapien
ctgagcctgttgcttggttcttgac

SEQ ID NO: 483233 - DNA, 25 bp, Homo sapien
ctcctccagtagatttgctgctgga

SEQ ID NO: 483234 - DNA, 25 bp, Homo sapien
ctggagcgggaagttagagtctctc

SEQ ID NO: 483235 - DNA, 25 bp, Homo sapien
tccagtagatttgctgctggagcgg

SEQ ID NO: 483236 - DNA, 25 bp, Homo sapien
cgggaagttagagtctctctgagtt

SEQ ID NO: 483237 - DNA, 25 bp, Homo sapien
gaatttactgggtgtgcctgtcact

SEQ ID NO: 483238 - DNA, 25 bp, Homo sapien
cttagaaaggacaacacagctgagg

SEQ ID NO: 483239 - DNA, 25 bp, Homo sapien
cattggcagttgtggcttagaaagg

SEQ ID NO: 483240 - DNA, 25 bp, Homo sapien
gctgcttctttatgtagcattggca

SEQ ID NO: 483241 - DNA, 25 bp, Homo sapien
ctgtgggtggtcgttgtagggaggg

SEQ ID NO: 483242 - DNA, 25 bp, Homo sapien
ggtacccagcgtccagggtctgcgt

SEQ ID NO: 483243 - DNA, 25 bp, Homo sapien
caatttggtacccagcgtccagggt

SEQ ID NO: 483244 - DNA, 25 bp, Homo sapien
ttctgatcaatttggtacccagcgt

SEQ ID NO: 483245 - DNA, 25 bp, Homo sapien
gatcaatttggtacccagcgtccag

SEQ ID NO: 483246 - DNA, 25 bp, Homo sapien
tccgccggcttagctgcagatggtt

SEQ ID NO: 483247 - DNA, 25 bp, Homo sapien
ccgccggcttagctgcagatggttt

SEQ ID NO: 483248 - DNA, 25 bp, Homo sapien
ctccgccggcttagctgcagatggt

SEQ ID NO: 483249 - DNA, 25 bp, Homo sapien
ttcccagctgggttgagtggaagaa

SEQ ID NO: 483250 - DNA, 25 bp, Homo sapien
cttttcccagctgggttgagtggaa

SEQ ID NO: 483251 - DNA, 25 bp, Homo sapien
ttagtcttttcccagctgggttgag

SEQ ID NO: 483252 - DNA, 25 bp, Homo sapien
agtcttttcccagctgggttgagtg

SEQ ID NO: 483253 - DNA, 25 bp, Homo sapien
ggctggtctgccactcagaaagctg

SEQ ID NO: 483254 - DNA, 25 bp, Homo sapien
tggggttctcaaggcgccctcggta

SEQ ID NO: 483255 - DNA, 25 bp, Homo sapien
ttctaatgggcagttctcatagctc

SEQ ID NO: 483256 - DNA, 25 bp, Homo sapien
tagaccgaaggcagtttctctggag

SEQ ID NO: 483257 - DNA, 25 bp, Homo sapien
tgacaggcctggcccgccttgtctg

SEQ ID NO: 483258 - DNA, 25 bp, Homo sapien
ttgtctgcgtcttcacctttccttt

SEQ ID NO: 483259 - DNA, 25 bp, Homo sapien
tgagaaaactcggaggagctcccga

SEQ ID NO: 483260 - DNA, 25 bp, Homo sapien
tctttggcggatgtggccttccacc

SEQ ID NO: 483261 - DNA, 25 bp, Homo sapien
ccccgagcaagctctgtatcatctg

SEQ ID NO: 483262 - DNA, 25 bp, Homo sapien
tctgcctagggagccctcgtaaggg

SEQ ID NO: 483263 - DNA, 25 bp, Homo sapien
ggaagcccccgagcaagctctgtat

SEQ ID NO: 483264 - DNA, 25 bp, Homo sapien
gattctcagactcagtaccgcttgc

SEQ ID NO: 483265 - DNA, 25 bp, Homo sapien
ggcactgcgctgtctgtgcactcct

SEQ ID NO: 483266 - DNA, 25 bp, Homo sapien
gggccttcagcccaccgggctggca

SEQ ID NO: 483267 - DNA, 25 bp, Homo sapien
tctgtgcactcctcctgatcgggaa

SEQ ID NO: 483268 - DNA, 25 bp, Homo sapien
cctcctgatcgggaaacttgttcct

SEQ ID NO: 483269 - DNA, 25 bp, Homo sapien
ctgcgtgagaggaggtagctgacct

SEQ ID NO: 483270 - DNA, 25 bp, Homo sapien
agctgaccttggctgccacccccat

SEQ ID NO: 483271 - DNA, 25 bp, Homo sapien
cgtgagaggaggtagctgaccttgg

SEQ ID NO: 483272 - DNA, 25 bp, Homo sapien
tagctgaccttggctgccaccccca

SEQ ID NO: 483273 - DNA, 25 bp, Homo sapien
cttgtggtcctgtgccggaggggct

SEQ ID NO: 483274 - DNA, 25 bp, Homo sapien
cccatagcctggcgtgcttctggct

SEQ ID NO: 483275 - DNA, 25 bp, Homo sapien
tgagggcaggtccttcccccatagc

SEQ ID NO: 483276 - DNA, 25 bp, Homo sapien
ggtccttcccccatagcctggcgtg

SEQ ID NO: 483277 - DNA, 25 bp, Homo sapien
gacacagaacgatgtccgggagcct

SEQ ID NO: 483278 - DNA, 25 bp, Homo sapien
cccagtggccatgtgttagcagatt

SEQ ID NO: 483279 - DNA, 25 bp, Homo sapien
gagcctcataggatctctctggaga

SEQ ID NO: 483280 - DNA, 25 bp, Homo sapien
acagatgccgaatagcccgtcagag

SEQ ID NO: 483281 - DNA, 25 bp, Homo sapien
cctggacctaatgggatctgaactt

SEQ ID NO: 483282 - DNA, 25 bp, Homo sapien
catggtgtaaaattgcagggtggac

SEQ ID NO: 483283 - DNA, 25 bp, Homo sapien
gatggtgaaccttctgcatcggccc

SEQ ID NO: 483284 - DNA, 25 bp, Homo sapien
catatagtgcgccattttctgtgaa

SEQ ID NO: 483285 - DNA, 25 bp, Homo sapien
actgacagcattggactgcacaggg

SEQ ID NO: 483286 - DNA, 25 bp, Homo sapien
gagcctgcagagtatagtgcccgga

SEQ ID NO: 483287 - DNA, 25 bp, Homo sapien
ccggagtcgttggaggcagagttca

SEQ ID NO: 483288 - DNA, 25 bp, Homo sapien
tcctcaagaggtcggctgcctgctt

SEQ ID NO: 483289 - DNA, 25 bp, Homo sapien
tccgagacgtgggttcggagagcac

SEQ ID NO: 483290 - DNA, 25 bp, Homo sapien
aggacatccgagacgtgggttcgga

SEQ ID NO: 483291 - DNA, 25 bp, Homo sapien
catccgagacgtgggttcggagagc

SEQ ID NO: 483292 - DNA, 25 bp, Homo sapien
gacatccgagacgtgggttcggaga

SEQ ID NO: 483293 - DNA, 25 bp, Homo sapien
cgttccttccttgggaggtgcctgc

SEQ ID NO: 483294 - DNA, 25 bp, Homo sapien
cagttaccctgttaccatctgcacc

SEQ ID NO: 483295 - DNA, 25 bp, Homo sapien
ggaggtgcctgcccagttaccctgt

SEQ ID NO: 483296 - DNA, 25 bp, Homo sapien
ccgttccttccttgggaggtgcctg

SEQ ID NO: 483297 - DNA, 25 bp, Homo sapien
ggatttcactgttcaggtttgaatt

SEQ ID NO: 483298 - DNA, 25 bp, Homo sapien
ctctctttcggtacttggtgacacc

SEQ ID NO: 483299 - DNA, 25 bp, Homo sapien
gaattcttcgcccagtaaacctctc

SEQ ID NO: 483300 - DNA, 25 bp, Homo sapien
ttacaggaattcttcgcccagtaaa

SEQ ID NO: 483301 - DNA, 25 bp, Homo sapien
cagtaaacctctctttcggtacttg

SEQ ID NO: 483302 - DNA, 25 bp, Homo sapien
gaaagtgcgagttgcaaaccttctg

SEQ ID NO: 483303 - DNA, 25 bp, Homo sapien
acagccgcgcaccagggtcccgggc

SEQ ID NO: 483304 - DNA, 25 bp, Homo sapien
ttctggaaggaggaatccctcggac

SEQ ID NO: 483305 - DNA, 25 bp, Homo sapien
aggaggaatccctcggacagccgcg

SEQ ID NO: 483306 - DNA, 25 bp, Homo sapien
gggagcgcgcctggactcgtccggg

SEQ ID NO: 483307 - DNA, 25 bp, Homo sapien
ccgagcggagtaggcagggtggagt

SEQ ID NO: 483308 - DNA, 25 bp, Homo sapien
acttgcagtggctttgcccggagcc

SEQ ID NO: 483309 - DNA, 25 bp, Homo sapien
tggaggaaggtaaccgcgagttcca

SEQ ID NO: 483310 - DNA, 25 bp, Homo sapien
ctgtccccgggagaagtgaggtgga

SEQ ID NO: 483311 - DNA, 25 bp, Homo sapien
gaagtgaggtggagtgatgcccttg

SEQ ID NO: 483312 - DNA, 25 bp, Homo sapien
agaagtgaggtggagtgatgccctt

SEQ ID NO: 483313 - DNA, 25 bp, Homo sapien
gggtgcgggcgcctagtcctccgcg

SEQ ID NO: 483314 - DNA, 25 bp, Homo sapien
aggagccgtaggaaccgcggcctgg

SEQ ID NO: 483315 - DNA, 25 bp, Homo sapien
aggtctccggcgtgtgcgtgcagga

SEQ ID NO: 483316 - DNA, 25 bp, Homo sapien
cccaacactcttccggagctgcagg

SEQ ID NO: 483317 - DNA, 25 bp, Homo sapien
gcggcggctgcggcctagggctccc

SEQ ID NO: 483318 - DNA, 25 bp, Homo sapien
cggcggctgcggcctagggctcccg

SEQ ID NO: 483319 - DNA, 25 bp, Homo sapien
ggcggctgcggcctagggctcccgc

SEQ ID NO: 483320 - DNA, 25 bp, Homo sapien
cctgggctgcgctgaagaatagaaa

SEQ ID NO: 483321 - DNA, 25 bp, Homo sapien
taaggtattccctaggactccgaga

SEQ ID NO: 483322 - DNA, 25 bp, Homo sapien
tcctcaagggatgggtgtaccaatg

SEQ ID NO: 483323 - DNA, 25 bp, Homo sapien
cagtcctacttacgggtggcagggc

SEQ ID NO: 483324 - DNA, 25 bp, Homo sapien
gcctggcctgtatcaaacatttgtt

SEQ ID NO: 483325 - DNA, 25 bp, Homo sapien
aattcgcagcgttagagatcccacc

SEQ ID NO: 483326 - DNA, 25 bp, Homo sapien
tgctatggaggttgccaaaggcctc

SEQ ID NO: 483327 - DNA, 25 bp, Homo sapien
gactatatatttcaggagcaccgct

SEQ ID NO: 483328 - DNA, 25 bp, Homo sapien
tccatcagcgatgtcgaccatgaag

SEQ ID NO: 483329 - DNA, 25 bp, Homo sapien
gcttttgagaatctcttgtaatctg

SEQ ID NO: 483330 - DNA, 25 bp, Homo sapien
ccttgacaatcgctccagagagtct

SEQ ID NO: 483331 - DNA, 25 bp, Homo sapien
cacatgagccttgacaatcgctcca

SEQ ID NO: 483332 - DNA, 25 bp, Homo sapien
gagccttgacaatcgctccagagag

SEQ ID NO: 483333 - DNA, 25 bp, Homo sapien
tcttaataatgtcacagtgcaggtg

SEQ ID NO: 483334 - DNA, 25 bp, Homo sapien
catgggctccacactgtaatttggc

SEQ ID NO: 483335 - DNA, 25 bp, Homo sapien
ggtattttcctagctgacccagctc

SEQ ID NO: 483336 - DNA, 25 bp, Homo sapien
taatttggcctttacagagcttccg

SEQ ID NO: 483337 - DNA, 25 bp, Homo sapien
ttcaccctttcctagacaatctggt

SEQ ID NO: 483338 - DNA, 25 bp, Homo sapien
gcccaagtacgatcccactattgat

SEQ ID NO: 483339 - DNA, 25 bp, Homo sapien
caccctttcctagacaatctggtgg

SEQ ID NO: 483340 - DNA, 25 bp, Homo sapien
agtggctatgcccaagtacgatccc

SEQ ID NO: 483341 - DNA, 25 bp, Homo sapien
gggctgatcacccaaggccaggagt

SEQ ID NO: 483342 - DNA, 25 bp, Homo sapien
aagcatttcccagctggacacggtg

SEQ ID NO: 483343 - DNA, 25 bp, Homo sapien
aggaaagcatttcccagctggacac

SEQ ID NO: 483344 - DNA, 25 bp, Homo sapien
gtcaaggaaagcatttcccagctgg

SEQ ID NO: 483345 - DNA, 25 bp, Homo sapien
ggctttctcaagagggtcctgtgtg

SEQ ID NO: 483346 - DNA, 25 bp, Homo sapien
tctcaagagggtcctgtgtgtccgg

SEQ ID NO: 483347 - DNA, 25 bp, Homo sapien
ggtctccaggtatctcgggtctatc

SEQ ID NO: 483348 - DNA, 25 bp, Homo sapien
ggtatctcgggtctatcagcaagga

SEQ ID NO: 483349 - DNA, 25 bp, Homo sapien
gggcagccggcttaggggcagaggg

SEQ ID NO: 483350 - DNA, 25 bp, Homo sapien
gcagagggagtaaaagccacagaaa

SEQ ID NO: 483351 - DNA, 25 bp, Homo sapien
aggaaaggcgagcatggaagtccat

SEQ ID NO: 483352 - DNA, 25 bp, Homo sapien
tggccagaaacagcgaaggagagga

SEQ ID NO: 483353 - DNA, 25 bp, Homo sapien
caaggcggtggtgattagctctgaa

SEQ ID NO: 483354 - DNA, 25 bp, Homo sapien
tattgcctatgggtgtcccggtggg

SEQ ID NO: 483355 - DNA, 25 bp, Homo sapien
cggtggtgattagctctgaaactca

SEQ ID NO: 483356 - DNA, 25 bp, Homo sapien
cccaacaaggcggtggtgattagct

SEQ ID NO: 483357 - DNA, 25 bp, Homo sapien
agtccctacctgtgtttaaattatg

SEQ ID NO: 483358 - DNA, 25 bp, Homo sapien
taaggaccagctggtattaactgat

SEQ ID NO: 483359 - DNA, 25 bp, Homo sapien
ggataactcgaaagacagctcaggt

SEQ ID NO: 483360 - DNA, 25 bp, Homo sapien
gccaaaagtgaacgtacaggtttga

SEQ ID NO: 483361 - DNA, 25 bp, Homo sapien
acacactgtcttagagtactgtgag

SEQ ID NO: 483362 - DNA, 25 bp, Homo sapien
gcgcccggccgtgaacgctattttc

SEQ ID NO: 483363 - DNA, 25 bp, Homo sapien
tgtttgaaaggcttatttaagccac

SEQ ID NO: 483364 - DNA, 25 bp, Homo sapien
ttatttaagccacacgtacacacac

SEQ ID NO: 483365 - DNA, 25 bp, Homo sapien
ggcaacaactatgtccgggaaaatc

SEQ ID NO: 483366 - DNA, 25 bp, Homo sapien
ctgcaggcaacaactatgtccggga

SEQ ID NO: 483367 - DNA, 25 bp, Homo sapien
tgcaggcaacaactatgtccgggaa

SEQ ID NO: 483368 - DNA, 25 bp, Homo sapien
tacatgaggtcaagtcaagtagcct

SEQ ID NO: 483369 - DNA, 25 bp, Homo sapien
tacataaatggagagggacttgatc

SEQ ID NO: 483370 - DNA, 25 bp, Homo sapien
cgtgttagacaactcagtgcatggg

SEQ ID NO: 483371 - DNA, 25 bp, Homo sapien
gttacattgccttttatggagccca

SEQ ID NO: 483372 - DNA, 25 bp, Homo sapien
agatggttacgagggtgatgttcct

SEQ ID NO: 483373 - DNA, 25 bp, Homo sapien
taagatggttacgagggtgatgttc

SEQ ID NO: 483374 - DNA, 25 bp, Homo sapien
aattaagatggttacgagggtgatg

SEQ ID NO: 483375 - DNA, 25 bp, Homo sapien
ccaaattaagatggttacgagggtg

SEQ ID NO: 483376 - DNA, 25 bp, Homo sapien
tttaggcatcggagtaaggcatttc

SEQ ID NO: 483377 - DNA, 25 bp, Homo sapien
caaaaatagatttaggcatcggagt

SEQ ID NO: 483378 - DNA, 25 bp, Homo sapien
tagatttaggcatcggagtaaggca

SEQ ID NO: 483379 - DNA, 25 bp, Homo sapien
gcatcggagtaaggcatttcccaag

SEQ ID NO: 483380 - DNA, 25 bp, Homo sapien
ccttggcagtgggatgtacaagaag

SEQ ID NO: 483381 - DNA, 25 bp, Homo sapien
caagccacagggcaacatcatgggt

SEQ ID NO: 483382 - DNA, 25 bp, Homo sapien
catgggtaaagtggccaagtgcatc

SEQ ID NO: 483383 - DNA, 25 bp, Homo sapien
gcagtgggatgtacaagaagttcaa

SEQ ID NO: 483384 - DNA, 25 bp, Homo sapien
aaacaagcttgttacccactggcct

SEQ ID NO: 483385 - DNA, 25 bp, Homo sapien
acaagcttgttacccactggccttt

SEQ ID NO: 483386 - DNA, 25 bp, Homo sapien
agcttgttacccactggcctttggg

SEQ ID NO: 483387 - DNA, 25 bp, Homo sapien
gtaaacaagcttgttacccactggc

SEQ ID NO: 483388 - DNA, 25 bp, Homo sapien
tttccacaatcatcacacccatgct

SEQ ID NO: 483389 - DNA, 25 bp, Homo sapien
gtttgctttccacaatcatcacacc

SEQ ID NO: 483390 - DNA, 25 bp, Homo sapien
ttccatcttttacttggctattaat

SEQ ID NO: 483391 - DNA, 25 bp, Homo sapien
acaatcatcacacccatgctcagag

SEQ ID NO: 483392 - DNA, 25 bp, Homo sapien
ggcctggccctgatagctctcggga

SEQ ID NO: 483393 - DNA, 25 bp, Homo sapien
ggtgctgtccttgatcggcctggcc

SEQ ID NO: 483394 - DNA, 25 bp, Homo sapien
ggaatcaaaccctgtgtgtctgcgt

SEQ ID NO: 483395 - DNA, 25 bp, Homo sapien
tctgcgtttggtggagatcagtttg

SEQ ID NO: 483396 - DNA, 25 bp, Homo sapien
tcgctctccattgtctacacaattg

SEQ ID NO: 483397 - DNA, 25 bp, Homo sapien
gtcacctcagtaagctccattaatg

SEQ ID NO: 483398 - DNA, 25 bp, Homo sapien
tacacaattggacaagcagtcacct

SEQ ID NO: 483399 - DNA, 25 bp, Homo sapien
tcacagaccacaaccatgatggcac

SEQ ID NO: 483400 - DNA, 25 bp, Homo sapien
aatttcccctctgtgggaagcggcg

SEQ ID NO: 483401 - DNA, 25 bp, Homo sapien
tcctcatttggttgttcggctggcc

SEQ ID NO: 483402 - DNA, 25 bp, Homo sapien
cgcagggcggaggtcatcctcattt

SEQ ID NO: 483403 - DNA, 25 bp, Homo sapien
tcggctggcccgaaacagatgggct

SEQ ID NO: 483404 - DNA, 25 bp, Homo sapien
ccgggacatggatgagctccttgca

SEQ ID NO: 483405 - DNA, 25 bp, Homo sapien
agctccttgcaggtcagcctgggag

SEQ ID NO: 483406 - DNA, 25 bp, Homo sapien
aggtcagcctgggagctgaagaaga

SEQ ID NO: 483407 - DNA, 25 bp, Homo sapien
ctgaagaagaaggacggtcctggaa

SEQ ID NO: 483408 - DNA, 25 bp, Homo sapien
tggtgtgaaagacagcccaagtcca

SEQ ID NO: 483409 - DNA, 25 bp, Homo sapien
tcaggctggtttgcaccgagcttgc

SEQ ID NO: 483410 - DNA, 25 bp, Homo sapien
tgttgccgtgtcctcaagaacgcac

SEQ ID NO: 483411 - DNA, 25 bp, Homo sapien
aatgacgctttgcaccttcaggctg

SEQ ID NO: 483412 - DNA, 25 bp, Homo sapien
agaacgcacggcactacagcaatga

SEQ ID NO: 483413 - DNA, 25 bp, Homo sapien
agctcctgcctggtgcacactatag

SEQ ID NO: 483414 - DNA, 25 bp, Homo sapien
caggcatgtttctgcatcagctcac

SEQ ID NO: 483415 - DNA, 25 bp, Homo sapien
ccatggtctgacttccagcgtgaca

SEQ ID NO: 483416 - DNA, 25 bp, Homo sapien
catggcttcggagtgacaggacctt

SEQ ID NO: 483417 - DNA, 25 bp, Homo sapien
tggaaatcaactgtctgtcagcatg

SEQ ID NO: 483418 - DNA, 25 bp, Homo sapien
ttaggactgtcctgagatctttcct

SEQ ID NO: 483419 - DNA, 25 bp, Homo sapien
tgccaggagcacgtcccgccggcag

SEQ ID NO: 483420 - DNA, 25 bp, Homo sapien
ttcctttctgtgtttgcaaaacctc

SEQ ID NO: 483421 - DNA, 25 bp, Homo sapien
tgttcctttctgtgtttgcaaaacc

SEQ ID NO: 483422 - DNA, 25 bp, Homo sapien
tttaatgttcctttctgtgtttgca

SEQ ID NO: 483423 - DNA, 25 bp, Homo sapien
taatgttcctttctgtgtttgcaaa

SEQ ID NO: 483424 - DNA, 25 bp, Homo sapien
tttgtcagctgtggcatttggagag

SEQ ID NO: 483425 - DNA, 25 bp, Homo sapien
catttggagagatcatgtcttgtaa

SEQ ID NO: 483426 - DNA, 25 bp, Homo sapien
gaattttctaaaatctttgtcagct

SEQ ID NO: 483427 - DNA, 25 bp, Homo sapien
ctaaaatctttgtcagctgtggcat

SEQ ID NO: 483428 - DNA, 25 bp, Homo sapien
gggacattttattgcctgttctcca

SEQ ID NO: 483429 - DNA, 25 bp, Homo sapien
tcatctgacggcctcctggatcact

SEQ ID NO: 483430 - DNA, 25 bp, Homo sapien
tcttatagtctgagaaacgtgggac

SEQ ID NO: 483431 - DNA, 25 bp, Homo sapien
gatacttgtttaatctctgccagct

SEQ ID NO: 483432 - DNA, 25 bp, Homo sapien
tgttgaacggttattcctactgggc

SEQ ID NO: 483433 - DNA, 25 bp, Homo sapien
ctgacctttgtgcttggaggcctcc

SEQ ID NO: 483434 - DNA, 25 bp, Homo sapien
tactgggcagaacctcctggctttt

SEQ ID NO: 483435 - DNA, 25 bp, Homo sapien
gctgcttgacatctgggactctgtt

SEQ ID NO: 483436 - DNA, 25 bp, Homo sapien
aaagtatgggcaaaacgtccctgag

SEQ ID NO: 483437 - DNA, 25 bp, Homo sapien
gacacaaaagtatgggcaaaacgtc

SEQ ID NO: 483438 - DNA, 25 bp, Homo sapien
gtatgggcaaaacgtccctgagcag

SEQ ID NO: 483439 - DNA, 25 bp, Homo sapien
caaaagtatgggcaaaacgtccctg

SEQ ID NO: 483440 - DNA, 25 bp, Homo sapien
ctctgaatctctcaactaaggagga

SEQ ID NO: 483441 - DNA, 25 bp, Homo sapien
agcagaacatgcctgtcgcctgcct

SEQ ID NO: 483442 - DNA, 25 bp, Homo sapien
tctacaggtctggttccttccagga

SEQ ID NO: 483443 - DNA, 25 bp, Homo sapien
atcttcccaagggttgaggcagccc

SEQ ID NO: 483444 - DNA, 25 bp, Homo sapien
gaagaggtctcgtccttgctccggt

SEQ ID NO: 483445 - DNA, 25 bp, Homo sapien
ggtggcaacacttgctggccagtta

SEQ ID NO: 483446 - DNA, 25 bp, Homo sapien
gccagttaccgagggcatgactttg

SEQ ID NO: 483447 - DNA, 25 bp, Homo sapien
tgtcctgagtacctgactaacccgc

SEQ ID NO: 483448 - DNA, 25 bp, Homo sapien
aggaagggacgattctgctgaggca

SEQ ID NO: 483449 - DNA, 25 bp, Homo sapien
cttgtaaaggaagggacgattctgc

SEQ ID NO: 483450 - DNA, 25 bp, Homo sapien
aagggacgattctgctgaggcagaa

SEQ ID NO: 483451 - DNA, 25 bp, Homo sapien
ttgtaaaggaagggacgattctgct

SEQ ID NO: 483452 - DNA, 25 bp, Homo sapien
ctgtcagatcatggagcaaagtccc

SEQ ID NO: 483453 - DNA, 25 bp, Homo sapien
gtgcactgagtcatcgtgtaaaacc

SEQ ID NO: 483454 - DNA, 25 bp, Homo sapien
ctgagtcatcgtgtaaaacctccac

SEQ ID NO: 483455 - DNA, 25 bp, Homo sapien
tgcctatctctggaatcagtgttcg

SEQ ID NO: 483456 - DNA, 25 bp, Homo sapien
tgttcggccgtcctgtctctgactc

SEQ ID NO: 483457 - DNA, 25 bp, Homo sapien
gtggagcacggattcccccatcaac

SEQ ID NO: 483458 - DNA, 25 bp, Homo sapien
caggtcacagccgtcacggctatgc

SEQ ID NO: 483459 - DNA, 25 bp, Homo sapien
ccgtcacggctatgcgtggagcacg

SEQ ID NO: 483460 - DNA, 25 bp, Homo sapien
tcaacccgtgatgctcttgccaagt

SEQ ID NO: 483461 - DNA, 25 bp, Homo sapien
tacttgagcgggtcagcttccttga

SEQ ID NO: 483462 - DNA, 25 bp, Homo sapien
gacagaagggatttgctctccattc

SEQ ID NO: 483463 - DNA, 25 bp, Homo sapien
tgggtccccgggacacaatgatgcg

SEQ ID NO: 483464 - DNA, 25 bp, Homo sapien
tctgcaaggaaagtccgtgtagccc

SEQ ID NO: 483465 - DNA, 25 bp, Homo sapien
gcggtggcttcctgtgaagaaacca

SEQ ID NO: 483466 - DNA, 25 bp, Homo sapien
tggtcggccaaggtgctcagcacct

SEQ ID NO: 483467 - DNA, 25 bp, Homo sapien
tttccagtgtgacccttaatcctca

SEQ ID NO: 483468 - DNA, 25 bp, Homo sapien
ttggcgtagtcacacggtacacggg

SEQ ID NO: 483469 - DNA, 25 bp, Homo sapien
gctgcgcatacaccggatgaggacg

SEQ ID NO: 483470 - DNA, 25 bp, Homo sapien
gagtctggagcttgcaccttcttgt

SEQ ID NO: 483471 - DNA, 25 bp, Homo sapien
ttgtccacaagtgacttgagcagat

SEQ ID NO: 483472 - DNA, 25 bp, Homo sapien
tatctgctgctggtccgggcttgtc

SEQ ID NO: 483473 - DNA, 25 bp, Homo sapien
tctagagcctggcccgcggccaggg

SEQ ID NO: 483474 - DNA, 25 bp, Homo sapien
ccttggctgcggttcatccctggtg

SEQ ID NO: 483475 - DNA, 25 bp, Homo sapien
ttggctgcggttcatccctggtggc

SEQ ID NO: 483476 - DNA, 25 bp, Homo sapien
gctgcggttcatccctggtggcaga

SEQ ID NO: 483477 - DNA, 25 bp, Homo sapien
ccaccaagggtgagttgtgtcttca

SEQ ID NO: 483478 - DNA, 25 bp, Homo sapien
aagccaccaagggtgagttgtgtct

SEQ ID NO: 483479 - DNA, 25 bp, Homo sapien
gccaccaagggtgagttgtgtcttc

SEQ ID NO: 483480 - DNA, 25 bp, Homo sapien
cagaaaaagacgtgaaattaagcca

SEQ ID NO: 483481 - DNA, 25 bp, Homo sapien
cctgtggaatctgcctggtacaact

SEQ ID NO: 483482 - DNA, 25 bp, Homo sapien
ggcatctgtattgggttcgtggtgg

SEQ ID NO: 483483 - DNA, 25 bp, Homo sapien
tgttctggttacagtgcactctgca

SEQ ID NO: 483484 - DNA, 25 bp, Homo sapien
ttgaaggtgttctgacgaatgttct

SEQ ID NO: 483485 - DNA, 25 bp, Homo sapien
tgctctccacaaaataacacgaggg

SEQ ID NO: 483486 - DNA, 25 bp, Homo sapien
acaggctgaagggtatgcggttctc

SEQ ID NO: 483487 - DNA, 25 bp, Homo sapien
cgagggaaccggcaaagctcattat

SEQ ID NO: 483488 - DNA, 25 bp, Homo sapien
gcagggtcatccactaaaagaaagg

SEQ ID NO: 483489 - DNA, 25 bp, Homo sapien
tacgtttgttccatgtcgctgacat

SEQ ID NO: 483490 - DNA, 25 bp, Homo sapien
ccagcatacgtttgttccatgtcgc

SEQ ID NO: 483491 - DNA, 25 bp, Homo sapien
tgttccatgtcgctgacatcccagc

SEQ ID NO: 483492 - DNA, 25 bp, Homo sapien
gcatacgtttgttccatgtcgctga

SEQ ID NO: 483493 - DNA, 25 bp, Homo sapien
tcctgcttctggtatgcccggtggc

SEQ ID NO: 483494 - DNA, 25 bp, Homo sapien
tcacatgatggttccaattgcaggt

SEQ ID NO: 483495 - DNA, 25 bp, Homo sapien
tcactcagccccatatagttccatg

SEQ ID NO: 483496 - DNA, 25 bp, Homo sapien
ggttccaattgcaggtgctgttcct

SEQ ID NO: 483497 - DNA, 25 bp, Homo sapien
gatgacctaagggaactgaccattg

SEQ ID NO: 483498 - DNA, 25 bp, Homo sapien
gaccttttgcctcgaggctgagctg

SEQ ID NO: 483499 - DNA, 25 bp, Homo sapien
tcaagcagtttagaaccaaaggcct

SEQ ID NO: 483500 - DNA, 25 bp, Homo sapien
aaaaggttctgggatctacatggca

SEQ ID NO: 483501 - DNA, 25 bp, Homo sapien
cttccgggtagccttcttcgggcag

SEQ ID NO: 483502 - DNA, 25 bp, Homo sapien
gcaaagtgaccgaggtcatgcactc

SEQ ID NO: 483503 - DNA, 25 bp, Homo sapien
ctgcaccgggcctacagcaaagtga

SEQ ID NO: 483504 - DNA, 25 bp, Homo sapien
ggctggcccatctgtatgacacgct

SEQ ID NO: 483505 - DNA, 25 bp, Homo sapien
tttctgtgggttagatgtaaagccc

SEQ ID NO: 483506 - DNA, 25 bp, Homo sapien
cacagaacatttgcggtgggctttc

SEQ ID NO: 483507 - DNA, 25 bp, Homo sapien
gggaatgcagtgtcagtacctggcc

SEQ ID NO: 483508 - DNA, 25 bp, Homo sapien
tgttaataaaaactatgcgagcctg

SEQ ID NO: 483509 - DNA, 25 bp, Homo sapien
cttctctgttggaattaagatgtca

SEQ ID NO: 483510 - DNA, 25 bp, Homo sapien
taagatgtcacaaatggcacctctg

SEQ ID NO: 483511 - DNA, 25 bp, Homo sapien
cacttctctgttggaattaagatgt

SEQ ID NO: 483512 - DNA, 25 bp, Homo sapien
acaaatggcacctctgtatcagctg

SEQ ID NO: 483513 - DNA, 25 bp, Homo sapien
tcatgatagaaagatcactgtgaat

SEQ ID NO: 483514 - DNA, 25 bp, Homo sapien
gtgatagattcacaattcactggac

SEQ ID NO: 483515 - DNA, 25 bp, Homo sapien
actgtgaattccaggtgttctgcca

SEQ ID NO: 483516 - DNA, 25 bp, Homo sapien
ctgccagctgtgatagattcacaat

SEQ ID NO: 483517 - DNA, 25 bp, Homo sapien
taggtcgtcttagtgattggcaagc

SEQ ID NO: 483518 - DNA, 25 bp, Homo sapien
tggtcggcagacacatgaggcttag

SEQ ID NO: 483519 - DNA, 25 bp, Homo sapien
caggagcaataggaaccaagacagg

SEQ ID NO: 483520 - DNA, 25 bp, Homo sapien
cagtgaggactaacacataatcagg

SEQ ID NO: 483521 - DNA, 25 bp, Homo sapien
tataatcttgtcacgcatcccatgg

SEQ ID NO: 483522 - DNA, 25 bp, Homo sapien
aatgcagttctgttgaggtgcgagc

SEQ ID NO: 483523 - DNA, 25 bp, Homo sapien
gtgcccatcccaataaacagctgag

SEQ ID NO: 483524 - DNA, 25 bp, Homo sapien
gctgagccatttagggatttatccc

SEQ ID NO: 483525 - DNA, 25 bp, Homo sapien
aagatttctgccgatttccacgtag

SEQ ID NO: 483526 - DNA, 25 bp, Homo sapien
gaagatttctgccgatttccacgta

SEQ ID NO: 483527 - DNA, 25 bp, Homo sapien
cggaagatttctgccgatttccacg

SEQ ID NO: 483528 - DNA, 25 bp, Homo sapien
gatttctgccgatttccacgtagac

SEQ ID NO: 483529 - DNA, 25 bp, Homo sapien
ctatttgcaccggttgagaaggcaa

SEQ ID NO: 483530 - DNA, 25 bp, Homo sapien
gcaaagaagttgacctgataactgt

SEQ ID NO: 483531 - DNA, 25 bp, Homo sapien
actgttggtcatcccattaggaagg

SEQ ID NO: 483532 - DNA, 25 bp, Homo sapien
cagcttggtgtcagtgtgagcagcc

SEQ ID NO: 483533 - DNA, 25 bp, Homo sapien
gcaatttccagcactcagataaacc

SEQ ID NO: 483534 - DNA, 25 bp, Homo sapien
gaaacctagagatcctagaagactg

SEQ ID NO: 483535 - DNA, 25 bp, Homo sapien
caggtttcctggctctcaactcaaa

SEQ ID NO: 483536 - DNA, 25 bp, Homo sapien
caagactgcacagctaattagaggc

SEQ ID NO: 483537 - DNA, 25 bp, Homo sapien
tgccacataaccctctgtgagcagt

SEQ ID NO: 483538 - DNA, 25 bp, Homo sapien
tctgatcatgccacataaccctctg

SEQ ID NO: 483539 - DNA, 25 bp, Homo sapien
caatccaagaccctgctgctgtcat

SEQ ID NO: 483540 - DNA, 25 bp, Homo sapien
tgttgtcccttgagatgaggagctc

SEQ ID NO: 483541 - DNA, 25 bp, Homo sapien
gcactgcacttgcaagggagctgct

SEQ ID NO: 483542 - DNA, 25 bp, Homo sapien
tggtgttggcccatggccggtatca

SEQ ID NO: 483543 - DNA, 25 bp, Homo sapien
taaattcccgtcttgtcttcctctc

SEQ ID NO: 483544 - DNA, 25 bp, Homo sapien
catggaggaagtctcctaaattccc

SEQ ID NO: 483545 - DNA, 25 bp, Homo sapien
cgtcgttgttccagcttgttgtcag

SEQ ID NO: 483546 - DNA, 25 bp, Homo sapien
gcatcccgctttattgtagtgaagg

SEQ ID NO: 483547 - DNA, 25 bp, Homo sapien
tcaggcatcccgctttattgtagtg

SEQ ID NO: 483548 - DNA, 25 bp, Homo sapien
gctcctgtagcccatcatggcgtcg

SEQ ID NO: 483549 - DNA, 25 bp, Homo sapien
ctgcattgtgctatcagaccactct

SEQ ID NO: 483550 - DNA, 25 bp, Homo sapien
gcattgtgctatcagaccactcttt

SEQ ID NO: 483551 - DNA, 25 bp, Homo sapien
tgcattgtgctatcagaccactctt

SEQ ID NO: 483552 - DNA, 25 bp, Homo sapien
catctctgaaggttctctggactgc

SEQ ID NO: 483553 - DNA, 25 bp, Homo sapien
tgcattgcatatcagacagaggtag

SEQ ID NO: 483554 - DNA, 25 bp, Homo sapien
cacaggaggctcacttggcacttct

SEQ ID NO: 483555 - DNA, 25 bp, Homo sapien
gcagcagcaagcgatgcagagagcc

SEQ ID NO: 483556 - DNA, 25 bp, Homo sapien
gggatttccttaatatggagagttg

SEQ ID NO: 483557 - DNA, 25 bp, Homo sapien
gccagtctcgtattctgctttggga

SEQ ID NO: 483558 - DNA, 25 bp, Homo sapien
gatttccttaatatggagagttgtc

SEQ ID NO: 483559 - DNA, 25 bp, Homo sapien
ggaggagccagtctcgtattctgct

SEQ ID NO: 483560 - DNA, 25 bp, Homo sapien
agttgttggagctacagaatgggat

SEQ ID NO: 483561 - DNA, 25 bp, Homo sapien
aatgggatcttggaattccacccag

SEQ ID NO: 483562 - DNA, 25 bp, Homo sapien
tccacccagtgtaagaagtaagacc

SEQ ID NO: 483563 - DNA, 25 bp, Homo sapien
taagaccaagggaatgggttggcca

SEQ ID NO: 483564 - DNA, 25 bp, Homo sapien
acttgcgttttcagccgagaatgca

SEQ ID NO: 483565 - DNA, 25 bp, Homo sapien
cccacgctgtgtggaacagacacaa

SEQ ID NO: 483566 - DNA, 25 bp, Homo sapien
attccgattgatttggcccacgctg

SEQ ID NO: 483567 - DNA, 25 bp, Homo sapien
ttttgcatggagtagtaacacccct

SEQ ID NO: 483568 - DNA, 25 bp, Homo sapien
tgcattgctggtcctaacatcctgg

SEQ ID NO: 483569 - DNA, 25 bp, Homo sapien
gaggacaggaagatactgctttctc

SEQ ID NO: 483570 - DNA, 25 bp, Homo sapien
actgagtgttgcatcttcagaagga

SEQ ID NO: 483571 - DNA, 25 bp, Homo sapien
tgctttctcattcagatgcatgacc

SEQ ID NO: 483572 - DNA, 25 bp, Homo sapien
attctagaacactgctgtcatgcat

SEQ ID NO: 483573 - DNA, 25 bp, Homo sapien
ttctagaacactgctgtcatgcatc

SEQ ID NO: 483574 - DNA, 25 bp, Homo sapien
ctgtcggctgctctttgcccaccac

SEQ ID NO: 483575 - DNA, 25 bp, Homo sapien
gtcatgcatcctgtcggctgctctt

SEQ ID NO: 483576 - DNA, 25 bp, Homo sapien
tcaagtcacagatgggtgtgcctct

SEQ ID NO: 483577 - DNA, 25 bp, Homo sapien
tttcccggctggtgaggctaccatc

SEQ ID NO: 483578 - DNA, 25 bp, Homo sapien
cagcaccaggtttgtgaggagccac

SEQ ID NO: 483579 - DNA, 25 bp, Homo sapien
cagcagctgcttggtacagcgaagc

SEQ ID NO: 483580 - DNA, 25 bp, Homo sapien
tttttctaggaagtgcaatgcagtc

SEQ ID NO: 483581 - DNA, 25 bp, Homo sapien
gagaaaagaccagttaccatcctcg

SEQ ID NO: 483582 - DNA, 25 bp, Homo sapien
tctagaagtgataggaaaacaatgc

SEQ ID NO: 483583 - DNA, 25 bp, Homo sapien
tacacctcacctgtttctagaagtg

SEQ ID NO: 483584 - DNA, 25 bp, Homo sapien
taatagtatatgtggtgttgaagca

SEQ ID NO: 483585 - DNA, 25 bp, Homo sapien
tataatagtatatgtggtgttgaag

SEQ ID NO: 483586 - DNA, 25 bp, Homo sapien
aattttataatagtatatgtggtgt

SEQ ID NO: 483587 - DNA, 25 bp, Homo sapien
tttataatagtatatgtggtgttga

SEQ ID NO: 483588 - DNA, 25 bp, Homo sapien
ggtagcactccacgtggtgttcgca

SEQ ID NO: 483589 - DNA, 25 bp, Homo sapien
cagcctctggtggtttaatgcgttg

SEQ ID NO: 483590 - DNA, 25 bp, Homo sapien
taatgcgttgatttctcggtagcac

SEQ ID NO: 483591 - DNA, 25 bp, Homo sapien
tgatttctcggtagcactccacgtg

SEQ ID NO: 483592 - DNA, 25 bp, Homo sapien
ttgccgactctgtacttatgttggg

SEQ ID NO: 483593 - DNA, 25 bp, Homo sapien
acctgctttgccgactctgtactta

SEQ ID NO: 483594 - DNA, 25 bp, Homo sapien
tgctttgccgactctgtacttatgt

SEQ ID NO: 483595 - DNA, 25 bp, Homo sapien
gatgtgacctgctttgccgactctg

SEQ ID NO: 483596 - DNA, 25 bp, Homo sapien
cacgtgtcttgagcaaacctgcaca

SEQ ID NO: 483597 - DNA, 25 bp, Homo sapien
ttaaagcacgtgtcttgagcaaacc

SEQ ID NO: 483598 - DNA, 25 bp, Homo sapien
gaaagttgacataccaaatgggaag

SEQ ID NO: 483599 - DNA, 25 bp, Homo sapien
aaagcacgtgtcttgagcaaacctg

SEQ ID NO: 483600 - DNA, 25 bp, Homo sapien
ccgttcagcaggactgacgggaggc

SEQ ID NO: 483601 - DNA, 25 bp, Homo sapien
gaaatctgggaaggatccccgttca

SEQ ID NO: 483602 - DNA, 25 bp, Homo sapien
gctggacagtgtccttgcgctggac

SEQ ID NO: 483603 - DNA, 25 bp, Homo sapien
tggacagtgtccttgcgctggacat

SEQ ID NO: 483604 - DNA, 25 bp, Homo sapien
ctgttcactgagagtgggctgtctt

SEQ ID NO: 483605 - DNA, 25 bp, Homo sapien
gcctacagctgttcactgagagtgg

SEQ ID NO: 483606 - DNA, 25 bp, Homo sapien
tacagctgttcactgagagtgggct

SEQ ID NO: 483607 - DNA, 25 bp, Homo sapien
tcaggcagcctacagctgttcactg

SEQ ID NO: 483608 - DNA, 25 bp, Homo sapien
agaaaatagatagccttggcagctg

SEQ ID NO: 483609 - DNA, 25 bp, Homo sapien
gtacctgcaagtgtctgagtcctct

SEQ ID NO: 483610 - DNA, 25 bp, Homo sapien
gacaagaaaatagatagccttggca

SEQ ID NO: 483611 - DNA, 25 bp, Homo sapien
tccccgacgtacctgcaagtgtctg

SEQ ID NO: 483612 - DNA, 25 bp, Homo sapien
tgacattgaggtccctggtgctgcc

SEQ ID NO: 483613 - DNA, 25 bp, Homo sapien
tgtttgattcgtgattttgctgaca

SEQ ID NO: 483614 - DNA, 25 bp, Homo sapien
cggacatcagtgtttgattcgtgat

SEQ ID NO: 483615 - DNA, 25 bp, Homo sapien
tgagaactgtcatcggacatcagtg

SEQ ID NO: 483616 - DNA, 25 bp, Homo sapien
ctaggggctgtggagctgtgcccat

SEQ ID NO: 483617 - DNA, 25 bp, Homo sapien
cctaggggctgtggagctgtgccca

SEQ ID NO: 483618 - DNA, 25 bp, Homo sapien
gtttccctaggggctgtggagctgt

SEQ ID NO: 483619 - DNA, 25 bp, Homo sapien
tccctaggggctgtggagctgtgcc

SEQ ID NO: 483620 - DNA, 25 bp, Homo sapien
ttgctgcatatccactgccccttgc

SEQ ID NO: 483621 - DNA, 25 bp, Homo sapien
ctttgctgcatatccactgcccctt

SEQ ID NO: 483622 - DNA, 25 bp, Homo sapien
tttgctgcatatccactgccccttg

SEQ ID NO: 483623 - DNA, 25 bp, Homo sapien
tcctcagggcgaggagctgctcctt

SEQ ID NO: 483624 - DNA, 25 bp, Homo sapien
tgtctttcctcagggcgaggagctg

SEQ ID NO: 483625 - DNA, 25 bp, Homo sapien
gacctggcatgaatgaccctgattg

SEQ ID NO: 483626 - DNA, 25 bp, Homo sapien
cctggggggccttgcatcagacctg

SEQ ID NO: 483627 - DNA, 25 bp, Homo sapien
tatcctgttgtagaaggcttgcggg

SEQ ID NO: 483628 - DNA, 25 bp, Homo sapien
tattaaaccactgaactggcgcggt

SEQ ID NO: 483629 - DNA, 25 bp, Homo sapien
taacacccgcagagtagtagagagt

SEQ ID NO: 483630 - DNA, 25 bp, Homo sapien
ggatgttttccctcgcaggagtaac

SEQ ID NO: 483631 - DNA, 25 bp, Homo sapien
ggcctagccccagcatttggtagga

SEQ ID NO: 483632 - DNA, 25 bp, Homo sapien
tctgctcggtgaggccttctaggct

SEQ ID NO: 483633 - DNA, 25 bp, Homo sapien
ggtacccacacccaggtgaggccta

SEQ ID NO: 483634 - DNA, 25 bp, Homo sapien
cctgatgacatggtgtccggtgact

SEQ ID NO: 483635 - DNA, 25 bp, Homo sapien
gggacccagggagctttggtgttga

SEQ ID NO: 483636 - DNA, 25 bp, Homo sapien
tcctcaaggagcatggaatctggag

SEQ ID NO: 483637 - DNA, 25 bp, Homo sapien
tttagggtcctctgccgcttggcta

SEQ ID NO: 483638 - DNA, 25 bp, Homo sapien
aaacatttggtgaagacactatcct

SEQ ID NO: 483639 - DNA, 25 bp, Homo sapien
tggagttgatttaagctgcagagtt

SEQ ID NO: 483640 - DNA, 25 bp, Homo sapien
ttggttttgagtctggcctggtgca

SEQ ID NO: 483641 - DNA, 25 bp, Homo sapien
gaaaagggatcaccaatagcagatg

SEQ ID NO: 483642 - DNA, 25 bp, Homo sapien
tcctcgaagttactaaacacattgg

SEQ ID NO: 483643 - DNA, 25 bp, Homo sapien
tgacagtgttggtttctcctcgaag

SEQ ID NO: 483644 - DNA, 25 bp, Homo sapien
agaggcggagattcctgacagtgtt

SEQ ID NO: 483645 - DNA, 25 bp, Homo sapien
catacgactaagcaccctcttccgt

SEQ ID NO: 483646 - DNA, 25 bp, Homo sapien
ccatacgactaagcaccctcttccg

SEQ ID NO: 483647 - DNA, 25 bp, Homo sapien
cccatacgactaagcaccctcttcc

SEQ ID NO: 483648 - DNA, 25 bp, Homo sapien
ttttcttcctgttgtatatttgagc

SEQ ID NO: 483649 - DNA, 25 bp, Homo sapien
ttcttcctgttgtatatttgagctt

SEQ ID NO: 483650 - DNA, 25 bp, Homo sapien
tcctgagagatagttctttttcttc

SEQ ID NO: 483651 - DNA, 25 bp, Homo sapien
ctttttcttcctgttgtatatttga

SEQ ID NO: 483652 - DNA, 25 bp, Homo sapien
caagcacttgccagtgatgccactc

SEQ ID NO: 483653 - DNA, 25 bp, Homo sapien
acttgccagtgatgccactcctcac

SEQ ID NO: 483654 - DNA, 25 bp, Homo sapien
cttcttcgatgtcaagcacttgcca

SEQ ID NO: 483655 - DNA, 25 bp, Homo sapien
ttcttcgatgtcaagcacttgccag

SEQ ID NO: 483656 - DNA, 25 bp, Homo sapien
ggtgcacctgccacataagttctgg

SEQ ID NO: 483657 - DNA, 25 bp, Homo sapien
acctgccacataagttctggccggg

SEQ ID NO: 483658 - DNA, 25 bp, Homo sapien
gcaggtgcacctgccacataagttc

SEQ ID NO: 483659 - DNA, 25 bp, Homo sapien
gcacctgccacataagttctggccg

SEQ ID NO: 483660 - DNA, 25 bp, Homo sapien
caaatttctccaactccagtttgat

SEQ ID NO: 483661 - DNA, 25 bp, Homo sapien
ttttctctcgattgctagctctgcc

SEQ ID NO: 483662 - DNA, 25 bp, Homo sapien
tggagattggagatgaagcttcgct

SEQ ID NO: 483663 - DNA, 25 bp, Homo sapien
cagtttgatccatagtaaacaagga

SEQ ID NO: 483664 - DNA, 25 bp, Homo sapien
ttttggtggcagatcgatgcccttc

SEQ ID NO: 483665 - DNA, 25 bp, Homo sapien
tcattttggtggcagatcgatgccc

SEQ ID NO: 483666 - DNA, 25 bp, Homo sapien
catcattttggtggcagatcgatgc

SEQ ID NO: 483667 - DNA, 25 bp, Homo sapien
acaggggcggatgcatcattttggt

SEQ ID NO: 483668 - DNA, 25 bp, Homo sapien
ctgtgggggattgtcggggcagagt

SEQ ID NO: 483669 - DNA, 25 bp, Homo sapien
tgtgggggattgtcggggcagagtg

SEQ ID NO: 483670 - DNA, 25 bp, Homo sapien
tacaacccgattcacctggatggtg

SEQ ID NO: 483671 - DNA, 25 bp, Homo sapien
ttggaacagtgcaagaagatgggcc

SEQ ID NO: 483672 - DNA, 25 bp, Homo sapien
tatttggaaacgcactacaacccga

SEQ ID NO: 483673 - DNA, 25 bp, Homo sapien
acgtttgagcaggagcgagctctgc

SEQ ID NO: 483674 - DNA, 25 bp, Homo sapien
agcccgggcgctgctgcgatcgcgg

SEQ ID NO: 483675 - DNA, 25 bp, Homo sapien
aggcggcccggcgagtggtcgccga

SEQ ID NO: 483676 - DNA, 25 bp, Homo sapien
gggcgtgacacggtgcagagggcgc

SEQ ID NO: 483677 - DNA, 25 bp, Homo sapien
tggtcgccgagggaggctggtggca

SEQ ID NO: 483678 - DNA, 25 bp, Homo sapien
cctcggctgtgcgccctcttggtgg

SEQ ID NO: 483679 - DNA, 25 bp, Homo sapien
ccctcctccggtcttcggacgtgcg

SEQ ID NO: 483680 - DNA, 25 bp, Homo sapien
ctccggtcttcggacgtgcggcccg

SEQ ID NO: 483681 - DNA, 25 bp, Homo sapien
tcttggtggcgtgcgcagtcccctc

SEQ ID NO: 483682 - DNA, 25 bp, Homo sapien
gcgggttccgatcggtgccacataa

SEQ ID NO: 483683 - DNA, 25 bp, Homo sapien
aggttccgagcagggacgctccgtc

SEQ ID NO: 483684 - DNA, 25 bp, Homo sapien
gttacaggcgacataaccgaggctc

SEQ ID NO: 483685 - DNA, 25 bp, Homo sapien
gaagtattgcccacgtccaaggtga

SEQ ID NO: 483686 - DNA, 25 bp, Homo sapien
cggcgcatcgcagtttccctggtac

SEQ ID NO: 483687 - DNA, 25 bp, Homo sapien
ggcagaccggctaaatcggccccag

SEQ ID NO: 483688 - DNA, 25 bp, Homo sapien
gaccggctaaatcggccccagtgag

SEQ ID NO: 483689 - DNA, 25 bp, Homo sapien
acggtgggctcgcaagccggcgcat

SEQ ID NO: 483690 - DNA, 25 bp, Homo sapien
gatggcggctatgaaacctctgggt

SEQ ID NO: 483691 - DNA, 25 bp, Homo sapien
tttaagattacgcttcaggccagtg

SEQ ID NO: 483692 - DNA, 25 bp, Homo sapien
tattgagtgcggacggcatacctca

SEQ ID NO: 483693 - DNA, 25 bp, Homo sapien
gacccggcaggtaaggaactgtcca

SEQ ID NO: 483694 - DNA, 25 bp, Homo sapien
aaagttttgagaatacagcacctgg

SEQ ID NO: 483695 - DNA, 25 bp, Homo sapien
gccagcaaggcaggctaaccccaga

SEQ ID NO: 483696 - DNA, 25 bp, Homo sapien
aggctaaccccagaggtgtgtaagt

SEQ ID NO: 483697 - DNA, 25 bp, Homo sapien
gagccagcaaggcaggctaacccca

SEQ ID NO: 483698 - DNA, 25 bp, Homo sapien
aaccccagaggtgtgtaagtgcaaa

SEQ ID NO: 483699 - DNA, 25 bp, Homo sapien
gacatttgctccttgaatccagtgg

SEQ ID NO: 483700 - DNA, 25 bp, Homo sapien
tacagagtcgaaccttgggcaaaag

SEQ ID NO: 483701 - DNA, 25 bp, Homo sapien
aaaatggctctagatgacatcaggc

SEQ ID NO: 483702 - DNA, 25 bp, Homo sapien
aaaacctgagttaactgagcgtgca

SEQ ID NO: 483703 - DNA, 25 bp, Homo sapien
ctggttgaaatggcctgggcttccc

SEQ ID NO: 483704 - DNA, 25 bp, Homo sapien
tctggttgaaatggcctgggcttcc

SEQ ID NO: 483705 - DNA, 25 bp, Homo sapien
ttttccaagcatggttctggttgaa

SEQ ID NO: 483706 - DNA, 25 bp, Homo sapien
gattttccaagcatggttctggttg

SEQ ID NO: 483707 - DNA, 25 bp, Homo sapien
ctggaatggacacatttccaagcat

SEQ ID NO: 483708 - DNA, 25 bp, Homo sapien
gatacttggccaaggcaagttgctg

SEQ ID NO: 483709 - DNA, 25 bp, Homo sapien
gatacagcaaccgtaggtcccggat

SEQ ID NO: 483710 - DNA, 25 bp, Homo sapien
ggcaagttgctgatacagcaaccgt

SEQ ID NO: 483711 - DNA, 25 bp, Homo sapien
cgatacttggccaaggcaagttgct

SEQ ID NO: 483712 - DNA, 25 bp, Homo sapien
tcaactggcgcctttctacggtgtc

SEQ ID NO: 483713 - DNA, 25 bp, Homo sapien
cataatgtgcaatgtggcccatgga

SEQ ID NO: 483714 - DNA, 25 bp, Homo sapien
gttttcactgtgacggactcccaga

SEQ ID NO: 483715 - DNA, 25 bp, Homo sapien
gaagggctcaaccactaatgtcgtc

SEQ ID NO: 483716 - DNA, 25 bp, Homo sapien
gaaatttggagccaagaacactggc

SEQ ID NO: 483717 - DNA, 25 bp, Homo sapien
gcataactttgcgtctcgggcctca

SEQ ID NO: 483718 - DNA, 25 bp, Homo sapien
cagtagaaagggatccgagggaaca

SEQ ID NO: 483719 - DNA, 25 bp, Homo sapien
tacatccgattgtctggtcagtgaa

SEQ ID NO: 483720 - DNA, 25 bp, Homo sapien
tcatgccggagaataatgccagtga

SEQ ID NO: 483721 - DNA, 25 bp, Homo sapien
caagatataacactgtcatgccgga

SEQ ID NO: 483722 - DNA, 25 bp, Homo sapien
atgtgaccgttcagcccagggaaag

SEQ ID NO: 483723 - DNA, 25 bp, Homo sapien
ttagaagccaccaagacaacgctgc

SEQ ID NO: 483724 - DNA, 25 bp, Homo sapien
tttagagtcctatacacctgtttgg

SEQ ID NO: 483725 - DNA, 25 bp, Homo sapien
taaggtgagtcaactctagccagtc

SEQ ID NO: 483726 - DNA, 25 bp, Homo sapien
aactggcaagggtatctggatggac

SEQ ID NO: 483727 - DNA, 25 bp, Homo sapien
tgctggctagaattccccacctgga

SEQ ID NO: 483728 - DNA, 25 bp, Homo sapien
tgtgtgtcagtcaggagaggcttac

SEQ ID NO: 483729 - DNA, 25 bp, Homo sapien
gcttgtccaaaagagccacagtcca

SEQ ID NO: 483730 - DNA, 25 bp, Homo sapien
tatccaagagcagcagtcgtgtcct

SEQ ID NO: 483731 - DNA, 25 bp, Homo sapien
cttctgagaagcacttgacgcccgg

SEQ ID NO: 483732 - DNA, 25 bp, Homo sapien
ctgccctcggggaaattgcttgtta

SEQ ID NO: 483733 - DNA, 25 bp, Homo sapien
gtgaaataacaacggcatctggagg

SEQ ID NO: 483734 - DNA, 25 bp, Homo sapien
gctgatggacgctgatgaacagtga

SEQ ID NO: 483735 - DNA, 25 bp, Homo sapien
cagggagcgctgaacgtcagagtct

SEQ ID NO: 483736 - DNA, 25 bp, Homo sapien
gctgaacttggtgtgtacagtccat

SEQ ID NO: 483737 - DNA, 25 bp, Homo sapien
acccctccttcaacatcctggtggc

SEQ ID NO: 483738 - DNA, 25 bp, Homo sapien
tgtgtacagtccatcagcacagcac

SEQ ID NO: 483739 - DNA, 25 bp, Homo sapien
gaacttggtgtgtacagtccatcag

SEQ ID NO: 483740 - DNA, 25 bp, Homo sapien
tgtgattccactactaattagaatg

SEQ ID NO: 483741 - DNA, 25 bp, Homo sapien
gagttttgaccttctctggttctaa

SEQ ID NO: 483742 - DNA, 25 bp, Homo sapien
gtgattccactactaattagaatgg

SEQ ID NO: 483743 - DNA, 25 bp, Homo sapien
tctctggttctaacctgagccagtt

SEQ ID NO: 483744 - DNA, 25 bp, Homo sapien
aatacacttctcaaaattggtccaa

SEQ ID NO: 483745 - DNA, 25 bp, Homo sapien
attggtccaaagttcgtgttcatca

SEQ ID NO: 483746 - DNA, 25 bp, Homo sapien
caaagttcgtgttcatcatccactt

SEQ ID NO: 483747 - DNA, 25 bp, Homo sapien
tacacttctcaaaattggtccaaag

SEQ ID NO: 483748 - DNA, 25 bp, Homo sapien
gttgttcccctcactgtcttggacc

SEQ ID NO: 483749 - DNA, 25 bp, Homo sapien
cttacgcaatggcacatgggcacgg

SEQ ID NO: 483750 - DNA, 25 bp, Homo sapien
tcttgggggagacttgcttgttgtt

SEQ ID NO: 483751 - DNA, 25 bp, Homo sapien
gtctctaacaagaatgccccttacg

SEQ ID NO: 483752 - DNA, 25 bp, Homo sapien
gggctttctcacaaaacactggtgt

SEQ ID NO: 483753 - DNA, 25 bp, Homo sapien
gattctgctatctgttctgagcccc

SEQ ID NO: 483754 - DNA, 25 bp, Homo sapien
catccgtagtgcaatccagaacaga

SEQ ID NO: 483755 - DNA, 25 bp, Homo sapien
gcccagtagcatcagtcagtccagg

SEQ ID NO: 483756 - DNA, 25 bp, Homo sapien
gagatccttggaatggtaaagagac

SEQ ID NO: 483757 - DNA, 25 bp, Homo sapien
gtggagatccttggaatggtaaaga

SEQ ID NO: 483758 - DNA, 25 bp, Homo sapien
aagcaaccctgggagatttaagaat

SEQ ID NO: 483759 - DNA, 25 bp, Homo sapien
catggtccgtcaattcccgcagaag

SEQ ID NO: 483760 - DNA, 25 bp, Homo sapien
gccctagctccacgctggctgtgtt

SEQ ID NO: 483761 - DNA, 25 bp, Homo sapien
tcgcattcgctgtttgctgttccac

SEQ ID NO: 483762 - DNA, 25 bp, Homo sapien
ttgccctagctccacgctggctgtg

SEQ ID NO: 483763 - DNA, 25 bp, Homo sapien
ctcatgagaggtaacttcgcattcg

SEQ ID NO: 483764 - DNA, 25 bp, Homo sapien
gcttttgggacttacccatctagga

SEQ ID NO: 483765 - DNA, 25 bp, Homo sapien
aaatgagcttttgggacttacccat

SEQ ID NO: 483766 - DNA, 25 bp, Homo sapien
gcttatatcgatttttctaggattg

SEQ ID NO: 483767 - DNA, 25 bp, Homo sapien
atgtggcttatatcgatttttctag

SEQ ID NO: 483768 - DNA, 25 bp, Homo sapien
ctgattatattgtggcggccaccag

SEQ ID NO: 483769 - DNA, 25 bp, Homo sapien
ccagcactgattatattgtggcggc

SEQ ID NO: 483770 - DNA, 25 bp, Homo sapien
agcactgattatattgtggcggcca

SEQ ID NO: 483771 - DNA, 25 bp, Homo sapien
cactgattatattgtggcggccacc

SEQ ID NO: 483772 - DNA, 25 bp, Homo sapien
gaacgggaagcctgccatcaatgac

SEQ ID NO: 483773 - DNA, 25 bp, Homo sapien
aagcctgccatcaatgacaatccca

SEQ ID NO: 483774 - DNA, 25 bp, Homo sapien
catcttcttgagcagtgccagctgt

SEQ ID NO: 483775 - DNA, 25 bp, Homo sapien
tgtcactatcaatgacctcaactac

SEQ ID NO: 483776 - DNA, 25 bp, Homo sapien
tgattgtacatctactctgcatcct

SEQ ID NO: 483777 - DNA, 25 bp, Homo sapien
gattgtacatctactctgcatcctg

SEQ ID NO: 483778 - DNA, 25 bp, Homo sapien
attgtacatctactctgcatcctga

SEQ ID NO: 483779 - DNA, 25 bp, Homo sapien
cttgattgtacatctactctgcatc

SEQ ID NO: 483780 - DNA, 25 bp, Homo sapien
ccaggttgaaacgatggcggtcaga

SEQ ID NO: 483781 - DNA, 25 bp, Homo sapien
cctgaggtaaaaacgggtggcactg

SEQ ID NO: 483782 - DNA, 25 bp, Homo sapien
tccacgcgcgttgtgtctttccggg

SEQ ID NO: 483783 - DNA, 25 bp, Homo sapien
ggcaggagcgccacttctaatctct

SEQ ID NO: 483784 - DNA, 25 bp, Homo sapien
tgacgaacggcgcacccggcgcatg

SEQ ID NO: 483785 - DNA, 25 bp, Homo sapien
gaggccactcgccgctgacgaacgg

SEQ ID NO: 483786 - DNA, 25 bp, Homo sapien
cactcttggcggagcgacgaatccg

SEQ ID NO: 483787 - DNA, 25 bp, Homo sapien
aagctgaagtgcgagccccagcgac

SEQ ID NO: 483788 - DNA, 25 bp, Homo sapien
cactggagccggtgctggtgaacat

SEQ ID NO: 483789 - DNA, 25 bp, Homo sapien
agagcccactggagccggtgctggt

SEQ ID NO: 483790 - DNA, 25 bp, Homo sapien
gcccactggagccggtgctggtgaa

SEQ ID NO: 483791 - DNA, 25 bp, Homo sapien
ccactggagccggtgctggtgaaca

SEQ ID NO: 483792 - DNA, 25 bp, Homo sapien
ccaggatggcggaggccggtactca

SEQ ID NO: 483793 - DNA, 25 bp, Homo sapien
cagccaggatggcggaggccggtac

SEQ ID NO: 483794 - DNA, 25 bp, Homo sapien
caggatggcggaggccggtactcac

SEQ ID NO: 483795 - DNA, 25 bp, Homo sapien
gccaggatggcggaggccggtactc

SEQ ID NO: 483796 - DNA, 25 bp, Homo sapien
tctggagggtcggccccaccacctc

SEQ ID NO: 483797 - DNA, 25 bp, Homo sapien
agcagggttcggacgcgggtctgga

SEQ ID NO: 483798 - DNA, 25 bp, Homo sapien
cgggaactagcagggttcggacgcg

SEQ ID NO: 483799 - DNA, 25 bp, Homo sapien
caagaccgggaactagcagggttcg

SEQ ID NO: 483800 - DNA, 25 bp, Homo sapien
gcacacgctccgcaaagggcctggg

SEQ ID NO: 483801 - DNA, 25 bp, Homo sapien
tcagcttctaaagcggaggctgaac

SEQ ID NO: 483802 - DNA, 25 bp, Homo sapien
aagtgaaactgagaggtcagcttct

SEQ ID NO: 483803 - DNA, 25 bp, Homo sapien
ggccccaagagactcctgggcagag

SEQ ID NO: 483804 - DNA, 25 bp, Homo sapien
agcacagctgcgctccctcgccacg

SEQ ID NO: 483805 - DNA, 25 bp, Homo sapien
aagcactctcatcagtgtgtgtttg

SEQ ID NO: 483806 - DNA, 25 bp, Homo sapien
tccctcgccacgacttcctaacttc

SEQ ID NO: 483807 - DNA, 25 bp, Homo sapien
gaccaccgctaacacgccaggaaaa

SEQ ID NO: 483808 - DNA, 25 bp, Homo sapien
tcctgcctccatctcaatctgtttg

SEQ ID NO: 483809 - DNA, 25 bp, Homo sapien
catctcaatctgtttgtccattaaa

SEQ ID NO: 483810 - DNA, 25 bp, Homo sapien
agactccgttctctctgccctgcct

SEQ ID NO: 483811 - DNA, 25 bp, Homo sapien
caatctgtttgtccattaaaatgtc

SEQ ID NO: 483812 - DNA, 25 bp, Homo sapien
cttcgaccgagcacgcagcttcggg

SEQ ID NO: 483813 - DNA, 25 bp, Homo sapien
cgaccgagcacgcagcttcgggagg

SEQ ID NO: 483814 - DNA, 25 bp, Homo sapien
tcgtcctcttcgaccgagcacgcag

SEQ ID NO: 483815 - DNA, 25 bp, Homo sapien
ctcttcgaccgagcacgcagcttcg

SEQ ID NO: 483816 - DNA, 25 bp, Homo sapien
tcaggagaaggctgcttcattcttc

SEQ ID NO: 483817 - DNA, 25 bp, Homo sapien
cttctggattggaggaaaggaacaa

SEQ ID NO: 483818 - DNA, 25 bp, Homo sapien
tctggattggaggaaaggaacaaag

SEQ ID NO: 483819 - DNA, 25 bp, Homo sapien
ttcattcttctggattggaggaaag

SEQ ID NO: 483820 - DNA, 25 bp, Homo sapien
gctttttcggacagagatggttgcc

SEQ ID NO: 483821 - DNA, 25 bp, Homo sapien
tgtcacaccgctttttcggacagag

SEQ ID NO: 483822 - DNA, 25 bp, Homo sapien
tcggacagagatggttgccaactac

SEQ ID NO: 483823 - DNA, 25 bp, Homo sapien
cagaagcctgtcacaccgctttttc

SEQ ID NO: 483824 - DNA, 25 bp, Homo sapien
gagtgattgcaaggcagtcccctga

SEQ ID NO: 483825 - DNA, 25 bp, Homo sapien
tgagggttccctcccgtgaagacag

SEQ ID NO: 483826 - DNA, 25 bp, Homo sapien
cagcaagggtacagtggatctccaa

SEQ ID NO: 483827 - DNA, 25 bp, Homo sapien
tccaacctgggaaatctagagagct

SEQ ID NO: 483828 - DNA, 25 bp, Homo sapien
aagttatggatagggcgtggtggct

SEQ ID NO: 483829 - DNA, 25 bp, Homo sapien
aatgtgtatttgaatgccatttctg

SEQ ID NO: 483830 - DNA, 25 bp, Homo sapien
atgtatatacatgcgtcagaaaaaa

SEQ ID NO: 483831 - DNA, 25 bp, Homo sapien
ctaactcacgttttttaatatctga

SEQ ID NO: 483832 - DNA, 25 bp, Homo sapien
agccggcttgcagttcccagagggc

SEQ ID NO: 483833 - DNA, 25 bp, Homo sapien
tgagcttcagcagaactcgaaatgg

SEQ ID NO: 483834 - DNA, 25 bp, Homo sapien
ctcgaaatggctgacggtaaggctg

SEQ ID NO: 483835 - DNA, 25 bp, Homo sapien
acaaaggcggtttcccgctcgcaga

SEQ ID NO: 483836 - DNA, 25 bp, Homo sapien
ggcactgtcaagtaggcgatcacca

SEQ ID NO: 483837 - DNA, 25 bp, Homo sapien
catcccaggtggaacagggcagcat

SEQ ID NO: 483838 - DNA, 25 bp, Homo sapien
catcctcaatggtctagagtggcca

SEQ ID NO: 483839 - DNA, 25 bp, Homo sapien
ttctaagagcacctcctcagagtgg

SEQ ID NO: 483840 - DNA, 25 bp, Homo sapien
gatgtaagtgcaacgggcagcttga

SEQ ID NO: 483841 - DNA, 25 bp, Homo sapien
gggtgatgtaagtgcaacgggcagc

SEQ ID NO: 483842 - DNA, 25 bp, Homo sapien
tcctttgtgactctgacaggactgc

SEQ ID NO: 483843 - DNA, 25 bp, Homo sapien
ctcctttgtgactctgacaggactg

SEQ ID NO: 483844 - DNA, 25 bp, Homo sapien
cctcgtaattcaaaagtagaggaga

SEQ ID NO: 483845 - DNA, 25 bp, Homo sapien
cctcattgcctcgtaattcaaaagt

SEQ ID NO: 483846 - DNA, 25 bp, Homo sapien
cattgcctcgtaattcaaaagtaga

SEQ ID NO: 483847 - DNA, 25 bp, Homo sapien
ttgcctcgtaattcaaaagtagagg

SEQ ID NO: 483848 - DNA, 25 bp, Homo sapien
tttaccagttacagttgacactgtg

SEQ ID NO: 483849 - DNA, 25 bp, Homo sapien
gggcgaatttaccagttacagttga

SEQ ID NO: 483850 - DNA, 25 bp, Homo sapien
ttctgtgagatgcaccttcatctta

SEQ ID NO: 483851 - DNA, 25 bp, Homo sapien
ggggacattctcagattctgtgaga

SEQ ID NO: 483852 - DNA, 25 bp, Homo sapien
cctggacgacagggagaaactccat

SEQ ID NO: 483853 - DNA, 25 bp, Homo sapien
gcctggacgacagggagaaactcca

SEQ ID NO: 483854 - DNA, 25 bp, Homo sapien
agcctggacgacagggagaaactcc

SEQ ID NO: 483855 - DNA, 25 bp, Homo sapien
cagcctggacgacagggagaaactc

SEQ ID NO: 483856 - DNA, 25 bp, Homo sapien
ttgtactaaaagcagtcacgcccct

SEQ ID NO: 483857 - DNA, 25 bp, Homo sapien
agtgtgacctctgccttgtactaaa

SEQ ID NO: 483858 - DNA, 25 bp, Homo sapien
ccatgagtacaactggagcccaggt

SEQ ID NO: 483859 - DNA, 25 bp, Homo sapien
gagcccaggtcagttttccaggaga

SEQ ID NO: 483860 - DNA, 25 bp, Homo sapien
cagcagaaggctcttcgacagaggc

SEQ ID NO: 483861 - DNA, 25 bp, Homo sapien
cagaaggctcttcgacagaggcgcc

SEQ ID NO: 483862 - DNA, 25 bp, Homo sapien
aggctcttcgacagaggcgccttgt

SEQ ID NO: 483863 - DNA, 25 bp, Homo sapien
gaaggctcttcgacagaggcgcctt

SEQ ID NO: 483864 - DNA, 25 bp, Homo sapien
ctggaagtcgttcttgactgcgtga

SEQ ID NO: 483865 - DNA, 25 bp, Homo sapien
gaagtcgttcttgactgcgtgaagg

SEQ ID NO: 483866 - DNA, 25 bp, Homo sapien
tcttgactgcgtgaaggtcatacac

SEQ ID NO: 483867 - DNA, 25 bp, Homo sapien
gtcgttcttgactgcgtgaaggtca

SEQ ID NO: 483868 - DNA, 25 bp, Homo sapien
tgtgtatgcgtgtgtttagatttcc

SEQ ID NO: 483869 - DNA, 25 bp, Homo sapien
tgttaatctggatgtggctattccc

SEQ ID NO: 483870 - DNA, 25 bp, Homo sapien
gaatacacactgagagcctcttagg

SEQ ID NO: 483871 - DNA, 25 bp, Homo sapien
aactcccatatctctcatgaataca

SEQ ID NO: 483872 - DNA, 25 bp, Homo sapien
aagctctgagagccactaagaaaat

SEQ ID NO: 483873 - DNA, 25 bp, Homo sapien
tcagggataagctctgagagccact

SEQ ID NO: 483874 - DNA, 25 bp, Homo sapien
ataagctctgagagccactaagaaa

SEQ ID NO: 483875 - DNA, 25 bp, Homo sapien
agggataagctctgagagccactaa

SEQ ID NO: 483876 - DNA, 25 bp, Homo sapien
gcaggctcaaccctctgagactgaa

SEQ ID NO: 483877 - DNA, 25 bp, Homo sapien
agtcatacaacctgtgctcttgcca

SEQ ID NO: 483878 - DNA, 25 bp, Homo sapien
tgtgctcttgccaacagaaataaga

SEQ ID NO: 483879 - DNA, 25 bp, Homo sapien
tgagaagtctgagcatatcaactgt

SEQ ID NO: 483880 - DNA, 25 bp, Homo sapien
gactactgcagaaagtatctttcaa

SEQ ID NO: 483881 - DNA, 25 bp, Homo sapien
attataaataagcagactactgcag

SEQ ID NO: 483882 - DNA, 25 bp, Homo sapien
taagcagactactgcagaaagtatc

SEQ ID NO: 483883 - DNA, 25 bp, Homo sapien
taaataagcagactactgcagaaag

SEQ ID NO: 483884 - DNA, 25 bp, Homo sapien
aattttctgcttccatatcttcttt

SEQ ID NO: 483885 - DNA, 25 bp, Homo sapien
caaattttctgcttccatatcttct

SEQ ID NO: 483886 - DNA, 25 bp, Homo sapien
gcttccatatcttctttcaaatatc

SEQ ID NO: 483887 - DNA, 25 bp, Homo sapien
tgcaaattttctgcttccatatctt

SEQ ID NO: 483888 - DNA, 25 bp, Homo sapien
gaaagtcaaataaggctgacaaaac

SEQ ID NO: 483889 - DNA, 25 bp, Homo sapien
gcttcaatgaggagaaagtcaaata

SEQ ID NO: 483890 - DNA, 25 bp, Homo sapien
ggagaaagtcaaataaggctgacaa

SEQ ID NO: 483891 - DNA, 25 bp, Homo sapien
tcaaataaggctgacaaaacccagg

SEQ ID NO: 483892 - DNA, 25 bp, Homo sapien
aattactagctgcagtgatgccaaa

SEQ ID NO: 483893 - DNA, 25 bp, Homo sapien
ggcaaattactagctgcagtgatgc

SEQ ID NO: 483894 - DNA, 25 bp, Homo sapien
tactagctgcagtgatgccaaagaa

SEQ ID NO: 483895 - DNA, 25 bp, Homo sapien
gaaggcaaattactagctgcagtga

SEQ ID NO: 483896 - DNA, 25 bp, Homo sapien
tcatcaggaaatgagactctggacc

SEQ ID NO: 483897 - DNA, 25 bp, Homo sapien
cctaccccactgacaagcaaaatga

SEQ ID NO: 483898 - DNA, 25 bp, Homo sapien
aataaaaactaagactcagtgacct

SEQ ID NO: 483899 - DNA, 25 bp, Homo sapien
atgaaagatttccagcttgcatgac

SEQ ID NO: 483900 - DNA, 25 bp, Homo sapien
gcatgactctgagtagatgctacta

SEQ ID NO: 483901 - DNA, 25 bp, Homo sapien
tagtgctgacagatacatggccatt

SEQ ID NO: 483902 - DNA, 25 bp, Homo sapien
taaaaacacgtgcaaagccgtgctg

SEQ ID NO: 483903 - DNA, 25 bp, Homo sapien
tacagccgaagtacgccaaagaact

SEQ ID NO: 483904 - DNA, 25 bp, Homo sapien
taaaagctgtgaacgtgctgaacct

SEQ ID NO: 483905 - DNA, 25 bp, Homo sapien
gaagacttggctttacgtactccca

SEQ ID NO: 483906 - DNA, 25 bp, Homo sapien
tcaaggtgctgctttctgtgaacca

SEQ ID NO: 483907 - DNA, 25 bp, Homo sapien
tattacatgctcaatagacagtggg

SEQ ID NO: 483908 - DNA, 25 bp, Homo sapien
tgtgaaccactgaagtagagcagct

SEQ ID NO: 483909 - DNA, 25 bp, Homo sapien
cacagcaattgctcaagttaattct

SEQ ID NO: 483910 - DNA, 25 bp, Homo sapien
tttaagcctccaagattactctcct

SEQ ID NO: 483911 - DNA, 25 bp, Homo sapien
ctcctttgaatgacactagagatat

SEQ ID NO: 483912 - DNA, 25 bp, Homo sapien
cagacaggcacgtttcttgtgttta

SEQ ID NO: 483913 - DNA, 25 bp, Homo sapien
gcagaagcaattaatcaaggatcct

SEQ ID NO: 483914 - DNA, 25 bp, Homo sapien
gcaggcagcgattcgttgctcactt

SEQ ID NO: 483915 - DNA, 25 bp, Homo sapien
tagacttccacgcactagaaaagca

SEQ ID NO: 483916 - DNA, 25 bp, Homo sapien
aattaacctaacaaggcaggcagcg

SEQ ID NO: 483917 - DNA, 25 bp, Homo sapien
tggattcaacttgtttgctgtgagg

SEQ ID NO: 483918 - DNA, 25 bp, Homo sapien
caaacagaaaggaggtatactaact

SEQ ID NO: 483919 - DNA, 25 bp, Homo sapien
gtcccatgggacttcagtggttcca

SEQ ID NO: 483920 - DNA, 25 bp, Homo sapien
tgaggttaagtgtctgaatgtctac

SEQ ID NO: 483921 - DNA, 25 bp, Homo sapien
ctaatgagtgggaatgtctacagtg

SEQ ID NO: 483922 - DNA, 25 bp, Homo sapien
cagaccatatttgactgaaggtaac

SEQ ID NO: 483923 - DNA, 25 bp, Homo sapien
tctacagtgtggagacactgggcaa

SEQ ID NO: 483924 - DNA, 25 bp, Homo sapien
tgggcaaagggaggactcatgtcct

SEQ ID NO: 483925 - DNA, 25 bp, Homo sapien
aaataaactgtgtgagtactcctac

SEQ ID NO: 483926 - DNA, 25 bp, Homo sapien
tgaagagctccaagacccactaatc

SEQ ID NO: 483927 - DNA, 25 bp, Homo sapien
gccctgaactatcaatcggtatgga

SEQ ID NO: 483928 - DNA, 25 bp, Homo sapien
tcggtatggaaaaccggagaccata

SEQ ID NO: 483929 - DNA, 25 bp, Homo sapien
tgagaagactgctagcagctccccg

SEQ ID NO: 483930 - DNA, 25 bp, Homo sapien
gcccttgacgacttaccggtacaga

SEQ ID NO: 483931 - DNA, 25 bp, Homo sapien
gaaatgaacatctgcgctctttgag

SEQ ID NO: 483932 - DNA, 25 bp, Homo sapien
ggatggtctccaggactcaaacgat

SEQ ID NO: 483933 - DNA, 25 bp, Homo sapien
caaagacattcaagctgcatgcagt

SEQ ID NO: 483934 - DNA, 25 bp, Homo sapien
gcaacattcttggaccactcacctg

SEQ ID NO: 483935 - DNA, 25 bp, Homo sapien
catgagagactctaggccagaatca

SEQ ID NO: 483936 - DNA, 25 bp, Homo sapien
taaagcctgaagatgactgtggtcc

SEQ ID NO: 483937 - DNA, 25 bp, Homo sapien
gagcacagtgattacaaggcctatt

SEQ ID NO: 483938 - DNA, 25 bp, Homo sapien
cccagaaagtgagacaatagagcac

SEQ ID NO: 483939 - DNA, 25 bp, Homo sapien
gggcaagagtgcctgaaatactcaa

SEQ ID NO: 483940 - DNA, 25 bp, Homo sapien
tcaaagccccagtaagtaggcccag

SEQ ID NO: 483941 - DNA, 25 bp, Homo sapien
gaaattatctgtgcctagtcctgga

SEQ ID NO: 483942 - DNA, 25 bp, Homo sapien
gtcaccatcacagctatttcttagc

SEQ ID NO: 483943 - DNA, 25 bp, Homo sapien
gaaaacatggagaaggtaagacctg

SEQ ID NO: 483944 - DNA, 25 bp, Homo sapien
taatctgctcatcgagaacagcagg

SEQ ID NO: 483945 - DNA, 25 bp, Homo sapien
gaagcaactagcatgtggcagaccg

SEQ ID NO: 483946 - DNA, 25 bp, Homo sapien
ggtttcgtggagcagagctacccaa

SEQ ID NO: 483947 - DNA, 25 bp, Homo sapien
tggcagaccgatcccagtcagcttt

SEQ ID NO: 483948 - DNA, 25 bp, Homo sapien
gctgacatgcagagtacaaggaagg

SEQ ID NO: 483949 - DNA, 25 bp, Homo sapien
tcctttgctgtctgttacctgagtc

SEQ ID NO: 483950 - DNA, 25 bp, Homo sapien
ggaagtgaatcttgaatacaaccag

SEQ ID NO: 483951 - DNA, 25 bp, Homo sapien
ctgagtctcacttaaccagcgttaa

SEQ ID NO: 483952 - DNA, 25 bp, Homo sapien
caaggtgcaactttccagtgataaa

SEQ ID NO: 483953 - DNA, 25 bp, Homo sapien
tggcaccccgttggatgtgtagaac

SEQ ID NO: 483954 - DNA, 25 bp, Homo sapien
ctgcaccaggaaaatggctatctca

SEQ ID NO: 483955 - DNA, 25 bp, Homo sapien
gaaccctggaacagataatgagcca

SEQ ID NO: 483956 - DNA, 25 bp, Homo sapien
tatgggaagtacactaggagaaccc

SEQ ID NO: 483957 - DNA, 25 bp, Homo sapien
cagggatgggttcagaaagaactga

SEQ ID NO: 483958 - DNA, 25 bp, Homo sapien
cagcagttaagaagacgacattatc

SEQ ID NO: 483959 - DNA, 25 bp, Homo sapien
aggcagaagttcagggatgggttca

SEQ ID NO: 483960 - DNA, 25 bp, Homo sapien
ttccttactcttgttacaacatggg

SEQ ID NO: 483961 - DNA, 25 bp, Homo sapien
tatcagtcgcactttccagatgatg

SEQ ID NO: 483962 - DNA, 25 bp, Homo sapien
ggtctggctccatggtctgcactct

SEQ ID NO: 483963 - DNA, 25 bp, Homo sapien
gaaactatgctccagagaggttgag

SEQ ID NO: 483964 - DNA, 25 bp, Homo sapien
gaggcttgttctatttatcagtcgc

SEQ ID NO: 483965 - DNA, 25 bp, Homo sapien
agacattcgttccagatttctctgc

SEQ ID NO: 483966 - DNA, 25 bp, Homo sapien
caattgctgcatggacccttttatc

SEQ ID NO: 483967 - DNA, 25 bp, Homo sapien
tttcctggaatgtagccaaagacat

SEQ ID NO: 483968 - DNA, 25 bp, Homo sapien
gcactttacagtatgcctgatgaac

SEQ ID NO: 483969 - DNA, 25 bp, Homo sapien
aatgaagttagctgagatccaagtc

SEQ ID NO: 483970 - DNA, 25 bp, Homo sapien
tcactagatatgctgaaagtgcccc

SEQ ID NO: 483971 - DNA, 25 bp, Homo sapien
tgtcctgtaataggcaagctcaacc

SEQ ID NO: 483972 - DNA, 25 bp, Homo sapien
cagacagtgcttttgatcagggtag

SEQ ID NO: 483973 - DNA, 25 bp, Homo sapien
catattagggccagctagcggaatc

SEQ ID NO: 483974 - DNA, 25 bp, Homo sapien
cacagagagggatctagcatggcat

SEQ ID NO: 483975 - DNA, 25 bp, Homo sapien
tagcggaatcatccttcaagaggtt

SEQ ID NO: 483976 - DNA, 25 bp, Homo sapien
tgaggatggcccttagagcctagac

SEQ ID NO: 483977 - DNA, 25 bp, Homo sapien
taagagaatggcatagatggcttcc

SEQ ID NO: 483978 - DNA, 25 bp, Homo sapien
gggccacgtgcatcttttcattaga

SEQ ID NO: 483979 - DNA, 25 bp, Homo sapien
tacaggagccttgaaggccgacagg

SEQ ID NO: 483980 - DNA, 25 bp, Homo sapien
caagtactgcattacagaggcaaaa

SEQ ID NO: 483981 - DNA, 25 bp, Homo sapien
acacagagcttgtggtttgcctggg

SEQ ID NO: 483982 - DNA, 25 bp, Homo sapien
ggccccgtttgagagcctggcggga

SEQ ID NO: 483983 - DNA, 25 bp, Homo sapien
ccccgtttgagagcctggcgggaag

SEQ ID NO: 483984 - DNA, 25 bp, Homo sapien
ccgtttgagagcctggcgggaagct

SEQ ID NO: 483985 - DNA, 25 bp, Homo sapien
acagcctctgactcaggcagcctct

SEQ ID NO: 483986 - DNA, 25 bp, Homo sapien
gcctctgactcaggcagcctctcga

SEQ ID NO: 483987 - DNA, 25 bp, Homo sapien
agcctctgactcaggcagcctctcg

SEQ ID NO: 483988 - DNA, 25 bp, Homo sapien
cctctgactcaggcagcctctcgac

SEQ ID NO: 483989 - DNA, 25 bp, Homo sapien
tgacaatgttcctccatactcacag

SEQ ID NO: 483990 - DNA, 25 bp, Homo sapien
tggcggcccaaagaattcagctgac

SEQ ID NO: 483991 - DNA, 25 bp, Homo sapien
cttgatgctctttcttgtgtctgac

SEQ ID NO: 483992 - DNA, 25 bp, Homo sapien
tactcacagcactttagacgttaga

SEQ ID NO: 483993 - DNA, 25 bp, Homo sapien
aaatgcttcataaagatgtgatggc

SEQ ID NO: 483994 - DNA, 25 bp, Homo sapien
tgttggcagtactctcttcctaaaa

SEQ ID NO: 483995 - DNA, 25 bp, Homo sapien
atcactggagtctgccaccactgtc

SEQ ID NO: 483996 - DNA, 25 bp, Homo sapien
cataggctccagtatccaaagataa

SEQ ID NO: 483997 - DNA, 25 bp, Homo sapien
tatggagcagtaaaatggtacaaac

SEQ ID NO: 483998 - DNA, 25 bp, Homo sapien
tgatggacaacggacccagaatttg

SEQ ID NO: 483999 - DNA, 25 bp, Homo sapien
cacttggactcttggtatggagcag

SEQ ID NO: 484000 - DNA, 25 bp, Homo sapien
ggtacaaacagagcaaacacaggtg

SEQ ID NO: 484001 - DNA, 25 bp, Homo sapien
tgacattcgctgaggattggcaaag

SEQ ID NO: 484002 - DNA, 25 bp, Homo sapien
tgtaacctggacagtagtactctag

SEQ ID NO: 484003 - DNA, 25 bp, Homo sapien
ccagcagggagcaattgacattcgc

SEQ ID NO: 484004 - DNA, 25 bp, Homo sapien
catttagcaaatggtgacgctacca

SEQ ID NO: 484005 - DNA, 25 bp, Homo sapien
cgtcatagcccattgcacagggcat

SEQ ID NO: 484006 - DNA, 25 bp, Homo sapien
taagtattggatggcttgagagccc

SEQ ID NO: 484007 - DNA, 25 bp, Homo sapien
gatactgatttaagtattggatggc

SEQ ID NO: 484008 - DNA, 25 bp, Homo sapien
ttgagagcccacaacgtcatagccc

SEQ ID NO: 484009 - DNA, 25 bp, Homo sapien
aagtccacttatggctacaatccag

SEQ ID NO: 484010 - DNA, 25 bp, Homo sapien
tccacttatggctacaatccagatg

SEQ ID NO: 484011 - DNA, 25 bp, Homo sapien
gctacaatccagatgtaggaaccag

SEQ ID NO: 484012 - DNA, 25 bp, Homo sapien
ttatggctacaatccagatgtagga

SEQ ID NO: 484013 - DNA, 25 bp, Homo sapien
aaagaatggtgagacagttgaatat

SEQ ID NO: 484014 - DNA, 25 bp, Homo sapien
aaaagaatggtgagacagttgaata

SEQ ID NO: 484015 - DNA, 25 bp, Homo sapien
aaaaaaaagaatggtgagacagttg

SEQ ID NO: 484016 - DNA, 25 bp, Homo sapien
aaaaaagaatggtgagacagttgaa

SEQ ID NO: 484017 - DNA, 25 bp, Homo sapien
tcaaaattaccttgaaagcacaaac

SEQ ID NO: 484018 - DNA, 25 bp, Homo sapien
tcatcaaaattaccttgaaagcaca

SEQ ID NO: 484019 - DNA, 25 bp, Homo sapien
caattttccctgtgactggcctttt

SEQ ID NO: 484020 - DNA, 25 bp, Homo sapien
ctcaattttccctgtgactggcctt

SEQ ID NO: 484021 - DNA, 25 bp, Homo sapien
atcttttaagagcatagacataggc

SEQ ID NO: 484022 - DNA, 25 bp, Homo sapien
ttaagagcatagacataggccgggc

SEQ ID NO: 484023 - DNA, 25 bp, Homo sapien
gttggaagaaactgcatgtggttat

SEQ ID NO: 484024 - DNA, 25 bp, Homo sapien
tggaagaaactgcatgtggttatgc

SEQ ID NO: 484025 - DNA, 25 bp, Homo sapien
tgtaaggtgctggactcactgggcc

SEQ ID NO: 484026 - DNA, 25 bp, Homo sapien
tgtctgtgcatctcgtggctggaag

SEQ ID NO: 484027 - DNA, 25 bp, Homo sapien
cgattgtgtttttcagggcctctgg

SEQ ID NO: 484028 - DNA, 25 bp, Homo sapien
catcctagtggtgtggctaagggaa

SEQ ID NO: 484029 - DNA, 25 bp, Homo sapien
aagtcagttagaagataaatagccc

SEQ ID NO: 484030 - DNA, 25 bp, Homo sapien
ggaagtttcaaacatcgatggtgga

SEQ ID NO: 484031 - DNA, 25 bp, Homo sapien
tacacacccaatagagcggctaaag

SEQ ID NO: 484032 - DNA, 25 bp, Homo sapien
gatatgaaaatgaccactaagcaca

SEQ ID NO: 484033 - DNA, 25 bp, Homo sapien
catttataaaaccaattccacttat

SEQ ID NO: 484034 - DNA, 25 bp, Homo sapien
gctgtatttctacacactagtgaca

SEQ ID NO: 484035 - DNA, 25 bp, Homo sapien
acccagccaatcagctgtatttcta

SEQ ID NO: 484036 - DNA, 25 bp, Homo sapien
cactagtgacaaacaattgggaaaa

SEQ ID NO: 484037 - DNA, 25 bp, Homo sapien
ctaggggctgctttcccaggggcat

SEQ ID NO: 484038 - DNA, 25 bp, Homo sapien
gaagctgtgaccctgtaagtctgag

SEQ ID NO: 484039 - DNA, 25 bp, Homo sapien
agtctaggccaaagacccacgctgg

SEQ ID NO: 484040 - DNA, 25 bp, Homo sapien
tagtactagcctgaaaccacaacag

SEQ ID NO: 484041 - DNA, 25 bp, Homo sapien
ggacacatggtcacgcaaccagaga

SEQ ID NO: 484042 - DNA, 25 bp, Homo sapien
tgaattacttcatgtaaaacaggag

SEQ ID NO: 484043 - DNA, 25 bp, Homo sapien
agtcctcacttaactcactgatagg

SEQ ID NO: 484044 - DNA, 25 bp, Homo sapien
cctactgacaaggttaagacttact

SEQ ID NO: 484045 - DNA, 25 bp, Homo sapien
atgtaatgtcttcccatccactgcg

SEQ ID NO: 484046 - DNA, 25 bp, Homo sapien
ggagcaatgtggcaacaccaagtag

SEQ ID NO: 484047 - DNA, 25 bp, Homo sapien
tgaactccatgtgcgtgtactgatg

SEQ ID NO: 484048 - DNA, 25 bp, Homo sapien
gaaggtatcacatgttgcgctcatc

SEQ ID NO: 484049 - DNA, 25 bp, Homo sapien
aactctcacacagtcccgagggaag

SEQ ID NO: 484050 - DNA, 25 bp, Homo sapien
tcgagataaggatttcagagtcact

SEQ ID NO: 484051 - DNA, 25 bp, Homo sapien
caaagaacaagataagcaaggcccc

SEQ ID NO: 484052 - DNA, 25 bp, Homo sapien
gatcttaaggatgatgcggtgcccg

SEQ ID NO: 484053 - DNA, 25 bp, Homo sapien
cccgagcttgggagtgtctattaga

SEQ ID NO: 484054 - DNA, 25 bp, Homo sapien
gacaccagcagaaaacaactgccat

SEQ ID NO: 484055 - DNA, 25 bp, Homo sapien
cagatggccatcacagagacaccag

SEQ ID NO: 484056 - DNA, 25 bp, Homo sapien
ctttgttggcagatggccatcacag

SEQ ID NO: 484057 - DNA, 25 bp, Homo sapien
catcacagagacaccagcagaaaac

SEQ ID NO: 484058 - DNA, 25 bp, Homo sapien
ttgctgtcgtagcacagaccggaca

SEQ ID NO: 484059 - DNA, 25 bp, Homo sapien
tgctgtcgtagcacagaccggacat

SEQ ID NO: 484060 - DNA, 25 bp, Homo sapien
tttgctgtcgtagcacagaccggac

SEQ ID NO: 484061 - DNA, 25 bp, Homo sapien
gggatgcagagcacctgatgcacct

SEQ ID NO: 484062 - DNA, 25 bp, Homo sapien
agaagatgggttcaagtgtccaaga

SEQ ID NO: 484063 - DNA, 25 bp, Homo sapien
ctgaagaagagaagatgggttcaag

SEQ ID NO: 484064 - DNA, 25 bp, Homo sapien
ctggggatgcagagcacctgatgca

SEQ ID NO: 484065 - DNA, 25 bp, Homo sapien
ggctcccatcccaattctggcttcg

SEQ ID NO: 484066 - DNA, 25 bp, Homo sapien
gtctctgtcgcctcccttgtgcaaa

SEQ ID NO: 484067 - DNA, 25 bp, Homo sapien
catcccaattctggcttcgctggtg

SEQ ID NO: 484068 - DNA, 25 bp, Homo sapien
tctctggatgtccagcgtggctccc

SEQ ID NO: 484069 - DNA, 25 bp, Homo sapien
atctgcagacctacttcttgcatcc

SEQ ID NO: 484070 - DNA, 25 bp, Homo sapien
ccaaaccatcgtgagatctgcagac

SEQ ID NO: 484071 - DNA, 25 bp, Homo sapien
tctccaaaccatcgtgagatctgca

SEQ ID NO: 484072 - DNA, 25 bp, Homo sapien
gcagacctacttcttgcatccaatg

SEQ ID NO: 484073 - DNA, 25 bp, Homo sapien
caacctggcagatcccgtgatgttc

SEQ ID NO: 484074 - DNA, 25 bp, Homo sapien
aggcctgggtacaacctggcagatc

SEQ ID NO: 484075 - DNA, 25 bp, Homo sapien
tgggaatgcacgctccagcagggca

SEQ ID NO: 484076 - DNA, 25 bp, Homo sapien
gcagatcccgtgatgttccaagtat

SEQ ID NO: 484077 - DNA, 25 bp, Homo sapien
tgtacggtactcgtgcatgcacaca

SEQ ID NO: 484078 - DNA, 25 bp, Homo sapien
tcaatgtccagctctaggcctacca

SEQ ID NO: 484079 - DNA, 25 bp, Homo sapien
caatacaactgcaccctgtacggta

SEQ ID NO: 484080 - DNA, 25 bp, Homo sapien
gagacaggacctaagctccataaga

SEQ ID NO: 484081 - DNA, 25 bp, Homo sapien
cactgatccaccacttctggcagga

SEQ ID NO: 484082 - DNA, 25 bp, Homo sapien
tactctcctgtttaaaaggcctcac

SEQ ID NO: 484083 - DNA, 25 bp, Homo sapien
taccgtcatcccttcagacaacgtt

SEQ ID NO: 484084 - DNA, 25 bp, Homo sapien
tcattgcctctttcttataggaacc

SEQ ID NO: 484085 - DNA, 25 bp, Homo sapien
catgcaccgtgaagctgtggagact

SEQ ID NO: 484086 - DNA, 25 bp, Homo sapien
ggctggaccctatgctcactgtgga

SEQ ID NO: 484087 - DNA, 25 bp, Homo sapien
acagagcttctttgctacagcgagc

SEQ ID NO: 484088 - DNA, 25 bp, Homo sapien
tgcacaggcaccattcggatgatca

SEQ ID NO: 484089 - DNA, 25 bp, Homo sapien
tttaggtttggaagataaagaggca

SEQ ID NO: 484090 - DNA, 25 bp, Homo sapien
tggaagataaagaggcaagagatca

SEQ ID NO: 484091 - DNA, 25 bp, Homo sapien
gtttggaagataaagaggcaagaga

SEQ ID NO: 484092 - DNA, 25 bp, Homo sapien
ataaagaggcaagagatcaaagata

SEQ ID NO: 484093 - DNA, 25 bp, Homo sapien
cacaaataacagatgaccagaacta

SEQ ID NO: 484094 - DNA, 25 bp, Homo sapien
tgtcccacttggcttgtaccaacaa

SEQ ID NO: 484095 - DNA, 25 bp, Homo sapien
gagaggattggctcccacaaataac

SEQ ID NO: 484096 - DNA, 25 bp, Homo sapien
accgggcagcccaatgagatgagga

SEQ ID NO: 484097 - DNA, 25 bp, Homo sapien
gccactctgggtgtcagtagcttct

SEQ ID NO: 484098 - DNA, 25 bp, Homo sapien
tgtgagtatcgctgagccactctgg

SEQ ID NO: 484099 - DNA, 25 bp, Homo sapien
ccaaatgctgcgaaagtaactgaaa

SEQ ID NO: 484100 - DNA, 25 bp, Homo sapien
gaggatgtgcagctaaactcacttt

SEQ ID NO: 484101 - DNA, 25 bp, Homo sapien
tactgctccagagtacatctctaaa

SEQ ID NO: 484102 - DNA, 25 bp, Homo sapien
gatactgctccagagtacatctcta

SEQ ID NO: 484103 - DNA, 25 bp, Homo sapien
atctctaaattcattcgtcctttca

SEQ ID NO: 484104 - DNA, 25 bp, Homo sapien
aattcattcgtcctttcaaaaactg

SEQ ID NO: 484105 - DNA, 25 bp, Homo sapien
gattatgaggatgatttttctaata

SEQ ID NO: 484106 - DNA, 25 bp, Homo sapien
cttcccagaatgattatgaggatga

SEQ ID NO: 484107 - DNA, 25 bp, Homo sapien
gatgatttttctaatatacccctgg

SEQ ID NO: 484108 - DNA, 25 bp, Homo sapien
gaggaaaaacttcccagaatgatta

SEQ ID NO: 484109 - DNA, 25 bp, Homo sapien
caaggcttctcgagggtctcagttt

SEQ ID NO: 484110 - DNA, 25 bp, Homo sapien
gggttgcacgaaatcaaggcttctc

SEQ ID NO: 484111 - DNA, 25 bp, Homo sapien
catgggtactccagtggtctgttcc

SEQ ID NO: 484112 - DNA, 25 bp, Homo sapien
acaaaaccacgtctgtcaaccacag

SEQ ID NO: 484113 - DNA, 25 bp, Homo sapien
tgagacagtggccttgaagacataa

SEQ ID NO: 484114 - DNA, 25 bp, Homo sapien
gccacacagcgaggactgagacagt

SEQ ID NO: 484115 - DNA, 25 bp, Homo sapien
tctgcatcgtatattctgttttccc

SEQ ID NO: 484116 - DNA, 25 bp, Homo sapien
ctctcagagtgtggattatccattt

SEQ ID NO: 484117 - DNA, 25 bp, Homo sapien
agaggtgtcccaaccttttcctgtg

SEQ ID NO: 484118 - DNA, 25 bp, Homo sapien
ggaccgtcaggaccagaggtgtccc

SEQ ID NO: 484119 - DNA, 25 bp, Homo sapien
tccagggaccgtcaggaccagaggt

SEQ ID NO: 484120 - DNA, 25 bp, Homo sapien
tcaggaccagaggtgtcccaacctt

SEQ ID NO: 484121 - DNA, 25 bp, Homo sapien
ttaaagcaaggaggctcccaaagga

SEQ ID NO: 484122 - DNA, 25 bp, Homo sapien
tggcatatgcaagcactcaagaaac

SEQ ID NO: 484123 - DNA, 25 bp, Homo sapien
ttgtcctgtttgtagacctggcctc

SEQ ID NO: 484124 - DNA, 25 bp, Homo sapien
ggcctcctgtacgacctggcatatg

SEQ ID NO: 484125 - DNA, 25 bp, Homo sapien
tggagaacaattacagagggggcat

SEQ ID NO: 484126 - DNA, 25 bp, Homo sapien
ggcattatgaatgcgatgttttaga

SEQ ID NO: 484127 - DNA, 25 bp, Homo sapien
gtacaagttggtgccccataaaaga

SEQ ID NO: 484128 - DNA, 25 bp, Homo sapien
tgactgctcgtacaagttggtgccc

SEQ ID NO: 484129 - DNA, 25 bp, Homo sapien
gtgtgagccaggcacgcggtctcat

SEQ ID NO: 484130 - DNA, 25 bp, Homo sapien
tcgggcactcgagcgtccacaggag

SEQ ID NO: 484131 - DNA, 25 bp, Homo sapien
ggtggctgacctcgggcactcgagc

SEQ ID NO: 484132 - DNA, 25 bp, Homo sapien
ccacaggagagtgtgagccaggcac

SEQ ID NO: 484133 - DNA, 25 bp, Homo sapien
ctcagaacacgagtatatatactat

SEQ ID NO: 484134 - DNA, 25 bp, Homo sapien
aacttttttagatggatatatggtc

SEQ ID NO: 484135 - DNA, 25 bp, Homo sapien
caaataaagttgtacaagaatatgc

SEQ ID NO: 484136 - DNA, 25 bp, Homo sapien
gatggatatatggtcatggtgactc

SEQ ID NO: 484137 - DNA, 25 bp, Homo sapien
cctagaaaatccaagagtgtttaca

SEQ ID NO: 484138 - DNA, 25 bp, Homo sapien
tagaaaaactagcaacataatccac

SEQ ID NO: 484139 - DNA, 25 bp, Homo sapien
tcaatacccattcatgaagagacaa

SEQ ID NO: 484140 - DNA, 25 bp, Homo sapien
aaatcaaacgctcatctcaataggt

SEQ ID NO: 484141 - DNA, 25 bp, Homo sapien
tatacccaatttaagaagttagaga

SEQ ID NO: 484142 - DNA, 25 bp, Homo sapien
caaagtaattgtgtactagatccta

SEQ ID NO: 484143 - DNA, 25 bp, Homo sapien
cattacacagattatattctcacca

SEQ ID NO: 484144 - DNA, 25 bp, Homo sapien
tctcaccataatgcaattaaatgag

SEQ ID NO: 484145 - DNA, 25 bp, Homo sapien
gactgcagactgtgataaaacctca

SEQ ID NO: 484146 - DNA, 25 bp, Homo sapien
tgaagtaaatcctgagcgcacacag

SEQ ID NO: 484147 - DNA, 25 bp, Homo sapien
gcgcacacagtggaggaagactgca

SEQ ID NO: 484148 - DNA, 25 bp, Homo sapien
actgtgataaaacctcagcaacagg

SEQ ID NO: 484149 - DNA, 25 bp, Homo sapien
tcagactgccgaccgccctgatagt

SEQ ID NO: 484150 - DNA, 25 bp, Homo sapien
tttgtcgctgacgtaaaggaggaaa

SEQ ID NO: 484151 - DNA, 25 bp, Homo sapien
gatagtttacgttttgtcgctgacg

SEQ ID NO: 484152 - DNA, 25 bp, Homo sapien
gacgattccaattgatcattcctcc

SEQ ID NO: 484153 - DNA, 25 bp, Homo sapien
gatcgaaactgcttcaactctgaaa

SEQ ID NO: 484154 - DNA, 25 bp, Homo sapien
cgcttgattacttttgagtcctgtt

SEQ ID NO: 484155 - DNA, 25 bp, Homo sapien
accatctttgtatttacacgcttga

SEQ ID NO: 484156 - DNA, 25 bp, Homo sapien
catggatttagaatgagtaccaggt

SEQ ID NO: 484157 - DNA, 25 bp, Homo sapien
aggcagagggaaacttcaaagtatt

SEQ ID NO: 484158 - DNA, 25 bp, Homo sapien
cttcaaagtattatgatggcaacac

SEQ ID NO: 484159 - DNA, 25 bp, Homo sapien
aacaggcagagggaaacttcaaagt

SEQ ID NO: 484160 - DNA, 25 bp, Homo sapien
ttatgatggcaacactcttaacttt

SEQ ID NO: 484161 - DNA, 25 bp, Homo sapien
tgaaatgctgatctcaatttgtttt

SEQ ID NO: 484162 - DNA, 25 bp, Homo sapien
ggcgatggcgtggatggtgtggtca

SEQ ID NO: 484163 - DNA, 25 bp, Homo sapien
ctgtgaaatgctgatctcaatttgt

SEQ ID NO: 484164 - DNA, 25 bp, Homo sapien
acagggaatggggaggcgatggcgt

SEQ ID NO: 484165 - DNA, 25 bp, Homo sapien
tacaacttctcgtaacacggagcga

SEQ ID NO: 484166 - DNA, 25 bp, Homo sapien
gacaaagttttgctacagaggcagg

SEQ ID NO: 484167 - DNA, 25 bp, Homo sapien
acctgttaatcctgaagagctgctg

SEQ ID NO: 484168 - DNA, 25 bp, Homo sapien
taaatacctcgtcttaacggctgcc

SEQ ID NO: 484169 - DNA, 25 bp, Homo sapien
taaggctgcttctcacggtcactga

SEQ ID NO: 484170 - DNA, 25 bp, Homo sapien
tgagcagacatctcgccttgtggtt

SEQ ID NO: 484171 - DNA, 25 bp, Homo sapien
tttagactcagagccggtgacgcca

SEQ ID NO: 484172 - DNA, 25 bp, Homo sapien
tctacctttctctgggcaaccctgg

SEQ ID NO: 484173 - DNA, 25 bp, Homo sapien
ggtcactgtcagctaaaggaaagaa

SEQ ID NO: 484174 - DNA, 25 bp, Homo sapien
tcagaattcagcacagcgcttagcc

SEQ ID NO: 484175 - DNA, 25 bp, Homo sapien
gacatgaatcgaagagaggaagctg

SEQ ID NO: 484176 - DNA, 25 bp, Homo sapien
tcattttctaagctttgggagggtc

SEQ ID NO: 484177 - DNA, 25 bp, Homo sapien
ccagctgcccacccccatgctgacg

SEQ ID NO: 484178 - DNA, 25 bp, Homo sapien
gctgcccacccccatgctgacgcat

SEQ ID NO: 484179 - DNA, 25 bp, Homo sapien
ctgttggcaccagctgcccaccccc

SEQ ID NO: 484180 - DNA, 25 bp, Homo sapien
gcaccagctgcccacccccatgctg

SEQ ID NO: 484181 - DNA, 25 bp, Homo sapien
ttgcagaaagcgatgcccacctgaa

SEQ ID NO: 484182 - DNA, 25 bp, Homo sapien
cacactgggtgcagggtagcatgca

SEQ ID NO: 484183 - DNA, 25 bp, Homo sapien
ctgggtgcagggtagcatgcacacc

SEQ ID NO: 484184 - DNA, 25 bp, Homo sapien
ttcccatattctgacgcttgcagaa

SEQ ID NO: 484185 - DNA, 25 bp, Homo sapien
tagacggtgagctcccttgagggct

SEQ ID NO: 484186 - DNA, 25 bp, Homo sapien
gagactctggaaaagactgtgctag

SEQ ID NO: 484187 - DNA, 25 bp, Homo sapien
ggtgcccagcaccagttagagaagg

SEQ ID NO: 484188 - DNA, 25 bp, Homo sapien
ggcacggcgctgcatactgcaactt

SEQ ID NO: 484189 - DNA, 25 bp, Homo sapien
cctgatccgatctaacatccacagg

SEQ ID NO: 484190 - DNA, 25 bp, Homo sapien
catgagcacctgatccgatctaaca

SEQ ID NO: 484191 - DNA, 25 bp, Homo sapien
gttgttaaagtacaggaatgaatgt

SEQ ID NO: 484192 - DNA, 25 bp, Homo sapien
tctgctctaaggactggcactaggt

SEQ ID NO: 484193 - DNA, 25 bp, Homo sapien
tatcgaaagcaccacattttagcca

SEQ ID NO: 484194 - DNA, 25 bp, Homo sapien
taatggtattatagatggtcagccc

SEQ ID NO: 484195 - DNA, 25 bp, Homo sapien
ttaactcacactgaaaccctggact

SEQ ID NO: 484196 - DNA, 25 bp, Homo sapien
gtttagcaaatacacaactctgatg

SEQ ID NO: 484197 - DNA, 25 bp, Homo sapien
tgaccagcgctcaataaacatgacc

SEQ ID NO: 484198 - DNA, 25 bp, Homo sapien
taaacatgacctctcaggaccacta

SEQ ID NO: 484199 - DNA, 25 bp, Homo sapien
ggcacatgaccagcgctcaataaac

SEQ ID NO: 484200 - DNA, 25 bp, Homo sapien
accactattctcctatggagggcag

SEQ ID NO: 484201 - DNA, 25 bp, Homo sapien
gaaaaccaggttcatgcttccgtga

SEQ ID NO: 484202 - DNA, 25 bp, Homo sapien
tgctaacgctgcagaaaaagtgtct

SEQ ID NO: 484203 - DNA, 25 bp, Homo sapien
aaaatatgtgatgggcttactgaag

SEQ ID NO: 484204 - DNA, 25 bp, Homo sapien
gaagctgcatgctgtcttaggtctg

SEQ ID NO: 484205 - DNA, 25 bp, Homo sapien
gatacatttggtttggaatccacag

SEQ ID NO: 484206 - DNA, 25 bp, Homo sapien
ccactgatgatacatttggtttgga

SEQ ID NO: 484207 - DNA, 25 bp, Homo sapien
taatgggctggctacacacaggtca

SEQ ID NO: 484208 - DNA, 25 bp, Homo sapien
aatccacaggatgctgataatgggc

SEQ ID NO: 484209 - DNA, 25 bp, Homo sapien
ctgtagtacttcaagtgcagctgag

SEQ ID NO: 484210 - DNA, 25 bp, Homo sapien
gtacttcaagtgcagctgaggactg

SEQ ID NO: 484211 - DNA, 25 bp, Homo sapien
tgaggactggctgcttctttgcacc

SEQ ID NO: 484212 - DNA, 25 bp, Homo sapien
gctgtccacactcagcaatttggag

SEQ ID NO: 484213 - DNA, 25 bp, Homo sapien
ttacacaagagcgtgcacaggcaca

SEQ ID NO: 484214 - DNA, 25 bp, Homo sapien
cataaagcactttgcgggtgtgaca

SEQ ID NO: 484215 - DNA, 25 bp, Homo sapien
gcacactactaatgcatcatatgca

SEQ ID NO: 484216 - DNA, 25 bp, Homo sapien
tcatatgcacatcagctgtggctga

SEQ ID NO: 484217 - DNA, 25 bp, Homo sapien
ggcgctgacattgccgcttatccct

SEQ ID NO: 484218 - DNA, 25 bp, Homo sapien
cagagaaaacgcagaaacctgaggg

SEQ ID NO: 484219 - DNA, 25 bp, Homo sapien
tgagggcgctgacattgccgcttat

SEQ ID NO: 484220 - DNA, 25 bp, Homo sapien
atccctgggccccaaatgttcttca

SEQ ID NO: 484221 - DNA, 25 bp, Homo sapien
aatcccatctccatgagccgggcga

SEQ ID NO: 484222 - DNA, 25 bp, Homo sapien
gaaaatcccatctccatgagccggg

SEQ ID NO: 484223 - DNA, 25 bp, Homo sapien
tggaaaatcccatctccatgagccg

SEQ ID NO: 484224 - DNA, 25 bp, Homo sapien
aaatcccatctccatgagccgggcg

SEQ ID NO: 484225 - DNA, 25 bp, Homo sapien
tgaagctctcagggcttccaaagca

SEQ ID NO: 484226 - DNA, 25 bp, Homo sapien
gctctcagggcttccaaagcatcac

SEQ ID NO: 484227 - DNA, 25 bp, Homo sapien
tgtttgaagctctcagggcttccaa

SEQ ID NO: 484228 - DNA, 25 bp, Homo sapien
aagctctcagggcttccaaagcatc

SEQ ID NO: 484229 - DNA, 25 bp, Homo sapien
caggaagttggtggcgacattgagg

SEQ ID NO: 484230 - DNA, 25 bp, Homo sapien
ggaagttggtggcgacattgaggtc

SEQ ID NO: 484231 - DNA, 25 bp, Homo sapien
gcaggaagttggtggcgacattgag

SEQ ID NO: 484232 - DNA, 25 bp, Homo sapien
aagttggtggcgacattgaggtcat

SEQ ID NO: 484233 - DNA, 25 bp, Homo sapien
ccggtccggtcccagtgttggcctg

SEQ ID NO: 484234 - DNA, 25 bp, Homo sapien
gtggggaccacgcactgtcactcgg

SEQ ID NO: 484235 - DNA, 25 bp, Homo sapien
actgtcactcggctgccggtccggt

SEQ ID NO: 484236 - DNA, 25 bp, Homo sapien
tcggtccccgggctgatctgatggt

SEQ ID NO: 484237 - DNA, 25 bp, Homo sapien
ccctcttcccacaagaacatcagca

SEQ ID NO: 484238 - DNA, 25 bp, Homo sapien
ctccctcttcccacaagaacatcag

SEQ ID NO: 484239 - DNA, 25 bp, Homo sapien
cctcttcccacaagaacatcagcac

SEQ ID NO: 484240 - DNA, 25 bp, Homo sapien
tccctcttcccacaagaacatcagc

SEQ ID NO: 484241 - DNA, 25 bp, Homo sapien
cacgacgcaggagatgacatgttac

SEQ ID NO: 484242 - DNA, 25 bp, Homo sapien
cagtaagagggttacagcaattccc

SEQ ID NO: 484243 - DNA, 25 bp, Homo sapien
cactcccaggagattcgaaaacaag

SEQ ID NO: 484244 - DNA, 25 bp, Homo sapien
cgagtgctgactctccaacctaggg

SEQ ID NO: 484245 - DNA, 25 bp, Homo sapien
ggagaactccagaaccttgaaccag

SEQ ID NO: 484246 - DNA, 25 bp, Homo sapien
catttcacccgcagcctagtggcta

SEQ ID NO: 484247 - DNA, 25 bp, Homo sapien
gagtgccctagtcagcccatgtggc

SEQ ID NO: 484248 - DNA, 25 bp, Homo sapien
ggctaactctggatactctgagcaa

SEQ ID NO: 484249 - DNA, 25 bp, Homo sapien
gggcaggcaagggatcgtttctcct

SEQ ID NO: 484250 - DNA, 25 bp, Homo sapien
ggcaggcaagggatcgtttctcctc

SEQ ID NO: 484251 - DNA, 25 bp, Homo sapien
caggcaagggatcgtttctcctctt

SEQ ID NO: 484252 - DNA, 25 bp, Homo sapien
ggcaagggatcgtttctcctcttcc

SEQ ID NO: 484253 - DNA, 25 bp, Homo sapien
ccaggagggccaggcagttagccct

SEQ ID NO: 484254 - DNA, 25 bp, Homo sapien
ctgcgagccaggagggccaggcagt

SEQ ID NO: 484255 - DNA, 25 bp, Homo sapien
agccaggagggccaggcagttagcc

SEQ ID NO: 484256 - DNA, 25 bp, Homo sapien
cgagccaggagggccaggcagttag

SEQ ID NO: 484257 - DNA, 25 bp, Homo sapien
ctcctgtcgccacaggttgaagacc

SEQ ID NO: 484258 - DNA, 25 bp, Homo sapien
gccacaggttgaagacccaagccct

SEQ ID NO: 484259 - DNA, 25 bp, Homo sapien
tgtcgccacaggttgaagacccaag

SEQ ID NO: 484260 - DNA, 25 bp, Homo sapien
acaggttgaagacccaagccctgag

SEQ ID NO: 484261 - DNA, 25 bp, Homo sapien
tgcatcctgtcctccacagtctgcc

SEQ ID NO: 484262 - DNA, 25 bp, Homo sapien
catcctgtcctccacagtctgccct

SEQ ID NO: 484263 - DNA, 25 bp, Homo sapien
ctgcatcctgtcctccacagtctgc

SEQ ID NO: 484264 - DNA, 25 bp, Homo sapien
tcctgtcctccacagtctgccctgc

SEQ ID NO: 484265 - DNA, 25 bp, Homo sapien
agtcaacttgcttcgggtcttttca

SEQ ID NO: 484266 - DNA, 25 bp, Homo sapien
tgatacatcgttgctcattttgcag

SEQ ID NO: 484267 - DNA, 25 bp, Homo sapien
cttttcatgctcatggcggtccacc

SEQ ID NO: 484268 - DNA, 25 bp, Homo sapien
gcagaacataacagttgcacattgc

SEQ ID NO: 484269 - DNA, 25 bp, Homo sapien
aaaactttattgtaagtatcaacat

SEQ ID NO: 484270 - DNA, 25 bp, Homo sapien
ggctttatttgtacaagtctgatag

SEQ ID NO: 484271 - DNA, 25 bp, Homo sapien
caaatgagcacccagtcgtctgaag

SEQ ID NO: 484272 - DNA, 25 bp, Homo sapien
tctgaagaaagacgagcagtgcgga

SEQ ID NO: 484273 - DNA, 25 bp, Homo sapien
gtatagcctggaacaaggctttatt

SEQ ID NO: 484274 - DNA, 25 bp, Homo sapien
ttagggagctagagactccaggaca

SEQ ID NO: 484275 - DNA, 25 bp, Homo sapien
ggtttctgcggtgccccgcttcgtg

SEQ ID NO: 484276 - DNA, 25 bp, Homo sapien
caggccctcctcttagggagctaga

SEQ ID NO: 484277 - DNA, 25 bp, Homo sapien
ggactgaatgaaggatgcttccggt

SEQ ID NO: 484278 - DNA, 25 bp, Homo sapien
tggtgaagttggaggccccggaatc

SEQ ID NO: 484279 - DNA, 25 bp, Homo sapien
tctggccatttggggacagcccctg

SEQ ID NO: 484280 - DNA, 25 bp, Homo sapien
gatttttgtgtccgggtgaggacca

SEQ ID NO: 484281 - DNA, 25 bp, Homo sapien
gcttcttctgtttcgctgtggtgaa

SEQ ID NO: 484282 - DNA, 25 bp, Homo sapien
agaggaatttgagggccaaccctgg

SEQ ID NO: 484283 - DNA, 25 bp, Homo sapien
aagaggaatttgagggccaaccctg

SEQ ID NO: 484284 - DNA, 25 bp, Homo sapien
cagtcccaagaggaatttgagggcc

SEQ ID NO: 484285 - DNA, 25 bp, Homo sapien
caagaggaatttgagggccaaccct

SEQ ID NO: 484286 - DNA, 25 bp, Homo sapien
gaatctcaggagacactgtgtcacc

SEQ ID NO: 484287 - DNA, 25 bp, Homo sapien
cctggccacatttgcgaaggcgaat

SEQ ID NO: 484288 - DNA, 25 bp, Homo sapien
gaatcgggcctgagtttcgctgcca

SEQ ID NO: 484289 - DNA, 25 bp, Homo sapien
ctttgattacaaggcccgagtctcc

SEQ ID NO: 484290 - DNA, 25 bp, Homo sapien
gcagagccgtctctgatgcggcagg

SEQ ID NO: 484291 - DNA, 25 bp, Homo sapien
tctgatgcggcagggctgatcggaa

SEQ ID NO: 484292 - DNA, 25 bp, Homo sapien
tccctttacagtgggccggtgaaca

SEQ ID NO: 484293 - DNA, 25 bp, Homo sapien
ctgggcccccaaggagcaagaagcc

SEQ ID NO: 484294 - DNA, 25 bp, Homo sapien
tctcccctcgaggtagaaaccttga

SEQ ID NO: 484295 - DNA, 25 bp, Homo sapien
aatcatctggaaagtgtgagaatcc

SEQ ID NO: 484296 - DNA, 25 bp, Homo sapien
ggtaaacaccgaggaaaagctgtgc

SEQ ID NO: 484297 - DNA, 25 bp, Homo sapien
tgtgagaatccgtgggtaaacaccg

SEQ ID NO: 484298 - DNA, 25 bp, Homo sapien
taagaagttcccctggcctgtgatg

SEQ ID NO: 484299 - DNA, 25 bp, Homo sapien
acttcgccaagtgacagcatacggg

SEQ ID NO: 484300 - DNA, 25 bp, Homo sapien
catacgggatggcacagagactaag

SEQ ID NO: 484301 - DNA, 25 bp, Homo sapien
cctatagcacatgggtcagaccaca

SEQ ID NO: 484302 - DNA, 25 bp, Homo sapien
acatttccaccgagagtcccacttc

SEQ ID NO: 484303 - DNA, 25 bp, Homo sapien
cacatattccgatgggcttttggct

SEQ ID NO: 484304 - DNA, 25 bp, Homo sapien
tcatatttgtagatgctcacatatt

SEQ ID NO: 484305 - DNA, 25 bp, Homo sapien
tagatgctcacatattccgatgggc

SEQ ID NO: 484306 - DNA, 25 bp, Homo sapien
ctccagcagggacaccgaggtctgg

SEQ ID NO: 484307 - DNA, 25 bp, Homo sapien
cgagcacttctcacagggcatgaag

SEQ ID NO: 484308 - DNA, 25 bp, Homo sapien
ccgaggtctggctgcctccggacat

SEQ ID NO: 484309 - DNA, 25 bp, Homo sapien
tggccagccagtggtgtgatgagga

SEQ ID NO: 484310 - DNA, 25 bp, Homo sapien
cttggggccctgtgaattcaggagt

SEQ ID NO: 484311 - DNA, 25 bp, Homo sapien
ctctgcatccgctggtggctgctct

SEQ ID NO: 484312 - DNA, 25 bp, Homo sapien
ggctcaaagtctcaaagaacttgga

SEQ ID NO: 484313 - DNA, 25 bp, Homo sapien
agaacctcagctgaaaggtcccctc

SEQ ID NO: 484314 - DNA, 25 bp, Homo sapien
ccaggcagggagctagcgctccaga

SEQ ID NO: 484315 - DNA, 25 bp, Homo sapien
aaggaaatgtctgctctggcaccct

SEQ ID NO: 484316 - DNA, 25 bp, Homo sapien
tggcacccttgcttgatgccccgga

SEQ ID NO: 484317 - DNA, 25 bp, Homo sapien
ggacagctggcactaccccaggcag

SEQ ID NO: 484318 - DNA, 25 bp, Homo sapien
tatgaagatcacctggaagctgtgc

SEQ ID NO: 484319 - DNA, 25 bp, Homo sapien
gcctgcttacgctgctgatgctggt

SEQ ID NO: 484320 - DNA, 25 bp, Homo sapien
ttcatggcgagagggatgctccacc

SEQ ID NO: 484321 - DNA, 25 bp, Homo sapien
aaaggacgccactggcgaggctgcc

SEQ ID NO: 484322 - DNA, 25 bp, Homo sapien
acagcccgcgcagcacagtccggga

SEQ ID NO: 484323 - DNA, 25 bp, Homo sapien
ggggccacagcccgcgcagcacagt

SEQ ID NO: 484324 - DNA, 25 bp, Homo sapien
cacagcccgcgcagcacagtccggg

SEQ ID NO: 484325 - DNA, 25 bp, Homo sapien
gccacagcccgcgcagcacagtccg

SEQ ID NO: 484326 - DNA, 25 bp, Homo sapien
caggggacacccttcgaggctttgg

SEQ ID NO: 484327 - DNA, 25 bp, Homo sapien
cttgactggcaccctgggtgttttt

SEQ ID NO: 484328 - DNA, 25 bp, Homo sapien
catgaacagattccgtttctgcaga

SEQ ID NO: 484329 - DNA, 25 bp, Homo sapien
gaagagtgtcgagttttgtgccatg

SEQ ID NO: 484330 - DNA, 25 bp, Homo sapien
gtcacatctatggtctgaatcccag

SEQ ID NO: 484331 - DNA, 25 bp, Homo sapien
gaatggtggctgcttttgaatttcc

SEQ ID NO: 484332 - DNA, 25 bp, Homo sapien
tctggtggcttcactgtcacatcta

SEQ ID NO: 484333 - DNA, 25 bp, Homo sapien
ttcttgctttcccttgctcgctgcc

SEQ ID NO: 484334 - DNA, 25 bp, Homo sapien
tcaggccccattaaggcaccttgcc

SEQ ID NO: 484335 - DNA, 25 bp, Homo sapien
ccagagccagggcggtctcccctcc

SEQ ID NO: 484336 - DNA, 25 bp, Homo sapien
aggccccattaaggcaccttgcctg

SEQ ID NO: 484337 - DNA, 25 bp, Homo sapien
agagccagggcggtctcccctccac

SEQ ID NO: 484338 - DNA, 25 bp, Homo sapien
ctaaatgttgtgaggacgcccagga

SEQ ID NO: 484339 - DNA, 25 bp, Homo sapien
cttgtggtctgtggacaagtcaggc

SEQ ID NO: 484340 - DNA, 25 bp, Homo sapien
aatgttgtgaggacgcccaggacgt

SEQ ID NO: 484341 - DNA, 25 bp, Homo sapien
tgtggacaagtcaggcacctttgga

SEQ ID NO: 484342 - DNA, 25 bp, Homo sapien
tctgaccgggtgaagagactctcat

SEQ ID NO: 484343 - DNA, 25 bp, Homo sapien
tcttgtccccaagctctgaagtgag

SEQ ID NO: 484344 - DNA, 25 bp, Homo sapien
gcttggccctaacgaagtctgaccg

SEQ ID NO: 484345 - DNA, 25 bp, Homo sapien
catttaatgttaccgactctgcgcc

SEQ ID NO: 484346 - DNA, 25 bp, Homo sapien
aacccactaagcttcccgcagacat

SEQ ID NO: 484347 - DNA, 25 bp, Homo sapien
tgaaagacagccaatggcgtaagac

SEQ ID NO: 484348 - DNA, 25 bp, Homo sapien
cagccaatggcgtaagacttttctt

SEQ ID NO: 484349 - DNA, 25 bp, Homo sapien
gccaggtgcgtttctaacagccctg

SEQ ID NO: 484350 - DNA, 25 bp, Homo sapien
agttctgtcccactttgtcctgtca

SEQ ID NO: 484351 - DNA, 25 bp, Homo sapien
gtccttcacattgcagagacttgct

SEQ ID NO: 484352 - DNA, 25 bp, Homo sapien
ttgagtaggaacatttgcgcagtcc

SEQ ID NO: 484353 - DNA, 25 bp, Homo sapien
gagacttgcttgcatggttatcatg

SEQ ID NO: 484354 - DNA, 25 bp, Homo sapien
gatgtccccgatacgatggagcacg

SEQ ID NO: 484355 - DNA, 25 bp, Homo sapien
cctgtagcactgtagaaggacggtg

SEQ ID NO: 484356 - DNA, 25 bp, Homo sapien
tacgatggagcacgggcagatttgc

SEQ ID NO: 484357 - DNA, 25 bp, Homo sapien
ctgggagccactgatgtccccgata

SEQ ID NO: 484358 - DNA, 25 bp, Homo sapien
ctaaggggttgccagtgtaaagaag

SEQ ID NO: 484359 - DNA, 25 bp, Homo sapien
cgcccagcatgctgaatgccagaat

SEQ ID NO: 484360 - DNA, 25 bp, Homo sapien
aatgccagaattaggtggggctccc

SEQ ID NO: 484361 - DNA, 25 bp, Homo sapien
cctaggagtgcctggtcctccttct

SEQ ID NO: 484362 - DNA, 25 bp, Homo sapien
gaaagctgcgaatttgctgtctctg

SEQ ID NO: 484363 - DNA, 25 bp, Homo sapien
caaagaaaattgacaccttgggaag

SEQ ID NO: 484364 - DNA, 25 bp, Homo sapien
tcaaagaaaattgacaccttgggaa

SEQ ID NO: 484365 - DNA, 25 bp, Homo sapien
agcaatgcagatgtccatgggctgt

SEQ ID NO: 484366 - DNA, 25 bp, Homo sapien
tgggtcttccctcttatgagagggc

SEQ ID NO: 484367 - DNA, 25 bp, Homo sapien
tgcagatgtccatgggctgtgctgc

SEQ ID NO: 484368 - DNA, 25 bp, Homo sapien
ccctcttatgagagggctgagtgtg

SEQ ID NO: 484369 - DNA, 25 bp, Homo sapien
aggatcattgcattgaccagcgaac

SEQ ID NO: 484370 - DNA, 25 bp, Homo sapien
ggaggatcattgcattgaccagcga

SEQ ID NO: 484371 - DNA, 25 bp, Homo sapien
gtggaggatcattgcattgaccagc

SEQ ID NO: 484372 - DNA, 25 bp, Homo sapien
cagtggaggatcattgcattgacca

SEQ ID NO: 484373 - DNA, 25 bp, Homo sapien
tctgtttgggggagtgtcaaatgca

SEQ ID NO: 484374 - DNA, 25 bp, Homo sapien
caaggtctgggcccagtctgtttgg

SEQ ID NO: 484375 - DNA, 25 bp, Homo sapien
tttcccactggggttccagagtggc

SEQ ID NO: 484376 - DNA, 25 bp, Homo sapien
actggggttccagagtggcctctcc

SEQ ID NO: 484377 - DNA, 25 bp, Homo sapien
ctggccacggtaggggacagactca

SEQ ID NO: 484378 - DNA, 25 bp, Homo sapien
tccccaccataggagggtggagatt

SEQ ID NO: 484379 - DNA, 25 bp, Homo sapien
gatttcacataaaggagcttcaggg

SEQ ID NO: 484380 - DNA, 25 bp, Homo sapien
gggacagactcagaaccatccccac

SEQ ID NO: 484381 - DNA, 25 bp, Homo sapien
tccacgcaggccacaaaatggaggc

SEQ ID NO: 484382 - DNA, 25 bp, Homo sapien
tggctgcggtgtctacccggtgctg

SEQ ID NO: 484383 - DNA, 25 bp, Homo sapien
ccgaaagacgaaagtgacaattcca

SEQ ID NO: 484384 - DNA, 25 bp, Homo sapien
cctgggcgctgtcgtgccgaaagac

SEQ ID NO: 484385 - DNA, 25 bp, Homo sapien
gcaagtatcacgcatgcgcagggcc

SEQ ID NO: 484386 - DNA, 25 bp, Homo sapien
agactcatgctaccatctcgaccgg

SEQ ID NO: 484387 - DNA, 25 bp, Homo sapien
gccaactcctactcggacacgtcat

SEQ ID NO: 484388 - DNA, 25 bp, Homo sapien
gctaccatctcgaccggtgcaagta

SEQ ID NO: 484389 - DNA, 25 bp, Homo sapien
cacctgcggtctgtctggaggcgga

SEQ ID NO: 484390 - DNA, 25 bp, Homo sapien
ctatgacagaaagcacctgcggtct

SEQ ID NO: 484391 - DNA, 25 bp, Homo sapien
ggcggagttggtggcggagagaaaa

SEQ ID NO: 484392 - DNA, 25 bp, Homo sapien
cggtctgtctggaggcggagttggt

SEQ ID NO: 484393 - DNA, 25 bp, Homo sapien
tatccatcatacagtttctttgtca

SEQ ID NO: 484394 - DNA, 25 bp, Homo sapien
attacaaattccgatctagagctcc

SEQ ID NO: 484395 - DNA, 25 bp, Homo sapien
ttgctgctgggtcttacgaagttct

SEQ ID NO: 484396 - DNA, 25 bp, Homo sapien
ctttgtcacactgtccgcggcacgc

SEQ ID NO: 484397 - DNA, 25 bp, Homo sapien
ttttccgcgcgccagctgaggtggt

SEQ ID NO: 484398 - DNA, 25 bp, Homo sapien
tttccgcgcgccagctgaggtggtt

SEQ ID NO: 484399 - DNA, 25 bp, Homo sapien
acatgctcagtgagaacggtcgcag

SEQ ID NO: 484400 - DNA, 25 bp, Homo sapien
tcagtgagaacggtcgcaggcacca

SEQ ID NO: 484401 - DNA, 25 bp, Homo sapien
cccagaaggctagttccggttgcgc

SEQ ID NO: 484402 - DNA, 25 bp, Homo sapien
gtcccgcaacagaaaccgaagcgga

SEQ ID NO: 484403 - DNA, 25 bp, Homo sapien
gttccggttgcgctaggagacaccc

SEQ ID NO: 484404 - DNA, 25 bp, Homo sapien
gagtctcggagacgactacaaggcc

SEQ ID NO: 484405 - DNA, 25 bp, Homo sapien
cgcggccaccgaggtggagacaaca

SEQ ID NO: 484406 - DNA, 25 bp, Homo sapien
ccgggcaggtagaaagcgccgctcc

SEQ ID NO: 484407 - DNA, 25 bp, Homo sapien
aggtggagacaacaccggcagcctc

SEQ ID NO: 484408 - DNA, 25 bp, Homo sapien
tcgtcgcagaagttgacgggcgcca

SEQ ID NO: 484409 - DNA, 25 bp, Homo sapien
gaggcgagtctgaggcccactgcgt

SEQ ID NO: 484410 - DNA, 25 bp, Homo sapien
cttggcccgcaagacgggaggcgag

SEQ ID NO: 484411 - DNA, 25 bp, Homo sapien
ccgcaagacgggaggcgagtctgag

SEQ ID NO: 484412 - DNA, 25 bp, Homo sapien
aggcgagtctgaggcccactgcgtc

SEQ ID NO: 484413 - DNA, 25 bp, Homo sapien
gacctgcatacatccaactccaaag

SEQ ID NO: 484414 - DNA, 25 bp, Homo sapien
tccaaagctctgaggcgtgaagccc

SEQ ID NO: 484415 - DNA, 25 bp, Homo sapien
aagggcgctccacacggtccctgtt

SEQ ID NO: 484416 - DNA, 25 bp, Homo sapien
tccaggaaaactgaatacagctgct

SEQ ID NO: 484417 - DNA, 25 bp, Homo sapien
tacagggctgtgagcgaacactcac

SEQ ID NO: 484418 - DNA, 25 bp, Homo sapien
tgtagggagtcggtcacccgcttcc

SEQ ID NO: 484419 - DNA, 25 bp, Homo sapien
acccgcttcctcagcgtacatgtta

SEQ ID NO: 484420 - DNA, 25 bp, Homo sapien
tcctcagcgtacatgttacagggct

SEQ ID NO: 484421 - DNA, 25 bp, Homo sapien
aatgcccagcaactgatctcctaga

SEQ ID NO: 484422 - DNA, 25 bp, Homo sapien
tgcccagcaactgatctcctagata

SEQ ID NO: 484423 - DNA, 25 bp, Homo sapien
agctctgagttatccgatcagcaat

SEQ ID NO: 484424 - DNA, 25 bp, Homo sapien
agttatccgatcagcaatgcccagc

SEQ ID NO: 484425 - DNA, 25 bp, Homo sapien
actactgtacacaactgtagactta

SEQ ID NO: 484426 - DNA, 25 bp, Homo sapien
ctgtacacaactgtagacttacaca

SEQ ID NO: 484427 - DNA, 25 bp, Homo sapien
tgtacacaactgtagacttacacac

SEQ ID NO: 484428 - DNA, 25 bp, Homo sapien
tactgtacacaactgtagacttaca

SEQ ID NO: 484429 - DNA, 25 bp, Homo sapien
cactgaatcaagtctgttcacaaat

SEQ ID NO: 484430 - DNA, 25 bp, Homo sapien
gaatcaagtctgttcacaaatagtt

SEQ ID NO: 484431 - DNA, 25 bp, Homo sapien
attccactgaatcaagtctgttcac

SEQ ID NO: 484432 - DNA, 25 bp, Homo sapien
tcaagtctgttcacaaatagttcta

SEQ ID NO: 484433 - DNA, 25 bp, Homo sapien
agtacacttgccaacacatcccaat

SEQ ID NO: 484434 - DNA, 25 bp, Homo sapien
gccaacacatcccaatatgtgaagc

SEQ ID NO: 484435 - DNA, 25 bp, Homo sapien
tgcagttgtctcatctcagtacact

SEQ ID NO: 484436 - DNA, 25 bp, Homo sapien
tatgtgaagcatggctaaaaagacc

SEQ ID NO: 484437 - DNA, 25 bp, Homo sapien
caagattttcagatgggcgctttcc

SEQ ID NO: 484438 - DNA, 25 bp, Homo sapien
tacctgaccaagattttcagatggg

SEQ ID NO: 484439 - DNA, 25 bp, Homo sapien
gatgggcgctttccttctgatgctt

SEQ ID NO: 484440 - DNA, 25 bp, Homo sapien
tctttccccgaatagtacctgacca

SEQ ID NO: 484441 - DNA, 25 bp, Homo sapien
aacaagcttacaggtctccttctta

SEQ ID NO: 484442 - DNA, 25 bp, Homo sapien
caaacaagcttacaggtctccttct

SEQ ID NO: 484443 - DNA, 25 bp, Homo sapien
acaaacaagcttacaggtctccttc

SEQ ID NO: 484444 - DNA, 25 bp, Homo sapien
aagcttacaggtctccttcttatta

SEQ ID NO: 484445 - DNA, 25 bp, Homo sapien
tcaagaattctaacttttgtttgtc

SEQ ID NO: 484446 - DNA, 25 bp, Homo sapien
agtgatgttgataattcaataacat

SEQ ID NO: 484447 - DNA, 25 bp, Homo sapien
cagtgatgttgataattcaataaca

SEQ ID NO: 484448 - DNA, 25 bp, Homo sapien
gtccagtggttctatgatactaaga

SEQ ID NO: 484449 - DNA, 25 bp, Homo sapien
tgtccagtgctggtatcaaagcaat

SEQ ID NO: 484450 - DNA, 25 bp, Homo sapien
tgggatctgggattggaactcacta

SEQ ID NO: 484451 - DNA, 25 bp, Homo sapien
cctttgctaacttggtgggatctgg

SEQ ID NO: 484452 - DNA, 25 bp, Homo sapien
caccacgttacaggcatattatcca

SEQ ID NO: 484453 - DNA, 25 bp, Homo sapien
tcaacatcgtaacaccacgttacag

SEQ ID NO: 484454 - DNA, 25 bp, Homo sapien
tcgtaacaccacgttacaggcatat

SEQ ID NO: 484455 - DNA, 25 bp, Homo sapien
cgttacaggcatattatccacaatc

SEQ ID NO: 484456 - DNA, 25 bp, Homo sapien
gcatggcctttatctgtaatgtaac

SEQ ID NO: 484457 - DNA, 25 bp, Homo sapien
catcttttgcatggcctttatctgt

SEQ ID NO: 484458 - DNA, 25 bp, Homo sapien
cagccaataggaaatccaggattac

SEQ ID NO: 484459 - DNA, 25 bp, Homo sapien
tatctgtaatgtaacagccaatagg

SEQ ID NO: 484460 - DNA, 25 bp, Homo sapien
ctactatgtacattttgtaatatat

SEQ ID NO: 484461 - DNA, 25 bp, Homo sapien
tactatgtacattttgtaatatata

SEQ ID NO: 484462 - DNA, 25 bp, Homo sapien
gattaactcatgctaccttccactg

SEQ ID NO: 484463 - DNA, 25 bp, Homo sapien
tatatatccccacctagttctaatt

SEQ ID NO: 484464 - DNA, 25 bp, Homo sapien
taatatctgacttctgcaatacaaa

SEQ ID NO: 484465 - DNA, 25 bp, Homo sapien
caaagacacataggtcttaaaaagg

SEQ ID NO: 484466 - DNA, 25 bp, Homo sapien
gatgtcaacatggttgaagatgtaa

SEQ ID NO: 484467 - DNA, 25 bp, Homo sapien
agtttagcagccactaatcttgctc

SEQ ID NO: 484468 - DNA, 25 bp, Homo sapien
ccagtttcaacaacatgatagtata

SEQ ID NO: 484469 - DNA, 25 bp, Homo sapien
tcccatggacccagtttcaacaaca

SEQ ID NO: 484470 - DNA, 25 bp, Homo sapien
cccactgacacgtggaaaagctgtc

SEQ ID NO: 484471 - DNA, 25 bp, Homo sapien
gaaagccacacattatctgaggcag

SEQ ID NO: 484472 - DNA, 25 bp, Homo sapien
caaatcatgccaaagggagttttag

SEQ ID NO: 484473 - DNA, 25 bp, Homo sapien
ggcttgaccgcttatcatgacagga

SEQ ID NO: 484474 - DNA, 25 bp, Homo sapien
cagagtaagtataggcaatttttat

SEQ ID NO: 484475 - DNA, 25 bp, Homo sapien
cctgagcagtctggtttatctatat

SEQ ID NO: 484476 - DNA, 25 bp, Homo sapien
gcagtctggtttatctatatgggta

SEQ ID NO: 484477 - DNA, 25 bp, Homo sapien
ctcgaagctaacagagtaagtatag

SEQ ID NO: 484478 - DNA, 25 bp, Homo sapien
ggaacactgcctaagattcttgcat

SEQ ID NO: 484479 - DNA, 25 bp, Homo sapien
tactatttactgcaccaggtttgca

SEQ ID NO: 484480 - DNA, 25 bp, Homo sapien
ggcacactgagctcttaatatctag

SEQ ID NO: 484481 - DNA, 25 bp, Homo sapien
aaagcttgtccttccattgagtcaa

SEQ ID NO: 484482 - DNA, 25 bp, Homo sapien
aatgtgggtatgaggcatagactcc

SEQ ID NO: 484483 - DNA, 25 bp, Homo sapien
gactccagaatatagtcccatctag

SEQ ID NO: 484484 - DNA, 25 bp, Homo sapien
tagacgcccatctgatcttatcatc

SEQ ID NO: 484485 - DNA, 25 bp, Homo sapien
gtgggtatgaggcatagactccaga

SEQ ID NO: 484486 - DNA, 25 bp, Homo sapien
taaagtcatagcaacaacagcggct

SEQ ID NO: 484487 - DNA, 25 bp, Homo sapien
tattatgaaataactactgtgccca

SEQ ID NO: 484488 - DNA, 25 bp, Homo sapien
gaacactcttatgtgccagacaatg

SEQ ID NO: 484489 - DNA, 25 bp, Homo sapien
taagggacctgctgtgactcacaat

SEQ ID NO: 484490 - DNA, 25 bp, Homo sapien
ttccagataagaagagaacaatgac

SEQ ID NO: 484491 - DNA, 25 bp, Homo sapien
tccagataagaagagaacaatgacc

SEQ ID NO: 484492 - DNA, 25 bp, Homo sapien
attccagataagaagagaacaatga

SEQ ID NO: 484493 - DNA, 25 bp, Homo sapien
ctaccattccagataagaagagaac

SEQ ID NO: 484494 - DNA, 25 bp, Homo sapien
cgtagagtccatctgattatatcta

SEQ ID NO: 484495 - DNA, 25 bp, Homo sapien
caatatctttgtgcagtgtccgtaa

SEQ ID NO: 484496 - DNA, 25 bp, Homo sapien
tatatctagcaatatctttgtgcag

SEQ ID NO: 484497 - DNA, 25 bp, Homo sapien
tgcagtgtccgtaacataatcatag

SEQ ID NO: 484498 - DNA, 25 bp, Homo sapien
caataaacagtgtccttggcagact

SEQ ID NO: 484499 - DNA, 25 bp, Homo sapien
tgtccttggcagactaaagactaaa

SEQ ID NO: 484500 - DNA, 25 bp, Homo sapien
taaacagtgtccttggcagactaaa

SEQ ID NO: 484501 - DNA, 25 bp, Homo sapien
aataacaataaacagtgtccttggc

SEQ ID NO: 484502 - DNA, 25 bp, Homo sapien
tcacaaaggtcataattaaaatctg

SEQ ID NO: 484503 - DNA, 25 bp, Homo sapien
taaaatctgtgtcccggatcctaga

SEQ ID NO: 484504 - DNA, 25 bp, Homo sapien
tgatagcagcatcccttttcttgga

SEQ ID NO: 484505 - DNA, 25 bp, Homo sapien
tcttggaggacggaatatatcacca

SEQ ID NO: 484506 - DNA, 25 bp, Homo sapien
cctgacaaaggcttggtctaggaag

SEQ ID NO: 484507 - DNA, 25 bp, Homo sapien
aaggacctgttcatctccagcccag

SEQ ID NO: 484508 - DNA, 25 bp, Homo sapien
cagcccagtgcctccctgacaaagg

SEQ ID NO: 484509 - DNA, 25 bp, Homo sapien
ggtcccagttctgggctgtttagac

SEQ ID NO: 484510 - DNA, 25 bp, Homo sapien
aatgagagatcacatccttcctgtg

SEQ ID NO: 484511 - DNA, 25 bp, Homo sapien
gagaaagatttcatacggccattag

SEQ ID NO: 484512 - DNA, 25 bp, Homo sapien
ggctgactggatgctcaagagtgca

SEQ ID NO: 484513 - DNA, 25 bp, Homo sapien
caacattcaaacagaagagacatat

SEQ ID NO: 484514 - DNA, 25 bp, Homo sapien
catcagcgctcctcggttggcaggt

SEQ ID NO: 484515 - DNA, 25 bp, Homo sapien
ctcctcggttggcaggtgacaaaaa

SEQ ID NO: 484516 - DNA, 25 bp, Homo sapien
gttggcaggtgacaaaaatcccagg

SEQ ID NO: 484517 - DNA, 25 bp, Homo sapien
acgtcatcagcgctcctcggttggc

SEQ ID NO: 484518 - DNA, 25 bp, Homo sapien
taactaagaacagacccctatgagg

SEQ ID NO: 484519 - DNA, 25 bp, Homo sapien
tatgaggcacactatttacaaagca

SEQ ID NO: 484520 - DNA, 25 bp, Homo sapien
caaaaggaatcaccaagcaggctcc

SEQ ID NO: 484521 - DNA, 25 bp, Homo sapien
agagtcccttcctgatcagacgcca

SEQ ID NO: 484522 - DNA, 25 bp, Homo sapien
cacattaaggttgtccacgtaactc

SEQ ID NO: 484523 - DNA, 25 bp, Homo sapien
gactgtggcattcccgaggaggcca

SEQ ID NO: 484524 - DNA, 25 bp, Homo sapien
tgtatatcccagacgagactgtggc

SEQ ID NO: 484525 - DNA, 25 bp, Homo sapien
tcagccttactctgtggccgtgagc

SEQ ID NO: 484526 - DNA, 25 bp, Homo sapien
aaaatgaaagtacacgtctgctccc

SEQ ID NO: 484527 - DNA, 25 bp, Homo sapien
tccgaggaaccgacagaaagcctgt

SEQ ID NO: 484528 - DNA, 25 bp, Homo sapien
ttcaagtaatacaggatctgcagct

SEQ ID NO: 484529 - DNA, 25 bp, Homo sapien
aaatgaaactggctgagatctcaga

SEQ ID NO: 484530 - DNA, 25 bp, Homo sapien
taggaggaactgtggttcctaggag

SEQ ID NO: 484531 - DNA, 25 bp, Homo sapien
gttcctaggaggtgcgtgtgtcaga

SEQ ID NO: 484532 - DNA, 25 bp, Homo sapien
gaggtgcgtgtgtcagatgaggcaa

SEQ ID NO: 484533 - DNA, 25 bp, Homo sapien
ggtgcgtgtgtcagatgaggcaact

SEQ ID NO: 484534 - DNA, 25 bp, Homo sapien
aggacaaagaaatgatgttaataaa

SEQ ID NO: 484535 - DNA, 25 bp, Homo sapien
ccaggacaaagaaatgatgttaata

SEQ ID NO: 484536 - DNA, 25 bp, Homo sapien
atttgttttccacttctcacctcca

SEQ ID NO: 484537 - DNA, 25 bp, Homo sapien
tgttttccacttctcacctccaaag

SEQ ID NO: 484538 - DNA, 25 bp, Homo sapien
tacagaacaacatgtcagactgacc

SEQ ID NO: 484539 - DNA, 25 bp, Homo sapien
catgatttagagacacggaggatta

SEQ ID NO: 484540 - DNA, 25 bp, Homo sapien
catgtctaaaggtactttccccaga

SEQ ID NO: 484541 - DNA, 25 bp, Homo sapien
tgggaaaacatatgcttgcctgaac

SEQ ID NO: 484542 - DNA, 25 bp, Homo sapien
tctaggaccagaaccgcatcagata

SEQ ID NO: 484543 - DNA, 25 bp, Homo sapien
cacagtcttggtaaggacggacacc

SEQ ID NO: 484544 - DNA, 25 bp, Homo sapien
tcagataatcgagaggagaagcagt

SEQ ID NO: 484545 - DNA, 25 bp, Homo sapien
tattgctgtagcctgttcacgtgtc

SEQ ID NO: 484546 - DNA, 25 bp, Homo sapien
tttgcctgagttaaactcctcccag

SEQ ID NO: 484547 - DNA, 25 bp, Homo sapien
tgaaagacacaacaggcttttgggt

SEQ ID NO: 484548 - DNA, 25 bp, Homo sapien
aattgctcttcagattgggtttgcc

SEQ ID NO: 484549 - DNA, 25 bp, Homo sapien
tgactagaaactacccaattgctct

SEQ ID NO: 484550 - DNA, 25 bp, Homo sapien
cgtcagaggcacagatatgcagaac

SEQ ID NO: 484551 - DNA, 25 bp, Homo sapien
gtcccaaaaggaatagctgctgaag

SEQ ID NO: 484552 - DNA, 25 bp, Homo sapien
gtatgcaccaataaacgtcagaggc

SEQ ID NO: 484553 - DNA, 25 bp, Homo sapien
ggccaatatggcaaccagtgtccca

SEQ ID NO: 484554 - DNA, 25 bp, Homo sapien
cacctgaataagttaacacctataa

SEQ ID NO: 484555 - DNA, 25 bp, Homo sapien
ctgaataagttaacacctataaact

SEQ ID NO: 484556 - DNA, 25 bp, Homo sapien
tcacctgaataagttaacacctata

SEQ ID NO: 484557 - DNA, 25 bp, Homo sapien
ttcacctgaataagttaacacctat

SEQ ID NO: 484558 - DNA, 25 bp, Homo sapien
tactgaagtgcggttagagaaggat

SEQ ID NO: 484559 - DNA, 25 bp, Homo sapien
aagtgcggttagagaaggatactga

SEQ ID NO: 484560 - DNA, 25 bp, Homo sapien
agggatactgaagtgcggttagaga

SEQ ID NO: 484561 - DNA, 25 bp, Homo sapien
gttagagaaggatactgatgagaca

SEQ ID NO: 484562 - DNA, 25 bp, Homo sapien
cctgtcagttcactacttctgaggt

SEQ ID NO: 484563 - DNA, 25 bp, Homo sapien
cttctgaggtataaagtcataaatt

SEQ ID NO: 484564 - DNA, 25 bp, Homo sapien
ggtcctgctcacaaagtgtactaac

SEQ ID NO: 484565 - DNA, 25 bp, Homo sapien
aagtgtactaaccacacagtctttc

SEQ ID NO: 484566 - DNA, 25 bp, Homo sapien
caggcaagggcttcgtgtagaacga

SEQ ID NO: 484567 - DNA, 25 bp, Homo sapien
tgtagaacgactgttcaggaatctg

SEQ ID NO: 484568 - DNA, 25 bp, Homo sapien
caggaatctgacgtggaatctgatt

SEQ ID NO: 484569 - DNA, 25 bp, Homo sapien
gggcaaaatccctcccatgataata

SEQ ID NO: 484570 - DNA, 25 bp, Homo sapien
cataggtttggagaaacttcggtga

SEQ ID NO: 484571 - DNA, 25 bp, Homo sapien
tcggtgaattttctgtcacagggtt

SEQ ID NO: 484572 - DNA, 25 bp, Homo sapien
cacagggttgctgtgtaacacaagc

SEQ ID NO: 484573 - DNA, 25 bp, Homo sapien
gggataacactcacctcacagagaa

SEQ ID NO: 484574 - DNA, 25 bp, Homo sapien
acacgtcaagaaggaactataaata

SEQ ID NO: 484575 - DNA, 25 bp, Homo sapien
tcaatttgacacaatacataacaca

SEQ ID NO: 484576 - DNA, 25 bp, Homo sapien
ctataatcaaacacgtcaagaagga

SEQ ID NO: 484577 - DNA, 25 bp, Homo sapien
ttttcaatttgacacaatacataac

SEQ ID NO: 484578 - DNA, 25 bp, Homo sapien
ctctgcacataggtggaaatagcaa

SEQ ID NO: 484579 - DNA, 25 bp, Homo sapien
tagttgcttcagaacaggtaataac

SEQ ID NO: 484580 - DNA, 25 bp, Homo sapien
aaacatgtaatacatctggtgtgac

SEQ ID NO: 484581 - DNA, 25 bp, Homo sapien
caaaatgataaacaccagaaatagg

SEQ ID NO: 484582 - DNA, 25 bp, Homo sapien
tcacacccacgaagacagctacaat

SEQ ID NO: 484583 - DNA, 25 bp, Homo sapien
gcaaagatacggagaattggaacct

SEQ ID NO: 484584 - DNA, 25 bp, Homo sapien
aaccagaatgagacaccgcttcaca

SEQ ID NO: 484585 - DNA, 25 bp, Homo sapien
agaaacaatacaaatgcccaccaat

SEQ ID NO: 484586 - DNA, 25 bp, Homo sapien
aaacagatacatttgacctcatcaa

SEQ ID NO: 484587 - DNA, 25 bp, Homo sapien
gctggaggactcagcctttttgatt

SEQ ID NO: 484588 - DNA, 25 bp, Homo sapien
ggaggactcagcctttttgatttca

SEQ ID NO: 484589 - DNA, 25 bp, Homo sapien
aaaatagtgtggtacaggcctaagg

SEQ ID NO: 484590 - DNA, 25 bp, Homo sapien
atagtgtggtacaggcctaagggca

SEQ ID NO: 484591 - DNA, 25 bp, Homo sapien
ggaatgaacgccattgccaatgata

SEQ ID NO: 484592 - DNA, 25 bp, Homo sapien
ccaaagtacagaattgtgcttgctg

SEQ ID NO: 484593 - DNA, 25 bp, Homo sapien
tgttcccgtgatctgcagttttgaa

SEQ ID NO: 484594 - DNA, 25 bp, Homo sapien
taaagccactcgtaaggaatgaacg

SEQ ID NO: 484595 - DNA, 25 bp, Homo sapien
tacttgtggccagaaatcaaatgcg

SEQ ID NO: 484596 - DNA, 25 bp, Homo sapien
gataattattcaggctagggctggg

SEQ ID NO: 484597 - DNA, 25 bp, Homo sapien
tatacatgggacattaccgtgggaa

SEQ ID NO: 484598 - DNA, 25 bp, Homo sapien
tacccaccgggaatatactacagat

SEQ ID NO: 484599 - DNA, 25 bp, Homo sapien
accttcaccacactgtatattttgg

SEQ ID NO: 484600 - DNA, 25 bp, Homo sapien
caccacactgtatattttggtaaca

SEQ ID NO: 484601 - DNA, 25 bp, Homo sapien
tcagtcaaccttcaccacactgtat

SEQ ID NO: 484602 - DNA, 25 bp, Homo sapien
attttggtaacaaaccaaaagcatg

SEQ ID NO: 484603 - DNA, 25 bp, Homo sapien
tctgttttaactggacacactggac

SEQ ID NO: 484604 - DNA, 25 bp, Homo sapien
tgttttaactggacacactggactt

SEQ ID NO: 484605 - DNA, 25 bp, Homo sapien
ttctgttttaactggacacactgga

SEQ ID NO: 484606 - DNA, 25 bp, Homo sapien
atttctgttttaactggacacactg

SEQ ID NO: 484607 - DNA, 25 bp, Homo sapien
ttctgaaggattactaggccaataa

SEQ ID NO: 484608 - DNA, 25 bp, Homo sapien
aattctttctgcctaccgagcctag

SEQ ID NO: 484609 - DNA, 25 bp, Homo sapien
ctatttacaatgcagtgtcctgcct

SEQ ID NO: 484610 - DNA, 25 bp, Homo sapien
ttaaaaggccaataccatgggaata

SEQ ID NO: 484611 - DNA, 25 bp, Homo sapien
gatacaagcagaccgatacttcaga

SEQ ID NO: 484612 - DNA, 25 bp, Homo sapien
taatgacaatgtagtaaggctccac

SEQ ID NO: 484613 - DNA, 25 bp, Homo sapien
aggctccaccttaagtacttgcaga

SEQ ID NO: 484614 - DNA, 25 bp, Homo sapien
gatttgctctcctaagcagcaagca

SEQ ID NO: 484615 - DNA, 25 bp, Homo sapien
taaagcacatgggaggatgtacata

SEQ ID NO: 484616 - DNA, 25 bp, Homo sapien
tggaaaatagagtataacaagtatt

SEQ ID NO: 484617 - DNA, 25 bp, Homo sapien
gaggtattgtgagtaaactagagat

SEQ ID NO: 484618 - DNA, 25 bp, Homo sapien
tactaagggacaactctacccataa

SEQ ID NO: 484619 - DNA, 25 bp, Homo sapien
cttcagccatgttcccccagggagg

SEQ ID NO: 484620 - DNA, 25 bp, Homo sapien
gggagatgtctgtaggtcttccttc

SEQ ID NO: 484621 - DNA, 25 bp, Homo sapien
cccacccaggggagatgtctgtagg

SEQ ID NO: 484622 - DNA, 25 bp, Homo sapien
gccaaggggcccatcaaattctgtt

SEQ ID NO: 484623 - DNA, 25 bp, Homo sapien
ccgggacgaccctgccaatgtggta

SEQ ID NO: 484624 - DNA, 25 bp, Homo sapien
tgggctcagccacagaatgtgctct

SEQ ID NO: 484625 - DNA, 25 bp, Homo sapien
caatgtggtaatggctcgtcccaac

SEQ ID NO: 484626 - DNA, 25 bp, Homo sapien
gataaaaatacccaagcagagaccg

SEQ ID NO: 484627 - DNA, 25 bp, Homo sapien
tgcttcggcttgcagctgcatggct

SEQ ID NO: 484628 - DNA, 25 bp, Homo sapien
cctgagatcaagggccatgctccct

SEQ ID NO: 484629 - DNA, 25 bp, Homo sapien
agttctggggtcaaggtcctgagat

SEQ ID NO: 484630 - DNA, 25 bp, Homo sapien
tctctgtcttagctgttatatggca

SEQ ID NO: 484631 - DNA, 25 bp, Homo sapien
caaacgcgagagctctgtacggaca

SEQ ID NO: 484632 - DNA, 25 bp, Homo sapien
gaggaacttggtattggcagccaga

SEQ ID NO: 484633 - DNA, 25 bp, Homo sapien
tacggacacaggatgtagaaagacc

SEQ ID NO: 484634 - DNA, 25 bp, Homo sapien
gactggtcacggtgcaaagtcccca

SEQ ID NO: 484635 - DNA, 25 bp, Homo sapien
ccttcacagctgacattcactctcc

SEQ ID NO: 484636 - DNA, 25 bp, Homo sapien
tctgatgtcaccaactcgtgtgcct

SEQ ID NO: 484637 - DNA, 25 bp, Homo sapien
gatgtcaccaactcgtgtgccttca

SEQ ID NO: 484638 - DNA, 25 bp, Homo sapien
tgtcaccaactcgtgtgccttcatg

SEQ ID NO: 484639 - DNA, 25 bp, Homo sapien
tcaccaactcgtgtgccttcatgtc

SEQ ID NO: 484640 - DNA, 25 bp, Homo sapien
tggcctgcaccacctacgaggatct

SEQ ID NO: 484641 - DNA, 25 bp, Homo sapien
gccatcaacagtctggcctgcacca

SEQ ID NO: 484642 - DNA, 25 bp, Homo sapien
ctaaggtggcatagggccatcaaca

SEQ ID NO: 484643 - DNA, 25 bp, Homo sapien
tgcaccacctacgaggatctccttg

SEQ ID NO: 484644 - DNA, 25 bp, Homo sapien
ttgctgttcttggtctcaggctgtg

SEQ ID NO: 484645 - DNA, 25 bp, Homo sapien
cttgctgttcttggtctcaggctgt

SEQ ID NO: 484646 - DNA, 25 bp, Homo sapien
tagaaggtcaaaagtggcctgggaa

SEQ ID NO: 484647 - DNA, 25 bp, Homo sapien
tcctcccaaactagggtgcgtgagg

SEQ ID NO: 484648 - DNA, 25 bp, Homo sapien
tgccaggatgctatggcccttgacc

SEQ ID NO: 484649 - DNA, 25 bp, Homo sapien
agacaactctctgcagataggtcag

SEQ ID NO: 484650 - DNA, 25 bp, Homo sapien
gaatattttgcctcggccctagagg

SEQ ID NO: 484651 - DNA, 25 bp, Homo sapien
gactaaacccgcattcctgaggagg

SEQ ID NO: 484652 - DNA, 25 bp, Homo sapien
tactggtcctgcttctacgagtggc

SEQ ID NO: 484653 - DNA, 25 bp, Homo sapien
caacatggaggctttgggctacaaa

SEQ ID NO: 484654 - DNA, 25 bp, Homo sapien
ctctgccagtgactgtgtgccatct

SEQ ID NO: 484655 - DNA, 25 bp, Homo sapien
tctgccagtgactgtgtgccatctc

SEQ ID NO: 484656 - DNA, 25 bp, Homo sapien
ttttgtcccttaactttgagctctg

SEQ ID NO: 484657 - DNA, 25 bp, Homo sapien
tcccttaactttgagctctgccagt

SEQ ID NO: 484658 - DNA, 25 bp, Homo sapien
gtaggttggttgttctcttgtccca

SEQ ID NO: 484659 - DNA, 25 bp, Homo sapien
tgtaggttggttgttctcttgtccc

SEQ ID NO: 484660 - DNA, 25 bp, Homo sapien
tttgtaggttggttgttctcttgtc

SEQ ID NO: 484661 - DNA, 25 bp, Homo sapien
ttgtaggttggttgttctcttgtcc

SEQ ID NO: 484662 - DNA, 25 bp, Homo sapien
cgtgatcaacaccaaaggctcttta

SEQ ID NO: 484663 - DNA, 25 bp, Homo sapien
cttttggtgtctggccgatacaggt

SEQ ID NO: 484664 - DNA, 25 bp, Homo sapien
tcaaggagcaggaacgattaggaaa

SEQ ID NO: 484665 - DNA, 25 bp, Homo sapien
tcaccaaagttgagtctcaaaggct

SEQ ID NO: 484666 - DNA, 25 bp, Homo sapien
cttcccgacgcgcgcgccccgccct

SEQ ID NO: 484667 - DNA, 25 bp, Homo sapien
gccctccgcagcagacgtagcgcca

SEQ ID NO: 484668 - DNA, 25 bp, Homo sapien
ccctccgcagcagacgtagcgccat

SEQ ID NO: 484669 - DNA, 25 bp, Homo sapien
cgccctccgcagcagacgtagcgcc

SEQ ID NO: 484670 - DNA, 25 bp, Homo sapien
tggctgctaccactgaacacataca

SEQ ID NO: 484671 - DNA, 25 bp, Homo sapien
acattccttggctgctaccactgaa

SEQ ID NO: 484672 - DNA, 25 bp, Homo sapien
taccactgaacacatacagccaggg

SEQ ID NO: 484673 - DNA, 25 bp, Homo sapien
tccttggctgctaccactgaacaca

SEQ ID NO: 484674 - DNA, 25 bp, Homo sapien
tgtcgcctctctaaactgtcttcat

SEQ ID NO: 484675 - DNA, 25 bp, Homo sapien
cagaatctcaggtacttagcttgta

SEQ ID NO: 484676 - DNA, 25 bp, Homo sapien
ttagcttgtagttgtcgcctctcta

SEQ ID NO: 484677 - DNA, 25 bp, Homo sapien
cccagaatctcaggtacttagcttg

SEQ ID NO: 484678 - DNA, 25 bp, Homo sapien
cacggtaaaactctaccacaggata

SEQ ID NO: 484679 - DNA, 25 bp, Homo sapien
atgtaggagcacgagccccacacag

SEQ ID NO: 484680 - DNA, 25 bp, Homo sapien
ggctctggtccacggtaaaactcta

SEQ ID NO: 484681 - DNA, 25 bp, Homo sapien
ctaccacaggataacggtatgtagg

SEQ ID NO: 484682 - DNA, 25 bp, Homo sapien
ggcactgatgactcgagagtgtggg

SEQ ID NO: 484683 - DNA, 25 bp, Homo sapien
gggacgagacagatggctggctgag

SEQ ID NO: 484684 - DNA, 25 bp, Homo sapien
tcagcggagaggttagggctctcag

SEQ ID NO: 484685 - DNA, 25 bp, Homo sapien
gaagggtgacaaaagtcagcggaga

SEQ ID NO: 484686 - DNA, 25 bp, Homo sapien
tttccacccgctcatgtcaaataga

SEQ ID NO: 484687 - DNA, 25 bp, Homo sapien
agcccagtgcaggagaccaaacata

SEQ ID NO: 484688 - DNA, 25 bp, Homo sapien
cattcgtggctggtgacaaatcata

SEQ ID NO: 484689 - DNA, 25 bp, Homo sapien
gcataaagggtgaacgtggagtttc

SEQ ID NO: 484690 - DNA, 25 bp, Homo sapien
gaactgagcctatgagtccacactt

SEQ ID NO: 484691 - DNA, 25 bp, Homo sapien
aaccagctccgatggagaaggcatg

SEQ ID NO: 484692 - DNA, 25 bp, Homo sapien
agcccgatggacagcaaacgaacag

SEQ ID NO: 484693 - DNA, 25 bp, Homo sapien
caagacaggccaaggtgatgaacca

SEQ ID NO: 484694 - DNA, 25 bp, Homo sapien
ttggcatatagaaagagctcgggag

SEQ ID NO: 484695 - DNA, 25 bp, Homo sapien
aacaggatttaagagagggcagagc

SEQ ID NO: 484696 - DNA, 25 bp, Homo sapien
taagatcaacaatacagggcaaatg

SEQ ID NO: 484697 - DNA, 25 bp, Homo sapien
ttccaaaggtatccacagtaggtgg

SEQ ID NO: 484698 - DNA, 25 bp, Homo sapien
ccctcgtagaaccatcattttatct

SEQ ID NO: 484699 - DNA, 25 bp, Homo sapien
ctcgtagaaccatcattttatctgt

SEQ ID NO: 484700 - DNA, 25 bp, Homo sapien
gtagaaccatcattttatctgtacc

SEQ ID NO: 484701 - DNA, 25 bp, Homo sapien
cgtagaaccatcattttatctgtac

SEQ ID NO: 484702 - DNA, 25 bp, Homo sapien
aatagcatcattaagctgggcacag

SEQ ID NO: 484703 - DNA, 25 bp, Homo sapien
cacacagttgttgagagtgctacat

SEQ ID NO: 484704 - DNA, 25 bp, Homo sapien
tgttctgatcactgcgaaatcccgc

SEQ ID NO: 484705 - DNA, 25 bp, Homo sapien
gaaatcccgcatgtctagcacagag

SEQ ID NO: 484706 - DNA, 25 bp, Homo sapien
tagtgaaatgtacttagctccaaga

SEQ ID NO: 484707 - DNA, 25 bp, Homo sapien
aactactcaaaagaacactacaggg

SEQ ID NO: 484708 - DNA, 25 bp, Homo sapien
ctgtggcaagctctgctaggaatac

SEQ ID NO: 484709 - DNA, 25 bp, Homo sapien
gaagcagagcttaaccaacgctgaa

SEQ ID NO: 484710 - DNA, 25 bp, Homo sapien
aatgtatgactgtaggcttgcactg

SEQ ID NO: 484711 - DNA, 25 bp, Homo sapien
tgtatcaactacaaacaatgtatga

SEQ ID NO: 484712 - DNA, 25 bp, Homo sapien
taacctataggttataaatgattaa

SEQ ID NO: 484713 - DNA, 25 bp, Homo sapien
caaaaaacttatatcattgaggttg

SEQ ID NO: 484714 - DNA, 25 bp, Homo sapien
tttttctaactggttgaaaatgcag

SEQ ID NO: 484715 - DNA, 25 bp, Homo sapien
gaaaacctgaggataattacagacc

SEQ ID NO: 484716 - DNA, 25 bp, Homo sapien
tgagccaaatcaaaactcaagttgc

SEQ ID NO: 484717 - DNA, 25 bp, Homo sapien
ctgagccaaatcaaaactcaagttg

SEQ ID NO: 484718 - DNA, 25 bp, Homo sapien
tgctgggattatcatcaaggagccc

SEQ ID NO: 484719 - DNA, 25 bp, Homo sapien
tgagcagagttacagactgagcacc

SEQ ID NO: 484720 - DNA, 25 bp, Homo sapien
cactgttctcgtggctgagcaggga

SEQ ID NO: 484721 - DNA, 25 bp, Homo sapien
cactggctgttgactatcccaaaac

SEQ ID NO: 484722 - DNA, 25 bp, Homo sapien
aggaaacatggagactcagggcgag

SEQ ID NO: 484723 - DNA, 25 bp, Homo sapien
tgttcctgggaaaagcggatcaaga

SEQ ID NO: 484724 - DNA, 25 bp, Homo sapien
ggatcaagaaactcgctgaagacca

SEQ ID NO: 484725 - DNA, 25 bp, Homo sapien
gaaaagcggatcaagaaactcgctg

SEQ ID NO: 484726 - DNA, 25 bp, Homo sapien
caggtcaatagcaggaaactccgaa

SEQ ID NO: 484727 - DNA, 25 bp, Homo sapien
gcgccccgccaggtcaatagcagga

SEQ ID NO: 484728 - DNA, 25 bp, Homo sapien
agggaccgcggcaccagcgggcagg

SEQ ID NO: 484729 - DNA, 25 bp, Homo sapien
aaactccgaaggcagggcgaggaag

SEQ ID NO: 484730 - DNA, 25 bp, Homo sapien
tcgcacatcgaactggcatcctcgt

SEQ ID NO: 484731 - DNA, 25 bp, Homo sapien
ctgcagagcgcacgcaggcggcctt

SEQ ID NO: 484732 - DNA, 25 bp, Homo sapien
ttttgtccatgacgtccctgtgccc

SEQ ID NO: 484733 - DNA, 25 bp, Homo sapien
aggcggccttctgctcgcacatcga

SEQ ID NO: 484734 - DNA, 25 bp, Homo sapien
cccgagtgggcctgcggatgaagct

SEQ ID NO: 484735 - DNA, 25 bp, Homo sapien
atggcagtcccctgccggcggcccc

SEQ ID NO: 484736 - DNA, 25 bp, Homo sapien
cggatgaagctgctggtgccaaaaa

SEQ ID NO: 484737 - DNA, 25 bp, Homo sapien
agtgggcctgcggatgaagctgctg

SEQ ID NO: 484738 - DNA, 25 bp, Homo sapien
caagtcctttgcaatggagtctagg

SEQ ID NO: 484739 - DNA, 25 bp, Homo sapien
cgctgaaggtggtgattactatcga

SEQ ID NO: 484740 - DNA, 25 bp, Homo sapien
caactccgcggtttcaaagcgcaga

SEQ ID NO: 484741 - DNA, 25 bp, Homo sapien
tcaaaatggataaacccggctgccg

SEQ ID NO: 484742 - DNA, 25 bp, Homo sapien
ttaccctgaaggatgaccgacagag

SEQ ID NO: 484743 - DNA, 25 bp, Homo sapien
gagcaaacgctggtacaaggcttgg

SEQ ID NO: 484744 - DNA, 25 bp, Homo sapien
tggaaaccgaggcagttaccctgaa

SEQ ID NO: 484745 - DNA, 25 bp, Homo sapien
gagactattcgcaaacacagacgtt

SEQ ID NO: 484746 - DNA, 25 bp, Homo sapien
gataagatggttctgctgaccagca

SEQ ID NO: 484747 - DNA, 25 bp, Homo sapien
tgagggcacactagacatgggatgg

SEQ ID NO: 484748 - DNA, 25 bp, Homo sapien
tgataagatggttctgctgaccagc

SEQ ID NO: 484749 - DNA, 25 bp, Homo sapien
agtggaatgtgagggcacactagac

SEQ ID NO: 484750 - DNA, 25 bp, Homo sapien
gcagcattttgcaactggcttgaaa

SEQ ID NO: 484751 - DNA, 25 bp, Homo sapien
catctccccttgtgattaaatagag

SEQ ID NO: 484752 - DNA, 25 bp, Homo sapien
tgtcagcggtcaagagttataatcc

SEQ ID NO: 484753 - DNA, 25 bp, Homo sapien
gattggtcccagagccgaagagaca

SEQ ID NO: 484754 - DNA, 25 bp, Homo sapien
cctgcctcggccttccaaaatgctg

SEQ ID NO: 484755 - DNA, 25 bp, Homo sapien
tcgaacacctgacttcaaatgatct

SEQ ID NO: 484756 - DNA, 25 bp, Homo sapien
cgaacacctgacttcaaatgatctg

SEQ ID NO: 484757 - DNA, 25 bp, Homo sapien
gcttcgaaacatatcccaggtacat

SEQ ID NO: 484758 - DNA, 25 bp, Homo sapien
gagtaaagccaacatccttccagcg

SEQ ID NO: 484759 - DNA, 25 bp, Homo sapien
tcaaaagtattcaaggctaagtcct

SEQ ID NO: 484760 - DNA, 25 bp, Homo sapien
tattctcaacataacttctggaggg

SEQ ID NO: 484761 - DNA, 25 bp, Homo sapien
ctcatttacagatatgactgggcac

SEQ ID NO: 484762 - DNA, 25 bp, Homo sapien
cttgcaattgctcaagttgaaacaa

SEQ ID NO: 484763 - DNA, 25 bp, Homo sapien
ggcacatgggatttcaatcatgctc

SEQ ID NO: 484764 - DNA, 25 bp, Homo sapien
aatcatgctccttcattgctgagaa

SEQ ID NO: 484765 - DNA, 25 bp, Homo sapien
gagcttgttctgtgatggataaaaa

SEQ ID NO: 484766 - DNA, 25 bp, Homo sapien
agacgcaagcgagagtgagtaaatc

SEQ ID NO: 484767 - DNA, 25 bp, Homo sapien
tatgggcggatccttgcaaataaca

SEQ ID NO: 484768 - DNA, 25 bp, Homo sapien
gcctgtgggataaagcagagccaac

SEQ ID NO: 484769 - DNA, 25 bp, Homo sapien
caacatcagcacgaaagaagacgca

SEQ ID NO: 484770 - DNA, 25 bp, Homo sapien
aaacagggcaccgataatccaaaat

SEQ ID NO: 484771 - DNA, 25 bp, Homo sapien
cttccgtaatactctattgataagt

SEQ ID NO: 484772 - DNA, 25 bp, Homo sapien
tccgtaatactctattgataagttt

SEQ ID NO: 484773 - DNA, 25 bp, Homo sapien
tattgataagttttggtctcagaaa

SEQ ID NO: 484774 - DNA, 25 bp, Homo sapien
gaaagcatatcagttgtgggtccaa

SEQ ID NO: 484775 - DNA, 25 bp, Homo sapien
tgatttgtgcttgcctcaaccctaa

SEQ ID NO: 484776 - DNA, 25 bp, Homo sapien
gtccagggtgaatgctaaatggaac

SEQ ID NO: 484777 - DNA, 25 bp, Homo sapien
ctcttgtagagtccctaagtccagg

SEQ ID NO: 484778 - DNA, 25 bp, Homo sapien
tatttgtctccgctttctttctaaa

SEQ ID NO: 484779 - DNA, 25 bp, Homo sapien
tattagtatttgtctccgctttctt

SEQ ID NO: 484780 - DNA, 25 bp, Homo sapien
tagtatttgtctccgctttctttct

SEQ ID NO: 484781 - DNA, 25 bp, Homo sapien
ttagtatttgtctccgctttctttc

SEQ ID NO: 484782 - DNA, 25 bp, Homo sapien
tcctaaaccgatatcccagatcacg

SEQ ID NO: 484783 - DNA, 25 bp, Homo sapien
tgagagcgggctctttcctaaaccg

SEQ ID NO: 484784 - DNA, 25 bp, Homo sapien
tcacggtcatgtgtagaggccagcc

SEQ ID NO: 484785 - DNA, 25 bp, Homo sapien
aaaaccgcacggtattaccacagca

SEQ ID NO: 484786 - DNA, 25 bp, Homo sapien
tgtcaacaggccgatggctggctgc

SEQ ID NO: 484787 - DNA, 25 bp, Homo sapien
ggaatactcaagtgcaggctgaaag

SEQ ID NO: 484788 - DNA, 25 bp, Homo sapien
gcagatgactgacaaaggagcccaa

SEQ ID NO: 484789 - DNA, 25 bp, Homo sapien
tatttagcccgaagcagatccaaag

SEQ ID NO: 484790 - DNA, 25 bp, Homo sapien
gggtagtggcaccagggagtcagga

SEQ ID NO: 484791 - DNA, 25 bp, Homo sapien
gcaccggccacgctgatgtgggacc

SEQ ID NO: 484792 - DNA, 25 bp, Homo sapien
agccacactgaagcggtgccgaggc

SEQ ID NO: 484793 - DNA, 25 bp, Homo sapien
gcaatgctgatgagggaccgacggt

SEQ ID NO: 484794 - DNA, 25 bp, Homo sapien
gacaggtcctcagtgcacttgcagg

SEQ ID NO: 484795 - DNA, 25 bp, Homo sapien
tattctcactaagaggccagtcagc

SEQ ID NO: 484796 - DNA, 25 bp, Homo sapien
tgtctatcatcttgggcggctctgc

SEQ ID NO: 484797 - DNA, 25 bp, Homo sapien
gggtgcaccttgagatctatggcca

SEQ ID NO: 484798 - DNA, 25 bp, Homo sapien
tacttcgataatgacctggtgttcc

SEQ ID NO: 484799 - DNA, 25 bp, Homo sapien
aattacgacgggttcattccagcct

SEQ ID NO: 484800 - DNA, 25 bp, Homo sapien
cagaaggaacagagacgtgcgcatg

SEQ ID NO: 484801 - DNA, 25 bp, Homo sapien
aaactccagtttagcatcaagcagg

SEQ ID NO: 484802 - DNA, 25 bp, Homo sapien
tacagaacattgctccttaagtact

SEQ ID NO: 484803 - DNA, 25 bp, Homo sapien
cattctcaattaccatgaagctcat

SEQ ID NO: 484804 - DNA, 25 bp, Homo sapien
gctccttaagtactgcatggcattt

SEQ ID NO: 484805 - DNA, 25 bp, Homo sapien
taaaatgtcccggaggcaattaagc

SEQ ID NO: 484806 - DNA, 25 bp, Homo sapien
ttgagattgaaaggttgttgcaggt

SEQ ID NO: 484807 - DNA, 25 bp, Homo sapien
tcatggcaccaaatggacaatctcc

SEQ ID NO: 484808 - DNA, 25 bp, Homo sapien
gcctgtgactccagatgcagcaatg

SEQ ID NO: 484809 - DNA, 25 bp, Homo sapien
cagacctactacctgggatgcagct

SEQ ID NO: 484810 - DNA, 25 bp, Homo sapien
aacagggccattcgtgagattagca

SEQ ID NO: 484811 - DNA, 25 bp, Homo sapien
caatataaataagcgtgcagcctgc

SEQ ID NO: 484812 - DNA, 25 bp, Homo sapien
catggacacgggagcaaaagaacag

SEQ ID NO: 484813 - DNA, 25 bp, Homo sapien
gaagacatggtcttttgtgcccaaa

SEQ ID NO: 484814 - DNA, 25 bp, Homo sapien
tgttcttcttgtggaagagtcaagc

SEQ ID NO: 484815 - DNA, 25 bp, Homo sapien
cctgttcttcttgtggaagagtcaa

SEQ ID NO: 484816 - DNA, 25 bp, Homo sapien
ccctgttcttcttgtggaagagtca

SEQ ID NO: 484817 - DNA, 25 bp, Homo sapien
ttcttcttgtggaagagtcaagcat

SEQ ID NO: 484818 - DNA, 25 bp, Homo sapien
gcctgttccatagtttatcccgtga

SEQ ID NO: 484819 - DNA, 25 bp, Homo sapien
tcaggacgagcgatacaatttgcgg

SEQ ID NO: 484820 - DNA, 25 bp, Homo sapien
gatgaaatcagctcccataatcagg

SEQ ID NO: 484821 - DNA, 25 bp, Homo sapien
tgtcatgaagactgccaattaggcc

SEQ ID NO: 484822 - DNA, 25 bp, Homo sapien
ggggttagtccagaatgagatttct

SEQ ID NO: 484823 - DNA, 25 bp, Homo sapien
tgattggggttagtccagaatgaga

SEQ ID NO: 484824 - DNA, 25 bp, Homo sapien
tgcaagacacgtgattggggttagt

SEQ ID NO: 484825 - DNA, 25 bp, Homo sapien
ctgcaagacacgtgattggggttag

SEQ ID NO: 484826 - DNA, 25 bp, Homo sapien
tctggggatatcagctgctagagac

SEQ ID NO: 484827 - DNA, 25 bp, Homo sapien
gggatatcagctgctagagacgctt

SEQ ID NO: 484828 - DNA, 25 bp, Homo sapien
gatatcagctgctagagacgctttc

SEQ ID NO: 484829 - DNA, 25 bp, Homo sapien
caagtctggggatatcagctgctag

SEQ ID NO: 484830 - DNA, 25 bp, Homo sapien
tcctcacagtcgagcactgcacaat

SEQ ID NO: 484831 - DNA, 25 bp, Homo sapien
ttccaggtacataaagcactgccct

SEQ ID NO: 484832 - DNA, 25 bp, Homo sapien
caatctacattcagggatggaatct

SEQ ID NO: 484833 - DNA, 25 bp, Homo sapien
ttttgtttgcagccactccatcctc

SEQ ID NO: 484834 - DNA, 25 bp, Homo sapien
ccaaccactaaggttctatgtgtca

SEQ ID NO: 484835 - DNA, 25 bp, Homo sapien
acctcatccggcctacaagttggat

SEQ ID NO: 484836 - DNA, 25 bp, Homo sapien
ggcctacaagttggatattttctaa

SEQ ID NO: 484837 - DNA, 25 bp, Homo sapien
cagccaaccactaaggttctatgtg

SEQ ID NO: 484838 - DNA, 25 bp, Homo sapien
tcaggtcacctggcgcaagaaactt

SEQ ID NO: 484839 - DNA, 25 bp, Homo sapien
gacccattcccagcccaacctcatt

SEQ ID NO: 484840 - DNA, 25 bp, Homo sapien
ggtcacctggcgcaagaaactttca

SEQ ID NO: 484841 - DNA, 25 bp, Homo sapien
ttcccagcccaacctcattgtctag

SEQ ID NO: 484842 - DNA, 25 bp, Homo sapien
caggtgggtattggaggacaacctc

SEQ ID NO: 484843 - DNA, 25 bp, Homo sapien
ggctcactgtgctacaatgctacaa

SEQ ID NO: 484844 - DNA, 25 bp, Homo sapien
taattagaagtttatcagggcacct

SEQ ID NO: 484845 - DNA, 25 bp, Homo sapien
tataggaaatcaagctactcccagg

SEQ ID NO: 484846 - DNA, 25 bp, Homo sapien
gctgatggcatgcagcatgtctcca

SEQ ID NO: 484847 - DNA, 25 bp, Homo sapien
ccctcaaagttgaaggctgatggca

SEQ ID NO: 484848 - DNA, 25 bp, Homo sapien
gcccaatcatggctgccagcacagg

SEQ ID NO: 484849 - DNA, 25 bp, Homo sapien
cagcatgtctccagtgaagcagccc

SEQ ID NO: 484850 - DNA, 25 bp, Homo sapien
gaccagagagtttactgatttcact

SEQ ID NO: 484851 - DNA, 25 bp, Homo sapien
gatttcactgttgatcaattcaacc

SEQ ID NO: 484852 - DNA, 25 bp, Homo sapien
acagttcatgtgcaaaggaccagag

SEQ ID NO: 484853 - DNA, 25 bp, Homo sapien
tgtgcaaaggaccagagagtttact

SEQ ID NO: 484854 - DNA, 25 bp, Homo sapien
tcaggacgtgaacttgcttgtggcc

SEQ ID NO: 484855 - DNA, 25 bp, Homo sapien
gccatctgacaagtgtcttgtgtgt

SEQ ID NO: 484856 - DNA, 25 bp, Homo sapien
gtccagctgtgctagatgctcagga

SEQ ID NO: 484857 - DNA, 25 bp, Homo sapien
gaacttgcttgtggccttaaggagc

SEQ ID NO: 484858 - DNA, 25 bp, Homo sapien
caccctcgatggaagggcataattg

SEQ ID NO: 484859 - DNA, 25 bp, Homo sapien
tcgctaacagcgtgacagccaaggg

SEQ ID NO: 484860 - DNA, 25 bp, Homo sapien
tgctgaaaacagctaatcgctaaca

SEQ ID NO: 484861 - DNA, 25 bp, Homo sapien
agccatccctttcttcgcttcagga

SEQ ID NO: 484862 - DNA, 25 bp, Homo sapien
tttttatctgccatgggattgtagg

SEQ ID NO: 484863 - DNA, 25 bp, Homo sapien
aaattttttatctgccatgggattg

SEQ ID NO: 484864 - DNA, 25 bp, Homo sapien
ccatgggattgtaggcttctgtttc

SEQ ID NO: 484865 - DNA, 25 bp, Homo sapien
tatctgccatgggattgtaggcttc

SEQ ID NO: 484866 - DNA, 25 bp, Homo sapien
tataaacgtaaccttgcttggctgg

SEQ ID NO: 484867 - DNA, 25 bp, Homo sapien
ctataaacgtaaccttgcttggctg

SEQ ID NO: 484868 - DNA, 25 bp, Homo sapien
accacagtgggacttgcatctgttt

SEQ ID NO: 484869 - DNA, 25 bp, Homo sapien
tgtaccacagtgggacttgcatctg

SEQ ID NO: 484870 - DNA, 25 bp, Homo sapien
taccacagtgggacttgcatctgtt

SEQ ID NO: 484871 - DNA, 25 bp, Homo sapien
gtaccacagtgggacttgcatctgt

SEQ ID NO: 484872 - DNA, 25 bp, Homo sapien
caatgggcaactgatcccgcctgcc

SEQ ID NO: 484873 - DNA, 25 bp, Homo sapien
tcagtaaaagcaatgcagagagctc

SEQ ID NO: 484874 - DNA, 25 bp, Homo sapien
cccaatgggcaactgatcccgcctg

SEQ ID NO: 484875 - DNA, 25 bp, Homo sapien
gtaaaagcaatgcagagagctcctg

SEQ ID NO: 484876 - DNA, 25 bp, Homo sapien
gagggatcctttgtcctgattaaca

SEQ ID NO: 484877 - DNA, 25 bp, Homo sapien
taacagtgggttctgaagtgcctcc

SEQ ID NO: 484878 - DNA, 25 bp, Homo sapien
catgagttatatcttgcagcacgca

SEQ ID NO: 484879 - DNA, 25 bp, Homo sapien
aatgcagctccccagaattgttcca

SEQ ID NO: 484880 - DNA, 25 bp, Homo sapien
ggaagtaaaaccctatccgcagcgc

SEQ ID NO: 484881 - DNA, 25 bp, Homo sapien
tttgtcaggcattatcccatggttg

SEQ ID NO: 484882 - DNA, 25 bp, Homo sapien
atttccggggtcattcgcatctttg

SEQ ID NO: 484883 - DNA, 25 bp, Homo sapien
tcccatggttgatgggtagcaggaa

SEQ ID NO: 484884 - DNA, 25 bp, Homo sapien
ctacataattacatggccttcactc

SEQ ID NO: 484885 - DNA, 25 bp, Homo sapien
acataattacatggccttcactcac

SEQ ID NO: 484886 - DNA, 25 bp, Homo sapien
tacataattacatggccttcactca

SEQ ID NO: 484887 - DNA, 25 bp, Homo sapien
gaatctggctaagagctgaatcggc

SEQ ID NO: 484888 - DNA, 25 bp, Homo sapien
ggaaacacactacgatctcaatgaa

SEQ ID NO: 484889 - DNA, 25 bp, Homo sapien
gagttgttctacatctaaggacacc

SEQ ID NO: 484890 - DNA, 25 bp, Homo sapien
ctgaatcggctgagaaagaaggagt

SEQ ID NO: 484891 - DNA, 25 bp, Homo sapien
tctttattgcccatgcaaaggagaa

SEQ ID NO: 484892 - DNA, 25 bp, Homo sapien
taagtcctcctgagtctggactcaa

SEQ ID NO: 484893 - DNA, 25 bp, Homo sapien
aaggtgatcaactttttatgaagag

SEQ ID NO: 484894 - DNA, 25 bp, Homo sapien
ctcaataccattgggctaagccaga

SEQ ID NO: 484895 - DNA, 25 bp, Homo sapien
tcgggacaaagcgagagtctgagcc

SEQ ID NO: 484896 - DNA, 25 bp, Homo sapien
tgtgagtgcctccagtcattctgag

SEQ ID NO: 484897 - DNA, 25 bp, Homo sapien
tagcccctgggctgattactgacaa

SEQ ID NO: 484898 - DNA, 25 bp, Homo sapien
tttgcacggcatgcagaagccaagc

SEQ ID NO: 484899 - DNA, 25 bp, Homo sapien
taattcagcatatgtacaaagccaa

SEQ ID NO: 484900 - DNA, 25 bp, Homo sapien
ttggacaccgtgatggagcctggca

SEQ ID NO: 484901 - DNA, 25 bp, Homo sapien
tgtacaaagccaatttttggacacc

SEQ ID NO: 484902 - DNA, 25 bp, Homo sapien
tctgccgccctccatatttgcaagg

SEQ ID NO: 484903 - DNA, 25 bp, Homo sapien
ggatgcagcacgttgcatggctgct

SEQ ID NO: 484904 - DNA, 25 bp, Homo sapien
tggcttcagagtacatcccgtgggt

SEQ ID NO: 484905 - DNA, 25 bp, Homo sapien
tgccaatctagggtctgcacactgc

SEQ ID NO: 484906 - DNA, 25 bp, Homo sapien
tagccctgtcttccgtcacgaggaa

SEQ ID NO: 484907 - DNA, 25 bp, Homo sapien
catttcggagttgattgggactgag

SEQ ID NO: 484908 - DNA, 25 bp, Homo sapien
tgggactgaggtcagcttgttcagc

SEQ ID NO: 484909 - DNA, 25 bp, Homo sapien
gttcagctcctgatccttcactgta

SEQ ID NO: 484910 - DNA, 25 bp, Homo sapien
cagctgtcacatttcggagttgatt

SEQ ID NO: 484911 - DNA, 25 bp, Homo sapien
gagctagggactgtcacagactcac

SEQ ID NO: 484912 - DNA, 25 bp, Homo sapien
cacagagtagttgagttggacagaa

SEQ ID NO: 484913 - DNA, 25 bp, Homo sapien
tggacagaacttagaggtaacttgg

SEQ ID NO: 484914 - DNA, 25 bp, Homo sapien
taggtgccactttctataccgcagt

SEQ ID NO: 484915 - DNA, 25 bp, Homo sapien
cactctgtgacaccaatggataata

SEQ ID NO: 484916 - DNA, 25 bp, Homo sapien
caagtggtaaatggccagcttgccc

SEQ ID NO: 484917 - DNA, 25 bp, Homo sapien
cactggtggtcctatggatccatta

SEQ ID NO: 484918 - DNA, 25 bp, Homo sapien
tcctaattctaactgtgacaagtgg

SEQ ID NO: 484919 - DNA, 25 bp, Homo sapien
ctgtgggctcaccaggagtcctggc

SEQ ID NO: 484920 - DNA, 25 bp, Homo sapien
gcaccttaaagctgcgtgaaccagg

SEQ ID NO: 484921 - DNA, 25 bp, Homo sapien
tctattatgggacaggacctactcg

SEQ ID NO: 484922 - DNA, 25 bp, Homo sapien
tgttccctgcaatgctgactttgag

SEQ ID NO: 484923 - DNA, 25 bp, Homo sapien
tgttttcctcgagcaaatgctaata

SEQ ID NO: 484924 - DNA, 25 bp, Homo sapien
gggagcttccgatcttctataatta

SEQ ID NO: 484925 - DNA, 25 bp, Homo sapien
tgctaataaaacaatgccgtggctg

SEQ ID NO: 484926 - DNA, 25 bp, Homo sapien
ggctggcaccgcatttgatttccat

SEQ ID NO: 484927 - DNA, 25 bp, Homo sapien
cactcggctacacacaacttttaaa

SEQ ID NO: 484928 - DNA, 25 bp, Homo sapien
cacactcggctacacacaactttta

SEQ ID NO: 484929 - DNA, 25 bp, Homo sapien
gacagagtatttacgtaccacaagc

SEQ ID NO: 484930 - DNA, 25 bp, Homo sapien
tacgtaccacaagcttacactgtct

SEQ ID NO: 484931 - DNA, 25 bp, Homo sapien
gtaataatgatcagagactgttgta

SEQ ID NO: 484932 - DNA, 25 bp, Homo sapien
tgtaataatgatcagagactgttgt

SEQ ID NO: 484933 - DNA, 25 bp, Homo sapien
gcggcacagtctcgccatctggaga

SEQ ID NO: 484934 - DNA, 25 bp, Homo sapien
ttttacactccagtggaagaggtgg

SEQ ID NO: 484935 - DNA, 25 bp, Homo sapien
cagcagtcagttcattagttccaaa

SEQ ID NO: 484936 - DNA, 25 bp, Homo sapien
catcctcgcaagtttctagctcaga

SEQ ID NO: 484937 - DNA, 25 bp, Homo sapien
gacacgctctggtgacgtaagaaag

SEQ ID NO: 484938 - DNA, 25 bp, Homo sapien
ggtgacgtaagaaagcggagaaatc

SEQ ID NO: 484939 - DNA, 25 bp, Homo sapien
agaaagcggagaaatcaaccatcac

SEQ ID NO: 484940 - DNA, 25 bp, Homo sapien
aagagacacgctctggtgacgtaag

SEQ ID NO: 484941 - DNA, 25 bp, Homo sapien
ctttttggaaggcacatttagatcc

SEQ ID NO: 484942 - DNA, 25 bp, Homo sapien
cagctttttggaaggcacatttaga

SEQ ID NO: 484943 - DNA, 25 bp, Homo sapien
ttttggaaggcacatttagatccat

SEQ ID NO: 484944 - DNA, 25 bp, Homo sapien
tttcagctttttggaaggcacattt

SEQ ID NO: 484945 - DNA, 25 bp, Homo sapien
ttcagtagggcccagatcaatgtct

SEQ ID NO: 484946 - DNA, 25 bp, Homo sapien
gccagaccactggaaactgagttga

SEQ ID NO: 484947 - DNA, 25 bp, Homo sapien
gagtttttacaattctcagtcgagc

SEQ ID NO: 484948 - DNA, 25 bp, Homo sapien
cacctttggtagcatcaggctggaa

SEQ ID NO: 484949 - DNA, 25 bp, Homo sapien
aaggatgcactagagaactgttcag

SEQ ID NO: 484950 - DNA, 25 bp, Homo sapien
gattctcgggcaacctagtttccag

SEQ ID NO: 484951 - DNA, 25 bp, Homo sapien
catccaattaggaagcgaagcatca

SEQ ID NO: 484952 - DNA, 25 bp, Homo sapien
cagggattactctgggagggctact

SEQ ID NO: 484953 - DNA, 25 bp, Homo sapien
cagggttacgcttgttatagtccaa

SEQ ID NO: 484954 - DNA, 25 bp, Homo sapien
cacactgttcgggatttgtgggaga

SEQ ID NO: 484955 - DNA, 25 bp, Homo sapien
tatagtccaataagccgtgccagtc

SEQ ID NO: 484956 - DNA, 25 bp, Homo sapien
ttgtgggagaattgtcccatgacaa

SEQ ID NO: 484957 - DNA, 25 bp, Homo sapien
aaagagattggggaggagatgaagt

SEQ ID NO: 484958 - DNA, 25 bp, Homo sapien
gggctcagcgattctttcaattcca

SEQ ID NO: 484959 - DNA, 25 bp, Homo sapien
aagagattggggaggagatgaagta

SEQ ID NO: 484960 - DNA, 25 bp, Homo sapien
cagggctcagcgattctttcaattc

SEQ ID NO: 484961 - DNA, 25 bp, Homo sapien
tgcactaagtactaacacaaaaggt

SEQ ID NO: 484962 - DNA, 25 bp, Homo sapien
caatatattccctgttcttagtgag

SEQ ID NO: 484963 - DNA, 25 bp, Homo sapien
tcttagtgagaacaccccaatgcct

SEQ ID NO: 484964 - DNA, 25 bp, Homo sapien
catttatgctagaaagtggtagcac

SEQ ID NO: 484965 - DNA, 25 bp, Homo sapien
ctggaaacatacaaaagctcttgcc

SEQ ID NO: 484966 - DNA, 25 bp, Homo sapien
tggaaacatacaaaagctcttgccc

SEQ ID NO: 484967 - DNA, 25 bp, Homo sapien
ggaaacatacaaaagctcttgccca

SEQ ID NO: 484968 - DNA, 25 bp, Homo sapien
aagctcgccaattttttccatgaga

SEQ ID NO: 484969 - DNA, 25 bp, Homo sapien
taattctttgaagaccaaagctcgc

SEQ ID NO: 484970 - DNA, 25 bp, Homo sapien
gctgccagtggggtagcccaaattc

SEQ ID NO: 484971 - DNA, 25 bp, Homo sapien
tgagaccagttcacagctagctctg

SEQ ID NO: 484972 - DNA, 25 bp, Homo sapien
tttaagtggaatgaaaatttgtctg

SEQ ID NO: 484973 - DNA, 25 bp, Homo sapien
taagtggaatgaaaatttgtctgca

SEQ ID NO: 484974 - DNA, 25 bp, Homo sapien
agtggaatgaaaatttgtctgcaaa

SEQ ID NO: 484975 - DNA, 25 bp, Homo sapien
ttaagtggaatgaaaatttgtctgc

SEQ ID NO: 484976 - DNA, 25 bp, Homo sapien
ttgagcaaacccattgcagtttcca

SEQ ID NO: 484977 - DNA, 25 bp, Homo sapien
tgagcaaacccattgcagtttccac

SEQ ID NO: 484978 - DNA, 25 bp, Homo sapien
tgctcacaggacaaggtttgaagca

SEQ ID NO: 484979 - DNA, 25 bp, Homo sapien
cctgctaataatatacgtgggtggg

SEQ ID NO: 484980 - DNA, 25 bp, Homo sapien
gaataaaatggcgaagcagtgctta

SEQ ID NO: 484981 - DNA, 25 bp, Homo sapien
taaatcactggatgaatctggttgc

SEQ ID NO: 484982 - DNA, 25 bp, Homo sapien
ggacgacctgactcttaacacagtt

SEQ ID NO: 484983 - DNA, 25 bp, Homo sapien
gagcagaacagaactaagtctcacg

SEQ ID NO: 484984 - DNA, 25 bp, Homo sapien
aagtctcacggaaacgcgtgcgtca

SEQ ID NO: 484985 - DNA, 25 bp, Homo sapien
gaggcacggtgcatttcagtaacag

SEQ ID NO: 484986 - DNA, 25 bp, Homo sapien
ctatgctggctcgaaagtcttctcc

SEQ ID NO: 484987 - DNA, 25 bp, Homo sapien
ccttcagggtttcttcacacactgc

SEQ ID NO: 484988 - DNA, 25 bp, Homo sapien
tcctccaaaaacgactgcatctaga

SEQ ID NO: 484989 - DNA, 25 bp, Homo sapien
gaaagagacctacttgaggcccgac

SEQ ID NO: 484990 - DNA, 25 bp, Homo sapien
aagagagagagagatgtctttgaca

SEQ ID NO: 484991 - DNA, 25 bp, Homo sapien
agagagagagagatgtctttgacac

SEQ ID NO: 484992 - DNA, 25 bp, Homo sapien
cattccattgtcatgaaaaaccatt

SEQ ID NO: 484993 - DNA, 25 bp, Homo sapien
gttatgtaaatgtccatccttgagg

SEQ ID NO: 484994 - DNA, 25 bp, Homo sapien
ccattgtcatggttggcaaatatac

SEQ ID NO: 484995 - DNA, 25 bp, Homo sapien
tcaggaagtagtgtccattccattg

SEQ ID NO: 484996 - DNA, 25 bp, Homo sapien
ggcagctatgaggagccctaaatta

SEQ ID NO: 484997 - DNA, 25 bp, Homo sapien
ataatgcagtgctctagaagcaggg

SEQ ID NO: 484998 - DNA, 25 bp, Homo sapien
aacaggctttctattgctcgtgtct

SEQ ID NO: 484999 - DNA, 25 bp, Homo sapien
ccatatattcctgagcatgcctggg

SEQ ID NO: 485000 - DNA, 25 bp, Homo sapien
cagggtttctttactacttgttgca

SEQ ID NO: 485001 - DNA, 25 bp, Homo sapien
gatctatggcttggagaccaaaggc

SEQ ID NO: 485002 - DNA, 25 bp, Homo sapien
cagctccatctcgaaagtcaatgta

SEQ ID NO: 485003 - DNA, 25 bp, Homo sapien
tttgccgggcgtagagaatatccag

SEQ ID NO: 485004 - DNA, 25 bp, Homo sapien
caacatcagggtctattagataaat

SEQ ID NO: 485005 - DNA, 25 bp, Homo sapien
tcagagcaacatctggccacctggc

SEQ ID NO: 485006 - DNA, 25 bp, Homo sapien
ggcagccagtgccatacattgcagg

SEQ ID NO: 485007 - DNA, 25 bp, Homo sapien
agataaatttcatggagtttttctc

SEQ ID NO: 485008 - DNA, 25 bp, Homo sapien
cctggaccacggcaatttggttagg

SEQ ID NO: 485009 - DNA, 25 bp, Homo sapien
gttctttaaaggcagcaatcagttc

SEQ ID NO: 485010 - DNA, 25 bp, Homo sapien
tctttaaaggcagcaatcagttctt

SEQ ID NO: 485011 - DNA, 25 bp, Homo sapien
tggttagggtgaatcacctgcttac

SEQ ID NO: 485012 - DNA, 25 bp, Homo sapien
cacagagcaggaaacgcgaggctca

SEQ ID NO: 485013 - DNA, 25 bp, Homo sapien
aattaggaacaaccgtactccagtg

SEQ ID NO: 485014 - DNA, 25 bp, Homo sapien
gacagattgtgcattaccactgcaa

SEQ ID NO: 485015 - DNA, 25 bp, Homo sapien
ggctcaatgatgcactaaattagga

SEQ ID NO: 485016 - DNA, 25 bp, Homo sapien
tagcagaggtatagagcattcggtg

SEQ ID NO: 485017 - DNA, 25 bp, Homo sapien
gatggacatgtgaatgagagtccgt

SEQ ID NO: 485018 - DNA, 25 bp, Homo sapien
cgtggctcttcgttctaggtgaata

SEQ ID NO: 485019 - DNA, 25 bp, Homo sapien
ggtgaatagatttactcatgggaat

SEQ ID NO: 485020 - DNA, 25 bp, Homo sapien
ttcaatggtccacatgctgcctcag

SEQ ID NO: 485021 - DNA, 25 bp, Homo sapien
ggaactctgctctctcgtttcaatg

SEQ ID NO: 485022 - DNA, 25 bp, Homo sapien
cagctgggatgggtcatagacacag

SEQ ID NO: 485023 - DNA, 25 bp, Homo sapien
gctacccaatgtgaaacccagctgg

SEQ ID NO: 485024 - DNA, 25 bp, Homo sapien
tgtgaccggccagtttataggcaaa

SEQ ID NO: 485025 - DNA, 25 bp, Homo sapien
gaatcatttcaaccttgctggacaa

SEQ ID NO: 485026 - DNA, 25 bp, Homo sapien
taaaataaccatatgtccctactgg

SEQ ID NO: 485027 - DNA, 25 bp, Homo sapien
ctgcagatccaatttctgtgaccgg

SEQ ID NO: 485028 - DNA, 25 bp, Homo sapien
caccctgggcagttagtggattcat

SEQ ID NO: 485029 - DNA, 25 bp, Homo sapien
gggtgctgagtttgggggtcgtgca

SEQ ID NO: 485030 - DNA, 25 bp, Homo sapien
tgcaccctgggcagttagtggattc

SEQ ID NO: 485031 - DNA, 25 bp, Homo sapien
gagagggtgctgagtttgggggtcg

SEQ ID NO: 485032 - DNA, 25 bp, Homo sapien
tgtccagaggtggtccgaggatcca

SEQ ID NO: 485033 - DNA, 25 bp, Homo sapien
tacatgcactgatgggcccacgttt

SEQ ID NO: 485034 - DNA, 25 bp, Homo sapien
cctaagcagaggaagttgaaccacc

SEQ ID NO: 485035 - DNA, 25 bp, Homo sapien
tctctattagacgaagctggactga

SEQ ID NO: 485036 - DNA, 25 bp, Homo sapien
tacctgccaggtacacgggagatgc

SEQ ID NO: 485037 - DNA, 25 bp, Homo sapien
caggtacacgggagatgctctgtga

SEQ ID NO: 485038 - DNA, 25 bp, Homo sapien
acacgggagatgctctgtgaccgct

SEQ ID NO: 485039 - DNA, 25 bp, Homo sapien
gccaagagcagcaataccgacctac

SEQ ID NO: 485040 - DNA, 25 bp, Homo sapien
acaagaatcggagaaaaggccaggg

SEQ ID NO: 485041 - DNA, 25 bp, Homo sapien
cagggtggtgagcacagggacgatc

SEQ ID NO: 485042 - DNA, 25 bp, Homo sapien
tgcaacaagaatcggagaaaaggcc

SEQ ID NO: 485043 - DNA, 25 bp, Homo sapien
ctgatgcaacaagaatcggagaaaa

SEQ ID NO: 485044 - DNA, 25 bp, Homo sapien
ttggaagttccgaggtggtcctgta

SEQ ID NO: 485045 - DNA, 25 bp, Homo sapien
tatccacccaccaagtgggttatgg

SEQ ID NO: 485046 - DNA, 25 bp, Homo sapien
caaaggcctcttggttatccaccca

SEQ ID NO: 485047 - DNA, 25 bp, Homo sapien
tgttttacaaggcaatcgtctagtt

SEQ ID NO: 485048 - DNA, 25 bp, Homo sapien
ctggaaaacagagaatacaaacttc

SEQ ID NO: 485049 - DNA, 25 bp, Homo sapien
ttcagtaatggcatgtcgatcatac

SEQ ID NO: 485050 - DNA, 25 bp, Homo sapien
tgggcctgcttcagtaatggcatgt

SEQ ID NO: 485051 - DNA, 25 bp, Homo sapien
gaggtggcaagcgtaacagtgttct

SEQ ID NO: 485052 - DNA, 25 bp, Homo sapien
gcatgtcgatcatactcccttggaa

SEQ ID NO: 485053 - DNA, 25 bp, Homo sapien
taattgccggtaatggttgactcac

SEQ ID NO: 485054 - DNA, 25 bp, Homo sapien
gactcacagcattcacccaggatga

SEQ ID NO: 485055 - DNA, 25 bp, Homo sapien
taaatggagtcaggtcccaatctgg

SEQ ID NO: 485056 - DNA, 25 bp, Homo sapien
tgttcatcgtctagcggttcaagga

SEQ ID NO: 485057 - DNA, 25 bp, Homo sapien
tacaagtttatgactgagggagtcc

SEQ ID NO: 485058 - DNA, 25 bp, Homo sapien
cctcaatggcaaacagttaaacggg

SEQ ID NO: 485059 - DNA, 25 bp, Homo sapien
ccagctcgggtgcattgtgtcttct

SEQ ID NO: 485060 - DNA, 25 bp, Homo sapien
tctaatgtgatgcaaatctcgcagg

SEQ ID NO: 485061 - DNA, 25 bp, Homo sapien
tcaaacttcattggcgtcctctggc

SEQ ID NO: 485062 - DNA, 25 bp, Homo sapien
attggcgtcctctggcaagcacaag

SEQ ID NO: 485063 - DNA, 25 bp, Homo sapien
caaaatctctgattgttggtgtttc

SEQ ID NO: 485064 - DNA, 25 bp, Homo sapien
gttggtgtttcaaacttcattggcg

SEQ ID NO: 485065 - DNA, 25 bp, Homo sapien
ctcagctcctcacctctcgggcttc

SEQ ID NO: 485066 - DNA, 25 bp, Homo sapien
gtcttcacagaatgaggatccccag

SEQ ID NO: 485067 - DNA, 25 bp, Homo sapien
cctggatcctgtgtttgagaaatga

SEQ ID NO: 485068 - DNA, 25 bp, Homo sapien
tgtggagggtggcactcctctatga

SEQ ID NO: 485069 - DNA, 25 bp, Homo sapien
atgagggaccccacggagcatgtgc

SEQ ID NO: 485070 - DNA, 25 bp, Homo sapien
tggctagaggccattcggctctgaa

SEQ ID NO: 485071 - DNA, 25 bp, Homo sapien
ctagctgcaacaatgggtgctcctc

SEQ ID NO: 485072 - DNA, 25 bp, Homo sapien
catccttggtgggtcctagctgcaa

SEQ ID NO: 485073 - DNA, 25 bp, Homo sapien
cggctctgaagttggcgagatgcca

SEQ ID NO: 485074 - DNA, 25 bp, Homo sapien
ggtggagactagaacgcaagccctt

SEQ ID NO: 485075 - DNA, 25 bp, Homo sapien
caccctcagcgggtgcgtatggcag

SEQ ID NO: 485076 - DNA, 25 bp, Homo sapien
atcccctcaagccaagggcttcttt

SEQ ID NO: 485077 - DNA, 25 bp, Homo sapien
gggctgcccataggaaggacaaggt

SEQ ID NO: 485078 - DNA, 25 bp, Homo sapien
ctgcttttccccaggtctgtagggc

SEQ ID NO: 485079 - DNA, 25 bp, Homo sapien
gcttttccccaggtctgtagggctc

SEQ ID NO: 485080 - DNA, 25 bp, Homo sapien
ttgcggaggggcctgcttttcccca

SEQ ID NO: 485081 - DNA, 25 bp, Homo sapien
gccttgcggaggggcctgcttttcc

SEQ ID NO: 485082 - DNA, 25 bp, Homo sapien
gggctttgcatacatacagtcagtc

SEQ ID NO: 485083 - DNA, 25 bp, Homo sapien
ggcaccatgggtttctgatcaggac

SEQ ID NO: 485084 - DNA, 25 bp, Homo sapien
ctaagcggcttgtgatgagctacac

SEQ ID NO: 485085 - DNA, 25 bp, Homo sapien
taaagcaatctacaccacacgggtc

SEQ ID NO: 485086 - DNA, 25 bp, Homo sapien
cactgggacatcagacgggaacgct

SEQ ID NO: 485087 - DNA, 25 bp, Homo sapien
gccgggaggactaacactgggacat

SEQ ID NO: 485088 - DNA, 25 bp, Homo sapien
aacgctcccggatgccgagaaactt

SEQ ID NO: 485089 - DNA, 25 bp, Homo sapien
gaaacttcctaacttgtgctcacag

SEQ ID NO: 485090 - DNA, 25 bp, Homo sapien
ggaggcggtgaagtcttcatcccgc

SEQ ID NO: 485091 - DNA, 25 bp, Homo sapien
tttcaaattcaaatcggaggcggtg

SEQ ID NO: 485092 - DNA, 25 bp, Homo sapien
catcccgcaggactgttttcccagc

SEQ ID NO: 485093 - DNA, 25 bp, Homo sapien
gcggtgaagtcttcatcccgcagga

SEQ ID NO: 485094 - DNA, 25 bp, Homo sapien
gacatggtttgttctatctgcccag

SEQ ID NO: 485095 - DNA, 25 bp, Homo sapien
caaaacgaccgggtgcaaaagtgtg

SEQ ID NO: 485096 - DNA, 25 bp, Homo sapien
ataatatgtctattttagagacggg

SEQ ID NO: 485097 - DNA, 25 bp, Homo sapien
cgaaatcataaaagcggaaggtcct

SEQ ID NO: 485098 - DNA, 25 bp, Homo sapien
ccctccaaaaccagcccgcgcagag

SEQ ID NO: 485099 - DNA, 25 bp, Homo sapien
ccccctccaaaaccagcccgcgcag

SEQ ID NO: 485100 - DNA, 25 bp, Homo sapien
cctccaaaaccagcccgcgcagagc

SEQ ID NO: 485101 - DNA, 25 bp, Homo sapien
cccctccaaaaccagcccgcgcaga

SEQ ID NO: 485102 - DNA, 25 bp, Homo sapien
tctttacgtcgtgggcaattcttac

SEQ ID NO: 485103 - DNA, 25 bp, Homo sapien
caattcttactgactcggaaggcga

SEQ ID NO: 485104 - DNA, 25 bp, Homo sapien
cggaaggcgatatgctgccaaataa

SEQ ID NO: 485105 - DNA, 25 bp, Homo sapien
ttgcagcgcgcttggcggaaacggg

SEQ ID NO: 485106 - DNA, 25 bp, Homo sapien
caaagaagtccccaaatgattttgg

SEQ ID NO: 485107 - DNA, 25 bp, Homo sapien
agggcgggcgcaagggccctgcgca

SEQ ID NO: 485108 - DNA, 25 bp, Homo sapien
gaccgggatcgtccctgcgtccctc

SEQ ID NO: 485109 - DNA, 25 bp, Homo sapien
ggctcgcggccaggcggtgtgaggc

SEQ ID NO: 485110 - DNA, 25 bp, Homo sapien
cgcgtggctcgggtgcggattcggg

SEQ ID NO: 485111 - DNA, 25 bp, Homo sapien
aatactgtgattgaacaaagtgggc

SEQ ID NO: 485112 - DNA, 25 bp, Homo sapien
cctcttgattcgaatactgtgattg

SEQ ID NO: 485113 - DNA, 25 bp, Homo sapien
ttttcctcttgattcgaatactgtg

SEQ ID NO: 485114 - DNA, 25 bp, Homo sapien
aacaaagtgggcgattcgactggag

SEQ ID NO: 485115 - DNA, 25 bp, Homo sapien
cccagtcgggttcaacaggtgtctg

SEQ ID NO: 485116 - DNA, 25 bp, Homo sapien
gaataagtcctgtgactggcccctc

SEQ ID NO: 485117 - DNA, 25 bp, Homo sapien
cccttcaaaaagttcggcgacatct

SEQ ID NO: 485118 - DNA, 25 bp, Homo sapien
tggcttccacaagggcattctaatt

SEQ ID NO: 485119 - DNA, 25 bp, Homo sapien
attcagccctaatcttgaggacagg

SEQ ID NO: 485120 - DNA, 25 bp, Homo sapien
tcgaacaagagcttgtatgggagaa

SEQ ID NO: 485121 - DNA, 25 bp, Homo sapien
cctaatcttgaggacaggtttccag

SEQ ID NO: 485122 - DNA, 25 bp, Homo sapien
tccagaatgggtttgttctcgaaca

SEQ ID NO: 485123 - DNA, 25 bp, Homo sapien
aggtgcgggtagcttgactctggaa

SEQ ID NO: 485124 - DNA, 25 bp, Homo sapien
taggtgcgggtagcttgactctgga

SEQ ID NO: 485125 - DNA, 25 bp, Homo sapien
ttaggtgcgggtagcttgactctgg

SEQ ID NO: 485126 - DNA, 25 bp, Homo sapien
agttctcccagaaaatcgaagccag

SEQ ID NO: 485127 - DNA, 25 bp, Homo sapien
cagctatttggcgttatgtaaacca

SEQ ID NO: 485128 - DNA, 25 bp, Homo sapien
taacattaagccagatgcctagagt

SEQ ID NO: 485129 - DNA, 25 bp, Homo sapien
tcatcacatagccagtgttcggcct

SEQ ID NO: 485130 - DNA, 25 bp, Homo sapien
catcagaacctaagtggaggaggga

SEQ ID NO: 485131 - DNA, 25 bp, Homo sapien
caacagaaggactaagggaagagca

SEQ ID NO: 485132 - DNA, 25 bp, Homo sapien
gatcctggaagtggcgcatctctct

SEQ ID NO: 485133 - DNA, 25 bp, Homo sapien
tctctcaggagtggctttcaagctg

SEQ ID NO: 485134 - DNA, 25 bp, Homo sapien
gaaacttccataggccagcagtgga

SEQ ID NO: 485135 - DNA, 25 bp, Homo sapien
atgatcagataagagtttacagtca

SEQ ID NO: 485136 - DNA, 25 bp, Homo sapien
tccagcaccgagagaaacttccata

SEQ ID NO: 485137 - DNA, 25 bp, Homo sapien
tctgcaagatcaggggacgggacaa

SEQ ID NO: 485138 - DNA, 25 bp, Homo sapien
cacacatttggagcttgctcaccct

SEQ ID NO: 485139 - DNA, 25 bp, Homo sapien
tcaaggtgtattgcgaggtggcact

SEQ ID NO: 485140 - DNA, 25 bp, Homo sapien
ctggctgtgtttttgatgactggtt

SEQ ID NO: 485141 - DNA, 25 bp, Homo sapien
tgtttgaattgtgatgaattcgagt

SEQ ID NO: 485142 - DNA, 25 bp, Homo sapien
ccagaggtcttttagcccaaggcag

SEQ ID NO: 485143 - DNA, 25 bp, Homo sapien
taagatcctagaggagtgaccaacc

SEQ ID NO: 485144 - DNA, 25 bp, Homo sapien
gatagttgtgatcaaagctttctgg

SEQ ID NO: 485145 - DNA, 25 bp, Homo sapien
agagaatggcctaggaccagaccct

SEQ ID NO: 485146 - DNA, 25 bp, Homo sapien
cacaggcacgtaacagaagctcagt

SEQ ID NO: 485147 - DNA, 25 bp, Homo sapien
taactctacagtaatggtcattgca

SEQ ID NO: 485148 - DNA, 25 bp, Homo sapien
gatcaatggacggatttgacacagg

SEQ ID NO: 485149 - DNA, 25 bp, Homo sapien
tgtatgaactttaccctcttgttgt

SEQ ID NO: 485150 - DNA, 25 bp, Homo sapien
gaatgatcaggcttccacactgcga

SEQ ID NO: 485151 - DNA, 25 bp, Homo sapien
caccatgctagttgccaggaacgag

SEQ ID NO: 485152 - DNA, 25 bp, Homo sapien
caggaacgagcaaagtagaccaact

SEQ ID NO: 485153 - DNA, 25 bp, Homo sapien
tttgtgttggctcactagcatgggc

SEQ ID NO: 485154 - DNA, 25 bp, Homo sapien
caggatgaccgagagatgcctgcgc

SEQ ID NO: 485155 - DNA, 25 bp, Homo sapien
tttgaagagtgcagggccaattcct

SEQ ID NO: 485156 - DNA, 25 bp, Homo sapien
gagaggaggctctcgcggctgtcct

SEQ ID NO: 485157 - DNA, 25 bp, Homo sapien
gcctgcgctgtgcttgagcattgcc

SEQ ID NO: 485158 - DNA, 25 bp, Homo sapien
tcagcgactcttgaccaacagataa

SEQ ID NO: 485159 - DNA, 25 bp, Homo sapien
gaccaacagataagagtcaatccta

SEQ ID NO: 485160 - DNA, 25 bp, Homo sapien
caacagataagagtcaatcctacac

SEQ ID NO: 485161 - DNA, 25 bp, Homo sapien
cagcgactcttgaccaacagataag

SEQ ID NO: 485162 - DNA, 25 bp, Homo sapien
ttctgatgcaggtggccacagtcat

SEQ ID NO: 485163 - DNA, 25 bp, Homo sapien
catggggggcttggtgagagtctgt

SEQ ID NO: 485164 - DNA, 25 bp, Homo sapien
caggtggccacagtcatggggggct

SEQ ID NO: 485165 - DNA, 25 bp, Homo sapien
tctgttttgaggcagtaggtgtcat

SEQ ID NO: 485166 - DNA, 25 bp, Homo sapien
gttcaggcaaatgacgtggggacat

SEQ ID NO: 485167 - DNA, 25 bp, Homo sapien
tagttcaggcaaatgacgtggggac

SEQ ID NO: 485168 - DNA, 25 bp, Homo sapien
tatagttcaggcaaatgacgtgggg

SEQ ID NO: 485169 - DNA, 25 bp, Homo sapien
gtatagttcaggcaaatgacgtggg

SEQ ID NO: 485170 - DNA, 25 bp, Homo sapien
ctgttagttgttccaagtgaatatt

SEQ ID NO: 485171 - DNA, 25 bp, Homo sapien
cccaaacatggtggctgaagatgca

SEQ ID NO: 485172 - DNA, 25 bp, Homo sapien
gaatatttcacaacatccagtccag

SEQ ID NO: 485173 - DNA, 25 bp, Homo sapien
ggctgaagatgcatgcatagtgcat

SEQ ID NO: 485174 - DNA, 25 bp, Homo sapien
tacatggctggagtgaataagccat

SEQ ID NO: 485175 - DNA, 25 bp, Homo sapien
tttacatggctggagtgaataagcc

SEQ ID NO: 485176 - DNA, 25 bp, Homo sapien
tggtttacatggctggagtgaataa

SEQ ID NO: 485177 - DNA, 25 bp, Homo sapien
gtactggtttacatggctggagtga

SEQ ID NO: 485178 - DNA, 25 bp, Homo sapien
agactgagctggtgtggaccagggc

SEQ ID NO: 485179 - DNA, 25 bp, Homo sapien
tgaaatctccctgggtatagggctg

SEQ ID NO: 485180 - DNA, 25 bp, Homo sapien
gagtggcagcggtggagactgagct

SEQ ID NO: 485181 - DNA, 25 bp, Homo sapien
ggtgaggagtggcagcggtggagac

SEQ ID NO: 485182 - DNA, 25 bp, Homo sapien
gcttccggtttagctcccattcctg

SEQ ID NO: 485183 - DNA, 25 bp, Homo sapien
gtgaccacaaagtgatgcctgcctt

SEQ ID NO: 485184 - DNA, 25 bp, Homo sapien
cctgggcagacgcatgaaagttttc

SEQ ID NO: 485185 - DNA, 25 bp, Homo sapien
tttgtggcataaagttgggacctgg

SEQ ID NO: 485186 - DNA, 25 bp, Homo sapien
tgtggactggtgagatttttctgga

SEQ ID NO: 485187 - DNA, 25 bp, Homo sapien
tggtgagatttttctggaccccaca

SEQ ID NO: 485188 - DNA, 25 bp, Homo sapien
gactggtgagatttttctggacccc

SEQ ID NO: 485189 - DNA, 25 bp, Homo sapien
ggtgagatttttctggaccccacac

SEQ ID NO: 485190 - DNA, 25 bp, Homo sapien
gcagaatcaggctcgtattgcttat

SEQ ID NO: 485191 - DNA, 25 bp, Homo sapien
gactagcgacgatgaaaggcctctt

SEQ ID NO: 485192 - DNA, 25 bp, Homo sapien
tctggccaattcctagactagcgac

SEQ ID NO: 485193 - DNA, 25 bp, Homo sapien
taaattgcgccaggaaatagaaatc

SEQ ID NO: 485194 - DNA, 25 bp, Homo sapien
tgatgctaactgagtatggacaccg

SEQ ID NO: 485195 - DNA, 25 bp, Homo sapien
tgatcagagtgggattttggacttg

SEQ ID NO: 485196 - DNA, 25 bp, Homo sapien
tgctccgattccgacctggccggtt

SEQ ID NO: 485197 - DNA, 25 bp, Homo sapien
gtcaccctattgatgctaactgagt

SEQ ID NO: 485198 - DNA, 25 bp, Homo sapien
ttgaccagaagatagcagaagcttt

SEQ ID NO: 485199 - DNA, 25 bp, Homo sapien
tgtggtctccttatacaccaaaggc

SEQ ID NO: 485200 - DNA, 25 bp, Homo sapien
tctcctgggctcttaatcgtgttct

SEQ ID NO: 485201 - DNA, 25 bp, Homo sapien
ttcagcttgattccaccctgggttc

SEQ ID NO: 485202 - DNA, 25 bp, Homo sapien
gggacagaatcatgaggtgattcca

SEQ ID NO: 485203 - DNA, 25 bp, Homo sapien
tgttcatacccgtgagggacagaat

SEQ ID NO: 485204 - DNA, 25 bp, Homo sapien
gcacagctggttccctgttcatacc

SEQ ID NO: 485205 - DNA, 25 bp, Homo sapien
aggtgattccaggagtctcttctca

SEQ ID NO: 485206 - DNA, 25 bp, Homo sapien
attagaacaaactgtggcctagggc

SEQ ID NO: 485207 - DNA, 25 bp, Homo sapien
cgaaagagcacgcattagaacaaac

SEQ ID NO: 485208 - DNA, 25 bp, Homo sapien
tggcctagggcaagagtctgttgtg

SEQ ID NO: 485209 - DNA, 25 bp, Homo sapien
tagaacaaactgtggcctagggcaa

SEQ ID NO: 485210 - DNA, 25 bp, Homo sapien
tccagggtccttgccactggactca

SEQ ID NO: 485211 - DNA, 25 bp, Homo sapien
atcctcctgacctggcgcaaagaag

SEQ ID NO: 485212 - DNA, 25 bp, Homo sapien
ctgaaaactaacaggatcatgccca

SEQ ID NO: 485213 - DNA, 25 bp, Homo sapien
agaagaacgtttggcactgacataa

SEQ ID NO: 485214 - DNA, 25 bp, Homo sapien
caggaaattgatccggataaggacc

SEQ ID NO: 485215 - DNA, 25 bp, Homo sapien
tgtaactttgcatactcctgttccc

SEQ ID NO: 485216 - DNA, 25 bp, Homo sapien
ccagccggtcaacaatctgggagaa

SEQ ID NO: 485217 - DNA, 25 bp, Homo sapien
ggataaggaccatcaaccagccggt

SEQ ID NO: 485218 - DNA, 25 bp, Homo sapien
gatcggggtcaatacttgcaggtag

SEQ ID NO: 485219 - DNA, 25 bp, Homo sapien
caggtagggaatgtgcgaaggcggt

SEQ ID NO: 485220 - DNA, 25 bp, Homo sapien
ttcagtacagatcgaatcagtgtct

SEQ ID NO: 485221 - DNA, 25 bp, Homo sapien
gattttctaaccagtggtttcagta

SEQ ID NO: 485222 - DNA, 25 bp, Homo sapien
taatggctccgcaaggagtcgtgat

SEQ ID NO: 485223 - DNA, 25 bp, Homo sapien
gagtcgtgattcctttcgagtgtaa

SEQ ID NO: 485224 - DNA, 25 bp, Homo sapien
gagcggcacgagtaatggctccgca

SEQ ID NO: 485225 - DNA, 25 bp, Homo sapien
caaatctcgtttacatccaaggagt

SEQ ID NO: 485226 - DNA, 25 bp, Homo sapien
ttagcgaggagcggggagttgctga

SEQ ID NO: 485227 - DNA, 25 bp, Homo sapien
aggagcggggagttgctgaaagccg

SEQ ID NO: 485228 - DNA, 25 bp, Homo sapien
cgaggagcggggagttgctgaaagc

SEQ ID NO: 485229 - DNA, 25 bp, Homo sapien
gcgaggagcggggagttgctgaaag

SEQ ID NO: 485230 - DNA, 25 bp, Homo sapien
ctctgggcctgcaaaacgagcacaa

SEQ ID NO: 485231 - DNA, 25 bp, Homo sapien
tgtttgctcgagtgttgactcccgg

SEQ ID NO: 485232 - DNA, 25 bp, Homo sapien
ctcctcccgggaggaataggcgaga

SEQ ID NO: 485233 - DNA, 25 bp, Homo sapien
cagcccggagggtccagaaggaaag

SEQ ID NO: 485234 - DNA, 25 bp, Homo sapien
tttacgtctcaatctagtattcagg

SEQ ID NO: 485235 - DNA, 25 bp, Homo sapien
tttgtaattagcagcgaggagcgcg

SEQ ID NO: 485236 - DNA, 25 bp, Homo sapien
cacaagggcgctacaagaagagggc

SEQ ID NO: 485237 - DNA, 25 bp, Homo sapien
ttagccccgatgtctttccgaggag

SEQ ID NO: 485238 - DNA, 25 bp, Homo sapien
tggagttaaacagcccacaatgggc

SEQ ID NO: 485239 - DNA, 25 bp, Homo sapien
ttgccaagagctcgcgagcaccctg

SEQ ID NO: 485240 - DNA, 25 bp, Homo sapien
gagctcgcgagcaccctgcgtggca

SEQ ID NO: 485241 - DNA, 25 bp, Homo sapien
ccttgccaagagctcgcgagcaccc

SEQ ID NO: 485242 - DNA, 25 bp, Homo sapien
caagagctcgcgagcaccctgcgtg

SEQ ID NO: 485243 - DNA, 25 bp, Homo sapien
gataacggatgcagaaagatggcct

SEQ ID NO: 485244 - DNA, 25 bp, Homo sapien
agatggccttttggcccggaacgca

SEQ ID NO: 485245 - DNA, 25 bp, Homo sapien
gaacgcactctctctcgtacgcata

SEQ ID NO: 485246 - DNA, 25 bp, Homo sapien
ctaggactggagttcccaggcccaa

SEQ ID NO: 485247 - DNA, 25 bp, Homo sapien
gatccatttgcaatgtctgattctc

SEQ ID NO: 485248 - DNA, 25 bp, Homo sapien
tgtgtgtggttagcacccttagctt

SEQ ID NO: 485249 - DNA, 25 bp, Homo sapien
agactggaatctgagcgcaatgggt

SEQ ID NO: 485250 - DNA, 25 bp, Homo sapien
ggagagctcgcattcagacagccct

SEQ ID NO: 485251 - DNA, 25 bp, Homo sapien
agggcatcccggcagattgatttct

SEQ ID NO: 485252 - DNA, 25 bp, Homo sapien
tatgtggcgtttcacctggatgtgg

SEQ ID NO: 485253 - DNA, 25 bp, Homo sapien
gaagcttactgccaactgactgtgg

SEQ ID NO: 485254 - DNA, 25 bp, Homo sapien
gagatgcagtaaaatgccctcccca

SEQ ID NO: 485255 - DNA, 25 bp, Homo sapien
ggagttctctttaaagtcgccaaca

SEQ ID NO: 485256 - DNA, 25 bp, Homo sapien
gcaagactcaaattgatttttgtca

SEQ ID NO: 485257 - DNA, 25 bp, Homo sapien
ccccgaagtcagaggttgagaccct

SEQ ID NO: 485258 - DNA, 25 bp, Homo sapien
cagatggcgaaactgagacctcaag

SEQ ID NO: 485259 - DNA, 25 bp, Homo sapien
agtagcattacaagcgggcgcatta

SEQ ID NO: 485260 - DNA, 25 bp, Homo sapien
cctggctatgggcaccgtgaaaaaa

SEQ ID NO: 485261 - DNA, 25 bp, Homo sapien
tccttgctgagaaaggaacaccagt

SEQ ID NO: 485262 - DNA, 25 bp, Homo sapien
tgaatgacacgggaaaaagagcttg

SEQ ID NO: 485263 - DNA, 25 bp, Homo sapien
tgtcttatgagcctggaaacaaccc

SEQ ID NO: 485264 - DNA, 25 bp, Homo sapien
tcaccgaggcgctttgaagggtcgc

SEQ ID NO: 485265 - DNA, 25 bp, Homo sapien
gccctgtgcccattagaaaggcgga

SEQ ID NO: 485266 - DNA, 25 bp, Homo sapien
taataagggtcgttcatcaccgagg

SEQ ID NO: 485267 - DNA, 25 bp, Homo sapien
gaaagcgctcgcctttgtcagcgat

SEQ ID NO: 485268 - DNA, 25 bp, Homo sapien
atgagaaaccctttgaagtggaact

SEQ ID NO: 485269 - DNA, 25 bp, Homo sapien
ggttgccttaacgacgccgctgaat

SEQ ID NO: 485270 - DNA, 25 bp, Homo sapien
gaagtggaacttattataggaggaa

SEQ ID NO: 485271 - DNA, 25 bp, Homo sapien
gggccactgtgattcgagacagtcg

SEQ ID NO: 485272 - DNA, 25 bp, Homo sapien
tactttcatgccaagttacttcagt

SEQ ID NO: 485273 - DNA, 25 bp, Homo sapien
ccacgcggagcgtcaggatcgctgt

SEQ ID NO: 485274 - DNA, 25 bp, Homo sapien
ttcgagacagtcgatgagacacagc

SEQ ID NO: 485275 - DNA, 25 bp, Homo sapien
ggcaagcaagacgttcccatctgaa

SEQ ID NO: 485276 - DNA, 25 bp, Homo sapien
tagtccagaacggaaggcttggcgc

SEQ ID NO: 485277 - DNA, 25 bp, Homo sapien
tggcgctcggacaatcttcatggtg

SEQ ID NO: 485278 - DNA, 25 bp, Homo sapien
taagatttctatggcaattggcaag

SEQ ID NO: 485279 - DNA, 25 bp, Homo sapien
gcttacttgaatgaacaacgtaatg

SEQ ID NO: 485280 - DNA, 25 bp, Homo sapien
tatacattttggtgaaagattgtca

SEQ ID NO: 485281 - DNA, 25 bp, Homo sapien
tgcattgtgttgataagattatata

SEQ ID NO: 485282 - DNA, 25 bp, Homo sapien
cctggaagagttcaaagcacaccaa

SEQ ID NO: 485283 - DNA, 25 bp, Homo sapien
gaatgtgtgacctttgccagagctg

SEQ ID NO: 485284 - DNA, 25 bp, Homo sapien
gattgtaaaccacacacctgctgca

SEQ ID NO: 485285 - DNA, 25 bp, Homo sapien
tagttaatggcgatacacactgccg

SEQ ID NO: 485286 - DNA, 25 bp, Homo sapien
gatactgcctcctaactgtgtccaa

SEQ ID NO: 485287 - DNA, 25 bp, Homo sapien
tgggtttcagtgttacattctggcc

SEQ ID NO: 485288 - DNA, 25 bp, Homo sapien
agcactagggatctcaccctgatcc

SEQ ID NO: 485289 - DNA, 25 bp, Homo sapien
tgtttattttgacaggaggatctcc

SEQ ID NO: 485290 - DNA, 25 bp, Homo sapien
tacagaccctgaggggagtgtgtct

SEQ ID NO: 485291 - DNA, 25 bp, Homo sapien
ggtttttggctctgcgtctcgcgga

SEQ ID NO: 485292 - DNA, 25 bp, Homo sapien
tgatcaaagggactaatccccgggc

SEQ ID NO: 485293 - DNA, 25 bp, Homo sapien
caacccgcgcttggtgtttctggcg

SEQ ID NO: 485294 - DNA, 25 bp, Homo sapien
ggacattgtgttctgagagggccca

SEQ ID NO: 485295 - DNA, 25 bp, Homo sapien
tcccgcctgcccaggcctcgcgagg

SEQ ID NO: 485296 - DNA, 25 bp, Homo sapien
acaggccacgccctgcgcactgtcc

SEQ ID NO: 485297 - DNA, 25 bp, Homo sapien
tgcgggcgcagaagccgatccgggc

SEQ ID NO: 485298 - DNA, 25 bp, Homo sapien
gccgcgcgcggcctagggcccttcc

SEQ ID NO: 485299 - DNA, 25 bp, Homo sapien
cttctcggcagggcaggatccaggg

SEQ ID NO: 485300 - DNA, 25 bp, Homo sapien
tctcggcagggcaggatccagggac

SEQ ID NO: 485301 - DNA, 25 bp, Homo sapien
gcacttctcggcagggcaggatcca

SEQ ID NO: 485302 - DNA, 25 bp, Homo sapien
cagcacttctcggcagggcaggatc

SEQ ID NO: 485303 - DNA, 25 bp, Homo sapien
gcgcgggcagctacccctgcggcgg

SEQ ID NO: 485304 - DNA, 25 bp, Homo sapien
ggcgcgggcagctacccctgcggcg

SEQ ID NO: 485305 - DNA, 25 bp, Homo sapien
cgcgggcagctacccctgcggcggg

SEQ ID NO: 485306 - DNA, 25 bp, Homo sapien
ccggcgcgggcagctacccctgcgg

SEQ ID NO: 485307 - DNA, 25 bp, Homo sapien
actgtgcagctcaaatgtggtgttc

SEQ ID NO: 485308 - DNA, 25 bp, Homo sapien
ccaaaatctcggtcccactgtgcag

SEQ ID NO: 485309 - DNA, 25 bp, Homo sapien
ggtgttcactctgccaatcgctgga

SEQ ID NO: 485310 - DNA, 25 bp, Homo sapien
taaagagcgcccaatacatacatgt

SEQ ID NO: 485311 - DNA, 25 bp, Homo sapien
ggcaggccggggcttgagcggatcc

SEQ ID NO: 485312 - DNA, 25 bp, Homo sapien
ggctgcgtgcgactgggcggcaggc

SEQ ID NO: 485313 - DNA, 25 bp, Homo sapien
ggatccagctcagggccgcgggggc

SEQ ID NO: 485314 - DNA, 25 bp, Homo sapien
ggccggggcttgagcggatccagct

SEQ ID NO: 485315 - DNA, 25 bp, Homo sapien
cgttcccatttccacacccctctct

SEQ ID NO: 485316 - DNA, 25 bp, Homo sapien
agaacccgggctctcttgcgccggc

SEQ ID NO: 485317 - DNA, 25 bp, Homo sapien
tccctccgtcccattcttccctgtc

SEQ ID NO: 485318 - DNA, 25 bp, Homo sapien
cggcttaagcgagtctctgcaggtt

SEQ ID NO: 485319 - DNA, 25 bp, Homo sapien
agcctctcccggcttaagcgagtct

SEQ ID NO: 485320 - DNA, 25 bp, Homo sapien
cccgctcccgatccgcgcggtgcgt

SEQ ID NO: 485321 - DNA, 25 bp, Homo sapien
cgccgccgcctggatctgcctcggg

SEQ ID NO: 485322 - DNA, 25 bp, Homo sapien
cctggatctgcctcgggcggccggg

SEQ ID NO: 485323 - DNA, 25 bp, Homo sapien
gcgcgtagcgaaggcgcggagagga

SEQ ID NO: 485324 - DNA, 25 bp, Homo sapien
atggtggcgcgcgaagctgcccacc

SEQ ID NO: 485325 - DNA, 25 bp, Homo sapien
actgcggacccgcgtccaggagcat

SEQ ID NO: 485326 - DNA, 25 bp, Homo sapien
caccccgatggccgggaactgcgga

SEQ ID NO: 485327 - DNA, 25 bp, Homo sapien
gcggagtggtgatggtggcgcgcga

SEQ ID NO: 485328 - DNA, 25 bp, Homo sapien
gccaggctcagttcacggtcctgca

SEQ ID NO: 485329 - DNA, 25 bp, Homo sapien
tgagcttgaaggctcccatgtgcgc

SEQ ID NO: 485330 - DNA, 25 bp, Homo sapien
ccgcggctgcggaacaggaagtccc

SEQ ID NO: 485331 - DNA, 25 bp, Homo sapien
gcggcggagtcaacgaagccgttct

SEQ ID NO: 485332 - DNA, 25 bp, Homo sapien
tgagcacattctgcgagccgtgcgg

SEQ ID NO: 485333 - DNA, 25 bp, Homo sapien
ccgaggcgcatctgcccgttgagca

SEQ ID NO: 485334 - DNA, 25 bp, Homo sapien
ctggcggtattgctccgagcgcccg

SEQ ID NO: 485335 - DNA, 25 bp, Homo sapien
ggtattgctccgagcgcccgaacac

SEQ ID NO: 485336 - DNA, 25 bp, Homo sapien
tgtggagttgcgccgccgagtaggg

SEQ ID NO: 485337 - DNA, 25 bp, Homo sapien
cgagtaggggtcggtccgcgggctg

SEQ ID NO: 485338 - DNA, 25 bp, Homo sapien
tggttgtggagttgcgccgccgagt

SEQ ID NO: 485339 - DNA, 25 bp, Homo sapien
ggttgtggagttgcgccgccgagta

SEQ ID NO: 485340 - DNA, 25 bp, Homo sapien
ctgccgcatatagcggaaaaaggca

SEQ ID NO: 485341 - DNA, 25 bp, Homo sapien
gccgcatatagcggaaaaaggcacc

SEQ ID NO: 485342 - DNA, 25 bp, Homo sapien
gcatatagcggaaaaaggcaccggg

SEQ ID NO: 485343 - DNA, 25 bp, Homo sapien
cgcatatagcggaaaaaggcaccgg

SEQ ID NO: 485344 - DNA, 25 bp, Homo sapien
gccgacgtgctccaccgagacgtgt

SEQ ID NO: 485345 - DNA, 25 bp, Homo sapien
gagacgtgtgtcaccagctcgtgca

SEQ ID NO: 485346 - DNA, 25 bp, Homo sapien
tgctccaccgagacgtgtgtcacca

SEQ ID NO: 485347 - DNA, 25 bp, Homo sapien
caccgagacgtgtgtcaccagctcg

SEQ ID NO: 485348 - DNA, 25 bp, Homo sapien
tacactccgagcagaaaagcacatt

SEQ ID NO: 485349 - DNA, 25 bp, Homo sapien
tgagaaacgcattacagcttcggct

SEQ ID NO: 485350 - DNA, 25 bp, Homo sapien
ccgggcaccgaattagcgagcagtt

SEQ ID NO: 485351 - DNA, 25 bp, Homo sapien
tcatttcatgggaaacagtcccggg

SEQ ID NO: 485352 - DNA, 25 bp, Homo sapien
ccccacttcggagtaaatattgacg

SEQ ID NO: 485353 - DNA, 25 bp, Homo sapien
ttcttttaggaaatcgtctggcacg

SEQ ID NO: 485354 - DNA, 25 bp, Homo sapien
taggaaatcgtctggcacgattttg

SEQ ID NO: 485355 - DNA, 25 bp, Homo sapien
ccacttcggagtaaatattgacggg

SEQ ID NO: 485356 - DNA, 25 bp, Homo sapien
cggaagagaacaataggccgctggc

SEQ ID NO: 485357 - DNA, 25 bp, Homo sapien
aagagaacaataggccgctggcgca

SEQ ID NO: 485358 - DNA, 25 bp, Homo sapien
cttcccggaagagaacaataggccg

SEQ ID NO: 485359 - DNA, 25 bp, Homo sapien
tcccggaagagaacaataggccgct

SEQ ID NO: 485360 - DNA, 25 bp, Homo sapien
catctagtgactgcggagaggcaca

SEQ ID NO: 485361 - DNA, 25 bp, Homo sapien
agtcatttagaggtgcgagaactca

SEQ ID NO: 485362 - DNA, 25 bp, Homo sapien
gaactcaaacgtcgttccacttgga

SEQ ID NO: 485363 - DNA, 25 bp, Homo sapien
taaagacatccgctcagacacagga

SEQ ID NO: 485364 - DNA, 25 bp, Homo sapien
caggctgacgtccatctcctcaaat

SEQ ID NO: 485365 - DNA, 25 bp, Homo sapien
tccaggctgacgtccatctcctcaa

SEQ ID NO: 485366 - DNA, 25 bp, Homo sapien
ccaggctgacgtccatctcctcaaa

SEQ ID NO: 485367 - DNA, 25 bp, Homo sapien
ttccaggctgacgtccatctcctca

SEQ ID NO: 485368 - DNA, 25 bp, Homo sapien
ccccactcaggctgcgagggggctg

SEQ ID NO: 485369 - DNA, 25 bp, Homo sapien
cagtccgatcccctctgcggcagaa

SEQ ID NO: 485370 - DNA, 25 bp, Homo sapien
tcccctctgcggcagaactaagatc

SEQ ID NO: 485371 - DNA, 25 bp, Homo sapien
tgggtccctcaaaccagtccgatcc

SEQ ID NO: 485372 - DNA, 25 bp, Homo sapien
ctgtggacggcaaacatcggcgctg

SEQ ID NO: 485373 - DNA, 25 bp, Homo sapien
tgtggacggcaaacatcggcgctgg

SEQ ID NO: 485374 - DNA, 25 bp, Homo sapien
ctcaaactcacactggaacggcttc

SEQ ID NO: 485375 - DNA, 25 bp, Homo sapien
ggcttatcggaggtgtggacgtgca

SEQ ID NO: 485376 - DNA, 25 bp, Homo sapien
ggtcgcagccctcaaactcacactg

SEQ ID NO: 485377 - DNA, 25 bp, Homo sapien
tcggaggtgtggacgtgcatgtgct

SEQ ID NO: 485378 - DNA, 25 bp, Homo sapien
gccagtgctgcaccggcgcctcggc

SEQ ID NO: 485379 - DNA, 25 bp, Homo sapien
ctcccaggccggctgaggtggtccg

SEQ ID NO: 485380 - DNA, 25 bp, Homo sapien
gtggtccgggccagtgctgcaccgg

SEQ ID NO: 485381 - DNA, 25 bp, Homo sapien
ggaccctcccaggccggctgaggtg

SEQ ID NO: 485382 - DNA, 25 bp, Homo sapien
ctgcaagacaaaagccgggaggggg

SEQ ID NO: 485383 - DNA, 25 bp, Homo sapien
gccccgggggcgtggacgactcata

SEQ ID NO: 485384 - DNA, 25 bp, Homo sapien
tggacgactcatagccggagctggc

SEQ ID NO: 485385 - DNA, 25 bp, Homo sapien
gcggccggggaggattcagagccct

SEQ ID NO: 485386 - DNA, 25 bp, Homo sapien
gggcgtggacgactcatagccggag

SEQ ID NO: 485387 - DNA, 25 bp, Homo sapien
gctctggggctcggcgctgggggac

SEQ ID NO: 485388 - DNA, 25 bp, Homo sapien
gctggggacaggttggagctgctct

SEQ ID NO: 485389 - DNA, 25 bp, Homo sapien
gccgccgctggggacaggttggagc

SEQ ID NO: 485390 - DNA, 25 bp, Homo sapien
gacaggttggagctgctctggggct

SEQ ID NO: 485391 - DNA, 25 bp, Homo sapien
gagcctccgccccggtgcaccgcgg

SEQ ID NO: 485392 - DNA, 25 bp, Homo sapien
cactgcccgagcctccgccccggtg

SEQ ID NO: 485393 - DNA, 25 bp, Homo sapien
gcctccgccccggtgcaccgcggac

SEQ ID NO: 485394 - DNA, 25 bp, Homo sapien
ctgcccgagcctccgccccggtgca

SEQ ID NO: 485395 - DNA, 25 bp, Homo sapien
aggccgctgtgacccccggctgtcc

SEQ ID NO: 485396 - DNA, 25 bp, Homo sapien
ggagaggccgctgtgacccccggct

SEQ ID NO: 485397 - DNA, 25 bp, Homo sapien
agaggccgctgtgacccccggctgt

SEQ ID NO: 485398 - DNA, 25 bp, Homo sapien
aggagaggccgctgtgacccccggc

SEQ ID NO: 485399 - DNA, 25 bp, Homo sapien
aaaatcagattcataattttaacaa

SEQ ID NO: 485400 - DNA, 25 bp, Homo sapien
cctcgctgctagctgcggggagggc

SEQ ID NO: 485401 - DNA, 25 bp, Homo sapien
tgatcacaaggtgccctcgctgcta

SEQ ID NO: 485402 - DNA, 25 bp, Homo sapien
catgatcacaaggtgccctcgctgc

SEQ ID NO: 485403 - DNA, 25 bp, Homo sapien
aagaacgtgggcatggagattagca

SEQ ID NO: 485404 - DNA, 25 bp, Homo sapien
acgcaatccggagttttacaaatgg

SEQ ID NO: 485405 - DNA, 25 bp, Homo sapien
gaagggagactttggcacggctcat

SEQ ID NO: 485406 - DNA, 25 bp, Homo sapien
ggaggagtccgctatgtacacagtt

SEQ ID NO: 485407 - DNA, 25 bp, Homo sapien
tatcttgtttgaaaactccgatcag

SEQ ID NO: 485408 - DNA, 25 bp, Homo sapien
tagagtatcttgtttgaaaactccg

SEQ ID NO: 485409 - DNA, 25 bp, Homo sapien
tcttccttagagtatcttgtttgaa

SEQ ID NO: 485410 - DNA, 25 bp, Homo sapien
cttgtttgaaaactccgatcagctc

SEQ ID NO: 485411 - DNA, 25 bp, Homo sapien
gctctgcgtctccacggcggtgctg

SEQ ID NO: 485412 - DNA, 25 bp, Homo sapien
tggaggtgtcgctgccaccacccaa

SEQ ID NO: 485413 - DNA, 25 bp, Homo sapien
cgatcctctggaggtgtcgctgcca

SEQ ID NO: 485414 - DNA, 25 bp, Homo sapien
cacggcggtgctgcgcgatcctctg

SEQ ID NO: 485415 - DNA, 25 bp, Homo sapien
gcggcggctagcagaaaccgtgctc

SEQ ID NO: 485416 - DNA, 25 bp, Homo sapien
tgcgggcagctacccgcagcgcagc

SEQ ID NO: 485417 - DNA, 25 bp, Homo sapien
aagttcaagttgacggcggcggcta

SEQ ID NO: 485418 - DNA, 25 bp, Homo sapien
aaccgtgctccagccgcggcaggtt

SEQ ID NO: 485419 - DNA, 25 bp, Homo sapien
gctgataccgatgccggttatcatc

SEQ ID NO: 485420 - DNA, 25 bp, Homo sapien
cagggaaagctgataccgatgccgg

SEQ ID NO: 485421 - DNA, 25 bp, Homo sapien
aagctgataccgatgccggttatca

SEQ ID NO: 485422 - DNA, 25 bp, Homo sapien
ggaaagctgataccgatgccggtta

SEQ ID NO: 485423 - DNA, 25 bp, Homo sapien
tcctagccaaccctgggacgcagaa

SEQ ID NO: 485424 - DNA, 25 bp, Homo sapien
aaccacttgagactgaaaacatccg

SEQ ID NO: 485425 - DNA, 25 bp, Homo sapien
cttgatctcagggttttgtgcggaa

SEQ ID NO: 485426 - DNA, 25 bp, Homo sapien
ccgagcctccggtacagtctgtgat

SEQ ID NO: 485427 - DNA, 25 bp, Homo sapien
gcatcctctcgcttcgtggggcagg

SEQ ID NO: 485428 - DNA, 25 bp, Homo sapien
gcagctgcgctgagcatcctctcgc

SEQ ID NO: 485429 - DNA, 25 bp, Homo sapien
agcatcctctcgcttcgtggggcag

SEQ ID NO: 485430 - DNA, 25 bp, Homo sapien
gagcatcctctcgcttcgtggggca

SEQ ID NO: 485431 - DNA, 25 bp, Homo sapien
cgttaactgcgatgattatctctga

SEQ ID NO: 485432 - DNA, 25 bp, Homo sapien
cagtcgctgagcgttaactgcgatg

SEQ ID NO: 485433 - DNA, 25 bp, Homo sapien
gctgagcgttaactgcgatgattat

SEQ ID NO: 485434 - DNA, 25 bp, Homo sapien
cggagcagcccagtcgctgagcgtt

SEQ ID NO: 485435 - DNA, 25 bp, Homo sapien
gctcattaaatccaccattcacagg

SEQ ID NO: 485436 - DNA, 25 bp, Homo sapien
agaaccgccggccaacgccacacaa

SEQ ID NO: 485437 - DNA, 25 bp, Homo sapien
caacgccacacaaacgctcattaaa

SEQ ID NO: 485438 - DNA, 25 bp, Homo sapien
ccaccattcacaggcgggccggcgg

SEQ ID NO: 485439 - DNA, 25 bp, Homo sapien
gcgccctccctccaggtcagcgcat

SEQ ID NO: 485440 - DNA, 25 bp, Homo sapien
gccctccctccaggtcagcgcatct

SEQ ID NO: 485441 - DNA, 25 bp, Homo sapien
ttcgcgccctccctccaggtcagcg

SEQ ID NO: 485442 - DNA, 25 bp, Homo sapien
ctttcgcgccctccctccaggtcag

SEQ ID NO: 485443 - DNA, 25 bp, Homo sapien
agaaagtcaagttgtcacgggtctc

SEQ ID NO: 485444 - DNA, 25 bp, Homo sapien
gtcaagttgtcacgggtctctttcg

SEQ ID NO: 485445 - DNA, 25 bp, Homo sapien
gggctgtgggctctcgagctcacac

SEQ ID NO: 485446 - DNA, 25 bp, Homo sapien
tcacacgggcctctcgaagaggaga

SEQ ID NO: 485447 - DNA, 25 bp, Homo sapien
aatgtgcagcggttgggtatgaaaa

SEQ ID NO: 485448 - DNA, 25 bp, Homo sapien
gaccaaagcatgtttgatctttgca

SEQ ID NO: 485449 - DNA, 25 bp, Homo sapien
caagaaggaagtatacattgtgaag

SEQ ID NO: 485450 - DNA, 25 bp, Homo sapien
cccagaaagtggtgcaatttgttaa

SEQ ID NO: 485451 - DNA, 25 bp, Homo sapien
tgccattctctggtgttgtgtctga

SEQ ID NO: 485452 - DNA, 25 bp, Homo sapien
agcgccagacattcagccggatcca

SEQ ID NO: 485453 - DNA, 25 bp, Homo sapien
gctacacgcgattatttcagtgcca

SEQ ID NO: 485454 - DNA, 25 bp, Homo sapien
tgtgtctgaaaaacgggtggccaag

SEQ ID NO: 485455 - DNA, 25 bp, Homo sapien
gaatgactgctacttggaccacaga

SEQ ID NO: 485456 - DNA, 25 bp, Homo sapien
agaacctatcgtctattgcaggaat

SEQ ID NO: 485457 - DNA, 25 bp, Homo sapien
cgctaccgaacagaacctatcgtct

SEQ ID NO: 485458 - DNA, 25 bp, Homo sapien
gaaacaggacattcccgctaccgaa

SEQ ID NO: 485459 - DNA, 25 bp, Homo sapien
gattcagggcagaagcgatgcattt

SEQ ID NO: 485460 - DNA, 25 bp, Homo sapien
cgaaagcaagcgttccagccaagtg

SEQ ID NO: 485461 - DNA, 25 bp, Homo sapien
ttaaaacagcgcaaagagcccggct

SEQ ID NO: 485462 - DNA, 25 bp, Homo sapien
gagcccggctctttagggaaatgcg

SEQ ID NO: 485463 - DNA, 25 bp, Homo sapien
tgttcaatggaagcgagaaatagct

SEQ ID NO: 485464 - DNA, 25 bp, Homo sapien
agctggcgtttgttggctgttgtgt

SEQ ID NO: 485465 - DNA, 25 bp, Homo sapien
gagaaatagctcaacgcgctcttaa

SEQ ID NO: 485466 - DNA, 25 bp, Homo sapien
tgagcaacagactgttcaatggaag

SEQ ID NO: 485467 - DNA, 25 bp, Homo sapien
catccgtttggcttttagtgaaggc

SEQ ID NO: 485468 - DNA, 25 bp, Homo sapien
gaactaattcatccatgtgggaact

SEQ ID NO: 485469 - DNA, 25 bp, Homo sapien
caagatctgaggtgcatccgggctt

SEQ ID NO: 485470 - DNA, 25 bp, Homo sapien
cagactgggaagtgtaagaaacaca

SEQ ID NO: 485471 - DNA, 25 bp, Homo sapien
aaactgtgaagagcaacctctggat

SEQ ID NO: 485472 - DNA, 25 bp, Homo sapien
gctattaagaaacgactgatgacag

SEQ ID NO: 485473 - DNA, 25 bp, Homo sapien
cagagaaaaggcttggattccagct

SEQ ID NO: 485474 - DNA, 25 bp, Homo sapien
tgcatgccctctataacagtgtgga

SEQ ID NO: 485475 - DNA, 25 bp, Homo sapien
caccagttggtcgtagttgaccagc

SEQ ID NO: 485476 - DNA, 25 bp, Homo sapien
cgtagttgaccagctgtttggaatc

SEQ ID NO: 485477 - DNA, 25 bp, Homo sapien
ggtcgtagttgaccagctgtttgga

SEQ ID NO: 485478 - DNA, 25 bp, Homo sapien
tggatttcaccagttggtcgtagtt

SEQ ID NO: 485479 - DNA, 25 bp, Homo sapien
gcaatgatagcctctctggtcagca

SEQ ID NO: 485480 - DNA, 25 bp, Homo sapien
caccgtaccatgtgtggcatttggg

SEQ ID NO: 485481 - DNA, 25 bp, Homo sapien
tgctatgaagatcacacacgggtcc

SEQ ID NO: 485482 - DNA, 25 bp, Homo sapien
cacacgggtccagatgcatttcgtc

SEQ ID NO: 485483 - DNA, 25 bp, Homo sapien
ccctcatcgccccagtgagttgatt

SEQ ID NO: 485484 - DNA, 25 bp, Homo sapien
acccctcatcgccccagtgagttga

SEQ ID NO: 485485 - DNA, 25 bp, Homo sapien
cccctcatcgccccagtgagttgat

SEQ ID NO: 485486 - DNA, 25 bp, Homo sapien
tattcgttagctaacatcctgtaaa

SEQ ID NO: 485487 - DNA, 25 bp, Homo sapien
tctatattcgttagctaacatcctg

SEQ ID NO: 485488 - DNA, 25 bp, Homo sapien
taacatcctgtaaagaagacatttt

SEQ ID NO: 485489 - DNA, 25 bp, Homo sapien
atttcttctatattcgttagctaac

SEQ ID NO: 485490 - DNA, 25 bp, Homo sapien
tctgctctggagtaacactacgcta

SEQ ID NO: 485491 - DNA, 25 bp, Homo sapien
tacgctaagtgtaatcccggaaaca

SEQ ID NO: 485492 - DNA, 25 bp, Homo sapien
tgttaggagcaccaacgacagaggt

SEQ ID NO: 485493 - DNA, 25 bp, Homo sapien
tgatactggcctgcagaaacacttg

SEQ ID NO: 485494 - DNA, 25 bp, Homo sapien
tgtccccgcagaccgcccctctgct

SEQ ID NO: 485495 - DNA, 25 bp, Homo sapien
tgttgtccccgcagaccgcccctct

SEQ ID NO: 485496 - DNA, 25 bp, Homo sapien
cgcagaccgcccctctgctgacctc

SEQ ID NO: 485497 - DNA, 25 bp, Homo sapien
agaccgcccctctgctgacctctca

SEQ ID NO: 485498 - DNA, 25 bp, Homo sapien
ctgtcccgacccagaaccccgccat

SEQ ID NO: 485499 - DNA, 25 bp, Homo sapien
gcagcgaccagcggtgctgtcccga

SEQ ID NO: 485500 - DNA, 25 bp, Homo sapien
cgcccacgccgtccggcagcgacca

SEQ ID NO: 485501 - DNA, 25 bp, Homo sapien
ggccaccgcccacgccgtccggcag

SEQ ID NO: 485502 - DNA, 25 bp, Homo sapien
agggtccgcagcgccgcgctcagca

SEQ ID NO: 485503 - DNA, 25 bp, Homo sapien
tcagggtccgcagcgccgcgctcag

SEQ ID NO: 485504 - DNA, 25 bp, Homo sapien
gggtccgcagcgccgcgctcagcat

SEQ ID NO: 485505 - DNA, 25 bp, Homo sapien
cttcagggtccgcagcgccgcgctc

SEQ ID NO: 485506 - DNA, 25 bp, Homo sapien
gcactgtcttgaatagtacagaaca

SEQ ID NO: 485507 - DNA, 25 bp, Homo sapien
tcattaggatcatatcccactgaac

SEQ ID NO: 485508 - DNA, 25 bp, Homo sapien
cactgaaccaagattacgggacacc

SEQ ID NO: 485509 - DNA, 25 bp, Homo sapien
cgggacaccattaagcactgtcttg

SEQ ID NO: 485510 - DNA, 25 bp, Homo sapien
ggtgaagcgaccaacttagtctgaa

SEQ ID NO: 485511 - DNA, 25 bp, Homo sapien
tggcaaagatagcagggagcagaat

SEQ ID NO: 485512 - DNA, 25 bp, Homo sapien
taagtgcagccctcaagtgaagggt

SEQ ID NO: 485513 - DNA, 25 bp, Homo sapien
tgcacttgggacagtaggtataaac

SEQ ID NO: 485514 - DNA, 25 bp, Homo sapien
cgacatgcaatttctcctctattag

SEQ ID NO: 485515 - DNA, 25 bp, Homo sapien
ccgacatgcaatttctcctctatta

SEQ ID NO: 485516 - DNA, 25 bp, Homo sapien
gcaatttctcctctattagcaacaa

SEQ ID NO: 485517 - DNA, 25 bp, Homo sapien
atttctcctctattagcaacaagaa

SEQ ID NO: 485518 - DNA, 25 bp, Homo sapien
gtcttaatgcccatcttcttgcaag

SEQ ID NO: 485519 - DNA, 25 bp, Homo sapien
aacatcactgtggatggcaactgtc

SEQ ID NO: 485520 - DNA, 25 bp, Homo sapien
gtggatggcaactgtcttaatgccc

SEQ ID NO: 485521 - DNA, 25 bp, Homo sapien
agaactagcatcaacatcactgtgg

SEQ ID NO: 485522 - DNA, 25 bp, Homo sapien
tactaggctgtatcatcaaggtttg

SEQ ID NO: 485523 - DNA, 25 bp, Homo sapien
caatattgaattcacctaacgatgc

SEQ ID NO: 485524 - DNA, 25 bp, Homo sapien
tatactatataggtgtgtactaggc

SEQ ID NO: 485525 - DNA, 25 bp, Homo sapien
cattaactgatggaccctaccaaag

SEQ ID NO: 485526 - DNA, 25 bp, Homo sapien
aactattctccacaaatcttcccag

SEQ ID NO: 485527 - DNA, 25 bp, Homo sapien
aataataagcgtgctttcctagggc

SEQ ID NO: 485528 - DNA, 25 bp, Homo sapien
tcccagagaataataagcgtgcttt

SEQ ID NO: 485529 - DNA, 25 bp, Homo sapien
cataaactattctccacaaatcttc

SEQ ID NO: 485530 - DNA, 25 bp, Homo sapien
ccatttacctgatcattaccctcca

SEQ ID NO: 485531 - DNA, 25 bp, Homo sapien
catttacctgatcattaccctccag

SEQ ID NO: 485532 - DNA, 25 bp, Homo sapien
ttacctgatcattaccctccagttt

SEQ ID NO: 485533 - DNA, 25 bp, Homo sapien
atttacctgatcattaccctccagt

SEQ ID NO: 485534 - DNA, 25 bp, Homo sapien
taacattagaaggaaatctggaaca

SEQ ID NO: 485535 - DNA, 25 bp, Homo sapien
gatcagctctaaaactgcttaagga

SEQ ID NO: 485536 - DNA, 25 bp, Homo sapien
cattagttgctagcagatcagctct

SEQ ID NO: 485537 - DNA, 25 bp, Homo sapien
tctactgtcctggttcaagcctttc

SEQ ID NO: 485538 - DNA, 25 bp, Homo sapien
catgtaagggggagaatcagagccc

SEQ ID NO: 485539 - DNA, 25 bp, Homo sapien
cttccttggaattgaagcccatgta

SEQ ID NO: 485540 - DNA, 25 bp, Homo sapien
tagtcgaagaatgacccatctccag

SEQ ID NO: 485541 - DNA, 25 bp, Homo sapien
gggagatcaaatcacctactagtcg

SEQ ID NO: 485542 - DNA, 25 bp, Homo sapien
agcttcctggtatagttagctccca

SEQ ID NO: 485543 - DNA, 25 bp, Homo sapien
taatcatgaaaagcagttacggagc

SEQ ID NO: 485544 - DNA, 25 bp, Homo sapien
tagtatctatgcagacatcatggca

SEQ ID NO: 485545 - DNA, 25 bp, Homo sapien
caagaagttttccttagcacagtca

SEQ ID NO: 485546 - DNA, 25 bp, Homo sapien
cactccaaggatgatgtaatacgga

SEQ ID NO: 485547 - DNA, 25 bp, Homo sapien
tacggactagatgcactccttggct

SEQ ID NO: 485548 - DNA, 25 bp, Homo sapien
caatgcaagacactgggtagaacac

SEQ ID NO: 485549 - DNA, 25 bp, Homo sapien
tagcaacagcttacataacccggcc

SEQ ID NO: 485550 - DNA, 25 bp, Homo sapien
aggagctacggagaaagcagcagtc

SEQ ID NO: 485551 - DNA, 25 bp, Homo sapien
atccaggagctacggagaaagcagc

SEQ ID NO: 485552 - DNA, 25 bp, Homo sapien
gagtacatccaggagctacggagaa

SEQ ID NO: 485553 - DNA, 25 bp, Homo sapien
cacccagcctgataaagcgcgctga

SEQ ID NO: 485554 - DNA, 25 bp, Homo sapien
gccagggtagcccaatattttaata

SEQ ID NO: 485555 - DNA, 25 bp, Homo sapien
gcactcatgcccagttctaagcaag

SEQ ID NO: 485556 - DNA, 25 bp, Homo sapien
ttgggataattagagggactgaatg

SEQ ID NO: 485557 - DNA, 25 bp, Homo sapien
tctaagcaagctccccaggaagttg

SEQ ID NO: 485558 - DNA, 25 bp, Homo sapien
ggcatccatgttgaggtagctttta

SEQ ID NO: 485559 - DNA, 25 bp, Homo sapien
tgaaacagctgcagtagatagattc

SEQ ID NO: 485560 - DNA, 25 bp, Homo sapien
agtagatagattcattcagactcac

SEQ ID NO: 485561 - DNA, 25 bp, Homo sapien
tgcagtagatagattcattcagact

SEQ ID NO: 485562 - DNA, 25 bp, Homo sapien
cagctgcagtagatagattcattca

SEQ ID NO: 485563 - DNA, 25 bp, Homo sapien
ctttgatttccagtagcgaattcga

SEQ ID NO: 485564 - DNA, 25 bp, Homo sapien
cgaattcgaccacatttaactcatg

SEQ ID NO: 485565 - DNA, 25 bp, Homo sapien
cactgccagatgctacaaagccttt

SEQ ID NO: 485566 - DNA, 25 bp, Homo sapien
ggtgtgaaagctgaatccagcagcc

SEQ ID NO: 485567 - DNA, 25 bp, Homo sapien
gaaaggaatccataacctggatgta

SEQ ID NO: 485568 - DNA, 25 bp, Homo sapien
aaaggaatccataacctggatgtac

SEQ ID NO: 485569 - DNA, 25 bp, Homo sapien
tgtaactgaggaccaatgaccctgc

SEQ ID NO: 485570 - DNA, 25 bp, Homo sapien
tcaagtacacagataggatccaaac

SEQ ID NO: 485571 - DNA, 25 bp, Homo sapien
tttcaacgctgagcatcctgatgga

SEQ ID NO: 485572 - DNA, 25 bp, Homo sapien
tataacacatcatggactgcagcct

SEQ ID NO: 485573 - DNA, 25 bp, Homo sapien
tctctcaggttgagattcaactgct

SEQ ID NO: 485574 - DNA, 25 bp, Homo sapien
tcaactgctgaataaggtggcatat

SEQ ID NO: 485575 - DNA, 25 bp, Homo sapien
tggaactgaagaatgaacactagaa

SEQ ID NO: 485576 - DNA, 25 bp, Homo sapien
ggtggcatatgtgttcaactggatt

SEQ ID NO: 485577 - DNA, 25 bp, Homo sapien
cagcatctgctacgttgtcacattt

SEQ ID NO: 485578 - DNA, 25 bp, Homo sapien
aagggatggtcacctaaggtgacgc

SEQ ID NO: 485579 - DNA, 25 bp, Homo sapien
tcaacagcatctgctacgttgtcac

SEQ ID NO: 485580 - DNA, 25 bp, Homo sapien
tgacgctaacaaccgggcagaaagg

SEQ ID NO: 485581 - DNA, 25 bp, Homo sapien
caccaattaaaagcagatgtcacct

SEQ ID NO: 485582 - DNA, 25 bp, Homo sapien
ttttttcacccaatgcagtgatagg

SEQ ID NO: 485583 - DNA, 25 bp, Homo sapien
tttaattctaactggctgagaaact

SEQ ID NO: 485584 - DNA, 25 bp, Homo sapien
tacaactgctcaaggtagtgcttac

SEQ ID NO: 485585 - DNA, 25 bp, Homo sapien
caaaagacctcttcagttgtagacc

SEQ ID NO: 485586 - DNA, 25 bp, Homo sapien
gctgcaattatcatactgtcccata

SEQ ID NO: 485587 - DNA, 25 bp, Homo sapien
tgtacacaacactcaacagcctttg

SEQ ID NO: 485588 - DNA, 25 bp, Homo sapien
cagagttagtctgattttcctgaac

SEQ ID NO: 485589 - DNA, 25 bp, Homo sapien
caaaatctttctcgtggccatattc

SEQ ID NO: 485590 - DNA, 25 bp, Homo sapien
tgcttatggacaacacagacaagtg

SEQ ID NO: 485591 - DNA, 25 bp, Homo sapien
atttgtacagatacacaattgtttc

SEQ ID NO: 485592 - DNA, 25 bp, Homo sapien
tatacattccccatccattagcaga

SEQ ID NO: 485593 - DNA, 25 bp, Homo sapien
tcaataattccaaccagagccttca

SEQ ID NO: 485594 - DNA, 25 bp, Homo sapien
ctttctcaataattccaaccagagc

SEQ ID NO: 485595 - DNA, 25 bp, Homo sapien
caataattccaaccagagccttcat

SEQ ID NO: 485596 - DNA, 25 bp, Homo sapien
tctcaataattccaaccagagcctt

SEQ ID NO: 485597 - DNA, 25 bp, Homo sapien
tgtaaacaggtgcaagtggcctctg

SEQ ID NO: 485598 - DNA, 25 bp, Homo sapien
agattactggagagtaaccagccat

SEQ ID NO: 485599 - DNA, 25 bp, Homo sapien
gctaaagattactggagagtaacca

SEQ ID NO: 485600 - DNA, 25 bp, Homo sapien
ctgcttgtaaacaggtgcaagtggc

SEQ ID NO: 485601 - DNA, 25 bp, Homo sapien
cacacttagtgaactaagagtgaaa

SEQ ID NO: 485602 - DNA, 25 bp, Homo sapien
ggcaagagatcttttgtttagtccg

SEQ ID NO: 485603 - DNA, 25 bp, Homo sapien
tagtccgtcagatcagatattaaat

SEQ ID NO: 485604 - DNA, 25 bp, Homo sapien
ggtctcttgctgtaaatgcccaatg

SEQ ID NO: 485605 - DNA, 25 bp, Homo sapien
tcagggtaaacatctgcgtctggac

SEQ ID NO: 485606 - DNA, 25 bp, Homo sapien
tcaacacacggactaggagcagctt

SEQ ID NO: 485607 - DNA, 25 bp, Homo sapien
gaagtgtttctcaagccagtttgcc

SEQ ID NO: 485608 - DNA, 25 bp, Homo sapien
ttagcactgagatgggtcacacagc

SEQ ID NO: 485609 - DNA, 25 bp, Homo sapien
tagcctgttgcttggactgctctcc

SEQ ID NO: 485610 - DNA, 25 bp, Homo sapien
gagtagcctgttgcttggactgctc

SEQ ID NO: 485611 - DNA, 25 bp, Homo sapien
tgttgcttggactgctctcctggcc

SEQ ID NO: 485612 - DNA, 25 bp, Homo sapien
cagctgagtagcctgttgcttggac

SEQ ID NO: 485613 - DNA, 25 bp, Homo sapien
ttgctttcaatcttgtcgcccatgg

SEQ ID NO: 485614 - DNA, 25 bp, Homo sapien
caatgaaaacgacatcttctgctgc

SEQ ID NO: 485615 - DNA, 25 bp, Homo sapien
catgtgtgtcaggtccaatgaaaac

SEQ ID NO: 485616 - DNA, 25 bp, Homo sapien
tgtcgcccatggcttgaatagcatg

SEQ ID NO: 485617 - DNA, 25 bp, Homo sapien
tataatgcactggatcagacgatct

SEQ ID NO: 485618 - DNA, 25 bp, Homo sapien
aacatgtacttcctctcttataatg

SEQ ID NO: 485619 - DNA, 25 bp, Homo sapien
tattgctggtgaacagggcaaaaca

SEQ ID NO: 485620 - DNA, 25 bp, Homo sapien
gatcagacgatctacgaactcggta

SEQ ID NO: 485621 - DNA, 25 bp, Homo sapien
gtcatatattgcactactgtctcct

SEQ ID NO: 485622 - DNA, 25 bp, Homo sapien
tgtaaaattaataccataagtggaa

SEQ ID NO: 485623 - DNA, 25 bp, Homo sapien
actgtctcctccgattcatttaatg

SEQ ID NO: 485624 - DNA, 25 bp, Homo sapien
gcacaatgtctttagggcagtcata

SEQ ID NO: 485625 - DNA, 25 bp, Homo sapien
gagactcaacattaatcccatgagg

SEQ ID NO: 485626 - DNA, 25 bp, Homo sapien
tttcccttgcaattctgacagcttc

SEQ ID NO: 485627 - DNA, 25 bp, Homo sapien
caatttcccttgcaattctgacagc

SEQ ID NO: 485628 - DNA, 25 bp, Homo sapien
gcaattctgacagcttcttctgcat

SEQ ID NO: 485629 - DNA, 25 bp, Homo sapien
caattctgacagcttcttctgcatc

SEQ ID NO: 485630 - DNA, 25 bp, Homo sapien
gcaaatgttcctatgaagtactgat

SEQ ID NO: 485631 - DNA, 25 bp, Homo sapien
cagaatcagttctatatagtccagt

SEQ ID NO: 485632 - DNA, 25 bp, Homo sapien
ccagtgatttcaaaccatgaacaga

SEQ ID NO: 485633 - DNA, 25 bp, Homo sapien
ttaggcaatgaggaataccagtgat

SEQ ID NO: 485634 - DNA, 25 bp, Homo sapien
tgttggagtctatgatttatccaca

SEQ ID NO: 485635 - DNA, 25 bp, Homo sapien
cactatttctttggcagagaaagga

SEQ ID NO: 485636 - DNA, 25 bp, Homo sapien
tgcctgcctatttctctctacttag

SEQ ID NO: 485637 - DNA, 25 bp, Homo sapien
cctcagtctgtcatacacatatata

SEQ ID NO: 485638 - DNA, 25 bp, Homo sapien
aatacatcaccaaataacatatgag

SEQ ID NO: 485639 - DNA, 25 bp, Homo sapien
atacatcaccaaataacatatgagt

SEQ ID NO: 485640 - DNA, 25 bp, Homo sapien
atatatcactaggcttggcatggtg

SEQ ID NO: 485641 - DNA, 25 bp, Homo sapien
tgaaacagaatgataagcgttggct

SEQ ID NO: 485642 - DNA, 25 bp, Homo sapien
tggtttcgtaagtgtctggtatttc

SEQ ID NO: 485643 - DNA, 25 bp, Homo sapien
cagctgacatatgtttgaaacagaa

SEQ ID NO: 485644 - DNA, 25 bp, Homo sapien
tcttcagctgacatatgtttgaaac

SEQ ID NO: 485645 - DNA, 25 bp, Homo sapien
gaacctggctgatactaactcttaa

SEQ ID NO: 485646 - DNA, 25 bp, Homo sapien
atatgctgtcaccacaccatggaga

SEQ ID NO: 485647 - DNA, 25 bp, Homo sapien
gatttcaggcagtacatatgctgtc

SEQ ID NO: 485648 - DNA, 25 bp, Homo sapien
ttcttatgccaaatcgatttcaggc

SEQ ID NO: 485649 - DNA, 25 bp, Homo sapien
atcccaagcaatgcgcatgcctttc

SEQ ID NO: 485650 - DNA, 25 bp, Homo sapien
tcatcatcccaagcaatgcgcatgc

SEQ ID NO: 485651 - DNA, 25 bp, Homo sapien
agcaatgcgcatgcctttcccacca

SEQ ID NO: 485652 - DNA, 25 bp, Homo sapien
tcatcccaagcaatgcgcatgcctt

SEQ ID NO: 485653 - DNA, 25 bp, Homo sapien
tatcatcgccaaaactagaagcagc

SEQ ID NO: 485654 - DNA, 25 bp, Homo sapien
tctattagtagtctatcatcgccaa

SEQ ID NO: 485655 - DNA, 25 bp, Homo sapien
ctggatttctatatgacgaggatta

SEQ ID NO: 485656 - DNA, 25 bp, Homo sapien
gaagcagcttcttgagatgacaatc

SEQ ID NO: 485657 - DNA, 25 bp, Homo sapien
tcttctctgaattgagcactctctt

SEQ ID NO: 485658 - DNA, 25 bp, Homo sapien
cattaagccataaagcattcccatg

SEQ ID NO: 485659 - DNA, 25 bp, Homo sapien
ctctttcattaagccataaagcatt

SEQ ID NO: 485660 - DNA, 25 bp, Homo sapien
cattcccatgtttatcacctagaac

SEQ ID NO: 485661 - DNA, 25 bp, Homo sapien
ccaagtaattagcttcagcaccttc

SEQ ID NO: 485662 - DNA, 25 bp, Homo sapien
caccaagtaattagcttcagcacct

SEQ ID NO: 485663 - DNA, 25 bp, Homo sapien
tcagatcaacaccaagtaattagct

SEQ ID NO: 485664 - DNA, 25 bp, Homo sapien
tcaacaccaagtaattagcttcagc

SEQ ID NO: 485665 - DNA, 25 bp, Homo sapien
tgtttgtctacatttcggacaaaaa

SEQ ID NO: 485666 - DNA, 25 bp, Homo sapien
tctacatttcggacaaaaatcaagt

SEQ ID NO: 485667 - DNA, 25 bp, Homo sapien
aaaatgtttgtctacatttcggaca

SEQ ID NO: 485668 - DNA, 25 bp, Homo sapien
ttgtctacatttcggacaaaaatca

SEQ ID NO: 485669 - DNA, 25 bp, Homo sapien
gctcttcgagtctccgcatccaaaa

SEQ ID NO: 485670 - DNA, 25 bp, Homo sapien
tattttactgctctggcaagagcta

SEQ ID NO: 485671 - DNA, 25 bp, Homo sapien
cagaggaatattttactgctctggc

SEQ ID NO: 485672 - DNA, 25 bp, Homo sapien
tctggcaagagctacagcttgttct

SEQ ID NO: 485673 - DNA, 25 bp, Homo sapien
aagggtaaagtacagaggcatggag

SEQ ID NO: 485674 - DNA, 25 bp, Homo sapien
gacattgaactttagagggatacta

SEQ ID NO: 485675 - DNA, 25 bp, Homo sapien
gatactatccgtcattcctaacaga

SEQ ID NO: 485676 - DNA, 25 bp, Homo sapien
tcctaacagatgtcttagcacaagc

SEQ ID NO: 485677 - DNA, 25 bp, Homo sapien
gaggtgccggttcctctgggagcct

SEQ ID NO: 485678 - DNA, 25 bp, Homo sapien
ggttacaacgccagtcgcttcctga

SEQ ID NO: 485679 - DNA, 25 bp, Homo sapien
gattctcaacgtcctcactgtggca

SEQ ID NO: 485680 - DNA, 25 bp, Homo sapien
cctgagatttggttagaactaagga

SEQ ID NO: 485681 - DNA, 25 bp, Homo sapien
atgaagacacggctcccatgaagca

SEQ ID NO: 485682 - DNA, 25 bp, Homo sapien
ggcatgaagacacggctcccatgaa

SEQ ID NO: 485683 - DNA, 25 bp, Homo sapien
agacacggctcccatgaagcacagg

SEQ ID NO: 485684 - DNA, 25 bp, Homo sapien
caggcatgaagacacggctcccatg

SEQ ID NO: 485685 - DNA, 25 bp, Homo sapien
caaagttcaaggacacaaggacggt

SEQ ID NO: 485686 - DNA, 25 bp, Homo sapien
cctcctgcacccatggtagggctaa

SEQ ID NO: 485687 - DNA, 25 bp, Homo sapien
tagggctaaccagggcccacaggag

SEQ ID NO: 485688 - DNA, 25 bp, Homo sapien
cgccacggcacagcgaacagaaaac

SEQ ID NO: 485689 - DNA, 25 bp, Homo sapien
tgaagaaagccatagcacgcaaaag

SEQ ID NO: 485690 - DNA, 25 bp, Homo sapien
aagaggcagaaatccacctggagcc

SEQ ID NO: 485691 - DNA, 25 bp, Homo sapien
gaggttctaccaaaagatcagcagt

SEQ ID NO: 485692 - DNA, 25 bp, Homo sapien
gggataattgtacccaagtcaggag

SEQ ID NO: 485693 - DNA, 25 bp, Homo sapien
ggaatgcaacctcaagataagactg

SEQ ID NO: 485694 - DNA, 25 bp, Homo sapien
taaccacgaagataagaggccacca

SEQ ID NO: 485695 - DNA, 25 bp, Homo sapien
tactactgtccataggcatgtggca

SEQ ID NO: 485696 - DNA, 25 bp, Homo sapien
tctagaactgcaaccgggctgtgta

SEQ ID NO: 485697 - DNA, 25 bp, Homo sapien
gactcatggagagggagtgtctaca

SEQ ID NO: 485698 - DNA, 25 bp, Homo sapien
gagtagttctccatctagctgtcca

SEQ ID NO: 485699 - DNA, 25 bp, Homo sapien
aaagagaggatccacgtaccaggca

SEQ ID NO: 485700 - DNA, 25 bp, Homo sapien
gaagtagaccctgtgtgtagctgaa

SEQ ID NO: 485701 - DNA, 25 bp, Homo sapien
cacaaaccaaggcatatcctggttg

SEQ ID NO: 485702 - DNA, 25 bp, Homo sapien
caaaccaaggcatatcctggttgga

SEQ ID NO: 485703 - DNA, 25 bp, Homo sapien
caaggcatatcctggttggaaaaaa

SEQ ID NO: 485704 - DNA, 25 bp, Homo sapien
accaaggcatatcctggttggaaaa

SEQ ID NO: 485705 - DNA, 25 bp, Homo sapien
cagatgcagaactagtaggtaagga

SEQ ID NO: 485706 - DNA, 25 bp, Homo sapien
taaggagggctaactgtaacgcaca

SEQ ID NO: 485707 - DNA, 25 bp, Homo sapien
taagagaaacatatccagtagacct

SEQ ID NO: 485708 - DNA, 25 bp, Homo sapien
gttacttataggagaggataaccac

SEQ ID NO: 485709 - DNA, 25 bp, Homo sapien
ttccttccatggtaaaagtagattc

SEQ ID NO: 485710 - DNA, 25 bp, Homo sapien
ctttccttccatggtaaaagtagat

SEQ ID NO: 485711 - DNA, 25 bp, Homo sapien
ttccatggtaaaagtagattcctcc

SEQ ID NO: 485712 - DNA, 25 bp, Homo sapien
ccttccatggtaaaagtagattcct

SEQ ID NO: 485713 - DNA, 25 bp, Homo sapien
catatctgtataccaaaaacttctt

SEQ ID NO: 485714 - DNA, 25 bp, Homo sapien
taataagggagggtataacacatcc

SEQ ID NO: 485715 - DNA, 25 bp, Homo sapien
aactcagacagcaatatcatttaca

SEQ ID NO: 485716 - DNA, 25 bp, Homo sapien
caaaaccccaaatctaagtgcctga

SEQ ID NO: 485717 - DNA, 25 bp, Homo sapien
ttgtcagaatcctcccactatgtta

SEQ ID NO: 485718 - DNA, 25 bp, Homo sapien
catctgacttgaccaacattcttgt

SEQ ID NO: 485719 - DNA, 25 bp, Homo sapien
aaaatagtgtccctagaaagacttg

SEQ ID NO: 485720 - DNA, 25 bp, Homo sapien
tgcgatatgtttcctctgacctaaa

SEQ ID NO: 485721 - DNA, 25 bp, Homo sapien
ggagtaaagggccactaggcctgca

SEQ ID NO: 485722 - DNA, 25 bp, Homo sapien
tatagtccctaaattggaagacagt

SEQ ID NO: 485723 - DNA, 25 bp, Homo sapien
cagtaatatgttaatgtccaaatcc

SEQ ID NO: 485724 - DNA, 25 bp, Homo sapien
taggcctgcaacttactctgaaatg

SEQ ID NO: 485725 - DNA, 25 bp, Homo sapien
tttcactaacctgtcctgacaagca

SEQ ID NO: 485726 - DNA, 25 bp, Homo sapien
ccacttgcatgctttcactaacctg

SEQ ID NO: 485727 - DNA, 25 bp, Homo sapien
acaagcagccagattagtgtaatct

SEQ ID NO: 485728 - DNA, 25 bp, Homo sapien
gcagccagattagtgtaatcttgca

SEQ ID NO: 485729 - DNA, 25 bp, Homo sapien
taggtccaggccagtaatgcattct

SEQ ID NO: 485730 - DNA, 25 bp, Homo sapien
gaatatcagcttgtttgtgcctgag

SEQ ID NO: 485731 - DNA, 25 bp, Homo sapien
gtagcccttagcaacacggatcatt

SEQ ID NO: 485732 - DNA, 25 bp, Homo sapien
gcccagccgttgatgcgaatatcag

SEQ ID NO: 485733 - DNA, 25 bp, Homo sapien
aatataaatcagcacaagtaaggtt

SEQ ID NO: 485734 - DNA, 25 bp, Homo sapien
tattttcaacatatggtatttacca

SEQ ID NO: 485735 - DNA, 25 bp, Homo sapien
gtcttttacgctagacaacttagaa

SEQ ID NO: 485736 - DNA, 25 bp, Homo sapien
tattattgtcttttacgctagacaa

SEQ ID NO: 485737 - DNA, 25 bp, Homo sapien
agatggtaaaccaaaagacttgtag

SEQ ID NO: 485738 - DNA, 25 bp, Homo sapien
accaggtagatgtaacggttcttgg

SEQ ID NO: 485739 - DNA, 25 bp, Homo sapien
cttggtactgagacaatctcccaat

SEQ ID NO: 485740 - DNA, 25 bp, Homo sapien
acaatctcccaatagatggtaaacc

SEQ ID NO: 485741 - DNA, 25 bp, Homo sapien
tttcttgaacaccacaaaatactga

SEQ ID NO: 485742 - DNA, 25 bp, Homo sapien
gaaagaattgggaacactgtaagct

SEQ ID NO: 485743 - DNA, 25 bp, Homo sapien
atttatatcatcagatgtccccagg

SEQ ID NO: 485744 - DNA, 25 bp, Homo sapien
gactatatagcagggttggactcga

SEQ ID NO: 485745 - DNA, 25 bp, Homo sapien
gaatattcacagatggtacagcctt

SEQ ID NO: 485746 - DNA, 25 bp, Homo sapien
gctttgaacacagcatggagtctcc

SEQ ID NO: 485747 - DNA, 25 bp, Homo sapien
caccatcttcatgccagtaatcaaa

SEQ ID NO: 485748 - DNA, 25 bp, Homo sapien
tggagtctccaagcacagaaagggt

SEQ ID NO: 485749 - DNA, 25 bp, Homo sapien
aagatttggtgggatgaagactgta

SEQ ID NO: 485750 - DNA, 25 bp, Homo sapien
caggtctcacgtttgaaaattgcaa

SEQ ID NO: 485751 - DNA, 25 bp, Homo sapien
aaattgcaaaaacttgcgagggcaa

SEQ ID NO: 485752 - DNA, 25 bp, Homo sapien
tatcacttgtactttcaacaggtct

SEQ ID NO: 485753 - DNA, 25 bp, Homo sapien
agctgtcaacgcatctactgtcctg

SEQ ID NO: 485754 - DNA, 25 bp, Homo sapien
gcagtaagcagaacatttaaggcat

SEQ ID NO: 485755 - DNA, 25 bp, Homo sapien
tagacaaagcttagtgtgcactctc

SEQ ID NO: 485756 - DNA, 25 bp, Homo sapien
tgacaggccaaaagtgatcaccatg

SEQ ID NO: 485757 - DNA, 25 bp, Homo sapien
aagtgacagcccaatctgattaaat

SEQ ID NO: 485758 - DNA, 25 bp, Homo sapien
agtgacagcccaatctgattaaatg

SEQ ID NO: 485759 - DNA, 25 bp, Homo sapien
gaagtcagatcaagtctccattcct

SEQ ID NO: 485760 - DNA, 25 bp, Homo sapien
cagtaccacagtggactctgtgaaa

SEQ ID NO: 485761 - DNA, 25 bp, Homo sapien
caagcacctctgtacgagattctca

SEQ ID NO: 485762 - DNA, 25 bp, Homo sapien
tgtaccacagtatgaaaactctgct

SEQ ID NO: 485763 - DNA, 25 bp, Homo sapien
aatatacttggctttctattttctg

SEQ ID NO: 485764 - DNA, 25 bp, Homo sapien
catatttcaggacataaactgatgt

SEQ ID NO: 485765 - DNA, 25 bp, Homo sapien
aaacatatttcaggacataaactga

SEQ ID NO: 485766 - DNA, 25 bp, Homo sapien
gaaatatacttggctttctattttc

SEQ ID NO: 485767 - DNA, 25 bp, Homo sapien
ctggttggatgccactgtccactcg

SEQ ID NO: 485768 - DNA, 25 bp, Homo sapien
ttcctggttggatgccactgtccac

SEQ ID NO: 485769 - DNA, 25 bp, Homo sapien
cctggttggatgccactgtccactc

SEQ ID NO: 485770 - DNA, 25 bp, Homo sapien
tcctggttggatgccactgtccact

SEQ ID NO: 485771 - DNA, 25 bp, Homo sapien
tttgaaatcataggatcataataaa

SEQ ID NO: 485772 - DNA, 25 bp, Homo sapien
aaatcataggatcataataaatgct

SEQ ID NO: 485773 - DNA, 25 bp, Homo sapien
ttttgaaatcataggatcataataa

SEQ ID NO: 485774 - DNA, 25 bp, Homo sapien
tcataggatcataataaatgctaat

SEQ ID NO: 485775 - DNA, 25 bp, Homo sapien
ttctatcagagccatatgtgattag

SEQ ID NO: 485776 - DNA, 25 bp, Homo sapien
gaataacatagttatccagtgcatc

SEQ ID NO: 485777 - DNA, 25 bp, Homo sapien
cctcagttctatcagagccatatgt

SEQ ID NO: 485778 - DNA, 25 bp, Homo sapien
tccagtgcatctgccattctcttca

SEQ ID NO: 485779 - DNA, 25 bp, Homo sapien
gagttgattatcacctctcgaagta

SEQ ID NO: 485780 - DNA, 25 bp, Homo sapien
agtaatgcaatattatgtgtaacac

SEQ ID NO: 485781 - DNA, 25 bp, Homo sapien
ctccttttacaaagcgtgagttgat

SEQ ID NO: 485782 - DNA, 25 bp, Homo sapien
gaaatttagtgctgatgtctccttt

SEQ ID NO: 485783 - DNA, 25 bp, Homo sapien
tttaaaatatctaagacctgattta

SEQ ID NO: 485784 - DNA, 25 bp, Homo sapien
aaaatatctaagacctgatttaggg

SEQ ID NO: 485785 - DNA, 25 bp, Homo sapien
atatctaagacctgatttaggggga

SEQ ID NO: 485786 - DNA, 25 bp, Homo sapien
tatctaagacctgatttagggggaa

SEQ ID NO: 485787 - DNA, 25 bp, Homo sapien
tcaagggaaaccgcttttcaacatc

SEQ ID NO: 485788 - DNA, 25 bp, Homo sapien
atcaagggaaaccgcttttcaacat

SEQ ID NO: 485789 - DNA, 25 bp, Homo sapien
cgtatataccatcagcaagggagga

SEQ ID NO: 485790 - DNA, 25 bp, Homo sapien
aactattagtgcatggactcaggca

SEQ ID NO: 485791 - DNA, 25 bp, Homo sapien
gggtactcagttccaacaggctctg

SEQ ID NO: 485792 - DNA, 25 bp, Homo sapien
tcatggtggttcacaatcaaagtcc

SEQ ID NO: 485793 - DNA, 25 bp, Homo sapien
tgatgatgctattgccaataactgg

SEQ ID NO: 485794 - DNA, 25 bp, Homo sapien
tgatgctattgccaataactggttc

SEQ ID NO: 485795 - DNA, 25 bp, Homo sapien
gaatgccacaaacaatgatgatgct

SEQ ID NO: 485796 - DNA, 25 bp, Homo sapien
ctcttaactggaatgccacaaacaa

SEQ ID NO: 485797 - DNA, 25 bp, Homo sapien
ctgaagtggaagataaggtaattga

SEQ ID NO: 485798 - DNA, 25 bp, Homo sapien
gataaggtaattgatccttcctttc

SEQ ID NO: 485799 - DNA, 25 bp, Homo sapien
ttgtactctagttttcagtatttta

SEQ ID NO: 485800 - DNA, 25 bp, Homo sapien
ttcctgaagtggaagataaggtaat

SEQ ID NO: 485801 - DNA, 25 bp, Homo sapien
ggtggatctcgctatgacgcccaga

SEQ ID NO: 485802 - DNA, 25 bp, Homo sapien
ggtgatatgttaacaggatatagga

SEQ ID NO: 485803 - DNA, 25 bp, Homo sapien
tcagggtgatatgttaacaggatat

SEQ ID NO: 485804 - DNA, 25 bp, Homo sapien
ggcttcactgtgcaagacctctaaa

SEQ ID NO: 485805 - DNA, 25 bp, Homo sapien
ctatgtctggtttaataacaggcat

SEQ ID NO: 485806 - DNA, 25 bp, Homo sapien
gctatgtctggtttaataacaggca

SEQ ID NO: 485807 - DNA, 25 bp, Homo sapien
tacggtatgaactttatcatgcaat

SEQ ID NO: 485808 - DNA, 25 bp, Homo sapien
gacccattgtttgatgctactacgg

SEQ ID NO: 485809 - DNA, 25 bp, Homo sapien
tgtttgatgctactacggtatgaac

SEQ ID NO: 485810 - DNA, 25 bp, Homo sapien
cgagaacactgacccattgtttgat

SEQ ID NO: 485811 - DNA, 25 bp, Homo sapien
cttattatgcatccatatgtagtta

SEQ ID NO: 485812 - DNA, 25 bp, Homo sapien
tttcttattatgcatccatatgtag

SEQ ID NO: 485813 - DNA, 25 bp, Homo sapien
tatgcatccatatgtagttattatt

SEQ ID NO: 485814 - DNA, 25 bp, Homo sapien
tattatgcatccatatgtagttatt

SEQ ID NO: 485815 - DNA, 25 bp, Homo sapien
tgcagctgtgcacccaattagacaa

SEQ ID NO: 485816 - DNA, 25 bp, Homo sapien
ttcaaaagtagagtgcgatacccac

SEQ ID NO: 485817 - DNA, 25 bp, Homo sapien
caattttccagagtacacgggcagg

SEQ ID NO: 485818 - DNA, 25 bp, Homo sapien
tcattcaagagggtacaggtgcagc

SEQ ID NO: 485819 - DNA, 25 bp, Homo sapien
catgactgcttctagcaggccctct

SEQ ID NO: 485820 - DNA, 25 bp, Homo sapien
tgcatgactgcttctagcaggccct

SEQ ID NO: 485821 - DNA, 25 bp, Homo sapien
ctgcatgactgcttctagcaggccc

SEQ ID NO: 485822 - DNA, 25 bp, Homo sapien
tgactgcttctagcaggccctcttc

SEQ ID NO: 485823 - DNA, 25 bp, Homo sapien
caggtgaataagtcaccaactctcc

SEQ ID NO: 485824 - DNA, 25 bp, Homo sapien
ggtgaataagtcaccaactctccct

SEQ ID NO: 485825 - DNA, 25 bp, Homo sapien
gtgaataagtcaccaactctccctt

SEQ ID NO: 485826 - DNA, 25 bp, Homo sapien
gaataagtcaccaactctcccttca

SEQ ID NO: 485827 - DNA, 25 bp, Homo sapien
gccccaaggaaatttcaggcattcc

SEQ ID NO: 485828 - DNA, 25 bp, Homo sapien
ctctgccccaaggaaatttcaggca

SEQ ID NO: 485829 - DNA, 25 bp, Homo sapien
cattccatgacagtttggtaaatta

SEQ ID NO: 485830 - DNA, 25 bp, Homo sapien
aggcattccatgacagtttggtaaa

SEQ ID NO: 485831 - DNA, 25 bp, Homo sapien
tgagtcacttgaccttccctgggtg

SEQ ID NO: 485832 - DNA, 25 bp, Homo sapien
tccagatggttgctaacattcagag

SEQ ID NO: 485833 - DNA, 25 bp, Homo sapien
tcatcccctcttgctgttaagtgag

SEQ ID NO: 485834 - DNA, 25 bp, Homo sapien
tgaggagttgccctaggacagccaa

SEQ ID NO: 485835 - DNA, 25 bp, Homo sapien
cacaatgcatgaacgggattctggg

SEQ ID NO: 485836 - DNA, 25 bp, Homo sapien
taattagaatcacggacacagaaga

SEQ ID NO: 485837 - DNA, 25 bp, Homo sapien
gattctgggagagatcacaaccccc

SEQ ID NO: 485838 - DNA, 25 bp, Homo sapien
ccttgatgatggagcacgtcagacc

SEQ ID NO: 485839 - DNA, 25 bp, Homo sapien
tgtgcccattacatctcaaggaaga

SEQ ID NO: 485840 - DNA, 25 bp, Homo sapien
tatagcaatagtacacggagttccc

SEQ ID NO: 485841 - DNA, 25 bp, Homo sapien
tacagggcactatcagctgtaagcc

SEQ ID NO: 485842 - DNA, 25 bp, Homo sapien
gcatgcacttgtacagagtatacag

SEQ ID NO: 485843 - DNA, 25 bp, Homo sapien
tcatggtgatcagatctagagccct

SEQ ID NO: 485844 - DNA, 25 bp, Homo sapien
ttctgcccagtgtaggatgctcagc

SEQ ID NO: 485845 - DNA, 25 bp, Homo sapien
gcaggctatagcttggacaatgaat

SEQ ID NO: 485846 - DNA, 25 bp, Homo sapien
caggagcgtgggacatgtgaataca

SEQ ID NO: 485847 - DNA, 25 bp, Homo sapien
acagtggtacaatcttggcccactg

SEQ ID NO: 485848 - DNA, 25 bp, Homo sapien
cagcctccgcctcccaggttcacgc

SEQ ID NO: 485849 - DNA, 25 bp, Homo sapien
agtacagtggtacaatcttggccca

SEQ ID NO: 485850 - DNA, 25 bp, Homo sapien
aggttcacgcaattctcctacctca

SEQ ID NO: 485851 - DNA, 25 bp, Homo sapien
tgagtctacgttctccccatgccag

SEQ ID NO: 485852 - DNA, 25 bp, Homo sapien
ggccctcgtagcaaagcctcaggaa

SEQ ID NO: 485853 - DNA, 25 bp, Homo sapien
agcgccgcgaggcagatctaagcat

SEQ ID NO: 485854 - DNA, 25 bp, Homo sapien
cctcaggaagactgcgtgtgagtct

SEQ ID NO: 485855 - DNA, 25 bp, Homo sapien
ctgcaattagacaagtaatgcatat

SEQ ID NO: 485856 - DNA, 25 bp, Homo sapien
tagacaagtaatgcatataaattcc

SEQ ID NO: 485857 - DNA, 25 bp, Homo sapien
caagtaatgcatataaattccagtg

SEQ ID NO: 485858 - DNA, 25 bp, Homo sapien
gtaatgcatataaattccagtgaca

SEQ ID NO: 485859 - DNA, 25 bp, Homo sapien
caaacagccttctaactcgaaacct

SEQ ID NO: 485860 - DNA, 25 bp, Homo sapien
ttcaagtgatttccgtaagtaacaa

SEQ ID NO: 485861 - DNA, 25 bp, Homo sapien
cgaaacctatctggacatgctacat

SEQ ID NO: 485862 - DNA, 25 bp, Homo sapien
tgaggcttcaagtgatttccgtaag

SEQ ID NO: 485863 - DNA, 25 bp, Homo sapien
tcatctctggggagaggtgaaggac

SEQ ID NO: 485864 - DNA, 25 bp, Homo sapien
tgaagaaagacagaaaactgatctc

SEQ ID NO: 485865 - DNA, 25 bp, Homo sapien
aagacagaaaactgatctcaagttc

SEQ ID NO: 485866 - DNA, 25 bp, Homo sapien
aagaaagacagaaaactgatctcaa

SEQ ID NO: 485867 - DNA, 25 bp, Homo sapien
gaaagacagaaaactgatctcaagt

SEQ ID NO: 485868 - DNA, 25 bp, Homo sapien
ggtcacatttagtttcgacccatca

SEQ ID NO: 485869 - DNA, 25 bp, Homo sapien
tgagtgccatcaacgctgacagaca

SEQ ID NO: 485870 - DNA, 25 bp, Homo sapien
caataagggcgaagccaggttccac

SEQ ID NO: 485871 - DNA, 25 bp, Homo sapien
caggttccacgtgctggtcacattt

SEQ ID NO: 485872 - DNA, 25 bp, Homo sapien
ttgaggaggccctctaaggaaatcc

SEQ ID NO: 485873 - DNA, 25 bp, Homo sapien
ctaaggaaatccttacaacactcac

SEQ ID NO: 485874 - DNA, 25 bp, Homo sapien
ctgacaaggattctggacttgagga

SEQ ID NO: 485875 - DNA, 25 bp, Homo sapien
tgctgacaaggattctggacttgag

SEQ ID NO: 485876 - DNA, 25 bp, Homo sapien
catgaaccttcttggattgtctgaa

SEQ ID NO: 485877 - DNA, 25 bp, Homo sapien
tctgggttccaaggcatctcctcaa

SEQ ID NO: 485878 - DNA, 25 bp, Homo sapien
caagttttactagcctaacactacg

SEQ ID NO: 485879 - DNA, 25 bp, Homo sapien
gcaggacattttatattgaggcgaa

SEQ ID NO: 485880 - DNA, 25 bp, Homo sapien
aagctgtgggaccagtgactgtcca

SEQ ID NO: 485881 - DNA, 25 bp, Homo sapien
gctgtgggaccagtgactgtccatc

SEQ ID NO: 485882 - DNA, 25 bp, Homo sapien
agctgtgggaccagtgactgtccat

SEQ ID NO: 485883 - DNA, 25 bp, Homo sapien
agacagaagcgtgatctcggatggc

SEQ ID NO: 485884 - DNA, 25 bp, Homo sapien
gacagaagcgtgatctcggatggct

SEQ ID NO: 485885 - DNA, 25 bp, Homo sapien
ctctcaactgtgttgggcactgctg

SEQ ID NO: 485886 - DNA, 25 bp, Homo sapien
ctcaactgtgttgggcactgctggc

SEQ ID NO: 485887 - DNA, 25 bp, Homo sapien
gctggctgaattaagacccaccttc

SEQ ID NO: 485888 - DNA, 25 bp, Homo sapien
gggcactgctggctgaattaagacc

SEQ ID NO: 485889 - DNA, 25 bp, Homo sapien
taccaagaaactgaatgctcatgtt

SEQ ID NO: 485890 - DNA, 25 bp, Homo sapien
agaaactgaatgctcatgtttccac

SEQ ID NO: 485891 - DNA, 25 bp, Homo sapien
aaactgaatgctcatgtttccacct

SEQ ID NO: 485892 - DNA, 25 bp, Homo sapien
caagaaactgaatgctcatgtttcc

SEQ ID NO: 485893 - DNA, 25 bp, Homo sapien
tccatggaagacagcttagttcagc

SEQ ID NO: 485894 - DNA, 25 bp, Homo sapien
tttagtgctctacacaccagccaga

SEQ ID NO: 485895 - DNA, 25 bp, Homo sapien
cctgctgatggaacaggccctgaac

SEQ ID NO: 485896 - DNA, 25 bp, Homo sapien
tgagagccaggaaatctgtataccc

SEQ ID NO: 485897 - DNA, 25 bp, Homo sapien
ccagaccagaaatttcccttatatc

SEQ ID NO: 485898 - DNA, 25 bp, Homo sapien
tttcccttatatcatagatgtctct

SEQ ID NO: 485899 - DNA, 25 bp, Homo sapien
ctccagaccagaaatttcccttata

SEQ ID NO: 485900 - DNA, 25 bp, Homo sapien
cagaccagaaatttcccttatatca

SEQ ID NO: 485901 - DNA, 25 bp, Homo sapien
cacactctaatatgtctcaccagca

SEQ ID NO: 485902 - DNA, 25 bp, Homo sapien
cactgtgaagtgatgcttatcacac

SEQ ID NO: 485903 - DNA, 25 bp, Homo sapien
cttctagaataaggtattgagctgc

SEQ ID NO: 485904 - DNA, 25 bp, Homo sapien
gaacagaagaacttcacagatgtca

SEQ ID NO: 485905 - DNA, 25 bp, Homo sapien
ttagtggtctccatagacaatcaaa

SEQ ID NO: 485906 - DNA, 25 bp, Homo sapien
tggtctccatagacaatcaaaccag

SEQ ID NO: 485907 - DNA, 25 bp, Homo sapien
cttcaattctacacaggatgagaga

SEQ ID NO: 485908 - DNA, 25 bp, Homo sapien
tctccatagacaatcaaaccagcca

SEQ ID NO: 485909 - DNA, 25 bp, Homo sapien
acaggaatgtgccaccacgtccggc

SEQ ID NO: 485910 - DNA, 25 bp, Homo sapien
ggaatgtgccaccacgtccggctag

SEQ ID NO: 485911 - DNA, 25 bp, Homo sapien
acaacctccgtctcctgggttcaag

SEQ ID NO: 485912 - DNA, 25 bp, Homo sapien
caatggcgcaatctttgctcaccac

SEQ ID NO: 485913 - DNA, 25 bp, Homo sapien
ctgctttgcctgggtagctctgaag

SEQ ID NO: 485914 - DNA, 25 bp, Homo sapien
ctgaaggcttaataagccttcctct

SEQ ID NO: 485915 - DNA, 25 bp, Homo sapien
tcctctttgccaaaagtacctgctt

SEQ ID NO: 485916 - DNA, 25 bp, Homo sapien
atcaatccttttgatacgtacaaga

SEQ ID NO: 485917 - DNA, 25 bp, Homo sapien
ttgatacgtacaagaaaggccaagg

SEQ ID NO: 485918 - DNA, 25 bp, Homo sapien
tttgatacgtacaagaaaggccaag

SEQ ID NO: 485919 - DNA, 25 bp, Homo sapien
aatccttttgatacgtacaagaaag

SEQ ID NO: 485920 - DNA, 25 bp, Homo sapien
gctccgcaaccactgtgttgtctgt

SEQ ID NO: 485921 - DNA, 25 bp, Homo sapien
gtgctccgcaaccactgtgttgtct

SEQ ID NO: 485922 - DNA, 25 bp, Homo sapien
ccccaggtgctccgcaaccactgtg

SEQ ID NO: 485923 - DNA, 25 bp, Homo sapien
caggtgctccgcaaccactgtgttg

SEQ ID NO: 485924 - DNA, 25 bp, Homo sapien
ggaaacgacgcaagaaccatgaagt

SEQ ID NO: 485925 - DNA, 25 bp, Homo sapien
gaaacgacgcaagaaccatgaagtc

SEQ ID NO: 485926 - DNA, 25 bp, Homo sapien
tggaaacgacgcaagaaccatgaag

SEQ ID NO: 485927 - DNA, 25 bp, Homo sapien
gtggaaacgacgcaagaaccatgaa

SEQ ID NO: 485928 - DNA, 25 bp, Homo sapien
tagccaggtgtgcccatctcgagga

SEQ ID NO: 485929 - DNA, 25 bp, Homo sapien
tctcgaggaagcccactctattttt

SEQ ID NO: 485930 - DNA, 25 bp, Homo sapien
gtgttcaccccgatagccaggtgtg

SEQ ID NO: 485931 - DNA, 25 bp, Homo sapien
gccaggtgtgcccatctcgaggaag

SEQ ID NO: 485932 - DNA, 25 bp, Homo sapien
agttcagctggcggatgagctgatt

SEQ ID NO: 485933 - DNA, 25 bp, Homo sapien
ttcagctggcggatgagctgattga

SEQ ID NO: 485934 - DNA, 25 bp, Homo sapien
ctagttcagctggcggatgagctga

SEQ ID NO: 485935 - DNA, 25 bp, Homo sapien
tcagctggcggatgagctgattgac

SEQ ID NO: 485936 - DNA, 25 bp, Homo sapien
cccaaggatagaagatgcacatgga

SEQ ID NO: 485937 - DNA, 25 bp, Homo sapien
taaacccaaggatagaagatgcaca

SEQ ID NO: 485938 - DNA, 25 bp, Homo sapien
caaggatagaagatgcacatggaat

SEQ ID NO: 485939 - DNA, 25 bp, Homo sapien
aacccaaggatagaagatgcacatg

SEQ ID NO: 485940 - DNA, 25 bp, Homo sapien
gaagcaccgccattgggaagatcca

SEQ ID NO: 485941 - DNA, 25 bp, Homo sapien
cagagaaaactctaccgatgggcaa

SEQ ID NO: 485942 - DNA, 25 bp, Homo sapien
tagttggcctgcacacgagaagcac

SEQ ID NO: 485943 - DNA, 25 bp, Homo sapien
tatcaagtatccaaaaaatccaggc

SEQ ID NO: 485944 - DNA, 25 bp, Homo sapien
tccagggacttacagacccagaaag

SEQ ID NO: 485945 - DNA, 25 bp, Homo sapien
caggcaaatagagaccaccccaaag

SEQ ID NO: 485946 - DNA, 25 bp, Homo sapien
tcctcaatttagtaaagaacttgga

SEQ ID NO: 485947 - DNA, 25 bp, Homo sapien
tgccttaaaacatcccagggccaga

SEQ ID NO: 485948 - DNA, 25 bp, Homo sapien
tcagggctctggtctgacccactga

SEQ ID NO: 485949 - DNA, 25 bp, Homo sapien
tgaccacaggccacaatggcgacag

SEQ ID NO: 485950 - DNA, 25 bp, Homo sapien
gcgacagaccgctcctcagaggatt

SEQ ID NO: 485951 - DNA, 25 bp, Homo sapien
caagactaggttgttgaagacagac

SEQ ID NO: 485952 - DNA, 25 bp, Homo sapien
tggtgcatgcagagtcaaattgtgt

SEQ ID NO: 485953 - DNA, 25 bp, Homo sapien
gaaggttctggtgcatgcagagtca

SEQ ID NO: 485954 - DNA, 25 bp, Homo sapien
attgtgtgtttctatccctctgaac

SEQ ID NO: 485955 - DNA, 25 bp, Homo sapien
ttgtgtgtttctatccctctgaacc

SEQ ID NO: 485956 - DNA, 25 bp, Homo sapien
cagcagtggctcctaccgaggtgct

SEQ ID NO: 485957 - DNA, 25 bp, Homo sapien
gtgcagaggcgaccagaacacatca

SEQ ID NO: 485958 - DNA, 25 bp, Homo sapien
gaaatttaagtcgtctcaggcctat

SEQ ID NO: 485959 - DNA, 25 bp, Homo sapien
tcaccagaagcactgggcagctaat

SEQ ID NO: 485960 - DNA, 25 bp, Homo sapien
cagggcatgttaatagctaatgtga

SEQ ID NO: 485961 - DNA, 25 bp, Homo sapien
ttactatagcactttccactaactt

SEQ ID NO: 485962 - DNA, 25 bp, Homo sapien
tctagagtagtgttgcctgatggaa

SEQ ID NO: 485963 - DNA, 25 bp, Homo sapien
tgatggaattctaaggaacattact

SEQ ID NO: 485964 - DNA, 25 bp, Homo sapien
tgaaattgcataaaccaggaggtct

SEQ ID NO: 485965 - DNA, 25 bp, Homo sapien
tggacagagccttaggaaacagccc

SEQ ID NO: 485966 - DNA, 25 bp, Homo sapien
gaatgacagtaacaccccaaaggac

SEQ ID NO: 485967 - DNA, 25 bp, Homo sapien
gaggtcttaaagcagggttccctga

SEQ ID NO: 485968 - DNA, 25 bp, Homo sapien
tatcccaagggcaacattttgcagc

SEQ ID NO: 485969 - DNA, 25 bp, Homo sapien
tattaagagtgcaccgctttggcca

SEQ ID NO: 485970 - DNA, 25 bp, Homo sapien
caatgacacaaagctgagttgcgca

SEQ ID NO: 485971 - DNA, 25 bp, Homo sapien
ggccattatttcacaaccgagttaa

SEQ ID NO: 485972 - DNA, 25 bp, Homo sapien
aaccgagagctttcaatcccaggcc

SEQ ID NO: 485973 - DNA, 25 bp, Homo sapien
ggccgcagcaccttctgccaagctt

SEQ ID NO: 485974 - DNA, 25 bp, Homo sapien
agtgttacaaatccaaaagagcttg

SEQ ID NO: 485975 - DNA, 25 bp, Homo sapien
aaaagagcttgtacaaaccgagagc

SEQ ID NO: 485976 - DNA, 25 bp, Homo sapien
aaaacttctgaaatgggacctctga

SEQ ID NO: 485977 - DNA, 25 bp, Homo sapien
tgcccaggtgctttatggattacaa

SEQ ID NO: 485978 - DNA, 25 bp, Homo sapien
ggacctctgattgaactctgcccag

SEQ ID NO: 485979 - DNA, 25 bp, Homo sapien
catctaagcaatctaagcagcccct

SEQ ID NO: 485980 - DNA, 25 bp, Homo sapien
cacaattccagggtgctgacactat

SEQ ID NO: 485981 - DNA, 25 bp, Homo sapien
caatgcaaggtgtgactctgagcgg

SEQ ID NO: 485982 - DNA, 25 bp, Homo sapien
actgcattgcagttccataagggaa

SEQ ID NO: 485983 - DNA, 25 bp, Homo sapien
tctgagcggatcctgggccagaaaa

SEQ ID NO: 485984 - DNA, 25 bp, Homo sapien
gattatcgagtaaaaccatatggag

SEQ ID NO: 485985 - DNA, 25 bp, Homo sapien
aaatgtagccacaggcgagaaagca

SEQ ID NO: 485986 - DNA, 25 bp, Homo sapien
ttgatgcagagatagaaatgtagcc

SEQ ID NO: 485987 - DNA, 25 bp, Homo sapien
gaagatggtggataaaggattatcg

SEQ ID NO: 485988 - DNA, 25 bp, Homo sapien
taactcaaagcctcctgtgggcatc

SEQ ID NO: 485989 - DNA, 25 bp, Homo sapien
actcaaagcctcctgtgggcatcat

SEQ ID NO: 485990 - DNA, 25 bp, Homo sapien
ctgctgtaactcaaagcctcctgtg

SEQ ID NO: 485991 - DNA, 25 bp, Homo sapien
tgtaactcaaagcctcctgtgggca

SEQ ID NO: 485992 - DNA, 25 bp, Homo sapien
cctctccgtgaataaatctatgagc

SEQ ID NO: 485993 - DNA, 25 bp, Homo sapien
aaatctatgagccacaatttggtct

SEQ ID NO: 485994 - DNA, 25 bp, Homo sapien
tctatgagccacaatttggtctatc

SEQ ID NO: 485995 - DNA, 25 bp, Homo sapien
tatgagccacaatttggtctatcca

SEQ ID NO: 485996 - DNA, 25 bp, Homo sapien
ccaagagcggctgcactacgtatca

SEQ ID NO: 485997 - DNA, 25 bp, Homo sapien
aaatggttctcaattgctgcacaca

SEQ ID NO: 485998 - DNA, 25 bp, Homo sapien
cgtatcagtaagttaagacaatggg

SEQ ID NO: 485999 - DNA, 25 bp, Homo sapien
tattcatgactgaaaacgttggctt

SEQ ID NO: 486000 - DNA, 25 bp, Homo sapien
catcggggaacgcagaacactgctt

SEQ ID NO: 486001 - DNA, 25 bp, Homo sapien
tctgcggcaagtctggttaagatat

SEQ ID NO: 486002 - DNA, 25 bp, Homo sapien
gtctggttaagatattcaccttgta

SEQ ID NO: 486003 - DNA, 25 bp, Homo sapien
taaatttgttcaattctgcggcaag

SEQ ID NO: 486004 - DNA, 25 bp, Homo sapien
ggaacttttgctgtgtgaaccctac

SEQ ID NO: 486005 - DNA, 25 bp, Homo sapien
taagtgacgtgcctctggtccaagg

SEQ ID NO: 486006 - DNA, 25 bp, Homo sapien
tagaagttgcgctaagagccgacga

SEQ ID NO: 486007 - DNA, 25 bp, Homo sapien
tttagaacttattgccaggcccacc

SEQ ID NO: 486008 - DNA, 25 bp, Homo sapien
gcatcttgtcaaataaactgcttga

SEQ ID NO: 486009 - DNA, 25 bp, Homo sapien
ggcacaggagtgcttgttggattct

SEQ ID NO: 486010 - DNA, 25 bp, Homo sapien
tgttaacaaatgcatggatctctgt

SEQ ID NO: 486011 - DNA, 25 bp, Homo sapien
catgctgtgagatacaatctgaggt

SEQ ID NO: 486012 - DNA, 25 bp, Homo sapien
ctgctgctagtacattaccagagaa

SEQ ID NO: 486013 - DNA, 25 bp, Homo sapien
ggagatgtaaaggatgactgcacag

SEQ ID NO: 486014 - DNA, 25 bp, Homo sapien
catgaaaatgatggcaaaggcctaa

SEQ ID NO: 486015 - DNA, 25 bp, Homo sapien
aattggagatgtaaaggatgactgc

SEQ ID NO: 486016 - DNA, 25 bp, Homo sapien
gagtggatgagatttacagtaacag

SEQ ID NO: 486017 - DNA, 25 bp, Homo sapien
taggcagatctctacagacagactc

SEQ ID NO: 486018 - DNA, 25 bp, Homo sapien
agaataggcagatctctacagacag

SEQ ID NO: 486019 - DNA, 25 bp, Homo sapien
tctctacagacagactcgaggttgc

SEQ ID NO: 486020 - DNA, 25 bp, Homo sapien
gcagatctctacagacagactcgag

SEQ ID NO: 486021 - DNA, 25 bp, Homo sapien
catggcttcaatcacacaaatttct

SEQ ID NO: 486022 - DNA, 25 bp, Homo sapien
ttcatggcttcaatcacacaaattt

SEQ ID NO: 486023 - DNA, 25 bp, Homo sapien
ttttcatggcttcaatcacacaaat

SEQ ID NO: 486024 - DNA, 25 bp, Homo sapien
tcatggcttcaatcacacaaatttc

SEQ ID NO: 486025 - DNA, 25 bp, Homo sapien
cagaacacggccagccttgcgcttc

SEQ ID NO: 486026 - DNA, 25 bp, Homo sapien
acggccagccttgcgcttcccatca

SEQ ID NO: 486027 - DNA, 25 bp, Homo sapien
acacggccagccttgcgcttcccat

SEQ ID NO: 486028 - DNA, 25 bp, Homo sapien
agaacacggccagccttgcgcttcc

SEQ ID NO: 486029 - DNA, 25 bp, Homo sapien
tctctgggaggaaaagtggcctcgc

SEQ ID NO: 486030 - DNA, 25 bp, Homo sapien
gccctactagaggacgcagtgttag

SEQ ID NO: 486031 - DNA, 25 bp, Homo sapien
tgcttggactgaaaaggctgctttc

SEQ ID NO: 486032 - DNA, 25 bp, Homo sapien
cagtgttagtgatgcagcgatgacc

SEQ ID NO: 486033 - DNA, 25 bp, Homo sapien
tggctggcctgagggctactctccg

SEQ ID NO: 486034 - DNA, 25 bp, Homo sapien
gcaccctcaggtctaggcaggctct

SEQ ID NO: 486035 - DNA, 25 bp, Homo sapien
gagcatttgcgctgtggcctgcgct

SEQ ID NO: 486036 - DNA, 25 bp, Homo sapien
tcaggtctaggcaggctcttcactg

SEQ ID NO: 486037 - DNA, 25 bp, Homo sapien
tagtaaccagaaccaagaggcggca

SEQ ID NO: 486038 - DNA, 25 bp, Homo sapien
accaagaggcggcaggctcctaatc

SEQ ID NO: 486039 - DNA, 25 bp, Homo sapien
ggctcctaatccatttctaaaaatg

SEQ ID NO: 486040 - DNA, 25 bp, Homo sapien
gggagagtaagaattagtaaccaga

SEQ ID NO: 486041 - DNA, 25 bp, Homo sapien
agctccacgagcagatccccttctc

SEQ ID NO: 486042 - DNA, 25 bp, Homo sapien
cagcttgacagtgcacagatttcac

SEQ ID NO: 486043 - DNA, 25 bp, Homo sapien
ccagcttgacagtgcacagatttca

SEQ ID NO: 486044 - DNA, 25 bp, Homo sapien
attccagctccacgagcagatcccc

SEQ ID NO: 486045 - DNA, 25 bp, Homo sapien
acgacgtaaacgtagctgcacaggg

SEQ ID NO: 486046 - DNA, 25 bp, Homo sapien
tcctgtataatgcttgaatcaattg

SEQ ID NO: 486047 - DNA, 25 bp, Homo sapien
gaatcaattgtgtgtgaaagcatca

SEQ ID NO: 486048 - DNA, 25 bp, Homo sapien
ctgtggaataaatgacgacgtaaac

SEQ ID NO: 486049 - DNA, 25 bp, Homo sapien
tgacactagggaatctcacagcaga

SEQ ID NO: 486050 - DNA, 25 bp, Homo sapien
taattttgacactagggaatctcac

SEQ ID NO: 486051 - DNA, 25 bp, Homo sapien
cagcagaagtacaaatcatatgtac

SEQ ID NO: 486052 - DNA, 25 bp, Homo sapien
tgatttaattttgacactagggaat

SEQ ID NO: 486053 - DNA, 25 bp, Homo sapien
gctggtagtctactggcagagcctg

SEQ ID NO: 486054 - DNA, 25 bp, Homo sapien
catttgcagtctctggtccttagga

SEQ ID NO: 486055 - DNA, 25 bp, Homo sapien
ggaagttttgaaaatcagcaccagg

SEQ ID NO: 486056 - DNA, 25 bp, Homo sapien
gagcctgtcgcctatgtgtacattg

SEQ ID NO: 486057 - DNA, 25 bp, Homo sapien
ctgagcgcccggacttcaagtggaa

SEQ ID NO: 486058 - DNA, 25 bp, Homo sapien
taattttagcaaggcacgaagtacc

SEQ ID NO: 486059 - DNA, 25 bp, Homo sapien
cacaaaaaggctacgctgggtctca

SEQ ID NO: 486060 - DNA, 25 bp, Homo sapien
gattcaactcggtgcacggctcttg

SEQ ID NO: 486061 - DNA, 25 bp, Homo sapien
cagggcaagcatgctgtatatcaga

SEQ ID NO: 486062 - DNA, 25 bp, Homo sapien
cacggctgggtagaatttgtagaaa

SEQ ID NO: 486063 - DNA, 25 bp, Homo sapien
tatactgattctggcctgtaacccc

SEQ ID NO: 486064 - DNA, 25 bp, Homo sapien
tgtagaaaagatccacagggcaagc

SEQ ID NO: 486065 - DNA, 25 bp, Homo sapien
cagtgcttcgtgtacagcagggcca

SEQ ID NO: 486066 - DNA, 25 bp, Homo sapien
tctacgcggtagacgagcggatgct

SEQ ID NO: 486067 - DNA, 25 bp, Homo sapien
tgaatctgccggaaaggaaccaatc

SEQ ID NO: 486068 - DNA, 25 bp, Homo sapien
ggatgacttcgagagttgcccggcc

SEQ ID NO: 486069 - DNA, 25 bp, Homo sapien
gactgaagacaggctattctctgga

SEQ ID NO: 486070 - DNA, 25 bp, Homo sapien
cgtgcagcctattcgctgcactaac

SEQ ID NO: 486071 - DNA, 25 bp, Homo sapien
tactgtgtgagttgtgcaattcaca

SEQ ID NO: 486072 - DNA, 25 bp, Homo sapien
gacatttctgaagcgagcgtcttcg

SEQ ID NO: 486073 - DNA, 25 bp, Homo sapien
cattctgctgcggttctgagaggca

SEQ ID NO: 486074 - DNA, 25 bp, Homo sapien
tgaagacacagtaacatgtggctct

SEQ ID NO: 486075 - DNA, 25 bp, Homo sapien
aaagaggagcccgacattttctcag

SEQ ID NO: 486076 - DNA, 25 bp, Homo sapien
ttctcagccagaatgaatcacaggc

SEQ ID NO: 486077 - DNA, 25 bp, Homo sapien
tcctttccatacttgaagcagacat

SEQ ID NO: 486078 - DNA, 25 bp, Homo sapien
tcttgggattttccagtgattcctt

SEQ ID NO: 486079 - DNA, 25 bp, Homo sapien
tgtttgcatagagctcgttccctgg

SEQ ID NO: 486080 - DNA, 25 bp, Homo sapien
cgctcctgctgccgtgcctggaatt

SEQ ID NO: 486081 - DNA, 25 bp, Homo sapien
aggaggcagcaggggctggcagcac

SEQ ID NO: 486082 - DNA, 25 bp, Homo sapien
caggaggcagcaggggctggcagca

SEQ ID NO: 486083 - DNA, 25 bp, Homo sapien
ggccacggcagatgtgactggagcc

SEQ ID NO: 486084 - DNA, 25 bp, Homo sapien
gactggagcctggtatgagggcagc

SEQ ID NO: 486085 - DNA, 25 bp, Homo sapien
ttctagattcaggaggccacggcag

SEQ ID NO: 486086 - DNA, 25 bp, Homo sapien
cttctagattcaggaggccacggca

SEQ ID NO: 486087 - DNA, 25 bp, Homo sapien
aaagcaagaaaaggtgcagtcgaga

SEQ ID NO: 486088 - DNA, 25 bp, Homo sapien
gctcagcctcgcaacttggcatgga

SEQ ID NO: 486089 - DNA, 25 bp, Homo sapien
aggtgcagtcgagagacctagaaga

SEQ ID NO: 486090 - DNA, 25 bp, Homo sapien
tggcatggagggttttagttgttaa

SEQ ID NO: 486091 - DNA, 25 bp, Homo sapien
cttgaccctgctgccaagagatgtc

SEQ ID NO: 486092 - DNA, 25 bp, Homo sapien
ccagcacaaatctgtagaaatgctt

SEQ ID NO: 486093 - DNA, 25 bp, Homo sapien
tgagtgtaagggaagccagcacaaa

SEQ ID NO: 486094 - DNA, 25 bp, Homo sapien
gatgtctcgttcttgtcctgtttta

SEQ ID NO: 486095 - DNA, 25 bp, Homo sapien
tttaacttcctattcttacatattc

SEQ ID NO: 486096 - DNA, 25 bp, Homo sapien
cttacatattctcatccttctagaa

SEQ ID NO: 486097 - DNA, 25 bp, Homo sapien
atccttctagaatattctgtcagca

SEQ ID NO: 486098 - DNA, 25 bp, Homo sapien
ctagaatattctgtcagcaaaccac

SEQ ID NO: 486099 - DNA, 25 bp, Homo sapien
gtgggcaactgtccatctcaagacc

SEQ ID NO: 486100 - DNA, 25 bp, Homo sapien
tcaggccaggcaatgtccatgaagc

SEQ ID NO: 486101 - DNA, 25 bp, Homo sapien
tgtccatctcaagacctgggaaata

SEQ ID NO: 486102 - DNA, 25 bp, Homo sapien
ggaagggtgggcaactgtccatctc

SEQ ID NO: 486103 - DNA, 25 bp, Homo sapien
tccaggggcagtgcccaacctgttg

SEQ ID NO: 486104 - DNA, 25 bp, Homo sapien
agtgcccaacctgttgggggctgca

SEQ ID NO: 486105 - DNA, 25 bp, Homo sapien
gttgggggctgcatccaagtcaccc

SEQ ID NO: 486106 - DNA, 25 bp, Homo sapien
tccaagtcacccacacaaaattcat

SEQ ID NO: 486107 - DNA, 25 bp, Homo sapien
ggctcacggtgagagacatggtacc

SEQ ID NO: 486108 - DNA, 25 bp, Homo sapien
gacatggtaccagaaggatggtgtt

SEQ ID NO: 486109 - DNA, 25 bp, Homo sapien
tgcctctagggctcacggtgagaga

SEQ ID NO: 486110 - DNA, 25 bp, Homo sapien
gggacctcggcagccgcaaggccag

SEQ ID NO: 486111 - DNA, 25 bp, Homo sapien
gccagtatcgccttatcaaatgaat

SEQ ID NO: 486112 - DNA, 25 bp, Homo sapien
tcagagtcaactttgtgatcagggc

SEQ ID NO: 486113 - DNA, 25 bp, Homo sapien
cagggaggtgctctctccattggca

SEQ ID NO: 486114 - DNA, 25 bp, Homo sapien
cagtgtttgagattagagctgtaga

SEQ ID NO: 486115 - DNA, 25 bp, Homo sapien
ttcgcagccctctttagaacatcct

SEQ ID NO: 486116 - DNA, 25 bp, Homo sapien
tgtagtgcagccatgcttgaagagg

SEQ ID NO: 486117 - DNA, 25 bp, Homo sapien
caaggaaaggtgacagtaagaggac

SEQ ID NO: 486118 - DNA, 25 bp, Homo sapien
gaggacagaaacacgaaatattcgc

SEQ ID NO: 486119 - DNA, 25 bp, Homo sapien
aaacgcgtcctccattgccccgcgc

SEQ ID NO: 486120 - DNA, 25 bp, Homo sapien
gcggtaaaagccaggaaccgcctca

SEQ ID NO: 486121 - DNA, 25 bp, Homo sapien
tgccagaacgggcagagggcggtaa

SEQ ID NO: 486122 - DNA, 25 bp, Homo sapien
ggccacgggcgcgattgccagaacg

SEQ ID NO: 486123 - DNA, 25 bp, Homo sapien
ctggggcgtcgctccctgcgcggcg

SEQ ID NO: 486124 - DNA, 25 bp, Homo sapien
gcgtcgctccctgcgcggcgtccgg

SEQ ID NO: 486125 - DNA, 25 bp, Homo sapien
tccctgcgcggcgtccgggtcgagg

SEQ ID NO: 486126 - DNA, 25 bp, Homo sapien
gggcgtcgctccctgcgcggcgtcc

SEQ ID NO: 486127 - DNA, 25 bp, Homo sapien
cccggctgccggcaggtgaggcgct

SEQ ID NO: 486128 - DNA, 25 bp, Homo sapien
ccctccccgacagccccggctgccg

SEQ ID NO: 486129 - DNA, 25 bp, Homo sapien
tgccctccccgacagccccggctgc

SEQ ID NO: 486130 - DNA, 25 bp, Homo sapien
cctgccctccccgacagccccggct

SEQ ID NO: 486131 - DNA, 25 bp, Homo sapien
gactcggtatcagggctgtgtgcat

SEQ ID NO: 486132 - DNA, 25 bp, Homo sapien
tccccaagcttgtggagtcgtctgt

SEQ ID NO: 486133 - DNA, 25 bp, Homo sapien
gtccatttgatgtggcgtgtcccca

SEQ ID NO: 486134 - DNA, 25 bp, Homo sapien
actagatggcggtctggactcggta

SEQ ID NO: 486135 - DNA, 25 bp, Homo sapien
cccctctattggacgttacttgcaa

SEQ ID NO: 486136 - DNA, 25 bp, Homo sapien
tcccctctattggacgttacttgca

SEQ ID NO: 486137 - DNA, 25 bp, Homo sapien
cttcccctctattggacgttacttg

SEQ ID NO: 486138 - DNA, 25 bp, Homo sapien
cctctattggacgttacttgcaatg

SEQ ID NO: 486139 - DNA, 25 bp, Homo sapien
tccagcatttccatcgtagctgttt

SEQ ID NO: 486140 - DNA, 25 bp, Homo sapien
cagtgattaatttgattgatatttc

SEQ ID NO: 486141 - DNA, 25 bp, Homo sapien
agcatttccatcgtagctgttttct

SEQ ID NO: 486142 - DNA, 25 bp, Homo sapien
tcaggaagtctttgatctgtgcaga

SEQ ID NO: 486143 - DNA, 25 bp, Homo sapien
ttccccataggaagaaattgactct

SEQ ID NO: 486144 - DNA, 25 bp, Homo sapien
tctatcaaatggagccacattcggg

SEQ ID NO: 486145 - DNA, 25 bp, Homo sapien
caagccatgctttaggcaagagcag

SEQ ID NO: 486146 - DNA, 25 bp, Homo sapien
ggtgaagagggcaacacatctgtgt

SEQ ID NO: 486147 - DNA, 25 bp, Homo sapien
ggagcagagctcttcatctgcaggg

SEQ ID NO: 486148 - DNA, 25 bp, Homo sapien
gatttctgagctcccttgttctcct

SEQ ID NO: 486149 - DNA, 25 bp, Homo sapien
tcttcatctgcagggagcatttccc

SEQ ID NO: 486150 - DNA, 25 bp, Homo sapien
tgttctccttcttcaagggagcaga

SEQ ID NO: 486151 - DNA, 25 bp, Homo sapien
tatttcagggaaacaaaagtcagtc

SEQ ID NO: 486152 - DNA, 25 bp, Homo sapien
tgtcagtgtaggtagtgctggtccc

SEQ ID NO: 486153 - DNA, 25 bp, Homo sapien
ggtccctggtctgcatgtcaaggca

SEQ ID NO: 486154 - DNA, 25 bp, Homo sapien
ctgagactactgtggatgagatacc

SEQ ID NO: 486155 - DNA, 25 bp, Homo sapien
gacccgtgttttagaccagcaagcc

SEQ ID NO: 486156 - DNA, 25 bp, Homo sapien
catgacgtgccagttttgagcggtg

SEQ ID NO: 486157 - DNA, 25 bp, Homo sapien
taaatggatcacatctgctggcact

SEQ ID NO: 486158 - DNA, 25 bp, Homo sapien
gaagcacggcttggtcgttccagct

SEQ ID NO: 486159 - DNA, 25 bp, Homo sapien
aacgaacacgtggagttgagagacc

SEQ ID NO: 486160 - DNA, 25 bp, Homo sapien
gatacggattccagtccagagggag

SEQ ID NO: 486161 - DNA, 25 bp, Homo sapien
ccagagggagcaacggatcggattc

SEQ ID NO: 486162 - DNA, 25 bp, Homo sapien
tcccggacaggaagaagtggagttc

SEQ ID NO: 486163 - DNA, 25 bp, Homo sapien
aaatgttactgaacattataaccgg

SEQ ID NO: 486164 - DNA, 25 bp, Homo sapien
cattataaccggttgagccatttta

SEQ ID NO: 486165 - DNA, 25 bp, Homo sapien
ataaccggttgagccattttatcag

SEQ ID NO: 486166 - DNA, 25 bp, Homo sapien
tactgaacattataaccggttgagc

SEQ ID NO: 486167 - DNA, 25 bp, Homo sapien
agagcgaaggggaaggtgccgccca

SEQ ID NO: 486168 - DNA, 25 bp, Homo sapien
tgtaattgcacagcgctctaggaac

SEQ ID NO: 486169 - DNA, 25 bp, Homo sapien
gaatccagtaccaacaatggccaga

SEQ ID NO: 486170 - DNA, 25 bp, Homo sapien
tgagcacccatatctcagaagctgg

SEQ ID NO: 486171 - DNA, 25 bp, Homo sapien
tactgtgaagcatcgtcctgccagg

SEQ ID NO: 486172 - DNA, 25 bp, Homo sapien
ggagaagattcccatctgtcaccat

SEQ ID NO: 486173 - DNA, 25 bp, Homo sapien
gctcccaaggtaaggcatggattct

SEQ ID NO: 486174 - DNA, 25 bp, Homo sapien
ggtaaggcatggattctggtcactg

SEQ ID NO: 486175 - DNA, 25 bp, Homo sapien
ctggtcactggagaagattcccatc

SEQ ID NO: 486176 - DNA, 25 bp, Homo sapien
gaagagggagagtccaaactcgcct

SEQ ID NO: 486177 - DNA, 25 bp, Homo sapien
aactcgcctgggcacgcgtgtgtgc

SEQ ID NO: 486178 - DNA, 25 bp, Homo sapien
gacaaatcagtgcaggtaccagacc

SEQ ID NO: 486179 - DNA, 25 bp, Homo sapien
aataatgtgaggctgcattgccaaa

SEQ ID NO: 486180 - DNA, 25 bp, Homo sapien
ggtctttgctattgctgccctcgcg

SEQ ID NO: 486181 - DNA, 25 bp, Homo sapien
gcacactcgcatctttcacttcggg

SEQ ID NO: 486182 - DNA, 25 bp, Homo sapien
tgcttctccgtgtaatgcacgtccc

SEQ ID NO: 486183 - DNA, 25 bp, Homo sapien
ggttttggatgatgggattctgcac

SEQ ID NO: 486184 - DNA, 25 bp, Homo sapien
cttggtccagaaatattcctggcat

SEQ ID NO: 486185 - DNA, 25 bp, Homo sapien
ccttggtccagaaatattcctggca

SEQ ID NO: 486186 - DNA, 25 bp, Homo sapien
gaatgctgatccctcccagtgtcac

SEQ ID NO: 486187 - DNA, 25 bp, Homo sapien
gactggtactatcctgactgcccta

SEQ ID NO: 486188 - DNA, 25 bp, Homo sapien
tccaccagttgcctttgagcacgtg

SEQ ID NO: 486189 - DNA, 25 bp, Homo sapien
tcacacccacattggctgagccaat

SEQ ID NO: 486190 - DNA, 25 bp, Homo sapien
gaatgtaaataatgatgagatatgt

SEQ ID NO: 486191 - DNA, 25 bp, Homo sapien
ataatgatgagatatgtaggtgata

SEQ ID NO: 486192 - DNA, 25 bp, Homo sapien
aatgatgagatatgtaggtgataac

SEQ ID NO: 486193 - DNA, 25 bp, Homo sapien
gatgagatatgtaggtgataacatt

SEQ ID NO: 486194 - DNA, 25 bp, Homo sapien
ccccaactcgagttgccatggcaaa

SEQ ID NO: 486195 - DNA, 25 bp, Homo sapien
ggaagaaagaggcccgctccaggcc

SEQ ID NO: 486196 - DNA, 25 bp, Homo sapien
cagaagggccttccccaactcgagt

SEQ ID NO: 486197 - DNA, 25 bp, Homo sapien
gatgaaaaacgcttgcattctgaat

SEQ ID NO: 486198 - DNA, 25 bp, Homo sapien
gacctatgggattgatcctaatttc

SEQ ID NO: 486199 - DNA, 25 bp, Homo sapien
gagagggttaactgacctatgggat

SEQ ID NO: 486200 - DNA, 25 bp, Homo sapien
ctgacctatgggattgatcctaatt

SEQ ID NO: 486201 - DNA, 25 bp, Homo sapien
aatagagagggttaactgacctatg

SEQ ID NO: 486202 - DNA, 25 bp, Homo sapien
tgatgcttcttgtgtagcaggcaat

SEQ ID NO: 486203 - DNA, 25 bp, Homo sapien
ctgatgcttcttgtgtagcaggcaa

SEQ ID NO: 486204 - DNA, 25 bp, Homo sapien
gatgcttcttgtgtagcaggcaata

SEQ ID NO: 486205 - DNA, 25 bp, Homo sapien
gctgatgcttcttgtgtagcaggca

SEQ ID NO: 486206 - DNA, 25 bp, Homo sapien
ctttctgaaattttccatttcctca

SEQ ID NO: 486207 - DNA, 25 bp, Homo sapien
tttctgaaattttccatttcctcat

SEQ ID NO: 486208 - DNA, 25 bp, Homo sapien
aatgactcagcaccgtggtgagagg

SEQ ID NO: 486209 - DNA, 25 bp, Homo sapien
ctgggaaacaatcagggttgacacc

SEQ ID NO: 486210 - DNA, 25 bp, Homo sapien
tgttaaatgactcagcaccgtggtg

SEQ ID NO: 486211 - DNA, 25 bp, Homo sapien
gacaccctccaatttgttaaatgac

SEQ ID NO: 486212 - DNA, 25 bp, Homo sapien
gaaggccctgagtctttggatgttg

SEQ ID NO: 486213 - DNA, 25 bp, Homo sapien
gaaaagcagagcctgtgtaggagca

SEQ ID NO: 486214 - DNA, 25 bp, Homo sapien
tggatgttggatccctcaacctcat

SEQ ID NO: 486215 - DNA, 25 bp, Homo sapien
tgggtgacagaacccatcccagtgc

SEQ ID NO: 486216 - DNA, 25 bp, Homo sapien
tattatagtgctcggataattccca

SEQ ID NO: 486217 - DNA, 25 bp, Homo sapien
ccgggatgaacgtggaaagagtaca

SEQ ID NO: 486218 - DNA, 25 bp, Homo sapien
aagatcagtccccaaagttgttgtg

SEQ ID NO: 486219 - DNA, 25 bp, Homo sapien
tgttgtgacagcttaattgtattat

SEQ ID NO: 486220 - DNA, 25 bp, Homo sapien
gccgcatcgagtttctccaggttga

SEQ ID NO: 486221 - DNA, 25 bp, Homo sapien
gcactatgggccttagaatgcagaa

SEQ ID NO: 486222 - DNA, 25 bp, Homo sapien
gaaagccgcatcgagtttctccagg

SEQ ID NO: 486223 - DNA, 25 bp, Homo sapien
tagaatgcagaaagccgcatcgagt

SEQ ID NO: 486224 - DNA, 25 bp, Homo sapien
aaagagaggctattttcacggcttc

SEQ ID NO: 486225 - DNA, 25 bp, Homo sapien
tcccataagccactcaagaagtgtg

SEQ ID NO: 486226 - DNA, 25 bp, Homo sapien
gaaagagaggctgggtaagacagct

SEQ ID NO: 486227 - DNA, 25 bp, Homo sapien
gccgcatgcacctcaatgggttctg

SEQ ID NO: 486228 - DNA, 25 bp, Homo sapien
ctccagccttgttttctaggtcgtc

SEQ ID NO: 486229 - DNA, 25 bp, Homo sapien
ttaaagctgtctttctccagccttg

SEQ ID NO: 486230 - DNA, 25 bp, Homo sapien
tttctccagccttgttttctaggtc

SEQ ID NO: 486231 - DNA, 25 bp, Homo sapien
taaagctgtctttctccagccttgt

SEQ ID NO: 486232 - DNA, 25 bp, Homo sapien
ctctagggtcagcagtaacacagga

SEQ ID NO: 486233 - DNA, 25 bp, Homo sapien
aacagacgtggagaatctcatctgc

SEQ ID NO: 486234 - DNA, 25 bp, Homo sapien
cacaggatttgaagcccctggtgtg

SEQ ID NO: 486235 - DNA, 25 bp, Homo sapien
agacgtggagaatctcatctgcttc

SEQ ID NO: 486236 - DNA, 25 bp, Homo sapien
ctactgctgcaaaaattcccagtct

SEQ ID NO: 486237 - DNA, 25 bp, Homo sapien
gacaaggcttcacgggcatcacata

SEQ ID NO: 486238 - DNA, 25 bp, Homo sapien
tcccagtctgtactcagtgctttca

SEQ ID NO: 486239 - DNA, 25 bp, Homo sapien
gctttcatttctagagctgttcgac

SEQ ID NO: 486240 - DNA, 25 bp, Homo sapien
tggttggtttggttcaaattctcca

SEQ ID NO: 486241 - DNA, 25 bp, Homo sapien
tggactgtaactgctccagatagca

SEQ ID NO: 486242 - DNA, 25 bp, Homo sapien
ccagatagcattgaaattgcaggga

SEQ ID NO: 486243 - DNA, 25 bp, Homo sapien
ggatactaccaagggagatttacaa

SEQ ID NO: 486244 - DNA, 25 bp, Homo sapien
cagacatgcgattttggatactacc

SEQ ID NO: 486245 - DNA, 25 bp, Homo sapien
gatatgctactattgcccagtttag

SEQ ID NO: 486246 - DNA, 25 bp, Homo sapien
gctgtatgtaactctaatgcgcctg

SEQ ID NO: 486247 - DNA, 25 bp, Homo sapien
aatgcgcctgcagactttattgagc

SEQ ID NO: 486248 - DNA, 25 bp, Homo sapien
aaaataccagatggatgtcactgct

SEQ ID NO: 486249 - DNA, 25 bp, Homo sapien
cagagaaaggctggcactcaggcat

SEQ ID NO: 486250 - DNA, 25 bp, Homo sapien
gctcccaggaagcagttttaggcat

SEQ ID NO: 486251 - DNA, 25 bp, Homo sapien
tactgcaaatgctcccaggaagcag

SEQ ID NO: 486252 - DNA, 25 bp, Homo sapien
taggcatttcaactgggcagcatgt

SEQ ID NO: 486253 - DNA, 25 bp, Homo sapien
cacatatgtcaagccctacgcagta

SEQ ID NO: 486254 - DNA, 25 bp, Homo sapien
aataacacatatgtcaagccctacg

SEQ ID NO: 486255 - DNA, 25 bp, Homo sapien
caagccctacgcagtagaaaagcat

SEQ ID NO: 486256 - DNA, 25 bp, Homo sapien
tatgtcaagccctacgcagtagaaa

SEQ ID NO: 486257 - DNA, 25 bp, Homo sapien
agttacaccacagtgtggcagcagc

SEQ ID NO: 486258 - DNA, 25 bp, Homo sapien
tctgggtctggcttccttttgacag

SEQ ID NO: 486259 - DNA, 25 bp, Homo sapien
ggtctggcttccttttgacagccat

SEQ ID NO: 486260 - DNA, 25 bp, Homo sapien
tgggtctggcttccttttgacagcc

SEQ ID NO: 486261 - DNA, 25 bp, Homo sapien
ttgaaagtgggtacaagagcagctg

SEQ ID NO: 486262 - DNA, 25 bp, Homo sapien
atttgaaagtgggtacaagagcagc

SEQ ID NO: 486263 - DNA, 25 bp, Homo sapien
ccatttgaaagtgggtacaagagca

SEQ ID NO: 486264 - DNA, 25 bp, Homo sapien
cccatttgaaagtgggtacaagagc

SEQ ID NO: 486265 - DNA, 25 bp, Homo sapien
tctgtatagcgggagaattcacatt

SEQ ID NO: 486266 - DNA, 25 bp, Homo sapien
ctgcaattccctctgtatagcggga

SEQ ID NO: 486267 - DNA, 25 bp, Homo sapien
caattccctctgtatagcgggagaa

SEQ ID NO: 486268 - DNA, 25 bp, Homo sapien
tccctctgtatagcgggagaattca

SEQ ID NO: 486269 - DNA, 25 bp, Homo sapien
tatcctcctacaagaacaattcgcc

SEQ ID NO: 486270 - DNA, 25 bp, Homo sapien
cgccaatcgtataaaagtgttcgtg

SEQ ID NO: 486271 - DNA, 25 bp, Homo sapien
aagtgttcgtgcatccattaatgca

SEQ ID NO: 486272 - DNA, 25 bp, Homo sapien
gaacaattcgccaatcgtataaaag

SEQ ID NO: 486273 - DNA, 25 bp, Homo sapien
tttgtccaggatcactgagcatgtg

SEQ ID NO: 486274 - DNA, 25 bp, Homo sapien
aggatcactgagcatgtgccttgca

SEQ ID NO: 486275 - DNA, 25 bp, Homo sapien
cacggcaaaggccagagtttgtcca

SEQ ID NO: 486276 - DNA, 25 bp, Homo sapien
cggcaaaggccagagtttgtccagg

SEQ ID NO: 486277 - DNA, 25 bp, Homo sapien
gctgcccaaccccatgtactactgt

SEQ ID NO: 486278 - DNA, 25 bp, Homo sapien
tactactgtcctggtatggacatcc

SEQ ID NO: 486279 - DNA, 25 bp, Homo sapien
catgtactactgtcctggtatggac

SEQ ID NO: 486280 - DNA, 25 bp, Homo sapien
caaccccatgtactactgtcctggt

SEQ ID NO: 486281 - DNA, 25 bp, Homo sapien
aacacagtttgaaatccgccattca

SEQ ID NO: 486282 - DNA, 25 bp, Homo sapien
taatgggtgtcgtgaattaccagta

SEQ ID NO: 486283 - DNA, 25 bp, Homo sapien
gctaaggctccacagaacacagttt

SEQ ID NO: 486284 - DNA, 25 bp, Homo sapien
gccattcaatgctaatgcctgtagt

SEQ ID NO: 486285 - DNA, 25 bp, Homo sapien
gggacagcagctgtccccacgggca

SEQ ID NO: 486286 - DNA, 25 bp, Homo sapien
gctggggacagcagctgtccccacg

SEQ ID NO: 486287 - DNA, 25 bp, Homo sapien
tggggacagcagctgtccccacggg

SEQ ID NO: 486288 - DNA, 25 bp, Homo sapien
ggacagcagctgtccccacgggcat

SEQ ID NO: 486289 - DNA, 25 bp, Homo sapien
gagatgtgcagtacctccctctcca

SEQ ID NO: 486290 - DNA, 25 bp, Homo sapien
tttgagagatgtgcagtacctccct

SEQ ID NO: 486291 - DNA, 25 bp, Homo sapien
accataatacaaggaaatgtctggt

SEQ ID NO: 486292 - DNA, 25 bp, Homo sapien
acctccaacccatcaccaggcgatc

SEQ ID NO: 486293 - DNA, 25 bp, Homo sapien
ggcaaaatacgaggaccgctcttct

SEQ ID NO: 486294 - DNA, 25 bp, Homo sapien
catttggcaaaatacgaggaccgct

SEQ ID NO: 486295 - DNA, 25 bp, Homo sapien
cttcatttggcaaaatacgaggacc

SEQ ID NO: 486296 - DNA, 25 bp, Homo sapien
aaaatacgaggaccgctcttctcac

SEQ ID NO: 486297 - DNA, 25 bp, Homo sapien
gaaaaatattggctactgagatatt

SEQ ID NO: 486298 - DNA, 25 bp, Homo sapien
tattggctactgagatattctttgt

SEQ ID NO: 486299 - DNA, 25 bp, Homo sapien
aaaatattggctactgagatattct

SEQ ID NO: 486300 - DNA, 25 bp, Homo sapien
ggctactgagatattctttgttcat

SEQ ID NO: 486301 - DNA, 25 bp, Homo sapien
ttaaacgctgtcgttggtcagctct

SEQ ID NO: 486302 - DNA, 25 bp, Homo sapien
gatttatcgggtgacaggtcacagg

SEQ ID NO: 486303 - DNA, 25 bp, Homo sapien
gaggagcaggagaattgtgggatag

SEQ ID NO: 486304 - DNA, 25 bp, Homo sapien
gaggactcactggagtgatttatcg

SEQ ID NO: 486305 - DNA, 25 bp, Homo sapien
atgccagttgcatcacgtcagctgc

SEQ ID NO: 486306 - DNA, 25 bp, Homo sapien
caaaggagaccgtaactctgcacac

SEQ ID NO: 486307 - DNA, 25 bp, Homo sapien
tgcagaggacaataaattgggtgct

SEQ ID NO: 486308 - DNA, 25 bp, Homo sapien
cagaagtatcggtcctgctttgaag

SEQ ID NO: 486309 - DNA, 25 bp, Homo sapien
tagatgaagttgaaactctgagccc

SEQ ID NO: 486310 - DNA, 25 bp, Homo sapien
tctagcacagcgtcagaaagaactt

SEQ ID NO: 486311 - DNA, 25 bp, Homo sapien
cagtttacaaagattgagactctga

SEQ ID NO: 486312 - DNA, 25 bp, Homo sapien
aaagaaatgtccagcccagaacgcc

SEQ ID NO: 486313 - DNA, 25 bp, Homo sapien
aatccctgaggttgtacctctctgc

SEQ ID NO: 486314 - DNA, 25 bp, Homo sapien
tggaacacagttttggcaggcagtg

SEQ ID NO: 486315 - DNA, 25 bp, Homo sapien
gccttgtaataacagccgcccatga

SEQ ID NO: 486316 - DNA, 25 bp, Homo sapien
gaagcggtaacagatggctacgtct

SEQ ID NO: 486317 - DNA, 25 bp, Homo sapien
aaacttggccagatcggagaaggag

SEQ ID NO: 486318 - DNA, 25 bp, Homo sapien
tgctcatacacagaactggtttgaa

SEQ ID NO: 486319 - DNA, 25 bp, Homo sapien
actgttgggcaactattctcagcca

SEQ ID NO: 486320 - DNA, 25 bp, Homo sapien
gatagtctgtaaatgcctgcagcca

SEQ ID NO: 486321 - DNA, 25 bp, Homo sapien
tagcgtcttttgagcctgttccaaa

SEQ ID NO: 486322 - DNA, 25 bp, Homo sapien
tgagtctggattccttcctgatgtt

SEQ ID NO: 486323 - DNA, 25 bp, Homo sapien
tgtgagtctggattccttcctgatg

SEQ ID NO: 486324 - DNA, 25 bp, Homo sapien
aggtgtcctcttgtagcgtcttttg

SEQ ID NO: 486325 - DNA, 25 bp, Homo sapien
tccagctgctgaattcatcatgtca

SEQ ID NO: 486326 - DNA, 25 bp, Homo sapien
ccagctgctgaattcatcatgtcat

SEQ ID NO: 486327 - DNA, 25 bp, Homo sapien
cagctccagctgctgaattcatcat

SEQ ID NO: 486328 - DNA, 25 bp, Homo sapien
gctccagctgctgaattcatcatgt

SEQ ID NO: 486329 - DNA, 25 bp, Homo sapien
aggttgctgaaatgagatccccgaa

SEQ ID NO: 486330 - DNA, 25 bp, Homo sapien
gagatccccgaagcttttgtcccat

SEQ ID NO: 486331 - DNA, 25 bp, Homo sapien
tgagatccccgaagcttttgtccca

SEQ ID NO: 486332 - DNA, 25 bp, Homo sapien
cttaataagaatgttgtttggaaat

SEQ ID NO: 486333 - DNA, 25 bp, Homo sapien
gatgatgttgacagaagggttatgt

SEQ ID NO: 486334 - DNA, 25 bp, Homo sapien
ctccaatttggggtaatgatgctga

SEQ ID NO: 486335 - DNA, 25 bp, Homo sapien
gacagaagggttatgtttggataaa

SEQ ID NO: 486336 - DNA, 25 bp, Homo sapien
tggagtataagcaaacagctgatga

SEQ ID NO: 486337 - DNA, 25 bp, Homo sapien
aatgagaaaatgaacaagatacgtg

SEQ ID NO: 486338 - DNA, 25 bp, Homo sapien
ctaaaaatagtgcagcaattttttt

SEQ ID NO: 486339 - DNA, 25 bp, Homo sapien
gaaaatgaacaagatacgtgaacat

SEQ ID NO: 486340 - DNA, 25 bp, Homo sapien
gagaaaatgaacaagatacgtgaac

SEQ ID NO: 486341 - DNA, 25 bp, Homo sapien
ttaagatctacttgcaggtgattct

SEQ ID NO: 486342 - DNA, 25 bp, Homo sapien
aagatctacttgcaggtgattcttg

SEQ ID NO: 486343 - DNA, 25 bp, Homo sapien
taagatctacttgcaggtgattctt

SEQ ID NO: 486344 - DNA, 25 bp, Homo sapien
ttcttgccgaaaaatgagtcataga

SEQ ID NO: 486345 - DNA, 25 bp, Homo sapien
catctcatactggcatccctcaagg

SEQ ID NO: 486346 - DNA, 25 bp, Homo sapien
ccccacagccatctcatactggcat

SEQ ID NO: 486347 - DNA, 25 bp, Homo sapien
gccatctcatactggcatccctcaa

SEQ ID NO: 486348 - DNA, 25 bp, Homo sapien
ctcatactggcatccctcaagggca

SEQ ID NO: 486349 - DNA, 25 bp, Homo sapien
ctttccgcagggcaataatgcagac

SEQ ID NO: 486350 - DNA, 25 bp, Homo sapien
ggattaagactttccgcagggcaat

SEQ ID NO: 486351 - DNA, 25 bp, Homo sapien
ttgaggactgatgggattaagactt

SEQ ID NO: 486352 - DNA, 25 bp, Homo sapien
cagggcaataatgcagacacaagtt

SEQ ID NO: 486353 - DNA, 25 bp, Homo sapien
ggcagccaccagtagaccagcttgc

SEQ ID NO: 486354 - DNA, 25 bp, Homo sapien
ccagtagaccagcttgcatgaggat

SEQ ID NO: 486355 - DNA, 25 bp, Homo sapien
tagaccagcttgcatgaggatgcca

SEQ ID NO: 486356 - DNA, 25 bp, Homo sapien
ccagcttgcatgaggatgccactgc

SEQ ID NO: 486357 - DNA, 25 bp, Homo sapien
gcaacacagtgggagacttttcctg

SEQ ID NO: 486358 - DNA, 25 bp, Homo sapien
caacacagtgggagacttttcctgc

SEQ ID NO: 486359 - DNA, 25 bp, Homo sapien
aatgcaacacagtgggagacttttc

SEQ ID NO: 486360 - DNA, 25 bp, Homo sapien
atgcaacacagtgggagacttttcc

SEQ ID NO: 486361 - DNA, 25 bp, Homo sapien
aagacaccgacaccaagtaattgcc

SEQ ID NO: 486362 - DNA, 25 bp, Homo sapien
ttgtaggaacaacgatgaacaagac

SEQ ID NO: 486363 - DNA, 25 bp, Homo sapien
caagtaattgccaagtcagttccca

SEQ ID NO: 486364 - DNA, 25 bp, Homo sapien
tcaaccacgaccataggttgtagga

SEQ ID NO: 486365 - DNA, 25 bp, Homo sapien
gctgtgtagaggtgagcaacggcca

SEQ ID NO: 486366 - DNA, 25 bp, Homo sapien
cctccactaattccacatcagagat

SEQ ID NO: 486367 - DNA, 25 bp, Homo sapien
gatgagaggaacatcagaactcctg

SEQ ID NO: 486368 - DNA, 25 bp, Homo sapien
agaactcctgctcgctaacgaccag

SEQ ID NO: 486369 - DNA, 25 bp, Homo sapien
tcaggttgatgctaattcacaggcc

SEQ ID NO: 486370 - DNA, 25 bp, Homo sapien
gatgctaattcacaggccacggagc

SEQ ID NO: 486371 - DNA, 25 bp, Homo sapien
cacggagcctccactaagcagagtg

SEQ ID NO: 486372 - DNA, 25 bp, Homo sapien
gcagagtgttcatggcagctgatgg

SEQ ID NO: 486373 - DNA, 25 bp, Homo sapien
agatccgcctcatatctgccttgtc

SEQ ID NO: 486374 - DNA, 25 bp, Homo sapien
caaacacgtgagaaatattctccta

SEQ ID NO: 486375 - DNA, 25 bp, Homo sapien
gataatgttttctgtcaaacacgtg

SEQ ID NO: 486376 - DNA, 25 bp, Homo sapien
gtccttctgcccgtgagacccagga

SEQ ID NO: 486377 - DNA, 25 bp, Homo sapien
tacagatggatgctctgatctcatg

SEQ ID NO: 486378 - DNA, 25 bp, Homo sapien
tcacgcttcttgctctgtgagtcta

SEQ ID NO: 486379 - DNA, 25 bp, Homo sapien
tcaagattggggcagtcacgcttct

SEQ ID NO: 486380 - DNA, 25 bp, Homo sapien
ctgtgagtctacagatggatgctct

SEQ ID NO: 486381 - DNA, 25 bp, Homo sapien
cctgaacatgctgcacacttcctga

SEQ ID NO: 486382 - DNA, 25 bp, Homo sapien
gaacagaagtcacatccagcctgaa

SEQ ID NO: 486383 - DNA, 25 bp, Homo sapien
actcttgtttctgacacgccacctt

SEQ ID NO: 486384 - DNA, 25 bp, Homo sapien
gattctcaggacattcttcttccat

SEQ ID NO: 486385 - DNA, 25 bp, Homo sapien
catgggtctgtactagtgctgcata

SEQ ID NO: 486386 - DNA, 25 bp, Homo sapien
gatgtttttggctcattacacttga

SEQ ID NO: 486387 - DNA, 25 bp, Homo sapien
ttctcacgaaactgctgagcccttt

SEQ ID NO: 486388 - DNA, 25 bp, Homo sapien
tagtgctgcataaaaacaagatgtt

SEQ ID NO: 486389 - DNA, 25 bp, Homo sapien
taaggctgagtgaataccctgtgcc

SEQ ID NO: 486390 - DNA, 25 bp, Homo sapien
gataaggctgagtgaataccctgtg

SEQ ID NO: 486391 - DNA, 25 bp, Homo sapien
ggctgagtgaataccctgtgccctc

SEQ ID NO: 486392 - DNA, 25 bp, Homo sapien
gctgataaggctgagtgaataccct

SEQ ID NO: 486393 - DNA, 25 bp, Homo sapien
cacagaagtatcgtggtagtggcag

SEQ ID NO: 486394 - DNA, 25 bp, Homo sapien
aaagaacaaccagtcatgtggccaa

SEQ ID NO: 486395 - DNA, 25 bp, Homo sapien
tggacttgacttggacctttaacta

SEQ ID NO: 486396 - DNA, 25 bp, Homo sapien
tgggccagccaagtagaagtggact

SEQ ID NO: 486397 - DNA, 25 bp, Homo sapien
tgtgcaagcaccaggcaaagaaatg

SEQ ID NO: 486398 - DNA, 25 bp, Homo sapien
aaaagagtgctaagcccaaagtggc

SEQ ID NO: 486399 - DNA, 25 bp, Homo sapien
gaaatggactcaggatgcttagcgg

SEQ ID NO: 486400 - DNA, 25 bp, Homo sapien
tattctgtctgcgtaaactaaggta

SEQ ID NO: 486401 - DNA, 25 bp, Homo sapien
aaaatgaaccccatgactgacgcgg

SEQ ID NO: 486402 - DNA, 25 bp, Homo sapien
taactgaattccagcttgtcacaag

SEQ ID NO: 486403 - DNA, 25 bp, Homo sapien
gacgcggcttcctgcggttctgaag

SEQ ID NO: 486404 - DNA, 25 bp, Homo sapien
tctgaagttaagaagtggtggaccc

SEQ ID NO: 486405 - DNA, 25 bp, Homo sapien
ggtcttcactgggactaccaccaag

SEQ ID NO: 486406 - DNA, 25 bp, Homo sapien
gctgacgatgttcagtgggtcttca

SEQ ID NO: 486407 - DNA, 25 bp, Homo sapien
actaagttcatgctaaagcaggagc

SEQ ID NO: 486408 - DNA, 25 bp, Homo sapien
gaatggagggagagcaatgctcccc

SEQ ID NO: 486409 - DNA, 25 bp, Homo sapien
caggcatttctccagcgatcgaggc

SEQ ID NO: 486410 - DNA, 25 bp, Homo sapien
agatctcatgttttgggctccccag

SEQ ID NO: 486411 - DNA, 25 bp, Homo sapien
caatgacattctcaggcatggaggg

SEQ ID NO: 486412 - DNA, 25 bp, Homo sapien
gaggttaacaacgtggagctgatcc

SEQ ID NO: 486413 - DNA, 25 bp, Homo sapien
gctcagtctcgtatgatgtttgcat

SEQ ID NO: 486414 - DNA, 25 bp, Homo sapien
ctccttagtgaggacaatatattta

SEQ ID NO: 486415 - DNA, 25 bp, Homo sapien
tcgaatgctcagtctcgtatgatgt

SEQ ID NO: 486416 - DNA, 25 bp, Homo sapien
tatttataacctttcgaatgctcag

SEQ ID NO: 486417 - DNA, 25 bp, Homo sapien
ttcaaagccctgaaatcgagcaaaa

SEQ ID NO: 486418 - DNA, 25 bp, Homo sapien
aagccctgaaatcgagcaaaaaatg

SEQ ID NO: 486419 - DNA, 25 bp, Homo sapien
cctgaaatcgagcaaaaaatgcatt

SEQ ID NO: 486420 - DNA, 25 bp, Homo sapien
ctttgttgagatttcctctaattca

SEQ ID NO: 486421 - DNA, 25 bp, Homo sapien
gaacaggaaattccagcccacagag

SEQ ID NO: 486422 - DNA, 25 bp, Homo sapien
tccgaagaggatgttccactacctg

SEQ ID NO: 486423 - DNA, 25 bp, Homo sapien
aacaggatccacattattctagcag

SEQ ID NO: 486424 - DNA, 25 bp, Homo sapien
gactgtatcgttcagctccactaaa

SEQ ID NO: 486425 - DNA, 25 bp, Homo sapien
gagcttggggagtatatctttgaat

SEQ ID NO: 486426 - DNA, 25 bp, Homo sapien
aatctgcaactagcaagccacacag

SEQ ID NO: 486427 - DNA, 25 bp, Homo sapien
ttttatcatcgccaactaggaagag

SEQ ID NO: 486428 - DNA, 25 bp, Homo sapien
caggatggttttctccttagttctc

SEQ ID NO: 486429 - DNA, 25 bp, Homo sapien
atcaccagtgtgtgccgtgatggtc

SEQ ID NO: 486430 - DNA, 25 bp, Homo sapien
gcctctccaagacatcaccagtgtg

SEQ ID NO: 486431 - DNA, 25 bp, Homo sapien
cgcctctccaagacatcaccagtgt

SEQ ID NO: 486432 - DNA, 25 bp, Homo sapien
ccagtgtgtgccgtgatggtcacct

SEQ ID NO: 486433 - DNA, 25 bp, Homo sapien
ctgcatgatggattgtcggtgggcc

SEQ ID NO: 486434 - DNA, 25 bp, Homo sapien
catgatggattgtcggtgggcccgt

SEQ ID NO: 486435 - DNA, 25 bp, Homo sapien
gattgtcggtgggcccgtgttctcc

SEQ ID NO: 486436 - DNA, 25 bp, Homo sapien
tcggtgggcccgtgttctcctggaa

SEQ ID NO: 486437 - DNA, 25 bp, Homo sapien
ggctggcagttgccacgtggctcat

SEQ ID NO: 486438 - DNA, 25 bp, Homo sapien
cgcccttcccatccgctctccaatt

SEQ ID NO: 486439 - DNA, 25 bp, Homo sapien
ttcacacttgcgtggccgcccttcc

SEQ ID NO: 486440 - DNA, 25 bp, Homo sapien
ccttcccatccgctctccaattttc

SEQ ID NO: 486441 - DNA, 25 bp, Homo sapien
tccttcttcacacttgcgtggccgc

SEQ ID NO: 486442 - DNA, 25 bp, Homo sapien
gataagtagtgttcggaaagtgccc

SEQ ID NO: 486443 - DNA, 25 bp, Homo sapien
tcacaatcttcgataagtagtgttc

SEQ ID NO: 486444 - DNA, 25 bp, Homo sapien
gatgggctctccaagtctaaatgct

SEQ ID NO: 486445 - DNA, 25 bp, Homo sapien
aatggtacagaactaaatgtgtgaa

SEQ ID NO: 486446 - DNA, 25 bp, Homo sapien
ccaattctaacttcccaacttctgt

SEQ ID NO: 486447 - DNA, 25 bp, Homo sapien
tctccaattctaacttcccaacttc

SEQ ID NO: 486448 - DNA, 25 bp, Homo sapien
atctccaattctaacttcccaactt

SEQ ID NO: 486449 - DNA, 25 bp, Homo sapien
tccaattctaacttcccaacttctg

SEQ ID NO: 486450 - DNA, 25 bp, Homo sapien
gatttaaccaggacaaagtcaatca

SEQ ID NO: 486451 - DNA, 25 bp, Homo sapien
actgaaggggatgctcaaactgaga

SEQ ID NO: 486452 - DNA, 25 bp, Homo sapien
cagatacagcatagtcatccatgta

SEQ ID NO: 486453 - DNA, 25 bp, Homo sapien
tatagtggttgagtaacgtgtaagt

SEQ ID NO: 486454 - DNA, 25 bp, Homo sapien
tccttagtcagcaaagcaggtctgc

SEQ ID NO: 486455 - DNA, 25 bp, Homo sapien
ggtggctgagtctggcaatgagggc

SEQ ID NO: 486456 - DNA, 25 bp, Homo sapien
gggcatccttagtcagcaaagcagg

SEQ ID NO: 486457 - DNA, 25 bp, Homo sapien
gggaggtggctgagtctggcaatga

SEQ ID NO: 486458 - DNA, 25 bp, Homo sapien
catttctgaggaccgacgtgggaga

SEQ ID NO: 486459 - DNA, 25 bp, Homo sapien
tcgacatagagggtaaaacaaccca

SEQ ID NO: 486460 - DNA, 25 bp, Homo sapien
ataaaagaatcaccaggacaagggc

SEQ ID NO: 486461 - DNA, 25 bp, Homo sapien
tgtcagtgcctgcacggctggacct

SEQ ID NO: 486462 - DNA, 25 bp, Homo sapien
gatgcccagggtgtcagttttttga

SEQ ID NO: 486463 - DNA, 25 bp, Homo sapien
cacgcattgccgctgtgatgcccag

SEQ ID NO: 486464 - DNA, 25 bp, Homo sapien
gttctgttgtggagacacgcattgc

SEQ ID NO: 486465 - DNA, 25 bp, Homo sapien
gctgtcttagttctcctgctaacat

SEQ ID NO: 486466 - DNA, 25 bp, Homo sapien
ccttcccctatgtggtcaccacctt

SEQ ID NO: 486467 - DNA, 25 bp, Homo sapien
gggactggaccatgcatgcaaaatt

SEQ ID NO: 486468 - DNA, 25 bp, Homo sapien
ctgggactggaccatgcatgcaaaa

SEQ ID NO: 486469 - DNA, 25 bp, Homo sapien
catttgccttcccctatgtggtcac

SEQ ID NO: 486470 - DNA, 25 bp, Homo sapien
gaaacagttgtacaagcagatggtt

SEQ ID NO: 486471 - DNA, 25 bp, Homo sapien
aaacagttgtacaagcagatggttt

SEQ ID NO: 486472 - DNA, 25 bp, Homo sapien
agaaacagttgtacaagcagatggt

SEQ ID NO: 486473 - DNA, 25 bp, Homo sapien
gatgagctgcctgcgaggatttggg

SEQ ID NO: 486474 - DNA, 25 bp, Homo sapien
gggcagcggcactgctctgggcggg

SEQ ID NO: 486475 - DNA, 25 bp, Homo sapien
tgagctgcctgcgaggatttgggca

SEQ ID NO: 486476 - DNA, 25 bp, Homo sapien
tggtgccaaacccctcagtggagag

SEQ ID NO: 486477 - DNA, 25 bp, Homo sapien
gacccacggacacccaggcttgcag

SEQ ID NO: 486478 - DNA, 25 bp, Homo sapien
ggctccagccggagttgcaattgcg

SEQ ID NO: 486479 - DNA, 25 bp, Homo sapien
cggacacccaggcttgcaggtccgg

SEQ ID NO: 486480 - DNA, 25 bp, Homo sapien
atggctgggcagacggacccacgga

SEQ ID NO: 486481 - DNA, 25 bp, Homo sapien
tggggttcaccgagggaggcggcag

SEQ ID NO: 486482 - DNA, 25 bp, Homo sapien
tccgggcgagctgcacttctgcaag

SEQ ID NO: 486483 - DNA, 25 bp, Homo sapien
acttctgcaaggtggggttcaccga

SEQ ID NO: 486484 - DNA, 25 bp, Homo sapien
ctgggctgctccgggcgagctgcac

SEQ ID NO: 486485 - DNA, 25 bp, Homo sapien
gaacagctgacaacccagcaaagag

SEQ ID NO: 486486 - DNA, 25 bp, Homo sapien
agatggcgagaagctttgaggaaca

SEQ ID NO: 486487 - DNA, 25 bp, Homo sapien
ggaacagctgacaacccagcaaaga

SEQ ID NO: 486488 - DNA, 25 bp, Homo sapien
agggaggacgccagcagcaagaagt

SEQ ID NO: 486489 - DNA, 25 bp, Homo sapien
ggacagcctgcaggcggcgcccggc

SEQ ID NO: 486490 - DNA, 25 bp, Homo sapien
actcggcccgggacagcctgcaggc

SEQ ID NO: 486491 - DNA, 25 bp, Homo sapien
tccgactcggcccgggacagcctgc

SEQ ID NO: 486492 - DNA, 25 bp, Homo sapien
tcggcccgggacagcctgcaggcgg

SEQ ID NO: 486493 - DNA, 25 bp, Homo sapien
ggccccggccgtggcacagcgcggc

SEQ ID NO: 486494 - DNA, 25 bp, Homo sapien
ctgcccaggtgcgcggcagcgtcgc

SEQ ID NO: 486495 - DNA, 25 bp, Homo sapien
ggctgcccaggtgcgcggcagcgtc

SEQ ID NO: 486496 - DNA, 25 bp, Homo sapien
gggctgcccaggtgcgcggcagcgt

SEQ ID NO: 486497 - DNA, 25 bp, Homo sapien
acaggtgctcccgtcgtaggtctcg

SEQ ID NO: 486498 - DNA, 25 bp, Homo sapien
ctgcacaggtgctcccgtcgtaggt

SEQ ID NO: 486499 - DNA, 25 bp, Homo sapien
gtgctcccgtcgtaggtctcgcaca

SEQ ID NO: 486500 - DNA, 25 bp, Homo sapien
tcgtaggtctcgcacacccactcat

SEQ ID NO: 486501 - DNA, 25 bp, Homo sapien
ggctgactcaggaggatccttctta

SEQ ID NO: 486502 - DNA, 25 bp, Homo sapien
tctttaacatgagatgcataacggg

SEQ ID NO: 486503 - DNA, 25 bp, Homo sapien
tctaaaaacttcaactacagctgag

SEQ ID NO: 486504 - DNA, 25 bp, Homo sapien
tgctcattatcagtacgacaagtaa

SEQ ID NO: 486505 - DNA, 25 bp, Homo sapien
tcagcggctgcaggcaaaatggctt

SEQ ID NO: 486506 - DNA, 25 bp, Homo sapien
acttcagcggctgcaggcaaaatgg

SEQ ID NO: 486507 - DNA, 25 bp, Homo sapien
ccacttcagcggctgcaggcaaaat

SEQ ID NO: 486508 - DNA, 25 bp, Homo sapien
ctgggccacttcagcggctgcaggc

SEQ ID NO: 486509 - DNA, 25 bp, Homo sapien
gatggcaacatactttgcacaaagc

SEQ ID NO: 486510 - DNA, 25 bp, Homo sapien
cagatggcaacatactttgcacaaa

SEQ ID NO: 486511 - DNA, 25 bp, Homo sapien
atggcaacatactttgcacaaagcc

SEQ ID NO: 486512 - DNA, 25 bp, Homo sapien
agatggcaacatactttgcacaaag

SEQ ID NO: 486513 - DNA, 25 bp, Homo sapien
aattcgttcacagctacgacaacgg

SEQ ID NO: 486514 - DNA, 25 bp, Homo sapien
caaatgtgaattcgttcacagctac

SEQ ID NO: 486515 - DNA, 25 bp, Homo sapien
ttcacagctacgacaacggccagct

SEQ ID NO: 486516 - DNA, 25 bp, Homo sapien
cagctacgacaacggccagctcaga

SEQ ID NO: 486517 - DNA, 25 bp, Homo sapien
caggaggttgaagagccagtggaag

SEQ ID NO: 486518 - DNA, 25 bp, Homo sapien
aggaggttgaagagccagtggaagg

SEQ ID NO: 486519 - DNA, 25 bp, Homo sapien
taaccaacccaatatcagagaaggg

SEQ ID NO: 486520 - DNA, 25 bp, Homo sapien
taccaatgggtaaatctgctcgagt

SEQ ID NO: 486521 - DNA, 25 bp, Homo sapien
tgggtaaatctgctcgagttctttc

SEQ ID NO: 486522 - DNA, 25 bp, Homo sapien
tgcaggaaaaatgcaactgaatggt

SEQ ID NO: 486523 - DNA, 25 bp, Homo sapien
gatttaagagctgggtgatgcaggt

SEQ ID NO: 486524 - DNA, 25 bp, Homo sapien
cagttttttggtctcttgcctgaaa

SEQ ID NO: 486525 - DNA, 25 bp, Homo sapien
atgcaggtcctctcgctcgccactg

SEQ ID NO: 486526 - DNA, 25 bp, Homo sapien
ttaggcataggtactgatgtaggat

SEQ ID NO: 486527 - DNA, 25 bp, Homo sapien
aggatctgttattgtctcattagtc

SEQ ID NO: 486528 - DNA, 25 bp, Homo sapien
gatgctcttcggcactcctgtggga

SEQ ID NO: 486529 - DNA, 25 bp, Homo sapien
cagggaacaaggccttctccatgct

SEQ ID NO: 486530 - DNA, 25 bp, Homo sapien
tcgagctggttcgatgagactccat

SEQ ID NO: 486531 - DNA, 25 bp, Homo sapien
ggagaagcaatcctcttctgtccag

SEQ ID NO: 486532 - DNA, 25 bp, Homo sapien
tccagagggacagctgttgcaattt

SEQ ID NO: 486533 - DNA, 25 bp, Homo sapien
ctagtccagagggacagctgttgca

SEQ ID NO: 486534 - DNA, 25 bp, Homo sapien
tagtccagagggacagctgttgcaa

SEQ ID NO: 486535 - DNA, 25 bp, Homo sapien
agagggacagctgttgcaattttac

SEQ ID NO: 486536 - DNA, 25 bp, Homo sapien
aaagagcgcctagaaactagccttt

SEQ ID NO: 486537 - DNA, 25 bp, Homo sapien
caaaagagcgcctagaaactagcct

SEQ ID NO: 486538 - DNA, 25 bp, Homo sapien
gcctagaaactagcctttggctttc

SEQ ID NO: 486539 - DNA, 25 bp, Homo sapien
gagcgcctagaaactagcctttggc

SEQ ID NO: 486540 - DNA, 25 bp, Homo sapien
catcctcctctgtatcctcacccct

SEQ ID NO: 486541 - DNA, 25 bp, Homo sapien
cctctgtatcctcacccctctccat

SEQ ID NO: 486542 - DNA, 25 bp, Homo sapien
atcctcctctgtatcctcacccctc

SEQ ID NO: 486543 - DNA, 25 bp, Homo sapien
cctcctctgtatcctcacccctctc

SEQ ID NO: 486544 - DNA, 25 bp, Homo sapien
ttcctgaacttccttcctgatccat

SEQ ID NO: 486545 - DNA, 25 bp, Homo sapien
aggagcaagacagaaatcccctccc

SEQ ID NO: 486546 - DNA, 25 bp, Homo sapien
cccttcctgaacttccttcctgatc

SEQ ID NO: 486547 - DNA, 25 bp, Homo sapien
gcaagacagaaatcccctcccttcc

SEQ ID NO: 486548 - DNA, 25 bp, Homo sapien
aatacagatgtcatcgtgtaagaca

SEQ ID NO: 486549 - DNA, 25 bp, Homo sapien
cagatgtcatcgtgtaagacagcag

SEQ ID NO: 486550 - DNA, 25 bp, Homo sapien
tggcaaatacagatgtcatcgtgta

SEQ ID NO: 486551 - DNA, 25 bp, Homo sapien
cattgaccacatggcaaatacagat

SEQ ID NO: 486552 - DNA, 25 bp, Homo sapien
ttgacatcagctgcctttggaaaag

SEQ ID NO: 486553 - DNA, 25 bp, Homo sapien
ttggaaaagcaatagaaacataacc

SEQ ID NO: 486554 - DNA, 25 bp, Homo sapien
agcaatagaaacataaccaacagca

SEQ ID NO: 486555 - DNA, 25 bp, Homo sapien
cttgacatcagctgcctttggaaaa

SEQ ID NO: 486556 - DNA, 25 bp, Homo sapien
gagagctcagtaggatttatagata

SEQ ID NO: 486557 - DNA, 25 bp, Homo sapien
gctcattcacgagggcatacttggc

SEQ ID NO: 486558 - DNA, 25 bp, Homo sapien
tgaagagggtttgggctctctcaaa

SEQ ID NO: 486559 - DNA, 25 bp, Homo sapien
tctctcaaattctgcagcacccggg

SEQ ID NO: 486560 - DNA, 25 bp, Homo sapien
tcttctttgtcaagtcacagttagt

SEQ ID NO: 486561 - DNA, 25 bp, Homo sapien
tcacagttagttgggtactggcaag

SEQ ID NO: 486562 - DNA, 25 bp, Homo sapien
gaattcttgcacatttggttacttt

SEQ ID NO: 486563 - DNA, 25 bp, Homo sapien
gtactggcaagcatccccataccat

SEQ ID NO: 486564 - DNA, 25 bp, Homo sapien
cacttccatctgaattatcacactt

SEQ ID NO: 486565 - DNA, 25 bp, Homo sapien
tgcattctctatcgtcacactcaca

SEQ ID NO: 486566 - DNA, 25 bp, Homo sapien
tctgaattatcacacttacacctgc

SEQ ID NO: 486567 - DNA, 25 bp, Homo sapien
ttcttctgtttcatcgtctatgcat

SEQ ID NO: 486568 - DNA, 25 bp, Homo sapien
caggcttgcaggttgagcagaagag

SEQ ID NO: 486569 - DNA, 25 bp, Homo sapien
ttttcctacaccagtcaaggttgca

SEQ ID NO: 486570 - DNA, 25 bp, Homo sapien
tgggcacaggcttgcaggttgagca

SEQ ID NO: 486571 - DNA, 25 bp, Homo sapien
acaggcttgcaggttgagcagaaga

SEQ ID NO: 486572 - DNA, 25 bp, Homo sapien
gactcacaggaattgaagctaccga

SEQ ID NO: 486573 - DNA, 25 bp, Homo sapien
gactgagccctttaagaaagaattg

SEQ ID NO: 486574 - DNA, 25 bp, Homo sapien
ttatccaggtagtttgtacagccag

SEQ ID NO: 486575 - DNA, 25 bp, Homo sapien
catcttgcttaggtcattggctcgg

SEQ ID NO: 486576 - DNA, 25 bp, Homo sapien
tgctcatctgcacttgcctccaagc

SEQ ID NO: 486577 - DNA, 25 bp, Homo sapien
gctcatctgcacttgcctccaagcc

SEQ ID NO: 486578 - DNA, 25 bp, Homo sapien
ctgctcatctgcacttgcctccaag

SEQ ID NO: 486579 - DNA, 25 bp, Homo sapien
tcatctgcacttgcctccaagccat

SEQ ID NO: 486580 - DNA, 25 bp, Homo sapien
gctttctccaaacacatcatggttg

SEQ ID NO: 486581 - DNA, 25 bp, Homo sapien
tatatgagcattcactctaaggacg

SEQ ID NO: 486582 - DNA, 25 bp, Homo sapien
catggttgtgcctatacctgcttaa

SEQ ID NO: 486583 - DNA, 25 bp, Homo sapien
tgtcctttaacttggcctagacagg

SEQ ID NO: 486584 - DNA, 25 bp, Homo sapien
tccatgccaaccagccttgcagtag

SEQ ID NO: 486585 - DNA, 25 bp, Homo sapien
gggtgatatcgcactggaattcaca

SEQ ID NO: 486586 - DNA, 25 bp, Homo sapien
tctggagacgtgcatcttcgcttgc

SEQ ID NO: 486587 - DNA, 25 bp, Homo sapien
cttgcagtagcagtttccacagtaa

SEQ ID NO: 486588 - DNA, 25 bp, Homo sapien
acatcgtgacaggtacattcaccac

SEQ ID NO: 486589 - DNA, 25 bp, Homo sapien
ggtcatagacagctctacagtccct

SEQ ID NO: 486590 - DNA, 25 bp, Homo sapien
gaagtcatcagaatatcggtcatag

SEQ ID NO: 486591 - DNA, 25 bp, Homo sapien
agtccccagtcggatcaacatcgtg

SEQ ID NO: 486592 - DNA, 25 bp, Homo sapien
aagcagtgacgtgccccacaggagg

SEQ ID NO: 486593 - DNA, 25 bp, Homo sapien
agaatgtcatctgccactaaggccc

SEQ ID NO: 486594 - DNA, 25 bp, Homo sapien
tgaattcacaagcagtgacgtgccc

SEQ ID NO: 486595 - DNA, 25 bp, Homo sapien
ttcacaagcagtgacgtgccccaca

SEQ ID NO: 486596 - DNA, 25 bp, Homo sapien
catcttccgcaattacactgtccat

SEQ ID NO: 486597 - DNA, 25 bp, Homo sapien
gagcaaggcagatccgagcttccct

SEQ ID NO: 486598 - DNA, 25 bp, Homo sapien
agcaaggcagatccgagcttccctg

SEQ ID NO: 486599 - DNA, 25 bp, Homo sapien
gcagtcacatcttccgcaattacac

SEQ ID NO: 486600 - DNA, 25 bp, Homo sapien
caaaacatccagtaccaatgtgttt

SEQ ID NO: 486601 - DNA, 25 bp, Homo sapien
aacatccagtaccaatgtgtttgca

SEQ ID NO: 486602 - DNA, 25 bp, Homo sapien
aaaacatccagtaccaatgtgtttg

SEQ ID NO: 486603 - DNA, 25 bp, Homo sapien
aaacatccagtaccaatgtgtttgc

SEQ ID NO: 486604 - DNA, 25 bp, Homo sapien
cgtagctgcgaaagcccaaacaaaa

SEQ ID NO: 486605 - DNA, 25 bp, Homo sapien
gtagctgcgaaagcccaaacaaaaa

SEQ ID NO: 486606 - DNA, 25 bp, Homo sapien
tagctgcgaaagcccaaacaaaaac

SEQ ID NO: 486607 - DNA, 25 bp, Homo sapien
tataatgtgcccaaatacgaagctc

SEQ ID NO: 486608 - DNA, 25 bp, Homo sapien
ctggctcaccccagagaaggctttt

SEQ ID NO: 486609 - DNA, 25 bp, Homo sapien
tatacttaatttccccgaatgagag

SEQ ID NO: 486610 - DNA, 25 bp, Homo sapien
tagaacctgcaaactatgcctcaag

SEQ ID NO: 486611 - DNA, 25 bp, Homo sapien
cctggtggctctcaaaaggaaacac

SEQ ID NO: 486612 - DNA, 25 bp, Homo sapien
gaagcatactgtcctcaaaatggtg

SEQ ID NO: 486613 - DNA, 25 bp, Homo sapien
caaaatggtgcttgcagttcacgcc

SEQ ID NO: 486614 - DNA, 25 bp, Homo sapien
caatcaaaggtggatactgtccagc

SEQ ID NO: 486615 - DNA, 25 bp, Homo sapien
ctggctgccttaacggcattcccat

SEQ ID NO: 486616 - DNA, 25 bp, Homo sapien
gcttcttttccctatgagatctggg

SEQ ID NO: 486617 - DNA, 25 bp, Homo sapien
actggctgccttaacggcattccca

SEQ ID NO: 486618 - DNA, 25 bp, Homo sapien
cttttccctatgagatctgggtttc

SEQ ID NO: 486619 - DNA, 25 bp, Homo sapien
tatctgctgaacttctcaccctctt

SEQ ID NO: 486620 - DNA, 25 bp, Homo sapien
aagttatctgctgaacttctcaccc

SEQ ID NO: 486621 - DNA, 25 bp, Homo sapien
caagttatctgctgaacttctcacc

SEQ ID NO: 486622 - DNA, 25 bp, Homo sapien
gttatctgctgaacttctcaccctc

SEQ ID NO: 486623 - DNA, 25 bp, Homo sapien
gctaggtttgatctctctgattcac

SEQ ID NO: 486624 - DNA, 25 bp, Homo sapien
tatcctattgtctggcagtcatcaa

SEQ ID NO: 486625 - DNA, 25 bp, Homo sapien
caatcagcgactgagctgatgccag

SEQ ID NO: 486626 - DNA, 25 bp, Homo sapien
tgattcaccaatacttccatacgct

SEQ ID NO: 486627 - DNA, 25 bp, Homo sapien
tctcttatatggtcaagcttcttca

SEQ ID NO: 486628 - DNA, 25 bp, Homo sapien
gtatctcttatatggtcaagcttct

SEQ ID NO: 486629 - DNA, 25 bp, Homo sapien
aagtatctcttatatggtcaagctt

SEQ ID NO: 486630 - DNA, 25 bp, Homo sapien
tcttatatggtcaagcttcttcacc

SEQ ID NO: 486631 - DNA, 25 bp, Homo sapien
gaggtgctccgctgcttaggaaacc

SEQ ID NO: 486632 - DNA, 25 bp, Homo sapien
aatagacggtagtgagggaggtgct

SEQ ID NO: 486633 - DNA, 25 bp, Homo sapien
caatagacggtagtgagggaggtgc

SEQ ID NO: 486634 - DNA, 25 bp, Homo sapien
ctatgtcacataaaaagcgatgttg

SEQ ID NO: 486635 - DNA, 25 bp, Homo sapien
gatgttggaggaaccctgattactt

SEQ ID NO: 486636 - DNA, 25 bp, Homo sapien
cataaaaagcgatgttggaggaacc

SEQ ID NO: 486637 - DNA, 25 bp, Homo sapien
aaaagcgatgttggaggaaccctga

SEQ ID NO: 486638 - DNA, 25 bp, Homo sapien
ggtttgccatagcaacctgattgca

SEQ ID NO: 486639 - DNA, 25 bp, Homo sapien
gattgcactagagaaagcgcctgcc

SEQ ID NO: 486640 - DNA, 25 bp, Homo sapien
aaataataggtttgccatagcaacc

SEQ ID NO: 486641 - DNA, 25 bp, Homo sapien
aaatgcatcctaagttcccttgcaa

SEQ ID NO: 486642 - DNA, 25 bp, Homo sapien
gtggtaacagtaggcacactctcca

SEQ ID NO: 486643 - DNA, 25 bp, Homo sapien
gctggtgtggtaacagtaggcacac

SEQ ID NO: 486644 - DNA, 25 bp, Homo sapien
ctgctggtgtggtaacagtaggcac

SEQ ID NO: 486645 - DNA, 25 bp, Homo sapien
gtgtggtaacagtaggcacactctc

SEQ ID NO: 486646 - DNA, 25 bp, Homo sapien
caatttgttcacttcctttttcatt

SEQ ID NO: 486647 - DNA, 25 bp, Homo sapien
tgttcacttcctttttcattgtact

SEQ ID NO: 486648 - DNA, 25 bp, Homo sapien
ttgttcacttcctttttcattgtac

SEQ ID NO: 486649 - DNA, 25 bp, Homo sapien
atttgttcacttcctttttcattgt

SEQ ID NO: 486650 - DNA, 25 bp, Homo sapien
gaccaagtacatctcttctgcatga

SEQ ID NO: 486651 - DNA, 25 bp, Homo sapien
ggagacaagaagacgaacaagacag

SEQ ID NO: 486652 - DNA, 25 bp, Homo sapien
ggattgacaatcaagagagtcctca

SEQ ID NO: 486653 - DNA, 25 bp, Homo sapien
cacagggtagatgcctggacttgaa

SEQ ID NO: 486654 - DNA, 25 bp, Homo sapien
ttcttcttggattcctcttttttca

SEQ ID NO: 486655 - DNA, 25 bp, Homo sapien
cttcactccttccctctttcttcca

SEQ ID NO: 486656 - DNA, 25 bp, Homo sapien
tcttcttggattcctcttttttcat

SEQ ID NO: 486657 - DNA, 25 bp, Homo sapien
cactccttccctctttcttccaggt

SEQ ID NO: 486658 - DNA, 25 bp, Homo sapien
tctcaaatttgtctgaaataacaag

SEQ ID NO: 486659 - DNA, 25 bp, Homo sapien
ttctcaaatttgtctgaaataacaa

SEQ ID NO: 486660 - DNA, 25 bp, Homo sapien
catgggtggatgtgcaaatgattcc

SEQ ID NO: 486661 - DNA, 25 bp, Homo sapien
gtgcataaatgctctaatctttttc

SEQ ID NO: 486662 - DNA, 25 bp, Homo sapien
ttcaatgtgcataaatgctctaatc

SEQ ID NO: 486663 - DNA, 25 bp, Homo sapien
ctttttcatgggtggatgtgcaaat

SEQ ID NO: 486664 - DNA, 25 bp, Homo sapien
tagtcactctgttgctgaacttgta

SEQ ID NO: 486665 - DNA, 25 bp, Homo sapien
gaaataatcacaagatgcttcaggg

SEQ ID NO: 486666 - DNA, 25 bp, Homo sapien
tcagggctgaccttgcaatgttgtt

SEQ ID NO: 486667 - DNA, 25 bp, Homo sapien
taatcacaagatgcttcagggctga

SEQ ID NO: 486668 - DNA, 25 bp, Homo sapien
gcgatcatcacactcacaagtcttg

SEQ ID NO: 486669 - DNA, 25 bp, Homo sapien
cacccggcgatctcctggaggatag

SEQ ID NO: 486670 - DNA, 25 bp, Homo sapien
acaagtcttgccatacacccggcga

SEQ ID NO: 486671 - DNA, 25 bp, Homo sapien
gaggtcttcacagcggcgatcatca

SEQ ID NO: 486672 - DNA, 25 bp, Homo sapien
gtagcatacagctatgagaaaggtt

SEQ ID NO: 486673 - DNA, 25 bp, Homo sapien
tgtactgcgtactttcacatacctg

SEQ ID NO: 486674 - DNA, 25 bp, Homo sapien
caagagtcagtagaataacaaaggc

SEQ ID NO: 486675 - DNA, 25 bp, Homo sapien
taaagcaagttgcatgcaggtagca

SEQ ID NO: 486676 - DNA, 25 bp, Homo sapien
cacgcccaacaggagccaaaatctt

SEQ ID NO: 486677 - DNA, 25 bp, Homo sapien
tatacccatgggagttcttgcagga

SEQ ID NO: 486678 - DNA, 25 bp, Homo sapien
tgtcaggcaccaggatatacccatg

SEQ ID NO: 486679 - DNA, 25 bp, Homo sapien
tctggcttagaagaagtcgcacgcc

SEQ ID NO: 486680 - DNA, 25 bp, Homo sapien
caacacgactgtgttgccacttaga

SEQ ID NO: 486681 - DNA, 25 bp, Homo sapien
aacacgactgtgttgccacttagac

SEQ ID NO: 486682 - DNA, 25 bp, Homo sapien
tgaaggacacttgcgagaatgcgga

SEQ ID NO: 486683 - DNA, 25 bp, Homo sapien
gaatcaactatttgcctagcgaaga

SEQ ID NO: 486684 - DNA, 25 bp, Homo sapien
tctccacagggaggatgagtaacca

SEQ ID NO: 486685 - DNA, 25 bp, Homo sapien
ttctcccagggacagatacgctcat

SEQ ID NO: 486686 - DNA, 25 bp, Homo sapien
acttccgcggatgttggcagagctt

SEQ ID NO: 486687 - DNA, 25 bp, Homo sapien
gttacacttccgcggatgttggcag

SEQ ID NO: 486688 - DNA, 25 bp, Homo sapien
tacacttccgcggatgttggcagag

SEQ ID NO: 486689 - DNA, 25 bp, Homo sapien
gctttccaaaccatcctctctcaca

SEQ ID NO: 486690 - DNA, 25 bp, Homo sapien
ccttccccgagcacaatatgccatc

SEQ ID NO: 486691 - DNA, 25 bp, Homo sapien
cttccccgagcacaatatgccatct

SEQ ID NO: 486692 - DNA, 25 bp, Homo sapien
cagaggttttgagggtaaatgaagc

SEQ ID NO: 486693 - DNA, 25 bp, Homo sapien
ttttgagggtaaatgaagcttcagc

SEQ ID NO: 486694 - DNA, 25 bp, Homo sapien
ggttttgagggtaaatgaagcttca

SEQ ID NO: 486695 - DNA, 25 bp, Homo sapien
tgaccagcagaggttttgagggtaa

SEQ ID NO: 486696 - DNA, 25 bp, Homo sapien
acaggattcagtgtctctagcacac

SEQ ID NO: 486697 - DNA, 25 bp, Homo sapien
ggttctttggcaacaggattcagtg

SEQ ID NO: 486698 - DNA, 25 bp, Homo sapien
ggtgtggttctttggcaacaggatt

SEQ ID NO: 486699 - DNA, 25 bp, Homo sapien
tggcaacaggattcagtgtctctag

SEQ ID NO: 486700 - DNA, 25 bp, Homo sapien
gaagtgaatacatctgcattcattt

SEQ ID NO: 486701 - DNA, 25 bp, Homo sapien
ttcttggcaccacagatagtcacag

SEQ ID NO: 486702 - DNA, 25 bp, Homo sapien
tgatgtctgaagttctgccaaaaag

SEQ ID NO: 486703 - DNA, 25 bp, Homo sapien
tgaagttctgccaaaaagtctcttt

SEQ ID NO: 486704 - DNA, 25 bp, Homo sapien
tcgtcatcgataatccagcattgat

SEQ ID NO: 486705 - DNA, 25 bp, Homo sapien
tggttttatcccctttcgtcatcga

SEQ ID NO: 486706 - DNA, 25 bp, Homo sapien
gaggccggtccactaacatgaatgt

SEQ ID NO: 486707 - DNA, 25 bp, Homo sapien
ggagatcacgatcagctgctgccaa

SEQ ID NO: 486708 - DNA, 25 bp, Homo sapien
tgcagaattggtaagttcaaaatat

SEQ ID NO: 486709 - DNA, 25 bp, Homo sapien
ggcaagaatcaatcattagtgcttc

SEQ ID NO: 486710 - DNA, 25 bp, Homo sapien
tcatatcagggaaactggtatatgc

SEQ ID NO: 486711 - DNA, 25 bp, Homo sapien
ttgtggtcatcacagatatcatgaa

SEQ ID NO: 486712 - DNA, 25 bp, Homo sapien
aatgcacttcccacaatgacaagaa

SEQ ID NO: 486713 - DNA, 25 bp, Homo sapien
gtcgcagtctctgtcatcacagtca

SEQ ID NO: 486714 - DNA, 25 bp, Homo sapien
tgtacaaatgagaccatcatgtttg

SEQ ID NO: 486715 - DNA, 25 bp, Homo sapien
tcttcagcagaacaaatgcacttcc

SEQ ID NO: 486716 - DNA, 25 bp, Homo sapien
acagtttccacagctacatattcca

SEQ ID NO: 486717 - DNA, 25 bp, Homo sapien
cagtttccacagctacatattccat

SEQ ID NO: 486718 - DNA, 25 bp, Homo sapien
cagtttgagccctattggcatttgg

SEQ ID NO: 486719 - DNA, 25 bp, Homo sapien
tggtgactgatacggaattctggaa

SEQ ID NO: 486720 - DNA, 25 bp, Homo sapien
tgtcctgtacactgcgggatgctca

SEQ ID NO: 486721 - DNA, 25 bp, Homo sapien
gaaaaattgctctcgttaggaacca

SEQ ID NO: 486722 - DNA, 25 bp, Homo sapien
aaatggatgcatacttcaggcccat

SEQ ID NO: 486723 - DNA, 25 bp, Homo sapien
ttgtacgcataacccctgcccagtt

SEQ ID NO: 486724 - DNA, 25 bp, Homo sapien
gaaacctaaaatagatatccctgaa

SEQ ID NO: 486725 - DNA, 25 bp, Homo sapien
atgtgatcccttatttctagaaacc

SEQ ID NO: 486726 - DNA, 25 bp, Homo sapien
tagaactacaacatggttgcactcc

SEQ ID NO: 486727 - DNA, 25 bp, Homo sapien
taagggaagtcccaattattgtaca

SEQ ID NO: 486728 - DNA, 25 bp, Homo sapien
aacattttgttcctatcactgagtg

SEQ ID NO: 486729 - DNA, 25 bp, Homo sapien
tgcactccttaatctcaggatagag

SEQ ID NO: 486730 - DNA, 25 bp, Homo sapien
taagcgccgtgatagagaaatccaa

SEQ ID NO: 486731 - DNA, 25 bp, Homo sapien
caaaggtcatttgtattacgatggc

SEQ ID NO: 486732 - DNA, 25 bp, Homo sapien
tccttaataggaggataagcgccgt

SEQ ID NO: 486733 - DNA, 25 bp, Homo sapien
tgtaatgaattccaatgtctgtgca

SEQ ID NO: 486734 - DNA, 25 bp, Homo sapien
aaatgaacactagaacagagctgac

SEQ ID NO: 486735 - DNA, 25 bp, Homo sapien
tatattggtgtttgcattgctggca

SEQ ID NO: 486736 - DNA, 25 bp, Homo sapien
tataatacagttccggtactatggt

SEQ ID NO: 486737 - DNA, 25 bp, Homo sapien
ttctgagaaaacaaatgccgaggac

SEQ ID NO: 486738 - DNA, 25 bp, Homo sapien
tgttggaatccagataaactcaagg

SEQ ID NO: 486739 - DNA, 25 bp, Homo sapien
gagggcggtactttccaagtgctgt

SEQ ID NO: 486740 - DNA, 25 bp, Homo sapien
gacaacgggtataatggctctcctc

SEQ ID NO: 486741 - DNA, 25 bp, Homo sapien
aaacaagcagcgttagtgccaacac

SEQ ID NO: 486742 - DNA, 25 bp, Homo sapien
tctggtctcacctgtagcatgggaa

SEQ ID NO: 486743 - DNA, 25 bp, Homo sapien
tatatcaagggaaagcgactgggct

SEQ ID NO: 486744 - DNA, 25 bp, Homo sapien
gcttaaagagatccacgatgggtcc

SEQ ID NO: 486745 - DNA, 25 bp, Homo sapien
tatttgtttgggataagacttcgcc

SEQ ID NO: 486746 - DNA, 25 bp, Homo sapien
tctatgtgggaggatgacccagtca

SEQ ID NO: 486747 - DNA, 25 bp, Homo sapien
taaatcttcttcatgacagcccttg

SEQ ID NO: 486748 - DNA, 25 bp, Homo sapien
tttgagcttagggaagacaactacc

SEQ ID NO: 486749 - DNA, 25 bp, Homo sapien
tatgtgggatcaatgtactggcctc

SEQ ID NO: 486750 - DNA, 25 bp, Homo sapien
tgcccagtggctgggttagaggtgc

SEQ ID NO: 486751 - DNA, 25 bp, Homo sapien
gtctgttgaattatcctagatgaaa

SEQ ID NO: 486752 - DNA, 25 bp, Homo sapien
gccatgatctcagaatacagtctgt

SEQ ID NO: 486753 - DNA, 25 bp, Homo sapien
acatgcctctagctcagcatctggg

SEQ ID NO: 486754 - DNA, 25 bp, Homo sapien
tcagcagagcatgggcaagacggct

SEQ ID NO: 486755 - DNA, 25 bp, Homo sapien
taatgaaccaaacttaacgccatcc

SEQ ID NO: 486756 - DNA, 25 bp, Homo sapien
tccatttcagatatactccgtcctg

SEQ ID NO: 486757 - DNA, 25 bp, Homo sapien
tgcgttcccctcatactcagcagag

SEQ ID NO: 486758 - DNA, 25 bp, Homo sapien
caatggaattgctttacttcaggga

SEQ ID NO: 486759 - DNA, 25 bp, Homo sapien
cactagttgccatgtaccgagaacc

SEQ ID NO: 486760 - DNA, 25 bp, Homo sapien
aatgggcaaactgcagtggtctatg

SEQ ID NO: 486761 - DNA, 25 bp, Homo sapien
caggtatggatggaccattctcaca

SEQ ID NO: 486762 - DNA, 25 bp, Homo sapien
ttcctctacatcaagcatcttcttc

SEQ ID NO: 486763 - DNA, 25 bp, Homo sapien
gagacaatacatccctaagttgctg

SEQ ID NO: 486764 - DNA, 25 bp, Homo sapien
tcctctacatcaagcatcttcttct

SEQ ID NO: 486765 - DNA, 25 bp, Homo sapien
caatacatccctaagttgctgatgg

SEQ ID NO: 486766 - DNA, 25 bp, Homo sapien
atttgagtttgtggcccgtgctgtg

SEQ ID NO: 486767 - DNA, 25 bp, Homo sapien
tgagtttgtggcccgtgctgtgcac

SEQ ID NO: 486768 - DNA, 25 bp, Homo sapien
gcatttgagtttgtggcccgtgctg

SEQ ID NO: 486769 - DNA, 25 bp, Homo sapien
agtttgtggcccgtgctgtgcacat

SEQ ID NO: 486770 - DNA, 25 bp, Homo sapien
caaagtaagaacttggacttggaga

SEQ ID NO: 486771 - DNA, 25 bp, Homo sapien
gagagatactcctaaggagtccagg

SEQ ID NO: 486772 - DNA, 25 bp, Homo sapien
tccaggatgagggtcattattgagc

SEQ ID NO: 486773 - DNA, 25 bp, Homo sapien
cattattgagctgttactgggaggg

SEQ ID NO: 486774 - DNA, 25 bp, Homo sapien
aaaaggtggatacaggttgcgtgaa

SEQ ID NO: 486775 - DNA, 25 bp, Homo sapien
acctctgctagggtgataggctata

SEQ ID NO: 486776 - DNA, 25 bp, Homo sapien
gcttctaagagacgtgtcacctctg

SEQ ID NO: 486777 - DNA, 25 bp, Homo sapien
tctgtaggtatagaggtagataaaa

SEQ ID NO: 486778 - DNA, 25 bp, Homo sapien
taccacccaagctaggccagattta

SEQ ID NO: 486779 - DNA, 25 bp, Homo sapien
gaccactggtttcactcatgcctaa

SEQ ID NO: 486780 - DNA, 25 bp, Homo sapien
aaatcccaaatcctactgctgtgtg

SEQ ID NO: 486781 - DNA, 25 bp, Homo sapien
cctgccccagggtctttgtatatta

SEQ ID NO: 486782 - DNA, 25 bp, Homo sapien
tattgcccactgatgcgttatgatc

SEQ ID NO: 486783 - DNA, 25 bp, Homo sapien
taactgcttattgcccactgatgcg

SEQ ID NO: 486784 - DNA, 25 bp, Homo sapien
tccgctaactgcttattgcccactg

SEQ ID NO: 486785 - DNA, 25 bp, Homo sapien
cactgatgcgttatgatctttagcc

SEQ ID NO: 486786 - DNA, 25 bp, Homo sapien
gacaaaatgctcctaccatttggat

SEQ ID NO: 486787 - DNA, 25 bp, Homo sapien
taacagtgctactagaaatcagaca

SEQ ID NO: 486788 - DNA, 25 bp, Homo sapien
taaccctctttcacataggcacaca

SEQ ID NO: 486789 - DNA, 25 bp, Homo sapien
tgtttaacagtgctactagaaatca

SEQ ID NO: 486790 - DNA, 25 bp, Homo sapien
tgctgttctggggaggttaactttc

SEQ ID NO: 486791 - DNA, 25 bp, Homo sapien
ttaactttcttacttcaaattcaca

SEQ ID NO: 486792 - DNA, 25 bp, Homo sapien
ttctgccactttggtcagctgctgt

SEQ ID NO: 486793 - DNA, 25 bp, Homo sapien
tagcttctgccactttggtcagctg

SEQ ID NO: 486794 - DNA, 25 bp, Homo sapien
ggatgggtttacagttgcagccaag

SEQ ID NO: 486795 - DNA, 25 bp, Homo sapien
tgttgtcagttgtagagtaatgcca

SEQ ID NO: 486796 - DNA, 25 bp, Homo sapien
tgcattgaattgacccaaacaggga

SEQ ID NO: 486797 - DNA, 25 bp, Homo sapien
gtagagtaatgccatttagaggctg

SEQ ID NO: 486798 - DNA, 25 bp, Homo sapien
tatgaatctgtagcatgaaatacat

SEQ ID NO: 486799 - DNA, 25 bp, Homo sapien
tcatttcacaactgtatgaatctgt

SEQ ID NO: 486800 - DNA, 25 bp, Homo sapien
caactgtatgaatctgtagcatgaa

SEQ ID NO: 486801 - DNA, 25 bp, Homo sapien
tttcacaactgtatgaatctgtagc

SEQ ID NO: 486802 - DNA, 25 bp, Homo sapien
agtgatgacatcagactatgcaggg

SEQ ID NO: 486803 - DNA, 25 bp, Homo sapien
tttaagctcatgtattcatcaccac

SEQ ID NO: 486804 - DNA, 25 bp, Homo sapien
tttatccaatgcaagattctgtcta

SEQ ID NO: 486805 - DNA, 25 bp, Homo sapien
tgtctatcatgcatattcactgctg

SEQ ID NO: 486806 - DNA, 25 bp, Homo sapien
tgtaccgtgattgtgtgtgcatcct

SEQ ID NO: 486807 - DNA, 25 bp, Homo sapien
ctatggttgagtaattgtcatggca

SEQ ID NO: 486808 - DNA, 25 bp, Homo sapien
tgtgcatcctaagacgtgattcctg

SEQ ID NO: 486809 - DNA, 25 bp, Homo sapien
gcaggtttgcccctctagtgttggc

SEQ ID NO: 486810 - DNA, 25 bp, Homo sapien
ttggtttcttggtgtcacctttagc

SEQ ID NO: 486811 - DNA, 25 bp, Homo sapien
gtttcttggtgtcacctttagccat

SEQ ID NO: 486812 - DNA, 25 bp, Homo sapien
ggtttcttggtgtcacctttagcca

SEQ ID NO: 486813 - DNA, 25 bp, Homo sapien
tggtttcttggtgtcacctttagcc

SEQ ID NO: 486814 - DNA, 25 bp, Homo sapien
tgtcggagcacatcttgaaaaattc

SEQ ID NO: 486815 - DNA, 25 bp, Homo sapien
acatctgcacaaagagagcacaagc

SEQ ID NO: 486816 - DNA, 25 bp, Homo sapien
tctgcacaaagagagcacaagcaga

SEQ ID NO: 486817 - DNA, 25 bp, Homo sapien
tgcacaaagagagcacaagcagaca

SEQ ID NO: 486818 - DNA, 25 bp, Homo sapien
gatttatacttatctttcctagaca

SEQ ID NO: 486819 - DNA, 25 bp, Homo sapien
cataatcgttcatttccccatccga

SEQ ID NO: 486820 - DNA, 25 bp, Homo sapien
catccgaacctactttttctgcctt

SEQ ID NO: 486821 - DNA, 25 bp, Homo sapien
tacttatctttcctagacactgtct

SEQ ID NO: 486822 - DNA, 25 bp, Homo sapien
ggaaagaattcagatggtggccttc

SEQ ID NO: 486823 - DNA, 25 bp, Homo sapien
tgaacagaacggaaagaattcagat

SEQ ID NO: 486824 - DNA, 25 bp, Homo sapien
tgggacatcttctcgcctccctgag

SEQ ID NO: 486825 - DNA, 25 bp, Homo sapien
tggccttcttgggacatcttctcgc

SEQ ID NO: 486826 - DNA, 25 bp, Homo sapien
ccttagtgatgtcagtctgctttgt

SEQ ID NO: 486827 - DNA, 25 bp, Homo sapien
ccagctttttgccacggatgccagg

SEQ ID NO: 486828 - DNA, 25 bp, Homo sapien
gatgtcagtctgctttgtcctgtca

SEQ ID NO: 486829 - DNA, 25 bp, Homo sapien
ccacggatgccaggatttgcagatt

SEQ ID NO: 486830 - DNA, 25 bp, Homo sapien
tgagccatcaaactctcctttacac

SEQ ID NO: 486831 - DNA, 25 bp, Homo sapien
ttgagccatcaaactctcctttaca

SEQ ID NO: 486832 - DNA, 25 bp, Homo sapien
tttagtggggtgctttgagccatca

SEQ ID NO: 486833 - DNA, 25 bp, Homo sapien
ttagtggggtgctttgagccatcaa

SEQ ID NO: 486834 - DNA, 25 bp, Homo sapien
gtgtcagttacagcactctcctcct

SEQ ID NO: 486835 - DNA, 25 bp, Homo sapien
ttgtcattaaacctagtgagggcag

SEQ ID NO: 486836 - DNA, 25 bp, Homo sapien
gattctgatcagattttgtcattaa

SEQ ID NO: 486837 - DNA, 25 bp, Homo sapien
gattttgtcattaaacctagtgagg

SEQ ID NO: 486838 - DNA, 25 bp, Homo sapien
gatcagattttgtcattaaacctag

SEQ ID NO: 486839 - DNA, 25 bp, Homo sapien
gcagcttgaggagcattgatgagtt

SEQ ID NO: 486840 - DNA, 25 bp, Homo sapien
agttaaagtactgatgcaactctaa

SEQ ID NO: 486841 - DNA, 25 bp, Homo sapien
agcattgatgagtttgtggatttgc

SEQ ID NO: 486842 - DNA, 25 bp, Homo sapien
aaataagttaaagtactgatgcaac

SEQ ID NO: 486843 - DNA, 25 bp, Homo sapien
gcaactagttagcaccttgggtgag

SEQ ID NO: 486844 - DNA, 25 bp, Homo sapien
ttttaagtcattgaagggagtcacc

SEQ ID NO: 486845 - DNA, 25 bp, Homo sapien
tgtgataagatacgatgaagccctc

SEQ ID NO: 486846 - DNA, 25 bp, Homo sapien
gaaattccccttgtctctagctaag

SEQ ID NO: 486847 - DNA, 25 bp, Homo sapien
agtgctgtatgaatgcgaagaatac

SEQ ID NO: 486848 - DNA, 25 bp, Homo sapien
cactgattatcaggtaaactcaaac

SEQ ID NO: 486849 - DNA, 25 bp, Homo sapien
aaacttcatcatgataacactgatt

SEQ ID NO: 486850 - DNA, 25 bp, Homo sapien
tgtatgaatgcgaagaatacaggat

SEQ ID NO: 486851 - DNA, 25 bp, Homo sapien
tttccacttaagctccacacttgag

SEQ ID NO: 486852 - DNA, 25 bp, Homo sapien
gtaaatttcccacacttgacagcgt

SEQ ID NO: 486853 - DNA, 25 bp, Homo sapien
gacctagaggataattgccccgata

SEQ ID NO: 486854 - DNA, 25 bp, Homo sapien
tcctcattacaaggagacctagagg

SEQ ID NO: 486855 - DNA, 25 bp, Homo sapien
agaagtggctcgtcctccatgtcca

SEQ ID NO: 486856 - DNA, 25 bp, Homo sapien
catcaaggtgctcagtatgagacag

SEQ ID NO: 486857 - DNA, 25 bp, Homo sapien
cattttgtctgtatctaagcagaga

SEQ ID NO: 486858 - DNA, 25 bp, Homo sapien
gcagagatttccagacaagttccat

SEQ ID NO: 486859 - DNA, 25 bp, Homo sapien
gtcactcaggtggtagatagaaaag

SEQ ID NO: 486860 - DNA, 25 bp, Homo sapien
cactctgtctagcactgttctaagc

SEQ ID NO: 486861 - DNA, 25 bp, Homo sapien
gatatttgtacaatccactctgtct

SEQ ID NO: 486862 - DNA, 25 bp, Homo sapien
gagtttaagaatctgcccaaagtca

SEQ ID NO: 486863 - DNA, 25 bp, Homo sapien
gactccgatgggtcacttcttgaga

SEQ ID NO: 486864 - DNA, 25 bp, Homo sapien
gatgttcagtgtgcagacttttagc

SEQ ID NO: 486865 - DNA, 25 bp, Homo sapien
gcttgagtttcatgcgtgcccagag

SEQ ID NO: 486866 - DNA, 25 bp, Homo sapien
gcctcacctactgttatccccaaag

SEQ ID NO: 486867 - DNA, 25 bp, Homo sapien
ggcaggcagaagtacacgtggctct

SEQ ID NO: 486868 - DNA, 25 bp, Homo sapien
tcaccaaggtaatgcgcagctacag

SEQ ID NO: 486869 - DNA, 25 bp, Homo sapien
cgtcttatccggagtcagtgctgca

SEQ ID NO: 486870 - DNA, 25 bp, Homo sapien
agtagagcattgtggatacacccca

SEQ ID NO: 486871 - DNA, 25 bp, Homo sapien
ctgtattatggttgccagtttcaca

SEQ ID NO: 486872 - DNA, 25 bp, Homo sapien
tctgtattatggttgccagtttcac

SEQ ID NO: 486873 - DNA, 25 bp, Homo sapien
tctctgtattatggttgccagtttc

SEQ ID NO: 486874 - DNA, 25 bp, Homo sapien
ctctctgtattatggttgccagttt

SEQ ID NO: 486875 - DNA, 25 bp, Homo sapien
ctatctgaacgctgagagcaaaggg

SEQ ID NO: 486876 - DNA, 25 bp, Homo sapien
gatggcactatctgaacgctgagag

SEQ ID NO: 486877 - DNA, 25 bp, Homo sapien
tctggaattgggttatattcctcac

SEQ ID NO: 486878 - DNA, 25 bp, Homo sapien
ctataaagtattctgggatggcact

SEQ ID NO: 486879 - DNA, 25 bp, Homo sapien
ttctttagggttggcttagactcca

SEQ ID NO: 486880 - DNA, 25 bp, Homo sapien
tctttagggttggcttagactccat

SEQ ID NO: 486881 - DNA, 25 bp, Homo sapien
tcatggtgtggtcggtgctggtaaa

SEQ ID NO: 486882 - DNA, 25 bp, Homo sapien
caaactggctggaaaacttgggcag

SEQ ID NO: 486883 - DNA, 25 bp, Homo sapien
gtgtggtcggtgctggtaaagccct

SEQ ID NO: 486884 - DNA, 25 bp, Homo sapien
tgctcccacaaactggctggaaaac

SEQ ID NO: 486885 - DNA, 25 bp, Homo sapien
catgagagctatggtattatgtgcc

SEQ ID NO: 486886 - DNA, 25 bp, Homo sapien
taaagtagccactgactacaatggt

SEQ ID NO: 486887 - DNA, 25 bp, Homo sapien
gtgcctgggcttcttactaacattt

SEQ ID NO: 486888 - DNA, 25 bp, Homo sapien
catgtatgcttaatcagcaggtgcc

SEQ ID NO: 486889 - DNA, 25 bp, Homo sapien
tcagctgattgtagggaagaagcaa

SEQ ID NO: 486890 - DNA, 25 bp, Homo sapien
caaatcttgagagtgtttgccatac

SEQ ID NO: 486891 - DNA, 25 bp, Homo sapien
tctgcatcttcataggctctcaaat

SEQ ID NO: 486892 - DNA, 25 bp, Homo sapien
tttgccatacactgggttctcctca

SEQ ID NO: 486893 - DNA, 25 bp, Homo sapien
gcagcccttcagtcaaatcctggga

SEQ ID NO: 486894 - DNA, 25 bp, Homo sapien
tgtgtgaactatggcccagtccgct

SEQ ID NO: 486895 - DNA, 25 bp, Homo sapien
gaattgcctgagatacaagccgtta

SEQ ID NO: 486896 - DNA, 25 bp, Homo sapien
taattgaaaaactggcgaattgcct

SEQ ID NO: 486897 - DNA, 25 bp, Homo sapien
ggttcccagaccttggacaaatgtg

SEQ ID NO: 486898 - DNA, 25 bp, Homo sapien
caaatgtggatatcctggcggtgcc

SEQ ID NO: 486899 - DNA, 25 bp, Homo sapien
tcaagaagcgcaggttgcggcgcca

SEQ ID NO: 486900 - DNA, 25 bp, Homo sapien
aaagtgcgcatcttcggcctcaaga

SEQ ID NO: 486901 - DNA, 25 bp, Homo sapien
ctgtgaagatcaatttccttcccat

SEQ ID NO: 486902 - DNA, 25 bp, Homo sapien
gctacgttgaagagaaatgaccgct

SEQ ID NO: 486903 - DNA, 25 bp, Homo sapien
tcacagccagaatagatgcccggag

SEQ ID NO: 486904 - DNA, 25 bp, Homo sapien
gaccgcttgaggctcctgaaattca

SEQ ID NO: 486905 - DNA, 25 bp, Homo sapien
tatctctcggttatggaaaagctga

SEQ ID NO: 486906 - DNA, 25 bp, Homo sapien
aaactgatgcttgtatagtatttta

SEQ ID NO: 486907 - DNA, 25 bp, Homo sapien
ccaaactgatgcttgtatagtattt

SEQ ID NO: 486908 - DNA, 25 bp, Homo sapien
ttccaaactgatgcttgtatagtat

SEQ ID NO: 486909 - DNA, 25 bp, Homo sapien
cttccaaactgatgcttgtatagta

SEQ ID NO: 486910 - DNA, 25 bp, Homo sapien
gagcctaatggtcctgtctccacaa

SEQ ID NO: 486911 - DNA, 25 bp, Homo sapien
cacaatcactgagaattgctgtacg

SEQ ID NO: 486912 - DNA, 25 bp, Homo sapien
tggagcggtccagcaaatgataaca

SEQ ID NO: 486913 - DNA, 25 bp, Homo sapien
gaaattcaggtaagcaggtggtact

SEQ ID NO: 486914 - DNA, 25 bp, Homo sapien
tcaaagaaatgatccccggagaggc

SEQ ID NO: 486915 - DNA, 25 bp, Homo sapien
tcagctttgactcttgcagcagggc

SEQ ID NO: 486916 - DNA, 25 bp, Homo sapien
gggcaactcccggtcctggaaatga

SEQ ID NO: 486917 - DNA, 25 bp, Homo sapien
ttgactcaccgagggtagaatgacc

SEQ ID NO: 486918 - DNA, 25 bp, Homo sapien
ccggcagacagtctgcagcagtaga

SEQ ID NO: 486919 - DNA, 25 bp, Homo sapien
gacagtctgcagcagtagaacattc

SEQ ID NO: 486920 - DNA, 25 bp, Homo sapien
cggcagacagtctgcagcagtagaa

SEQ ID NO: 486921 - DNA, 25 bp, Homo sapien
agtctgcagcagtagaacattccat

SEQ ID NO: 486922 - DNA, 25 bp, Homo sapien
cttttaacagaagggttgagttcat

SEQ ID NO: 486923 - DNA, 25 bp, Homo sapien
tcttttaacagaagggttgagttca

SEQ ID NO: 486924 - DNA, 25 bp, Homo sapien
ttgatgggttgaccattccgacccc

SEQ ID NO: 486925 - DNA, 25 bp, Homo sapien
aagccattgcttgtctattcggtgc

SEQ ID NO: 486926 - DNA, 25 bp, Homo sapien
tctggaagccagtataaagccattg

SEQ ID NO: 486927 - DNA, 25 bp, Homo sapien
tagtctccaagatgagagtgaaatc

SEQ ID NO: 486928 - DNA, 25 bp, Homo sapien
aaaccactggtgaaagcggtttgtg

SEQ ID NO: 486929 - DNA, 25 bp, Homo sapien
tagttcatcacccagttcctgttgc

SEQ ID NO: 486930 - DNA, 25 bp, Homo sapien
ctggtgaaagcggtttgtgccatta

SEQ ID NO: 486931 - DNA, 25 bp, Homo sapien
cattatcttgtagttcatcacccag

SEQ ID NO: 486932 - DNA, 25 bp, Homo sapien
tggtcagatttcaatctccacaaaa

SEQ ID NO: 486933 - DNA, 25 bp, Homo sapien
caccttttcgattttggtcagattt

SEQ ID NO: 486934 - DNA, 25 bp, Homo sapien
gacaaatattgggccaccttttcga

SEQ ID NO: 486935 - DNA, 25 bp, Homo sapien
cgattttggtcagatttcaatctcc

SEQ ID NO: 486936 - DNA, 25 bp, Homo sapien
taccccagtggctccaaagaaccac

SEQ ID NO: 486937 - DNA, 25 bp, Homo sapien
ttactaaatagtaccccagtggctc

SEQ ID NO: 486938 - DNA, 25 bp, Homo sapien
catttactaaatagtaccccagtgg

SEQ ID NO: 486939 - DNA, 25 bp, Homo sapien
agctctctgagtttaggaaagctct

SEQ ID NO: 486940 - DNA, 25 bp, Homo sapien
tctggaggaatagaaacaccttcct

SEQ ID NO: 486941 - DNA, 25 bp, Homo sapien
taggaaagctctcaagttctctgaa

SEQ ID NO: 486942 - DNA, 25 bp, Homo sapien
cacttttggttaacttctgtccaag

SEQ ID NO: 486943 - DNA, 25 bp, Homo sapien
cactcagtgagaaatctcttatttc

SEQ ID NO: 486944 - DNA, 25 bp, Homo sapien
catcacatcacactcagtgagaaat

SEQ ID NO: 486945 - DNA, 25 bp, Homo sapien
tttctgatctgggcctggacacaca

SEQ ID NO: 486946 - DNA, 25 bp, Homo sapien
tttggcttctttacccatcacatca

SEQ ID NO: 486947 - DNA, 25 bp, Homo sapien
ctcggtttccatttgcaagattgct

SEQ ID NO: 486948 - DNA, 25 bp, Homo sapien
atttttgccaatctgccgtctgtga

SEQ ID NO: 486949 - DNA, 25 bp, Homo sapien
ccaatctgccgtctgtgatgttggc

SEQ ID NO: 486950 - DNA, 25 bp, Homo sapien
ggctgcatcccagggatcactcggt

SEQ ID NO: 486951 - DNA, 25 bp, Homo sapien
tagagtccaatgatgattcagtggt

SEQ ID NO: 486952 - DNA, 25 bp, Homo sapien
tctaagatgataccagggaacattt

SEQ ID NO: 486953 - DNA, 25 bp, Homo sapien
ttaatgtagagtccaatgatgattc

SEQ ID NO: 486954 - DNA, 25 bp, Homo sapien
agtggttctaagatgataccaggga

SEQ ID NO: 486955 - DNA, 25 bp, Homo sapien
cttggataaatgatgtagagccttt

SEQ ID NO: 486956 - DNA, 25 bp, Homo sapien
tatgggtttgtataggaaaacattc

SEQ ID NO: 486957 - DNA, 25 bp, Homo sapien
tttcatctgtttgccggaagcctaa

SEQ ID NO: 486958 - DNA, 25 bp, Homo sapien
tgtagagcctttagagctttcttca

SEQ ID NO: 486959 - DNA, 25 bp, Homo sapien
tgctacatgaattcccaatggtcag

SEQ ID NO: 486960 - DNA, 25 bp, Homo sapien
ctacatgaattcccaatggtcagct

SEQ ID NO: 486961 - DNA, 25 bp, Homo sapien
ctgctacatgaattcccaatggtca

SEQ ID NO: 486962 - DNA, 25 bp, Homo sapien
aaactagatttgtgagggagctgct

SEQ ID NO: 486963 - DNA, 25 bp, Homo sapien
atgttatttccttgacagtcgttcc

SEQ ID NO: 486964 - DNA, 25 bp, Homo sapien
tatttccttgacagtcgttcccaat

SEQ ID NO: 486965 - DNA, 25 bp, Homo sapien
tggttttcttgcagtgctcttctct

SEQ ID NO: 486966 - DNA, 25 bp, Homo sapien
tcttgcagtgctcttctctttattc

SEQ ID NO: 486967 - DNA, 25 bp, Homo sapien
cagaattactgaaagccattctcca

SEQ ID NO: 486968 - DNA, 25 bp, Homo sapien
tcttgaggcgttacagaattactga

SEQ ID NO: 486969 - DNA, 25 bp, Homo sapien
tggaatcttgaggcgttacagaatt

SEQ ID NO: 486970 - DNA, 25 bp, Homo sapien
acagaattactgaaagccattctcc

SEQ ID NO: 486971 - DNA, 25 bp, Homo sapien
ttagatttatatgggcgtggatcca

SEQ ID NO: 486972 - DNA, 25 bp, Homo sapien
caaggactgtggtgcctatcattta

SEQ ID NO: 486973 - DNA, 25 bp, Homo sapien
gtggatccaatcttctatggccaga

SEQ ID NO: 486974 - DNA, 25 bp, Homo sapien
tcatttataacagcagcagactttc

SEQ ID NO: 486975 - DNA, 25 bp, Homo sapien
catatcacagtaggctgctcctcct

SEQ ID NO: 486976 - DNA, 25 bp, Homo sapien
atccatatcacagtaggctgctcct

SEQ ID NO: 486977 - DNA, 25 bp, Homo sapien
atatcacagtaggctgctcctcctc

SEQ ID NO: 486978 - DNA, 25 bp, Homo sapien
ccacttcttctggacagttttatac

SEQ ID NO: 486979 - DNA, 25 bp, Homo sapien
ttttggtaggctgcacattccattt

SEQ ID NO: 486980 - DNA, 25 bp, Homo sapien
attttggtaggctgcacattccatt

SEQ ID NO: 486981 - DNA, 25 bp, Homo sapien
tattttggtaggctgcacattccat

SEQ ID NO: 486982 - DNA, 25 bp, Homo sapien
gaagacaagatagtcccattagcgc

SEQ ID NO: 486983 - DNA, 25 bp, Homo sapien
cttgcacgccagaatgagatccttt

SEQ ID NO: 486984 - DNA, 25 bp, Homo sapien
cattagcgctacgtaataaggtgca

SEQ ID NO: 486985 - DNA, 25 bp, Homo sapien
tagcattcagcagtacttgcacgcc

SEQ ID NO: 486986 - DNA, 25 bp, Homo sapien
gcacttgaatcaacttggcaacttt

SEQ ID NO: 486987 - DNA, 25 bp, Homo sapien
tagtcaatgcagaagcatgggatac

SEQ ID NO: 486988 - DNA, 25 bp, Homo sapien
tgatgaaatctggtactcagcagca

SEQ ID NO: 486989 - DNA, 25 bp, Homo sapien
gggatacaagctccctgatgaaatc

SEQ ID NO: 486990 - DNA, 25 bp, Homo sapien
tgtcctttttcggatgactttggaa

SEQ ID NO: 486991 - DNA, 25 bp, Homo sapien
taaaaacgtgtcatctaatgtcctt

SEQ ID NO: 486992 - DNA, 25 bp, Homo sapien
tggtgctgagaagcctttaaaaacg

SEQ ID NO: 486993 - DNA, 25 bp, Homo sapien
taatgtcctttttcggatgactttg

SEQ ID NO: 486994 - DNA, 25 bp, Homo sapien
tagggatcaacccaagacatcagtg

SEQ ID NO: 486995 - DNA, 25 bp, Homo sapien
tataaagctgttgccaaacatcctg

SEQ ID NO: 486996 - DNA, 25 bp, Homo sapien
tgtcccctgacattgatgagatagg

SEQ ID NO: 486997 - DNA, 25 bp, Homo sapien
cctcaggagcctagatttttatggg

SEQ ID NO: 486998 - DNA, 25 bp, Homo sapien
gcatctgcaagggtcagtgttgttc

SEQ ID NO: 486999 - DNA, 25 bp, Homo sapien
agtgcatctgcaagggtcagtgttg

SEQ ID NO: 487000 - DNA, 25 bp, Homo sapien
tcatggacggcctccgtatggtgcc

SEQ ID NO: 487001 - DNA, 25 bp, Homo sapien
ggtgccatcctagtacagcttgaca

SEQ ID NO: 487002 - DNA, 25 bp, Homo sapien
actcattgtgagagtgagtcctctg

SEQ ID NO: 487003 - DNA, 25 bp, Homo sapien
gtgctgttacttttccacccacgat

SEQ ID NO: 487004 - DNA, 25 bp, Homo sapien
ttctctctgccttgtcgtgctgtta

SEQ ID NO: 487005 - DNA, 25 bp, Homo sapien
ctgccctgcaatctggatctggttc

SEQ ID NO: 487006 - DNA, 25 bp, Homo sapien
gtcgtgctgttacttttccacccac

SEQ ID NO: 487007 - DNA, 25 bp, Homo sapien
tctgttcgtgagagtgtaattccca

SEQ ID NO: 487008 - DNA, 25 bp, Homo sapien
tccgattgcccagatctctatatag

SEQ ID NO: 487009 - DNA, 25 bp, Homo sapien
ccacagcagattgcgtctattacaa

SEQ ID NO: 487010 - DNA, 25 bp, Homo sapien
tagccctgatagttttgccaatagt

SEQ ID NO: 487011 - DNA, 25 bp, Homo sapien
gatgagaagcctcccctgatacctg

SEQ ID NO: 487012 - DNA, 25 bp, Homo sapien
tatgaacttccatccctctgcagcg

SEQ ID NO: 487013 - DNA, 25 bp, Homo sapien
cattgggctagatgtcttcgtaaga

SEQ ID NO: 487014 - DNA, 25 bp, Homo sapien
cgtaagagtcctgtagcatcctgca

SEQ ID NO: 487015 - DNA, 25 bp, Homo sapien
gtcccctgataggtcctctccaaaa

SEQ ID NO: 487016 - DNA, 25 bp, Homo sapien
taaaagcgcactagtcaatgtcccc

SEQ ID NO: 487017 - DNA, 25 bp, Homo sapien
ttctgtcctaaaagcgcactagtca

SEQ ID NO: 487018 - DNA, 25 bp, Homo sapien
gacctcaggacttagttcatcccag

SEQ ID NO: 487019 - DNA, 25 bp, Homo sapien
gtgtactagaacgaggatttgcagg

SEQ ID NO: 487020 - DNA, 25 bp, Homo sapien
tctttcctcctggccgtgtactaga

SEQ ID NO: 487021 - DNA, 25 bp, Homo sapien
cctggccgtgtactagaacgaggat

SEQ ID NO: 487022 - DNA, 25 bp, Homo sapien
cctcctggccgtgtactagaacgag

SEQ ID NO: 487023 - DNA, 25 bp, Homo sapien
ctggcgcttatcatcctggatttct

SEQ ID NO: 487024 - DNA, 25 bp, Homo sapien
gaccctctggcgcttatcatcctgg

SEQ ID NO: 487025 - DNA, 25 bp, Homo sapien
gaaggaccctctggcgcttatcatc

SEQ ID NO: 487026 - DNA, 25 bp, Homo sapien
cctctggcgcttatcatcctggatt

SEQ ID NO: 487027 - DNA, 25 bp, Homo sapien
ctacttaatactggcagcagttttc

SEQ ID NO: 487028 - DNA, 25 bp, Homo sapien
tacttaatactggcagcagttttct

SEQ ID NO: 487029 - DNA, 25 bp, Homo sapien
tcagccgtctccacagtgaggtgag

SEQ ID NO: 487030 - DNA, 25 bp, Homo sapien
aaaatcagccgtctccacagtgagg

SEQ ID NO: 487031 - DNA, 25 bp, Homo sapien
gaggtaaaatcagccgtctccacag

SEQ ID NO: 487032 - DNA, 25 bp, Homo sapien
cttgaggtaaaatcagccgtctcca

SEQ ID NO: 487033 - DNA, 25 bp, Homo sapien
aagtgggctgatcattcagtgttgg

SEQ ID NO: 487034 - DNA, 25 bp, Homo sapien
gtgggctgatcattcagtgttggtg

SEQ ID NO: 487035 - DNA, 25 bp, Homo sapien
cccaagtgggctgatcattcagtgt

SEQ ID NO: 487036 - DNA, 25 bp, Homo sapien
ccaagtgggctgatcattcagtgtt

SEQ ID NO: 487037 - DNA, 25 bp, Homo sapien
ggggtagactgcattctgcagcgaa

SEQ ID NO: 487038 - DNA, 25 bp, Homo sapien
tagactgcattctgcagcgaaggcc

SEQ ID NO: 487039 - DNA, 25 bp, Homo sapien
ccaaggacaggggagtgggagcctg

SEQ ID NO: 487040 - DNA, 25 bp, Homo sapien
gactgcattctgcagcgaaggccat

SEQ ID NO: 487041 - DNA, 25 bp, Homo sapien
gctgcttcccatattaggcccatat

SEQ ID NO: 487042 - DNA, 25 bp, Homo sapien
catatcttcccctatggttcacatt

SEQ ID NO: 487043 - DNA, 25 bp, Homo sapien
tatggttcacatttgtctgcctttg

SEQ ID NO: 487044 - DNA, 25 bp, Homo sapien
tttcattgagttgtttacggctttg

SEQ ID NO: 487045 - DNA, 25 bp, Homo sapien
gactttgttccacgtaattgacttg

SEQ ID NO: 487046 - DNA, 25 bp, Homo sapien
tttctcatggtgcaagcagactttg

SEQ ID NO: 487047 - DNA, 25 bp, Homo sapien
taattgacttgataccagatgttag

SEQ ID NO: 487048 - DNA, 25 bp, Homo sapien
gttcgtatggcttgtagaaactaaa

SEQ ID NO: 487049 - DNA, 25 bp, Homo sapien
ttgattggcaatgagaccatcattc

SEQ ID NO: 487050 - DNA, 25 bp, Homo sapien
cagacaaagccttacccacttgaag

SEQ ID NO: 487051 - DNA, 25 bp, Homo sapien
gaaggatgtgatctaacttatggcc

SEQ ID NO: 487052 - DNA, 25 bp, Homo sapien
tcattgattggcaatgagaccatca

SEQ ID NO: 487053 - DNA, 25 bp, Homo sapien
cctgtgggccactcctgtgttgcca

SEQ ID NO: 487054 - DNA, 25 bp, Homo sapien
tctccctgtgggccactcctgtgtt

SEQ ID NO: 487055 - DNA, 25 bp, Homo sapien
tccctgtgggccactcctgtgttgc

SEQ ID NO: 487056 - DNA, 25 bp, Homo sapien
gtgggccactcctgtgttgccactc

SEQ ID NO: 487057 - DNA, 25 bp, Homo sapien
cctgtgggccactcctgtgttgcca

SEQ ID NO: 487058 - DNA, 25 bp, Homo sapien
tctccctgtgggccactcctgtgtt

SEQ ID NO: 487059 - DNA, 25 bp, Homo sapien
tccctgtgggccactcctgtgttgc

SEQ ID NO: 487060 - DNA, 25 bp, Homo sapien
gtgggccactcctgtgttgccactc

SEQ ID NO: 487061 - DNA, 25 bp, Homo sapien
cttctaaattgctgcattcgttcat

SEQ ID NO: 487062 - DNA, 25 bp, Homo sapien
gcattcgttcataaactgtttcttg

SEQ ID NO: 487063 - DNA, 25 bp, Homo sapien
tttgtactgataagtatcactagaa

SEQ ID NO: 487064 - DNA, 25 bp, Homo sapien
gcaaaatgctgttattctttgagaa

SEQ ID NO: 487065 - DNA, 25 bp, Homo sapien
tgctaataggttggatctgctcttc

SEQ ID NO: 487066 - DNA, 25 bp, Homo sapien
tgcacaatctttggagcttaagtag

SEQ ID NO: 487067 - DNA, 25 bp, Homo sapien
atttgctttgcttatcagagtgcta

SEQ ID NO: 487068 - DNA, 25 bp, Homo sapien
caatctttggagcttaagtagaatg

SEQ ID NO: 487069 - DNA, 25 bp, Homo sapien
gtcttacttggggtacgctggatac

SEQ ID NO: 487070 - DNA, 25 bp, Homo sapien
tcttacttggggtacgctggatacc

SEQ ID NO: 487071 - DNA, 25 bp, Homo sapien
taatcaacatggcacacagctgcta

SEQ ID NO: 487072 - DNA, 25 bp, Homo sapien
ccccagcatcacataatcaacatgg

SEQ ID NO: 487073 - DNA, 25 bp, Homo sapien
gttcatcgtattcatgggtttacac

SEQ ID NO: 487074 - DNA, 25 bp, Homo sapien
catcgtattcatgggtttacacggc

SEQ ID NO: 487075 - DNA, 25 bp, Homo sapien
tattcatgggtttacacggccttcc

SEQ ID NO: 487076 - DNA, 25 bp, Homo sapien
tcatgggtttacacggccttccttc

SEQ ID NO: 487077 - DNA, 25 bp, Homo sapien
cagatcacctcctcgaatactggtc

SEQ ID NO: 487078 - DNA, 25 bp, Homo sapien
gaatactggtccctgataaccatcc

SEQ ID NO: 487079 - DNA, 25 bp, Homo sapien
caatcctagttggtgcttctctaag

SEQ ID NO: 487080 - DNA, 25 bp, Homo sapien
taagacacggtacacaactcttgtt

SEQ ID NO: 487081 - DNA, 25 bp, Homo sapien
caggctcccttggtcacttccccac

SEQ ID NO: 487082 - DNA, 25 bp, Homo sapien
atcttcccaatccaggctcccttgg

SEQ ID NO: 487083 - DNA, 25 bp, Homo sapien
ggtccctgcgaatcttcccaatcca

SEQ ID NO: 487084 - DNA, 25 bp, Homo sapien
ccaatccaggctcccttggtcactt

SEQ ID NO: 487085 - DNA, 25 bp, Homo sapien
tatgaaatgcctaaactcctaaaca

SEQ ID NO: 487086 - DNA, 25 bp, Homo sapien
aagccttcagagacttcccattctg

SEQ ID NO: 487087 - DNA, 25 bp, Homo sapien
tgtatgaaatgcctaaactcctaaa

SEQ ID NO: 487088 - DNA, 25 bp, Homo sapien
gaactaaagccttcagagacttccc

SEQ ID NO: 487089 - DNA, 25 bp, Homo sapien
taacccatctttccatgcttcactt

SEQ ID NO: 487090 - DNA, 25 bp, Homo sapien
ctttgttccagactttaagtggcct

SEQ ID NO: 487091 - DNA, 25 bp, Homo sapien
ccatctttccatgcttcactttgtt

SEQ ID NO: 487092 - DNA, 25 bp, Homo sapien
ctttaagtggcctccagaatgtttt

SEQ ID NO: 487093 - DNA, 25 bp, Homo sapien
tcattccaccctgtgggaaaccatc

SEQ ID NO: 487094 - DNA, 25 bp, Homo sapien
ctcttcctggcatggtcgcaaggtc

SEQ ID NO: 487095 - DNA, 25 bp, Homo sapien
attccaccctgtgggaaaccatcca

SEQ ID NO: 487096 - DNA, 25 bp, Homo sapien
catctcttcctggcatggtcgcaag

SEQ ID NO: 487097 - DNA, 25 bp, Homo sapien
tctgtggctatgctactgccatggg

SEQ ID NO: 487098 - DNA, 25 bp, Homo sapien
gtggagacttcctgttacgactcgc

SEQ ID NO: 487099 - DNA, 25 bp, Homo sapien
gcatgactgaatcccgttctgcaga

SEQ ID NO: 487100 - DNA, 25 bp, Homo sapien
ccgttctgcagacgacacttgacat

SEQ ID NO: 487101 - DNA, 25 bp, Homo sapien
ccacagctgtgtgtctacgagtaca

SEQ ID NO: 487102 - DNA, 25 bp, Homo sapien
ctggaactcagtgatttcacaagac

SEQ ID NO: 487103 - DNA, 25 bp, Homo sapien
tacgagtacagcaggggctccatta

SEQ ID NO: 487104 - DNA, 25 bp, Homo sapien
ggaactcagtgatttcacaagactc

SEQ ID NO: 487105 - DNA, 25 bp, Homo sapien
tgttgcttcgccatgatttctgagg

SEQ ID NO: 487106 - DNA, 25 bp, Homo sapien
ggaaagagtcggtgcccagttagaa

SEQ ID NO: 487107 - DNA, 25 bp, Homo sapien
tattggttgccctctatttagaggt

SEQ ID NO: 487108 - DNA, 25 bp, Homo sapien
gcccagttagaagaggaccatggct

SEQ ID NO: 487109 - DNA, 25 bp, Homo sapien
tccgatggtgcctaaaaaagcatcc

SEQ ID NO: 487110 - DNA, 25 bp, Homo sapien
gattcttgcctagcactgtgctgtg

SEQ ID NO: 487111 - DNA, 25 bp, Homo sapien
cttcgttttccagttgggacaactg

SEQ ID NO: 487112 - DNA, 25 bp, Homo sapien
agatgacaactctgcgccagggcgg

SEQ ID NO: 487113 - DNA, 25 bp, Homo sapien
tctacagtcagaagacactttgcat

SEQ ID NO: 487114 - DNA, 25 bp, Homo sapien
agaattctacagtcagaagacactt

SEQ ID NO: 487115 - DNA, 25 bp, Homo sapien
tcagaagacactttgcataccactg

SEQ ID NO: 487116 - DNA, 25 bp, Homo sapien
aagacactttgcataccactgtggt

SEQ ID NO: 487117 - DNA, 25 bp, Homo sapien
ttggcactaactgtttcccgaccat

SEQ ID NO: 487118 - DNA, 25 bp, Homo sapien
ttcttctcatcaatgaccgcatcct

SEQ ID NO: 487119 - DNA, 25 bp, Homo sapien
atgaccgcatccttataggcccttg

SEQ ID NO: 487120 - DNA, 25 bp, Homo sapien
ccttataggcccttggcactaactg

SEQ ID NO: 487121 - DNA, 25 bp, Homo sapien
gctcctacttttttgtttgtagaca

SEQ ID NO: 487122 - DNA, 25 bp, Homo sapien
tcctacttttttgtttgtagacaca

SEQ ID NO: 487123 - DNA, 25 bp, Homo sapien
catggcttccactaggagtgtgtga

SEQ ID NO: 487124 - DNA, 25 bp, Homo sapien
gatagtctagtgtgtgatgctcctc

SEQ ID NO: 487125 - DNA, 25 bp, Homo sapien
agtgtgtgagttgctgcttgcctga

SEQ ID NO: 487126 - DNA, 25 bp, Homo sapien
tggtccacgtcaccccaactggata

SEQ ID NO: 487127 - DNA, 25 bp, Homo sapien
gatgctgtgtactttgactccaggg

SEQ ID NO: 487128 - DNA, 25 bp, Homo sapien
tgatattcacaagataaactgatag

SEQ ID NO: 487129 - DNA, 25 bp, Homo sapien
agtgtgtgatctgctaatatgtata

SEQ ID NO: 487130 - DNA, 25 bp, Homo sapien
cacaaatgctcctgaacaacaagcc

SEQ ID NO: 487131 - DNA, 25 bp, Homo sapien
gaggcagagaaaggcagattctgaa

SEQ ID NO: 487132 - DNA, 25 bp, Homo sapien
cagggagcactgtgccctcagagct

SEQ ID NO: 487133 - DNA, 25 bp, Homo sapien
gaaatgaacagaatagcagggggac

SEQ ID NO: 487134 - DNA, 25 bp, Homo sapien
cttcagaagcttaaagatggaggca

SEQ ID NO: 487135 - DNA, 25 bp, Homo sapien
tctttcaaggtgttgtataatttta

SEQ ID NO: 487136 - DNA, 25 bp, Homo sapien
gcagcattcagcttacttttctgtc

SEQ ID NO: 487137 - DNA, 25 bp, Homo sapien
ccacagtatgtaaaaaaggctgaca

SEQ ID NO: 487138 - DNA, 25 bp, Homo sapien
gctgttttcgaagaaatctccatct

SEQ ID NO: 487139 - DNA, 25 bp, Homo sapien
gagggttccgcatcctatgtccatg

SEQ ID NO: 487140 - DNA, 25 bp, Homo sapien
tgaccagggcacttatggctcacag

SEQ ID NO: 487141 - DNA, 25 bp, Homo sapien
taaggtgcgcacgaatcagctaagg

SEQ ID NO: 487142 - DNA, 25 bp, Homo sapien
tcctttagagggtggacaatgcaca

SEQ ID NO: 487143 - DNA, 25 bp, Homo sapien
gctgcacaaaaaccatggcatccct

SEQ ID NO: 487144 - DNA, 25 bp, Homo sapien
agatttctactgcacacccaacttg

SEQ ID NO: 487145 - DNA, 25 bp, Homo sapien
tgtgaattggtcaaaaagtagaacc

SEQ ID NO: 487146 - DNA, 25 bp, Homo sapien
tgtgtatcagggatgagatttctac

SEQ ID NO: 487147 - DNA, 25 bp, Homo sapien
tgaactgggccataaagggacatgg

SEQ ID NO: 487148 - DNA, 25 bp, Homo sapien
tacacagctataggtagaagtggct

SEQ ID NO: 487149 - DNA, 25 bp, Homo sapien
aaatgcacatgcaaacggctgggcg

SEQ ID NO: 487150 - DNA, 25 bp, Homo sapien
cttgggttcttgcatgaagcgctcc

SEQ ID NO: 487151 - DNA, 25 bp, Homo sapien
aaccaaacactcattcagctgctgt

SEQ ID NO: 487152 - DNA, 25 bp, Homo sapien
accaaacactcattcagctgctgtc

SEQ ID NO: 487153 - DNA, 25 bp, Homo sapien
ccacatgatcaaacatcctgttcca

SEQ ID NO: 487154 - DNA, 25 bp, Homo sapien
ttgacctccttttccacatgatcaa

SEQ ID NO: 487155 - DNA, 25 bp, Homo sapien
ttcctctgctttgaagagtggataa

SEQ ID NO: 487156 - DNA, 25 bp, Homo sapien
gtttcctctgctttgaagagtggat

SEQ ID NO: 487157 - DNA, 25 bp, Homo sapien
ctgacagcggtaggggcttgtttcc

SEQ ID NO: 487158 - DNA, 25 bp, Homo sapien
aaagcactgacagcggtaggggctt

SEQ ID NO: 487159 - DNA, 25 bp, Homo sapien
gcagacccatggtggaattaaaacc

SEQ ID NO: 487160 - DNA, 25 bp, Homo sapien
ttaaaagtaagcatgtgggaaatgc

SEQ ID NO: 487161 - DNA, 25 bp, Homo sapien
tagaaatatagtgatggcaagcaga

SEQ ID NO: 487162 - DNA, 25 bp, Homo sapien
tcaatgggttttctaatggtctaga

SEQ ID NO: 487163 - DNA, 25 bp, Homo sapien
ttttcgcaatctctgcatcatctgg

SEQ ID NO: 487164 - DNA, 25 bp, Homo sapien
tgtcattttcttggtcgctgcccat

SEQ ID NO: 487165 - DNA, 25 bp, Homo sapien
cagacattattttatcgtttctgtc

SEQ ID NO: 487166 - DNA, 25 bp, Homo sapien
catcatctggatggcctcagtgtga

SEQ ID NO: 487167 - DNA, 25 bp, Homo sapien
caaaattacggccatgtgttgttga

SEQ ID NO: 487168 - DNA, 25 bp, Homo sapien
tacggccatgtgttgttgagacgag

SEQ ID NO: 487169 - DNA, 25 bp, Homo sapien
tgttgagacgagaacttccctgcat

SEQ ID NO: 487170 - DNA, 25 bp, Homo sapien
tgtgttgttgagacgagaacttccc

SEQ ID NO: 487171 - DNA, 25 bp, Homo sapien
tggtgctgcccctcatcttgtttgc

SEQ ID NO: 487172 - DNA, 25 bp, Homo sapien
tagagcatttctttggtgctgcccc

SEQ ID NO: 487173 - DNA, 25 bp, Homo sapien
catttctttggtgctgcccctcatc

SEQ ID NO: 487174 - DNA, 25 bp, Homo sapien
ctagggcctagagcatttctttggt

SEQ ID NO: 487175 - DNA, 25 bp, Homo sapien
ttccaacatactcttagcaggtttt

SEQ ID NO: 487176 - DNA, 25 bp, Homo sapien
tttccaacatactcttagcaggttt

SEQ ID NO: 487177 - DNA, 25 bp, Homo sapien
agccagctgtccattgatgagcttc

SEQ ID NO: 487178 - DNA, 25 bp, Homo sapien
caaagccagctgtccattgatgagc

SEQ ID NO: 487179 - DNA, 25 bp, Homo sapien
aaagccagctgtccattgatgagct

SEQ ID NO: 487180 - DNA, 25 bp, Homo sapien
aagccagctgtccattgatgagctt

SEQ ID NO: 487181 - DNA, 25 bp, Homo sapien
tatctggcttgatccaacgtctgga

SEQ ID NO: 487182 - DNA, 25 bp, Homo sapien
tccacttggtggatgtgcagcccac

SEQ ID NO: 487183 - DNA, 25 bp, Homo sapien
caaatatcctcagttgtccacttgg

SEQ ID NO: 487184 - DNA, 25 bp, Homo sapien
tgatctgctcatagtggacatccaa

SEQ ID NO: 487185 - DNA, 25 bp, Homo sapien
tttggttctggtagtatgacagcac

SEQ ID NO: 487186 - DNA, 25 bp, Homo sapien
tgttacacgctgtctttttaagccc

SEQ ID NO: 487187 - DNA, 25 bp, Homo sapien
gttcgtttcaaatatcctgtgttac

SEQ ID NO: 487188 - DNA, 25 bp, Homo sapien
gtgacttttaaatcggcccgattca

SEQ ID NO: 487189 - DNA, 25 bp, Homo sapien
gggctgtggacggagtccagaagta

SEQ ID NO: 487190 - DNA, 25 bp, Homo sapien
gctctggactgaaagggatatctgg

SEQ ID NO: 487191 - DNA, 25 bp, Homo sapien
gtagggcttcgatggaagagctaaa

SEQ ID NO: 487192 - DNA, 25 bp, Homo sapien
cagaagtagggcttcgatggaagag

SEQ ID NO: 487193 - DNA, 25 bp, Homo sapien
ctgttgaagaagtcatgagggttga

SEQ ID NO: 487194 - DNA, 25 bp, Homo sapien
cgtctagtactactttgtggaggaa

SEQ ID NO: 487195 - DNA, 25 bp, Homo sapien
tccatagaaatgaacctgaacagtt

SEQ ID NO: 487196 - DNA, 25 bp, Homo sapien
taatttctctgtcttgaacgtctag

SEQ ID NO: 487197 - DNA, 25 bp, Homo sapien
gcagagttgtttcgtaatggctgca

SEQ ID NO: 487198 - DNA, 25 bp, Homo sapien
catcttggtcgtctgtgtgctggct

SEQ ID NO: 487199 - DNA, 25 bp, Homo sapien
ctggcagagttgtttcgtaatggct

SEQ ID NO: 487200 - DNA, 25 bp, Homo sapien
gcctggcagagttgtttcgtaatgg

SEQ ID NO: 487201 - DNA, 25 bp, Homo sapien
tgtgacaccgatgacaagctgccac

SEQ ID NO: 487202 - DNA, 25 bp, Homo sapien
gacaccgatgacaagctgccacact

SEQ ID NO: 487203 - DNA, 25 bp, Homo sapien
ttctgtgacaccgatgacaagctgc

SEQ ID NO: 487204 - DNA, 25 bp, Homo sapien
gtcttctgtgacaccgatgacaagc

SEQ ID NO: 487205 - DNA, 25 bp, Homo sapien
tatgcccaggcttgctacccttagt

SEQ ID NO: 487206 - DNA, 25 bp, Homo sapien
cacattctgcactatggatggaggg

SEQ ID NO: 487207 - DNA, 25 bp, Homo sapien
tatcccgtaacatctcccaaggctg

SEQ ID NO: 487208 - DNA, 25 bp, Homo sapien
taaggctaggttacatataccatgg

SEQ ID NO: 487209 - DNA, 25 bp, Homo sapien
gcaaagtcacatgaggttttaatag

SEQ ID NO: 487210 - DNA, 25 bp, Homo sapien
ccgacacacactccgagtaatttgg

SEQ ID NO: 487211 - DNA, 25 bp, Homo sapien
cacactccgagtaatttggtggttt

SEQ ID NO: 487212 - DNA, 25 bp, Homo sapien
gtgtggatctgtggtcgccagcctt

SEQ ID NO: 487213 - DNA, 25 bp, Homo sapien
atctgtggtcgccagccttcaagat

SEQ ID NO: 487214 - DNA, 25 bp, Homo sapien
gggaattagcaccacgatgcggtca

SEQ ID NO: 487215 - DNA, 25 bp, Homo sapien
tccttgcttgttgccgcagggaaaa

SEQ ID NO: 487216 - DNA, 25 bp, Homo sapien
gatgcggtcacactccctggaatga

SEQ ID NO: 487217 - DNA, 25 bp, Homo sapien
gagtgcatgggttcttaaggcctca

SEQ ID NO: 487218 - DNA, 25 bp, Homo sapien
tgacttccaaaaggctgatcataaa

SEQ ID NO: 487219 - DNA, 25 bp, Homo sapien
tcttctttgaagtagcattgcagca

SEQ ID NO: 487220 - DNA, 25 bp, Homo sapien
gatgaaccttctgctctgtcttgga

SEQ ID NO: 487221 - DNA, 25 bp, Homo sapien
tgcagcacttttgaatgacttccaa

SEQ ID NO: 487222 - DNA, 25 bp, Homo sapien
tataagagtgtttaaattataagct

SEQ ID NO: 487223 - DNA, 25 bp, Homo sapien
taaattataagctggtgaagtgaaa

SEQ ID NO: 487224 - DNA, 25 bp, Homo sapien
gagtgtttaaattataagctggtga

SEQ ID NO: 487225 - DNA, 25 bp, Homo sapien
tttaaattataagctggtgaagtga

SEQ ID NO: 487226 - DNA, 25 bp, Homo sapien
tgtgtaaaggccactaaatgcctct

SEQ ID NO: 487227 - DNA, 25 bp, Homo sapien
gtgcccaatcctgttgatatcgatg

SEQ ID NO: 487228 - DNA, 25 bp, Homo sapien
cttttggcttgtactggtcaaagtg

SEQ ID NO: 487229 - DNA, 25 bp, Homo sapien
tcgatgggccagttttatgtaaccc

SEQ ID NO: 487230 - DNA, 25 bp, Homo sapien
tttgaagccatcattagtgagctat

SEQ ID NO: 487231 - DNA, 25 bp, Homo sapien
taaaccagagtgttaaattcagaga

SEQ ID NO: 487232 - DNA, 25 bp, Homo sapien
aggtggaggaataaacggatctatc

SEQ ID NO: 487233 - DNA, 25 bp, Homo sapien
taaacggatctatcctcattcccct

SEQ ID NO: 487234 - DNA, 25 bp, Homo sapien
gctaaagcagtgattgatagaggtg

SEQ ID NO: 487235 - DNA, 25 bp, Homo sapien
taaagcagtgattgatagaggtgga

SEQ ID NO: 487236 - DNA, 25 bp, Homo sapien
acatgaaggagagtgcgcttggccc

SEQ ID NO: 487237 - DNA, 25 bp, Homo sapien
tcagacagggtcttaatcttcccaa

SEQ ID NO: 487238 - DNA, 25 bp, Homo sapien
tgaattccttctacatgaaggagag

SEQ ID NO: 487239 - DNA, 25 bp, Homo sapien
cgcttggccccatgggtgatacatg

SEQ ID NO: 487240 - DNA, 25 bp, Homo sapien
gaagggatgaatcgaaggcatacgt

SEQ ID NO: 487241 - DNA, 25 bp, Homo sapien
ttaggaagggatgaatcgaaggcat

SEQ ID NO: 487242 - DNA, 25 bp, Homo sapien
gaatcgaaggcatacgttgagaaat

SEQ ID NO: 487243 - DNA, 25 bp, Homo sapien
tacgttgagaaattgtgggccagga

SEQ ID NO: 487244 - DNA, 25 bp, Homo sapien
ttcgctacgcaatgcggcggaagcg

SEQ ID NO: 487245 - DNA, 25 bp, Homo sapien
gacccggcagcttgtgctgttgttg

SEQ ID NO: 487246 - DNA, 25 bp, Homo sapien
ccgttgccacggagatgacctctga

SEQ ID NO: 487247 - DNA, 25 bp, Homo sapien
tagcgcgggaagtttccgttgccac

SEQ ID NO: 487248 - DNA, 25 bp, Homo sapien
cgagtgtggactgcttcggctctga

SEQ ID NO: 487249 - DNA, 25 bp, Homo sapien
ccctcggtaatccgggtgaagctgg

SEQ ID NO: 487250 - DNA, 25 bp, Homo sapien
tggctttacccattggcccagagtc

SEQ ID NO: 487251 - DNA, 25 bp, Homo sapien
ggtgaagctgggttccgagtgtgga

SEQ ID NO: 487252 - DNA, 25 bp, Homo sapien
ctgcagctctgcctccaggcgtgga

SEQ ID NO: 487253 - DNA, 25 bp, Homo sapien
tgcagctctgcctccaggcgtggaa

SEQ ID NO: 487254 - DNA, 25 bp, Homo sapien
gctgcagctctgcctccaggcgtgg

SEQ ID NO: 487255 - DNA, 25 bp, Homo sapien
gcagctctgcctccaggcgtggaac

SEQ ID NO: 487256 - DNA, 25 bp, Homo sapien
ttgttttctgcaaagccgcgagcgg

SEQ ID NO: 487257 - DNA, 25 bp, Homo sapien
gttttctgcaaagccgcgagcgggc

SEQ ID NO: 487258 - DNA, 25 bp, Homo sapien
ttttctgcaaagccgcgagcgggcc

SEQ ID NO: 487259 - DNA, 25 bp, Homo sapien
ttctgcaaagccgcgagcgggccca

SEQ ID NO: 487260 - DNA, 25 bp, Homo sapien
tttggcagaagccacggctctgggc

SEQ ID NO: 487261 - DNA, 25 bp, Homo sapien
gaaagtttggcagaagccacggctc

SEQ ID NO: 487262 - DNA, 25 bp, Homo sapien
gtgtccgggaccagaaagtttggca

SEQ ID NO: 487263 - DNA, 25 bp, Homo sapien
gaccagaaagtttggcagaagccac

SEQ ID NO: 487264 - DNA, 25 bp, Homo sapien
ggtgcagggtgctgggccgctgtgg

SEQ ID NO: 487265 - DNA, 25 bp, Homo sapien
gtgcagggtgctgggccgctgtggc

SEQ ID NO: 487266 - DNA, 25 bp, Homo sapien
gcagtttgaaaagcagtaatcttcc

SEQ ID NO: 487267 - DNA, 25 bp, Homo sapien
gcgcctaccaccctgatctatttgg

SEQ ID NO: 487268 - DNA, 25 bp, Homo sapien
cagttgctttggacggagtttctcg

SEQ ID NO: 487269 - DNA, 25 bp, Homo sapien
tcattagtaaagaacctcgagttcc

SEQ ID NO: 487270 - DNA, 25 bp, Homo sapien
tatgggactacaaagggcaggacga

SEQ ID NO: 487271 - DNA, 25 bp, Homo sapien
tatccgccacgatagggtgctctga

SEQ ID NO: 487272 - DNA, 25 bp, Homo sapien
caccattaggttcatagttgccaga

SEQ ID NO: 487273 - DNA, 25 bp, Homo sapien
ttagaatagcaaacgttagggcacc

SEQ ID NO: 487274 - DNA, 25 bp, Homo sapien
tttaggtaggcttcggagtactgcc

SEQ ID NO: 487275 - DNA, 25 bp, Homo sapien
catgcttggctgtagagtgggattc

SEQ ID NO: 487276 - DNA, 25 bp, Homo sapien
tagttggccttagactccatccagg

SEQ ID NO: 487277 - DNA, 25 bp, Homo sapien
aatgggttttgtagagcagtgccac

SEQ ID NO: 487278 - DNA, 25 bp, Homo sapien
gagcaccgctatataatcaagttgg

SEQ ID NO: 487279 - DNA, 25 bp, Homo sapien
cattcgtggaatttcagagcaccgc

SEQ ID NO: 487280 - DNA, 25 bp, Homo sapien
tgtaggtggttcaagcattcgtgga

SEQ ID NO: 487281 - DNA, 25 bp, Homo sapien
taagaaacttgggagaatactgcca

SEQ ID NO: 487282 - DNA, 25 bp, Homo sapien
aaatttctccctatacacgagtcac

SEQ ID NO: 487283 - DNA, 25 bp, Homo sapien
gaagtcagtccttccatagtactgg

SEQ ID NO: 487284 - DNA, 25 bp, Homo sapien
tgggaaataatttagcacagaacag

SEQ ID NO: 487285 - DNA, 25 bp, Homo sapien
gaccatttgtcttagggaccttgaa

SEQ ID NO: 487286 - DNA, 25 bp, Homo sapien
tcagctatgaagtgtaccccaagat

SEQ ID NO: 487287 - DNA, 25 bp, Homo sapien
tgctttacactgcaaaaatggtggt

SEQ ID NO: 487288 - DNA, 25 bp, Homo sapien
gtgttgtcacctttccacccgcatg

SEQ ID NO: 487289 - DNA, 25 bp, Homo sapien
tagcaactctgaaacgacacaccaa

SEQ ID NO: 487290 - DNA, 25 bp, Homo sapien
aaaggaacgcatatgctgcagtgtc

SEQ ID NO: 487291 - DNA, 25 bp, Homo sapien
tctttctcagggtgtctaagctgct

SEQ ID NO: 487292 - DNA, 25 bp, Homo sapien
ctgcagtgtctttgtggcaagagtc

SEQ ID NO: 487293 - DNA, 25 bp, Homo sapien
taagctgctggattgcttttcgccc

SEQ ID NO: 487294 - DNA, 25 bp, Homo sapien
ctcaaagaaatataccacgtgaggg

SEQ ID NO: 487295 - DNA, 25 bp, Homo sapien
cctttggtaataatccggtggtgat

SEQ ID NO: 487296 - DNA, 25 bp, Homo sapien
aaaactgggagaagatccggaatat

SEQ ID NO: 487297 - DNA, 25 bp, Homo sapien
caatcactgagaagtctcaaagaaa

SEQ ID NO: 487298 - DNA, 25 bp, Homo sapien
ttttgatctcagttgggatctcttt

SEQ ID NO: 487299 - DNA, 25 bp, Homo sapien
gattagttttgatctcagttgggat

SEQ ID NO: 487300 - DNA, 25 bp, Homo sapien
tagttttgatctcagttgggatctc

SEQ ID NO: 487301 - DNA, 25 bp, Homo sapien
attagttttgatctcagttgggatc

SEQ ID NO: 487302 - DNA, 25 bp, Homo sapien
gagattttcctcatgctcacggttg

SEQ ID NO: 487303 - DNA, 25 bp, Homo sapien
tcctcatgctcacggttgttggaaa

SEQ ID NO: 487304 - DNA, 25 bp, Homo sapien
gaatccggaggggagattttcctca

SEQ ID NO: 487305 - DNA, 25 bp, Homo sapien
tcacatccgaggctgggcgaggaat

SEQ ID NO: 487306 - DNA, 25 bp, Homo sapien
gcatttcaaaacttgcatttttccc

SEQ ID NO: 487307 - DNA, 25 bp, Homo sapien
atgcatttcaaaacttgcatttttc

SEQ ID NO: 487308 - DNA, 25 bp, Homo sapien
tgcatttcaaaacttgcatttttcc

SEQ ID NO: 487309 - DNA, 25 bp, Homo sapien
gcttttttgtcacggccataggctc

SEQ ID NO: 487310 - DNA, 25 bp, Homo sapien
tatttcttcggtgatcaaagctttt

SEQ ID NO: 487311 - DNA, 25 bp, Homo sapien
tctatttcttcggtgatcaaagctt

SEQ ID NO: 487312 - DNA, 25 bp, Homo sapien
cccttctatttcttcggtgatcaaa

SEQ ID NO: 487313 - DNA, 25 bp, Homo sapien
gccaaggtttctagagagacatctg

SEQ ID NO: 487314 - DNA, 25 bp, Homo sapien
aaaggcacctgccaccacgcccggc

SEQ ID NO: 487315 - DNA, 25 bp, Homo sapien
taaaggcacctgccaccacgcccgg

SEQ ID NO: 487316 - DNA, 25 bp, Homo sapien
ttcacgtcattctcctgcctcgcct

SEQ ID NO: 487317 - DNA, 25 bp, Homo sapien
acgtcattctcctgcctcgcctcag

SEQ ID NO: 487318 - DNA, 25 bp, Homo sapien
tggttggaaattttggatatgtcct

SEQ ID NO: 487319 - DNA, 25 bp, Homo sapien
ctttgagagtagtgattggttggaa

SEQ ID NO: 487320 - DNA, 25 bp, Homo sapien
tcctttggggagaggttgagtgtga

SEQ ID NO: 487321 - DNA, 25 bp, Homo sapien
aactttgagagtagtgattggttgg

SEQ ID NO: 487322 - DNA, 25 bp, Homo sapien
tggctcagatacttctttccatggg

SEQ ID NO: 487323 - DNA, 25 bp, Homo sapien
catgtcccctctctaaacgacatgg

SEQ ID NO: 487324 - DNA, 25 bp, Homo sapien
cctctctaaacgacatggtgacctg

SEQ ID NO: 487325 - DNA, 25 bp, Homo sapien
taaacgacatggtgacctggaaatc

SEQ ID NO: 487326 - DNA, 25 bp, Homo sapien
agagccttgcttgccctctggtgtc

SEQ ID NO: 487327 - DNA, 25 bp, Homo sapien
tctggtgtcccacagtattctgcat

SEQ ID NO: 487328 - DNA, 25 bp, Homo sapien
tctcctccacgtttctgtatttcct

SEQ ID NO: 487329 - DNA, 25 bp, Homo sapien
ttctcctccacgtttctgtatttcc

SEQ ID NO: 487330 - DNA, 25 bp, Homo sapien
caattatatccacccgagctgtaga

SEQ ID NO: 487331 - DNA, 25 bp, Homo sapien
tccagaagggaccaagaatgcattg

SEQ ID NO: 487332 - DNA, 25 bp, Homo sapien
cgagctgtagatccggttttatcca

SEQ ID NO: 487333 - DNA, 25 bp, Homo sapien
ttatttggcggagatgagctgcctg

SEQ ID NO: 487334 - DNA, 25 bp, Homo sapien
tcagagggctctctcacaatgctaa

SEQ ID NO: 487335 - DNA, 25 bp, Homo sapien
ttgctcggatgatctctgtcgaccc

SEQ ID NO: 487336 - DNA, 25 bp, Homo sapien
aagagctctcggttgaaaatataat

SEQ ID NO: 487337 - DNA, 25 bp, Homo sapien
ttgtggcgttcaaaaatctcatgag

SEQ ID NO: 487338 - DNA, 25 bp, Homo sapien
taagtctgtagtgtgagtctgagtt

SEQ ID NO: 487339 - DNA, 25 bp, Homo sapien
cttaagtctgtagtgtgagtctgag

SEQ ID NO: 487340 - DNA, 25 bp, Homo sapien
tctgtagtgtgagtctgagttgatg

SEQ ID NO: 487341 - DNA, 25 bp, Homo sapien
agtctgtagtgtgagtctgagttga

SEQ ID NO: 487342 - DNA, 25 bp, Homo sapien
tagtcatagggcattaaaggtacag

SEQ ID NO: 487343 - DNA, 25 bp, Homo sapien
tcctgcgaaggtagtggcatcttat

SEQ ID NO: 487344 - DNA, 25 bp, Homo sapien
tctgaagttgccacaaagcctctgg

SEQ ID NO: 487345 - DNA, 25 bp, Homo sapien
atttggtgacaatttgctggagtag

SEQ ID NO: 487346 - DNA, 25 bp, Homo sapien
aatatgtctgattccaccttgagga

SEQ ID NO: 487347 - DNA, 25 bp, Homo sapien
gcatggaacagggtaattccctgtt

SEQ ID NO: 487348 - DNA, 25 bp, Homo sapien
tccctgttattctattgattagcat

SEQ ID NO: 487349 - DNA, 25 bp, Homo sapien
tgtcaatatgtctgattccaccttg

SEQ ID NO: 487350 - DNA, 25 bp, Homo sapien
gaatgtctgttgcttgccaggctct

SEQ ID NO: 487351 - DNA, 25 bp, Homo sapien
tgaacatgtgcaaaacgtggcttct

SEQ ID NO: 487352 - DNA, 25 bp, Homo sapien
tcttttgaaggggagcttgtggtct

SEQ ID NO: 487353 - DNA, 25 bp, Homo sapien
gctctgggccaagaattctgctaaa

SEQ ID NO: 487354 - DNA, 25 bp, Homo sapien
ttgaggagagcagcacaatcagcgt

SEQ ID NO: 487355 - DNA, 25 bp, Homo sapien
ttttcaactggctagaggttggtcc

SEQ ID NO: 487356 - DNA, 25 bp, Homo sapien
ggtagtgtgtactgtccaccaagat

SEQ ID NO: 487357 - DNA, 25 bp, Homo sapien
tgtagcctgtacaccgtcactgtca

SEQ ID NO: 487358 - DNA, 25 bp, Homo sapien
tcccctgcccctgcaccctctttaa

SEQ ID NO: 487359 - DNA, 25 bp, Homo sapien
atgaaaaatcctgagaaatcctctt

SEQ ID NO: 487360 - DNA, 25 bp, Homo sapien
tgttatttctacctgaaatgaaaaa

SEQ ID NO: 487361 - DNA, 25 bp, Homo sapien
aaatgtatgtctgcctttcccctgc

SEQ ID NO: 487362 - DNA, 25 bp, Homo sapien
tactaacgattttctaaacatgatg

SEQ ID NO: 487363 - DNA, 25 bp, Homo sapien
tttctccacacatcctaggtgtaag

SEQ ID NO: 487364 - DNA, 25 bp, Homo sapien
gtaagccatgtttagttactaacga

SEQ ID NO: 487365 - DNA, 25 bp, Homo sapien
tgagaagttttacgtctgtgtccat

SEQ ID NO: 487366 - DNA, 25 bp, Homo sapien
atgtaggttctcagggtgcctgagt

SEQ ID NO: 487367 - DNA, 25 bp, Homo sapien
gggtggaggcgagggcggtataaga

SEQ ID NO: 487368 - DNA, 25 bp, Homo sapien
tgaagaaactgtcaagggctggcca

SEQ ID NO: 487369 - DNA, 25 bp, Homo sapien
gttttgcctttgggcccagatgagc

SEQ ID NO: 487370 - DNA, 25 bp, Homo sapien
gcattgcaggacatctgggggcaaa

SEQ ID NO: 487371 - DNA, 25 bp, Homo sapien
agcattgcaggacatctgggggcaa

SEQ ID NO: 487372 - DNA, 25 bp, Homo sapien
tggcacgtcgccatgtcttcagcac

SEQ ID NO: 487373 - DNA, 25 bp, Homo sapien
cttcagcacccttatggcttctaca

SEQ ID NO: 487374 - DNA, 25 bp, Homo sapien
cacccttatggcttctacatttgta

SEQ ID NO: 487375 - DNA, 25 bp, Homo sapien
ggatcttggtggcacgtcgccatgt

SEQ ID NO: 487376 - DNA, 25 bp, Homo sapien
taacgcatcagtagggaacacagca

SEQ ID NO: 487377 - DNA, 25 bp, Homo sapien
gacagtctcgatttgggtgccaact

SEQ ID NO: 487378 - DNA, 25 bp, Homo sapien
tatggtgcaagagttaacgcatcag

SEQ ID NO: 487379 - DNA, 25 bp, Homo sapien
gctgctcagaacctggtgactttgg

SEQ ID NO: 487380 - DNA, 25 bp, Homo sapien
taggcaaggcatggactgtagtaat

SEQ ID NO: 487381 - DNA, 25 bp, Homo sapien
caaggcatggactgtagtaatagct

SEQ ID NO: 487382 - DNA, 25 bp, Homo sapien
tattaggcaaggcatggactgtagt

SEQ ID NO: 487383 - DNA, 25 bp, Homo sapien
ggcatggactgtagtaatagctgct

SEQ ID NO: 487384 - DNA, 25 bp, Homo sapien
cttgctgagggattgccctccttct

SEQ ID NO: 487385 - DNA, 25 bp, Homo sapien
tagttgagaattaaggagtgcagcc

SEQ ID NO: 487386 - DNA, 25 bp, Homo sapien
gagtgcagccatactcagagacatg

SEQ ID NO: 487387 - DNA, 25 bp, Homo sapien
ccaggatgcagaggtccttagttga

SEQ ID NO: 487388 - DNA, 25 bp, Homo sapien
tccttattagatagactgtcaccca

SEQ ID NO: 487389 - DNA, 25 bp, Homo sapien
tcaccgttgtacatgatccttatta

SEQ ID NO: 487390 - DNA, 25 bp, Homo sapien
tacatgatccttattagatagactg

SEQ ID NO: 487391 - DNA, 25 bp, Homo sapien
accgttgtacatgatccttattaga

SEQ ID NO: 487392 - DNA, 25 bp, Homo sapien
gccaggagtgaagaatatagatttt

SEQ ID NO: 487393 - DNA, 25 bp, Homo sapien
ggagtgaagaatatagattttggta

SEQ ID NO: 487394 - DNA, 25 bp, Homo sapien
agtgaagaatatagattttggtatc

SEQ ID NO: 487395 - DNA, 25 bp, Homo sapien
caggagtgaagaatatagattttgg

SEQ ID NO: 487396 - DNA, 25 bp, Homo sapien
tcgccaatcctgtctccagcagatc

SEQ ID NO: 487397 - DNA, 25 bp, Homo sapien
ctgaacgggtcctgtcctctgtgct

SEQ ID NO: 487398 - DNA, 25 bp, Homo sapien
ctctggctcctgaacgggtcctgtc

SEQ ID NO: 487399 - DNA, 25 bp, Homo sapien
ttttcccctgctctcgccaatcctg

SEQ ID NO: 487400 - DNA, 25 bp, Homo sapien
caccaatagagggaaccatccacct

SEQ ID NO: 487401 - DNA, 25 bp, Homo sapien
gagggaaccatccacctgcatttct

SEQ ID NO: 487402 - DNA, 25 bp, Homo sapien
aatagagggaaccatccacctgcat

SEQ ID NO: 487403 - DNA, 25 bp, Homo sapien
tagagggaaccatccacctgcattt

SEQ ID NO: 487404 - DNA, 25 bp, Homo sapien
taggccacagtgaacagtctacctg

SEQ ID NO: 487405 - DNA, 25 bp, Homo sapien
caggatccatccttggtaggccaca

SEQ ID NO: 487406 - DNA, 25 bp, Homo sapien
tatgcttcgtacagagctgggtgag

SEQ ID NO: 487407 - DNA, 25 bp, Homo sapien
agaattcctatgagagtcacccagg

SEQ ID NO: 487408 - DNA, 25 bp, Homo sapien
tctagactcatcctactgcgcttgg

SEQ ID NO: 487409 - DNA, 25 bp, Homo sapien
caagcccgtatcttgtctagactca

SEQ ID NO: 487410 - DNA, 25 bp, Homo sapien
ttgttctaggagatacctgagtgag

SEQ ID NO: 487411 - DNA, 25 bp, Homo sapien
gagtgaggcatggtaaaccggtccc

SEQ ID NO: 487412 - DNA, 25 bp, Homo sapien
tagattggctttgcaatagtgccac

SEQ ID NO: 487413 - DNA, 25 bp, Homo sapien
ttagattggctttgcaatagtgcca

SEQ ID NO: 487414 - DNA, 25 bp, Homo sapien
actggtcaatggcagcttctttttc

SEQ ID NO: 487415 - DNA, 25 bp, Homo sapien
tgggactggtcaatggcagcttctt

SEQ ID NO: 487416 - DNA, 25 bp, Homo sapien
tggtcaatggcagcttctttttcca

SEQ ID NO: 487417 - DNA, 25 bp, Homo sapien
cctgggactggtcaatggcagcttc

SEQ ID NO: 487418 - DNA, 25 bp, Homo sapien
ctgggactgagtcaatggcaacttc

SEQ ID NO: 487419 - DNA, 25 bp, Homo sapien
aatggcaacttcttgttccacaggg

SEQ ID NO: 487420 - DNA, 25 bp, Homo sapien
gagtcaatggcaacttcttgttcca

SEQ ID NO: 487421 - DNA, 25 bp, Homo sapien
tcttgttccacagggttagggaaga

SEQ ID NO: 487422 - DNA, 25 bp, Homo sapien
aagcaggaagtgctgagtcagatgt

SEQ ID NO: 487423 - DNA, 25 bp, Homo sapien
cagatgtttttcctgtcacctgccc

SEQ ID NO: 487424 - DNA, 25 bp, Homo sapien
cagcattgttcaaagcaggaagtgc

SEQ ID NO: 487425 - DNA, 25 bp, Homo sapien
gaagtgctgagtcagatgtttttcc

SEQ ID NO: 487426 - DNA, 25 bp, Homo sapien
ttgggttcccctgtgttgttatgcc

SEQ ID NO: 487427 - DNA, 25 bp, Homo sapien
tgggttcccctgtgttgttatgccc

SEQ ID NO: 487428 - DNA, 25 bp, Homo sapien
gcttagccgctaaggagtctgcggt

SEQ ID NO: 487429 - DNA, 25 bp, Homo sapien
tagccgctaaggagtctgcggtgtc

SEQ ID NO: 487430 - DNA, 25 bp, Homo sapien
cggtgtcggcgaaagctccggacat

SEQ ID NO: 487431 - DNA, 25 bp, Homo sapien
agtctgcggtgtcggcgaaagctcc

SEQ ID NO: 487432 - DNA, 25 bp, Homo sapien
cgaggcaagggagccggcgcactca

SEQ ID NO: 487433 - DNA, 25 bp, Homo sapien
ccgaggcaagggagccggcgcactc

SEQ ID NO: 487434 - DNA, 25 bp, Homo sapien
gaggcaagggagccggcgcactcac

SEQ ID NO: 487435 - DNA, 25 bp, Homo sapien
gaatcactccccgagagacgggcaa

SEQ ID NO: 487436 - DNA, 25 bp, Homo sapien
aacagcaggcctccaagcagagtcc

SEQ ID NO: 487437 - DNA, 25 bp, Homo sapien
agccaggaataatgggaacccttcg

SEQ ID NO: 487438 - DNA, 25 bp, Homo sapien
gagtcctggtgtcccggaccgaatc

SEQ ID NO: 487439 - DNA, 25 bp, Homo sapien
cgcggactagcagcgcgaggacacc

SEQ ID NO: 487440 - DNA, 25 bp, Homo sapien
tgcgcgcggactagcagcgcgagga

SEQ ID NO: 487441 - DNA, 25 bp, Homo sapien
ctagcagcgcgaggacacccgtgcg

SEQ ID NO: 487442 - DNA, 25 bp, Homo sapien
gcgaggacacccgtgcggcctcggg

SEQ ID NO: 487443 - DNA, 25 bp, Homo sapien
aggatggaggacgaggaagcggcaa

SEQ ID NO: 487444 - DNA, 25 bp, Homo sapien
ggacgcaggatggaggacgaggaag

SEQ ID NO: 487445 - DNA, 25 bp, Homo sapien
caggatggaggacgaggaagcggca

SEQ ID NO: 487446 - DNA, 25 bp, Homo sapien
ggatggaggacgaggaagcggcaaa

SEQ ID NO: 487447 - DNA, 25 bp, Homo sapien
cgtgtccaggactgcgatgagcacc

SEQ ID NO: 487448 - DNA, 25 bp, Homo sapien
catactccgggtagcggcagaggaa

SEQ ID NO: 487449 - DNA, 25 bp, Homo sapien
tcttcggcaggagaccgtgaaaagg

SEQ ID NO: 487450 - DNA, 25 bp, Homo sapien
gctcctcagtcgcagcggtggccat

SEQ ID NO: 487451 - DNA, 25 bp, Homo sapien
ggactcggccgcagagcggggcttt

SEQ ID NO: 487452 - DNA, 25 bp, Homo sapien
cggactcggccgcagagcggggctt

SEQ ID NO: 487453 - DNA, 25 bp, Homo sapien
actgtgcgccgttgagtccccttgg

SEQ ID NO: 487454 - DNA, 25 bp, Homo sapien
tgtgcgccgttgagtccccttggcg

SEQ ID NO: 487455 - DNA, 25 bp, Homo sapien
gcactgtgcgccgttgagtcccctt

SEQ ID NO: 487456 - DNA, 25 bp, Homo sapien
ctggcactgtgcgccgttgagtccc

SEQ ID NO: 487457 - DNA, 25 bp, Homo sapien
ggcctggcagcgccgaagcgagaag

SEQ ID NO: 487458 - DNA, 25 bp, Homo sapien
cctggggggtccggcctggcagcgc

SEQ ID NO: 487459 - DNA, 25 bp, Homo sapien
ctggcagcgccgaagcgagaaggaa

SEQ ID NO: 487460 - DNA, 25 bp, Homo sapien
ggcagcgccgaagcgagaaggaagg

SEQ ID NO: 487461 - DNA, 25 bp, Homo sapien
taagcaaacacgctgcagaagaccg

SEQ ID NO: 487462 - DNA, 25 bp, Homo sapien
gaaacccagctttcgtgcttaaaga

SEQ ID NO: 487463 - DNA, 25 bp, Homo sapien
tttcataaggtctgagaagctcgcc

SEQ ID NO: 487464 - DNA, 25 bp, Homo sapien
gggtttctaagcagattcggccaga

SEQ ID NO: 487465 - DNA, 25 bp, Homo sapien
gattcacaaaagatgtgctgtactc

SEQ ID NO: 487466 - DNA, 25 bp, Homo sapien
caaaagatgtgctgtactccagagt

SEQ ID NO: 487467 - DNA, 25 bp, Homo sapien
cttctgattcacaaaagatgtgctg

SEQ ID NO: 487468 - DNA, 25 bp, Homo sapien
cctcttctgattcacaaaagatgtg

SEQ ID NO: 487469 - DNA, 25 bp, Homo sapien
taccaacaaattctaccaagcagca

SEQ ID NO: 487470 - DNA, 25 bp, Homo sapien
taaagccccaaatgagttgatagct

SEQ ID NO: 487471 - DNA, 25 bp, Homo sapien
tacaacgacaactatataactccag

SEQ ID NO: 487472 - DNA, 25 bp, Homo sapien
gaaccggtgaaccacttatcccagc

SEQ ID NO: 487473 - DNA, 25 bp, Homo sapien
tgtttaggccaatatctgagtcaag

SEQ ID NO: 487474 - DNA, 25 bp, Homo sapien
aatcctcacgtttgcaagccaccgt

SEQ ID NO: 487475 - DNA, 25 bp, Homo sapien
ggttgttaaaagagaagacttatgc

SEQ ID NO: 487476 - DNA, 25 bp, Homo sapien
tttaccctccaaatagttggtgatg

SEQ ID NO: 487477 - DNA, 25 bp, Homo sapien
catcctccacttgatcatgcccaca

SEQ ID NO: 487478 - DNA, 25 bp, Homo sapien
tcctccacttgatcatgcccacaga

SEQ ID NO: 487479 - DNA, 25 bp, Homo sapien
gtaactactactcttctcatgccac

SEQ ID NO: 487480 - DNA, 25 bp, Homo sapien
cccatcctccacttgatcatgccca

SEQ ID NO: 487481 - DNA, 25 bp, Homo sapien
tgaaaggccaacaatctcaccatcc

SEQ ID NO: 487482 - DNA, 25 bp, Homo sapien
gatatcaacgatttttggttttcca

SEQ ID NO: 487483 - DNA, 25 bp, Homo sapien
ggctctacttctgtagcagtattca

SEQ ID NO: 487484 - DNA, 25 bp, Homo sapien
gcagtattcacatcgccacttcctg

SEQ ID NO: 487485 - DNA, 25 bp, Homo sapien
gccgagattgtgccattgtacttca

SEQ ID NO: 487486 - DNA, 25 bp, Homo sapien
cagaggtcgaggtgagccgagattg

SEQ ID NO: 487487 - DNA, 25 bp, Homo sapien
cttgaatacaggaagcagaggtcga

SEQ ID NO: 487488 - DNA, 25 bp, Homo sapien
cgagattgtgccattgtacttcaac

SEQ ID NO: 487489 - DNA, 25 bp, Homo sapien
ctagtgatattattagttcatgtgg

SEQ ID NO: 487490 - DNA, 25 bp, Homo sapien
taattctacctttgaacactagtga

SEQ ID NO: 487491 - DNA, 25 bp, Homo sapien
tcatgtggtttatctaaagccggga

SEQ ID NO: 487492 - DNA, 25 bp, Homo sapien
taatagcaatacatatggtacacat

SEQ ID NO: 487493 - DNA, 25 bp, Homo sapien
ttccttgagtgccttaggatagaag

SEQ ID NO: 487494 - DNA, 25 bp, Homo sapien
tttatgccaatatgatatttgcctg

SEQ ID NO: 487495 - DNA, 25 bp, Homo sapien
tttttatgccaatatgatatttgcc

SEQ ID NO: 487496 - DNA, 25 bp, Homo sapien
gagtgccttaggatagaagtcatag

SEQ ID NO: 487497 - DNA, 25 bp, Homo sapien
gttttctacaggcttctgcaagggc

SEQ ID NO: 487498 - DNA, 25 bp, Homo sapien
ttgagaagagccgttgttggcaaca

SEQ ID NO: 487499 - DNA, 25 bp, Homo sapien
gccgttgttggcaacatcaaattct

SEQ ID NO: 487500 - DNA, 25 bp, Homo sapien
tcttcctgttttctacaggcttctg

SEQ ID NO: 487501 - DNA, 25 bp, Homo sapien
gaatatggttctagggtaatgttta

SEQ ID NO: 487502 - DNA, 25 bp, Homo sapien
gaaactctatgggaatatggttcta

SEQ ID NO: 487503 - DNA, 25 bp, Homo sapien
tgtttaaatgaaatcgactagcacc

SEQ ID NO: 487504 - DNA, 25 bp, Homo sapien
gtggaaaaacagtctattagttctg

SEQ ID NO: 487505 - DNA, 25 bp, Homo sapien
cagtcatatacagggccaggatcgc

SEQ ID NO: 487506 - DNA, 25 bp, Homo sapien
catatacagggccaggatcgctgta

SEQ ID NO: 487507 - DNA, 25 bp, Homo sapien
cagggccaggatcgctgtatttctt

SEQ ID NO: 487508 - DNA, 25 bp, Homo sapien
ccaagcagtcatatacagggccagg

SEQ ID NO: 487509 - DNA, 25 bp, Homo sapien
cgctgttgcctgatgagctgatggc

SEQ ID NO: 487510 - DNA, 25 bp, Homo sapien
catttgactcctgctgaaaaccttc

SEQ ID NO: 487511 - DNA, 25 bp, Homo sapien
tgatggcctgctctgcccctacatt

SEQ ID NO: 487512 - DNA, 25 bp, Homo sapien
gcccctacatttgactcctgctgaa

SEQ ID NO: 487513 - DNA, 25 bp, Homo sapien
tccataatgtgtccgcctatttcca

SEQ ID NO: 487514 - DNA, 25 bp, Homo sapien
atctccataatgtgtccgcctattt

SEQ ID NO: 487515 - DNA, 25 bp, Homo sapien
tgtccgcctatttccactgtctctt

SEQ ID NO: 487516 - DNA, 25 bp, Homo sapien
taatgtgtccgcctatttccactgt

SEQ ID NO: 487517 - DNA, 25 bp, Homo sapien
catctcagctgtgccaaaagagcca

SEQ ID NO: 487518 - DNA, 25 bp, Homo sapien
caacacggtagatttactcaagtcc

SEQ ID NO: 487519 - DNA, 25 bp, Homo sapien
taacggagtaattcaacatctcagc

SEQ ID NO: 487520 - DNA, 25 bp, Homo sapien
gagcaggtttccatcatcgtatata

SEQ ID NO: 487521 - DNA, 25 bp, Homo sapien
ctggaattctcacacaccatggtgg

SEQ ID NO: 487522 - DNA, 25 bp, Homo sapien
gctgtcatgcaagaaaacattcgcc

SEQ ID NO: 487523 - DNA, 25 bp, Homo sapien
gactatagtgtgttggagctccagg

SEQ ID NO: 487524 - DNA, 25 bp, Homo sapien
taagactgaccacagcaagtgttgc

SEQ ID NO: 487525 - DNA, 25 bp, Homo sapien
caatttgcatattattaatcatgat

SEQ ID NO: 487526 - DNA, 25 bp, Homo sapien
aatttgcatattattaatcatgata

SEQ ID NO: 487527 - DNA, 25 bp, Homo sapien
tcaatttgcatattattaatcatga

SEQ ID NO: 487528 - DNA, 25 bp, Homo sapien
cctgtgcctgtttccattgtgctta

SEQ ID NO: 487529 - DNA, 25 bp, Homo sapien
gctatactagctacatgtgtcccat

SEQ ID NO: 487530 - DNA, 25 bp, Homo sapien
tttgagcaccaggagctaccccatt

SEQ ID NO: 487531 - DNA, 25 bp, Homo sapien
ggaaagtgtccagcagctatactag

SEQ ID NO: 487532 - DNA, 25 bp, Homo sapien
tgtagttgacaagatcacacttatg

SEQ ID NO: 487533 - DNA, 25 bp, Homo sapien
ttggccagtgagttgcttctccgta

SEQ ID NO: 487534 - DNA, 25 bp, Homo sapien
gcttctccgtaactgtagttgacaa

SEQ ID NO: 487535 - DNA, 25 bp, Homo sapien
gtgagttgcttctccgtaactgtag

SEQ ID NO: 487536 - DNA, 25 bp, Homo sapien
cacttgatgtagttccacctggaca

SEQ ID NO: 487537 - DNA, 25 bp, Homo sapien
gttccacctggacaaccaactgtag

SEQ ID NO: 487538 - DNA, 25 bp, Homo sapien
accaactgtagacaggcatggacca

SEQ ID NO: 487539 - DNA, 25 bp, Homo sapien
ctatcacacttgatgtagttccacc

SEQ ID NO: 487540 - DNA, 25 bp, Homo sapien
tctctctcagtgaatactcagcaac

SEQ ID NO: 487541 - DNA, 25 bp, Homo sapien
gaccaagtatattgatttgcaggta

SEQ ID NO: 487542 - DNA, 25 bp, Homo sapien
ctaggtcctctagaagaccaagtat

SEQ ID NO: 487543 - DNA, 25 bp, Homo sapien
tactcagcaaccatcatatcaggag

SEQ ID NO: 487544 - DNA, 25 bp, Homo sapien
tcttattgagtgtctttagctgggc

SEQ ID NO: 487545 - DNA, 25 bp, Homo sapien
gggcagtctacaatgacagcgcaaa

SEQ ID NO: 487546 - DNA, 25 bp, Homo sapien
cacggcctggttgttttcaatgaca

SEQ ID NO: 487547 - DNA, 25 bp, Homo sapien
caaaaacacatcaagctttgctgac

SEQ ID NO: 487548 - DNA, 25 bp, Homo sapien
gcatttttaagacgaccactggtta

SEQ ID NO: 487549 - DNA, 25 bp, Homo sapien
ggccacagtgtcaggtatatttaga

SEQ ID NO: 487550 - DNA, 25 bp, Homo sapien
tatctgggcatgtgtgacaggccac

SEQ ID NO: 487551 - DNA, 25 bp, Homo sapien
taacactatgtactaactgcactca

SEQ ID NO: 487552 - DNA, 25 bp, Homo sapien
ctaaatggaaagccattgaagtttg

SEQ ID NO: 487553 - DNA, 25 bp, Homo sapien
tcctggcgcactgatactcacacca

SEQ ID NO: 487554 - DNA, 25 bp, Homo sapien
cagtgtccagttaggaacagaagca

SEQ ID NO: 487555 - DNA, 25 bp, Homo sapien
gggaagacatagatgttccattcat

SEQ ID NO: 487556 - DNA, 25 bp, Homo sapien
aaaggatcagggcaatgcctccaca

SEQ ID NO: 487557 - DNA, 25 bp, Homo sapien
gaactgtgtagtcaatgttattagc

SEQ ID NO: 487558 - DNA, 25 bp, Homo sapien
gaataataccatgtccttgagcaaa

SEQ ID NO: 487559 - DNA, 25 bp, Homo sapien
aatacttctatattgtcagccttca

SEQ ID NO: 487560 - DNA, 25 bp, Homo sapien
tattgtcagccttcactgcagtgtt

SEQ ID NO: 487561 - DNA, 25 bp, Homo sapien
tgcagccacctgaacaggatctcgg

SEQ ID NO: 487562 - DNA, 25 bp, Homo sapien
tctccggaaatacaggttcaatgcc

SEQ ID NO: 487563 - DNA, 25 bp, Homo sapien
gaggtagatgccacggttatttcca

SEQ ID NO: 487564 - DNA, 25 bp, Homo sapien
caatgccaacgccatgatctgaagg

SEQ ID NO: 487565 - DNA, 25 bp, Homo sapien
gaagacagccagataatagcgatga

SEQ ID NO: 487566 - DNA, 25 bp, Homo sapien
cagaaagctctgtcttatacctaag

SEQ ID NO: 487567 - DNA, 25 bp, Homo sapien
cacacaggtcatagtattcaactga

SEQ ID NO: 487568 - DNA, 25 bp, Homo sapien
tgttcacacctaatcgagctgcagt

SEQ ID NO: 487569 - DNA, 25 bp, Homo sapien
cattgattcatgagttccaaatggc

SEQ ID NO: 487570 - DNA, 25 bp, Homo sapien
caatccttctcttaagcccctggga

SEQ ID NO: 487571 - DNA, 25 bp, Homo sapien
ccaaatggctgggacactgaaccca

SEQ ID NO: 487572 - DNA, 25 bp, Homo sapien
ccctgggatccacacgtatgtttat

SEQ ID NO: 487573 - DNA, 25 bp, Homo sapien
cagtgatcggaactctgaagagcgg

SEQ ID NO: 487574 - DNA, 25 bp, Homo sapien
gggatgctatatcatagccacatac

SEQ ID NO: 487575 - DNA, 25 bp, Homo sapien
ctctgaagagcggacctgcgttagg

SEQ ID NO: 487576 - DNA, 25 bp, Homo sapien
gctataactgcagtgatcggaactc

SEQ ID NO: 487577 - DNA, 25 bp, Homo sapien
ctgtaaaggctagatcataatgtga

SEQ ID NO: 487578 - DNA, 25 bp, Homo sapien
ccctcaggaacctcaataaaatgcc

SEQ ID NO: 487579 - DNA, 25 bp, Homo sapien
tttgaccaggtttaaagtgtacatc

SEQ ID NO: 487580 - DNA, 25 bp, Homo sapien
caataaaatgccttcgaatttgacc

SEQ ID NO: 487581 - DNA, 25 bp, Homo sapien
gtgataccaggtgacaaacagatgg

SEQ ID NO: 487582 - DNA, 25 bp, Homo sapien
gcaatagctccattataaaccagtg

SEQ ID NO: 487583 - DNA, 25 bp, Homo sapien
ccttatagggttctgacgggactag

SEQ ID NO: 487584 - DNA, 25 bp, Homo sapien
taaaccagtgtgcaaattaacaggc

SEQ ID NO: 487585 - DNA, 25 bp, Homo sapien
gaacaaactttgctgacacctcaga

SEQ ID NO: 487586 - DNA, 25 bp, Homo sapien
gatatgctctttgcttcacaagctg

SEQ ID NO: 487587 - DNA, 25 bp, Homo sapien
tagaattcatggcttcgatatgctc

SEQ ID NO: 487588 - DNA, 25 bp, Homo sapien
tcagaagaacacgaacacactgtca

SEQ ID NO: 487589 - DNA, 25 bp, Homo sapien
cactatcccatggaaagaaatggta

SEQ ID NO: 487590 - DNA, 25 bp, Homo sapien
aatgttgacatcactgagacttgcc

SEQ ID NO: 487591 - DNA, 25 bp, Homo sapien
gcccaccaacgagcaatgcaaaatt

SEQ ID NO: 487592 - DNA, 25 bp, Homo sapien
tttaactgaggagcagtacacacta

SEQ ID NO: 487593 - DNA, 25 bp, Homo sapien
ccagttcttcaaagttatgcaggga

SEQ ID NO: 487594 - DNA, 25 bp, Homo sapien
ggaggactgaacatcaaagcggttg

SEQ ID NO: 487595 - DNA, 25 bp, Homo sapien
aaagcggttgattccttccgatgca

SEQ ID NO: 487596 - DNA, 25 bp, Homo sapien
cagggagccagatcttcgtatttca

SEQ ID NO: 487597 - DNA, 25 bp, Homo sapien
gttatatgtcaggaccatctcataa

SEQ ID NO: 487598 - DNA, 25 bp, Homo sapien
catctcataaagttgacggttattt

SEQ ID NO: 487599 - DNA, 25 bp, Homo sapien
tcataaagttgacggttatttggca

SEQ ID NO: 487600 - DNA, 25 bp, Homo sapien
tatatgtcaggaccatctcataaag

SEQ ID NO: 487601 - DNA, 25 bp, Homo sapien
tcttcgcagaaagcaatcaggccca

SEQ ID NO: 487602 - DNA, 25 bp, Homo sapien
tccagtgccttcttcgcagaaagca

SEQ ID NO: 487603 - DNA, 25 bp, Homo sapien
gccttcttcgcagaaagcaatcagg

SEQ ID NO: 487604 - DNA, 25 bp, Homo sapien
tgggagctactctgacctttccctg

SEQ ID NO: 487605 - DNA, 25 bp, Homo sapien
cttggagttacttccccactcttgg

SEQ ID NO: 487606 - DNA, 25 bp, Homo sapien
ctgatgtggataggcatcgcctgaa

SEQ ID NO: 487607 - DNA, 25 bp, Homo sapien
tgggcagcttggagttacttcccca

SEQ ID NO: 487608 - DNA, 25 bp, Homo sapien
tcgcctgaacccatctgtcttttgt

SEQ ID NO: 487609 - DNA, 25 bp, Homo sapien
ggttatatttgggtggtaatgtcaa

SEQ ID NO: 487610 - DNA, 25 bp, Homo sapien
tcatgaatatctaagctcaaggtat

SEQ ID NO: 487611 - DNA, 25 bp, Homo sapien
tctgtagtcgaattgtataatctcc

SEQ ID NO: 487612 - DNA, 25 bp, Homo sapien
atcactgatttgctcatggcgaatc

SEQ ID NO: 487613 - DNA, 25 bp, Homo sapien
ggactacagtgtatacgatgggcag

SEQ ID NO: 487614 - DNA, 25 bp, Homo sapien
ttagcctagatgtcataaactgaca

SEQ ID NO: 487615 - DNA, 25 bp, Homo sapien
aatgactacatcctctaaatttagc

SEQ ID NO: 487616 - DNA, 25 bp, Homo sapien
cgatgggcagtaagtataagcaatg

SEQ ID NO: 487617 - DNA, 25 bp, Homo sapien
cagtctttgacaatgttaaggatcc

SEQ ID NO: 487618 - DNA, 25 bp, Homo sapien
gttaaggatcctgcaagatagcatc

SEQ ID NO: 487619 - DNA, 25 bp, Homo sapien
tttctttcctagttcagtctttgac

SEQ ID NO: 487620 - DNA, 25 bp, Homo sapien
cctgcaagatagcatccaggtcctg

SEQ ID NO: 487621 - DNA, 25 bp, Homo sapien
gaacgaaaattcacagctgacgccc

SEQ ID NO: 487622 - DNA, 25 bp, Homo sapien
taccagggtttcttaaatcagtgca

SEQ ID NO: 487623 - DNA, 25 bp, Homo sapien
ctgacgcccaatagctggagcagct

SEQ ID NO: 487624 - DNA, 25 bp, Homo sapien
tcagggtaggcaactttctaagcac

SEQ ID NO: 487625 - DNA, 25 bp, Homo sapien
tgggagttagaacgacattctgtaa

SEQ ID NO: 487626 - DNA, 25 bp, Homo sapien
agttagaacgacattctgtaagaaa

SEQ ID NO: 487627 - DNA, 25 bp, Homo sapien
ggagttagaacgacattctgtaaga

SEQ ID NO: 487628 - DNA, 25 bp, Homo sapien
ctgggagttagaacgacattctgta

SEQ ID NO: 487629 - DNA, 25 bp, Homo sapien
ccttgtcgttttgctgcagactgcc

SEQ ID NO: 487630 - DNA, 25 bp, Homo sapien
tccttgtcgttttgctgcagactgc

SEQ ID NO: 487631 - DNA, 25 bp, Homo sapien
cttgtcgttttgctgcagactgccc

SEQ ID NO: 487632 - DNA, 25 bp, Homo sapien
caggcagcctatgtgttgtgaggca

SEQ ID NO: 487633 - DNA, 25 bp, Homo sapien
tgccacccagtgtgctagaagagtg

SEQ ID NO: 487634 - DNA, 25 bp, Homo sapien
tctccatggaattgagcttctctgc

SEQ ID NO: 487635 - DNA, 25 bp, Homo sapien
tatcagggagagaggtatgctgctc

SEQ ID NO: 487636 - DNA, 25 bp, Homo sapien
gcgcaaaatctgagctgatcttcta

SEQ ID NO: 487637 - DNA, 25 bp, Homo sapien
cactctctgggtaggcactgccctg

SEQ ID NO: 487638 - DNA, 25 bp, Homo sapien
cctgagcaaagccaaggtaagcgca

SEQ ID NO: 487639 - DNA, 25 bp, Homo sapien
ggaaacaggtctattgcttgggcta

SEQ ID NO: 487640 - DNA, 25 bp, Homo sapien
tgtcattctccctctgaggtcaggg

SEQ ID NO: 487641 - DNA, 25 bp, Homo sapien
ataaatccatttgtagccactggct

SEQ ID NO: 487642 - DNA, 25 bp, Homo sapien
cagaacctgtaaacaaaggcctcac

SEQ ID NO: 487643 - DNA, 25 bp, Homo sapien
gtcagggggccagaacctgtaaaca

SEQ ID NO: 487644 - DNA, 25 bp, Homo sapien
tcacggaagccttgaggaaaaacca

SEQ ID NO: 487645 - DNA, 25 bp, Homo sapien
gccttagactaaaaatgggtcgcag

SEQ ID NO: 487646 - DNA, 25 bp, Homo sapien
caaaaagcacctgggatcacggaag

SEQ ID NO: 487647 - DNA, 25 bp, Homo sapien
gatgagcaagtgtaaagacctgagc

SEQ ID NO: 487648 - DNA, 25 bp, Homo sapien
agtccccgcgatgtgccaggtaatg

SEQ ID NO: 487649 - DNA, 25 bp, Homo sapien
gacttactgagtccccgcgatgtgc

SEQ ID NO: 487650 - DNA, 25 bp, Homo sapien
caaccaacaggacttactgagtccc

SEQ ID NO: 487651 - DNA, 25 bp, Homo sapien
caacaggacttactgagtccccgcg

SEQ ID NO: 487652 - DNA, 25 bp, Homo sapien
ggctttacttggcagacagatgaca

SEQ ID NO: 487653 - DNA, 25 bp, Homo sapien
tgtcatgtaacatgggctgcaccta

SEQ ID NO: 487654 - DNA, 25 bp, Homo sapien
gctgcacctaagttgtactacactg

SEQ ID NO: 487655 - DNA, 25 bp, Homo sapien
gatgacaaaagtacactgacctttc

SEQ ID NO: 487656 - DNA, 25 bp, Homo sapien
ttggtggaggtattaagtagtaatg

SEQ ID NO: 487657 - DNA, 25 bp, Homo sapien
ttaagatctcgtaatgcttcagtaa

SEQ ID NO: 487658 - DNA, 25 bp, Homo sapien
tgaattttaagatctcgtaatgctt

SEQ ID NO: 487659 - DNA, 25 bp, Homo sapien
agtagtaatgaacagggattacatc

SEQ ID NO: 487660 - DNA, 25 bp, Homo sapien
caacagtactttacaagagagcccc

SEQ ID NO: 487661 - DNA, 25 bp, Homo sapien
gcttgcctcgtgtggtatggaacca

SEQ ID NO: 487662 - DNA, 25 bp, Homo sapien
agagagcccctacctcttgagagca

SEQ ID NO: 487663 - DNA, 25 bp, Homo sapien
tatgaactccttaggccacactggc

SEQ ID NO: 487664 - DNA, 25 bp, Homo sapien
cctgttccatggactttggtgcact

SEQ ID NO: 487665 - DNA, 25 bp, Homo sapien
tgagagagcccttaaggcacacgga

SEQ ID NO: 487666 - DNA, 25 bp, Homo sapien
cattgagttccctggatatgtaggt

SEQ ID NO: 487667 - DNA, 25 bp, Homo sapien
tgctcagaagtcagttgttaacctt

SEQ ID NO: 487668 - DNA, 25 bp, Homo sapien
cagttttgctcctttgtgctataag

SEQ ID NO: 487669 - DNA, 25 bp, Homo sapien
tctccttccttctgtagtagtattc

SEQ ID NO: 487670 - DNA, 25 bp, Homo sapien
tacataggcctaatatatacacaat

SEQ ID NO: 487671 - DNA, 25 bp, Homo sapien
ctagcttaatttcagtgagatacag

SEQ ID NO: 487672 - DNA, 25 bp, Homo sapien
tgagtctcagggaatcacatatgac

SEQ ID NO: 487673 - DNA, 25 bp, Homo sapien
tggtccacagacaaagaataccttt

SEQ ID NO: 487674 - DNA, 25 bp, Homo sapien
ttcaagactgtctggctattctgag

SEQ ID NO: 487675 - DNA, 25 bp, Homo sapien
ccttgtgccagtataacactgtctt

SEQ ID NO: 487676 - DNA, 25 bp, Homo sapien
ccctgaagactaacgattttgagca

SEQ ID NO: 487677 - DNA, 25 bp, Homo sapien
gctgaaaaggaatcccctgtatgga

SEQ ID NO: 487678 - DNA, 25 bp, Homo sapien
gctgatggacattccaccttttggc

SEQ ID NO: 487679 - DNA, 25 bp, Homo sapien
gctgggccatatggaaactaagttt

SEQ ID NO: 487680 - DNA, 25 bp, Homo sapien
caattgatgaagtcgtgcaacgtac

SEQ ID NO: 487681 - DNA, 25 bp, Homo sapien
caacgtacagaggaagataattagg

SEQ ID NO: 487682 - DNA, 25 bp, Homo sapien
tttcagcatccaattgatgaagtcg

SEQ ID NO: 487683 - DNA, 25 bp, Homo sapien
tcaattcgttataaatgtcactaga

SEQ ID NO: 487684 - DNA, 25 bp, Homo sapien
agcatttgccgcatcaacaatttca

SEQ ID NO: 487685 - DNA, 25 bp, Homo sapien
gcatttgccgcatcaacaatttcat

SEQ ID NO: 487686 - DNA, 25 bp, Homo sapien
ttcattgcaatataaactgctaggg

SEQ ID NO: 487687 - DNA, 25 bp, Homo sapien
caggcctgggatcagtcttcattgc

SEQ ID NO: 487688 - DNA, 25 bp, Homo sapien
gcaatataaactgctagggctgttt

SEQ ID NO: 487689 - DNA, 25 bp, Homo sapien
tttatagtagctgcatcaggcctgg

SEQ ID NO: 487690 - DNA, 25 bp, Homo sapien
tgtgtctgagcactcctttcatccg

SEQ ID NO: 487691 - DNA, 25 bp, Homo sapien
tttcatccgtcgctcggccagagtc

SEQ ID NO: 487692 - DNA, 25 bp, Homo sapien
gggcagactcggcaaatgctgcctg

SEQ ID NO: 487693 - DNA, 25 bp, Homo sapien
tgctgcctgatggatcctggctgcc

SEQ ID NO: 487694 - DNA, 25 bp, Homo sapien
caggtgttaaccctagagaactaga

SEQ ID NO: 487695 - DNA, 25 bp, Homo sapien
tcagcaatcggtggatcaatgtaca

SEQ ID NO: 487696 - DNA, 25 bp, Homo sapien
aatgcccaaattgccagctcacacg

SEQ ID NO: 487697 - DNA, 25 bp, Homo sapien
tattacatacatttgggcccacagc

SEQ ID NO: 487698 - DNA, 25 bp, Homo sapien
catttgtctatgtgtatacccagag

SEQ ID NO: 487699 - DNA, 25 bp, Homo sapien
tagctgcacctggttgaaacggaat

SEQ ID NO: 487700 - DNA, 25 bp, Homo sapien
ttaaatgagttagggtagctgcacc

SEQ ID NO: 487701 - DNA, 25 bp, Homo sapien
ggaatgccagaagcaacagagttga

SEQ ID NO: 487702 - DNA, 25 bp, Homo sapien
gcacaacctttcctacaaagggcat

SEQ ID NO: 487703 - DNA, 25 bp, Homo sapien
tcttgagcctgggtgtgaagaagat

SEQ ID NO: 487704 - DNA, 25 bp, Homo sapien
catctacgagggtggatttttgttt

SEQ ID NO: 487705 - DNA, 25 bp, Homo sapien
agtggaaatggctccgtcttgagcc

SEQ ID NO: 487706 - DNA, 25 bp, Homo sapien
caaatttaaggcctctcccatacat

SEQ ID NO: 487707 - DNA, 25 bp, Homo sapien
cttccacaagtttagttgcaaattt

SEQ ID NO: 487708 - DNA, 25 bp, Homo sapien
tagttgcaaatttaaggcctctccc

SEQ ID NO: 487709 - DNA, 25 bp, Homo sapien
gcatgtttatatgcaaatgtcaaaa

SEQ ID NO: 487710 - DNA, 25 bp, Homo sapien
cacagtcctaatcctttctagttat

SEQ ID NO: 487711 - DNA, 25 bp, Homo sapien
ataaaaccagtattgctatatcaca

SEQ ID NO: 487712 - DNA, 25 bp, Homo sapien
tatcttgtcactatgcaatatcaaa

SEQ ID NO: 487713 - DNA, 25 bp, Homo sapien
attactgtaataactggtcacaata

SEQ ID NO: 487714 - DNA, 25 bp, Homo sapien
gaggctagtatcagttttttggata

SEQ ID NO: 487715 - DNA, 25 bp, Homo sapien
aggctagtatcagttttttggatag

SEQ ID NO: 487716 - DNA, 25 bp, Homo sapien
aacttgtgcagaaacctcaactata

SEQ ID NO: 487717 - DNA, 25 bp, Homo sapien
agagttgaggcaacatgcctttaaa

SEQ ID NO: 487718 - DNA, 25 bp, Homo sapien
ttagagttgaggcaacatgccttta

SEQ ID NO: 487719 - DNA, 25 bp, Homo sapien
ctaacttgtgcagaaacctcaacta

SEQ ID NO: 487720 - DNA, 25 bp, Homo sapien
tggactgactggtgaaggtaaacaa

SEQ ID NO: 487721 - DNA, 25 bp, Homo sapien
ttaatctagtcaaagatctggagga

SEQ ID NO: 487722 - DNA, 25 bp, Homo sapien
ggactgactggtgaaggtaaacaaa

SEQ ID NO: 487723 - DNA, 25 bp, Homo sapien
agaaagagttctcttaatctagtca

SEQ ID NO: 487724 - DNA, 25 bp, Homo sapien
tatattattataaaggaagtgacag

SEQ ID NO: 487725 - DNA, 25 bp, Homo sapien
gacagatttttaagctcagtattta

SEQ ID NO: 487726 - DNA, 25 bp, Homo sapien
gtagcatatagaaccttccttccac

SEQ ID NO: 487727 - DNA, 25 bp, Homo sapien
gtaacagtaaggtagtagcatatag

SEQ ID NO: 487728 - DNA, 25 bp, Homo sapien
tcagtaaaagatgcacaatgggtcc

SEQ ID NO: 487729 - DNA, 25 bp, Homo sapien
ttagaatacgcaataatcgggagga

SEQ ID NO: 487730 - DNA, 25 bp, Homo sapien
caatgggtccatccaagtaacttca

SEQ ID NO: 487731 - DNA, 25 bp, Homo sapien
caataatcgggaggatacatgatgg

SEQ ID NO: 487732 - DNA, 25 bp, Homo sapien
catgcattagactaaaaatgccaca

SEQ ID NO: 487733 - DNA, 25 bp, Homo sapien
aacatgcattagactaaaaatgcca

SEQ ID NO: 487734 - DNA, 25 bp, Homo sapien
acatgcattagactaaaaatgccac

SEQ ID NO: 487735 - DNA, 25 bp, Homo sapien
ctctgataaatacatgtcattttaa

SEQ ID NO: 487736 - DNA, 25 bp, Homo sapien
tcattttaataatcagtactggata

SEQ ID NO: 487737 - DNA, 25 bp, Homo sapien
ataatcagtactggatagtggatga

SEQ ID NO: 487738 - DNA, 25 bp, Homo sapien
tttaataatcagtactggatagtgg

SEQ ID NO: 487739 - DNA, 25 bp, Homo sapien
tacatgtattaagccacacgtcagt

SEQ ID NO: 487740 - DNA, 25 bp, Homo sapien
ccagagtgcatatggtgtactgtga

SEQ ID NO: 487741 - DNA, 25 bp, Homo sapien
gattcagctgtctggcacttacaca

SEQ ID NO: 487742 - DNA, 25 bp, Homo sapien
caactcgaagtcctaggtgctggca

SEQ ID NO: 487743 - DNA, 25 bp, Homo sapien
gcacgtgcagtagccaaagataaaa

SEQ ID NO: 487744 - DNA, 25 bp, Homo sapien
aagttaatcatacaagaactggaaa

SEQ ID NO: 487745 - DNA, 25 bp, Homo sapien
gacgagagatgcacgtgcagtagcc

SEQ ID NO: 487746 - DNA, 25 bp, Homo sapien
ttggtggaggaatgacgagagatgc

SEQ ID NO: 487747 - DNA, 25 bp, Homo sapien
tagctagcccagaaggtgtgaccaa

SEQ ID NO: 487748 - DNA, 25 bp, Homo sapien
gccgtataaccttgggaagtcatcc

SEQ ID NO: 487749 - DNA, 25 bp, Homo sapien
aaacgttactgattcctgctgtagg

SEQ ID NO: 487750 - DNA, 25 bp, Homo sapien
gatagactttggaccctagctagcc

SEQ ID NO: 487751 - DNA, 25 bp, Homo sapien
ttatctatctccctatgaaggcttc

SEQ ID NO: 487752 - DNA, 25 bp, Homo sapien
tatctatctccctatgaaggcttct

SEQ ID NO: 487753 - DNA, 25 bp, Homo sapien
attatctatctccctatgaaggctt

SEQ ID NO: 487754 - DNA, 25 bp, Homo sapien
atctatctccctatgaaggcttctc

SEQ ID NO: 487755 - DNA, 25 bp, Homo sapien
gaaattctgctgattgggatgccca

SEQ ID NO: 487756 - DNA, 25 bp, Homo sapien
tgcagactgcaccattagagtgtcc

SEQ ID NO: 487757 - DNA, 25 bp, Homo sapien
cagcaaagtgctagcaggtactgca

SEQ ID NO: 487758 - DNA, 25 bp, Homo sapien
tgtttgtccctcgagagaactcagc

SEQ ID NO: 487759 - DNA, 25 bp, Homo sapien
aatcacacacattgaatgtcggtgg

SEQ ID NO: 487760 - DNA, 25 bp, Homo sapien
tgaagaaggtctgtgtctccaatga

SEQ ID NO: 487761 - DNA, 25 bp, Homo sapien
tcggtggttccagggttcttgaaga

SEQ ID NO: 487762 - DNA, 25 bp, Homo sapien
cactgagtctcccttataagtaggc

SEQ ID NO: 487763 - DNA, 25 bp, Homo sapien
gcagtcacagcggctgctctcaggg

SEQ ID NO: 487764 - DNA, 25 bp, Homo sapien
tgcagcagccctggaccatttgaca

SEQ ID NO: 487765 - DNA, 25 bp, Homo sapien
atcccatatagaagcagctggcagt

SEQ ID NO: 487766 - DNA, 25 bp, Homo sapien
gacatttgggccactgtgttaccag

SEQ ID NO: 487767 - DNA, 25 bp, Homo sapien
aacggacagcgttggaggcatctgc

SEQ ID NO: 487768 - DNA, 25 bp, Homo sapien
aaatcggagcatgattagtgacaac

SEQ ID NO: 487769 - DNA, 25 bp, Homo sapien
catgtccaagcagcggacggcgcta

SEQ ID NO: 487770 - DNA, 25 bp, Homo sapien
gacggcgctatggaaagaacggaca

SEQ ID NO: 487771 - DNA, 25 bp, Homo sapien
tgtgatctctttctgctctgaattc

SEQ ID NO: 487772 - DNA, 25 bp, Homo sapien
tgatctctttctgctctgaattcat

SEQ ID NO: 487773 - DNA, 25 bp, Homo sapien
cccactgtgatctctttctgctctg

SEQ ID NO: 487774 - DNA, 25 bp, Homo sapien
ccagcccactgtgatctctttctgc

SEQ ID NO: 487775 - DNA, 25 bp, Homo sapien
aagcacatggggaagcggcaggacc

SEQ ID NO: 487776 - DNA, 25 bp, Homo sapien
tcccatccgaaaagtttcaggagct

SEQ ID NO: 487777 - DNA, 25 bp, Homo sapien
aatcactcgcttcccatccgaaaag

SEQ ID NO: 487778 - DNA, 25 bp, Homo sapien
aagagccaatcactcgcttcccatc

SEQ ID NO: 487779 - DNA, 25 bp, Homo sapien
tcaccacatgtatgaaccacaaaag

SEQ ID NO: 487780 - DNA, 25 bp, Homo sapien
atcaccacatgtatgaaccacaaaa

SEQ ID NO: 487781 - DNA, 25 bp, Homo sapien
aatcaccacatgtatgaaccacaaa

SEQ ID NO: 487782 - DNA, 25 bp, Homo sapien
tcagtgggcagtttactacaaaaca

SEQ ID NO: 487783 - DNA, 25 bp, Homo sapien
gaatatcagggttaagtcatacaca

SEQ ID NO: 487784 - DNA, 25 bp, Homo sapien
gatcgtcatcttggtaaatcagagg

SEQ ID NO: 487785 - DNA, 25 bp, Homo sapien
tagctgaagggatagcaaggtattc

SEQ ID NO: 487786 - DNA, 25 bp, Homo sapien
tcaataccacgtgataccccttggg

SEQ ID NO: 487787 - DNA, 25 bp, Homo sapien
gagttacagaaatcaccacatggtg

SEQ ID NO: 487788 - DNA, 25 bp, Homo sapien
gaacacgccgacaaaatctggatgg

SEQ ID NO: 487789 - DNA, 25 bp, Homo sapien
gatctgaaccgaagagtcccgaagg

SEQ ID NO: 487790 - DNA, 25 bp, Homo sapien
aggagtggtacgcagcagttccttt

SEQ ID NO: 487791 - DNA, 25 bp, Homo sapien
ccatcagcaggagtggtacgcagca

SEQ ID NO: 487792 - DNA, 25 bp, Homo sapien
taattagggattcagtaccataaag

SEQ ID NO: 487793 - DNA, 25 bp, Homo sapien
tcttcagtggaatgctaattaggga

SEQ ID NO: 487794 - DNA, 25 bp, Homo sapien
gagaaggcaaatcattccatggcag

SEQ ID NO: 487795 - DNA, 25 bp, Homo sapien
tcaacagaacattagtctagtatcc

SEQ ID NO: 487796 - DNA, 25 bp, Homo sapien
atggcagtgaaaggacggtcgacaa

SEQ ID NO: 487797 - DNA, 25 bp, Homo sapien
gaaaatgcaagctccccataaaatc

SEQ ID NO: 487798 - DNA, 25 bp, Homo sapien
acgcccgtgagacccgctttgaatt

SEQ ID NO: 487799 - DNA, 25 bp, Homo sapien
tcccgggtgactggctcgaagtagc

SEQ ID NO: 487800 - DNA, 25 bp, Homo sapien
gctcgaagtagcctcggagttgaga

SEQ ID NO: 487801 - DNA, 25 bp, Homo sapien
tttgcggagagaacggatcccgtgc

SEQ ID NO: 487802 - DNA, 25 bp, Homo sapien
gcttcgtccgctttgccgggtagga

SEQ ID NO: 487803 - DNA, 25 bp, Homo sapien
ctttgccgggtaggagggcggaatg

SEQ ID NO: 487804 - DNA, 25 bp, Homo sapien
cagccggtgggggcttcgtccgctt

SEQ ID NO: 487805 - DNA, 25 bp, Homo sapien
tgccgggtaggagggcggaatgtgg

SEQ ID NO: 487806 - DNA, 25 bp, Homo sapien
agtgacggcggttgggtgcccgcgg

SEQ ID NO: 487807 - DNA, 25 bp, Homo sapien
ccctgaagggagtgacggcggttgg

SEQ ID NO: 487808 - DNA, 25 bp, Homo sapien
tgaagggagtgacggcggttgggtg

SEQ ID NO: 487809 - DNA, 25 bp, Homo sapien
ggtgcccgcggccacttttgccttc

SEQ ID NO: 487810 - DNA, 25 bp, Homo sapien
ctttgtcaatccatgggaaaatgag

SEQ ID NO: 487811 - DNA, 25 bp, Homo sapien
taaactaagacatcagagtaccgtc

SEQ ID NO: 487812 - DNA, 25 bp, Homo sapien
tctcagactggtcagtgcttttctg

SEQ ID NO: 487813 - DNA, 25 bp, Homo sapien
tcggtttctcaagatgcttctcaga

SEQ ID NO: 487814 - DNA, 25 bp, Homo sapien
taaatgggcgagaggtggtaaaatc

SEQ ID NO: 487815 - DNA, 25 bp, Homo sapien
agtatttccgctcgtcctgtcgcga

SEQ ID NO: 487816 - DNA, 25 bp, Homo sapien
tgtcgcgaactacatatcccaggga

SEQ ID NO: 487817 - DNA, 25 bp, Homo sapien
gtgaccaacgcaaaaacctgagctg

SEQ ID NO: 487818 - DNA, 25 bp, Homo sapien
tcccatcggagcgagcgaggatgct

SEQ ID NO: 487819 - DNA, 25 bp, Homo sapien
ccggcgacaggtcgtcggatagcat

SEQ ID NO: 487820 - DNA, 25 bp, Homo sapien
ggcgtccctcgtcccatcggagcga

SEQ ID NO: 487821 - DNA, 25 bp, Homo sapien
gcggtgcccggcgacaggtcgtcgg

SEQ ID NO: 487822 - DNA, 25 bp, Homo sapien
cgcgcggccggcgaggcgcctcctg

SEQ ID NO: 487823 - DNA, 25 bp, Homo sapien
ctggatcacagcatccagcgcgcgg

SEQ ID NO: 487824 - DNA, 25 bp, Homo sapien
tggatcacagcatccagcgcgcggc

SEQ ID NO: 487825 - DNA, 25 bp, Homo sapien
cggccggcgaggcgcctcctgttac

SEQ ID NO: 487826 - DNA, 25 bp, Homo sapien
ctctggcctgtcgggtggggtcggg

SEQ ID NO: 487827 - DNA, 25 bp, Homo sapien
gctgcggccgcggcggaacccggct

SEQ ID NO: 487828 - DNA, 25 bp, Homo sapien
tgtcgggtggggtcgggtcgctgcg

SEQ ID NO: 487829 - DNA, 25 bp, Homo sapien
ctgcggccgcggcggaacccggctc

SEQ ID NO: 487830 - DNA, 25 bp, Homo sapien
ccacggggctcggagaggcgatgac

SEQ ID NO: 487831 - DNA, 25 bp, Homo sapien
acggggctcggagaggcgatgaccc

SEQ ID NO: 487832 - DNA, 25 bp, Homo sapien
acgccacggggctcggagaggcgat

SEQ ID NO: 487833 - DNA, 25 bp, Homo sapien
cgccacggggctcggagaggcgatg

SEQ ID NO: 487834 - DNA, 25 bp, Homo sapien
gctttgttcaccagagggctaggcc

SEQ ID NO: 487835 - DNA, 25 bp, Homo sapien
gggtcaccggtatccacatggacac

SEQ ID NO: 487836 - DNA, 25 bp, Homo sapien
cacatggacacctcctaatcgagct

SEQ ID NO: 487837 - DNA, 25 bp, Homo sapien
agagcgcgcacccatgcagtggcct

SEQ ID NO: 487838 - DNA, 25 bp, Homo sapien
gtgagcccgtgactcctggcggcgg

SEQ ID NO: 487839 - DNA, 25 bp, Homo sapien
aggcgacggccgctgcgcgctggtt

SEQ ID NO: 487840 - DNA, 25 bp, Homo sapien
ccagacccgggtgctggcgtgcagg

SEQ ID NO: 487841 - DNA, 25 bp, Homo sapien
cgtgcaggggaaggcgacggccgct

SEQ ID NO: 487842 - DNA, 25 bp, Homo sapien
gcggctccgggtccgactgccaagc

SEQ ID NO: 487843 - DNA, 25 bp, Homo sapien
ggctccgggtccgactgccaagctg

SEQ ID NO: 487844 - DNA, 25 bp, Homo sapien
gctccgggtccgactgccaagctga

SEQ ID NO: 487845 - DNA, 25 bp, Homo sapien
ctccgggtccgactgccaagctgac

SEQ ID NO: 487846 - DNA, 25 bp, Homo sapien
gccttggctcggagccaccggctct

SEQ ID NO: 487847 - DNA, 25 bp, Homo sapien
cggagccaccggctcttctgggttt

SEQ ID NO: 487848 - DNA, 25 bp, Homo sapien
agccaccggctcttctgggttttcg

SEQ ID NO: 487849 - DNA, 25 bp, Homo sapien
tggctcggagccaccggctcttctg

SEQ ID NO: 487850 - DNA, 25 bp, Homo sapien
attaataatgacaattgcacaaaag

SEQ ID NO: 487851 - DNA, 25 bp, Homo sapien
tgagtaaacgagtcggtatcattaa

SEQ ID NO: 487852 - DNA, 25 bp, Homo sapien
acgagtcggtatcattaataatgac

SEQ ID NO: 487853 - DNA, 25 bp, Homo sapien
ctgtttgagtaaacgagtcggtatc

SEQ ID NO: 487854 - DNA, 25 bp, Homo sapien
cacgggcaattgctgcatccgggct

SEQ ID NO: 487855 - DNA, 25 bp, Homo sapien
ggcaattgctgcatccgggctaaga

SEQ ID NO: 487856 - DNA, 25 bp, Homo sapien
caattgctgcatccgggctaagagc

SEQ ID NO: 487857 - DNA, 25 bp, Homo sapien
gggcccacgggcaattgctgcatcc

SEQ ID NO: 487858 - DNA, 25 bp, Homo sapien
cgggggtgaccgcctcgaacatgct

SEQ ID NO: 487859 - DNA, 25 bp, Homo sapien
cccgggggtgaccgcctcgaacatg

SEQ ID NO: 487860 - DNA, 25 bp, Homo sapien
gggtgaccgcctcgaacatgcttgc

SEQ ID NO: 487861 - DNA, 25 bp, Homo sapien
ggggtgaccgcctcgaacatgcttg

SEQ ID NO: 487862 - DNA, 25 bp, Homo sapien
acggagtagacagtcgcgcaggcca

SEQ ID NO: 487863 - DNA, 25 bp, Homo sapien
gcgcagaaccagtgcgcgcggaggc

SEQ ID NO: 487864 - DNA, 25 bp, Homo sapien
gataccgggagtcctccgcgcctgg

SEQ ID NO: 487865 - DNA, 25 bp, Homo sapien
ggcgccagcctgtcaaaagataccg

SEQ ID NO: 487866 - DNA, 25 bp, Homo sapien
gattgattgcggttccctcttccag

SEQ ID NO: 487867 - DNA, 25 bp, Homo sapien
tccagattattgtatccccagggcc

SEQ ID NO: 487868 - DNA, 25 bp, Homo sapien
tatgatcaacgtctgcatcctgcaa

SEQ ID NO: 487869 - DNA, 25 bp, Homo sapien
taagatttactaagccggcgtggtg

SEQ ID NO: 487870 - DNA, 25 bp, Homo sapien
cacacaggtcttaccaggtggcaat

SEQ ID NO: 487871 - DNA, 25 bp, Homo sapien
aggtgacccggtacagactctagta

SEQ ID NO: 487872 - DNA, 25 bp, Homo sapien
aaggccaactcctgatggtccctag

SEQ ID NO: 487873 - DNA, 25 bp, Homo sapien
gacacttctaacctgacctgtgcag

SEQ ID NO: 487874 - DNA, 25 bp, Homo sapien
ggaagtggtgctctctccttattca

SEQ ID NO: 487875 - DNA, 25 bp, Homo sapien
cagcagatgtcctaacatagcattt

SEQ ID NO: 487876 - DNA, 25 bp, Homo sapien
tgcctttctctacatcagtgtggtg

SEQ ID NO: 487877 - DNA, 25 bp, Homo sapien
cagtacctggcgttgttcagaccaa

SEQ ID NO: 487878 - DNA, 25 bp, Homo sapien
aacgaaagcctatgagttaggctgc

SEQ ID NO: 487879 - DNA, 25 bp, Homo sapien
aaatagtatcaaaaccatcatacaa

SEQ ID NO: 487880 - DNA, 25 bp, Homo sapien
caaatattgaacaacgaaagcctat

SEQ ID NO: 487881 - DNA, 25 bp, Homo sapien
taaaaataactgtcatgggttacca

SEQ ID NO: 487882 - DNA, 25 bp, Homo sapien
tttaccagttaatatctctgcccat

SEQ ID NO: 487883 - DNA, 25 bp, Homo sapien
caacagagcatcagttgagagattc

SEQ ID NO: 487884 - DNA, 25 bp, Homo sapien
ccgggcagggtatgcgggtttctca

SEQ ID NO: 487885 - DNA, 25 bp, Homo sapien
cagggtatgcgggtttctcagggct

SEQ ID NO: 487886 - DNA, 25 bp, Homo sapien
ctgacagaaaaacggatccaatcaa

SEQ ID NO: 487887 - DNA, 25 bp, Homo sapien
tcaaggtgtcactaacttctgatca

SEQ ID NO: 487888 - DNA, 25 bp, Homo sapien
cagaaaaacggatccaatcaaggtg

SEQ ID NO: 487889 - DNA, 25 bp, Homo sapien
aaacggatccaatcaaggtgtcact

SEQ ID NO: 487890 - DNA, 25 bp, Homo sapien
tactagaaacaagttgcaactctat

SEQ ID NO: 487891 - DNA, 25 bp, Homo sapien
ttactagaaacaagttgcaactcta

SEQ ID NO: 487892 - DNA, 25 bp, Homo sapien
tattactagaaacaagttgcaactc

SEQ ID NO: 487893 - DNA, 25 bp, Homo sapien
cagcatgctataaaagcttgagagc

SEQ ID NO: 487894 - DNA, 25 bp, Homo sapien
cagatttgtgctcaccatttccaga

SEQ ID NO: 487895 - DNA, 25 bp, Homo sapien
tctctcagatttgtgctcaccattt

SEQ ID NO: 487896 - DNA, 25 bp, Homo sapien
tctcagatttgtgctcaccatttcc

SEQ ID NO: 487897 - DNA, 25 bp, Homo sapien
atttgtgctcaccatttccagaatc

SEQ ID NO: 487898 - DNA, 25 bp, Homo sapien
tccgatgtactagtcgggataccaa

SEQ ID NO: 487899 - DNA, 25 bp, Homo sapien
gtgtttcgaatttgtggtcacccca

SEQ ID NO: 487900 - DNA, 25 bp, Homo sapien
tgagaaaggcatagtccgaacagat

SEQ ID NO: 487901 - DNA, 25 bp, Homo sapien
ttcccatgcgagaggtagcttgccc

SEQ ID NO: 487902 - DNA, 25 bp, Homo sapien
gaggtctaatactttccgctgttta

SEQ ID NO: 487903 - DNA, 25 bp, Homo sapien
atactttccgctgtttaatatcttc

SEQ ID NO: 487904 - DNA, 25 bp, Homo sapien
catcgtctgaggtctaatactttcc

SEQ ID NO: 487905 - DNA, 25 bp, Homo sapien
tctgaggtctaatactttccgctgt

SEQ ID NO: 487906 - DNA, 25 bp, Homo sapien
tggcagttacgtggagtcacacaga

SEQ ID NO: 487907 - DNA, 25 bp, Homo sapien
aacatgtggttcacaactgggtccc

SEQ ID NO: 487908 - DNA, 25 bp, Homo sapien
ccgagtttgggaaagaccagcataa

SEQ ID NO: 487909 - DNA, 25 bp, Homo sapien
ttagcctgggaattagacactaggg

SEQ ID NO: 487910 - DNA, 25 bp, Homo sapien
cttatcagtgagaacgtgtgccacg

SEQ ID NO: 487911 - DNA, 25 bp, Homo sapien
tgccacgagccctaaatctgtagac

SEQ ID NO: 487912 - DNA, 25 bp, Homo sapien
tctgtagactacacaaaatgacaca

SEQ ID NO: 487913 - DNA, 25 bp, Homo sapien
tacctaggtattacactctgtgtgc

SEQ ID NO: 487914 - DNA, 25 bp, Homo sapien
aacaaagaaacaagccctatcatca

SEQ ID NO: 487915 - DNA, 25 bp, Homo sapien
taagagcaactttagtgtggtctaa

SEQ ID NO: 487916 - DNA, 25 bp, Homo sapien
agaaggtgctaagaagtagccacaa

SEQ ID NO: 487917 - DNA, 25 bp, Homo sapien
gaagtagccacaatgaaacaaagaa

SEQ ID NO: 487918 - DNA, 25 bp, Homo sapien
gataatgttaaatcagcttaacaat

SEQ ID NO: 487919 - DNA, 25 bp, Homo sapien
ttgtggggggagataatgttaaatc

SEQ ID NO: 487920 - DNA, 25 bp, Homo sapien
aagctagtcaagcgtggttgtgggg

SEQ ID NO: 487921 - DNA, 25 bp, Homo sapien
gggagataatgttaaatcagcttaa

SEQ ID NO: 487922 - DNA, 25 bp, Homo sapien
gagccactgcacctggccaaatgtg

SEQ ID NO: 487923 - DNA, 25 bp, Homo sapien
acgtgagccactgcacctggccaaa

SEQ ID NO: 487924 - DNA, 25 bp, Homo sapien
ttgaccttgtgatcttccacctcag

SEQ ID NO: 487925 - DNA, 25 bp, Homo sapien
gtgagccactgcacctggccaaatg

SEQ ID NO: 487926 - DNA, 25 bp, Homo sapien
tagctaagtatgactaactgccagt

SEQ ID NO: 487927 - DNA, 25 bp, Homo sapien
tcagtggcactaagcaatccagaca

SEQ ID NO: 487928 - DNA, 25 bp, Homo sapien
cccacgtgtcaacttctcagagaga

SEQ ID NO: 487929 - DNA, 25 bp, Homo sapien
taaactcctggttgaactgcttaca

SEQ ID NO: 487930 - DNA, 25 bp, Homo sapien
tgtgctgtataagaaattccaacaa

SEQ ID NO: 487931 - DNA, 25 bp, Homo sapien
aattaatgaagagatgccacaagaa

SEQ ID NO: 487932 - DNA, 25 bp, Homo sapien
cttatactgtggtcggcttatgcag

SEQ ID NO: 487933 - DNA, 25 bp, Homo sapien
aagtcttatactgtggtcggcttat

SEQ ID NO: 487934 - DNA, 25 bp, Homo sapien
agaatatgtaaagcttcttcttggg

SEQ ID NO: 487935 - DNA, 25 bp, Homo sapien
cgtgaaaggaccaaacctaatatct

SEQ ID NO: 487936 - DNA, 25 bp, Homo sapien
ccaaacctaatatcttcaaatggag

SEQ ID NO: 487937 - DNA, 25 bp, Homo sapien
ataagtgttgtattccccgtgaaag

SEQ ID NO: 487938 - DNA, 25 bp, Homo sapien
ttacatggaagtggtcattaatttg

SEQ ID NO: 487939 - DNA, 25 bp, Homo sapien
tagaacataagagcatccttttaca

SEQ ID NO: 487940 - DNA, 25 bp, Homo sapien
gcttatatagaacataagagcatcc

SEQ ID NO: 487941 - DNA, 25 bp, Homo sapien
ttcccatgaggcttatatagaacat

SEQ ID NO: 487942 - DNA, 25 bp, Homo sapien
ttagagttttactagcatgtgcgcg

SEQ ID NO: 487943 - DNA, 25 bp, Homo sapien
cacggacccaaacaatacaatgtgt

SEQ ID NO: 487944 - DNA, 25 bp, Homo sapien
gaaaactgctaactccatgctgctt

SEQ ID NO: 487945 - DNA, 25 bp, Homo sapien
tatatgtcaccacacaggtctaaca

SEQ ID NO: 487946 - DNA, 25 bp, Homo sapien
actgaaagcccataaagcagtgtcc

SEQ ID NO: 487947 - DNA, 25 bp, Homo sapien
ctgaaagcccataaagcagtgtcca

SEQ ID NO: 487948 - DNA, 25 bp, Homo sapien
tgaaagcccataaagcagtgtccat

SEQ ID NO: 487949 - DNA, 25 bp, Homo sapien
cacacaaactgaaagcccataaagc

SEQ ID NO: 487950 - DNA, 25 bp, Homo sapien
gattttggcaatgatagatataagc

SEQ ID NO: 487951 - DNA, 25 bp, Homo sapien
gcttcgaagccaattggacaaaaat

SEQ ID NO: 487952 - DNA, 25 bp, Homo sapien
caatccacgggttaactttgacagg

SEQ ID NO: 487953 - DNA, 25 bp, Homo sapien
tataagccagcgattcatctttcaa

SEQ ID NO: 487954 - DNA, 25 bp, Homo sapien
aggtcattccaacctgtctcagaat

SEQ ID NO: 487955 - DNA, 25 bp, Homo sapien
gtcattccaacctgtctcagaatcc

SEQ ID NO: 487956 - DNA, 25 bp, Homo sapien
caggtcattccaacctgtctcagaa

SEQ ID NO: 487957 - DNA, 25 bp, Homo sapien
cccaggtcattccaacctgtctcag

SEQ ID NO: 487958 - DNA, 25 bp, Homo sapien
cttgattctccaattaagatccaat

SEQ ID NO: 487959 - DNA, 25 bp, Homo sapien
ctacttgattctccaattaagatcc

SEQ ID NO: 487960 - DNA, 25 bp, Homo sapien
tgattctccaattaagatccaatat

SEQ ID NO: 487961 - DNA, 25 bp, Homo sapien
ctccaattaagatccaatattcaac

SEQ ID NO: 487962 - DNA, 25 bp, Homo sapien
acacatgacacaatggaggaatctc

SEQ ID NO: 487963 - DNA, 25 bp, Homo sapien
gttacttaagatattgatgcaaaaa

SEQ ID NO: 487964 - DNA, 25 bp, Homo sapien
aatgttacttaagatattgatgcaa

SEQ ID NO: 487965 - DNA, 25 bp, Homo sapien
acatgacacaatggaggaatctcaa

SEQ ID NO: 487966 - DNA, 25 bp, Homo sapien
tctagtcctaggtgtcttccaggag

SEQ ID NO: 487967 - DNA, 25 bp, Homo sapien
tgttcatcagaaggtttacaaccac

SEQ ID NO: 487968 - DNA, 25 bp, Homo sapien
caaaacatatgtcctctaaaagact

SEQ ID NO: 487969 - DNA, 25 bp, Homo sapien
ggaatgaagttctaatccatgctaa

SEQ ID NO: 487970 - DNA, 25 bp, Homo sapien
tttttctatactgcagtcccctctc

SEQ ID NO: 487971 - DNA, 25 bp, Homo sapien
taagtgccggatatccaggtattct

SEQ ID NO: 487972 - DNA, 25 bp, Homo sapien
ttgagtgtttagatcagtaacaata

SEQ ID NO: 487973 - DNA, 25 bp, Homo sapien
ccaggtattctggattttgagtgtt

SEQ ID NO: 487974 - DNA, 25 bp, Homo sapien
tggcaattccctgggcatgtgttgg

SEQ ID NO: 487975 - DNA, 25 bp, Homo sapien
catctttttccatgccgagtcctga

SEQ ID NO: 487976 - DNA, 25 bp, Homo sapien
gagtcctgatggaaactagcactga

SEQ ID NO: 487977 - DNA, 25 bp, Homo sapien
cagttaagtctctggaatgctatga

SEQ ID NO: 487978 - DNA, 25 bp, Homo sapien
tattttttataccacaagatctgct

SEQ ID NO: 487979 - DNA, 25 bp, Homo sapien
tacagtcctgtatatagcagtttca

SEQ ID NO: 487980 - DNA, 25 bp, Homo sapien
caagcttagtatctggagaactaca

SEQ ID NO: 487981 - DNA, 25 bp, Homo sapien
gcagtttcatatataatgccagctg

SEQ ID NO: 487982 - DNA, 25 bp, Homo sapien
tatatccccttctgtaggctaggca

SEQ ID NO: 487983 - DNA, 25 bp, Homo sapien
aacaaatgaggcaagcaagatcctg

SEQ ID NO: 487984 - DNA, 25 bp, Homo sapien
ggcatgtacgagtgaacaaacggat

SEQ ID NO: 487985 - DNA, 25 bp, Homo sapien
taacaaatgtctagggatcgagtca

SEQ ID NO: 487986 - DNA, 25 bp, Homo sapien
tcctacctacgtcttctctgaaata

SEQ ID NO: 487987 - DNA, 25 bp, Homo sapien
gacaacttcatttggttcaagctaa

SEQ ID NO: 487988 - DNA, 25 bp, Homo sapien
ccatttttgacctacaaagatgaca

SEQ ID NO: 487989 - DNA, 25 bp, Homo sapien
gacacaatggtaccttctacctaaa

SEQ ID NO: 487990 - DNA, 25 bp, Homo sapien
agcttctgcgggaaagataatctca

SEQ ID NO: 487991 - DNA, 25 bp, Homo sapien
tctgcgggaaagataatctcactaa

SEQ ID NO: 487992 - DNA, 25 bp, Homo sapien
cgggaaagataatctcactaaactc

SEQ ID NO: 487993 - DNA, 25 bp, Homo sapien
cttctgcgggaaagataatctcact

SEQ ID NO: 487994 - DNA, 25 bp, Homo sapien
tgcgccgccgtgtgtgaagatactt

SEQ ID NO: 487995 - DNA, 25 bp, Homo sapien
cagctgcgcgtccttaacgttggca

SEQ ID NO: 487996 - DNA, 25 bp, Homo sapien
gcccaggctgggaactattttctac

SEQ ID NO: 487997 - DNA, 25 bp, Homo sapien
gcaaaagcgccttcttggtggagta

SEQ ID NO: 487998 - DNA, 25 bp, Homo sapien
gaagtttagcgccagtggtgatgcc

SEQ ID NO: 487999 - DNA, 25 bp, Homo sapien
ggttacttgcttccgtcacgctggc

SEQ ID NO: 488000 - DNA, 25 bp, Homo sapien
cgtctaatacgacgcgcagggcgga

SEQ ID NO: 488001 - DNA, 25 bp, Homo sapien
gaaacagccagaagatgtccctgcg

SEQ ID NO: 488002 - DNA, 25 bp, Homo sapien
gacggcactaatgggagcgcattaa

SEQ ID NO: 488003 - DNA, 25 bp, Homo sapien
gcaaataatacagaagccacggttt

SEQ ID NO: 488004 - DNA, 25 bp, Homo sapien
aattcttctacgacggactgcaccg

SEQ ID NO: 488005 - DNA, 25 bp, Homo sapien
cgcattaaagcggagagactctggc

SEQ ID NO: 488006 - DNA, 25 bp, Homo sapien
ctgccgcccggagcactccagcagc

SEQ ID NO: 488007 - DNA, 25 bp, Homo sapien
gcagcttccagagcccctggacccc

SEQ ID NO: 488008 - DNA, 25 bp, Homo sapien
gccgcccggagcactccagcagctt

SEQ ID NO: 488009 - DNA, 25 bp, Homo sapien
gcttccagagcccctggacccccat

SEQ ID NO: 488010 - DNA, 25 bp, Homo sapien
caacagccaggatcttcccttccag

SEQ ID NO: 488011 - DNA, 25 bp, Homo sapien
aacagccaggatcttcccttccagc

SEQ ID NO: 488012 - DNA, 25 bp, Homo sapien
ggatcttcccttccagcgcttcggg

SEQ ID NO: 488013 - DNA, 25 bp, Homo sapien
gccaggatcttcccttccagcgctt

SEQ ID NO: 488014 - DNA, 25 bp, Homo sapien
gcgaggaatccagccccgaatccct

SEQ ID NO: 488015 - DNA, 25 bp, Homo sapien
cagagccccgcgaggaatccagccc

SEQ ID NO: 488016 - DNA, 25 bp, Homo sapien
caagtcccaacgcggcgttaaggat

SEQ ID NO: 488017 - DNA, 25 bp, Homo sapien
agccccgcgaggaatccagccccga

SEQ ID NO: 488018 - DNA, 25 bp, Homo sapien
tgagggcagcaacagcgcatgtgct

SEQ ID NO: 488019 - DNA, 25 bp, Homo sapien
ggtaatgccaattctcagctagggt

SEQ ID NO: 488020 - DNA, 25 bp, Homo sapien
caagggctgctacataaaatgatct

SEQ ID NO: 488021 - DNA, 25 bp, Homo sapien
gagacagacatgaacacggctcatt

SEQ ID NO: 488022 - DNA, 25 bp, Homo sapien
gtattagatcgatgtttctgcttgc

SEQ ID NO: 488023 - DNA, 25 bp, Homo sapien
tagaacttggtgttgatgtgcatct

SEQ ID NO: 488024 - DNA, 25 bp, Homo sapien
gtgcatctgtcttgtattagatcga

SEQ ID NO: 488025 - DNA, 25 bp, Homo sapien
aacttggtgttgatgtgcatctgtc

SEQ ID NO: 488026 - DNA, 25 bp, Homo sapien
caattcagccatgaacaaaacagag

SEQ ID NO: 488027 - DNA, 25 bp, Homo sapien
agagacggtccctatctccaggaag

SEQ ID NO: 488028 - DNA, 25 bp, Homo sapien
tatacaccaaacaattcagccatga

SEQ ID NO: 488029 - DNA, 25 bp, Homo sapien
aatggcaggaggtgatacggccact

SEQ ID NO: 488030 - DNA, 25 bp, Homo sapien
caaacgttgaacactaaatacttat

SEQ ID NO: 488031 - DNA, 25 bp, Homo sapien
aaaacatttagctctcatgggatct

SEQ ID NO: 488032 - DNA, 25 bp, Homo sapien
tatccaaacgttgaacactaaatac

SEQ ID NO: 488033 - DNA, 25 bp, Homo sapien
tttagctctcatgggatctacctaa

SEQ ID NO: 488034 - DNA, 25 bp, Homo sapien
actccgggatttttctcttcatcct

SEQ ID NO: 488035 - DNA, 25 bp, Homo sapien
tcttcatcctcacaacttcaatttc

SEQ ID NO: 488036 - DNA, 25 bp, Homo sapien
tctcttcatcctcacaacttcaatt

SEQ ID NO: 488037 - DNA, 25 bp, Homo sapien
tttctcttcatcctcacaacttcaa

SEQ ID NO: 488038 - DNA, 25 bp, Homo sapien
caatagtggagcatccccatcaaac

SEQ ID NO: 488039 - DNA, 25 bp, Homo sapien
gcagagccgatgaaacaaagtgaga

SEQ ID NO: 488040 - DNA, 25 bp, Homo sapien
attgagttcccatggcgatcccgga

SEQ ID NO: 488041 - DNA, 25 bp, Homo sapien
gatcccggactcctttaagtgcttg

SEQ ID NO: 488042 - DNA, 25 bp, Homo sapien
cagtgttctgagtgatggccgcatc

SEQ ID NO: 488043 - DNA, 25 bp, Homo sapien
tcagattcagggaggcacttcccaa

SEQ ID NO: 488044 - DNA, 25 bp, Homo sapien
aaaagagggtttccacagtgttctg

SEQ ID NO: 488045 - DNA, 25 bp, Homo sapien
gaaggcttgctatcacggaggatac

SEQ ID NO: 488046 - DNA, 25 bp, Homo sapien
cttctctgtcgttttcctggagtca

SEQ ID NO: 488047 - DNA, 25 bp, Homo sapien
tgaaggcagttttgatggcttgtct

SEQ ID NO: 488048 - DNA, 25 bp, Homo sapien
actggacgctaagtcctttctctgc

SEQ ID NO: 488049 - DNA, 25 bp, Homo sapien
gttttcctggagtcactggacgcta

SEQ ID NO: 488050 - DNA, 25 bp, Homo sapien
ttttaaaacttcatctctaacacga

SEQ ID NO: 488051 - DNA, 25 bp, Homo sapien
tttaaaacttcatctctaacacgac

SEQ ID NO: 488052 - DNA, 25 bp, Homo sapien
tttaaacagattatgcagaccctgc

SEQ ID NO: 488053 - DNA, 25 bp, Homo sapien
taaacagattatgcagaccctgctc

SEQ ID NO: 488054 - DNA, 25 bp, Homo sapien
tctttaaacagattatgcagaccct

SEQ ID NO: 488055 - DNA, 25 bp, Homo sapien
caaatctttaaacagattatgcaga

SEQ ID NO: 488056 - DNA, 25 bp, Homo sapien
gtaaaggaggcaaaacatagaggtc

SEQ ID NO: 488057 - DNA, 25 bp, Homo sapien
gaggcaaaacatagaggtcgttttc

SEQ ID NO: 488058 - DNA, 25 bp, Homo sapien
agaggtcgttttctcttcgaacttg

SEQ ID NO: 488059 - DNA, 25 bp, Homo sapien
ctcttcgaacttgggtaagactggg

SEQ ID NO: 488060 - DNA, 25 bp, Homo sapien
ctgtaatgcttgtttttgattcatt

SEQ ID NO: 488061 - DNA, 25 bp, Homo sapien
tgccattctttttcatcttcctctt

SEQ ID NO: 488062 - DNA, 25 bp, Homo sapien
gccattctttttcatcttcctcttc

SEQ ID NO: 488063 - DNA, 25 bp, Homo sapien
tgattcattctttcttgccattctt

SEQ ID NO: 488064 - DNA, 25 bp, Homo sapien
agaatacattctgaattcaaaaatg

SEQ ID NO: 488065 - DNA, 25 bp, Homo sapien
aataacagaatacattctgaattca

SEQ ID NO: 488066 - DNA, 25 bp, Homo sapien
acagaatacattctgaattcaaaaa

SEQ ID NO: 488067 - DNA, 25 bp, Homo sapien
tattcattttcatgtcattcatttc

SEQ ID NO: 488068 - DNA, 25 bp, Homo sapien
aatcacagcaccatgaaatttacat

SEQ ID NO: 488069 - DNA, 25 bp, Homo sapien
gataaaatcacagcaccatgaaatt

SEQ ID NO: 488070 - DNA, 25 bp, Homo sapien
ctgtaaagataaaatcacagcacca

SEQ ID NO: 488071 - DNA, 25 bp, Homo sapien
gaaatttacatttcatacacttagt

SEQ ID NO: 488072 - DNA, 25 bp, Homo sapien
ggtgaactctttcatatcagtcaag

SEQ ID NO: 488073 - DNA, 25 bp, Homo sapien
tgctttacttcagggggcaggctgc

SEQ ID NO: 488074 - DNA, 25 bp, Homo sapien
cgcttgaggattatgaaagaactct

SEQ ID NO: 488075 - DNA, 25 bp, Homo sapien
cagactcaatatctatcgcttgagg

SEQ ID NO: 488076 - DNA, 25 bp, Homo sapien
cctagtctcgggtcaaaagtcaaga

SEQ ID NO: 488077 - DNA, 25 bp, Homo sapien
gaaaaatactgagctagacactgaa

SEQ ID NO: 488078 - DNA, 25 bp, Homo sapien
tacagaggtgagcaagataagcgtg

SEQ ID NO: 488079 - DNA, 25 bp, Homo sapien
ggaatgtggagagccaatggcatct

SEQ ID NO: 488080 - DNA, 25 bp, Homo sapien
tgggcctgccaagctacaagatgtt

SEQ ID NO: 488081 - DNA, 25 bp, Homo sapien
ggtactgtgaaaagtcatcagactc

SEQ ID NO: 488082 - DNA, 25 bp, Homo sapien
tggtactgtgaaaagtcatcagact

SEQ ID NO: 488083 - DNA, 25 bp, Homo sapien
cttcatactgccttcggatgtgtcc

SEQ ID NO: 488084 - DNA, 25 bp, Homo sapien
ccttcatcttcatactgccttcgga

SEQ ID NO: 488085 - DNA, 25 bp, Homo sapien
ctgaatccacttctgcaactgtctt

SEQ ID NO: 488086 - DNA, 25 bp, Homo sapien
ctctgaatccacttctgcaactgtc

SEQ ID NO: 488087 - DNA, 25 bp, Homo sapien
agagactctgaatccacttctgcaa

SEQ ID NO: 488088 - DNA, 25 bp, Homo sapien
gactctgaatccacttctgcaactg

SEQ ID NO: 488089 - DNA, 25 bp, Homo sapien
caagagctctcttaatggctgaaag

SEQ ID NO: 488090 - DNA, 25 bp, Homo sapien
tgacttcacgtcaaaagacatgccg

SEQ ID NO: 488091 - DNA, 25 bp, Homo sapien
gatatggagccttcgtctacagcag

SEQ ID NO: 488092 - DNA, 25 bp, Homo sapien
cacgggcctgccttcgattttcact

SEQ ID NO: 488093 - DNA, 25 bp, Homo sapien
gagcccaggtgcgtcactatgtcta

SEQ ID NO: 488094 - DNA, 25 bp, Homo sapien
tgtttcttgcaaactgacagggcca

SEQ ID NO: 488095 - DNA, 25 bp, Homo sapien
cattagtgctggctacgtgctcctc

SEQ ID NO: 488096 - DNA, 25 bp, Homo sapien
tctcatatgggcaaagttcgttctg

SEQ ID NO: 488097 - DNA, 25 bp, Homo sapien
gaggctagactgaaccccatggaat

SEQ ID NO: 488098 - DNA, 25 bp, Homo sapien
taatggttgccttccttccctgtag

SEQ ID NO: 488099 - DNA, 25 bp, Homo sapien
tcaattaggtaaactggcactgtct

SEQ ID NO: 488100 - DNA, 25 bp, Homo sapien
catatccagggagaataagcagatg

SEQ ID NO: 488101 - DNA, 25 bp, Homo sapien
tccacgtcgtccctctcagagttgt

SEQ ID NO: 488102 - DNA, 25 bp, Homo sapien
tcaggaggctctcggactcagcagg

SEQ ID NO: 488103 - DNA, 25 bp, Homo sapien
cctcttcgccttgttctgagggagg

SEQ ID NO: 488104 - DNA, 25 bp, Homo sapien
gaagtttcagggaattctgcttgaa

SEQ ID NO: 488105 - DNA, 25 bp, Homo sapien
catggagcgaatcttccgcatcttt

SEQ ID NO: 488106 - DNA, 25 bp, Homo sapien
cattcatggagcgaatcttccgcat

SEQ ID NO: 488107 - DNA, 25 bp, Homo sapien
ttcatggagcgaatcttccgcatct

SEQ ID NO: 488108 - DNA, 25 bp, Homo sapien
gccattcatggagcgaatcttccgc

SEQ ID NO: 488109 - DNA, 25 bp, Homo sapien
aaccacatggaaaacggagtctatc

SEQ ID NO: 488110 - DNA, 25 bp, Homo sapien
tgaagccatcagcaaccacaagatg

SEQ ID NO: 488111 - DNA, 25 bp, Homo sapien
aaaaagcctgcatttagtctgactg

SEQ ID NO: 488112 - DNA, 25 bp, Homo sapien
tcagcaagaagtcgaaacacaatgt

SEQ ID NO: 488113 - DNA, 25 bp, Homo sapien
ttctgctgtgctaagaggttgctct

SEQ ID NO: 488114 - DNA, 25 bp, Homo sapien
gctgtgctaagaggttgctctccag

SEQ ID NO: 488115 - DNA, 25 bp, Homo sapien
cagtagcagcgatccgttcttgctg

SEQ ID NO: 488116 - DNA, 25 bp, Homo sapien
ctgtccggtgacagtagcagcgatc

SEQ ID NO: 488117 - DNA, 25 bp, Homo sapien
gaagtctgatcagtcaggtccagga

SEQ ID NO: 488118 - DNA, 25 bp, Homo sapien
cctctgcttccatgggagcctggat

SEQ ID NO: 488119 - DNA, 25 bp, Homo sapien
agcctggatgtagggaatgccgaac

SEQ ID NO: 488120 - DNA, 25 bp, Homo sapien
aaaagtttctatagacatgccgcgc

SEQ ID NO: 488121 - DNA, 25 bp, Homo sapien
ttggtattccttcggtataatcact

SEQ ID NO: 488122 - DNA, 25 bp, Homo sapien
cagttggtattccttcggtataatc

SEQ ID NO: 488123 - DNA, 25 bp, Homo sapien
acaacccacagttggtattccttcg

SEQ ID NO: 488124 - DNA, 25 bp, Homo sapien
cccacagttggtattccttcggtat

SEQ ID NO: 488125 - DNA, 25 bp, Homo sapien
gagaattttaggagaggttccaggc

SEQ ID NO: 488126 - DNA, 25 bp, Homo sapien
gccatgcccagggaattcattgaga

SEQ ID NO: 488127 - DNA, 25 bp, Homo sapien
catgcccagggaattcattgagaat

SEQ ID NO: 488128 - DNA, 25 bp, Homo sapien
cccagggaattcattgagaatttcc

SEQ ID NO: 488129 - DNA, 25 bp, Homo sapien
ccccgaggccgaagccacctcatca

SEQ ID NO: 488130 - DNA, 25 bp, Homo sapien
aggccccgaggccgaagccacctca

SEQ ID NO: 488131 - DNA, 25 bp, Homo sapien
ccacctcatcagccccgcgagccat

SEQ ID NO: 488132 - DNA, 25 bp, Homo sapien
cgaggccgaagccacctcatcagcc

SEQ ID NO: 488133 - DNA, 25 bp, Homo sapien
taacactaacaactattatttcgct

SEQ ID NO: 488134 - DNA, 25 bp, Homo sapien
tgtgtgctaggcaatattctacgtg

SEQ ID NO: 488135 - DNA, 25 bp, Homo sapien
aatattctacgtgagcacacagcca

SEQ ID NO: 488136 - DNA, 25 bp, Homo sapien
caactattatttcgctgtgtgctag

SEQ ID NO: 488137 - DNA, 25 bp, Homo sapien
acaattacttacacagcaatgagac

SEQ ID NO: 488138 - DNA, 25 bp, Homo sapien
taaacttagaacatgtaaactcaag

SEQ ID NO: 488139 - DNA, 25 bp, Homo sapien
catgtaaactcaagttctaactcaa

SEQ ID NO: 488140 - DNA, 25 bp, Homo sapien
caatgagacattatagttcatacac

SEQ ID NO: 488141 - DNA, 25 bp, Homo sapien
tcatgaggattaggtcttatctttg

SEQ ID NO: 488142 - DNA, 25 bp, Homo sapien
tttttcactttggtgtcatgaggat

SEQ ID NO: 488143 - DNA, 25 bp, Homo sapien
cacgggtttgaggtaggcctcggca

SEQ ID NO: 488144 - DNA, 25 bp, Homo sapien
gggtgagttgcaatgtccgtaattt

SEQ ID NO: 488145 - DNA, 25 bp, Homo sapien
gaaaggatcccttcgagtcatccac

SEQ ID NO: 488146 - DNA, 25 bp, Homo sapien
agaaaggatcccttcgagtcatcca

SEQ ID NO: 488147 - DNA, 25 bp, Homo sapien
tctaattttgtcgagatcaggtttc

SEQ ID NO: 488148 - DNA, 25 bp, Homo sapien
taattttgtcgagatcaggtttccc

SEQ ID NO: 488149 - DNA, 25 bp, Homo sapien
ctaattttgtcgagatcaggtttcc

SEQ ID NO: 488150 - DNA, 25 bp, Homo sapien
tctctaattttgtcgagatcaggtt

SEQ ID NO: 488151 - DNA, 25 bp, Homo sapien
taaatgactccagcataatcatctg

SEQ ID NO: 488152 - DNA, 25 bp, Homo sapien
gacatcaaagacttgtgactatgaa

SEQ ID NO: 488153 - DNA, 25 bp, Homo sapien
tcatctggcactatgttcttttcaa

SEQ ID NO: 488154 - DNA, 25 bp, Homo sapien
tagctctcactttaggacatcaaag

SEQ ID NO: 488155 - DNA, 25 bp, Homo sapien
ctgctgggcatcgagttgctttaat

SEQ ID NO: 488156 - DNA, 25 bp, Homo sapien
gctgggcatcgagttgctttaatac

SEQ ID NO: 488157 - DNA, 25 bp, Homo sapien
ggcatcgagttgctttaatacagga

SEQ ID NO: 488158 - DNA, 25 bp, Homo sapien
tgggcatcgagttgctttaatacag

SEQ ID NO: 488159 - DNA, 25 bp, Homo sapien
aattcacttttaagaagatattctt

SEQ ID NO: 488160 - DNA, 25 bp, Homo sapien
tcacttttaagaagatattctttgg

SEQ ID NO: 488161 - DNA, 25 bp, Homo sapien
agaagatattctttggccgggcatg

SEQ ID NO: 488162 - DNA, 25 bp, Homo sapien
ttaagaagatattctttggccgggc

SEQ ID NO: 488163 - DNA, 25 bp, Homo sapien
agaaggaatcaattcggagctgtgt

SEQ ID NO: 488164 - DNA, 25 bp, Homo sapien
ctaaagaaggaatcaattcggagct

SEQ ID NO: 488165 - DNA, 25 bp, Homo sapien
taaagaaggaatcaattcggagctg

SEQ ID NO: 488166 - DNA, 25 bp, Homo sapien
aagaaggaatcaattcggagctgtg

SEQ ID NO: 488167 - DNA, 25 bp, Homo sapien
taatacgtttagcatcttctttctc

SEQ ID NO: 488168 - DNA, 25 bp, Homo sapien
ggctcttaatacgtttagcatcttc

SEQ ID NO: 488169 - DNA, 25 bp, Homo sapien
gtctctggctcttaatacgtttagc

SEQ ID NO: 488170 - DNA, 25 bp, Homo sapien
aatacgtttagcatcttctttctcc

SEQ ID NO: 488171 - DNA, 25 bp, Homo sapien
aaactgcttctatttcgctggctgc

SEQ ID NO: 488172 - DNA, 25 bp, Homo sapien
caaacacagatctggcggtcacgag

SEQ ID NO: 488173 - DNA, 25 bp, Homo sapien
ggtcgcacctccattcttcacggga

SEQ ID NO: 488174 - DNA, 25 bp, Homo sapien
tcactgagttctgcgaatctgaagc

SEQ ID NO: 488175 - DNA, 25 bp, Homo sapien
ttaattttattacgtctttgcgaca

SEQ ID NO: 488176 - DNA, 25 bp, Homo sapien
acgtctttgcgacaaattcattaca

SEQ ID NO: 488177 - DNA, 25 bp, Homo sapien
aaattcattacaaatggctgtcata

SEQ ID NO: 488178 - DNA, 25 bp, Homo sapien
ggctgtcataactaattatagagga

SEQ ID NO: 488179 - DNA, 25 bp, Homo sapien
tgaaaggctagcatcgcagcacagt

SEQ ID NO: 488180 - DNA, 25 bp, Homo sapien
gctgggacctctggtagtgactgaa

SEQ ID NO: 488181 - DNA, 25 bp, Homo sapien
gaaggctaggaatatcccacgagtg

SEQ ID NO: 488182 - DNA, 25 bp, Homo sapien
gttatacagcagtgagacggcaatg

SEQ ID NO: 488183 - DNA, 25 bp, Homo sapien
atgaaatgatggtaggtgatatatt

SEQ ID NO: 488184 - DNA, 25 bp, Homo sapien
tgatggtaggtgatatattgatgtt

SEQ ID NO: 488185 - DNA, 25 bp, Homo sapien
aatgatggtaggtgatatattgatg

SEQ ID NO: 488186 - DNA, 25 bp, Homo sapien
cttctgaatccatcaagtaatgaaa

SEQ ID NO: 488187 - DNA, 25 bp, Homo sapien
taaatgccacctgatctgctccaag

SEQ ID NO: 488188 - DNA, 25 bp, Homo sapien
gagtgttcctctacttggtgatggc

SEQ ID NO: 488189 - DNA, 25 bp, Homo sapien
acattgtaatgctagttccgtctca

SEQ ID NO: 488190 - DNA, 25 bp, Homo sapien
tcataaaccatacagaaattgcgtc

SEQ ID NO: 488191 - DNA, 25 bp, Homo sapien
gacaagtcacctaaggtaccaggga

SEQ ID NO: 488192 - DNA, 25 bp, Homo sapien
tcctgtcctaacaactacagaggga

SEQ ID NO: 488193 - DNA, 25 bp, Homo sapien
tagagtacactaagtcccaggagca

SEQ ID NO: 488194 - DNA, 25 bp, Homo sapien
ggttagttggccagattagtgctcc

SEQ ID NO: 488195 - DNA, 25 bp, Homo sapien
accactactgcaaacgttgaccctt

SEQ ID NO: 488196 - DNA, 25 bp, Homo sapien
tgcaaacgttgacccttgacagaga

SEQ ID NO: 488197 - DNA, 25 bp, Homo sapien
tactgcaaacgttgacccttgacag

SEQ ID NO: 488198 - DNA, 25 bp, Homo sapien
cacccacctctaccactactgcaaa

SEQ ID NO: 488199 - DNA, 25 bp, Homo sapien
catggcctcagtaattcgaatctca

SEQ ID NO: 488200 - DNA, 25 bp, Homo sapien
cttgtcatcataggcttctctggtg

SEQ ID NO: 488201 - DNA, 25 bp, Homo sapien
ggccaaacaacagcaccataacaat

SEQ ID NO: 488202 - DNA, 25 bp, Homo sapien
caggaagtagttgttatcagagttg

SEQ ID NO: 488203 - DNA, 25 bp, Homo sapien
gaggacattctacatgtgagactca

SEQ ID NO: 488204 - DNA, 25 bp, Homo sapien
atagaattaattgaggcccagcgtg

SEQ ID NO: 488205 - DNA, 25 bp, Homo sapien
tcacaaagaaggaatatggaacctg

SEQ ID NO: 488206 - DNA, 25 bp, Homo sapien
gacgcttggcaagtaataacagaaa

SEQ ID NO: 488207 - DNA, 25 bp, Homo sapien
aatggagactagccctgttccagct

SEQ ID NO: 488208 - DNA, 25 bp, Homo sapien
atttcaatcacgtttttgtcaacca

SEQ ID NO: 488209 - DNA, 25 bp, Homo sapien
gtcaaccatattatactgctttgca

SEQ ID NO: 488210 - DNA, 25 bp, Homo sapien
tggagactagccctgttccagctcc

SEQ ID NO: 488211 - DNA, 25 bp, Homo sapien
aaatctgtggccgtcacgtgagcac

SEQ ID NO: 488212 - DNA, 25 bp, Homo sapien
ctccccaggagagttctttaacctg

SEQ ID NO: 488213 - DNA, 25 bp, Homo sapien
tgcaggtttccaagtaattcgggta

SEQ ID NO: 488214 - DNA, 25 bp, Homo sapien
gggaagtttgtatctaaagctactc

SEQ ID NO: 488215 - DNA, 25 bp, Homo sapien
ccaagaaaggatgagcgtagaccac

SEQ ID NO: 488216 - DNA, 25 bp, Homo sapien
gctcctccggtttttcttcacagct

SEQ ID NO: 488217 - DNA, 25 bp, Homo sapien
caggtcaaacaactccttaaatcta

SEQ ID NO: 488218 - DNA, 25 bp, Homo sapien
catccgctgccaaaatatagtcaaa

SEQ ID NO: 488219 - DNA, 25 bp, Homo sapien
ctattaccgcatgagtagaaggcag

SEQ ID NO: 488220 - DNA, 25 bp, Homo sapien
ggagaacagacaacaacagtgcagt

SEQ ID NO: 488221 - DNA, 25 bp, Homo sapien
gatttatttgcagatcccactgtag

SEQ ID NO: 488222 - DNA, 25 bp, Homo sapien
cagtgtgactttgccaagagcttct

SEQ ID NO: 488223 - DNA, 25 bp, Homo sapien
gacgacaatcggcagacttcaggct

SEQ ID NO: 488224 - DNA, 25 bp, Homo sapien
caggctctgctggtcagctcaaaat

SEQ ID NO: 488225 - DNA, 25 bp, Homo sapien
aagttgtgcctgtgccgggtagcca

SEQ ID NO: 488226 - DNA, 25 bp, Homo sapien
ccaggaacgaggacaataaagagac

SEQ ID NO: 488227 - DNA, 25 bp, Homo sapien
taccccttgccgcttttgatgcatt

SEQ ID NO: 488228 - DNA, 25 bp, Homo sapien
tataattcaattcacttgcttaaat

SEQ ID NO: 488229 - DNA, 25 bp, Homo sapien
ccttgccgcttttgatgcatttgca

SEQ ID NO: 488230 - DNA, 25 bp, Homo sapien
gccgcttttgatgcatttgcatatc

SEQ ID NO: 488231 - DNA, 25 bp, Homo sapien
gcgtctctaatgtgtgaagaccaca

SEQ ID NO: 488232 - DNA, 25 bp, Homo sapien
cctcaggcagaaatcgtccctctgt

SEQ ID NO: 488233 - DNA, 25 bp, Homo sapien
gtaggaccgccaacatgtggatatg

SEQ ID NO: 488234 - DNA, 25 bp, Homo sapien
gatttccgcgggaagcgtctctaat

SEQ ID NO: 488235 - DNA, 25 bp, Homo sapien
gccgtggggtgaacctacaacagga

SEQ ID NO: 488236 - DNA, 25 bp, Homo sapien
tggggtgaacctacaacaggaatgc

SEQ ID NO: 488237 - DNA, 25 bp, Homo sapien
cttggagtctcacgattcatgccgt

SEQ ID NO: 488238 - DNA, 25 bp, Homo sapien
ggagtctcacgattcatgccgtggg

SEQ ID NO: 488239 - DNA, 25 bp, Homo sapien
ttccctacccctcccttatgctgca

SEQ ID NO: 488240 - DNA, 25 bp, Homo sapien
tacatagaatatgtacttacttgca

SEQ ID NO: 488241 - DNA, 25 bp, Homo sapien
tgatagaagattcttgcactgatag

SEQ ID NO: 488242 - DNA, 25 bp, Homo sapien
acccctcccttatgctgcagccaca

SEQ ID NO: 488243 - DNA, 25 bp, Homo sapien
ccaaacaggtatgtgaccatgtcat

SEQ ID NO: 488244 - DNA, 25 bp, Homo sapien
cactgagtaaaagttcccactccgt

SEQ ID NO: 488245 - DNA, 25 bp, Homo sapien
tactctgaagccaacagagctagct

SEQ ID NO: 488246 - DNA, 25 bp, Homo sapien
tccccagtttcaatccatactctga

SEQ ID NO: 488247 - DNA, 25 bp, Homo sapien
agaagttacatgtgtttgtgactcc

SEQ ID NO: 488248 - DNA, 25 bp, Homo sapien
ccatgtaagaagttacatgtgtttg

SEQ ID NO: 488249 - DNA, 25 bp, Homo sapien
tgtttgtgactcctggacaactata

SEQ ID NO: 488250 - DNA, 25 bp, Homo sapien
ggacaactatagtgatatgctccat

SEQ ID NO: 488251 - DNA, 25 bp, Homo sapien
cattggttcagctggacccctgtag

SEQ ID NO: 488252 - DNA, 25 bp, Homo sapien
taagttaccgagaactcttcccgca

SEQ ID NO: 488253 - DNA, 25 bp, Homo sapien
gacatcgcgcttcttgagtttcagg

SEQ ID NO: 488254 - DNA, 25 bp, Homo sapien
ctgtagcgtcccatgcatgcagccg

SEQ ID NO: 488255 - DNA, 25 bp, Homo sapien
tcagcgacaccatgcaaggacttct

SEQ ID NO: 488256 - DNA, 25 bp, Homo sapien
caggtgaatctgcttgtggccaaaa

SEQ ID NO: 488257 - DNA, 25 bp, Homo sapien
caaaacccatagttgagaggacaca

SEQ ID NO: 488258 - DNA, 25 bp, Homo sapien
cacaggcaaatatccggtgtcttca

SEQ ID NO: 488259 - DNA, 25 bp, Homo sapien
gacagatgcaaaaggcctccacact

SEQ ID NO: 488260 - DNA, 25 bp, Homo sapien
ggttgactgttgactcagacagatg

SEQ ID NO: 488261 - DNA, 25 bp, Homo sapien
tggaatgtccttccagacaaacgcc

SEQ ID NO: 488262 - DNA, 25 bp, Homo sapien
gatgtgcccaagatctggaatgtcc

SEQ ID NO: 488263 - DNA, 25 bp, Homo sapien
ttaagggttggaccgcagacacaga

SEQ ID NO: 488264 - DNA, 25 bp, Homo sapien
cacttgctccgagcggccattgtca

SEQ ID NO: 488265 - DNA, 25 bp, Homo sapien
cagacacagaagtatgatccgaggg

SEQ ID NO: 488266 - DNA, 25 bp, Homo sapien
atccgagggacactccagcgactgt

SEQ ID NO: 488267 - DNA, 25 bp, Homo sapien
tctggttaaccaagcagcactggtt

SEQ ID NO: 488268 - DNA, 25 bp, Homo sapien
atgacagtctggttaaccaagcagc

SEQ ID NO: 488269 - DNA, 25 bp, Homo sapien
cagtctggttaaccaagcagcactg

SEQ ID NO: 488270 - DNA, 25 bp, Homo sapien
gaaatgacagtctggttaaccaagc

SEQ ID NO: 488271 - DNA, 25 bp, Homo sapien
tggagtttccagaaaattattgttc

SEQ ID NO: 488272 - DNA, 25 bp, Homo sapien
aggtggagtttccagaaaattattg

SEQ ID NO: 488273 - DNA, 25 bp, Homo sapien
tccagaaaattattgttccattttg

SEQ ID NO: 488274 - DNA, 25 bp, Homo sapien
agtttccagaaaattattgttccat

SEQ ID NO: 488275 - DNA, 25 bp, Homo sapien
tgtgaaacgctcagctctgagaggg

SEQ ID NO: 488276 - DNA, 25 bp, Homo sapien
catcctgtgaaacgctcagctctga

SEQ ID NO: 488277 - DNA, 25 bp, Homo sapien
cttcatcctgtgaaacgctcagctc

SEQ ID NO: 488278 - DNA, 25 bp, Homo sapien
tcctgtgaaacgctcagctctgaga

SEQ ID NO: 488279 - DNA, 25 bp, Homo sapien
gcagtgcttaagtgccgtcatttca

SEQ ID NO: 488280 - DNA, 25 bp, Homo sapien
tgcttaagtgccgtcatttcatgtg

SEQ ID NO: 488281 - DNA, 25 bp, Homo sapien
taagtgccgtcatttcatgtgtcat

SEQ ID NO: 488282 - DNA, 25 bp, Homo sapien
ttaagtgccgtcatttcatgtgtca

SEQ ID NO: 488283 - DNA, 25 bp, Homo sapien
ggctctatggccctggctacataga

SEQ ID NO: 488284 - DNA, 25 bp, Homo sapien
gccaggctctatggccctggctaca

SEQ ID NO: 488285 - DNA, 25 bp, Homo sapien
aggccaggctctatggccctggcta

SEQ ID NO: 488286 - DNA, 25 bp, Homo sapien
ctctatggccctggctacatagagc

SEQ ID NO: 488287 - DNA, 25 bp, Homo sapien
taatgagtgtttgctgaacaaaggt

SEQ ID NO: 488288 - DNA, 25 bp, Homo sapien
acctgggtcctgaatgccacgaggt

SEQ ID NO: 488289 - DNA, 25 bp, Homo sapien
acacctgggtcctgaatgccacgag

SEQ ID NO: 488290 - DNA, 25 bp, Homo sapien
aggtctcagaacaataatgagtgtt

SEQ ID NO: 488291 - DNA, 25 bp, Homo sapien
gacgaagatatgttacatcagagga

SEQ ID NO: 488292 - DNA, 25 bp, Homo sapien
tcagaggagcgcactgctgttggct

SEQ ID NO: 488293 - DNA, 25 bp, Homo sapien
actggttggtaaagacgaagatatg

SEQ ID NO: 488294 - DNA, 25 bp, Homo sapien
tccaagcagcgcactggttggtaaa

SEQ ID NO: 488295 - DNA, 25 bp, Homo sapien
gaaagcctggaaaactcgtacaaga

SEQ ID NO: 488296 - DNA, 25 bp, Homo sapien
cagtttctgctcatccaaggtccgc

SEQ ID NO: 488297 - DNA, 25 bp, Homo sapien
cacgatgctgaggaattggaaagcc

SEQ ID NO: 488298 - DNA, 25 bp, Homo sapien
gatgtccacctgcttagaacctcag

SEQ ID NO: 488299 - DNA, 25 bp, Homo sapien
tcctgagacctatacacacctgtga

SEQ ID NO: 488300 - DNA, 25 bp, Homo sapien
gagacctatacacacctgtgaatgc

SEQ ID NO: 488301 - DNA, 25 bp, Homo sapien
ctcctgagacctatacacacctgtg

SEQ ID NO: 488302 - DNA, 25 bp, Homo sapien
ctgagacctatacacacctgtgaat

SEQ ID NO: 488303 - DNA, 25 bp, Homo sapien
tgtcataaagcagccggactcctat

SEQ ID NO: 488304 - DNA, 25 bp, Homo sapien
tccaaaggtggttacgtcattcagg

SEQ ID NO: 488305 - DNA, 25 bp, Homo sapien
gctttccaacggtggtgtcaagata

SEQ ID NO: 488306 - DNA, 25 bp, Homo sapien
gatagctgcaaatgtgtacgagact

SEQ ID NO: 488307 - DNA, 25 bp, Homo sapien
tctgagtggaggaagcagtttctgc

SEQ ID NO: 488308 - DNA, 25 bp, Homo sapien
tctatgccagagaatgaccgaccct

SEQ ID NO: 488309 - DNA, 25 bp, Homo sapien
tttcccaggtaaaagcacttcatcc

SEQ ID NO: 488310 - DNA, 25 bp, Homo sapien
gaaagtcactttgtctgctaccaag

SEQ ID NO: 488311 - DNA, 25 bp, Homo sapien
gatgtggggagtttgtcccaaagaa

SEQ ID NO: 488312 - DNA, 25 bp, Homo sapien
ggagtttgtcccaaagaagagaaca

SEQ ID NO: 488313 - DNA, 25 bp, Homo sapien
gcaggatgtggggagtttgtcccaa

SEQ ID NO: 488314 - DNA, 25 bp, Homo sapien
tggggagtttgtcccaaagaagaga

SEQ ID NO: 488315 - DNA, 25 bp, Homo sapien
caaaagcaagcttgtagatggtcct

SEQ ID NO: 488316 - DNA, 25 bp, Homo sapien
aaagcaagcttgtagatggtcctag

SEQ ID NO: 488317 - DNA, 25 bp, Homo sapien
taaaactaagaagccaatcttcagg

SEQ ID NO: 488318 - DNA, 25 bp, Homo sapien
caagcttgtagatggtcctagaatt

SEQ ID NO: 488319 - DNA, 25 bp, Homo sapien
aaacagagccttgtacacagattgg

SEQ ID NO: 488320 - DNA, 25 bp, Homo sapien
aagcaccgtggtaaaacagagcctt

SEQ ID NO: 488321 - DNA, 25 bp, Homo sapien
gacattccagaaagcaccgtggtaa

SEQ ID NO: 488322 - DNA, 25 bp, Homo sapien
cagagccttgtacacagattggagc

SEQ ID NO: 488323 - DNA, 25 bp, Homo sapien
acacctgttatcagctgttgagttg

SEQ ID NO: 488324 - DNA, 25 bp, Homo sapien
ggttcagagcttattggaatttcat

SEQ ID NO: 488325 - DNA, 25 bp, Homo sapien
ggaatttcatgtggtatcatagtta

SEQ ID NO: 488326 - DNA, 25 bp, Homo sapien
tgagttgtttcatgaaaaggttcag

SEQ ID NO: 488327 - DNA, 25 bp, Homo sapien
gtaaccattctttgatgtaccagtc

SEQ ID NO: 488328 - DNA, 25 bp, Homo sapien
tcagtaaccattctttgatgtacca

SEQ ID NO: 488329 - DNA, 25 bp, Homo sapien
cagtaaccattctttgatgtaccag

SEQ ID NO: 488330 - DNA, 25 bp, Homo sapien
aaccattctttgatgtaccagtcac

SEQ ID NO: 488331 - DNA, 25 bp, Homo sapien
atgcctcagttgacccatgtcttca

SEQ ID NO: 488332 - DNA, 25 bp, Homo sapien
aagcagacaccatcattgggccctg

SEQ ID NO: 488333 - DNA, 25 bp, Homo sapien
cttgctctcagggagagcacacaca

SEQ ID NO: 488334 - DNA, 25 bp, Homo sapien
acacacatgcctcagttgacccatg

SEQ ID NO: 488335 - DNA, 25 bp, Homo sapien
tgtaatcctaacattgttgagtggg

SEQ ID NO: 488336 - DNA, 25 bp, Homo sapien
ataccgggggtctgcgtgatgggct

SEQ ID NO: 488337 - DNA, 25 bp, Homo sapien
ggggtctgcgtgatgggctgccaca

SEQ ID NO: 488338 - DNA, 25 bp, Homo sapien
taatcctaacattgttgagtgggac

SEQ ID NO: 488339 - DNA, 25 bp, Homo sapien
tacgctctaaaaggccgattagtaa

SEQ ID NO: 488340 - DNA, 25 bp, Homo sapien
gctcaactggcccatatgtctccag

SEQ ID NO: 488341 - DNA, 25 bp, Homo sapien
catatgtctccagcatacgctctaa

SEQ ID NO: 488342 - DNA, 25 bp, Homo sapien
tgtttatctaaatgtcgttggcatt

SEQ ID NO: 488343 - DNA, 25 bp, Homo sapien
ttcctaccaattctgtaagagccag

SEQ ID NO: 488344 - DNA, 25 bp, Homo sapien
ggtccacctggttcattcctaccaa

SEQ ID NO: 488345 - DNA, 25 bp, Homo sapien
ctgtaagagccagcataggcagcat

SEQ ID NO: 488346 - DNA, 25 bp, Homo sapien
caattctgtaagagccagcataggc

SEQ ID NO: 488347 - DNA, 25 bp, Homo sapien
gcctcacttggtgtgtactaactgt

SEQ ID NO: 488348 - DNA, 25 bp, Homo sapien
ctcacttggtgtgtactaactgtac

SEQ ID NO: 488349 - DNA, 25 bp, Homo sapien
cacttggtgtgtactaactgtactc

SEQ ID NO: 488350 - DNA, 25 bp, Homo sapien
ctgcctcacttggtgtgtactaact

SEQ ID NO: 488351 - DNA, 25 bp, Homo sapien
ccttcagtgtgagaagatacgtgat

SEQ ID NO: 488352 - DNA, 25 bp, Homo sapien
cagctggcagcgttagccagccagt

SEQ ID NO: 488353 - DNA, 25 bp, Homo sapien
tctccttcatttacagctggcagcg

SEQ ID NO: 488354 - DNA, 25 bp, Homo sapien
tcaacagaatggtgtcctcggtccc

SEQ ID NO: 488355 - DNA, 25 bp, Homo sapien
tgataggattaagccccataggaag

SEQ ID NO: 488356 - DNA, 25 bp, Homo sapien
ggaagttcagacaaatatcactgca

SEQ ID NO: 488357 - DNA, 25 bp, Homo sapien
cctgtagggctttcatctgtaagac

SEQ ID NO: 488358 - DNA, 25 bp, Homo sapien
tgtaagacacctttgctgataggat

SEQ ID NO: 488359 - DNA, 25 bp, Homo sapien
gattgtcagccactgtgttgtcctc

SEQ ID NO: 488360 - DNA, 25 bp, Homo sapien
tggattgtcagccactgtgttgtcc

SEQ ID NO: 488361 - DNA, 25 bp, Homo sapien
ctgtgttgtcctcagtccctattag

SEQ ID NO: 488362 - DNA, 25 bp, Homo sapien
tgtcctcagtccctattagccatgg

SEQ ID NO: 488363 - DNA, 25 bp, Homo sapien
ttccaccccagagagtatgtcaccc

SEQ ID NO: 488364 - DNA, 25 bp, Homo sapien
ccagagagtatgtcaccctcttctt

SEQ ID NO: 488365 - DNA, 25 bp, Homo sapien
ggtgctcttgggatacccttctact

SEQ ID NO: 488366 - DNA, 25 bp, Homo sapien
tcataggaatctccgtgtgccctgc

SEQ ID NO: 488367 - DNA, 25 bp, Homo sapien
ctgtgcctggcgcattggtttttaa

SEQ ID NO: 488368 - DNA, 25 bp, Homo sapien
tgcagttagtcatctttccaacatg

SEQ ID NO: 488369 - DNA, 25 bp, Homo sapien
accctttcacattaattctacgatg

SEQ ID NO: 488370 - DNA, 25 bp, Homo sapien
gaaaatctcttcacgtcacttttac

SEQ ID NO: 488371 - DNA, 25 bp, Homo sapien
tttattgcaatagctgtgaagaaac

SEQ ID NO: 488372 - DNA, 25 bp, Homo sapien
tataacctccacagtgtcatgcagt

SEQ ID NO: 488373 - DNA, 25 bp, Homo sapien
gagagacagcctagggactcacact

SEQ ID NO: 488374 - DNA, 25 bp, Homo sapien
gactctttagagttgcctggctggg

SEQ ID NO: 488375 - DNA, 25 bp, Homo sapien
ctcatcatggagaagcctgaactgc

SEQ ID NO: 488376 - DNA, 25 bp, Homo sapien
tctgaggtactgaccccaacatgaa

SEQ ID NO: 488377 - DNA, 25 bp, Homo sapien
gattagagctgaccctagtgacctc

SEQ ID NO: 488378 - DNA, 25 bp, Homo sapien
tctggagactagagctccaaaagct

SEQ ID NO: 488379 - DNA, 25 bp, Homo sapien
ctcttggtcttgtagatggtcatcc

SEQ ID NO: 488380 - DNA, 25 bp, Homo sapien
tagcttgcggactgctgctttatta

SEQ ID NO: 488381 - DNA, 25 bp, Homo sapien
tatggcagtttagcttgcggactgc

SEQ ID NO: 488382 - DNA, 25 bp, Homo sapien
tgacttggagtatggcagtttagct

SEQ ID NO: 488383 - DNA, 25 bp, Homo sapien
cttttgacttggagtatggcagttt

SEQ ID NO: 488384 - DNA, 25 bp, Homo sapien
ccaggagtagaccaccagcatttct

SEQ ID NO: 488385 - DNA, 25 bp, Homo sapien
tccagatgacagtcgctaggagttc

SEQ ID NO: 488386 - DNA, 25 bp, Homo sapien
aaaagacactgcaagggccgggcgc

SEQ ID NO: 488387 - DNA, 25 bp, Homo sapien
gctaggagttcagcaagctccttcc

SEQ ID NO: 488388 - DNA, 25 bp, Homo sapien
ccttgcactaattcagagctaaggg

SEQ ID NO: 488389 - DNA, 25 bp, Homo sapien
tcctaatgccagtattggaaggtcc

SEQ ID NO: 488390 - DNA, 25 bp, Homo sapien
cagtattggaaggtccacctgaaga

SEQ ID NO: 488391 - DNA, 25 bp, Homo sapien
tccctcaaatccttgcactaattca

SEQ ID NO: 488392 - DNA, 25 bp, Homo sapien
tcccagcggcatctcatttcaatgc

SEQ ID NO: 488393 - DNA, 25 bp, Homo sapien
tccctcctctaatttatcctgtgca

SEQ ID NO: 488394 - DNA, 25 bp, Homo sapien
gtgcattaccattacagtcatcttc

SEQ ID NO: 488395 - DNA, 25 bp, Homo sapien
tcaatgccctcccaaccaattttgt

SEQ ID NO: 488396 - DNA, 25 bp, Homo sapien
tgtcttttgactcagacacactgcc

SEQ ID NO: 488397 - DNA, 25 bp, Homo sapien
tgtctttcttggggacatattccac

SEQ ID NO: 488398 - DNA, 25 bp, Homo sapien
gccaagcagtttcttagagcactcg

SEQ ID NO: 488399 - DNA, 25 bp, Homo sapien
ctggttccacaagcctgcataattc

SEQ ID NO: 488400 - DNA, 25 bp, Homo sapien
gagcactcgtggtactctggttcca

SEQ ID NO: 488401 - DNA, 25 bp, Homo sapien
caaactaagtggactgccaagcagt

SEQ ID NO: 488402 - DNA, 25 bp, Homo sapien
cagtaaggcactttcaatgtcaaca

SEQ ID NO: 488403 - DNA, 25 bp, Homo sapien
gagtcttataaactgcgaccttgca

SEQ ID NO: 488404 - DNA, 25 bp, Homo sapien
cagggatgggagtgcacagtaaggc

SEQ ID NO: 488405 - DNA, 25 bp, Homo sapien
ttgatttttgctggccgcttcttgc

SEQ ID NO: 488406 - DNA, 25 bp, Homo sapien
gaaagatgtccatgatgaggcttct

SEQ ID NO: 488407 - DNA, 25 bp, Homo sapien
ttaacagcatcccaatgggccagtg

SEQ ID NO: 488408 - DNA, 25 bp, Homo sapien
ctttctctggttgagttgccctgca

SEQ ID NO: 488409 - DNA, 25 bp, Homo sapien
caatgcacaaagtatacagttactc

SEQ ID NO: 488410 - DNA, 25 bp, Homo sapien
accaatttcttagtatgactgccca

SEQ ID NO: 488411 - DNA, 25 bp, Homo sapien
tttcttagtatgactgcccaagtct

SEQ ID NO: 488412 - DNA, 25 bp, Homo sapien
taccaatttcttagtatgactgccc

SEQ ID NO: 488413 - DNA, 25 bp, Homo sapien
ccaatttcttagtatgactgcccaa

SEQ ID NO: 488414 - DNA, 25 bp, Homo sapien
tgaagacccctgtacttccacttgt

SEQ ID NO: 488415 - DNA, 25 bp, Homo sapien
tcctagaatgaagacccctgtactt

SEQ ID NO: 488416 - DNA, 25 bp, Homo sapien
caaggctcctagaatgaagacccct

SEQ ID NO: 488417 - DNA, 25 bp, Homo sapien
ggctcctagaatgaagacccctgta

SEQ ID NO: 488418 - DNA, 25 bp, Homo sapien
cctcctcattccggtttcaccagag

SEQ ID NO: 488419 - DNA, 25 bp, Homo sapien
tcctcattccggtttcaccagagga

SEQ ID NO: 488420 - DNA, 25 bp, Homo sapien
atgacctcctcattccggtttcacc

SEQ ID NO: 488421 - DNA, 25 bp, Homo sapien
gacctcctcattccggtttcaccag

SEQ ID NO: 488422 - DNA, 25 bp, Homo sapien
ttctgtaccacgctgctttttaagg

SEQ ID NO: 488423 - DNA, 25 bp, Homo sapien
tattttctgtaccacgctgcttttt

SEQ ID NO: 488424 - DNA, 25 bp, Homo sapien
taccacgctgctttttaaggctcat

SEQ ID NO: 488425 - DNA, 25 bp, Homo sapien
ggtattttctgtaccacgctgcttt

SEQ ID NO: 488426 - DNA, 25 bp, Homo sapien
cagtgcaaatattgtgatccattca

SEQ ID NO: 488427 - DNA, 25 bp, Homo sapien
catggtgcgttagcagatttgatgc

SEQ ID NO: 488428 - DNA, 25 bp, Homo sapien
tacgaaatggaaaagatcataggga

SEQ ID NO: 488429 - DNA, 25 bp, Homo sapien
ggcataatgatgctcagaggcaaga

SEQ ID NO: 488430 - DNA, 25 bp, Homo sapien
ctgctaaaaccatccgcagcaaagt

SEQ ID NO: 488431 - DNA, 25 bp, Homo sapien
tgctaaaaccatccgcagcaaagtc

SEQ ID NO: 488432 - DNA, 25 bp, Homo sapien
gctaaaaccatccgcagcaaagtca

SEQ ID NO: 488433 - DNA, 25 bp, Homo sapien
cctttttgcagcagtgtgtactgaa

SEQ ID NO: 488434 - DNA, 25 bp, Homo sapien
ttaattgccaaaaagccctcacaag

SEQ ID NO: 488435 - DNA, 25 bp, Homo sapien
gtgtactgaacttatatctgttttc

SEQ ID NO: 488436 - DNA, 25 bp, Homo sapien
tagctgccaacgtggtaacccttca

SEQ ID NO: 488437 - DNA, 25 bp, Homo sapien
cagagctcgctggtagataggatga

SEQ ID NO: 488438 - DNA, 25 bp, Homo sapien
ccaatcacggagagtcgcttcttca

SEQ ID NO: 488439 - DNA, 25 bp, Homo sapien
taccagaggctgtggtcaaatacac

SEQ ID NO: 488440 - DNA, 25 bp, Homo sapien
tcaaatacacctgccacagagctcg

SEQ ID NO: 488441 - DNA, 25 bp, Homo sapien
tattccgctattgtatatctggggt

SEQ ID NO: 488442 - DNA, 25 bp, Homo sapien
ctattccgctattgtatatctgggg

SEQ ID NO: 488443 - DNA, 25 bp, Homo sapien
ctagcttcaagcgagaagtggtggt

SEQ ID NO: 488444 - DNA, 25 bp, Homo sapien
tagcttcaagcgagaagtggtggtc

SEQ ID NO: 488445 - DNA, 25 bp, Homo sapien
gcttcaagcgagaagtggtggtcat

SEQ ID NO: 488446 - DNA, 25 bp, Homo sapien
agcttcaagcgagaagtggtggtca

SEQ ID NO: 488447 - DNA, 25 bp, Homo sapien
tcttgctcgactgaaaaagtggttg

SEQ ID NO: 488448 - DNA, 25 bp, Homo sapien
tgcgctaacccataagccctactgg

SEQ ID NO: 488449 - DNA, 25 bp, Homo sapien
tcgtggtattgtacggctgctctca

SEQ ID NO: 488450 - DNA, 25 bp, Homo sapien
caaggctacagggtttcttatgcgc

SEQ ID NO: 488451 - DNA, 25 bp, Homo sapien
aaggccagaagactgctttcgggac

SEQ ID NO: 488452 - DNA, 25 bp, Homo sapien
aggccagaagactgctttcgggaca

SEQ ID NO: 488453 - DNA, 25 bp, Homo sapien
gaaggccagaagactgctttcggga

SEQ ID NO: 488454 - DNA, 25 bp, Homo sapien
ctccatatgaagtgggccatgagac

SEQ ID NO: 488455 - DNA, 25 bp, Homo sapien
aaaataaattatggttgtagcaatc

SEQ ID NO: 488456 - DNA, 25 bp, Homo sapien
taaattatggttgtagcaatctcca

SEQ ID NO: 488457 - DNA, 25 bp, Homo sapien
ccatgagactggagacatttgacaa

SEQ ID NO: 488458 - DNA, 25 bp, Homo sapien
gaattcaacccctgtggaagaaatg

SEQ ID NO: 488459 - DNA, 25 bp, Homo sapien
tagatgcgaggatgggaattcaacc

SEQ ID NO: 488460 - DNA, 25 bp, Homo sapien
cagtgaaggtagtttgaaacaaggt

SEQ ID NO: 488461 - DNA, 25 bp, Homo sapien
ggaaaatgaggtactattgaagacc

SEQ ID NO: 488462 - DNA, 25 bp, Homo sapien
gaatagcatagttccctccatggtt

SEQ ID NO: 488463 - DNA, 25 bp, Homo sapien
tcacagtgaatagcatagttccctc

SEQ ID NO: 488464 - DNA, 25 bp, Homo sapien
gttaaagctaaacttctcaatatca

SEQ ID NO: 488465 - DNA, 25 bp, Homo sapien
aaagctaaacttctcaatatcacag

SEQ ID NO: 488466 - DNA, 25 bp, Homo sapien
gcattgttggataaggtcacaaaca

SEQ ID NO: 488467 - DNA, 25 bp, Homo sapien
gaagaatacaagattgtaaaagcgc

SEQ ID NO: 488468 - DNA, 25 bp, Homo sapien
acaaggggtctttctacatgatcac

SEQ ID NO: 488469 - DNA, 25 bp, Homo sapien
caaacatgaacagggtcaaattcaa

SEQ ID NO: 488470 - DNA, 25 bp, Homo sapien
cattaactattaagaattggtccaa

SEQ ID NO: 488471 - DNA, 25 bp, Homo sapien
ctgtacattaactattaagaattgg

SEQ ID NO: 488472 - DNA, 25 bp, Homo sapien
tacattaactattaagaattggtcc

SEQ ID NO: 488473 - DNA, 25 bp, Homo sapien
taactattaagaattggtccaatgt

SEQ ID NO: 488474 - DNA, 25 bp, Homo sapien
agcatgggatgtgtgcgctctcaca

SEQ ID NO: 488475 - DNA, 25 bp, Homo sapien
tctgagggccttcatgtattgtaag

SEQ ID NO: 488476 - DNA, 25 bp, Homo sapien
tctagctagcagaatataatttccc

SEQ ID NO: 488477 - DNA, 25 bp, Homo sapien
cacatacctgttggcacttgggaaa

SEQ ID NO: 488478 - DNA, 25 bp, Homo sapien
cagaaactgagtttaggaaatgctg

SEQ ID NO: 488479 - DNA, 25 bp, Homo sapien
agaaactgagtttaggaaatgctga

SEQ ID NO: 488480 - DNA, 25 bp, Homo sapien
tcagaaactgagtttaggaaatgct

SEQ ID NO: 488481 - DNA, 25 bp, Homo sapien
tcaatagcaggcaattcccagtcat

SEQ ID NO: 488482 - DNA, 25 bp, Homo sapien
gatcaatagcaggcaattcccagtc

SEQ ID NO: 488483 - DNA, 25 bp, Homo sapien
caatagcaggcaattcccagtcatc

SEQ ID NO: 488484 - DNA, 25 bp, Homo sapien
atcaatagcaggcaattcccagtca

SEQ ID NO: 488485 - DNA, 25 bp, Homo sapien
cattgcacggggatgtagataatcc

SEQ ID NO: 488486 - DNA, 25 bp, Homo sapien
aatgtgtgtaagtgattgggcagaa

SEQ ID NO: 488487 - DNA, 25 bp, Homo sapien
aaaggcctccgttttatggaatgtg

SEQ ID NO: 488488 - DNA, 25 bp, Homo sapien
gctgagcttgtctttaccgtctttc

SEQ ID NO: 488489 - DNA, 25 bp, Homo sapien
tgggttcccagcgaacagtgtgctt

SEQ ID NO: 488490 - DNA, 25 bp, Homo sapien
cccagcgaacagtgtgcttttgcat

SEQ ID NO: 488491 - DNA, 25 bp, Homo sapien
ggttcccagcgaacagtgtgctttt

SEQ ID NO: 488492 - DNA, 25 bp, Homo sapien
cctgggttcccagcgaacagtgtgc

SEQ ID NO: 488493 - DNA, 25 bp, Homo sapien
cttggaaggtgaataggttggcttt

SEQ ID NO: 488494 - DNA, 25 bp, Homo sapien
ctctgagagtcccttcgttgcactg

SEQ ID NO: 488495 - DNA, 25 bp, Homo sapien
ttgcttggaaggtgaataggttggc

SEQ ID NO: 488496 - DNA, 25 bp, Homo sapien
aaggtgaataggttggctttatcac

SEQ ID NO: 488497 - DNA, 25 bp, Homo sapien
taggagcaattcgtcacaatctgtc

SEQ ID NO: 488498 - DNA, 25 bp, Homo sapien
cagcatcatgtaggagcaattcgtc

SEQ ID NO: 488499 - DNA, 25 bp, Homo sapien
catgtaggagcaattcgtcacaatc

SEQ ID NO: 488500 - DNA, 25 bp, Homo sapien
agcaattcgtcacaatctgtcatgg

SEQ ID NO: 488501 - DNA, 25 bp, Homo sapien
ggatgttgctctaattgagctccct

SEQ ID NO: 488502 - DNA, 25 bp, Homo sapien
gccagggatgttgctctaattgagc

SEQ ID NO: 488503 - DNA, 25 bp, Homo sapien
tgccagggatgttgctctaattgag

SEQ ID NO: 488504 - DNA, 25 bp, Homo sapien
cagggatgttgctctaattgagctc

SEQ ID NO: 488505 - DNA, 25 bp, Homo sapien
tgtcattctctacagcggagcacgg

SEQ ID NO: 488506 - DNA, 25 bp, Homo sapien
tcattctctacagcggagcacgggc

SEQ ID NO: 488507 - DNA, 25 bp, Homo sapien
tcattgtttaccattagcactgtca

SEQ ID NO: 488508 - DNA, 25 bp, Homo sapien
tgatgctgacttgcacaagggaagc

SEQ ID NO: 488509 - DNA, 25 bp, Homo sapien
gagctgaagtctcatattcagccat

SEQ ID NO: 488510 - DNA, 25 bp, Homo sapien
cagctctcgagctgaagtctcatat

SEQ ID NO: 488511 - DNA, 25 bp, Homo sapien
tctcgagctgaagtctcatattcag

SEQ ID NO: 488512 - DNA, 25 bp, Homo sapien
agctctcgagctgaagtctcatatt

SEQ ID NO: 488513 - DNA, 25 bp, Homo sapien
tcgttttccacatggtttgacttaa

SEQ ID NO: 488514 - DNA, 25 bp, Homo sapien
gacttaataggatctaagttcagat

SEQ ID NO: 488515 - DNA, 25 bp, Homo sapien
tatggtccaaccttgtcgttttcca

SEQ ID NO: 488516 - DNA, 25 bp, Homo sapien
cttaataggatctaagttcagatac

SEQ ID NO: 488517 - DNA, 25 bp, Homo sapien
ggtctccctctaccaacagactatg

SEQ ID NO: 488518 - DNA, 25 bp, Homo sapien
ctagcaggattttaataacttgatc

SEQ ID NO: 488519 - DNA, 25 bp, Homo sapien
ttgtctttacatccctagaccctcg

SEQ ID NO: 488520 - DNA, 25 bp, Homo sapien
cttgatcatttgcagggtctccctc

SEQ ID NO: 488521 - DNA, 25 bp, Homo sapien
gcggcaattaagtgctaggcattga

SEQ ID NO: 488522 - DNA, 25 bp, Homo sapien
gatactgccccagaaattgcctaag

SEQ ID NO: 488523 - DNA, 25 bp, Homo sapien
tgaccccacgtgatggcggcaatta

SEQ ID NO: 488524 - DNA, 25 bp, Homo sapien
tatttcagggattttccaggaacta

SEQ ID NO: 488525 - DNA, 25 bp, Homo sapien
cttatcccaattgccacctttcagc

SEQ ID NO: 488526 - DNA, 25 bp, Homo sapien
tatcccaattgccacctttcagcat

SEQ ID NO: 488527 - DNA, 25 bp, Homo sapien
ttatcccaattgccacctttcagca

SEQ ID NO: 488528 - DNA, 25 bp, Homo sapien
ggccacatcacattgactggcgggt

SEQ ID NO: 488529 - DNA, 25 bp, Homo sapien
ggtcttttcgcctggggcattggca

SEQ ID NO: 488530 - DNA, 25 bp, Homo sapien
catcacattgactggcgggtctttt

SEQ ID NO: 488531 - DNA, 25 bp, Homo sapien
ttgactggcgggtcttttcgcctgg

SEQ ID NO: 488532 - DNA, 25 bp, Homo sapien
gtgcctttgcatcctggttgcccca

SEQ ID NO: 488533 - DNA, 25 bp, Homo sapien
cagtgcctttgcatcctggttgccc

SEQ ID NO: 488534 - DNA, 25 bp, Homo sapien
gacagtgcctttgcatcctggttgc

SEQ ID NO: 488535 - DNA, 25 bp, Homo sapien
tcagacagtgcctttgcatcctggt

SEQ ID NO: 488536 - DNA, 25 bp, Homo sapien
atattacgcacttgttcttagatgg

SEQ ID NO: 488537 - DNA, 25 bp, Homo sapien
agatggaggctctaattttctccta

SEQ ID NO: 488538 - DNA, 25 bp, Homo sapien
tggaatattacgcacttgttcttag

SEQ ID NO: 488539 - DNA, 25 bp, Homo sapien
ttgttcttagatggaggctctaatt

SEQ ID NO: 488540 - DNA, 25 bp, Homo sapien
ggagcctccggtggaagtcgttcca

SEQ ID NO: 488541 - DNA, 25 bp, Homo sapien
aacaggacttaaagctgggagcctc

SEQ ID NO: 488542 - DNA, 25 bp, Homo sapien
gagcctccggtggaagtcgttccat

SEQ ID NO: 488543 - DNA, 25 bp, Homo sapien
aatccagagtgaacaggacttaaag

SEQ ID NO: 488544 - DNA, 25 bp, Homo sapien
aaaggacatctctttgaggcagaga

SEQ ID NO: 488545 - DNA, 25 bp, Homo sapien
gcagagattggaggctctgaagaaa

SEQ ID NO: 488546 - DNA, 25 bp, Homo sapien
tgaaattggaatcattactggcccg

SEQ ID NO: 488547 - DNA, 25 bp, Homo sapien
tcaagggcattgacatagggtggaa

SEQ ID NO: 488548 - DNA, 25 bp, Homo sapien
tttcctggaaacaattctactttga

SEQ ID NO: 488549 - DNA, 25 bp, Homo sapien
tattcctggcgatagccgtggtgga

SEQ ID NO: 488550 - DNA, 25 bp, Homo sapien
tcctgtcaccacctcttgtggcttc

SEQ ID NO: 488551 - DNA, 25 bp, Homo sapien
ttgtggcttctgaacagcacctcca

SEQ ID NO: 488552 - DNA, 25 bp, Homo sapien
tcttccttacaggagtcctcctctc

SEQ ID NO: 488553 - DNA, 25 bp, Homo sapien
tgaagctgatatcgacgaggctgcc

SEQ ID NO: 488554 - DNA, 25 bp, Homo sapien
gccgttacatgtgctccacatccta

SEQ ID NO: 488555 - DNA, 25 bp, Homo sapien
tcagcatccattataaggcaccatg

SEQ ID NO: 488556 - DNA, 25 bp, Homo sapien
ctcaacatggcatccgtgaagctga

SEQ ID NO: 488557 - DNA, 25 bp, Homo sapien
gctttgctccatggcggatagtgtc

SEQ ID NO: 488558 - DNA, 25 bp, Homo sapien
ggcttgctggaatttatcctggact

SEQ ID NO: 488559 - DNA, 25 bp, Homo sapien
catggcggatagtgtccagattggc

SEQ ID NO: 488560 - DNA, 25 bp, Homo sapien
ccagattggctaaaggatgtgtttt

SEQ ID NO: 488561 - DNA, 25 bp, Homo sapien
aagctatgacgacacaaaaacacaa

SEQ ID NO: 488562 - DNA, 25 bp, Homo sapien
ctaagctatgacgacacaaaaacac

SEQ ID NO: 488563 - DNA, 25 bp, Homo sapien
taagctatgacgacacaaaaacaca

SEQ ID NO: 488564 - DNA, 25 bp, Homo sapien
gctatgacgacacaaaaacacaatg

SEQ ID NO: 488565 - DNA, 25 bp, Homo sapien
ctaacttgggattctcagtaacttt

SEQ ID NO: 488566 - DNA, 25 bp, Homo sapien
tccttccttaatacctccttgaatg

SEQ ID NO: 488567 - DNA, 25 bp, Homo sapien
aatcactactggagccacttctaac

SEQ ID NO: 488568 - DNA, 25 bp, Homo sapien
taatacctccttgaatgataagtgg

SEQ ID NO: 488569 - DNA, 25 bp, Homo sapien
ctcagggcatgctttatttgatcta

SEQ ID NO: 488570 - DNA, 25 bp, Homo sapien
ctctcagggcatgctttatttgatc

SEQ ID NO: 488571 - DNA, 25 bp, Homo sapien
gcatgctttatttgatctatgctca

SEQ ID NO: 488572 - DNA, 25 bp, Homo sapien
cagggcatgctttatttgatctatg

SEQ ID NO: 488573 - DNA, 25 bp, Homo sapien
ttacataatggcttcttcttctaag

SEQ ID NO: 488574 - DNA, 25 bp, Homo sapien
tacataatggcttcttcttctaagt

SEQ ID NO: 488575 - DNA, 25 bp, Homo sapien
tcttctgcgaatccctccaaaaaat

SEQ ID NO: 488576 - DNA, 25 bp, Homo sapien
atcttctgcgaatccctccaaaaaa

SEQ ID NO: 488577 - DNA, 25 bp, Homo sapien
ctgaaatcttctgcgaatccctcca

SEQ ID NO: 488578 - DNA, 25 bp, Homo sapien
ttcctgaaatcttctgcgaatccct

SEQ ID NO: 488579 - DNA, 25 bp, Homo sapien
tgaacaccatccaacgcagtgaccg

SEQ ID NO: 488580 - DNA, 25 bp, Homo sapien
taggccccttggttgacttccttga

SEQ ID NO: 488581 - DNA, 25 bp, Homo sapien
ctaggccccttggttgacttccttg

SEQ ID NO: 488582 - DNA, 25 bp, Homo sapien
ccaacgcagtgaccgaggtcaacat

SEQ ID NO: 488583 - DNA, 25 bp, Homo sapien
tgaaacaccgagagttcaaggccct

SEQ ID NO: 488584 - DNA, 25 bp, Homo sapien
taaatgtccttgtattgaactcaat

SEQ ID NO: 488585 - DNA, 25 bp, Homo sapien
tgtatcctgaaagccccgacaaagg

SEQ ID NO: 488586 - DNA, 25 bp, Homo sapien
gcctcagatgagctaagtggatagt

SEQ ID NO: 488587 - DNA, 25 bp, Homo sapien
cctgtgaacgcacagcctggtagcc

SEQ ID NO: 488588 - DNA, 25 bp, Homo sapien
tgctcctccgacctgtgaacgcaca

SEQ ID NO: 488589 - DNA, 25 bp, Homo sapien
ccccttcttgttgcgatggacgcat

SEQ ID NO: 488590 - DNA, 25 bp, Homo sapien
tgcgatggacgcattttctgctcct

SEQ ID NO: 488591 - DNA, 25 bp, Homo sapien
gagaggagtgaatgtctccctctcc

SEQ ID NO: 488592 - DNA, 25 bp, Homo sapien
tgagaggagtgaatgtctccctctc

SEQ ID NO: 488593 - DNA, 25 bp, Homo sapien
ttaaaaatcaaaccagtactgacat

SEQ ID NO: 488594 - DNA, 25 bp, Homo sapien
taaaaatcaaaccagtactgacatt

SEQ ID NO: 488595 - DNA, 25 bp, Homo sapien
atgctgattccttcatcggaacagc

SEQ ID NO: 488596 - DNA, 25 bp, Homo sapien
aggctttctgctggggcttgtttga

SEQ ID NO: 488597 - DNA, 25 bp, Homo sapien
tgctgattccttcatcggaacagcc

SEQ ID NO: 488598 - DNA, 25 bp, Homo sapien
gtaggagtcatattgaccttccttc

SEQ ID NO: 488599 - DNA, 25 bp, Homo sapien
tcatgtaggagtcatattgaccttc

SEQ ID NO: 488600 - DNA, 25 bp, Homo sapien
tgtaggagtcatattgaccttcctt

SEQ ID NO: 488601 - DNA, 25 bp, Homo sapien
catgtaggagtcatattgaccttcc

SEQ ID NO: 488602 - DNA, 25 bp, Homo sapien
tcatgctgtatcaccctatgaagtg

SEQ ID NO: 488603 - DNA, 25 bp, Homo sapien
ggtcatgtaaccataagctcctttg

SEQ ID NO: 488604 - DNA, 25 bp, Homo sapien
catgtaaccataagctcctttggcc

SEQ ID NO: 488605 - DNA, 25 bp, Homo sapien
tgaagtgtgtgagccagtgctagct

SEQ ID NO: 488606 - DNA, 25 bp, Homo sapien
tacacagacttcatcactcgcaggt

SEQ ID NO: 488607 - DNA, 25 bp, Homo sapien
gacttcatcactcgcaggtctcagc

SEQ ID NO: 488608 - DNA, 25 bp, Homo sapien
gctacacagacttcatcactcgcag

SEQ ID NO: 488609 - DNA, 25 bp, Homo sapien
tcactcgcaggtctcagctcgtctg

SEQ ID NO: 488610 - DNA, 25 bp, Homo sapien
tctgttctttaagagaacaccttta

SEQ ID NO: 488611 - DNA, 25 bp, Homo sapien
atctgttctttaagagaacaccttt

SEQ ID NO: 488612 - DNA, 25 bp, Homo sapien
gatctgttctttaagagaacacctt

SEQ ID NO: 488613 - DNA, 25 bp, Homo sapien
agatctgttctttaagagaacacct

SEQ ID NO: 488614 - DNA, 25 bp, Homo sapien
tggcccaaaatactgcaaactcctg

SEQ ID NO: 488615 - DNA, 25 bp, Homo sapien
ggaggggtggcccaaaatactgcaa

SEQ ID NO: 488616 - DNA, 25 bp, Homo sapien
ggcccaaaatactgcaaactcctga

SEQ ID NO: 488617 - DNA, 25 bp, Homo sapien
gggtggcccaaaatactgcaaactc

SEQ ID NO: 488618 - DNA, 25 bp, Homo sapien
tcactccggaacctgattgtagttc

SEQ ID NO: 488619 - DNA, 25 bp, Homo sapien
gtagttctgggtattaaagctcaat

SEQ ID NO: 488620 - DNA, 25 bp, Homo sapien
ttctgggtattaaagctcaatagtt

SEQ ID NO: 488621 - DNA, 25 bp, Homo sapien
ctccggaacctgattgtagttctgg

SEQ ID NO: 488622 - DNA, 25 bp, Homo sapien
agtgatgctcatcaggtgtactcca

SEQ ID NO: 488623 - DNA, 25 bp, Homo sapien
tgatgctcatcaggtgtactccacc

SEQ ID NO: 488624 - DNA, 25 bp, Homo sapien
cagtgatgctcatcaggtgtactcc

SEQ ID NO: 488625 - DNA, 25 bp, Homo sapien
gtgatgctcatcaggtgtactccac

SEQ ID NO: 488626 - DNA, 25 bp, Homo sapien
gggcatattccaacatttccaagaa

SEQ ID NO: 488627 - DNA, 25 bp, Homo sapien
tgctgcttgacctgacatcgcagct

SEQ ID NO: 488628 - DNA, 25 bp, Homo sapien
ataaacatgtacaccaagcttctgg

SEQ ID NO: 488629 - DNA, 25 bp, Homo sapien
ttctgatgcttaactgcttctgctg

SEQ ID NO: 488630 - DNA, 25 bp, Homo sapien
ctttcgccaaagcagcaagtggcca

SEQ ID NO: 488631 - DNA, 25 bp, Homo sapien
gctttagtgccccaaagggtgtctc

SEQ ID NO: 488632 - DNA, 25 bp, Homo sapien
ccttgtgtttcttggcatggtcacc

SEQ ID NO: 488633 - DNA, 25 bp, Homo sapien
ggcccaatgggcttgcccttgtgtt

SEQ ID NO: 488634 - DNA, 25 bp, Homo sapien
gatcctccaagctatgtgttctgcc

SEQ ID NO: 488635 - DNA, 25 bp, Homo sapien
tcctccaagctatgtgttctgcctt

SEQ ID NO: 488636 - DNA, 25 bp, Homo sapien
ctccaagctatgtgttctgccttca

SEQ ID NO: 488637 - DNA, 25 bp, Homo sapien
tccaagctatgtgttctgccttcat

SEQ ID NO: 488638 - DNA, 25 bp, Homo sapien
agtagcggcaatagtacttgattgg

SEQ ID NO: 488639 - DNA, 25 bp, Homo sapien
gccaagcaagtagcggcaatagtac

SEQ ID NO: 488640 - DNA, 25 bp, Homo sapien
tattgccaagcaagtagcggcaata

SEQ ID NO: 488641 - DNA, 25 bp, Homo sapien
tagtacttgattgggtcttcagtgt

SEQ ID NO: 488642 - DNA, 25 bp, Homo sapien
ttgaagttaactcactttttagcca

SEQ ID NO: 488643 - DNA, 25 bp, Homo sapien
tgaagttaactcactttttagccag

SEQ ID NO: 488644 - DNA, 25 bp, Homo sapien
taagtgcccaagcaaatgaatgttc

SEQ ID NO: 488645 - DNA, 25 bp, Homo sapien
ggtaagtgcccaagcaaatgaatgt

SEQ ID NO: 488646 - DNA, 25 bp, Homo sapien
cccaagcaaatgaatgttctcaggg

SEQ ID NO: 488647 - DNA, 25 bp, Homo sapien
ctggtaagtgcccaagcaaatgaat

SEQ ID NO: 488648 - DNA, 25 bp, Homo sapien
taatcatgtccaagtcctgagtgct

SEQ ID NO: 488649 - DNA, 25 bp, Homo sapien
aacagttgccatacgcttaaggtca

SEQ ID NO: 488650 - DNA, 25 bp, Homo sapien
ctttgggataatagcactgagtgac

SEQ ID NO: 488651 - DNA, 25 bp, Homo sapien
ggtcatcggatttgtggcgcctcca

SEQ ID NO: 488652 - DNA, 25 bp, Homo sapien
agccaagttggctccagcagcatca

SEQ ID NO: 488653 - DNA, 25 bp, Homo sapien
atcagcaggtagaaaggtagggatg

SEQ ID NO: 488654 - DNA, 25 bp, Homo sapien
agccacgctgaacaacagggattct

SEQ ID NO: 488655 - DNA, 25 bp, Homo sapien
gggtcaataatgaaagggagccacg

SEQ ID NO: 488656 - DNA, 25 bp, Homo sapien
tcaataatgaaagggagccacgctg

SEQ ID NO: 488657 - DNA, 25 bp, Homo sapien
tgtgaattacttttcaccttctggg

SEQ ID NO: 488658 - DNA, 25 bp, Homo sapien
gacagccccagtgtagacaaaagct

SEQ ID NO: 488659 - DNA, 25 bp, Homo sapien
tgtagacaaaagctcatgtctactg

SEQ ID NO: 488660 - DNA, 25 bp, Homo sapien
cccagtgtagacaaaagctcatgtc

SEQ ID NO: 488661 - DNA, 25 bp, Homo sapien
ttgacagccccagtgtagacaaaag

SEQ ID NO: 488662 - DNA, 25 bp, Homo sapien
gataatagaatactgaagtatcagc

SEQ ID NO: 488663 - DNA, 25 bp, Homo sapien
taagtaagataatagaatactgaag

SEQ ID NO: 488664 - DNA, 25 bp, Homo sapien
ttcctctagtggcttaagtaagata

SEQ ID NO: 488665 - DNA, 25 bp, Homo sapien
aatactgaagtatcagcagggcaga

SEQ ID NO: 488666 - DNA, 25 bp, Homo sapien
gtggtagaggctccatgaaaaacag

SEQ ID NO: 488667 - DNA, 25 bp, Homo sapien
tggtagaggctccatgaaaaacaga

SEQ ID NO: 488668 - DNA, 25 bp, Homo sapien
tagagagtgcattccagacatggga

SEQ ID NO: 488669 - DNA, 25 bp, Homo sapien
cttctagagagtgcattccagacat

SEQ ID NO: 488670 - DNA, 25 bp, Homo sapien
gcattccagacatgggaggaagaaa

SEQ ID NO: 488671 - DNA, 25 bp, Homo sapien
gagtgcattccagacatgggaggaa

SEQ ID NO: 488672 - DNA, 25 bp, Homo sapien
atttatcacaaagcatagactcgca

SEQ ID NO: 488673 - DNA, 25 bp, Homo sapien
tgtttttgtaatcgactctgctcac

SEQ ID NO: 488674 - DNA, 25 bp, Homo sapien
ttcctgtttttgtaatcgactctgc

SEQ ID NO: 488675 - DNA, 25 bp, Homo sapien
gactcgcagtattagatacttcctg

SEQ ID NO: 488676 - DNA, 25 bp, Homo sapien
tttcaatcaagctgctgcattcatt

SEQ ID NO: 488677 - DNA, 25 bp, Homo sapien
ttgagcgcagaggtcaacggaaaca

SEQ ID NO: 488678 - DNA, 25 bp, Homo sapien
ttcattgagcgcagaggtcaacgga

SEQ ID NO: 488679 - DNA, 25 bp, Homo sapien
ctgcattcattgagcgcagaggtca

SEQ ID NO: 488680 - DNA, 25 bp, Homo sapien
ccatctgggtcgaattgacaagaat

SEQ ID NO: 488681 - DNA, 25 bp, Homo sapien
tgccatgatgtgaagggcctttaat

SEQ ID NO: 488682 - DNA, 25 bp, Homo sapien
gaatgactaagaattgtagcttgga

SEQ ID NO: 488683 - DNA, 25 bp, Homo sapien
gaattggtgaactttgcatatggac

SEQ ID NO: 488684 - DNA, 25 bp, Homo sapien
ctacagagtacatgtcattgttcat

SEQ ID NO: 488685 - DNA, 25 bp, Homo sapien
tttgacaagaagatggatcctccag

SEQ ID NO: 488686 - DNA, 25 bp, Homo sapien
tgtccgcagaccacttttcttttct

SEQ ID NO: 488687 - DNA, 25 bp, Homo sapien
cttccaccttttcaggcaatatgta

SEQ ID NO: 488688 - DNA, 25 bp, Homo sapien
ggcaatatgtaattatcatgtccgc

SEQ ID NO: 488689 - DNA, 25 bp, Homo sapien
tctcctcccatctgtagcagctcac

SEQ ID NO: 488690 - DNA, 25 bp, Homo sapien
cttctttcatctctcctcccatctg

SEQ ID NO: 488691 - DNA, 25 bp, Homo sapien
tttggcagtgagagcttctttcatc

SEQ ID NO: 488692 - DNA, 25 bp, Homo sapien
tcagaattctttggcagtgagagct

SEQ ID NO: 488693 - DNA, 25 bp, Homo sapien
gctctctccacgttttagatactta

SEQ ID NO: 488694 - DNA, 25 bp, Homo sapien
atagaagagaacacggctctctcca

SEQ ID NO: 488695 - DNA, 25 bp, Homo sapien
ctgatggaacaattagtgaatagaa

SEQ ID NO: 488696 - DNA, 25 bp, Homo sapien
tggaacaattagtgaatagaagaga

SEQ ID NO: 488697 - DNA, 25 bp, Homo sapien
ctgggtggcaggcagacagcaccat

SEQ ID NO: 488698 - DNA, 25 bp, Homo sapien
ggtaacacgggaacaagccatgaag

SEQ ID NO: 488699 - DNA, 25 bp, Homo sapien
accactagaaactgcgagcccagag

SEQ ID NO: 488700 - DNA, 25 bp, Homo sapien
gctgtccccatagaaggtaacacgg

SEQ ID NO: 488701 - DNA, 25 bp, Homo sapien
gggtctcagatctaaccaccactag

SEQ ID NO: 488702 - DNA, 25 bp, Homo sapien
tgtgattgcataatgtctggatttg

SEQ ID NO: 488703 - DNA, 25 bp, Homo sapien
tcctctggcgatcagaagtgtgaaa

SEQ ID NO: 488704 - DNA, 25 bp, Homo sapien
tcttcctctggcgatcagaagtgtg

SEQ ID NO: 488705 - DNA, 25 bp, Homo sapien
tattaatccctgtcattgtgattgc

SEQ ID NO: 488706 - DNA, 25 bp, Homo sapien
aagtcttactatgtgtcgtaggaag

SEQ ID NO: 488707 - DNA, 25 bp, Homo sapien
tgctctgaaagtcttactatgtgtc

SEQ ID NO: 488708 - DNA, 25 bp, Homo sapien
tgctttttatgtcgggcatgttaat

SEQ ID NO: 488709 - DNA, 25 bp, Homo sapien
tataatgctttttatgtcgggcatg

SEQ ID NO: 488710 - DNA, 25 bp, Homo sapien
aactgacacgtggttcccttgggct

SEQ ID NO: 488711 - DNA, 25 bp, Homo sapien
ccttgggctctgttgacagggttgc

SEQ ID NO: 488712 - DNA, 25 bp, Homo sapien
gaacctgagtaggacacccacagaa

SEQ ID NO: 488713 - DNA, 25 bp, Homo sapien
ttatattgaaattggactgaattcc

SEQ ID NO: 488714 - DNA, 25 bp, Homo sapien
tgaactctgagtatgacagcagaaa

SEQ ID NO: 488715 - DNA, 25 bp, Homo sapien
tatatatttgttgacccctgttgca

SEQ ID NO: 488716 - DNA, 25 bp, Homo sapien
cgctgcagtcgtctgaagttgcttt

SEQ ID NO: 488717 - DNA, 25 bp, Homo sapien
gaatttgctaattctgtttgtgtat

SEQ ID NO: 488718 - DNA, 25 bp, Homo sapien
gagaagcggtattgccttgctatgt

SEQ ID NO: 488719 - DNA, 25 bp, Homo sapien
aagagagaagcggtattgccttgct

SEQ ID NO: 488720 - DNA, 25 bp, Homo sapien
aaagaaattgatcctctgaaaaaca

SEQ ID NO: 488721 - DNA, 25 bp, Homo sapien
aagcggtattgccttgctatgtttt

SEQ ID NO: 488722 - DNA, 25 bp, Homo sapien
gtctttgaaagtgatgacaatgacc

SEQ ID NO: 488723 - DNA, 25 bp, Homo sapien
tcaagtaggtaaatctgtatcttcc

SEQ ID NO: 488724 - DNA, 25 bp, Homo sapien
tattcctgagactgtctttgaaagt

SEQ ID NO: 488725 - DNA, 25 bp, Homo sapien
tttttcaagtaggtaaatctgtatc

SEQ ID NO: 488726 - DNA, 25 bp, Homo sapien
ctggctctgggtccctgtccctggg

SEQ ID NO: 488727 - DNA, 25 bp, Homo sapien
gctctgggtccctgtccctgggaac

SEQ ID NO: 488728 - DNA, 25 bp, Homo sapien
ggctctgggtccctgtccctgggaa

SEQ ID NO: 488729 - DNA, 25 bp, Homo sapien
ctgggtccctgtccctgggaaccat

SEQ ID NO: 488730 - DNA, 25 bp, Homo sapien
gccagtctttcatagtctatgtcca

SEQ ID NO: 488731 - DNA, 25 bp, Homo sapien
cgcttctgtccatgcttccataatt

SEQ ID NO: 488732 - DNA, 25 bp, Homo sapien
ttccataattttcacaagagccagt

SEQ ID NO: 488733 - DNA, 25 bp, Homo sapien
cctccctcctgctccgcttctgtcc

SEQ ID NO: 488734 - DNA, 25 bp, Homo sapien
aaccctgcaaaggttccagcacttt

SEQ ID NO: 488735 - DNA, 25 bp, Homo sapien
tgccagtgggttagctgcagcacag

SEQ ID NO: 488736 - DNA, 25 bp, Homo sapien
tcccagaaacatcaagaagaaggca

SEQ ID NO: 488737 - DNA, 25 bp, Homo sapien
cacagggacacaagtgattgttgct

SEQ ID NO: 488738 - DNA, 25 bp, Homo sapien
aagaaccagcccgtgtcactaagac

SEQ ID NO: 488739 - DNA, 25 bp, Homo sapien
gctgtgggactcttcacctaccgca

SEQ ID NO: 488740 - DNA, 25 bp, Homo sapien
cttcacctaccgcagatgtttccat

SEQ ID NO: 488741 - DNA, 25 bp, Homo sapien
tcactaagacaagcacaaatagctc

SEQ ID NO: 488742 - DNA, 25 bp, Homo sapien
tttttggcaatcctctaatttcttg

SEQ ID NO: 488743 - DNA, 25 bp, Homo sapien
tggcaatcctctaatttcttgttct

SEQ ID NO: 488744 - DNA, 25 bp, Homo sapien
ttctatttttggcaatcctctaatt

SEQ ID NO: 488745 - DNA, 25 bp, Homo sapien
gttacattcatcttcgtttttctcc

SEQ ID NO: 488746 - DNA, 25 bp, Homo sapien
gacgttatcgcatagatggaaatcc

SEQ ID NO: 488747 - DNA, 25 bp, Homo sapien
cagggacaatgctccgacgacgtta

SEQ ID NO: 488748 - DNA, 25 bp, Homo sapien
gagaagtagaatcagaagacaaggt

SEQ ID NO: 488749 - DNA, 25 bp, Homo sapien
gaagacaaggtcaagttcatgcagg

SEQ ID NO: 488750 - DNA, 25 bp, Homo sapien
gtaattgtctctccctgcgattttg

SEQ ID NO: 488751 - DNA, 25 bp, Homo sapien
ttatcttgtaattgtctctccctgc

SEQ ID NO: 488752 - DNA, 25 bp, Homo sapien
ccctgcgattttgctttaacttcca

SEQ ID NO: 488753 - DNA, 25 bp, Homo sapien
gtctctccctgcgattttgctttaa

SEQ ID NO: 488754 - DNA, 25 bp, Homo sapien
tgtatgggggacgagagcgttgaac

SEQ ID NO: 488755 - DNA, 25 bp, Homo sapien
tagtacttagaatgtgaagaaagag

SEQ ID NO: 488756 - DNA, 25 bp, Homo sapien
ggacgagagcgttgaacattctgtg

SEQ ID NO: 488757 - DNA, 25 bp, Homo sapien
atgagtagtacttagaatgtgaaga

SEQ ID NO: 488758 - DNA, 25 bp, Homo sapien
ggggatagctcagtcagaatcgtac

SEQ ID NO: 488759 - DNA, 25 bp, Homo sapien
ggtgtgaaggggatagctcagtcag

SEQ ID NO: 488760 - DNA, 25 bp, Homo sapien
gaaggggatagctcagtcagaatcg

SEQ ID NO: 488761 - DNA, 25 bp, Homo sapien
tgtgaaggggatagctcagtcagaa

SEQ ID NO: 488762 - DNA, 25 bp, Homo sapien
tcttctcatctctgagctgtctcct

SEQ ID NO: 488763 - DNA, 25 bp, Homo sapien
tcctcttcattttgtaatctggctt

SEQ ID NO: 488764 - DNA, 25 bp, Homo sapien
ctcctgaagtttcttcaacgaactt

SEQ ID NO: 488765 - DNA, 25 bp, Homo sapien
tttgtcctatttcagttccctcctc

SEQ ID NO: 488766 - DNA, 25 bp, Homo sapien
gcttgttcccatacaaatgtactct

SEQ ID NO: 488767 - DNA, 25 bp, Homo sapien
tccaatcctattgtgcttgttccca

SEQ ID NO: 488768 - DNA, 25 bp, Homo sapien
catatttattatacgtttccaatcc

SEQ ID NO: 488769 - DNA, 25 bp, Homo sapien
atgtactctaaaatacgtaaaatag

SEQ ID NO: 488770 - DNA, 25 bp, Homo sapien
ttcaggttgcgtttagctgtcagag

SEQ ID NO: 488771 - DNA, 25 bp, Homo sapien
caggttgcgtttagctgtcagagaa

SEQ ID NO: 488772 - DNA, 25 bp, Homo sapien
attcaggttgcgtttagctgtcaga

SEQ ID NO: 488773 - DNA, 25 bp, Homo sapien
tcaggttgcgtttagctgtcagaga

SEQ ID NO: 488774 - DNA, 25 bp, Homo sapien
tagttggctataattacaacactag

SEQ ID NO: 488775 - DNA, 25 bp, Homo sapien
agttggctataattacaacactagt

SEQ ID NO: 488776 - DNA, 25 bp, Homo sapien
gtagttggctataattacaacacta

SEQ ID NO: 488777 - DNA, 25 bp, Homo sapien
gagaagagtttgtccacagcttgtt

SEQ ID NO: 488778 - DNA, 25 bp, Homo sapien
agagtttgtccacagcttgtttcca

SEQ ID NO: 488779 - DNA, 25 bp, Homo sapien
gaagagtttgtccacagcttgtttc

SEQ ID NO: 488780 - DNA, 25 bp, Homo sapien
aagagaagagtttgtccacagcttg

SEQ ID NO: 488781 - DNA, 25 bp, Homo sapien
gatgctgactacctgagccaacctt

SEQ ID NO: 488782 - DNA, 25 bp, Homo sapien
gcagctaccacctatattttctaca

SEQ ID NO: 488783 - DNA, 25 bp, Homo sapien
gatatggatataaacacttagaccc

SEQ ID NO: 488784 - DNA, 25 bp, Homo sapien
tacagcagggatctttgcagtctag

SEQ ID NO: 488785 - DNA, 25 bp, Homo sapien
gcattatatcttctctaccactgcc

SEQ ID NO: 488786 - DNA, 25 bp, Homo sapien
tagcattatatcttctctaccactg

SEQ ID NO: 488787 - DNA, 25 bp, Homo sapien
cttctagcattatatcttctctacc

SEQ ID NO: 488788 - DNA, 25 bp, Homo sapien
tctagcattatatcttctctaccac

SEQ ID NO: 488789 - DNA, 25 bp, Homo sapien
attggagtcacagtgatgtagggga

SEQ ID NO: 488790 - DNA, 25 bp, Homo sapien
atcatgtgatcaagcattggagtca

SEQ ID NO: 488791 - DNA, 25 bp, Homo sapien
aaaatcatgtgatcaagcattggag

SEQ ID NO: 488792 - DNA, 25 bp, Homo sapien
tggagtcacagtgatgtaggggagc

SEQ ID NO: 488793 - DNA, 25 bp, Homo sapien
cttttgttaatcctccccggctgct

SEQ ID NO: 488794 - DNA, 25 bp, Homo sapien
cagcttggcttttgttaatcctccc

SEQ ID NO: 488795 - DNA, 25 bp, Homo sapien
gctggctctcttcttatgctgaatc

SEQ ID NO: 488796 - DNA, 25 bp, Homo sapien
tcttcttatgctgaatctcagagca

SEQ ID NO: 488797 - DNA, 25 bp, Homo sapien
aaggtgaccgcgacctcttttggag

SEQ ID NO: 488798 - DNA, 25 bp, Homo sapien
caaaaggtgaccgcgacctcttttg

SEQ ID NO: 488799 - DNA, 25 bp, Homo sapien
ggtgaccgcgacctcttttggagga

SEQ ID NO: 488800 - DNA, 25 bp, Homo sapien
aggtgaccgcgacctcttttggagg

SEQ ID NO: 488801 - DNA, 25 bp, Homo sapien
gttaaactgtcatcagtgtctgtct

SEQ ID NO: 488802 - DNA, 25 bp, Homo sapien
cccgctgggagaggcgttcattcaa

SEQ ID NO: 488803 - DNA, 25 bp, Homo sapien
tataacctcaattactgcagggtca

SEQ ID NO: 488804 - DNA, 25 bp, Homo sapien
cattttctggtggtacttggacggc

SEQ ID NO: 488805 - DNA, 25 bp, Homo sapien
tcagtgggtcagctctcttcaaggg

SEQ ID NO: 488806 - DNA, 25 bp, Homo sapien
tgctaatcaaaagactgcccagtat

SEQ ID NO: 488807 - DNA, 25 bp, Homo sapien
cattggagtgggtagatacggtctc

SEQ ID NO: 488808 - DNA, 25 bp, Homo sapien
gcaaagcacacacaacggaacaact

SEQ ID NO: 488809 - DNA, 25 bp, Homo sapien
tagactattttcacacggaaaccag

SEQ ID NO: 488810 - DNA, 25 bp, Homo sapien
cacagtgtctgagcaggattggtca

SEQ ID NO: 488811 - DNA, 25 bp, Homo sapien
tgcacagtgtctgagcaggattggt

SEQ ID NO: 488812 - DNA, 25 bp, Homo sapien
ctttgcacagtgtctgagcaggatt

SEQ ID NO: 488813 - DNA, 25 bp, Homo sapien
tttgcacagtgtctgagcaggattg

SEQ ID NO: 488814 - DNA, 25 bp, Homo sapien
gcttcatcaaacagtgaggtaaggg

SEQ ID NO: 488815 - DNA, 25 bp, Homo sapien
tcttgcttcatcaaacagtgaggta

SEQ ID NO: 488816 - DNA, 25 bp, Homo sapien
ttgcttcatcaaacagtgaggtaag

SEQ ID NO: 488817 - DNA, 25 bp, Homo sapien
cctcttgcttcatcaaacagtgagg

SEQ ID NO: 488818 - DNA, 25 bp, Homo sapien
aagggaattgaagagggagacaggc

SEQ ID NO: 488819 - DNA, 25 bp, Homo sapien
cccaagggaattgaagagggagaca

SEQ ID NO: 488820 - DNA, 25 bp, Homo sapien
ctcccaagggaattgaagagggaga

SEQ ID NO: 488821 - DNA, 25 bp, Homo sapien
ccaagggaattgaagagggagacag

SEQ ID NO: 488822 - DNA, 25 bp, Homo sapien
gagactgtgtagcaagaagccctgt

SEQ ID NO: 488823 - DNA, 25 bp, Homo sapien
tgaaggacatccagggacgaacagc

SEQ ID NO: 488824 - DNA, 25 bp, Homo sapien
cacggccagatttgtgctccactct

SEQ ID NO: 488825 - DNA, 25 bp, Homo sapien
aacagccaattgtgccacggccaga

SEQ ID NO: 488826 - DNA, 25 bp, Homo sapien
aacttgattgtcatagctgggagca

SEQ ID NO: 488827 - DNA, 25 bp, Homo sapien
gccttagggcagagacatggacact

SEQ ID NO: 488828 - DNA, 25 bp, Homo sapien
ccctgggtgaaacagcgaagtccat

SEQ ID NO: 488829 - DNA, 25 bp, Homo sapien
tgcatcgagaaataccctgattggg

SEQ ID NO: 488830 - DNA, 25 bp, Homo sapien
tatttagctcccactgaggggtcct

SEQ ID NO: 488831 - DNA, 25 bp, Homo sapien
agtcatttccgccacccagccattc

SEQ ID NO: 488832 - DNA, 25 bp, Homo sapien
gggtcctttaatgttgacctgaaca

SEQ ID NO: 488833 - DNA, 25 bp, Homo sapien
tcaaatccgaccacccctcacagtt

SEQ ID NO: 488834 - DNA, 25 bp, Homo sapien
tctaccaaaatgtctgtttgaagtt

SEQ ID NO: 488835 - DNA, 25 bp, Homo sapien
ggacccaaggctcttgtacttaata

SEQ ID NO: 488836 - DNA, 25 bp, Homo sapien
acccaaggctcttgtacttaataag

SEQ ID NO: 488837 - DNA, 25 bp, Homo sapien
catgtctaccaaaatgtctgtttga

SEQ ID NO: 488838 - DNA, 25 bp, Homo sapien
attttgattagttgggtccacatat

SEQ ID NO: 488839 - DNA, 25 bp, Homo sapien
ttttgattagttgggtccacatatc

SEQ ID NO: 488840 - DNA, 25 bp, Homo sapien
tgaacttcacgtattgagcccaagt

SEQ ID NO: 488841 - DNA, 25 bp, Homo sapien
cattctccgtggagctggtaaagtg

SEQ ID NO: 488842 - DNA, 25 bp, Homo sapien
caagaaggatgaacttcacgtattg

SEQ ID NO: 488843 - DNA, 25 bp, Homo sapien
cccattctccgtggagctggtaaag

SEQ ID NO: 488844 - DNA, 25 bp, Homo sapien
gacagtaatcagaacttgatggaga

SEQ ID NO: 488845 - DNA, 25 bp, Homo sapien
tgtgacagttttagtattacattct

SEQ ID NO: 488846 - DNA, 25 bp, Homo sapien
gaggcctacgcaggtgtgatatgat

SEQ ID NO: 488847 - DNA, 25 bp, Homo sapien
tatgatagttggtgctagtgtgaca

SEQ ID NO: 488848 - DNA, 25 bp, Homo sapien
tttctccttcacactggattcatca

SEQ ID NO: 488849 - DNA, 25 bp, Homo sapien
gtttctccttcacactggattcatc

SEQ ID NO: 488850 - DNA, 25 bp, Homo sapien
agtttctccttcacactggattcat

SEQ ID NO: 488851 - DNA, 25 bp, Homo sapien
cagctcttttgatgagtggacacat

SEQ ID NO: 488852 - DNA, 25 bp, Homo sapien
cctcattatccatttcctcagacat

SEQ ID NO: 488853 - DNA, 25 bp, Homo sapien
tcatcctcattatccatttcctcag

SEQ ID NO: 488854 - DNA, 25 bp, Homo sapien
cttcatcctcattatccatttcctc

SEQ ID NO: 488855 - DNA, 25 bp, Homo sapien
tcctcattatccatttcctcagaca

SEQ ID NO: 488856 - DNA, 25 bp, Homo sapien
ccatcatatccagtgaggctctcaa

SEQ ID NO: 488857 - DNA, 25 bp, Homo sapien
ctcaatgtccgtagtaagactaagg

SEQ ID NO: 488858 - DNA, 25 bp, Homo sapien
tctctggcaccatcatatccagtga

SEQ ID NO: 488859 - DNA, 25 bp, Homo sapien
agtgaggctctcaatgtccgtagta

SEQ ID NO: 488860 - DNA, 25 bp, Homo sapien
cagccttttctaaggtatggtttat

SEQ ID NO: 488861 - DNA, 25 bp, Homo sapien
caccagtaaattcacaggtctgcac

SEQ ID NO: 488862 - DNA, 25 bp, Homo sapien
gcaccattcccaagggttgctgtgc

SEQ ID NO: 488863 - DNA, 25 bp, Homo sapien
tcccaagggttgctgtgcacagcct

SEQ ID NO: 488864 - DNA, 25 bp, Homo sapien
gacatgcagacaactgttccctcac

SEQ ID NO: 488865 - DNA, 25 bp, Homo sapien
caacagtcttctggtcggcagacat

SEQ ID NO: 488866 - DNA, 25 bp, Homo sapien
tgtgctgtagttaaatcaacagtct

SEQ ID NO: 488867 - DNA, 25 bp, Homo sapien
tgctgtgtgctgtagttaaatcaac

SEQ ID NO: 488868 - DNA, 25 bp, Homo sapien
ctggtacagcaggcaacttcctctt

SEQ ID NO: 488869 - DNA, 25 bp, Homo sapien
gcaacttcctcttcttttcaacacc

SEQ ID NO: 488870 - DNA, 25 bp, Homo sapien
aggcaacttcctcttcttttcaaca

SEQ ID NO: 488871 - DNA, 25 bp, Homo sapien
tcctcttcttttcaacaccctccac

SEQ ID NO: 488872 - DNA, 25 bp, Homo sapien
tttctcaggcacttatcttcagctc

SEQ ID NO: 488873 - DNA, 25 bp, Homo sapien
acttctttctcaggcacttatcttc

SEQ ID NO: 488874 - DNA, 25 bp, Homo sapien
ctgcaaaattcctttactttctcta

SEQ ID NO: 488875 - DNA, 25 bp, Homo sapien
tctgcaaaattcctttactttctct

SEQ ID NO: 488876 - DNA, 25 bp, Homo sapien
ggatgtacgaagaagttgccagctt

SEQ ID NO: 488877 - DNA, 25 bp, Homo sapien
tggatgtacgaagaagttgccagct

SEQ ID NO: 488878 - DNA, 25 bp, Homo sapien
tttggatgtacgaagaagttgccag

SEQ ID NO: 488879 - DNA, 25 bp, Homo sapien
ggttttggatgtacgaagaagttgc

SEQ ID NO: 488880 - DNA, 25 bp, Homo sapien
ccactgatagcactgatcctgatga

SEQ ID NO: 488881 - DNA, 25 bp, Homo sapien
acaccactgatagcactgatcctga

SEQ ID NO: 488882 - DNA, 25 bp, Homo sapien
ggctcacaccactgatagcactgat

SEQ ID NO: 488883 - DNA, 25 bp, Homo sapien
ctcacaccactgatagcactgatcc

SEQ ID NO: 488884 - DNA, 25 bp, Homo sapien
aaagaagctgcaacacctttcagac

SEQ ID NO: 488885 - DNA, 25 bp, Homo sapien
ctgacaaaggcaaagaagctgcaac

SEQ ID NO: 488886 - DNA, 25 bp, Homo sapien
gcaaagaagctgcaacacctttcag

SEQ ID NO: 488887 - DNA, 25 bp, Homo sapien
aggcaaagaagctgcaacacctttc

SEQ ID NO: 488888 - DNA, 25 bp, Homo sapien
tacgtttctacaattctcagtatgt

SEQ ID NO: 488889 - DNA, 25 bp, Homo sapien
gtttctacaattctcagtatgttca

SEQ ID NO: 488890 - DNA, 25 bp, Homo sapien
ctacaattctcagtatgttcattaa

SEQ ID NO: 488891 - DNA, 25 bp, Homo sapien
tctacaattctcagtatgttcatta

SEQ ID NO: 488892 - DNA, 25 bp, Homo sapien
tcagtgcaattcgcttctcattgat

SEQ ID NO: 488893 - DNA, 25 bp, Homo sapien
gtcagtgcaattcgcttctcattga

SEQ ID NO: 488894 - DNA, 25 bp, Homo sapien
tgtcagtgcaattcgcttctcattg

SEQ ID NO: 488895 - DNA, 25 bp, Homo sapien
tctgtcagtgcaattcgcttctcat

SEQ ID NO: 488896 - DNA, 25 bp, Homo sapien
cctaagaagcctgttgatctgctcc

SEQ ID NO: 488897 - DNA, 25 bp, Homo sapien
gttgccagcagttccaccttctatg

SEQ ID NO: 488898 - DNA, 25 bp, Homo sapien
ttaattcagtctcctaagaagcctg

SEQ ID NO: 488899 - DNA, 25 bp, Homo sapien
tctatgaaatgggtgatctttttct

SEQ ID NO: 488900 - DNA, 25 bp, Homo sapien
gccatagccattgtggtccaatgca

SEQ ID NO: 488901 - DNA, 25 bp, Homo sapien
ctacgtggctgatagaagggacatg

SEQ ID NO: 488902 - DNA, 25 bp, Homo sapien
tagaagggacatgttggcatcgcca

SEQ ID NO: 488903 - DNA, 25 bp, Homo sapien
ggtccaatgcatcagcaaacttctg

SEQ ID NO: 488904 - DNA, 25 bp, Homo sapien
ccctctttcaagtcccattcttcta

SEQ ID NO: 488905 - DNA, 25 bp, Homo sapien
cctctttcaagtcccattcttctag

SEQ ID NO: 488906 - DNA, 25 bp, Homo sapien
tttcaagtcccattcttctagcagg

SEQ ID NO: 488907 - DNA, 25 bp, Homo sapien
tctttcaagtcccattcttctagca

SEQ ID NO: 488908 - DNA, 25 bp, Homo sapien
gggtgaagggaagcagccgagatgc

SEQ ID NO: 488909 - DNA, 25 bp, Homo sapien
tgcagtcagagacatttcgaagcta

SEQ ID NO: 488910 - DNA, 25 bp, Homo sapien
gtcagagacatttcgaagctacgag

SEQ ID NO: 488911 - DNA, 25 bp, Homo sapien
ggaagcagccgagatgcagtcagag

SEQ ID NO: 488912 - DNA, 25 bp, Homo sapien
tgtgaaatgcattttaacatcgccg

SEQ ID NO: 488913 - DNA, 25 bp, Homo sapien
taacatcgccggctttttccctgaa

SEQ ID NO: 488914 - DNA, 25 bp, Homo sapien
gaaaatggcccatgtttataactct

SEQ ID NO: 488915 - DNA, 25 bp, Homo sapien
ccaggaataagtccatcgttgaatg

SEQ ID NO: 488916 - DNA, 25 bp, Homo sapien
ggttgctattagttcatcctgggct

SEQ ID NO: 488917 - DNA, 25 bp, Homo sapien
tgaaggcctgtgttccacctaattc

SEQ ID NO: 488918 - DNA, 25 bp, Homo sapien
gctctgtgtgtctagatgttcttct

SEQ ID NO: 488919 - DNA, 25 bp, Homo sapien
aattccagcagggtgtttgtgctgg

SEQ ID NO: 488920 - DNA, 25 bp, Homo sapien
gctggtgaagttctgcatgaatatt

SEQ ID NO: 488921 - DNA, 25 bp, Homo sapien
tagggttggctgatatttaatcacg

SEQ ID NO: 488922 - DNA, 25 bp, Homo sapien
tcacgtggtcacacttagcccggaa

SEQ ID NO: 488923 - DNA, 25 bp, Homo sapien
tagcccggaaagatagtggtgaatg

SEQ ID NO: 488924 - DNA, 25 bp, Homo sapien
gctgatatttaatcacgtggtcaca

SEQ ID NO: 488925 - DNA, 25 bp, Homo sapien
atttcaatatgatgtagcctcatat

SEQ ID NO: 488926 - DNA, 25 bp, Homo sapien
tgatgtgacttgatagtcttagtca

SEQ ID NO: 488927 - DNA, 25 bp, Homo sapien
tctgctgatttgctctgatgtgact

SEQ ID NO: 488928 - DNA, 25 bp, Homo sapien
cagagcctctgcgttctgctgattt

SEQ ID NO: 488929 - DNA, 25 bp, Homo sapien
gtgtccatgaactggacgaactgca

SEQ ID NO: 488930 - DNA, 25 bp, Homo sapien
atgaagtcaggcacgggaccatgga

SEQ ID NO: 488931 - DNA, 25 bp, Homo sapien
cagcattgaaccatccatgaagtca

SEQ ID NO: 488932 - DNA, 25 bp, Homo sapien
gaactgcagcattgaaccatccatg

SEQ ID NO: 488933 - DNA, 25 bp, Homo sapien
aatgacagcgtgaatataatagttc

SEQ ID NO: 488934 - DNA, 25 bp, Homo sapien
cttgactgcctgagcaactcatttt

SEQ ID NO: 488935 - DNA, 25 bp, Homo sapien
gactgcctgagcaactcattttgct

SEQ ID NO: 488936 - DNA, 25 bp, Homo sapien
gcttataaatgacagcgtgaatata

SEQ ID NO: 488937 - DNA, 25 bp, Homo sapien
gtgtatgtagggatgaattcatcat

SEQ ID NO: 488938 - DNA, 25 bp, Homo sapien
gagaccttagccatcctgaagtccc

SEQ ID NO: 488939 - DNA, 25 bp, Homo sapien
catctgctctcctaacacgaaagga

SEQ ID NO: 488940 - DNA, 25 bp, Homo sapien
ctcctaacacgaaaggaaactgtgg

SEQ ID NO: 488941 - DNA, 25 bp, Homo sapien
gaggacagggagaccttagccatcc

SEQ ID NO: 488942 - DNA, 25 bp, Homo sapien
ccatggactccaaaacagtgtcttt

SEQ ID NO: 488943 - DNA, 25 bp, Homo sapien
tgagctgcttggctacgtctgccca

SEQ ID NO: 488944 - DNA, 25 bp, Homo sapien
ttccatattgccagaatggaagggc

SEQ ID NO: 488945 - DNA, 25 bp, Homo sapien
gaccttctctatatttggtattcca

SEQ ID NO: 488946 - DNA, 25 bp, Homo sapien
gcttttcccactccctcattataga

SEQ ID NO: 488947 - DNA, 25 bp, Homo sapien
tttcccactccctcattatagagtc

SEQ ID NO: 488948 - DNA, 25 bp, Homo sapien
tttgcttttcccactccctcattat

SEQ ID NO: 488949 - DNA, 25 bp, Homo sapien
cctttgcttttcccactccctcatt

SEQ ID NO: 488950 - DNA, 25 bp, Homo sapien
gaggacagaacaagcgcatatacaa

SEQ ID NO: 488951 - DNA, 25 bp, Homo sapien
aggacagaacaagcgcatatacaaa

SEQ ID NO: 488952 - DNA, 25 bp, Homo sapien
cttgtagcctgagaggacagaacaa

SEQ ID NO: 488953 - DNA, 25 bp, Homo sapien
tgcattgctggtaactgcatcccag

SEQ ID NO: 488954 - DNA, 25 bp, Homo sapien
tgtgcctggccgatatgaatgtaaa

SEQ ID NO: 488955 - DNA, 25 bp, Homo sapien
aacacccagtacacctatctgcatt

SEQ ID NO: 488956 - DNA, 25 bp, Homo sapien
gccgatatgaatgtaaacacccagt

SEQ ID NO: 488957 - DNA, 25 bp, Homo sapien
gtgggatgttaacggccgtatgttc

SEQ ID NO: 488958 - DNA, 25 bp, Homo sapien
aacggccgtatgttccgtggctctc

SEQ ID NO: 488959 - DNA, 25 bp, Homo sapien
atgttaacggccgtatgttccgtgg

SEQ ID NO: 488960 - DNA, 25 bp, Homo sapien
taggtgggatgttaacggccgtatg

SEQ ID NO: 488961 - DNA, 25 bp, Homo sapien
tgaaatacttccagatttgtggaat

SEQ ID NO: 488962 - DNA, 25 bp, Homo sapien
aaatacttccagatttgtggaatga

SEQ ID NO: 488963 - DNA, 25 bp, Homo sapien
gaaatacttccagatttgtggaatg

SEQ ID NO: 488964 - DNA, 25 bp, Homo sapien
cgttcagttgagtaagcagttctaa

SEQ ID NO: 488965 - DNA, 25 bp, Homo sapien
cacattgtcgttcagttgagtaagc

SEQ ID NO: 488966 - DNA, 25 bp, Homo sapien
gacatgcacattgtcgttcagttga

SEQ ID NO: 488967 - DNA, 25 bp, Homo sapien
taaatcggggttagaacaccagcca

SEQ ID NO: 488968 - DNA, 25 bp, Homo sapien
tgtgcggagcaatccatgagctaac

SEQ ID NO: 488969 - DNA, 25 bp, Homo sapien
ctgcaaggtggaaacatgcaggcag

SEQ ID NO: 488970 - DNA, 25 bp, Homo sapien
ttttatataagtcactgtgcggagc

SEQ ID NO: 488971 - DNA, 25 bp, Homo sapien
aatattaatacgttgccactgtgca

SEQ ID NO: 488972 - DNA, 25 bp, Homo sapien
tctatacgggtccataatgtatatt

SEQ ID NO: 488973 - DNA, 25 bp, Homo sapien
gccatatactctatacgggtccata

SEQ ID NO: 488974 - DNA, 25 bp, Homo sapien
cagggccatatactctatacgggtc

SEQ ID NO: 488975 - DNA, 25 bp, Homo sapien
gttgtccagggccatatactctata

SEQ ID NO: 488976 - DNA, 25 bp, Homo sapien
gagtgtccttcctacctgctgttcc

SEQ ID NO: 488977 - DNA, 25 bp, Homo sapien
attctcattctcacccgcagcgcca

SEQ ID NO: 488978 - DNA, 25 bp, Homo sapien
acagcagcttgctcacggctccttg

SEQ ID NO: 488979 - DNA, 25 bp, Homo sapien
ttccaaccgcctgcacaggagtgtc

SEQ ID NO: 488980 - DNA, 25 bp, Homo sapien
ttattcgtcagccatttccctctgt

SEQ ID NO: 488981 - DNA, 25 bp, Homo sapien
ccatttccctctgtggtcctctcac

SEQ ID NO: 488982 - DNA, 25 bp, Homo sapien
gccatttccctctgtggtcctctca

SEQ ID NO: 488983 - DNA, 25 bp, Homo sapien
tcagccatttccctctgtggtcctc

SEQ ID NO: 488984 - DNA, 25 bp, Homo sapien
cccactgcgagtgggtgctaaccag

SEQ ID NO: 488985 - DNA, 25 bp, Homo sapien
gcttcctgcacgtgtcgtgtgtgtg

SEQ ID NO: 488986 - DNA, 25 bp, Homo sapien
tgcgagtgggtgctaaccagaacca

SEQ ID NO: 488987 - DNA, 25 bp, Homo sapien
tatccccactgcgagtgggtgctaa

SEQ ID NO: 488988 - DNA, 25 bp, Homo sapien
aaaaggctgcatccctgtgtaggag

SEQ ID NO: 488989 - DNA, 25 bp, Homo sapien
taaaaggctgcatccctgtgtagga

SEQ ID NO: 488990 - DNA, 25 bp, Homo sapien
ctaaaaggctgcatccctgtgtagg

SEQ ID NO: 488991 - DNA, 25 bp, Homo sapien
gctgtggtcagaagtgctccaattg

SEQ ID NO: 488992 - DNA, 25 bp, Homo sapien
cagctgtggtcagaagtgctccaat

SEQ ID NO: 488993 - DNA, 25 bp, Homo sapien
gtggtcagaagtgctccaattgctt

SEQ ID NO: 488994 - DNA, 25 bp, Homo sapien
acagctgtggtcagaagtgctccaa

SEQ ID NO: 488995 - DNA, 25 bp, Homo sapien
gccagccagagccttaggtctggtt

SEQ ID NO: 488996 - DNA, 25 bp, Homo sapien
gtctggttttcagccagtcgctgca

SEQ ID NO: 488997 - DNA, 25 bp, Homo sapien
cgctgcatgaatgagtgtatgtatt

SEQ ID NO: 488998 - DNA, 25 bp, Homo sapien
ttggcattgcccctcactgatcaca

SEQ ID NO: 488999 - DNA, 25 bp, Homo sapien
gattcatggtcgcttcaatattccc

SEQ ID NO: 489000 - DNA, 25 bp, Homo sapien
ctggattcatggtcgcttcaatatt

SEQ ID NO: 489001 - DNA, 25 bp, Homo sapien
gtcgcttcaatattcccatggctca

SEQ ID NO: 489002 - DNA, 25 bp, Homo sapien
catggtcgcttcaatattcccatgg

SEQ ID NO: 489003 - DNA, 25 bp, Homo sapien
ctgtgtacccgatgactatggccac

SEQ ID NO: 489004 - DNA, 25 bp, Homo sapien
cccgatgactatggccacctctgag

SEQ ID NO: 489005 - DNA, 25 bp, Homo sapien
tgtgtacccgatgactatggccacc

SEQ ID NO: 489006 - DNA, 25 bp, Homo sapien
gtacccgatgactatggccacctct

SEQ ID NO: 489007 - DNA, 25 bp, Homo sapien
caaatgcttgacctgcctttcctgg

SEQ ID NO: 489008 - DNA, 25 bp, Homo sapien
ctctggaacacctttacatggtcgt

SEQ ID NO: 489009 - DNA, 25 bp, Homo sapien
cctggtctggaatgactgaagcttc

SEQ ID NO: 489010 - DNA, 25 bp, Homo sapien
gaagcttctcttatatgctccttgg

SEQ ID NO: 489011 - DNA, 25 bp, Homo sapien
tggaggacgatgtgcattgccacag

SEQ ID NO: 489012 - DNA, 25 bp, Homo sapien
gacgatgtgcattgccacagagcag

SEQ ID NO: 489013 - DNA, 25 bp, Homo sapien
gaggacgatgtgcattgccacagag

SEQ ID NO: 489014 - DNA, 25 bp, Homo sapien
ggacgatgtgcattgccacagagca

SEQ ID NO: 489015 - DNA, 25 bp, Homo sapien
tataatgcaatttttcgaccatatt

SEQ ID NO: 489016 - DNA, 25 bp, Homo sapien
atttttcgaccatattttgttagtg

SEQ ID NO: 489017 - DNA, 25 bp, Homo sapien
tgcaatttttcgaccatattttgtt

SEQ ID NO: 489018 - DNA, 25 bp, Homo sapien
gctgtagccattcacattcaaacag

SEQ ID NO: 489019 - DNA, 25 bp, Homo sapien
ttgtccctccgataatagaataacc

SEQ ID NO: 489020 - DNA, 25 bp, Homo sapien
gtgctcttgtccctccgataataga

SEQ ID NO: 489021 - DNA, 25 bp, Homo sapien
tagctcctaatggtgctcttgtccc

SEQ ID NO: 489022 - DNA, 25 bp, Homo sapien
cttagctcctaatggtgctcttgtc

SEQ ID NO: 489023 - DNA, 25 bp, Homo sapien
tcttcttgcttcaggatcacaggac

SEQ ID NO: 489024 - DNA, 25 bp, Homo sapien
tcattccttccatgattggctttca

SEQ ID NO: 489025 - DNA, 25 bp, Homo sapien
tctgctaagattgccgttctctcat

SEQ ID NO: 489026 - DNA, 25 bp, Homo sapien
tcaatgttgagtaacctgtggatac

SEQ ID NO: 489027 - DNA, 25 bp, Homo sapien
tgcagcgtgtcccaaaaaatgaaag

SEQ ID NO: 489028 - DNA, 25 bp, Homo sapien
caggcctcttataaatgtaattatc

SEQ ID NO: 489029 - DNA, 25 bp, Homo sapien
tgtaattatcaatgcagcgtgtccc

SEQ ID NO: 489030 - DNA, 25 bp, Homo sapien
tctcttcaggcctcttataaatgta

SEQ ID NO: 489031 - DNA, 25 bp, Homo sapien
ggcccactgaagatggtctctttct

SEQ ID NO: 489032 - DNA, 25 bp, Homo sapien
ataaagctgcagaatgatctcccgc

SEQ ID NO: 489033 - DNA, 25 bp, Homo sapien
tctcccgccttggcccactgaagat

SEQ ID NO: 489034 - DNA, 25 bp, Homo sapien
agctgcagaatgatctcccgccttg

SEQ ID NO: 489035 - DNA, 25 bp, Homo sapien
ccagtcattatccagaatagcattc

SEQ ID NO: 489036 - DNA, 25 bp, Homo sapien
aatgttccagtcattatccagaata

SEQ ID NO: 489037 - DNA, 25 bp, Homo sapien
tcatttggacctactgtgtttgaaa

SEQ ID NO: 489038 - DNA, 25 bp, Homo sapien
tctcttacttccacggcatcttcat

SEQ ID NO: 489039 - DNA, 25 bp, Homo sapien
cgaaggtgcttacgagcctttgtct

SEQ ID NO: 489040 - DNA, 25 bp, Homo sapien
cctgaagcttaaatatcctgacatt

SEQ ID NO: 489041 - DNA, 25 bp, Homo sapien
tgtgctgccagctcctgaagcttaa

SEQ ID NO: 489042 - DNA, 25 bp, Homo sapien
tttctgtatatgtgagattctcccc

SEQ ID NO: 489043 - DNA, 25 bp, Homo sapien
acattgatctcaagctttctgttta

SEQ ID NO: 489044 - DNA, 25 bp, Homo sapien
catgagggcacagtaagtgaggaat

SEQ ID NO: 489045 - DNA, 25 bp, Homo sapien
tcttgttttatgagacgagcatgag

SEQ ID NO: 489046 - DNA, 25 bp, Homo sapien
taaatacattgatctcaagctttct

SEQ ID NO: 489047 - DNA, 25 bp, Homo sapien
aaccatgagtatggcctttgggaga

SEQ ID NO: 489048 - DNA, 25 bp, Homo sapien
catgagtatggcctttgggagagaa

SEQ ID NO: 489049 - DNA, 25 bp, Homo sapien
gaggaaccatgagtatggcctttgg

SEQ ID NO: 489050 - DNA, 25 bp, Homo sapien
ctagaggaaccatgagtatggcctt

SEQ ID NO: 489051 - DNA, 25 bp, Homo sapien
tccatacaagtttgcatgcatgaac

SEQ ID NO: 489052 - DNA, 25 bp, Homo sapien
gccaggtcaatagcatccatacaag

SEQ ID NO: 489053 - DNA, 25 bp, Homo sapien
ttccagcaagctgcatctggcacag

SEQ ID NO: 489054 - DNA, 25 bp, Homo sapien
cacagaagcatatgggcagttgcag

SEQ ID NO: 489055 - DNA, 25 bp, Homo sapien
gatgactcagtttaaggcccctgcc

SEQ ID NO: 489056 - DNA, 25 bp, Homo sapien
atgactcagtttaaggcccctgcca

SEQ ID NO: 489057 - DNA, 25 bp, Homo sapien
tgactcagtttaaggcccctgccac

SEQ ID NO: 489058 - DNA, 25 bp, Homo sapien
tctcttcttctcctattatcttatc

SEQ ID NO: 489059 - DNA, 25 bp, Homo sapien
tcttcttctcctattatcttatctc

SEQ ID NO: 489060 - DNA, 25 bp, Homo sapien
acaaagaagtctatgtgatgattta

SEQ ID NO: 489061 - DNA, 25 bp, Homo sapien
aagtctatgtgatgatttatctttc

SEQ ID NO: 489062 - DNA, 25 bp, Homo sapien
tgatctcactgtagagggggccctg

SEQ ID NO: 489063 - DNA, 25 bp, Homo sapien
tgatggtggtgggtcagtcatgtgc

SEQ ID NO: 489064 - DNA, 25 bp, Homo sapien
catgacacttataagtgcccctgtg

SEQ ID NO: 489065 - DNA, 25 bp, Homo sapien
gaaagctgacgctgatgatggtggt

SEQ ID NO: 489066 - DNA, 25 bp, Homo sapien
tgagccacattgtactttcagttca

SEQ ID NO: 489067 - DNA, 25 bp, Homo sapien
gagccacattgtactttcagttcat

SEQ ID NO: 489068 - DNA, 25 bp, Homo sapien
ttgagccacattgtactttcagttc

SEQ ID NO: 489069 - DNA, 25 bp, Homo sapien
gccacattgtactttcagttcatcc

SEQ ID NO: 489070 - DNA, 25 bp, Homo sapien
ctgaagcttcatcattttgaatttc

SEQ ID NO: 489071 - DNA, 25 bp, Homo sapien
tttcccattgaccatatagcacatt

SEQ ID NO: 489072 - DNA, 25 bp, Homo sapien
ttcttttcccattgaccatatagca

SEQ ID NO: 489073 - DNA, 25 bp, Homo sapien
cccattgaccatatagcacattttg

SEQ ID NO: 489074 - DNA, 25 bp, Homo sapien
tgtcaaaatcagcaggacgtttatg

SEQ ID NO: 489075 - DNA, 25 bp, Homo sapien
cagcaggacgtttatgttagatttc

SEQ ID NO: 489076 - DNA, 25 bp, Homo sapien
gggtgtttttgctgtatgactgtca

SEQ ID NO: 489077 - DNA, 25 bp, Homo sapien
tttcctgagtgggtcaagattgaat

SEQ ID NO: 489078 - DNA, 25 bp, Homo sapien
tatagtcacttggatatgataccct

SEQ ID NO: 489079 - DNA, 25 bp, Homo sapien
gataccctcttagggtctgaggagg

SEQ ID NO: 489080 - DNA, 25 bp, Homo sapien
tgcctgtaggtaacggatacttttg

SEQ ID NO: 489081 - DNA, 25 bp, Homo sapien
taaggctatgtagctattcaccagg

SEQ ID NO: 489082 - DNA, 25 bp, Homo sapien
gagccttcagagcaagaacaccaaa

SEQ ID NO: 489083 - DNA, 25 bp, Homo sapien
ggctacagtgtattgcctgggccac

SEQ ID NO: 489084 - DNA, 25 bp, Homo sapien
agtgtattgcctgggccacccatgc

SEQ ID NO: 489085 - DNA, 25 bp, Homo sapien
tgcgtgctgcgtgctgctggctaca

SEQ ID NO: 489086 - DNA, 25 bp, Homo sapien
ttctgagtctcacggaaaattgcca

SEQ ID NO: 489087 - DNA, 25 bp, Homo sapien
catgagctgcatcaatgttcagaag

SEQ ID NO: 489088 - DNA, 25 bp, Homo sapien
tgcacgcttaccctagcaaacattg

SEQ ID NO: 489089 - DNA, 25 bp, Homo sapien
tacagaagtatgaagagctgctcct

SEQ ID NO: 489090 - DNA, 25 bp, Homo sapien
ccagaatcaaggttgatctcagagg

SEQ ID NO: 489091 - DNA, 25 bp, Homo sapien
tacaattgccaatgcccagtctgat

SEQ ID NO: 489092 - DNA, 25 bp, Homo sapien
tgatgccagctaagagttgttctga

SEQ ID NO: 489093 - DNA, 25 bp, Homo sapien
agaggtacaattgccaatgcccagt

SEQ ID NO: 489094 - DNA, 25 bp, Homo sapien
agttgctgatgccagctaagagttg

SEQ ID NO: 489095 - DNA, 25 bp, Homo sapien
gaatggtccacaaagaaatcctaac

SEQ ID NO: 489096 - DNA, 25 bp, Homo sapien
tattctaaagacctcatggatatga

SEQ ID NO: 489097 - DNA, 25 bp, Homo sapien
tcctaacaacgaggttccatggaga

SEQ ID NO: 489098 - DNA, 25 bp, Homo sapien
tgaactatatgaaaaccaaggagca

SEQ ID NO: 489099 - DNA, 25 bp, Homo sapien
catctctttcttgtgggggaggtcc

SEQ ID NO: 489100 - DNA, 25 bp, Homo sapien
ctggtagcatctctttcttgtgggg

SEQ ID NO: 489101 - DNA, 25 bp, Homo sapien
tggtagcatctctttcttgtggggg

SEQ ID NO: 489102 - DNA, 25 bp, Homo sapien
tagcatctctttcttgtgggggagg

SEQ ID NO: 489103 - DNA, 25 bp, Homo sapien
aacgtgttattaggaagtatagcca

SEQ ID NO: 489104 - DNA, 25 bp, Homo sapien
tctcatacacttctaaaggatgtct

SEQ ID NO: 489105 - DNA, 25 bp, Homo sapien
cacttctaaaggatgtctggaagca

SEQ ID NO: 489106 - DNA, 25 bp, Homo sapien
taatgcacagaaccaagtgtcaggg

SEQ ID NO: 489107 - DNA, 25 bp, Homo sapien
tgaatcccaggtaagtccactttga

SEQ ID NO: 489108 - DNA, 25 bp, Homo sapien
caaaccatgaaccagattcaggaca

SEQ ID NO: 489109 - DNA, 25 bp, Homo sapien
aacgtcgttgtcctctgaatcccag

SEQ ID NO: 489110 - DNA, 25 bp, Homo sapien
aatatccacgggcaaaccatgaacc

SEQ ID NO: 489111 - DNA, 25 bp, Homo sapien
tctcaattagaagcgaagagctacc

SEQ ID NO: 489112 - DNA, 25 bp, Homo sapien
caattagaagcgaagagctaccaaa

SEQ ID NO: 489113 - DNA, 25 bp, Homo sapien
gtcagtcattctctcaattagaagc

SEQ ID NO: 489114 - DNA, 25 bp, Homo sapien
cattctctcaattagaagcgaagag

SEQ ID NO: 489115 - DNA, 25 bp, Homo sapien
tcttctcaaaccaggaaggtgttca

SEQ ID NO: 489116 - DNA, 25 bp, Homo sapien
cagaacccctatggctgaagactgg

SEQ ID NO: 489117 - DNA, 25 bp, Homo sapien
atagaagccgagaagcagaacccct

SEQ ID NO: 489118 - DNA, 25 bp, Homo sapien
tgaagactggtcctgatagagattc

SEQ ID NO: 489119 - DNA, 25 bp, Homo sapien
tatttatgggcttaatcaagagaga

SEQ ID NO: 489120 - DNA, 25 bp, Homo sapien
ttaatcaagagagacatgacacctg

SEQ ID NO: 489121 - DNA, 25 bp, Homo sapien
cagcatcagttattccaataactgc

SEQ ID NO: 489122 - DNA, 25 bp, Homo sapien
tcagttattccaataactgcataat

SEQ ID NO: 489123 - DNA, 25 bp, Homo sapien
tggttgtcatcatacggttgtacca

SEQ ID NO: 489124 - DNA, 25 bp, Homo sapien
ggttgtcatcatacggttgtaccat

SEQ ID NO: 489125 - DNA, 25 bp, Homo sapien
ttggttgtcatcatacggttgtacc

SEQ ID NO: 489126 - DNA, 25 bp, Homo sapien
tattgttgtagttaatctctttgta

SEQ ID NO: 489127 - DNA, 25 bp, Homo sapien
ttacttgcttcactctactttctgg

SEQ ID NO: 489128 - DNA, 25 bp, Homo sapien
caagatcaatattgttgtagttaat

SEQ ID NO: 489129 - DNA, 25 bp, Homo sapien
tacttgcttcactctactttctggc

SEQ ID NO: 489130 - DNA, 25 bp, Homo sapien
catgcaggagctgataaacttgctc

SEQ ID NO: 489131 - DNA, 25 bp, Homo sapien
taagccactaatttggggtgtagct

SEQ ID NO: 489132 - DNA, 25 bp, Homo sapien
gaatcatcatatacactagtaagct

SEQ ID NO: 489133 - DNA, 25 bp, Homo sapien
tgctcactgttatgtatgtatccaa

SEQ ID NO: 489134 - DNA, 25 bp, Homo sapien
cagctaaatcatcggcattgtgaag

SEQ ID NO: 489135 - DNA, 25 bp, Homo sapien
aatcatcggcattgtgaagcagaga

SEQ ID NO: 489136 - DNA, 25 bp, Homo sapien
gtcctcccagctaaatcatcggcat

SEQ ID NO: 489137 - DNA, 25 bp, Homo sapien
tcccagctaaatcatcggcattgtg

SEQ ID NO: 489138 - DNA, 25 bp, Homo sapien
agagaatcagcacccatcagctttt

SEQ ID NO: 489139 - DNA, 25 bp, Homo sapien
gagaatcagcacccatcagcttttc

SEQ ID NO: 489140 - DNA, 25 bp, Homo sapien
gagagaatcagcacccatcagcttt

SEQ ID NO: 489141 - DNA, 25 bp, Homo sapien
agaaaatatcagtcgtgttcagatt

SEQ ID NO: 489142 - DNA, 25 bp, Homo sapien
gaaaatatcagtcgtgttcagattc

SEQ ID NO: 489143 - DNA, 25 bp, Homo sapien
aagaaaatatcagtcgtgttcagat

SEQ ID NO: 489144 - DNA, 25 bp, Homo sapien
gattttacccaatgtatatctggat

SEQ ID NO: 489145 - DNA, 25 bp, Homo sapien
ttttcagatttgctcagaagaatgc

SEQ ID NO: 489146 - DNA, 25 bp, Homo sapien
tgaagtagattttacccaatgtata

SEQ ID NO: 489147 - DNA, 25 bp, Homo sapien
cagatttgctcagaagaatgctcct

SEQ ID NO: 489148 - DNA, 25 bp, Homo sapien
taatgggctgggtgttgtggctgac

SEQ ID NO: 489149 - DNA, 25 bp, Homo sapien
acctgtaatcctagcacttggggag

SEQ ID NO: 489150 - DNA, 25 bp, Homo sapien
gggaggccgaggcgctgctgcactc

SEQ ID NO: 489151 - DNA, 25 bp, Homo sapien
ccagcctgggcaacatagtgagacc

SEQ ID NO: 489152 - DNA, 25 bp, Homo sapien
cttgttaccgtctctcttccttctt

SEQ ID NO: 489153 - DNA, 25 bp, Homo sapien
ttccaaatagccgtcctcatgcctt

SEQ ID NO: 489154 - DNA, 25 bp, Homo sapien
tctttccttgttaccgtctctcttc

SEQ ID NO: 489155 - DNA, 25 bp, Homo sapien
cttctttccttgttaccgtctctct

SEQ ID NO: 489156 - DNA, 25 bp, Homo sapien
aaggtaagagacccaaggacataat

SEQ ID NO: 489157 - DNA, 25 bp, Homo sapien
gacataatgatctctgtaaatgcct

SEQ ID NO: 489158 - DNA, 25 bp, Homo sapien
gaaggtaagagacccaaggacataa

SEQ ID NO: 489159 - DNA, 25 bp, Homo sapien
aaggacataatgatctctgtaaatg

SEQ ID NO: 489160 - DNA, 25 bp, Homo sapien
tgacagtgcaaattgccatttagaa

SEQ ID NO: 489161 - DNA, 25 bp, Homo sapien
agtgcaaattgccatttagaatcac

SEQ ID NO: 489162 - DNA, 25 bp, Homo sapien
aaattgccatttagaatcaccttgg

SEQ ID NO: 489163 - DNA, 25 bp, Homo sapien
gcaaattgccatttagaatcacctt

SEQ ID NO: 489164 - DNA, 25 bp, Homo sapien
tttcaagatgaaagataatgtgtaa

SEQ ID NO: 489165 - DNA, 25 bp, Homo sapien
gtatctgggaacaataacacttcct

SEQ ID NO: 489166 - DNA, 25 bp, Homo sapien
aaatccacttgagctatcttttggg

SEQ ID NO: 489167 - DNA, 25 bp, Homo sapien
tttaataaagctttgtgagatttca

SEQ ID NO: 489168 - DNA, 25 bp, Homo sapien
cttctgacataaaggcctgctttat

SEQ ID NO: 489169 - DNA, 25 bp, Homo sapien
tgacataaaggcctgctttatacaa

SEQ ID NO: 489170 - DNA, 25 bp, Homo sapien
ttctgacataaaggcctgctttata

SEQ ID NO: 489171 - DNA, 25 bp, Homo sapien
cataaaggcctgctttatacaaaat

SEQ ID NO: 489172 - DNA, 25 bp, Homo sapien
cagatccaaggtctggtagcaggat

SEQ ID NO: 489173 - DNA, 25 bp, Homo sapien
tccagatccaaggtctggtagcagg

SEQ ID NO: 489174 - DNA, 25 bp, Homo sapien
cttccagatccaaggtctggtagca

SEQ ID NO: 489175 - DNA, 25 bp, Homo sapien
agatccaaggtctggtagcaggatg

SEQ ID NO: 489176 - DNA, 25 bp, Homo sapien
tctgctggctttcacgggttctctg

SEQ ID NO: 489177 - DNA, 25 bp, Homo sapien
attgcatatatgtgagactccgggt

SEQ ID NO: 489178 - DNA, 25 bp, Homo sapien
ctccgggtattttcaaaaccagctg

SEQ ID NO: 489179 - DNA, 25 bp, Homo sapien
gggagcagaagccagtccatttgac

SEQ ID NO: 489180 - DNA, 25 bp, Homo sapien
tggccaggtcttgtgaaaggtaacc

SEQ ID NO: 489181 - DNA, 25 bp, Homo sapien
aggtaacctcatcaccggagtcaag

SEQ ID NO: 489182 - DNA, 25 bp, Homo sapien
cccatgttccattggttagaagtcc

SEQ ID NO: 489183 - DNA, 25 bp, Homo sapien
ctgtaaggagatccggtctcagttg

SEQ ID NO: 489184 - DNA, 25 bp, Homo sapien
tgctggttgtagttgcaggtccaca

SEQ ID NO: 489185 - DNA, 25 bp, Homo sapien
caggtccacattcgttctagaggct

SEQ ID NO: 489186 - DNA, 25 bp, Homo sapien
ggcctcataggcaaggaactcatag

SEQ ID NO: 489187 - DNA, 25 bp, Homo sapien
tagaggctgcctgcggtccttagag

SEQ ID NO: 489188 - DNA, 25 bp, Homo sapien
cattgtcatcagaaggattggctgg

SEQ ID NO: 489189 - DNA, 25 bp, Homo sapien
gactacattgtcatcagaaggattg

SEQ ID NO: 489190 - DNA, 25 bp, Homo sapien
cagagtccagtgaagatgttggcca

SEQ ID NO: 489191 - DNA, 25 bp, Homo sapien
cagctgggtcccagacacagagtcc

SEQ ID NO: 489192 - DNA, 25 bp, Homo sapien
agagttgcaaatacaatcccatcac

SEQ ID NO: 489193 - DNA, 25 bp, Homo sapien
agagagttgcaaatacaatcccatc

SEQ ID NO: 489194 - DNA, 25 bp, Homo sapien
caggtgggtgcatagaaatggcatt

SEQ ID NO: 489195 - DNA, 25 bp, Homo sapien
gccaggtgggtgcatagaaatggca

SEQ ID NO: 489196 - DNA, 25 bp, Homo sapien
gcagagccttcaggaatttatgtcg

SEQ ID NO: 489197 - DNA, 25 bp, Homo sapien
gatgactgacacgtctcctctttgt

SEQ ID NO: 489198 - DNA, 25 bp, Homo sapien
tacttcctcctgtaacaggatgact

SEQ ID NO: 489199 - DNA, 25 bp, Homo sapien
tcaggaatttatgtcgactgcacat

SEQ ID NO: 489200 - DNA, 25 bp, Homo sapien
actggagtaactggactgaggatgg

SEQ ID NO: 489201 - DNA, 25 bp, Homo sapien
tgaggatggactcctttcttaagaa

SEQ ID NO: 489202 - DNA, 25 bp, Homo sapien
gcaggtagcctctccactggagtaa

SEQ ID NO: 489203 - DNA, 25 bp, Homo sapien
cacccgtggctccattaaatgtttt

SEQ ID NO: 489204 - DNA, 25 bp, Homo sapien
ctctgtgttttctacccgggctagc

SEQ ID NO: 489205 - DNA, 25 bp, Homo sapien
tgaacatgcagagtccttcagagac

SEQ ID NO: 489206 - DNA, 25 bp, Homo sapien
tacccgggctagcttcctccagagc

SEQ ID NO: 489207 - DNA, 25 bp, Homo sapien
aacatgcagagtccttcagagacca

SEQ ID NO: 489208 - DNA, 25 bp, Homo sapien
tgcctttcagtaaagttggttagca

SEQ ID NO: 489209 - DNA, 25 bp, Homo sapien
aagttggttagcatattaactactg

SEQ ID NO: 489210 - DNA, 25 bp, Homo sapien
taaagtccccagatagatttcttcc

SEQ ID NO: 489211 - DNA, 25 bp, Homo sapien
tgacaaggtgataattaaagtcccc

SEQ ID NO: 489212 - DNA, 25 bp, Homo sapien
tctgaatggtctttgtctgtaaaat

SEQ ID NO: 489213 - DNA, 25 bp, Homo sapien
tttgtctgtaaaatggaagagacat

SEQ ID NO: 489214 - DNA, 25 bp, Homo sapien
gtctttgtctgtaaaatggaagaga

SEQ ID NO: 489215 - DNA, 25 bp, Homo sapien
ctctgaatggtctttgtctgtaaaa

SEQ ID NO: 489216 - DNA, 25 bp, Homo sapien
tcctctgttcggtgaaactatccac

SEQ ID NO: 489217 - DNA, 25 bp, Homo sapien
cagcatcttcatcgttaagaatgca

SEQ ID NO: 489218 - DNA, 25 bp, Homo sapien
catggatactctcctctgttcggtg

SEQ ID NO: 489219 - DNA, 25 bp, Homo sapien
tgaaactatccacccttggttctct

SEQ ID NO: 489220 - DNA, 25 bp, Homo sapien
cctccattcttatcaggtatcactt

SEQ ID NO: 489221 - DNA, 25 bp, Homo sapien
tccagctttgtaactcctccattct

SEQ ID NO: 489222 - DNA, 25 bp, Homo sapien
ttatcaggtatcacttcttcagaca

SEQ ID NO: 489223 - DNA, 25 bp, Homo sapien
cagctttgtaactcctccattctta

SEQ ID NO: 489224 - DNA, 25 bp, Homo sapien
catcagagtaaaatacttcgcaaga

SEQ ID NO: 489225 - DNA, 25 bp, Homo sapien
taaaatacttcgcaagagccagcca

SEQ ID NO: 489226 - DNA, 25 bp, Homo sapien
gagtaaaatacttcgcaagagccag

SEQ ID NO: 489227 - DNA, 25 bp, Homo sapien
aaatacttcgcaagagccagccatg

SEQ ID NO: 489228 - DNA, 25 bp, Homo sapien
accttctgaattcttattgtgcaaa

SEQ ID NO: 489229 - DNA, 25 bp, Homo sapien
ccttctgaattcttattgtgcaaat

SEQ ID NO: 489230 - DNA, 25 bp, Homo sapien
gaattcttattgtgcaaatttcctc

SEQ ID NO: 489231 - DNA, 25 bp, Homo sapien
gttcccggttggctgacatagagcc

SEQ ID NO: 489232 - DNA, 25 bp, Homo sapien
tcccggttggctgacatagagcccc

SEQ ID NO: 489233 - DNA, 25 bp, Homo sapien
ttcccggttggctgacatagagccc

SEQ ID NO: 489234 - DNA, 25 bp, Homo sapien
tagatctttatggatcctgaagcca

SEQ ID NO: 489235 - DNA, 25 bp, Homo sapien
tctgtctctttgtgtggccttatag

SEQ ID NO: 489236 - DNA, 25 bp, Homo sapien
cacgggctgcatagggataactaga

SEQ ID NO: 489237 - DNA, 25 bp, Homo sapien
cactgccctttgtctggatatctgt

SEQ ID NO: 489238 - DNA, 25 bp, Homo sapien
gcttctccttgcacaatgatctcta

SEQ ID NO: 489239 - DNA, 25 bp, Homo sapien
taggcttctccttgcacaatgatct

SEQ ID NO: 489240 - DNA, 25 bp, Homo sapien
tcataggcttctccttgcacaatga

SEQ ID NO: 489241 - DNA, 25 bp, Homo sapien
ccttgcacaatgatctctatttctc

SEQ ID NO: 489242 - DNA, 25 bp, Homo sapien
ggaaaatgagagcactgttcagaag

SEQ ID NO: 489243 - DNA, 25 bp, Homo sapien
tccaggagcctattttccgggagga

SEQ ID NO: 489244 - DNA, 25 bp, Homo sapien
tattttccgggaggaaaatgagagc

SEQ ID NO: 489245 - DNA, 25 bp, Homo sapien
agagcactgttcagaagtactggaa

SEQ ID NO: 489246 - DNA, 25 bp, Homo sapien
tcaggcctgcttgcaaatgagtggc

SEQ ID NO: 489247 - DNA, 25 bp, Homo sapien
tcctctttccgcgtgattggaactc

SEQ ID NO: 489248 - DNA, 25 bp, Homo sapien
cgcgtgattggaactcatcttcctc

SEQ ID NO: 489249 - DNA, 25 bp, Homo sapien
gagcccatggtgtccagaactcagg

SEQ ID NO: 489250 - DNA, 25 bp, Homo sapien
gtctgggatgtgcatctccaggaac

SEQ ID NO: 489251 - DNA, 25 bp, Homo sapien
ttctttttactagcctgctctgcca

SEQ ID NO: 489252 - DNA, 25 bp, Homo sapien
ttatttcctgtagtcaaactggctg

SEQ ID NO: 489253 - DNA, 25 bp, Homo sapien
tctccaggaaccgaagtgctaaacc

SEQ ID NO: 489254 - DNA, 25 bp, Homo sapien
agcaaaccaaactgtccacccatgt

SEQ ID NO: 489255 - DNA, 25 bp, Homo sapien
caaaccaaactgtccacccatgttt

SEQ ID NO: 489256 - DNA, 25 bp, Homo sapien
gagcaaaccaaactgtccacccatg

SEQ ID NO: 489257 - DNA, 25 bp, Homo sapien
ttactgagcaaaccaaactgtccac

SEQ ID NO: 489258 - DNA, 25 bp, Homo sapien
aactgagcttgatagagttctgtgc

SEQ ID NO: 489259 - DNA, 25 bp, Homo sapien
attcttggaggcgagctggctaaag

SEQ ID NO: 489260 - DNA, 25 bp, Homo sapien
gagcttgatagagttctgtgctcat

SEQ ID NO: 489261 - DNA, 25 bp, Homo sapien
cttggaggcgagctggctaaagtaa

SEQ ID NO: 489262 - DNA, 25 bp, Homo sapien
tctgtctcccaggaactcagactca

SEQ ID NO: 489263 - DNA, 25 bp, Homo sapien
tcaaatgctgagatgccatcgaccc

SEQ ID NO: 489264 - DNA, 25 bp, Homo sapien
gagatgccatcgacccctgattctg

SEQ ID NO: 489265 - DNA, 25 bp, Homo sapien
gactcaaaactcttgcaccagaaac

SEQ ID NO: 489266 - DNA, 25 bp, Homo sapien
tcatttatcatggagtgagtcactt

SEQ ID NO: 489267 - DNA, 25 bp, Homo sapien
caggttcatgtttttgggtacattc

SEQ ID NO: 489268 - DNA, 25 bp, Homo sapien
tgtttttcttgacaagcctgagtcc

SEQ ID NO: 489269 - DNA, 25 bp, Homo sapien
gtccgtcattctggctggtattaca

SEQ ID NO: 489270 - DNA, 25 bp, Homo sapien
tgtgaagtcaccaaacacatcgaag

SEQ ID NO: 489271 - DNA, 25 bp, Homo sapien
ttttgggggaatactttgcacagcc

SEQ ID NO: 489272 - DNA, 25 bp, Homo sapien
tttgcacagccctcaaccagttctt

SEQ ID NO: 489273 - DNA, 25 bp, Homo sapien
tgtctttcagtttggttacctcgcc

SEQ ID NO: 489274 - DNA, 25 bp, Homo sapien
cagtctcttggcttgacgtttgaga

SEQ ID NO: 489275 - DNA, 25 bp, Homo sapien
agtgcaaaaagccttctactttcag

SEQ ID NO: 489276 - DNA, 25 bp, Homo sapien
tatatctatgacattctgatacaag

SEQ ID NO: 489277 - DNA, 25 bp, Homo sapien
gcttgacgtttgagaggcagtgcaa

SEQ ID NO: 489278 - DNA, 25 bp, Homo sapien
ctacagaaggagaagaggccattta

SEQ ID NO: 489279 - DNA, 25 bp, Homo sapien
cagaaggagaagaggccatttatca

SEQ ID NO: 489280 - DNA, 25 bp, Homo sapien
agaaggagaagaggccatttatcat

SEQ ID NO: 489281 - DNA, 25 bp, Homo sapien
tacagaaggagaagaggccatttat

SEQ ID NO: 489282 - DNA, 25 bp, Homo sapien
attcttgaggatttcgaaaatcaat

SEQ ID NO: 489283 - DNA, 25 bp, Homo sapien
ttcttgaggatttcgaaaatcaatg

SEQ ID NO: 489284 - DNA, 25 bp, Homo sapien
ctggccttcaaaatagagtaaacta

SEQ ID NO: 489285 - DNA, 25 bp, Homo sapien
tggccttcaaaatagagtaaactaa

SEQ ID NO: 489286 - DNA, 25 bp, Homo sapien
tcaaaatagagtaaactaaaactca

SEQ ID NO: 489287 - DNA, 25 bp, Homo sapien
tatgaataccatttccgatgctttg

SEQ ID NO: 489288 - DNA, 25 bp, Homo sapien
gggaattaccgtatagttacatgga

SEQ ID NO: 489289 - DNA, 25 bp, Homo sapien
actgggctttgattacttcgatttc

SEQ ID NO: 489290 - DNA, 25 bp, Homo sapien
catggaaatattacttccctctgtg

SEQ ID NO: 489291 - DNA, 25 bp, Homo sapien
ccctgtaaccgtgaaggttatcaca

SEQ ID NO: 489292 - DNA, 25 bp, Homo sapien
gaaggttatcacaaggctcagaggg

SEQ ID NO: 489293 - DNA, 25 bp, Homo sapien
cgagaagttccctgtaaccgtgaag

SEQ ID NO: 489294 - DNA, 25 bp, Homo sapien
cttcacgagaagttccctgtaaccg

SEQ ID NO: 489295 - DNA, 25 bp, Homo sapien
gaggggcagaattcttcacgatatg

SEQ ID NO: 489296 - DNA, 25 bp, Homo sapien
ggaagaggggcagaattcttcacga

SEQ ID NO: 489297 - DNA, 25 bp, Homo sapien
ggcagaattcttcacgatatgcctc

SEQ ID NO: 489298 - DNA, 25 bp, Homo sapien
ttcttcacgatatgcctcaaacctg

SEQ ID NO: 489299 - DNA, 25 bp, Homo sapien
gctgttgtctaatgtcccgttttgg

SEQ ID NO: 489300 - DNA, 25 bp, Homo sapien
catagtctatgattggtgcatcttc

SEQ ID NO: 489301 - DNA, 25 bp, Homo sapien
gagtaagagtcctaattaatgccac

SEQ ID NO: 489302 - DNA, 25 bp, Homo sapien
gaagtccgctgtggtcctaaagctg

SEQ ID NO: 489303 - DNA, 25 bp, Homo sapien
cccttttccaaatatcgagcagcca

SEQ ID NO: 489304 - DNA, 25 bp, Homo sapien
tgcccttttccaaatatcgagcagc

SEQ ID NO: 489305 - DNA, 25 bp, Homo sapien
tttccaaatatcgagcagccaccat

SEQ ID NO: 489306 - DNA, 25 bp, Homo sapien
ttgcacctgtgatcctcatcttgcc

SEQ ID NO: 489307 - DNA, 25 bp, Homo sapien
cactgggaccctccaaggtgtggca

SEQ ID NO: 489308 - DNA, 25 bp, Homo sapien
actgggaccctccaaggtgtggcag

SEQ ID NO: 489309 - DNA, 25 bp, Homo sapien
ctgggaccctccaaggtgtggcagg

SEQ ID NO: 489310 - DNA, 25 bp, Homo sapien
tctgcacaatgctttctgtggctct

SEQ ID NO: 489311 - DNA, 25 bp, Homo sapien
gccataagccaagggaacgtacaca

SEQ ID NO: 489312 - DNA, 25 bp, Homo sapien
aagaagtccaagaacgccataagcc

SEQ ID NO: 489313 - DNA, 25 bp, Homo sapien
ttgtggacaatgcacccctcggcat

SEQ ID NO: 489314 - DNA, 25 bp, Homo sapien
tactgtagaggatccccactcctac

SEQ ID NO: 489315 - DNA, 25 bp, Homo sapien
gaccccgtactgtagaggatcccca

SEQ ID NO: 489316 - DNA, 25 bp, Homo sapien
gctggaccccgtactgtagaggatc

SEQ ID NO: 489317 - DNA, 25 bp, Homo sapien
cgtactgtagaggatccccactcct

SEQ ID NO: 489318 - DNA, 25 bp, Homo sapien
gctcccacagcaatcttctcccttc

SEQ ID NO: 489319 - DNA, 25 bp, Homo sapien
caggttctggggactcagcttccat

SEQ ID NO: 489320 - DNA, 25 bp, Homo sapien
tcttcccagccttcccaggttctgg

SEQ ID NO: 489321 - DNA, 25 bp, Homo sapien
atcattcttcccagccttcccaggt

SEQ ID NO: 489322 - DNA, 25 bp, Homo sapien
ctctccatcattcttcccagccttc

SEQ ID NO: 489323 - DNA, 25 bp, Homo sapien
cagagaccatttgccctctaggagc

SEQ ID NO: 489324 - DNA, 25 bp, Homo sapien
ccatggtttggtgctcagagaccat

SEQ ID NO: 489325 - DNA, 25 bp, Homo sapien
ggtttggtgctcagagaccatttgc

SEQ ID NO: 489326 - DNA, 25 bp, Homo sapien
catggtttggtgctcagagaccatt

SEQ ID NO: 489327 - DNA, 25 bp, Homo sapien
caggaactgaaaggacccacgtgga

SEQ ID NO: 489328 - DNA, 25 bp, Homo sapien
ccaattcaccggagaaaacacagcc

SEQ ID NO: 489329 - DNA, 25 bp, Homo sapien
ccagtgtctggaagccttacaggaa

SEQ ID NO: 489330 - DNA, 25 bp, Homo sapien
acacagccagctttgcatacagtgt

SEQ ID NO: 489331 - DNA, 25 bp, Homo sapien
ttacaatgaagggaagaaaggaaga

SEQ ID NO: 489332 - DNA, 25 bp, Homo sapien
tattacaatgaagggaagaaaggaa

SEQ ID NO: 489333 - DNA, 25 bp, Homo sapien
tacaatgaagggaagaaaggaagac

SEQ ID NO: 489334 - DNA, 25 bp, Homo sapien
caatgaagggaagaaaggaagacat

SEQ ID NO: 489335 - DNA, 25 bp, Homo sapien
cggtaattcttcttgtacttacagg

SEQ ID NO: 489336 - DNA, 25 bp, Homo sapien
taattcttcttgtacttacaggtca

SEQ ID NO: 489337 - DNA, 25 bp, Homo sapien
ctgacggtaattcttcttgtactta

SEQ ID NO: 489338 - DNA, 25 bp, Homo sapien
gacggtaattcttcttgtacttaca

SEQ ID NO: 489339 - DNA, 25 bp, Homo sapien
tttcattgcaggatctatgaaaaag

SEQ ID NO: 489340 - DNA, 25 bp, Homo sapien
tgcaggatctatgaaaaaggctttt

SEQ ID NO: 489341 - DNA, 25 bp, Homo sapien
cattgcaggatctatgaaaaaggct

SEQ ID NO: 489342 - DNA, 25 bp, Homo sapien
caggatctatgaaaaaggcttttac

SEQ ID NO: 489343 - DNA, 25 bp, Homo sapien
agcctctttgtagaattcactgcag

SEQ ID NO: 489344 - DNA, 25 bp, Homo sapien
gcctctttgtagaattcactgcagc

SEQ ID NO: 489345 - DNA, 25 bp, Homo sapien
taaaagcacctagtcactctccatg

SEQ ID NO: 489346 - DNA, 25 bp, Homo sapien
ggcatagcttgtccatatccatacc

SEQ ID NO: 489347 - DNA, 25 bp, Homo sapien
tcaggtgactttcctatgtaaaagc

SEQ ID NO: 489348 - DNA, 25 bp, Homo sapien
gtagaacagtgttacacccctttca

SEQ ID NO: 489349 - DNA, 25 bp, Homo sapien
tatctcccttgcgtagttgaatggt

SEQ ID NO: 489350 - DNA, 25 bp, Homo sapien
tctcctggaggtgtttactagcttc

SEQ ID NO: 489351 - DNA, 25 bp, Homo sapien
tatattaccacaccatgaagtagtg

SEQ ID NO: 489352 - DNA, 25 bp, Homo sapien
cctggttgaagagccgtgggaacac

SEQ ID NO: 489353 - DNA, 25 bp, Homo sapien
ggttggatgttttactcgcaaatgt

SEQ ID NO: 489354 - DNA, 25 bp, Homo sapien
gctctaggtactagagaagacatgc

SEQ ID NO: 489355 - DNA, 25 bp, Homo sapien
tgctactgcatgcaacgcactgctc

SEQ ID NO: 489356 - DNA, 25 bp, Homo sapien
gagaagacatgccaaatagtgaaaa

SEQ ID NO: 489357 - DNA, 25 bp, Homo sapien
cattccgtgcaatttctagccataa

SEQ ID NO: 489358 - DNA, 25 bp, Homo sapien
ttcatcactggactcattttcccac

SEQ ID NO: 489359 - DNA, 25 bp, Homo sapien
ttcccgaccccagtttaggatgcag

SEQ ID NO: 489360 - DNA, 25 bp, Homo sapien
taggatgcagttcattccgtgcaat

SEQ ID NO: 489361 - DNA, 25 bp, Homo sapien
ttctcatccaaaatgggatgcagat

SEQ ID NO: 489362 - DNA, 25 bp, Homo sapien
aaataaccttcaaagttgcaaatat

SEQ ID NO: 489363 - DNA, 25 bp, Homo sapien
tgccataattcttctgctgctgtcc

SEQ ID NO: 489364 - DNA, 25 bp, Homo sapien
gctgctgtccttaaaataaccttca

SEQ ID NO: 489365 - DNA, 25 bp, Homo sapien
tttcttcatcagctgttatatactt

SEQ ID NO: 489366 - DNA, 25 bp, Homo sapien
tgtgaatattttagaggacaaaagg

SEQ ID NO: 489367 - DNA, 25 bp, Homo sapien
cattgccagcagtctatgatttctt

SEQ ID NO: 489368 - DNA, 25 bp, Homo sapien
ttcatcagctgttatatacttttgc

SEQ ID NO: 489369 - DNA, 25 bp, Homo sapien
gactgctttatagaggatgtaatcc

SEQ ID NO: 489370 - DNA, 25 bp, Homo sapien
cagactgctttatagaggatgtaat

SEQ ID NO: 489371 - DNA, 25 bp, Homo sapien
ctgctttatagaggatgtaatccat

SEQ ID NO: 489372 - DNA, 25 bp, Homo sapien
cccagactgctttatagaggatgta

SEQ ID NO: 489373 - DNA, 25 bp, Homo sapien
tgttcactccgtgggatacttgttg

SEQ ID NO: 489374 - DNA, 25 bp, Homo sapien
tctccttttgaagtgttcactccgt

SEQ ID NO: 489375 - DNA, 25 bp, Homo sapien
tgaagtgttcactccgtgggatact

SEQ ID NO: 489376 - DNA, 25 bp, Homo sapien
cttttgaagtgttcactccgtggga

SEQ ID NO: 489377 - DNA, 25 bp, Homo sapien
tcttgagcttggatgactgcaatag

SEQ ID NO: 489378 - DNA, 25 bp, Homo sapien
taagtgtctcttaaatctatcccca

SEQ ID NO: 489379 - DNA, 25 bp, Homo sapien
tgcaatagtctcctcaacggtgtcc

SEQ ID NO: 489380 - DNA, 25 bp, Homo sapien
ggttattctcaaggatgaagctcca

SEQ ID NO: 489381 - DNA, 25 bp, Homo sapien
gatgatcttctgaatcataactctc

SEQ ID NO: 489382 - DNA, 25 bp, Homo sapien
tctaccaaatggcagtagacttatt

SEQ ID NO: 489383 - DNA, 25 bp, Homo sapien
ctgtgtgataagaaggttatctacc

SEQ ID NO: 489384 - DNA, 25 bp, Homo sapien
tattgccagtagtggcagctgttca

SEQ ID NO: 489385 - DNA, 25 bp, Homo sapien
gcggtctatttgtctgtactgatat

SEQ ID NO: 489386 - DNA, 25 bp, Homo sapien
attttctttgcggtctatttgtctg

SEQ ID NO: 489387 - DNA, 25 bp, Homo sapien
tgcctgacagccatccatttataaa

SEQ ID NO: 489388 - DNA, 25 bp, Homo sapien
gctttgtacaaacttctttatcttc

SEQ ID NO: 489389 - DNA, 25 bp, Homo sapien
tcttaacataactagggacttggga

SEQ ID NO: 489390 - DNA, 25 bp, Homo sapien
tttgggtttaggcaccatctctatc

SEQ ID NO: 489391 - DNA, 25 bp, Homo sapien
cataaagtcccatgttctaaggaga

SEQ ID NO: 489392 - DNA, 25 bp, Homo sapien
caaccattatttggtcatgccaaga

SEQ ID NO: 489393 - DNA, 25 bp, Homo sapien
tcgatccctgaattagtagcctcct

SEQ ID NO: 489394 - DNA, 25 bp, Homo sapien
agactttagctcagatgggtgaagg

SEQ ID NO: 489395 - DNA, 25 bp, Homo sapien
tccttaggtctagactttagctcag

SEQ ID NO: 489396 - DNA, 25 bp, Homo sapien
taaactcttgcttggcagattactc

SEQ ID NO: 489397 - DNA, 25 bp, Homo sapien
tcttactgtggcctcatgtggcaga

SEQ ID NO: 489398 - DNA, 25 bp, Homo sapien
caagggcacaaatttcaccatgagg

SEQ ID NO: 489399 - DNA, 25 bp, Homo sapien
acatttagtccgtaatgggcattct

SEQ ID NO: 489400 - DNA, 25 bp, Homo sapien
tactcgttatgatgagaatccttcc

SEQ ID NO: 489401 - DNA, 25 bp, Homo sapien
cattagtcttcatggaaaatctagg

SEQ ID NO: 489402 - DNA, 25 bp, Homo sapien
tggtgagtaattgatcttaagacac

SEQ ID NO: 489403 - DNA, 25 bp, Homo sapien
tttcagggtggaacaggatgtatac

SEQ ID NO: 489404 - DNA, 25 bp, Homo sapien
caatgccactctcattggtgagtaa

SEQ ID NO: 489405 - DNA, 25 bp, Homo sapien
ccgtagatctttgctaatgatgacc

SEQ ID NO: 489406 - DNA, 25 bp, Homo sapien
gtagatctttgctaatgatgaccat

SEQ ID NO: 489407 - DNA, 25 bp, Homo sapien
cgtagatctttgctaatgatgacca

SEQ ID NO: 489408 - DNA, 25 bp, Homo sapien
gccgtagatctttgctaatgatgac

SEQ ID NO: 489409 - DNA, 25 bp, Homo sapien
tcatggaagagtattggcgggcttc

SEQ ID NO: 489410 - DNA, 25 bp, Homo sapien
tctttctccggaatctcagtacatc

SEQ ID NO: 489411 - DNA, 25 bp, Homo sapien
tctctttctccggaatctcagtaca

SEQ ID NO: 489412 - DNA, 25 bp, Homo sapien
gagtattggcgggcttctctttctc

SEQ ID NO: 489413 - DNA, 25 bp, Homo sapien
ttgacgggcctacataccctccgga

SEQ ID NO: 489414 - DNA, 25 bp, Homo sapien
ggcctacataccctccggagtttgc

SEQ ID NO: 489415 - DNA, 25 bp, Homo sapien
caacagcattaactcttcctcctag

SEQ ID NO: 489416 - DNA, 25 bp, Homo sapien
cagcatctccttgacgggcctacat

SEQ ID NO: 489417 - DNA, 25 bp, Homo sapien
gagtgatctcactcatcaagacgaa

SEQ ID NO: 489418 - DNA, 25 bp, Homo sapien
ccgatgggtatcgttctgaactgct

SEQ ID NO: 489419 - DNA, 25 bp, Homo sapien
taattctcgaaactattgctccagg

SEQ ID NO: 489420 - DNA, 25 bp, Homo sapien
tgcagccattagtgttaacagatgc

SEQ ID NO: 489421 - DNA, 25 bp, Homo sapien
aggcttttcagacatggcaccgtcc

SEQ ID NO: 489422 - DNA, 25 bp, Homo sapien
gatttttgcctgtgaactagatgaa

SEQ ID NO: 489423 - DNA, 25 bp, Homo sapien
cctgtgaactagatgaaggcttttc

SEQ ID NO: 489424 - DNA, 25 bp, Homo sapien
gaactagatgaaggcttttcagaca

SEQ ID NO: 489425 - DNA, 25 bp, Homo sapien
tgttggtgaatatcactgttgctgc

SEQ ID NO: 489426 - DNA, 25 bp, Homo sapien
cctcggagaggcaatgtgtgctgac

SEQ ID NO: 489427 - DNA, 25 bp, Homo sapien
gcccagcaagggagcttttatcccc

SEQ ID NO: 489428 - DNA, 25 bp, Homo sapien
tttatccccttgctgagtggctgag

SEQ ID NO: 489429 - DNA, 25 bp, Homo sapien
gaccacatgcgcttccagactccct

SEQ ID NO: 489430 - DNA, 25 bp, Homo sapien
tgtgtcctcagaccacatgcgcttc

SEQ ID NO: 489431 - DNA, 25 bp, Homo sapien
tggctccctggtgtgcacctctcag

SEQ ID NO: 489432 - DNA, 25 bp, Homo sapien
ctggtgtgcacctctcaggccctcc

SEQ ID NO: 489433 - DNA, 25 bp, Homo sapien
cacaacctggtgtatgaggttcttt

SEQ ID NO: 489434 - DNA, 25 bp, Homo sapien
gcacaacctggtgtatgaggttctt

SEQ ID NO: 489435 - DNA, 25 bp, Homo sapien
cagcacaacctggtgtatgaggttc

SEQ ID NO: 489436 - DNA, 25 bp, Homo sapien
caacctggtgtatgaggttctttca

SEQ ID NO: 489437 - DNA, 25 bp, Homo sapien
gaaaggcaagtgtggtgattagacc

SEQ ID NO: 489438 - DNA, 25 bp, Homo sapien
caagtgtggtgattagacccaaggg

SEQ ID NO: 489439 - DNA, 25 bp, Homo sapien
tgattagacccaagggccaaaaggc

SEQ ID NO: 489440 - DNA, 25 bp, Homo sapien
ccaaaaggcgatattgtggaggaga

SEQ ID NO: 489441 - DNA, 25 bp, Homo sapien
ggtgttcctgttggtgacagcagtc

SEQ ID NO: 489442 - DNA, 25 bp, Homo sapien
tggtgacagcagtcttgccggatgc

SEQ ID NO: 489443 - DNA, 25 bp, Homo sapien
tgacagcagtcttgccggatgccac

SEQ ID NO: 489444 - DNA, 25 bp, Homo sapien
tcagattgctggtgttcctgttggt

SEQ ID NO: 489445 - DNA, 25 bp, Homo sapien
aacaacatggtttcaagtagccgca

SEQ ID NO: 489446 - DNA, 25 bp, Homo sapien
caacatggtttcaagtagccgcagt

SEQ ID NO: 489447 - DNA, 25 bp, Homo sapien
catggtttcaagtagccgcagttta

SEQ ID NO: 489448 - DNA, 25 bp, Homo sapien
gtaaacaacatggtttcaagtagcc

SEQ ID NO: 489449 - DNA, 25 bp, Homo sapien
ctgtgtatgaaagtgcctgacagat

SEQ ID NO: 489450 - DNA, 25 bp, Homo sapien
cagataaaactggtggttgaaccat

SEQ ID NO: 489451 - DNA, 25 bp, Homo sapien
tatgaaagtgcctgacagataaaac

SEQ ID NO: 489452 - DNA, 25 bp, Homo sapien
tgacagataaaactggtggttgaac

SEQ ID NO: 489453 - DNA, 25 bp, Homo sapien
cactgtagaccatcgttatctgaat

SEQ ID NO: 489454 - DNA, 25 bp, Homo sapien
aatgccactgtagaccatcgttatc

SEQ ID NO: 489455 - DNA, 25 bp, Homo sapien
gtagaccatcgttatctgaatacaa

SEQ ID NO: 489456 - DNA, 25 bp, Homo sapien
ccatcgttatctgaatacaattctg

SEQ ID NO: 489457 - DNA, 25 bp, Homo sapien
atgatttgggagccaggtgttgaat

SEQ ID NO: 489458 - DNA, 25 bp, Homo sapien
ttgggagccaggtgttgaatttgct

SEQ ID NO: 489459 - DNA, 25 bp, Homo sapien
ctggaatgatttgggagccaggtgt

SEQ ID NO: 489460 - DNA, 25 bp, Homo sapien
gatttgggagccaggtgttgaattt

SEQ ID NO: 489461 - DNA, 25 bp, Homo sapien
tatgagttccactaaagcagggatt

SEQ ID NO: 489462 - DNA, 25 bp, Homo sapien
cagttattgttttccacgtcccttg

SEQ ID NO: 489463 - DNA, 25 bp, Homo sapien
tcagccccttgtagtacagttattg

SEQ ID NO: 489464 - DNA, 25 bp, Homo sapien
cagggattggagaaacccagttgtc

SEQ ID NO: 489465 - DNA, 25 bp, Homo sapien
cgagggcggcccctctctcatctgt

SEQ ID NO: 489466 - DNA, 25 bp, Homo sapien
ccgagggcggcccctctctcatctg

SEQ ID NO: 489467 - DNA, 25 bp, Homo sapien
tccgagggcggcccctctctcatct

SEQ ID NO: 489468 - DNA, 25 bp, Homo sapien
gctccgagggcggcccctctctcat

SEQ ID NO: 489469 - DNA, 25 bp, Homo sapien
tagtggatgagggtagctaaaatta

SEQ ID NO: 489470 - DNA, 25 bp, Homo sapien
tggccatgggtctttataatagtgg

SEQ ID NO: 489471 - DNA, 25 bp, Homo sapien
gagaccctttgctctaattatagac

SEQ ID NO: 489472 - DNA, 25 bp, Homo sapien
taatagtggctaatctccataacat

SEQ ID NO: 489473 - DNA, 25 bp, Homo sapien
ccaatacgatcatgcagttcctgtg

SEQ ID NO: 489474 - DNA, 25 bp, Homo sapien
aaacagaaacgagagcccaaccact

SEQ ID NO: 489475 - DNA, 25 bp, Homo sapien
gagccaaacagaaacgagagcccaa

SEQ ID NO: 489476 - DNA, 25 bp, Homo sapien
caaccactccaatacgatcatgcag

SEQ ID NO: 489477 - DNA, 25 bp, Homo sapien
taagatgaatggcaataggtcttcc

SEQ ID NO: 489478 - DNA, 25 bp, Homo sapien
gatgaatggcaataggtcttccatc

SEQ ID NO: 489479 - DNA, 25 bp, Homo sapien
atgaatggcaataggtcttccatca

SEQ ID NO: 489480 - DNA, 25 bp, Homo sapien
catttgtaagatgaatggcaatagg

SEQ ID NO: 489481 - DNA, 25 bp, Homo sapien
ggcattagcatagcaacattggtgg

SEQ ID NO: 489482 - DNA, 25 bp, Homo sapien
tcgtgtgggagattcgctctgtgca

SEQ ID NO: 489483 - DNA, 25 bp, Homo sapien
gctgctttagaagagtgctgtcgtg

SEQ ID NO: 489484 - DNA, 25 bp, Homo sapien
tgtcagggttagttcgtagggtcaa

SEQ ID NO: 489485 - DNA, 25 bp, Homo sapien
tcttttcttgaaatttagtccagta

SEQ ID NO: 489486 - DNA, 25 bp, Homo sapien
tctgaagtcttagctcacgtgtgaa

SEQ ID NO: 489487 - DNA, 25 bp, Homo sapien
gtcttagctcacgtgtgaattccat

SEQ ID NO: 489488 - DNA, 25 bp, Homo sapien
gtatttctgaagtcttagctcacgt

SEQ ID NO: 489489 - DNA, 25 bp, Homo sapien
ggatactatccctggcgagctgaag

SEQ ID NO: 489490 - DNA, 25 bp, Homo sapien
tatattggaataaatcacctaaggg

SEQ ID NO: 489491 - DNA, 25 bp, Homo sapien
gaagatcttcatggagatgtcgtgc

SEQ ID NO: 489492 - DNA, 25 bp, Homo sapien
tcctcccgggtgtgacatttttgca

SEQ ID NO: 489493 - DNA, 25 bp, Homo sapien
tattctgataaagccactctgtgtc

SEQ ID NO: 489494 - DNA, 25 bp, Homo sapien
gaggaatcccttgacaagctcaggc

SEQ ID NO: 489495 - DNA, 25 bp, Homo sapien
taagctgttgaaactaaggtagaga

SEQ ID NO: 489496 - DNA, 25 bp, Homo sapien
tctgtcgtcctctgcgcacttggag

SEQ ID NO: 489497 - DNA, 25 bp, Homo sapien
aacaccgcgttgtcctctcggaaca

SEQ ID NO: 489498 - DNA, 25 bp, Homo sapien
tccaaacatgaaaaacagccgatca

SEQ ID NO: 489499 - DNA, 25 bp, Homo sapien
tatggatgacaaacgtttttgcttt

SEQ ID NO: 489500 - DNA, 25 bp, Homo sapien
cctggagtgtcatccaattatcact

SEQ ID NO: 489501 - DNA, 25 bp, Homo sapien
ggctgcctttctatggtaagtgaat

SEQ ID NO: 489502 - DNA, 25 bp, Homo sapien
gctggctgcctttctatggtaagtg

SEQ ID NO: 489503 - DNA, 25 bp, Homo sapien
gcctttctatggtaagtgaattcat

SEQ ID NO: 489504 - DNA, 25 bp, Homo sapien
tgagctggctgcctttctatggtaa

SEQ ID NO: 489505 - DNA, 25 bp, Homo sapien
ctggattcctccatgggtcatctct

SEQ ID NO: 489506 - DNA, 25 bp, Homo sapien
ctccatgggtcatctcttactttac

SEQ ID NO: 489507 - DNA, 25 bp, Homo sapien
cttactttacttccagttgtacctg

SEQ ID NO: 489508 - DNA, 25 bp, Homo sapien
caactgtatagtccagcccaggaac

SEQ ID NO: 489509 - DNA, 25 bp, Homo sapien
aaagggcatgtcgattaacggccat

SEQ ID NO: 489510 - DNA, 25 bp, Homo sapien
ccttgaagttggatgctaaaagggc

SEQ ID NO: 489511 - DNA, 25 bp, Homo sapien
gggataatccttgaagttggatgct

SEQ ID NO: 489512 - DNA, 25 bp, Homo sapien
agttggatgctaaaagggcatgtcg

SEQ ID NO: 489513 - DNA, 25 bp, Homo sapien
aagcctgcggaatggagccagcact

SEQ ID NO: 489514 - DNA, 25 bp, Homo sapien
cagcctgaagcctgcggaatggagc

SEQ ID NO: 489515 - DNA, 25 bp, Homo sapien
ctgaagcctgcggaatggagccagc

SEQ ID NO: 489516 - DNA, 25 bp, Homo sapien
aggccccgcttgctgcagcctgaag

SEQ ID NO: 489517 - DNA, 25 bp, Homo sapien
gtgcccctgattcctgagtccctcc

SEQ ID NO: 489518 - DNA, 25 bp, Homo sapien
gggtgcccctgattcctgagtccct

SEQ ID NO: 489519 - DNA, 25 bp, Homo sapien
gagggtgcccctgattcctgagtcc

SEQ ID NO: 489520 - DNA, 25 bp, Homo sapien
ggagggtgcccctgattcctgagtc

SEQ ID NO: 489521 - DNA, 25 bp, Homo sapien
tctcaggggtttgctcctttacctc

SEQ ID NO: 489522 - DNA, 25 bp, Homo sapien
tcctttacctcaagaggtcccacaa

SEQ ID NO: 489523 - DNA, 25 bp, Homo sapien
tgcatctcaggggtttgctccttta

SEQ ID NO: 489524 - DNA, 25 bp, Homo sapien
aggtcccacaacctcgtatcgtgtc

SEQ ID NO: 489525 - DNA, 25 bp, Homo sapien
agtttcagtagttccagcacagcat

SEQ ID NO: 489526 - DNA, 25 bp, Homo sapien
gtttcagtagttccagcacagcata

SEQ ID NO: 489527 - DNA, 25 bp, Homo sapien
gcacagaacacctcactgcatgcga

SEQ ID NO: 489528 - DNA, 25 bp, Homo sapien
tgcatgcgacccggtgccctgctgt

SEQ ID NO: 489529 - DNA, 25 bp, Homo sapien
tcctggaagcgtcacaaagcagctg

SEQ ID NO: 489530 - DNA, 25 bp, Homo sapien
tgagtgagcacagaacacctcactg

SEQ ID NO: 489531 - DNA, 25 bp, Homo sapien
ggcctcacagctgttggcaattcag

SEQ ID NO: 489532 - DNA, 25 bp, Homo sapien
tattctagagccagtggcctcacag

SEQ ID NO: 489533 - DNA, 25 bp, Homo sapien
tgttggcaattcagctttcctgtac

SEQ ID NO: 489534 - DNA, 25 bp, Homo sapien
agctgttggcaattcagctttcctg

SEQ ID NO: 489535 - DNA, 25 bp, Homo sapien
tggggagggagcatattgcagggag

SEQ ID NO: 489536 - DNA, 25 bp, Homo sapien
gagggagcatattgcagggagacat

SEQ ID NO: 489537 - DNA, 25 bp, Homo sapien
ggagggagcatattgcagggagaca

SEQ ID NO: 489538 - DNA, 25 bp, Homo sapien
gggagggagcatattgcagggagac

SEQ ID NO: 489539 - DNA, 25 bp, Homo sapien
gcaccagcgactgctaaataacgac

SEQ ID NO: 489540 - DNA, 25 bp, Homo sapien
gcgactgctaaataacgacttttcc

SEQ ID NO: 489541 - DNA, 25 bp, Homo sapien
cctctggaagctgcttgattgcacc

SEQ ID NO: 489542 - DNA, 25 bp, Homo sapien
gctgcttgattgcaccagcgactgc

SEQ ID NO: 489543 - DNA, 25 bp, Homo sapien
aggtcctcaaatactcggatgcaga

SEQ ID NO: 489544 - DNA, 25 bp, Homo sapien
tcctcaaatactcggatgcagagtt

SEQ ID NO: 489545 - DNA, 25 bp, Homo sapien
tcaaatactcggatgcagagtttga

SEQ ID NO: 489546 - DNA, 25 bp, Homo sapien
ggtcctcaaatactcggatgcagag

SEQ ID NO: 489547 - DNA, 25 bp, Homo sapien
gtcaagtgtgctgatgtcctgattt

SEQ ID NO: 489548 - DNA, 25 bp, Homo sapien
gggagcaaggagtcaagtgtgctga

SEQ ID NO: 489549 - DNA, 25 bp, Homo sapien
gcaaggagtcaagtgtgctgatgtc

SEQ ID NO: 489550 - DNA, 25 bp, Homo sapien
tttggaaaatactgagatggtgaga

SEQ ID NO: 489551 - DNA, 25 bp, Homo sapien
agggcatcgcagctgttggaagaga

SEQ ID NO: 489552 - DNA, 25 bp, Homo sapien
agaggcctgaaggccagcaagcagc

SEQ ID NO: 489553 - DNA, 25 bp, Homo sapien
tgagaggcctgaaggccagcaagca

SEQ ID NO: 489554 - DNA, 25 bp, Homo sapien
ggcatcgcagctgttggaagagaaa

SEQ ID NO: 489555 - DNA, 25 bp, Homo sapien
agcattcattggccttgggctttgt

SEQ ID NO: 489556 - DNA, 25 bp, Homo sapien
ccaaaagcattcattggccttgggc

SEQ ID NO: 489557 - DNA, 25 bp, Homo sapien
caaaagcattcattggccttgggct

SEQ ID NO: 489558 - DNA, 25 bp, Homo sapien
aaagcattcattggccttgggcttt

SEQ ID NO: 489559 - DNA, 25 bp, Homo sapien
caggtattgtgtccgtgcagattca

SEQ ID NO: 489560 - DNA, 25 bp, Homo sapien
ggtggtttgctttagttttggctgc

SEQ ID NO: 489561 - DNA, 25 bp, Homo sapien
tgcagattcacgagaagatcaggca

SEQ ID NO: 489562 - DNA, 25 bp, Homo sapien
cttgttcagtaaagccaaggtggtt

SEQ ID NO: 489563 - DNA, 25 bp, Homo sapien
gttgatacaaccatttgcaaccgct

SEQ ID NO: 489564 - DNA, 25 bp, Homo sapien
ttgatacaaccatttgcaaccgctt

SEQ ID NO: 489565 - DNA, 25 bp, Homo sapien
gatacaaccatttgcaaccgcttat

SEQ ID NO: 489566 - DNA, 25 bp, Homo sapien
tgatacaaccatttgcaaccgctta

SEQ ID NO: 489567 - DNA, 25 bp, Homo sapien
tacagagtcatcattaactttactt

SEQ ID NO: 489568 - DNA, 25 bp, Homo sapien
aagctgcttgaggtaatacttctca

SEQ ID NO: 489569 - DNA, 25 bp, Homo sapien
tcaactctttgttacagagtcatca

SEQ ID NO: 489570 - DNA, 25 bp, Homo sapien
aggctgcccctggtctcggctgact

SEQ ID NO: 489571 - DNA, 25 bp, Homo sapien
tggtgcgctctcattcttgatgtgt

SEQ ID NO: 489572 - DNA, 25 bp, Homo sapien
tgtttgctggttcattggtgcgctc

SEQ ID NO: 489573 - DNA, 25 bp, Homo sapien
ttgcagctgggccacgtaacgggac

SEQ ID NO: 489574 - DNA, 25 bp, Homo sapien
cttgatgtgtttgctattgcagctg

SEQ ID NO: 489575 - DNA, 25 bp, Homo sapien
gatgaaagcagtgtgagttccagaa

SEQ ID NO: 489576 - DNA, 25 bp, Homo sapien
gcttttagagggaattcacagctca

SEQ ID NO: 489577 - DNA, 25 bp, Homo sapien
ggagtcatgcctgttagttaagtga

SEQ ID NO: 489578 - DNA, 25 bp, Homo sapien
caatcgtgtttgctatcatcatggg

SEQ ID NO: 489579 - DNA, 25 bp, Homo sapien
tcagctccctgaaccaaactcacaa

SEQ ID NO: 489580 - DNA, 25 bp, Homo sapien
aaggggtgattcaaccctggccaca

SEQ ID NO: 489581 - DNA, 25 bp, Homo sapien
tttgtctggttgacagcatgtggcc

SEQ ID NO: 489582 - DNA, 25 bp, Homo sapien
caatctgggtcatttatgctttgtc

SEQ ID NO: 489583 - DNA, 25 bp, Homo sapien
gtccttggtacttatgacacctctg

SEQ ID NO: 489584 - DNA, 25 bp, Homo sapien
ggtacttatgacacctctgaccatc

SEQ ID NO: 489585 - DNA, 25 bp, Homo sapien
ccttggtacttatgacacctctgac

SEQ ID NO: 489586 - DNA, 25 bp, Homo sapien
ctgtccttggtacttatgacacctc

SEQ ID NO: 489587 - DNA, 25 bp, Homo sapien
cttgaggcaagcaattgccaagcaa

SEQ ID NO: 489588 - DNA, 25 bp, Homo sapien
gttttcttgaggcaagcaattgcca

SEQ ID NO: 489589 - DNA, 25 bp, Homo sapien
tgctaatatgttttcttgaggcaag

SEQ ID NO: 489590 - DNA, 25 bp, Homo sapien
tatgttttcttgaggcaagcaattg

SEQ ID NO: 489591 - DNA, 25 bp, Homo sapien
ccgggtgccgttcccggaagtgcat

SEQ ID NO: 489592 - DNA, 25 bp, Homo sapien
ggaaggagaccacttctaaaatgag

SEQ ID NO: 489593 - DNA, 25 bp, Homo sapien
taaaatgagggacattgactgcccg

SEQ ID NO: 489594 - DNA, 25 bp, Homo sapien
attgactgcccgtccaaccgggtgc

SEQ ID NO: 489595 - DNA, 25 bp, Homo sapien
caatggtacggaaagtttgctgctt

SEQ ID NO: 489596 - DNA, 25 bp, Homo sapien
taaatccgacctggagaaggtcacg

SEQ ID NO: 489597 - DNA, 25 bp, Homo sapien
ttcgaccttgacgtctgcagcaccg

SEQ ID NO: 489598 - DNA, 25 bp, Homo sapien
tgctgtatcactggcaatggtacgg

SEQ ID NO: 489599 - DNA, 25 bp, Homo sapien
gttgtcaggtccacttgcaaatgcg

SEQ ID NO: 489600 - DNA, 25 bp, Homo sapien
taccgtctttgatttctgtggcctg

SEQ ID NO: 489601 - DNA, 25 bp, Homo sapien
catctagcgtggcagaatttatggt

SEQ ID NO: 489602 - DNA, 25 bp, Homo sapien
aatctgacagatattcgttccatct

SEQ ID NO: 489603 - DNA, 25 bp, Homo sapien
ctctcttcgtgattattgcaaggat

SEQ ID NO: 489604 - DNA, 25 bp, Homo sapien
aatctttctctcttcgtgattattg

SEQ ID NO: 489605 - DNA, 25 bp, Homo sapien
ctttctctcttcgtgattattgcaa

SEQ ID NO: 489606 - DNA, 25 bp, Homo sapien
ttctctcttcgtgattattgcaagg

SEQ ID NO: 489607 - DNA, 25 bp, Homo sapien
caactgtaaccatccccaatctgag

SEQ ID NO: 489608 - DNA, 25 bp, Homo sapien
taggctgctcatggttcctccaact

SEQ ID NO: 489609 - DNA, 25 bp, Homo sapien
aaagatctgcttctgacaaatattc

SEQ ID NO: 489610 - DNA, 25 bp, Homo sapien
cacacttggtgcataagggtcttct

SEQ ID NO: 489611 - DNA, 25 bp, Homo sapien
gcatcttgaagatacactactgtaa

SEQ ID NO: 489612 - DNA, 25 bp, Homo sapien
tgaagatacactactgtaaagccat

SEQ ID NO: 489613 - DNA, 25 bp, Homo sapien
aaagtttctcagattgggaatggtt

SEQ ID NO: 489614 - DNA, 25 bp, Homo sapien
tctcagattgggaatggttggaaag

SEQ ID NO: 489615 - DNA, 25 bp, Homo sapien
gtgataacaccgcacctcttggttg

SEQ ID NO: 489616 - DNA, 25 bp, Homo sapien
ttgatgacgggtacctggcgggatg

SEQ ID NO: 489617 - DNA, 25 bp, Homo sapien
tgcacaccagtgaggctgtgctggt

SEQ ID NO: 489618 - DNA, 25 bp, Homo sapien
ttgctgtggtcgctgctctgattgg

SEQ ID NO: 489619 - DNA, 25 bp, Homo sapien
ttggcacactgctccaaggatactg

SEQ ID NO: 489620 - DNA, 25 bp, Homo sapien
tccacaggggaggttggcacactgc

SEQ ID NO: 489621 - DNA, 25 bp, Homo sapien
tcttttctggtcctggtaggacagg

SEQ ID NO: 489622 - DNA, 25 bp, Homo sapien
gtctgttgtgaggagggagcccatg

SEQ ID NO: 489623 - DNA, 25 bp, Homo sapien
ctagtgtggccagatgtcggactcc

SEQ ID NO: 489624 - DNA, 25 bp, Homo sapien
cccgcactggacagcgtcacttgag

SEQ ID NO: 489625 - DNA, 25 bp, Homo sapien
ccaaggacttgtggcagaaactggt

SEQ ID NO: 489626 - DNA, 25 bp, Homo sapien
ccctctactggtgtgatcaggatac

SEQ ID NO: 489627 - DNA, 25 bp, Homo sapien
tattttccttccagaatagtgccag

SEQ ID NO: 489628 - DNA, 25 bp, Homo sapien
tttccttccagaatagtgccaggaa

SEQ ID NO: 489629 - DNA, 25 bp, Homo sapien
attttccttccagaatagtgccagg

SEQ ID NO: 489630 - DNA, 25 bp, Homo sapien
ttttccttccagaatagtgccagga

SEQ ID NO: 489631 - DNA, 25 bp, Homo sapien
gtcagtctgagtcagattaatgttc

SEQ ID NO: 489632 - DNA, 25 bp, Homo sapien
tctccttaaggatgtaagattcatt

SEQ ID NO: 489633 - DNA, 25 bp, Homo sapien
tatgctgagagcaaatctaggcaag

SEQ ID NO: 489634 - DNA, 25 bp, Homo sapien
cagtgtatgggtttagaatcaaaca

SEQ ID NO: 489635 - DNA, 25 bp, Homo sapien
tgctacgcccttcacacagtcgtgt

SEQ ID NO: 489636 - DNA, 25 bp, Homo sapien
tatagcttggaactaggacagtcag

SEQ ID NO: 489637 - DNA, 25 bp, Homo sapien
cagttaattgactggaacaggtcag

SEQ ID NO: 489638 - DNA, 25 bp, Homo sapien
catgggtgcattgcatgctacgccc

SEQ ID NO: 489639 - DNA, 25 bp, Homo sapien
tgtgtttctcctcctgattagagcc

SEQ ID NO: 489640 - DNA, 25 bp, Homo sapien
tttctcctcctgattagagcctgca

SEQ ID NO: 489641 - DNA, 25 bp, Homo sapien
cgtgtgtttctcctcctgattagag

SEQ ID NO: 489642 - DNA, 25 bp, Homo sapien
tgtttctcctcctgattagagcctg

SEQ ID NO: 489643 - DNA, 25 bp, Homo sapien
ctcgtttcagcagaataggcaactg

SEQ ID NO: 489644 - DNA, 25 bp, Homo sapien
tcgtttcagcagaataggcaactgt

SEQ ID NO: 489645 - DNA, 25 bp, Homo sapien
ggacagaagcatgattggtcctgct

SEQ ID NO: 489646 - DNA, 25 bp, Homo sapien
caggacagaagcatgattggtcctg

SEQ ID NO: 489647 - DNA, 25 bp, Homo sapien
agaagcatgattggtcctgctgaga

SEQ ID NO: 489648 - DNA, 25 bp, Homo sapien
aggacagaagcatgattggtcctgc

SEQ ID NO: 489649 - DNA, 25 bp, Homo sapien
agacccgcagtgtcttgagtcacag

SEQ ID NO: 489650 - DNA, 25 bp, Homo sapien
gatgggcttccctgtattgatagca

SEQ ID NO: 489651 - DNA, 25 bp, Homo sapien
tgagtcacagggtgatcatgttttc

SEQ ID NO: 489652 - DNA, 25 bp, Homo sapien
tgttttcttgcaatattattcatgg

SEQ ID NO: 489653 - DNA, 25 bp, Homo sapien
tatcctggaagagccccaaagttca

SEQ ID NO: 489654 - DNA, 25 bp, Homo sapien
ccgaagacaaaaagagttatcctgg

SEQ ID NO: 489655 - DNA, 25 bp, Homo sapien
gcaaagtccagagaacatagaggtt

SEQ ID NO: 489656 - DNA, 25 bp, Homo sapien
cagagaacatagaggttttctgtcc

SEQ ID NO: 489657 - DNA, 25 bp, Homo sapien
tgcctcctcaatccaaagagagggc

SEQ ID NO: 489658 - DNA, 25 bp, Homo sapien
catttgcctcctcaatccaaagaga

SEQ ID NO: 489659 - DNA, 25 bp, Homo sapien
tttgcctcctcaatccaaagagagg

SEQ ID NO: 489660 - DNA, 25 bp, Homo sapien
cctcctcaatccaaagagagggcat

SEQ ID NO: 489661 - DNA, 25 bp, Homo sapien
cctgtagtgcccctgtcgtggaagg

SEQ ID NO: 489662 - DNA, 25 bp, Homo sapien
cttcctggtactccctctcaaagct

SEQ ID NO: 489663 - DNA, 25 bp, Homo sapien
tgcccctgtcgtggaaggcagcatg

SEQ ID NO: 489664 - DNA, 25 bp, Homo sapien
cacagcctgtagtgcccctgtcgtg

SEQ ID NO: 489665 - DNA, 25 bp, Homo sapien
caactggccttgtatgcattgtcgt

SEQ ID NO: 489666 - DNA, 25 bp, Homo sapien
tatggtatctcccaagagatagcag

SEQ ID NO: 489667 - DNA, 25 bp, Homo sapien
tatgcattgtcgttatggtatctcc

SEQ ID NO: 489668 - DNA, 25 bp, Homo sapien
gaattttggaaatcacaactggcct

SEQ ID NO: 489669 - DNA, 25 bp, Homo sapien
taggggtcattgcagcagcgacaca

SEQ ID NO: 489670 - DNA, 25 bp, Homo sapien
agcgcccctcccaggtcgacaagaa

SEQ ID NO: 489671 - DNA, 25 bp, Homo sapien
cgacacagccggtttggaacagggc

SEQ ID NO: 489672 - DNA, 25 bp, Homo sapien
atgcacaccgtgacaggtcccagaa

SEQ ID NO: 489673 - DNA, 25 bp, Homo sapien
ctttcagtacggctctcacctttga

SEQ ID NO: 489674 - DNA, 25 bp, Homo sapien
tttcagtacggctctcacctttgag

SEQ ID NO: 489675 - DNA, 25 bp, Homo sapien
cctctttcagtacggctctcacctt

SEQ ID NO: 489676 - DNA, 25 bp, Homo sapien
tctttcagtacggctctcacctttg

SEQ ID NO: 489677 - DNA, 25 bp, Homo sapien
ttactcttctactacatgttgcatc

SEQ ID NO: 489678 - DNA, 25 bp, Homo sapien
tctactacatgttgcatctgtctgg

SEQ ID NO: 489679 - DNA, 25 bp, Homo sapien
tactacatgttgcatctgtctggct

SEQ ID NO: 489680 - DNA, 25 bp, Homo sapien
tttctatttactcttctactacatg

SEQ ID NO: 489681 - DNA, 25 bp, Homo sapien
tgaacttgaacttctgggaacgatg

SEQ ID NO: 489682 - DNA, 25 bp, Homo sapien
tgtgaacttgaacttctgggaacga

SEQ ID NO: 489683 - DNA, 25 bp, Homo sapien
acttgaacttctgggaacgatggga

SEQ ID NO: 489684 - DNA, 25 bp, Homo sapien
tgaacttctgggaacgatgggaatt

SEQ ID NO: 489685 - DNA, 25 bp, Homo sapien
ttccggattaagatcatgtggaaga

SEQ ID NO: 489686 - DNA, 25 bp, Homo sapien
cagttttccggattaagatcatgtg

SEQ ID NO: 489687 - DNA, 25 bp, Homo sapien
tacagttttccggattaagatcatg

SEQ ID NO: 489688 - DNA, 25 bp, Homo sapien
gttttccggattaagatcatgtgga

SEQ ID NO: 489689 - DNA, 25 bp, Homo sapien
tccaaaggatagcatgaactcattc

SEQ ID NO: 489690 - DNA, 25 bp, Homo sapien
gccagtaatgatgagtagcccataa

SEQ ID NO: 489691 - DNA, 25 bp, Homo sapien
tgaatcagtctgcttacctccctct

SEQ ID NO: 489692 - DNA, 25 bp, Homo sapien
cacgctcagatccataactgtctgt

SEQ ID NO: 489693 - DNA, 25 bp, Homo sapien
tctcggcagcttcgtttctaatttc

SEQ ID NO: 489694 - DNA, 25 bp, Homo sapien
tttctctcggcagcttcgtttctaa

SEQ ID NO: 489695 - DNA, 25 bp, Homo sapien
ctcggcagcttcgtttctaatttct

SEQ ID NO: 489696 - DNA, 25 bp, Homo sapien
tctctcggcagcttcgtttctaatt

SEQ ID NO: 489697 - DNA, 25 bp, Homo sapien
tctagggacagcttcttgtgaagat

SEQ ID NO: 489698 - DNA, 25 bp, Homo sapien
cttcttgtgaagatctaagttttga

SEQ ID NO: 489699 - DNA, 25 bp, Homo sapien
gcagcaattacttcctgaatgtgca

SEQ ID NO: 489700 - DNA, 25 bp, Homo sapien
gcagttcctttgtggagtattgcag

SEQ ID NO: 489701 - DNA, 25 bp, Homo sapien
gaagaactagagtaggagcgagggc

SEQ ID NO: 489702 - DNA, 25 bp, Homo sapien
agaactagagtaggagcgagggctc

SEQ ID NO: 489703 - DNA, 25 bp, Homo sapien
aatggaagaactagagtaggagcga

SEQ ID NO: 489704 - DNA, 25 bp, Homo sapien
aactagagtaggagcgagggctcac

SEQ ID NO: 489705 - DNA, 25 bp, Homo sapien
cactggtgacaaaactgatccagaa

SEQ ID NO: 489706 - DNA, 25 bp, Homo sapien
aggcttccagctgtcactggtgaca

SEQ ID NO: 489707 - DNA, 25 bp, Homo sapien
cagctgtcactggtgacaaaactga

SEQ ID NO: 489708 - DNA, 25 bp, Homo sapien
cacagaccagatcccatttcccatg

SEQ ID NO: 489709 - DNA, 25 bp, Homo sapien
taaaactagggactagaacctctgc

SEQ ID NO: 489710 - DNA, 25 bp, Homo sapien
gagaacagagttcctcacagcgagg

SEQ ID NO: 489711 - DNA, 25 bp, Homo sapien
taatggaagttggtgccatcgcccc

SEQ ID NO: 489712 - DNA, 25 bp, Homo sapien
catttgtcacaacgcatgagagctt

SEQ ID NO: 489713 - DNA, 25 bp, Homo sapien
cctgggtcttcgtccaccttgtcat

SEQ ID NO: 489714 - DNA, 25 bp, Homo sapien
ccacaatagctatttcaatcctttg

SEQ ID NO: 489715 - DNA, 25 bp, Homo sapien
cctttggcatgctcttttaactcct

SEQ ID NO: 489716 - DNA, 25 bp, Homo sapien
aactcctgggtcttcgtccaccttg

SEQ ID NO: 489717 - DNA, 25 bp, Homo sapien
aatgggcatcaaaatcatgtaagga

SEQ ID NO: 489718 - DNA, 25 bp, Homo sapien
ccttcatgctttgagggtatgagag

SEQ ID NO: 489719 - DNA, 25 bp, Homo sapien
caaaagtgagccttatagaaaactc

SEQ ID NO: 489720 - DNA, 25 bp, Homo sapien
tagaaaactcatagtacctaccaca

SEQ ID NO: 489721 - DNA, 25 bp, Homo sapien
catatgacacctgcttaaattgatc

SEQ ID NO: 489722 - DNA, 25 bp, Homo sapien
ttttctaggaagatgctcatatgac

SEQ ID NO: 489723 - DNA, 25 bp, Homo sapien
ggaagatgctcatatgacacctgct

SEQ ID NO: 489724 - DNA, 25 bp, Homo sapien
gacacctgcttaaattgatcaaaat

SEQ ID NO: 489725 - DNA, 25 bp, Homo sapien
gggatgggatggcaagttcctcacc

SEQ ID NO: 489726 - DNA, 25 bp, Homo sapien
tgatattcgtatctaatggctgaaa

SEQ ID NO: 489727 - DNA, 25 bp, Homo sapien
gaaaatcattgggatgtacaggaag

SEQ ID NO: 489728 - DNA, 25 bp, Homo sapien
gatattcgtatctaatggctgaaaa

SEQ ID NO: 489729 - DNA, 25 bp, Homo sapien
gttgatgcaaacatcataaactctg

SEQ ID NO: 489730 - DNA, 25 bp, Homo sapien
gagaagggcagctattcaccagcta

SEQ ID NO: 489731 - DNA, 25 bp, Homo sapien
taattgaaatgtagacaacggcagc

SEQ ID NO: 489732 - DNA, 25 bp, Homo sapien
tctttagaacagtgatggaggcagt

SEQ ID NO: 489733 - DNA, 25 bp, Homo sapien
gaccagctgtgtgacaaatcctcta

SEQ ID NO: 489734 - DNA, 25 bp, Homo sapien
aagttgcgtttaacatttgaagaag

SEQ ID NO: 489735 - DNA, 25 bp, Homo sapien
caggggagtaggttgtgttcacaaa

SEQ ID NO: 489736 - DNA, 25 bp, Homo sapien
tgagtgttttttgactctttccaaa

SEQ ID NO: 489737 - DNA, 25 bp, Homo sapien
caaaggttctaggtatttggactca

SEQ ID NO: 489738 - DNA, 25 bp, Homo sapien
ggtgacccccgctatctaacatgat

SEQ ID NO: 489739 - DNA, 25 bp, Homo sapien
cttgttgatgtgagtgtgccacccc

SEQ ID NO: 489740 - DNA, 25 bp, Homo sapien
gaagtgtgcgtaaagctctctgagt

SEQ ID NO: 489741 - DNA, 25 bp, Homo sapien
gcagcaaaggccgagggcattagaa

SEQ ID NO: 489742 - DNA, 25 bp, Homo sapien
tctagggctcttgaactgaacactt

SEQ ID NO: 489743 - DNA, 25 bp, Homo sapien
taaaaatcatcaacacgggatctgt

SEQ ID NO: 489744 - DNA, 25 bp, Homo sapien
ttcttgtctccatgctctaggaagt

SEQ ID NO: 489745 - DNA, 25 bp, Homo sapien
tctccatgctctaggaagtgttttc

SEQ ID NO: 489746 - DNA, 25 bp, Homo sapien
agattaacaaacccctatgactctt

SEQ ID NO: 489747 - DNA, 25 bp, Homo sapien
attaacaaacccctatgactcttca

SEQ ID NO: 489748 - DNA, 25 bp, Homo sapien
acaaacccctatgactcttcatcct

SEQ ID NO: 489749 - DNA, 25 bp, Homo sapien
ttaacaaacccctatgactcttcat

SEQ ID NO: 489750 - DNA, 25 bp, Homo sapien
agaaatggagatgaactgtgcttcc

SEQ ID NO: 489751 - DNA, 25 bp, Homo sapien
tcctgctgtcattttccgtgagtgc

SEQ ID NO: 489752 - DNA, 25 bp, Homo sapien
gattgggtagccaccaccactttca

SEQ ID NO: 489753 - DNA, 25 bp, Homo sapien
tcaattccatcgtttccggattggg

SEQ ID NO: 489754 - DNA, 25 bp, Homo sapien
agaagggagagtctgtagaagatat

SEQ ID NO: 489755 - DNA, 25 bp, Homo sapien
tatgatttccctcggcgagttttcc

SEQ ID NO: 489756 - DNA, 25 bp, Homo sapien
ttgagagaggtgacgagaagggaga

SEQ ID NO: 489757 - DNA, 25 bp, Homo sapien
gagagtctgtagaagatatgatttc

SEQ ID NO: 489758 - DNA, 25 bp, Homo sapien
tttagtcgattactattctacgtgg

SEQ ID NO: 489759 - DNA, 25 bp, Homo sapien
ttttagtcgattactattctacgtg

SEQ ID NO: 489760 - DNA, 25 bp, Homo sapien
tgtgcattcttgagatcttctctgg

SEQ ID NO: 489761 - DNA, 25 bp, Homo sapien
gtcgagacaggagctcacagggcaa

SEQ ID NO: 489762 - DNA, 25 bp, Homo sapien
caaagattatttagcgtcgagacag

SEQ ID NO: 489763 - DNA, 25 bp, Homo sapien
gggtttctgagatacgtgtgcattc

SEQ ID NO: 489764 - DNA, 25 bp, Homo sapien
ggtcaccttcttgctctagccacag

SEQ ID NO: 489765 - DNA, 25 bp, Homo sapien
tgaaacataaaatcgagcctgagtt

SEQ ID NO: 489766 - DNA, 25 bp, Homo sapien
tgtcatttatactccaaagcccagg

SEQ ID NO: 489767 - DNA, 25 bp, Homo sapien
aaaaggtgctggcactccaatacat

SEQ ID NO: 489768 - DNA, 25 bp, Homo sapien
gaggacaagcttcatgaggacgaag

SEQ ID NO: 489769 - DNA, 25 bp, Homo sapien
caacttagcatttgatgacccagag

SEQ ID NO: 489770 - DNA, 25 bp, Homo sapien
tctagcaaaggagtgatgaaccatg

SEQ ID NO: 489771 - DNA, 25 bp, Homo sapien
gagttggtagcaggtcagattccat

SEQ ID NO: 489772 - DNA, 25 bp, Homo sapien
gacactgcacagtaacacaatggcc

SEQ ID NO: 489773 - DNA, 25 bp, Homo sapien
caatttcagaaggtaatagggtaag

SEQ ID NO: 489774 - DNA, 25 bp, Homo sapien
ttagaggtgataccctttggctgcg

SEQ ID NO: 489775 - DNA, 25 bp, Homo sapien
aacgcaccaggaaagaacagtgcct

SEQ ID NO: 489776 - DNA, 25 bp, Homo sapien
cacgactgaatagcaaggcagagct

SEQ ID NO: 489777 - DNA, 25 bp, Homo sapien
cagtaggatttcatgtctcacacga

SEQ ID NO: 489778 - DNA, 25 bp, Homo sapien
tagacagattccctagccaacaatg

SEQ ID NO: 489779 - DNA, 25 bp, Homo sapien
tatcgacagtactatttagccgtgg

SEQ ID NO: 489780 - DNA, 25 bp, Homo sapien
attttccatcgaaagaggaacagag

SEQ ID NO: 489781 - DNA, 25 bp, Homo sapien
ggaattccagtcattgattttctca

SEQ ID NO: 489782 - DNA, 25 bp, Homo sapien
tttctcagaaattctcttgctgaat

SEQ ID NO: 489783 - DNA, 25 bp, Homo sapien
aggaacagaggaattccagtcattg

SEQ ID NO: 489784 - DNA, 25 bp, Homo sapien
tgccactcttctgacgagttccttt

SEQ ID NO: 489785 - DNA, 25 bp, Homo sapien
gccactcttctgacgagttcctttc

SEQ ID NO: 489786 - DNA, 25 bp, Homo sapien
tgcattctgcaacgtttagtgtcat

SEQ ID NO: 489787 - DNA, 25 bp, Homo sapien
aaggctgcatactctcccgatggca

SEQ ID NO: 489788 - DNA, 25 bp, Homo sapien
agcttcggcagacgtggcctcaggt

SEQ ID NO: 489789 - DNA, 25 bp, Homo sapien
ccgcagagcggatgttctggacaga

SEQ ID NO: 489790 - DNA, 25 bp, Homo sapien
caggtgggaccatgaaaagtgagcc

SEQ ID NO: 489791 - DNA, 25 bp, Homo sapien
gacacgaaagcatattgtgatatag

SEQ ID NO: 489792 - DNA, 25 bp, Homo sapien
gcctctgcaggacacgaaagcatat

SEQ ID NO: 489793 - DNA, 25 bp, Homo sapien
acagcactgaacagggggttaaaca

SEQ ID NO: 489794 - DNA, 25 bp, Homo sapien
catattgtgatatagtaatcttaca

SEQ ID NO: 489795 - DNA, 25 bp, Homo sapien
ttgggaacccgacatagttggatcg

SEQ ID NO: 489796 - DNA, 25 bp, Homo sapien
catgatagtacaacgttaaagcctc

SEQ ID NO: 489797 - DNA, 25 bp, Homo sapien
gctgcccttccgctacgattgggaa

SEQ ID NO: 489798 - DNA, 25 bp, Homo sapien
gagtgggtactaataaactttcatg

SEQ ID NO: 489799 - DNA, 25 bp, Homo sapien
cctgtttccccaggccactgtcgtt

SEQ ID NO: 489800 - DNA, 25 bp, Homo sapien
ttccccaggccactgtcgtttagac

SEQ ID NO: 489801 - DNA, 25 bp, Homo sapien
tccctgtttccccaggccactgtcg

SEQ ID NO: 489802 - DNA, 25 bp, Homo sapien
tgtttccccaggccactgtcgttta

SEQ ID NO: 489803 - DNA, 25 bp, Homo sapien
tacagacggcactgcccctgtgtct

SEQ ID NO: 489804 - DNA, 25 bp, Homo sapien
gggcagttgagtccccagatggaaa

SEQ ID NO: 489805 - DNA, 25 bp, Homo sapien
ctgtagctccgtgtttccacagaac

SEQ ID NO: 489806 - DNA, 25 bp, Homo sapien
gaactgcttcagctcagcttcaagg

SEQ ID NO: 489807 - DNA, 25 bp, Homo sapien
tattttctcaagtttcaagcttaaa

SEQ ID NO: 489808 - DNA, 25 bp, Homo sapien
catttggggttccaatatagtgtaa

SEQ ID NO: 489809 - DNA, 25 bp, Homo sapien
gttgtgtgaggattaatggagccat

SEQ ID NO: 489810 - DNA, 25 bp, Homo sapien
ggagccattttgaaaaccgttgcta

SEQ ID NO: 489811 - DNA, 25 bp, Homo sapien
tgctgctgctcatcggatgaaggtg

SEQ ID NO: 489812 - DNA, 25 bp, Homo sapien
cagcatggagggggatccaccagca

SEQ ID NO: 489813 - DNA, 25 bp, Homo sapien
cagctcatctagttgatattcgcaa

SEQ ID NO: 489814 - DNA, 25 bp, Homo sapien
accagcagctcatctagttgatatt

SEQ ID NO: 489815 - DNA, 25 bp, Homo sapien
ctgatggtgggtaaaagatcagatg

SEQ ID NO: 489816 - DNA, 25 bp, Homo sapien
agatggcactgttaacccacaagtt

SEQ ID NO: 489817 - DNA, 25 bp, Homo sapien
aaggctgatggtgggtaaaagatca

SEQ ID NO: 489818 - DNA, 25 bp, Homo sapien
gcactgttaacccacaagttggtaa

SEQ ID NO: 489819 - DNA, 25 bp, Homo sapien
cattgtggtgactggtcctgtggtt

SEQ ID NO: 489820 - DNA, 25 bp, Homo sapien
tcatgtccttgacgatgaattaggg

SEQ ID NO: 489821 - DNA, 25 bp, Homo sapien
tcaattaaggcgcagggaatcatgt

SEQ ID NO: 489822 - DNA, 25 bp, Homo sapien
tatgaatagccagtgttgcccagtg

SEQ ID NO: 489823 - DNA, 25 bp, Homo sapien
gatttcgggccatgattgacacagt

SEQ ID NO: 489824 - DNA, 25 bp, Homo sapien
caaacttcctcgagtggtgggagaa

SEQ ID NO: 489825 - DNA, 25 bp, Homo sapien
cagtatacaggtgctccttagaaag

SEQ ID NO: 489826 - DNA, 25 bp, Homo sapien
gagggcatgcgctttcctgacaagc

SEQ ID NO: 489827 - DNA, 25 bp, Homo sapien
tcaccttgatggtgccgggagcagc

SEQ ID NO: 489828 - DNA, 25 bp, Homo sapien
gctgcgtcacccactctgtcaatat

SEQ ID NO: 489829 - DNA, 25 bp, Homo sapien
tgatgtgtatatagcttttctcctg

SEQ ID NO: 489830 - DNA, 25 bp, Homo sapien
gaaatactacccttgggcaggcagc

SEQ ID NO: 489831 - DNA, 25 bp, Homo sapien
caaagaggagcccatgactttagga

SEQ ID NO: 489832 - DNA, 25 bp, Homo sapien
cagccctcagaaatgaaagcccaca

SEQ ID NO: 489833 - DNA, 25 bp, Homo sapien
ggattgtcaggacatgtcccccgcc

SEQ ID NO: 489834 - DNA, 25 bp, Homo sapien
cttcagtgaaaaacagccctcagaa

SEQ ID NO: 489835 - DNA, 25 bp, Homo sapien
gaggaaaaggtgttgccaagaactg

SEQ ID NO: 489836 - DNA, 25 bp, Homo sapien
actgagtcacttgcaggttcttgga

SEQ ID NO: 489837 - DNA, 25 bp, Homo sapien
tgtatccagatgaaaatatgacggt

SEQ ID NO: 489838 - DNA, 25 bp, Homo sapien
gcacaattgccctgagcacaaaggt

SEQ ID NO: 489839 - DNA, 25 bp, Homo sapien
tctgaaaggagtggcggcttaaaaa

SEQ ID NO: 489840 - DNA, 25 bp, Homo sapien
ttttttagtgcagattcaagtttcc

SEQ ID NO: 489841 - DNA, 25 bp, Homo sapien
gcaattcaggtttcttggtgataca

SEQ ID NO: 489842 - DNA, 25 bp, Homo sapien
gcctgaaagacttcctttagcaatt

SEQ ID NO: 489843 - DNA, 25 bp, Homo sapien
gctaagggatgagctcctaggtcaa

SEQ ID NO: 489844 - DNA, 25 bp, Homo sapien
aagggatgagctcctaggtcaaagg

SEQ ID NO: 489845 - DNA, 25 bp, Homo sapien
gatgagctcctaggtcaaaggccat

SEQ ID NO: 489846 - DNA, 25 bp, Homo sapien
ctgctaagggatgagctcctaggtc

SEQ ID NO: 489847 - DNA, 25 bp, Homo sapien
ctctgtttacagacgtccttccgta

SEQ ID NO: 489848 - DNA, 25 bp, Homo sapien
tctgtttacagacgtccttccgtaa

SEQ ID NO: 489849 - DNA, 25 bp, Homo sapien
agttccctggcttgagagtgccctc

SEQ ID NO: 489850 - DNA, 25 bp, Homo sapien
gcttcctcggggaccttcacagcca

SEQ ID NO: 489851 - DNA, 25 bp, Homo sapien
ctggtccagtgcaagagtctgggag

SEQ ID NO: 489852 - DNA, 25 bp, Homo sapien
ggtccagtgcaagagtctgggagaa

SEQ ID NO: 489853 - DNA, 25 bp, Homo sapien
tccagtgcaagagtctgggagaatt

SEQ ID NO: 489854 - DNA, 25 bp, Homo sapien
ccagtgcaagagtctgggagaattg

SEQ ID NO: 489855 - DNA, 25 bp, Homo sapien
ccacctcgccgggaatttaagagag

SEQ ID NO: 489856 - DNA, 25 bp, Homo sapien
taaacctggccgtgtacattggcag

SEQ ID NO: 489857 - DNA, 25 bp, Homo sapien
ccgcgctgatggctgttttgacaaa

SEQ ID NO: 489858 - DNA, 25 bp, Homo sapien
cagcgcaggtgaaacattgtgccgc

SEQ ID NO: 489859 - DNA, 25 bp, Homo sapien
gatcctgatggtttccttgtgtctg

SEQ ID NO: 489860 - DNA, 25 bp, Homo sapien
tcctgatggtttccttgtgtctgag

SEQ ID NO: 489861 - DNA, 25 bp, Homo sapien
cttgatcctgatggtttccttgtgt

SEQ ID NO: 489862 - DNA, 25 bp, Homo sapien
tgatcctgatggtttccttgtgtct

SEQ ID NO: 489863 - DNA, 25 bp, Homo sapien
cagtggacgccaggagtctgcgatt

SEQ ID NO: 489864 - DNA, 25 bp, Homo sapien
gattaatcgactgtgatcaccaggg

SEQ ID NO: 489865 - DNA, 25 bp, Homo sapien
cgtgggaccctacaaacactgggtg

SEQ ID NO: 489866 - DNA, 25 bp, Homo sapien
gatttctgctctgcttacgtgggac

SEQ ID NO: 489867 - DNA, 25 bp, Homo sapien
ccccacaccaacgagcagaaggtgg

SEQ ID NO: 489868 - DNA, 25 bp, Homo sapien
cacaccaacgagcagaaggtggcaa

SEQ ID NO: 489869 - DNA, 25 bp, Homo sapien
ccaacgagcagaaggtggcaagcag

SEQ ID NO: 489870 - DNA, 25 bp, Homo sapien
caccaacgagcagaaggtggcaagc

SEQ ID NO: 489871 - DNA, 25 bp, Homo sapien
tgaaacatcctgtggactcaaggga

SEQ ID NO: 489872 - DNA, 25 bp, Homo sapien
tctgccatcggatgacaggaccatg

SEQ ID NO: 489873 - DNA, 25 bp, Homo sapien
tccagactctgccatcggatgacag

SEQ ID NO: 489874 - DNA, 25 bp, Homo sapien
cggatgacaggaccatgtctgaaac

SEQ ID NO: 489875 - DNA, 25 bp, Homo sapien
gcagttatcttactatatgcgagtg

SEQ ID NO: 489876 - DNA, 25 bp, Homo sapien
tactatatgcgagtgtgtttccgga

SEQ ID NO: 489877 - DNA, 25 bp, Homo sapien
ccgagtactgattgtttcactaaac

SEQ ID NO: 489878 - DNA, 25 bp, Homo sapien
agtgtgtttccggatgcaccgagta

SEQ ID NO: 489879 - DNA, 25 bp, Homo sapien
ccaggtcctggagataattgtacta

SEQ ID NO: 489880 - DNA, 25 bp, Homo sapien
ttgtgcagaccattaacataggcag

SEQ ID NO: 489881 - DNA, 25 bp, Homo sapien
aattgtactaatgtcagggaaactg

SEQ ID NO: 489882 - DNA, 25 bp, Homo sapien
aggtgtgctcatgcaaagattgtgc

SEQ ID NO: 489883 - DNA, 25 bp, Homo sapien
ttgaactttaagttcctttcctgca

SEQ ID NO: 489884 - DNA, 25 bp, Homo sapien
tgaactttaagttcctttcctgcag

SEQ ID NO: 489885 - DNA, 25 bp, Homo sapien
tttcctgcagggttctttaaagcca

SEQ ID NO: 489886 - DNA, 25 bp, Homo sapien
ttcctgcagggttctttaaagccat

SEQ ID NO: 489887 - DNA, 25 bp, Homo sapien
tgaagaacctaggtctccaggtgac

SEQ ID NO: 489888 - DNA, 25 bp, Homo sapien
gcccttgctgcaactggatcatgaa

SEQ ID NO: 489889 - DNA, 25 bp, Homo sapien
ttcagcctgacttagagagatactc

SEQ ID NO: 489890 - DNA, 25 bp, Homo sapien
gaggattggcaaatcttcagcctga

SEQ ID NO: 489891 - DNA, 25 bp, Homo sapien
tcctggcatggagaggcgagcgctg

SEQ ID NO: 489892 - DNA, 25 bp, Homo sapien
ggcacatagcgtcctggcatggaga

SEQ ID NO: 489893 - DNA, 25 bp, Homo sapien
cgaggcacatagcgtcctggcatgg

SEQ ID NO: 489894 - DNA, 25 bp, Homo sapien
gaggcgagcgctggggtccggcctg

SEQ ID NO: 489895 - DNA, 25 bp, Homo sapien
ctcatgctgtgacctctcataggtc

SEQ ID NO: 489896 - DNA, 25 bp, Homo sapien
ccaggtttgaggagatgagtccccc

SEQ ID NO: 489897 - DNA, 25 bp, Homo sapien
cataggtctcggtcccccaggtttg

SEQ ID NO: 489898 - DNA, 25 bp, Homo sapien
ttgaggagatgagtccccctggctg

SEQ ID NO: 489899 - DNA, 25 bp, Homo sapien
tttagagacatagcaagggagacag

SEQ ID NO: 489900 - DNA, 25 bp, Homo sapien
cagatggattagggaagtggggaag

SEQ ID NO: 489901 - DNA, 25 bp, Homo sapien
acagatggattagggaagtggggaa

SEQ ID NO: 489902 - DNA, 25 bp, Homo sapien
actcttagccgagaagtgtgcatgc

SEQ ID NO: 489903 - DNA, 25 bp, Homo sapien
gtaaccttcgttctcatccactgcg

SEQ ID NO: 489904 - DNA, 25 bp, Homo sapien
tgtctgggtacctccgatgtcctgg

SEQ ID NO: 489905 - DNA, 25 bp, Homo sapien
caatggtggttcatccagggtgact

SEQ ID NO: 489906 - DNA, 25 bp, Homo sapien
catggtagacggtgcaagggatctc

SEQ ID NO: 489907 - DNA, 25 bp, Homo sapien
taggtcttagcatacgaatttgggt

SEQ ID NO: 489908 - DNA, 25 bp, Homo sapien
gagggcccacgttctggctcatagg

SEQ ID NO: 489909 - DNA, 25 bp, Homo sapien
cgttctatagcagtagtcaaggtga

SEQ ID NO: 489910 - DNA, 25 bp, Homo sapien
tacatttattaatcctgatcataaa

SEQ ID NO: 489911 - DNA, 25 bp, Homo sapien
atcctgatcataaagtaggaaatac

SEQ ID NO: 489912 - DNA, 25 bp, Homo sapien
cacagtgttattgtcaccatttcag

SEQ ID NO: 489913 - DNA, 25 bp, Homo sapien
acagtgttattgtcaccatttcaga

SEQ ID NO: 489914 - DNA, 25 bp, Homo sapien
gaaaaagtgtcttgggtcatgagtc

SEQ ID NO: 489915 - DNA, 25 bp, Homo sapien
gagtgtgcacagatcctcgggcttt

SEQ ID NO: 489916 - DNA, 25 bp, Homo sapien
gaaacctgggcattcaatactatgg

SEQ ID NO: 489917 - DNA, 25 bp, Homo sapien
caattgtacagagacaagggcccta

SEQ ID NO: 489918 - DNA, 25 bp, Homo sapien
tgaggtagtactccccaaaatgtgg

SEQ ID NO: 489919 - DNA, 25 bp, Homo sapien
acagatgaggtagtactccccaaaa

SEQ ID NO: 489920 - DNA, 25 bp, Homo sapien
tgcaggttcgctgagcccagaaagc

SEQ ID NO: 489921 - DNA, 25 bp, Homo sapien
caaaatgtggaactttggtattgca

SEQ ID NO: 489922 - DNA, 25 bp, Homo sapien
ggtggtttaaccagcaatggttcat

SEQ ID NO: 489923 - DNA, 25 bp, Homo sapien
ccagcaatggttcattaatccaaca

SEQ ID NO: 489924 - DNA, 25 bp, Homo sapien
agaggatgaggtggtttaaccagca

SEQ ID NO: 489925 - DNA, 25 bp, Homo sapien
taatccaacactaagtgggaaagca

SEQ ID NO: 489926 - DNA, 25 bp, Homo sapien
caatgggacgatggcttcagcccct

SEQ ID NO: 489927 - DNA, 25 bp, Homo sapien
tgctgaagacaatgggacgatggct

SEQ ID NO: 489928 - DNA, 25 bp, Homo sapien
attgtgctgaagacaatgggacgat

SEQ ID NO: 489929 - DNA, 25 bp, Homo sapien
aagacaatgggacgatggcttcagc

SEQ ID NO: 489930 - DNA, 25 bp, Homo sapien
tcttcaggaaattgctgtgtattgg

SEQ ID NO: 489931 - DNA, 25 bp, Homo sapien
tgtaattcaattccttttcttcagg

SEQ ID NO: 489932 - DNA, 25 bp, Homo sapien
ttgctgtgtattggctttcaaatat

SEQ ID NO: 489933 - DNA, 25 bp, Homo sapien
caggaaattgctgtgtattggcttt

SEQ ID NO: 489934 - DNA, 25 bp, Homo sapien
gcttgcaagtacctggccgaaatgt

SEQ ID NO: 489935 - DNA, 25 bp, Homo sapien
cttgcaagtacctggccgaaatgtc

SEQ ID NO: 489936 - DNA, 25 bp, Homo sapien
cagttaaaatgcacagcggccattt

SEQ ID NO: 489937 - DNA, 25 bp, Homo sapien
ggaccttcacttggtgcacctggaa

SEQ ID NO: 489938 - DNA, 25 bp, Homo sapien
gctgcttgttgcaggcgtaacagcc

SEQ ID NO: 489939 - DNA, 25 bp, Homo sapien
gcaggcgtaacagccgcctttacca

SEQ ID NO: 489940 - DNA, 25 bp, Homo sapien
gatacaaccgttgcaagggagatga

SEQ ID NO: 489941 - DNA, 25 bp, Homo sapien
aaaatgattttgatacaaccgttgc

SEQ ID NO: 489942 - DNA, 25 bp, Homo sapien
ctgtaggaacgtttggcacatttca

SEQ ID NO: 489943 - DNA, 25 bp, Homo sapien
acgtttggcacatttcagtcaccag

SEQ ID NO: 489944 - DNA, 25 bp, Homo sapien
tggtcttttgggcaggtgtggccac

SEQ ID NO: 489945 - DNA, 25 bp, Homo sapien
actgagaagcaagaagaatgacagt

SEQ ID NO: 489946 - DNA, 25 bp, Homo sapien
catggtccatttgccgtagtgggtt

SEQ ID NO: 489947 - DNA, 25 bp, Homo sapien
tccatttgccgtagtgggttagatc

SEQ ID NO: 489948 - DNA, 25 bp, Homo sapien
ctgtagctgagcaggggcaatgtat

SEQ ID NO: 489949 - DNA, 25 bp, Homo sapien
tgtagctgagcaggggcaatgtatt

SEQ ID NO: 489950 - DNA, 25 bp, Homo sapien
gctgtagctgagcaggggcaatgta

SEQ ID NO: 489951 - DNA, 25 bp, Homo sapien
aaactctcctggttgaaaatgcatt

SEQ ID NO: 489952 - DNA, 25 bp, Homo sapien
gaaactctcctggttgaaaatgcat

SEQ ID NO: 489953 - DNA, 25 bp, Homo sapien
tctctgtcatgcggcaggaggagag

SEQ ID NO: 489954 - DNA, 25 bp, Homo sapien
gtctctctgtcatgcggcaggagga

SEQ ID NO: 489955 - DNA, 25 bp, Homo sapien
ccttctctgatgcagtgatggttga

SEQ ID NO: 489956 - DNA, 25 bp, Homo sapien
cagagatggaagacaaggtctgtct

SEQ ID NO: 489957 - DNA, 25 bp, Homo sapien
gcccaacctcttttgatgcttcctg

SEQ ID NO: 489958 - DNA, 25 bp, Homo sapien
cctgatgggtctggcttcgtgcagc

SEQ ID NO: 489959 - DNA, 25 bp, Homo sapien
ttcttgaccttcaaagccagttttg

SEQ ID NO: 489960 - DNA, 25 bp, Homo sapien
ttgaccttcaaagccagttttggct

SEQ ID NO: 489961 - DNA, 25 bp, Homo sapien
ggctttgattttgcagaggaggggc

SEQ ID NO: 489962 - DNA, 25 bp, Homo sapien
ctttgattttgcagaggaggggcgt

SEQ ID NO: 489963 - DNA, 25 bp, Homo sapien
tcggcgtcgctggtgtgaacatgca

SEQ ID NO: 489964 - DNA, 25 bp, Homo sapien
tggaggtggggtcggcgtcgctggt

SEQ ID NO: 489965 - DNA, 25 bp, Homo sapien
tctgtgtcgatgaagcgaagggcct

SEQ ID NO: 489966 - DNA, 25 bp, Homo sapien
cctaggtctgtgtcgatgaagcgaa

SEQ ID NO: 489967 - DNA, 25 bp, Homo sapien
tactgtcttgagtgactttccaagc

SEQ ID NO: 489968 - DNA, 25 bp, Homo sapien
aagatactgtcttgagtgactttcc

SEQ ID NO: 489969 - DNA, 25 bp, Homo sapien
taaaagatactgtcttgagtgactt

SEQ ID NO: 489970 - DNA, 25 bp, Homo sapien
tcttgagtgactttccaagccccgg

SEQ ID NO: 489971 - DNA, 25 bp, Homo sapien
tgagaacacgggcaacggacttgca

SEQ ID NO: 489972 - DNA, 25 bp, Homo sapien
gcagacaactcgaatcttagagagc

SEQ ID NO: 489973 - DNA, 25 bp, Homo sapien
gcggcgcctggcgtgagtcttctca

SEQ ID NO: 489974 - DNA, 25 bp, Homo sapien
gctcgcatctcttgcccttgcagaa

SEQ ID NO: 489975 - DNA, 25 bp, Homo sapien
ccgcagtgagtacagccgctcctaa

SEQ ID NO: 489976 - DNA, 25 bp, Homo sapien
gcagtgagtacagccgctcctaacg

SEQ ID NO: 489977 - DNA, 25 bp, Homo sapien
gagtacagccgctcctaacgctgct

SEQ ID NO: 489978 - DNA, 25 bp, Homo sapien
gtgagtacagccgctcctaacgctg

SEQ ID NO: 489979 - DNA, 25 bp, Homo sapien
ccataattccagttctcatcctgtg

SEQ ID NO: 489980 - DNA, 25 bp, Homo sapien
tacagctgcctccataattccagtt

SEQ ID NO: 489981 - DNA, 25 bp, Homo sapien
tgtctcttctcgtgtaccctacact

SEQ ID NO: 489982 - DNA, 25 bp, Homo sapien
tggtgtctcttctcgtgtaccctac

SEQ ID NO: 489983 - DNA, 25 bp, Homo sapien
gctggtgtctcttctcgtgtaccct

SEQ ID NO: 489984 - DNA, 25 bp, Homo sapien
ggtgtctcttctcgtgtaccctaca

SEQ ID NO: 489985 - DNA, 25 bp, Homo sapien
cagagcattggccttaatacaagac

SEQ ID NO: 489986 - DNA, 25 bp, Homo sapien
ggtcggcttcacaatgccacttaga

SEQ ID NO: 489987 - DNA, 25 bp, Homo sapien
taaccagggtgagatcatgtactgc

SEQ ID NO: 489988 - DNA, 25 bp, Homo sapien
tctacagttgcatttttggtcggct

SEQ ID NO: 489989 - DNA, 25 bp, Homo sapien
gatgtccatatctcacctcgcaaag

SEQ ID NO: 489990 - DNA, 25 bp, Homo sapien
tcaacacagtgtgcatctcggacat

SEQ ID NO: 489991 - DNA, 25 bp, Homo sapien
tctcggacatccaaaactccctgtg

SEQ ID NO: 489992 - DNA, 25 bp, Homo sapien
gcacagcgtgcaagccgatgacttc

SEQ ID NO: 489993 - DNA, 25 bp, Homo sapien
tcagttccgactgctttgtgcacag

SEQ ID NO: 489994 - DNA, 25 bp, Homo sapien
cacagctgactcagagaccgggtgg

SEQ ID NO: 489995 - DNA, 25 bp, Homo sapien
cttgtcagttccgactgctttgtgc

SEQ ID NO: 489996 - DNA, 25 bp, Homo sapien
gttccgactgctttgtgcacagctg

SEQ ID NO: 489997 - DNA, 25 bp, Homo sapien
gtcggcttgatcagcacacaggtca

SEQ ID NO: 489998 - DNA, 25 bp, Homo sapien
tttgctgccatatcaggacgtcggg

SEQ ID NO: 489999 - DNA, 25 bp, Homo sapien
gacttcattctaccaccctttgctg

SEQ ID NO: 490000 - DNA, 25 bp, Homo sapien
caggtcattcctagagagatcagct

SEQ ID NO: 490001 - DNA, 25 bp, Homo sapien
gacaggagggctcatcagataatcg

SEQ ID NO: 490002 - DNA, 25 bp, Homo sapien
tggtgacataaaagaacaggtgctg

SEQ ID NO: 490003 - DNA, 25 bp, Homo sapien
ggagaccattcctcatcagcacgct

SEQ ID NO: 490004 - DNA, 25 bp, Homo sapien
cacttgcacataggttgagggcaat

SEQ ID NO: 490005 - DNA, 25 bp, Homo sapien
aacatggattaaagccacatggctt

SEQ ID NO: 490006 - DNA, 25 bp, Homo sapien
ctcctaaagatggcctggtgggaca

SEQ ID NO: 490007 - DNA, 25 bp, Homo sapien
atggcctggtgggacatgctctctc

SEQ ID NO: 490008 - DNA, 25 bp, Homo sapien
cctaaagatggcctggtgggacatg

SEQ ID NO: 490009 - DNA, 25 bp, Homo sapien
ggtgggacatgctctctccctgagt

SEQ ID NO: 490010 - DNA, 25 bp, Homo sapien
tgccgggactgggttttttgctgca

SEQ ID NO: 490011 - DNA, 25 bp, Homo sapien
actatcgggtactttgctaaacaat

SEQ ID NO: 490012 - DNA, 25 bp, Homo sapien
gaagctcccactgaggccgcgctgc

SEQ ID NO: 490013 - DNA, 25 bp, Homo sapien
ttaagcatggtggaagcaccattct

SEQ ID NO: 490014 - DNA, 25 bp, Homo sapien
gcctgtcataggttttaaatctgct

SEQ ID NO: 490015 - DNA, 25 bp, Homo sapien
agtttcacattgcagttagccccag

SEQ ID NO: 490016 - DNA, 25 bp, Homo sapien
cagaaaatgaaatccgtgaagtcac

SEQ ID NO: 490017 - DNA, 25 bp, Homo sapien
taagtaacacagtattatgcctgag

SEQ ID NO: 490018 - DNA, 25 bp, Homo sapien
cagtgagtacctgcaaaaatgagtt

SEQ ID NO: 490019 - DNA, 25 bp, Homo sapien
gagttccctgcaaccaattgaaaag

SEQ ID NO: 490020 - DNA, 25 bp, Homo sapien
ttgtatgatcgtccctggtcacccg

SEQ ID NO: 490021 - DNA, 25 bp, Homo sapien
ggtcacccgactttggaatttgcac

SEQ ID NO: 490022 - DNA, 25 bp, Homo sapien
tctataaaaggtaggtcagatcccc

SEQ ID NO: 490023 - DNA, 25 bp, Homo sapien
caaggtgccctttagccagatgcta

SEQ ID NO: 490024 - DNA, 25 bp, Homo sapien
tgatgatatattcgggcaggactgt

SEQ ID NO: 490025 - DNA, 25 bp, Homo sapien
cgattgagccttacgacactttggt

SEQ ID NO: 490026 - DNA, 25 bp, Homo sapien
ctagtcttgtagcattcggccttgg

SEQ ID NO: 490027 - DNA, 25 bp, Homo sapien
ttcggccttggtgaacacacacgct

SEQ ID NO: 490028 - DNA, 25 bp, Homo sapien
tagcattcggccttggtgaacacac

SEQ ID NO: 490029 - DNA, 25 bp, Homo sapien
acacacacgctccctggaagctgga

SEQ ID NO: 490030 - DNA, 25 bp, Homo sapien
gagcccggcgaacatttactacaag

SEQ ID NO: 490031 - DNA, 25 bp, Homo sapien
cttgctgaagtaccggaggagacac

SEQ ID NO: 490032 - DNA, 25 bp, Homo sapien
ttactacaaggtctgagagggaccc

SEQ ID NO: 490033 - DNA, 25 bp, Homo sapien
actacgagaaggtcagcggcgacta

SEQ ID NO: 490034 - DNA, 25 bp, Homo sapien
tcatgacgccactgtgacctggtgt

SEQ ID NO: 490035 - DNA, 25 bp, Homo sapien
tcagatagcatacgtgcggcagtgt

SEQ ID NO: 490036 - DNA, 25 bp, Homo sapien
tatggtgctaatgttgccgatgccc

SEQ ID NO: 490037 - DNA, 25 bp, Homo sapien
gggtgtgccagacaagagccatgaa

SEQ ID NO: 490038 - DNA, 25 bp, Homo sapien
aaatcagccactaagcctttcagag

SEQ ID NO: 490039 - DNA, 25 bp, Homo sapien
aaaggtgattttcactatgggaagc

SEQ ID NO: 490040 - DNA, 25 bp, Homo sapien
gggtttggaacctcagcataagaat

SEQ ID NO: 490041 - DNA, 25 bp, Homo sapien
tttatttcagagttcgctgccagga

SEQ ID NO: 490042 - DNA, 25 bp, Homo sapien
ctgagctctgggtagaatgtcctat

SEQ ID NO: 490043 - DNA, 25 bp, Homo sapien
caaactgcttcaaagttgttccatg

SEQ ID NO: 490044 - DNA, 25 bp, Homo sapien
ttgttccatgtttaacactcttctt

SEQ ID NO: 490045 - DNA, 25 bp, Homo sapien
tctgggtagaatgtcctattattgt

SEQ ID NO: 490046 - DNA, 25 bp, Homo sapien
actttctgctcttccgtcttttcac

SEQ ID NO: 490047 - DNA, 25 bp, Homo sapien
cttttcactcttgagtgtctgtagc

SEQ ID NO: 490048 - DNA, 25 bp, Homo sapien
tgtgcacctgccatcactttctgct

SEQ ID NO: 490049 - DNA, 25 bp, Homo sapien
cctatgtgtacatgtgcttgcacgc

SEQ ID NO: 490050 - DNA, 25 bp, Homo sapien
gctaagaagtttgccaggaagtcca

SEQ ID NO: 490051 - DNA, 25 bp, Homo sapien
agttactgaactactctggccatca

SEQ ID NO: 490052 - DNA, 25 bp, Homo sapien
caaaagcatatggtagcctgggata

SEQ ID NO: 490053 - DNA, 25 bp, Homo sapien
gaaagacttccacgatggcgtaggc

SEQ ID NO: 490054 - DNA, 25 bp, Homo sapien
tcccttcaggcaccactgatgtgtg

SEQ ID NO: 490055 - DNA, 25 bp, Homo sapien
tcagatgactgcctcggaagaagcc

SEQ ID NO: 490056 - DNA, 25 bp, Homo sapien
gcttggtgtggagctagactttccc

SEQ ID NO: 490057 - DNA, 25 bp, Homo sapien
cacatgtgcgtgtcttgatttccct

SEQ ID NO: 490058 - DNA, 25 bp, Homo sapien
gagccaccaggtatattgtcacaca

SEQ ID NO: 490059 - DNA, 25 bp, Homo sapien
taatctacactctttggccaaccgt

SEQ ID NO: 490060 - DNA, 25 bp, Homo sapien
tgcaatttcgggttcactacacagc

SEQ ID NO: 490061 - DNA, 25 bp, Homo sapien
catcagatgtttgtgctaaggtgcg

SEQ ID NO: 490062 - DNA, 25 bp, Homo sapien
tcagttcaccgtgtgtttgaatttc

SEQ ID NO: 490063 - DNA, 25 bp, Homo sapien
gctaaactggtttgtgtgccgatca

SEQ ID NO: 490064 - DNA, 25 bp, Homo sapien
gccgatcagttcaccgtgtgtttga

SEQ ID NO: 490065 - DNA, 25 bp, Homo sapien
ggtttgtgtgccgatcagttcaccg

SEQ ID NO: 490066 - DNA, 25 bp, Homo sapien
tttcatctccgcgatttttcccatt

SEQ ID NO: 490067 - DNA, 25 bp, Homo sapien
tcatctccgcgatttttcccattca

SEQ ID NO: 490068 - DNA, 25 bp, Homo sapien
atctccgcgatttttcccattcagg

SEQ ID NO: 490069 - DNA, 25 bp, Homo sapien
gagcctttcatctccgcgatttttc

SEQ ID NO: 490070 - DNA, 25 bp, Homo sapien
gaaaatgtctcctgtcatacgccca

SEQ ID NO: 490071 - DNA, 25 bp, Homo sapien
ggcaaagccctgagacgtgcaggaa

SEQ ID NO: 490072 - DNA, 25 bp, Homo sapien
gaaggaggtatctgtgaagcagcct

SEQ ID NO: 490073 - DNA, 25 bp, Homo sapien
tactgggctgattatacttgattgg

SEQ ID NO: 490074 - DNA, 25 bp, Homo sapien
cggccagaggtctccaacaaccaaa

SEQ ID NO: 490075 - DNA, 25 bp, Homo sapien
gaccatgcagccgccggccagaggt

SEQ ID NO: 490076 - DNA, 25 bp, Homo sapien
gccagaggtctccaacaaccaaatc

SEQ ID NO: 490077 - DNA, 25 bp, Homo sapien
gaggtctccaacaaccaaatcttca

SEQ ID NO: 490078 - DNA, 25 bp, Homo sapien
gcttcttgccggtggattcattcag

SEQ ID NO: 490079 - DNA, 25 bp, Homo sapien
atcaagtccaggcttatttctacag

SEQ ID NO: 490080 - DNA, 25 bp, Homo sapien
acagcaaactgggattctggcttct

SEQ ID NO: 490081 - DNA, 25 bp, Homo sapien
gtacagcccatctggcttttgatgt

SEQ ID NO: 490082 - DNA, 25 bp, Homo sapien
atccaacatttagctttgtagtcta

SEQ ID NO: 490083 - DNA, 25 bp, Homo sapien
catccaacatttagctttgtagtct

SEQ ID NO: 490084 - DNA, 25 bp, Homo sapien
tccaacatttagctttgtagtctac

SEQ ID NO: 490085 - DNA, 25 bp, Homo sapien
agccacagagctcttctgtgagttt

SEQ ID NO: 490086 - DNA, 25 bp, Homo sapien
ttctgtgagttttgtctttcccacc

SEQ ID NO: 490087 - DNA, 25 bp, Homo sapien
tcagccacagagctcttctgtgagt

SEQ ID NO: 490088 - DNA, 25 bp, Homo sapien
tcttctgtgagttttgtctttccca

SEQ ID NO: 490089 - DNA, 25 bp, Homo sapien
gaaggcccttgcctccaggctgttg

SEQ ID NO: 490090 - DNA, 25 bp, Homo sapien
gataaagggtgaagccatggcaaca

SEQ ID NO: 490091 - DNA, 25 bp, Homo sapien
aatgacacgtctctgaaaagggcgc

SEQ ID NO: 490092 - DNA, 25 bp, Homo sapien
ggcagagtataaagaaactgatccc

SEQ ID NO: 490093 - DNA, 25 bp, Homo sapien
ctgccgacgcaaagacatgcagatg

SEQ ID NO: 490094 - DNA, 25 bp, Homo sapien
tacaaagcataagctgttgacgctg

SEQ ID NO: 490095 - DNA, 25 bp, Homo sapien
ttaagatgatttgctaagcacctgg

SEQ ID NO: 490096 - DNA, 25 bp, Homo sapien
gctggaggttaagatgatttgctaa

SEQ ID NO: 490097 - DNA, 25 bp, Homo sapien
tgtaggagccataggaaagagtcct

SEQ ID NO: 490098 - DNA, 25 bp, Homo sapien
ctgtaggagccataggaaagagtcc

SEQ ID NO: 490099 - DNA, 25 bp, Homo sapien
gtctcccttgcagctgaatgctagc

SEQ ID NO: 490100 - DNA, 25 bp, Homo sapien
tatgtccagacctgcgagggccctg

SEQ ID NO: 490101 - DNA, 25 bp, Homo sapien
aagatgagtctgtctttccagctat

SEQ ID NO: 490102 - DNA, 25 bp, Homo sapien
aattctcctgataacggcctgcctg

SEQ ID NO: 490103 - DNA, 25 bp, Homo sapien
tgtgtatccggtaggagaattagaa

SEQ ID NO: 490104 - DNA, 25 bp, Homo sapien
tagtttgtgtgtatccggtaggaga

SEQ ID NO: 490105 - DNA, 25 bp, Homo sapien
attagtttgtgtgtatccggtagga

SEQ ID NO: 490106 - DNA, 25 bp, Homo sapien
tattaactattagtttgtgtgtatc

SEQ ID NO: 490107 - DNA, 25 bp, Homo sapien
cgggagtcggccgtccgagctgcgt

SEQ ID NO: 490108 - DNA, 25 bp, Homo sapien
agtcggccgtccgagctgcgtccgg

SEQ ID NO: 490109 - DNA, 25 bp, Homo sapien
cctggagccgcacgggagtcggccg

SEQ ID NO: 490110 - DNA, 25 bp, Homo sapien
agccgcacgggagtcggccgtccga

SEQ ID NO: 490111 - DNA, 25 bp, Homo sapien
gctcgggccgctgcccgctgcactg

SEQ ID NO: 490112 - DNA, 25 bp, Homo sapien
gcgcgctcgggccgctgcccgctgc

SEQ ID NO: 490113 - DNA, 25 bp, Homo sapien
cccgcgcgctcgggccgctgcccgc

SEQ ID NO: 490114 - DNA, 25 bp, Homo sapien
ggcgcccgcgcgctcgggccgctgc

SEQ ID NO: 490115 - DNA, 25 bp, Homo sapien
ggagccgcgggccaatgggcttcgc

SEQ ID NO: 490116 - DNA, 25 bp, Homo sapien
gggccccgcgtttatagcgctctga

SEQ ID NO: 490117 - DNA, 25 bp, Homo sapien
gggccaatgggcttcgcgcggcggg

SEQ ID NO: 490118 - DNA, 25 bp, Homo sapien
ttatagcgctctgacagcgcggcgg

SEQ ID NO: 490119 - DNA, 25 bp, Homo sapien
tgcagacgccgagtgagaagcacat

SEQ ID NO: 490120 - DNA, 25 bp, Homo sapien
gaactgtgacttgattagatgctgc

SEQ ID NO: 490121 - DNA, 25 bp, Homo sapien
gaaagtagcgaggagttcctgccag

SEQ ID NO: 490122 - DNA, 25 bp, Homo sapien
gctcgagatgcggagaagcaaagct

SEQ ID NO: 490123 - DNA, 25 bp, Homo sapien
tcctctgccaggctatgggaaagag

SEQ ID NO: 490124 - DNA, 25 bp, Homo sapien
caccatccagtctttaatgtgctgc

SEQ ID NO: 490125 - DNA, 25 bp, Homo sapien
ccccagtctattagaagttaagatg

SEQ ID NO: 490126 - DNA, 25 bp, Homo sapien
tgtgctgcaacaatgtagtaatttg

SEQ ID NO: 490127 - DNA, 25 bp, Homo sapien
aaaactatggatggtctgataaggc

SEQ ID NO: 490128 - DNA, 25 bp, Homo sapien
gctcttgatgttcctgatacaggta

SEQ ID NO: 490129 - DNA, 25 bp, Homo sapien
gataaggcttttactgaccccactg

SEQ ID NO: 490130 - DNA, 25 bp, Homo sapien
tcccagggtattactggacctatgt

SEQ ID NO: 490131 - DNA, 25 bp, Homo sapien
gccgaagaacagttgagaattgttg

SEQ ID NO: 490132 - DNA, 25 bp, Homo sapien
gagctagagcgaatactggaagaga

SEQ ID NO: 490133 - DNA, 25 bp, Homo sapien
tcagacagaaggtagctataaagct

SEQ ID NO: 490134 - DNA, 25 bp, Homo sapien
ttgccaggaaactatcattagggag

SEQ ID NO: 490135 - DNA, 25 bp, Homo sapien
gaagaacgtgcaaaacgtgaggagc

SEQ ID NO: 490136 - DNA, 25 bp, Homo sapien
ttttaaagaggaagctggcgcgtat

SEQ ID NO: 490137 - DNA, 25 bp, Homo sapien
gatgcaggtattgccaagctaacag

SEQ ID NO: 490138 - DNA, 25 bp, Homo sapien
gaagaagcccgtagttccatgaagt

SEQ ID NO: 490139 - DNA, 25 bp, Homo sapien
tataagctgccttccgaaattgtca

SEQ ID NO: 490140 - DNA, 25 bp, Homo sapien
gcaaattactttacagccctgagtg

SEQ ID NO: 490141 - DNA, 25 bp, Homo sapien
tagcattctgatcataaggccctcc

SEQ ID NO: 490142 - DNA, 25 bp, Homo sapien
gcttgtttgcactgattactccagg

SEQ ID NO: 490143 - DNA, 25 bp, Homo sapien
tactccaggatccaaaaacttggtg

SEQ ID NO: 490144 - DNA, 25 bp, Homo sapien
gtgagtggaggctgactgagaccag

SEQ ID NO: 490145 - DNA, 25 bp, Homo sapien
gagtggaggctgactgagaccagtg

SEQ ID NO: 490146 - DNA, 25 bp, Homo sapien
ggaggctgactgagaccagtgaccc

SEQ ID NO: 490147 - DNA, 25 bp, Homo sapien
gctgactgagaccagtgaccctggg

SEQ ID NO: 490148 - DNA, 25 bp, Homo sapien
gaactttcactggtgatgacctggg

SEQ ID NO: 490149 - DNA, 25 bp, Homo sapien
aactcaatacagttggtgccaagag

SEQ ID NO: 490150 - DNA, 25 bp, Homo sapien
agatggactctgaagtggaactgca

SEQ ID NO: 490151 - DNA, 25 bp, Homo sapien
cctggcttgccggagaagtgcaagt

SEQ ID NO: 490152 - DNA, 25 bp, Homo sapien
taggaagtagatgcaacactccccg

SEQ ID NO: 490153 - DNA, 25 bp, Homo sapien
ggcatgcacaggtatcgtacagata

SEQ ID NO: 490154 - DNA, 25 bp, Homo sapien
gggacttccatacaaggcatgcaca

SEQ ID NO: 490155 - DNA, 25 bp, Homo sapien
tcatggagatccgaggacagggcac

SEQ ID NO: 490156 - DNA, 25 bp, Homo sapien
tcttttgtgccaagcgagtctgaac

SEQ ID NO: 490157 - DNA, 25 bp, Homo sapien
ttctccatgggagtcttttgtgcca

SEQ ID NO: 490158 - DNA, 25 bp, Homo sapien
tgtgccaagcgagtctgaactctcc

SEQ ID NO: 490159 - DNA, 25 bp, Homo sapien
aaggggccatctgatccacaccagg

SEQ ID NO: 490160 - DNA, 25 bp, Homo sapien
tctctgtcagcatacccagtgcatg

SEQ ID NO: 490161 - DNA, 25 bp, Homo sapien
ccattcttaaagattggtcacttag

SEQ ID NO: 490162 - DNA, 25 bp, Homo sapien
cccagcattaagtggagcaattccg

SEQ ID NO: 490163 - DNA, 25 bp, Homo sapien
cacttagggaatggacaaagtctct

SEQ ID NO: 490164 - DNA, 25 bp, Homo sapien
ggagaacccgacgaggacatcaatt

SEQ ID NO: 490165 - DNA, 25 bp, Homo sapien
tctttctattctacgaaatgcctgc

SEQ ID NO: 490166 - DNA, 25 bp, Homo sapien
atgcctgccattcgctctctaggca

SEQ ID NO: 490167 - DNA, 25 bp, Homo sapien
atttggtccctgaatggagaacccg

SEQ ID NO: 490168 - DNA, 25 bp, Homo sapien
ctctcagagggacccggcacactga

SEQ ID NO: 490169 - DNA, 25 bp, Homo sapien
gagtttcccatttgtctctcagagg

SEQ ID NO: 490170 - DNA, 25 bp, Homo sapien
ctcagagggacccggcacactgata

SEQ ID NO: 490171 - DNA, 25 bp, Homo sapien
tctctcagagggacccggcacactg

SEQ ID NO: 490172 - DNA, 25 bp, Homo sapien
ctatgactgagagaactggatggca

SEQ ID NO: 490173 - DNA, 25 bp, Homo sapien
gagtttggaatccttagtgctcccg

SEQ ID NO: 490174 - DNA, 25 bp, Homo sapien
ggtttatcagggctgcactaggtca

SEQ ID NO: 490175 - DNA, 25 bp, Homo sapien
cactgattgatgcaagggcttttcc

SEQ ID NO: 490176 - DNA, 25 bp, Homo sapien
gggtcacagtccctcctagaagtga

SEQ ID NO: 490177 - DNA, 25 bp, Homo sapien
agaaagaggatagcccctcctagaa

SEQ ID NO: 490178 - DNA, 25 bp, Homo sapien
cagtccctcctagaagtgagagttc

SEQ ID NO: 490179 - DNA, 25 bp, Homo sapien
gaggatagcccctcctagaagtggg

SEQ ID NO: 490180 - DNA, 25 bp, Homo sapien
gttccaccagcacaaatgacagtag

SEQ ID NO: 490181 - DNA, 25 bp, Homo sapien
agttccaccagcacaaatgacagta

SEQ ID NO: 490182 - DNA, 25 bp, Homo sapien
ctagttccaccagcacaaatgacag

SEQ ID NO: 490183 - DNA, 25 bp, Homo sapien
tagttccaccagcacaaatgacagt

SEQ ID NO: 490184 - DNA, 25 bp, Homo sapien
atatcttgagaggaacactgctttc

SEQ ID NO: 490185 - DNA, 25 bp, Homo sapien
aatatcttgagaggaacactgcttt

SEQ ID NO: 490186 - DNA, 25 bp, Homo sapien
ctgggaatgcgctctgtgtggattc

SEQ ID NO: 490187 - DNA, 25 bp, Homo sapien
gcctctgcttccctggacactgcat

SEQ ID NO: 490188 - DNA, 25 bp, Homo sapien
tgtgtggattccaccctgacttctt

SEQ ID NO: 490189 - DNA, 25 bp, Homo sapien
tgacttcttcctgcagctgtgctgc

SEQ ID NO: 490190 - DNA, 25 bp, Homo sapien
tacataaggaattacagcccacgcc

SEQ ID NO: 490191 - DNA, 25 bp, Homo sapien
tatatatcttcctagacatctgggc

SEQ ID NO: 490192 - DNA, 25 bp, Homo sapien
caagtaattggtaggagcaacaaga

SEQ ID NO: 490193 - DNA, 25 bp, Homo sapien
ttgcctggcacctaccatgatcacg

SEQ ID NO: 490194 - DNA, 25 bp, Homo sapien
gagatccagccctacaaacaaaatg

SEQ ID NO: 490195 - DNA, 25 bp, Homo sapien
ccagtacagaggtgaaataggtcag

SEQ ID NO: 490196 - DNA, 25 bp, Homo sapien
tggagtgaaataccgccatgtggca

SEQ ID NO: 490197 - DNA, 25 bp, Homo sapien
catttagccctggacactatgccaa

SEQ ID NO: 490198 - DNA, 25 bp, Homo sapien
agccaggtcgttttttgttgtcaca

SEQ ID NO: 490199 - DNA, 25 bp, Homo sapien
tgttgtcacatgaaaggctctgttc

SEQ ID NO: 490200 - DNA, 25 bp, Homo sapien
agtggtgaccacagagctttgctgc

SEQ ID NO: 490201 - DNA, 25 bp, Homo sapien
gatgcctgtcgtgatgtttgagcca

SEQ ID NO: 490202 - DNA, 25 bp, Homo sapien
taagcaccaagtgctcacaaatagt

SEQ ID NO: 490203 - DNA, 25 bp, Homo sapien
caatatggtctggtttatgcatcca

SEQ ID NO: 490204 - DNA, 25 bp, Homo sapien
tcttcagggataaaccaggtcatct

SEQ ID NO: 490205 - DNA, 25 bp, Homo sapien
tctttgagtgtgtcttaagcaccaa

SEQ ID NO: 490206 - DNA, 25 bp, Homo sapien
gaaagaggtttcaaattggagatgc

SEQ ID NO: 490207 - DNA, 25 bp, Homo sapien
tggagatgcttttcagagagatgga

SEQ ID NO: 490208 - DNA, 25 bp, Homo sapien
tgaagcaggtgaaatagaaagaggt

SEQ ID NO: 490209 - DNA, 25 bp, Homo sapien
taggtcctgtcaggtgaagcaggtg

SEQ ID NO: 490210 - DNA, 25 bp, Homo sapien
ggcaggccttttagtgctccctcaa

SEQ ID NO: 490211 - DNA, 25 bp, Homo sapien
caatttgtattgtctagggatagta

SEQ ID NO: 490212 - DNA, 25 bp, Homo sapien
tggtaattttcactgggcaggcctt

SEQ ID NO: 490213 - DNA, 25 bp, Homo sapien
tagtaatcagaatcctgtcctctgc

SEQ ID NO: 490214 - DNA, 25 bp, Homo sapien
tcccagctgggagacaatgaatgcc

SEQ ID NO: 490215 - DNA, 25 bp, Homo sapien
cttttggagaccttttcccagctgg

SEQ ID NO: 490216 - DNA, 25 bp, Homo sapien
gctgggagacaatgaatgccaagtg

SEQ ID NO: 490217 - DNA, 25 bp, Homo sapien
ccttcgaactttactctctttattg

SEQ ID NO: 490218 - DNA, 25 bp, Homo sapien
tgagaagagaattaggtgtacagag

SEQ ID NO: 490219 - DNA, 25 bp, Homo sapien
aaccaccacaggcagatagagcact

SEQ ID NO: 490220 - DNA, 25 bp, Homo sapien
tatgagtgatatccaccaaccacca

SEQ ID NO: 490221 - DNA, 25 bp, Homo sapien
ctcccaaattgagcgatgcctgtcc

SEQ ID NO: 490222 - DNA, 25 bp, Homo sapien
tctgttctgtattcccatcggtaag

SEQ ID NO: 490223 - DNA, 25 bp, Homo sapien
tgactgcccgatggagcttcagaga

SEQ ID NO: 490224 - DNA, 25 bp, Homo sapien
cagccccgtaatgtgttgccaggca

SEQ ID NO: 490225 - DNA, 25 bp, Homo sapien
ggatgcagagatctgcctgtgatac

SEQ ID NO: 490226 - DNA, 25 bp, Homo sapien
taatttaactgctttacgctcagca

SEQ ID NO: 490227 - DNA, 25 bp, Homo sapien
tgctttacgctcagcaactgtcttc

SEQ ID NO: 490228 - DNA, 25 bp, Homo sapien
ccgagcatcggcaacaagtttcaga

SEQ ID NO: 490229 - DNA, 25 bp, Homo sapien
ttcagaaaagccttcgtcagccctc

SEQ ID NO: 490230 - DNA, 25 bp, Homo sapien
gaatgcaagacgtctgttctacccg

SEQ ID NO: 490231 - DNA, 25 bp, Homo sapien
cattccatcattgcgttttccagaa

SEQ ID NO: 490232 - DNA, 25 bp, Homo sapien
gttctacccgcatccatacaagcat

SEQ ID NO: 490233 - DNA, 25 bp, Homo sapien
catcaaaataggtcgtgcacacctg

SEQ ID NO: 490234 - DNA, 25 bp, Homo sapien
tggaaactagtcctgatttacaagg

SEQ ID NO: 490235 - DNA, 25 bp, Homo sapien
aaggtcctgaattactcccttgcat

SEQ ID NO: 490236 - DNA, 25 bp, Homo sapien
atgatttgactctgctgactgcact

SEQ ID NO: 490237 - DNA, 25 bp, Homo sapien
gtgacttctccatggccagattcct

SEQ ID NO: 490238 - DNA, 25 bp, Homo sapien
cagcgtgacaaggagacaaataacc

SEQ ID NO: 490239 - DNA, 25 bp, Homo sapien
ggcgatcttcataatcctagtgtag

SEQ ID NO: 490240 - DNA, 25 bp, Homo sapien
gaatccttccctcaaaacagcgtga

SEQ ID NO: 490241 - DNA, 25 bp, Homo sapien
tctgttcttgaaccatcgcgtggcc

SEQ ID NO: 490242 - DNA, 25 bp, Homo sapien
gttagtaatgacctcacaggactca

SEQ ID NO: 490243 - DNA, 25 bp, Homo sapien
catgagagagtctctctgggtgtca

SEQ ID NO: 490244 - DNA, 25 bp, Homo sapien
aagtaagacacttgggcacccatca

SEQ ID NO: 490245 - DNA, 25 bp, Homo sapien
ctgggtgtcactgttagtaatgacc

SEQ ID NO: 490246 - DNA, 25 bp, Homo sapien
cttgatctctgggtaaggcctggcc

SEQ ID NO: 490247 - DNA, 25 bp, Homo sapien
ttaagtccgatctatcccatcaggg

SEQ ID NO: 490248 - DNA, 25 bp, Homo sapien
tctcactagggacagaacgatgttt

SEQ ID NO: 490249 - DNA, 25 bp, Homo sapien
tgcagctgtgcctgtcaaaacccag

SEQ ID NO: 490250 - DNA, 25 bp, Homo sapien
gagtaaccctgtgagtacctcttcc

SEQ ID NO: 490251 - DNA, 25 bp, Homo sapien
gttgaatgtctgaactcgccaccaa

SEQ ID NO: 490252 - DNA, 25 bp, Homo sapien
tggttctcagcaaagttgagagtgg

SEQ ID NO: 490253 - DNA, 25 bp, Homo sapien
ggaaggtgaagccaatacagagtaa

SEQ ID NO: 490254 - DNA, 25 bp, Homo sapien
aggtacaacagaggttccaagctgg

SEQ ID NO: 490255 - DNA, 25 bp, Homo sapien
tacagtcctgattagaccccaggta

SEQ ID NO: 490256 - DNA, 25 bp, Homo sapien
gatacagtcctgattagaccccagg

SEQ ID NO: 490257 - DNA, 25 bp, Homo sapien
cagatacagtcctgattagacccca

SEQ ID NO: 490258 - DNA, 25 bp, Homo sapien
gaaggctgtttaggtgaattatctg

SEQ ID NO: 490259 - DNA, 25 bp, Homo sapien
ctgtaggaaggctgtttaggtgaat

SEQ ID NO: 490260 - DNA, 25 bp, Homo sapien
aggaaggctgtttaggtgaattatc

SEQ ID NO: 490261 - DNA, 25 bp, Homo sapien
aggctgtttaggtgaattatctggg

SEQ ID NO: 490262 - DNA, 25 bp, Homo sapien
cagatagggcaaagcctagagtggc

SEQ ID NO: 490263 - DNA, 25 bp, Homo sapien
gctgctatgtcaatgtcccgggaga

SEQ ID NO: 490264 - DNA, 25 bp, Homo sapien
cctcagatagggcaaagcctagagt

SEQ ID NO: 490265 - DNA, 25 bp, Homo sapien
tagggcaaagcctagagtggcatag

SEQ ID NO: 490266 - DNA, 25 bp, Homo sapien
ccaggaatggcatggagtcacagca

SEQ ID NO: 490267 - DNA, 25 bp, Homo sapien
aaccaggaatggcatggagtcacag

SEQ ID NO: 490268 - DNA, 25 bp, Homo sapien
accaggaatggcatggagtcacagc

SEQ ID NO: 490269 - DNA, 25 bp, Homo sapien
gatcctcggatgagaattgctccct

SEQ ID NO: 490270 - DNA, 25 bp, Homo sapien
tagctcagtctagaactcttcagag

SEQ ID NO: 490271 - DNA, 25 bp, Homo sapien
tcttcagagatacaaaatgcccact

SEQ ID NO: 490272 - DNA, 25 bp, Homo sapien
cactacagtagaagaatcaggatcc

SEQ ID NO: 490273 - DNA, 25 bp, Homo sapien
cacagaagacttcgggacagggctg

SEQ ID NO: 490274 - DNA, 25 bp, Homo sapien
ggagcatcgcttcaagcagacacag

SEQ ID NO: 490275 - DNA, 25 bp, Homo sapien
cagaccactcgacatgaagcacaga

SEQ ID NO: 490276 - DNA, 25 bp, Homo sapien
acacaacaataagccctccggagca

SEQ ID NO: 490277 - DNA, 25 bp, Homo sapien
tccagtgcaagcaaagggagcgcat

SEQ ID NO: 490278 - DNA, 25 bp, Homo sapien
aatgaacagcaaccttctggaaagg

SEQ ID NO: 490279 - DNA, 25 bp, Homo sapien
ggaggatcaacctcttggtcttgaa

SEQ ID NO: 490280 - DNA, 25 bp, Homo sapien
taatatgactgatgaagggctccgt

SEQ ID NO: 490281 - DNA, 25 bp, Homo sapien
ggttatgcacccactgtacacgcag

SEQ ID NO: 490282 - DNA, 25 bp, Homo sapien
tgctaggagatagagggatcctctc

SEQ ID NO: 490283 - DNA, 25 bp, Homo sapien
gcagaacatgcagtcgacacaggaa

SEQ ID NO: 490284 - DNA, 25 bp, Homo sapien
gatcgtgcccatcacatgtgtttcg

SEQ ID NO: 490285 - DNA, 25 bp, Homo sapien
gtcaaagtcagctttgcgattatga

SEQ ID NO: 490286 - DNA, 25 bp, Homo sapien
gctttgcgattatgatcgcctcata

SEQ ID NO: 490287 - DNA, 25 bp, Homo sapien
gattatgatcgcctcatatacggca

SEQ ID NO: 490288 - DNA, 25 bp, Homo sapien
tatgatcgcctcatatacggcatcc

SEQ ID NO: 490289 - DNA, 25 bp, Homo sapien
tttctgcaggtttactatggtctgg

SEQ ID NO: 490290 - DNA, 25 bp, Homo sapien
taaatgtatgatgcacaaggtccca

SEQ ID NO: 490291 - DNA, 25 bp, Homo sapien
tcatcacccaaatgcgaccattctt

SEQ ID NO: 490292 - DNA, 25 bp, Homo sapien
aatgcgaccattctttttataccaa

SEQ ID NO: 490293 - DNA, 25 bp, Homo sapien
ctggataccgcggaagtaaaatact

SEQ ID NO: 490294 - DNA, 25 bp, Homo sapien
ttctggataccgcggaagtaaaata

SEQ ID NO: 490295 - DNA, 25 bp, Homo sapien
cttgacaatgatggtcgtaggtcat

SEQ ID NO: 490296 - DNA, 25 bp, Homo sapien
atacttgacaatgatggtcgtaggt

SEQ ID NO: 490297 - DNA, 25 bp, Homo sapien
gaaacttccaatatcctggcgtctt

SEQ ID NO: 490298 - DNA, 25 bp, Homo sapien
ggcccatacagcgtctttctcctgt

SEQ ID NO: 490299 - DNA, 25 bp, Homo sapien
cagctgctggcccatacagcgtctt

SEQ ID NO: 490300 - DNA, 25 bp, Homo sapien
aatatcctggcgtcttacagctgct

SEQ ID NO: 490301 - DNA, 25 bp, Homo sapien
tctgcttccttagttgccttctttg

SEQ ID NO: 490302 - DNA, 25 bp, Homo sapien
tttcacatttaacctctgcttcctt

SEQ ID NO: 490303 - DNA, 25 bp, Homo sapien
tttgtgacgctgtttttattccatt

SEQ ID NO: 490304 - DNA, 25 bp, Homo sapien
tagttgccttctttgtgacgctgtt

SEQ ID NO: 490305 - DNA, 25 bp, Homo sapien
ggagcatgccttgagcacatcggca

SEQ ID NO: 490306 - DNA, 25 bp, Homo sapien
gagtcaatgttctccttggctctgt

SEQ ID NO: 490307 - DNA, 25 bp, Homo sapien
catcttccgcaaaggtctgcacacg

SEQ ID NO: 490308 - DNA, 25 bp, Homo sapien
tctgcacacgacgaatgagtcaatg

SEQ ID NO: 490309 - DNA, 25 bp, Homo sapien
caaaacacatccacgtgggctgaag

SEQ ID NO: 490310 - DNA, 25 bp, Homo sapien
ttcaaaacacatccacgtgggctga

SEQ ID NO: 490311 - DNA, 25 bp, Homo sapien
gggctggctctttcaaaacacatcc

SEQ ID NO: 490312 - DNA, 25 bp, Homo sapien
aacacatccacgtgggctgaaggcg

SEQ ID NO: 490313 - DNA, 25 bp, Homo sapien
tatctctgtatgtttataaggtgca

SEQ ID NO: 490314 - DNA, 25 bp, Homo sapien
gtttataaggtgcattctggctcac

SEQ ID NO: 490315 - DNA, 25 bp, Homo sapien
ctctgtatgtttataaggtgcattc

SEQ ID NO: 490316 - DNA, 25 bp, Homo sapien
gtatgtttataaggtgcattctggc

SEQ ID NO: 490317 - DNA, 25 bp, Homo sapien
tatgaacgtgttctctgagtttcaa

SEQ ID NO: 490318 - DNA, 25 bp, Homo sapien
ttgggctctccaagaatttctgggg

SEQ ID NO: 490319 - DNA, 25 bp, Homo sapien
taagcttttgcaggactccaaaagc

SEQ ID NO: 490320 - DNA, 25 bp, Homo sapien
gaaacacattgtccccaacagaggc

SEQ ID NO: 490321 - DNA, 25 bp, Homo sapien
ggattcgttcctgttcaatccacat

SEQ ID NO: 490322 - DNA, 25 bp, Homo sapien
atcctcagtgaccttaattaagctg

SEQ ID NO: 490323 - DNA, 25 bp, Homo sapien
ggagaccaccttcccctgtgagacg

SEQ ID NO: 490324 - DNA, 25 bp, Homo sapien
tgaccttaattaagctggcactaag

SEQ ID NO: 490325 - DNA, 25 bp, Homo sapien
taagttgctgagtgtggagaccacc

SEQ ID NO: 490326 - DNA, 25 bp, Homo sapien
gtagctgaaaccaacacacgcctgg

SEQ ID NO: 490327 - DNA, 25 bp, Homo sapien
tcttcaatagaaccatcagcgcttc

SEQ ID NO: 490328 - DNA, 25 bp, Homo sapien
ttttgtgaatagcaagccgcttgga

SEQ ID NO: 490329 - DNA, 25 bp, Homo sapien
taattgccgcatctgcttctggaag

SEQ ID NO: 490330 - DNA, 25 bp, Homo sapien
tttcttactctccccaaacagtagc

SEQ ID NO: 490331 - DNA, 25 bp, Homo sapien
ttcacaccaacataactatccaggc

SEQ ID NO: 490332 - DNA, 25 bp, Homo sapien
atcttaacaacaccagagggagagg

SEQ ID NO: 490333 - DNA, 25 bp, Homo sapien
cgtttcatcttaacaacaccagagg

SEQ ID NO: 490334 - DNA, 25 bp, Homo sapien
tatccatgcgtctaggctgcaagag

SEQ ID NO: 490335 - DNA, 25 bp, Homo sapien
gagtgacacttttcgaggacaacag

SEQ ID NO: 490336 - DNA, 25 bp, Homo sapien
cctccagtggaaaggtagatgtcaa

SEQ ID NO: 490337 - DNA, 25 bp, Homo sapien
tgtttcaagccatcgcctccagtgg

SEQ ID NO: 490338 - DNA, 25 bp, Homo sapien
gagattcatcattacccaggatttc

SEQ ID NO: 490339 - DNA, 25 bp, Homo sapien
tttctgtgcttctatctggggagac

SEQ ID NO: 490340 - DNA, 25 bp, Homo sapien
gaaacaacacgctgtacttccccaa

SEQ ID NO: 490341 - DNA, 25 bp, Homo sapien
gatttaaattatagtgttccaaata

SEQ ID NO: 490342 - DNA, 25 bp, Homo sapien
ctgaaaagaatcatatgacccagaa

SEQ ID NO: 490343 - DNA, 25 bp, Homo sapien
cacaaacagtcaaacctattgttat

SEQ ID NO: 490344 - DNA, 25 bp, Homo sapien
cagtcaaacctattgttatcagaaa

SEQ ID NO: 490345 - DNA, 25 bp, Homo sapien
agcaacgggattttctccagttcac

SEQ ID NO: 490346 - DNA, 25 bp, Homo sapien
ggctcgtacaggaggtagtagctct

SEQ ID NO: 490347 - DNA, 25 bp, Homo sapien
cttgccacgtgaatgcccatcacgt

SEQ ID NO: 490348 - DNA, 25 bp, Homo sapien
gcccatcacgtgccaggtcagacag

SEQ ID NO: 490349 - DNA, 25 bp, Homo sapien
caataaagtacgcttttccgtccat

SEQ ID NO: 490350 - DNA, 25 bp, Homo sapien
caggtcatgttctcgtactcgtact

SEQ ID NO: 490351 - DNA, 25 bp, Homo sapien
cttgcaggtcatgttctcgtactcg

SEQ ID NO: 490352 - DNA, 25 bp, Homo sapien
ggctcttgcaggtcatgttctcgta

SEQ ID NO: 490353 - DNA, 25 bp, Homo sapien
catgttctcgtactcgtactttagc

SEQ ID NO: 490354 - DNA, 25 bp, Homo sapien
gtgtctgaagcatcaacgggtttac

SEQ ID NO: 490355 - DNA, 25 bp, Homo sapien
ggtttacttaacaagaagatctgca

SEQ ID NO: 490356 - DNA, 25 bp, Homo sapien
catgatccgatagagacagtcaaat

SEQ ID NO: 490357 - DNA, 25 bp, Homo sapien
ctttaactctgccatttgtgtctga

SEQ ID NO: 490358 - DNA, 25 bp, Homo sapien
tctggtcttcgtgttccaaagttcc

SEQ ID NO: 490359 - DNA, 25 bp, Homo sapien
tcattctggtcttcgtgttccaaag

SEQ ID NO: 490360 - DNA, 25 bp, Homo sapien
tcttcgtgttccaaagttcctgtga

SEQ ID NO: 490361 - DNA, 25 bp, Homo sapien
tcgtgttccaaagttcctgtgaaat

SEQ ID NO: 490362 - DNA, 25 bp, Homo sapien
gagatctttgctctcccacgcagag

SEQ ID NO: 490363 - DNA, 25 bp, Homo sapien
cacgcagagttacagttttgctgaa

SEQ ID NO: 490364 - DNA, 25 bp, Homo sapien
agaacgcaagcccttgcctttgcag

SEQ ID NO: 490365 - DNA, 25 bp, Homo sapien
gaaacttcacaagggagatctttgc

SEQ ID NO: 490366 - DNA, 25 bp, Homo sapien
ctgtgggtctgtgctacctctgcat

SEQ ID NO: 490367 - DNA, 25 bp, Homo sapien
tctgcattttccctgcactcttccc

SEQ ID NO: 490368 - DNA, 25 bp, Homo sapien
acctctgcattttccctgcactctt

SEQ ID NO: 490369 - DNA, 25 bp, Homo sapien
tgcattttccctgcactcttcccac

SEQ ID NO: 490370 - DNA, 25 bp, Homo sapien
tgctcctcggcgtccagttttgcac

SEQ ID NO: 490371 - DNA, 25 bp, Homo sapien
ctccatttcacattacaccgaatgg

SEQ ID NO: 490372 - DNA, 25 bp, Homo sapien
cacattacaccgaatggagtgaggg

SEQ ID NO: 490373 - DNA, 25 bp, Homo sapien
catttcacattacaccgaatggagt

SEQ ID NO: 490374 - DNA, 25 bp, Homo sapien
tcaagaactgcccttcaccagcagg

SEQ ID NO: 490375 - DNA, 25 bp, Homo sapien
aggctcaagcccagattgttctcca

SEQ ID NO: 490376 - DNA, 25 bp, Homo sapien
accagcaggctcaagcccagattgt

SEQ ID NO: 490377 - DNA, 25 bp, Homo sapien
tcaagcccagattgttctccagttc

SEQ ID NO: 490378 - DNA, 25 bp, Homo sapien
ttccatggtagcgtgcacattttat

SEQ ID NO: 490379 - DNA, 25 bp, Homo sapien
ttcttagggattccgctgctcctac

SEQ ID NO: 490380 - DNA, 25 bp, Homo sapien
ttagggattccgctgctcctacagg

SEQ ID NO: 490381 - DNA, 25 bp, Homo sapien
tggggaagaatttccgtggatttca

SEQ ID NO: 490382 - DNA, 25 bp, Homo sapien
tgaaccaaggccgatgacaggttct

SEQ ID NO: 490383 - DNA, 25 bp, Homo sapien
agtgctccagagtctcgagggccag

SEQ ID NO: 490384 - DNA, 25 bp, Homo sapien
tctcgagggccaggagtgcatgcaa

SEQ ID NO: 490385 - DNA, 25 bp, Homo sapien
agagaatggatagcggtgcaagcac

SEQ ID NO: 490386 - DNA, 25 bp, Homo sapien
tccgtgcaagggaagtagctgcttt

SEQ ID NO: 490387 - DNA, 25 bp, Homo sapien
ttggtttcttcttccgtgcaaggga

SEQ ID NO: 490388 - DNA, 25 bp, Homo sapien
gggaagtagctgctttcctcgcctg

SEQ ID NO: 490389 - DNA, 25 bp, Homo sapien
cttgcagtcctgcaaatctcccatt

SEQ ID NO: 490390 - DNA, 25 bp, Homo sapien
aagagatggtggtccaagtggactc

SEQ ID NO: 490391 - DNA, 25 bp, Homo sapien
aaaagaagagatggtggtccaagtg

SEQ ID NO: 490392 - DNA, 25 bp, Homo sapien
gagatggtggtccaagtggactcac

SEQ ID NO: 490393 - DNA, 25 bp, Homo sapien
agaagagatggtggtccaagtggac

SEQ ID NO: 490394 - DNA, 25 bp, Homo sapien
cattctcttgagatccattctcttc

SEQ ID NO: 490395 - DNA, 25 bp, Homo sapien
cagtcattctcttgagatccattct

SEQ ID NO: 490396 - DNA, 25 bp, Homo sapien
gtcattctcttgagatccattctct

SEQ ID NO: 490397 - DNA, 25 bp, Homo sapien
attctcttgagatccattctcttcc

SEQ ID NO: 490398 - DNA, 25 bp, Homo sapien
aggtgatgatgctccaacaatatcc

SEQ ID NO: 490399 - DNA, 25 bp, Homo sapien
tccccaattcatgtgcagattcaag

SEQ ID NO: 490400 - DNA, 25 bp, Homo sapien
tccgtgcatgttaatccccaattca

SEQ ID NO: 490401 - DNA, 25 bp, Homo sapien
gatgctccaacaatatccgtgcatg

SEQ ID NO: 490402 - DNA, 25 bp, Homo sapien
tgacattaaagctatttgacagctc

SEQ ID NO: 490403 - DNA, 25 bp, Homo sapien
taaagctatttgacagctccaggaa

SEQ ID NO: 490404 - DNA, 25 bp, Homo sapien
aaatgacattaaagctatttgacag

SEQ ID NO: 490405 - DNA, 25 bp, Homo sapien
acattaaagctatttgacagctcca

SEQ ID NO: 490406 - DNA, 25 bp, Homo sapien
ttaagtgaaattggtgctgttccag

SEQ ID NO: 490407 - DNA, 25 bp, Homo sapien
taaggtttaagtgaaattggtgctg

SEQ ID NO: 490408 - DNA, 25 bp, Homo sapien
gataaactcataggcactgccagct

SEQ ID NO: 490409 - DNA, 25 bp, Homo sapien
tgttccagctcctgtcaggatgata

SEQ ID NO: 490410 - DNA, 25 bp, Homo sapien
aaatacagactttctcagtgtgcat

SEQ ID NO: 490411 - DNA, 25 bp, Homo sapien
aaaatacagactttctcagtgtgca

SEQ ID NO: 490412 - DNA, 25 bp, Homo sapien
aaaaatacagactttctcagtgtgc

SEQ ID NO: 490413 - DNA, 25 bp, Homo sapien
ggttgaaatagggaagcatttcagc

SEQ ID NO: 490414 - DNA, 25 bp, Homo sapien
gctctgggtttcagacggatcatgc

SEQ ID NO: 490415 - DNA, 25 bp, Homo sapien
gtttcagacggatcatgctgatggc

SEQ ID NO: 490416 - DNA, 25 bp, Homo sapien
agacggatcatgctgatggcaatgc

SEQ ID NO: 490417 - DNA, 25 bp, Homo sapien
tccagaagaactcagctaattaggg

SEQ ID NO: 490418 - DNA, 25 bp, Homo sapien
ggtagatcctttctctcctgatatg

SEQ ID NO: 490419 - DNA, 25 bp, Homo sapien
tctcctgatatgtggcgtcctccag

SEQ ID NO: 490420 - DNA, 25 bp, Homo sapien
tgcgcccagccgtttagtgatgaat

SEQ ID NO: 490421 - DNA, 25 bp, Homo sapien
tcccactgaaaacgacatgaactgt

SEQ ID NO: 490422 - DNA, 25 bp, Homo sapien
tcctgcgttttccagaactccaggg

SEQ ID NO: 490423 - DNA, 25 bp, Homo sapien
gggcaccttcgcttgggtcagactt

SEQ ID NO: 490424 - DNA, 25 bp, Homo sapien
taatttgagtcatgagtgggctcac

SEQ ID NO: 490425 - DNA, 25 bp, Homo sapien
ttcctgtaggttcggtcccagcgcg

SEQ ID NO: 490426 - DNA, 25 bp, Homo sapien
ccagcgcgcagcagaaacgtcaggg

SEQ ID NO: 490427 - DNA, 25 bp, Homo sapien
cgctctcagaagcacgcgggcctct

SEQ ID NO: 490428 - DNA, 25 bp, Homo sapien
attttgtctccgagccaaaaagccg

SEQ ID NO: 490429 - DNA, 25 bp, Homo sapien
ctgcgtgggactgcagtgggagggc

SEQ ID NO: 490430 - DNA, 25 bp, Homo sapien
gggctgcgtgggactgcagtgggag

SEQ ID NO: 490431 - DNA, 25 bp, Homo sapien
cccaggggctgcgtgggactgcagt

SEQ ID NO: 490432 - DNA, 25 bp, Homo sapien
caggggctgcgtgggactgcagtgg

SEQ ID NO: 490433 - DNA, 25 bp, Homo sapien
tcaaatctgtacactgcagtatcag

SEQ ID NO: 490434 - DNA, 25 bp, Homo sapien
catattcatcctgaagcagaaccta

SEQ ID NO: 490435 - DNA, 25 bp, Homo sapien
gaataaacttctcccaggatgcacc

SEQ ID NO: 490436 - DNA, 25 bp, Homo sapien
tatcagtcacttcatcaagtgggtg

SEQ ID NO: 490437 - DNA, 25 bp, Homo sapien
caaatatccagctatgcttggcatc

SEQ ID NO: 490438 - DNA, 25 bp, Homo sapien
tcattatcatccacgctcaaaatat

SEQ ID NO: 490439 - DNA, 25 bp, Homo sapien
ttgaacatcaaatagcgaaggtaaa

SEQ ID NO: 490440 - DNA, 25 bp, Homo sapien
tatcatccacgctcaaaatatcact

SEQ ID NO: 490441 - DNA, 25 bp, Homo sapien
tcccaatggcttcgtgaaagaaaca

SEQ ID NO: 490442 - DNA, 25 bp, Homo sapien
caagtcctagatgcttgctcatccc

SEQ ID NO: 490443 - DNA, 25 bp, Homo sapien
gaagttagaatcctagactcatgga

SEQ ID NO: 490444 - DNA, 25 bp, Homo sapien
gactcatggaccgagaaagagtagg

SEQ ID NO: 490445 - DNA, 25 bp, Homo sapien
tctatcaaggttggccccttctccg

SEQ ID NO: 490446 - DNA, 25 bp, Homo sapien
ttggccccttctccgttaggagcca

SEQ ID NO: 490447 - DNA, 25 bp, Homo sapien
agactctatcaaggttggccccttc

SEQ ID NO: 490448 - DNA, 25 bp, Homo sapien
tccgttaggagccatgttgagtttc

SEQ ID NO: 490449 - DNA, 25 bp, Homo sapien
gaaaatcagctgatcaaggaaatca

SEQ ID NO: 490450 - DNA, 25 bp, Homo sapien
catcaagctaaaggagtaaccggta

SEQ ID NO: 490451 - DNA, 25 bp, Homo sapien
aaaagacccagtagcagttacaact

SEQ ID NO: 490452 - DNA, 25 bp, Homo sapien
gcagttacaactgacatcaagctaa

SEQ ID NO: 490453 - DNA, 25 bp, Homo sapien
actgactttagggagtgatcaacat

SEQ ID NO: 490454 - DNA, 25 bp, Homo sapien
gtggcccataggcagaaactgactt

SEQ ID NO: 490455 - DNA, 25 bp, Homo sapien
gcaacagggaattcagaatcaggga

SEQ ID NO: 490456 - DNA, 25 bp, Homo sapien
cagaatcagggatgagaatgtttgc

SEQ ID NO: 490457 - DNA, 25 bp, Homo sapien
tgcagactttgcaaggccaggacac

SEQ ID NO: 490458 - DNA, 25 bp, Homo sapien
catgaagcacatgtctagaacaggc

SEQ ID NO: 490459 - DNA, 25 bp, Homo sapien
gacactttcatggagcatgaagcac

SEQ ID NO: 490460 - DNA, 25 bp, Homo sapien
gttgcgaggtagatgctgtgatcct

SEQ ID NO: 490461 - DNA, 25 bp, Homo sapien
ttacaaaatgacaacttgggcatct

SEQ ID NO: 490462 - DNA, 25 bp, Homo sapien
tgacaacttgggcatctggtgaaga

SEQ ID NO: 490463 - DNA, 25 bp, Homo sapien
caaaatgacaacttgggcatctggt

SEQ ID NO: 490464 - DNA, 25 bp, Homo sapien
catctggtgaagagccagctgccat

SEQ ID NO: 490465 - DNA, 25 bp, Homo sapien
cacagagtgccattccatcttccca

SEQ ID NO: 490466 - DNA, 25 bp, Homo sapien
accacagagtgccattccatcttcc

SEQ ID NO: 490467 - DNA, 25 bp, Homo sapien
cagagtgccattccatcttcccatg

SEQ ID NO: 490468 - DNA, 25 bp, Homo sapien
gaccacagagtgccattccatcttc

SEQ ID NO: 490469 - DNA, 25 bp, Homo sapien
atctgcatcagaggtcagtgctgcc

SEQ ID NO: 490470 - DNA, 25 bp, Homo sapien
aatctgcatcagaggtcagtgctgc

SEQ ID NO: 490471 - DNA, 25 bp, Homo sapien
gaaactatctccctcattaccactg

SEQ ID NO: 490472 - DNA, 25 bp, Homo sapien
tgaacactctcacttctgcatggat

SEQ ID NO: 490473 - DNA, 25 bp, Homo sapien
tgcttggtaacatgagagttaaagg

SEQ ID NO: 490474 - DNA, 25 bp, Homo sapien
gttcctttactgtggcttgtatgaa

SEQ ID NO: 490475 - DNA, 25 bp, Homo sapien
acccattgatcaacttaaattcttc

SEQ ID NO: 490476 - DNA, 25 bp, Homo sapien
ggctacataacaaataccgttctgg

SEQ ID NO: 490477 - DNA, 25 bp, Homo sapien
gtgtagatctaaagaacccattgat

SEQ ID NO: 490478 - DNA, 25 bp, Homo sapien
aatttcagacgctgaacttttccct

SEQ ID NO: 490479 - DNA, 25 bp, Homo sapien
caaggtgctgcttcttacaattcat

SEQ ID NO: 490480 - DNA, 25 bp, Homo sapien
tcttcaggaacaaggtgctgcttct

SEQ ID NO: 490481 - DNA, 25 bp, Homo sapien
acaaggtgctgcttcttacaattca

SEQ ID NO: 490482 - DNA, 25 bp, Homo sapien
ctatcttcaggaacaaggtgctgct

SEQ ID NO: 490483 - DNA, 25 bp, Homo sapien
ctgaaacttttgccaggctgggtct

SEQ ID NO: 490484 - DNA, 25 bp, Homo sapien
caggctgggtctccctgatctccat

SEQ ID NO: 490485 - DNA, 25 bp, Homo sapien
ttgccaggctgggtctccctgatct

SEQ ID NO: 490486 - DNA, 25 bp, Homo sapien
tgccaggctgggtctccctgatctc

SEQ ID NO: 490487 - DNA, 25 bp, Homo sapien
gggacacactctgcaaaagagggtg

SEQ ID NO: 490488 - DNA, 25 bp, Homo sapien
cccagccaccacatctagattgcag

SEQ ID NO: 490489 - DNA, 25 bp, Homo sapien
gacacactctgcaaaagagggtgtg

SEQ ID NO: 490490 - DNA, 25 bp, Homo sapien
cacatctagattgcagccctgggac

SEQ ID NO: 490491 - DNA, 25 bp, Homo sapien
ccatgtgtaagagaaccatctccaa

SEQ ID NO: 490492 - DNA, 25 bp, Homo sapien
gattgcctggtgattggttggccat

SEQ ID NO: 490493 - DNA, 25 bp, Homo sapien
gtaagagaaccatctccaactgaca

SEQ ID NO: 490494 - DNA, 25 bp, Homo sapien
tgattggttggccatgtgtaagaga

SEQ ID NO: 490495 - DNA, 25 bp, Homo sapien
ggatagccgcatatgtgagcagtgt

SEQ ID NO: 490496 - DNA, 25 bp, Homo sapien
tctgaagctccaacaagtcgatgat

SEQ ID NO: 490497 - DNA, 25 bp, Homo sapien
tgatagatgaagtgtggatagccgc

SEQ ID NO: 490498 - DNA, 25 bp, Homo sapien
tagtgtatccctttgccacatatgg

SEQ ID NO: 490499 - DNA, 25 bp, Homo sapien
gtgtgttgtggatgtttggagctgt

SEQ ID NO: 490500 - DNA, 25 bp, Homo sapien
gtgttgtggatgtttggagctgtat

SEQ ID NO: 490501 - DNA, 25 bp, Homo sapien
tagtgtgttgtggatgtttggagct

SEQ ID NO: 490502 - DNA, 25 bp, Homo sapien
ttagtgtgttgtggatgtttggagc

SEQ ID NO: 490503 - DNA, 25 bp, Homo sapien
gaaacctggtcttctgagagtgtaa

SEQ ID NO: 490504 - DNA, 25 bp, Homo sapien
gtcttctgagagtgtaatttcccca

SEQ ID NO: 490505 - DNA, 25 bp, Homo sapien
atttccccaagggtgtggtagcagg

SEQ ID NO: 490506 - DNA, 25 bp, Homo sapien
tggtagcaggcaggatctgtgccca

SEQ ID NO: 490507 - DNA, 25 bp, Homo sapien
catgacaaagtgagatgttttctgt

SEQ ID NO: 490508 - DNA, 25 bp, Homo sapien
gttggtaaaaatttcgcattcacac

SEQ ID NO: 490509 - DNA, 25 bp, Homo sapien
cacactggtacatgacaaagtgaga

SEQ ID NO: 490510 - DNA, 25 bp, Homo sapien
ttttgatctgtggagtagttggtaa

SEQ ID NO: 490511 - DNA, 25 bp, Homo sapien
ggaggttggccaccaagtgatgttt

SEQ ID NO: 490512 - DNA, 25 bp, Homo sapien
ccttgttggcaaatgtagtgactca

SEQ ID NO: 490513 - DNA, 25 bp, Homo sapien
tgactcagaaggaaagcgtattaag

SEQ ID NO: 490514 - DNA, 25 bp, Homo sapien
tctgggagtctaagagaaacattat

SEQ ID NO: 490515 - DNA, 25 bp, Homo sapien
taggcaagccatacgtactttttcg

SEQ ID NO: 490516 - DNA, 25 bp, Homo sapien
gatgcagtcttcaattatgcccaga

SEQ ID NO: 490517 - DNA, 25 bp, Homo sapien
tttcaaaaagcagaacctgtgggca

SEQ ID NO: 490518 - DNA, 25 bp, Homo sapien
aagtcatttaagacacgtaggtggg

SEQ ID NO: 490519 - DNA, 25 bp, Homo sapien
ggtgttccgtttgcgacctccatcg

SEQ ID NO: 490520 - DNA, 25 bp, Homo sapien
atcggcacacgagtcctgccagcag

SEQ ID NO: 490521 - DNA, 25 bp, Homo sapien
caggaagccgtgtaccacatcagga

SEQ ID NO: 490522 - DNA, 25 bp, Homo sapien
tgggctcgaggagaaaggataaacc

SEQ ID NO: 490523 - DNA, 25 bp, Homo sapien
cacatatctccggttctcgttagca

SEQ ID NO: 490524 - DNA, 25 bp, Homo sapien
tccggttctcgttagcattgacaac

SEQ ID NO: 490525 - DNA, 25 bp, Homo sapien
atttaacacatatctccggttctcg

SEQ ID NO: 490526 - DNA, 25 bp, Homo sapien
cgttagcattgacaaccatgaaata

SEQ ID NO: 490527 - DNA, 25 bp, Homo sapien
gaagtcgttttctcccgtctgacta

SEQ ID NO: 490528 - DNA, 25 bp, Homo sapien
gggacatcagacaagtattttggaa

SEQ ID NO: 490529 - DNA, 25 bp, Homo sapien
gagacacaggatttaatgtggggac

SEQ ID NO: 490530 - DNA, 25 bp, Homo sapien
ttaagcaggcaattactgaagtcgt

SEQ ID NO: 490531 - DNA, 25 bp, Homo sapien
gactgaagtggagacctattcataa

SEQ ID NO: 490532 - DNA, 25 bp, Homo sapien
ccttgccatgaccttacctaagaca

SEQ ID NO: 490533 - DNA, 25 bp, Homo sapien
ataaatggggtgagacacttcttcc

SEQ ID NO: 490534 - DNA, 25 bp, Homo sapien
aaccttgctaccaaaccaggtcctg

SEQ ID NO: 490535 - DNA, 25 bp, Homo sapien
tttctctccatagcaaatgtggatg

SEQ ID NO: 490536 - DNA, 25 bp, Homo sapien
tgtgagattgttcaccttcagctcc

SEQ ID NO: 490537 - DNA, 25 bp, Homo sapien
ggatgtgagattgttcaccttcagc

SEQ ID NO: 490538 - DNA, 25 bp, Homo sapien
tgttttggggttctgtccaccagaa

SEQ ID NO: 490539 - DNA, 25 bp, Homo sapien
tcactgatacctgaaacacgtgctg

SEQ ID NO: 490540 - DNA, 25 bp, Homo sapien
gaaacacgtgctggccctgattcct

SEQ ID NO: 490541 - DNA, 25 bp, Homo sapien
gtggtgtgagcaggtcatgggatcc

SEQ ID NO: 490542 - DNA, 25 bp, Homo sapien
aggctctgggtgtccaagtggtgtg

SEQ ID NO: 490543 - DNA, 25 bp, Homo sapien
acagcaaagagccttagggttgact

SEQ ID NO: 490544 - DNA, 25 bp, Homo sapien
gagccttagggttgacttgtctaaa

SEQ ID NO: 490545 - DNA, 25 bp, Homo sapien
tcactgcgacctgcattaggcggga

SEQ ID NO: 490546 - DNA, 25 bp, Homo sapien
caaagagccttagggttgacttgtc

SEQ ID NO: 490547 - DNA, 25 bp, Homo sapien
agaggaatgtgagcaaaaaaaccag

SEQ ID NO: 490548 - DNA, 25 bp, Homo sapien
gaatgtgagcaaaaaaaccagtggc

SEQ ID NO: 490549 - DNA, 25 bp, Homo sapien
ggaatgtgagcaaaaaaaccagtgg

SEQ ID NO: 490550 - DNA, 25 bp, Homo sapien
gaggaatgtgagcaaaaaaaccagt

SEQ ID NO: 490551 - DNA, 25 bp, Homo sapien
cagtctctgcgtggataagtgatca

SEQ ID NO: 490552 - DNA, 25 bp, Homo sapien
taagtgatcaaagtggatgactcca

SEQ ID NO: 490553 - DNA, 25 bp, Homo sapien
tgtaccacatcagaatgccaggatg

SEQ ID NO: 490554 - DNA, 25 bp, Homo sapien
gatgactccagaagatgtgtcctta

SEQ ID NO: 490555 - DNA, 25 bp, Homo sapien
ataatgacaatccacttcattcata

SEQ ID NO: 490556 - DNA, 25 bp, Homo sapien
taatgacaatccacttcattcatac

SEQ ID NO: 490557 - DNA, 25 bp, Homo sapien
aatgacaatccacttcattcataca

SEQ ID NO: 490558 - DNA, 25 bp, Homo sapien
tgacaatccacttcattcatacatt

SEQ ID NO: 490559 - DNA, 25 bp, Homo sapien
ccttgtggtatcttggtctaaacca

SEQ ID NO: 490560 - DNA, 25 bp, Homo sapien
tagtgttaaaaactatggtggtcaa

SEQ ID NO: 490561 - DNA, 25 bp, Homo sapien
tcttgattgtagattctagtgttaa

SEQ ID NO: 490562 - DNA, 25 bp, Homo sapien
ggtggtcaacaccttgtggtatctt

SEQ ID NO: 490563 - DNA, 25 bp, Homo sapien
ttgtaacacgctggccgcatgtgtc

SEQ ID NO: 490564 - DNA, 25 bp, Homo sapien
ggccgcatgtgtcagccacttgcac

SEQ ID NO: 490565 - DNA, 25 bp, Homo sapien
tggccgcatgtgtcagccacttgca

SEQ ID NO: 490566 - DNA, 25 bp, Homo sapien
tcattgtaacacgctggccgcatgt

SEQ ID NO: 490567 - DNA, 25 bp, Homo sapien
tctgttgcatggagtcatcgccaac

SEQ ID NO: 490568 - DNA, 25 bp, Homo sapien
ggagtcatcgccaactatccttcct

SEQ ID NO: 490569 - DNA, 25 bp, Homo sapien
cagttctgttgcatggagtcatcgc

SEQ ID NO: 490570 - DNA, 25 bp, Homo sapien
gcatggagtcatcgccaactatcct

SEQ ID NO: 490571 - DNA, 25 bp, Homo sapien
acacctctgactggagctcagtgtg

SEQ ID NO: 490572 - DNA, 25 bp, Homo sapien
gactggagctcagtgtgatatccat

SEQ ID NO: 490573 - DNA, 25 bp, Homo sapien
ttcctctggacacctctgactggag

SEQ ID NO: 490574 - DNA, 25 bp, Homo sapien
tctggacacctctgactggagctca

SEQ ID NO: 490575 - DNA, 25 bp, Homo sapien
gaagctgtgctattgagagcactgg

SEQ ID NO: 490576 - DNA, 25 bp, Homo sapien
agctgtgctattgagagcactggga

SEQ ID NO: 490577 - DNA, 25 bp, Homo sapien
agagaagctgtgctattgagagcac

SEQ ID NO: 490578 - DNA, 25 bp, Homo sapien
tcatcttgaccaaagagcacctttc

SEQ ID NO: 490579 - DNA, 25 bp, Homo sapien
gcgtgctagccaagtagaaggtcat

SEQ ID NO: 490580 - DNA, 25 bp, Homo sapien
gattccagttattggcgtgctagcc

SEQ ID NO: 490581 - DNA, 25 bp, Homo sapien
cgcagcactgctgcttcaagattcc

SEQ ID NO: 490582 - DNA, 25 bp, Homo sapien
tgcttcaagattccagttattggcg

SEQ ID NO: 490583 - DNA, 25 bp, Homo sapien
taacatgctctaggtagttgaggaa

SEQ ID NO: 490584 - DNA, 25 bp, Homo sapien
tacagggaacaaacaaagggattgc

SEQ ID NO: 490585 - DNA, 25 bp, Homo sapien
gggattgcggacacatatctggact

SEQ ID NO: 490586 - DNA, 25 bp, Homo sapien
gggaacatttcacctgctgagtgta

SEQ ID NO: 490587 - DNA, 25 bp, Homo sapien
gctgaacaaacaagtgctctccata

SEQ ID NO: 490588 - DNA, 25 bp, Homo sapien
taaccacagtgaatgggtgtgcacg

SEQ ID NO: 490589 - DNA, 25 bp, Homo sapien
aaaccagaaacagagcggagccaag

SEQ ID NO: 490590 - DNA, 25 bp, Homo sapien
gacctcatggtatagcaaaaaacaa

SEQ ID NO: 490591 - DNA, 25 bp, Homo sapien
tacgcgggaacaaacattgcaaggg

SEQ ID NO: 490592 - DNA, 25 bp, Homo sapien
taggacctgttgctcgctgcatagt

SEQ ID NO: 490593 - DNA, 25 bp, Homo sapien
gaagtccaccttcaagtacgcggga

SEQ ID NO: 490594 - DNA, 25 bp, Homo sapien
aataattgtcccaagataggacctg

SEQ ID NO: 490595 - DNA, 25 bp, Homo sapien
caaaacaagcaattgcagaaacaag

SEQ ID NO: 490596 - DNA, 25 bp, Homo sapien
ggctcttagtccagcatttgtagtg

SEQ ID NO: 490597 - DNA, 25 bp, Homo sapien
gtggaacaggaaacgaccagccagc

SEQ ID NO: 490598 - DNA, 25 bp, Homo sapien
tgatgccttgaggattaaccactcc

SEQ ID NO: 490599 - DNA, 25 bp, Homo sapien
tttgatgccattgagggaagatgtc

SEQ ID NO: 490600 - DNA, 25 bp, Homo sapien
tcgctgaccttgcacagaagtgaca

SEQ ID NO: 490601 - DNA, 25 bp, Homo sapien
gggaagatgtcactcgctgaccttg

SEQ ID NO: 490602 - DNA, 25 bp, Homo sapien
agtgacaccgtgtctggcaaatatt

SEQ ID NO: 490603 - DNA, 25 bp, Homo sapien
attctaacgtagttcaagttatcct

SEQ ID NO: 490604 - DNA, 25 bp, Homo sapien
acgtagttcaagttatccttctgct

SEQ ID NO: 490605 - DNA, 25 bp, Homo sapien
taacgtagttcaagttatccttctg

SEQ ID NO: 490606 - DNA, 25 bp, Homo sapien
tctaacgtagttcaagttatccttc

SEQ ID NO: 490607 - DNA, 25 bp, Homo sapien
gagagcagggagagctctgcctccc

SEQ ID NO: 490608 - DNA, 25 bp, Homo sapien
ctgggtgacacttgttggagagcag

SEQ ID NO: 490609 - DNA, 25 bp, Homo sapien
acttgttggagagcagggagagctc

SEQ ID NO: 490610 - DNA, 25 bp, Homo sapien
gagcagggagagctctgcctccctc

SEQ ID NO: 490611 - DNA, 25 bp, Homo sapien
ggagagcttgtgggcgcccctctct

SEQ ID NO: 490612 - DNA, 25 bp, Homo sapien
ggagagcttgtgggcgcccctctct

SEQ ID NO: 490613 - DNA, 25 bp, Homo sapien
ggagagcttgtgggcgcccctctct

SEQ ID NO: 490614 - DNA, 25 bp, Homo sapien
tctgcgcgcctgcagagagtctgaa

SEQ ID NO: 490615 - DNA, 25 bp, Homo sapien
gagagtctgaaaggacgttcactgc

SEQ ID NO: 490616 - DNA, 25 bp, Homo sapien
aggctgcaatgggagatgggcgccc

SEQ ID NO: 490617 - DNA, 25 bp, Homo sapien
ctggtggcgactctgcgcgcctgca

SEQ ID NO: 490618 - DNA, 25 bp, Homo sapien
tttcctttcactgatataaccttga

SEQ ID NO: 490619 - DNA, 25 bp, Homo sapien
tgaagatgcggctggtagttttccg

SEQ ID NO: 490620 - DNA, 25 bp, Homo sapien
ctaatagaagcaccgaaagctcccc

SEQ ID NO: 490621 - DNA, 25 bp, Homo sapien
gattcagcttctgtaccacatggtc

SEQ ID NO: 490622 - DNA, 25 bp, Homo sapien
agacgaggtgtccatttatattgcc

SEQ ID NO: 490623 - DNA, 25 bp, Homo sapien
gcaatactgtttggaggttcagacg

SEQ ID NO: 490624 - DNA, 25 bp, Homo sapien
gatgaagtcatctacggaggcctct

SEQ ID NO: 490625 - DNA, 25 bp, Homo sapien
tttcagattgtctacaaagcctggc

SEQ ID NO: 490626 - DNA, 25 bp, Homo sapien
gaaagctcgtctttatatcacgctg

SEQ ID NO: 490627 - DNA, 25 bp, Homo sapien
tttctagctctagagaactcggcac

SEQ ID NO: 490628 - DNA, 25 bp, Homo sapien
tctctctataggagaaggccaagcc

SEQ ID NO: 490629 - DNA, 25 bp, Homo sapien
tatcacgctggtagctacctgtttg

SEQ ID NO: 490630 - DNA, 25 bp, Homo sapien
cactggccatcaaggggaagagtgg

SEQ ID NO: 490631 - DNA, 25 bp, Homo sapien
cctttcagagcataatttcctgaca

SEQ ID NO: 490632 - DNA, 25 bp, Homo sapien
aatttcctgacaaatcaagctgctt

SEQ ID NO: 490633 - DNA, 25 bp, Homo sapien
ggcactggccatcaaggggaagagt

SEQ ID NO: 490634 - DNA, 25 bp, Homo sapien
tcgattcaagtattaagtaaaaatg

SEQ ID NO: 490635 - DNA, 25 bp, Homo sapien
caaagattgtgacagtcaataagtc

SEQ ID NO: 490636 - DNA, 25 bp, Homo sapien
taaaacatttcccaaacaagtctca

SEQ ID NO: 490637 - DNA, 25 bp, Homo sapien
caaacaagtctcaagggctttatga

SEQ ID NO: 490638 - DNA, 25 bp, Homo sapien
agagaccccgacgtatccaatgctc

SEQ ID NO: 490639 - DNA, 25 bp, Homo sapien
gtgactccagagaccccgacgtatc

SEQ ID NO: 490640 - DNA, 25 bp, Homo sapien
tcagctaggtggtctctaaggcttt

SEQ ID NO: 490641 - DNA, 25 bp, Homo sapien
cccacttccgacgttaacagaggct

SEQ ID NO: 490642 - DNA, 25 bp, Homo sapien
tccggaggctgtgccgttataacca

SEQ ID NO: 490643 - DNA, 25 bp, Homo sapien
tctttctagagttcgtggcttcaca

SEQ ID NO: 490644 - DNA, 25 bp, Homo sapien
ggtgatcctggtcccgtgtagtatt

SEQ ID NO: 490645 - DNA, 25 bp, Homo sapien
tgcatgggctacttcaggattgtcc

SEQ ID NO: 490646 - DNA, 25 bp, Homo sapien
gaaatgtgggacagagccaacaagc

SEQ ID NO: 490647 - DNA, 25 bp, Homo sapien
ggaaatgtgggacagagccaacaag

SEQ ID NO: 490648 - DNA, 25 bp, Homo sapien
gggaaatgtgggacagagccaacaa

SEQ ID NO: 490649 - DNA, 25 bp, Homo sapien
ccaactgggcttgcgttggccctgt

SEQ ID NO: 490650 - DNA, 25 bp, Homo sapien
tggccaactgggcttgcgttggccc

SEQ ID NO: 490651 - DNA, 25 bp, Homo sapien
cctgattggccaactgggcttgcgt

SEQ ID NO: 490652 - DNA, 25 bp, Homo sapien
tgattggccaactgggcttgcgttg

SEQ ID NO: 490653 - DNA, 25 bp, Homo sapien
gcatcattatgcaagcccaaaggcc

SEQ ID NO: 490654 - DNA, 25 bp, Homo sapien
tactagtttccagtgggcattccac

SEQ ID NO: 490655 - DNA, 25 bp, Homo sapien
aggtggactggctctcacgctaacc

SEQ ID NO: 490656 - DNA, 25 bp, Homo sapien
ccactgacggtaaatttctgccaga

SEQ ID NO: 490657 - DNA, 25 bp, Homo sapien
acagttgccgaagtgccttctttga

SEQ ID NO: 490658 - DNA, 25 bp, Homo sapien
agttgccgaagtgccttctttgagc

SEQ ID NO: 490659 - DNA, 25 bp, Homo sapien
ataacagttgccgaagtgccttctt

SEQ ID NO: 490660 - DNA, 25 bp, Homo sapien
gccgaagtgccttctttgagcttct

SEQ ID NO: 490661 - DNA, 25 bp, Homo sapien
gttgactgctttaaccacaagtact

SEQ ID NO: 490662 - DNA, 25 bp, Homo sapien
ttgactgctttaaccacaagtactt

SEQ ID NO: 490663 - DNA, 25 bp, Homo sapien
tgactgctttaaccacaagtacttt

SEQ ID NO: 490664 - DNA, 25 bp, Homo sapien
ttccacttcattgtcaatctcacca

SEQ ID NO: 490665 - DNA, 25 bp, Homo sapien
tttccacttcattgtcaatctcacc

SEQ ID NO: 490666 - DNA, 25 bp, Homo sapien
acttcattgtcaatctcaccatgta

SEQ ID NO: 490667 - DNA, 25 bp, Homo sapien
cttcattgtcaatctcaccatgtaa

SEQ ID NO: 490668 - DNA, 25 bp, Homo sapien
tgtagatgccaggcatccagggtag

SEQ ID NO: 490669 - DNA, 25 bp, Homo sapien
aatgtagatgccaggcatccagggt

SEQ ID NO: 490670 - DNA, 25 bp, Homo sapien
tttgaacttcccatttgtacatcct

SEQ ID NO: 490671 - DNA, 25 bp, Homo sapien
atgccaggcatccagggtaggaata

SEQ ID NO: 490672 - DNA, 25 bp, Homo sapien
tgatcaaggattgtcgaagaccctc

SEQ ID NO: 490673 - DNA, 25 bp, Homo sapien
cttctatggccgcactgtgaggaca

SEQ ID NO: 490674 - DNA, 25 bp, Homo sapien
tgtgaggacactcggctgcttgcag

SEQ ID NO: 490675 - DNA, 25 bp, Homo sapien
gaaccgcaaggtctttgatcaagga

SEQ ID NO: 490676 - DNA, 25 bp, Homo sapien
gtcacagcctgacagcgcctgctgg

SEQ ID NO: 490677 - DNA, 25 bp, Homo sapien
ttccataagataggccaaagaaacc

SEQ ID NO: 490678 - DNA, 25 bp, Homo sapien
cttaattccataagataggccaaag

SEQ ID NO: 490679 - DNA, 25 bp, Homo sapien
tcacagcctgacagcgcctgctggg

SEQ ID NO: 490680 - DNA, 25 bp, Homo sapien
tgcctttctaaataatgtttctccc

SEQ ID NO: 490681 - DNA, 25 bp, Homo sapien
tctttgcctttctaaataatgtttc

SEQ ID NO: 490682 - DNA, 25 bp, Homo sapien
tctattgtcttcttgtcctcttttt

SEQ ID NO: 490683 - DNA, 25 bp, Homo sapien
ctttctaaataatgtttctccctca

SEQ ID NO: 490684 - DNA, 25 bp, Homo sapien
caaattcgtgtcttttaaaactgag

SEQ ID NO: 490685 - DNA, 25 bp, Homo sapien
tgagtttgtgctttcagaattcact

SEQ ID NO: 490686 - DNA, 25 bp, Homo sapien
gtttgtgctttcagaattcactcca

SEQ ID NO: 490687 - DNA, 25 bp, Homo sapien
actggcgaaggcagcaagtccacag

SEQ ID NO: 490688 - DNA, 25 bp, Homo sapien
gcaggaccatcacactctggaatgt

SEQ ID NO: 490689 - DNA, 25 bp, Homo sapien
tcttttggcattatgaggcctatag

SEQ ID NO: 490690 - DNA, 25 bp, Homo sapien
gaggcctatagcaggaccatcacac

SEQ ID NO: 490691 - DNA, 25 bp, Homo sapien
gcattatgaggcctatagcaggacc

SEQ ID NO: 490692 - DNA, 25 bp, Homo sapien
tcagtatagctgaaaccaacaattt

SEQ ID NO: 490693 - DNA, 25 bp, Homo sapien
ccaacaatttgaaataagagcttga

SEQ ID NO: 490694 - DNA, 25 bp, Homo sapien
aattttcttcagtatagctgaaacc

SEQ ID NO: 490695 - DNA, 25 bp, Homo sapien
tttgaagttggcagctaaagcctcc

SEQ ID NO: 490696 - DNA, 25 bp, Homo sapien
tgttcctcccgtgaaccttcgtgta

SEQ ID NO: 490697 - DNA, 25 bp, Homo sapien
ctcccgtgaaccttcgtgtagacct

SEQ ID NO: 490698 - DNA, 25 bp, Homo sapien
cattaagtttaagccacactgcctt

SEQ ID NO: 490699 - DNA, 25 bp, Homo sapien
gttcttcagctcgaccttccttgca

SEQ ID NO: 490700 - DNA, 25 bp, Homo sapien
ctccatatgtgtgcccactcagaca

SEQ ID NO: 490701 - DNA, 25 bp, Homo sapien
ctggttgctccatatgtgtgcccac

SEQ ID NO: 490702 - DNA, 25 bp, Homo sapien
tttagacctgccaaaagctcacatt

SEQ ID NO: 490703 - DNA, 25 bp, Homo sapien
tagacctgccaaaagctcacattca

SEQ ID NO: 490704 - DNA, 25 bp, Homo sapien
gtaagttttgataaggaccatcaaa

SEQ ID NO: 490705 - DNA, 25 bp, Homo sapien
cattccctggaaccgttgaaatgta

SEQ ID NO: 490706 - DNA, 25 bp, Homo sapien
tatgatatccatacatgtgttgttc

SEQ ID NO: 490707 - DNA, 25 bp, Homo sapien
tctgcttctgcacgtttttccatgt

SEQ ID NO: 490708 - DNA, 25 bp, Homo sapien
aagggtgtgggtttcctgatcaacg

SEQ ID NO: 490709 - DNA, 25 bp, Homo sapien
tccctctgcgttgtattcctttgac

SEQ ID NO: 490710 - DNA, 25 bp, Homo sapien
tcctttgacgttgccccaacttgca

SEQ ID NO: 490711 - DNA, 25 bp, Homo sapien
tgcaggtgtagagttgggctccctc

SEQ ID NO: 490712 - DNA, 25 bp, Homo sapien
acttctcgacgacccagctgtgtag

SEQ ID NO: 490713 - DNA, 25 bp, Homo sapien
tgctgatttgactgcgtcttcctgg

SEQ ID NO: 490714 - DNA, 25 bp, Homo sapien
agcagacacgcctatgagtccacgg

SEQ ID NO: 490715 - DNA, 25 bp, Homo sapien
tctgaagaggtactaggaggcttgc

SEQ ID NO: 490716 - DNA, 25 bp, Homo sapien
gtcctggagcatctctaagtaatta

SEQ ID NO: 490717 - DNA, 25 bp, Homo sapien
caggaacacacagaacaaaggttga

SEQ ID NO: 490718 - DNA, 25 bp, Homo sapien
caaaggttgagtcctggagcatctc

SEQ ID NO: 490719 - DNA, 25 bp, Homo sapien
cacagaacaaaggttgagtcctgga

SEQ ID NO: 490720 - DNA, 25 bp, Homo sapien
tttggcattttgtgcatgcagtttt

SEQ ID NO: 490721 - DNA, 25 bp, Homo sapien
ttggcattttgtgcatgcagtttta

SEQ ID NO: 490722 - DNA, 25 bp, Homo sapien
ctttggcattttgtgcatgcagttt

SEQ ID NO: 490723 - DNA, 25 bp, Homo sapien
tttatagacagggtgtaaggactgg

SEQ ID NO: 490724 - DNA, 25 bp, Homo sapien
gaagtcaattccacatcgggtcttt

SEQ ID NO: 490725 - DNA, 25 bp, Homo sapien
ttccacatcgggtctttatagacag

SEQ ID NO: 490726 - DNA, 25 bp, Homo sapien
ttatagacagggtgtaaggactggt

SEQ ID NO: 490727 - DNA, 25 bp, Homo sapien
ctcttggaaagtctgatgtggttga

SEQ ID NO: 490728 - DNA, 25 bp, Homo sapien
gaaagtctgatgtggttgatatctg

SEQ ID NO: 490729 - DNA, 25 bp, Homo sapien
tatctgttgtgcaaacaaaatcaat

SEQ ID NO: 490730 - DNA, 25 bp, Homo sapien
ctgatgtggttgatatctgttgtgc

SEQ ID NO: 490731 - DNA, 25 bp, Homo sapien
aatcatgcaaatctccaaacgaaaa

SEQ ID NO: 490732 - DNA, 25 bp, Homo sapien
gcaaatctccaaacgaaaattagaa

SEQ ID NO: 490733 - DNA, 25 bp, Homo sapien
tcatgcaaatctccaaacgaaaatt

SEQ ID NO: 490734 - DNA, 25 bp, Homo sapien
tgcaaatctccaaacgaaaattaga

SEQ ID NO: 490735 - DNA, 25 bp, Homo sapien
gccatcctggaacatgttttcaatg

SEQ ID NO: 490736 - DNA, 25 bp, Homo sapien
tatgccatcctggaacatgttttca

SEQ ID NO: 490737 - DNA, 25 bp, Homo sapien
tgccatcctggaacatgttttcaat

SEQ ID NO: 490738 - DNA, 25 bp, Homo sapien
ttatgccatcctggaacatgttttc

SEQ ID NO: 490739 - DNA, 25 bp, Homo sapien
acacagggagtgaatctttgacttc

SEQ ID NO: 490740 - DNA, 25 bp, Homo sapien
tttccctggaatttctagccttcca

SEQ ID NO: 490741 - DNA, 25 bp, Homo sapien
tccctggaatttctagccttccact

SEQ ID NO: 490742 - DNA, 25 bp, Homo sapien
cagggagtgaatctttgacttcttt

SEQ ID NO: 490743 - DNA, 25 bp, Homo sapien
cgtcgtgcaggagagtagaattgac

SEQ ID NO: 490744 - DNA, 25 bp, Homo sapien
tacttggaagaatgtaatgactctg

SEQ ID NO: 490745 - DNA, 25 bp, Homo sapien
gatgcaggttccgtggctacttgga

SEQ ID NO: 490746 - DNA, 25 bp, Homo sapien
ttggtaaatcattggcaggttttga

SEQ ID NO: 490747 - DNA, 25 bp, Homo sapien
tccaaagatatagaccagccaaagt

SEQ ID NO: 490748 - DNA, 25 bp, Homo sapien
agccaaagtcaaatgcagagagccc

SEQ ID NO: 490749 - DNA, 25 bp, Homo sapien
agcaggactctacaactacctccaa

SEQ ID NO: 490750 - DNA, 25 bp, Homo sapien
gactctacaactacctccaaagata

SEQ ID NO: 490751 - DNA, 25 bp, Homo sapien
tgtattgccggcgacagtggttacc

SEQ ID NO: 490752 - DNA, 25 bp, Homo sapien
ctgtattgccggcgacagtggttac

SEQ ID NO: 490753 - DNA, 25 bp, Homo sapien
gtattgccggcgacagtggttacca

SEQ ID NO: 490754 - DNA, 25 bp, Homo sapien
tattgccggcgacagtggttaccat

SEQ ID NO: 490755 - DNA, 25 bp, Homo sapien
ctgcacatgaggaatacctgcctgc

SEQ ID NO: 490756 - DNA, 25 bp, Homo sapien
ctgcttctcatggccattactgggc

SEQ ID NO: 490757 - DNA, 25 bp, Homo sapien
tgcacatgaggaatacctgcctgct

SEQ ID NO: 490758 - DNA, 25 bp, Homo sapien
ttctcatggccattactgggcatcc

SEQ ID NO: 490759 - DNA, 25 bp, Homo sapien
ttggctttgcccaggcgtgcacttc

SEQ ID NO: 490760 - DNA, 25 bp, Homo sapien
gcttctctctcgtttcccatcactc

SEQ ID NO: 490761 - DNA, 25 bp, Homo sapien
tgcttctctctcgtttcccatcact

SEQ ID NO: 490762 - DNA, 25 bp, Homo sapien
gcctgcttctctctcgtttcccatc

SEQ ID NO: 490763 - DNA, 25 bp, Homo sapien
taaacgttgtgcgtcttcctgttta

SEQ ID NO: 490764 - DNA, 25 bp, Homo sapien
gttgtgcgtcttcctgtttaacctc

SEQ ID NO: 490765 - DNA, 25 bp, Homo sapien
ttgtgcgtcttcctgtttaacctca

SEQ ID NO: 490766 - DNA, 25 bp, Homo sapien
cgttgtgcgtcttcctgtttaacct

SEQ ID NO: 490767 - DNA, 25 bp, Homo sapien
tgattttcccagtggtggtgaagtc

SEQ ID NO: 490768 - DNA, 25 bp, Homo sapien
ttatgattttcccagtggtggtgaa

SEQ ID NO: 490769 - DNA, 25 bp, Homo sapien
attttcccagtggtggtgaagtcca

SEQ ID NO: 490770 - DNA, 25 bp, Homo sapien
tatgattttcccagtggtggtgaag

SEQ ID NO: 490771 - DNA, 25 bp, Homo sapien
ctccaggagacgtaagctctgcttc

SEQ ID NO: 490772 - DNA, 25 bp, Homo sapien
gctccaggagacgtaagctctgctt

SEQ ID NO: 490773 - DNA, 25 bp, Homo sapien
tcgctccaggagacgtaagctctgc

SEQ ID NO: 490774 - DNA, 25 bp, Homo sapien
tttcgctccaggagacgtaagctct

SEQ ID NO: 490775 - DNA, 25 bp, Homo sapien
cctttaagatagagaactttgtggc

SEQ ID NO: 490776 - DNA, 25 bp, Homo sapien
ccacaggcttgttagacttataagg

SEQ ID NO: 490777 - DNA, 25 bp, Homo sapien
cagttgaatgtggaagatacacggc

SEQ ID NO: 490778 - DNA, 25 bp, Homo sapien
cttataaggagttcatcagatacct

SEQ ID NO: 490779 - DNA, 25 bp, Homo sapien
tcaactcaggatgttttgtctgcca

SEQ ID NO: 490780 - DNA, 25 bp, Homo sapien
ctcaggatgttttgtctgccacaat

SEQ ID NO: 490781 - DNA, 25 bp, Homo sapien
ggatgttttgtctgccacaatttca

SEQ ID NO: 490782 - DNA, 25 bp, Homo sapien
aggaatcaactcaggatgttttgtc

SEQ ID NO: 490783 - DNA, 25 bp, Homo sapien
ttggttccatctcaactaggtgttc

SEQ ID NO: 490784 - DNA, 25 bp, Homo sapien
tttcagttggttccatctcaactag

SEQ ID NO: 490785 - DNA, 25 bp, Homo sapien
ctgaacaaccatcctttcagttggt

SEQ ID NO: 490786 - DNA, 25 bp, Homo sapien
cagttggttccatctcaactaggtg

SEQ ID NO: 490787 - DNA, 25 bp, Homo sapien
gtgtcgtctccacagatatcattca

SEQ ID NO: 490788 - DNA, 25 bp, Homo sapien
cttttcattctcaaacctgtagtca

SEQ ID NO: 490789 - DNA, 25 bp, Homo sapien
tccacagatatcattcactttttcc

SEQ ID NO: 490790 - DNA, 25 bp, Homo sapien
cattctcaaacctgtagtcagtcac

SEQ ID NO: 490791 - DNA, 25 bp, Homo sapien
ggaagacctgccagcgctagtgctg

SEQ ID NO: 490792 - DNA, 25 bp, Homo sapien
tcttctattcatggaaccccaccat

SEQ ID NO: 490793 - DNA, 25 bp, Homo sapien
ccaccattgatctaggcttgaggca

SEQ ID NO: 490794 - DNA, 25 bp, Homo sapien
ggcttgaggcaatacttgtgctttc

SEQ ID NO: 490795 - DNA, 25 bp, Homo sapien
tctgagtctctaggagcggctgctt

SEQ ID NO: 490796 - DNA, 25 bp, Homo sapien
gcttacgtagcatttgcaaaagaga

SEQ ID NO: 490797 - DNA, 25 bp, Homo sapien
cttctggtgccctctccataaaata

SEQ ID NO: 490798 - DNA, 25 bp, Homo sapien
caatggcagataaaggctccttagc

SEQ ID NO: 490799 - DNA, 25 bp, Homo sapien
aaagagagattaagaagaggaaaat

SEQ ID NO: 490800 - DNA, 25 bp, Homo sapien
aagagagattaagaagaggaaaata

SEQ ID NO: 490801 - DNA, 25 bp, Homo sapien
ctgccttggacctgtaggaaagtaa

SEQ ID NO: 490802 - DNA, 25 bp, Homo sapien
tggacctgtaggaaagtaattgtaa

SEQ ID NO: 490803 - DNA, 25 bp, Homo sapien
tgccttggacctgtaggaaagtaat

SEQ ID NO: 490804 - DNA, 25 bp, Homo sapien
ccttggacctgtaggaaagtaattg

SEQ ID NO: 490805 - DNA, 25 bp, Homo sapien
acttccatgtgaaaggtgtaactct

SEQ ID NO: 490806 - DNA, 25 bp, Homo sapien
ttccatgtgaaaggtgtaactcttc

SEQ ID NO: 490807 - DNA, 25 bp, Homo sapien
ccatgtgaaaggtgtaactcttctt

SEQ ID NO: 490808 - DNA, 25 bp, Homo sapien
gtgaaaggtgtaactcttcttcaaa

SEQ ID NO: 490809 - DNA, 25 bp, Homo sapien
atacagctagcaggtcacataacca

SEQ ID NO: 490810 - DNA, 25 bp, Homo sapien
tatgcaatgattcaggctacagcca

SEQ ID NO: 490811 - DNA, 25 bp, Homo sapien
tgctgcctaccaacaaactatactt

SEQ ID NO: 490812 - DNA, 25 bp, Homo sapien
ggctgcatttgaccctcaaagcttc

SEQ ID NO: 490813 - DNA, 25 bp, Homo sapien
tccaaccaatccacaaatgaggctg

SEQ ID NO: 490814 - DNA, 25 bp, Homo sapien
tcctcagattcacagttcagatggc

SEQ ID NO: 490815 - DNA, 25 bp, Homo sapien
gaatacatgcgtaagaatacctggt

SEQ ID NO: 490816 - DNA, 25 bp, Homo sapien
tgctaaaacagtgagtacaccaggg

SEQ ID NO: 490817 - DNA, 25 bp, Homo sapien
ttatccaacatgagattttccaaca

SEQ ID NO: 490818 - DNA, 25 bp, Homo sapien
ctgactcggatgcacatcctctgag

SEQ ID NO: 490819 - DNA, 25 bp, Homo sapien
ggctgactcggatgcacatcctctg

SEQ ID NO: 490820 - DNA, 25 bp, Homo sapien
gaaggctgactcggatgcacatcct

SEQ ID NO: 490821 - DNA, 25 bp, Homo sapien
aaggctgactcggatgcacatcctc

SEQ ID NO: 490822 - DNA, 25 bp, Homo sapien
cctgccagcatttagtggatggtga

SEQ ID NO: 490823 - DNA, 25 bp, Homo sapien
agtggatggtgatgcaaacgttcta

SEQ ID NO: 490824 - DNA, 25 bp, Homo sapien
ttctatgatgcacgggcaggcagtc

SEQ ID NO: 490825 - DNA, 25 bp, Homo sapien
agagttcgtccaccagtgacagaag

SEQ ID NO: 490826 - DNA, 25 bp, Homo sapien
tagacttgacaactggaactctgta

SEQ ID NO: 490827 - DNA, 25 bp, Homo sapien
cccttaagaaggcaatctctcctgc

SEQ ID NO: 490828 - DNA, 25 bp, Homo sapien
gtatcagtgattcccaagaaaggtt

SEQ ID NO: 490829 - DNA, 25 bp, Homo sapien
cttccagacaccaagacttgaaaac

SEQ ID NO: 490830 - DNA, 25 bp, Homo sapien
catggatagtttccaacattctgtt

SEQ ID NO: 490831 - DNA, 25 bp, Homo sapien
ccaactgcatccctaccatggatag

SEQ ID NO: 490832 - DNA, 25 bp, Homo sapien
gagacatcatcctttccttcaggtg

SEQ ID NO: 490833 - DNA, 25 bp, Homo sapien
tgttgctcttagaaagtcctgagac

SEQ ID NO: 490834 - DNA, 25 bp, Homo sapien
gtccatcttctgcatacatccacat

SEQ ID NO: 490835 - DNA, 25 bp, Homo sapien
tgctgggctgcctcaacagatagta

SEQ ID NO: 490836 - DNA, 25 bp, Homo sapien
catttttgtgtggaatgagtccatc

SEQ ID NO: 490837 - DNA, 25 bp, Homo sapien
tagtatttgtacaatggcatttttg

SEQ ID NO: 490838 - DNA, 25 bp, Homo sapien
ttgagtttcacattccgatataaga

SEQ ID NO: 490839 - DNA, 25 bp, Homo sapien
ttcacattccgatataagacgacaa

SEQ ID NO: 490840 - DNA, 25 bp, Homo sapien
gagtttcacattccgatataagacg

SEQ ID NO: 490841 - DNA, 25 bp, Homo sapien
gtttcacattccgatataagacgac

SEQ ID NO: 490842 - DNA, 25 bp, Homo sapien
cactgcctggagtctggactgtgaa

SEQ ID NO: 490843 - DNA, 25 bp, Homo sapien
tctgtggattcctagtttgcttctc

SEQ ID NO: 490844 - DNA, 25 bp, Homo sapien
tgcctggagtctggactgtgaagct

SEQ ID NO: 490845 - DNA, 25 bp, Homo sapien
actgcctggagtctggactgtgaag

SEQ ID NO: 490846 - DNA, 25 bp, Homo sapien
cagtatgaacaatcagcacaacagt

SEQ ID NO: 490847 - DNA, 25 bp, Homo sapien
gtgacacatcccacaagaataccaa

SEQ ID NO: 490848 - DNA, 25 bp, Homo sapien
gaatgccgacacctttccagtatga

SEQ ID NO: 490849 - DNA, 25 bp, Homo sapien
tagacaacagggacgcagcttgggt

SEQ ID NO: 490850 - DNA, 25 bp, Homo sapien
tctacattgcagaagacccatcctc

SEQ ID NO: 490851 - DNA, 25 bp, Homo sapien
gactttagcttcttcagcagattcc

SEQ ID NO: 490852 - DNA, 25 bp, Homo sapien
tcaattcagtggtttatcatttttc

SEQ ID NO: 490853 - DNA, 25 bp, Homo sapien
tctggaatccactattgactttagc

SEQ ID NO: 490854 - DNA, 25 bp, Homo sapien
gctgggttatgaggccccagcaagc

SEQ ID NO: 490855 - DNA, 25 bp, Homo sapien
ttgactattatccaagaacagatgg

SEQ ID NO: 490856 - DNA, 25 bp, Homo sapien
ggctggtaatttcccatagtggagc

SEQ ID NO: 490857 - DNA, 25 bp, Homo sapien
taggtgatgataaatggctggtaat

SEQ ID NO: 490858 - DNA, 25 bp, Homo sapien
catagccttctatattcaatataag

SEQ ID NO: 490859 - DNA, 25 bp, Homo sapien
acatagccttctatattcaatataa

SEQ ID NO: 490860 - DNA, 25 bp, Homo sapien
tgcagaatgccactgacgtgatgcc

SEQ ID NO: 490861 - DNA, 25 bp, Homo sapien
tctgaggtcggggagcattgcacaa

SEQ ID NO: 490862 - DNA, 25 bp, Homo sapien
cctgaagtggggctttagactcctt

SEQ ID NO: 490863 - DNA, 25 bp, Homo sapien
tgtgggtttcttcaatctgaggtcg

SEQ ID NO: 490864 - DNA, 25 bp, Homo sapien
gagcattgcacaatctggcccactg

SEQ ID NO: 490865 - DNA, 25 bp, Homo sapien
ctgccttccttccagcagagtcact

SEQ ID NO: 490866 - DNA, 25 bp, Homo sapien
ttccttccagcagagtcactctcca

SEQ ID NO: 490867 - DNA, 25 bp, Homo sapien
gccttccttccagcagagtcactct

SEQ ID NO: 490868 - DNA, 25 bp, Homo sapien
cttccttccagcagagtcactctcc

SEQ ID NO: 490869 - DNA, 25 bp, Homo sapien
gcaaggctcagaccaggctcacaag

SEQ ID NO: 490870 - DNA, 25 bp, Homo sapien
aaatactcagtggctgtgcaaggct

SEQ ID NO: 490871 - DNA, 25 bp, Homo sapien
ctgaggtaggaggtacactggctaa

SEQ ID NO: 490872 - DNA, 25 bp, Homo sapien
aggctcttggttgaaaagcagcccc

SEQ ID NO: 490873 - DNA, 25 bp, Homo sapien
tgcagggcagtttctgctcttgtga

SEQ ID NO: 490874 - DNA, 25 bp, Homo sapien
tgctcttgtgatatctagactgtag

SEQ ID NO: 490875 - DNA, 25 bp, Homo sapien
tagactgtagcacggagagtgctcc

SEQ ID NO: 490876 - DNA, 25 bp, Homo sapien
gagagtgctccgttttccctgtcct

SEQ ID NO: 490877 - DNA, 25 bp, Homo sapien
aaaatgatgagttgaatatcccact

SEQ ID NO: 490878 - DNA, 25 bp, Homo sapien
tgaatatcccactgttgaccacagt

SEQ ID NO: 490879 - DNA, 25 bp, Homo sapien
tgttgaccacagtctgcagcaccct

SEQ ID NO: 490880 - DNA, 25 bp, Homo sapien
tagtaaattggttgttatattccat

SEQ ID NO: 490881 - DNA, 25 bp, Homo sapien
tgctggccatgctcaatgcactgtg

SEQ ID NO: 490882 - DNA, 25 bp, Homo sapien
tacttctatcaatattcggatgacc

SEQ ID NO: 490883 - DNA, 25 bp, Homo sapien
cctcaaagcactgtgtgtcttccat

SEQ ID NO: 490884 - DNA, 25 bp, Homo sapien
caggtggatgcagcaaggcgttttg

SEQ ID NO: 490885 - DNA, 25 bp, Homo sapien
cagcaggagatccattagcgtatca

SEQ ID NO: 490886 - DNA, 25 bp, Homo sapien
taactaataattttgccagtggcct

SEQ ID NO: 490887 - DNA, 25 bp, Homo sapien
ctgagcctctaacagcaggagatcc

SEQ ID NO: 490888 - DNA, 25 bp, Homo sapien
gatccattagcgtatcacttggcat

SEQ ID NO: 490889 - DNA, 25 bp, Homo sapien
tctgggtaatggattcaataattcg

SEQ ID NO: 490890 - DNA, 25 bp, Homo sapien
tcggccgtgtgatgtagtgacagct

SEQ ID NO: 490891 - DNA, 25 bp, Homo sapien
gattcaataattcggccgtgtgatg

SEQ ID NO: 490892 - DNA, 25 bp, Homo sapien
taattcggccgtgtgatgtagtgac

SEQ ID NO: 490893 - DNA, 25 bp, Homo sapien
gcttcagtcgaatgcacaggctgca

SEQ ID NO: 490894 - DNA, 25 bp, Homo sapien
tagcacgtggcagtcaggtacagta

SEQ ID NO: 490895 - DNA, 25 bp, Homo sapien
cacagcagtgttcgttgactgagag

SEQ ID NO: 490896 - DNA, 25 bp, Homo sapien
gctgcactggacacactagcacgtg

SEQ ID NO: 490897 - DNA, 25 bp, Homo sapien
cacaaagggatttagtttgagtcaa

SEQ ID NO: 490898 - DNA, 25 bp, Homo sapien
ggcattaggcatggtactacttcct

SEQ ID NO: 490899 - DNA, 25 bp, Homo sapien
gcacaggaagtgaattatcagaagg

SEQ ID NO: 490900 - DNA, 25 bp, Homo sapien
tcagaaggggatgcacaaagggatt

SEQ ID NO: 490901 - DNA, 25 bp, Homo sapien
ctaatcaacaatgcgttgagtcact

SEQ ID NO: 490902 - DNA, 25 bp, Homo sapien
caatgcgttgagtcactggtcgttt

SEQ ID NO: 490903 - DNA, 25 bp, Homo sapien
tgcgttgagtcactggtcgttttac

SEQ ID NO: 490904 - DNA, 25 bp, Homo sapien
caacaatgcgttgagtcactggtcg

SEQ ID NO: 490905 - DNA, 25 bp, Homo sapien
aattctctggagacaatcttactaa

SEQ ID NO: 490906 - DNA, 25 bp, Homo sapien
aatgtgactctgaactaaaagcata

SEQ ID NO: 490907 - DNA, 25 bp, Homo sapien
ggagacaatcttactaaccttttca

SEQ ID NO: 490908 - DNA, 25 bp, Homo sapien
agcaaattctctggagacaatctta

SEQ ID NO: 490909 - DNA, 25 bp, Homo sapien
caggtgaaagttcatgacaaccttt

SEQ ID NO: 490910 - DNA, 25 bp, Homo sapien
ttttagcaggtgaaagttcatgaca

SEQ ID NO: 490911 - DNA, 25 bp, Homo sapien
tgaaagttcatgacaacctttgtac

SEQ ID NO: 490912 - DNA, 25 bp, Homo sapien
ttgttttagcaggtgaaagttcatg

SEQ ID NO: 490913 - DNA, 25 bp, Homo sapien
ttaagtgtcacaagattggaccagc

SEQ ID NO: 490914 - DNA, 25 bp, Homo sapien
cagccgtcggatgagagcaggatcc

SEQ ID NO: 490915 - DNA, 25 bp, Homo sapien
agcaggatccagatgtcggcgttaa

SEQ ID NO: 490916 - DNA, 25 bp, Homo sapien
agaggatggcctcccctaggcacct

SEQ ID NO: 490917 - DNA, 25 bp, Homo sapien
tttcttttattttatccttccagca

SEQ ID NO: 490918 - DNA, 25 bp, Homo sapien
ttcactgctttcttttattttatcc

SEQ ID NO: 490919 - DNA, 25 bp, Homo sapien
tgctttcttttattttatccttcca

SEQ ID NO: 490920 - DNA, 25 bp, Homo sapien
cttttattttatccttccagcacat

SEQ ID NO: 490921 - DNA, 25 bp, Homo sapien
cttttcatacacgcctttcacactg

SEQ ID NO: 490922 - DNA, 25 bp, Homo sapien
tttcatacacgcctttcacactgcg

SEQ ID NO: 490923 - DNA, 25 bp, Homo sapien
tcatacacgcctttcacactgcgtg

SEQ ID NO: 490924 - DNA, 25 bp, Homo sapien
tacacgcctttcacactgcgtgaca

SEQ ID NO: 490925 - DNA, 25 bp, Homo sapien
tgctgctttgccgtagcccctgatg

SEQ ID NO: 490926 - DNA, 25 bp, Homo sapien
ttgccgtagcccctgatgtgtggac

SEQ ID NO: 490927 - DNA, 25 bp, Homo sapien
ctgatgtgtggacgtggttctgacc

SEQ ID NO: 490928 - DNA, 25 bp, Homo sapien
ggatgtgggtcaggaaggcgttctc

SEQ ID NO: 490929 - DNA, 25 bp, Homo sapien
gatcatctggaggacaggttaaacc

SEQ ID NO: 490930 - DNA, 25 bp, Homo sapien
tccctgagcactggacgtagctttt

SEQ ID NO: 490931 - DNA, 25 bp, Homo sapien
tccatacgtgatactcatgctgccg

SEQ ID NO: 490932 - DNA, 25 bp, Homo sapien
ttaatgattttccagctcgctggcc

SEQ ID NO: 490933 - DNA, 25 bp, Homo sapien
caatctggttccttgccagaatgta

SEQ ID NO: 490934 - DNA, 25 bp, Homo sapien
gctgggtctaattgagagtgagtaa

SEQ ID NO: 490935 - DNA, 25 bp, Homo sapien
tcgctgaagagacacctggtttcca

SEQ ID NO: 490936 - DNA, 25 bp, Homo sapien
tctcgcctcgggatgagggatacgc

SEQ ID NO: 490937 - DNA, 25 bp, Homo sapien
gaactggtttggtgcagttgctgac

SEQ ID NO: 490938 - DNA, 25 bp, Homo sapien
tgatggtatgacgaggattctgact

SEQ ID NO: 490939 - DNA, 25 bp, Homo sapien
gattctgacttttagggactactcc

SEQ ID NO: 490940 - DNA, 25 bp, Homo sapien
gactactccccgtaagtccatgaca

SEQ ID NO: 490941 - DNA, 25 bp, Homo sapien
ccagggtgccgatttatttcataca

SEQ ID NO: 490942 - DNA, 25 bp, Homo sapien
taacctaaagaaatgtccgatatat

SEQ ID NO: 490943 - DNA, 25 bp, Homo sapien
tacaggatttgagtgaagattcttt

SEQ ID NO: 490944 - DNA, 25 bp, Homo sapien
gaagattcttttaatccaagtgtcc

SEQ ID NO: 490945 - DNA, 25 bp, Homo sapien
gcttgtggtcatagctatccacgtc

SEQ ID NO: 490946 - DNA, 25 bp, Homo sapien
ctcaagcttgtggtcatagctatcc

SEQ ID NO: 490947 - DNA, 25 bp, Homo sapien
ttgtggtcatagctatccacgtcca

SEQ ID NO: 490948 - DNA, 25 bp, Homo sapien
caagcttgtggtcatagctatccac

SEQ ID NO: 490949 - DNA, 25 bp, Homo sapien
ttcccatccacttctcgtgctgttt

SEQ ID NO: 490950 - DNA, 25 bp, Homo sapien
taaggcactggatcccgctgaatga

SEQ ID NO: 490951 - DNA, 25 bp, Homo sapien
aaaggacaaggcgattgcaggagct

SEQ ID NO: 490952 - DNA, 25 bp, Homo sapien
caaaggctaaggcactggatcccgc

SEQ ID NO: 490953 - DNA, 25 bp, Homo sapien
acttgaggatttatctctacattct

SEQ ID NO: 490954 - DNA, 25 bp, Homo sapien
cattctccgtagcatccacaattct

SEQ ID NO: 490955 - DNA, 25 bp, Homo sapien
atctctacattctccgtagcatcca

SEQ ID NO: 490956 - DNA, 25 bp, Homo sapien
tccgtagcatccacaattcttagca

SEQ ID NO: 490957 - DNA, 25 bp, Homo sapien
ctcttttttgcacctccgtaggagg

SEQ ID NO: 490958 - DNA, 25 bp, Homo sapien
cccatgacgtgcttaggaaagttga

SEQ ID NO: 490959 - DNA, 25 bp, Homo sapien
gcctccgacccatgacgtgcttagg

SEQ ID NO: 490960 - DNA, 25 bp, Homo sapien
acctccgtaggaggatggcctccga

SEQ ID NO: 490961 - DNA, 25 bp, Homo sapien
aaggtgctgtcttgatgggctcttc

SEQ ID NO: 490962 - DNA, 25 bp, Homo sapien
aagaacaaggtgctgtcttgatggg

SEQ ID NO: 490963 - DNA, 25 bp, Homo sapien
gaacaaggtgctgtcttgatgggct

SEQ ID NO: 490964 - DNA, 25 bp, Homo sapien
acaaggtgctgtcttgatgggctct

SEQ ID NO: 490965 - DNA, 25 bp, Homo sapien
tcataaccgatcttgagagaaatca

SEQ ID NO: 490966 - DNA, 25 bp, Homo sapien
aatcataggatattacaattcccat

SEQ ID NO: 490967 - DNA, 25 bp, Homo sapien
cttgagagaaatcataggatattac

SEQ ID NO: 490968 - DNA, 25 bp, Homo sapien
ccgatcttgagagaaatcataggat

SEQ ID NO: 490969 - DNA, 25 bp, Homo sapien
ctttcagatacagacttaaaaggcg

SEQ ID NO: 490970 - DNA, 25 bp, Homo sapien
tttcagatacagacttaaaaggcgt

SEQ ID NO: 490971 - DNA, 25 bp, Homo sapien
ttcagatacagacttaaaaggcgtt

SEQ ID NO: 490972 - DNA, 25 bp, Homo sapien
tcagatacagacttaaaaggcgttc

SEQ ID NO: 490973 - DNA, 25 bp, Homo sapien
tgtctttttctgcatgtaaatccat

SEQ ID NO: 490974 - DNA, 25 bp, Homo sapien
tgaggtgtgtccttgtctttttctg

SEQ ID NO: 490975 - DNA, 25 bp, Homo sapien
catgaggtgtgtccttgtctttttc

SEQ ID NO: 490976 - DNA, 25 bp, Homo sapien
cttgtctttttctgcatgtaaatcc

SEQ ID NO: 490977 - DNA, 25 bp, Homo sapien
tagtcatgaaggtgatatcagaggt

SEQ ID NO: 490978 - DNA, 25 bp, Homo sapien
tgcctttccacatgtagtcatgaag

SEQ ID NO: 490979 - DNA, 25 bp, Homo sapien
gatatcagaggtagccttttctggt

SEQ ID NO: 490980 - DNA, 25 bp, Homo sapien
gtgataatgcctttccacatgtagt

SEQ ID NO: 490981 - DNA, 25 bp, Homo sapien
caatatcatcataagtgtgactcag

SEQ ID NO: 490982 - DNA, 25 bp, Homo sapien
tgtgactcagataatgtataggatc

SEQ ID NO: 490983 - DNA, 25 bp, Homo sapien
gaaagccactggatccgatttggaa

SEQ ID NO: 490984 - DNA, 25 bp, Homo sapien
aaatacaggaatgtttgaaagccac

SEQ ID NO: 490985 - DNA, 25 bp, Homo sapien
aaattatgtaggagattgccacggg

SEQ ID NO: 490986 - DNA, 25 bp, Homo sapien
ttgccacgggccacaaacaaatgtt

SEQ ID NO: 490987 - DNA, 25 bp, Homo sapien
ctaactgcaaggagtttttaaatct

SEQ ID NO: 490988 - DNA, 25 bp, Homo sapien
gtaggagattgccacgggccacaaa

SEQ ID NO: 490989 - DNA, 25 bp, Homo sapien
taagaatgaataggtctacagacat

SEQ ID NO: 490990 - DNA, 25 bp, Homo sapien
cttgctgtgaagtaagaatgaatag

SEQ ID NO: 490991 - DNA, 25 bp, Homo sapien
catattgtcctgagggtgcttgatc

SEQ ID NO: 490992 - DNA, 25 bp, Homo sapien
ggtctacagacatattgtcctgagg

SEQ ID NO: 490993 - DNA, 25 bp, Homo sapien
gaggtgaggagtgccacaggatgga

SEQ ID NO: 490994 - DNA, 25 bp, Homo sapien
cttcagggagcttggggactagtcc

SEQ ID NO: 490995 - DNA, 25 bp, Homo sapien
gatggagggatgttgtccctgtctt

SEQ ID NO: 490996 - DNA, 25 bp, Homo sapien
gagcgccacccactgcatgctgggt

SEQ ID NO: 490997 - DNA, 25 bp, Homo sapien
tggggaaaaagaacacattcagtgc

SEQ ID NO: 490998 - DNA, 25 bp, Homo sapien
ggaaaaagaacacattcagtgcaag

SEQ ID NO: 490999 - DNA, 25 bp, Homo sapien
tgtggggaaaaagaacacattcagt

SEQ ID NO: 491000 - DNA, 25 bp, Homo sapien
aaaagaacacattcagtgcaagtac

SEQ ID NO: 491001 - DNA, 25 bp, Homo sapien
gagtgtgacagtgtgccgatattct

SEQ ID NO: 491002 - DNA, 25 bp, Homo sapien
gaagagtgtgacagtgtgccgatat

SEQ ID NO: 491003 - DNA, 25 bp, Homo sapien
agagtgtgacagtgtgccgatattc

SEQ ID NO: 491004 - DNA, 25 bp, Homo sapien
agtgtgacagtgtgccgatattctc

SEQ ID NO: 491005 - DNA, 25 bp, Homo sapien
tgatatgtccagacattccgagtgc

SEQ ID NO: 491006 - DNA, 25 bp, Homo sapien
tggctgatatgtccagacattccga

SEQ ID NO: 491007 - DNA, 25 bp, Homo sapien
atatgtccagacattccgagtgccc

SEQ ID NO: 491008 - DNA, 25 bp, Homo sapien
aatggctgatatgtccagacattcc

SEQ ID NO: 491009 - DNA, 25 bp, Homo sapien
ttcttgtttgaacccacaagcccca

SEQ ID NO: 491010 - DNA, 25 bp, Homo sapien
tcttcttcttgtttgaacccacaag

SEQ ID NO: 491011 - DNA, 25 bp, Homo sapien
cattcagtgtctatcttattcatgt

SEQ ID NO: 491012 - DNA, 25 bp, Homo sapien
ggaaggtctgatggatttatactga

SEQ ID NO: 491013 - DNA, 25 bp, Homo sapien
ctcctgtaaacatgtggccctgagc

SEQ ID NO: 491014 - DNA, 25 bp, Homo sapien
aactcctgtaaacatgtggccctga

SEQ ID NO: 491015 - DNA, 25 bp, Homo sapien
aaactcctgtaaacatgtggccctg

SEQ ID NO: 491016 - DNA, 25 bp, Homo sapien
cctgtaaacatgtggccctgagcaa

SEQ ID NO: 491017 - DNA, 25 bp, Homo sapien
ggaggattttcaatcacgttagtgc

SEQ ID NO: 491018 - DNA, 25 bp, Homo sapien
caactgcaatgctgagattttacat

SEQ ID NO: 491019 - DNA, 25 bp, Homo sapien
gaaggatctcagcacttttacagta

SEQ ID NO: 491020 - DNA, 25 bp, Homo sapien
tacatggctgactacttctgtgctg

SEQ ID NO: 491021 - DNA, 25 bp, Homo sapien
ttcagatctttcaggtcagatgaac

SEQ ID NO: 491022 - DNA, 25 bp, Homo sapien
tgaattaacgaggaatccttcagat

SEQ ID NO: 491023 - DNA, 25 bp, Homo sapien
taacgaggaatccttcagatctttc

SEQ ID NO: 491024 - DNA, 25 bp, Homo sapien
tcagatctttcaggtcagatgaacc

SEQ ID NO: 491025 - DNA, 25 bp, Homo sapien
tttgtagcaatcctgcaacaagccg

SEQ ID NO: 491026 - DNA, 25 bp, Homo sapien
ctgcccgatggccagacccatgttg

SEQ ID NO: 491027 - DNA, 25 bp, Homo sapien
aggagagggtctgtttgtagcaatc

SEQ ID NO: 491028 - DNA, 25 bp, Homo sapien
gactctgacagatgcttttcctgcg

SEQ ID NO: 491029 - DNA, 25 bp, Homo sapien
gttgttacttcctgctaagcccgaa

SEQ ID NO: 491030 - DNA, 25 bp, Homo sapien
tcctttcaacgtagtgatactgtgc

SEQ ID NO: 491031 - DNA, 25 bp, Homo sapien
aaaggtaatcttctgcgagttaggg

SEQ ID NO: 491032 - DNA, 25 bp, Homo sapien
ggcatctgttgccagactttcttgt

SEQ ID NO: 491033 - DNA, 25 bp, Homo sapien
tgcacattgtgaagtccccatcttt

SEQ ID NO: 491034 - DNA, 25 bp, Homo sapien
gaagatcattcatcgagttagattg

SEQ ID NO: 491035 - DNA, 25 bp, Homo sapien
acgaaggatacagtggtgattggcc

SEQ ID NO: 491036 - DNA, 25 bp, Homo sapien
gacatttaaaggaacgaaggataca

SEQ ID NO: 491037 - DNA, 25 bp, Homo sapien
tgtcttttctcacacccgggtggct

SEQ ID NO: 491038 - DNA, 25 bp, Homo sapien
ttttcattcatcatcctcgtcaaat

SEQ ID NO: 491039 - DNA, 25 bp, Homo sapien
tagagtatttcaggcttttttgcag

SEQ ID NO: 491040 - DNA, 25 bp, Homo sapien
ttcatcatcctcgtcaaatgtcttt

SEQ ID NO: 491041 - DNA, 25 bp, Homo sapien
tgtgccgagtttaccgtgcttccag

SEQ ID NO: 491042 - DNA, 25 bp, Homo sapien
tcacaagtacttcttgtgccgagtt

SEQ ID NO: 491043 - DNA, 25 bp, Homo sapien
acttcttgtgccgagtttaccgtgc

SEQ ID NO: 491044 - DNA, 25 bp, Homo sapien
gtttaccgtgcttccagcatttgga

SEQ ID NO: 491045 - DNA, 25 bp, Homo sapien
taaagaggtcatccatgtgcacttc

SEQ ID NO: 491046 - DNA, 25 bp, Homo sapien
gggatcttgcgaaaatgctaagcct

SEQ ID NO: 491047 - DNA, 25 bp, Homo sapien
tctaagtggagcgtgaactatatgc

SEQ ID NO: 491048 - DNA, 25 bp, Homo sapien
tatgcagtcagaatgtctagcctca

SEQ ID NO: 491049 - DNA, 25 bp, Homo sapien
tccaggtttcaagctgtcctttctc

SEQ ID NO: 491050 - DNA, 25 bp, Homo sapien
ttcaactctaccattatcttccagg

SEQ ID NO: 491051 - DNA, 25 bp, Homo sapien
tagtagtggcattcttttgggtagt

SEQ ID NO: 491052 - DNA, 25 bp, Homo sapien
gctaaaactgatagagctgatggat

SEQ ID NO: 491053 - DNA, 25 bp, Homo sapien
taatttgatatgtggagagacagca

SEQ ID NO: 491054 - DNA, 25 bp, Homo sapien
cctctggtaggtagtggtagtgaac

SEQ ID NO: 491055 - DNA, 25 bp, Homo sapien
tatcaggcaacaacccaagtacagg

SEQ ID NO: 491056 - DNA, 25 bp, Homo sapien
gcaaaattatgcctaagctggaggg

SEQ ID NO: 491057 - DNA, 25 bp, Homo sapien
actagagtcccttgtgaggccatct

SEQ ID NO: 491058 - DNA, 25 bp, Homo sapien
tggtaactaactagagccctcaggt

SEQ ID NO: 491059 - DNA, 25 bp, Homo sapien
tagaatttagagcatgcaccctcat

SEQ ID NO: 491060 - DNA, 25 bp, Homo sapien
tgctgacaggcaacacttggatcat

SEQ ID NO: 491061 - DNA, 25 bp, Homo sapien
ccaatggggtcctcattgccagcca

SEQ ID NO: 491062 - DNA, 25 bp, Homo sapien
caatggggtcctcattgccagccat

SEQ ID NO: 491063 - DNA, 25 bp, Homo sapien
caccaatggggtcctcattgccagc

SEQ ID NO: 491064 - DNA, 25 bp, Homo sapien
accaatggggtcctcattgccagcc

SEQ ID NO: 491065 - DNA, 25 bp, Homo sapien
ggcatcagaagcaacaacctggatc

SEQ ID NO: 491066 - DNA, 25 bp, Homo sapien
tcacagtgtgtcggcatcagaagca

SEQ ID NO: 491067 - DNA, 25 bp, Homo sapien
acagtgtgtcggcatcagaagcaac

SEQ ID NO: 491068 - DNA, 25 bp, Homo sapien
tgtgtcggcatcagaagcaacaacc

SEQ ID NO: 491069 - DNA, 25 bp, Homo sapien
tttataatctgcattctgttgtgtc

SEQ ID NO: 491070 - DNA, 25 bp, Homo sapien
tataatctgcattctgttgtgtcat

SEQ ID NO: 491071 - DNA, 25 bp, Homo sapien
ttataatctgcattctgttgtgtca

SEQ ID NO: 491072 - DNA, 25 bp, Homo sapien
gcactctccacacctttcacgtatg

SEQ ID NO: 491073 - DNA, 25 bp, Homo sapien
cctttcacgtatgccctgtgccttt

SEQ ID NO: 491074 - DNA, 25 bp, Homo sapien
tccacacctttcacgtatgccctgt

SEQ ID NO: 491075 - DNA, 25 bp, Homo sapien
ctgcactctccacacctttcacgta

SEQ ID NO: 491076 - DNA, 25 bp, Homo sapien
tttgctgaagcaaagtaacagggaa

SEQ ID NO: 491077 - DNA, 25 bp, Homo sapien
acactcttagcaggattactgccca

SEQ ID NO: 491078 - DNA, 25 bp, Homo sapien
tactgcccatgatagggtaccaggg

SEQ ID NO: 491079 - DNA, 25 bp, Homo sapien
gatagggtaccagggtccactaaca

SEQ ID NO: 491080 - DNA, 25 bp, Homo sapien
tcctctcatgcagtagtttaaatgt

SEQ ID NO: 491081 - DNA, 25 bp, Homo sapien
tgttagtgtcgttgccttcttccac

SEQ ID NO: 491082 - DNA, 25 bp, Homo sapien
agccgtcatcctctcatgcagtagt

SEQ ID NO: 491083 - DNA, 25 bp, Homo sapien
tttaaatgttagtgtcgttgccttc

SEQ ID NO: 491084 - DNA, 25 bp, Homo sapien
ccatggtgagtggagttcaagcgat

SEQ ID NO: 491085 - DNA, 25 bp, Homo sapien
aatacacggtgatatcccttgtccc

SEQ ID NO: 491086 - DNA, 25 bp, Homo sapien
tgtccctcagttgcttcatgtgtta

SEQ ID NO: 491087 - DNA, 25 bp, Homo sapien
cactaggcaagctgtaagaatcttc

SEQ ID NO: 491088 - DNA, 25 bp, Homo sapien
gatcatgggaactcctgtagctagg

SEQ ID NO: 491089 - DNA, 25 bp, Homo sapien
tgtagctaggatctcagaggtccac

SEQ ID NO: 491090 - DNA, 25 bp, Homo sapien
gaaacttcccatgctaaatgtctgg

SEQ ID NO: 491091 - DNA, 25 bp, Homo sapien
catgtgatcagatgccccttggtcc

SEQ ID NO: 491092 - DNA, 25 bp, Homo sapien
gagtcctgaaaaacagcgccctgaa

SEQ ID NO: 491093 - DNA, 25 bp, Homo sapien
gagagaatcagcgaccaatgggaat

SEQ ID NO: 491094 - DNA, 25 bp, Homo sapien
tgtgtagaactggtggagtcctgaa

SEQ ID NO: 491095 - DNA, 25 bp, Homo sapien
aaaaacagcgccctgaagtggaggt

SEQ ID NO: 491096 - DNA, 25 bp, Homo sapien
tctgtggaccaacagttgagcacat

SEQ ID NO: 491097 - DNA, 25 bp, Homo sapien
cagacctctttggtaatctgtggac

SEQ ID NO: 491098 - DNA, 25 bp, Homo sapien
tccagtggaaggtccatggccctct

SEQ ID NO: 491099 - DNA, 25 bp, Homo sapien
tctgtgtgtccagacagagccatgg

SEQ ID NO: 491100 - DNA, 25 bp, Homo sapien
tagcatgcaaggaagatgtgaacac

SEQ ID NO: 491101 - DNA, 25 bp, Homo sapien
tgaacacaaataagctgcccctggg

SEQ ID NO: 491102 - DNA, 25 bp, Homo sapien
aacgggagacacacgttgggccaca

SEQ ID NO: 491103 - DNA, 25 bp, Homo sapien
cagccaggatcgaggtagcatgcaa

SEQ ID NO: 491104 - DNA, 25 bp, Homo sapien
atagcatgctgctgttgtctggaaa

SEQ ID NO: 491105 - DNA, 25 bp, Homo sapien
agcatgctgctgttgtctggaaaga

SEQ ID NO: 491106 - DNA, 25 bp, Homo sapien
ctatagcatgctgctgttgtctgga

SEQ ID NO: 491107 - DNA, 25 bp, Homo sapien
catgctgctgttgtctggaaagatg

SEQ ID NO: 491108 - DNA, 25 bp, Homo sapien
tttgcattacagtatctggatttcc

SEQ ID NO: 491109 - DNA, 25 bp, Homo sapien
ccgactctgggaaagaacaatggca

SEQ ID NO: 491110 - DNA, 25 bp, Homo sapien
cagagctgaccagctgaccatcttc

SEQ ID NO: 491111 - DNA, 25 bp, Homo sapien
tctaggtgacttaaggattctatta

SEQ ID NO: 491112 - DNA, 25 bp, Homo sapien
actttcttcttcatctggtatcacc

SEQ ID NO: 491113 - DNA, 25 bp, Homo sapien
ctttcttcttcatctggtatcacct

SEQ ID NO: 491114 - DNA, 25 bp, Homo sapien
tttcttcttcatctggtatcacctc

SEQ ID NO: 491115 - DNA, 25 bp, Homo sapien
ttcttcttcatctggtatcacctct

SEQ ID NO: 491116 - DNA, 25 bp, Homo sapien
tgatttgcactcttgtaccttacag

SEQ ID NO: 491117 - DNA, 25 bp, Homo sapien
gggactccgactaactccttcagct

SEQ ID NO: 491118 - DNA, 25 bp, Homo sapien
gatttgcactcttgtaccttacagg

SEQ ID NO: 491119 - DNA, 25 bp, Homo sapien
aatgggactccgactaactccttca

SEQ ID NO: 491120 - DNA, 25 bp, Homo sapien
ggaagccagtccgagattcaaaacc

SEQ ID NO: 491121 - DNA, 25 bp, Homo sapien
tagaagaattgactcatgggatcac

SEQ ID NO: 491122 - DNA, 25 bp, Homo sapien
gtgacttcccacaatacgccgtctg

SEQ ID NO: 491123 - DNA, 25 bp, Homo sapien
agatggcgggtaggtctgcctctcc

SEQ ID NO: 491124 - DNA, 25 bp, Homo sapien
tatcttgtttctagctttggttgca

SEQ ID NO: 491125 - DNA, 25 bp, Homo sapien
tacgtacttcatgattaagtttcat

SEQ ID NO: 491126 - DNA, 25 bp, Homo sapien
tatatctgtatctgtgacaatgtag

SEQ ID NO: 491127 - DNA, 25 bp, Homo sapien
tttcttcaagtctaggagcctaatt

SEQ ID NO: 491128 - DNA, 25 bp, Homo sapien
ggccctttatgtcccaactcaaaca

SEQ ID NO: 491129 - DNA, 25 bp, Homo sapien
tatgtcccaactcaaacagtgtatc

SEQ ID NO: 491130 - DNA, 25 bp, Homo sapien
ctggccctttatgtcccaactcaaa

SEQ ID NO: 491131 - DNA, 25 bp, Homo sapien
tcccaactcaaacagtgtatctggg

SEQ ID NO: 491132 - DNA, 25 bp, Homo sapien
tgtggaaaccagaaatcgactatga

SEQ ID NO: 491133 - DNA, 25 bp, Homo sapien
ctggagttatactcttgtacccata

SEQ ID NO: 491134 - DNA, 25 bp, Homo sapien
ttcagatctggagttatactcttgt

SEQ ID NO: 491135 - DNA, 25 bp, Homo sapien
cgactatgacttttcaagttcaaaa

SEQ ID NO: 491136 - DNA, 25 bp, Homo sapien
tgtcctttttcgtactagattttga

SEQ ID NO: 491137 - DNA, 25 bp, Homo sapien
ctattatctttgtcgctatcctgtg

SEQ ID NO: 491138 - DNA, 25 bp, Homo sapien
tcctgtgtaaacatccgtttgtcct

SEQ ID NO: 491139 - DNA, 25 bp, Homo sapien
ttcgtactagattttgaggatctag

SEQ ID NO: 491140 - DNA, 25 bp, Homo sapien
aattcaccaactaatgagaaaatcg

SEQ ID NO: 491141 - DNA, 25 bp, Homo sapien
caccaactaatgagaaaatcgaaag

SEQ ID NO: 491142 - DNA, 25 bp, Homo sapien
gagtggaattcaccaactaatgaga

SEQ ID NO: 491143 - DNA, 25 bp, Homo sapien
gaagagtggaattcaccaactaatg

SEQ ID NO: 491144 - DNA, 25 bp, Homo sapien
gatactttcctcctagttttgttga

SEQ ID NO: 491145 - DNA, 25 bp, Homo sapien
aaagtgagtgttggtaatttctgaa

SEQ ID NO: 491146 - DNA, 25 bp, Homo sapien
tgttgtaattggcataaccccatcc

SEQ ID NO: 491147 - DNA, 25 bp, Homo sapien
tctttgtctagtacagctgctgtgt

SEQ ID NO: 491148 - DNA, 25 bp, Homo sapien
aggtgtccttgttgaggcataagtc

SEQ ID NO: 491149 - DNA, 25 bp, Homo sapien
agtcagagctgtagagtttggcttt

SEQ ID NO: 491150 - DNA, 25 bp, Homo sapien
tgaatcagcttcacatgcatgctga

SEQ ID NO: 491151 - DNA, 25 bp, Homo sapien
ggaacatatttacctgcatgaatca

SEQ ID NO: 491152 - DNA, 25 bp, Homo sapien
tgatccatgcgatactatgtgtgca

SEQ ID NO: 491153 - DNA, 25 bp, Homo sapien
caaattttggaatacagcctatctc

SEQ ID NO: 491154 - DNA, 25 bp, Homo sapien
tattcaaaccgtggaacaaatgtat

SEQ ID NO: 491155 - DNA, 25 bp, Homo sapien
tatggcatgcatattgtaactttca

SEQ ID NO: 491156 - DNA, 25 bp, Homo sapien
tctcgaaatggatataactacactg

SEQ ID NO: 491157 - DNA, 25 bp, Homo sapien
ctagatggtgaacgtatgcaaatgc

SEQ ID NO: 491158 - DNA, 25 bp, Homo sapien
cagatattgagcacattgagaagga

SEQ ID NO: 491159 - DNA, 25 bp, Homo sapien
tctacatagaaaccaagctagatgg

SEQ ID NO: 491160 - DNA, 25 bp, Homo sapien
ttgcataatgtcactacagatctgg

SEQ ID NO: 491161 - DNA, 25 bp, Homo sapien
gagttgcataatgtcactacagatc

SEQ ID NO: 491162 - DNA, 25 bp, Homo sapien
tgctgagttgcataatgtcactaca

SEQ ID NO: 491163 - DNA, 25 bp, Homo sapien
tggtgttagtcagcaaactatcttt

SEQ ID NO: 491164 - DNA, 25 bp, Homo sapien
cgtgcttgagcccggtgactgcaag

SEQ ID NO: 491165 - DNA, 25 bp, Homo sapien
tgcgcggcgagcagctggcggaacc

SEQ ID NO: 491166 - DNA, 25 bp, Homo sapien
ggtgactgcaaggccccgggtctcc

SEQ ID NO: 491167 - DNA, 25 bp, Homo sapien
tcgcgagcctggctgcgccggcgtg

SEQ ID NO: 491168 - DNA, 25 bp, Homo sapien
gcaggtttgcggagcaatttgttct

SEQ ID NO: 491169 - DNA, 25 bp, Homo sapien
ctctgcaagccgcaggtttgcggag

SEQ ID NO: 491170 - DNA, 25 bp, Homo sapien
cgcaggtttgcggagcaatttgttc

SEQ ID NO: 491171 - DNA, 25 bp, Homo sapien
caagccgcaggtttgcggagcaatt

SEQ ID NO: 491172 - DNA, 25 bp, Homo sapien
ccgaggcctccgtggtgaagaggtg

SEQ ID NO: 491173 - DNA, 25 bp, Homo sapien
gccggacccgatgagctcgggagtc

SEQ ID NO: 491174 - DNA, 25 bp, Homo sapien
tggtgaagaggtgccggacccgatg

SEQ ID NO: 491175 - DNA, 25 bp, Homo sapien
aagaggtgccggacccgatgagctc

SEQ ID NO: 491176 - DNA, 25 bp, Homo sapien
ttccaccctcctccgagcaccagga

SEQ ID NO: 491177 - DNA, 25 bp, Homo sapien
gcggcgtgggcccggctccctgctc

SEQ ID NO: 491178 - DNA, 25 bp, Homo sapien
tgctccaggacctagggatcttggc

SEQ ID NO: 491179 - DNA, 25 bp, Homo sapien
caccaggactccctccagttccgta

SEQ ID NO: 491180 - DNA, 25 bp, Homo sapien
ccgctcgggtgtcgccggcaaatgc

SEQ ID NO: 491181 - DNA, 25 bp, Homo sapien
agtgggaaccctgcccgctcttccg

SEQ ID NO: 491182 - DNA, 25 bp, Homo sapien
acataacctgttctccgtctccgct

SEQ ID NO: 491183 - DNA, 25 bp, Homo sapien
cgcagaagccgctgccagtgagccc

SEQ ID NO: 491184 - DNA, 25 bp, Homo sapien
cgtcgcttccgtcgctcctcatcat

SEQ ID NO: 491185 - DNA, 25 bp, Homo sapien
cgcgtcgcttccgtcgctcctcatc

SEQ ID NO: 491186 - DNA, 25 bp, Homo sapien
cccgcgtcgcttccgtcgctcctca

SEQ ID NO: 491187 - DNA, 25 bp, Homo sapien
cgcttccgtcgctcctcatcatcct

SEQ ID NO: 491188 - DNA, 25 bp, Homo sapien
gacaggctgcgcagtcggccgcggg

SEQ ID NO: 491189 - DNA, 25 bp, Homo sapien
agactcgcggacaggctgcgcagtc

SEQ ID NO: 491190 - DNA, 25 bp, Homo sapien
tcagactcgcggacaggctgcgcag

SEQ ID NO: 491191 - DNA, 25 bp, Homo sapien
cagtcggccgcgggcacgaaaccgg

SEQ ID NO: 491192 - DNA, 25 bp, Homo sapien
taaaagagaaatacggcagagagcc

SEQ ID NO: 491193 - DNA, 25 bp, Homo sapien
agagcccaagaccatgaagccaagg

SEQ ID NO: 491194 - DNA, 25 bp, Homo sapien
tccattgtagctctctgtaagtatc

SEQ ID NO: 491195 - DNA, 25 bp, Homo sapien
gtaagataatgcctccatacagatg

SEQ ID NO: 491196 - DNA, 25 bp, Homo sapien
cataaagacgtgaagaggatggctg

SEQ ID NO: 491197 - DNA, 25 bp, Homo sapien
ttttcatgtggaatgccagtgggca

SEQ ID NO: 491198 - DNA, 25 bp, Homo sapien
aaaatgttttcatgtggaatgccag

SEQ ID NO: 491199 - DNA, 25 bp, Homo sapien
tgttttcatgtggaatgccagtggg

SEQ ID NO: 491200 - DNA, 25 bp, Homo sapien
tgaaaatgttttcatgtggaatgcc

SEQ ID NO: 491201 - DNA, 25 bp, Homo sapien
tatcgtatcaaaataagattcagac

SEQ ID NO: 491202 - DNA, 25 bp, Homo sapien
gaattgtctccagtgtatcgtatca

SEQ ID NO: 491203 - DNA, 25 bp, Homo sapien
aagattcagacgtattccatctttg

SEQ ID NO: 491204 - DNA, 25 bp, Homo sapien
aacctgtgacctatgttgcctgcat

SEQ ID NO: 491205 - DNA, 25 bp, Homo sapien
aaagtgctggccatatgtggtatgc

SEQ ID NO: 491206 - DNA, 25 bp, Homo sapien
caagtgcagtgaaatagccttggca

SEQ ID NO: 491207 - DNA, 25 bp, Homo sapien
cataaaggaaggtaacgcatcggaa

SEQ ID NO: 491208 - DNA, 25 bp, Homo sapien
caaggtcaggtctagtcatcacgta

SEQ ID NO: 491209 - DNA, 25 bp, Homo sapien
tctaaaaggaacattctttatcatt

SEQ ID NO: 491210 - DNA, 25 bp, Homo sapien
ctaaaaggaacattctttatcattc

SEQ ID NO: 491211 - DNA, 25 bp, Homo sapien
tatacatcagtatatgaccagtgct

SEQ ID NO: 491212 - DNA, 25 bp, Homo sapien
tggcaacctgcacataagtctcaat

SEQ ID NO: 491213 - DNA, 25 bp, Homo sapien
tttggaatatcgtaaaggagcagtg

SEQ ID NO: 491214 - DNA, 25 bp, Homo sapien
ggatctcagcattcaccagagcaaa

SEQ ID NO: 491215 - DNA, 25 bp, Homo sapien
aaggtatgccatgtaagctcgtgtc

SEQ ID NO: 491216 - DNA, 25 bp, Homo sapien
tgaggactgcatgaaacaacttggc

SEQ ID NO: 491217 - DNA, 25 bp, Homo sapien
tagtggtggtatagccctaggcaca

SEQ ID NO: 491218 - DNA, 25 bp, Homo sapien
gaattctcaacaggtattacagcgt

SEQ ID NO: 491219 - DNA, 25 bp, Homo sapien
ggagctaccacaactggcctcataa

SEQ ID NO: 491220 - DNA, 25 bp, Homo sapien
tgtacaccacctcaccaagcaaatt

SEQ ID NO: 491221 - DNA, 25 bp, Homo sapien
aggtgtacaccacctcaccaagcaa

SEQ ID NO: 491222 - DNA, 25 bp, Homo sapien
tctcaaagggctagaggagctacca

SEQ ID NO: 491223 - DNA, 25 bp, Homo sapien
caattagttgctgtcttgcttatca

SEQ ID NO: 491224 - DNA, 25 bp, Homo sapien
gtgtcatcacacctagtcaatcccg

SEQ ID NO: 491225 - DNA, 25 bp, Homo sapien
taaatcataccctgtgctgcatatt

SEQ ID NO: 491226 - DNA, 25 bp, Homo sapien
tattgtcgtggctcagtgatctgag

SEQ ID NO: 491227 - DNA, 25 bp, Homo sapien
tcaaattcatcataaacctgatttc

SEQ ID NO: 491228 - DNA, 25 bp, Homo sapien
tgtaacgtctgcaagggtttcccag

SEQ ID NO: 491229 - DNA, 25 bp, Homo sapien
tcttactacaaaatgacgcagtcag

SEQ ID NO: 491230 - DNA, 25 bp, Homo sapien
tataactcccacaataaggtgaccg

SEQ ID NO: 491231 - DNA, 25 bp, Homo sapien
cagttaccctctgacgagttcccat

SEQ ID NO: 491232 - DNA, 25 bp, Homo sapien
taagtgaccacagggaatggatcat

SEQ ID NO: 491233 - DNA, 25 bp, Homo sapien
tgctggcatttaccctccgattgga

SEQ ID NO: 491234 - DNA, 25 bp, Homo sapien
gatgtcctgcgtgcactacatggca

SEQ ID NO: 491235 - DNA, 25 bp, Homo sapien
agggcttggctcacccctcaggaga

SEQ ID NO: 491236 - DNA, 25 bp, Homo sapien
cttaaggcaagaagtaaggcgtgac

SEQ ID NO: 491237 - DNA, 25 bp, Homo sapien
taaggcaagaagtaaggcgtgactg

SEQ ID NO: 491238 - DNA, 25 bp, Homo sapien
aagaagtaaggcgtgactgctccct

SEQ ID NO: 491239 - DNA, 25 bp, Homo sapien
ggcaagaagtaaggcgtgactgctc

SEQ ID NO: 491240 - DNA, 25 bp, Homo sapien
ttggaggatcggacagaggggcttt

SEQ ID NO: 491241 - DNA, 25 bp, Homo sapien
tccgtctttggaggatcggacagag

SEQ ID NO: 491242 - DNA, 25 bp, Homo sapien
tttccgtctttggaggatcggacag

SEQ ID NO: 491243 - DNA, 25 bp, Homo sapien
gctttccttccgtgggaggatggaa

SEQ ID NO: 491244 - DNA, 25 bp, Homo sapien
tggcagcttctccgcgtggtggccc

SEQ ID NO: 491245 - DNA, 25 bp, Homo sapien
agcttctccgcgtggtggccctgca

SEQ ID NO: 491246 - DNA, 25 bp, Homo sapien
ttcagtcccgcggtgacagctggag

SEQ ID NO: 491247 - DNA, 25 bp, Homo sapien
cagtcccgcggtgacagctggagct

SEQ ID NO: 491248 - DNA, 25 bp, Homo sapien
tttcagtcccgcggtgacagctgga

SEQ ID NO: 491249 - DNA, 25 bp, Homo sapien
tcagtcccgcggtgacagctggagc

SEQ ID NO: 491250 - DNA, 25 bp, Homo sapien
caagttattagaaagacagctgagg

SEQ ID NO: 491251 - DNA, 25 bp, Homo sapien
tcttgcctgcgtcttgcagctgctg

SEQ ID NO: 491252 - DNA, 25 bp, Homo sapien
caggatcttgcctgcgtcttgcagc

SEQ ID NO: 491253 - DNA, 25 bp, Homo sapien
aaacttcaagttattagaaagacag

SEQ ID NO: 491254 - DNA, 25 bp, Homo sapien
ctggagttgccttctcctggagctg

SEQ ID NO: 491255 - DNA, 25 bp, Homo sapien
ccttctcctggagctggtggttcaa

SEQ ID NO: 491256 - DNA, 25 bp, Homo sapien
tctcctggagctggtggttcaaaga

SEQ ID NO: 491257 - DNA, 25 bp, Homo sapien
ctcctggagctggtggttcaaagat

SEQ ID NO: 491258 - DNA, 25 bp, Homo sapien
tcttctggaccctgaacggcacgct

SEQ ID NO: 491259 - DNA, 25 bp, Homo sapien
gaccctgaacggcacgcttatttct

SEQ ID NO: 491260 - DNA, 25 bp, Homo sapien
tgaacggcacgcttatttctgctgt

SEQ ID NO: 491261 - DNA, 25 bp, Homo sapien
ctggaccctgaacggcacgcttatt

SEQ ID NO: 491262 - DNA, 25 bp, Homo sapien
aggaaaatcatgttcctgtctgtgt

SEQ ID NO: 491263 - DNA, 25 bp, Homo sapien
ttgaggaaaatcatgttcctgtctg

SEQ ID NO: 491264 - DNA, 25 bp, Homo sapien
gaggaaaatcatgttcctgtctgtg

SEQ ID NO: 491265 - DNA, 25 bp, Homo sapien
acttgaggaaaatcatgttcctgtc

SEQ ID NO: 491266 - DNA, 25 bp, Homo sapien
gcacccacagattcttcatagtgct

SEQ ID NO: 491267 - DNA, 25 bp, Homo sapien
gattcttcatagtgcttctcactca

SEQ ID NO: 491268 - DNA, 25 bp, Homo sapien
ctgcacccacagattcttcatagtg

SEQ ID NO: 491269 - DNA, 25 bp, Homo sapien
acagattcttcatagtgcttctcac

SEQ ID NO: 491270 - DNA, 25 bp, Homo sapien
tcactgtctgcaatcagttgcaagc

SEQ ID NO: 491271 - DNA, 25 bp, Homo sapien
tttgtatagttggtgtttcactgtc

SEQ ID NO: 491272 - DNA, 25 bp, Homo sapien
gtatagttggtgtttcactgtctgc

SEQ ID NO: 491273 - DNA, 25 bp, Homo sapien
aatcagttgcaagcagtcttgagtg

SEQ ID NO: 491274 - DNA, 25 bp, Homo sapien
agtggactgaattctaagtggaaaa

SEQ ID NO: 491275 - DNA, 25 bp, Homo sapien
tctgtgctagtgttgttttgcccat

SEQ ID NO: 491276 - DNA, 25 bp, Homo sapien
atctgtgctagtgttgttttgccca

SEQ ID NO: 491277 - DNA, 25 bp, Homo sapien
ctgtgctagtgttgttttgcccatt

SEQ ID NO: 491278 - DNA, 25 bp, Homo sapien
tcaagcagtctggaaaagatgggcg

SEQ ID NO: 491279 - DNA, 25 bp, Homo sapien
ttcataccttacatcttataccagg

SEQ ID NO: 491280 - DNA, 25 bp, Homo sapien
tttcagaaggaacacgagatctttc

SEQ ID NO: 491281 - DNA, 25 bp, Homo sapien
ttaaagttaatgtcttcaagcagtc

SEQ ID NO: 491282 - DNA, 25 bp, Homo sapien
ggtgcgttcagacatcaaaacccat

SEQ ID NO: 491283 - DNA, 25 bp, Homo sapien
gagccagaatctgtaggtgcgttca

SEQ ID NO: 491284 - DNA, 25 bp, Homo sapien
ccactgtgctcaagggtgagatgaa

SEQ ID NO: 491285 - DNA, 25 bp, Homo sapien
gaagacagtagccatcagtgagtag

SEQ ID NO: 491286 - DNA, 25 bp, Homo sapien
tggcaaaatgtttccagacgaagaa

SEQ ID NO: 491287 - DNA, 25 bp, Homo sapien
cattccttggcccaaatgtggcaac

SEQ ID NO: 491288 - DNA, 25 bp, Homo sapien
aaatgtttccagacgaagaaatctc

SEQ ID NO: 491289 - DNA, 25 bp, Homo sapien
ccattccttggcccaaatgtggcaa

SEQ ID NO: 491290 - DNA, 25 bp, Homo sapien
tgagaagccatggaacaaatgtgta

SEQ ID NO: 491291 - DNA, 25 bp, Homo sapien
agaagccatggaacaaatgtgtaag

SEQ ID NO: 491292 - DNA, 25 bp, Homo sapien
gagaagccatggaacaaatgtgtaa

SEQ ID NO: 491293 - DNA, 25 bp, Homo sapien
ctgagaagccatggaacaaatgtgt

SEQ ID NO: 491294 - DNA, 25 bp, Homo sapien
tgggaggctttgaacagtaaaacca

SEQ ID NO: 491295 - DNA, 25 bp, Homo sapien
aaaccaaaaaactgtgtcagaaatg

SEQ ID NO: 491296 - DNA, 25 bp, Homo sapien
tgtgtcagaaatgaacacaaaatgg

SEQ ID NO: 491297 - DNA, 25 bp, Homo sapien
tgaacacaaaatgggaggctttgaa

SEQ ID NO: 491298 - DNA, 25 bp, Homo sapien
aatacatcgaaacaaagtcaccaga

SEQ ID NO: 491299 - DNA, 25 bp, Homo sapien
gcgtaggtcttatcagtatataaaa

SEQ ID NO: 491300 - DNA, 25 bp, Homo sapien
gcaggaattattgggtagtgtttca

SEQ ID NO: 491301 - DNA, 25 bp, Homo sapien
cctctgaattagatgtcccatggcg

SEQ ID NO: 491302 - DNA, 25 bp, Homo sapien
ttctcttggtattgcaagttggagt

SEQ ID NO: 491303 - DNA, 25 bp, Homo sapien
tttctcttggtattgcaagttggag

SEQ ID NO: 491304 - DNA, 25 bp, Homo sapien
tataaaatgaaaaccgggatgctgt

SEQ ID NO: 491305 - DNA, 25 bp, Homo sapien
gctatgtgacatacttcaggatgcc

SEQ ID NO: 491306 - DNA, 25 bp, Homo sapien
tcctccaagataagaagctatgact

SEQ ID NO: 491307 - DNA, 25 bp, Homo sapien
tcctagagatgtgggcacttgctcc

SEQ ID NO: 491308 - DNA, 25 bp, Homo sapien
cagatcacctgcgttggtccgcagg

SEQ ID NO: 491309 - DNA, 25 bp, Homo sapien
gagtgcgggaagctgccgcttccaa

SEQ ID NO: 491310 - DNA, 25 bp, Homo sapien
gcagatgtgtgagcttccacagccg

SEQ ID NO: 491311 - DNA, 25 bp, Homo sapien
tccacagccggtggatatggagtgc

SEQ ID NO: 491312 - DNA, 25 bp, Homo sapien
cctgtcagctctgcctgctcagcat

SEQ ID NO: 491313 - DNA, 25 bp, Homo sapien
tcctgtcagctctgcctgctcagca

SEQ ID NO: 491314 - DNA, 25 bp, Homo sapien
ccttcctgtcagctctgcctgctca

SEQ ID NO: 491315 - DNA, 25 bp, Homo sapien
tgtcagctctgcctgctcagcatct

SEQ ID NO: 491316 - DNA, 25 bp, Homo sapien
tgcattttgagctacagatctccag

SEQ ID NO: 491317 - DNA, 25 bp, Homo sapien
agatctccagtttcccttgagtgag

SEQ ID NO: 491318 - DNA, 25 bp, Homo sapien
tcatccttgtcgaacagcggtacgt

SEQ ID NO: 491319 - DNA, 25 bp, Homo sapien
catcaacttgggaacactctgggtt

SEQ ID NO: 491320 - DNA, 25 bp, Homo sapien
tataggagggaggtctacagcactg

SEQ ID NO: 491321 - DNA, 25 bp, Homo sapien
gacagcaagcacattgtgcatttag

SEQ ID NO: 491322 - DNA, 25 bp, Homo sapien
agtagcccatctataggagggaggt

SEQ ID NO: 491323 - DNA, 25 bp, Homo sapien
gtaatgaaggcgctaaactgtggct

SEQ ID NO: 491324 - DNA, 25 bp, Homo sapien
gatacagaacagtatctgcaagcgt

SEQ ID NO: 491325 - DNA, 25 bp, Homo sapien
gcaagcgttcagctgagtaactcat

SEQ ID NO: 491326 - DNA, 25 bp, Homo sapien
cagtatctgcaagcgttcagctgag

SEQ ID NO: 491327 - DNA, 25 bp, Homo sapien
gaacagtatctgcaagcgttcagct

SEQ ID NO: 491328 - DNA, 25 bp, Homo sapien
gcagggagcactgtcccatggactg

SEQ ID NO: 491329 - DNA, 25 bp, Homo sapien
atggactgatccatgttcactgccc

SEQ ID NO: 491330 - DNA, 25 bp, Homo sapien
gactgttgtgccaatggattggtaa

SEQ ID NO: 491331 - DNA, 25 bp, Homo sapien
gccaatggattggtaatgactgcca

SEQ ID NO: 491332 - DNA, 25 bp, Homo sapien
tgggacttgggagaacatcagagat

SEQ ID NO: 491333 - DNA, 25 bp, Homo sapien
gccgcagctccatatgttaagtgaa

SEQ ID NO: 491334 - DNA, 25 bp, Homo sapien
cagagatttcttcagctcgtttttc

SEQ ID NO: 491335 - DNA, 25 bp, Homo sapien
gaatttgggtcgaattgttctcatg

SEQ ID NO: 491336 - DNA, 25 bp, Homo sapien
tgacctcatcatatctgacaggcaa

SEQ ID NO: 491337 - DNA, 25 bp, Homo sapien
caactctgaacgctgtagctgcttc

SEQ ID NO: 491338 - DNA, 25 bp, Homo sapien
gctgagagcctaaaatcctcaaggg

SEQ ID NO: 491339 - DNA, 25 bp, Homo sapien
tgttgaaccagcttgtgacctcatc

SEQ ID NO: 491340 - DNA, 25 bp, Homo sapien
gaagacaatcgcagcagtgaaggac

SEQ ID NO: 491341 - DNA, 25 bp, Homo sapien
cattagagtggtcctgaatggtgcc

SEQ ID NO: 491342 - DNA, 25 bp, Homo sapien
tgacaacgcagaactcaggagaagg

SEQ ID NO: 491343 - DNA, 25 bp, Homo sapien
tggcgatggtgccatgaactcagtg

SEQ ID NO: 491344 - DNA, 25 bp, Homo sapien
ttataagccaagatctccactttca

SEQ ID NO: 491345 - DNA, 25 bp, Homo sapien
tataagccaagatctccactttcac

SEQ ID NO: 491346 - DNA, 25 bp, Homo sapien
gctccctgtagagtccttcattcat

SEQ ID NO: 491347 - DNA, 25 bp, Homo sapien
tcctgctccctgtagagtccttcat

SEQ ID NO: 491348 - DNA, 25 bp, Homo sapien
cttcctgagcaactggccctctggg

SEQ ID NO: 491349 - DNA, 25 bp, Homo sapien
gggtcctgctccctgtagagtcctt

SEQ ID NO: 491350 - DNA, 25 bp, Homo sapien
tcacccagcaggctagcatggcacg

SEQ ID NO: 491351 - DNA, 25 bp, Homo sapien
acccagcaggctagcatggcacggg

SEQ ID NO: 491352 - DNA, 25 bp, Homo sapien
agcaggctagcatggcacgggcaca

SEQ ID NO: 491353 - DNA, 25 bp, Homo sapien
aggctagcatggcacgggcacacgt

SEQ ID NO: 491354 - DNA, 25 bp, Homo sapien
gacctccttgaatgagctatgggac

SEQ ID NO: 491355 - DNA, 25 bp, Homo sapien
gagctatgggacttgaggtgattct

SEQ ID NO: 491356 - DNA, 25 bp, Homo sapien
gctccttcaggcagcaagactccca

SEQ ID NO: 491357 - DNA, 25 bp, Homo sapien
gcaagactcccattggaaattccaa

SEQ ID NO: 491358 - DNA, 25 bp, Homo sapien
gagaccagccagagctgcccgtgca

SEQ ID NO: 491359 - DNA, 25 bp, Homo sapien
ctatgtttctctcagaggaggagga

SEQ ID NO: 491360 - DNA, 25 bp, Homo sapien
ctgatgttgtctctcagtgcctcgc

SEQ ID NO: 491361 - DNA, 25 bp, Homo sapien
gcagaccctactgctctgctctgag

SEQ ID NO: 491362 - DNA, 25 bp, Homo sapien
cttttagcctctgggcagtccatcc

SEQ ID NO: 491363 - DNA, 25 bp, Homo sapien
tctgggcagtccatccttctgtggg

SEQ ID NO: 491364 - DNA, 25 bp, Homo sapien
tagcctctgggcagtccatccttct

SEQ ID NO: 491365 - DNA, 25 bp, Homo sapien
ggcagtccatccttctgtgggggtc

SEQ ID NO: 491366 - DNA, 25 bp, Homo sapien
cactgcagttagtttggcacaagct

SEQ ID NO: 491367 - DNA, 25 bp, Homo sapien
tgtgctacctttagctgggatcctc

SEQ ID NO: 491368 - DNA, 25 bp, Homo sapien
ctattactgattgcttccgactcac

SEQ ID NO: 491369 - DNA, 25 bp, Homo sapien
gctgcccttcactggctgtgctacc

SEQ ID NO: 491370 - DNA, 25 bp, Homo sapien
tgtctggaacttgcctacatgtttc

SEQ ID NO: 491371 - DNA, 25 bp, Homo sapien
tgtattttcgacttctcgttcccaa

SEQ ID NO: 491372 - DNA, 25 bp, Homo sapien
ctaaagcttcatagccaataaagcc

SEQ ID NO: 491373 - DNA, 25 bp, Homo sapien
gccaataaagccagaagggtgtctg

SEQ ID NO: 491374 - DNA, 25 bp, Homo sapien
gattcattttgataatgacaatcta

SEQ ID NO: 491375 - DNA, 25 bp, Homo sapien
tacttagggaaagaagccgcagatt

SEQ ID NO: 491376 - DNA, 25 bp, Homo sapien
ttagggaaagaagccgcagattcat

SEQ ID NO: 491377 - DNA, 25 bp, Homo sapien
gaaagaagccgcagattcattttga

SEQ ID NO: 491378 - DNA, 25 bp, Homo sapien
ttttactgtcatactccttgggaag

SEQ ID NO: 491379 - DNA, 25 bp, Homo sapien
ctgataggagagggaatgtacagca

SEQ ID NO: 491380 - DNA, 25 bp, Homo sapien
gataggagagggaatgtacagcaga

SEQ ID NO: 491381 - DNA, 25 bp, Homo sapien
tgataggagagggaatgtacagcag

SEQ ID NO: 491382 - DNA, 25 bp, Homo sapien
tgaagcctgaacagtctaaaagatt

SEQ ID NO: 491383 - DNA, 25 bp, Homo sapien
gtcccatgactctctattccaactg

SEQ ID NO: 491384 - DNA, 25 bp, Homo sapien
gcttctctatatccccagatctgtt

SEQ ID NO: 491385 - DNA, 25 bp, Homo sapien
gatgtttctaaaccttctgctgaag

SEQ ID NO: 491386 - DNA, 25 bp, Homo sapien
ttggcagcccaagagtaagttagat

SEQ ID NO: 491387 - DNA, 25 bp, Homo sapien
tgggtgctgctttctggttatgttc

SEQ ID NO: 491388 - DNA, 25 bp, Homo sapien
agctgctcttcactcattgcatgca

SEQ ID NO: 491389 - DNA, 25 bp, Homo sapien
tctgagcccacgtcccaattgatgg

SEQ ID NO: 491390 - DNA, 25 bp, Homo sapien
ccacccctatgaatcttggagagcc

SEQ ID NO: 491391 - DNA, 25 bp, Homo sapien
tcatggaagcacttccacccctatg

SEQ ID NO: 491392 - DNA, 25 bp, Homo sapien
tggaagcacttccacccctatgaat

SEQ ID NO: 491393 - DNA, 25 bp, Homo sapien
gcacttccacccctatgaatcttgg

SEQ ID NO: 491394 - DNA, 25 bp, Homo sapien
tctaactgcgaaagctacggacact

SEQ ID NO: 491395 - DNA, 25 bp, Homo sapien
tgaatccatggatggtaagccctgg

SEQ ID NO: 491396 - DNA, 25 bp, Homo sapien
gaatggccacatgtctcagagaagg

SEQ ID NO: 491397 - DNA, 25 bp, Homo sapien
caagaatctgatactagcgtggcct

SEQ ID NO: 491398 - DNA, 25 bp, Homo sapien
gcttgttgctctacccagctgtggt

SEQ ID NO: 491399 - DNA, 25 bp, Homo sapien
gctgttcaagaacctagtcacggaa

SEQ ID NO: 491400 - DNA, 25 bp, Homo sapien
caagctggtatctagggtgcaaggc

SEQ ID NO: 491401 - DNA, 25 bp, Homo sapien
tgtccaaaggcaggtccagatttgc

SEQ ID NO: 491402 - DNA, 25 bp, Homo sapien
ttgggtggctgtgtaaacgcgttcc

SEQ ID NO: 491403 - DNA, 25 bp, Homo sapien
ccttgggtggctgtgtaaacgcgtt

SEQ ID NO: 491404 - DNA, 25 bp, Homo sapien
tggctgtgtaaacgcgttccctgtc

SEQ ID NO: 491405 - DNA, 25 bp, Homo sapien
gtgtaaacgcgttccctgtccacat

SEQ ID NO: 491406 - DNA, 25 bp, Homo sapien
ggagccgggcgccaggcgacgcggc

SEQ ID NO: 491407 - DNA, 25 bp, Homo sapien
ccggagccgggcgccaggcgacgcg

SEQ ID NO: 491408 - DNA, 25 bp, Homo sapien
cgccggagccgggcgccaggcgacg

SEQ ID NO: 491409 - DNA, 25 bp, Homo sapien
agggtccgccggagccgggcgccag

SEQ ID NO: 491410 - DNA, 25 bp, Homo sapien
gcgtccctcgaaatggccagtttcg

SEQ ID NO: 491411 - DNA, 25 bp, Homo sapien
catcgcgcctgggagcggttgtgta

SEQ ID NO: 491412 - DNA, 25 bp, Homo sapien
aatccgcgcaagaggcaacagctgg

SEQ ID NO: 491413 - DNA, 25 bp, Homo sapien
agcggttgtgtaggtgaccacgccg

SEQ ID NO: 491414 - DNA, 25 bp, Homo sapien
tcgccagtccttagaaatttacaat

SEQ ID NO: 491415 - DNA, 25 bp, Homo sapien
ccagtccttagaaatttacaatctt

SEQ ID NO: 491416 - DNA, 25 bp, Homo sapien
cgccagtccttagaaatttacaatc

SEQ ID NO: 491417 - DNA, 25 bp, Homo sapien
ctcgccagtccttagaaatttacaa

SEQ ID NO: 491418 - DNA, 25 bp, Homo sapien
gaaggtgtctgtcatggggaggagc

SEQ ID NO: 491419 - DNA, 25 bp, Homo sapien
aaggtgtctgtcatggggaggagca

SEQ ID NO: 491420 - DNA, 25 bp, Homo sapien
aaaatgcagggatgtgagtcgggag

SEQ ID NO: 491421 - DNA, 25 bp, Homo sapien
gtagagaacaagcacctcggtgttg

SEQ ID NO: 491422 - DNA, 25 bp, Homo sapien
taaagtcagtgtattcagaaacgct

SEQ ID NO: 491423 - DNA, 25 bp, Homo sapien
gaaacgctaagttccacgtagagaa

SEQ ID NO: 491424 - DNA, 25 bp, Homo sapien
cagtattcaagtgtacaagtactca

SEQ ID NO: 491425 - DNA, 25 bp, Homo sapien
taatgcttagatagcctttgtaaac

SEQ ID NO: 491426 - DNA, 25 bp, Homo sapien
ggtacatttactttgactcctacaa

SEQ ID NO: 491427 - DNA, 25 bp, Homo sapien
ggcaaacaagacataaaggattcat

SEQ ID NO: 491428 - DNA, 25 bp, Homo sapien
atgggtgaggaatcatgtcgccagt

SEQ ID NO: 491429 - DNA, 25 bp, Homo sapien
gcaaaggttgtcgttctttccaaga

SEQ ID NO: 491430 - DNA, 25 bp, Homo sapien
tggctgacgccatggcagtagcacc

SEQ ID NO: 491431 - DNA, 25 bp, Homo sapien
tctgcattgctcagatgcttcactt

SEQ ID NO: 491432 - DNA, 25 bp, Homo sapien
cattccatattatttgccttagtta

SEQ ID NO: 491433 - DNA, 25 bp, Homo sapien
cagcttgcttctctatttgtaattt

SEQ ID NO: 491434 - DNA, 25 bp, Homo sapien
attttgtttgtactcctgcaggtga

SEQ ID NO: 491435 - DNA, 25 bp, Homo sapien
tttgtttgtactcctgcaggtgaaa

SEQ ID NO: 491436 - DNA, 25 bp, Homo sapien
gaatcaatttcacacttgctcacca

SEQ ID NO: 491437 - DNA, 25 bp, Homo sapien
cattggtttgatattgccatggcaa

SEQ ID NO: 491438 - DNA, 25 bp, Homo sapien
tcttgacaaatttggcttgagcgta

SEQ ID NO: 491439 - DNA, 25 bp, Homo sapien
tgagcgtatccctgtgtacaactga

SEQ ID NO: 491440 - DNA, 25 bp, Homo sapien
tgaaagtctccgagcgcagttctgg

SEQ ID NO: 491441 - DNA, 25 bp, Homo sapien
gctttcactgaaagtctccgagcgc

SEQ ID NO: 491442 - DNA, 25 bp, Homo sapien
ggtccacgctcagagtctgacacat

SEQ ID NO: 491443 - DNA, 25 bp, Homo sapien
aatacaacctttggaaatctctcct

SEQ ID NO: 491444 - DNA, 25 bp, Homo sapien
tttttagttgccaccagttgctgtg

SEQ ID NO: 491445 - DNA, 25 bp, Homo sapien
gattcttagctggtagtaaagcgga

SEQ ID NO: 491446 - DNA, 25 bp, Homo sapien
tgtgtgtgaataggaaattgatagc

SEQ ID NO: 491447 - DNA, 25 bp, Homo sapien
ttgatagcaggagcttaaaatagcc

SEQ ID NO: 491448 - DNA, 25 bp, Homo sapien
taaatcttcttcgtgcacactgtcc

SEQ ID NO: 491449 - DNA, 25 bp, Homo sapien
caatcccgggaatagtcagctctaa

SEQ ID NO: 491450 - DNA, 25 bp, Homo sapien
gctattgtagcacccttgattgaca

SEQ ID NO: 491451 - DNA, 25 bp, Homo sapien
gaagccacggatagaaggatcctaa

SEQ ID NO: 491452 - DNA, 25 bp, Homo sapien
agataagcctctccccggtgggtct

SEQ ID NO: 491453 - DNA, 25 bp, Homo sapien
tccccggtgggtcttgaggcaccac

SEQ ID NO: 491454 - DNA, 25 bp, Homo sapien
tgttccatgatcctgcaaaaagctt

SEQ ID NO: 491455 - DNA, 25 bp, Homo sapien
gacaggaatcttgctacgggttcca

SEQ ID NO: 491456 - DNA, 25 bp, Homo sapien
aactcattctcattcggcagctgga

SEQ ID NO: 491457 - DNA, 25 bp, Homo sapien
gtttacctcaggatgcactattgca

SEQ ID NO: 491458 - DNA, 25 bp, Homo sapien
cctttgtgcttccacccatgctcca

SEQ ID NO: 491459 - DNA, 25 bp, Homo sapien
cctccaccaggtgtgttcaatgtgt

SEQ ID NO: 491460 - DNA, 25 bp, Homo sapien
ccaggttccttgtaggaaagatgca

SEQ ID NO: 491461 - DNA, 25 bp, Homo sapien
gcatccaggttccttgtaggaaaga

SEQ ID NO: 491462 - DNA, 25 bp, Homo sapien
gctcctgccctggaattcatccact

SEQ ID NO: 491463 - DNA, 25 bp, Homo sapien
gagcacatgggatgctaatgttgca

SEQ ID NO: 491464 - DNA, 25 bp, Homo sapien
tgaaggcttcctgtgattcactagg

SEQ ID NO: 491465 - DNA, 25 bp, Homo sapien
gatgctaatgttgcacatttcagaa

SEQ ID NO: 491466 - DNA, 25 bp, Homo sapien
acaaggaggtgagggtcgaaggcca

SEQ ID NO: 491467 - DNA, 25 bp, Homo sapien
catgggcaatcgtttcaaggtatga

SEQ ID NO: 491468 - DNA, 25 bp, Homo sapien
gaaagcagcgggatgcagtcatgga

SEQ ID NO: 491469 - DNA, 25 bp, Homo sapien
ttaagtaaagtggattccactgagt

SEQ ID NO: 491470 - DNA, 25 bp, Homo sapien
ccattggattttgccacataaaggt

SEQ ID NO: 491471 - DNA, 25 bp, Homo sapien
gtccattggattttgccacataaag

SEQ ID NO: 491472 - DNA, 25 bp, Homo sapien
ctagtgtccattggattttgccaca

SEQ ID NO: 491473 - DNA, 25 bp, Homo sapien
ttggattttgccacataaaggtggt

SEQ ID NO: 491474 - DNA, 25 bp, Homo sapien
ggatatagatttacagtcataattc

SEQ ID NO: 491475 - DNA, 25 bp, Homo sapien
agtgatttggtcatgatcaaaagct

SEQ ID NO: 491476 - DNA, 25 bp, Homo sapien
catatttcgtaaacaacaagtgatt

SEQ ID NO: 491477 - DNA, 25 bp, Homo sapien
aagctttcagtggatatagatttac

SEQ ID NO: 491478 - DNA, 25 bp, Homo sapien
aaaatagttcgtgtgtttctcaaga

SEQ ID NO: 491479 - DNA, 25 bp, Homo sapien
taaatgcaacaattctccttgcact

SEQ ID NO: 491480 - DNA, 25 bp, Homo sapien
ccttgcacttgatattgcaaatcca

SEQ ID NO: 491481 - DNA, 25 bp, Homo sapien
tatattgtccattgcacaggtcata

SEQ ID NO: 491482 - DNA, 25 bp, Homo sapien
tattataaccactataagtgtgcac

SEQ ID NO: 491483 - DNA, 25 bp, Homo sapien
ctattattataaccactataagtgt

SEQ ID NO: 491484 - DNA, 25 bp, Homo sapien
actataagtgtgcaccacagcacac

SEQ ID NO: 491485 - DNA, 25 bp, Homo sapien
attattataaccactataagtgtgc

SEQ ID NO: 491486 - DNA, 25 bp, Homo sapien
ctcatgggatcgaaaaacgttacat

SEQ ID NO: 491487 - DNA, 25 bp, Homo sapien
tgggatcgaaaaacgttacatagct

SEQ ID NO: 491488 - DNA, 25 bp, Homo sapien
aaaacgttacatagctgaaagcaac

SEQ ID NO: 491489 - DNA, 25 bp, Homo sapien
cgaaaaacgttacatagctgaaagc

SEQ ID NO: 491490 - DNA, 25 bp, Homo sapien
tttgatttgctcacagcgcatgcgc

SEQ ID NO: 491491 - DNA, 25 bp, Homo sapien
ggaagggactctagcaagcactggt

SEQ ID NO: 491492 - DNA, 25 bp, Homo sapien
taatcgcgtcctgtagcatgtccgt

SEQ ID NO: 491493 - DNA, 25 bp, Homo sapien
gaaaagccttctcgcgctcatagta

SEQ ID NO: 491494 - DNA, 25 bp, Homo sapien
aaacatcttatctgagctacttctt

SEQ ID NO: 491495 - DNA, 25 bp, Homo sapien
aacatcttatctgagctacttcttc

SEQ ID NO: 491496 - DNA, 25 bp, Homo sapien
caaacatcttatctgagctacttct

SEQ ID NO: 491497 - DNA, 25 bp, Homo sapien
gcaaacatcttatctgagctacttc

SEQ ID NO: 491498 - DNA, 25 bp, Homo sapien
gaggatgtcggggagggctccgcag

SEQ ID NO: 491499 - DNA, 25 bp, Homo sapien
agaggagaggtacatctgcaaggaa

SEQ ID NO: 491500 - DNA, 25 bp, Homo sapien
atggaggaagggtgttcctggcggg

SEQ ID NO: 491501 - DNA, 25 bp, Homo sapien
gtacatctgcaaggaatggaggaag

SEQ ID NO: 491502 - DNA, 25 bp, Homo sapien
ttcaaggaattcgtgttggcaatgc

SEQ ID NO: 491503 - DNA, 25 bp, Homo sapien
aaggaattcgtgttggcaatgctgc

SEQ ID NO: 491504 - DNA, 25 bp, Homo sapien
ttacacttcaaggaattcgtgttgg

SEQ ID NO: 491505 - DNA, 25 bp, Homo sapien
cacttcaaggaattcgtgttggcaa

SEQ ID NO: 491506 - DNA, 25 bp, Homo sapien
tgatttccagcaccaattttgtaac

SEQ ID NO: 491507 - DNA, 25 bp, Homo sapien
tccagatcgaccaggaaaattgttg

SEQ ID NO: 491508 - DNA, 25 bp, Homo sapien
tcttcccactgctgcggcattgtcc

SEQ ID NO: 491509 - DNA, 25 bp, Homo sapien
tcaggccgctgaacatccagatcga

SEQ ID NO: 491510 - DNA, 25 bp, Homo sapien
actgatggggtaagcagccgttgtt

SEQ ID NO: 491511 - DNA, 25 bp, Homo sapien
gttggctgtaccacccatgacccat

SEQ ID NO: 491512 - DNA, 25 bp, Homo sapien
gatggggtaagcagccgttgttcca

SEQ ID NO: 491513 - DNA, 25 bp, Homo sapien
gctgttggctgtaccacccatgacc

SEQ ID NO: 491514 - DNA, 25 bp, Homo sapien
cccatagctcgtggtggcagcacga

SEQ ID NO: 491515 - DNA, 25 bp, Homo sapien
gcagcacgacgttgagtaccgcaag

SEQ ID NO: 491516 - DNA, 25 bp, Homo sapien
ttaattaaggccatagcatgacaga

SEQ ID NO: 491517 - DNA, 25 bp, Homo sapien
gtaccgcaagaccaaggagacttcc

SEQ ID NO: 491518 - DNA, 25 bp, Homo sapien
tcctttagctgttcagaaaggggtc

SEQ ID NO: 491519 - DNA, 25 bp, Homo sapien
aaggggtcctcctgcatatctagca

SEQ ID NO: 491520 - DNA, 25 bp, Homo sapien
cctgcatatctagcatctttattct

SEQ ID NO: 491521 - DNA, 25 bp, Homo sapien
ttagctgttcagaaaggggtcctcc

SEQ ID NO: 491522 - DNA, 25 bp, Homo sapien
taaatccaggatgcatgcaatataa

SEQ ID NO: 491523 - DNA, 25 bp, Homo sapien
tccaggacagatgtaaagtgacagt

SEQ ID NO: 491524 - DNA, 25 bp, Homo sapien
aaacttgatggcatatttccttagc

SEQ ID NO: 491525 - DNA, 25 bp, Homo sapien
gactctatatattccaggacagatg

SEQ ID NO: 491526 - DNA, 25 bp, Homo sapien
gttctacagaacttttaacatatcc

SEQ ID NO: 491527 - DNA, 25 bp, Homo sapien
tccaattgtggtacaaattgtctgg

SEQ ID NO: 491528 - DNA, 25 bp, Homo sapien
gaacttttaacatatccaattgtgg

SEQ ID NO: 491529 - DNA, 25 bp, Homo sapien
ggtacaaattgtctggcgggaatca

SEQ ID NO: 491530 - DNA, 25 bp, Homo sapien
tgtgcaaagccttaaggtcagtcct

SEQ ID NO: 491531 - DNA, 25 bp, Homo sapien
taaattcactgcttgttttgccagc

SEQ ID NO: 491532 - DNA, 25 bp, Homo sapien
ggtatcttatgagcatacccacagc

SEQ ID NO: 491533 - DNA, 25 bp, Homo sapien
ccttcgcttaggatctgggcttcta

SEQ ID NO: 491534 - DNA, 25 bp, Homo sapien
tttgattcagatccacatgcactca

SEQ ID NO: 491535 - DNA, 25 bp, Homo sapien
tgtgattgcttctgatttgattcag

SEQ ID NO: 491536 - DNA, 25 bp, Homo sapien
gatgctcaagactgttaccagccac

SEQ ID NO: 491537 - DNA, 25 bp, Homo sapien
cacaggatgctcaagactgttacca

SEQ ID NO: 491538 - DNA, 25 bp, Homo sapien
taatactgagaagcatagacagcca

SEQ ID NO: 491539 - DNA, 25 bp, Homo sapien
catgggaatcagcatccaaggactg

SEQ ID NO: 491540 - DNA, 25 bp, Homo sapien
catagacagccatgggaatcagcat

SEQ ID NO: 491541 - DNA, 25 bp, Homo sapien
aatcagcatccaaggactgtttagc

SEQ ID NO: 491542 - DNA, 25 bp, Homo sapien
ctatattccattgatccctatgttc

SEQ ID NO: 491543 - DNA, 25 bp, Homo sapien
gagacgagggtgtgggggtctgccc

SEQ ID NO: 491544 - DNA, 25 bp, Homo sapien
tgccccctccttcaggagccgaagc

SEQ ID NO: 491545 - DNA, 25 bp, Homo sapien
gccccctccttcaggagccgaagca

SEQ ID NO: 491546 - DNA, 25 bp, Homo sapien
gagcagggaccctcccgaggagacg

SEQ ID NO: 491547 - DNA, 25 bp, Homo sapien
gcctatattctttggcaaactgtct

SEQ ID NO: 491548 - DNA, 25 bp, Homo sapien
gtatctatttccagtgctagagaga

SEQ ID NO: 491549 - DNA, 25 bp, Homo sapien
tctgctgactgtataataacttgca

SEQ ID NO: 491550 - DNA, 25 bp, Homo sapien
tgctagagagaaaacgcctatattc

SEQ ID NO: 491551 - DNA, 25 bp, Homo sapien
ggccaacagcacagatactcacact

SEQ ID NO: 491552 - DNA, 25 bp, Homo sapien
tgtaatgtgggacgcccaaaaggtg

SEQ ID NO: 491553 - DNA, 25 bp, Homo sapien
ctgtaatgtgggacgcccaaaaggt

SEQ ID NO: 491554 - DNA, 25 bp, Homo sapien
cagcacagatactcacacttgacat

SEQ ID NO: 491555 - DNA, 25 bp, Homo sapien
ctctttccctcaaagtcgctgatcg

SEQ ID NO: 491556 - DNA, 25 bp, Homo sapien
gctcagtgctgatgaagcatcaggc

SEQ ID NO: 491557 - DNA, 25 bp, Homo sapien
tgatcgtctataattagagctcagt

SEQ ID NO: 491558 - DNA, 25 bp, Homo sapien
cctcaaagtcgctgatcgtctataa

SEQ ID NO: 491559 - DNA, 25 bp, Homo sapien
tgtcttctgctgtgattgatgttct

SEQ ID NO: 491560 - DNA, 25 bp, Homo sapien
tgttcttgctagagtctgcccttgt

SEQ ID NO: 491561 - DNA, 25 bp, Homo sapien
tcagtatcacccaacttgcctggct

SEQ ID NO: 491562 - DNA, 25 bp, Homo sapien
tccaaggaacatgcaggaacagccc

SEQ ID NO: 491563 - DNA, 25 bp, Homo sapien
cattaatgatatcacttactccaca

SEQ ID NO: 491564 - DNA, 25 bp, Homo sapien
ttctctccacttagaacaccatcaa

SEQ ID NO: 491565 - DNA, 25 bp, Homo sapien
gatccccaaaatgtcatccctcctg

SEQ ID NO: 491566 - DNA, 25 bp, Homo sapien
gatatcacttactccacataagatc

SEQ ID NO: 491567 - DNA, 25 bp, Homo sapien
tgaaggcattatcataccgagcaca

SEQ ID NO: 491568 - DNA, 25 bp, Homo sapien
tgtgcatgggcgtccagaagtcttc

SEQ ID NO: 491569 - DNA, 25 bp, Homo sapien
cctggtggttgacgttgactcctct

SEQ ID NO: 491570 - DNA, 25 bp, Homo sapien
tatcagggttatcgcaggcacaggc

SEQ ID NO: 491571 - DNA, 25 bp, Homo sapien
tggtaaactgaattgctttacttac

SEQ ID NO: 491572 - DNA, 25 bp, Homo sapien
aatggtaaactgaattgctttactt

SEQ ID NO: 491573 - DNA, 25 bp, Homo sapien
caaatggtaaactgaattgctttac

SEQ ID NO: 491574 - DNA, 25 bp, Homo sapien
tcaaatggtaaactgaattgcttta

SEQ ID NO: 491575 - DNA, 25 bp, Homo sapien
cagcattactcgaaaggcgatttgg

SEQ ID NO: 491576 - DNA, 25 bp, Homo sapien
ggcgatttggttcctttctgtaata

SEQ ID NO: 491577 - DNA, 25 bp, Homo sapien
aaattctatggcctttatggtgaac

SEQ ID NO: 491578 - DNA, 25 bp, Homo sapien
ggtgaaccggcaatttagtgcctct

SEQ ID NO: 491579 - DNA, 25 bp, Homo sapien
catacacaaatcattaaatgtaatc

SEQ ID NO: 491580 - DNA, 25 bp, Homo sapien
gatgtagctcaaaataataacagct

SEQ ID NO: 491581 - DNA, 25 bp, Homo sapien
atgggatgtagctcaaaataataac

SEQ ID NO: 491582 - DNA, 25 bp, Homo sapien
cacaaatcattaaatgtaatccaga

SEQ ID NO: 491583 - DNA, 25 bp, Homo sapien
aagggtaaactgaagcaagtgtctt

SEQ ID NO: 491584 - DNA, 25 bp, Homo sapien
ctgtggttgactgtcctgaagggta

SEQ ID NO: 491585 - DNA, 25 bp, Homo sapien
tggttgactgtcctgaagggtaaac

SEQ ID NO: 491586 - DNA, 25 bp, Homo sapien
aagtgtcttgggagttatttctgcc

SEQ ID NO: 491587 - DNA, 25 bp, Homo sapien
ttatattagcctcccagcgagaagc

SEQ ID NO: 491588 - DNA, 25 bp, Homo sapien
ggatcaactccaggtcgacccatgt

SEQ ID NO: 491589 - DNA, 25 bp, Homo sapien
catggtaatccgtggtcaatgaagc

SEQ ID NO: 491590 - DNA, 25 bp, Homo sapien
ggcgagtttccctagcagcccaatg

SEQ ID NO: 491591 - DNA, 25 bp, Homo sapien
caggatagagctggattctgtccct

SEQ ID NO: 491592 - DNA, 25 bp, Homo sapien
cattttcatccagataggtcaacag

SEQ ID NO: 491593 - DNA, 25 bp, Homo sapien
tctacagcataatctaatgggatat

SEQ ID NO: 491594 - DNA, 25 bp, Homo sapien
tttcatccagataggtcaacaggat

SEQ ID NO: 491595 - DNA, 25 bp, Homo sapien
ctggcgcagtgaggtcaaatccact

SEQ ID NO: 491596 - DNA, 25 bp, Homo sapien
tggcgcagtgaggtcaaatccactc

SEQ ID NO: 491597 - DNA, 25 bp, Homo sapien
tgttaacatactcattggtctctga

SEQ ID NO: 491598 - DNA, 25 bp, Homo sapien
tctgttaacatactcattggtctct

SEQ ID NO: 491599 - DNA, 25 bp, Homo sapien
catctgttaacatactcattggtct

SEQ ID NO: 491600 - DNA, 25 bp, Homo sapien
gacatctgttaacatactcattggt

SEQ ID NO: 491601 - DNA, 25 bp, Homo sapien
catttcctccagatgataagaagtg

SEQ ID NO: 491602 - DNA, 25 bp, Homo sapien
ctcattgacatttcctccagatgat

SEQ ID NO: 491603 - DNA, 25 bp, Homo sapien
ttgacatttcctccagatgataaga

SEQ ID NO: 491604 - DNA, 25 bp, Homo sapien
ttcctccagatgataagaagtgttt

SEQ ID NO: 491605 - DNA, 25 bp, Homo sapien
gggagtccagtactgatcatctact

SEQ ID NO: 491606 - DNA, 25 bp, Homo sapien
gtagccactcgcacacgccatgtgt

SEQ ID NO: 491607 - DNA, 25 bp, Homo sapien
gatcatctactatgttgaggtctcc

SEQ ID NO: 491608 - DNA, 25 bp, Homo sapien
tgttccaggataagagacaccacct

SEQ ID NO: 491609 - DNA, 25 bp, Homo sapien
catagttgtcatgtgagttcatgac

SEQ ID NO: 491610 - DNA, 25 bp, Homo sapien
ttctgcagcatagttgtcatgtgag

SEQ ID NO: 491611 - DNA, 25 bp, Homo sapien
tgtcatgtgagttcatgactgtgtt

SEQ ID NO: 491612 - DNA, 25 bp, Homo sapien
tggagagggagtaataaaaacaatc

SEQ ID NO: 491613 - DNA, 25 bp, Homo sapien
tttatggttctcaataattggtggc

SEQ ID NO: 491614 - DNA, 25 bp, Homo sapien
gatgtttatggttctcaataattgg

SEQ ID NO: 491615 - DNA, 25 bp, Homo sapien
ctatagatgtttatggttctcaata

SEQ ID NO: 491616 - DNA, 25 bp, Homo sapien
tggttctcaataattggtggcccca

SEQ ID NO: 491617 - DNA, 25 bp, Homo sapien
ttcacgaggtgtgggtttgcctgat

SEQ ID NO: 491618 - DNA, 25 bp, Homo sapien
acagttcacgaggtgtgggtttgcc

SEQ ID NO: 491619 - DNA, 25 bp, Homo sapien
tcctcattacagttcacgaggtgtg

SEQ ID NO: 491620 - DNA, 25 bp, Homo sapien
ctgacgccttctcctcattacagtt

SEQ ID NO: 491621 - DNA, 25 bp, Homo sapien
tgggctggttgttacacagcttcac

SEQ ID NO: 491622 - DNA, 25 bp, Homo sapien
tgatgaattgtgcttgaactgggct

SEQ ID NO: 491623 - DNA, 25 bp, Homo sapien
tgaactgggctggttgttacacagc

SEQ ID NO: 491624 - DNA, 25 bp, Homo sapien
tgtgcttgaactgggctggttgtta

SEQ ID NO: 491625 - DNA, 25 bp, Homo sapien
tcttgagctaaggtagaagcagata

SEQ ID NO: 491626 - DNA, 25 bp, Homo sapien
cgtgaatgatctcttcatagggctc

SEQ ID NO: 491627 - DNA, 25 bp, Homo sapien
tactcgacagtacgggaagatcgtg

SEQ ID NO: 491628 - DNA, 25 bp, Homo sapien
ggcaatttcggctttcagcagcatt

SEQ ID NO: 491629 - DNA, 25 bp, Homo sapien
ctgctcgggtttggtggaaccgctc

SEQ ID NO: 491630 - DNA, 25 bp, Homo sapien
ggtttggtggaaccgctcatcatgg

SEQ ID NO: 491631 - DNA, 25 bp, Homo sapien
cttgcttggcaattggtaacaccag

SEQ ID NO: 491632 - DNA, 25 bp, Homo sapien
caacaaactgtcttgcttggcaatt

SEQ ID NO: 491633 - DNA, 25 bp, Homo sapien
aaggaatgatgtttgtgacttcccc

SEQ ID NO: 491634 - DNA, 25 bp, Homo sapien
ctagaggtttagcacaaagaggaaa

SEQ ID NO: 491635 - DNA, 25 bp, Homo sapien
ctttgttggccattgtgctagaggt

SEQ ID NO: 491636 - DNA, 25 bp, Homo sapien
gatgtttgtgacttcccctactggg

SEQ ID NO: 491637 - DNA, 25 bp, Homo sapien
actgttattaagagatgaaatggtt

SEQ ID NO: 491638 - DNA, 25 bp, Homo sapien
gcaggctgccatcattgagctcgct

SEQ ID NO: 491639 - DNA, 25 bp, Homo sapien
tcattgagctcgctgagcgttgcca

SEQ ID NO: 491640 - DNA, 25 bp, Homo sapien
tgagcgttgccaggtcatcgtttgg

SEQ ID NO: 491641 - DNA, 25 bp, Homo sapien
gattgttcccaaagcgcttctgaat

SEQ ID NO: 491642 - DNA, 25 bp, Homo sapien
caacatttgaagcactgaagggtga

SEQ ID NO: 491643 - DNA, 25 bp, Homo sapien
gcaacatttgaagcactgaagggtg

SEQ ID NO: 491644 - DNA, 25 bp, Homo sapien
tgcaacatttgaagcactgaagggt

SEQ ID NO: 491645 - DNA, 25 bp, Homo sapien
ttgcaacatttgaagcactgaaggg

SEQ ID NO: 491646 - DNA, 25 bp, Homo sapien
tgtatgctctttcgcttcctgttcc

SEQ ID NO: 491647 - DNA, 25 bp, Homo sapien
caatgtatgctctttcgcttcctgt

SEQ ID NO: 491648 - DNA, 25 bp, Homo sapien
gtatgctctttcgcttcctgttcct

SEQ ID NO: 491649 - DNA, 25 bp, Homo sapien
aatgtatgctctttcgcttcctgtt

SEQ ID NO: 491650 - DNA, 25 bp, Homo sapien
caagcaaaagaatgtctccaatgaa

SEQ ID NO: 491651 - DNA, 25 bp, Homo sapien
ttaacaagcaaaagaatgtctccaa

SEQ ID NO: 491652 - DNA, 25 bp, Homo sapien
ccttgtatgggttaacaagcaaaag

SEQ ID NO: 491653 - DNA, 25 bp, Homo sapien
gcaaaagaatgtctccaatgaatgt

SEQ ID NO: 491654 - DNA, 25 bp, Homo sapien
tgcaccgggccacacgggatctttt

SEQ ID NO: 491655 - DNA, 25 bp, Homo sapien
gtcaccctaagtgtctcacactcag

SEQ ID NO: 491656 - DNA, 25 bp, Homo sapien
cacacagtgccgctgtgctgagtgt

SEQ ID NO: 491657 - DNA, 25 bp, Homo sapien
gagatttgagcagcctcacacagta

SEQ ID NO: 491658 - DNA, 25 bp, Homo sapien
ctgactcgcccgctgtgacccgcat

SEQ ID NO: 491659 - DNA, 25 bp, Homo sapien
catggaccctgtcccggttggtgga

SEQ ID NO: 491660 - DNA, 25 bp, Homo sapien
cggttggtggaacggcctgctgact

SEQ ID NO: 491661 - DNA, 25 bp, Homo sapien
gtggaacggcctgctgactcgcccg

SEQ ID NO: 491662 - DNA, 25 bp, Homo sapien
tggcatggaccctgtcctggttggt

SEQ ID NO: 491663 - DNA, 25 bp, Homo sapien
tctccaacataaataggcagcacaa

SEQ ID NO: 491664 - DNA, 25 bp, Homo sapien
aacataaataggcagcacaatcatg

SEQ ID NO: 491665 - DNA, 25 bp, Homo sapien
tccaacataaataggcagcacaatc

SEQ ID NO: 491666 - DNA, 25 bp, Homo sapien
gtgtctccaacataaataggcagca

SEQ ID NO: 491667 - DNA, 25 bp, Homo sapien
tgaggagctgaaatacagctgggac

SEQ ID NO: 491668 - DNA, 25 bp, Homo sapien
tgaggccgctgttcccggaagagct

SEQ ID NO: 491669 - DNA, 25 bp, Homo sapien
cggaagagctggtgaaaggctctct

SEQ ID NO: 491670 - DNA, 25 bp, Homo sapien
gatgaaacactgaggccgctgttcc

SEQ ID NO: 491671 - DNA, 25 bp, Homo sapien
agaatgggtggaatcccatgcctca

SEQ ID NO: 491672 - DNA, 25 bp, Homo sapien
aatgggtggaatcccatgcctcagt

SEQ ID NO: 491673 - DNA, 25 bp, Homo sapien
ctagaatgggtggaatcccatgcct

SEQ ID NO: 491674 - DNA, 25 bp, Homo sapien
tgggtggaatcccatgcctcagtgc

SEQ ID NO: 491675 - DNA, 25 bp, Homo sapien
tctacaatgggtggaattccctgcc

SEQ ID NO: 491676 - DNA, 25 bp, Homo sapien
tcatccttgagtctacaatgggtgg

SEQ ID NO: 491677 - DNA, 25 bp, Homo sapien
ttttctcatccttgagtctacaatg

SEQ ID NO: 491678 - DNA, 25 bp, Homo sapien
tgagtctacaatgggtggaattccc

SEQ ID NO: 491679 - DNA, 25 bp, Homo sapien
tcctttgagtttagaatggatgaga

SEQ ID NO: 491680 - DNA, 25 bp, Homo sapien
ttatcaccctcgtgtctagaatggg

SEQ ID NO: 491681 - DNA, 25 bp, Homo sapien
cattgagtttagaatgggtggaagc

SEQ ID NO: 491682 - DNA, 25 bp, Homo sapien
ttctcatccttgtgtctagaatgga

SEQ ID NO: 491683 - DNA, 25 bp, Homo sapien
ggccttacaggagagacgttacctc

SEQ ID NO: 491684 - DNA, 25 bp, Homo sapien
tgcttcatgggccttacaggagaga

SEQ ID NO: 491685 - DNA, 25 bp, Homo sapien
ttcatgcttcatgggccttacagga

SEQ ID NO: 491686 - DNA, 25 bp, Homo sapien
catgggccttacaggagagacgtta

SEQ ID NO: 491687 - DNA, 25 bp, Homo sapien
ttgcttcaaagcttgttcctttgtt

SEQ ID NO: 491688 - DNA, 25 bp, Homo sapien
gcaggtgaggtgtcttatgatttgt

SEQ ID NO: 491689 - DNA, 25 bp, Homo sapien
gccctgcaggtgaggtgtcttatga

SEQ ID NO: 491690 - DNA, 25 bp, Homo sapien
gaggtgtcttatgatttgtttgctg

SEQ ID NO: 491691 - DNA, 25 bp, Homo sapien
gtgaggtgtcttatgatttgtttgc

SEQ ID NO: 491692 - DNA, 25 bp, Homo sapien
agctatcaaccacggcctgccacag

SEQ ID NO: 491693 - DNA, 25 bp, Homo sapien
atcaaccacggcctgccacagggac

SEQ ID NO: 491694 - DNA, 25 bp, Homo sapien
cagagctatcaaccacggcctgcca

SEQ ID NO: 491695 - DNA, 25 bp, Homo sapien
tatcaaccacggcctgccacaggga

SEQ ID NO: 491696 - DNA, 25 bp, Homo sapien
gatcccgcctgccagcactccccat

SEQ ID NO: 491697 - DNA, 25 bp, Homo sapien
tgatcccgcctgccagcactcccca

SEQ ID NO: 491698 - DNA, 25 bp, Homo sapien
cattaagtgtggtcttggcatgtcc

SEQ ID NO: 491699 - DNA, 25 bp, Homo sapien
aaatacttgatgaagcaactggaca

SEQ ID NO: 491700 - DNA, 25 bp, Homo sapien
caaaggcttctaagatgcacacgac

SEQ ID NO: 491701 - DNA, 25 bp, Homo sapien
cggttagctgttgtttcctctcaca

SEQ ID NO: 491702 - DNA, 25 bp, Homo sapien
acatcaaaaggcaagtattctcgac

SEQ ID NO: 491703 - DNA, 25 bp, Homo sapien
aaaaggcaagtattctcgacattcc

SEQ ID NO: 491704 - DNA, 25 bp, Homo sapien
caagtattctcgacattcctcaggg

SEQ ID NO: 491705 - DNA, 25 bp, Homo sapien
ctggacatccctcccttttgagttc

SEQ ID NO: 491706 - DNA, 25 bp, Homo sapien
tgaaacaagtctggatttctctagc

SEQ ID NO: 491707 - DNA, 25 bp, Homo sapien
ggatttctctagcaaatatgtataa

SEQ ID NO: 491708 - DNA, 25 bp, Homo sapien
ggccaagaggttgtgaaacaagtct

SEQ ID NO: 491709 - DNA, 25 bp, Homo sapien
taagatgaagtccatatttttcttc

SEQ ID NO: 491710 - DNA, 25 bp, Homo sapien
ccactgaattgagtttggatcagaa

SEQ ID NO: 491711 - DNA, 25 bp, Homo sapien
gatcagaatccaattctctcttgtg

SEQ ID NO: 491712 - DNA, 25 bp, Homo sapien
tcctaatgcaaatctggacccatcc

SEQ ID NO: 491713 - DNA, 25 bp, Homo sapien
tgttctcatcctaatgcaaatctgg

SEQ ID NO: 491714 - DNA, 25 bp, Homo sapien
tcagagtctagttcccaccaccgcc

SEQ ID NO: 491715 - DNA, 25 bp, Homo sapien
cagagtctagttcccaccaccgccc

SEQ ID NO: 491716 - DNA, 25 bp, Homo sapien
agatctctctcagcagcgtggccct

SEQ ID NO: 491717 - DNA, 25 bp, Homo sapien
tttacagaagtgttcgattgctgcc

SEQ ID NO: 491718 - DNA, 25 bp, Homo sapien
tgagccttgcgctggcatgtaacca

SEQ ID NO: 491719 - DNA, 25 bp, Homo sapien
gctggcatgtaaccaggttctggct

SEQ ID NO: 491720 - DNA, 25 bp, Homo sapien
gattttagacgtgaagaaagtctct

SEQ ID NO: 491721 - DNA, 25 bp, Homo sapien
ctctgattacataagcaccggattt

SEQ ID NO: 491722 - DNA, 25 bp, Homo sapien
gatgacagcaaatcgcacattccaa

SEQ ID NO: 491723 - DNA, 25 bp, Homo sapien
caaatcttattgacttcgccatctc

SEQ ID NO: 491724 - DNA, 25 bp, Homo sapien
tcattgcaaataccgccacaaaatc

SEQ ID NO: 491725 - DNA, 25 bp, Homo sapien
tttgtgggtcattgcaaataccgcc

SEQ ID NO: 491726 - DNA, 25 bp, Homo sapien
tgggtcattgcaaataccgccacaa

SEQ ID NO: 491727 - DNA, 25 bp, Homo sapien
gcaaataccgccacaaaatctttca

SEQ ID NO: 491728 - DNA, 25 bp, Homo sapien
ctctccttccctgtgagtggccctt

SEQ ID NO: 491729 - DNA, 25 bp, Homo sapien
ggcctctccttccctgtgagtggcc

SEQ ID NO: 491730 - DNA, 25 bp, Homo sapien
tcaggcctctccttccctgtgagtg

SEQ ID NO: 491731 - DNA, 25 bp, Homo sapien
tctccttccctgtgagtggccctta

SEQ ID NO: 491732 - DNA, 25 bp, Homo sapien
cagcctgaattctgagaatcctgaa

SEQ ID NO: 491733 - DNA, 25 bp, Homo sapien
tcagcctgaattctgagaatcctga

SEQ ID NO: 491734 - DNA, 25 bp, Homo sapien
agcctgaattctgagaatcctgaat

SEQ ID NO: 491735 - DNA, 25 bp, Homo sapien
taatttaagaccatccatactacct

SEQ ID NO: 491736 - DNA, 25 bp, Homo sapien
ataatttaagaccatccatactacc

SEQ ID NO: 491737 - DNA, 25 bp, Homo sapien
tggccccaccgtcaataatttaaga

SEQ ID NO: 491738 - DNA, 25 bp, Homo sapien
ggaaacgcctgcctcgtggaactgt

SEQ ID NO: 491739 - DNA, 25 bp, Homo sapien
gagccatgtctgtccgtccgcttgg

SEQ ID NO: 491740 - DNA, 25 bp, Homo sapien
ttggcattttcacacgctgcagagc

SEQ ID NO: 491741 - DNA, 25 bp, Homo sapien
gatggctcgggttagttgaattcct

SEQ ID NO: 491742 - DNA, 25 bp, Homo sapien
ctgtgaaacgcagagcaaagaagga

SEQ ID NO: 491743 - DNA, 25 bp, Homo sapien
tgaaacgcagagcaaagaaggagac

SEQ ID NO: 491744 - DNA, 25 bp, Homo sapien
aaacgcagagcaaagaaggagacag

SEQ ID NO: 491745 - DNA, 25 bp, Homo sapien
aacgcagagcaaagaaggagacagg

SEQ ID NO: 491746 - DNA, 25 bp, Homo sapien
agaaggcaagcgcatcggcatctgt

SEQ ID NO: 491747 - DNA, 25 bp, Homo sapien
caagcgcatcggcatctgttggaag

SEQ ID NO: 491748 - DNA, 25 bp, Homo sapien
gccccagaaggcaagcgcatcggca

SEQ ID NO: 491749 - DNA, 25 bp, Homo sapien
aggcaagcgcatcggcatctgttgg

SEQ ID NO: 491750 - DNA, 25 bp, Homo sapien
taacgaataatatacacccctgatg

SEQ ID NO: 491751 - DNA, 25 bp, Homo sapien
gggactacctgtgcctacaaatgac

SEQ ID NO: 491752 - DNA, 25 bp, Homo sapien
gatggtgccaggacttatgggcata

SEQ ID NO: 491753 - DNA, 25 bp, Homo sapien
tacaaatgacaaggaaaggcgttgg

SEQ ID NO: 491754 - DNA, 25 bp, Homo sapien
tggcaatggtagacactagggacta

SEQ ID NO: 491755 - DNA, 25 bp, Homo sapien
gaaactcagaacaccattcaccact

SEQ ID NO: 491756 - DNA, 25 bp, Homo sapien
tgaacactgggctcatggaaataaa

SEQ ID NO: 491757 - DNA, 25 bp, Homo sapien
ttacttataagagggaactgaacac

SEQ ID NO: 491758 - DNA, 25 bp, Homo sapien
tctccagcaatacagttatcttcgt

SEQ ID NO: 491759 - DNA, 25 bp, Homo sapien
ctccagcaatacagttatcttcgtt

SEQ ID NO: 491760 - DNA, 25 bp, Homo sapien
cttctccagcaatacagttatcttc

SEQ ID NO: 491761 - DNA, 25 bp, Homo sapien
ttctccagcaatacagttatcttcg

SEQ ID NO: 491762 - DNA, 25 bp, Homo sapien
cagctctccacggcctctaggttga

SEQ ID NO: 491763 - DNA, 25 bp, Homo sapien
tctccacggcctctaggttgatgca

SEQ ID NO: 491764 - DNA, 25 bp, Homo sapien
agtgttcatcatcagacgcccactc

SEQ ID NO: 491765 - DNA, 25 bp, Homo sapien
gctctccacggcctctaggttgatg

SEQ ID NO: 491766 - DNA, 25 bp, Homo sapien
gggaaggcgtccagccaaccccaca

SEQ ID NO: 491767 - DNA, 25 bp, Homo sapien
tggggaaggcgtccagccaacccca

SEQ ID NO: 491768 - DNA, 25 bp, Homo sapien
aggccctggggaaggcgtccagcca

SEQ ID NO: 491769 - DNA, 25 bp, Homo sapien
ccaaccccacagcctttgccctcac

SEQ ID NO: 491770 - DNA, 25 bp, Homo sapien
tcagttaattctgggtagacgaagc

SEQ ID NO: 491771 - DNA, 25 bp, Homo sapien
ttatttcagttaattctgggtagac

SEQ ID NO: 491772 - DNA, 25 bp, Homo sapien
tttcagttaattctgggtagacgaa

SEQ ID NO: 491773 - DNA, 25 bp, Homo sapien
tatttcagttaattctgggtagacg

SEQ ID NO: 491774 - DNA, 25 bp, Homo sapien
tgagaaagtgcgaatacagcggcat

SEQ ID NO: 491775 - DNA, 25 bp, Homo sapien
tgctccatgagaaagtgcgaataca

SEQ ID NO: 491776 - DNA, 25 bp, Homo sapien
tttttagcctagaatttacagcagc

SEQ ID NO: 491777 - DNA, 25 bp, Homo sapien
tacagcagctatgacctgctccatg

SEQ ID NO: 491778 - DNA, 25 bp, Homo sapien
acatttgctgcggagaagggacaca

SEQ ID NO: 491779 - DNA, 25 bp, Homo sapien
tgaaggtcgtgggaacctaagacat

SEQ ID NO: 491780 - DNA, 25 bp, Homo sapien
aaagaggttggaggtttcgatgact

SEQ ID NO: 491781 - DNA, 25 bp, Homo sapien
cagggcaaccaatggttgtggcttt

SEQ ID NO: 491782 - DNA, 25 bp, Homo sapien
aaagtcacttctgccgtatttgatc

SEQ ID NO: 491783 - DNA, 25 bp, Homo sapien
cacgtaacgttatcgcctggcttcc

SEQ ID NO: 491784 - DNA, 25 bp, Homo sapien
gcttccggtcagacttctgtggtta

SEQ ID NO: 491785 - DNA, 25 bp, Homo sapien
ctgttaggagacaaggcacgtaacg

SEQ ID NO: 491786 - DNA, 25 bp, Homo sapien
tcagagaacgctcccctgtggatgc

SEQ ID NO: 491787 - DNA, 25 bp, Homo sapien
tgctgaagccaactacattcagggc

SEQ ID NO: 491788 - DNA, 25 bp, Homo sapien
catcctgtatggtctggttcaaata

SEQ ID NO: 491789 - DNA, 25 bp, Homo sapien
cattcagggctcgtttcaaaacagc

SEQ ID NO: 491790 - DNA, 25 bp, Homo sapien
aatccatccatgtattggcttcaga

SEQ ID NO: 491791 - DNA, 25 bp, Homo sapien
cattcactcatttagggtgggcctc

SEQ ID NO: 491792 - DNA, 25 bp, Homo sapien
gtgggcagggaaataaacacagacc

SEQ ID NO: 491793 - DNA, 25 bp, Homo sapien
tgccccgtcagccataacggtgtgg

SEQ ID NO: 491794 - DNA, 25 bp, Homo sapien
ccaaggtgcaatattgctgctagaa

SEQ ID NO: 491795 - DNA, 25 bp, Homo sapien
cagggcagtaaaccgaatgtctcca

SEQ ID NO: 491796 - DNA, 25 bp, Homo sapien
gaattacgaacagattctccacctc

SEQ ID NO: 491797 - DNA, 25 bp, Homo sapien
ggagttcccctcattcagggcagta

SEQ ID NO: 491798 - DNA, 25 bp, Homo sapien
attgaatatcagttgttaaggcaga

SEQ ID NO: 491799 - DNA, 25 bp, Homo sapien
tgttaaggcagatgccaattcatct

SEQ ID NO: 491800 - DNA, 25 bp, Homo sapien
cagttgttaaggcagatgccaattc

SEQ ID NO: 491801 - DNA, 25 bp, Homo sapien
aatatcagttgttaaggcagatgcc

SEQ ID NO: 491802 - DNA, 25 bp, Homo sapien
tcagcaatctgtatggtatgtcgtc

SEQ ID NO: 491803 - DNA, 25 bp, Homo sapien
tgtacagggacttggccaagaggtc

SEQ ID NO: 491804 - DNA, 25 bp, Homo sapien
caagaggtctcggaaaaactcagca

SEQ ID NO: 491805 - DNA, 25 bp, Homo sapien
catggtattcaccaaaaagctaaac

SEQ ID NO: 491806 - DNA, 25 bp, Homo sapien
gtgaatatgactgtgctctcaattg

SEQ ID NO: 491807 - DNA, 25 bp, Homo sapien
tacgtgaagacttgtgaatatgact

SEQ ID NO: 491808 - DNA, 25 bp, Homo sapien
tcattcgaagacaagtacgtgaaga

SEQ ID NO: 491809 - DNA, 25 bp, Homo sapien
tatgactgtgctctcaattgtctgc

SEQ ID NO: 491810 - DNA, 25 bp, Homo sapien
gagtcaggggcgcagcaggcaggag

SEQ ID NO: 491811 - DNA, 25 bp, Homo sapien
ctgagtcaggggcgcagcaggcagg

SEQ ID NO: 491812 - DNA, 25 bp, Homo sapien
cgcagcaggcaggagcaactggttc

SEQ ID NO: 491813 - DNA, 25 bp, Homo sapien
cagcaggcaggagcaactggttcat

SEQ ID NO: 491814 - DNA, 25 bp, Homo sapien
tcttcctgcgttcgtggggagcacg

SEQ ID NO: 491815 - DNA, 25 bp, Homo sapien
tggggagcacgtcatggcctctgct

SEQ ID NO: 491816 - DNA, 25 bp, Homo sapien
ctgctcctccaagctctaagagggc

SEQ ID NO: 491817 - DNA, 25 bp, Homo sapien
agggcactggccacttcagggctta

SEQ ID NO: 491818 - DNA, 25 bp, Homo sapien
tattttacctcgacactggggtgcg

SEQ ID NO: 491819 - DNA, 25 bp, Homo sapien
ttacctcgacactggggtgcggcag

SEQ ID NO: 491820 - DNA, 25 bp, Homo sapien
ttttacctcgacactggggtgcggc

SEQ ID NO: 491821 - DNA, 25 bp, Homo sapien
cctattttacctcgacactggggtg

SEQ ID NO: 491822 - DNA, 25 bp, Homo sapien
agcacctgtccgctgttcccaatat

SEQ ID NO: 491823 - DNA, 25 bp, Homo sapien
tcagcatgccagttccttcgttcag

SEQ ID NO: 491824 - DNA, 25 bp, Homo sapien
ttcaggcactgcgtgagcccctgtc

SEQ ID NO: 491825 - DNA, 25 bp, Homo sapien
actggcaggaccttgtgtcattccg

SEQ ID NO: 491826 - DNA, 25 bp, Homo sapien
caggactcggaatcaagttagccca

SEQ ID NO: 491827 - DNA, 25 bp, Homo sapien
caacagcagcacgtgaagtcaactc

SEQ ID NO: 491828 - DNA, 25 bp, Homo sapien
tcaactcagctgtccactacgtgtg

SEQ ID NO: 491829 - DNA, 25 bp, Homo sapien
ttcagcatcaggattcaggactcgg

SEQ ID NO: 491830 - DNA, 25 bp, Homo sapien
acaaaacaatacaccaggataaatg

SEQ ID NO: 491831 - DNA, 25 bp, Homo sapien
aaacaatacaccaggataaatgggc

SEQ ID NO: 491832 - DNA, 25 bp, Homo sapien
acaatacaccaggataaatgggcat

SEQ ID NO: 491833 - DNA, 25 bp, Homo sapien
gaaacaaaacaatacaccaggataa

SEQ ID NO: 491834 - DNA, 25 bp, Homo sapien
atattccaatatccaatgtctgcat

SEQ ID NO: 491835 - DNA, 25 bp, Homo sapien
ctcttcaaaaccaaaaatgtccaat

SEQ ID NO: 491836 - DNA, 25 bp, Homo sapien
accaaaaatgtccaatattccaata

SEQ ID NO: 491837 - DNA, 25 bp, Homo sapien
atgtccaatattccaatatccaatg

SEQ ID NO: 491838 - DNA, 25 bp, Homo sapien
ggtcttcaaaaaggagtctatcgac

SEQ ID NO: 491839 - DNA, 25 bp, Homo sapien
aatttaaatagaagccatgcccaag

SEQ ID NO: 491840 - DNA, 25 bp, Homo sapien
ctacttcacatgtataaagacattg

SEQ ID NO: 491841 - DNA, 25 bp, Homo sapien
tctatcgactacaaactaactggct

SEQ ID NO: 491842 - DNA, 25 bp, Homo sapien
ggagttaagttaggcttctctgcag

SEQ ID NO: 491843 - DNA, 25 bp, Homo sapien
cagactgctccaagtggttctccga

SEQ ID NO: 491844 - DNA, 25 bp, Homo sapien
ggttctccgacaaatcagttatccc

SEQ ID NO: 491845 - DNA, 25 bp, Homo sapien
tcaactatttgaagattaccttggg

SEQ ID NO: 491846 - DNA, 25 bp, Homo sapien
tactttcattactcagtgaaacata

SEQ ID NO: 491847 - DNA, 25 bp, Homo sapien
ggctcatcatttgtattaatgacaa

SEQ ID NO: 491848 - DNA, 25 bp, Homo sapien
gagtaaatttccaccaactgctctc

SEQ ID NO: 491849 - DNA, 25 bp, Homo sapien
aactgctctccctttactttcatta

SEQ ID NO: 491850 - DNA, 25 bp, Homo sapien
gagaatatgctgtttccatggtaac

SEQ ID NO: 491851 - DNA, 25 bp, Homo sapien
atatagtggtgcatcttctcattgg

SEQ ID NO: 491852 - DNA, 25 bp, Homo sapien
ccacttgctcgtggagaaaaagcac

SEQ ID NO: 491853 - DNA, 25 bp, Homo sapien
ggtaactccctcttgtacacattcc

SEQ ID NO: 491854 - DNA, 25 bp, Homo sapien
gagcgtgcttcttgaagatactcag

SEQ ID NO: 491855 - DNA, 25 bp, Homo sapien
cttgaagatactcagcaataatgac

SEQ ID NO: 491856 - DNA, 25 bp, Homo sapien
gatactcagcaataatgacagccac

SEQ ID NO: 491857 - DNA, 25 bp, Homo sapien
gcttcttgaagatactcagcaataa

SEQ ID NO: 491858 - DNA, 25 bp, Homo sapien
gggagtacaccgcatttgtgtttga

SEQ ID NO: 491859 - DNA, 25 bp, Homo sapien
ttcatccaataaggtgagaaatcca

SEQ ID NO: 491860 - DNA, 25 bp, Homo sapien
catttgtgtttgaggattctaggag

SEQ ID NO: 491861 - DNA, 25 bp, Homo sapien
caataaggtgagaaatccagatggc

SEQ ID NO: 491862 - DNA, 25 bp, Homo sapien
gtgaaggctgtaccgtggtctttga

SEQ ID NO: 491863 - DNA, 25 bp, Homo sapien
tgcatgatggtgaaggctgtaccgt

SEQ ID NO: 491864 - DNA, 25 bp, Homo sapien
tagtgcatgatggtgaaggctgtac

SEQ ID NO: 491865 - DNA, 25 bp, Homo sapien
ccttcctgcgtagtgcatgatggtg

SEQ ID NO: 491866 - DNA, 25 bp, Homo sapien
tccacatatccttgcactgggatcc

SEQ ID NO: 491867 - DNA, 25 bp, Homo sapien
cacatatccttgcactgggatccag

SEQ ID NO: 491868 - DNA, 25 bp, Homo sapien
ccacatatccttgcactgggatcca

SEQ ID NO: 491869 - DNA, 25 bp, Homo sapien
gaacttctgacacaacttcccaaat

SEQ ID NO: 491870 - DNA, 25 bp, Homo sapien
ctggttgctgcctgtaccgccaagg

SEQ ID NO: 491871 - DNA, 25 bp, Homo sapien
tgctgtgttggaatggcatcgccca

SEQ ID NO: 491872 - DNA, 25 bp, Homo sapien
tcccaaatactaggtaggtgctgtg

SEQ ID NO: 491873 - DNA, 25 bp, Homo sapien
agcccttggttgtacatgcatattt

SEQ ID NO: 491874 - DNA, 25 bp, Homo sapien
acttcgtgagttaacagtgttaaga

SEQ ID NO: 491875 - DNA, 25 bp, Homo sapien
agtgttaagaggacaaagcccttgg

SEQ ID NO: 491876 - DNA, 25 bp, Homo sapien
tggccccacccaatctttttagaca

SEQ ID NO: 491877 - DNA, 25 bp, Homo sapien
ggtcttcctggtcagagctttcagg

SEQ ID NO: 491878 - DNA, 25 bp, Homo sapien
agctttcaggataggcgagtccctc

SEQ ID NO: 491879 - DNA, 25 bp, Homo sapien
ccaaacaagactctgaagcgtggcc

SEQ ID NO: 491880 - DNA, 25 bp, Homo sapien
caggataggcgagtccctccaggtg

SEQ ID NO: 491881 - DNA, 25 bp, Homo sapien
ttgccgttttccagagttttataca

SEQ ID NO: 491882 - DNA, 25 bp, Homo sapien
taacatccacatacaacgacaaaca

SEQ ID NO: 491883 - DNA, 25 bp, Homo sapien
cacatacaacgacaaacatttgctg

SEQ ID NO: 491884 - DNA, 25 bp, Homo sapien
tgcatttaacatccacatacaacga

SEQ ID NO: 491885 - DNA, 25 bp, Homo sapien
catccacatacaacgacaaacattt

SEQ ID NO: 491886 - DNA, 25 bp, Homo sapien
agtgtgtcatagtctgttctctgcc

SEQ ID NO: 491887 - DNA, 25 bp, Homo sapien
agtggataatgggagacacaaaacc

SEQ ID NO: 491888 - DNA, 25 bp, Homo sapien
tataccttggggcacagaccacggt

SEQ ID NO: 491889 - DNA, 25 bp, Homo sapien
cccagtgtggaccggtagtggataa

SEQ ID NO: 491890 - DNA, 25 bp, Homo sapien
tttttcaatcgccccaacaacatca

SEQ ID NO: 491891 - DNA, 25 bp, Homo sapien
tagaagattctgtgaaagggagtct

SEQ ID NO: 491892 - DNA, 25 bp, Homo sapien
atagaagattctgtgaaagggagtc

SEQ ID NO: 491893 - DNA, 25 bp, Homo sapien
tggctcctgagccaaacatggccca

SEQ ID NO: 491894 - DNA, 25 bp, Homo sapien
tcaactgggagctttttgatgctac

SEQ ID NO: 491895 - DNA, 25 bp, Homo sapien
ttcacattataacagcagaggtgag

SEQ ID NO: 491896 - DNA, 25 bp, Homo sapien
caaggatcttatggtgcacaaggtc

SEQ ID NO: 491897 - DNA, 25 bp, Homo sapien
tgtgtacattctacaacagacctca

SEQ ID NO: 491898 - DNA, 25 bp, Homo sapien
ctgtacctggttagtggtctcagag

SEQ ID NO: 491899 - DNA, 25 bp, Homo sapien
acttctaatcttaggcactaatgag

SEQ ID NO: 491900 - DNA, 25 bp, Homo sapien
tgtctctatgagctgtctccaagct

SEQ ID NO: 491901 - DNA, 25 bp, Homo sapien
cagagccgtctgtaagtacctgtga

SEQ ID NO: 491902 - DNA, 25 bp, Homo sapien
aggacctgccttacttggtgcacca

SEQ ID NO: 491903 - DNA, 25 bp, Homo sapien
agaggacctgccttacttggtgcac

SEQ ID NO: 491904 - DNA, 25 bp, Homo sapien
tgtctcagagccgtctgtaagtacc

SEQ ID NO: 491905 - DNA, 25 bp, Homo sapien
tgagcagggcagacttatgtcctcg

SEQ ID NO: 491906 - DNA, 25 bp, Homo sapien
tacgagggatcctgtttgtgacaat

SEQ ID NO: 491907 - DNA, 25 bp, Homo sapien
tgattgatcacgacattttcactag

SEQ ID NO: 491908 - DNA, 25 bp, Homo sapien
tgtgacaatttcgactggaacaaat

SEQ ID NO: 491909 - DNA, 25 bp, Homo sapien
tgctatggtgactggatctcctcgt

SEQ ID NO: 491910 - DNA, 25 bp, Homo sapien
cctgagttgtgatgctatggtgact

SEQ ID NO: 491911 - DNA, 25 bp, Homo sapien
tgaagaaatgtagaagttcctttct

SEQ ID NO: 491912 - DNA, 25 bp, Homo sapien
gatctcctcgttccaatctttgaag

SEQ ID NO: 491913 - DNA, 25 bp, Homo sapien
gaagtgtggagtgcacttctgaagt

SEQ ID NO: 491914 - DNA, 25 bp, Homo sapien
aatatattgtagctgagcagacacg

SEQ ID NO: 491915 - DNA, 25 bp, Homo sapien
cgaacagggtatccatatcggaaga

SEQ ID NO: 491916 - DNA, 25 bp, Homo sapien
aaaagtatctggcagctttgagtta

SEQ ID NO: 491917 - DNA, 25 bp, Homo sapien
taatccaaggaaagccacactttga

SEQ ID NO: 491918 - DNA, 25 bp, Homo sapien
gtacactgcactgaacagcagcgag

SEQ ID NO: 491919 - DNA, 25 bp, Homo sapien
cagcagcgagaacgacgattttaag

SEQ ID NO: 491920 - DNA, 25 bp, Homo sapien
cagaagacccttgctacaatagtgt

SEQ ID NO: 491921 - DNA, 25 bp, Homo sapien
tgtaatattccaacccatgtaatat

SEQ ID NO: 491922 - DNA, 25 bp, Homo sapien
gcttctgtaacactttgtaatattc

SEQ ID NO: 491923 - DNA, 25 bp, Homo sapien
tcttactatgcttctgtaacacttt

SEQ ID NO: 491924 - DNA, 25 bp, Homo sapien
ttccaacccatgtaatattccaacc

SEQ ID NO: 491925 - DNA, 25 bp, Homo sapien
cagaacatattggtggaacttggct

SEQ ID NO: 491926 - DNA, 25 bp, Homo sapien
tacagtgccatcagtaaaagatctg

SEQ ID NO: 491927 - DNA, 25 bp, Homo sapien
tgggctagtctttaaacctgaatcc

SEQ ID NO: 491928 - DNA, 25 bp, Homo sapien
taaacatttgctgttgcaagccact

SEQ ID NO: 491929 - DNA, 25 bp, Homo sapien
cgagagtgatgctgtgccaagtcca

SEQ ID NO: 491930 - DNA, 25 bp, Homo sapien
agtccaggcctagcttttaagaagg

SEQ ID NO: 491931 - DNA, 25 bp, Homo sapien
gaagaggccccaagcaagcattgcc

SEQ ID NO: 491932 - DNA, 25 bp, Homo sapien
caggcataggagtgaagggaccatc

SEQ ID NO: 491933 - DNA, 25 bp, Homo sapien
gagccataggaccacaattctgcca

SEQ ID NO: 491934 - DNA, 25 bp, Homo sapien
agcccttcatgaccattggaaacaa

SEQ ID NO: 491935 - DNA, 25 bp, Homo sapien
gatgagaattccacaagcatacagg

SEQ ID NO: 491936 - DNA, 25 bp, Homo sapien
aggtggctgagaccatataaaacat

SEQ ID NO: 491937 - DNA, 25 bp, Homo sapien
tttcaggaagccgaccaaaggcaat

SEQ ID NO: 491938 - DNA, 25 bp, Homo sapien
tgccttacgccacgaacgagtctgt

SEQ ID NO: 491939 - DNA, 25 bp, Homo sapien
tccaaaggttgtgactgattcagcc

SEQ ID NO: 491940 - DNA, 25 bp, Homo sapien
gcaatccagagtgtaaggcccacag

SEQ ID NO: 491941 - DNA, 25 bp, Homo sapien
ttaagatgctgctcatgcccatccc

SEQ ID NO: 491942 - DNA, 25 bp, Homo sapien
ttttcctgtacaccttaagatgctg

SEQ ID NO: 491943 - DNA, 25 bp, Homo sapien
taaactcaactacccttacgctcag

SEQ ID NO: 491944 - DNA, 25 bp, Homo sapien
tatgccactgcaatggtggcatctt

SEQ ID NO: 491945 - DNA, 25 bp, Homo sapien
tgtatttatcaggtacaagaacagc

SEQ ID NO: 491946 - DNA, 25 bp, Homo sapien
gagccatggcttgtatttatcaggt

SEQ ID NO: 491947 - DNA, 25 bp, Homo sapien
tgagccatggcttgtatttatcagg

SEQ ID NO: 491948 - DNA, 25 bp, Homo sapien
atttatcaggtacaagaacagcttg

SEQ ID NO: 491949 - DNA, 25 bp, Homo sapien
tatgacaattccagggctactgctt

SEQ ID NO: 491950 - DNA, 25 bp, Homo sapien
tggtctgcacatggctctgctaagg

SEQ ID NO: 491951 - DNA, 25 bp, Homo sapien
gcttctagggctggccaacacggat

SEQ ID NO: 491952 - DNA, 25 bp, Homo sapien
tggccaacacggatttcccttctac

SEQ ID NO: 491953 - DNA, 25 bp, Homo sapien
cagccaagggaaggcaaagttggaa

SEQ ID NO: 491954 - DNA, 25 bp, Homo sapien
aaaggactggatgggagccgtccaa

SEQ ID NO: 491955 - DNA, 25 bp, Homo sapien
ttggaaatgcggtcgccagtgctga

SEQ ID NO: 491956 - DNA, 25 bp, Homo sapien
agccgtccaattttggagcagccaa

SEQ ID NO: 491957 - DNA, 25 bp, Homo sapien
ttctcacgcaggaatgtatcagcca

SEQ ID NO: 491958 - DNA, 25 bp, Homo sapien
tgctggagaacaagtcgacatcgct

SEQ ID NO: 491959 - DNA, 25 bp, Homo sapien
gtcgacatcgctcggcagctgactg

SEQ ID NO: 491960 - DNA, 25 bp, Homo sapien
cagccttgtaatttacactgctgga

SEQ ID NO: 491961 - DNA, 25 bp, Homo sapien
taatagtactgaagataccacatct

SEQ ID NO: 491962 - DNA, 25 bp, Homo sapien
gcatagatcggcatacaaaagtaat

SEQ ID NO: 491963 - DNA, 25 bp, Homo sapien
tcggcatacaaaagtaatagtactg

SEQ ID NO: 491964 - DNA, 25 bp, Homo sapien
gcagacacaggtgcatagatcggca

SEQ ID NO: 491965 - DNA, 25 bp, Homo sapien
ctttctgcacagagccacatcggtg

SEQ ID NO: 491966 - DNA, 25 bp, Homo sapien
ctctcgactctcccagtgctgtgtg

SEQ ID NO: 491967 - DNA, 25 bp, Homo sapien
cagtgaaaagtaccactgggaaagc

SEQ ID NO: 491968 - DNA, 25 bp, Homo sapien
ccgaagttctcgacatcttcttgaa

SEQ ID NO: 491969 - DNA, 25 bp, Homo sapien
tcctgcctcaaacgggacacacagg

SEQ ID NO: 491970 - DNA, 25 bp, Homo sapien
tcacaagttcctgcctcaaacggga

SEQ ID NO: 491971 - DNA, 25 bp, Homo sapien
aagttcctgcctcaaacgggacaca

SEQ ID NO: 491972 - DNA, 25 bp, Homo sapien
tgcctcaaacgggacacacaggcca

SEQ ID NO: 491973 - DNA, 25 bp, Homo sapien
cattgtgaaaaagcttaccaaagcc

SEQ ID NO: 491974 - DNA, 25 bp, Homo sapien
tgcatagcaggcagtgatgaataaa

SEQ ID NO: 491975 - DNA, 25 bp, Homo sapien
tattttgagcttactagtgaatgac

SEQ ID NO: 491976 - DNA, 25 bp, Homo sapien
tagaacagtatgacctgcatagcag

SEQ ID NO: 491977 - DNA, 25 bp, Homo sapien
caagccctaaagatttccacaggtc

SEQ ID NO: 491978 - DNA, 25 bp, Homo sapien
gcacctcaagccctaaagatttcca

SEQ ID NO: 491979 - DNA, 25 bp, Homo sapien
cctcaagccctaaagatttccacag

SEQ ID NO: 491980 - DNA, 25 bp, Homo sapien
tgagcacctcaagccctaaagattt

SEQ ID NO: 491981 - DNA, 25 bp, Homo sapien
ctgggcttcggattcactcggtgga

SEQ ID NO: 491982 - DNA, 25 bp, Homo sapien
gaaggagcagcgttgcaatcgaagc

SEQ ID NO: 491983 - DNA, 25 bp, Homo sapien
agggcagatctgcatgtcaggccag

SEQ ID NO: 491984 - DNA, 25 bp, Homo sapien
ccctggtgggtttttcatgtagcct

SEQ ID NO: 491985 - DNA, 25 bp, Homo sapien
tttttctctgcaactgtaggcacaa

SEQ ID NO: 491986 - DNA, 25 bp, Homo sapien
cagcatgccagtattttagaaacac

SEQ ID NO: 491987 - DNA, 25 bp, Homo sapien
aatcattgagttggtcagcatgcca

SEQ ID NO: 491988 - DNA, 25 bp, Homo sapien
gcaactgtaggcacaaatcattgag

SEQ ID NO: 491989 - DNA, 25 bp, Homo sapien
cattttcccgggcaatgtctgaagc

SEQ ID NO: 491990 - DNA, 25 bp, Homo sapien
gcatcgtaggttttcagccccatgt

SEQ ID NO: 491991 - DNA, 25 bp, Homo sapien
gttcatttcactacggagccggtca

SEQ ID NO: 491992 - DNA, 25 bp, Homo sapien
ggtgctggcgtgctaaaaatcctct

SEQ ID NO: 491993 - DNA, 25 bp, Homo sapien
taagccagccttatatccgtaacgc

SEQ ID NO: 491994 - DNA, 25 bp, Homo sapien
tccgtaacgcttgtgtaaaaatgtc

SEQ ID NO: 491995 - DNA, 25 bp, Homo sapien
gagacgtgacagtttacacagggat

SEQ ID NO: 491996 - DNA, 25 bp, Homo sapien
aagtgacacaagcatggcaggagag

SEQ ID NO: 491997 - DNA, 25 bp, Homo sapien
aatgcctgggtccactcttgtcatc

SEQ ID NO: 491998 - DNA, 25 bp, Homo sapien
caggcgctcacagcctcataggaag

SEQ ID NO: 491999 - DNA, 25 bp, Homo sapien
cataggaagcactcagccgggtgtt

SEQ ID NO: 492000 - DNA, 25 bp, Homo sapien
gctgtcatccatgctgaacaccgag

SEQ ID NO: 492001 - DNA, 25 bp, Homo sapien
ttagggcgacagtactgccatgggc

SEQ ID NO: 492002 - DNA, 25 bp, Homo sapien
gagcatgcgcgagcccggaacacga

SEQ ID NO: 492003 - DNA, 25 bp, Homo sapien
atgggcgccccaaggcgaagtcaga

SEQ ID NO: 492004 - DNA, 25 bp, Homo sapien
ggcaagccaacaattggatttattt

SEQ ID NO: 492005 - DNA, 25 bp, Homo sapien
tagctgccgactttctgaattgatt

SEQ ID NO: 492006 - DNA, 25 bp, Homo sapien
ccgactttctgaattgatttgatac

SEQ ID NO: 492007 - DNA, 25 bp, Homo sapien
atggaatagctgccgactttctgaa

SEQ ID NO: 492008 - DNA, 25 bp, Homo sapien
gaatagctgccgactttctgaattg

SEQ ID NO: 492009 - DNA, 25 bp, Homo sapien
cagacaccagagatgtaattgacta

SEQ ID NO: 492010 - DNA, 25 bp, Homo sapien
caataatattttcagcgccacatgc

SEQ ID NO: 492011 - DNA, 25 bp, Homo sapien
ggcctgtacaccctgaagcagccat

SEQ ID NO: 492012 - DNA, 25 bp, Homo sapien
tctctgccccagtgaatacaatgat

SEQ ID NO: 492013 - DNA, 25 bp, Homo sapien
gggaccgggcctgcatgttcctcca

SEQ ID NO: 492014 - DNA, 25 bp, Homo sapien
aatcccaagggaccgggcctgcatg

SEQ ID NO: 492015 - DNA, 25 bp, Homo sapien
agccacggccccgtgccccgagaat

SEQ ID NO: 492016 - DNA, 25 bp, Homo sapien
cgagaatcccaagggaccgggcctg

SEQ ID NO: 492017 - DNA, 25 bp, Homo sapien
tatctcctcgtaggagccgctgagc

SEQ ID NO: 492018 - DNA, 25 bp, Homo sapien
tgctgtagtcgtcgctgtgcggtct

SEQ ID NO: 492019 - DNA, 25 bp, Homo sapien
cttcatggtgctgtagtcgtcgctg

SEQ ID NO: 492020 - DNA, 25 bp, Homo sapien
ccgatatctcctcgtaggagccgct

SEQ ID NO: 492021 - DNA, 25 bp, Homo sapien
gagtcccgggggtcagaacgcgcgc

SEQ ID NO: 492022 - DNA, 25 bp, Homo sapien
ctgcggagtcccgggggtcagaacg

SEQ ID NO: 492023 - DNA, 25 bp, Homo sapien
gtcccgggggtcagaacgcgcgctg

SEQ ID NO: 492024 - DNA, 25 bp, Homo sapien
cgggggtcagaacgcgcgctgctgc

SEQ ID NO: 492025 - DNA, 25 bp, Homo sapien
ctgtcgtcctcgtcacccggaggcg

SEQ ID NO: 492026 - DNA, 25 bp, Homo sapien
gatgtacacaggctcgctgtcgtcc

SEQ ID NO: 492027 - DNA, 25 bp, Homo sapien
ggtccgggctatcgggcctggccgc

SEQ ID NO: 492028 - DNA, 25 bp, Homo sapien
ttcatctcctcgtacacggactccc

SEQ ID NO: 492029 - DNA, 25 bp, Homo sapien
ggggcggcgatgcgccgtggagcag

SEQ ID NO: 492030 - DNA, 25 bp, Homo sapien
aggggcggcgatgcgccgtggagca

SEQ ID NO: 492031 - DNA, 25 bp, Homo sapien
gcggccggtgcggcagcaggttggg

SEQ ID NO: 492032 - DNA, 25 bp, Homo sapien
cgggatgtcgcacgcgtcccctggg

SEQ ID NO: 492033 - DNA, 25 bp, Homo sapien
tgtcaggggcgactcgtcggaggcg

SEQ ID NO: 492034 - DNA, 25 bp, Homo sapien
ctccaggggtgtcaggggcgactcg

SEQ ID NO: 492035 - DNA, 25 bp, Homo sapien
tgaggttggtctccaggactggcag

SEQ ID NO: 492036 - DNA, 25 bp, Homo sapien
aggttggtctccaggactggcagct

SEQ ID NO: 492037 - DNA, 25 bp, Homo sapien
ttgaggttggtctccaggactggca

SEQ ID NO: 492038 - DNA, 25 bp, Homo sapien
gttggtctccaggactggcagcttc

SEQ ID NO: 492039 - DNA, 25 bp, Homo sapien
cgggctcgacccctccggctgcacg

SEQ ID NO: 492040 - DNA, 25 bp, Homo sapien
ctgcggggacagcgggctcgacccc

SEQ ID NO: 492041 - DNA, 25 bp, Homo sapien
tcgacccctccggctgcacggggta

SEQ ID NO: 492042 - DNA, 25 bp, Homo sapien
tgcggggacagcgggctcgacccct

SEQ ID NO: 492043 - DNA, 25 bp, Homo sapien
ggggacgcgggcctgtcgccgtcgc

SEQ ID NO: 492044 - DNA, 25 bp, Homo sapien
cgccgtcgcccttctggctcttgga

SEQ ID NO: 492045 - DNA, 25 bp, Homo sapien
cgtcgcccttctggctcttggagta

SEQ ID NO: 492046 - DNA, 25 bp, Homo sapien
gggacgcgggcctgtcgccgtcgcc

SEQ ID NO: 492047 - DNA, 25 bp, Homo sapien
gcggcgtggacggcggggaggctcg

SEQ ID NO: 492048 - DNA, 25 bp, Homo sapien
ccggcgggaaggccaagtgcgcgca

SEQ ID NO: 492049 - DNA, 25 bp, Homo sapien
gcgaggcactggagccggccttcct

SEQ ID NO: 492050 - DNA, 25 bp, Homo sapien
cgtccgccctggtggccttcacggg

SEQ ID NO: 492051 - DNA, 25 bp, Homo sapien
ccttcacgggggaatatgggatctt

SEQ ID NO: 492052 - DNA, 25 bp, Homo sapien
ggccttcctggcgtccgccctggtg

SEQ ID NO: 492053 - DNA, 25 bp, Homo sapien
acactcctccccgagttgaagaggc

SEQ ID NO: 492054 - DNA, 25 bp, Homo sapien
cgcggatttccgaagcacactcctc

SEQ ID NO: 492055 - DNA, 25 bp, Homo sapien
ctccccgagttgaagaggctggcga

SEQ ID NO: 492056 - DNA, 25 bp, Homo sapien
cttcccgccgcggatttccgaagca

SEQ ID NO: 492057 - DNA, 25 bp, Homo sapien
tgtcgctaaacaatgaatgggtaac

SEQ ID NO: 492058 - DNA, 25 bp, Homo sapien
gcatcctgcatcttgtcgctaaaca

SEQ ID NO: 492059 - DNA, 25 bp, Homo sapien
gcatttgagtcattgtaaagcatcc

SEQ ID NO: 492060 - DNA, 25 bp, Homo sapien
aatgggtaactgcacttgatttggc

SEQ ID NO: 492061 - DNA, 25 bp, Homo sapien
tggggcgtggttcagagcagcagct

SEQ ID NO: 492062 - DNA, 25 bp, Homo sapien
catctggggttgtacttgttgactt

SEQ ID NO: 492063 - DNA, 25 bp, Homo sapien
ggggcgtggttcagagcagcagctc

SEQ ID NO: 492064 - DNA, 25 bp, Homo sapien
gtgcatctggggttgtacttgttga

SEQ ID NO: 492065 - DNA, 25 bp, Homo sapien
cctcagacagtaacaagactgtttt

SEQ ID NO: 492066 - DNA, 25 bp, Homo sapien
tgccatgacaggagaggtatgaata

SEQ ID NO: 492067 - DNA, 25 bp, Homo sapien
tcctcagacagtaacaagactgttt

SEQ ID NO: 492068 - DNA, 25 bp, Homo sapien
tgaataagttaacatcagggatgtg

SEQ ID NO: 492069 - DNA, 25 bp, Homo sapien
ttggtcagatcacccgcagggacct

SEQ ID NO: 492070 - DNA, 25 bp, Homo sapien
gacctctcctttacagcacagagca

SEQ ID NO: 492071 - DNA, 25 bp, Homo sapien
agggacctctcctttacagcacaga

SEQ ID NO: 492072 - DNA, 25 bp, Homo sapien
caggaccttggtcagatcacccgca

SEQ ID NO: 492073 - DNA, 25 bp, Homo sapien
gggtcatctcggctacttatgttca

SEQ ID NO: 492074 - DNA, 25 bp, Homo sapien
tttcagcagttatagcactagatag

SEQ ID NO: 492075 - DNA, 25 bp, Homo sapien
gagtctcggaagtaatttctgacgt

SEQ ID NO: 492076 - DNA, 25 bp, Homo sapien
agcactagatagtgaattagataac

SEQ ID NO: 492077 - DNA, 25 bp, Homo sapien
tcttggttctggttcactctgactc

SEQ ID NO: 492078 - DNA, 25 bp, Homo sapien
tctggttcactctgactcttgggaa

SEQ ID NO: 492079 - DNA, 25 bp, Homo sapien
tggtggggccacgactcagtttctt

SEQ ID NO: 492080 - DNA, 25 bp, Homo sapien
tggttctggttcactctgactcttg

SEQ ID NO: 492081 - DNA, 25 bp, Homo sapien
tttgaaatgtcgaagtccctgtgcc

SEQ ID NO: 492082 - DNA, 25 bp, Homo sapien
tccctgtgccacttatagacaaccg

SEQ ID NO: 492083 - DNA, 25 bp, Homo sapien
ttatagacaaccgtgagtatccatc

SEQ ID NO: 492084 - DNA, 25 bp, Homo sapien
ttgaaatgtcgaagtccctgtgcca

SEQ ID NO: 492085 - DNA, 25 bp, Homo sapien
taaactttatgtactactggtaaca

SEQ ID NO: 492086 - DNA, 25 bp, Homo sapien
aatggcagtccagtactatataaac

SEQ ID NO: 492087 - DNA, 25 bp, Homo sapien
gaagaggaggccagtactccttaac

SEQ ID NO: 492088 - DNA, 25 bp, Homo sapien
caatcatgaatgctatctaaatggc

SEQ ID NO: 492089 - DNA, 25 bp, Homo sapien
tgagagggcattttaaaatcatcat

SEQ ID NO: 492090 - DNA, 25 bp, Homo sapien
ctgagagggcattttaaaatcatca

SEQ ID NO: 492091 - DNA, 25 bp, Homo sapien
tagctattgagtaaaatctactagg

SEQ ID NO: 492092 - DNA, 25 bp, Homo sapien
tatataagaattgccagaatggctg

SEQ ID NO: 492093 - DNA, 25 bp, Homo sapien
tgtaagactatgataggccactacc

SEQ ID NO: 492094 - DNA, 25 bp, Homo sapien
gactgatgtttgcaataaccaatta

SEQ ID NO: 492095 - DNA, 25 bp, Homo sapien
aaatatactagatgtgaccctctgc

SEQ ID NO: 492096 - DNA, 25 bp, Homo sapien
cccagcagttggtgttactcttcca

SEQ ID NO: 492097 - DNA, 25 bp, Homo sapien
gtttcgaggtcttaaggttctagca

SEQ ID NO: 492098 - DNA, 25 bp, Homo sapien
ttgatagaccatacaactctgtgct

SEQ ID NO: 492099 - DNA, 25 bp, Homo sapien
gcatggacccaaagatggaccccta

SEQ ID NO: 492100 - DNA, 25 bp, Homo sapien
cagggcagtcaggtaatctggccaa

SEQ ID NO: 492101 - DNA, 25 bp, Homo sapien
caagcattaggtgttccaaaaggca

SEQ ID NO: 492102 - DNA, 25 bp, Homo sapien
gatacaggctaaggatcagagtccc

SEQ ID NO: 492103 - DNA, 25 bp, Homo sapien
gggccacactttcattctctgagag

SEQ ID NO: 492104 - DNA, 25 bp, Homo sapien
ctccagtccaagagttcctgcaggg

SEQ ID NO: 492105 - DNA, 25 bp, Homo sapien
ttctcctccagtccaagagttcctg

SEQ ID NO: 492106 - DNA, 25 bp, Homo sapien
tctgagagcctcagctgatggatta

SEQ ID NO: 492107 - DNA, 25 bp, Homo sapien
agagctcagacggcagcctgttgca

SEQ ID NO: 492108 - DNA, 25 bp, Homo sapien
ggctcagcgtggtgcaggatctgct

SEQ ID NO: 492109 - DNA, 25 bp, Homo sapien
caccctgggctcagcgtggtgcagg

SEQ ID NO: 492110 - DNA, 25 bp, Homo sapien
cccagagctcagacggcagcctgtt

SEQ ID NO: 492111 - DNA, 25 bp, Homo sapien
tctaaatgcgtggagagaagcccca

SEQ ID NO: 492112 - DNA, 25 bp, Homo sapien
taaccgtgtgccatgtgatttcctg

SEQ ID NO: 492113 - DNA, 25 bp, Homo sapien
gacagccgacgaaagcacatcaatg

SEQ ID NO: 492114 - DNA, 25 bp, Homo sapien
gatcattttacaccaccggctatgg

SEQ ID NO: 492115 - DNA, 25 bp, Homo sapien
ttgacaccctgagcatccgaggcca

SEQ ID NO: 492116 - DNA, 25 bp, Homo sapien
attgacaccctgagcatccgaggcc

SEQ ID NO: 492117 - DNA, 25 bp, Homo sapien
cattgacaccctgagcatccgaggc

SEQ ID NO: 492118 - DNA, 25 bp, Homo sapien
gattccttctagaggttgtctcaac

SEQ ID NO: 492119 - DNA, 25 bp, Homo sapien
ggttgtctcaactgtcttttctcca

SEQ ID NO: 492120 - DNA, 25 bp, Homo sapien
gccgaaatcctgtgaacagttgatt

SEQ ID NO: 492121 - DNA, 25 bp, Homo sapien
ttctagaatgccgaaatcctgtgaa

SEQ ID NO: 492122 - DNA, 25 bp, Homo sapien
tggcaaacgccttagtggatgatga

SEQ ID NO: 492123 - DNA, 25 bp, Homo sapien
tgctttttactgctgctcgtggcaa

SEQ ID NO: 492124 - DNA, 25 bp, Homo sapien
tcatcgacgagaacggaatgttagg

SEQ ID NO: 492125 - DNA, 25 bp, Homo sapien
gaaatgacctcatggaaacagtgtg

SEQ ID NO: 492126 - DNA, 25 bp, Homo sapien
tttgctataaccattcgtaaccgta

SEQ ID NO: 492127 - DNA, 25 bp, Homo sapien
cattcgtaaccgtaacagattttct

SEQ ID NO: 492128 - DNA, 25 bp, Homo sapien
tcttgacagatgaattctttttgct

SEQ ID NO: 492129 - DNA, 25 bp, Homo sapien
tatatgacggttgttgtgtgcttac

SEQ ID NO: 492130 - DNA, 25 bp, Homo sapien
ccgatccgagccacggcatcaaagt

SEQ ID NO: 492131 - DNA, 25 bp, Homo sapien
agaggcggcttactggatttaaaat

SEQ ID NO: 492132 - DNA, 25 bp, Homo sapien
gccacggcatcaaagttcactcgag

SEQ ID NO: 492133 - DNA, 25 bp, Homo sapien
aaagttcactcgagtccatgtgaag

SEQ ID NO: 492134 - DNA, 25 bp, Homo sapien
tctggaggaatgtctggccactgcg

SEQ ID NO: 492135 - DNA, 25 bp, Homo sapien
gaggaatgtctggccactgcggttc

SEQ ID NO: 492136 - DNA, 25 bp, Homo sapien
gaggttctggaggaatgtctggcca

SEQ ID NO: 492137 - DNA, 25 bp, Homo sapien
ttctggaggaatgtctggccactgc

SEQ ID NO: 492138 - DNA, 25 bp, Homo sapien
gaatagcagatagaatagcagatgg

SEQ ID NO: 492139 - DNA, 25 bp, Homo sapien
agaatagcagatagaatagcagatg

SEQ ID NO: 492140 - DNA, 25 bp, Homo sapien
gctagtggcttgtaatatggggaaa

SEQ ID NO: 492141 - DNA, 25 bp, Homo sapien
taatcctacttggtgctggagggag

SEQ ID NO: 492142 - DNA, 25 bp, Homo sapien
catcccagctggtagagtgtgctac

SEQ ID NO: 492143 - DNA, 25 bp, Homo sapien
ggaacttgttatccagacatcccag

SEQ ID NO: 492144 - DNA, 25 bp, Homo sapien
gaaggttctccgaaaacattcaggc

SEQ ID NO: 492145 - DNA, 25 bp, Homo sapien
atgcacaacgaacccatattcccgt

SEQ ID NO: 492146 - DNA, 25 bp, Homo sapien
ctttctcatgcacaacgaacccata

SEQ ID NO: 492147 - DNA, 25 bp, Homo sapien
tctcatgcacaacgaacccatattc

SEQ ID NO: 492148 - DNA, 25 bp, Homo sapien
cacaacgaacccatattcccgtagg

SEQ ID NO: 492149 - DNA, 25 bp, Homo sapien
gacagcttatgtgtaatcttcaggc

SEQ ID NO: 492150 - DNA, 25 bp, Homo sapien
tttcattagtacagagaaagctccc

SEQ ID NO: 492151 - DNA, 25 bp, Homo sapien
taggaggtacgtgtatgacagctta

SEQ ID NO: 492152 - DNA, 25 bp, Homo sapien
gattcacttcatcacaggtggccta

SEQ ID NO: 492153 - DNA, 25 bp, Homo sapien
ttgatgaagacttggacagtcatgc

SEQ ID NO: 492154 - DNA, 25 bp, Homo sapien
tattctagggtagcgtgttctggtc

SEQ ID NO: 492155 - DNA, 25 bp, Homo sapien
ccccaatataaggaacagtcttctg

SEQ ID NO: 492156 - DNA, 25 bp, Homo sapien
aggcctttgttcagattcgtcttgg

SEQ ID NO: 492157 - DNA, 25 bp, Homo sapien
tttatgcgcaccctctgttattcag

SEQ ID NO: 492158 - DNA, 25 bp, Homo sapien
gagctctggacccaactctcttgca

SEQ ID NO: 492159 - DNA, 25 bp, Homo sapien
ttggctcggccacatactagcagtg

SEQ ID NO: 492160 - DNA, 25 bp, Homo sapien
taattatacttacttcagccaggtg

SEQ ID NO: 492161 - DNA, 25 bp, Homo sapien
tgctgtcagcatggaacctcttgtc

SEQ ID NO: 492162 - DNA, 25 bp, Homo sapien
gcccagcgaggtttccccagatgct

SEQ ID NO: 492163 - DNA, 25 bp, Homo sapien
ctctgactctcgacccagggtgggt

SEQ ID NO: 492164 - DNA, 25 bp, Homo sapien
tatcacccataggaaggacctccga

SEQ ID NO: 492165 - DNA, 25 bp, Homo sapien
caggtttctagggaactgggcagca

SEQ ID NO: 492166 - DNA, 25 bp, Homo sapien
ccatccaggacagaactcagaggac

SEQ ID NO: 492167 - DNA, 25 bp, Homo sapien
ttacactaggcaggtttctagggaa

SEQ ID NO: 492168 - DNA, 25 bp, Homo sapien
ggtgtaggtggatgactagagggaa

SEQ ID NO: 492169 - DNA, 25 bp, Homo sapien
atatggctcggggaaatatggccct

SEQ ID NO: 492170 - DNA, 25 bp, Homo sapien
acccactttcctcatatggctcggg

SEQ ID NO: 492171 - DNA, 25 bp, Homo sapien
atggctcggggaaatatggccctgt

SEQ ID NO: 492172 - DNA, 25 bp, Homo sapien
tcacccactttcctcatatggctcg

SEQ ID NO: 492173 - DNA, 25 bp, Homo sapien
ggcctgagactgatgcagcctctct

SEQ ID NO: 492174 - DNA, 25 bp, Homo sapien
tgaccagcgtgagtgaaataatact

SEQ ID NO: 492175 - DNA, 25 bp, Homo sapien
tactgttgaaccaggcaaggcttag

SEQ ID NO: 492176 - DNA, 25 bp, Homo sapien
ggctgaatcttaccagacaatagtt

SEQ ID NO: 492177 - DNA, 25 bp, Homo sapien
taggaggctcagatcgcaagcaagc

SEQ ID NO: 492178 - DNA, 25 bp, Homo sapien
tgatttccgagtctagcaccacgag

SEQ ID NO: 492179 - DNA, 25 bp, Homo sapien
gataccaatcccagtcacacaggag

SEQ ID NO: 492180 - DNA, 25 bp, Homo sapien
caatgacccatattctctggaggaa

SEQ ID NO: 492181 - DNA, 25 bp, Homo sapien
tgtatcacgaatcctgtctccagaa

SEQ ID NO: 492182 - DNA, 25 bp, Homo sapien
aagccgtggtgtctacatgccctcg

SEQ ID NO: 492183 - DNA, 25 bp, Homo sapien
tactcaaagaaagcgtgaagcctct

SEQ ID NO: 492184 - DNA, 25 bp, Homo sapien
tctgctgtccccttgaagccgtggt

SEQ ID NO: 492185 - DNA, 25 bp, Homo sapien
acgttagctctttagagcacaccgc

SEQ ID NO: 492186 - DNA, 25 bp, Homo sapien
tatcagaggaagttgcgctgtttgc

SEQ ID NO: 492187 - DNA, 25 bp, Homo sapien
gttccttcagtgagatctcctactg

SEQ ID NO: 492188 - DNA, 25 bp, Homo sapien
acagttaagataaacgttagctctt

SEQ ID NO: 492189 - DNA, 25 bp, Homo sapien
gggctcctcacttctgggacagggt

SEQ ID NO: 492190 - DNA, 25 bp, Homo sapien
ctcctcacttctgggacagggtggc

SEQ ID NO: 492191 - DNA, 25 bp, Homo sapien
gggtggcagttgggcagaggcactc

SEQ ID NO: 492192 - DNA, 25 bp, Homo sapien
agggctgccccccacctcctggacg

SEQ ID NO: 492193 - DNA, 25 bp, Homo sapien
tgctacacccggcaggtccggtgga

SEQ ID NO: 492194 - DNA, 25 bp, Homo sapien
ctacacccggcaggtccggtggact

SEQ ID NO: 492195 - DNA, 25 bp, Homo sapien
ttagtaaaaatgaagcgaaagcgga

SEQ ID NO: 492196 - DNA, 25 bp, Homo sapien
agtaaaaatgaagcgaaagcggaag

SEQ ID NO: 492197 - DNA, 25 bp, Homo sapien
tctggtctgctgtgtcggcacatcc

SEQ ID NO: 492198 - DNA, 25 bp, Homo sapien
tcacctacacaaaagactggctcgg

SEQ ID NO: 492199 - DNA, 25 bp, Homo sapien
ggcacatcctgttgtgaccttcatg

SEQ ID NO: 492200 - DNA, 25 bp, Homo sapien
agtgccagccgtgcctctggtctgc

SEQ ID NO: 492201 - DNA, 25 bp, Homo sapien
acctagctctgtggagtcaagagta

SEQ ID NO: 492202 - DNA, 25 bp, Homo sapien
gcaatttcactatacctagttcctg

SEQ ID NO: 492203 - DNA, 25 bp, Homo sapien
acattggctactttgtatatgctgc

SEQ ID NO: 492204 - DNA, 25 bp, Homo sapien
ctgtcggtgactgccaaaggaaatc

SEQ ID NO: 492205 - DNA, 25 bp, Homo sapien
ctgctcccatgcagaaatgcatgag

SEQ ID NO: 492206 - DNA, 25 bp, Homo sapien
cagaaatgcatgagagtatccaccc

SEQ ID NO: 492207 - DNA, 25 bp, Homo sapien
gcatgagagtatccaccctctcctg

SEQ ID NO: 492208 - DNA, 25 bp, Homo sapien
catgcagaaatgcatgagagtatcc

SEQ ID NO: 492209 - DNA, 25 bp, Homo sapien
ggcagggtcttggattataggtcct

SEQ ID NO: 492210 - DNA, 25 bp, Homo sapien
ggtcttggattataggtcctgtttc

SEQ ID NO: 492211 - DNA, 25 bp, Homo sapien
cagacagtgaagggttgactctgtc

SEQ ID NO: 492212 - DNA, 25 bp, Homo sapien
gattataggtcctgtttcatgtccc

SEQ ID NO: 492213 - DNA, 25 bp, Homo sapien
tgcttttcacgtccagttcatgggt

SEQ ID NO: 492214 - DNA, 25 bp, Homo sapien
taacttctgagttagcgcagggctg

SEQ ID NO: 492215 - DNA, 25 bp, Homo sapien
cagcctccggtagcttaacttctga

SEQ ID NO: 492216 - DNA, 25 bp, Homo sapien
tccttgtccccggtatcagcaagtg

SEQ ID NO: 492217 - DNA, 25 bp, Homo sapien
tgtttccaccggaagaggctctcgc

SEQ ID NO: 492218 - DNA, 25 bp, Homo sapien
tctggaggtccggagactctaggct

SEQ ID NO: 492219 - DNA, 25 bp, Homo sapien
tggccccagtgtttagctacagagg

SEQ ID NO: 492220 - DNA, 25 bp, Homo sapien
gctctcgctccttctgaagtcatgg

SEQ ID NO: 492221 - DNA, 25 bp, Homo sapien
gcacagagcacctcggaagaagcct

SEQ ID NO: 492222 - DNA, 25 bp, Homo sapien
gcatatggtgccgaaggaatctgtc

SEQ ID NO: 492223 - DNA, 25 bp, Homo sapien
caaatcagtagaaacgcacaacggg

SEQ ID NO: 492224 - DNA, 25 bp, Homo sapien
ggaatctgtcccaagacgctgctga

SEQ ID NO: 492225 - DNA, 25 bp, Homo sapien
ggcttcagtcgcaggaagtcgccta

SEQ ID NO: 492226 - DNA, 25 bp, Homo sapien
caggaagtcgcctacatgtggtgtc

SEQ ID NO: 492227 - DNA, 25 bp, Homo sapien
gcctctgggcttcagtcgcaggaag

SEQ ID NO: 492228 - DNA, 25 bp, Homo sapien
cgcctacatgtggtgtcgttttcag

SEQ ID NO: 492229 - DNA, 25 bp, Homo sapien
caccactgattactttgcatgttct

SEQ ID NO: 492230 - DNA, 25 bp, Homo sapien
ttccccaggcaactactgttcagct

SEQ ID NO: 492231 - DNA, 25 bp, Homo sapien
aatggagtaatgtcatgcatggtcg

SEQ ID NO: 492232 - DNA, 25 bp, Homo sapien
tgaaggaaatgcataacccagtccc

SEQ ID NO: 492233 - DNA, 25 bp, Homo sapien
gaagaaaaactggttcaatgacgtg

SEQ ID NO: 492234 - DNA, 25 bp, Homo sapien
ttaactacatgctataacgaagcct

SEQ ID NO: 492235 - DNA, 25 bp, Homo sapien
caatgacgtgaacccatgaaagggc

SEQ ID NO: 492236 - DNA, 25 bp, Homo sapien
gagaaaattcactctgatctgaaag

SEQ ID NO: 492237 - DNA, 25 bp, Homo sapien
tttggtggtgccaatgccgcagcaa

SEQ ID NO: 492238 - DNA, 25 bp, Homo sapien
gagtcttcctcggtcagtgaccgtt

SEQ ID NO: 492239 - DNA, 25 bp, Homo sapien
ctcggtcagtgaccgttttggtggt

SEQ ID NO: 492240 - DNA, 25 bp, Homo sapien
tgccaatgccgcagcaagtttcatc

SEQ ID NO: 492241 - DNA, 25 bp, Homo sapien
gaagaaggcccacaagctcgctaca

SEQ ID NO: 492242 - DNA, 25 bp, Homo sapien
gaaggcccacaagctcgctacaggt

SEQ ID NO: 492243 - DNA, 25 bp, Homo sapien
gaatagtgacattctcaggaacaaa

SEQ ID NO: 492244 - DNA, 25 bp, Homo sapien
gccaccttcatcaagcgatgaagaa

SEQ ID NO: 492245 - DNA, 25 bp, Homo sapien
ttcttgtcggctcgccttctgctgg

SEQ ID NO: 492246 - DNA, 25 bp, Homo sapien
ttccaggggatgtgacggcagaacc

SEQ ID NO: 492247 - DNA, 25 bp, Homo sapien
ttgtgtctagcatgtaaccctgcat

SEQ ID NO: 492248 - DNA, 25 bp, Homo sapien
cctttgtgtctagcatgtaaccctg

SEQ ID NO: 492249 - DNA, 25 bp, Homo sapien
cctggatcctgacagtgcgactccg

SEQ ID NO: 492250 - DNA, 25 bp, Homo sapien
gacagtgcgactccgcgtgcggctt

SEQ ID NO: 492251 - DNA, 25 bp, Homo sapien
ttcaacctgtctcagtgtatgaaga

SEQ ID NO: 492252 - DNA, 25 bp, Homo sapien
tctccctgccatggtcttagatttc

SEQ ID NO: 492253 - DNA, 25 bp, Homo sapien
caacagtcctgctagcgggttttcc

SEQ ID NO: 492254 - DNA, 25 bp, Homo sapien
tctgcaaagcgcgtgaacttccgtg

SEQ ID NO: 492255 - DNA, 25 bp, Homo sapien
gggttttcccgcctcagcgattgaa

SEQ ID NO: 492256 - DNA, 25 bp, Homo sapien
tgtggtgatatggttccaagcctga

SEQ ID NO: 492257 - DNA, 25 bp, Homo sapien
tgaccgccacaattgagtcctcagc

SEQ ID NO: 492258 - DNA, 25 bp, Homo sapien
ggctcttcgctttgtggctgtcccc

SEQ ID NO: 492259 - DNA, 25 bp, Homo sapien
gtggcttgctgtctacactctcctg

SEQ ID NO: 492260 - DNA, 25 bp, Homo sapien
ccccgcatacgctggcacatgtggc

SEQ ID NO: 492261 - DNA, 25 bp, Homo sapien
tagtagtataggacaagagtgccag

SEQ ID NO: 492262 - DNA, 25 bp, Homo sapien
gccagggcagcaagaaaagtttaaa

SEQ ID NO: 492263 - DNA, 25 bp, Homo sapien
cgtgagagagcaatcagcagcatga

SEQ ID NO: 492264 - DNA, 25 bp, Homo sapien
taaagctaagtcaacagaggaatcg

SEQ ID NO: 492265 - DNA, 25 bp, Homo sapien
gcttagccctaaacctcaacagtta

SEQ ID NO: 492266 - DNA, 25 bp, Homo sapien
ctggcggtgcttcatatccctctag

SEQ ID NO: 492267 - DNA, 25 bp, Homo sapien
tcaacagttaaatcaacaaaactgc

SEQ ID NO: 492268 - DNA, 25 bp, Homo sapien
aaactgctcgccagaacactacgag

SEQ ID NO: 492269 - DNA, 25 bp, Homo sapien
caatgaaggcattggtacaagttcc

SEQ ID NO: 492270 - DNA, 25 bp, Homo sapien
tggcactggcagaattttgtcgaat

SEQ ID NO: 492271 - DNA, 25 bp, Homo sapien
tacaagttcccatggccactactgc

SEQ ID NO: 492272 - DNA, 25 bp, Homo sapien
aaaaattcagcaccacaatgaaggc

SEQ ID NO: 492273 - DNA, 25 bp, Homo sapien
cagtaattattagctaatatgatgc

SEQ ID NO: 492274 - DNA, 25 bp, Homo sapien
aattattagctaatatgatgctgat

SEQ ID NO: 492275 - DNA, 25 bp, Homo sapien
acagtaattattagctaatatgatg

SEQ ID NO: 492276 - DNA, 25 bp, Homo sapien
gtaattattagctaatatgatgctg

SEQ ID NO: 492277 - DNA, 25 bp, Homo sapien
cccaggatggtcagtagttaggaaa

SEQ ID NO: 492278 - DNA, 25 bp, Homo sapien
acctgacaggtatgcccattatggc

SEQ ID NO: 492279 - DNA, 25 bp, Homo sapien
tgtgtaactgtcgaatgatcatgcc

SEQ ID NO: 492280 - DNA, 25 bp, Homo sapien
cattatggcagtaggtctctttctc

SEQ ID NO: 492281 - DNA, 25 bp, Homo sapien
caaaggaccacagaatgttgaccac

SEQ ID NO: 492282 - DNA, 25 bp, Homo sapien
cggaggcgtggctgacagaatatca

SEQ ID NO: 492283 - DNA, 25 bp, Homo sapien
gaatccagaacccaaactccagtga

SEQ ID NO: 492284 - DNA, 25 bp, Homo sapien
tatgaggagatacaaactgaggagc

SEQ ID NO: 492285 - DNA, 25 bp, Homo sapien
catctcctggtatctcagggatgct

SEQ ID NO: 492286 - DNA, 25 bp, Homo sapien
ttagtggcaaaagatgttggtgtcc

SEQ ID NO: 492287 - DNA, 25 bp, Homo sapien
tgatttccgctgtgtctgatgccaa

SEQ ID NO: 492288 - DNA, 25 bp, Homo sapien
gatgccaatagcctctgcctttctt

SEQ ID NO: 492289 - DNA, 25 bp, Homo sapien
cagtactagggcatgggagaacttg

SEQ ID NO: 492290 - DNA, 25 bp, Homo sapien
agcttgggtctggaatatgggcact

SEQ ID NO: 492291 - DNA, 25 bp, Homo sapien
ttgggtctggaatatgggcacttgt

SEQ ID NO: 492292 - DNA, 25 bp, Homo sapien
aaagtgaggctccagtactagggca

SEQ ID NO: 492293 - DNA, 25 bp, Homo sapien
tcatccgcgtacagctctaagcaac

SEQ ID NO: 492294 - DNA, 25 bp, Homo sapien
aaatagtattcatccgcgtacagct

SEQ ID NO: 492295 - DNA, 25 bp, Homo sapien
catttcacggcaaacatagaaatag

SEQ ID NO: 492296 - DNA, 25 bp, Homo sapien
cccaaccatttcacggcaaacatag

SEQ ID NO: 492297 - DNA, 25 bp, Homo sapien
cgttctctgtcagattttgagaagc

SEQ ID NO: 492298 - DNA, 25 bp, Homo sapien
tggccaggtgtgtagctctcgttct

SEQ ID NO: 492299 - DNA, 25 bp, Homo sapien
gacttgtgtaactgtctccagcctg

SEQ ID NO: 492300 - DNA, 25 bp, Homo sapien
ttgagaagcctgcttatgactggac

SEQ ID NO: 492301 - DNA, 25 bp, Homo sapien
ctcccaggacacacattggtaaggc

SEQ ID NO: 492302 - DNA, 25 bp, Homo sapien
gatgcctgcagcatatcaggttgag

SEQ ID NO: 492303 - DNA, 25 bp, Homo sapien
ccattttgtgaaacgctggccgtgg

SEQ ID NO: 492304 - DNA, 25 bp, Homo sapien
tatacagtctgaatatcaccctctg

SEQ ID NO: 492305 - DNA, 25 bp, Homo sapien
acgtgagggccagatatatggttga

SEQ ID NO: 492306 - DNA, 25 bp, Homo sapien
ttatccccagtactgtggcccatgc

SEQ ID NO: 492307 - DNA, 25 bp, Homo sapien
aacaaaacatatcaactcgagcttt

SEQ ID NO: 492308 - DNA, 25 bp, Homo sapien
cccatgcctcaagttctgtggacaa

SEQ ID NO: 492309 - DNA, 25 bp, Homo sapien
gcttgatgaaatcagtgctcagaac

SEQ ID NO: 492310 - DNA, 25 bp, Homo sapien
tgttgcctccatcggcttgatgaaa

SEQ ID NO: 492311 - DNA, 25 bp, Homo sapien
gcctccatcggcttgatgaaatcag

SEQ ID NO: 492312 - DNA, 25 bp, Homo sapien
tgcctccatcggcttgatgaaatca

SEQ ID NO: 492313 - DNA, 25 bp, Homo sapien
tcttttctcgagtttgctgatgtct

SEQ ID NO: 492314 - DNA, 25 bp, Homo sapien
tttctcgagtttgctgatgtctgta

SEQ ID NO: 492315 - DNA, 25 bp, Homo sapien
ttctcgagtttgctgatgtctgtag

SEQ ID NO: 492316 - DNA, 25 bp, Homo sapien
cttttctcgagtttgctgatgtctg

SEQ ID NO: 492317 - DNA, 25 bp, Homo sapien
cgaatgtcattgagaatgggcagac

SEQ ID NO: 492318 - DNA, 25 bp, Homo sapien
aaggattaggatttggccctctggc

SEQ ID NO: 492319 - DNA, 25 bp, Homo sapien
cacagacgccttttgggactgggct

SEQ ID NO: 492320 - DNA, 25 bp, Homo sapien
tattagggtgaagacatccatgtca

SEQ ID NO: 492321 - DNA, 25 bp, Homo sapien
cagcttctgcatagttgctttggga

SEQ ID NO: 492322 - DNA, 25 bp, Homo sapien
tgaacaaggatttccatgtctagga

SEQ ID NO: 492323 - DNA, 25 bp, Homo sapien
taggattaaacctatttcagcttct

SEQ ID NO: 492324 - DNA, 25 bp, Homo sapien
ttggaaggcatgatatgaacaagga

SEQ ID NO: 492325 - DNA, 25 bp, Homo sapien
ctcctccgtagccatggtaatattt

SEQ ID NO: 492326 - DNA, 25 bp, Homo sapien
taatatttcccacatgccacaagtc

SEQ ID NO: 492327 - DNA, 25 bp, Homo sapien
cgtagccatggtaatatttcccaca

SEQ ID NO: 492328 - DNA, 25 bp, Homo sapien
catggtaatatttcccacatgccac

SEQ ID NO: 492329 - DNA, 25 bp, Homo sapien
acttgaatatcccttttacatctct

SEQ ID NO: 492330 - DNA, 25 bp, Homo sapien
atctctggtccgttttagaaatttg

SEQ ID NO: 492331 - DNA, 25 bp, Homo sapien
gtttatacaggactttatacttgaa

SEQ ID NO: 492332 - DNA, 25 bp, Homo sapien
gacacggatcggtcccgtatgacag

SEQ ID NO: 492333 - DNA, 25 bp, Homo sapien
cgtatgacagcgtcttcttcctgtg

SEQ ID NO: 492334 - DNA, 25 bp, Homo sapien
tgatgacttcatgtggacacggatc

SEQ ID NO: 492335 - DNA, 25 bp, Homo sapien
ttaatctttgataagtgcaggctcc

SEQ ID NO: 492336 - DNA, 25 bp, Homo sapien
ctgctgtgacagtcaccaagctggc

SEQ ID NO: 492337 - DNA, 25 bp, Homo sapien
tgtgacagtcaccaagctggccatg

SEQ ID NO: 492338 - DNA, 25 bp, Homo sapien
gctgtgacagtcaccaagctggcca

SEQ ID NO: 492339 - DNA, 25 bp, Homo sapien
tgacagtcaccaagctggccatgct

SEQ ID NO: 492340 - DNA, 25 bp, Homo sapien
tagcttggcactcaaagtctaagga

SEQ ID NO: 492341 - DNA, 25 bp, Homo sapien
gggctcacccatgacctttagaaga

SEQ ID NO: 492342 - DNA, 25 bp, Homo sapien
ggaattcttcatcccgtgctccagg

SEQ ID NO: 492343 - DNA, 25 bp, Homo sapien
tacatcctgtggactatcgtggagg

SEQ ID NO: 492344 - DNA, 25 bp, Homo sapien
tgtgccaaggatcagtgtctggtgg

SEQ ID NO: 492345 - DNA, 25 bp, Homo sapien
agtgtatcaaatagtggctgtgcca

SEQ ID NO: 492346 - DNA, 25 bp, Homo sapien
tcatttcctgggttgagatctaaaa

SEQ ID NO: 492347 - DNA, 25 bp, Homo sapien
gagatctaaaatcctgagcagagtt

SEQ ID NO: 492348 - DNA, 25 bp, Homo sapien
attgtttgcacacctatttcaagca

SEQ ID NO: 492349 - DNA, 25 bp, Homo sapien
gaattgtttgcacacctatttcaag

SEQ ID NO: 492350 - DNA, 25 bp, Homo sapien
gtgaattgtttgcacacctatttca

SEQ ID NO: 492351 - DNA, 25 bp, Homo sapien
aattgtttgcacacctatttcaagc

SEQ ID NO: 492352 - DNA, 25 bp, Homo sapien
gggacccgtccatagcacggatggc

SEQ ID NO: 492353 - DNA, 25 bp, Homo sapien
caattggggggacccgtccatagca

SEQ ID NO: 492354 - DNA, 25 bp, Homo sapien
catagcacggatggcgctgcttccg

SEQ ID NO: 492355 - DNA, 25 bp, Homo sapien
ccccgagaccgctgccaattggggg

SEQ ID NO: 492356 - DNA, 25 bp, Homo sapien
tgttcagcaagcactcgatcagagg

SEQ ID NO: 492357 - DNA, 25 bp, Homo sapien
catcgttcctgccttgagtcactct

SEQ ID NO: 492358 - DNA, 25 bp, Homo sapien
gagtcactctcaagctaatcagcgt

SEQ ID NO: 492359 - DNA, 25 bp, Homo sapien
tcagaggctgttctacgacaagggc

SEQ ID NO: 492360 - DNA, 25 bp, Homo sapien
tgccaagaacatcatgcagtttggg

SEQ ID NO: 492361 - DNA, 25 bp, Homo sapien
gcttcctctcgttctatcttctgca

SEQ ID NO: 492362 - DNA, 25 bp, Homo sapien
ccactcctctgtggtctggggattt

SEQ ID NO: 492363 - DNA, 25 bp, Homo sapien
atcttctgcagataccactcctctg

SEQ ID NO: 492364 - DNA, 25 bp, Homo sapien
ccgatatgcttctggatactggaga

SEQ ID NO: 492365 - DNA, 25 bp, Homo sapien
tgggcgagtcagctactttataagt

SEQ ID NO: 492366 - DNA, 25 bp, Homo sapien
catagtccaacgtggctcctgaagc

SEQ ID NO: 492367 - DNA, 25 bp, Homo sapien
ctggctttatccacaagaaaggtga

SEQ ID NO: 492368 - DNA, 25 bp, Homo sapien
ctgagcggtcagatgactcacagcc

SEQ ID NO: 492369 - DNA, 25 bp, Homo sapien
gcggtcagatgactcacagcctttc

SEQ ID NO: 492370 - DNA, 25 bp, Homo sapien
agatgactcacagcctttccgctgc

SEQ ID NO: 492371 - DNA, 25 bp, Homo sapien
ggtcagatgactcacagcctttccg

SEQ ID NO: 492372 - DNA, 25 bp, Homo sapien
gagagtgcacccgtacctatggaag

SEQ ID NO: 492373 - DNA, 25 bp, Homo sapien
ttggcaaagcagatataaccctcag

SEQ ID NO: 492374 - DNA, 25 bp, Homo sapien
ccagtgtgtggcagttctcgcagat

SEQ ID NO: 492375 - DNA, 25 bp, Homo sapien
aaaaatccctgtaggcgtgctagca

SEQ ID NO: 492376 - DNA, 25 bp, Homo sapien
cgaagccagaagctgcccgcgtggc

SEQ ID NO: 492377 - DNA, 25 bp, Homo sapien
cctccgtggaaaatgtctctctcag

SEQ ID NO: 492378 - DNA, 25 bp, Homo sapien
gatggcttttggtgtggccgccacc

SEQ ID NO: 492379 - DNA, 25 bp, Homo sapien
gcggcgccaaggtcatccgcgcaga

SEQ ID NO: 492380 - DNA, 25 bp, Homo sapien
aagagccccggcgagtacatcaaca

SEQ ID NO: 492381 - DNA, 25 bp, Homo sapien
gactacatgaacctcgacttcagct

SEQ ID NO: 492382 - DNA, 25 bp, Homo sapien
gtgggctccttggacggcctcctgt

SEQ ID NO: 492383 - DNA, 25 bp, Homo sapien
tcaacatcgactttggcgagcccgg

SEQ ID NO: 492384 - DNA, 25 bp, Homo sapien
gaccagtacgtgctcatgagctccc

SEQ ID NO: 492385 - DNA, 25 bp, Homo sapien
gggacagcgaccagtacgtgctcat

SEQ ID NO: 492386 - DNA, 25 bp, Homo sapien
gacagcgaccagtacgtgctcatga

SEQ ID NO: 492387 - DNA, 25 bp, Homo sapien
cagcgaccagtacgtgctcatgagc

SEQ ID NO: 492388 - DNA, 25 bp, Homo sapien
tcaaggagctcttcgagttccggcc

SEQ ID NO: 492389 - DNA, 25 bp, Homo sapien
ttccggccgcgcagtaagagccaat

SEQ ID NO: 492390 - DNA, 25 bp, Homo sapien
tgacgctgcagctcatgaacatccg

SEQ ID NO: 492391 - DNA, 25 bp, Homo sapien
tgaagctcaactgcgagcagccgtc

SEQ ID NO: 492392 - DNA, 25 bp, Homo sapien
caggtgaacctgaagcccaagggtc

SEQ ID NO: 492393 - DNA, 25 bp, Homo sapien
gtgtggcaggtgaacctgaagccca

SEQ ID NO: 492394 - DNA, 25 bp, Homo sapien
gagcaagaacctgacgggggtgtac

SEQ ID NO: 492395 - DNA, 25 bp, Homo sapien
ggtgtaccgtctgtgcctgtctgcg

SEQ ID NO: 492396 - DNA, 25 bp, Homo sapien
agtacttcgccgtggccgccgagaa

SEQ ID NO: 492397 - DNA, 25 bp, Homo sapien
aaggacgagtacttcgccgtggccg

SEQ ID NO: 492398 - DNA, 25 bp, Homo sapien
ctacaccaaggacgagtacttcgcc

SEQ ID NO: 492399 - DNA, 25 bp, Homo sapien
caccaaggacgagtacttcgccgtg

SEQ ID NO: 492400 - DNA, 25 bp, Homo sapien
tattacctcccaaacgcgatttcaa

SEQ ID NO: 492401 - DNA, 25 bp, Homo sapien
gcgatttcaacttcccgacaagctg

SEQ ID NO: 492402 - DNA, 25 bp, Homo sapien
tatggaaaccgcactttctccgcct

SEQ ID NO: 492403 - DNA, 25 bp, Homo sapien
cccggcgctatggaaaccgcacttt

SEQ ID NO: 492404 - DNA, 25 bp, Homo sapien
tcattgaggagacgtaattgcaggg

SEQ ID NO: 492405 - DNA, 25 bp, Homo sapien
tcttcgttgcgcaggatcgggagct

SEQ ID NO: 492406 - DNA, 25 bp, Homo sapien
gagcttgctgggatctgaactcagg

SEQ ID NO: 492407 - DNA, 25 bp, Homo sapien
gtcacaaaagcccagtagatacatg

SEQ ID NO: 492408 - DNA, 25 bp, Homo sapien
ggaaaagatgacacctgctagcgtg

SEQ ID NO: 492409 - DNA, 25 bp, Homo sapien
ctttaacactaggatggccccaaga

SEQ ID NO: 492410 - DNA, 25 bp, Homo sapien
cattgtctactgatggctggcaaca

SEQ ID NO: 492411 - DNA, 25 bp, Homo sapien
gaaagtgctaactgccaatccagag

SEQ ID NO: 492412 - DNA, 25 bp, Homo sapien
aactccctgctgaaagatatggcca

SEQ ID NO: 492413 - DNA, 25 bp, Homo sapien
tcttggaccatgagaaaaaatttca

SEQ ID NO: 492414 - DNA, 25 bp, Homo sapien
aaatactgtcaaacacctacagggc

SEQ ID NO: 492415 - DNA, 25 bp, Homo sapien
gcttccaaggaaagatcttggacca

SEQ ID NO: 492416 - DNA, 25 bp, Homo sapien
catagcatatacacggaggctcaga

SEQ ID NO: 492417 - DNA, 25 bp, Homo sapien
gaaatctctacttaacagtcagcgg

SEQ ID NO: 492418 - DNA, 25 bp, Homo sapien
tcagcgggaaatggcaataaatggc

SEQ ID NO: 492419 - DNA, 25 bp, Homo sapien
taaaagaccgctcaattctcagttg

SEQ ID NO: 492420 - DNA, 25 bp, Homo sapien
tcccatgctttctgagtctcagcct

SEQ ID NO: 492421 - DNA, 25 bp, Homo sapien
tcggattcttctcgttctccaatgt

SEQ ID NO: 492422 - DNA, 25 bp, Homo sapien
tctgctaaatagcactttgaattca

SEQ ID NO: 492423 - DNA, 25 bp, Homo sapien
tctgctcccggaggataatgcttat

SEQ ID NO: 492424 - DNA, 25 bp, Homo sapien
taggtagcaagggataattcatttc

SEQ ID NO: 492425 - DNA, 25 bp, Homo sapien
ttagctcttggaaggtaggcttcca

SEQ ID NO: 492426 - DNA, 25 bp, Homo sapien
tcattgaaatgagggttttctactc

SEQ ID NO: 492427 - DNA, 25 bp, Homo sapien
gtagcaagggataattcatttccat

SEQ ID NO: 492428 - DNA, 25 bp, Homo sapien
tcttttcaagtgcaccccaggtgat

SEQ ID NO: 492429 - DNA, 25 bp, Homo sapien
catgcatgtgctatgaggtagtctg

SEQ ID NO: 492430 - DNA, 25 bp, Homo sapien
cctcttaggacaatcaagtggcagc

SEQ ID NO: 492431 - DNA, 25 bp, Homo sapien
gcccaaagctaccttcagaaagaag

SEQ ID NO: 492432 - DNA, 25 bp, Homo sapien
tcttcttgaggccacgggatacact

SEQ ID NO: 492433 - DNA, 25 bp, Homo sapien
tcagaaacaaccgttagtgggacag

SEQ ID NO: 492434 - DNA, 25 bp, Homo sapien
tgttcttacatgaaccccaggtgct

SEQ ID NO: 492435 - DNA, 25 bp, Homo sapien
tttcggataactgggagctgcctgc

SEQ ID NO: 492436 - DNA, 25 bp, Homo sapien
gcatctgtcgggtgttttggaagca

SEQ ID NO: 492437 - DNA, 25 bp, Homo sapien
tagcccggtcatactgggtagcaac

SEQ ID NO: 492438 - DNA, 25 bp, Homo sapien
cacaaagtgctgcacacaggaggcc

SEQ ID NO: 492439 - DNA, 25 bp, Homo sapien
gggtagcaacagaccgagccaaatg

SEQ ID NO: 492440 - DNA, 25 bp, Homo sapien
catggaagtgttgaaccgctgctta

SEQ ID NO: 492441 - DNA, 25 bp, Homo sapien
gtttcaaggaagaccagtcagcatg

SEQ ID NO: 492442 - DNA, 25 bp, Homo sapien
cagcctccggaacagtgacagaatc

SEQ ID NO: 492443 - DNA, 25 bp, Homo sapien
cactgagacacgcttgagggaggaa

SEQ ID NO: 492444 - DNA, 25 bp, Homo sapien
tgggcttttgagacagaacaaggct

SEQ ID NO: 492445 - DNA, 25 bp, Homo sapien
gcttagcagccatgtgaccacgaaa

SEQ ID NO: 492446 - DNA, 25 bp, Homo sapien
tagggaatcggttggaatccagctc

SEQ ID NO: 492447 - DNA, 25 bp, Homo sapien
cagctgatgttcaatggatttggcc

SEQ ID NO: 492448 - DNA, 25 bp, Homo sapien
ttcgagtgactttagtggaagacca

SEQ ID NO: 492449 - DNA, 25 bp, Homo sapien
ggaagaccaacactttctaccgcat

SEQ ID NO: 492450 - DNA, 25 bp, Homo sapien
tctcttccctggaggatgacggtgc

SEQ ID NO: 492451 - DNA, 25 bp, Homo sapien
gaaccgcagatgctgggtaatgacg

SEQ ID NO: 492452 - DNA, 25 bp, Homo sapien
tttctaaaggttcatgtccgtcagg

SEQ ID NO: 492453 - DNA, 25 bp, Homo sapien
ggacatgttctcttcctaaagacgg

SEQ ID NO: 492454 - DNA, 25 bp, Homo sapien
ccatcagggttaaatctggacatgt

SEQ ID NO: 492455 - DNA, 25 bp, Homo sapien
gattcaggttcgtgtccatcagggt

SEQ ID NO: 492456 - DNA, 25 bp, Homo sapien
ttagcttagggatggtcgcctccct

SEQ ID NO: 492457 - DNA, 25 bp, Homo sapien
ccctgctggccttctcgaaggtctg

SEQ ID NO: 492458 - DNA, 25 bp, Homo sapien
aggtctgcgtgaacacagcccttgg

SEQ ID NO: 492459 - DNA, 25 bp, Homo sapien
cttagggatggtcgcctccctggaa

SEQ ID NO: 492460 - DNA, 25 bp, Homo sapien
gttcttgtgtgtagctatcctgggc

SEQ ID NO: 492461 - DNA, 25 bp, Homo sapien
catttccaccagcaacgcttgaggg

SEQ ID NO: 492462 - DNA, 25 bp, Homo sapien
gaacattccattcgaggatcagaga

SEQ ID NO: 492463 - DNA, 25 bp, Homo sapien
tgagtaatacccttgaacacgtgta

SEQ ID NO: 492464 - DNA, 25 bp, Homo sapien
cattgcctgcacagggagggtctcc

SEQ ID NO: 492465 - DNA, 25 bp, Homo sapien
tcattgcctggcaacgtgctggtgc

SEQ ID NO: 492466 - DNA, 25 bp, Homo sapien
tgcaccaagtggtctgcacgcagca

SEQ ID NO: 492467 - DNA, 25 bp, Homo sapien
ccgtctgtgagcgaatggcgctgcc

SEQ ID NO: 492468 - DNA, 25 bp, Homo sapien
ccagcactgtcttgacctcagaagg

SEQ ID NO: 492469 - DNA, 25 bp, Homo sapien
ggagtgactccgagagacgcccagc

SEQ ID NO: 492470 - DNA, 25 bp, Homo sapien
cagcagccgtggttgtgaaatgact

SEQ ID NO: 492471 - DNA, 25 bp, Homo sapien
tgagagaacagacgaaaagataggg

SEQ ID NO: 492472 - DNA, 25 bp, Homo sapien
agcacctttacaggccatggagatg

SEQ ID NO: 492473 - DNA, 25 bp, Homo sapien
tccttagcaacgtcaccaagctgtc

SEQ ID NO: 492474 - DNA, 25 bp, Homo sapien
tctgaccaccagtagccaggtttgg

SEQ ID NO: 492475 - DNA, 25 bp, Homo sapien
gggccacctggaacaaccctgtgag

SEQ ID NO: 492476 - DNA, 25 bp, Homo sapien
cagtcctccacggcctccatgtggg

SEQ ID NO: 492477 - DNA, 25 bp, Homo sapien
ggcagtcctccacggcctccatgtg

SEQ ID NO: 492478 - DNA, 25 bp, Homo sapien
tcctccacggcctccatgtgggaga

SEQ ID NO: 492479 - DNA, 25 bp, Homo sapien
ctccacggcctccatgtgggagaag

SEQ ID NO: 492480 - DNA, 25 bp, Homo sapien
gagacatctaagtccaaagcttccc

SEQ ID NO: 492481 - DNA, 25 bp, Homo sapien
cagctcatggtgataagatattcgc

SEQ ID NO: 492482 - DNA, 25 bp, Homo sapien
cctacttgtttcacaaagtggatgc

SEQ ID NO: 492483 - DNA, 25 bp, Homo sapien
tctaagtctatcctgtgcctggcca

SEQ ID NO: 492484 - DNA, 25 bp, Homo sapien
aatgggacctctgatgattgtagcc

SEQ ID NO: 492485 - DNA, 25 bp, Homo sapien
ctcatgttcgcagtgcctcgggcag

SEQ ID NO: 492486 - DNA, 25 bp, Homo sapien
tccagtcactccatcatgaggaagc

SEQ ID NO: 492487 - DNA, 25 bp, Homo sapien
ttcttgacaaccttccactgagagg

SEQ ID NO: 492488 - DNA, 25 bp, Homo sapien
taagcgggtgttcgctggagcaccc

SEQ ID NO: 492489 - DNA, 25 bp, Homo sapien
gccagtgtgtatgtgtccggtgcca

SEQ ID NO: 492490 - DNA, 25 bp, Homo sapien
gatcaatgaatcctggtaagcgggt

SEQ ID NO: 492491 - DNA, 25 bp, Homo sapien
tgcagccctggtacctaatatacag

SEQ ID NO: 492492 - DNA, 25 bp, Homo sapien
tcatcgtactggggatcagaggccc

SEQ ID NO: 492493 - DNA, 25 bp, Homo sapien
gtcatcgtactggggatcagaggcc

SEQ ID NO: 492494 - DNA, 25 bp, Homo sapien
catcgtactggggatcagaggccct

SEQ ID NO: 492495 - DNA, 25 bp, Homo sapien
gtgcgtccgctgataactgaaccat

SEQ ID NO: 492496 - DNA, 25 bp, Homo sapien
tgcgcatacactcatcctgaagagg

SEQ ID NO: 492497 - DNA, 25 bp, Homo sapien
ctgtagagagggtcttctcagtacc

SEQ ID NO: 492498 - DNA, 25 bp, Homo sapien
tgtgtctcacgtgattcccaagtat

SEQ ID NO: 492499 - DNA, 25 bp, Homo sapien
taatattcatacagggctgttgcac

SEQ ID NO: 492500 - DNA, 25 bp, Homo sapien
cagggctgttgcactcatgaatgga

SEQ ID NO: 492501 - DNA, 25 bp, Homo sapien
ttcatacagggctgttgcactcatg

SEQ ID NO: 492502 - DNA, 25 bp, Homo sapien
tataatattcatacagggctgttgc

SEQ ID NO: 492503 - DNA, 25 bp, Homo sapien
atcagccgatgcaaccctagcgatc

SEQ ID NO: 492504 - DNA, 25 bp, Homo sapien
cgatgcaaccctagcgatcagtggg

SEQ ID NO: 492505 - DNA, 25 bp, Homo sapien
cttcctctatcgcggatggttttcc

SEQ ID NO: 492506 - DNA, 25 bp, Homo sapien
gccagatcagccgatgcaaccctag

SEQ ID NO: 492507 - DNA, 25 bp, Homo sapien
cctgtttgggttgggagctctctga

SEQ ID NO: 492508 - DNA, 25 bp, Homo sapien
gctgggggtggagcacatggcgtgg

SEQ ID NO: 492509 - DNA, 25 bp, Homo sapien
aaggcaagatcaccaagctgggggt

SEQ ID NO: 492510 - DNA, 25 bp, Homo sapien
gctctctgaaggcaagatcaccaag

SEQ ID NO: 492511 - DNA, 25 bp, Homo sapien
cattatctaaggtctttcttaggtg

SEQ ID NO: 492512 - DNA, 25 bp, Homo sapien
tgaacgaaagtcagtcaaagtttgt

SEQ ID NO: 492513 - DNA, 25 bp, Homo sapien
cctgccatcgccagaaacattatct

SEQ ID NO: 492514 - DNA, 25 bp, Homo sapien
gaaagtgccatggactgaacgaaag

SEQ ID NO: 492515 - DNA, 25 bp, Homo sapien
ggtctattagacactgatgccagct

SEQ ID NO: 492516 - DNA, 25 bp, Homo sapien
taggactgcacacaacagaaaagcc

SEQ ID NO: 492517 - DNA, 25 bp, Homo sapien
cctggacagtgggatcagagctatc

SEQ ID NO: 492518 - DNA, 25 bp, Homo sapien
gctatcattggctaggctctcccag

SEQ ID NO: 492519 - DNA, 25 bp, Homo sapien
ttcctgggcggctagagcctggact

SEQ ID NO: 492520 - DNA, 25 bp, Homo sapien
gagcagcatcgtggtcctcaagcct

SEQ ID NO: 492521 - DNA, 25 bp, Homo sapien
gactctcaatgcagcagtaaacgga

SEQ ID NO: 492522 - DNA, 25 bp, Homo sapien
cagggacatggcttgactgacgagt

SEQ ID NO: 492523 - DNA, 25 bp, Homo sapien
tggctagcaggcgaatatctctcag

SEQ ID NO: 492524 - DNA, 25 bp, Homo sapien
gtgtgatcctgcacgtcccagaagg

SEQ ID NO: 492525 - DNA, 25 bp, Homo sapien
tatctctcagaggatgcacgggctg

SEQ ID NO: 492526 - DNA, 25 bp, Homo sapien
gagagacttttctgactccaggccc

SEQ ID NO: 492527 - DNA, 25 bp, Homo sapien
gtctgcgagccggagatgtcctccg

SEQ ID NO: 492528 - DNA, 25 bp, Homo sapien
gatgtcctccgcgtattcccggtga

SEQ ID NO: 492529 - DNA, 25 bp, Homo sapien
cctgcatggggctgaatggttctgt

SEQ ID NO: 492530 - DNA, 25 bp, Homo sapien
gtgacaacgatgtggcctgtgagcc

SEQ ID NO: 492531 - DNA, 25 bp, Homo sapien
acttttctgttgcccttcattatat

SEQ ID NO: 492532 - DNA, 25 bp, Homo sapien
tcagcgatgctacgagcaatgtgct

SEQ ID NO: 492533 - DNA, 25 bp, Homo sapien
ctttcagagtagatagtggattcac

SEQ ID NO: 492534 - DNA, 25 bp, Homo sapien
ggatttcagtcaacagaggagagat

SEQ ID NO: 492535 - DNA, 25 bp, Homo sapien
ttaatccttgcggagttctcagcga

SEQ ID NO: 492536 - DNA, 25 bp, Homo sapien
cacattccacgctcactgggacgtt

SEQ ID NO: 492537 - DNA, 25 bp, Homo sapien
tcccaaaacggcatacagaacatgt

SEQ ID NO: 492538 - DNA, 25 bp, Homo sapien
tctccggtaaaaagcgaactcagtc

SEQ ID NO: 492539 - DNA, 25 bp, Homo sapien
ccatgctctttggaaacgagtgcct

SEQ ID NO: 492540 - DNA, 25 bp, Homo sapien
gagtggctgcttgttatctataggg

SEQ ID NO: 492541 - DNA, 25 bp, Homo sapien
tgagtcctggtgcagttaggtggct

SEQ ID NO: 492542 - DNA, 25 bp, Homo sapien
tagagagaatcttgtaggggacaca

SEQ ID NO: 492543 - DNA, 25 bp, Homo sapien
ttcccgctgcctgcggcagtagaga

SEQ ID NO: 492544 - DNA, 25 bp, Homo sapien
tgaccgccacgtcttctttttgact

SEQ ID NO: 492545 - DNA, 25 bp, Homo sapien
ttttgactaagcactggggaattcg

SEQ ID NO: 492546 - DNA, 25 bp, Homo sapien
ttcgatgggttatagatgttgacgc

SEQ ID NO: 492547 - DNA, 25 bp, Homo sapien
tgacgcatcttactcttggacattg

SEQ ID NO: 492548 - DNA, 25 bp, Homo sapien
ctgtgccactgcagctagttcagcc

SEQ ID NO: 492549 - DNA, 25 bp, Homo sapien
gatggacttgcttctcgggcctctc

SEQ ID NO: 492550 - DNA, 25 bp, Homo sapien
tgtagacttctgtggtagcagctgc

SEQ ID NO: 492551 - DNA, 25 bp, Homo sapien
ctgagcacctagagatggacttgct

SEQ ID NO: 492552 - DNA, 25 bp, Homo sapien
tagcccatttccgaggataacaatg

SEQ ID NO: 492553 - DNA, 25 bp, Homo sapien
gaatgttgtctgttgatggagctgc

SEQ ID NO: 492554 - DNA, 25 bp, Homo sapien
ggctgttaccctttgagcagcgata

SEQ ID NO: 492555 - DNA, 25 bp, Homo sapien
tcatcctcagtggtggtcacaacct

SEQ ID NO: 492556 - DNA, 25 bp, Homo sapien
tggagcgtgcttagtgattcgtaca

SEQ ID NO: 492557 - DNA, 25 bp, Homo sapien
cctctctgcattaggacttggtgcg

SEQ ID NO: 492558 - DNA, 25 bp, Homo sapien
tccaataaggatggtgaggtactgc

SEQ ID NO: 492559 - DNA, 25 bp, Homo sapien
gattcgtacatgagagggcaagagc

SEQ ID NO: 492560 - DNA, 25 bp, Homo sapien
gaagctgaccataccttgtggatag

SEQ ID NO: 492561 - DNA, 25 bp, Homo sapien
tgtccacagaatgtcggttcagcct

SEQ ID NO: 492562 - DNA, 25 bp, Homo sapien
gaacaacccctcttgcacaggagaa

SEQ ID NO: 492563 - DNA, 25 bp, Homo sapien
cctcttcattggatgccctgggcat

SEQ ID NO: 492564 - DNA, 25 bp, Homo sapien
agagcacattgagaatatgcactct

SEQ ID NO: 492565 - DNA, 25 bp, Homo sapien
gtctgtaccctgcttactcctttct

SEQ ID NO: 492566 - DNA, 25 bp, Homo sapien
aaagagcacattgagaatatgcact

SEQ ID NO: 492567 - DNA, 25 bp, Homo sapien
ctgtaccctgcttactcctttctgg

SEQ ID NO: 492568 - DNA, 25 bp, Homo sapien
tctgtgctgttctcaacaccagggt

SEQ ID NO: 492569 - DNA, 25 bp, Homo sapien
ctgtgctgttctcaacaccagggtc

SEQ ID NO: 492570 - DNA, 25 bp, Homo sapien
aggaggaggctgagatgttcttttc

SEQ ID NO: 492571 - DNA, 25 bp, Homo sapien
aaggaggaggctgagatgttctttt

SEQ ID NO: 492572 - DNA, 25 bp, Homo sapien
ggaggaggctgagatgttcttttcc

SEQ ID NO: 492573 - DNA, 25 bp, Homo sapien
tatcccttcggtgatggacggccgc

SEQ ID NO: 492574 - DNA, 25 bp, Homo sapien
ccaagtgtggagaacgggatctgcc

SEQ ID NO: 492575 - DNA, 25 bp, Homo sapien
gacggccgcatcaaggagtgtttct

SEQ ID NO: 492576 - DNA, 25 bp, Homo sapien
aatgtgatctaccaaggcctctgga

SEQ ID NO: 492577 - DNA, 25 bp, Homo sapien
gggacttcagagagtgactatttgg

SEQ ID NO: 492578 - DNA, 25 bp, Homo sapien
ctgggacttcagagagtgactattt

SEQ ID NO: 492579 - DNA, 25 bp, Homo sapien
tgggacttcagagagtgactatttg

SEQ ID NO: 492580 - DNA, 25 bp, Homo sapien
tgtgggaatgagcagacgaggactt

SEQ ID NO: 492581 - DNA, 25 bp, Homo sapien
gaatgtgggaatgagcagacgagga

SEQ ID NO: 492582 - DNA, 25 bp, Homo sapien
gggaatgagcagacgaggacttaaa

SEQ ID NO: 492583 - DNA, 25 bp, Homo sapien
tgggaatgtgggaatgagcagacga

SEQ ID NO: 492584 - DNA, 25 bp, Homo sapien
agccagtcccaccgataaattcact

SEQ ID NO: 492585 - DNA, 25 bp, Homo sapien
ccacagctccaacgacagagtgcag

SEQ ID NO: 492586 - DNA, 25 bp, Homo sapien
gaccaagcaaaactcagcagccctt

SEQ ID NO: 492587 - DNA, 25 bp, Homo sapien
gaagcctgcgaaagtcagccagtcc

SEQ ID NO: 492588 - DNA, 25 bp, Homo sapien
gattcgacagtcactatgagaccag

SEQ ID NO: 492589 - DNA, 25 bp, Homo sapien
gaatctattgcttaggctcctgtgg

SEQ ID NO: 492590 - DNA, 25 bp, Homo sapien
gagaggaatccaactaggtgcattt

SEQ ID NO: 492591 - DNA, 25 bp, Homo sapien
gagtcaaatggaaggaatcgaatct

SEQ ID NO: 492592 - DNA, 25 bp, Homo sapien
tcagatcagtggacaccgtgaggac

SEQ ID NO: 492593 - DNA, 25 bp, Homo sapien
catcaaatatgaaagtgtctacacc

SEQ ID NO: 492594 - DNA, 25 bp, Homo sapien
ttgggcatggagcacattatcaggt

SEQ ID NO: 492595 - DNA, 25 bp, Homo sapien
cgtggatgctgagcttcattgaacc

SEQ ID NO: 492596 - DNA, 25 bp, Homo sapien
ctgcactgcgtggggtgtggctgag

SEQ ID NO: 492597 - DNA, 25 bp, Homo sapien
cgtggggtgtggctgagtcgtgagt

SEQ ID NO: 492598 - DNA, 25 bp, Homo sapien
cactgcgtggggtgtggctgagtcg

SEQ ID NO: 492599 - DNA, 25 bp, Homo sapien
tgcgtggggtgtggctgagtcgtga

SEQ ID NO: 492600 - DNA, 25 bp, Homo sapien
ggatgcctgccagttgtgctgacac

SEQ ID NO: 492601 - DNA, 25 bp, Homo sapien
ctggctctgtcagcctgacgactgc

SEQ ID NO: 492602 - DNA, 25 bp, Homo sapien
agcctgacgactgcgggctggacca

SEQ ID NO: 492603 - DNA, 25 bp, Homo sapien
ctcctagttgtgggctgggatgctt

SEQ ID NO: 492604 - DNA, 25 bp, Homo sapien
ctccatgtagccctgaaattctgcg

SEQ ID NO: 492605 - DNA, 25 bp, Homo sapien
tccatgtagccctgaaattctgcgg

SEQ ID NO: 492606 - DNA, 25 bp, Homo sapien
catgtagccctgaaattctgcggcc

SEQ ID NO: 492607 - DNA, 25 bp, Homo sapien
tgtagccctgaaattctgcggccat

SEQ ID NO: 492608 - DNA, 25 bp, Homo sapien
tcattaatgagtgcctcctttgcag

SEQ ID NO: 492609 - DNA, 25 bp, Homo sapien
gactggcgctagatgttgttctgga

SEQ ID NO: 492610 - DNA, 25 bp, Homo sapien
gttctggacactctctcattaatga

SEQ ID NO: 492611 - DNA, 25 bp, Homo sapien
gatctttgtgctagaggctccctca

SEQ ID NO: 492612 - DNA, 25 bp, Homo sapien
tcaccttggcaggagtgtaaggagg

SEQ ID NO: 492613 - DNA, 25 bp, Homo sapien
ttcaccttggcaggagtgtaaggag

SEQ ID NO: 492614 - DNA, 25 bp, Homo sapien
cttcaccttggcaggagtgtaagga

SEQ ID NO: 492615 - DNA, 25 bp, Homo sapien
atcagctttcaaaggactctgacta

SEQ ID NO: 492616 - DNA, 25 bp, Homo sapien
ttgcatcagctttcaaaggactctg

SEQ ID NO: 492617 - DNA, 25 bp, Homo sapien
agctttcaaaggactctgactaata

SEQ ID NO: 492618 - DNA, 25 bp, Homo sapien
tcagctttcaaaggactctgactaa

SEQ ID NO: 492619 - DNA, 25 bp, Homo sapien
gatcaggttcgagtgcaatgctgca

SEQ ID NO: 492620 - DNA, 25 bp, Homo sapien
ccaaggaaggcactcaggtgagctt

SEQ ID NO: 492621 - DNA, 25 bp, Homo sapien
tgctcttcatggaggcgatcaggtt

SEQ ID NO: 492622 - DNA, 25 bp, Homo sapien
ggcaggccgctcactgccaaggaag

SEQ ID NO: 492623 - DNA, 25 bp, Homo sapien
agaagtgccaacaactcaactgggc

SEQ ID NO: 492624 - DNA, 25 bp, Homo sapien
tctgggcctagtcttagcagtgcca

SEQ ID NO: 492625 - DNA, 25 bp, Homo sapien
aacttcaggtcccatcgccaaggga

SEQ ID NO: 492626 - DNA, 25 bp, Homo sapien
gccacccttttgtggagggacagtg

SEQ ID NO: 492627 - DNA, 25 bp, Homo sapien
gtttcttccacattcgatcttacag

SEQ ID NO: 492628 - DNA, 25 bp, Homo sapien
cttcttggcgtttccgtttatcaag

SEQ ID NO: 492629 - DNA, 25 bp, Homo sapien
tccgtttatcaagcacattcgcaga

SEQ ID NO: 492630 - DNA, 25 bp, Homo sapien
cacattcgcagaatgggcagtttct

SEQ ID NO: 492631 - DNA, 25 bp, Homo sapien
catttgggtggtgtgtgccgcattc

SEQ ID NO: 492632 - DNA, 25 bp, Homo sapien
gacagcatcatgtgggtgactggcc

SEQ ID NO: 492633 - DNA, 25 bp, Homo sapien
tggagtccagccaccgcaacgcatt

SEQ ID NO: 492634 - DNA, 25 bp, Homo sapien
cccatttgatctccctctttgaagt

SEQ ID NO: 492635 - DNA, 25 bp, Homo sapien
tcagagggacctcaagatgcagagc

SEQ ID NO: 492636 - DNA, 25 bp, Homo sapien
acaggagggtcctagctgtagagac

SEQ ID NO: 492637 - DNA, 25 bp, Homo sapien
cggccagtcgtgtttttctcaaagc

SEQ ID NO: 492638 - DNA, 25 bp, Homo sapien
tagagacttcgacaggagaaggaga

SEQ ID NO: 492639 - DNA, 25 bp, Homo sapien
tgcatccggatcctgccaggaactt

SEQ ID NO: 492640 - DNA, 25 bp, Homo sapien
agcgacgcagtgctggacattccca

SEQ ID NO: 492641 - DNA, 25 bp, Homo sapien
atccagtgtccattgtgctgatttt

SEQ ID NO: 492642 - DNA, 25 bp, Homo sapien
tctcctgggtagttaaggtcaacca

SEQ ID NO: 492643 - DNA, 25 bp, Homo sapien
aactggagctttcagaaaggcatcc

SEQ ID NO: 492644 - DNA, 25 bp, Homo sapien
aggcggcccgcacctcagaagcaga

SEQ ID NO: 492645 - DNA, 25 bp, Homo sapien
aagcagacaccgttgtgcctgggtc

SEQ ID NO: 492646 - DNA, 25 bp, Homo sapien
ccactgataactggagctttcagaa

SEQ ID NO: 492647 - DNA, 25 bp, Homo sapien
catctcagcgatgtgaatgaggcca

SEQ ID NO: 492648 - DNA, 25 bp, Homo sapien
aatactgccgttctcaccagtgtga

SEQ ID NO: 492649 - DNA, 25 bp, Homo sapien
gatgatgtggaaccgttgcatgcga

SEQ ID NO: 492650 - DNA, 25 bp, Homo sapien
tgtgaggagtcatcatcagcaacca

SEQ ID NO: 492651 - DNA, 25 bp, Homo sapien
gggagcgcttcctctgatgcacgcc

SEQ ID NO: 492652 - DNA, 25 bp, Homo sapien
ctatttgtacttcctgagtgcgcgt

SEQ ID NO: 492653 - DNA, 25 bp, Homo sapien
tcgccgcagacttgcccgaaatagc

SEQ ID NO: 492654 - DNA, 25 bp, Homo sapien
acttgcccgaaatagcagcgcgcgg

SEQ ID NO: 492655 - DNA, 25 bp, Homo sapien
cacctgcatctagttctaaatcaga

SEQ ID NO: 492656 - DNA, 25 bp, Homo sapien
tctagtactaaaccgtctgcatgta

SEQ ID NO: 492657 - DNA, 25 bp, Homo sapien
tagttctaaaccatccgcattcagt

SEQ ID NO: 492658 - DNA, 25 bp, Homo sapien
accagctgcatctagtattaaacca

SEQ ID NO: 492659 - DNA, 25 bp, Homo sapien
caccagagccattgtgaagacgaag

SEQ ID NO: 492660 - DNA, 25 bp, Homo sapien
aggccatgcggcagggacccgattc

SEQ ID NO: 492661 - DNA, 25 bp, Homo sapien
gacagaatgtgaacacgcagcacag

SEQ ID NO: 492662 - DNA, 25 bp, Homo sapien
ccattgaaaagcgttcttttgctct

SEQ ID NO: 492663 - DNA, 25 bp, Homo sapien
taggaggtgtgggtgccttccatac

SEQ ID NO: 492664 - DNA, 25 bp, Homo sapien
gcagattcggaccactaggcctgaa

SEQ ID NO: 492665 - DNA, 25 bp, Homo sapien
tgttgctagtattgccacagacgca

SEQ ID NO: 492666 - DNA, 25 bp, Homo sapien
cagcgataagctttcaatagtggca

SEQ ID NO: 492667 - DNA, 25 bp, Homo sapien
tacctcactgtccaatatgaaaacc

SEQ ID NO: 492668 - DNA, 25 bp, Homo sapien
taggaatttgcgtaactaacacacc

SEQ ID NO: 492669 - DNA, 25 bp, Homo sapien
gaatttgcgtaactaacacaccctg

SEQ ID NO: 492670 - DNA, 25 bp, Homo sapien
tatgaaaaccgtaaagtgccttata

SEQ ID NO: 492671 - DNA, 25 bp, Homo sapien
gatgatggccaatggtctgtctctg

SEQ ID NO: 492672 - DNA, 25 bp, Homo sapien
tctctgtgtcgtgttttaggaagcc

SEQ ID NO: 492673 - DNA, 25 bp, Homo sapien
ttagagatttccgagcagggcagga

SEQ ID NO: 492674 - DNA, 25 bp, Homo sapien
caggagtgccatgtttctgacgtgc

SEQ ID NO: 492675 - DNA, 25 bp, Homo sapien
gaattaaaggtgatcaaggcgatca

SEQ ID NO: 492676 - DNA, 25 bp, Homo sapien
ccatctttacctcactggagtgtta

SEQ ID NO: 492677 - DNA, 25 bp, Homo sapien
tacaaaaggaagcagaaccgcctgc

SEQ ID NO: 492678 - DNA, 25 bp, Homo sapien
tcctttgcagggatggttgcagcat

SEQ ID NO: 492679 - DNA, 25 bp, Homo sapien
gctgccaggcaaactattacaaaag

SEQ ID NO: 492680 - DNA, 25 bp, Homo sapien
gataatttctgcacatctttaaatc

SEQ ID NO: 492681 - DNA, 25 bp, Homo sapien
tgagtaagagtgctgtccctgggtc

SEQ ID NO: 492682 - DNA, 25 bp, Homo sapien
ctaatttgttgtacggagtttcgtg

SEQ ID NO: 492683 - DNA, 25 bp, Homo sapien
catgaatgagaatattagcaacata

SEQ ID NO: 492684 - DNA, 25 bp, Homo sapien
tgatagcggggtgtcagctctggaa

SEQ ID NO: 492685 - DNA, 25 bp, Homo sapien
ggcatcctgtgcttgatagcggggt

SEQ ID NO: 492686 - DNA, 25 bp, Homo sapien
cttgatagcggggtgtcagctctgg

SEQ ID NO: 492687 - DNA, 25 bp, Homo sapien
tcctgtgcttgatagcggggtgtca

SEQ ID NO: 492688 - DNA, 25 bp, Homo sapien
cacgtggcctgaatggagccctcct

SEQ ID NO: 492689 - DNA, 25 bp, Homo sapien
tgttttgggcttggttctgctcctt

SEQ ID NO: 492690 - DNA, 25 bp, Homo sapien
gtgctgcccttgggcactcagtgtg

SEQ ID NO: 492691 - DNA, 25 bp, Homo sapien
tcctcgtccacctgttttgggcttg

SEQ ID NO: 492692 - DNA, 25 bp, Homo sapien
caactgacatctccacaacctggta

SEQ ID NO: 492693 - DNA, 25 bp, Homo sapien
aaaggggccgccaacatttcatctc

SEQ ID NO: 492694 - DNA, 25 bp, Homo sapien
ctccgagtgggctacacatgtgtgg

SEQ ID NO: 492695 - DNA, 25 bp, Homo sapien
catctcaacattgcccaaggaggag

SEQ ID NO: 492696 - DNA, 25 bp, Homo sapien
tgccgtgtggccgtggggcttatcc

SEQ ID NO: 492697 - DNA, 25 bp, Homo sapien
gagtatcatcctcgtccaaaaccat

SEQ ID NO: 492698 - DNA, 25 bp, Homo sapien
gaggatgcacgttcacagtgcctgc

SEQ ID NO: 492699 - DNA, 25 bp, Homo sapien
tctccagcatcttgtaggtttgttg

SEQ ID NO: 492700 - DNA, 25 bp, Homo sapien
ctgctccctcgaggatgcacgttca

SEQ ID NO: 492701 - DNA, 25 bp, Homo sapien
ccatatttggttcccttgctttctc

SEQ ID NO: 492702 - DNA, 25 bp, Homo sapien
ttccatatttggttcccttgctttc

SEQ ID NO: 492703 - DNA, 25 bp, Homo sapien
catatttggttcccttgctttctct

SEQ ID NO: 492704 - DNA, 25 bp, Homo sapien
tccatatttggttcccttgctttct

SEQ ID NO: 492705 - DNA, 25 bp, Homo sapien
ttttgaggaactccacttgatctaa

SEQ ID NO: 492706 - DNA, 25 bp, Homo sapien
taaaagctagggagcccttgggctg

SEQ ID NO: 492707 - DNA, 25 bp, Homo sapien
cacttgatctaaaagctagggagcc

SEQ ID NO: 492708 - DNA, 25 bp, Homo sapien
tggggtttttgctctccaaatctaa

SEQ ID NO: 492709 - DNA, 25 bp, Homo sapien
cattgtatgaactctggaccctggg

SEQ ID NO: 492710 - DNA, 25 bp, Homo sapien
cagaatcaggagatgcgtgtttccc

SEQ ID NO: 492711 - DNA, 25 bp, Homo sapien
gatcagtgctagcagccgcctttag

SEQ ID NO: 492712 - DNA, 25 bp, Homo sapien
caagtgttgatggactccttgcagc

SEQ ID NO: 492713 - DNA, 25 bp, Homo sapien
ccttcgtagaattaggaaatctgca

SEQ ID NO: 492714 - DNA, 25 bp, Homo sapien
gatgtactcaaattgccttcgtaga

SEQ ID NO: 492715 - DNA, 25 bp, Homo sapien
taaaccaaaatcgtattgcagtcgg

SEQ ID NO: 492716 - DNA, 25 bp, Homo sapien
tgcagtcggcgctttcctctttcct

SEQ ID NO: 492717 - DNA, 25 bp, Homo sapien
cagagttggaactactccaggcggg

SEQ ID NO: 492718 - DNA, 25 bp, Homo sapien
tctgtgagcccattgtgagaccgca

SEQ ID NO: 492719 - DNA, 25 bp, Homo sapien
tccaggcgggttgtgacacgtccgt

SEQ ID NO: 492720 - DNA, 25 bp, Homo sapien
tttctgctagcgtgactccagggct

SEQ ID NO: 492721 - DNA, 25 bp, Homo sapien
gacaccagatagtgcgaggtccttc

SEQ ID NO: 492722 - DNA, 25 bp, Homo sapien
catctttgtgagcttgagttgggca

SEQ ID NO: 492723 - DNA, 25 bp, Homo sapien
tgcttgtacaaccaccagaaggtgc

SEQ ID NO: 492724 - DNA, 25 bp, Homo sapien
tgaaagtgtgcgtagctccgtctcc

SEQ ID NO: 492725 - DNA, 25 bp, Homo sapien
tattggcctgggtgtgatcccaagc

SEQ ID NO: 492726 - DNA, 25 bp, Homo sapien
agtgtaccctgaatctgcagctgca

SEQ ID NO: 492727 - DNA, 25 bp, Homo sapien
cctcaggagcttcgagtgttcagca

SEQ ID NO: 492728 - DNA, 25 bp, Homo sapien
tgaatgccacacaaggctctggacc

SEQ ID NO: 492729 - DNA, 25 bp, Homo sapien
gcttcttgaattcaccaatttcttg

SEQ ID NO: 492730 - DNA, 25 bp, Homo sapien
ggcattgccaccacttgaacggctc

SEQ ID NO: 492731 - DNA, 25 bp, Homo sapien
aaagacaattgatgagatactccct

SEQ ID NO: 492732 - DNA, 25 bp, Homo sapien
tggtctgttgtcagcgtttcctcac

SEQ ID NO: 492733 - DNA, 25 bp, Homo sapien
cggtgaactcaaggcctgcaaagag

SEQ ID NO: 492734 - DNA, 25 bp, Homo sapien
gaaatcggtgaactcaaggcctgca

SEQ ID NO: 492735 - DNA, 25 bp, Homo sapien
caagaaatcggtgaactcaaggcct

SEQ ID NO: 492736 - DNA, 25 bp, Homo sapien
aatcggtgaactcaaggcctgcaaa

SEQ ID NO: 492737 - DNA, 25 bp, Homo sapien
aggatgtgggtgaagcgctgaccct

SEQ ID NO: 492738 - DNA, 25 bp, Homo sapien
cctcattccgtctctgggatctgtc

SEQ ID NO: 492739 - DNA, 25 bp, Homo sapien
gaccctcattccgtctctgggatct

SEQ ID NO: 492740 - DNA, 25 bp, Homo sapien
gggtgaagcgctgaccctcattccg

SEQ ID NO: 492741 - DNA, 25 bp, Homo sapien
tcccgacatggaagatgagttctgt

SEQ ID NO: 492742 - DNA, 25 bp, Homo sapien
gatggcatggttaaagctccctcgc

SEQ ID NO: 492743 - DNA, 25 bp, Homo sapien
gccattgcctcctagttgcagaaaa

SEQ ID NO: 492744 - DNA, 25 bp, Homo sapien
gaaattactaatggcgctcccgtgc

SEQ ID NO: 492745 - DNA, 25 bp, Homo sapien
tgaggaattcttaacgaccgccaaa

SEQ ID NO: 492746 - DNA, 25 bp, Homo sapien
cttcctggtgaggaattcttaacga

SEQ ID NO: 492747 - DNA, 25 bp, Homo sapien
tcctggtgaggaattcttaacgacc

SEQ ID NO: 492748 - DNA, 25 bp, Homo sapien
tggtgaggaattcttaacgaccgcc

SEQ ID NO: 492749 - DNA, 25 bp, Homo sapien
tatttgctaccaccagactaaggac

SEQ ID NO: 492750 - DNA, 25 bp, Homo sapien
gaagctggcattaacgggtcagacg

SEQ ID NO: 492751 - DNA, 25 bp, Homo sapien
ttttggaaaggcgatggcaacgtct

SEQ ID NO: 492752 - DNA, 25 bp, Homo sapien
taaggaccctacgattagtctggca

SEQ ID NO: 492753 - DNA, 25 bp, Homo sapien
gaactccagttcaacgtcttcacat

SEQ ID NO: 492754 - DNA, 25 bp, Homo sapien
tttgcactctctaacttccactggg

SEQ ID NO: 492755 - DNA, 25 bp, Homo sapien
tccatgatgcaccattactccctga

SEQ ID NO: 492756 - DNA, 25 bp, Homo sapien
tggctgtcttgctttgatctcaaac

SEQ ID NO: 492757 - DNA, 25 bp, Homo sapien
ggtgtcccggcgcactgcagccaca

SEQ ID NO: 492758 - DNA, 25 bp, Homo sapien
gggctgctgcccgaacgcattggcc

SEQ ID NO: 492759 - DNA, 25 bp, Homo sapien
tcggtcctcggcctggatccgcgaa

SEQ ID NO: 492760 - DNA, 25 bp, Homo sapien
gacgcgggagcctcttgagtgcgga

SEQ ID NO: 492761 - DNA, 25 bp, Homo sapien
cgtccactctgggccccggtcagtc

SEQ ID NO: 492762 - DNA, 25 bp, Homo sapien
gttcgtccactctgggccccggtca

SEQ ID NO: 492763 - DNA, 25 bp, Homo sapien
gctggcggttcgtccactctgggcc

SEQ ID NO: 492764 - DNA, 25 bp, Homo sapien
tggcggttcgtccactctgggcccc

SEQ ID NO: 492765 - DNA, 25 bp, Homo sapien
ggccaccgcgcgctggtctctcccc

SEQ ID NO: 492766 - DNA, 25 bp, Homo sapien
gccggccaccgcgcgctggtctctc

SEQ ID NO: 492767 - DNA, 25 bp, Homo sapien
ccaccgcgcgctggtctctccccat

SEQ ID NO: 492768 - DNA, 25 bp, Homo sapien
cggccaccgcgcgctggtctctccc

SEQ ID NO: 492769 - DNA, 25 bp, Homo sapien
ctctgggcgaggaaccccacggtca

SEQ ID NO: 492770 - DNA, 25 bp, Homo sapien
ggcgaggaaccccacggtcactgtc

SEQ ID NO: 492771 - DNA, 25 bp, Homo sapien
ctgggcgaggaaccccacggtcact

SEQ ID NO: 492772 - DNA, 25 bp, Homo sapien
gacgctctgggcgaggaaccccacg

SEQ ID NO: 492773 - DNA, 25 bp, Homo sapien
ccctgtggcccatggggtttcctag

SEQ ID NO: 492774 - DNA, 25 bp, Homo sapien
actgtgatacaagcctgcccttcca

SEQ ID NO: 492775 - DNA, 25 bp, Homo sapien
gcgtatgggcagcaccgggctcctc

SEQ ID NO: 492776 - DNA, 25 bp, Homo sapien
cacgagggtactgcctgatgcgttc

SEQ ID NO: 492777 - DNA, 25 bp, Homo sapien
tttctctcgtggacaaaccatggct

SEQ ID NO: 492778 - DNA, 25 bp, Homo sapien
gcgatgctccttcccgacacagttt

SEQ ID NO: 492779 - DNA, 25 bp, Homo sapien
gcttttgatgcagtccagggcacgt

SEQ ID NO: 492780 - DNA, 25 bp, Homo sapien
ttgcaatgattgcatcacggctgcc

SEQ ID NO: 492781 - DNA, 25 bp, Homo sapien
tctggcgccttgatgtgggtaacca

SEQ ID NO: 492782 - DNA, 25 bp, Homo sapien
tgtgcggtgtgccttaactagaaat

SEQ ID NO: 492783 - DNA, 25 bp, Homo sapien
tgggtaaccaccacaaaacctgatg

SEQ ID NO: 492784 - DNA, 25 bp, Homo sapien
tagaaatgcgttgacttttccaacc

SEQ ID NO: 492785 - DNA, 25 bp, Homo sapien
ctgtgtgggcaacccagacctcgct

SEQ ID NO: 492786 - DNA, 25 bp, Homo sapien
agaactgctttaggtctggtgcctg

SEQ ID NO: 492787 - DNA, 25 bp, Homo sapien
actgctttaggtctggtgcctgcac

SEQ ID NO: 492788 - DNA, 25 bp, Homo sapien
agacacccggttccctcctggacag

SEQ ID NO: 492789 - DNA, 25 bp, Homo sapien
ggagtgccaagaaggccactggcca

SEQ ID NO: 492790 - DNA, 25 bp, Homo sapien
agtgccaagaaggccactggccaac

SEQ ID NO: 492791 - DNA, 25 bp, Homo sapien
tgggagtgccaagaaggccactggc

SEQ ID NO: 492792 - DNA, 25 bp, Homo sapien
ctgggagtgccaagaaggccactgg

SEQ ID NO: 492793 - DNA, 25 bp, Homo sapien
acccttgacgcccatgaagctgagt

SEQ ID NO: 492794 - DNA, 25 bp, Homo sapien
ccttgacgcccatgaagctgagttt

SEQ ID NO: 492795 - DNA, 25 bp, Homo sapien
accacatccagggactgtgtgattt

SEQ ID NO: 492796 - DNA, 25 bp, Homo sapien
tgattttggccaccagaccaccttc

SEQ ID NO: 492797 - DNA, 25 bp, Homo sapien
tacagcagtatctttccacactcgc

SEQ ID NO: 492798 - DNA, 25 bp, Homo sapien
gcttagtgaccgttataataccgaa

SEQ ID NO: 492799 - DNA, 25 bp, Homo sapien
tgaagccaccgagtaaaacatcgtg

SEQ ID NO: 492800 - DNA, 25 bp, Homo sapien
tagcttgcttgagatgaagtcatgc

SEQ ID NO: 492801 - DNA, 25 bp, Homo sapien
ctcacagatagcaaagctgcctctg

SEQ ID NO: 492802 - DNA, 25 bp, Homo sapien
tcagaggacctggcttggacgaagt

SEQ ID NO: 492803 - DNA, 25 bp, Homo sapien
cagaggacctggcttggacgaagta

SEQ ID NO: 492804 - DNA, 25 bp, Homo sapien
gaggacctggcttggacgaagtagg

SEQ ID NO: 492805 - DNA, 25 bp, Homo sapien
ctgaagacgggctgcgtggatctga

SEQ ID NO: 492806 - DNA, 25 bp, Homo sapien
tgggcccccagctctttatcttcct

SEQ ID NO: 492807 - DNA, 25 bp, Homo sapien
agaagcccagggatgagaagtgtga

SEQ ID NO: 492808 - DNA, 25 bp, Homo sapien
gacagagagatagttgaggtcacct

SEQ ID NO: 492809 - DNA, 25 bp, Homo sapien
catgcagagcctgaagcaagcgaga

SEQ ID NO: 492810 - DNA, 25 bp, Homo sapien
gacatagagtgagctcgagacccta

SEQ ID NO: 492811 - DNA, 25 bp, Homo sapien
catggctgaaaacgccccgagagta

SEQ ID NO: 492812 - DNA, 25 bp, Homo sapien
tcctgttgggagcaatccacagacg

SEQ ID NO: 492813 - DNA, 25 bp, Homo sapien
tgccttcccacatcagcagggatcg

SEQ ID NO: 492814 - DNA, 25 bp, Homo sapien
tgcctggaagaaggtctgtgcataa

SEQ ID NO: 492815 - DNA, 25 bp, Homo sapien
cagggatcgaggatgcctttgctgt

SEQ ID NO: 492816 - DNA, 25 bp, Homo sapien
tttgctgtgaactcacactcggtag

SEQ ID NO: 492817 - DNA, 25 bp, Homo sapien
cgtacaatgaataagccccatgggc

SEQ ID NO: 492818 - DNA, 25 bp, Homo sapien
gcggcaagacataaccaggaggcat

SEQ ID NO: 492819 - DNA, 25 bp, Homo sapien
ttttaacgagcaatgaccggccaag

SEQ ID NO: 492820 - DNA, 25 bp, Homo sapien
ccaggtaggaactgctgagaaccca

SEQ ID NO: 492821 - DNA, 25 bp, Homo sapien
tgagtgacccaatgacagtgagaag

SEQ ID NO: 492822 - DNA, 25 bp, Homo sapien
gaatcgcccatctcaaaacgtggag

SEQ ID NO: 492823 - DNA, 25 bp, Homo sapien
tggcagctgcaggattaagaggaca

SEQ ID NO: 492824 - DNA, 25 bp, Homo sapien
gagtatcgtgttgccttcactagga

SEQ ID NO: 492825 - DNA, 25 bp, Homo sapien
tggaggccagaccccattggactta

SEQ ID NO: 492826 - DNA, 25 bp, Homo sapien
cccattggacttatctgctccttca

SEQ ID NO: 492827 - DNA, 25 bp, Homo sapien
agaggaattaaagaagctggcagag

SEQ ID NO: 492828 - DNA, 25 bp, Homo sapien
ggccagaccccattggacttatctg

SEQ ID NO: 492829 - DNA, 25 bp, Homo sapien
gcaaatcaaagacaagccgcgatcc

SEQ ID NO: 492830 - DNA, 25 bp, Homo sapien
tccagcagaggcataccgactgcac

SEQ ID NO: 492831 - DNA, 25 bp, Homo sapien
gacatgggtctctgaaacagtctcg

SEQ ID NO: 492832 - DNA, 25 bp, Homo sapien
gaggactgctatgtggtgtcccatg

SEQ ID NO: 492833 - DNA, 25 bp, Homo sapien
tccaacatttacaagagcccgaagt

SEQ ID NO: 492834 - DNA, 25 bp, Homo sapien
ttacaagagcccgaagtaccacact

SEQ ID NO: 492835 - DNA, 25 bp, Homo sapien
agagcccgaagtaccacactttgga

SEQ ID NO: 492836 - DNA, 25 bp, Homo sapien
tcctccagagagagtcttaggaatt

SEQ ID NO: 492837 - DNA, 25 bp, Homo sapien
gacatgccagccgtgcgtgcacaca

SEQ ID NO: 492838 - DNA, 25 bp, Homo sapien
attccacgccaaggcagtttccatg

SEQ ID NO: 492839 - DNA, 25 bp, Homo sapien
ggcagtttccatggacatgccagcc

SEQ ID NO: 492840 - DNA, 25 bp, Homo sapien
tcattccacgccaaggcagtttcca

SEQ ID NO: 492841 - DNA, 25 bp, Homo sapien
tcaagactagatgggctggcgcatt

SEQ ID NO: 492842 - DNA, 25 bp, Homo sapien
gaaatccaactccatactaagccag

SEQ ID NO: 492843 - DNA, 25 bp, Homo sapien
tactacacgtgagggaggcatgaac

SEQ ID NO: 492844 - DNA, 25 bp, Homo sapien
cctcctgggtctatagggtaaagca

SEQ ID NO: 492845 - DNA, 25 bp, Homo sapien
tctcatctgagagtttcacgttttt

SEQ ID NO: 492846 - DNA, 25 bp, Homo sapien
tcttgagtgaggtaatgaggcagct

SEQ ID NO: 492847 - DNA, 25 bp, Homo sapien
gatgcatcagttactactataaaaa

SEQ ID NO: 492848 - DNA, 25 bp, Homo sapien
tcagagaaaacagtaccttgaaagc

SEQ ID NO: 492849 - DNA, 25 bp, Homo sapien
ctcttcctccacacggcacatcaaa

SEQ ID NO: 492850 - DNA, 25 bp, Homo sapien
tccacacggcacatcaaacttcttc

SEQ ID NO: 492851 - DNA, 25 bp, Homo sapien
tcctccacacggcacatcaaacttc

SEQ ID NO: 492852 - DNA, 25 bp, Homo sapien
cacacggcacatcaaacttcttcac

SEQ ID NO: 492853 - DNA, 25 bp, Homo sapien
gacagggccatttgaccatctcact

SEQ ID NO: 492854 - DNA, 25 bp, Homo sapien
tcccaacacggagttatccaaccag

SEQ ID NO: 492855 - DNA, 25 bp, Homo sapien
tctggaatacccaagtgccttagga

SEQ ID NO: 492856 - DNA, 25 bp, Homo sapien
ggctgatgacgtgggttctcttttc

SEQ ID NO: 492857 - DNA, 25 bp, Homo sapien
aagcagggttgaaatgagcagtatg

SEQ ID NO: 492858 - DNA, 25 bp, Homo sapien
ctaagcagggttgaaatgagcagta

SEQ ID NO: 492859 - DNA, 25 bp, Homo sapien
taagcagggttgaaatgagcagtat

SEQ ID NO: 492860 - DNA, 25 bp, Homo sapien
gcagtgaaacctctacagctcaact

SEQ ID NO: 492861 - DNA, 25 bp, Homo sapien
tgagcagatgggtatcactccctgg

SEQ ID NO: 492862 - DNA, 25 bp, Homo sapien
tatgtctagtcaaaggcatgtctac

SEQ ID NO: 492863 - DNA, 25 bp, Homo sapien
gctgtccagacgagcaatcatttct

SEQ ID NO: 492864 - DNA, 25 bp, Homo sapien
gagacgctcagaacaaggtgattag

SEQ ID NO: 492865 - DNA, 25 bp, Homo sapien
tgttcttccctatgctgtgctgcga

SEQ ID NO: 492866 - DNA, 25 bp, Homo sapien
tatgaagtcagggtatattgcagct

SEQ ID NO: 492867 - DNA, 25 bp, Homo sapien
caggcagcggctagaaagtaaagtt

SEQ ID NO: 492868 - DNA, 25 bp, Homo sapien
ggtgttcgatgagcctcctagtgcc

SEQ ID NO: 492869 - DNA, 25 bp, Homo sapien
tgagtcagcacgtatacaaatagag

SEQ ID NO: 492870 - DNA, 25 bp, Homo sapien
gagtgtgagaatccgatgagtcagc

SEQ ID NO: 492871 - DNA, 25 bp, Homo sapien
tagtgccctcttgcccgaatattga

SEQ ID NO: 492872 - DNA, 25 bp, Homo sapien
tatgagatagagaccgaggatgtga

SEQ ID NO: 492873 - DNA, 25 bp, Homo sapien
tccatgggtgtgagatagaacctgt

SEQ ID NO: 492874 - DNA, 25 bp, Homo sapien
agccggtgggcgtgagatagagtcc

SEQ ID NO: 492875 - DNA, 25 bp, Homo sapien
cctaaagaaatctggctacggtaga

SEQ ID NO: 492876 - DNA, 25 bp, Homo sapien
gtgtgactccccactgaagcgttga

SEQ ID NO: 492877 - DNA, 25 bp, Homo sapien
gcttcacaccgaatcatagaattgg

SEQ ID NO: 492878 - DNA, 25 bp, Homo sapien
gagcatggcccgcaagagtccatct

SEQ ID NO: 492879 - DNA, 25 bp, Homo sapien
taagtgctgctacatgtctgctcta

SEQ ID NO: 492880 - DNA, 25 bp, Homo sapien
catgctttatccacaaaacgtaacc

SEQ ID NO: 492881 - DNA, 25 bp, Homo sapien
ctaaacactgtaaccatgctttatc

SEQ ID NO: 492882 - DNA, 25 bp, Homo sapien
aacgtaaccacggtctatccacaca

SEQ ID NO: 492883 - DNA, 25 bp, Homo sapien
accatgctttatccacaaaacgtaa

SEQ ID NO: 492884 - DNA, 25 bp, Homo sapien
cttatcttggtcagctggagttcac

SEQ ID NO: 492885 - DNA, 25 bp, Homo sapien
ggagcacagcctacagtcgatttga

SEQ ID NO: 492886 - DNA, 25 bp, Homo sapien
tcttggagccgcagtcctggagaat

SEQ ID NO: 492887 - DNA, 25 bp, Homo sapien
tcacctaagcaaggactggaccagg

SEQ ID NO: 492888 - DNA, 25 bp, Homo sapien
gagttctcgctccaggctagtcaga

SEQ ID NO: 492889 - DNA, 25 bp, Homo sapien
ggagatcaacaatacttcgcagctg

SEQ ID NO: 492890 - DNA, 25 bp, Homo sapien
gaagggatttgaagccaacctccat

SEQ ID NO: 492891 - DNA, 25 bp, Homo sapien
tcatgaatttacactgccagaaggg

SEQ ID NO: 492892 - DNA, 25 bp, Homo sapien
tgccaccactaaaatctaaaaccac

SEQ ID NO: 492893 - DNA, 25 bp, Homo sapien
atgaccccgacgatggccagagggc

SEQ ID NO: 492894 - DNA, 25 bp, Homo sapien
gcatcccgcttcctcactcctaaag

SEQ ID NO: 492895 - DNA, 25 bp, Homo sapien
actcctaaaggatccatgaccccga

SEQ ID NO: 492896 - DNA, 25 bp, Homo sapien
aaaggatccatgaccccgacgatgg

SEQ ID NO: 492897 - DNA, 25 bp, Homo sapien
tcacacgagtgtgaacgccccagca

SEQ ID NO: 492898 - DNA, 25 bp, Homo sapien
ctcacacgagtgtgaacgccccagc

SEQ ID NO: 492899 - DNA, 25 bp, Homo sapien
cacgagtgtgaacgccccagcatca

SEQ ID NO: 492900 - DNA, 25 bp, Homo sapien
gcatcatgctgatgacccacaaaag

SEQ ID NO: 492901 - DNA, 25 bp, Homo sapien
gccgaaatctgaatagtaggaaatc

SEQ ID NO: 492902 - DNA, 25 bp, Homo sapien
cttcctaagcggactcttcctgtct

SEQ ID NO: 492903 - DNA, 25 bp, Homo sapien
cttcctgtctcaccttttatgggca

SEQ ID NO: 492904 - DNA, 25 bp, Homo sapien
ctcaccttttatgggcactggcgcc

SEQ ID NO: 492905 - DNA, 25 bp, Homo sapien
attttgtccccacggcaactgcatg

SEQ ID NO: 492906 - DNA, 25 bp, Homo sapien
tagtgacacgaactccagtggagag

SEQ ID NO: 492907 - DNA, 25 bp, Homo sapien
ccaggcccttactgctccaagggag

SEQ ID NO: 492908 - DNA, 25 bp, Homo sapien
ggcttgctataaatgcagagtctca

SEQ ID NO: 492909 - DNA, 25 bp, Homo sapien
cctggtggcccattgtacccctggg

SEQ ID NO: 492910 - DNA, 25 bp, Homo sapien
tgtaatcctggtggcccattgtacc

SEQ ID NO: 492911 - DNA, 25 bp, Homo sapien
agtcccgggaatccttgtaatcctg

SEQ ID NO: 492912 - DNA, 25 bp, Homo sapien
ctgcagtcccgggaatccttgtaat

SEQ ID NO: 492913 - DNA, 25 bp, Homo sapien
ggaatccagaaacgcctcttgctcc

SEQ ID NO: 492914 - DNA, 25 bp, Homo sapien
gggaatccagaaacgcctcttgctc

SEQ ID NO: 492915 - DNA, 25 bp, Homo sapien
cagggaatccagaaacgcctcttgc

SEQ ID NO: 492916 - DNA, 25 bp, Homo sapien
agggaatccagaaacgcctcttgct

SEQ ID NO: 492917 - DNA, 25 bp, Homo sapien
ttatgtgaggttgctgtaaagaact

SEQ ID NO: 492918 - DNA, 25 bp, Homo sapien
agctgcacaaatgctcagcagggct

SEQ ID NO: 492919 - DNA, 25 bp, Homo sapien
tgtttttcgttttatgtgaggttgc

SEQ ID NO: 492920 - DNA, 25 bp, Homo sapien
agaagctgcacaaatgctcagcagg

SEQ ID NO: 492921 - DNA, 25 bp, Homo sapien
cctgggttccgttgcagccatcgta

SEQ ID NO: 492922 - DNA, 25 bp, Homo sapien
ctgagtctccctgggttccgttgca

SEQ ID NO: 492923 - DNA, 25 bp, Homo sapien
ggaggcccggtgaacccctcagagc

SEQ ID NO: 492924 - DNA, 25 bp, Homo sapien
gttgcagccatcgtagcccggcctt

SEQ ID NO: 492925 - DNA, 25 bp, Homo sapien
aacagccgaggaaaggtgaactagc

SEQ ID NO: 492926 - DNA, 25 bp, Homo sapien
ccatttgcttcaggtgaaaacgtga

SEQ ID NO: 492927 - DNA, 25 bp, Homo sapien
tagcaacgtactactgaagacacat

SEQ ID NO: 492928 - DNA, 25 bp, Homo sapien
ggtggaactgagtaggagaactcca

SEQ ID NO: 492929 - DNA, 25 bp, Homo sapien
cacctttctgcccttttggtccttg

SEQ ID NO: 492930 - DNA, 25 bp, Homo sapien
aggctcacctttctgcccttttggt

SEQ ID NO: 492931 - DNA, 25 bp, Homo sapien
atatctgtcgcgctcctctttaggc

SEQ ID NO: 492932 - DNA, 25 bp, Homo sapien
tcctctttaggcagtgcataaggct

SEQ ID NO: 492933 - DNA, 25 bp, Homo sapien
tggaaaccgaccaatccaggctctc

SEQ ID NO: 492934 - DNA, 25 bp, Homo sapien
ctggaaaccgaccaatccaggctct

SEQ ID NO: 492935 - DNA, 25 bp, Homo sapien
acatgcccagggcggccgggaggtc

SEQ ID NO: 492936 - DNA, 25 bp, Homo sapien
ggagctccaactggacccatctgtc

SEQ ID NO: 492937 - DNA, 25 bp, Homo sapien
tggacccatctgtcccacatgccca

SEQ ID NO: 492938 - DNA, 25 bp, Homo sapien
tggtctccctggagctccaactgga

SEQ ID NO: 492939 - DNA, 25 bp, Homo sapien
gtaatgagcccaggtgtgatatgcc

SEQ ID NO: 492940 - DNA, 25 bp, Homo sapien
tacttgcaatgagccctctagggcc

SEQ ID NO: 492941 - DNA, 25 bp, Homo sapien
gagtggccagagagctacacaagcc

SEQ ID NO: 492942 - DNA, 25 bp, Homo sapien
tatgcctgctagcatgggtgtggca

SEQ ID NO: 492943 - DNA, 25 bp, Homo sapien
cccagataacatctggtggaaagct

SEQ ID NO: 492944 - DNA, 25 bp, Homo sapien
gccattgactgtatatttaggacac

SEQ ID NO: 492945 - DNA, 25 bp, Homo sapien
cacagtgtaggatgcatggaggttt

SEQ ID NO: 492946 - DNA, 25 bp, Homo sapien
aggtttctgatgcatttggcttggc

SEQ ID NO: 492947 - DNA, 25 bp, Homo sapien
tgctgtccttttggtccagggggtc

SEQ ID NO: 492948 - DNA, 25 bp, Homo sapien
ctaagattcgtgcatagaaaaagca

SEQ ID NO: 492949 - DNA, 25 bp, Homo sapien
agatgacaaatttgtgcacatcacg

SEQ ID NO: 492950 - DNA, 25 bp, Homo sapien
ctctaagattcgtgcatagaaaaag

SEQ ID NO: 492951 - DNA, 25 bp, Homo sapien
aagcaagatgacaaatttgtgcaca

SEQ ID NO: 492952 - DNA, 25 bp, Homo sapien
actccgtagaaaccaagtcctctgt

SEQ ID NO: 492953 - DNA, 25 bp, Homo sapien
aactccgtagaaaccaagtcctctg

SEQ ID NO: 492954 - DNA, 25 bp, Homo sapien
taagcctgtcatgcacgtgatctca

SEQ ID NO: 492955 - DNA, 25 bp, Homo sapien
gagaaaagccacatggtccttacgg

SEQ ID NO: 492956 - DNA, 25 bp, Homo sapien
tcaggtctactttacagtgggctca

SEQ ID NO: 492957 - DNA, 25 bp, Homo sapien
cttttgtggtgaacgcaatgggact

SEQ ID NO: 492958 - DNA, 25 bp, Homo sapien
gcatattgttaagcaaaagcagttg

SEQ ID NO: 492959 - DNA, 25 bp, Homo sapien
catattgttaagcaaaagcagttgt

SEQ ID NO: 492960 - DNA, 25 bp, Homo sapien
ctgcatattgttaagcaaaagcagt

SEQ ID NO: 492961 - DNA, 25 bp, Homo sapien
tgcatattgttaagcaaaagcagtt

SEQ ID NO: 492962 - DNA, 25 bp, Homo sapien
gttgggtcccggctgccctacgtca

SEQ ID NO: 492963 - DNA, 25 bp, Homo sapien
tggaatcccgttgggtcccggctgc

SEQ ID NO: 492964 - DNA, 25 bp, Homo sapien
gtgtctgatggaatcccgttgggtc

SEQ ID NO: 492965 - DNA, 25 bp, Homo sapien
tgactcctgtgggcgcgatgatggg

SEQ ID NO: 492966 - DNA, 25 bp, Homo sapien
tggttccccctcactgcctttttca

SEQ ID NO: 492967 - DNA, 25 bp, Homo sapien
ttattcctggttccccctcactgcc

SEQ ID NO: 492968 - DNA, 25 bp, Homo sapien
attcctggttccccctcactgcctt

SEQ ID NO: 492969 - DNA, 25 bp, Homo sapien
tcttattcctggttccccctcactg

SEQ ID NO: 492970 - DNA, 25 bp, Homo sapien
tccaggaaagcccatgattccttct

SEQ ID NO: 492971 - DNA, 25 bp, Homo sapien
tccttcttctcccttcaaggaaatg

SEQ ID NO: 492972 - DNA, 25 bp, Homo sapien
cctcagtccaggaaagcccatgatt

SEQ ID NO: 492973 - DNA, 25 bp, Homo sapien
cttcttctcccttcaaggaaatgcc

SEQ ID NO: 492974 - DNA, 25 bp, Homo sapien
cagaaaggttttgtgcggtactcgc

SEQ ID NO: 492975 - DNA, 25 bp, Homo sapien
gagtggtagcaactgccagatagcc

SEQ ID NO: 492976 - DNA, 25 bp, Homo sapien
ggttcacggattgtagccagcgcag

SEQ ID NO: 492977 - DNA, 25 bp, Homo sapien
gctcttgggacagtcggaaatcaat

SEQ ID NO: 492978 - DNA, 25 bp, Homo sapien
ttctgtcctggtgatcctttttcac

SEQ ID NO: 492979 - DNA, 25 bp, Homo sapien
cttctgtcctggtgatcctttttca

SEQ ID NO: 492980 - DNA, 25 bp, Homo sapien
tctgtcctggtgatcctttttcacc

SEQ ID NO: 492981 - DNA, 25 bp, Homo sapien
tcctaagccatgaactagaatgtgg

SEQ ID NO: 492982 - DNA, 25 bp, Homo sapien
catggtaggaaattaacagcagcac

SEQ ID NO: 492983 - DNA, 25 bp, Homo sapien
tgtgccgcctttgggagtactccga

SEQ ID NO: 492984 - DNA, 25 bp, Homo sapien
tgtgattacggcaaagcctggcatt

SEQ ID NO: 492985 - DNA, 25 bp, Homo sapien
cagcggcaggtcaacaggtcaactg

SEQ ID NO: 492986 - DNA, 25 bp, Homo sapien
gagggttatgcacgacttaaggaga

SEQ ID NO: 492987 - DNA, 25 bp, Homo sapien
gcagtgaaacccagataggcgggaa

SEQ ID NO: 492988 - DNA, 25 bp, Homo sapien
tcagtggcaaacacaacagggtcgg

SEQ ID NO: 492989 - DNA, 25 bp, Homo sapien
gactgcaatggcattattatatctc

SEQ ID NO: 492990 - DNA, 25 bp, Homo sapien
ccctgacttgggtctcaaaaatgtc

SEQ ID NO: 492991 - DNA, 25 bp, Homo sapien
gtataactccaaaaagggactgcaa

SEQ ID NO: 492992 - DNA, 25 bp, Homo sapien
taaagtcatgtattaacccagtctg

SEQ ID NO: 492993 - DNA, 25 bp, Homo sapien
ccggggtccatcaggcccttgatag

SEQ ID NO: 492994 - DNA, 25 bp, Homo sapien
ttgatagccatccaggcctcggctt

SEQ ID NO: 492995 - DNA, 25 bp, Homo sapien
tcaggcccttgatagccatccaggc

SEQ ID NO: 492996 - DNA, 25 bp, Homo sapien
gtccatcaggcccttgatagccatc

SEQ ID NO: 492997 - DNA, 25 bp, Homo sapien
cagtggaaccacagacagtgcctgg

SEQ ID NO: 492998 - DNA, 25 bp, Homo sapien
ttttgggtagtgatagccgagccgc

SEQ ID NO: 492999 - DNA, 25 bp, Homo sapien
tttgtcataaggcagcatcccgcgc

SEQ ID NO: 493000 - DNA, 25 bp, Homo sapien
catccccatgctagggtggcagagc

SEQ ID NO: 493001 - DNA, 25 bp, Homo sapien
gaagaaacccgagcgtggaccgtca

SEQ ID NO: 493002 - DNA, 25 bp, Homo sapien
gatgtgagaatagccttttggagtt

SEQ ID NO: 493003 - DNA, 25 bp, Homo sapien
agaaacccgagcgtggaccgtcagg

SEQ ID NO: 493004 - DNA, 25 bp, Homo sapien
ttggagtttttgacagtacacatat

SEQ ID NO: 493005 - DNA, 25 bp, Homo sapien
gtgaggggagtaggcaggtagtcca

SEQ ID NO: 493006 - DNA, 25 bp, Homo sapien
ggtgaggggagtaggcaggtagtcc

SEQ ID NO: 493007 - DNA, 25 bp, Homo sapien
agggtgaggggagtaggcaggtagt

SEQ ID NO: 493008 - DNA, 25 bp, Homo sapien
tgaggggagtaggcaggtagtccag

SEQ ID NO: 493009 - DNA, 25 bp, Homo sapien
tatgcgatgctgaactatgcaggtg

SEQ ID NO: 493010 - DNA, 25 bp, Homo sapien
gctctgtgtccctaacaggagagaa

SEQ ID NO: 493011 - DNA, 25 bp, Homo sapien
tttagggttgcttagaatatctgtc

SEQ ID NO: 493012 - DNA, 25 bp, Homo sapien
tatgcaggtgaaattgttcacacac

SEQ ID NO: 493013 - DNA, 25 bp, Homo sapien
gggcttaagaaccttggtgcatttg

SEQ ID NO: 493014 - DNA, 25 bp, Homo sapien
tcagcgatagtccagacggcagaac

SEQ ID NO: 493015 - DNA, 25 bp, Homo sapien
tagtccagacggcagaactagaact

SEQ ID NO: 493016 - DNA, 25 bp, Homo sapien
gctggcaagcagagggcttaagaac

SEQ ID NO: 493017 - DNA, 25 bp, Homo sapien
tgaattttgaaagcacccgcctttg

SEQ ID NO: 493018 - DNA, 25 bp, Homo sapien
caataactcgggaatgttgtccggt

SEQ ID NO: 493019 - DNA, 25 bp, Homo sapien
gagggaatctgctggttagtcaacc

SEQ ID NO: 493020 - DNA, 25 bp, Homo sapien
gcatttctgaatccgcttgtgggaa

SEQ ID NO: 493021 - DNA, 25 bp, Homo sapien
gggaatcccgggtcacctctggcac

SEQ ID NO: 493022 - DNA, 25 bp, Homo sapien
ctgggaatcccgggtcacctctggc

SEQ ID NO: 493023 - DNA, 25 bp, Homo sapien
tgggaatcccgggtcacctctggca

SEQ ID NO: 493024 - DNA, 25 bp, Homo sapien
ccactggggcactagcgggcttcat

SEQ ID NO: 493025 - DNA, 25 bp, Homo sapien
cataccacaccgctgcctttgtgtt

SEQ ID NO: 493026 - DNA, 25 bp, Homo sapien
tgcctttgtgttcgtgtccagaggg

SEQ ID NO: 493027 - DNA, 25 bp, Homo sapien
gtgagtctcccataccacaccgctg

SEQ ID NO: 493028 - DNA, 25 bp, Homo sapien
gatgccggggtctccgatgaagccc

SEQ ID NO: 493029 - DNA, 25 bp, Homo sapien
tccgatgaagcccttgggtcccatc

SEQ ID NO: 493030 - DNA, 25 bp, Homo sapien
ccccgtagagcgcagggatgccggg

SEQ ID NO: 493031 - DNA, 25 bp, Homo sapien
ctggaggccctcgctttccatcagg

SEQ ID NO: 493032 - DNA, 25 bp, Homo sapien
ctgagaaggcagattatcaaggtgg

SEQ ID NO: 493033 - DNA, 25 bp, Homo sapien
tgttcagttgtagctttggctgtgc

SEQ ID NO: 493034 - DNA, 25 bp, Homo sapien
cagttgtagctttggctgtgcacgg

SEQ ID NO: 493035 - DNA, 25 bp, Homo sapien
tcagttgtagctttggctgtgcacg

SEQ ID NO: 493036 - DNA, 25 bp, Homo sapien
ttcagttgtagctttggctgtgcac

SEQ ID NO: 493037 - DNA, 25 bp, Homo sapien
gaataatgtgagaatatgtgggttt

SEQ ID NO: 493038 - DNA, 25 bp, Homo sapien
actgctcagactctttggcaggttc

SEQ ID NO: 493039 - DNA, 25 bp, Homo sapien
ggcaggttcatgatccagggaaata

SEQ ID NO: 493040 - DNA, 25 bp, Homo sapien
gaagacattgcctctaataactcta

SEQ ID NO: 493041 - DNA, 25 bp, Homo sapien
acttttgtgagctttgttctctgtc

SEQ ID NO: 493042 - DNA, 25 bp, Homo sapien
tgaccaggtcagctgcgtgtccggt

SEQ ID NO: 493043 - DNA, 25 bp, Homo sapien
gccagtgggatttcccgggagtgga

SEQ ID NO: 493044 - DNA, 25 bp, Homo sapien
tgcgtgtccggtcagttgtggactt

SEQ ID NO: 493045 - DNA, 25 bp, Homo sapien
atcaaggagggaggctacgcggtct

SEQ ID NO: 493046 - DNA, 25 bp, Homo sapien
aggctacgcggtctgccatgtgagt

SEQ ID NO: 493047 - DNA, 25 bp, Homo sapien
tgccatgtgagtctgccgtgtggac

SEQ ID NO: 493048 - DNA, 25 bp, Homo sapien
ttaaagggcatcaaggagggaggct

SEQ ID NO: 493049 - DNA, 25 bp, Homo sapien
tttgctcctttcagcccaaacagga

SEQ ID NO: 493050 - DNA, 25 bp, Homo sapien
gctcctttcagcccaaacaggaagc

SEQ ID NO: 493051 - DNA, 25 bp, Homo sapien
tgctcctttcagcccaaacaggaag

SEQ ID NO: 493052 - DNA, 25 bp, Homo sapien
ttgctcctttcagcccaaacaggaa

SEQ ID NO: 493053 - DNA, 25 bp, Homo sapien
ctggcagtcccggaagacctttgat

SEQ ID NO: 493054 - DNA, 25 bp, Homo sapien
gttgatgcctgcgaagcccttgggt

SEQ ID NO: 493055 - DNA, 25 bp, Homo sapien
cggctccccgttgatgcctgcgaag

SEQ ID NO: 493056 - DNA, 25 bp, Homo sapien
agcttcgtcgccttctgtacatctg

SEQ ID NO: 493057 - DNA, 25 bp, Homo sapien
tggacatgtagaaagtccgccttgg

SEQ ID NO: 493058 - DNA, 25 bp, Homo sapien
tgtggcagccaccaatcgacttcct

SEQ ID NO: 493059 - DNA, 25 bp, Homo sapien
actctttcaagagctgtcggctgcg

SEQ ID NO: 493060 - DNA, 25 bp, Homo sapien
tgctcccacgtgaaggtcagggcta

SEQ ID NO: 493061 - DNA, 25 bp, Homo sapien
agctccgtgccatgaagcagttggg

SEQ ID NO: 493062 - DNA, 25 bp, Homo sapien
gtcatggccgtcagcaacacagctc

SEQ ID NO: 493063 - DNA, 25 bp, Homo sapien
ctctgcggggctgcggttccttcca

SEQ ID NO: 493064 - DNA, 25 bp, Homo sapien
agttgggagtcatggccgtcagcaa

SEQ ID NO: 493065 - DNA, 25 bp, Homo sapien
ttgtactgtgagggcatctgagaag

SEQ ID NO: 493066 - DNA, 25 bp, Homo sapien
tttgtactgtgagggcatctgagaa

SEQ ID NO: 493067 - DNA, 25 bp, Homo sapien
attgttctggaatctccttttgctc

SEQ ID NO: 493068 - DNA, 25 bp, Homo sapien
ggtccgggagcaccaatgttgccag

SEQ ID NO: 493069 - DNA, 25 bp, Homo sapien
ctcctttgggtccgggagcaccaat

SEQ ID NO: 493070 - DNA, 25 bp, Homo sapien
ctttgggtccgggagcaccaatgtt

SEQ ID NO: 493071 - DNA, 25 bp, Homo sapien
atcgtcacctttcatcccgggcaca

SEQ ID NO: 493072 - DNA, 25 bp, Homo sapien
gggaatccatcgagcccatcgcggc

SEQ ID NO: 493073 - DNA, 25 bp, Homo sapien
tgggacgccgggctgtccccgctca

SEQ ID NO: 493074 - DNA, 25 bp, Homo sapien
ctgggctgccatcgtcacctttcat

SEQ ID NO: 493075 - DNA, 25 bp, Homo sapien
gagaggacggagctgccgcagtttg

SEQ ID NO: 493076 - DNA, 25 bp, Homo sapien
gaagagaggacggagctgccgcagt

SEQ ID NO: 493077 - DNA, 25 bp, Homo sapien
acggagctgccgcagtttgtggcta

SEQ ID NO: 493078 - DNA, 25 bp, Homo sapien
gctgccgcagtttgtggctactcac

SEQ ID NO: 493079 - DNA, 25 bp, Homo sapien
tggtccaggtaagccggcgtctcca

SEQ ID NO: 493080 - DNA, 25 bp, Homo sapien
ttctcctggagtacccttcgttcca

SEQ ID NO: 493081 - DNA, 25 bp, Homo sapien
gcgtctccagggaaaccacgttggc

SEQ ID NO: 493082 - DNA, 25 bp, Homo sapien
cagggaaaccacgttggcctttgag

SEQ ID NO: 493083 - DNA, 25 bp, Homo sapien
ttactggctcgtctggggcgtgcac

SEQ ID NO: 493084 - DNA, 25 bp, Homo sapien
acgtgtgtgaaggtgtgtcgtatat

SEQ ID NO: 493085 - DNA, 25 bp, Homo sapien
tcgtctggggcgtgcacgtgtgtga

SEQ ID NO: 493086 - DNA, 25 bp, Homo sapien
tgtgtgaaggtgtgtcgtatatgtt

SEQ ID NO: 493087 - DNA, 25 bp, Homo sapien
ctgtcacctccaacggcccttttca

SEQ ID NO: 493088 - DNA, 25 bp, Homo sapien
ggcaggcctggcaatcccttgggcc

SEQ ID NO: 493089 - DNA, 25 bp, Homo sapien
tggcaatcccttgggccctcctatg

SEQ ID NO: 493090 - DNA, 25 bp, Homo sapien
ctggcaggcctggcaatcccttggg

SEQ ID NO: 493091 - DNA, 25 bp, Homo sapien
aggcctggcaatcccttgggccctc

SEQ ID NO: 493092 - DNA, 25 bp, Homo sapien
agctcctgcgaagcctgggattcct

SEQ ID NO: 493093 - DNA, 25 bp, Homo sapien
ttcacgacctgcgtctcctggcaag

SEQ ID NO: 493094 - DNA, 25 bp, Homo sapien
tgggaacccttcacgacctgcgtct

SEQ ID NO: 493095 - DNA, 25 bp, Homo sapien
cctgcgaagcctgggattcctcgga

SEQ ID NO: 493096 - DNA, 25 bp, Homo sapien
ttcctgcaagatctgtagatagctt

SEQ ID NO: 493097 - DNA, 25 bp, Homo sapien
gacagccattccgaaacacctgtct

SEQ ID NO: 493098 - DNA, 25 bp, Homo sapien
tcctttttcctgcaagatctgtaga

SEQ ID NO: 493099 - DNA, 25 bp, Homo sapien
ctgggagacaggtgttgcggaggac

SEQ ID NO: 493100 - DNA, 25 bp, Homo sapien
tgataatgggtgcatcccatccatt

SEQ ID NO: 493101 - DNA, 25 bp, Homo sapien
gataatgggtgcatcccatccattc

SEQ ID NO: 493102 - DNA, 25 bp, Homo sapien
tccaaatcacctgataatgggtgca

SEQ ID NO: 493103 - DNA, 25 bp, Homo sapien
ctgtccaaatcacctgataatgggt

SEQ ID NO: 493104 - DNA, 25 bp, Homo sapien
tctccctggtagaaacccgtcactg

SEQ ID NO: 493105 - DNA, 25 bp, Homo sapien
gaggaacagcacttcgggatggaaa

SEQ ID NO: 493106 - DNA, 25 bp, Homo sapien
tcactgtcggttgggaaacgcttca

SEQ ID NO: 493107 - DNA, 25 bp, Homo sapien
cgcttcaaagaggaacgacacccct

SEQ ID NO: 493108 - DNA, 25 bp, Homo sapien
cactgcacctttggatcctcggggt

SEQ ID NO: 493109 - DNA, 25 bp, Homo sapien
gcacctttggatcctcggggtccta

SEQ ID NO: 493110 - DNA, 25 bp, Homo sapien
cccactgcacctttggatcctcggg

SEQ ID NO: 493111 - DNA, 25 bp, Homo sapien
cctttggatcctcggggtcctatga

SEQ ID NO: 493112 - DNA, 25 bp, Homo sapien
gcaggccgatgggacctggggatcc

SEQ ID NO: 493113 - DNA, 25 bp, Homo sapien
cctggcaggccgatgggacctgggg

SEQ ID NO: 493114 - DNA, 25 bp, Homo sapien
caggccgatgggacctggggatcca

SEQ ID NO: 493115 - DNA, 25 bp, Homo sapien
ctctgaatccaggggggcctctgtc

SEQ ID NO: 493116 - DNA, 25 bp, Homo sapien
gcctctgtctccgggaaggccttta

SEQ ID NO: 493117 - DNA, 25 bp, Homo sapien
tctgtctccgggaaggcctttaagc

SEQ ID NO: 493118 - DNA, 25 bp, Homo sapien
caggggggcctctgtctccgggaag

SEQ ID NO: 493119 - DNA, 25 bp, Homo sapien
tgtgcatctgggatggggcccccgg

SEQ ID NO: 493120 - DNA, 25 bp, Homo sapien
gattggggtcgcccttggaggccac

SEQ ID NO: 493121 - DNA, 25 bp, Homo sapien
ggattggggtcgcccttggaggcca

SEQ ID NO: 493122 - DNA, 25 bp, Homo sapien
ttcttcacctctgactaagcatggc

SEQ ID NO: 493123 - DNA, 25 bp, Homo sapien
caccaatagaattgcattccagatt

SEQ ID NO: 493124 - DNA, 25 bp, Homo sapien
tcacctctgactaagcatggccagg

SEQ ID NO: 493125 - DNA, 25 bp, Homo sapien
aatttttacaccaatagaattgcat

SEQ ID NO: 493126 - DNA, 25 bp, Homo sapien
cagtttctgcagacagcgctgattt

SEQ ID NO: 493127 - DNA, 25 bp, Homo sapien
gcgctgatttgcatcttatcttcca

SEQ ID NO: 493128 - DNA, 25 bp, Homo sapien
tgaactcatttaagtgccttccagg

SEQ ID NO: 493129 - DNA, 25 bp, Homo sapien
tcatttaagtgccttccaggaaggc

SEQ ID NO: 493130 - DNA, 25 bp, Homo sapien
tgcacagccagtcgaatggaagcag

SEQ ID NO: 493131 - DNA, 25 bp, Homo sapien
cctgtagcactggtgagcggaactg

SEQ ID NO: 493132 - DNA, 25 bp, Homo sapien
tgcctaacaaggcatatgaagcttg

SEQ ID NO: 493133 - DNA, 25 bp, Homo sapien
gcgtgtgtttgtggccgtcctgcac

SEQ ID NO: 493134 - DNA, 25 bp, Homo sapien
gacagcacggtctccgggtgaatgt

SEQ ID NO: 493135 - DNA, 25 bp, Homo sapien
cagtctgggcgtgcttctgagcgct

SEQ ID NO: 493136 - DNA, 25 bp, Homo sapien
ttgcaaaaatcaggcaccgaggtgc

SEQ ID NO: 493137 - DNA, 25 bp, Homo sapien
ggtgaatgtgcacgaatgcccgatc

SEQ ID NO: 493138 - DNA, 25 bp, Homo sapien
tcaggctgctgactgcgcactgtct

SEQ ID NO: 493139 - DNA, 25 bp, Homo sapien
ccacgtcaacctgcagcgaggaaga

SEQ ID NO: 493140 - DNA, 25 bp, Homo sapien
tcataacccagggacatggactgtg

SEQ ID NO: 493141 - DNA, 25 bp, Homo sapien
gagattctctaagatgcacggatgc

SEQ ID NO: 493142 - DNA, 25 bp, Homo sapien
tcttctagtttttaacactagctcc

SEQ ID NO: 493143 - DNA, 25 bp, Homo sapien
catatacactgacgaattttccttc

SEQ ID NO: 493144 - DNA, 25 bp, Homo sapien
tgctttccacatgcaggatactaac

SEQ ID NO: 493145 - DNA, 25 bp, Homo sapien
gctccctggacctccttatattcag

SEQ ID NO: 493146 - DNA, 25 bp, Homo sapien
tcctggaggcccatacaggcctggc

SEQ ID NO: 493147 - DNA, 25 bp, Homo sapien
tggcatcccaggcatcccttggctt

SEQ ID NO: 493148 - DNA, 25 bp, Homo sapien
tgggattcctggcagccccaagggc

SEQ ID NO: 493149 - DNA, 25 bp, Homo sapien
gctcctgggaatccatgcagtcctg

SEQ ID NO: 493150 - DNA, 25 bp, Homo sapien
cagagagacctttcatgcccacagg

SEQ ID NO: 493151 - DNA, 25 bp, Homo sapien
tggatggccttgctcccctgtgaag

SEQ ID NO: 493152 - DNA, 25 bp, Homo sapien
attcctttaaatccagggcttcctg

SEQ ID NO: 493153 - DNA, 25 bp, Homo sapien
gggtcccaggcattccatcaattcc

SEQ ID NO: 493154 - DNA, 25 bp, Homo sapien
cagacccttcagaccgggtattccg

SEQ ID NO: 493155 - DNA, 25 bp, Homo sapien
gtctccctttgagtccaggcatgcc

SEQ ID NO: 493156 - DNA, 25 bp, Homo sapien
ggtattccgaaaaatccagcctcgc

SEQ ID NO: 493157 - DNA, 25 bp, Homo sapien
gtccaggcatgccttggaaaccatc

SEQ ID NO: 493158 - DNA, 25 bp, Homo sapien
ctggaagggaatagagtgctgtcat

SEQ ID NO: 493159 - DNA, 25 bp, Homo sapien
gcaggatgacaggaggtggtcctgg

SEQ ID NO: 493160 - DNA, 25 bp, Homo sapien
ggatgacaggaggtggtcctggggg

SEQ ID NO: 493161 - DNA, 25 bp, Homo sapien
caggatgacaggaggtggtcctggg

SEQ ID NO: 493162 - DNA, 25 bp, Homo sapien
tgacaggaggtggtcctgggggccc

SEQ ID NO: 493163 - DNA, 25 bp, Homo sapien
cttttgcgcccaggtatcctttcag

SEQ ID NO: 493164 - DNA, 25 bp, Homo sapien
aggtatcctttcagccccataggcc

SEQ ID NO: 493165 - DNA, 25 bp, Homo sapien
ccaggtatcctttcagccccatagg

SEQ ID NO: 493166 - DNA, 25 bp, Homo sapien
tttgcgcccaggtatcctttcagcc

SEQ ID NO: 493167 - DNA, 25 bp, Homo sapien
atgccggggactccgatgtctccct

SEQ ID NO: 493168 - DNA, 25 bp, Homo sapien
ttgactcctttgatgtggccgggcc

SEQ ID NO: 493169 - DNA, 25 bp, Homo sapien
tgacagccctgggatgcctggcatt

SEQ ID NO: 493170 - DNA, 25 bp, Homo sapien
gggatgcctggcattccttggatac

SEQ ID NO: 493171 - DNA, 25 bp, Homo sapien
tatgaatcctgggaatcccgtaatt

SEQ ID NO: 493172 - DNA, 25 bp, Homo sapien
aatcctgggaatcccgtaattccag

SEQ ID NO: 493173 - DNA, 25 bp, Homo sapien
gcttcctatgaatcctgggaatccc

SEQ ID NO: 493174 - DNA, 25 bp, Homo sapien
ccggcttcctatgaatcctgggaat

SEQ ID NO: 493175 - DNA, 25 bp, Homo sapien
accagtcgcgccaatctcgccatac

SEQ ID NO: 493176 - DNA, 25 bp, Homo sapien
cgaaatcaccagtcgcgccaatctc

SEQ ID NO: 493177 - DNA, 25 bp, Homo sapien
gaaatcaccagtcgcgccaatctcg

SEQ ID NO: 493178 - DNA, 25 bp, Homo sapien
agtcgcgccaatctcgccatacagg

SEQ ID NO: 493179 - DNA, 25 bp, Homo sapien
cagagagctctgaattgtggactcc

SEQ ID NO: 493180 - DNA, 25 bp, Homo sapien
agctctgaattgtggactccctgtt

SEQ ID NO: 493181 - DNA, 25 bp, Homo sapien
gttttcactggacgggcaacactca

SEQ ID NO: 493182 - DNA, 25 bp, Homo sapien
gaattgtggactccctgttttcact

SEQ ID NO: 493183 - DNA, 25 bp, Homo sapien
aaatttatagtgtccccgatgtcac

SEQ ID NO: 493184 - DNA, 25 bp, Homo sapien
ctggtattccagtggtgccccgctc

SEQ ID NO: 493185 - DNA, 25 bp, Homo sapien
ctggtaaatttatagtgtccccgat

SEQ ID NO: 493186 - DNA, 25 bp, Homo sapien
tggtattccagtggtgccccgctcc

SEQ ID NO: 493187 - DNA, 25 bp, Homo sapien
taatggcctagggtggcagacacag

SEQ ID NO: 493188 - DNA, 25 bp, Homo sapien
tgaaggcatcattagagacgcgtgg

SEQ ID NO: 493189 - DNA, 25 bp, Homo sapien
tacagagctcccgtcactcaggagg

SEQ ID NO: 493190 - DNA, 25 bp, Homo sapien
acagataacaaaggagcccgggagg

SEQ ID NO: 493191 - DNA, 25 bp, Homo sapien
aagccgatgtcaccttctgttccct

SEQ ID NO: 493192 - DNA, 25 bp, Homo sapien
ttggactccagtcacgcctgttatc

SEQ ID NO: 493193 - DNA, 25 bp, Homo sapien
ccagggaagccgatgtcaccttctg

SEQ ID NO: 493194 - DNA, 25 bp, Homo sapien
tggactccagtcacgcctgttatcc

SEQ ID NO: 493195 - DNA, 25 bp, Homo sapien
ccaggcagtccaatccgccccagct

SEQ ID NO: 493196 - DNA, 25 bp, Homo sapien
aggcagtccaatccgccccagctct

SEQ ID NO: 493197 - DNA, 25 bp, Homo sapien
caccaggcagtccaatccgccccag

SEQ ID NO: 493198 - DNA, 25 bp, Homo sapien
gtccaatccgccccagctctccctg

SEQ ID NO: 493199 - DNA, 25 bp, Homo sapien
ttcttgacgcctcgccactgctgta

SEQ ID NO: 493200 - DNA, 25 bp, Homo sapien
gacgcctcgccactgctgtatgttt

SEQ ID NO: 493201 - DNA, 25 bp, Homo sapien
taaaagctgcttggaacaaatagcc

SEQ ID NO: 493202 - DNA, 25 bp, Homo sapien
tagcccggtgtcatttccattccct

SEQ ID NO: 493203 - DNA, 25 bp, Homo sapien
tatttcatgtgtgggacagcacagg

SEQ ID NO: 493204 - DNA, 25 bp, Homo sapien
catgtgtgggacagcacagggggtt

SEQ ID NO: 493205 - DNA, 25 bp, Homo sapien
gttatttcatgtgtgggacagcaca

SEQ ID NO: 493206 - DNA, 25 bp, Homo sapien
ttcatgtgtgggacagcacaggggg

SEQ ID NO: 493207 - DNA, 25 bp, Homo sapien
caagccgtgtaagccgcggatccca

SEQ ID NO: 493208 - DNA, 25 bp, Homo sapien
tggtgcctggcaagccgtgtaagcc

SEQ ID NO: 493209 - DNA, 25 bp, Homo sapien
gtaagccgcggatcccacggagtcc

SEQ ID NO: 493210 - DNA, 25 bp, Homo sapien
cctggcaagccgtgtaagccgcgga

SEQ ID NO: 493211 - DNA, 25 bp, Homo sapien
tgccaagccttcctgcactatgcta

SEQ ID NO: 493212 - DNA, 25 bp, Homo sapien
aaaatgattccccacttagtgcctg

SEQ ID NO: 493213 - DNA, 25 bp, Homo sapien
aatttaggatgaaaatagctgaatt

SEQ ID NO: 493214 - DNA, 25 bp, Homo sapien
aataaagaagttccaagaagctgcc

SEQ ID NO: 493215 - DNA, 25 bp, Homo sapien
tgtcggtgtttccaaccatacagtt

SEQ ID NO: 493216 - DNA, 25 bp, Homo sapien
cagctgatgtcggtgtttccaacca

SEQ ID NO: 493217 - DNA, 25 bp, Homo sapien
aacagcagctgatgtcggtgtttcc

SEQ ID NO: 493218 - DNA, 25 bp, Homo sapien
gatgtcggtgtttccaaccatacag

SEQ ID NO: 493219 - DNA, 25 bp, Homo sapien
tttctgtcctgggactcccacaggg

SEQ ID NO: 493220 - DNA, 25 bp, Homo sapien
gcctggaagggtgttggcctctcct

SEQ ID NO: 493221 - DNA, 25 bp, Homo sapien
ctgggtcacctctttccccaggagg

SEQ ID NO: 493222 - DNA, 25 bp, Homo sapien
gaagcctgggtctccgtggatgtca

SEQ ID NO: 493223 - DNA, 25 bp, Homo sapien
ccactgggatcctgtctgcctgtgc

SEQ ID NO: 493224 - DNA, 25 bp, Homo sapien
aaggcgctgcccgatcatgcttaga

SEQ ID NO: 493225 - DNA, 25 bp, Homo sapien
ctgcctgtgctcgacttccccaagg

SEQ ID NO: 493226 - DNA, 25 bp, Homo sapien
ctgtgaggagccctccactgggatc

SEQ ID NO: 493227 - DNA, 25 bp, Homo sapien
aaatatccctggcgcccctttgtca

SEQ ID NO: 493228 - DNA, 25 bp, Homo sapien
ataccagggaacccctgaagtcctg

SEQ ID NO: 493229 - DNA, 25 bp, Homo sapien
tgtgataccagggaacccctgaagt

SEQ ID NO: 493230 - DNA, 25 bp, Homo sapien
caccaggtgccccagagatgttgga

SEQ ID NO: 493231 - DNA, 25 bp, Homo sapien
cctgggttccctgtgtcacctttgc

SEQ ID NO: 493232 - DNA, 25 bp, Homo sapien
tggtggccctggtgggccccgataa

SEQ ID NO: 493233 - DNA, 25 bp, Homo sapien
tttttctcctgggagaccaaacaca

SEQ ID NO: 493234 - DNA, 25 bp, Homo sapien
tgggagaccaaacacaccaggcctg

SEQ ID NO: 493235 - DNA, 25 bp, Homo sapien
gtgggtccagtgttccccatgaagc

SEQ ID NO: 493236 - DNA, 25 bp, Homo sapien
gggattcctgcaatcccgggggctc

SEQ ID NO: 493237 - DNA, 25 bp, Homo sapien
ccactgtccctggttggacggcaat

SEQ ID NO: 493238 - DNA, 25 bp, Homo sapien
tgtccctggttggacggcaatcttc

SEQ ID NO: 493239 - DNA, 25 bp, Homo sapien
tccctggttggacggcaatcttctg

SEQ ID NO: 493240 - DNA, 25 bp, Homo sapien
cccggaagccgggaacagcagacac

SEQ ID NO: 493241 - DNA, 25 bp, Homo sapien
cttcttggccaatcggcccctggtg

SEQ ID NO: 493242 - DNA, 25 bp, Homo sapien
gcccctggtggcctatgggtccttc

SEQ ID NO: 493243 - DNA, 25 bp, Homo sapien
ggtggcctatgggtccttcatctcc

SEQ ID NO: 493244 - DNA, 25 bp, Homo sapien
aaaagtaagacagggcttcgcagtg

SEQ ID NO: 493245 - DNA, 25 bp, Homo sapien
cataggagtgtagctgctacgccca

SEQ ID NO: 493246 - DNA, 25 bp, Homo sapien
taatcctgacccttgaagtctactg

SEQ ID NO: 493247 - DNA, 25 bp, Homo sapien
gctacgcccagattaggagcaggag

SEQ ID NO: 493248 - DNA, 25 bp, Homo sapien
tacccataatttgccggctgcggat

SEQ ID NO: 493249 - DNA, 25 bp, Homo sapien
ggatgtgcccaacgtgcctggcgtt

SEQ ID NO: 493250 - DNA, 25 bp, Homo sapien
caggagacatggctcatcgcaggcc

SEQ ID NO: 493251 - DNA, 25 bp, Homo sapien
gccatgctgactgcgcacttgacca

SEQ ID NO: 493252 - DNA, 25 bp, Homo sapien
gatgctgacgctgcggcctggcata

SEQ ID NO: 493253 - DNA, 25 bp, Homo sapien
caccaggaggtagccgatgctgacg

SEQ ID NO: 493254 - DNA, 25 bp, Homo sapien
ccgatgctgacgctgcggcctggca

SEQ ID NO: 493255 - DNA, 25 bp, Homo sapien
gtagccgatgctgacgctgcggcct

SEQ ID NO: 493256 - DNA, 25 bp, Homo sapien
tcgaagtacagcaggctgtatccac

SEQ ID NO: 493257 - DNA, 25 bp, Homo sapien
ggccctcgaagtacagcaggctgta

SEQ ID NO: 493258 - DNA, 25 bp, Homo sapien
tcctggccctcgaagtacagcaggc

SEQ ID NO: 493259 - DNA, 25 bp, Homo sapien
ctggttgtgcgccttctcctggccc

SEQ ID NO: 493260 - DNA, 25 bp, Homo sapien
gtttgggagtctcgctgtggccctt

SEQ ID NO: 493261 - DNA, 25 bp, Homo sapien
cagccgtggagggtttgggagtctc

SEQ ID NO: 493262 - DNA, 25 bp, Homo sapien
tctcgctgtggccctttgatcttgg

SEQ ID NO: 493263 - DNA, 25 bp, Homo sapien
ttgatcttggccacttccgggccag

SEQ ID NO: 493264 - DNA, 25 bp, Homo sapien
catgtagctttattgcttctggaga

SEQ ID NO: 493265 - DNA, 25 bp, Homo sapien
tctggagactaagatagcctttatc

SEQ ID NO: 493266 - DNA, 25 bp, Homo sapien
gggtcttaacagcactggccccaag

SEQ ID NO: 493267 - DNA, 25 bp, Homo sapien
aagaaaactctgatggcctccaagg

SEQ ID NO: 493268 - DNA, 25 bp, Homo sapien
tgctgaaccgcgccaggcaggagcc

SEQ ID NO: 493269 - DNA, 25 bp, Homo sapien
ggtgctgaaccgcgccaggcaggag

SEQ ID NO: 493270 - DNA, 25 bp, Homo sapien
gtgctgaaccgcgccaggcaggagc

SEQ ID NO: 493271 - DNA, 25 bp, Homo sapien
ggaatatccgatccacaaactccgc

SEQ ID NO: 493272 - DNA, 25 bp, Homo sapien
ccagtaggacttgtcgttccggctg

SEQ ID NO: 493273 - DNA, 25 bp, Homo sapien
cagaacagcggctgatgtagggctt

SEQ ID NO: 493274 - DNA, 25 bp, Homo sapien
gtagggcttgatctcgtcctcggcc

SEQ ID NO: 493275 - DNA, 25 bp, Homo sapien
cgggaccctattccaagttgaggag

SEQ ID NO: 493276 - DNA, 25 bp, Homo sapien
ctattttatacccaaaggcgatccg

SEQ ID NO: 493277 - DNA, 25 bp, Homo sapien
tacaatgaatttatcgggacgggac

SEQ ID NO: 493278 - DNA, 25 bp, Homo sapien
taaacctaatctggccaaagctgag

SEQ ID NO: 493279 - DNA, 25 bp, Homo sapien
gccaggctggccgttcggtaagaac

SEQ ID NO: 493280 - DNA, 25 bp, Homo sapien
tcaatacggacatgaggcatcctcg

SEQ ID NO: 493281 - DNA, 25 bp, Homo sapien
ggtaagaactagagccgtgacagca

SEQ ID NO: 493282 - DNA, 25 bp, Homo sapien
cgagcggtagatataatccactgca

SEQ ID NO: 493283 - DNA, 25 bp, Homo sapien
ccagaagctgtacttgttggcgtag

SEQ ID NO: 493284 - DNA, 25 bp, Homo sapien
gcccggtgacaccagtgattggcca

SEQ ID NO: 493285 - DNA, 25 bp, Homo sapien
tctgctcgggaatggtggtcagcca

SEQ ID NO: 493286 - DNA, 25 bp, Homo sapien
tggcgcggaagtcctctagacagct

SEQ ID NO: 493287 - DNA, 25 bp, Homo sapien
accaatttttgggttggcacctgag

SEQ ID NO: 493288 - DNA, 25 bp, Homo sapien
ggttggcacctgaggtaataagtta

SEQ ID NO: 493289 - DNA, 25 bp, Homo sapien
taagcaccaaaatggcccttcctgg

SEQ ID NO: 493290 - DNA, 25 bp, Homo sapien
ggtaataagttaagaataagcacca

SEQ ID NO: 493291 - DNA, 25 bp, Homo sapien
cacatcaacggtatttgggagaaca

SEQ ID NO: 493292 - DNA, 25 bp, Homo sapien
tgtcccaccccgagaagggagttga

SEQ ID NO: 493293 - DNA, 25 bp, Homo sapien
tgccttcaggcggtgcgtctagcag

SEQ ID NO: 493294 - DNA, 25 bp, Homo sapien
taacattggcgtagaaagcagggcc

SEQ ID NO: 493295 - DNA, 25 bp, Homo sapien
tagggatgtggcaaaagaatgacct

SEQ ID NO: 493296 - DNA, 25 bp, Homo sapien
gggatgtggcaaaagaatgacctac

SEQ ID NO: 493297 - DNA, 25 bp, Homo sapien
ctatagggatgtggcaaaagaatga

SEQ ID NO: 493298 - DNA, 25 bp, Homo sapien
atagggatgtggcaaaagaatgacc

SEQ ID NO: 493299 - DNA, 25 bp, Homo sapien
tcacccccagcagtggaggggttaa

SEQ ID NO: 493300 - DNA, 25 bp, Homo sapien
cctatggggtgtaccttcaagtagc

SEQ ID NO: 493301 - DNA, 25 bp, Homo sapien
gacagcacctccgaccctatggggt

SEQ ID NO: 493302 - DNA, 25 bp, Homo sapien
tggaggggttaaatctcagggacaa

SEQ ID NO: 493303 - DNA, 25 bp, Homo sapien
tattttgtagtcgttacacaggagg

SEQ ID NO: 493304 - DNA, 25 bp, Homo sapien
ttgtagtcgttacacaggagggggc

SEQ ID NO: 493305 - DNA, 25 bp, Homo sapien
attttgtagtcgttacacaggaggg

SEQ ID NO: 493306 - DNA, 25 bp, Homo sapien
tgtagtcgttacacaggagggggca

SEQ ID NO: 493307 - DNA, 25 bp, Homo sapien
cacgaatgggttcaactctactgag

SEQ ID NO: 493308 - DNA, 25 bp, Homo sapien
tatggacacgagattaaggcggtca

SEQ ID NO: 493309 - DNA, 25 bp, Homo sapien
gattaaaaacagcagcgtgggcgga

SEQ ID NO: 493310 - DNA, 25 bp, Homo sapien
gcagacgttttgctctatggacacg

SEQ ID NO: 493311 - DNA, 25 bp, Homo sapien
cttcactgtgagttgtctttggtcc

SEQ ID NO: 493312 - DNA, 25 bp, Homo sapien
gactctcgacgtgttcatttataca

SEQ ID NO: 493313 - DNA, 25 bp, Homo sapien
ccacttggtacttgtatcttgatgc

SEQ ID NO: 493314 - DNA, 25 bp, Homo sapien
tgctttataatcctgactctcgacg

SEQ ID NO: 493315 - DNA, 25 bp, Homo sapien
ctgcacctctgaccgtttcagcacc

SEQ ID NO: 493316 - DNA, 25 bp, Homo sapien
tctgaccgtttcagcaccctgggtt

SEQ ID NO: 493317 - DNA, 25 bp, Homo sapien
tgaccgtttcagcaccctgggttgt

SEQ ID NO: 493318 - DNA, 25 bp, Homo sapien
acctctgaccgtttcagcaccctgg

SEQ ID NO: 493319 - DNA, 25 bp, Homo sapien
tatatccagtcataagccacccaag

SEQ ID NO: 493320 - DNA, 25 bp, Homo sapien
tctgaccaggcaagctgtgatctga

SEQ ID NO: 493321 - DNA, 25 bp, Homo sapien
ttgtgcctgactttcgagggcctcc

SEQ ID NO: 493322 - DNA, 25 bp, Homo sapien
caaagcccaatctgcagagtcgaga

SEQ ID NO: 493323 - DNA, 25 bp, Homo sapien
tgtgccggccgctgagcaaatgtgc

SEQ ID NO: 493324 - DNA, 25 bp, Homo sapien
tatgatgtgaatcaccggcagagcc

SEQ ID NO: 493325 - DNA, 25 bp, Homo sapien
gatgcggtggccctttataaaaaga

SEQ ID NO: 493326 - DNA, 25 bp, Homo sapien
aatgtgctttgagaccagcgccaag

SEQ ID NO: 493327 - DNA, 25 bp, Homo sapien
gagtcagcttctatctcagcaaggg

SEQ ID NO: 493328 - DNA, 25 bp, Homo sapien
tctagtctgggcacccaacagcttg

SEQ ID NO: 493329 - DNA, 25 bp, Homo sapien
cggagtctgcattcccgagtcagct

SEQ ID NO: 493330 - DNA, 25 bp, Homo sapien
ggcagtcgctgcttttttctggaca

SEQ ID NO: 493331 - DNA, 25 bp, Homo sapien
gccagatctgctccccttgtgggag

SEQ ID NO: 493332 - DNA, 25 bp, Homo sapien
ttgtgggagtctgtcctccacatct

SEQ ID NO: 493333 - DNA, 25 bp, Homo sapien
gagtatgcagaaagcttgtgctaca

SEQ ID NO: 493334 - DNA, 25 bp, Homo sapien
tgccagaaagttcctaggtagccct

SEQ ID NO: 493335 - DNA, 25 bp, Homo sapien
gtccaacgatgaaaagcacgccaag

SEQ ID NO: 493336 - DNA, 25 bp, Homo sapien
tctcattcctcttcgaaagcgtgcc

SEQ ID NO: 493337 - DNA, 25 bp, Homo sapien
tcaccaggagcgtctgtgaagcccc

SEQ ID NO: 493338 - DNA, 25 bp, Homo sapien
cagtgcggcagatgtgtccaacgat

SEQ ID NO: 493339 - DNA, 25 bp, Homo sapien
cacgattggtactgacggactccgg

SEQ ID NO: 493340 - DNA, 25 bp, Homo sapien
caggaaagtccaggtaaaccaccag

SEQ ID NO: 493341 - DNA, 25 bp, Homo sapien
tagagatgcctgatcctgtttccag

SEQ ID NO: 493342 - DNA, 25 bp, Homo sapien
ggcatccccagaattggacctgagg

SEQ ID NO: 493343 - DNA, 25 bp, Homo sapien
tctgcttgattgaggatgcagctcc

SEQ ID NO: 493344 - DNA, 25 bp, Homo sapien
caaggtgcggacaattgatggcttc

SEQ ID NO: 493345 - DNA, 25 bp, Homo sapien
gaatgtcatacatcccaagtcagcg

SEQ ID NO: 493346 - DNA, 25 bp, Homo sapien
gatggcttctttggctggacaaatc

SEQ ID NO: 493347 - DNA, 25 bp, Homo sapien
ggagttcaaggcctgcctcttccat

SEQ ID NO: 493348 - DNA, 25 bp, Homo sapien
taggctgaaacgatccgcctggctt

SEQ ID NO: 493349 - DNA, 25 bp, Homo sapien
tcctgggagctgaaccgctgaagag

SEQ ID NO: 493350 - DNA, 25 bp, Homo sapien
catggttgttgggaataggagccct

SEQ ID NO: 493351 - DNA, 25 bp, Homo sapien
tttttggagagacaaagtctcacca

SEQ ID NO: 493352 - DNA, 25 bp, Homo sapien
ttggagagacaaagtctcaccatgt

SEQ ID NO: 493353 - DNA, 25 bp, Homo sapien
ttttggagagacaaagtctcaccat

SEQ ID NO: 493354 - DNA, 25 bp, Homo sapien
ccagcagagaccagccgtgagggtc

SEQ ID NO: 493355 - DNA, 25 bp, Homo sapien
tgagaggctgaagcgtggccgtctc

SEQ ID NO: 493356 - DNA, 25 bp, Homo sapien
tgtactttaacccaacagccaggta

SEQ ID NO: 493357 - DNA, 25 bp, Homo sapien
acagccaggtaactcccattccagg

SEQ ID NO: 493358 - DNA, 25 bp, Homo sapien
tccactaataccaagattagggcag

SEQ ID NO: 493359 - DNA, 25 bp, Homo sapien
ataccaagattagggcaggcagttc

SEQ ID NO: 493360 - DNA, 25 bp, Homo sapien
gatttggttaaagggatcagatcca

SEQ ID NO: 493361 - DNA, 25 bp, Homo sapien
cagatccagttggtgcagggacact

SEQ ID NO: 493362 - DNA, 25 bp, Homo sapien
tttgctcggttctcacaggtgctta

SEQ ID NO: 493363 - DNA, 25 bp, Homo sapien
gacagagttccatggtccagctggc

SEQ ID NO: 493364 - DNA, 25 bp, Homo sapien
caggtgcttacagcgtctctggcca

SEQ ID NO: 493365 - DNA, 25 bp, Homo sapien
cgatttgcagttcgtcctgtgtgcc

SEQ ID NO: 493366 - DNA, 25 bp, Homo sapien
gggctcaagatatcgtccctgcttg

SEQ ID NO: 493367 - DNA, 25 bp, Homo sapien
gcttgttctcttcaagtgccgagat

SEQ ID NO: 493368 - DNA, 25 bp, Homo sapien
ccctgcttgttctcttcaagtgccg

SEQ ID NO: 493369 - DNA, 25 bp, Homo sapien
tcaagatatcgtccctgcttgttct

SEQ ID NO: 493370 - DNA, 25 bp, Homo sapien
cacctgcgtggctctatctaggaga

SEQ ID NO: 493371 - DNA, 25 bp, Homo sapien
tctcagaatccacgtacagttagtg

SEQ ID NO: 493372 - DNA, 25 bp, Homo sapien
gagtagatcccctctgctaaaattg

SEQ ID NO: 493373 - DNA, 25 bp, Homo sapien
tgtgagctagtctgtgacacctgcg

SEQ ID NO: 493374 - DNA, 25 bp, Homo sapien
taaaaggctcaaaacatctgatcca

SEQ ID NO: 493375 - DNA, 25 bp, Homo sapien
agaaaaatctgcagtgactgcttct

SEQ ID NO: 493376 - DNA, 25 bp, Homo sapien
taaaggcaatacagaaggtaatacg

SEQ ID NO: 493377 - DNA, 25 bp, Homo sapien
accttgacccttttacatttcagat

SEQ ID NO: 493378 - DNA, 25 bp, Homo sapien
tgccgccctatttgaagccaccgtc

SEQ ID NO: 493379 - DNA, 25 bp, Homo sapien
ccgccctatttgaagccaccgtcat

SEQ ID NO: 493380 - DNA, 25 bp, Homo sapien
tccactgccgccctatttgaagcca

SEQ ID NO: 493381 - DNA, 25 bp, Homo sapien
actgccgccctatttgaagccaccg

SEQ ID NO: 493382 - DNA, 25 bp, Homo sapien
cacagccattggaagcgttttccgg

SEQ ID NO: 493383 - DNA, 25 bp, Homo sapien
tctagatgattgacaagcgcgacgc

SEQ ID NO: 493384 - DNA, 25 bp, Homo sapien
ggctgtcggcagtgggatcccaact

SEQ ID NO: 493385 - DNA, 25 bp, Homo sapien
gccgtcgccggaaacacagccattg

SEQ ID NO: 493386 - DNA, 25 bp, Homo sapien
ctgcgtccagtggcggcccgtacag

SEQ ID NO: 493387 - DNA, 25 bp, Homo sapien
cgtacagcgcgagtgcggccgagag

SEQ ID NO: 493388 - DNA, 25 bp, Homo sapien
aatgcgacaacgaccgcgccggcga

SEQ ID NO: 493389 - DNA, 25 bp, Homo sapien
agtgcggccgagagcaatgcgacaa

SEQ ID NO: 493390 - DNA, 25 bp, Homo sapien
tctgcgtcacactctgctgaaagtc

SEQ ID NO: 493391 - DNA, 25 bp, Homo sapien
ttggtactgggatagcacctttctg

SEQ ID NO: 493392 - DNA, 25 bp, Homo sapien
cacctttctgatctttttggttgag

SEQ ID NO: 493393 - DNA, 25 bp, Homo sapien
gctgaaagtcctcccagtacttttg

SEQ ID NO: 493394 - DNA, 25 bp, Homo sapien
tgactgcagtccaaagctcactgag

SEQ ID NO: 493395 - DNA, 25 bp, Homo sapien
tctttatgagtagatgtaactgcct

SEQ ID NO: 493396 - DNA, 25 bp, Homo sapien
gctcactgagcgtttcacagcaaaa

SEQ ID NO: 493397 - DNA, 25 bp, Homo sapien
aaaccagtgtcacaagttccactga

SEQ ID NO: 493398 - DNA, 25 bp, Homo sapien
acagctcggctatgagagaaatgct

SEQ ID NO: 493399 - DNA, 25 bp, Homo sapien
tggtatgttctatagagctcaatga

SEQ ID NO: 493400 - DNA, 25 bp, Homo sapien
atatttaaaacagctcggctatgag

SEQ ID NO: 493401 - DNA, 25 bp, Homo sapien
gaatgaaaggatctttgcaaatata

SEQ ID NO: 493402 - DNA, 25 bp, Homo sapien
ttccatatcctttatcgaatgtgct

SEQ ID NO: 493403 - DNA, 25 bp, Homo sapien
tgtgctttacgtagcgaaaacgctc

SEQ ID NO: 493404 - DNA, 25 bp, Homo sapien
tacgtagcgaaaacgctctttctaa

SEQ ID NO: 493405 - DNA, 25 bp, Homo sapien
tatcgaatgtgctttacgtagcgaa

SEQ ID NO: 493406 - DNA, 25 bp, Homo sapien
acagaggaggtatgatatttctcac

SEQ ID NO: 493407 - DNA, 25 bp, Homo sapien
acagcctccaactacgcctattctt

SEQ ID NO: 493408 - DNA, 25 bp, Homo sapien
aactacgcctattcttccatcttgc

SEQ ID NO: 493409 - DNA, 25 bp, Homo sapien
tggaagacagaggaggtatgatatt

SEQ ID NO: 493410 - DNA, 25 bp, Homo sapien
gaagaaagtgacaaccacatgttcg

SEQ ID NO: 493411 - DNA, 25 bp, Homo sapien
agtgacaaccacatgttcggagcag

SEQ ID NO: 493412 - DNA, 25 bp, Homo sapien
gacaaccacatgttcggagcagtcg

SEQ ID NO: 493413 - DNA, 25 bp, Homo sapien
cacatgttcggagcagtcgggcatg

SEQ ID NO: 493414 - DNA, 25 bp, Homo sapien
ttgctgcaaaatatggggctccagt

SEQ ID NO: 493415 - DNA, 25 bp, Homo sapien
gagattgctgcaaaatatggggctc

SEQ ID NO: 493416 - DNA, 25 bp, Homo sapien
gctgcaaaatatggggctccagtgt

SEQ ID NO: 493417 - DNA, 25 bp, Homo sapien
gattgctgcaaaatatggggctcca

SEQ ID NO: 493418 - DNA, 25 bp, Homo sapien
gatgaaggagcacaagaggccgact

SEQ ID NO: 493419 - DNA, 25 bp, Homo sapien
agacacaggcgtccagcgctcatta

SEQ ID NO: 493420 - DNA, 25 bp, Homo sapien
aggcgtccagcgctcattactcagc

SEQ ID NO: 493421 - DNA, 25 bp, Homo sapien
gccgactcagggatcgctccggcat

SEQ ID NO: 493422 - DNA, 25 bp, Homo sapien
ggtggacgatcagctccgggctgta

SEQ ID NO: 493423 - DNA, 25 bp, Homo sapien
agaactgggtggacgatcagctccg

SEQ ID NO: 493424 - DNA, 25 bp, Homo sapien
gcacagaacacgtgggacaagtctg

SEQ ID NO: 493425 - DNA, 25 bp, Homo sapien
agaacacgtgggacaagtctgcgcc

SEQ ID NO: 493426 - DNA, 25 bp, Homo sapien
tgttattgctcagaggcccttcgtt

SEQ ID NO: 493427 - DNA, 25 bp, Homo sapien
gcaagctctatagcataggcggtct

SEQ ID NO: 493428 - DNA, 25 bp, Homo sapien
tagggcctggcaccagacatatgtg

SEQ ID NO: 493429 - DNA, 25 bp, Homo sapien
ctgacccatggaacacaggctaggg

SEQ ID NO: 493430 - DNA, 25 bp, Homo sapien
agaagcgcatcatctctacccaagc

SEQ ID NO: 493431 - DNA, 25 bp, Homo sapien
tacccaagccaggtcctacgacaag

SEQ ID NO: 493432 - DNA, 25 bp, Homo sapien
caggtcctacgacaagagcatgcag

SEQ ID NO: 493433 - DNA, 25 bp, Homo sapien
tgagaagcgcatcatctctacccaa

SEQ ID NO: 493434 - DNA, 25 bp, Homo sapien
ctctgttccaacttcacgcctaagg

SEQ ID NO: 493435 - DNA, 25 bp, Homo sapien
cttcacgcctaaggctaagcctgtc

SEQ ID NO: 493436 - DNA, 25 bp, Homo sapien
aggctaagcctgtcatgagggaagt

SEQ ID NO: 493437 - DNA, 25 bp, Homo sapien
gctaagcctgtcatgagggaagtga

SEQ ID NO: 493438 - DNA, 25 bp, Homo sapien
tctccccggggatgacagagggttc

SEQ ID NO: 493439 - DNA, 25 bp, Homo sapien
gaagcagcagccgtgcaccgcagac

SEQ ID NO: 493440 - DNA, 25 bp, Homo sapien
ggctcgttcacctctaattcatccg

SEQ ID NO: 493441 - DNA, 25 bp, Homo sapien
gcagatgggactccccattgagagc

SEQ ID NO: 493442 - DNA, 25 bp, Homo sapien
gcagcccacgctagatgacctgagg

SEQ ID NO: 493443 - DNA, 25 bp, Homo sapien
tcaagaccacggcaacagtgtacag

SEQ ID NO: 493444 - DNA, 25 bp, Homo sapien
acgtcgacgaagtaggaagcctctg

SEQ ID NO: 493445 - DNA, 25 bp, Homo sapien
gaaccagaatgcaaggtccagagtc

SEQ ID NO: 493446 - DNA, 25 bp, Homo sapien
aaaagatacccaaacagccaatgag

SEQ ID NO: 493447 - DNA, 25 bp, Homo sapien
gagtggctgctaagtagacaacaac

SEQ ID NO: 493448 - DNA, 25 bp, Homo sapien
aaccaaaccacagtgaggtcgctcc

SEQ ID NO: 493449 - DNA, 25 bp, Homo sapien
tgcaaagatgctcaacagcatcagc

SEQ ID NO: 493450 - DNA, 25 bp, Homo sapien
gctggcccggggcaatgagggactt

SEQ ID NO: 493451 - DNA, 25 bp, Homo sapien
cgagcgggaactggggctgcctgca

SEQ ID NO: 493452 - DNA, 25 bp, Homo sapien
gggctgcctgcagcgcttgcgggcc

SEQ ID NO: 493453 - DNA, 25 bp, Homo sapien
aactggggctgcctgcagcgcttgc

SEQ ID NO: 493454 - DNA, 25 bp, Homo sapien
tattatgagccaatacattgtgaca

SEQ ID NO: 493455 - DNA, 25 bp, Homo sapien
agattatacactgcagtagcatgta

SEQ ID NO: 493456 - DNA, 25 bp, Homo sapien
gacagacacctgataatacaaaaca

SEQ ID NO: 493457 - DNA, 25 bp, Homo sapien
taaagtgatcctgacttgacagaca

SEQ ID NO: 493458 - DNA, 25 bp, Homo sapien
cgtcgatgacaacagggatgtccct

SEQ ID NO: 493459 - DNA, 25 bp, Homo sapien
cgcgtcgatgacaacagggatgtcc

SEQ ID NO: 493460 - DNA, 25 bp, Homo sapien
tgacaacagggatgtccctggcctt

SEQ ID NO: 493461 - DNA, 25 bp, Homo sapien
agggatgtccctggcctttgacact

SEQ ID NO: 493462 - DNA, 25 bp, Homo sapien
acagaacaaggagccgtgctcactg

SEQ ID NO: 493463 - DNA, 25 bp, Homo sapien
caaggagccgtgctcactgcacagg

SEQ ID NO: 493464 - DNA, 25 bp, Homo sapien
gccttccgggagtccgagccaggag

SEQ ID NO: 493465 - DNA, 25 bp, Homo sapien
gaacaaggagccgtgctcactgcac

SEQ ID NO: 493466 - DNA, 25 bp, Homo sapien
cagccttccggtagccatggatgag

SEQ ID NO: 493467 - DNA, 25 bp, Homo sapien
tgagcacagccttccggtagccatg

SEQ ID NO: 493468 - DNA, 25 bp, Homo sapien
ctccacgtggttgggagtgagcaca

SEQ ID NO: 493469 - DNA, 25 bp, Homo sapien
cagtctgctgaactccacgtggttg

SEQ ID NO: 493470 - DNA, 25 bp, Homo sapien
gattacttgcaggtgtgtccacagg

SEQ ID NO: 493471 - DNA, 25 bp, Homo sapien
tactgggcactaacattgatgggac

SEQ ID NO: 493472 - DNA, 25 bp, Homo sapien
tcttcaggacgaacagggcttgcat

SEQ ID NO: 493473 - DNA, 25 bp, Homo sapien
cattaatgggaagacgcgccatccg

SEQ ID NO: 493474 - DNA, 25 bp, Homo sapien
gacacacgacgacagatagccctgt

SEQ ID NO: 493475 - DNA, 25 bp, Homo sapien
catgctctcgtgtctaaagggatca

SEQ ID NO: 493476 - DNA, 25 bp, Homo sapien
gaggatgcccaggatatcacctgca

SEQ ID NO: 493477 - DNA, 25 bp, Homo sapien
tatcacctgcagtgagtcctccgag

SEQ ID NO: 493478 - DNA, 25 bp, Homo sapien
tagcacagatccatggctgtcatcg

SEQ ID NO: 493479 - DNA, 25 bp, Homo sapien
tcttagcacagatccatggctgtca

SEQ ID NO: 493480 - DNA, 25 bp, Homo sapien
ctgagtcttagcacagatccatggc

SEQ ID NO: 493481 - DNA, 25 bp, Homo sapien
cagatccatggctgtcatcgctgtc

SEQ ID NO: 493482 - DNA, 25 bp, Homo sapien
tcctttctggaccaccgtcacgttg

SEQ ID NO: 493483 - DNA, 25 bp, Homo sapien
tggaccaccgtcacgttgcccaggg

SEQ ID NO: 493484 - DNA, 25 bp, Homo sapien
aggatgtcgcgctctcctttctgga

SEQ ID NO: 493485 - DNA, 25 bp, Homo sapien
ccgttggagaggatgtcgcgctctc

SEQ ID NO: 493486 - DNA, 25 bp, Homo sapien
gcccatgcacagagggcagccgcca

SEQ ID NO: 493487 - DNA, 25 bp, Homo sapien
ccatgcacagagggcagccgccact

SEQ ID NO: 493488 - DNA, 25 bp, Homo sapien
atgcacagagggcagccgccactca

SEQ ID NO: 493489 - DNA, 25 bp, Homo sapien
actggcccatgcacagagggcagcc

SEQ ID NO: 493490 - DNA, 25 bp, Homo sapien
ttagacccaagagagccttccagtg

SEQ ID NO: 493491 - DNA, 25 bp, Homo sapien
tgtgaatgtgacagtagccacgggt

SEQ ID NO: 493492 - DNA, 25 bp, Homo sapien
taacgtcacgtatgcctgtgtatgg

SEQ ID NO: 493493 - DNA, 25 bp, Homo sapien
caagacacgcagtggtgaggctgcc

SEQ ID NO: 493494 - DNA, 25 bp, Homo sapien
tgcggctgctgccttcctggctgca

SEQ ID NO: 493495 - DNA, 25 bp, Homo sapien
gctgctgccttcctggctgcacaca

SEQ ID NO: 493496 - DNA, 25 bp, Homo sapien
ctgccttcctggctgcacacaagca

SEQ ID NO: 493497 - DNA, 25 bp, Homo sapien
ctgcggctgctgccttcctggctgc

SEQ ID NO: 493498 - DNA, 25 bp, Homo sapien
gacgcccagggagcccgacaggagg

SEQ ID NO: 493499 - DNA, 25 bp, Homo sapien
cagtgtaccaggacgcccagggagc

SEQ ID NO: 493500 - DNA, 25 bp, Homo sapien
ccagtgtaccaggacgcccagggag

SEQ ID NO: 493501 - DNA, 25 bp, Homo sapien
ggagcccgacaggaggtccccttgc

SEQ ID NO: 493502 - DNA, 25 bp, Homo sapien
aacttcccagaacagcgtgctgctg

SEQ ID NO: 493503 - DNA, 25 bp, Homo sapien
gcttctgccaagagggttcgtctgt

SEQ ID NO: 493504 - DNA, 25 bp, Homo sapien
tgggccttggttgcacctcggaact

SEQ ID NO: 493505 - DNA, 25 bp, Homo sapien
cacagtgaatgatggacaggcccag

SEQ ID NO: 493506 - DNA, 25 bp, Homo sapien
tgaggccactggatgacagccctgc

SEQ ID NO: 493507 - DNA, 25 bp, Homo sapien
aggccactggatgacagccctgccc

SEQ ID NO: 493508 - DNA, 25 bp, Homo sapien
gaggccactggatgacagccctgcc

SEQ ID NO: 493509 - DNA, 25 bp, Homo sapien
atgaggccactggatgacagccctg

SEQ ID NO: 493510 - DNA, 25 bp, Homo sapien
gctgcttagccctgtttgactgtgc

SEQ ID NO: 493511 - DNA, 25 bp, Homo sapien
cacagcagaatgaacagtaagactc

SEQ ID NO: 493512 - DNA, 25 bp, Homo sapien
tggaggcaactcgagtgaacacagc

SEQ ID NO: 493513 - DNA, 25 bp, Homo sapien
aggaggcacacaggaaacgtctatg

SEQ ID NO: 493514 - DNA, 25 bp, Homo sapien
tgggcgtcgtggtccgggggccgca

SEQ ID NO: 493515 - DNA, 25 bp, Homo sapien
tcaggaccccaaattgtcaatttca

SEQ ID NO: 493516 - DNA, 25 bp, Homo sapien
aggaccccaaattgtcaatttcaag

SEQ ID NO: 493517 - DNA, 25 bp, Homo sapien
ccaaattgtcaatttcaagtctgat

SEQ ID NO: 493518 - DNA, 25 bp, Homo sapien
gagagcaggcgccaaacgcggccac

SEQ ID NO: 493519 - DNA, 25 bp, Homo sapien
aaggcttggtggttgcactgcctgg

SEQ ID NO: 493520 - DNA, 25 bp, Homo sapien
caaagagcttgctgaaggcggcccc

SEQ ID NO: 493521 - DNA, 25 bp, Homo sapien
ggagcgaccgtgcttctggaaggct

SEQ ID NO: 493522 - DNA, 25 bp, Homo sapien
tcagcacacgcgtgggtccggattt

SEQ ID NO: 493523 - DNA, 25 bp, Homo sapien
tgggagcaggccgagaaactctgtt

SEQ ID NO: 493524 - DNA, 25 bp, Homo sapien
caagtagaaacttcgccgatctggg

SEQ ID NO: 493525 - DNA, 25 bp, Homo sapien
tgaaaatctggcaagcaccgtacgc

SEQ ID NO: 493526 - DNA, 25 bp, Homo sapien
tcatggggacccctgtgtagacacg

SEQ ID NO: 493527 - DNA, 25 bp, Homo sapien
ggacaccggagagcgtgggacagga

SEQ ID NO: 493528 - DNA, 25 bp, Homo sapien
acacactcaagggtcagcgtcactc

SEQ ID NO: 493529 - DNA, 25 bp, Homo sapien
gtccccggtccggtctgccctgctg

SEQ ID NO: 493530 - DNA, 25 bp, Homo sapien
catccctaaggacacggctgtgctg

SEQ ID NO: 493531 - DNA, 25 bp, Homo sapien
acaacagaagctaacccgaggtcga

SEQ ID NO: 493532 - DNA, 25 bp, Homo sapien
taagagaacaccctaatgcacgcgt

SEQ ID NO: 493533 - DNA, 25 bp, Homo sapien
tgttggctgaaaccgcagttaccag

SEQ ID NO: 493534 - DNA, 25 bp, Homo sapien
cttctgaagttaggcgtcaaattag

SEQ ID NO: 493535 - DNA, 25 bp, Homo sapien
tctggaaaagttcacatgtagacag

SEQ ID NO: 493536 - DNA, 25 bp, Homo sapien
cagaatttagatgttaattccccag

SEQ ID NO: 493537 - DNA, 25 bp, Homo sapien
tcacatgtagacagtgaagcttctg

SEQ ID NO: 493538 - DNA, 25 bp, Homo sapien
ccatgaacctgctcacgacaagacg

SEQ ID NO: 493539 - DNA, 25 bp, Homo sapien
cctgtcggggctgctaggtcagcat

SEQ ID NO: 493540 - DNA, 25 bp, Homo sapien
ctttatgttaaagcttcctgtcggg

SEQ ID NO: 493541 - DNA, 25 bp, Homo sapien
cgacaagacgcacccatgcttctca

SEQ ID NO: 493542 - DNA, 25 bp, Homo sapien
caggatctgttctcagtgggaggac

SEQ ID NO: 493543 - DNA, 25 bp, Homo sapien
gccttgcttggacgacagatgctca

SEQ ID NO: 493544 - DNA, 25 bp, Homo sapien
gatacctcggccacaattgcgtgag

SEQ ID NO: 493545 - DNA, 25 bp, Homo sapien
gaccatttgccgaaacacacgtgtg

SEQ ID NO: 493546 - DNA, 25 bp, Homo sapien
tcatcttaaccatacagttcagtag

SEQ ID NO: 493547 - DNA, 25 bp, Homo sapien
tatcatcttaaccatacagttcagt

SEQ ID NO: 493548 - DNA, 25 bp, Homo sapien
atcatcttaaccatacagttcagta

SEQ ID NO: 493549 - DNA, 25 bp, Homo sapien
ttcagtagtgttaatatgttcacat

SEQ ID NO: 493550 - DNA, 25 bp, Homo sapien
atgacgcagagagaggtccgaaccc

SEQ ID NO: 493551 - DNA, 25 bp, Homo sapien
agcacagggttgcatgacacagagg

SEQ ID NO: 493552 - DNA, 25 bp, Homo sapien
cagccacggggttgcatggtatgca

SEQ ID NO: 493553 - DNA, 25 bp, Homo sapien
ttgcatgacgcagagagaggtccga

SEQ ID NO: 493554 - DNA, 25 bp, Homo sapien
tttccgtggtaagggtgactgtctg

SEQ ID NO: 493555 - DNA, 25 bp, Homo sapien
gagtgaacgagaagccaaggctcct

SEQ ID NO: 493556 - DNA, 25 bp, Homo sapien
tcttcccactgatgtaccgtttgtc

SEQ ID NO: 493557 - DNA, 25 bp, Homo sapien
caaggctccttcgaagagacacagc

SEQ ID NO: 493558 - DNA, 25 bp, Homo sapien
gagggcgtttaggaagctgcatgga

SEQ ID NO: 493559 - DNA, 25 bp, Homo sapien
ggaaggaacccctaatcgtggcgca

SEQ ID NO: 493560 - DNA, 25 bp, Homo sapien
cttcccacggctgaacgggatctgg

SEQ ID NO: 493561 - DNA, 25 bp, Homo sapien
ccgatcgtggcggagacttcccacg

SEQ ID NO: 493562 - DNA, 25 bp, Homo sapien
gtgctgggatgcacacgtgcttcgc

SEQ ID NO: 493563 - DNA, 25 bp, Homo sapien
gaagcttgcactgtaaacgctcctc

SEQ ID NO: 493564 - DNA, 25 bp, Homo sapien
agggcccggcaacagaagcttgcac

SEQ ID NO: 493565 - DNA, 25 bp, Homo sapien
ttagcgtgctgacgtgggctgtgct

SEQ ID NO: 493566 - DNA, 25 bp, Homo sapien
taaccgcagtggtgctcattccagg

SEQ ID NO: 493567 - DNA, 25 bp, Homo sapien
caccgggtttatcctgttgcaaagc

SEQ ID NO: 493568 - DNA, 25 bp, Homo sapien
gaatcggattgttcacgttgcaacg

SEQ ID NO: 493569 - DNA, 25 bp, Homo sapien
ttttcagcaagtcggagaacggtgc

SEQ ID NO: 493570 - DNA, 25 bp, Homo sapien
ccccagaagaggtggataggcccga

SEQ ID NO: 493571 - DNA, 25 bp, Homo sapien
ctcagtttggaacggcttggagaca

SEQ ID NO: 493572 - DNA, 25 bp, Homo sapien
tcatggacaccgttctcggaggccg

SEQ ID NO: 493573 - DNA, 25 bp, Homo sapien
tgtcgtctcccggtactcagtttgg

SEQ ID NO: 493574 - DNA, 25 bp, Homo sapien
tgccccccggactcttactactaga

SEQ ID NO: 493575 - DNA, 25 bp, Homo sapien
gacagcccaatcacgatgaagagga

SEQ ID NO: 493576 - DNA, 25 bp, Homo sapien
gagaccgtgagtaatgccccccgga

SEQ ID NO: 493577 - DNA, 25 bp, Homo sapien
tttgacagcccaatcacgatgaaga

SEQ ID NO: 493578 - DNA, 25 bp, Homo sapien
ggcgaggcgcaaactttactaggag

SEQ ID NO: 493579 - DNA, 25 bp, Homo sapien
ggtacacagcaactaccgcaactcg

SEQ ID NO: 493580 - DNA, 25 bp, Homo sapien
gcgggacagaaacctccgagaccat

SEQ ID NO: 493581 - DNA, 25 bp, Homo sapien
gggagcggcctgcttcgctgaaaac

SEQ ID NO: 493582 - DNA, 25 bp, Homo sapien
acttgggaaacattcagccccgctg

SEQ ID NO: 493583 - DNA, 25 bp, Homo sapien
caaataccagtttcaaacacttggg

SEQ ID NO: 493584 - DNA, 25 bp, Homo sapien
cgagccgcacttgtccaacgtggaa

SEQ ID NO: 493585 - DNA, 25 bp, Homo sapien
tgcttcggcccggcggctacatctg

SEQ ID NO: 493586 - DNA, 25 bp, Homo sapien
catagttcaccaggtggagctgctc

SEQ ID NO: 493587 - DNA, 25 bp, Homo sapien
catttctctgcaagtcgaaaggcag

SEQ ID NO: 493588 - DNA, 25 bp, Homo sapien
gctgctccccgttggcaggactcaa

SEQ ID NO: 493589 - DNA, 25 bp, Homo sapien
tggtatttcgcgtcgatctcccgca

SEQ ID NO: 493590 - DNA, 25 bp, Homo sapien
ctccgcaaactacaaccggcggcgt

SEQ ID NO: 493591 - DNA, 25 bp, Homo sapien
ccttccctacggcacacagagaaaa

SEQ ID NO: 493592 - DNA, 25 bp, Homo sapien
ctgcagagaacgacgcacaggtcct

SEQ ID NO: 493593 - DNA, 25 bp, Homo sapien
agcgcagcgcagatgggcgccttcc

SEQ ID NO: 493594 - DNA, 25 bp, Homo sapien
acagccaacaattcccggcggacac

SEQ ID NO: 493595 - DNA, 25 bp, Homo sapien
gcaggaaagtttccccaacagccaa

SEQ ID NO: 493596 - DNA, 25 bp, Homo sapien
acaattcccggcggacacgaactcg

SEQ ID NO: 493597 - DNA, 25 bp, Homo sapien
acgaactcgccacctctctctgaca

SEQ ID NO: 493598 - DNA, 25 bp, Homo sapien
aattcgctgcgaagctacgtctcgg

SEQ ID NO: 493599 - DNA, 25 bp, Homo sapien
cttcccggcagaggcgtctagtact

SEQ ID NO: 493600 - DNA, 25 bp, Homo sapien
tgaggcgggacgttccataatatgc

SEQ ID NO: 493601 - DNA, 25 bp, Homo sapien
tacgtctcggatagaacgcgcaggg

SEQ ID NO: 493602 - DNA, 25 bp, Homo sapien
ttcatccgcctcagcgaccaatcgt

SEQ ID NO: 493603 - DNA, 25 bp, Homo sapien
agttattgcgctaggcccgccttca

SEQ ID NO: 493604 - DNA, 25 bp, Homo sapien
gataaggacattccacgaaggacat

SEQ ID NO: 493605 - DNA, 25 bp, Homo sapien
cgttccgcaggggaatgataaggac

SEQ ID NO: 493606 - DNA, 25 bp, Homo sapien
agacagcggaaacacagacccatac

SEQ ID NO: 493607 - DNA, 25 bp, Homo sapien
gaagacgttcaaatcaactcgtcca

SEQ ID NO: 493608 - DNA, 25 bp, Homo sapien
gaagacagcggaaacacagacccat

SEQ ID NO: 493609 - DNA, 25 bp, Homo sapien
gaggccgagcgacccgaagacgttc

SEQ ID NO: 493610 - DNA, 25 bp, Homo sapien
cccgccccagcagcgagaagaacca

SEQ ID NO: 493611 - DNA, 25 bp, Homo sapien
gccccagcagcgagaagaaccaatc

SEQ ID NO: 493612 - DNA, 25 bp, Homo sapien
ggcccgccccagcagcgagaagaac

SEQ ID NO: 493613 - DNA, 25 bp, Homo sapien
acggcccgccccagcagcgagaaga

SEQ ID NO: 493614 - DNA, 25 bp, Homo sapien
tcgccgatttggagggcggaggcca

SEQ ID NO: 493615 - DNA, 25 bp, Homo sapien
gcctatgggaatcgccgatttggag

SEQ ID NO: 493616 - DNA, 25 bp, Homo sapien
gagagccgccgcctatgggaatcgc

SEQ ID NO: 493617 - DNA, 25 bp, Homo sapien
gccgccgcctatgggaatcgccgat

SEQ ID NO: 493618 - DNA, 25 bp, Homo sapien
tcgcgggaggcggtccgaactgcag

SEQ ID NO: 493619 - DNA, 25 bp, Homo sapien
agagatgcggcctgaaactgtctcc

SEQ ID NO: 493620 - DNA, 25 bp, Homo sapien
tactgctataaatccgcgcccgaaa

SEQ ID NO: 493621 - DNA, 25 bp, Homo sapien
acaggcccgggatcactgctactgc

SEQ ID NO: 493622 - DNA, 25 bp, Homo sapien
tttccacggccacgcgcggccccac

SEQ ID NO: 493623 - DNA, 25 bp, Homo sapien
gtttccacggccacgcgcggcccca

SEQ ID NO: 493624 - DNA, 25 bp, Homo sapien
gacagattcgctcgcttctcggcgc

SEQ ID NO: 493625 - DNA, 25 bp, Homo sapien
tgtgacccttgcgacagattcgctc

SEQ ID NO: 493626 - DNA, 25 bp, Homo sapien
aggactgtgatctttcctgaagcca

SEQ ID NO: 493627 - DNA, 25 bp, Homo sapien
gggcaggactgtgatctttcctgaa

SEQ ID NO: 493628 - DNA, 25 bp, Homo sapien
aacaccactgctaaataggaagcca

SEQ ID NO: 493629 - DNA, 25 bp, Homo sapien
gatatcccatcgcaaaattaccaag

SEQ ID NO: 493630 - DNA, 25 bp, Homo sapien
tccatccaggtgaagcctaatttgt

SEQ ID NO: 493631 - DNA, 25 bp, Homo sapien
ttattttacatcacaagcaagcttc

SEQ ID NO: 493632 - DNA, 25 bp, Homo sapien
gctcgtagcactcgtctagctcctt

SEQ ID NO: 493633 - DNA, 25 bp, Homo sapien
cgactgaagcgctcgtagcactcgt

SEQ ID NO: 493634 - DNA, 25 bp, Homo sapien
cgtctgtctcgcgactgaagcgctc

SEQ ID NO: 493635 - DNA, 25 bp, Homo sapien
cttctgcgccccgtctgtctcgcga

SEQ ID NO: 493636 - DNA, 25 bp, Homo sapien
cgatctggatcttctcgtcgcccag

SEQ ID NO: 493637 - DNA, 25 bp, Homo sapien
caccatctggctcacgatctggatc

SEQ ID NO: 493638 - DNA, 25 bp, Homo sapien
tcctggctgcggatcagcgcgcgct

SEQ ID NO: 493639 - DNA, 25 bp, Homo sapien
cagctcctggctgcggatcagcgcg

SEQ ID NO: 493640 - DNA, 25 bp, Homo sapien
tgcgcctcgaacagctccacgtggc

SEQ ID NO: 493641 - DNA, 25 bp, Homo sapien
ctgcgcctcgaacagctccacgtgg

SEQ ID NO: 493642 - DNA, 25 bp, Homo sapien
gcctcgaacagctccacgtggctgt

SEQ ID NO: 493643 - DNA, 25 bp, Homo sapien
tcgaacagctccacgtggctgtcca

SEQ ID NO: 493644 - DNA, 25 bp, Homo sapien
ttctccttgggtgtgcccgaggcgc

SEQ ID NO: 493645 - DNA, 25 bp, Homo sapien
agccttgccgctgttgcccgctgtg

SEQ ID NO: 493646 - DNA, 25 bp, Homo sapien
tgagcgcttgctgttgggcttgtca

SEQ ID NO: 493647 - DNA, 25 bp, Homo sapien
ggcactcgtcgttgtcgcagccgat

SEQ ID NO: 493648 - DNA, 25 bp, Homo sapien
tgggacagtaccacttgcccttggg

SEQ ID NO: 493649 - DNA, 25 bp, Homo sapien
gcccttgggtttatgattgagcccc

SEQ ID NO: 493650 - DNA, 25 bp, Homo sapien
tgcccttgggtttatgattgagccc

SEQ ID NO: 493651 - DNA, 25 bp, Homo sapien
cccggcacttgggacagtaccactt

SEQ ID NO: 493652 - DNA, 25 bp, Homo sapien
gtttattttgtcctcctcacaccag

SEQ ID NO: 493653 - DNA, 25 bp, Homo sapien
ggtttattttgtcctcctcacacca

SEQ ID NO: 493654 - DNA, 25 bp, Homo sapien
cacggtttattttgtcctcctcaca

SEQ ID NO: 493655 - DNA, 25 bp, Homo sapien
gagaagtgtacccaagcattttaaa

SEQ ID NO: 493656 - DNA, 25 bp, Homo sapien
tcctcccgcaagaaatcagtctgag

SEQ ID NO: 493657 - DNA, 25 bp, Homo sapien
gaggttccttgactagaccacttaa

SEQ ID NO: 493658 - DNA, 25 bp, Homo sapien
taggctgtatttttggcgacatggc

SEQ ID NO: 493659 - DNA, 25 bp, Homo sapien
cttaaggctttgtctaaattgctgg

SEQ ID NO: 493660 - DNA, 25 bp, Homo sapien
tttgctggcaattaagtaacttcta

SEQ ID NO: 493661 - DNA, 25 bp, Homo sapien
gacccagggtctgaatacagattct

SEQ ID NO: 493662 - DNA, 25 bp, Homo sapien
tttgacacgtatttatttgctggca

SEQ ID NO: 493663 - DNA, 25 bp, Homo sapien
tggacactagaatttaaacttcata

SEQ ID NO: 493664 - DNA, 25 bp, Homo sapien
cttcaaacagatggtgggctgaact

SEQ ID NO: 493665 - DNA, 25 bp, Homo sapien
cagatggtgggctgaacttgacaag

SEQ ID NO: 493666 - DNA, 25 bp, Homo sapien
taaacttcatataatcttcaaacag

SEQ ID NO: 493667 - DNA, 25 bp, Homo sapien
aaatagttttggcttgtcaagtcaa

SEQ ID NO: 493668 - DNA, 25 bp, Homo sapien
caggtgcaactattgaactctgccg

SEQ ID NO: 493669 - DNA, 25 bp, Homo sapien
caatatgtgggcaaatcaatgttag

SEQ ID NO: 493670 - DNA, 25 bp, Homo sapien
ccgttttgcaaaagcagtcagacaa

SEQ ID NO: 493671 - DNA, 25 bp, Homo sapien
tgtaaaacagacacttatgtccagc

SEQ ID NO: 493672 - DNA, 25 bp, Homo sapien
tctaccaagtaaccctctataatgg

SEQ ID NO: 493673 - DNA, 25 bp, Homo sapien
tggtaggtagcttcacagagactgt

SEQ ID NO: 493674 - DNA, 25 bp, Homo sapien
cacccgagactcttaaatgttctgg

SEQ ID NO: 493675 - DNA, 25 bp, Homo sapien
tatcataacgaaaacactttggacc

SEQ ID NO: 493676 - DNA, 25 bp, Homo sapien
ctttggaccctttatctgaactgta

SEQ ID NO: 493677 - DNA, 25 bp, Homo sapien
aacatacaacgtttctttagtccag

SEQ ID NO: 493678 - DNA, 25 bp, Homo sapien
ttttgtcctcatgtcgggattccag

SEQ ID NO: 493679 - DNA, 25 bp, Homo sapien
tcactggcaagtgcgtgcctgcagg

SEQ ID NO: 493680 - DNA, 25 bp, Homo sapien
aacgtcccagtcactggcaagtgcg

SEQ ID NO: 493681 - DNA, 25 bp, Homo sapien
cagccaacgtcccagtcactggcaa

SEQ ID NO: 493682 - DNA, 25 bp, Homo sapien
cccagtcactggcaagtgcgtgcct

SEQ ID NO: 493683 - DNA, 25 bp, Homo sapien
ccaccgacagtctcaagtattgaga

SEQ ID NO: 493684 - DNA, 25 bp, Homo sapien
ggcaaccaccgacagtctcaagtat

SEQ ID NO: 493685 - DNA, 25 bp, Homo sapien
agcattggcaaccaccgacagtctc

SEQ ID NO: 493686 - DNA, 25 bp, Homo sapien
ttattcagcattggcaaccaccgac

SEQ ID NO: 493687 - DNA, 25 bp, Homo sapien
ttttgaaccccgctgcatctgcaag

SEQ ID NO: 493688 - DNA, 25 bp, Homo sapien
cccctccattttgttcgagttccat

SEQ ID NO: 493689 - DNA, 25 bp, Homo sapien
tactggttcttggaacagcggtgtg

SEQ ID NO: 493690 - DNA, 25 bp, Homo sapien
cacagtggagccttttgaaccccgc

SEQ ID NO: 493691 - DNA, 25 bp, Homo sapien
catccactcgaaggcttgagagagg

SEQ ID NO: 493692 - DNA, 25 bp, Homo sapien
gaggcccgaagaattatgggacaaa

SEQ ID NO: 493693 - DNA, 25 bp, Homo sapien
cagcatccactcgaaggcttgagag

SEQ ID NO: 493694 - DNA, 25 bp, Homo sapien
aggcttgagagaggcccgaagaatt

SEQ ID NO: 493695 - DNA, 25 bp, Homo sapien
cacaagacgaatgacagagaagatg

SEQ ID NO: 493696 - DNA, 25 bp, Homo sapien
ttctcacaagacgaatgacagagaa

SEQ ID NO: 493697 - DNA, 25 bp, Homo sapien
gaagatgaagttggaattctttcca

SEQ ID NO: 493698 - DNA, 25 bp, Homo sapien
ttgcttttgcctcatggatcggatc

SEQ ID NO: 493699 - DNA, 25 bp, Homo sapien
tctggcagtgttcaactttgagaca

SEQ ID NO: 493700 - DNA, 25 bp, Homo sapien
ttattgtcagcggagagaggcccca

SEQ ID NO: 493701 - DNA, 25 bp, Homo sapien
tgtgtgacattattgtcagcggaga

SEQ ID NO: 493702 - DNA, 25 bp, Homo sapien
gagcactgcggcaagagacccccat

SEQ ID NO: 493703 - DNA, 25 bp, Homo sapien
tgtggcccttgtcaccctggggacc

SEQ ID NO: 493704 - DNA, 25 bp, Homo sapien
gccactgcggccagaggtgtcagcc

SEQ ID NO: 493705 - DNA, 25 bp, Homo sapien
ccagaggtgtcagccagggtgagga

SEQ ID NO: 493706 - DNA, 25 bp, Homo sapien
ttaaggagtgtggcccttgtcaccc

SEQ ID NO: 493707 - DNA, 25 bp, Homo sapien
gcttccctgggcttcgccgaaggcc

SEQ ID NO: 493708 - DNA, 25 bp, Homo sapien
tcaaaggaccagggcgagggcgctg

SEQ ID NO: 493709 - DNA, 25 bp, Homo sapien
aaaggaccagggcgagggcgctggg

SEQ ID NO: 493710 - DNA, 25 bp, Homo sapien
cctgggcttcgccgaaggccctggc

SEQ ID NO: 493711 - DNA, 25 bp, Homo sapien
gcctttctctgttctgcgactcttt

SEQ ID NO: 493712 - DNA, 25 bp, Homo sapien
tgcaaaacagcccatccctgaagcc

SEQ ID NO: 493713 - DNA, 25 bp, Homo sapien
tgaagcctttctctgttctgcgact

SEQ ID NO: 493714 - DNA, 25 bp, Homo sapien
ccctgaagcctttctctgttctgcg

SEQ ID NO: 493715 - DNA, 25 bp, Homo sapien
cctgcaggtggtgcctcctgtgcag

SEQ ID NO: 493716 - DNA, 25 bp, Homo sapien
ctgtgcaggggcaggtcagggtgcc

SEQ ID NO: 493717 - DNA, 25 bp, Homo sapien
tgcaggtggtgcctcctgtgcaggg

SEQ ID NO: 493718 - DNA, 25 bp, Homo sapien
gcaggtcagggtgcccacaggtagg

SEQ ID NO: 493719 - DNA, 25 bp, Homo sapien
atgcagccaggcgtgtcctgaatcc

SEQ ID NO: 493720 - DNA, 25 bp, Homo sapien
tcttagagctgggaacacgtggtgt

SEQ ID NO: 493721 - DNA, 25 bp, Homo sapien
aggcctcttagagctgggaacacgt

SEQ ID NO: 493722 - DNA, 25 bp, Homo sapien
cctcttagagctgggaacacgtggt

SEQ ID NO: 493723 - DNA, 25 bp, Homo sapien
tcaggggcctgaattgggggcgttg

SEQ ID NO: 493724 - DNA, 25 bp, Homo sapien
ccaccaacgtctgccagcggcttct

SEQ ID NO: 493725 - DNA, 25 bp, Homo sapien
ttgtgagggtccccaccaacgtctg

SEQ ID NO: 493726 - DNA, 25 bp, Homo sapien
ccagcggcttctgtcccacaagttt

SEQ ID NO: 493727 - DNA, 25 bp, Homo sapien
gactgcatggttggcctccttgtgc

SEQ ID NO: 493728 - DNA, 25 bp, Homo sapien
cagggtacgtctgtcttcccagtca

SEQ ID NO: 493729 - DNA, 25 bp, Homo sapien
caccgctccaagcaggactgcatgg

SEQ ID NO: 493730 - DNA, 25 bp, Homo sapien
caattggtctcgattcctctgtgct

SEQ ID NO: 493731 - DNA, 25 bp, Homo sapien
gctttaggatcacacctctggatgg

SEQ ID NO: 493732 - DNA, 25 bp, Homo sapien
tgtccaatcggctgtgacctacggc

SEQ ID NO: 493733 - DNA, 25 bp, Homo sapien
tgaacctagtagcaatgtcgccatt

SEQ ID NO: 493734 - DNA, 25 bp, Homo sapien
ctttgcccgggtgcctgatgatgct

SEQ ID NO: 493735 - DNA, 25 bp, Homo sapien
gctcgtggtctcgctcggttcggga

SEQ ID NO: 493736 - DNA, 25 bp, Homo sapien
ctcgtggtctcgctcggttcgggag

SEQ ID NO: 493737 - DNA, 25 bp, Homo sapien
caggctccatgaaattctgtgtccg

SEQ ID NO: 493738 - DNA, 25 bp, Homo sapien
tccatgaaattctgtgtccggaatt

SEQ ID NO: 493739 - DNA, 25 bp, Homo sapien
ccagaaatcagcctgcattggattc

SEQ ID NO: 493740 - DNA, 25 bp, Homo sapien
tcagactggactgtgatgtaagcca

SEQ ID NO: 493741 - DNA, 25 bp, Homo sapien
tcgtcttgtagaaagtaatctgcag

SEQ ID NO: 493742 - DNA, 25 bp, Homo sapien
aactgaggtcccaaatcgtcttgta

SEQ ID NO: 493743 - DNA, 25 bp, Homo sapien
tgtgagctcccttgaaagataagcc

SEQ ID NO: 493744 - DNA, 25 bp, Homo sapien
ttccagctggtacaagagttcactc

SEQ ID NO: 493745 - DNA, 25 bp, Homo sapien
ttggatgaatgctgagcctgcccac

SEQ ID NO: 493746 - DNA, 25 bp, Homo sapien
gaagacgatgcctgtgtgccacaat

SEQ ID NO: 493747 - DNA, 25 bp, Homo sapien
ttattggacactggacatggcgccc

SEQ ID NO: 493748 - DNA, 25 bp, Homo sapien
taatcatagcacacttggcacggtg

SEQ ID NO: 493749 - DNA, 25 bp, Homo sapien
tagacattggacatggcacccatcg

SEQ ID NO: 493750 - DNA, 25 bp, Homo sapien
tcagacattgagcacggtacaccat

SEQ ID NO: 493751 - DNA, 25 bp, Homo sapien
cagtaagcttttgatccaccgtgga

SEQ ID NO: 493752 - DNA, 25 bp, Homo sapien
tatcgtactgtgctcggtgctggaa

SEQ ID NO: 493753 - DNA, 25 bp, Homo sapien
tgatttgttgaaatggcgccaccag

SEQ ID NO: 493754 - DNA, 25 bp, Homo sapien
tgagactaacaacatgactgagccg

SEQ ID NO: 493755 - DNA, 25 bp, Homo sapien
gaaggctccaatccaaggttgtgca

SEQ ID NO: 493756 - DNA, 25 bp, Homo sapien
gaagttccctcatgattggatcagg

SEQ ID NO: 493757 - DNA, 25 bp, Homo sapien
catcagcgcgttgttgtcagaagac

SEQ ID NO: 493758 - DNA, 25 bp, Homo sapien
gctggaatcgccaacggataaacat

SEQ ID NO: 493759 - DNA, 25 bp, Homo sapien
tacttgcgcacgtctggtagctgcc

SEQ ID NO: 493760 - DNA, 25 bp, Homo sapien
gaagcagaggaacacgtcatggaga

SEQ ID NO: 493761 - DNA, 25 bp, Homo sapien
ggtagctgccctggacattcatgga

SEQ ID NO: 493762 - DNA, 25 bp, Homo sapien
agggtgtgcccatctcatgtaagac

SEQ ID NO: 493763 - DNA, 25 bp, Homo sapien
gcgggaaccagcttttgtggcccat

SEQ ID NO: 493764 - DNA, 25 bp, Homo sapien
ggaaacccattctgtcgtgtctgcc

SEQ ID NO: 493765 - DNA, 25 bp, Homo sapien
aaacccattctgtcgtgtctgccgg

SEQ ID NO: 493766 - DNA, 25 bp, Homo sapien
gctgctgtgcgggaaccagcttttg

SEQ ID NO: 493767 - DNA, 25 bp, Homo sapien
tggccgttctgttggaatttcggag

SEQ ID NO: 493768 - DNA, 25 bp, Homo sapien
aatttcggagttcctgtctttcagg

SEQ ID NO: 493769 - DNA, 25 bp, Homo sapien
ttccggagacatggcgtccctgaga

SEQ ID NO: 493770 - DNA, 25 bp, Homo sapien
agcatttgacgctgaccttccggag

SEQ ID NO: 493771 - DNA, 25 bp, Homo sapien
ggagctggtcagcattttccatgcc

SEQ ID NO: 493772 - DNA, 25 bp, Homo sapien
caagttccccttgatggacagcacc

SEQ ID NO: 493773 - DNA, 25 bp, Homo sapien
cacctaatgaccagcgctgagtcag

SEQ ID NO: 493774 - DNA, 25 bp, Homo sapien
taaggaacggcattggcatgctccg

SEQ ID NO: 493775 - DNA, 25 bp, Homo sapien
taaagattgcggagctcactaggaa

SEQ ID NO: 493776 - DNA, 25 bp, Homo sapien
gatgagctatcgatttgcattgctg

SEQ ID NO: 493777 - DNA, 25 bp, Homo sapien
tattttcccttcacaggtgggacga

SEQ ID NO: 493778 - DNA, 25 bp, Homo sapien
tcttgcagcatcttatttagggacc

SEQ ID NO: 493779 - DNA, 25 bp, Homo sapien
agagctggtcagtgcagaactgggc

SEQ ID NO: 493780 - DNA, 25 bp, Homo sapien
ttagagctggtcagtgcagaactgg

SEQ ID NO: 493781 - DNA, 25 bp, Homo sapien
tagagctggtcagtgcagaactggg

SEQ ID NO: 493782 - DNA, 25 bp, Homo sapien
accactatgtatatccagttaactg

SEQ ID NO: 493783 - DNA, 25 bp, Homo sapien
tatccagttaactgagagaattttg

SEQ ID NO: 493784 - DNA, 25 bp, Homo sapien
ggcaactagtggttatactctgcaa

SEQ ID NO: 493785 - DNA, 25 bp, Homo sapien
aaaaattggtgcagataaaatgtca

SEQ ID NO: 493786 - DNA, 25 bp, Homo sapien
gaacagtgtggtcgagcattccaag

SEQ ID NO: 493787 - DNA, 25 bp, Homo sapien
tagccagctcagaatacccatgtag

SEQ ID NO: 493788 - DNA, 25 bp, Homo sapien
cattccaagtccgtgaaggtgcagg

SEQ ID NO: 493789 - DNA, 25 bp, Homo sapien
gagacgctgacctggctctcggaaa

SEQ ID NO: 493790 - DNA, 25 bp, Homo sapien
tgagctacctgatgctactgacaca

SEQ ID NO: 493791 - DNA, 25 bp, Homo sapien
tctgttggaaccctctgtagaacac

SEQ ID NO: 493792 - DNA, 25 bp, Homo sapien
cactttattgatggcttttcaggac

SEQ ID NO: 493793 - DNA, 25 bp, Homo sapien
taccaggcaaatactactgttaacg

SEQ ID NO: 493794 - DNA, 25 bp, Homo sapien
taacctaatgaaaccctggctgcca

SEQ ID NO: 493795 - DNA, 25 bp, Homo sapien
gcatttggcagaagtactacgtaga

SEQ ID NO: 493796 - DNA, 25 bp, Homo sapien
gagaagaagcgactctgcgttgtgc

SEQ ID NO: 493797 - DNA, 25 bp, Homo sapien
tgtggtcgccggtctctctgtattc

SEQ ID NO: 493798 - DNA, 25 bp, Homo sapien
tatactgtgtcagcaatgcagaccc

SEQ ID NO: 493799 - DNA, 25 bp, Homo sapien
gaagacgatgctgacaaaatgcacg

SEQ ID NO: 493800 - DNA, 25 bp, Homo sapien
tcacgaatggcgacacagaagacga

SEQ ID NO: 493801 - DNA, 25 bp, Homo sapien
caaagcttggattctgccgtgccac

SEQ ID NO: 493802 - DNA, 25 bp, Homo sapien
gaaggaagttatgctacaagaagtc

SEQ ID NO: 493803 - DNA, 25 bp, Homo sapien
tctgatggtatgatgcatgggcttc

SEQ ID NO: 493804 - DNA, 25 bp, Homo sapien
acataataggtgtggacatgaactc

SEQ ID NO: 493805 - DNA, 25 bp, Homo sapien
tgtcaaatgcagtttagtcagaacg

SEQ ID NO: 493806 - DNA, 25 bp, Homo sapien
tgagcgcaccttcgagatgagacct

SEQ ID NO: 493807 - DNA, 25 bp, Homo sapien
gccactgcgaagatgggacttaaca

SEQ ID NO: 493808 - DNA, 25 bp, Homo sapien
tcacttcaggtggtaatgcgcctgg

SEQ ID NO: 493809 - DNA, 25 bp, Homo sapien
ctttgcgggtgggaagagcacactt

SEQ ID NO: 493810 - DNA, 25 bp, Homo sapien
tcgaaagagatgcttggaagactca

SEQ ID NO: 493811 - DNA, 25 bp, Homo sapien
ttggagtaaagaaagctagaactga

SEQ ID NO: 493812 - DNA, 25 bp, Homo sapien
tattagtgtgggaacaaatcgaaag

SEQ ID NO: 493813 - DNA, 25 bp, Homo sapien
gaacaaatcgaaagagatgcttgga

SEQ ID NO: 493814 - DNA, 25 bp, Homo sapien
cagtaaccccaagaaaggcatcagg

SEQ ID NO: 493815 - DNA, 25 bp, Homo sapien
gaatgccatggacaatctcagtaca

SEQ ID NO: 493816 - DNA, 25 bp, Homo sapien
gcaggttttcccaagcaaggccaaa

SEQ ID NO: 493817 - DNA, 25 bp, Homo sapien
cagatagctagtcagttcagcagga

SEQ ID NO: 493818 - DNA, 25 bp, Homo sapien
tctagtgttaccttgcactgtaggg

SEQ ID NO: 493819 - DNA, 25 bp, Homo sapien
tttgtataacctatggcccaagaat

SEQ ID NO: 493820 - DNA, 25 bp, Homo sapien
cagtggttactagatggaaagataa

SEQ ID NO: 493821 - DNA, 25 bp, Homo sapien
tgtaccccataataaaggatagagg

SEQ ID NO: 493822 - DNA, 25 bp, Homo sapien
gaatgacagttaccaaaagacagta

SEQ ID NO: 493823 - DNA, 25 bp, Homo sapien
cagtaacaaatgctgacgagaatgc

SEQ ID NO: 493824 - DNA, 25 bp, Homo sapien
tagacttgtacaaccgttatggaga

SEQ ID NO: 493825 - DNA, 25 bp, Homo sapien
ccacaatgagagattgtcttacccc

SEQ ID NO: 493826 - DNA, 25 bp, Homo sapien
cagcccatgtatccaggtgcatcaa

SEQ ID NO: 493827 - DNA, 25 bp, Homo sapien
cacagtcatcgtagtttccacagta

SEQ ID NO: 493828 - DNA, 25 bp, Homo sapien
gatgctaagttcaaaagtgcgtctg

SEQ ID NO: 493829 - DNA, 25 bp, Homo sapien
cagacacacgttttaggtcaggcac

SEQ ID NO: 493830 - DNA, 25 bp, Homo sapien
aactgctgaaactgccacaggtgct

SEQ ID NO: 493831 - DNA, 25 bp, Homo sapien
gcacacgaggcatactgttgaggta

SEQ ID NO: 493832 - DNA, 25 bp, Homo sapien
tctgcctgctagaaagggacagtaa

SEQ ID NO: 493833 - DNA, 25 bp, Homo sapien
taattgtccccacagcagacttgtc

SEQ ID NO: 493834 - DNA, 25 bp, Homo sapien
aattcgggccttggaatagctgtac

SEQ ID NO: 493835 - DNA, 25 bp, Homo sapien
gcacgtgaagttgtcaccatcctta

SEQ ID NO: 493836 - DNA, 25 bp, Homo sapien
tttgaacgatggaacaaataacagc

SEQ ID NO: 493837 - DNA, 25 bp, Homo sapien
gcttggtactcaggtattgactgga

SEQ ID NO: 493838 - DNA, 25 bp, Homo sapien
gtaagataacgcatttcagctgctg

SEQ ID NO: 493839 - DNA, 25 bp, Homo sapien
tcagctgctgtgcatcgtattaaat

SEQ ID NO: 493840 - DNA, 25 bp, Homo sapien
taagggcaagtacactaagtgtctg

SEQ ID NO: 493841 - DNA, 25 bp, Homo sapien
taaattttctagcaccacacgtgag

SEQ ID NO: 493842 - DNA, 25 bp, Homo sapien
gcgcgggcgtagaggcgggcttctc

SEQ ID NO: 493843 - DNA, 25 bp, Homo sapien
cgcgctctccggtgacggaccatgt

SEQ ID NO: 493844 - DNA, 25 bp, Homo sapien
gagctgctctcgctccgtttcccgc

SEQ ID NO: 493845 - DNA, 25 bp, Homo sapien
tctaggccagcgagccccgcgctct

SEQ ID NO: 493846 - DNA, 25 bp, Homo sapien
gcatcagtacttccctagacatcta

SEQ ID NO: 493847 - DNA, 25 bp, Homo sapien
aaacttgcaaacgtatagtcctagc

SEQ ID NO: 493848 - DNA, 25 bp, Homo sapien
taaagtccgtgatactgtcattcaa

SEQ ID NO: 493849 - DNA, 25 bp, Homo sapien
aatgctgcaatatgctttctcgtgc

SEQ ID NO: 493850 - DNA, 25 bp, Homo sapien
ggtgaccaaccaattagatcactgg

SEQ ID NO: 493851 - DNA, 25 bp, Homo sapien
gagttgagcaaaatctgggtgacca

SEQ ID NO: 493852 - DNA, 25 bp, Homo sapien
gcattgggaatagtcagtagacacc

SEQ ID NO: 493853 - DNA, 25 bp, Homo sapien
tgaggaaagacgtacacgaagtacc

SEQ ID NO: 493854 - DNA, 25 bp, Homo sapien
aaacagcaaggcttgcaggcccacg

SEQ ID NO: 493855 - DNA, 25 bp, Homo sapien
caggcccacgttgagtcctgaaggt

SEQ ID NO: 493856 - DNA, 25 bp, Homo sapien
tcctgaaggtgttgtcacagtgggc

SEQ ID NO: 493857 - DNA, 25 bp, Homo sapien
gcagatttgccctctcaaaagatgg

SEQ ID NO: 493858 - DNA, 25 bp, Homo sapien
caggcatgacaaatgtcgccttttt

SEQ ID NO: 493859 - DNA, 25 bp, Homo sapien
catgacaaatgtcgcctttttataa

SEQ ID NO: 493860 - DNA, 25 bp, Homo sapien
gacaaatgtcgcctttttataagga

SEQ ID NO: 493861 - DNA, 25 bp, Homo sapien
tacaggcatgacaaatgtcgccttt

SEQ ID NO: 493862 - DNA, 25 bp, Homo sapien
agtagagcttatccgaggactctgc

SEQ ID NO: 493863 - DNA, 25 bp, Homo sapien
ctcagtagagcttatccgaggactc

SEQ ID NO: 493864 - DNA, 25 bp, Homo sapien
cagtagagcttatccgaggactctg

SEQ ID NO: 493865 - DNA, 25 bp, Homo sapien
gtagagcttatccgaggactctgcc

SEQ ID NO: 493866 - DNA, 25 bp, Homo sapien
gtgcgcccgctcttggtgtactcca

SEQ ID NO: 493867 - DNA, 25 bp, Homo sapien
ggtgcgcccgctcttggtgtactcc

SEQ ID NO: 493868 - DNA, 25 bp, Homo sapien
gtggcccaccttccgcaagcaggag

SEQ ID NO: 493869 - DNA, 25 bp, Homo sapien
gaatccatccacctcaacgtcaggg

SEQ ID NO: 493870 - DNA, 25 bp, Homo sapien
agaagtggtaccagtgtgggacttc

SEQ ID NO: 493871 - DNA, 25 bp, Homo sapien
tggtcatcccaccaaagctcagaga

SEQ ID NO: 493872 - DNA, 25 bp, Homo sapien
agcgtcttctctgccttgctaccaa

SEQ ID NO: 493873 - DNA, 25 bp, Homo sapien
ccagcgtcttctctgccttgctacc

SEQ ID NO: 493874 - DNA, 25 bp, Homo sapien
gtcttctctgccttgctaccaattc

SEQ ID NO: 493875 - DNA, 25 bp, Homo sapien
ttctctgccttgctaccaattccat

SEQ ID NO: 493876 - DNA, 25 bp, Homo sapien
cacttgcttctgctggacttggcct

SEQ ID NO: 493877 - DNA, 25 bp, Homo sapien
cttgcttctgctggacttggcctac

SEQ ID NO: 493878 - DNA, 25 bp, Homo sapien
aacacctcttgcacttgcttctgct

SEQ ID NO: 493879 - DNA, 25 bp, Homo sapien
ctcttgcacttgcttctgctggact

SEQ ID NO: 493880 - DNA, 25 bp, Homo sapien
agcatcttcttggataggcgcatct

SEQ ID NO: 493881 - DNA, 25 bp, Homo sapien
gcatcttcttggataggcgcatctg

SEQ ID NO: 493882 - DNA, 25 bp, Homo sapien
ttggataggcgcatctggccctttt

SEQ ID NO: 493883 - DNA, 25 bp, Homo sapien
ctgctgcctgttgaagatgagcatc

SEQ ID NO: 493884 - DNA, 25 bp, Homo sapien
gggcaccgaacgtcatgctgtcagc

SEQ ID NO: 493885 - DNA, 25 bp, Homo sapien
tagagcacactttcattagctcgtc

SEQ ID NO: 493886 - DNA, 25 bp, Homo sapien
aggagggcaccgaacgtcatgctgt

SEQ ID NO: 493887 - DNA, 25 bp, Homo sapien
ccggtgcagtaataagtgtcgctct

SEQ ID NO: 493888 - DNA, 25 bp, Homo sapien
agtaataagtgtcgctcttgaagac

SEQ ID NO: 493889 - DNA, 25 bp, Homo sapien
tgacgtccccggtgcagtaataagt

SEQ ID NO: 493890 - DNA, 25 bp, Homo sapien
tccccggtgcagtaataagtgtcgc

SEQ ID NO: 493891 - DNA, 25 bp, Homo sapien
ttgggtgtccatgtcttgaccatac

SEQ ID NO: 493892 - DNA, 25 bp, Homo sapien
tctggttgggtgtccatgtcttgac

SEQ ID NO: 493893 - DNA, 25 bp, Homo sapien
ttccttctggttgggtgtccatgtc

SEQ ID NO: 493894 - DNA, 25 bp, Homo sapien
ctattccttctggttgggtgtccat

SEQ ID NO: 493895 - DNA, 25 bp, Homo sapien
ttaagagatttctcggtgggatcac

SEQ ID NO: 493896 - DNA, 25 bp, Homo sapien
gttaagagatttctcggtgggatca

SEQ ID NO: 493897 - DNA, 25 bp, Homo sapien
ctggggggaatatacggtcctgctt

SEQ ID NO: 493898 - DNA, 25 bp, Homo sapien
ggtgggggcatggccgccactgggt

SEQ ID NO: 493899 - DNA, 25 bp, Homo sapien
ggggcatggccgccactgggtcact

SEQ ID NO: 493900 - DNA, 25 bp, Homo sapien
tgggggcatggccgccactgggtca

SEQ ID NO: 493901 - DNA, 25 bp, Homo sapien
ggcatggccgccactgggtcactgg

SEQ ID NO: 493902 - DNA, 25 bp, Homo sapien
agcagaggcgttcatggcagcaggc

SEQ ID NO: 493903 - DNA, 25 bp, Homo sapien
ttagtgctgatgcacggagaagcct

SEQ ID NO: 493904 - DNA, 25 bp, Homo sapien
tgttggataacggcttatctgctgg

SEQ ID NO: 493905 - DNA, 25 bp, Homo sapien
gagcttcccaagagtaaggatcttc

SEQ ID NO: 493906 - DNA, 25 bp, Homo sapien
gggctacgacttcaacaggctctgc

SEQ ID NO: 493907 - DNA, 25 bp, Homo sapien
tccctcttggggctacgacttcaac

SEQ ID NO: 493908 - DNA, 25 bp, Homo sapien
gggacaagatgtgcgctgagaacaa

SEQ ID NO: 493909 - DNA, 25 bp, Homo sapien
gtgcgctgagaacaactcctggagc

SEQ ID NO: 493910 - DNA, 25 bp, Homo sapien
agaacatgtgcagagtgttccagac

SEQ ID NO: 493911 - DNA, 25 bp, Homo sapien
aacatgtgcagagtgttccagacca

SEQ ID NO: 493912 - DNA, 25 bp, Homo sapien
gaacatgtgcagagtgttccagacc

SEQ ID NO: 493913 - DNA, 25 bp, Homo sapien
gtgcccacacggtcccaggacttga

SEQ ID NO: 493914 - DNA, 25 bp, Homo sapien
tgcccacacggtcccaggacttgaa

SEQ ID NO: 493915 - DNA, 25 bp, Homo sapien
tcctttaacgacgtccaccaggctg

SEQ ID NO: 493916 - DNA, 25 bp, Homo sapien
aacgacgtccaccaggctgagggtg

SEQ ID NO: 493917 - DNA, 25 bp, Homo sapien
gagtgccaagcattcctagtttttc

SEQ ID NO: 493918 - DNA, 25 bp, Homo sapien
gtcctggccgtagtcaatctccagg

SEQ ID NO: 493919 - DNA, 25 bp, Homo sapien
ttgtcctggccgtagtcaatctcca

SEQ ID NO: 493920 - DNA, 25 bp, Homo sapien
ctctttgtcctggccgtagtcaatc

SEQ ID NO: 493921 - DNA, 25 bp, Homo sapien
tttgtcctggccgtagtcaatctcc

SEQ ID NO: 493922 - DNA, 25 bp, Homo sapien
gggcatctgaaggtcgatctcacac

SEQ ID NO: 493923 - DNA, 25 bp, Homo sapien
ggagtacgcggcctggatttgcctt

SEQ ID NO: 493924 - DNA, 25 bp, Homo sapien
ttccccaagggcatctgaaggtcga

SEQ ID NO: 493925 - DNA, 25 bp, Homo sapien
tttgccttttgctcagcttccccaa

SEQ ID NO: 493926 - DNA, 25 bp, Homo sapien
gaccgtaggctacctcaatgtccag

SEQ ID NO: 493927 - DNA, 25 bp, Homo sapien
cctgagcagaccgtaggctacctca

SEQ ID NO: 493928 - DNA, 25 bp, Homo sapien
gtccttcctgctatcgtgagaccct

SEQ ID NO: 493929 - DNA, 25 bp, Homo sapien
agtccttcctgctatcgtgagaccc

SEQ ID NO: 493930 - DNA, 25 bp, Homo sapien
ttcctgatgatctcagcttcttcag

SEQ ID NO: 493931 - DNA, 25 bp, Homo sapien
tctcagcttcttcagaatctctgtc

SEQ ID NO: 493932 - DNA, 25 bp, Homo sapien
ctcagcttcttcagaatctctgtca

SEQ ID NO: 493933 - DNA, 25 bp, Homo sapien
gatgatctcagcttcttcagaatct

SEQ ID NO: 493934 - DNA, 25 bp, Homo sapien
tcttcacactctatcttaaagctat

SEQ ID NO: 493935 - DNA, 25 bp, Homo sapien
actctatcttaaagctatcaatgac

SEQ ID NO: 493936 - DNA, 25 bp, Homo sapien
tatgcatcgtgtgtggttggttgca

SEQ ID NO: 493937 - DNA, 25 bp, Homo sapien
atgccacagcaaccttcagttatga

SEQ ID NO: 493938 - DNA, 25 bp, Homo sapien
catgtagcccatcacaggtgcttca

SEQ ID NO: 493939 - DNA, 25 bp, Homo sapien
aaacatgtagcccatcacaggtgct

SEQ ID NO: 493940 - DNA, 25 bp, Homo sapien
cccatcacaggtgcttcaggcaggg

SEQ ID NO: 493941 - DNA, 25 bp, Homo sapien
tagcccatcacaggtgcttcaggca

SEQ ID NO: 493942 - DNA, 25 bp, Homo sapien
gagacaagatcagcgaaatagatca

SEQ ID NO: 493943 - DNA, 25 bp, Homo sapien
agacaagatcagcgaaatagatcac

SEQ ID NO: 493944 - DNA, 25 bp, Homo sapien
ggagacaagatcagcgaaatagatc

SEQ ID NO: 493945 - DNA, 25 bp, Homo sapien
ctaagatgtatggcagtcgttggca

SEQ ID NO: 493946 - DNA, 25 bp, Homo sapien
taagatgtatggcagtcgttggcac

SEQ ID NO: 493947 - DNA, 25 bp, Homo sapien
gaggaacctctacaccatccagtgg

SEQ ID NO: 493948 - DNA, 25 bp, Homo sapien
gaagcatgcttcagttcacacacgt

SEQ ID NO: 493949 - DNA, 25 bp, Homo sapien
catccagtgggatactagctgaaag

SEQ ID NO: 493950 - DNA, 25 bp, Homo sapien
gcaacttcttccgacaggattaacc

SEQ ID NO: 493951 - DNA, 25 bp, Homo sapien
ctgagcaatatcatagacaatgtac

SEQ ID NO: 493952 - DNA, 25 bp, Homo sapien
tcagtttcagcagatatttcagatt

SEQ ID NO: 493953 - DNA, 25 bp, Homo sapien
aggaggtcttaaaattgaatttcag

SEQ ID NO: 493954 - DNA, 25 bp, Homo sapien
gaatttcagtttcagcagatatttc

SEQ ID NO: 493955 - DNA, 25 bp, Homo sapien
atttcagtttcagcagatatttcag

SEQ ID NO: 493956 - DNA, 25 bp, Homo sapien
agttgtcatcgagcacaggccagga

SEQ ID NO: 493957 - DNA, 25 bp, Homo sapien
caacacacgcggtgtagaaagggca

SEQ ID NO: 493958 - DNA, 25 bp, Homo sapien
tgttaaaatgccgaagaggacggtc

SEQ ID NO: 493959 - DNA, 25 bp, Homo sapien
gagcggtcgttcaagctacagccaa

SEQ ID NO: 493960 - DNA, 25 bp, Homo sapien
gcctggctcccagtagtgggttttg

SEQ ID NO: 493961 - DNA, 25 bp, Homo sapien
tggtcctcattgtttagggccagcc

SEQ ID NO: 493962 - DNA, 25 bp, Homo sapien
ttattccacaggtagggccatccca

SEQ ID NO: 493963 - DNA, 25 bp, Homo sapien
aacacctgatatgaggcctggctcc

SEQ ID NO: 493964 - DNA, 25 bp, Homo sapien
ggggcacacattgccaaaacccagc

SEQ ID NO: 493965 - DNA, 25 bp, Homo sapien
gggggcacacattgccaaaacccag

SEQ ID NO: 493966 - DNA, 25 bp, Homo sapien
taaactgtcatagcgctggttggca

SEQ ID NO: 493967 - DNA, 25 bp, Homo sapien
tctatagacaaagtagccccaaggg

SEQ ID NO: 493968 - DNA, 25 bp, Homo sapien
tttgcttacctcaaaacagctgggt

SEQ ID NO: 493969 - DNA, 25 bp, Homo sapien
cacaggtgcatgcattgcgggtgct

SEQ ID NO: 493970 - DNA, 25 bp, Homo sapien
ctcccatggtgtcttttcctcggtc

SEQ ID NO: 493971 - DNA, 25 bp, Homo sapien
tcccatggtgtcttttcctcggtcc

SEQ ID NO: 493972 - DNA, 25 bp, Homo sapien
tcatcctggttcaggagagggaaaa

SEQ ID NO: 493973 - DNA, 25 bp, Homo sapien
catatgtggtgataagggtagctct

SEQ ID NO: 493974 - DNA, 25 bp, Homo sapien
gcattggcccgtttttggcatgagt

SEQ ID NO: 493975 - DNA, 25 bp, Homo sapien
aaaacaatccttatgccaaggaggg

SEQ ID NO: 493976 - DNA, 25 bp, Homo sapien
tccacggtgaacaggagcgcttaaa

SEQ ID NO: 493977 - DNA, 25 bp, Homo sapien
tcactgcacggcaaacataccatgg

SEQ ID NO: 493978 - DNA, 25 bp, Homo sapien
taaatgcaactaacaaaccacggta

SEQ ID NO: 493979 - DNA, 25 bp, Homo sapien
ggtaggccgtggtcctcaagtttca

SEQ ID NO: 493980 - DNA, 25 bp, Homo sapien
caaacacgaagagcttggtatgctt

SEQ ID NO: 493981 - DNA, 25 bp, Homo sapien
atttcttcatctaagggcaagggaa

SEQ ID NO: 493982 - DNA, 25 bp, Homo sapien
tccagcagcaaacacgaagagcttg

SEQ ID NO: 493983 - DNA, 25 bp, Homo sapien
ttcttcatctaagggcaagggaaca

SEQ ID NO: 493984 - DNA, 25 bp, Homo sapien
tcgtcagtaacaccaaaaactgctg

SEQ ID NO: 493985 - DNA, 25 bp, Homo sapien
tgtaatgctcgttgaagtccagcct

SEQ ID NO: 493986 - DNA, 25 bp, Homo sapien
aagactctcgtcagagctggtcgtc

SEQ ID NO: 493987 - DNA, 25 bp, Homo sapien
gaagctaagaaaccgaagactctcg

SEQ ID NO: 493988 - DNA, 25 bp, Homo sapien
tgggagctgcgccgccccctggtac

SEQ ID NO: 493989 - DNA, 25 bp, Homo sapien
gtgggagctgcgccgccccctggta

SEQ ID NO: 493990 - DNA, 25 bp, Homo sapien
tgtgggagctgcgccgccccctggt

SEQ ID NO: 493991 - DNA, 25 bp, Homo sapien
gtgtgggagctgcgccgccccctgg

SEQ ID NO: 493992 - DNA, 25 bp, Homo sapien
aaatgcattcaactccgacgtgtgc

SEQ ID NO: 493993 - DNA, 25 bp, Homo sapien
ctttataaatatacccttgctgtag

SEQ ID NO: 493994 - DNA, 25 bp, Homo sapien
aagaggatgctaaataacagcaatg

SEQ ID NO: 493995 - DNA, 25 bp, Homo sapien
agcacttaagattcagaagcctcag

SEQ ID NO: 493996 - DNA, 25 bp, Homo sapien
agagcgtgcccctcactaggaaggg

SEQ ID NO: 493997 - DNA, 25 bp, Homo sapien
tgtccccgggattggcttgcgtctc

SEQ ID NO: 493998 - DNA, 25 bp, Homo sapien
gaggtagcctgccattctagggaca

SEQ ID NO: 493999 - DNA, 25 bp, Homo sapien
cacagaataaggcagggaggtagcc

SEQ ID NO: 494000 - DNA, 25 bp, Homo sapien
ctggtgtggctgtagtaactatttc

SEQ ID NO: 494001 - DNA, 25 bp, Homo sapien
ctcccagtgttgtaatagttcccat

SEQ ID NO: 494002 - DNA, 25 bp, Homo sapien
ctatttccccgataataagattatc

SEQ ID NO: 494003 - DNA, 25 bp, Homo sapien
tgagattattgtacgctggtgtggc

SEQ ID NO: 494004 - DNA, 25 bp, Homo sapien
gcagagaggaccagaacctgctggg

SEQ ID NO: 494005 - DNA, 25 bp, Homo sapien
aatctgtcccagcagagaggaccag

SEQ ID NO: 494006 - DNA, 25 bp, Homo sapien
gccagcccgggctggcgcatcaggg

SEQ ID NO: 494007 - DNA, 25 bp, Homo sapien
cgtggcctgcaagggtcctaatctg

SEQ ID NO: 494008 - DNA, 25 bp, Homo sapien
gggctgtctcccatggagctgttcc

SEQ ID NO: 494009 - DNA, 25 bp, Homo sapien
tcttcgtggagtctcccggcaggag

SEQ ID NO: 494010 - DNA, 25 bp, Homo sapien
cacggtgaggcttcttcgtggagtc

SEQ ID NO: 494011 - DNA, 25 bp, Homo sapien
tatgtgcgtaccagctggccgctca

SEQ ID NO: 494012 - DNA, 25 bp, Homo sapien
ccagctcgatgtcatcggcattcat

SEQ ID NO: 494013 - DNA, 25 bp, Homo sapien
gatgtcatcggcattcatggtgtgc

SEQ ID NO: 494014 - DNA, 25 bp, Homo sapien
ccacctccagggtctgtccttctcc

SEQ ID NO: 494015 - DNA, 25 bp, Homo sapien
gctcgatgtcatcggcattcatggt

SEQ ID NO: 494016 - DNA, 25 bp, Homo sapien
ctgggcttttctctgcgcccttttc

SEQ ID NO: 494017 - DNA, 25 bp, Homo sapien
tgctgtggtccatgattcattgctg

SEQ ID NO: 494018 - DNA, 25 bp, Homo sapien
gctgtggtccatgattcattgctgg

SEQ ID NO: 494019 - DNA, 25 bp, Homo sapien
cttccaaaagaggacgctgccaggc

SEQ ID NO: 494020 - DNA, 25 bp, Homo sapien
gcctctgtggggatcttccaaaaga

SEQ ID NO: 494021 - DNA, 25 bp, Homo sapien
aaaagaggacgctgccaggcttcct

SEQ ID NO: 494022 - DNA, 25 bp, Homo sapien
tccaaaagaggacgctgccaggctt

SEQ ID NO: 494023 - DNA, 25 bp, Homo sapien
ttgggtctttcagaaccttccacag

SEQ ID NO: 494024 - DNA, 25 bp, Homo sapien
gtcttgggtctttcagaaccttcca

SEQ ID NO: 494025 - DNA, 25 bp, Homo sapien
ggtctttcagaaccttccacagaag

SEQ ID NO: 494026 - DNA, 25 bp, Homo sapien
ctgtcttgggtctttcagaaccttc

SEQ ID NO: 494027 - DNA, 25 bp, Homo sapien
gaccatccttttgacccttgtggca

SEQ ID NO: 494028 - DNA, 25 bp, Homo sapien
taatttagcaatgggcgcaacagtc

SEQ ID NO: 494029 - DNA, 25 bp, Homo sapien
gattctaagtaatacgcgcctgtac

SEQ ID NO: 494030 - DNA, 25 bp, Homo sapien
tctggaaatgcatccccatcggagt

SEQ ID NO: 494031 - DNA, 25 bp, Homo sapien
gctgcaattcgatggcacaaagcgg

SEQ ID NO: 494032 - DNA, 25 bp, Homo sapien
gagttctgccctgtaaccgtggctg

SEQ ID NO: 494033 - DNA, 25 bp, Homo sapien
cacactgctgcaattcgatggcaca

SEQ ID NO: 494034 - DNA, 25 bp, Homo sapien
caaagcggtgagtccacggatgctt

SEQ ID NO: 494035 - DNA, 25 bp, Homo sapien
cccctgttgcacgtggtcccgttga

SEQ ID NO: 494036 - DNA, 25 bp, Homo sapien
cacgtggtcccgttgagcaagagca

SEQ ID NO: 494037 - DNA, 25 bp, Homo sapien
gaggtgcccctgttgcacgtggtcc

SEQ ID NO: 494038 - DNA, 25 bp, Homo sapien
ccgttgagcaagagcaggacagcag

SEQ ID NO: 494039 - DNA, 25 bp, Homo sapien
tagcaaatgggaacagggtttccaa

SEQ ID NO: 494040 - DNA, 25 bp, Homo sapien
tcctcacttgcattagaacttcggc

SEQ ID NO: 494041 - DNA, 25 bp, Homo sapien
gaacttcggcattcctagcaaatgg

SEQ ID NO: 494042 - DNA, 25 bp, Homo sapien
cacacaagctgggatatagacttcc

SEQ ID NO: 494043 - DNA, 25 bp, Homo sapien
ttttgccttggaccttgctgtacca

SEQ ID NO: 494044 - DNA, 25 bp, Homo sapien
taaaacttgtgaaaagctcagccat

SEQ ID NO: 494045 - DNA, 25 bp, Homo sapien
ttgccttggaccttgctgtaccacc

SEQ ID NO: 494046 - DNA, 25 bp, Homo sapien
cacccatttctaggtgtaaaacttg

SEQ ID NO: 494047 - DNA, 25 bp, Homo sapien
gtaattccattcctttgtgaggaca

SEQ ID NO: 494048 - DNA, 25 bp, Homo sapien
attccattcctttgtgaggacaagg

SEQ ID NO: 494049 - DNA, 25 bp, Homo sapien
ctgtaattccattcctttgtgagga

SEQ ID NO: 494050 - DNA, 25 bp, Homo sapien
aattccattcctttgtgaggacaag

SEQ ID NO: 494051 - DNA, 25 bp, Homo sapien
aatgggattctttgcagaacgtagg

SEQ ID NO: 494052 - DNA, 25 bp, Homo sapien
ttgtgccttggcttaagaaagtcaa

SEQ ID NO: 494053 - DNA, 25 bp, Homo sapien
cacactcgggaggagtcagagggag

SEQ ID NO: 494054 - DNA, 25 bp, Homo sapien
ctgcagatggaacgggctcacactc

SEQ ID NO: 494055 - DNA, 25 bp, Homo sapien
gagaagaaacgctcctctcagcgct

SEQ ID NO: 494056 - DNA, 25 bp, Homo sapien
tctcagcgctgaagaccgagtggga

SEQ ID NO: 494057 - DNA, 25 bp, Homo sapien
catgccaacaatgagatggtgtttc

SEQ ID NO: 494058 - DNA, 25 bp, Homo sapien
atcacttggctcgtcacaccacatg

SEQ ID NO: 494059 - DNA, 25 bp, Homo sapien
ccgttagtgagattgaaatttatag

SEQ ID NO: 494060 - DNA, 25 bp, Homo sapien
aaaatttctaatatccgttagtgag

SEQ ID NO: 494061 - DNA, 25 bp, Homo sapien
ccatggtcagcccaggataaagtgg

SEQ ID NO: 494062 - DNA, 25 bp, Homo sapien
ttgcctaagagtcataaccccttga

SEQ ID NO: 494063 - DNA, 25 bp, Homo sapien
ggcaagcccaggcacgatgaaatca

SEQ ID NO: 494064 - DNA, 25 bp, Homo sapien
gcttcagggaaagtgcggtggcaga

SEQ ID NO: 494065 - DNA, 25 bp, Homo sapien
ctggcaatttcagagggccagcggc

SEQ ID NO: 494066 - DNA, 25 bp, Homo sapien
ccagtggcgatgagggcttcaggga

SEQ ID NO: 494067 - DNA, 25 bp, Homo sapien
taccactcgttgtgctgcagaaatg

SEQ ID NO: 494068 - DNA, 25 bp, Homo sapien
catgcaggtaccactcgttgtgctg

SEQ ID NO: 494069 - DNA, 25 bp, Homo sapien
ggtaccactcgttgtgctgcagaaa

SEQ ID NO: 494070 - DNA, 25 bp, Homo sapien
aggtaccactcgttgtgctgcagaa

SEQ ID NO: 494071 - DNA, 25 bp, Homo sapien
cactgcgtcagtccggagtcaaggt

SEQ ID NO: 494072 - DNA, 25 bp, Homo sapien
caaacgctgtgatgcttggcgcata

SEQ ID NO: 494073 - DNA, 25 bp, Homo sapien
ttggcgcatacctgacagcgaccag

SEQ ID NO: 494074 - DNA, 25 bp, Homo sapien
tgtgccctagatctgttccgagcgt

SEQ ID NO: 494075 - DNA, 25 bp, Homo sapien
taattacttcatgtaggagcctgga

SEQ ID NO: 494076 - DNA, 25 bp, Homo sapien
tgttcatagcagtgtaattacttca

SEQ ID NO: 494077 - DNA, 25 bp, Homo sapien
tagcagtgtaattacttcatgtagg

SEQ ID NO: 494078 - DNA, 25 bp, Homo sapien
tacttcatgtaggagcctggaaata

SEQ ID NO: 494079 - DNA, 25 bp, Homo sapien
tccaggactgggtgtgaaaactgct

SEQ ID NO: 494080 - DNA, 25 bp, Homo sapien
caaatactgccttagaagtgagcgg

SEQ ID NO: 494081 - DNA, 25 bp, Homo sapien
taaaatagcagagaccgaatccagg

SEQ ID NO: 494082 - DNA, 25 bp, Homo sapien
gctgattggtcgcaaagcctgaaac

SEQ ID NO: 494083 - DNA, 25 bp, Homo sapien
agcagatgccaatgttatgcttcct

SEQ ID NO: 494084 - DNA, 25 bp, Homo sapien
taagtcagttttcatggtggcaggt

SEQ ID NO: 494085 - DNA, 25 bp, Homo sapien
tagcagatctaggaacttttgggca

SEQ ID NO: 494086 - DNA, 25 bp, Homo sapien
tctcagctcggacattgtttgtgaa

SEQ ID NO: 494087 - DNA, 25 bp, Homo sapien
taccttgtccttccagagtgatggg

SEQ ID NO: 494088 - DNA, 25 bp, Homo sapien
tgccagttccgcacaggtgagcggc

SEQ ID NO: 494089 - DNA, 25 bp, Homo sapien
tccacatgccagttccgcacaggtg

SEQ ID NO: 494090 - DNA, 25 bp, Homo sapien
aatgggcgtgggagattgccactca

SEQ ID NO: 494091 - DNA, 25 bp, Homo sapien
actgtgatggtgcagaatgggcgtg

SEQ ID NO: 494092 - DNA, 25 bp, Homo sapien
tgaatcgggaggaaccgactctccg

SEQ ID NO: 494093 - DNA, 25 bp, Homo sapien
gagcttcctcgaacaactgatgaca

SEQ ID NO: 494094 - DNA, 25 bp, Homo sapien
gctctagacggacggtgacgcttca

SEQ ID NO: 494095 - DNA, 25 bp, Homo sapien
tgtgaaagcagcaggccgaacctgg

SEQ ID NO: 494096 - DNA, 25 bp, Homo sapien
cggcgattggctcggcgcggcccag

SEQ ID NO: 494097 - DNA, 25 bp, Homo sapien
ccggcccgctgtcaggcgccttctc

SEQ ID NO: 494098 - DNA, 25 bp, Homo sapien
gagcggctcgggaacctgcgggcgc

SEQ ID NO: 494099 - DNA, 25 bp, Homo sapien
gccgcctcgcccatcgagcggccgg

SEQ ID NO: 494100 - DNA, 25 bp, Homo sapien
gatggtttttttgggcgactccagc

SEQ ID NO: 494101 - DNA, 25 bp, Homo sapien
taacggtttgctcggcggaattcat

SEQ ID NO: 494102 - DNA, 25 bp, Homo sapien
gagtgatgagccacgtaacggtttg

SEQ ID NO: 494103 - DNA, 25 bp, Homo sapien
gcagaaagccctccgggtccgagat

SEQ ID NO: 494104 - DNA, 25 bp, Homo sapien
tccacacaaagccagcggagtgagc

SEQ ID NO: 494105 - DNA, 25 bp, Homo sapien
tcggaacgcggtttccgatgcggct

SEQ ID NO: 494106 - DNA, 25 bp, Homo sapien
agccgcaccgcgtcggaacgcggtt

SEQ ID NO: 494107 - DNA, 25 bp, Homo sapien
caccggcaagaactgtccacacaaa

SEQ ID NO: 494108 - DNA, 25 bp, Homo sapien
taaaggttctgttcagaacgaggga

SEQ ID NO: 494109 - DNA, 25 bp, Homo sapien
gttctgttcagaacgagggagggac

SEQ ID NO: 494110 - DNA, 25 bp, Homo sapien
ctaaaggttctgttcagaacgaggg

SEQ ID NO: 494111 - DNA, 25 bp, Homo sapien
aaggttctgttcagaacgagggagg

SEQ ID NO: 494112 - DNA, 25 bp, Homo sapien
tgggaaccaccagccggaagggaga

SEQ ID NO: 494113 - DNA, 25 bp, Homo sapien
tcacttccagagattcgggtcaggg

SEQ ID NO: 494114 - DNA, 25 bp, Homo sapien
gtcagggttcacacgctccagcctg

SEQ ID NO: 494115 - DNA, 25 bp, Homo sapien
aaccaccagccggaagggagaagca

SEQ ID NO: 494116 - DNA, 25 bp, Homo sapien
cagggagacatcgtttttagaaact

SEQ ID NO: 494117 - DNA, 25 bp, Homo sapien
gtattttgagctacagggagacatc

SEQ ID NO: 494118 - DNA, 25 bp, Homo sapien
gcttgtgggcgatgaaaacaaactt

SEQ ID NO: 494119 - DNA, 25 bp, Homo sapien
gccggcttgtgggcgatgaaaacaa

SEQ ID NO: 494120 - DNA, 25 bp, Homo sapien
tcctttaaatgagcagaagaatctg

SEQ ID NO: 494121 - DNA, 25 bp, Homo sapien
cttcctaactctgaaacagaacaaa

SEQ ID NO: 494122 - DNA, 25 bp, Homo sapien
tgacacgccgtgaacgtcctctctg

SEQ ID NO: 494123 - DNA, 25 bp, Homo sapien
catgtaaagtttataattccatctt

SEQ ID NO: 494124 - DNA, 25 bp, Homo sapien
gcgcccagatctggcgctgaccaga

SEQ ID NO: 494125 - DNA, 25 bp, Homo sapien
gccctggaagccacgttcagcaggc

SEQ ID NO: 494126 - DNA, 25 bp, Homo sapien
cccgaaagttgcaagagtctgccct

SEQ ID NO: 494127 - DNA, 25 bp, Homo sapien
tgtgagaattaacccgtgttcctgg

SEQ ID NO: 494128 - DNA, 25 bp, Homo sapien
aagaggtggtatggctggcatccat

SEQ ID NO: 494129 - DNA, 25 bp, Homo sapien
tatggctggcatccatgcgtgcgct

SEQ ID NO: 494130 - DNA, 25 bp, Homo sapien
gcttccatgcgtgtgattgggtcac

SEQ ID NO: 494131 - DNA, 25 bp, Homo sapien
gggtcactagcacgcacacaatagg

SEQ ID NO: 494132 - DNA, 25 bp, Homo sapien
cattgctcaaggtaaacagaggcct

SEQ ID NO: 494133 - DNA, 25 bp, Homo sapien
taaggcactttcctaagcaccacag

SEQ ID NO: 494134 - DNA, 25 bp, Homo sapien
gaaaatgtgtttccaccagaagaca

SEQ ID NO: 494135 - DNA, 25 bp, Homo sapien
tatgagatcagtgagacaaacccag

SEQ ID NO: 494136 - DNA, 25 bp, Homo sapien
tcagattcaatctagggaaatgagc

SEQ ID NO: 494137 - DNA, 25 bp, Homo sapien
cagtgtgcttatgactccaggttat

SEQ ID NO: 494138 - DNA, 25 bp, Homo sapien
gaagagccaaccctagatagctgac

SEQ ID NO: 494139 - DNA, 25 bp, Homo sapien
gaagctccattacaggcaacaaaag

SEQ ID NO: 494140 - DNA, 25 bp, Homo sapien
tttaccagtgaaactatctggcctg

SEQ ID NO: 494141 - DNA, 25 bp, Homo sapien
atttaccagtgaaactatctggcct

SEQ ID NO: 494142 - DNA, 25 bp, Homo sapien
ttaccagtgaaactatctggcctgg

SEQ ID NO: 494143 - DNA, 25 bp, Homo sapien
ttcaagggtcatgcacaccatctgg

SEQ ID NO: 494144 - DNA, 25 bp, Homo sapien
tctgcttcaagggtcatgcacacca

SEQ ID NO: 494145 - DNA, 25 bp, Homo sapien
gcctcctgtctgcttcaagggtcat

SEQ ID NO: 494146 - DNA, 25 bp, Homo sapien
gtcatgcacaccatctggctggtcc

SEQ ID NO: 494147 - DNA, 25 bp, Homo sapien
tcctcaagacagatgggctgccagc

SEQ ID NO: 494148 - DNA, 25 bp, Homo sapien
gtcttcatagggcagatctccacca

SEQ ID NO: 494149 - DNA, 25 bp, Homo sapien
cagagttggtggcaacagtcccaaa

SEQ ID NO: 494150 - DNA, 25 bp, Homo sapien
gatacaagtgtaccaaacctccagt

SEQ ID NO: 494151 - DNA, 25 bp, Homo sapien
aatgcagactcccaaccacagaatg

SEQ ID NO: 494152 - DNA, 25 bp, Homo sapien
gagaagtatttatctccccagggag

SEQ ID NO: 494153 - DNA, 25 bp, Homo sapien
caacacggctggacctacttgtgca

SEQ ID NO: 494154 - DNA, 25 bp, Homo sapien
gagcctagcgtcagtgtgcacatgt

SEQ ID NO: 494155 - DNA, 25 bp, Homo sapien
ttgtgcagggtgagttccaccagcc

SEQ ID NO: 494156 - DNA, 25 bp, Homo sapien
tttgattttcatggggcaagctaag

SEQ ID NO: 494157 - DNA, 25 bp, Homo sapien
gcaagctaaggttgatagggtaaac

SEQ ID NO: 494158 - DNA, 25 bp, Homo sapien
aaaccacagtgcactcactgaccat

SEQ ID NO: 494159 - DNA, 25 bp, Homo sapien
tttttcttcctccggggctgcacca

SEQ ID NO: 494160 - DNA, 25 bp, Homo sapien
cccgacggcctggagcgagcccgct

SEQ ID NO: 494161 - DNA, 25 bp, Homo sapien
gatgccaacccgctcagccgctgct

SEQ ID NO: 494162 - DNA, 25 bp, Homo sapien
aacacagcgggcgacgctggcgagc

SEQ ID NO: 494163 - DNA, 25 bp, Homo sapien
ggacaaggccgagcgacgcccacgg

SEQ ID NO: 494164 - DNA, 25 bp, Homo sapien
actcgctctcgctccggggctcggg

SEQ ID NO: 494165 - DNA, 25 bp, Homo sapien
ttgctcaggcactcgctctcgctcc

SEQ ID NO: 494166 - DNA, 25 bp, Homo sapien
aggcactcgctctcgctccggggct

SEQ ID NO: 494167 - DNA, 25 bp, Homo sapien
ctcaggcactcgctctcgctccggg

SEQ ID NO: 494168 - DNA, 25 bp, Homo sapien
gcagccgcgcaggaactcgcggatg

SEQ ID NO: 494169 - DNA, 25 bp, Homo sapien
ccgcagccgcgcaggaactcgcgga

SEQ ID NO: 494170 - DNA, 25 bp, Homo sapien
cgcagccgcgcaggaactcgcggat

SEQ ID NO: 494171 - DNA, 25 bp, Homo sapien
tattatcacagccaataaggcagct

SEQ ID NO: 494172 - DNA, 25 bp, Homo sapien
tgacaaagctgatacgacaaagggt

SEQ ID NO: 494173 - DNA, 25 bp, Homo sapien
caaagggtatcagggaaagactact

SEQ ID NO: 494174 - DNA, 25 bp, Homo sapien
ggcagctggattacaaatgacaaag

SEQ ID NO: 494175 - DNA, 25 bp, Homo sapien
ttgtttaagtatagacagggtttca

SEQ ID NO: 494176 - DNA, 25 bp, Homo sapien
agcagacaagagaatggtggttacc

SEQ ID NO: 494177 - DNA, 25 bp, Homo sapien
gctgaggaggctgggaaggaggaaa

SEQ ID NO: 494178 - DNA, 25 bp, Homo sapien
tggtggttaccagatgctgaggagg

SEQ ID NO: 494179 - DNA, 25 bp, Homo sapien
gaagcagacaagagaatggtggtta

SEQ ID NO: 494180 - DNA, 25 bp, Homo sapien
aaagcactgtggaagatataagata

SEQ ID NO: 494181 - DNA, 25 bp, Homo sapien
taaagcactgtggaagatataagat

SEQ ID NO: 494182 - DNA, 25 bp, Homo sapien
tatggttacaacagtgccagctcac

SEQ ID NO: 494183 - DNA, 25 bp, Homo sapien
taactctaagagtgcattggtgagc

SEQ ID NO: 494184 - DNA, 25 bp, Homo sapien
agactgtcaccaaagagcctcatcc

SEQ ID NO: 494185 - DNA, 25 bp, Homo sapien
caagctaggcttggctacaaccaaa

SEQ ID NO: 494186 - DNA, 25 bp, Homo sapien
tgttgtgaacatgtctgtcctctgt

SEQ ID NO: 494187 - DNA, 25 bp, Homo sapien
gttgtgaacatgtctgtcctctgta

SEQ ID NO: 494188 - DNA, 25 bp, Homo sapien
ctgttgtgaacatgtctgtcctctg

SEQ ID NO: 494189 - DNA, 25 bp, Homo sapien
tgaacatgtctgtcctctgtacatt

SEQ ID NO: 494190 - DNA, 25 bp, Homo sapien
tatcacctctgaactgaagaccact

SEQ ID NO: 494191 - DNA, 25 bp, Homo sapien
cattaaatgtagactgcacatctaa

SEQ ID NO: 494192 - DNA, 25 bp, Homo sapien
cacatattttggataagaatgctat

SEQ ID NO: 494193 - DNA, 25 bp, Homo sapien
ccatctgaatactgtatcacctctg

SEQ ID NO: 494194 - DNA, 25 bp, Homo sapien
tctctctagcatccgctcaccatcc

SEQ ID NO: 494195 - DNA, 25 bp, Homo sapien
tctagcatccgctcaccatccgtag

SEQ ID NO: 494196 - DNA, 25 bp, Homo sapien
gctctctctagcatccgctcaccat

SEQ ID NO: 494197 - DNA, 25 bp, Homo sapien
gtggctctctctagcatccgctcac

SEQ ID NO: 494198 - DNA, 25 bp, Homo sapien
acttcagcacgacagccccttcttc

SEQ ID NO: 494199 - DNA, 25 bp, Homo sapien
gacttcagcacgacagccccttctt

SEQ ID NO: 494200 - DNA, 25 bp, Homo sapien
ggacttcagcacgacagccccttct

SEQ ID NO: 494201 - DNA, 25 bp, Homo sapien
gcacctctacgtagtagaccccaaa

SEQ ID NO: 494202 - DNA, 25 bp, Homo sapien
tcctgcctccatggtagcgctggct

SEQ ID NO: 494203 - DNA, 25 bp, Homo sapien
agaagtagtcgtctttttgcttctc

SEQ ID NO: 494204 - DNA, 25 bp, Homo sapien
gcgctggctgatgcacctctacgta

SEQ ID NO: 494205 - DNA, 25 bp, Homo sapien
attcataggaagtgtagaaattcag

SEQ ID NO: 494206 - DNA, 25 bp, Homo sapien
ttcataggaagtgtagaaattcagg

SEQ ID NO: 494207 - DNA, 25 bp, Homo sapien
taaaagggcaggatactccagcagt

SEQ ID NO: 494208 - DNA, 25 bp, Homo sapien
acaactgtatgtgctcccaatggag

SEQ ID NO: 494209 - DNA, 25 bp, Homo sapien
tgtaacaggcatatcaggaggtcac

SEQ ID NO: 494210 - DNA, 25 bp, Homo sapien
cattttgaaggatttagctggcacc

SEQ ID NO: 494211 - DNA, 25 bp, Homo sapien
caactcaaatgagagcagcatctag

SEQ ID NO: 494212 - DNA, 25 bp, Homo sapien
taacaaatacgggttaagctgcatt

SEQ ID NO: 494213 - DNA, 25 bp, Homo sapien
gcatctaggctgacataaccaccta

SEQ ID NO: 494214 - DNA, 25 bp, Homo sapien
agtccttagaacagatagtctttag

SEQ ID NO: 494215 - DNA, 25 bp, Homo sapien
taccggaaataagcatcagtggaca

SEQ ID NO: 494216 - DNA, 25 bp, Homo sapien
tccgaatggagacgtgcaccagcat

SEQ ID NO: 494217 - DNA, 25 bp, Homo sapien
taatgaagctcacgccaagagaagc

SEQ ID NO: 494218 - DNA, 25 bp, Homo sapien
ggcattcagcaagcaagcacggtgc

SEQ ID NO: 494219 - DNA, 25 bp, Homo sapien
ctgcccctgatacaaatcatttgca

SEQ ID NO: 494220 - DNA, 25 bp, Homo sapien
gatacaaatcatttgcatcaaacgt

SEQ ID NO: 494221 - DNA, 25 bp, Homo sapien
aactgaggaccttgttaaaattctg

SEQ ID NO: 494222 - DNA, 25 bp, Homo sapien
ctgaggaccttgttaaaattctgcc

SEQ ID NO: 494223 - DNA, 25 bp, Homo sapien
caggtagtgtggactttacaggcca

SEQ ID NO: 494224 - DNA, 25 bp, Homo sapien
aaaaccaaaggtgtcagcccgtatg

SEQ ID NO: 494225 - DNA, 25 bp, Homo sapien
tgaacaactcctgtcttcgctgtgg

SEQ ID NO: 494226 - DNA, 25 bp, Homo sapien
taaattcagtaatgctcccctggct

SEQ ID NO: 494227 - DNA, 25 bp, Homo sapien
gcttccagacagcagtcagagcaca

SEQ ID NO: 494228 - DNA, 25 bp, Homo sapien
gggccagtgcctctcgccggggcat

SEQ ID NO: 494229 - DNA, 25 bp, Homo sapien
cagcagcatcagcttccagacagca

SEQ ID NO: 494230 - DNA, 25 bp, Homo sapien
agtgcctctcgccggggcatcagca

SEQ ID NO: 494231 - DNA, 25 bp, Homo sapien
aagtcaagctgtgaacacgcagcca

SEQ ID NO: 494232 - DNA, 25 bp, Homo sapien
tcattagttacatccatcttcataa

SEQ ID NO: 494233 - DNA, 25 bp, Homo sapien
tgtttcctcgatgctttcatctgaa

SEQ ID NO: 494234 - DNA, 25 bp, Homo sapien
gacaattttcattagttacatccat

SEQ ID NO: 494235 - DNA, 25 bp, Homo sapien
tgtaaagaacaaagctatctatttt

SEQ ID NO: 494236 - DNA, 25 bp, Homo sapien
taatagcctgagagctactggattc

SEQ ID NO: 494237 - DNA, 25 bp, Homo sapien
aaagcattccttccatctaggaggg

SEQ ID NO: 494238 - DNA, 25 bp, Homo sapien
ttttacatccaacacatagccaatg

SEQ ID NO: 494239 - DNA, 25 bp, Homo sapien
caaaagactttatgcggtgagacga

SEQ ID NO: 494240 - DNA, 25 bp, Homo sapien
aaactccgatactggccctggaaca

SEQ ID NO: 494241 - DNA, 25 bp, Homo sapien
ttgaagtccgagtgtgcaaagactg

SEQ ID NO: 494242 - DNA, 25 bp, Homo sapien
gcaaagactgtgatccaagggagtc

SEQ ID NO: 494243 - DNA, 25 bp, Homo sapien
tgctcccaatggtagtccacagaat

SEQ ID NO: 494244 - DNA, 25 bp, Homo sapien
gaatcctaatgctcccaatggtagt

SEQ ID NO: 494245 - DNA, 25 bp, Homo sapien
taatgctcccaatggtagtccacag

SEQ ID NO: 494246 - DNA, 25 bp, Homo sapien
acttggaatcctaatgctcccaatg

SEQ ID NO: 494247 - DNA, 25 bp, Homo sapien
ctgcaacgcagtgtcccacagactg

SEQ ID NO: 494248 - DNA, 25 bp, Homo sapien
acagactgcacagaacgttcagagc

SEQ ID NO: 494249 - DNA, 25 bp, Homo sapien
gcaacgcagtgtcccacagactgca

SEQ ID NO: 494250 - DNA, 25 bp, Homo sapien
cacagaacgttcagagctctaggga

SEQ ID NO: 494251 - DNA, 25 bp, Homo sapien
ccggtccggccgttgagtgtgccct

SEQ ID NO: 494252 - DNA, 25 bp, Homo sapien
ttccacacgggtgacatggatgacg

SEQ ID NO: 494253 - DNA, 25 bp, Homo sapien
aagctcgtcctcattggtctgctgg

SEQ ID NO: 494254 - DNA, 25 bp, Homo sapien
tggatgacgtctccttttgagaagg

SEQ ID NO: 494255 - DNA, 25 bp, Homo sapien
atcggaaagtcagtgaaacaatgtg

SEQ ID NO: 494256 - DNA, 25 bp, Homo sapien
cggaaagtcagtgaaacaatgtgaa

SEQ ID NO: 494257 - DNA, 25 bp, Homo sapien
tcaaaatcggaaagtcagtgaaaca

SEQ ID NO: 494258 - DNA, 25 bp, Homo sapien
aaatcggaaagtcagtgaaacaatg

SEQ ID NO: 494259 - DNA, 25 bp, Homo sapien
gcaagacaaattcccacggcagatg

SEQ ID NO: 494260 - DNA, 25 bp, Homo sapien
gggtaacagcatactgcaagacaaa

SEQ ID NO: 494261 - DNA, 25 bp, Homo sapien
caaaagcgggggctcacgatgcctt

SEQ ID NO: 494262 - DNA, 25 bp, Homo sapien
ggcagatgacactgacgacattcaa

SEQ ID NO: 494263 - DNA, 25 bp, Homo sapien
cacatacgttgaaaccgggcacgca

SEQ ID NO: 494264 - DNA, 25 bp, Homo sapien
ccatgtacacgcacatacgttgaaa

SEQ ID NO: 494265 - DNA, 25 bp, Homo sapien
gagctccttgatggcaacacaccat

SEQ ID NO: 494266 - DNA, 25 bp, Homo sapien
atggattccgtgtggcccctgcaaa

SEQ ID NO: 494267 - DNA, 25 bp, Homo sapien
gcttctctccttaacttctcccttg

SEQ ID NO: 494268 - DNA, 25 bp, Homo sapien
ccagaatggaccttgctgcttctct

SEQ ID NO: 494269 - DNA, 25 bp, Homo sapien
ctctccttaacttctcccttgaatt

SEQ ID NO: 494270 - DNA, 25 bp, Homo sapien
ttccagaatggaccttgctgcttct

SEQ ID NO: 494271 - DNA, 25 bp, Homo sapien
tgttctaacttacagcgcagagagg

SEQ ID NO: 494272 - DNA, 25 bp, Homo sapien
ccttcaccgatgatgtcagctagat

SEQ ID NO: 494273 - DNA, 25 bp, Homo sapien
actttcatcatgttctggagacggc

SEQ ID NO: 494274 - DNA, 25 bp, Homo sapien
gagattaggctttgcccttaaggaa

SEQ ID NO: 494275 - DNA, 25 bp, Homo sapien
ggcagtcgtatcaaatcctttggga

SEQ ID NO: 494276 - DNA, 25 bp, Homo sapien
gcttttgtttatggcagtcgtatca

SEQ ID NO: 494277 - DNA, 25 bp, Homo sapien
ggagggctcttcagtgttcctgatt

SEQ ID NO: 494278 - DNA, 25 bp, Homo sapien
ctttgggagggctcttcagtgttcc

SEQ ID NO: 494279 - DNA, 25 bp, Homo sapien
gtcttctgcacgctctggctgctgc

SEQ ID NO: 494280 - DNA, 25 bp, Homo sapien
tcttctgcacgctctggctgctgca

SEQ ID NO: 494281 - DNA, 25 bp, Homo sapien
cctcgtcttctgcacgctctggctg

SEQ ID NO: 494282 - DNA, 25 bp, Homo sapien
tcgtcttctgcacgctctggctgct

SEQ ID NO: 494283 - DNA, 25 bp, Homo sapien
ggtatacctagcatgaattccatca

SEQ ID NO: 494284 - DNA, 25 bp, Homo sapien
tgccaaccgtatctgacaggtatac

SEQ ID NO: 494285 - DNA, 25 bp, Homo sapien
caaccgtatctgacaggtataccta

SEQ ID NO: 494286 - DNA, 25 bp, Homo sapien
cgtatctgacaggtatacctagcat

SEQ ID NO: 494287 - DNA, 25 bp, Homo sapien
ctggtctgcaatggccgtaggtacg

SEQ ID NO: 494288 - DNA, 25 bp, Homo sapien
ccgtaggtacgttgaaagcacagtc

SEQ ID NO: 494289 - DNA, 25 bp, Homo sapien
caatggccgtaggtacgttgaaagc

SEQ ID NO: 494290 - DNA, 25 bp, Homo sapien
cgttgaaagcacagtctgaagttct

SEQ ID NO: 494291 - DNA, 25 bp, Homo sapien
atatgaaatgtttgctgaacttaac

SEQ ID NO: 494292 - DNA, 25 bp, Homo sapien
aaatatgaaatgtttgctgaactta

SEQ ID NO: 494293 - DNA, 25 bp, Homo sapien
ctagatttcccattaaatatgaaat

SEQ ID NO: 494294 - DNA, 25 bp, Homo sapien
agatttcccattaaatatgaaatgt

SEQ ID NO: 494295 - DNA, 25 bp, Homo sapien
ggtgcattcttctaaagactgtacg

SEQ ID NO: 494296 - DNA, 25 bp, Homo sapien
aagactgtacgagcatttgctggaa

SEQ ID NO: 494297 - DNA, 25 bp, Homo sapien
gcattcttctaaagactgtacgagc

SEQ ID NO: 494298 - DNA, 25 bp, Homo sapien
tctaaagactgtacgagcatttgct

SEQ ID NO: 494299 - DNA, 25 bp, Homo sapien
gactgaagccttagtaaacacatgg

SEQ ID NO: 494300 - DNA, 25 bp, Homo sapien
ggaactctaacacctcgtatacatg

SEQ ID NO: 494301 - DNA, 25 bp, Homo sapien
tggcttcaagcgattactttactgc

SEQ ID NO: 494302 - DNA, 25 bp, Homo sapien
caaattctgagataacataaggact

SEQ ID NO: 494303 - DNA, 25 bp, Homo sapien
acgggaacagggcaaatcctgctat

SEQ ID NO: 494304 - DNA, 25 bp, Homo sapien
aaatcctgctatctccactgtttgc

SEQ ID NO: 494305 - DNA, 25 bp, Homo sapien
tgagacgggaacagggcaaatcctg

SEQ ID NO: 494306 - DNA, 25 bp, Homo sapien
agggcaaatcctgctatctccactg

SEQ ID NO: 494307 - DNA, 25 bp, Homo sapien
tcataaccatggacttactcttgcc

SEQ ID NO: 494308 - DNA, 25 bp, Homo sapien
ccactctacggctcttgattgcaga

SEQ ID NO: 494309 - DNA, 25 bp, Homo sapien
cagtgctgaaagtggtgtgttgaca

SEQ ID NO: 494310 - DNA, 25 bp, Homo sapien
ttctgtatcaaagatctgtccagtg

SEQ ID NO: 494311 - DNA, 25 bp, Homo sapien
gctaagggttaggatgcacaagtct

SEQ ID NO: 494312 - DNA, 25 bp, Homo sapien
gaagcacaacagttacctgcacgga

SEQ ID NO: 494313 - DNA, 25 bp, Homo sapien
gcacaagtcttcctgtcggtggcgg

SEQ ID NO: 494314 - DNA, 25 bp, Homo sapien
tcggtggcggtgacatatagatctc

SEQ ID NO: 494315 - DNA, 25 bp, Homo sapien
tccgtgaggacattcactgcagaag

SEQ ID NO: 494316 - DNA, 25 bp, Homo sapien
tgtggcatcaggtttaaaaagcagc

SEQ ID NO: 494317 - DNA, 25 bp, Homo sapien
aagggtgattggcacaatacgtgag

SEQ ID NO: 494318 - DNA, 25 bp, Homo sapien
tgaggtacagggttttcatctgtgg

SEQ ID NO: 494319 - DNA, 25 bp, Homo sapien
cagacgacggcctgcatgaaggcca

SEQ ID NO: 494320 - DNA, 25 bp, Homo sapien
ttgcaagtgatacagacgacggcct

SEQ ID NO: 494321 - DNA, 25 bp, Homo sapien
tgatacagacgacggcctgcatgaa

SEQ ID NO: 494322 - DNA, 25 bp, Homo sapien
cgacggcctgcatgaaggccactgc

SEQ ID NO: 494323 - DNA, 25 bp, Homo sapien
tccaaacatcactgggtggggcaga

SEQ ID NO: 494324 - DNA, 25 bp, Homo sapien
ccaaacatcactgggtggggcagac

SEQ ID NO: 494325 - DNA, 25 bp, Homo sapien
agacatcaatgctccaaacatcact

SEQ ID NO: 494326 - DNA, 25 bp, Homo sapien
tgctccaaacatcactgggtggggc

SEQ ID NO: 494327 - DNA, 25 bp, Homo sapien
accccttcactggcgatctctgagg

SEQ ID NO: 494328 - DNA, 25 bp, Homo sapien
gggtctgctgtccctcaaattgcat

SEQ ID NO: 494329 - DNA, 25 bp, Homo sapien
actggcgatctctgaggtctctgtc

SEQ ID NO: 494330 - DNA, 25 bp, Homo sapien
gatctctgaggtctctgtcaggccc

SEQ ID NO: 494331 - DNA, 25 bp, Homo sapien
tctcaaggtggtagaacaaggaccg

SEQ ID NO: 494332 - DNA, 25 bp, Homo sapien
gaccgagctgctccggtaaagagct

SEQ ID NO: 494333 - DNA, 25 bp, Homo sapien
gatggtagtcatccccagatgcgag

SEQ ID NO: 494334 - DNA, 25 bp, Homo sapien
tccggtaaagagctagagcacactg

SEQ ID NO: 494335 - DNA, 25 bp, Homo sapien
gaatttatgaaacataagtgttgct

SEQ ID NO: 494336 - DNA, 25 bp, Homo sapien
tttaacatctggaaggctccagctt

SEQ ID NO: 494337 - DNA, 25 bp, Homo sapien
atgagcaacagccagaatttatgaa

SEQ ID NO: 494338 - DNA, 25 bp, Homo sapien
tccagcttttatcccaaatctgcgc

SEQ ID NO: 494339 - DNA, 25 bp, Homo sapien
caagagagacactcgtggttagcaa

SEQ ID NO: 494340 - DNA, 25 bp, Homo sapien
agacactcgtggttagcaatgagag

SEQ ID NO: 494341 - DNA, 25 bp, Homo sapien
cactcgtggttagcaatgagagaca

SEQ ID NO: 494342 - DNA, 25 bp, Homo sapien
aagtggcaagagagacactcgtggt

SEQ ID NO: 494343 - DNA, 25 bp, Homo sapien
ggtcagcacgagaatcccagggctg

SEQ ID NO: 494344 - DNA, 25 bp, Homo sapien
tttgagcagcgtagggtatttatcc

SEQ ID NO: 494345 - DNA, 25 bp, Homo sapien
tctctcgagctctttgagcagcgta

SEQ ID NO: 494346 - DNA, 25 bp, Homo sapien
tccaggcgcatgaagggtttgctca

SEQ ID NO: 494347 - DNA, 25 bp, Homo sapien
gatttttgaatatcttgtctatctg

SEQ ID NO: 494348 - DNA, 25 bp, Homo sapien
ggatttttgaatatcttgtctatct

SEQ ID NO: 494349 - DNA, 25 bp, Homo sapien
tttttgaatatcttgtctatctgta

SEQ ID NO: 494350 - DNA, 25 bp, Homo sapien
tttgaatatcttgtctatctgtatg

SEQ ID NO: 494351 - DNA, 25 bp, Homo sapien
cctgggacatgtaagtgacgttgcc

SEQ ID NO: 494352 - DNA, 25 bp, Homo sapien
cctcttccggacttcttgacattgg

SEQ ID NO: 494353 - DNA, 25 bp, Homo sapien
ccagttccggatggcttccgtcagg

SEQ ID NO: 494354 - DNA, 25 bp, Homo sapien
gttttaatgtcatcgccctcccagt

SEQ ID NO: 494355 - DNA, 25 bp, Homo sapien
tcatcctaggactggcagacaacat

SEQ ID NO: 494356 - DNA, 25 bp, Homo sapien
gggaagagtagaagatatctttcat

SEQ ID NO: 494357 - DNA, 25 bp, Homo sapien
taggactggcagacaacattagcaa

SEQ ID NO: 494358 - DNA, 25 bp, Homo sapien
ccactcatcctaggactggcagaca

SEQ ID NO: 494359 - DNA, 25 bp, Homo sapien
cacacagcacatacacagatagata

SEQ ID NO: 494360 - DNA, 25 bp, Homo sapien
tcctcagatccacaataaaatataa

SEQ ID NO: 494361 - DNA, 25 bp, Homo sapien
gagctgtacgtccatatctgaatat

SEQ ID NO: 494362 - DNA, 25 bp, Homo sapien
tcacaacgaaacacaaacaggagct

SEQ ID NO: 494363 - DNA, 25 bp, Homo sapien
aacacacactgtatctgatgagctg

SEQ ID NO: 494364 - DNA, 25 bp, Homo sapien
tgatgagctgctactaaacatagac

SEQ ID NO: 494365 - DNA, 25 bp, Homo sapien
tgtaagcaagaaactcaactggcga

SEQ ID NO: 494366 - DNA, 25 bp, Homo sapien
caagggacagagtgacaagcccaaa

SEQ ID NO: 494367 - DNA, 25 bp, Homo sapien
ctgtcctcaagctttgtgattgtca

SEQ ID NO: 494368 - DNA, 25 bp, Homo sapien
gtcctcaagctttgtgattgtcatt

SEQ ID NO: 494369 - DNA, 25 bp, Homo sapien
gattgtcattcctgtcgttggaagc

SEQ ID NO: 494370 - DNA, 25 bp, Homo sapien
tcattcctgtcgttggaagctttcc

SEQ ID NO: 494371 - DNA, 25 bp, Homo sapien
tctgtaggtgctccacccattcctg

SEQ ID NO: 494372 - DNA, 25 bp, Homo sapien
gtatgagatggcactgaatgaggct

SEQ ID NO: 494373 - DNA, 25 bp, Homo sapien
ttcccacagacgtgaccttcgtttg

SEQ ID NO: 494374 - DNA, 25 bp, Homo sapien
cagatcctgctggttgttgcacgac

SEQ ID NO: 494375 - DNA, 25 bp, Homo sapien
tctatagttgagtgtaaaactcccc

SEQ ID NO: 494376 - DNA, 25 bp, Homo sapien
caattcactactgcacgaagagggc

SEQ ID NO: 494377 - DNA, 25 bp, Homo sapien
aatcagtcttctagggccacacgga

SEQ ID NO: 494378 - DNA, 25 bp, Homo sapien
cagggttgtttctcgagaacactca

SEQ ID NO: 494379 - DNA, 25 bp, Homo sapien
cattctgaggaagtgcgcgaccttc

SEQ ID NO: 494380 - DNA, 25 bp, Homo sapien
tgctcaccgcgaaagggcacttatc

SEQ ID NO: 494381 - DNA, 25 bp, Homo sapien
caaaacacaggctgagagggacggc

SEQ ID NO: 494382 - DNA, 25 bp, Homo sapien
tactgggcgaaactaaggcctgatc

SEQ ID NO: 494383 - DNA, 25 bp, Homo sapien
ttgctgtctgcgtgcttgctggacg

SEQ ID NO: 494384 - DNA, 25 bp, Homo sapien
tgctggacggagtgaccgggtggga

SEQ ID NO: 494385 - DNA, 25 bp, Homo sapien
agcgtgtggtaggcgggcgtcagcg

SEQ ID NO: 494386 - DNA, 25 bp, Homo sapien
gcggcgcgggcttgctgtctgcgtg

SEQ ID NO: 494387 - DNA, 25 bp, Homo sapien
cagagagcagctgagggccggaggg

SEQ ID NO: 494388 - DNA, 25 bp, Homo sapien
cttgggtgttttcggaggctccagg

SEQ ID NO: 494389 - DNA, 25 bp, Homo sapien
gctccagggcttgggtgttttcgga

SEQ ID NO: 494390 - DNA, 25 bp, Homo sapien
cagggcttgggtgttttcggaggct

SEQ ID NO: 494391 - DNA, 25 bp, Homo sapien
tgtttgagtggtcaagggacctcac

SEQ ID NO: 494392 - DNA, 25 bp, Homo sapien
ctgtttgagtggtcaagggacctca

SEQ ID NO: 494393 - DNA, 25 bp, Homo sapien
ctgcaggcgcagagggtcacagagc

SEQ ID NO: 494394 - DNA, 25 bp, Homo sapien
tgcaggcgcagagggtcacagagca

SEQ ID NO: 494395 - DNA, 25 bp, Homo sapien
tgctaaacgcgagaccaagactcag

SEQ ID NO: 494396 - DNA, 25 bp, Homo sapien
tcagagtgttcacaacggaatggcc

SEQ ID NO: 494397 - DNA, 25 bp, Homo sapien
taaggtgtcaactgtcaagcacgtg

SEQ ID NO: 494398 - DNA, 25 bp, Homo sapien
gacgacggcaaaaaacaaagtgagc

SEQ ID NO: 494399 - DNA, 25 bp, Homo sapien
ttcaggtttgcgcttgggcagcagc

SEQ ID NO: 494400 - DNA, 25 bp, Homo sapien
tttccgggacgcgaactcctcatct

SEQ ID NO: 494401 - DNA, 25 bp, Homo sapien
tgaaggcttccgttcaggtttgcgc

SEQ ID NO: 494402 - DNA, 25 bp, Homo sapien
tttttcatggtcttagggctcttac

SEQ ID NO: 494403 - DNA, 25 bp, Homo sapien
gcagtaagcttcaatgactttcaga

SEQ ID NO: 494404 - DNA, 25 bp, Homo sapien
gagtgtttgccttgttttggcgctg

SEQ ID NO: 494405 - DNA, 25 bp, Homo sapien
gaattgagtgtttgccttgttttgg

SEQ ID NO: 494406 - DNA, 25 bp, Homo sapien
ggcgctggtgcagtaagcttcaatg

SEQ ID NO: 494407 - DNA, 25 bp, Homo sapien
tgacagtcgagctggaaagggcacc

SEQ ID NO: 494408 - DNA, 25 bp, Homo sapien
tgcagaactcacagacacggttggg

SEQ ID NO: 494409 - DNA, 25 bp, Homo sapien
gaagccccagagtggtttgcccata

SEQ ID NO: 494410 - DNA, 25 bp, Homo sapien
catagacgggatatggtacgacacc

SEQ ID NO: 494411 - DNA, 25 bp, Homo sapien
aggctactgcgacgccccagggagt

SEQ ID NO: 494412 - DNA, 25 bp, Homo sapien
cagagtcttccgagaggtctgaagg

SEQ ID NO: 494413 - DNA, 25 bp, Homo sapien
tctaggcttggttggtcatcatcag

SEQ ID NO: 494414 - DNA, 25 bp, Homo sapien
tcagccaagacgtgattatgcatca

SEQ ID NO: 494415 - DNA, 25 bp, Homo sapien
ggtgagagatatatgagcaacagct

SEQ ID NO: 494416 - DNA, 25 bp, Homo sapien
ttctggtgagagatatatgagcaac

SEQ ID NO: 494417 - DNA, 25 bp, Homo sapien
tggtgagagatatatgagcaacagc

SEQ ID NO: 494418 - DNA, 25 bp, Homo sapien
tctggtgagagatatatgagcaaca

SEQ ID NO: 494419 - DNA, 25 bp, Homo sapien
tttggcccctcaagcaatgactagg

SEQ ID NO: 494420 - DNA, 25 bp, Homo sapien
caaaaaagtgctccctgacgcagag

SEQ ID NO: 494421 - DNA, 25 bp, Homo sapien
tctaaacaacgtgctactgccagga

SEQ ID NO: 494422 - DNA, 25 bp, Homo sapien
ggaagaaagaaatcacggccacctg

SEQ ID NO: 494423 - DNA, 25 bp, Homo sapien
gcatgcatgcttgtgtaagcctgcc

SEQ ID NO: 494424 - DNA, 25 bp, Homo sapien
catttcatagacgagatgactggct

SEQ ID NO: 494425 - DNA, 25 bp, Homo sapien
gggccttatctgacgacacacaact

SEQ ID NO: 494426 - DNA, 25 bp, Homo sapien
cttggctgttagacaccactctggg

SEQ ID NO: 494427 - DNA, 25 bp, Homo sapien
cttccgtacgggagttgtgaggcca

SEQ ID NO: 494428 - DNA, 25 bp, Homo sapien
ttgtaaagaaatgggtcagacacgg

SEQ ID NO: 494429 - DNA, 25 bp, Homo sapien
ataaaataggatcacaaagaatgtc

SEQ ID NO: 494430 - DNA, 25 bp, Homo sapien
ctagacaacctgtttatatcatctg

SEQ ID NO: 494431 - DNA, 25 bp, Homo sapien
tcttctatcactgtctgaccattac

SEQ ID NO: 494432 - DNA, 25 bp, Homo sapien
aaacttgtggagcagattctttgcg

SEQ ID NO: 494433 - DNA, 25 bp, Homo sapien
tagtttcttccactataattttctc

SEQ ID NO: 494434 - DNA, 25 bp, Homo sapien
cttcttctggaagcaaaacttgtgg

SEQ ID NO: 494435 - DNA, 25 bp, Homo sapien
aatgcatatacggtatccacaagac

SEQ ID NO: 494436 - DNA, 25 bp, Homo sapien
tcctttaatgcatatacggtatcca

SEQ ID NO: 494437 - DNA, 25 bp, Homo sapien
tgcatatacggtatccacaagactc

SEQ ID NO: 494438 - DNA, 25 bp, Homo sapien
ttaatgcatatacggtatccacaag

SEQ ID NO: 494439 - DNA, 25 bp, Homo sapien
aggtctttgcgggctctctgttctt

SEQ ID NO: 494440 - DNA, 25 bp, Homo sapien
tctttgcgggctctctgttcttcct

SEQ ID NO: 494441 - DNA, 25 bp, Homo sapien
ggtctttgcgggctctctgttcttc

SEQ ID NO: 494442 - DNA, 25 bp, Homo sapien
gtctttgcgggctctctgttcttcc

SEQ ID NO: 494443 - DNA, 25 bp, Homo sapien
ccaggcaggatcattcatgttcttc

SEQ ID NO: 494444 - DNA, 25 bp, Homo sapien
ggcaggatcattcatgttcttcagg

SEQ ID NO: 494445 - DNA, 25 bp, Homo sapien
tcatgttcttcaggactttcctcac

SEQ ID NO: 494446 - DNA, 25 bp, Homo sapien
gcaggatcattcatgttcttcagga

SEQ ID NO: 494447 - DNA, 25 bp, Homo sapien
ccaccacaggtatgcattcaaaatg

SEQ ID NO: 494448 - DNA, 25 bp, Homo sapien
ggtaactgagatgttcacagagtgg

SEQ ID NO: 494449 - DNA, 25 bp, Homo sapien
tgagtgcaccccgacttgggtcagg

SEQ ID NO: 494450 - DNA, 25 bp, Homo sapien
ggtttgatcgtctccattcgcagaa

SEQ ID NO: 494451 - DNA, 25 bp, Homo sapien
ggatgcgggcatgggacttcttatt

SEQ ID NO: 494452 - DNA, 25 bp, Homo sapien
cttattcacgtagctggaaaggaca

SEQ ID NO: 494453 - DNA, 25 bp, Homo sapien
tggtgctgcggaacgaaccaggcat

SEQ ID NO: 494454 - DNA, 25 bp, Homo sapien
aaataccgacatggggggtgctgcc

SEQ ID NO: 494455 - DNA, 25 bp, Homo sapien
tcacagtactcagacagcggacaag

SEQ ID NO: 494456 - DNA, 25 bp, Homo sapien
acctctaggtggatgcggcagtgcc

SEQ ID NO: 494457 - DNA, 25 bp, Homo sapien
attaaggagtccacacaaccagggc

SEQ ID NO: 494458 - DNA, 25 bp, Homo sapien
agttaatgtcgcctcccggcagagg

SEQ ID NO: 494459 - DNA, 25 bp, Homo sapien
caggttcttcttccaggagaactca

SEQ ID NO: 494460 - DNA, 25 bp, Homo sapien
aggttcttcttccaggagaactcac

SEQ ID NO: 494461 - DNA, 25 bp, Homo sapien
ctgtcttccttgacagatggctggc

SEQ ID NO: 494462 - DNA, 25 bp, Homo sapien
gcctgcactgttacttcctgtcttc

SEQ ID NO: 494463 - DNA, 25 bp, Homo sapien
tgagcctgcactgttacttcctgtc

SEQ ID NO: 494464 - DNA, 25 bp, Homo sapien
gtcttccttgacagatggctggcat

SEQ ID NO: 494465 - DNA, 25 bp, Homo sapien
ccagggcaccagagggcaacgccat

SEQ ID NO: 494466 - DNA, 25 bp, Homo sapien
gagcaccagggcaccagagggcaac

SEQ ID NO: 494467 - DNA, 25 bp, Homo sapien
cctgagcaccagggcaccagagggc

SEQ ID NO: 494468 - DNA, 25 bp, Homo sapien
agagcctgtggcccccaccctgagc

SEQ ID NO: 494469 - DNA, 25 bp, Homo sapien
cgtggaagagtgaaacccagcaggc

SEQ ID NO: 494470 - DNA, 25 bp, Homo sapien
aggccacaggacggagcagccagca

SEQ ID NO: 494471 - DNA, 25 bp, Homo sapien
ccgtggaagagtgaaacccagcagg

SEQ ID NO: 494472 - DNA, 25 bp, Homo sapien
ggggcggcagggactgccccagact

SEQ ID NO: 494473 - DNA, 25 bp, Homo sapien
ggcggcagggactgccccagactca

SEQ ID NO: 494474 - DNA, 25 bp, Homo sapien
cagggagaggggtgttcaccaaggg

SEQ ID NO: 494475 - DNA, 25 bp, Homo sapien
gcggcagggactgccccagactcac

SEQ ID NO: 494476 - DNA, 25 bp, Homo sapien
ggagaaccacgtcatcaatgagctt

SEQ ID NO: 494477 - DNA, 25 bp, Homo sapien
gctggagaaccacgtcatcaatgag

SEQ ID NO: 494478 - DNA, 25 bp, Homo sapien
agcagtcggctggagaaccacgtca

SEQ ID NO: 494479 - DNA, 25 bp, Homo sapien
gcaccgggaagctgcgggagccact

SEQ ID NO: 494480 - DNA, 25 bp, Homo sapien
cagtcccactccacgtggaaaacac

SEQ ID NO: 494481 - DNA, 25 bp, Homo sapien
tcagtcccactccacgtggaaaaca

SEQ ID NO: 494482 - DNA, 25 bp, Homo sapien
agctgacagatgaaggggccgagca

SEQ ID NO: 494483 - DNA, 25 bp, Homo sapien
tgacagatgaaggggccgagcacac

SEQ ID NO: 494484 - DNA, 25 bp, Homo sapien
gctgacagatgaaggggccgagcac

SEQ ID NO: 494485 - DNA, 25 bp, Homo sapien
ctgacagatgaaggggccgagcaca

SEQ ID NO: 494486 - DNA, 25 bp, Homo sapien
gaggtgccgcggagagttcttcact

SEQ ID NO: 494487 - DNA, 25 bp, Homo sapien
gtgccgcggagagttcttcacttcc

SEQ ID NO: 494488 - DNA, 25 bp, Homo sapien
tcttcacttccagcacgtattccat

SEQ ID NO: 494489 - DNA, 25 bp, Homo sapien
tgaattgcttcaggaggtgccgcgg

SEQ ID NO: 494490 - DNA, 25 bp, Homo sapien
cgcccccctggcgccttccctccat

SEQ ID NO: 494491 - DNA, 25 bp, Homo sapien
gcccccctggcgccttccctccata

SEQ ID NO: 494492 - DNA, 25 bp, Homo sapien
cctgtcccgctgcgagagctgcagg

SEQ ID NO: 494493 - DNA, 25 bp, Homo sapien
gccctgtcccgctgcgagagctgca

SEQ ID NO: 494494 - DNA, 25 bp, Homo sapien
ccctgtcccgctgcgagagctgcag

SEQ ID NO: 494495 - DNA, 25 bp, Homo sapien
ctgtcccgctgcgagagctgcaggg

SEQ ID NO: 494496 - DNA, 25 bp, Homo sapien
agcagcttgtacacacaacagctgc

SEQ ID NO: 494497 - DNA, 25 bp, Homo sapien
cagcagcagcttgtacacacaacag

SEQ ID NO: 494498 - DNA, 25 bp, Homo sapien
accagtcccatgcaccctgagaagt

SEQ ID NO: 494499 - DNA, 25 bp, Homo sapien
caccagtcccatgcaccctgagaag

SEQ ID NO: 494500 - DNA, 25 bp, Homo sapien
ccatgcaccctgagaagtggcacca

SEQ ID NO: 494501 - DNA, 25 bp, Homo sapien
gctgcctcctgtcccggatgagtga

SEQ ID NO: 494502 - DNA, 25 bp, Homo sapien
ctcctgtcccggatgagtgagtgtg

SEQ ID NO: 494503 - DNA, 25 bp, Homo sapien
ctgcctcctgtcccggatgagtgag

SEQ ID NO: 494504 - DNA, 25 bp, Homo sapien
cctcctgtcccggatgagtgagtgt

SEQ ID NO: 494505 - DNA, 25 bp, Homo sapien
gggattcggacacagagagtccaaa

SEQ ID NO: 494506 - DNA, 25 bp, Homo sapien
cacagatcccggggattcggacaca

SEQ ID NO: 494507 - DNA, 25 bp, Homo sapien
agctcgtgatgcccgaacgctcttc

SEQ ID NO: 494508 - DNA, 25 bp, Homo sapien
tcacactgcccgcagtctcctccac

SEQ ID NO: 494509 - DNA, 25 bp, Homo sapien
accccaccagacaggctcacactgc

SEQ ID NO: 494510 - DNA, 25 bp, Homo sapien
gccaggctcgcgttgcccgcagtct

SEQ ID NO: 494511 - DNA, 25 bp, Homo sapien
tgtgtctacagtgggtgactaggag

SEQ ID NO: 494512 - DNA, 25 bp, Homo sapien
ggcatccaggcaccacggccttttt

SEQ ID NO: 494513 - DNA, 25 bp, Homo sapien
gtgactaggagggctttgctcccag

SEQ ID NO: 494514 - DNA, 25 bp, Homo sapien
ttctatgcagcagcccatgtgtcta

SEQ ID NO: 494515 - DNA, 25 bp, Homo sapien
caggtttgcaaatgctgcggctgca

SEQ ID NO: 494516 - DNA, 25 bp, Homo sapien
gcggctgcagccctcatcctctgtc

SEQ ID NO: 494517 - DNA, 25 bp, Homo sapien
gcatcatggacacgggagccctgcc

SEQ ID NO: 494518 - DNA, 25 bp, Homo sapien
ggagccctgccgaggcgatgccgca

SEQ ID NO: 494519 - DNA, 25 bp, Homo sapien
gccttgatcggccatgggccaccga

SEQ ID NO: 494520 - DNA, 25 bp, Homo sapien
atgttcagccccgagggatgtggct

SEQ ID NO: 494521 - DNA, 25 bp, Homo sapien
acatgttcagccccgagggatgtgg

SEQ ID NO: 494522 - DNA, 25 bp, Homo sapien
gatgtggctgccttgatcggccatg

SEQ ID NO: 494523 - DNA, 25 bp, Homo sapien
aatgtcatacagaggaacgtcacac

SEQ ID NO: 494524 - DNA, 25 bp, Homo sapien
gtagaagcagcacccgagctcctgg

SEQ ID NO: 494525 - DNA, 25 bp, Homo sapien
gaaccgctttcttgtagcagacgcc

SEQ ID NO: 494526 - DNA, 25 bp, Homo sapien
tccctggagacgttgtagtcacaaa

SEQ ID NO: 494527 - DNA, 25 bp, Homo sapien
cgttgatgccaagctcctaaagatg

SEQ ID NO: 494528 - DNA, 25 bp, Homo sapien
tagtcagcgtcttagtatttcaccg

SEQ ID NO: 494529 - DNA, 25 bp, Homo sapien
gatggagactcaacctcaatgatgc

SEQ ID NO: 494530 - DNA, 25 bp, Homo sapien
caatgatgcgctccgtacagtgtct

SEQ ID NO: 494531 - DNA, 25 bp, Homo sapien
gactgtcccgtggaaacttgcttac

SEQ ID NO: 494532 - DNA, 25 bp, Homo sapien
tgggaaactgcttgtcaaacattct

SEQ ID NO: 494533 - DNA, 25 bp, Homo sapien
gggaaactgcttgtcaaacattctt

SEQ ID NO: 494534 - DNA, 25 bp, Homo sapien
ggactgtcccgtggaaacttgctta

SEQ ID NO: 494535 - DNA, 25 bp, Homo sapien
tgtggaggatagatggtgctggctc

SEQ ID NO: 494536 - DNA, 25 bp, Homo sapien
ggaaatggctcctcaatgcccaggt

SEQ ID NO: 494537 - DNA, 25 bp, Homo sapien
tggctcctcaatgcccaggtcaatt

SEQ ID NO: 494538 - DNA, 25 bp, Homo sapien
tgcgtggagagatggcgctggcccc

SEQ ID NO: 494539 - DNA, 25 bp, Homo sapien
ccacggggttgtgctgagagatggc

SEQ ID NO: 494540 - DNA, 25 bp, Homo sapien
ggggttgtgctgagagatggcgctg

SEQ ID NO: 494541 - DNA, 25 bp, Homo sapien
gttgtgctgagagatggcgctggct

SEQ ID NO: 494542 - DNA, 25 bp, Homo sapien
ttgtgctgagagatggcgctggctc

SEQ ID NO: 494543 - DNA, 25 bp, Homo sapien
tggtgatgacgaaggccccagcgat

SEQ ID NO: 494544 - DNA, 25 bp, Homo sapien
tgatggtgatgacgaaggccccagc

SEQ ID NO: 494545 - DNA, 25 bp, Homo sapien
tgtagatgatggtgatgacgaaggc

SEQ ID NO: 494546 - DNA, 25 bp, Homo sapien
atggtgatgacgaaggccccagcga

SEQ ID NO: 494547 - DNA, 25 bp, Homo sapien
gccttttcgctggacttctgtggca

SEQ ID NO: 494548 - DNA, 25 bp, Homo sapien
ttggaggcccaggactcgcaggctt

SEQ ID NO: 494549 - DNA, 25 bp, Homo sapien
tcgtcactcttcatcgagggcccag

SEQ ID NO: 494550 - DNA, 25 bp, Homo sapien
tcagccctaacttgctgctggatga

SEQ ID NO: 494551 - DNA, 25 bp, Homo sapien
tgcacagacgcagcctcagttaggg

SEQ ID NO: 494552 - DNA, 25 bp, Homo sapien
ggaggctcccttaaccaggcaaaca

SEQ ID NO: 494553 - DNA, 25 bp, Homo sapien
ggaatattcagcagtcccgaaaaga

SEQ ID NO: 494554 - DNA, 25 bp, Homo sapien
caggaaagcctcatttgcacagacg

SEQ ID NO: 494555 - DNA, 25 bp, Homo sapien
agtcctcagtttcttcggcttctgt

SEQ ID NO: 494556 - DNA, 25 bp, Homo sapien
cctcagtttcttcggcttctgttat

SEQ ID NO: 494557 - DNA, 25 bp, Homo sapien
cagtttcttcggcttctgttattgt

SEQ ID NO: 494558 - DNA, 25 bp, Homo sapien
agtttcttcggcttctgttattgtc

SEQ ID NO: 494559 - DNA, 25 bp, Homo sapien
ggataattctgacaatctccacttc

SEQ ID NO: 494560 - DNA, 25 bp, Homo sapien
agtgcacctgctgtaccatttcatt

SEQ ID NO: 494561 - DNA, 25 bp, Homo sapien
tgttaacagtgcacctgctgtacca

SEQ ID NO: 494562 - DNA, 25 bp, Homo sapien
tttgggtggtcattccatcacactg

SEQ ID NO: 494563 - DNA, 25 bp, Homo sapien
tgtgagcccccatagtgttaatatt

SEQ ID NO: 494564 - DNA, 25 bp, Homo sapien
tattagtgacaagcagtgccattaa

SEQ ID NO: 494565 - DNA, 25 bp, Homo sapien
gacaagcagtgccattaaaaactga

SEQ ID NO: 494566 - DNA, 25 bp, Homo sapien
tgttaatattagtgacaagcagtgc

SEQ ID NO: 494567 - DNA, 25 bp, Homo sapien
ccagatccagacgctgctcctccct

SEQ ID NO: 494568 - DNA, 25 bp, Homo sapien
tcctccctcgcagcacggctgagtc

SEQ ID NO: 494569 - DNA, 25 bp, Homo sapien
ctatgctttggggcctctcagatcc

SEQ ID NO: 494570 - DNA, 25 bp, Homo sapien
tgctttggggcctctcagatccaga

SEQ ID NO: 494571 - DNA, 25 bp, Homo sapien
ccagtcgcccacaaggaagtctgca

SEQ ID NO: 494572 - DNA, 25 bp, Homo sapien
tccagtcgcccacaaggaagtctgc

SEQ ID NO: 494573 - DNA, 25 bp, Homo sapien
ttccagtcgcccacaaggaagtctg

SEQ ID NO: 494574 - DNA, 25 bp, Homo sapien
ctttccagtcgcccacaaggaagtc

SEQ ID NO: 494575 - DNA, 25 bp, Homo sapien
ttccacgggccagacaaaaggctgc

SEQ ID NO: 494576 - DNA, 25 bp, Homo sapien
cagacaaaaggctgcgcccccacct

SEQ ID NO: 494577 - DNA, 25 bp, Homo sapien
acgggccagacaaaaggctgcgccc

SEQ ID NO: 494578 - DNA, 25 bp, Homo sapien
ccacgggccagacaaaaggctgcgc

SEQ ID NO: 494579 - DNA, 25 bp, Homo sapien
gcggactgggtgctgcttgcacaca

SEQ ID NO: 494580 - DNA, 25 bp, Homo sapien
aggcacgtagccagcactgcatgga

SEQ ID NO: 494581 - DNA, 25 bp, Homo sapien
ggtgctgcttgcacacagcatgaag

SEQ ID NO: 494582 - DNA, 25 bp, Homo sapien
ccagcactgcatggatgctggttca

SEQ ID NO: 494583 - DNA, 25 bp, Homo sapien
ggtgctccctggcaatttccacacg

SEQ ID NO: 494584 - DNA, 25 bp, Homo sapien
gctgtctggttcctattcatcctct

SEQ ID NO: 494585 - DNA, 25 bp, Homo sapien
tcattttggccctcttgccagtctc

SEQ ID NO: 494586 - DNA, 25 bp, Homo sapien
tcggtgctccctggcaatttccaca

SEQ ID NO: 494587 - DNA, 25 bp, Homo sapien
gggtaaaagtccacagagcaagtta

SEQ ID NO: 494588 - DNA, 25 bp, Homo sapien
gatgtgatgcaatgtcgaacaaaga

SEQ ID NO: 494589 - DNA, 25 bp, Homo sapien
caaagagccatacccatgggaagaa

SEQ ID NO: 494590 - DNA, 25 bp, Homo sapien
gaattgaagtcatgcctcttgggta

SEQ ID NO: 494591 - DNA, 25 bp, Homo sapien
tctgcctccacatctaagcacctgt

SEQ ID NO: 494592 - DNA, 25 bp, Homo sapien
tccacatctaagcacctgtccaaat

SEQ ID NO: 494593 - DNA, 25 bp, Homo sapien
cacatctaagcacctgtccaaatgc

SEQ ID NO: 494594 - DNA, 25 bp, Homo sapien
catctaagcacctgtccaaatgctt

SEQ ID NO: 494595 - DNA, 25 bp, Homo sapien
gcctcggagtgcacttcttacccag

SEQ ID NO: 494596 - DNA, 25 bp, Homo sapien
cattagggtgaacgtctcacccggg

SEQ ID NO: 494597 - DNA, 25 bp, Homo sapien
ggtcccggagtcctgtcagtgtgca

SEQ ID NO: 494598 - DNA, 25 bp, Homo sapien
tggagttgcattagggtgaacgtct

SEQ ID NO: 494599 - DNA, 25 bp, Homo sapien
gtggaacgtctggtgccatctggac

SEQ ID NO: 494600 - DNA, 25 bp, Homo sapien
ccatctggacaaaagttagtggtga

SEQ ID NO: 494601 - DNA, 25 bp, Homo sapien
caaaagttagtggtgagattcaggg

SEQ ID NO: 494602 - DNA, 25 bp, Homo sapien
ggaacgtctggtgccatctggacaa

SEQ ID NO: 494603 - DNA, 25 bp, Homo sapien
gcatccaacataaccttccagtttg

SEQ ID NO: 494604 - DNA, 25 bp, Homo sapien
agaccgttaaaatctctccactaat

SEQ ID NO: 494605 - DNA, 25 bp, Homo sapien
acatcagtgcatccaacataacctt

SEQ ID NO: 494606 - DNA, 25 bp, Homo sapien
agtgcatccaacataaccttccagt

SEQ ID NO: 494607 - DNA, 25 bp, Homo sapien
gcgttgcttggttctctcattcgga

SEQ ID NO: 494608 - DNA, 25 bp, Homo sapien
ccacgtgtggttactttggcgttgc

SEQ ID NO: 494609 - DNA, 25 bp, Homo sapien
ggttctctcattcggaaaaactgct

SEQ ID NO: 494610 - DNA, 25 bp, Homo sapien
tctggtctggatggcgccgctccag

SEQ ID NO: 494611 - DNA, 25 bp, Homo sapien
gatccacacggcaccaacgggtgat

SEQ ID NO: 494612 - DNA, 25 bp, Homo sapien
gtgaggatccacacggcaccaacgg

SEQ ID NO: 494613 - DNA, 25 bp, Homo sapien
acacggcaccaacgggtgattgtct

SEQ ID NO: 494614 - DNA, 25 bp, Homo sapien
gtcaaagtgaggatccacacggcac

SEQ ID NO: 494615 - DNA, 25 bp, Homo sapien
cgcaggacgctccgcacgcagctcc

SEQ ID NO: 494616 - DNA, 25 bp, Homo sapien
gcagctccttcgtgctccttcacgg

SEQ ID NO: 494617 - DNA, 25 bp, Homo sapien
cgcacgcagctccttcgtgctcctt

SEQ ID NO: 494618 - DNA, 25 bp, Homo sapien
agctccttcgtgctccttcacggag

SEQ ID NO: 494619 - DNA, 25 bp, Homo sapien
acagcaaacgtggaatggattccag

SEQ ID NO: 494620 - DNA, 25 bp, Homo sapien
ccagatctgttatttaatggctttc

SEQ ID NO: 494621 - DNA, 25 bp, Homo sapien
gtgtgggttctgctcatgccaggtc

SEQ ID NO: 494622 - DNA, 25 bp, Homo sapien
tctatttcaactagagtactttggg

SEQ ID NO: 494623 - DNA, 25 bp, Homo sapien
gtcggctcatagcttgtgacagtga

SEQ ID NO: 494624 - DNA, 25 bp, Homo sapien
catagcttgtgacagtgaatgcaca

SEQ ID NO: 494625 - DNA, 25 bp, Homo sapien
ctttgtagtagtcggctcatagctt

SEQ ID NO: 494626 - DNA, 25 bp, Homo sapien
gtatcagctactttaccctctattc

SEQ ID NO: 494627 - DNA, 25 bp, Homo sapien
actcaaagagtgagaccggaggagc

SEQ ID NO: 494628 - DNA, 25 bp, Homo sapien
cgctgggcccgcgtttcgaggagtg

SEQ ID NO: 494629 - DNA, 25 bp, Homo sapien
ccgcgtttcgaggagtggtgacatt

SEQ ID NO: 494630 - DNA, 25 bp, Homo sapien
aggagcgccctggaagacgctgggc

SEQ ID NO: 494631 - DNA, 25 bp, Homo sapien
tatgaccagccaacactcgttgagc

SEQ ID NO: 494632 - DNA, 25 bp, Homo sapien
ggaacatccatgaggcacgctctat

SEQ ID NO: 494633 - DNA, 25 bp, Homo sapien
aggcacgctctatgaccagccaaca

SEQ ID NO: 494634 - DNA, 25 bp, Homo sapien
tagaagcggaacatccatgaggcac

SEQ ID NO: 494635 - DNA, 25 bp, Homo sapien
tattcataccattgaatgggcttta

SEQ ID NO: 494636 - DNA, 25 bp, Homo sapien
aaactgacgtagaaagcttttagag

SEQ ID NO: 494637 - DNA, 25 bp, Homo sapien
aattattgcgctgctattttgtgca

SEQ ID NO: 494638 - DNA, 25 bp, Homo sapien
ttttgtgcaataacagagctgaaga

SEQ ID NO: 494639 - DNA, 25 bp, Homo sapien
gtgaccagcagacatgaccacaagg

SEQ ID NO: 494640 - DNA, 25 bp, Homo sapien
tgaccacaaggctccctcgaaaggt

SEQ ID NO: 494641 - DNA, 25 bp, Homo sapien
gcgccggcaggtaccactgggtctc

SEQ ID NO: 494642 - DNA, 25 bp, Homo sapien
caaggaccccagacatggccatgag

SEQ ID NO: 494643 - DNA, 25 bp, Homo sapien
aggtggtaattctatcattttttca

SEQ ID NO: 494644 - DNA, 25 bp, Homo sapien
tcttgtccctcaggtggtaattcta

SEQ ID NO: 494645 - DNA, 25 bp, Homo sapien
ctcagtgagactgcactgcccttcc

SEQ ID NO: 494646 - DNA, 25 bp, Homo sapien
tgctcgctccttcagagccctaaag

SEQ ID NO: 494647 - DNA, 25 bp, Homo sapien
ggttcttcctacaaagacccagcga

SEQ ID NO: 494648 - DNA, 25 bp, Homo sapien
aaaggctgcggacgctggcacctgt

SEQ ID NO: 494649 - DNA, 25 bp, Homo sapien
tttatgtccacaacttccccataca

SEQ ID NO: 494650 - DNA, 25 bp, Homo sapien
gcactcggggcacaacagctttcca

SEQ ID NO: 494651 - DNA, 25 bp, Homo sapien
actatcccaagatttgcactcgggg

SEQ ID NO: 494652 - DNA, 25 bp, Homo sapien
tgttgcaatgacctccgtcagactt

SEQ ID NO: 494653 - DNA, 25 bp, Homo sapien
acaaggactatcccaagatttgcat

SEQ ID NO: 494654 - DNA, 25 bp, Homo sapien
ggtcgtgtcgggcaacgggcattca

SEQ ID NO: 494655 - DNA, 25 bp, Homo sapien
cgtgtcgggcaacgggcattcacca

SEQ ID NO: 494656 - DNA, 25 bp, Homo sapien
aggtggtcgtgtcgggcaacgggca

SEQ ID NO: 494657 - DNA, 25 bp, Homo sapien
ctgcaggtggtcgtgtcgggcaacg

SEQ ID NO: 494658 - DNA, 25 bp, Homo sapien
aactcgaccttgttgcagtgcagtg

SEQ ID NO: 494659 - DNA, 25 bp, Homo sapien
gacgtctggacgcttccaaagcaca

SEQ ID NO: 494660 - DNA, 25 bp, Homo sapien
tctaaagagaacacctgcacggacg

SEQ ID NO: 494661 - DNA, 25 bp, Homo sapien
gccattcagggcacactctaaagag

SEQ ID NO: 494662 - DNA, 25 bp, Homo sapien
agattgctaaaagccggacaccggg

SEQ ID NO: 494663 - DNA, 25 bp, Homo sapien
cagtgagattgctaaaagccggaca

SEQ ID NO: 494664 - DNA, 25 bp, Homo sapien
gtgacagcagtgagattgctaaaag

SEQ ID NO: 494665 - DNA, 25 bp, Homo sapien
cagcagtgagattgctaaaagccgg

SEQ ID NO: 494666 - DNA, 25 bp, Homo sapien
gaaagaaggcctccaggcacaagtc

SEQ ID NO: 494667 - DNA, 25 bp, Homo sapien
tgcggtcaccattgaaagaaggcct

SEQ ID NO: 494668 - DNA, 25 bp, Homo sapien
aggcacaagtctcatcaaaggcttc

SEQ ID NO: 494669 - DNA, 25 bp, Homo sapien
tcatcaaaggcttccatacacaaag

SEQ ID NO: 494670 - DNA, 25 bp, Homo sapien
ggcttcttccacactcgctggaggt

SEQ ID NO: 494671 - DNA, 25 bp, Homo sapien
ttccacactcgctggaggttctgca

SEQ ID NO: 494672 - DNA, 25 bp, Homo sapien
tgggcggcttcttccacactcgctg

SEQ ID NO: 494673 - DNA, 25 bp, Homo sapien
cactcgctggaggttctgcaaggga

SEQ ID NO: 494674 - DNA, 25 bp, Homo sapien
aaaaacactaattcagggtctctgc

SEQ ID NO: 494675 - DNA, 25 bp, Homo sapien
caaaaacactaattcagggtctctg

SEQ ID NO: 494676 - DNA, 25 bp, Homo sapien
ataatcccaaaaacactaattcagg

SEQ ID NO: 494677 - DNA, 25 bp, Homo sapien
ccaaaaacactaattcagggtctct

SEQ ID NO: 494678 - DNA, 25 bp, Homo sapien
aatgccagacaatcgggaaagggcg

SEQ ID NO: 494679 - DNA, 25 bp, Homo sapien
ctttacaatgccagacaatcgggaa

SEQ ID NO: 494680 - DNA, 25 bp, Homo sapien
cacgctgcatggaggctttacaatg

SEQ ID NO: 494681 - DNA, 25 bp, Homo sapien
cccgcacacgctgcatggaggcttt

SEQ ID NO: 494682 - DNA, 25 bp, Homo sapien
tctctgtgcacctggtacagccggg

SEQ ID NO: 494683 - DNA, 25 bp, Homo sapien
tggagccggcttcccgttctctgtg

SEQ ID NO: 494684 - DNA, 25 bp, Homo sapien
tccctacgcaccaggtactgcaagt

SEQ ID NO: 494685 - DNA, 25 bp, Homo sapien
ctgcaagtcgcctagaggcagctct

SEQ ID NO: 494686 - DNA, 25 bp, Homo sapien
ctaggcagtgctcgccaggcccgtg

SEQ ID NO: 494687 - DNA, 25 bp, Homo sapien
gtgccccatcaattgccagtgcctt

SEQ ID NO: 494688 - DNA, 25 bp, Homo sapien
tcagaactgattccacgaccacgtg

SEQ ID NO: 494689 - DNA, 25 bp, Homo sapien
cttcttggcattgccttcctcaaag

SEQ ID NO: 494690 - DNA, 25 bp, Homo sapien
gcaaagcaatgcctacaacatagac

SEQ ID NO: 494691 - DNA, 25 bp, Homo sapien
aggcaaagcaatgcctacaacatag

SEQ ID NO: 494692 - DNA, 25 bp, Homo sapien
aagcaatgcctacaacatagaccat

SEQ ID NO: 494693 - DNA, 25 bp, Homo sapien
caaagcaatgcctacaacatagacc

SEQ ID NO: 494694 - DNA, 25 bp, Homo sapien
ggacgctgccggatctgtgcacact

SEQ ID NO: 494695 - DNA, 25 bp, Homo sapien
cagcatgcccatgggtttggaccgg

SEQ ID NO: 494696 - DNA, 25 bp, Homo sapien
gccaggaacaccataacggagcaca

SEQ ID NO: 494697 - DNA, 25 bp, Homo sapien
gagcacaattggtggtatctgaact

SEQ ID NO: 494698 - DNA, 25 bp, Homo sapien
gattaagagctttacacgcaaatgc

SEQ ID NO: 494699 - DNA, 25 bp, Homo sapien
atgattaagagctttacacgcaaat

SEQ ID NO: 494700 - DNA, 25 bp, Homo sapien
tgattaagagctttacacgcaaatg

SEQ ID NO: 494701 - DNA, 25 bp, Homo sapien
ttaagagctttacacgcaaatgcac

SEQ ID NO: 494702 - DNA, 25 bp, Homo sapien
ctcagatagtatctgtttaaacttc

SEQ ID NO: 494703 - DNA, 25 bp, Homo sapien
atattgatggcagaggcattactgc

SEQ ID NO: 494704 - DNA, 25 bp, Homo sapien
cttcaaaatattgatggcagaggca

SEQ ID NO: 494705 - DNA, 25 bp, Homo sapien
gatagtatctgtttaaacttcaaaa

SEQ ID NO: 494706 - DNA, 25 bp, Homo sapien
gtgacttctcttcggggggtccgca

SEQ ID NO: 494707 - DNA, 25 bp, Homo sapien
ggacggcctgggtgacttctcttcg

SEQ ID NO: 494708 - DNA, 25 bp, Homo sapien
cctgggacggcctgggtgacttctc

SEQ ID NO: 494709 - DNA, 25 bp, Homo sapien
ggatgccccgtcctgggacggcctg

SEQ ID NO: 494710 - DNA, 25 bp, Homo sapien
tcgatctgcgggaaacctgtgaggt

SEQ ID NO: 494711 - DNA, 25 bp, Homo sapien
agaaatgaagagaaccggcacgcca

SEQ ID NO: 494712 - DNA, 25 bp, Homo sapien
caaattctgggtgagttggttcctc

SEQ ID NO: 494713 - DNA, 25 bp, Homo sapien
tcctcttcagcaggattcgatctgc

SEQ ID NO: 494714 - DNA, 25 bp, Homo sapien
gggctctgttacgtgacgatcctgc

SEQ ID NO: 494715 - DNA, 25 bp, Homo sapien
ttttcatggacctctgtttcagttt

SEQ ID NO: 494716 - DNA, 25 bp, Homo sapien
ttcatggacctctgtttcagtttcc

SEQ ID NO: 494717 - DNA, 25 bp, Homo sapien
gttacgtgacgatcctgcatcctcc

SEQ ID NO: 494718 - DNA, 25 bp, Homo sapien
agactttcctacatccacttcctgc

SEQ ID NO: 494719 - DNA, 25 bp, Homo sapien
ctctccctggcggtcccattctaat

SEQ ID NO: 494720 - DNA, 25 bp, Homo sapien
ccattctaatccaaaggtactttca

SEQ ID NO: 494721 - DNA, 25 bp, Homo sapien
gcggtcccattctaatccaaaggta

SEQ ID NO: 494722 - DNA, 25 bp, Homo sapien
ttggcaaacgtctcctgggtgcgct

SEQ ID NO: 494723 - DNA, 25 bp, Homo sapien
tctcatgtctggacaaaacacagag

SEQ ID NO: 494724 - DNA, 25 bp, Homo sapien
gacaaggaatatgtgtccgcagcgc

SEQ ID NO: 494725 - DNA, 25 bp, Homo sapien
tgggtgcgctccatactccaggcac

SEQ ID NO: 494726 - DNA, 25 bp, Homo sapien
aagcctccgtttcctaactctagtg

SEQ ID NO: 494727 - DNA, 25 bp, Homo sapien
cacgagccacgaggatgaattctgt

SEQ ID NO: 494728 - DNA, 25 bp, Homo sapien
taatttcaacacgaagcagtcaggc

SEQ ID NO: 494729 - DNA, 25 bp, Homo sapien
ttgtgatcggaatgccacgagccac

SEQ ID NO: 494730 - DNA, 25 bp, Homo sapien
ctggtgaggcgtggcctatgagcgg

SEQ ID NO: 494731 - DNA, 25 bp, Homo sapien
ctctggtgaggcgtggcctatgagc

SEQ ID NO: 494732 - DNA, 25 bp, Homo sapien
cttctctggtgaggcgtggcctatg

SEQ ID NO: 494733 - DNA, 25 bp, Homo sapien
accttctctggtgaggcgtggccta

SEQ ID NO: 494734 - DNA, 25 bp, Homo sapien
ggttgctcagccctaactgttgcac

SEQ ID NO: 494735 - DNA, 25 bp, Homo sapien
ttcttcctgttgtgactgatgcctt

SEQ ID NO: 494736 - DNA, 25 bp, Homo sapien
cccggttgctcagccctaactgttg

SEQ ID NO: 494737 - DNA, 25 bp, Homo sapien
gatgccttgagcacccccggttgct

SEQ ID NO: 494738 - DNA, 25 bp, Homo sapien
caggtaagcgctgaaaacccacttg

SEQ ID NO: 494739 - DNA, 25 bp, Homo sapien
ctgcaagtcaggtaagcgctgaaaa

SEQ ID NO: 494740 - DNA, 25 bp, Homo sapien
agtcaggtaagcgctgaaaacccac

SEQ ID NO: 494741 - DNA, 25 bp, Homo sapien
caagtcaggtaagcgctgaaaaccc

SEQ ID NO: 494742 - DNA, 25 bp, Homo sapien
tttaatagagtgaccgctgccatca

SEQ ID NO: 494743 - DNA, 25 bp, Homo sapien
tctcgccgtgcatgtgagtgaactg

SEQ ID NO: 494744 - DNA, 25 bp, Homo sapien
gacagtcctgttttctcgccgtgca

SEQ ID NO: 494745 - DNA, 25 bp, Homo sapien
catgacactcggcagggacagtcct

SEQ ID NO: 494746 - DNA, 25 bp, Homo sapien
cgtggaacttaagttctctggtatt

SEQ ID NO: 494747 - DNA, 25 bp, Homo sapien
gagcgtggaacttaagttctctggt

SEQ ID NO: 494748 - DNA, 25 bp, Homo sapien
tcagagcgtggaacttaagttctct

SEQ ID NO: 494749 - DNA, 25 bp, Homo sapien
cagagcgtggaacttaagttctctg

SEQ ID NO: 494750 - DNA, 25 bp, Homo sapien
ctgaggacagggtggggcaggctcc

SEQ ID NO: 494751 - DNA, 25 bp, Homo sapien
tgaggacagggtggggcaggctcca

SEQ ID NO: 494752 - DNA, 25 bp, Homo sapien
gaggacagggtggggcaggctccat

SEQ ID NO: 494753 - DNA, 25 bp, Homo sapien
gtaactaccaactccacgatcaggg

SEQ ID NO: 494754 - DNA, 25 bp, Homo sapien
gaggcgcatgtgtgttagagtttca

SEQ ID NO: 494755 - DNA, 25 bp, Homo sapien
ttgctcgtgggtctagggccacctg

SEQ ID NO: 494756 - DNA, 25 bp, Homo sapien
cattgcacgaatgcttgtaactacc

SEQ ID NO: 494757 - DNA, 25 bp, Homo sapien
gctgcacgtaggacaatggccacat

SEQ ID NO: 494758 - DNA, 25 bp, Homo sapien
gcatccgcgtgaaaagagcaggtgt

SEQ ID NO: 494759 - DNA, 25 bp, Homo sapien
ttgatcacggaatggcttatgggcc

SEQ ID NO: 494760 - DNA, 25 bp, Homo sapien
acatgggagacgctttcgagggaca

SEQ ID NO: 494761 - DNA, 25 bp, Homo sapien
aaggaccacgatgcccagacccaga

SEQ ID NO: 494762 - DNA, 25 bp, Homo sapien
agaacctccgtgctgcagagggaca

SEQ ID NO: 494763 - DNA, 25 bp, Homo sapien
gggtctaaggaccacgatgcccaga

SEQ ID NO: 494764 - DNA, 25 bp, Homo sapien
agacccagaacctccgtgctgcaga

SEQ ID NO: 494765 - DNA, 25 bp, Homo sapien
ccattcagtaagctcagaagtggac

SEQ ID NO: 494766 - DNA, 25 bp, Homo sapien
ccttgtaacctccactttactgcgt

SEQ ID NO: 494767 - DNA, 25 bp, Homo sapien
tggacaccattcagtaagctcagaa

SEQ ID NO: 494768 - DNA, 25 bp, Homo sapien
ttcaggaggacagtgcgagctgctc

SEQ ID NO: 494769 - DNA, 25 bp, Homo sapien
tctgttgccagaaccgctcacttgc

SEQ ID NO: 494770 - DNA, 25 bp, Homo sapien
ccctctttgacacgccctgatctgt

SEQ ID NO: 494771 - DNA, 25 bp, Homo sapien
gccctgatctgttgccagaaccgct

SEQ ID NO: 494772 - DNA, 25 bp, Homo sapien
tgacacgccctgatctgttgccaga

SEQ ID NO: 494773 - DNA, 25 bp, Homo sapien
agagtgaaggcgaagtagccacaga

SEQ ID NO: 494774 - DNA, 25 bp, Homo sapien
aagagtgaaggcgaagtagccacag

SEQ ID NO: 494775 - DNA, 25 bp, Homo sapien
tgaagagtgaaggcgaagtagccac

SEQ ID NO: 494776 - DNA, 25 bp, Homo sapien
gctgaagagtgaaggcgaagtagcc

SEQ ID NO: 494777 - DNA, 25 bp, Homo sapien
ggcgccagttggacagcaggcatca

SEQ ID NO: 494778 - DNA, 25 bp, Homo sapien
gtacatcatgggctgtccaggcgcc

SEQ ID NO: 494779 - DNA, 25 bp, Homo sapien
ggtagacagcagacatcagtacatc

SEQ ID NO: 494780 - DNA, 25 bp, Homo sapien
taggtcctggactgtccagaggcca

SEQ ID NO: 494781 - DNA, 25 bp, Homo sapien
tgttgatgccatgggattgactcgc

SEQ ID NO: 494782 - DNA, 25 bp, Homo sapien
ggctgttgatgccatgggattgact

SEQ ID NO: 494783 - DNA, 25 bp, Homo sapien
ttgatgccatgggattgactcgcct

SEQ ID NO: 494784 - DNA, 25 bp, Homo sapien
tgccatgggattgactcgccttcct

SEQ ID NO: 494785 - DNA, 25 bp, Homo sapien
tgaaaacgcgcccaggttcgtcctc

SEQ ID NO: 494786 - DNA, 25 bp, Homo sapien
tacaacgattatgggtagctctgca

SEQ ID NO: 494787 - DNA, 25 bp, Homo sapien
gtcctctcctgaaggcggctggctg

SEQ ID NO: 494788 - DNA, 25 bp, Homo sapien
tatgtcccaggacgggtgaaaacgc

SEQ ID NO: 494789 - DNA, 25 bp, Homo sapien
tccaggagaatcaaggtggagtgga

SEQ ID NO: 494790 - DNA, 25 bp, Homo sapien
ttctcagcaattaatggagctgagt

SEQ ID NO: 494791 - DNA, 25 bp, Homo sapien
cagcaattaatggagctgagtcaaa

SEQ ID NO: 494792 - DNA, 25 bp, Homo sapien
acaatactcttgagaaggctgggtg

SEQ ID NO: 494793 - DNA, 25 bp, Homo sapien
ctcttccacacgggacccttggcct

SEQ ID NO: 494794 - DNA, 25 bp, Homo sapien
ttctcttccacacgggacccttggc

SEQ ID NO: 494795 - DNA, 25 bp, Homo sapien
tccacacgggacccttggccttcca

SEQ ID NO: 494796 - DNA, 25 bp, Homo sapien
tctcttccacacgggacccttggcc

SEQ ID NO: 494797 - DNA, 25 bp, Homo sapien
catccagggaattttcccggcctgg

SEQ ID NO: 494798 - DNA, 25 bp, Homo sapien
tgtaaggaggtacctggaccctgct

SEQ ID NO: 494799 - DNA, 25 bp, Homo sapien
tagggtctgcgatgatcagcatcca

SEQ ID NO: 494800 - DNA, 25 bp, Homo sapien
ttagagatccaccatagggtctgcg

SEQ ID NO: 494801 - DNA, 25 bp, Homo sapien
ggttgtgcagagacgtagccgtcac

SEQ ID NO: 494802 - DNA, 25 bp, Homo sapien
taggttgtgcagagacgtagccgtc

SEQ ID NO: 494803 - DNA, 25 bp, Homo sapien
ttgtgcagagacgtagccgtcaccc

SEQ ID NO: 494804 - DNA, 25 bp, Homo sapien
gtgcagagacgtagccgtcacccat

SEQ ID NO: 494805 - DNA, 25 bp, Homo sapien
gtggagtcacccctacaaacagcat

SEQ ID NO: 494806 - DNA, 25 bp, Homo sapien
attaacctatggagtgctgcaaccc

SEQ ID NO: 494807 - DNA, 25 bp, Homo sapien
tgataactggcctttaagagaagcc

SEQ ID NO: 494808 - DNA, 25 bp, Homo sapien
gcccttatgagctttcccggcagag

SEQ ID NO: 494809 - DNA, 25 bp, Homo sapien
aagcgcttcttgacttgagcctctg

SEQ ID NO: 494810 - DNA, 25 bp, Homo sapien
ctgtttgaagcgcttcttgacttga

SEQ ID NO: 494811 - DNA, 25 bp, Homo sapien
tttgaagcgcttcttgacttgagcc

SEQ ID NO: 494812 - DNA, 25 bp, Homo sapien
cttgggggtcctgtttgaagcgctt

SEQ ID NO: 494813 - DNA, 25 bp, Homo sapien
accacgggtgagagccacctgactg

SEQ ID NO: 494814 - DNA, 25 bp, Homo sapien
ctaggaccgaccaccacgggtgaga

SEQ ID NO: 494815 - DNA, 25 bp, Homo sapien
cctgactgacatccttgcctttgtc

SEQ ID NO: 494816 - DNA, 25 bp, Homo sapien
ggtgagagccacctgactgacatcc

SEQ ID NO: 494817 - DNA, 25 bp, Homo sapien
cgtgtgagatgtgtacgtgctgtac

SEQ ID NO: 494818 - DNA, 25 bp, Homo sapien
cacagcgctgtgaaatgatgctcca

SEQ ID NO: 494819 - DNA, 25 bp, Homo sapien
agaagagcgaccacccgatatagca

SEQ ID NO: 494820 - DNA, 25 bp, Homo sapien
tccttctctgcgctcgaaagaatgt

SEQ ID NO: 494821 - DNA, 25 bp, Homo sapien
tcaggaacatgacatcaaccaggtg

SEQ ID NO: 494822 - DNA, 25 bp, Homo sapien
tctcttgcactcacaaaagttcagg

SEQ ID NO: 494823 - DNA, 25 bp, Homo sapien
ggtgatcacagggtacagccagaca

SEQ ID NO: 494824 - DNA, 25 bp, Homo sapien
gctctgggctgaatggtgtcccgca

SEQ ID NO: 494825 - DNA, 25 bp, Homo sapien
tatttgagctggagtaccacctgca

SEQ ID NO: 494826 - DNA, 25 bp, Homo sapien
ccagatacgctgagatgtccggaac

SEQ ID NO: 494827 - DNA, 25 bp, Homo sapien
tgcccaaagttgtcatgtccagctg

SEQ ID NO: 494828 - DNA, 25 bp, Homo sapien
ggcactgggcttcacttcactggag

SEQ ID NO: 494829 - DNA, 25 bp, Homo sapien
cacgttccaccaaagcgtcttcata

SEQ ID NO: 494830 - DNA, 25 bp, Homo sapien
tacgaaaaggggaagaccgtctgca

SEQ ID NO: 494831 - DNA, 25 bp, Homo sapien
gagtgacacgttccaccaaagcgtc

SEQ ID NO: 494832 - DNA, 25 bp, Homo sapien
gcgtcttcatacgaaaaggggaaga

SEQ ID NO: 494833 - DNA, 25 bp, Homo sapien
ggcctgtagctactaagaattgaat

SEQ ID NO: 494834 - DNA, 25 bp, Homo sapien
gtctccctcccatcagtgtgggtca

SEQ ID NO: 494835 - DNA, 25 bp, Homo sapien
gtgacttcaacccaacaagagctta

SEQ ID NO: 494836 - DNA, 25 bp, Homo sapien
gggaggactgaaggtgagcttggcc

SEQ ID NO: 494837 - DNA, 25 bp, Homo sapien
ccaggaactgttcccagtggcctca

SEQ ID NO: 494838 - DNA, 25 bp, Homo sapien
tcaggggctactcggaggacggcgt

SEQ ID NO: 494839 - DNA, 25 bp, Homo sapien
accaggaactgttcccagtggcctc

SEQ ID NO: 494840 - DNA, 25 bp, Homo sapien
tcacgtcaggggctactcggaggac

SEQ ID NO: 494841 - DNA, 25 bp, Homo sapien
cagatgggctctgctaatgtgggca

SEQ ID NO: 494842 - DNA, 25 bp, Homo sapien
tccacgccaggaacgcagatgggct

SEQ ID NO: 494843 - DNA, 25 bp, Homo sapien
atgtacagagtcatgggacaccgcc

SEQ ID NO: 494844 - DNA, 25 bp, Homo sapien
gccatgtcccttatggatgtacaga

SEQ ID NO: 494845 - DNA, 25 bp, Homo sapien
tggtcagtggctgcaatggcttcca

SEQ ID NO: 494846 - DNA, 25 bp, Homo sapien
tgtgttcccggctctggacacttcc

SEQ ID NO: 494847 - DNA, 25 bp, Homo sapien
ctcctgcatccagccgcatgaagcc

SEQ ID NO: 494848 - DNA, 25 bp, Homo sapien
gcatccagccgcatgaagccctgct

SEQ ID NO: 494849 - DNA, 25 bp, Homo sapien
tgagtgaccttgaccaaggccatgg

SEQ ID NO: 494850 - DNA, 25 bp, Homo sapien
ggccatggagcccactgccttgggt

SEQ ID NO: 494851 - DNA, 25 bp, Homo sapien
ccaaggccatggagcccactgcctt

SEQ ID NO: 494852 - DNA, 25 bp, Homo sapien
ccactgccttgggtttttcacttgc

SEQ ID NO: 494853 - DNA, 25 bp, Homo sapien
tttggctctccgttgtctccgtcac

SEQ ID NO: 494854 - DNA, 25 bp, Homo sapien
tcacgtgtcgatggaggcatcgcaa

SEQ ID NO: 494855 - DNA, 25 bp, Homo sapien
tcgcaatgcaacagccaagtatggg

SEQ ID NO: 494856 - DNA, 25 bp, Homo sapien
gggtctggccttctttggctctccg

SEQ ID NO: 494857 - DNA, 25 bp, Homo sapien
tcggcgttaatcaatgagatgggac

SEQ ID NO: 494858 - DNA, 25 bp, Homo sapien
ggtaaaccccatttgattggcatga

SEQ ID NO: 494859 - DNA, 25 bp, Homo sapien
cgtgactattttgcaatcggcgtta

SEQ ID NO: 494860 - DNA, 25 bp, Homo sapien
gaatcacagatataatagcgctcct

SEQ ID NO: 494861 - DNA, 25 bp, Homo sapien
agccagcctggccattccagacgtt

SEQ ID NO: 494862 - DNA, 25 bp, Homo sapien
gcctggccattccagacgttggtct

SEQ ID NO: 494863 - DNA, 25 bp, Homo sapien
cagcctggccattccagacgttggt

SEQ ID NO: 494864 - DNA, 25 bp, Homo sapien
gccattccagacgttggtctcacca

SEQ ID NO: 494865 - DNA, 25 bp, Homo sapien
tgggccagtgtcaaagctcctccgt

SEQ ID NO: 494866 - DNA, 25 bp, Homo sapien
agtgtcaaagctcctccgtgggctg

SEQ ID NO: 494867 - DNA, 25 bp, Homo sapien
aagctcctccgtgggctgacctgca

SEQ ID NO: 494868 - DNA, 25 bp, Homo sapien
actgggccagtgtcaaagctcctcc

SEQ ID NO: 494869 - DNA, 25 bp, Homo sapien
catatgcgggctgggtgctgtcccc

SEQ ID NO: 494870 - DNA, 25 bp, Homo sapien
cagtttcctgatggatgaggcgccg

SEQ ID NO: 494871 - DNA, 25 bp, Homo sapien
cagagccgcctgcatatgcgggctg

SEQ ID NO: 494872 - DNA, 25 bp, Homo sapien
cctcagagggcaacgtggacagtcg

SEQ ID NO: 494873 - DNA, 25 bp, Homo sapien
ggtggctgggggcagcagaggtggc

SEQ ID NO: 494874 - DNA, 25 bp, Homo sapien
gtggctgggggcagcagaggtggca

SEQ ID NO: 494875 - DNA, 25 bp, Homo sapien
gccggtggctgggggcagcagaggt

SEQ ID NO: 494876 - DNA, 25 bp, Homo sapien
cttgactcagctgtgccggtggctg

SEQ ID NO: 494877 - DNA, 25 bp, Homo sapien
gaggaggggctttgcagggaaatag

SEQ ID NO: 494878 - DNA, 25 bp, Homo sapien
aggggctttgcagggaaataggagg

SEQ ID NO: 494879 - DNA, 25 bp, Homo sapien
ggaggggctttgcagggaaatagga

SEQ ID NO: 494880 - DNA, 25 bp, Homo sapien
cgaggaggggctttgcagggaaata

SEQ ID NO: 494881 - DNA, 25 bp, Homo sapien
aggaggctgcagaccaacgctggtc

SEQ ID NO: 494882 - DNA, 25 bp, Homo sapien
gaggctgcagaccaacgctggtctg

SEQ ID NO: 494883 - DNA, 25 bp, Homo sapien
gctgcagaccaacgctggtctgaag

SEQ ID NO: 494884 - DNA, 25 bp, Homo sapien
gaggaggctgcagaccaacgctggt

SEQ ID NO: 494885 - DNA, 25 bp, Homo sapien
ttattcatcgcggttggttttcctg

SEQ ID NO: 494886 - DNA, 25 bp, Homo sapien
tgtgtgccgtaagcctcacgggacc

SEQ ID NO: 494887 - DNA, 25 bp, Homo sapien
cagacttttgcaagccatctctcag

SEQ ID NO: 494888 - DNA, 25 bp, Homo sapien
gggccaacggcatttctctcacgga

SEQ ID NO: 494889 - DNA, 25 bp, Homo sapien
gctctaggcacgggaggcgtttcaa

SEQ ID NO: 494890 - DNA, 25 bp, Homo sapien
ctaggcacgggaggcgtttcaaatt

SEQ ID NO: 494891 - DNA, 25 bp, Homo sapien
aggctctaggcacgggaggcgtttc

SEQ ID NO: 494892 - DNA, 25 bp, Homo sapien
agaggctctaggcacgggaggcgtt

SEQ ID NO: 494893 - DNA, 25 bp, Homo sapien
tgggaataattgcacggctgagctt

SEQ ID NO: 494894 - DNA, 25 bp, Homo sapien
tgccaagtcctttggccgggaaaga

SEQ ID NO: 494895 - DNA, 25 bp, Homo sapien
tgagcctttcacaagcctgagctgc

SEQ ID NO: 494896 - DNA, 25 bp, Homo sapien
gagaactcagtgtcccggtgggaat

SEQ ID NO: 494897 - DNA, 25 bp, Homo sapien
gacagggctgttgccgtgtgctgca

SEQ ID NO: 494898 - DNA, 25 bp, Homo sapien
tgatccaagctgtgaaccggggcgc

SEQ ID NO: 494899 - DNA, 25 bp, Homo sapien
tcggcaaagcagaccaatttggagc

SEQ ID NO: 494900 - DNA, 25 bp, Homo sapien
gccaatgccccactcggcaaagcag

SEQ ID NO: 494901 - DNA, 25 bp, Homo sapien
accaaaggaacctgctataagtatt

SEQ ID NO: 494902 - DNA, 25 bp, Homo sapien
tgctataagtatttcccacagaggc

SEQ ID NO: 494903 - DNA, 25 bp, Homo sapien
gaacctgctataagtatttcccaca

SEQ ID NO: 494904 - DNA, 25 bp, Homo sapien
gtatttcccacagaggctacagcca

SEQ ID NO: 494905 - DNA, 25 bp, Homo sapien
ccagagctcggagcctgcacgagga

SEQ ID NO: 494906 - DNA, 25 bp, Homo sapien
ggcctcggcatggacaggtctcatc

SEQ ID NO: 494907 - DNA, 25 bp, Homo sapien
tgcacgaggacgaccttgcacgtgc

SEQ ID NO: 494908 - DNA, 25 bp, Homo sapien
atgccatggacagggcccgagaatt

SEQ ID NO: 494909 - DNA, 25 bp, Homo sapien
ctttggtagtacaccacaggcttgc

SEQ ID NO: 494910 - DNA, 25 bp, Homo sapien
aatcatagctagctgcagcgtccaa

SEQ ID NO: 494911 - DNA, 25 bp, Homo sapien
tgagagtccaggtagatgcagacag

SEQ ID NO: 494912 - DNA, 25 bp, Homo sapien
catcatctgtttaatgagagtccag

SEQ ID NO: 494913 - DNA, 25 bp, Homo sapien
tttctgattgcttcatcacatcatc

SEQ ID NO: 494914 - DNA, 25 bp, Homo sapien
agctcctcaacgtttctccagagat

SEQ ID NO: 494915 - DNA, 25 bp, Homo sapien
tcagctcctcaacgtttctccagag

SEQ ID NO: 494916 - DNA, 25 bp, Homo sapien
caccacgttcagctcctcaacgttt

SEQ ID NO: 494917 - DNA, 25 bp, Homo sapien
gttcagctcctcaacgtttctccag

SEQ ID NO: 494918 - DNA, 25 bp, Homo sapien
aggctcgcccggctgagagccaggg

SEQ ID NO: 494919 - DNA, 25 bp, Homo sapien
agccagggcagcctctatgctgcag

SEQ ID NO: 494920 - DNA, 25 bp, Homo sapien
gacgccacaccggagcggctggctc

SEQ ID NO: 494921 - DNA, 25 bp, Homo sapien
agcctctatgctgcagggcccgacg

SEQ ID NO: 494922 - DNA, 25 bp, Homo sapien
tgactgccgacatcgcatcagcagc

SEQ ID NO: 494923 - DNA, 25 bp, Homo sapien
ggtgtgactgccgacatcgcatcag

SEQ ID NO: 494924 - DNA, 25 bp, Homo sapien
ctcaggtgtgactgccgacatcgca

SEQ ID NO: 494925 - DNA, 25 bp, Homo sapien
tggctgccacgctcaggtgtgactg

SEQ ID NO: 494926 - DNA, 25 bp, Homo sapien
agaccccttcgtgggcacagggtga

SEQ ID NO: 494927 - DNA, 25 bp, Homo sapien
ctggagaccccttcgtgggcacagg

SEQ ID NO: 494928 - DNA, 25 bp, Homo sapien
gggtgaggctgcagaggttctactc

SEQ ID NO: 494929 - DNA, 25 bp, Homo sapien
ccttcgtgggcacagggtgaggctg

SEQ ID NO: 494930 - DNA, 25 bp, Homo sapien
ggagcacgcttcgtgggcacggagt

SEQ ID NO: 494931 - DNA, 25 bp, Homo sapien
ctctggagcacccttcgtgggcatg

SEQ ID NO: 494932 - DNA, 25 bp, Homo sapien
ttgcaggttctactcccgggcagct

SEQ ID NO: 494933 - DNA, 25 bp, Homo sapien
gtgatggtgacgtttctggagcccc

SEQ ID NO: 494934 - DNA, 25 bp, Homo sapien
aattccatcttccatgcacacgggc

SEQ ID NO: 494935 - DNA, 25 bp, Homo sapien
atgcacacgggcacaaagatagtca

SEQ ID NO: 494936 - DNA, 25 bp, Homo sapien
ccactcttagcaattccatcttcca

SEQ ID NO: 494937 - DNA, 25 bp, Homo sapien
tgcacacgggcacaaagatagtcat

SEQ ID NO: 494938 - DNA, 25 bp, Homo sapien
cacccccgcggggtgcttccagcgc

SEQ ID NO: 494939 - DNA, 25 bp, Homo sapien
ccccgcggggtgcttccagcgcaga

SEQ ID NO: 494940 - DNA, 25 bp, Homo sapien
acccccgcggggtgcttccagcgca

SEQ ID NO: 494941 - DNA, 25 bp, Homo sapien
ccgcggggtgcttccagcgcagagc

SEQ ID NO: 494942 - DNA, 25 bp, Homo sapien
ctaagggggcttatctccaagatgc

SEQ ID NO: 494943 - DNA, 25 bp, Homo sapien
taagggggcttatctccaagatgca

SEQ ID NO: 494944 - DNA, 25 bp, Homo sapien
actctcaacttcaggaggattcttc

SEQ ID NO: 494945 - DNA, 25 bp, Homo sapien
acttcccactggagctccagctccc

SEQ ID NO: 494946 - DNA, 25 bp, Homo sapien
caacttcaggaggattcttcctcct

SEQ ID NO: 494947 - DNA, 25 bp, Homo sapien
ctctctcaactctcaacttcaggag

SEQ ID NO: 494948 - DNA, 25 bp, Homo sapien
ccgactctgtttagtccacaccagg

SEQ ID NO: 494949 - DNA, 25 bp, Homo sapien
taaccgactctgtttagtccacacc

SEQ ID NO: 494950 - DNA, 25 bp, Homo sapien
ctaaccgactctgtttagtccacac

SEQ ID NO: 494951 - DNA, 25 bp, Homo sapien
aaccgactctgtttagtccacacca

SEQ ID NO: 494952 - DNA, 25 bp, Homo sapien
agtgcaaatcatagctcccggtttc

SEQ ID NO: 494953 - DNA, 25 bp, Homo sapien
gaggccttgaaagctgtgactgcat

SEQ ID NO: 494954 - DNA, 25 bp, Homo sapien
gtaattatgcaagctgaggccttga

SEQ ID NO: 494955 - DNA, 25 bp, Homo sapien
gatgtcgcacagatgaaatttcagc

SEQ ID NO: 494956 - DNA, 25 bp, Homo sapien
cacagccacacactaggcaatgagg

SEQ ID NO: 494957 - DNA, 25 bp, Homo sapien
ttctcacactctctaggcagcaggc

SEQ ID NO: 494958 - DNA, 25 bp, Homo sapien
gacgcctcctattccagtcacgatg

SEQ ID NO: 494959 - DNA, 25 bp, Homo sapien
gatgctcgatgaccctctcttattt

SEQ ID NO: 494960 - DNA, 25 bp, Homo sapien
ttggacagactcctccacgaacttc

SEQ ID NO: 494961 - DNA, 25 bp, Homo sapien
ccttcacatgtatcaatattgagca

SEQ ID NO: 494962 - DNA, 25 bp, Homo sapien
tcggccttgggcgaacttggacaga

SEQ ID NO: 494963 - DNA, 25 bp, Homo sapien
tgggcgaacttggacagactcctcc

SEQ ID NO: 494964 - DNA, 25 bp, Homo sapien
acgagggcattgttgcttgagtgct

SEQ ID NO: 494965 - DNA, 25 bp, Homo sapien
attacgagggcattgttgcttgagt

SEQ ID NO: 494966 - DNA, 25 bp, Homo sapien
gagggcattgttgcttgagtgcttt

SEQ ID NO: 494967 - DNA, 25 bp, Homo sapien
tacgagggcattgttgcttgagtgc

SEQ ID NO: 494968 - DNA, 25 bp, Homo sapien
ctgacgggccagcccagacgccggc

SEQ ID NO: 494969 - DNA, 25 bp, Homo sapien
cgggccagcccagacgccggcctgc

SEQ ID NO: 494970 - DNA, 25 bp, Homo sapien
gacgggccagcccagacgccggcct

SEQ ID NO: 494971 - DNA, 25 bp, Homo sapien
acgggccagcccagacgccggcctg

SEQ ID NO: 494972 - DNA, 25 bp, Homo sapien
tgctgggccctttcagctgacgccg

SEQ ID NO: 494973 - DNA, 25 bp, Homo sapien
tgtttctttctcctcgtagggccca

SEQ ID NO: 494974 - DNA, 25 bp, Homo sapien
acaatgccgcactgggctttgccgg

SEQ ID NO: 494975 - DNA, 25 bp, Homo sapien
gctttgccggccaggcctcgagagc

SEQ ID NO: 494976 - DNA, 25 bp, Homo sapien
cagttgcacggtgaagccgcggccc

SEQ ID NO: 494977 - DNA, 25 bp, Homo sapien
ccacttctcagcatgttgaggaggt

SEQ ID NO: 494978 - DNA, 25 bp, Homo sapien
ctccatggcagagcacacgaggcac

SEQ ID NO: 494979 - DNA, 25 bp, Homo sapien
gcacgtagcaatgggccgcagttgc

SEQ ID NO: 494980 - DNA, 25 bp, Homo sapien
tgctttgagggttcaaagggccgta

SEQ ID NO: 494981 - DNA, 25 bp, Homo sapien
aaattgctgcatgttgctttgaggg

SEQ ID NO: 494982 - DNA, 25 bp, Homo sapien
ttaaaattgctgcatgttgctttga

SEQ ID NO: 494983 - DNA, 25 bp, Homo sapien
ctgcatgttgctttgagggttcaaa

SEQ ID NO: 494984 - DNA, 25 bp, Homo sapien
ggctgtcacttccacattcccgtgg

SEQ ID NO: 494985 - DNA, 25 bp, Homo sapien
catcagaagcagagacttcccatgc

SEQ ID NO: 494986 - DNA, 25 bp, Homo sapien
tgctctgcacggacatcccatcaga

SEQ ID NO: 494987 - DNA, 25 bp, Homo sapien
cctgctggctgtcacttccacattc

SEQ ID NO: 494988 - DNA, 25 bp, Homo sapien
cacgtgttgacctccaacggataaa

SEQ ID NO: 494989 - DNA, 25 bp, Homo sapien
agcctcactgtggatcggtcctggg

SEQ ID NO: 494990 - DNA, 25 bp, Homo sapien
caggctgattttccacacgtgttga

SEQ ID NO: 494991 - DNA, 25 bp, Homo sapien
tgtgactcagttgattccaagcaga

SEQ ID NO: 494992 - DNA, 25 bp, Homo sapien
ccagagaacagcacgacggtgacca

SEQ ID NO: 494993 - DNA, 25 bp, Homo sapien
cagagaacagcacgacggtgaccag

SEQ ID NO: 494994 - DNA, 25 bp, Homo sapien
agagaacagcacgacggtgaccagg

SEQ ID NO: 494995 - DNA, 25 bp, Homo sapien
agagaacagtacgacggtgaccagg

SEQ ID NO: 494996 - DNA, 25 bp, Homo sapien
cagagaacagtacgacggtgaccag

SEQ ID NO: 494997 - DNA, 25 bp, Homo sapien
cagtacgacggtgaccaggggacac

SEQ ID NO: 494998 - DNA, 25 bp, Homo sapien
tacgacggtgaccaggggacacagc

SEQ ID NO: 494999 - DNA, 25 bp, Homo sapien
cagagaacagcacgacggtgaccag

SEQ ID NO: 495000 - DNA, 25 bp, Homo sapien
ccagagaacagcacgatggtgacca

SEQ ID NO: 495001 - DNA, 25 bp, Homo sapien
cagagaacagcacgatggtgaccag

SEQ ID NO: 495002 - DNA, 25 bp, Homo sapien
cagagaacagcacgacggtgaccag

SEQ ID NO: 495003 - DNA, 25 bp, Homo sapien
agagaacagcacgacggtgaccagg

SEQ ID NO: 495004 - DNA, 25 bp, Homo sapien
ccagagaacagcacgacggtgacca

SEQ ID NO: 495005 - DNA, 25 bp, Homo sapien
agcacgacggtgaccaggggccaca

SEQ ID NO: 495006 - DNA, 25 bp, Homo sapien
cagagaacagcacgacggtgaccag

SEQ ID NO: 495007 - DNA, 25 bp, Homo sapien
agagaacagcacgacggtgaccagg

SEQ ID NO: 495008 - DNA, 25 bp, Homo sapien
ccagagaacagcacgacggtgacca

SEQ ID NO: 495009 - DNA, 25 bp, Homo sapien
ccagagaacagcacgacggtgacca

SEQ ID NO: 495010 - DNA, 25 bp, Homo sapien
agcacgacggtgaccaggggccaca

SEQ ID NO: 495011 - DNA, 25 bp, Homo sapien
cagagaacagcacgacggtgaccag

SEQ ID NO: 495012 - DNA, 25 bp, Homo sapien
agagaacagcacgacggtgaccagg

SEQ ID NO: 495013 - DNA, 25 bp, Homo sapien
atcagcacgaggacgagaagtgcac

SEQ ID NO: 495014 - DNA, 25 bp, Homo sapien
agctccagatgaatggccatcagca

SEQ ID NO: 495015 - DNA, 25 bp, Homo sapien
tggagcccgtgtgagagctcttcag

SEQ ID NO: 495016 - DNA, 25 bp, Homo sapien
tggtgcttggacaccgggcacgacg

SEQ ID NO: 495017 - DNA, 25 bp, Homo sapien
catgtgcaagcatctcgggtgcctc

SEQ ID NO: 495018 - DNA, 25 bp, Homo sapien
catcgccatgtgcaagcatctcggg

SEQ ID NO: 495019 - DNA, 25 bp, Homo sapien
tgtgcaagcatctcgggtgcctcca

SEQ ID NO: 495020 - DNA, 25 bp, Homo sapien
tcaccatcgccatgtgcaagcatct

SEQ ID NO: 495021 - DNA, 25 bp, Homo sapien
gcttgttaatgaaacagttgatgat

SEQ ID NO: 495022 - DNA, 25 bp, Homo sapien
aagtgcagagcatagtaaatgcttg

SEQ ID NO: 495023 - DNA, 25 bp, Homo sapien
tctgcgtgcccgagtttgtgctaaa

SEQ ID NO: 495024 - DNA, 25 bp, Homo sapien
tgtgctaaacgcttcacctggacac

SEQ ID NO: 495025 - DNA, 25 bp, Homo sapien
tgtacttttgacagttctatcacgc

SEQ ID NO: 495026 - DNA, 25 bp, Homo sapien
gcttccgacagtgacgatgtccccg

SEQ ID NO: 495027 - DNA, 25 bp, Homo sapien
tttgcatagctgatttcgtgtactt

SEQ ID NO: 495028 - DNA, 25 bp, Homo sapien
gacagttctatcacgcttccgacag

SEQ ID NO: 495029 - DNA, 25 bp, Homo sapien
tagtagttaccaccaaaaaggatca

SEQ ID NO: 495030 - DNA, 25 bp, Homo sapien
cccgagtcattacaaggagaatcca

SEQ ID NO: 495031 - DNA, 25 bp, Homo sapien
ttcatcatatgcatcagaacaaggc

SEQ ID NO: 495032 - DNA, 25 bp, Homo sapien
tcatgtgtgacgattccctggccgt

SEQ ID NO: 495033 - DNA, 25 bp, Homo sapien
gccacagctcatcgctgacagttga

SEQ ID NO: 495034 - DNA, 25 bp, Homo sapien
tgacacagcatagttccacctgcac

SEQ ID NO: 495035 - DNA, 25 bp, Homo sapien
gacagttgacacagcatagttccac

SEQ ID NO: 495036 - DNA, 25 bp, Homo sapien
tccacaccgggacctccacactggg

SEQ ID NO: 495037 - DNA, 25 bp, Homo sapien
gaagaccctgtagcaccggacatgt

SEQ ID NO: 495038 - DNA, 25 bp, Homo sapien
gccagccgcaatcgggctgctctgt

SEQ ID NO: 495039 - DNA, 25 bp, Homo sapien
tgtagcaccggacatgtggccagag

SEQ ID NO: 495040 - DNA, 25 bp, Homo sapien
gaccctgtagcaccggacatgtggc

SEQ ID NO: 495041 - DNA, 25 bp, Homo sapien
gccctggtattttccacagagcctc

SEQ ID NO: 495042 - DNA, 25 bp, Homo sapien
cttgctcttcaggatgttttggaat

SEQ ID NO: 495043 - DNA, 25 bp, Homo sapien
gctcttcaggatgttttggaatttc

SEQ ID NO: 495044 - DNA, 25 bp, Homo sapien
ggtattttccacagagcctcttgct

SEQ ID NO: 495045 - DNA, 25 bp, Homo sapien
gacaggctgtgctgcgctccgagaa

SEQ ID NO: 495046 - DNA, 25 bp, Homo sapien
tgggacaggctgtgctgcgctccga

SEQ ID NO: 495047 - DNA, 25 bp, Homo sapien
ccgaggcttctcgatgggacaggct

SEQ ID NO: 495048 - DNA, 25 bp, Homo sapien
atgggacaggctgtgctgcgctccg

SEQ ID NO: 495049 - DNA, 25 bp, Homo sapien
tgtcctaagctttttgtacgtggca

SEQ ID NO: 495050 - DNA, 25 bp, Homo sapien
ggccagcaccctcatttagagatga

SEQ ID NO: 495051 - DNA, 25 bp, Homo sapien
aaacctcaggatacccctgcggatc

SEQ ID NO: 495052 - DNA, 25 bp, Homo sapien
aaacgcaatttattttgcaccagcc

SEQ ID NO: 495053 - DNA, 25 bp, Homo sapien
caagatcacggtgctggcagattcc

SEQ ID NO: 495054 - DNA, 25 bp, Homo sapien
cattctagaagctgagaagtccaag

SEQ ID NO: 495055 - DNA, 25 bp, Homo sapien
tccaagatcacggtgctggcagatt

SEQ ID NO: 495056 - DNA, 25 bp, Homo sapien
agatcacggtgctggcagattccgt

SEQ ID NO: 495057 - DNA, 25 bp, Homo sapien
gtgagcctacgcgaagcagtgctgc

SEQ ID NO: 495058 - DNA, 25 bp, Homo sapien
ccctggaagtttctcgtgagcctac

SEQ ID NO: 495059 - DNA, 25 bp, Homo sapien
tctcgtgagcctacgcgaagcagtg

SEQ ID NO: 495060 - DNA, 25 bp, Homo sapien
gaagtttctcgtgagcctacgcgaa

SEQ ID NO: 495061 - DNA, 25 bp, Homo sapien
caggcagcccggtgaagggggcgat

SEQ ID NO: 495062 - DNA, 25 bp, Homo sapien
gagaagacgcagagggcgtcaccac

SEQ ID NO: 495063 - DNA, 25 bp, Homo sapien
gacgcagagggcgtcaccacagcca

SEQ ID NO: 495064 - DNA, 25 bp, Homo sapien
gcagagggcgtcaccacagccatta

SEQ ID NO: 495065 - DNA, 25 bp, Homo sapien
aaccgatgattacagccccagagaa

SEQ ID NO: 495066 - DNA, 25 bp, Homo sapien
ccaggcataatgtgctgctctgttg

SEQ ID NO: 495067 - DNA, 25 bp, Homo sapien
aaagtgcccacggatgcgttgatgt

SEQ ID NO: 495068 - DNA, 25 bp, Homo sapien
taagctgctctttgagtcttatcca

SEQ ID NO: 495069 - DNA, 25 bp, Homo sapien
cagatgtgtaagttgagctttaact

SEQ ID NO: 495070 - DNA, 25 bp, Homo sapien
atgtgtaagttgagctttaactcac

SEQ ID NO: 495071 - DNA, 25 bp, Homo sapien
ggcagatgtgtaagttgagctttaa

SEQ ID NO: 495072 - DNA, 25 bp, Homo sapien
gatgtgtaagttgagctttaactca

SEQ ID NO: 495073 - DNA, 25 bp, Homo sapien
gaatgcaaggaatttgtttgtttat

SEQ ID NO: 495074 - DNA, 25 bp, Homo sapien
atgcaaggaatttgtttgtttattt

SEQ ID NO: 495075 - DNA, 25 bp, Homo sapien
ttgaatgcaaggaatttgtttgttt

SEQ ID NO: 495076 - DNA, 25 bp, Homo sapien
gaatttgtttgtttattttcattca

SEQ ID NO: 495077 - DNA, 25 bp, Homo sapien
atacaagtgagctttgctggcagcc

SEQ ID NO: 495078 - DNA, 25 bp, Homo sapien
tgtatactctcgtgagccggctttc

SEQ ID NO: 495079 - DNA, 25 bp, Homo sapien
ctcttctccctgtatactctcgtga

SEQ ID NO: 495080 - DNA, 25 bp, Homo sapien
cataatgggctaagaaaagcgctgc

SEQ ID NO: 495081 - DNA, 25 bp, Homo sapien
tttgtcactgtattcaaccacgcag

SEQ ID NO: 495082 - DNA, 25 bp, Homo sapien
agctgcgagcggctgacctgcaacg

SEQ ID NO: 495083 - DNA, 25 bp, Homo sapien
actgtattcaaccacgcagtcctgc

SEQ ID NO: 495084 - DNA, 25 bp, Homo sapien
tgacctgcaacgtgtcctgtccctg

SEQ ID NO: 495085 - DNA, 25 bp, Homo sapien
cagtgtacacggtgcttgctccaag

SEQ ID NO: 495086 - DNA, 25 bp, Homo sapien
ggattcgcaggtcattaggaaaatg

SEQ ID NO: 495087 - DNA, 25 bp, Homo sapien
ttgtgggagaagaaacatcagggac

SEQ ID NO: 495088 - DNA, 25 bp, Homo sapien
tcataggcattgactgagcaccaac

SEQ ID NO: 495089 - DNA, 25 bp, Homo sapien
cttgtgttgttggagcctccattct

SEQ ID NO: 495090 - DNA, 25 bp, Homo sapien
tgcaggaactacagcaggcttgtgt

SEQ ID NO: 495091 - DNA, 25 bp, Homo sapien
ccaggaaacttgctgttgggaggcc

SEQ ID NO: 495092 - DNA, 25 bp, Homo sapien
tagcagctcattgacgctcagagag

SEQ ID NO: 495093 - DNA, 25 bp, Homo sapien
cagttggtactgcaggtcatgacaa

SEQ ID NO: 495094 - DNA, 25 bp, Homo sapien
agagagtactcacaatgcctggcgg

SEQ ID NO: 495095 - DNA, 25 bp, Homo sapien
tggcgagtcactccaacaggctgac

SEQ ID NO: 495096 - DNA, 25 bp, Homo sapien
taaaccacggtctcttgagtcacca

SEQ ID NO: 495097 - DNA, 25 bp, Homo sapien
gaaaacactcgtggccatgtggacg

SEQ ID NO: 495098 - DNA, 25 bp, Homo sapien
tctttgccagcgcttaggagccctg

SEQ ID NO: 495099 - DNA, 25 bp, Homo sapien
ctctgctcatctgaagctggtagca

SEQ ID NO: 495100 - DNA, 25 bp, Homo sapien
tgctcatctgaagctggtagcaggc

SEQ ID NO: 495101 - DNA, 25 bp, Homo sapien
tctgaagctggtagcaggccttgga

SEQ ID NO: 495102 - DNA, 25 bp, Homo sapien
ccttggagaaggtgttgcccttcat

SEQ ID NO: 495103 - DNA, 25 bp, Homo sapien
cctggtggaggcttgggcctgacac

SEQ ID NO: 495104 - DNA, 25 bp, Homo sapien
cttctcctccaaacacatgctggtg

SEQ ID NO: 495105 - DNA, 25 bp, Homo sapien
aaacacatgctggtgcctggtggag

SEQ ID NO: 495106 - DNA, 25 bp, Homo sapien
tccaaacacatgctggtgcctggtg

SEQ ID NO: 495107 - DNA, 25 bp, Homo sapien
acgtcaaggctgctagtctaagaaa

SEQ ID NO: 495108 - DNA, 25 bp, Homo sapien
taatggatagcatcgtcgggaagcc

SEQ ID NO: 495109 - DNA, 25 bp, Homo sapien
tctgttgacacttggcctatgcgcg

SEQ ID NO: 495110 - DNA, 25 bp, Homo sapien
cagcccggcgatgaagataaagacg

SEQ ID NO: 495111 - DNA, 25 bp, Homo sapien
tggtcaggagccacggtttttggaa

SEQ ID NO: 495112 - DNA, 25 bp, Homo sapien
agcaatgcataaccgcgacgggcac

SEQ ID NO: 495113 - DNA, 25 bp, Homo sapien
tatgcaggcattattacgtttccta

SEQ ID NO: 495114 - DNA, 25 bp, Homo sapien
cacggcccatgggttgaacggtaga

SEQ ID NO: 495115 - DNA, 25 bp, Homo sapien
catttccaatagaccacactgcatg

SEQ ID NO: 495116 - DNA, 25 bp, Homo sapien
aagagtgcccgggacaaagacctag

SEQ ID NO: 495117 - DNA, 25 bp, Homo sapien
ctagatccctagcacgacggctggg

SEQ ID NO: 495118 - DNA, 25 bp, Homo sapien
acaggatttcagttcgtatttcggc

SEQ ID NO: 495119 - DNA, 25 bp, Homo sapien
tgtcccctccgaggtgagctcctcc

SEQ ID NO: 495120 - DNA, 25 bp, Homo sapien
aggccgcgccctggttggccactgt

SEQ ID NO: 495121 - DNA, 25 bp, Homo sapien
gttggccactgtcccctccgaggtg

SEQ ID NO: 495122 - DNA, 25 bp, Homo sapien
ctggttggccactgtcccctccgag

SEQ ID NO: 495123 - DNA, 25 bp, Homo sapien
cactgctgtagcagtgggctcctta

SEQ ID NO: 495124 - DNA, 25 bp, Homo sapien
gtagcagtgggctccttattccctt

SEQ ID NO: 495125 - DNA, 25 bp, Homo sapien
ggagcagggctggagagtgtttgcc

SEQ ID NO: 495126 - DNA, 25 bp, Homo sapien
tacactgctgtagcagtgggctcct

SEQ ID NO: 495127 - DNA, 25 bp, Homo sapien
gatgggctgctaaccttgaagctta

SEQ ID NO: 495128 - DNA, 25 bp, Homo sapien
tcccgcctgatggagttaacgctca

SEQ ID NO: 495129 - DNA, 25 bp, Homo sapien
cgtgaacaccttaggaagactgcat

SEQ ID NO: 495130 - DNA, 25 bp, Homo sapien
cacttggtcaggaactcgctgtgtc

SEQ ID NO: 495131 - DNA, 25 bp, Homo sapien
gagctatgcccttgatgacgtgaaa

SEQ ID NO: 495132 - DNA, 25 bp, Homo sapien
cataggcttcttacgccgggtcagg

SEQ ID NO: 495133 - DNA, 25 bp, Homo sapien
gacacacctggtatctcacgggcag

SEQ ID NO: 495134 - DNA, 25 bp, Homo sapien
gattcatgacattcggtgcccacag

SEQ ID NO: 495135 - DNA, 25 bp, Homo sapien
taaattggcccggaaatcaggatca

SEQ ID NO: 495136 - DNA, 25 bp, Homo sapien
tgcaagtgggcgatagacccaaaga

SEQ ID NO: 495137 - DNA, 25 bp, Homo sapien
cctggtacacactgggtgggaatgt

SEQ ID NO: 495138 - DNA, 25 bp, Homo sapien
aaaattgcactagcatatgacccag

SEQ ID NO: 495139 - DNA, 25 bp, Homo sapien
gactcattccggaccgggtggccag

SEQ ID NO: 495140 - DNA, 25 bp, Homo sapien
tccggcacggccgcgcccctaacgc

SEQ ID NO: 495141 - DNA, 25 bp, Homo sapien
gcccctaacgctctgcccacgggca

SEQ ID NO: 495142 - DNA, 25 bp, Homo sapien
cgactcattccggaccgggtggcca

SEQ ID NO: 495143 - DNA, 25 bp, Homo sapien
gattctttgcccaaaacacctctca

SEQ ID NO: 495144 - DNA, 25 bp, Homo sapien
gcccgtcggtcagtcacagttaaat

SEQ ID NO: 495145 - DNA, 25 bp, Homo sapien
tttcagcccgcggatttagttctcg

SEQ ID NO: 495146 - DNA, 25 bp, Homo sapien
aatggcacacgcttcaacatgttaa

SEQ ID NO: 495147 - DNA, 25 bp, Homo sapien
tgctcgggtcgatgactgccaggct

SEQ ID NO: 495148 - DNA, 25 bp, Homo sapien
ctcaaacccgcggaaagagggagcg

SEQ ID NO: 495149 - DNA, 25 bp, Homo sapien
gctgcgcagaccgagaacctaggca

SEQ ID NO: 495150 - DNA, 25 bp, Homo sapien
ggcgccctcctttgggcgtcggatc

SEQ ID NO: 495151 - DNA, 25 bp, Homo sapien
caagcgataaatgattggcagcagc

SEQ ID NO: 495152 - DNA, 25 bp, Homo sapien
gcaggtgtaacttgttgccaagcga

SEQ ID NO: 495153 - DNA, 25 bp, Homo sapien
cagtgccaattaggcagcacagggc

SEQ ID NO: 495154 - DNA, 25 bp, Homo sapien
gtgtggccacctgcataagtattaa

SEQ ID NO: 495155 - DNA, 25 bp, Homo sapien
ggcccgggctgccattaaatgagcg

SEQ ID NO: 495156 - DNA, 25 bp, Homo sapien
gcatggcgcgctggcgagtgacgtg

SEQ ID NO: 495157 - DNA, 25 bp, Homo sapien
cggcggcggcggtgatttgcatggc

SEQ ID NO: 495158 - DNA, 25 bp, Homo sapien
tgccattaaatgagcgcgccgcggc

SEQ ID NO: 495159 - DNA, 25 bp, Homo sapien
ggccggcggcgcgcggggcccagca

SEQ ID NO: 495160 - DNA, 25 bp, Homo sapien
ggcgcgcggggcccagcagccatac

SEQ ID NO: 495161 - DNA, 25 bp, Homo sapien
gcggcgcgcggggcccagcagccat

SEQ ID NO: 495162 - DNA, 25 bp, Homo sapien
cggcggcgcgcggggcccagcagcc

SEQ ID NO: 495163 - DNA, 25 bp, Homo sapien
ttcggctcgcaggtggaaagtttct

SEQ ID NO: 495164 - DNA, 25 bp, Homo sapien
tcggcggagcggtgcaaacaggtgc

SEQ ID NO: 495165 - DNA, 25 bp, Homo sapien
tgcagtcgtggccaagttgcagctc

SEQ ID NO: 495166 - DNA, 25 bp, Homo sapien
gaaagtttctcctgatgcacaaacc

SEQ ID NO: 495167 - DNA, 25 bp, Homo sapien
cgggttcaccggcaccgcgaggaga

SEQ ID NO: 495168 - DNA, 25 bp, Homo sapien
ggagagggcctggagcatagacggc

SEQ ID NO: 495169 - DNA, 25 bp, Homo sapien
gagggcctggagcatagacggccgg

SEQ ID NO: 495170 - DNA, 25 bp, Homo sapien
ggcggctggcgggttcaccggcacc

SEQ ID NO: 495171 - DNA, 25 bp, Homo sapien
caggtcggtctccatcatcatgctg

SEQ ID NO: 495172 - DNA, 25 bp, Homo sapien
cgccgggcgagtgcaggtcggtctc

SEQ ID NO: 495173 - DNA, 25 bp, Homo sapien
tcggtctccatcatcatgctgtaca

SEQ ID NO: 495174 - DNA, 25 bp, Homo sapien
gagtgcaggtcggtctccatcatca

SEQ ID NO: 495175 - DNA, 25 bp, Homo sapien
ggcccccaggcgcttgctgatctcc

SEQ ID NO: 495176 - DNA, 25 bp, Homo sapien
tcatgggccgtttgacccggtcctg

SEQ ID NO: 495177 - DNA, 25 bp, Homo sapien
ctgcccgcgggaccacaccatgaag

SEQ ID NO: 495178 - DNA, 25 bp, Homo sapien
ggcgcttgctgatctccgagttgtg

SEQ ID NO: 495179 - DNA, 25 bp, Homo sapien
ggccgcttctcggcctcggacatga

SEQ ID NO: 495180 - DNA, 25 bp, Homo sapien
tccttcttgagcagcgtcttggtct

SEQ ID NO: 495181 - DNA, 25 bp, Homo sapien
cgcgcgcagccgcttggcctcgtcg

SEQ ID NO: 495182 - DNA, 25 bp, Homo sapien
gctccttcatgtgcagcgcgcgcag

SEQ ID NO: 495183 - DNA, 25 bp, Homo sapien
agccgttgacgtgcgcgtagccgcc

SEQ ID NO: 495184 - DNA, 25 bp, Homo sapien
ccagccgttgacgtgcgcgtagccg

SEQ ID NO: 495185 - DNA, 25 bp, Homo sapien
ccgttgacgtgcgcgtagccgccgc

SEQ ID NO: 495186 - DNA, 25 bp, Homo sapien
cagccgttgacgtgcgcgtagccgc

SEQ ID NO: 495187 - DNA, 25 bp, Homo sapien
catgggctgcgggttgtgcgggtgc

SEQ ID NO: 495188 - DNA, 25 bp, Homo sapien
tagcccgagggcgacgcgctcatgt

SEQ ID NO: 495189 - DNA, 25 bp, Homo sapien
tgcagcgcgcccatgtcgtagcggt

SEQ ID NO: 495190 - DNA, 25 bp, Homo sapien
tcatgtagccctgcgagttggagat

SEQ ID NO: 495191 - DNA, 25 bp, Homo sapien
gcacggcgcccgcgagtgcgctggg

SEQ ID NO: 495192 - DNA, 25 bp, Homo sapien
acggcgcccgcgagtgcgctggggc

SEQ ID NO: 495193 - DNA, 25 bp, Homo sapien
tcatctcgcgcaggtccccggggca

SEQ ID NO: 495194 - DNA, 25 bp, Homo sapien
ggggcacggcgcccgcgagtgcgct

SEQ ID NO: 495195 - DNA, 25 bp, Homo sapien
tgctgccgccgccgggtcgcccccc

SEQ ID NO: 495196 - DNA, 25 bp, Homo sapien
ccgctgctgccgccgccgggtcgcc

SEQ ID NO: 495197 - DNA, 25 bp, Homo sapien
ctctgcgccgcggccgctgctgccg

SEQ ID NO: 495198 - DNA, 25 bp, Homo sapien
gctgctgccgccgccgggtcgcccc

SEQ ID NO: 495199 - DNA, 25 bp, Homo sapien
agatgtgcgtcaggggcaccgtgcc

SEQ ID NO: 495200 - DNA, 25 bp, Homo sapien
ctagatgtgcgtcaggggcaccgtg

SEQ ID NO: 495201 - DNA, 25 bp, Homo sapien
aggggcaccgtgccgttcacgcccg

SEQ ID NO: 495202 - DNA, 25 bp, Homo sapien
gcaccgtgccgttcacgcccgcgcc

SEQ ID NO: 495203 - DNA, 25 bp, Homo sapien
gaacgtctgtacaaaagccacgccg

SEQ ID NO: 495204 - DNA, 25 bp, Homo sapien
taaaacccaagtctggtgtcagcgc

SEQ ID NO: 495205 - DNA, 25 bp, Homo sapien
tcacccggcgttcgtctccagtatt

SEQ ID NO: 495206 - DNA, 25 bp, Homo sapien
caagaatgtgggaacgtctgtacaa

SEQ ID NO: 495207 - DNA, 25 bp, Homo sapien
tcgagcaaagaaaacgctttccgct

SEQ ID NO: 495208 - DNA, 25 bp, Homo sapien
cctccgtaggtgataaatactgtac

SEQ ID NO: 495209 - DNA, 25 bp, Homo sapien
tataacaaatgcgacgagctccgcg

SEQ ID NO: 495210 - DNA, 25 bp, Homo sapien
cgcgccggccggtatacaaaagtgg

SEQ ID NO: 495211 - DNA, 25 bp, Homo sapien
ggagaaaatgggctctgtctcttaa

SEQ ID NO: 495212 - DNA, 25 bp, Homo sapien
tgttgactcgaaacattttgggtgg

SEQ ID NO: 495213 - DNA, 25 bp, Homo sapien
tataactccgccgtctgaaggaggg

SEQ ID NO: 495214 - DNA, 25 bp, Homo sapien
cccgcattgcaacgccgaaaataaa

SEQ ID NO: 495215 - DNA, 25 bp, Homo sapien
tggacgtcagtcaaagaacctcaga

SEQ ID NO: 495216 - DNA, 25 bp, Homo sapien
cgaattcacagtcggctcagggcct

SEQ ID NO: 495217 - DNA, 25 bp, Homo sapien
taagtcgtagtggtgctcagccatc

SEQ ID NO: 495218 - DNA, 25 bp, Homo sapien
gcataggctcacttttggacggaca

SEQ ID NO: 495219 - DNA, 25 bp, Homo sapien
agatccagggctgcgaagaagctcg

SEQ ID NO: 495220 - DNA, 25 bp, Homo sapien
gaaagcggtgtcgtgacaaacagca

SEQ ID NO: 495221 - DNA, 25 bp, Homo sapien
tgatattttataccccgattctgcg

SEQ ID NO: 495222 - DNA, 25 bp, Homo sapien
tccgtgatgaaaaacgccacgcgca

SEQ ID NO: 495223 - DNA, 25 bp, Homo sapien
gctcgggttcttcacgtgtttttca

SEQ ID NO: 495224 - DNA, 25 bp, Homo sapien
cgatcattttccgtctttggatcta

SEQ ID NO: 495225 - DNA, 25 bp, Homo sapien
ttggatctatcacttgctcgggttc

SEQ ID NO: 495226 - DNA, 25 bp, Homo sapien
tggtgtttcatatcggcagatgaaa

SEQ ID NO: 495227 - DNA, 25 bp, Homo sapien
cagtctccccattgtcaaaccccat

SEQ ID NO: 495228 - DNA, 25 bp, Homo sapien
gcatttccggggtgctcagagagaa

SEQ ID NO: 495229 - DNA, 25 bp, Homo sapien
tctgggtgatgactcttgtcagtct

SEQ ID NO: 495230 - DNA, 25 bp, Homo sapien
tatcatctctcgttagcatttccgg

SEQ ID NO: 495231 - DNA, 25 bp, Homo sapien
tggctggttgactgaaggacattac

SEQ ID NO: 495232 - DNA, 25 bp, Homo sapien
gcctttatttgcacatgacgggatg

SEQ ID NO: 495233 - DNA, 25 bp, Homo sapien
gatcaagatgattgccagtagcccc

SEQ ID NO: 495234 - DNA, 25 bp, Homo sapien
gacaataaccaccatgcagcaaggg

SEQ ID NO: 495235 - DNA, 25 bp, Homo sapien
gaatcactctgtagatccactggga

SEQ ID NO: 495236 - DNA, 25 bp, Homo sapien
catacggtgtagatcacagtacaac

SEQ ID NO: 495237 - DNA, 25 bp, Homo sapien
caaaggaagcgatcagttggaatca

SEQ ID NO: 495238 - DNA, 25 bp, Homo sapien
tggccagtaccaaagatctaatgaa

SEQ ID NO: 495239 - DNA, 25 bp, Homo sapien
gcgcttgctcggaagaagatgccaa

SEQ ID NO: 495240 - DNA, 25 bp, Homo sapien
tgcgcttgctcggaagaagatgcca

SEQ ID NO: 495241 - DNA, 25 bp, Homo sapien
cctcggtgtagcctgtcctgagagg

SEQ ID NO: 495242 - DNA, 25 bp, Homo sapien
agctgcgcttgctcggaagaagatg

SEQ ID NO: 495243 - DNA, 25 bp, Homo sapien
gtgtccctggaagtccgccgtccca

SEQ ID NO: 495244 - DNA, 25 bp, Homo sapien
catgggcacgacttggaagtgtccc

SEQ ID NO: 495245 - DNA, 25 bp, Homo sapien
ctgcatgggcacgacttggaagtgt

SEQ ID NO: 495246 - DNA, 25 bp, Homo sapien
tgggcacgacttggaagtgtccctg

SEQ ID NO: 495247 - DNA, 25 bp, Homo sapien
agaaccctgttctgccagtcccttg

SEQ ID NO: 495248 - DNA, 25 bp, Homo sapien
gctcggagaacctagtagaaccctg

SEQ ID NO: 495249 - DNA, 25 bp, Homo sapien
gctccacgcaggtcaggtgcggctc

SEQ ID NO: 495250 - DNA, 25 bp, Homo sapien
caggatttgtgggacccgtgcacac

SEQ ID NO: 495251 - DNA, 25 bp, Homo sapien
ggtcgtggtttcttaactgtgggca

SEQ ID NO: 495252 - DNA, 25 bp, Homo sapien
caatgtctcaggtcgtggtttctta

SEQ ID NO: 495253 - DNA, 25 bp, Homo sapien
taactgtgggcagtgtatactgagg

SEQ ID NO: 495254 - DNA, 25 bp, Homo sapien
ttcaaaacaatgtctcaggtcgtgg

SEQ ID NO: 495255 - DNA, 25 bp, Homo sapien
aaatgagtgtcttagaaccaaagaa

SEQ ID NO: 495256 - DNA, 25 bp, Homo sapien
tgtgagtaacacatgcaacacgact

SEQ ID NO: 495257 - DNA, 25 bp, Homo sapien
tgtaattctaagttgccgctgatgg

SEQ ID NO: 495258 - DNA, 25 bp, Homo sapien
caacacgactctatagatatgcaga

SEQ ID NO: 495259 - DNA, 25 bp, Homo sapien
tcctaatctcgtttagcacattcac

SEQ ID NO: 495260 - DNA, 25 bp, Homo sapien
taatctcgtttagcacattcactct

SEQ ID NO: 495261 - DNA, 25 bp, Homo sapien
tcgtttagcacattcactctctgca

SEQ ID NO: 495262 - DNA, 25 bp, Homo sapien
tattccttcctaatctcgtttagca

SEQ ID NO: 495263 - DNA, 25 bp, Homo sapien
tgaaacttccaaagctcgaggaaaa

SEQ ID NO: 495264 - DNA, 25 bp, Homo sapien
tcgcttttggctccttcaggaatgc

SEQ ID NO: 495265 - DNA, 25 bp, Homo sapien
agtgcacggctgagtgaaacttcca

SEQ ID NO: 495266 - DNA, 25 bp, Homo sapien
tttgtgaagccattgagtgcacggc

SEQ ID NO: 495267 - DNA, 25 bp, Homo sapien
taaggggctccctcggctcgtttgc

SEQ ID NO: 495268 - DNA, 25 bp, Homo sapien
cgggataaggggctccctcggctcg

SEQ ID NO: 495269 - DNA, 25 bp, Homo sapien
aggggctccctcggctcgtttgcac

SEQ ID NO: 495270 - DNA, 25 bp, Homo sapien
ataaggggctccctcggctcgtttg

SEQ ID NO: 495271 - DNA, 25 bp, Homo sapien
caatgatgacattagcgtggcggcc

SEQ ID NO: 495272 - DNA, 25 bp, Homo sapien
cagggagcagcattgtccacgggtc

SEQ ID NO: 495273 - DNA, 25 bp, Homo sapien
tccacgggtcacttcaagatgagcg

SEQ ID NO: 495274 - DNA, 25 bp, Homo sapien
tccccaggtcacgagaagaaaacgc

SEQ ID NO: 495275 - DNA, 25 bp, Homo sapien
ttgcggaatgcaccagaaggagagc

SEQ ID NO: 495276 - DNA, 25 bp, Homo sapien
taactgttttgctttagggcgcgca

SEQ ID NO: 495277 - DNA, 25 bp, Homo sapien
ttcactcgacttggtatctgggcct

SEQ ID NO: 495278 - DNA, 25 bp, Homo sapien
tcctgcagtttgaggagcgtggcct

SEQ ID NO: 495279 - DNA, 25 bp, Homo sapien
ccttaaagtttagtcctcggctctg

SEQ ID NO: 495280 - DNA, 25 bp, Homo sapien
aagtttagtcctcggctctggtctg

SEQ ID NO: 495281 - DNA, 25 bp, Homo sapien
cctctgccgtcttcgaccttaaagt

SEQ ID NO: 495282 - DNA, 25 bp, Homo sapien
ttttcccagcctcagatgcggcaga

SEQ ID NO: 495283 - DNA, 25 bp, Homo sapien
cctccttttgtcagaaggagggcag

SEQ ID NO: 495284 - DNA, 25 bp, Homo sapien
ccttttgtcagaaggagggcaggca

SEQ ID NO: 495285 - DNA, 25 bp, Homo sapien
cttcacatcctaccccctccttttg

SEQ ID NO: 495286 - DNA, 25 bp, Homo sapien
catcctaccccctccttttgtcaga

SEQ ID NO: 495287 - DNA, 25 bp, Homo sapien
gtatttccctgttgttgtgtttaca

SEQ ID NO: 495288 - DNA, 25 bp, Homo sapien
tcctccatgtatttccctgttgttg

SEQ ID NO: 495289 - DNA, 25 bp, Homo sapien
acaaaaacattgttggttgcactac

SEQ ID NO: 495290 - DNA, 25 bp, Homo sapien
tgttgtgtttacaaaaacattgttg

SEQ ID NO: 495291 - DNA, 25 bp, Homo sapien
gaaaagcctgaacctggatgctgaa

SEQ ID NO: 495292 - DNA, 25 bp, Homo sapien
tataacgtgtgtgtatgaagcctgc

SEQ ID NO: 495293 - DNA, 25 bp, Homo sapien
tgtgttttacactgagcagcacgcc

SEQ ID NO: 495294 - DNA, 25 bp, Homo sapien
gggctggcacacatgaagaacctcc

SEQ ID NO: 495295 - DNA, 25 bp, Homo sapien
tcaagggctgattctcatggaccaa

SEQ ID NO: 495296 - DNA, 25 bp, Homo sapien
tcacagcggctgtcatagtgagctg

SEQ ID NO: 495297 - DNA, 25 bp, Homo sapien
ccaagaatcctgagtgtggccactc

SEQ ID NO: 495298 - DNA, 25 bp, Homo sapien
gcttgaagactaggttcacagcggc

SEQ ID NO: 495299 - DNA, 25 bp, Homo sapien
taaaaatctcattaataacaccatt

SEQ ID NO: 495300 - DNA, 25 bp, Homo sapien
caaaatgctactgataatgttgtca

SEQ ID NO: 495301 - DNA, 25 bp, Homo sapien
cataattataccgaagaagtctgtc

SEQ ID NO: 495302 - DNA, 25 bp, Homo sapien
tattgttattctaattatcagcaaa

SEQ ID NO: 495303 - DNA, 25 bp, Homo sapien
tacgccttcagagtagacaagcctg

SEQ ID NO: 495304 - DNA, 25 bp, Homo sapien
gattccacagtttcgtcttctaaca

SEQ ID NO: 495305 - DNA, 25 bp, Homo sapien
ggattatgaagaaatcactcagatg

SEQ ID NO: 495306 - DNA, 25 bp, Homo sapien
tagcgtctgtttcacggattatgaa

SEQ ID NO: 495307 - DNA, 25 bp, Homo sapien
gccttcgggtccctgcaaggtgtcc

SEQ ID NO: 495308 - DNA, 25 bp, Homo sapien
cacgtggaatcccaagggtgcaggc

SEQ ID NO: 495309 - DNA, 25 bp, Homo sapien
tccagaattgggctccacgtggaat

SEQ ID NO: 495310 - DNA, 25 bp, Homo sapien
ccgtgggcaagcctggtgccccttg

SEQ ID NO: 495311 - DNA, 25 bp, Homo sapien
gagctctggattaggactttccgga

SEQ ID NO: 495312 - DNA, 25 bp, Homo sapien
aggccagtacatgacaggccccaga

SEQ ID NO: 495313 - DNA, 25 bp, Homo sapien
cccagaggctcggagtgcctgctgc

SEQ ID NO: 495314 - DNA, 25 bp, Homo sapien
ggagcctcgccacaggtagaggcca

SEQ ID NO: 495315 - DNA, 25 bp, Homo sapien
gggatgcagacgtggcggcggcgct

SEQ ID NO: 495316 - DNA, 25 bp, Homo sapien
ccccgcaaggggatgcagacgtggc

SEQ ID NO: 495317 - DNA, 25 bp, Homo sapien
catggacatcaggagcaggatttgc

SEQ ID NO: 495318 - DNA, 25 bp, Homo sapien
ctctcatggacatcaggagcaggat

SEQ ID NO: 495319 - DNA, 25 bp, Homo sapien
aggtgctgccgctatcctgggcagg

SEQ ID NO: 495320 - DNA, 25 bp, Homo sapien
tccccccgaggtgcttgccgctgtc

SEQ ID NO: 495321 - DNA, 25 bp, Homo sapien
cccgaggtgcttgccgctgtcccgg

SEQ ID NO: 495322 - DNA, 25 bp, Homo sapien
ccccgaggtgctgccgctatcctgg

SEQ ID NO: 495323 - DNA, 25 bp, Homo sapien
ggaggccactcgcggtcctccaagg

SEQ ID NO: 495324 - DNA, 25 bp, Homo sapien
ggattctgtcccgacgccgactcat

SEQ ID NO: 495325 - DNA, 25 bp, Homo sapien
aaggaacggattgctgttaggattc

SEQ ID NO: 495326 - DNA, 25 bp, Homo sapien
tctgttgaaaaggaacggattgctg

SEQ ID NO: 495327 - DNA, 25 bp, Homo sapien
gattgctgttaggattctgtcccga

SEQ ID NO: 495328 - DNA, 25 bp, Homo sapien
tgtgctggccacacagatgcgctgt

SEQ ID NO: 495329 - DNA, 25 bp, Homo sapien
gaacttcacgttggaaaatagcact

SEQ ID NO: 495330 - DNA, 25 bp, Homo sapien
cgagtctcaggtgcttccttccgag

SEQ ID NO: 495331 - DNA, 25 bp, Homo sapien
caacgaggaaggacacgagtctcag

SEQ ID NO: 495332 - DNA, 25 bp, Homo sapien
tggagcaatggctgggacggatcgt

SEQ ID NO: 495333 - DNA, 25 bp, Homo sapien
cgtggatctatcacagtctccaaca

SEQ ID NO: 495334 - DNA, 25 bp, Homo sapien
agggacacagtctcccggagcagcc

SEQ ID NO: 495335 - DNA, 25 bp, Homo sapien
cctggctgacaggagccatcctgct

SEQ ID NO: 495336 - DNA, 25 bp, Homo sapien
aacccttttgtcatgcgaacagtca

SEQ ID NO: 495337 - DNA, 25 bp, Homo sapien
caaatatcgtgtttcttgaagcagg

SEQ ID NO: 495338 - DNA, 25 bp, Homo sapien
gcaggtcacgcctttacgaagggtc

SEQ ID NO: 495339 - DNA, 25 bp, Homo sapien
ggcatttcagtacgtttatcgcttg

SEQ ID NO: 495340 - DNA, 25 bp, Homo sapien
tttctcccctggctaaagatgtgtt

SEQ ID NO: 495341 - DNA, 25 bp, Homo sapien
aagatgtgttgctgggtaaagtgat

SEQ ID NO: 495342 - DNA, 25 bp, Homo sapien
ggacctgaccggctgttttctctgc

SEQ ID NO: 495343 - DNA, 25 bp, Homo sapien
tcatggacctgaccggctgttttct

SEQ ID NO: 495344 - DNA, 25 bp, Homo sapien
gaagagctagggtgccttgagactc

SEQ ID NO: 495345 - DNA, 25 bp, Homo sapien
gagctagggtgccttgagactccac

SEQ ID NO: 495346 - DNA, 25 bp, Homo sapien
gggtgccttgagactccacagtcag

SEQ ID NO: 495347 - DNA, 25 bp, Homo sapien
accagagaagagctagggtgccttg

SEQ ID NO: 495348 - DNA, 25 bp, Homo sapien
gcgtgccactcggtttttctctgca

SEQ ID NO: 495349 - DNA, 25 bp, Homo sapien
gaaatgacacatgggtaaggagctc

SEQ ID NO: 495350 - DNA, 25 bp, Homo sapien
gcctctcaaaaactgcatgtacttg

SEQ ID NO: 495351 - DNA, 25 bp, Homo sapien
cagaaatcaaccagaacggacctgt

SEQ ID NO: 495352 - DNA, 25 bp, Homo sapien
ctggagcacccggacctcggctcct

SEQ ID NO: 495353 - DNA, 25 bp, Homo sapien
atcgcccggccaaggcgtccttgag

SEQ ID NO: 495354 - DNA, 25 bp, Homo sapien
aaggcgtccttgagaccccaggagg

SEQ ID NO: 495355 - DNA, 25 bp, Homo sapien
cggacctcggctcctgacagcaagc

SEQ ID NO: 495356 - DNA, 25 bp, Homo sapien
tgtggccactctctgagcagtcgtc

SEQ ID NO: 495357 - DNA, 25 bp, Homo sapien
ggcctggctggcaacatccatgtcc

SEQ ID NO: 495358 - DNA, 25 bp, Homo sapien
tccttgggaacatgaagtgaacttg

SEQ ID NO: 495359 - DNA, 25 bp, Homo sapien
tcctgctccgctgtctgtgaagatg

SEQ ID NO: 495360 - DNA, 25 bp, Homo sapien
tagtggatcccacaccgaggctgca

SEQ ID NO: 495361 - DNA, 25 bp, Homo sapien
tgcgccgtgcgctcgcattcctcag

SEQ ID NO: 495362 - DNA, 25 bp, Homo sapien
gagctacatataaagactctccacg

SEQ ID NO: 495363 - DNA, 25 bp, Homo sapien
cacctagtggatcccacaccgaggc

SEQ ID NO: 495364 - DNA, 25 bp, Homo sapien
gcctactccttctggtggatcagaa

SEQ ID NO: 495365 - DNA, 25 bp, Homo sapien
ataaatacctaagacaccatgaaat

SEQ ID NO: 495366 - DNA, 25 bp, Homo sapien
tatgaagtgtctgacccgctctaac

SEQ ID NO: 495367 - DNA, 25 bp, Homo sapien
tgtttggctgaagaccctgatattt

SEQ ID NO: 495368 - DNA, 25 bp, Homo sapien
ggacctcccgtgtgagcactgatca

SEQ ID NO: 495369 - DNA, 25 bp, Homo sapien
tgatcatccgcatcatgtagatggg

SEQ ID NO: 495370 - DNA, 25 bp, Homo sapien
taggagcagaatgcaactgagggcc

SEQ ID NO: 495371 - DNA, 25 bp, Homo sapien
tcgggtgccccttctgttaggagca

SEQ ID NO: 495372 - DNA, 25 bp, Homo sapien
tgactacgaggtgcacacgtgaggt

SEQ ID NO: 495373 - DNA, 25 bp, Homo sapien
caggtgtcccctcaaagcgtagaaa

SEQ ID NO: 495374 - DNA, 25 bp, Homo sapien
atagggccggtatctcccctgcagg

SEQ ID NO: 495375 - DNA, 25 bp, Homo sapien
agatgtgggctgtgctcattcttct

SEQ ID NO: 495376 - DNA, 25 bp, Homo sapien
gagtggagacctccgagagctgatg

SEQ ID NO: 495377 - DNA, 25 bp, Homo sapien
cgagtggagacctccgagagctgat

SEQ ID NO: 495378 - DNA, 25 bp, Homo sapien
ggcattggctcctgcagttatggag

SEQ ID NO: 495379 - DNA, 25 bp, Homo sapien
cttgctccatcctgaaggaatggtc

SEQ ID NO: 495380 - DNA, 25 bp, Homo sapien
tcctgaaggaatggtccacacttat

SEQ ID NO: 495381 - DNA, 25 bp, Homo sapien
ggaatggtccacacttatctgactc

SEQ ID NO: 495382 - DNA, 25 bp, Homo sapien
tccatcctgaaggaatggtccacac

SEQ ID NO: 495383 - DNA, 25 bp, Homo sapien
gctgtattctgaaggaatgatccac

SEQ ID NO: 495384 - DNA, 25 bp, Homo sapien
tggtccatgtttacctgggcccatc

SEQ ID NO: 495385 - DNA, 25 bp, Homo sapien
gaaacagtccatgcttacctggctg

SEQ ID NO: 495386 - DNA, 25 bp, Homo sapien
tccatcctgaaggtatggtccatgt

SEQ ID NO: 495387 - DNA, 25 bp, Homo sapien
cctgaaggaatggtccatggttacc

SEQ ID NO: 495388 - DNA, 25 bp, Homo sapien
aggaatggtccatggttacctgggc

SEQ ID NO: 495389 - DNA, 25 bp, Homo sapien
tggtccatggttacctgggcccatc

SEQ ID NO: 495390 - DNA, 25 bp, Homo sapien
gctctatcctgaaggaatggtccat

SEQ ID NO: 495391 - DNA, 25 bp, Homo sapien
cctgaaggaatggtccatggttacc

SEQ ID NO: 495392 - DNA, 25 bp, Homo sapien
aggaatggtccatggttacctgggc

SEQ ID NO: 495393 - DNA, 25 bp, Homo sapien
tggtccatggttacctgggcccatc

SEQ ID NO: 495394 - DNA, 25 bp, Homo sapien
ctctatcctgaaggaatggtccatg

SEQ ID NO: 495395 - DNA, 25 bp, Homo sapien
cctgaaggaatggtccatggttacc

SEQ ID NO: 495396 - DNA, 25 bp, Homo sapien
aggaatggtccatggttacctgggc

SEQ ID NO: 495397 - DNA, 25 bp, Homo sapien
gctctatcctgaaggaatggtccat

SEQ ID NO: 495398 - DNA, 25 bp, Homo sapien
tggtccatggttacctgggcccatc

SEQ ID NO: 495399 - DNA, 25 bp, Homo sapien
cctgaaggaatggtccatggttacc

SEQ ID NO: 495400 - DNA, 25 bp, Homo sapien
gctctatcctgaaggaatggtccat

SEQ ID NO: 495401 - DNA, 25 bp, Homo sapien
aggaatggtccatggttacctgggc

SEQ ID NO: 495402 - DNA, 25 bp, Homo sapien
tggtccatggttacctgggcccatc

SEQ ID NO: 495403 - DNA, 25 bp, Homo sapien
gctgtattctgaaggaatgatccac

SEQ ID NO: 495404 - DNA, 25 bp, Homo sapien
tcctgaaggtatggtccatgtttac

SEQ ID NO: 495405 - DNA, 25 bp, Homo sapien
tggtccatgtttacctgggcccatc

SEQ ID NO: 495406 - DNA, 25 bp, Homo sapien
tccatcctgaaggtatggtccatgt

SEQ ID NO: 495407 - DNA, 25 bp, Homo sapien
gctgtattctgaaggaatggtccac

SEQ ID NO: 495408 - DNA, 25 bp, Homo sapien
tggtccatgtttacctgggcccatc

SEQ ID NO: 495409 - DNA, 25 bp, Homo sapien
gaaacagtccatgcttacctggctg

SEQ ID NO: 495410 - DNA, 25 bp, Homo sapien
tccatcctgaaggtatggtccatgt

SEQ ID NO: 495411 - DNA, 25 bp, Homo sapien
tccatcctgaaggtatggtccatgt

SEQ ID NO: 495412 - DNA, 25 bp, Homo sapien
gctgtattctgaaggaatggtccac

SEQ ID NO: 495413 - DNA, 25 bp, Homo sapien
tggtccatgtttacctgggcccatc

SEQ ID NO: 495414 - DNA, 25 bp, Homo sapien
gctgtattctgaaggaatgatccac

SEQ ID NO: 495415 - DNA, 25 bp, Homo sapien
aatggtccatacttacctgaatcca

SEQ ID NO: 495416 - DNA, 25 bp, Homo sapien
ggaatggtccatacttacctgaatc

SEQ ID NO: 495417 - DNA, 25 bp, Homo sapien
tccatacttacctgaatccatcctg

SEQ ID NO: 495418 - DNA, 25 bp, Homo sapien
tggtccatacttacctgaatccatc

SEQ ID NO: 495419 - DNA, 25 bp, Homo sapien
gctaacttggcggtattctgaagaa

SEQ ID NO: 495420 - DNA, 25 bp, Homo sapien
aacaatccatgctaacttggcggta

SEQ ID NO: 495421 - DNA, 25 bp, Homo sapien
tgaagaaacaatccatgctaacttg

SEQ ID NO: 495422 - DNA, 25 bp, Homo sapien
ccatgctaacttggcggtattctga

SEQ ID NO: 495423 - DNA, 25 bp, Homo sapien
tatccttgaaaatggtccatgcttt

SEQ ID NO: 495424 - DNA, 25 bp, Homo sapien
gtatccttgaaaatggtccatgctt

SEQ ID NO: 495425 - DNA, 25 bp, Homo sapien
gaatagttcttgtttacctggctgc

SEQ ID NO: 495426 - DNA, 25 bp, Homo sapien
tgcaatctgaaggaacggtccatgc

SEQ ID NO: 495427 - DNA, 25 bp, Homo sapien
aggaacggtccatgctttccaggct

SEQ ID NO: 495428 - DNA, 25 bp, Homo sapien
tggattcatcgtgaaggaatagttc

SEQ ID NO: 495429 - DNA, 25 bp, Homo sapien
aatgtttcgtgttgacctggctgca

SEQ ID NO: 495430 - DNA, 25 bp, Homo sapien
gaaatgattcatgcttaccaggcta

SEQ ID NO: 495431 - DNA, 25 bp, Homo sapien
tccatcctgagggaatagtccgcac

SEQ ID NO: 495432 - DNA, 25 bp, Homo sapien
tacatactgacggaatggtccatgc

SEQ ID NO: 495433 - DNA, 25 bp, Homo sapien
ctgaaggaacggtccacacttggca

SEQ ID NO: 495434 - DNA, 25 bp, Homo sapien
aacggtccacacttggcaggctcca

SEQ ID NO: 495435 - DNA, 25 bp, Homo sapien
acggtccacacttggcaggctccat

SEQ ID NO: 495436 - DNA, 25 bp, Homo sapien
aaggaacggtccacacttggcaggc

SEQ ID NO: 495437 - DNA, 25 bp, Homo sapien
tgaaggaatggctgatgcttacctg

SEQ ID NO: 495438 - DNA, 25 bp, Homo sapien
gaaggaatggctgatgcttacctgg

SEQ ID NO: 495439 - DNA, 25 bp, Homo sapien
aaggaatggctgatgcttacctggc

SEQ ID NO: 495440 - DNA, 25 bp, Homo sapien
gcatcctgaaggaatggtccatgct

SEQ ID NO: 495441 - DNA, 25 bp, Homo sapien
catcctgaaggaatggtccatgctt

SEQ ID NO: 495442 - DNA, 25 bp, Homo sapien
tcctgaaggaatggtccatgcttac

SEQ ID NO: 495443 - DNA, 25 bp, Homo sapien
atcctgaaggaatggtccatgctta

SEQ ID NO: 495444 - DNA, 25 bp, Homo sapien
tacctgactccactattaagaaatg

SEQ ID NO: 495445 - DNA, 25 bp, Homo sapien
aaactggtccatgcttacctggatg

SEQ ID NO: 495446 - DNA, 25 bp, Homo sapien
tggaatggttcatgcttacctggtg

SEQ ID NO: 495447 - DNA, 25 bp, Homo sapien
gcttacccgactgcatcctgacaga

SEQ ID NO: 495448 - DNA, 25 bp, Homo sapien
gctaaagaatggtccattcttacct

SEQ ID NO: 495449 - DNA, 25 bp, Homo sapien
tcttacctggttccgtgctaaaaga

SEQ ID NO: 495450 - DNA, 25 bp, Homo sapien
tacctggttccgtgctaaaagaatg

SEQ ID NO: 495451 - DNA, 25 bp, Homo sapien
acctggttccgtgctaaaagaatgg

SEQ ID NO: 495452 - DNA, 25 bp, Homo sapien
catatttgcctagctgtatccagga

SEQ ID NO: 495453 - DNA, 25 bp, Homo sapien
tgtatcctgaaagaatggtccctgg

SEQ ID NO: 495454 - DNA, 25 bp, Homo sapien
taatggtccacgcttacatggcagg

SEQ ID NO: 495455 - DNA, 25 bp, Homo sapien
gctgcatcccgaggaaaggttcata

SEQ ID NO: 495456 - DNA, 25 bp, Homo sapien
aggagtggtccactcttatgaggct

SEQ ID NO: 495457 - DNA, 25 bp, Homo sapien
tgtatcctgacagaatggtccaccc

SEQ ID NO: 495458 - DNA, 25 bp, Homo sapien
tgcatcctgatggaacggcccatgt

SEQ ID NO: 495459 - DNA, 25 bp, Homo sapien
cctggctgcatcctgaatgagtgat

SEQ ID NO: 495460 - DNA, 25 bp, Homo sapien
tccatcctgagggaatcgtccacag

SEQ ID NO: 495461 - DNA, 25 bp, Homo sapien
tggtccatgcttaccggactccatc

SEQ ID NO: 495462 - DNA, 25 bp, Homo sapien
gaatggtccatgcttaccggactcc

SEQ ID NO: 495463 - DNA, 25 bp, Homo sapien
ctgaaggaatggtccatgcttaccg

SEQ ID NO: 495464 - DNA, 25 bp, Homo sapien
aaggaatggtccatgcttaccggac

SEQ ID NO: 495465 - DNA, 25 bp, Homo sapien
ggagagggccatgcttatccgactc

SEQ ID NO: 495466 - DNA, 25 bp, Homo sapien
gagggccatgcttatccgactccat

SEQ ID NO: 495467 - DNA, 25 bp, Homo sapien
gcttatccgactccatcctgaggaa

SEQ ID NO: 495468 - DNA, 25 bp, Homo sapien
atgcttatccgactccatcctgagg

SEQ ID NO: 495469 - DNA, 25 bp, Homo sapien
gatactaggtcttcaggtgcccttg

SEQ ID NO: 495470 - DNA, 25 bp, Homo sapien
gagaagaactccaaccacgaaggga

SEQ ID NO: 495471 - DNA, 25 bp, Homo sapien
cactcggtatgttgctcgtgggcct

SEQ ID NO: 495472 - DNA, 25 bp, Homo sapien
tccatcttgaaggaacggtccaccc

SEQ ID NO: 495473 - DNA, 25 bp, Homo sapien
cattgaataagcttcttcccggcca

SEQ ID NO: 495474 - DNA, 25 bp, Homo sapien
tgcctctggatgtaccatcagcctg

SEQ ID NO: 495475 - DNA, 25 bp, Homo sapien
ggcggacggacactcatgcgtgcat

SEQ ID NO: 495476 - DNA, 25 bp, Homo sapien
tgcccacatccctgcaagctgaaag

SEQ ID NO: 495477 - DNA, 25 bp, Homo sapien
tctcagagaagtcactccccagtgc

SEQ ID NO: 495478 - DNA, 25 bp, Homo sapien
gacttctcagagaagtcactcccca

SEQ ID NO: 495479 - DNA, 25 bp, Homo sapien
cttctcagagaagtcactccccagt

SEQ ID NO: 495480 - DNA, 25 bp, Homo sapien
tcaagacttctcagagaagtcactc

SEQ ID NO: 495481 - DNA, 25 bp, Homo sapien
ccaggtggcagtgtacgtgccctgc

SEQ ID NO: 495482 - DNA, 25 bp, Homo sapien
gtcgttttctggtgcccctcatacc

SEQ ID NO: 495483 - DNA, 25 bp, Homo sapien
cccaggtggcagtgtacgtgccctg

SEQ ID NO: 495484 - DNA, 25 bp, Homo sapien
aggcagagggtgaggtcctcggcca

SEQ ID NO: 495485 - DNA, 25 bp, Homo sapien
atggagccgagtgtgactgagggtg

SEQ ID NO: 495486 - DNA, 25 bp, Homo sapien
tgagcgggtggtgggaggctacgtc

SEQ ID NO: 495487 - DNA, 25 bp, Homo sapien
cgagtgtgactgagggtgagcgggt

SEQ ID NO: 495488 - DNA, 25 bp, Homo sapien
cttctgagagccaggccaaagcttc

SEQ ID NO: 495489 - DNA, 25 bp, Homo sapien
cctgccatggttctcaccaaggagc

SEQ ID NO: 495490 - DNA, 25 bp, Homo sapien
agccaggccaaagcttctgggccca

SEQ ID NO: 495491 - DNA, 25 bp, Homo sapien
tgcaccacattggaggccccggtgc

SEQ ID NO: 495492 - DNA, 25 bp, Homo sapien
cgcgcaggcggctcttcctgcacca

SEQ ID NO: 495493 - DNA, 25 bp, Homo sapien
ggaccttgggctctcgggcatcgct

SEQ ID NO: 495494 - DNA, 25 bp, Homo sapien
gtgtggccggtgatccccgcgtctc

SEQ ID NO: 495495 - DNA, 25 bp, Homo sapien
agtaaggccccgactgagcgtccgg

SEQ ID NO: 495496 - DNA, 25 bp, Homo sapien
atatcccgtagacccataatttggc

SEQ ID NO: 495497 - DNA, 25 bp, Homo sapien
ttatgaaaatatcccgtagacccat

SEQ ID NO: 495498 - DNA, 25 bp, Homo sapien
aagtgatgctggctattataatgta

SEQ ID NO: 495499 - DNA, 25 bp, Homo sapien
tgatgctggctattataatgtaaac

SEQ ID NO: 495500 - DNA, 25 bp, Homo sapien
cttgatggattaaagagatcctcct

SEQ ID NO: 495501 - DNA, 25 bp, Homo sapien
actgcagccttgatggattaaagag

SEQ ID NO: 495502 - DNA, 25 bp, Homo sapien
tgaaatgatgacagagtcacaggaa

SEQ ID NO: 495503 - DNA, 25 bp, Homo sapien
cacacctggttaattgttcatactc

SEQ ID NO: 495504 - DNA, 25 bp, Homo sapien
gaaccgacagatccagagggtctaa

SEQ ID NO: 495505 - DNA, 25 bp, Homo sapien
aaatctgctcccatggaaagaggcg

SEQ ID NO: 495506 - DNA, 25 bp, Homo sapien
cgttctgaaggttgacagtttccca

SEQ ID NO: 495507 - DNA, 25 bp, Homo sapien
tactaatcaggacttaagggccagt

SEQ ID NO: 495508 - DNA, 25 bp, Homo sapien
ctggaatcacggttctcggccggag

SEQ ID NO: 495509 - DNA, 25 bp, Homo sapien
cggttctcggccggagctcagtttc

SEQ ID NO: 495510 - DNA, 25 bp, Homo sapien
ggaatcacggttctcggccggagct

SEQ ID NO: 495511 - DNA, 25 bp, Homo sapien
aatcacggttctcggccggagctca

SEQ ID NO: 495512 - DNA, 25 bp, Homo sapien
cagatccaggaactttgggaacctc

SEQ ID NO: 495513 - DNA, 25 bp, Homo sapien
tccaggaactttgggaacctcgaga

SEQ ID NO: 495514 - DNA, 25 bp, Homo sapien
gatccaggaactttgggaacctcga

SEQ ID NO: 495515 - DNA, 25 bp, Homo sapien
ttgctggcagatccaggaactttgg

SEQ ID NO: 495516 - DNA, 25 bp, Homo sapien
catcccacaggtgagtgaagaaggt

SEQ ID NO: 495517 - DNA, 25 bp, Homo sapien
ggctcaccgggtccccatcccacag

SEQ ID NO: 495518 - DNA, 25 bp, Homo sapien
cccacaggtgagtgaagaaggtcat

SEQ ID NO: 495519 - DNA, 25 bp, Homo sapien
ctgctacctggctcaccgggtcccc

SEQ ID NO: 495520 - DNA, 25 bp, Homo sapien
tcaagaaatcgagaggcgcctctgc

SEQ ID NO: 495521 - DNA, 25 bp, Homo sapien
gtcaagaaatcgagaggcgcctctg

SEQ ID NO: 495522 - DNA, 25 bp, Homo sapien
acgtcccctgtcagtgggaagaagc

SEQ ID NO: 495523 - DNA, 25 bp, Homo sapien
attcccattcccactacgtcccctg

SEQ ID NO: 495524 - DNA, 25 bp, Homo sapien
ctacgtcccctgtcagtgggaagaa

SEQ ID NO: 495525 - DNA, 25 bp, Homo sapien
ccactacgtcccctgtcagtgggaa

SEQ ID NO: 495526 - DNA, 25 bp, Homo sapien
aatgatcattaagaatgggtacagc

SEQ ID NO: 495527 - DNA, 25 bp, Homo sapien
attaatgatcattaagaatgggtac

SEQ ID NO: 495528 - DNA, 25 bp, Homo sapien
gatcattaagaatgggtacagctgc

SEQ ID NO: 495529 - DNA, 25 bp, Homo sapien
gacattaatgatcattaagaatggg

SEQ ID NO: 495530 - DNA, 25 bp, Homo sapien
acatatcctcctgttttgaactgaa

SEQ ID NO: 495531 - DNA, 25 bp, Homo sapien
ctgaatggtatttcagtaggtgaac

SEQ ID NO: 495532 - DNA, 25 bp, Homo sapien
cagggggtctgtagtttccaccatc

SEQ ID NO: 495533 - DNA, 25 bp, Homo sapien
gcacatcttcggctcatgctgtgtt

SEQ ID NO: 495534 - DNA, 25 bp, Homo sapien
gtgtttctattggacggccctggcc

SEQ ID NO: 495535 - DNA, 25 bp, Homo sapien
ttttaatgtggccactagacaatga

SEQ ID NO: 495536 - DNA, 25 bp, Homo sapien
aaaatctcctggaccagaatttcat

SEQ ID NO: 495537 - DNA, 25 bp, Homo sapien
gaaattttgacctcaatgccaggag

SEQ ID NO: 495538 - DNA, 25 bp, Homo sapien
tcatggtaattctcagaaccaccag

SEQ ID NO: 495539 - DNA, 25 bp, Homo sapien
tctctaataattcatggtaattctc

SEQ ID NO: 495540 - DNA, 25 bp, Homo sapien
gaaccaccagcttgataattctcat

SEQ ID NO: 495541 - DNA, 25 bp, Homo sapien
acagctggacttgggaaggggtaat

SEQ ID NO: 495542 - DNA, 25 bp, Homo sapien
cagctggacttgggaaggggtaatt

SEQ ID NO: 495543 - DNA, 25 bp, Homo sapien
ttacagctggacttgggaaggggta

SEQ ID NO: 495544 - DNA, 25 bp, Homo sapien
tacagctggacttgggaaggggtaa

SEQ ID NO: 495545 - DNA, 25 bp, Homo sapien
tttactggaaacactcttctcactg

SEQ ID NO: 495546 - DNA, 25 bp, Homo sapien
tgtggcccacgataattctcagaag

SEQ ID NO: 495547 - DNA, 25 bp, Homo sapien
catggagatttgcattagcattggc

SEQ ID NO: 495548 - DNA, 25 bp, Homo sapien
ttctcagaaggatcgccatggagat

SEQ ID NO: 495549 - DNA, 25 bp, Homo sapien
atggggggatatggatgtaccgaga

SEQ ID NO: 495550 - DNA, 25 bp, Homo sapien
ctagggtcggcatggagggtgcact

SEQ ID NO: 495551 - DNA, 25 bp, Homo sapien
gggatatggatgtaccgagaaatac

SEQ ID NO: 495552 - DNA, 25 bp, Homo sapien
gggtcggcatggagggtgcactctc

SEQ ID NO: 495553 - DNA, 25 bp, Homo sapien
catactgagtgttctttgaattctt

SEQ ID NO: 495554 - DNA, 25 bp, Homo sapien
gaatccccaaatgagaagacactta

SEQ ID NO: 495555 - DNA, 25 bp, Homo sapien
aaagaatccccaaatgagaagacac

SEQ ID NO: 495556 - DNA, 25 bp, Homo sapien
tgtcccttgagcaggaaaagaatcc

SEQ ID NO: 495557 - DNA, 25 bp, Homo sapien
cacttatctattatttccaatctac

SEQ ID NO: 495558 - DNA, 25 bp, Homo sapien
tgctggtgacgtacaggagcttcat

SEQ ID NO: 495559 - DNA, 25 bp, Homo sapien
gtgctggtgacgtacaggagcttca

SEQ ID NO: 495560 - DNA, 25 bp, Homo sapien
tggtcctctgctgctctttatggaa

SEQ ID NO: 495561 - DNA, 25 bp, Homo sapien
tgctgctctttatggaaaatgtttc

SEQ ID NO: 495562 - DNA, 25 bp, Homo sapien
gctcctcctctgtgcgctggtcctc

SEQ ID NO: 495563 - DNA, 25 bp, Homo sapien
tcctctgtgcgctggtcctctgctg

SEQ ID NO: 495564 - DNA, 25 bp, Homo sapien
ttcagagaacgtgggcgtgtgcaca

SEQ ID NO: 495565 - DNA, 25 bp, Homo sapien
cctttatgtggaatggttcagagaa

SEQ ID NO: 495566 - DNA, 25 bp, Homo sapien
tgtgaataaacgattttcctttatg

SEQ ID NO: 495567 - DNA, 25 bp, Homo sapien
cacaagtgccctgttccggaggctg

SEQ ID NO: 495568 - DNA, 25 bp, Homo sapien
tctggagacccaacgtgttcccgtg

SEQ ID NO: 495569 - DNA, 25 bp, Homo sapien
gcagggcgtgcttgagccttgcaca

SEQ ID NO: 495570 - DNA, 25 bp, Homo sapien
ggcacatctttaacacccctgtaag

SEQ ID NO: 495571 - DNA, 25 bp, Homo sapien
gactcttgtcttaagcctcctggga

SEQ ID NO: 495572 - DNA, 25 bp, Homo sapien
aagtgtgggacagagcacaaacatc

SEQ ID NO: 495573 - DNA, 25 bp, Homo sapien
aatgattatccaaagctaaagagag

SEQ ID NO: 495574 - DNA, 25 bp, Homo sapien
aatatcaccataaaccctagacagg

SEQ ID NO: 495575 - DNA, 25 bp, Homo sapien
catcaaacatgcgtaattggaggag

SEQ ID NO: 495576 - DNA, 25 bp, Homo sapien
ataaaggtgaggagggcgccaaaca

SEQ ID NO: 495577 - DNA, 25 bp, Homo sapien
gggcttgggcctgcgcggttttgga

SEQ ID NO: 495578 - DNA, 25 bp, Homo sapien
cttggagccaaagccacgcaaggac

SEQ ID NO: 495579 - DNA, 25 bp, Homo sapien
aaacatcgatagcagaagtccttgg

SEQ ID NO: 495580 - DNA, 25 bp, Homo sapien
tgtgagcagcgtctccttgggcaga

SEQ ID NO: 495581 - DNA, 25 bp, Homo sapien
tacggcagtgcacacggtagggctt

SEQ ID NO: 495582 - DNA, 25 bp, Homo sapien
tgacctcaagtgtgcctgaacgtgc

SEQ ID NO: 495583 - DNA, 25 bp, Homo sapien
ccatgggactgcctgggaccatttc

SEQ ID NO: 495584 - DNA, 25 bp, Homo sapien
cactctcatggcctctggtgcagcc

SEQ ID NO: 495585 - DNA, 25 bp, Homo sapien
tagattgtagtgtctgtcgccgagc

SEQ ID NO: 495586 - DNA, 25 bp, Homo sapien
ttgtagccactgtcgccaaatgggc

SEQ ID NO: 495587 - DNA, 25 bp, Homo sapien
tagattgtagcctctgtcaccgagg

SEQ ID NO: 495588 - DNA, 25 bp, Homo sapien
ccagagttgcgagcgatcatagcca

SEQ ID NO: 495589 - DNA, 25 bp, Homo sapien
cgccagtcccgggacatggagtcac

SEQ ID NO: 495590 - DNA, 25 bp, Homo sapien
ggagtcacaccttggaggagattca

SEQ ID NO: 495591 - DNA, 25 bp, Homo sapien
tccggagcgcggatcgtgccaatcg

SEQ ID NO: 495592 - DNA, 25 bp, Homo sapien
ctgtgtcatcagctggcgcgcaggt

SEQ ID NO: 495593 - DNA, 25 bp, Homo sapien
cggccagtgtgtagctgcatggtgt

SEQ ID NO: 495594 - DNA, 25 bp, Homo sapien
gcatggcctctcagtggccagcatg

SEQ ID NO: 495595 - DNA, 25 bp, Homo sapien
agctgtcagcccttgggtgtcaccc

SEQ ID NO: 495596 - DNA, 25 bp, Homo sapien
cagtgtgtagctgcatggtgtttct

SEQ ID NO: 495597 - DNA, 25 bp, Homo sapien
gaagctgcaaatgaaccggcagcag

SEQ ID NO: 495598 - DNA, 25 bp, Homo sapien
tctgtgatgccaccgccgggatggc

SEQ ID NO: 495599 - DNA, 25 bp, Homo sapien
ttttctgcagaaccgcatctgggcc

SEQ ID NO: 495600 - DNA, 25 bp, Homo sapien
tttggtgttccagagacctgaagcg

SEQ ID NO: 495601 - DNA, 25 bp, Homo sapien
caacattaggctgtaggcgtcacgc

SEQ ID NO: 495602 - DNA, 25 bp, Homo sapien
attgtgaagtcaagcgaccgcggcg

SEQ ID NO: 495603 - DNA, 25 bp, Homo sapien
ggcatctgggcggtccttctctgat

SEQ ID NO: 495604 - DNA, 25 bp, Homo sapien
gcagttttgtgatcggcattggcct

SEQ ID NO: 495605 - DNA, 25 bp, Homo sapien
gcattggaaagaaatcgacatggat

SEQ ID NO: 495606 - DNA, 25 bp, Homo sapien
tatatactactgaccaagatgttgg

SEQ ID NO: 495607 - DNA, 25 bp, Homo sapien
cagcgtgtaaataggagtgacgaga

SEQ ID NO: 495608 - DNA, 25 bp, Homo sapien
caaataccgcgaatgcatcagctaa

SEQ ID NO: 495609 - DNA, 25 bp, Homo sapien
gttgcactgctagacacgaaattcc

SEQ ID NO: 495610 - DNA, 25 bp, Homo sapien
ttactgacgaccagctctgacgaga

SEQ ID NO: 495611 - DNA, 25 bp, Homo sapien
gaaattcccattgacgtcctgcagg

SEQ ID NO: 495612 - DNA, 25 bp, Homo sapien
gagcattacaaagccagggagccca

SEQ ID NO: 495613 - DNA, 25 bp, Homo sapien
cttgaaataagtgctcccgtaaggc

SEQ ID NO: 495614 - DNA, 25 bp, Homo sapien
tccaagaatagaaccctccctgtta

SEQ ID NO: 495615 - DNA, 25 bp, Homo sapien
taagatagtaacctgatgccaaaac

SEQ ID NO: 495616 - DNA, 25 bp, Homo sapien
cctagtctcccttgtaaacgtggat

SEQ ID NO: 495617 - DNA, 25 bp, Homo sapien
gccatgggtctgctatgtttagtac

SEQ ID NO: 495618 - DNA, 25 bp, Homo sapien
ctttatctctgtgggtttgagctca

SEQ ID NO: 495619 - DNA, 25 bp, Homo sapien
tgggcatataccacctaccggttta

SEQ ID NO: 495620 - DNA, 25 bp, Homo sapien
cacgtacctagggtctgagattaga

SEQ ID NO: 495621 - DNA, 25 bp, Homo sapien
tatatggtagaagctcgggctggca

SEQ ID NO: 495622 - DNA, 25 bp, Homo sapien
tgtggtccttggttatggctcccca

SEQ ID NO: 495623 - DNA, 25 bp, Homo sapien
cagaactcgtttgtagggtgcgcca

SEQ ID NO: 495624 - DNA, 25 bp, Homo sapien
aatacgactgaagacccttgcggcc

SEQ ID NO: 495625 - DNA, 25 bp, Homo sapien
tccgttaaaatggcgccctggtggc

SEQ ID NO: 495626 - DNA, 25 bp, Homo sapien
cggaccagaagtcgccgaacgttct

SEQ ID NO: 495627 - DNA, 25 bp, Homo sapien
ttagcctgtcaggagcagggagctt

SEQ ID NO: 495628 - DNA, 25 bp, Homo sapien
cgaggatggcgaccccggaccagaa

SEQ ID NO: 495629 - DNA, 25 bp, Homo sapien
ccatttcataggatctcgggatctc

SEQ ID NO: 495630 - DNA, 25 bp, Homo sapien
gaagttggccttttaacatggtagc

SEQ ID NO: 495631 - DNA, 25 bp, Homo sapien
tcccaagcgtgcacccatgtgtaag

SEQ ID NO: 495632 - DNA, 25 bp, Homo sapien
taacgattgcactgaagttggcttg

SEQ ID NO: 495633 - DNA, 25 bp, Homo sapien
cacctaacgagtgttgtcctgtaat

SEQ ID NO: 495634 - DNA, 25 bp, Homo sapien
ccaagcctactgcaagaagatgttt

SEQ ID NO: 495635 - DNA, 25 bp, Homo sapien
tgtaatttactagcacaggcccaag

SEQ ID NO: 495636 - DNA, 25 bp, Homo sapien
gggtttgtctagatacaggcctggt

SEQ ID NO: 495637 - DNA, 25 bp, Homo sapien
taggtcactgtttgccattcggatc

SEQ ID NO: 495638 - DNA, 25 bp, Homo sapien
tttggaatttagataaagtctctct

SEQ ID NO: 495639 - DNA, 25 bp, Homo sapien
gcaatctccgcctactagtttcaaa

SEQ ID NO: 495640 - DNA, 25 bp, Homo sapien
attgcaggcacgcggcagcatgcct

SEQ ID NO: 495641 - DNA, 25 bp, Homo sapien
ttttcttatgatgtgtttgcctggc

SEQ ID NO: 495642 - DNA, 25 bp, Homo sapien
ctttgtgggcatgtagttaactata

SEQ ID NO: 495643 - DNA, 25 bp, Homo sapien
cattcctcagataaaccccacttgg

SEQ ID NO: 495644 - DNA, 25 bp, Homo sapien
tggctttcagatgttagcccaacct

SEQ ID NO: 495645 - DNA, 25 bp, Homo sapien
gatccctaagcaaccttaagagccc

SEQ ID NO: 495646 - DNA, 25 bp, Homo sapien
taaactgctgttaaggtcacacgtt

SEQ ID NO: 495647 - DNA, 25 bp, Homo sapien
taagagcccattagtcaggctgaca

SEQ ID NO: 495648 - DNA, 25 bp, Homo sapien
gggcactagcaatcctgcacaccat

SEQ ID NO: 495649 - DNA, 25 bp, Homo sapien
tgaccgcggcgataactctgaggcc

SEQ ID NO: 495650 - DNA, 25 bp, Homo sapien
gtgattgtaagatcccggcacctgg

SEQ ID NO: 495651 - DNA, 25 bp, Homo sapien
gggctggccaccaactgcatggaaa

SEQ ID NO: 495652 - DNA, 25 bp, Homo sapien
tctgacaggtcgatgctcttttcaa

SEQ ID NO: 495653 - DNA, 25 bp, Homo sapien
cagacgaccaattgctatggtcatt

SEQ ID NO: 495654 - DNA, 25 bp, Homo sapien
gaggaagcgagaaaaatactgccag

SEQ ID NO: 495655 - DNA, 25 bp, Homo sapien
tccaggcacggaggaagcgagaaaa

SEQ ID NO: 495656 - DNA, 25 bp, Homo sapien
gagaaaaatactgccagacgaccaa

SEQ ID NO: 495657 - DNA, 25 bp, Homo sapien
caaaagcgcagatttacggaagcaa

SEQ ID NO: 495658 - DNA, 25 bp, Homo sapien
gaattcgggacttgtctagctgcag

SEQ ID NO: 495659 - DNA, 25 bp, Homo sapien
ggaaagacgtacatgggccccataa

SEQ ID NO: 495660 - DNA, 25 bp, Homo sapien
aaccttgttaggcagctgtctgagc

SEQ ID NO: 495661 - DNA, 25 bp, Homo sapien
aagcccctcgggtcgtccagctggg

SEQ ID NO: 495662 - DNA, 25 bp, Homo sapien
agctggggccatgcataggcgccca

SEQ ID NO: 495663 - DNA, 25 bp, Homo sapien
ggccaagcccctcgggtcgtccagc

SEQ ID NO: 495664 - DNA, 25 bp, Homo sapien
catgcataggcgcccagcgtgcagt

SEQ ID NO: 495665 - DNA, 25 bp, Homo sapien
caagaatggcattgctgactcctgc

SEQ ID NO: 495666 - DNA, 25 bp, Homo sapien
gacatccaggatacctgggctatca

SEQ ID NO: 495667 - DNA, 25 bp, Homo sapien
taagccgaggattggagtctgaact

SEQ ID NO: 495668 - DNA, 25 bp, Homo sapien
aacgtgaaggagtctcctgttctca

SEQ ID NO: 495669 - DNA, 25 bp, Homo sapien
tcggcggggtcaatctgctctctga

SEQ ID NO: 495670 - DNA, 25 bp, Homo sapien
agcccttgctagtcctgcagccggg

SEQ ID NO: 495671 - DNA, 25 bp, Homo sapien
agttcctcagctgcaccccttggag

SEQ ID NO: 495672 - DNA, 25 bp, Homo sapien
cgagggcattggctgtcatccccat

SEQ ID NO: 495673 - DNA, 25 bp, Homo sapien
tgctgctcgctggagtaaaaaccgt

SEQ ID NO: 495674 - DNA, 25 bp, Homo sapien
gccacctttttaagggtgatgctgc

SEQ ID NO: 495675 - DNA, 25 bp, Homo sapien
tgaaataatgacacctcgagccctg

SEQ ID NO: 495676 - DNA, 25 bp, Homo sapien
cgactgacagaagcacgttgggctg

SEQ ID NO: 495677 - DNA, 25 bp, Homo sapien
tgggctggcctgcttttactcccgt

SEQ ID NO: 495678 - DNA, 25 bp, Homo sapien
ttttcttccagcgcccgatgggctg

SEQ ID NO: 495679 - DNA, 25 bp, Homo sapien
cctgcttttactcccgtgtagacgc

SEQ ID NO: 495680 - DNA, 25 bp, Homo sapien
gctggcctgcttttactcccgtgta

SEQ ID NO: 495681 - DNA, 25 bp, Homo sapien
gtttgggcaccacttgagcagactg

SEQ ID NO: 495682 - DNA, 25 bp, Homo sapien
caaaaccctgatggcgttgaagcaa

SEQ ID NO: 495683 - DNA, 25 bp, Homo sapien
gaagcggaaacgtggacatgacact

SEQ ID NO: 495684 - DNA, 25 bp, Homo sapien
cctgggttcctacgaagtggacaca

SEQ ID NO: 495685 - DNA, 25 bp, Homo sapien
ctagtatccctttgtaccactgtac

SEQ ID NO: 495686 - DNA, 25 bp, Homo sapien
tgaggactctaccaaaacacgaact

SEQ ID NO: 495687 - DNA, 25 bp, Homo sapien
cactgatatatatccctgaggactc

SEQ ID NO: 495688 - DNA, 25 bp, Homo sapien
tgcctgtcctaaacagaaagcattt

SEQ ID NO: 495689 - DNA, 25 bp, Homo sapien
gagatgggcctcaaaccttggttca

SEQ ID NO: 495690 - DNA, 25 bp, Homo sapien
gaaacaaccttctgattgggaatgg

SEQ ID NO: 495691 - DNA, 25 bp, Homo sapien
gatgcacggatattcaggaccacct

SEQ ID NO: 495692 - DNA, 25 bp, Homo sapien
gaggctcccgtcttctttgtaggta

SEQ ID NO: 495693 - DNA, 25 bp, Homo sapien
ggctcatcacgggattcatcacggg

SEQ ID NO: 495694 - DNA, 25 bp, Homo sapien
gacaccctgggtaagagtctctgca

SEQ ID NO: 495695 - DNA, 25 bp, Homo sapien
caggcacgtgtatctttcagaggct

SEQ ID NO: 495696 - DNA, 25 bp, Homo sapien
tcaggcaaccttgtggctggtccca

SEQ ID NO: 495697 - DNA, 25 bp, Homo sapien
ttaccgataaagtaatgaaagcaat

SEQ ID NO: 495698 - DNA, 25 bp, Homo sapien
tctgaacagtaactttaatatagac

SEQ ID NO: 495699 - DNA, 25 bp, Homo sapien
aatcatctgtctgaacagtaacttt

SEQ ID NO: 495700 - DNA, 25 bp, Homo sapien
taccgataaagtaatgaaagcaatt

SEQ ID NO: 495701 - DNA, 25 bp, Homo sapien
tgaaaactttcaccgcatcccggga

SEQ ID NO: 495702 - DNA, 25 bp, Homo sapien
tgagaaaactttcacggcatctggg

SEQ ID NO: 495703 - DNA, 25 bp, Homo sapien
caagagtggtagatgcgtcatggcc

SEQ ID NO: 495704 - DNA, 25 bp, Homo sapien
cagacaatgctggtgtgagctccgc

SEQ ID NO: 495705 - DNA, 25 bp, Homo sapien
tccggggtactagtgcggccgcgcc

SEQ ID NO: 495706 - DNA, 25 bp, Homo sapien
ccgctccggtcacggcctcggcgcg

SEQ ID NO: 495707 - DNA, 25 bp, Homo sapien
gctcccgctccgccgttcagcgccc

SEQ ID NO: 495708 - DNA, 25 bp, Homo sapien
tcggcgcgcccatgggctccggggt

SEQ ID NO: 495709 - DNA, 25 bp, Homo sapien
gtatctgtgcacgagcgtccgcacg

SEQ ID NO: 495710 - DNA, 25 bp, Homo sapien
acgagcgtccgcacgaggctgcagt

SEQ ID NO: 495711 - DNA, 25 bp, Homo sapien
atctgtgcacgagcgtccgcacgag

SEQ ID NO: 495712 - DNA, 25 bp, Homo sapien
tgtgcacgagcgtccgcacgaggct

SEQ ID NO: 495713 - DNA, 25 bp, Homo sapien
ccagtgagggagtaacacaaggctc

SEQ ID NO: 495714 - DNA, 25 bp, Homo sapien
aataaggtgtctagggacccacact

SEQ ID NO: 495715 - DNA, 25 bp, Homo sapien
acacttctgagcgacacaactgaga

SEQ ID NO: 495716 - DNA, 25 bp, Homo sapien
aacggaatgaactgggaacaccgcg

SEQ ID NO: 495717 - DNA, 25 bp, Homo sapien
ccagagggatgggacttgggtctct

SEQ ID NO: 495718 - DNA, 25 bp, Homo sapien
cattccaagggggccccagagggat

SEQ ID NO: 495719 - DNA, 25 bp, Homo sapien
tgtggtggtttcctgttcgcctccc

SEQ ID NO: 495720 - DNA, 25 bp, Homo sapien
tctctgtccttcccggctcactggc

SEQ ID NO: 495721 - DNA, 25 bp, Homo sapien
gggcgttcactcacccttcacaggg

SEQ ID NO: 495722 - DNA, 25 bp, Homo sapien
gaacctgctgtctaagctcggacgc

SEQ ID NO: 495723 - DNA, 25 bp, Homo sapien
gtgccaatgagacctggctgccctg

SEQ ID NO: 495724 - DNA, 25 bp, Homo sapien
tgccctgtcacaggatggcacagtg

SEQ ID NO: 495725 - DNA, 25 bp, Homo sapien
agagacaggatttctccacattggc

SEQ ID NO: 495726 - DNA, 25 bp, Homo sapien
gagacaggatttctccacattggcc

SEQ ID NO: 495727 - DNA, 25 bp, Homo sapien
agacaggatttctccacattggcca

SEQ ID NO: 495728 - DNA, 25 bp, Homo sapien
gacaggatttctccacattggccag

SEQ ID NO: 495729 - DNA, 25 bp, Homo sapien
gatgagatcatgaggtctgtgtcct

SEQ ID NO: 495730 - DNA, 25 bp, Homo sapien
tagatgagatcatgaggtctgtgtc

SEQ ID NO: 495731 - DNA, 25 bp, Homo sapien
atgagatcatgaggtctgtgtccta

SEQ ID NO: 495732 - DNA, 25 bp, Homo sapien
gattagatgagatcatgaggtctgt

SEQ ID NO: 495733 - DNA, 25 bp, Homo sapien
taaaacactattgaaaagcaacaca

SEQ ID NO: 495734 - DNA, 25 bp, Homo sapien
gggcagtcgacacctgcttaggtct

SEQ ID NO: 495735 - DNA, 25 bp, Homo sapien
gcttaggtctcagactaggcctctg

SEQ ID NO: 495736 - DNA, 25 bp, Homo sapien
catacattctgtattgtgagcaaga

SEQ ID NO: 495737 - DNA, 25 bp, Homo sapien
cacttaggaaaaagccatggaacca

SEQ ID NO: 495738 - DNA, 25 bp, Homo sapien
tatgaagtgcaaatgagtcctcaca

SEQ ID NO: 495739 - DNA, 25 bp, Homo sapien
gcaattagcagaaccgagctcctgg

SEQ ID NO: 495740 - DNA, 25 bp, Homo sapien
cggtccatcctgcatttaaacgtaa

SEQ ID NO: 495741 - DNA, 25 bp, Homo sapien
ggtttgcctgatttacaagcagtgc

SEQ ID NO: 495742 - DNA, 25 bp, Homo sapien
aacatgtaccacaagagtacccggg

SEQ ID NO: 495743 - DNA, 25 bp, Homo sapien
aaaagaatcccacacgccctcttga

SEQ ID NO: 495744 - DNA, 25 bp, Homo sapien
gaacaaccctctcagcttggaggta

SEQ ID NO: 495745 - DNA, 25 bp, Homo sapien
ggtctttatgaccacggcagctcag

SEQ ID NO: 495746 - DNA, 25 bp, Homo sapien
tttaggctgtcaaaagtcacccatg

SEQ ID NO: 495747 - DNA, 25 bp, Homo sapien
tcaagggtcaattccaggctacaga

SEQ ID NO: 495748 - DNA, 25 bp, Homo sapien
tggagctatttcaacccgaggcaaa

SEQ ID NO: 495749 - DNA, 25 bp, Homo sapien
aaacgacacggctgctatggagaca

SEQ ID NO: 495750 - DNA, 25 bp, Homo sapien
tggagttccgctgcacgacaatgtg

SEQ ID NO: 495751 - DNA, 25 bp, Homo sapien
tatatagctgtgaggaggaacacct

SEQ ID NO: 495752 - DNA, 25 bp, Homo sapien
gagatactacctacacggagcagga

SEQ ID NO: 495753 - DNA, 25 bp, Homo sapien
tgggagccgctctgagtgccgtttc

SEQ ID NO: 495754 - DNA, 25 bp, Homo sapien
agccgctctgagtgccgtttccgtg

SEQ ID NO: 495755 - DNA, 25 bp, Homo sapien
ggagccgctctgattgatgcttccc

SEQ ID NO: 495756 - DNA, 25 bp, Homo sapien
ttctgggagccgctctgagtgccgt

SEQ ID NO: 495757 - DNA, 25 bp, Homo sapien
cctgagagtccctgattaaaatagt

SEQ ID NO: 495758 - DNA, 25 bp, Homo sapien
cgtcttttgtgagtgggtgcagcac

SEQ ID NO: 495759 - DNA, 25 bp, Homo sapien
gaatgggatctgtgttcctctaaag

SEQ ID NO: 495760 - DNA, 25 bp, Homo sapien
gaaatgagccgcaactgtgatctgg

SEQ ID NO: 495761 - DNA, 25 bp, Homo sapien
tgaaaatctccgaggaagtgaaaac

SEQ ID NO: 495762 - DNA, 25 bp, Homo sapien
ctgtcccagctgaagcacagcggct

SEQ ID NO: 495763 - DNA, 25 bp, Homo sapien
tggggtattgctgccctgtcccagc

SEQ ID NO: 495764 - DNA, 25 bp, Homo sapien
aaaagtcattcctagatgtcagaag

SEQ ID NO: 495765 - DNA, 25 bp, Homo sapien
gatcctgttgtctgggtatctctgt

SEQ ID NO: 495766 - DNA, 25 bp, Homo sapien
cttggacgagacgatcctgttgtct

SEQ ID NO: 495767 - DNA, 25 bp, Homo sapien
ctccctgtgtcccacgtagatggtc

SEQ ID NO: 495768 - DNA, 25 bp, Homo sapien
tgtcccacgtagatggtcctgctgt

SEQ ID NO: 495769 - DNA, 25 bp, Homo sapien
aatggcaccgtatgtggacacctgg

SEQ ID NO: 495770 - DNA, 25 bp, Homo sapien
cgcaggctgagttctaagcagtatg

SEQ ID NO: 495771 - DNA, 25 bp, Homo sapien
tgtaagtattaccactgcagagaca

SEQ ID NO: 495772 - DNA, 25 bp, Homo sapien
gcctgagactgcgtcgactttgtaa

SEQ ID NO: 495773 - DNA, 25 bp, Homo sapien
gcgaagatctcaatgcatgggcgga

SEQ ID NO: 495774 - DNA, 25 bp, Homo sapien
caggctcgagaattccactttggtt

SEQ ID NO: 495775 - DNA, 25 bp, Homo sapien
tccattagcaaaagaggtattgccg

SEQ ID NO: 495776 - DNA, 25 bp, Homo sapien
caaggttactgtcaggccagctacc

SEQ ID NO: 495777 - DNA, 25 bp, Homo sapien
cacccatctgcttgggacaagcagc

SEQ ID NO: 495778 - DNA, 25 bp, Homo sapien
gacacccatctgcttgggacaagca

SEQ ID NO: 495779 - DNA, 25 bp, Homo sapien
ggcggggacgccggacacccatctg

SEQ ID NO: 495780 - DNA, 25 bp, Homo sapien
cggacacccatctgcttgggacaag

SEQ ID NO: 495781 - DNA, 25 bp, Homo sapien
tacaaatccccgatgtggctagggc

SEQ ID NO: 495782 - DNA, 25 bp, Homo sapien
tttgcacaccacgtcagtctctgag

SEQ ID NO: 495783 - DNA, 25 bp, Homo sapien
gacatctgtgggaggccatccttct

SEQ ID NO: 495784 - DNA, 25 bp, Homo sapien
tgaagccagtcgtagctcggacagt

SEQ ID NO: 495785 - DNA, 25 bp, Homo sapien
tactggcaatgaattcgctcaattt

SEQ ID NO: 495786 - DNA, 25 bp, Homo sapien
tgaattcgctcaatttttgtttgcc

SEQ ID NO: 495787 - DNA, 25 bp, Homo sapien
gcaatgaattcgctcaatttttgtt

SEQ ID NO: 495788 - DNA, 25 bp, Homo sapien
attcttacccttgtttctcagcagg

SEQ ID NO: 495789 - DNA, 25 bp, Homo sapien
tgttaccagtagtgatgcccctcct

SEQ ID NO: 495790 - DNA, 25 bp, Homo sapien
gcatacctaggataaacccacttgg

SEQ ID NO: 495791 - DNA, 25 bp, Homo sapien
ttttaattgatgtaggcccacccag

SEQ ID NO: 495792 - DNA, 25 bp, Homo sapien
ccaagctaagcctgtgacctgcaca

SEQ ID NO: 495793 - DNA, 25 bp, Homo sapien
caactaaagcctggtatggtcctaa

SEQ ID NO: 495794 - DNA, 25 bp, Homo sapien
ccattcgaaggtgggttctggctcc

SEQ ID NO: 495795 - DNA, 25 bp, Homo sapien
cagtctaccgaaacctgaagaaggt

SEQ ID NO: 495796 - DNA, 25 bp, Homo sapien
ttttacgccgtaatgaagacagtct

SEQ ID NO: 495797 - DNA, 25 bp, Homo sapien
gaggcaggcgtgtttcttgtccaca

SEQ ID NO: 495798 - DNA, 25 bp, Homo sapien
tgacagcgagctgaatggaagcctt

SEQ ID NO: 495799 - DNA, 25 bp, Homo sapien
aaaacgcaaggtagctcaacaatag

SEQ ID NO: 495800 - DNA, 25 bp, Homo sapien
tctagggcatagtaagtagcactgg

SEQ ID NO: 495801 - DNA, 25 bp, Homo sapien
ataaaagttggctactcttctgaat

SEQ ID NO: 495802 - DNA, 25 bp, Homo sapien
gcaccagaaatatgataaggaaata

SEQ ID NO: 495803 - DNA, 25 bp, Homo sapien
tggctactcttctgaattgttcaaa

SEQ ID NO: 495804 - DNA, 25 bp, Homo sapien
agttggctactcttctgaattgttc

SEQ ID NO: 495805 - DNA, 25 bp, Homo sapien
caggaaaggctgtcaccaacttaaa

SEQ ID NO: 495806 - DNA, 25 bp, Homo sapien
gaagagtaaattaagtgtaacgatg

SEQ ID NO: 495807 - DNA, 25 bp, Homo sapien
agtgaacttgtccaaatgatgacaa

SEQ ID NO: 495808 - DNA, 25 bp, Homo sapien
taagtgtaacgatgcatagcttggc

SEQ ID NO: 495809 - DNA, 25 bp, Homo sapien
gaacttgtccaaatgatgacaaagc

SEQ ID NO: 495810 - DNA, 25 bp, Homo sapien
ctggattttctttagagcatccaca

SEQ ID NO: 495811 - DNA, 25 bp, Homo sapien
gcccggcctggattttctttagagc

SEQ ID NO: 495812 - DNA, 25 bp, Homo sapien
gcctggattttctttagagcatcca

SEQ ID NO: 495813 - DNA, 25 bp, Homo sapien
gattttctttagagcatccacacac

SEQ ID NO: 495814 - DNA, 25 bp, Homo sapien
gccgtcacagtaatgacaaagaaga

SEQ ID NO: 495815 - DNA, 25 bp, Homo sapien
caaagaagagtggaagtccgcttgt

SEQ ID NO: 495816 - DNA, 25 bp, Homo sapien
tccgcttgtcactggacttgtgggt

SEQ ID NO: 495817 - DNA, 25 bp, Homo sapien
agtggaagtccgcttgtcactggac

SEQ ID NO: 495818 - DNA, 25 bp, Homo sapien
ccaccgcatctaatgagtgtcgaaa

SEQ ID NO: 495819 - DNA, 25 bp, Homo sapien
cacgggcccactgcatgtgtgctga

SEQ ID NO: 495820 - DNA, 25 bp, Homo sapien
aacacacaaccacgcaggatggcag

SEQ ID NO: 495821 - DNA, 25 bp, Homo sapien
agtgtcgaaattggaaacacagctc

SEQ ID NO: 495822 - DNA, 25 bp, Homo sapien
cgcagctttcgactttgtttccgaa

SEQ ID NO: 495823 - DNA, 25 bp, Homo sapien
cattgtctgctttatgtcgaagcca

SEQ ID NO: 495824 - DNA, 25 bp, Homo sapien
gagcttgccgtgctgaatgaaatga

SEQ ID NO: 495825 - DNA, 25 bp, Homo sapien
caggacactggttcatggcattgtc

SEQ ID NO: 495826 - DNA, 25 bp, Homo sapien
tctccccggttgctggaaaggaaga

SEQ ID NO: 495827 - DNA, 25 bp, Homo sapien
tcaagtcgcagggaaaggtctcgtc

SEQ ID NO: 495828 - DNA, 25 bp, Homo sapien
tggtgacgtggcacgtcccatctcc

SEQ ID NO: 495829 - DNA, 25 bp, Homo sapien
gtctcgtcctccttaaccatgacaa

SEQ ID NO: 495830 - DNA, 25 bp, Homo sapien
tggtggcgtgaagtccgccgatatc

SEQ ID NO: 495831 - DNA, 25 bp, Homo sapien
agtccgccgatatcctcctctgtgt

SEQ ID NO: 495832 - DNA, 25 bp, Homo sapien
tggtgtcctggaccgcgtaatgcgt

SEQ ID NO: 495833 - DNA, 25 bp, Homo sapien
ggctgctcacactcgatggtggcgt

SEQ ID NO: 495834 - DNA, 25 bp, Homo sapien
tcattcaggtcactgtaaacgttga

SEQ ID NO: 495835 - DNA, 25 bp, Homo sapien
tgtaaacgttgatgcgacccacgaa

SEQ ID NO: 495836 - DNA, 25 bp, Homo sapien
cactgtaaacgttgatgcgacccac

SEQ ID NO: 495837 - DNA, 25 bp, Homo sapien
caggtcactgtaaacgttgatgcga

SEQ ID NO: 495838 - DNA, 25 bp, Homo sapien
tttgaaactgctccacgggaccctg

SEQ ID NO: 495839 - DNA, 25 bp, Homo sapien
tgtgagacgaccctctcggcagagt

SEQ ID NO: 495840 - DNA, 25 bp, Homo sapien
tcggcagagtcttgcgcgaaaactt

SEQ ID NO: 495841 - DNA, 25 bp, Homo sapien
gaaaacttgtttcacgagcatcact

SEQ ID NO: 495842 - DNA, 25 bp, Homo sapien
cagtgtagctcctctaagcagcagg

SEQ ID NO: 495843 - DNA, 25 bp, Homo sapien
agtgtagctcctctaagcagcaggt

SEQ ID NO: 495844 - DNA, 25 bp, Homo sapien
tcagtgtagctcctctaagcagcag

SEQ ID NO: 495845 - DNA, 25 bp, Homo sapien
ttcagtgtagctcctctaagcagca

SEQ ID NO: 495846 - DNA, 25 bp, Homo sapien
tccattcccgtgtaaatagccacac

SEQ ID NO: 495847 - DNA, 25 bp, Homo sapien
ttttccacggcagatcgcttctgag

SEQ ID NO: 495848 - DNA, 25 bp, Homo sapien
gtttccattcccgtgtaaatagcca

SEQ ID NO: 495849 - DNA, 25 bp, Homo sapien
cacggcagatcgcttctgagatttt

SEQ ID NO: 495850 - DNA, 25 bp, Homo sapien
tcactctgccacatgtatttcagca

SEQ ID NO: 495851 - DNA, 25 bp, Homo sapien
gagatacacaatgaggaacgcattc

SEQ ID NO: 495852 - DNA, 25 bp, Homo sapien
gctcatcccgaaagggctcactctg

SEQ ID NO: 495853 - DNA, 25 bp, Homo sapien
tctgattataccacggctcatcccg

SEQ ID NO: 495854 - DNA, 25 bp, Homo sapien
caaacatgtcttcgtcccaggtgat

SEQ ID NO: 495855 - DNA, 25 bp, Homo sapien
tcgaccgtgacgtacatggacacag

SEQ ID NO: 495856 - DNA, 25 bp, Homo sapien
tgaggtccgacgtgttcaccagagg

SEQ ID NO: 495857 - DNA, 25 bp, Homo sapien
gccaggaagtccgtgaatgccttga

SEQ ID NO: 495858 - DNA, 25 bp, Homo sapien
acacagacgcttgactggtgggtga

SEQ ID NO: 495859 - DNA, 25 bp, Homo sapien
ctgttgtggacacagacgcttgact

SEQ ID NO: 495860 - DNA, 25 bp, Homo sapien
cgaagtgcttctggcacaggatctc

SEQ ID NO: 495861 - DNA, 25 bp, Homo sapien
ggtgcacgaagtgcttctggcacag

SEQ ID NO: 495862 - DNA, 25 bp, Homo sapien
gattcctgacgactctgggaggacc

SEQ ID NO: 495863 - DNA, 25 bp, Homo sapien
tggccttcgatgcagcactccttga

SEQ ID NO: 495864 - DNA, 25 bp, Homo sapien
gacctgcccgttgcagatgacgtgg

SEQ ID NO: 495865 - DNA, 25 bp, Homo sapien
tttccgtgagggtgccggtcttgtc

SEQ ID NO: 495866 - DNA, 25 bp, Homo sapien
cagagggcccggaaaaacagctcct

SEQ ID NO: 495867 - DNA, 25 bp, Homo sapien
tcgggcgaggatgagatgtacacac

SEQ ID NO: 495868 - DNA, 25 bp, Homo sapien
tcacctggacggtgtggcagagaca

SEQ ID NO: 495869 - DNA, 25 bp, Homo sapien
gggccgtctacgctgtcatcgtctt

SEQ ID NO: 495870 - DNA, 25 bp, Homo sapien
ctttcgatgtggttctccctgttta

SEQ ID NO: 495871 - DNA, 25 bp, Homo sapien
cagccttaggtaggtaaagccaagt

SEQ ID NO: 495872 - DNA, 25 bp, Homo sapien
gttctccctgtttaatatctccatg

SEQ ID NO: 495873 - DNA, 25 bp, Homo sapien
ccatgtaattgtccttcagccttag

SEQ ID NO: 495874 - DNA, 25 bp, Homo sapien
gtagcagattttacaattacactca

SEQ ID NO: 495875 - DNA, 25 bp, Homo sapien
tagcagattttacaattacactcat

SEQ ID NO: 495876 - DNA, 25 bp, Homo sapien
ttctgactgagtcaaaactcaaaat

SEQ ID NO: 495877 - DNA, 25 bp, Homo sapien
agcagattttacaattacactcatt

SEQ ID NO: 495878 - DNA, 25 bp, Homo sapien
ccttctatcactcgggggaatatcg

SEQ ID NO: 495879 - DNA, 25 bp, Homo sapien
gggaatatcgaagaatctgctcctt

SEQ ID NO: 495880 - DNA, 25 bp, Homo sapien
cactgcgttacgctccactctggct

SEQ ID NO: 495881 - DNA, 25 bp, Homo sapien
tctggctcggatctggtcaactttg

SEQ ID NO: 495882 - DNA, 25 bp, Homo sapien
tagtgctcggcaactgaacgagtgc

SEQ ID NO: 495883 - DNA, 25 bp, Homo sapien
tcctcacgacagaaatgaacgggcc

SEQ ID NO: 495884 - DNA, 25 bp, Homo sapien
tgaaagacgccggatacaacagccg

SEQ ID NO: 495885 - DNA, 25 bp, Homo sapien
aacgagtgctgctgttcctcacgac

SEQ ID NO: 495886 - DNA, 25 bp, Homo sapien
gcaacacacaaagttcggagcccct

SEQ ID NO: 495887 - DNA, 25 bp, Homo sapien
ggtcctcaacagctgtagcaccaag

SEQ ID NO: 495888 - DNA, 25 bp, Homo sapien
ggcttctgctaactttttctctcga

SEQ ID NO: 495889 - DNA, 25 bp, Homo sapien
tttctctcgatcttgaagggccact

SEQ ID NO: 495890 - DNA, 25 bp, Homo sapien
tatgtgcttgaagttctagctactc

SEQ ID NO: 495891 - DNA, 25 bp, Homo sapien
aagagtaattacagtcaggcatgac

SEQ ID NO: 495892 - DNA, 25 bp, Homo sapien
taattacagtcaggcatgactgctc

SEQ ID NO: 495893 - DNA, 25 bp, Homo sapien
atggtggtatgtgcttgaagttcta

SEQ ID NO: 495894 - DNA, 25 bp, Homo sapien
tcactgacgtctgacaagcctggcg

SEQ ID NO: 495895 - DNA, 25 bp, Homo sapien
tgtcaaaatatcgtagcccctcaaa

SEQ ID NO: 495896 - DNA, 25 bp, Homo sapien
tgctgacccaggaatccaaataagg

SEQ ID NO: 495897 - DNA, 25 bp, Homo sapien
tcaccacgaagtactgaagcagctt

SEQ ID NO: 495898 - DNA, 25 bp, Homo sapien
tctcccgtgagaacccagactttga

SEQ ID NO: 495899 - DNA, 25 bp, Homo sapien
tcttgctcagctcgaacaggacgtc

SEQ ID NO: 495900 - DNA, 25 bp, Homo sapien
gacaggttgtctctggtcaggctcc

SEQ ID NO: 495901 - DNA, 25 bp, Homo sapien
cagggcctcgatggtgtctgcagct

SEQ ID NO: 495902 - DNA, 25 bp, Homo sapien
tgcagctccgtcgataattaaaccg

SEQ ID NO: 495903 - DNA, 25 bp, Homo sapien
aagagctccctgtagttgccggaac

SEQ ID NO: 495904 - DNA, 25 bp, Homo sapien
tgcagctccggcagatttccaggaa

SEQ ID NO: 495905 - DNA, 25 bp, Homo sapien
aaaccgtagtcctgcatatctgctg

SEQ ID NO: 495906 - DNA, 25 bp, Homo sapien
cactgcatctggaagggtcatacat

SEQ ID NO: 495907 - DNA, 25 bp, Homo sapien
tttcccacaagaacatggccgcgtg

SEQ ID NO: 495908 - DNA, 25 bp, Homo sapien
tcgtatctgtaggaggcacacacta

SEQ ID NO: 495909 - DNA, 25 bp, Homo sapien
ttaacaatctgaggcggtgagacct

SEQ ID NO: 495910 - DNA, 25 bp, Homo sapien
acgtgattgggtgctcttttgaaaa

SEQ ID NO: 495911 - DNA, 25 bp, Homo sapien
gctgacatcatttgcaccatcgcca

SEQ ID NO: 495912 - DNA, 25 bp, Homo sapien
tgcgcttccagaatcatgctgacat

SEQ ID NO: 495913 - DNA, 25 bp, Homo sapien
tgcaccatcgccaattgctaacgtg

SEQ ID NO: 495914 - DNA, 25 bp, Homo sapien
gggagaagaacggatgaaaccatca

SEQ ID NO: 495915 - DNA, 25 bp, Homo sapien
tctagcgaaggggtgacctggccac

SEQ ID NO: 495916 - DNA, 25 bp, Homo sapien
ctgaatgcacctgcgtgctgccatg

SEQ ID NO: 495917 - DNA, 25 bp, Homo sapien
atcatcatgagccttcccggtcaca

SEQ ID NO: 495918 - DNA, 25 bp, Homo sapien
cgagctcagagatcctaatgtaata

SEQ ID NO: 495919 - DNA, 25 bp, Homo sapien
tagaagaagtactgcacgagctcag

SEQ ID NO: 495920 - DNA, 25 bp, Homo sapien
tgcccgtgaacaagcagcatcttct

SEQ ID NO: 495921 - DNA, 25 bp, Homo sapien
ggattgcatagtcgctgttcctggc

SEQ ID NO: 495922 - DNA, 25 bp, Homo sapien
tgagggggagcggcgaccctcctac

SEQ ID NO: 495923 - DNA, 25 bp, Homo sapien
tcatcacgctgctcggaatggcatg

SEQ ID NO: 495924 - DNA, 25 bp, Homo sapien
taactgttagttcggtgacgggaca

SEQ ID NO: 495925 - DNA, 25 bp, Homo sapien
taaacgggaaagaatcgaactgcac

SEQ ID NO: 495926 - DNA, 25 bp, Homo sapien
caagtggctcagacaagggtcgtgc

SEQ ID NO: 495927 - DNA, 25 bp, Homo sapien
actgagggaagatgaagcagacgtt

SEQ ID NO: 495928 - DNA, 25 bp, Homo sapien
agaagaactggtataaaaactgagg

SEQ ID NO: 495929 - DNA, 25 bp, Homo sapien
ctgttgtgaaaacccacagaagaac

SEQ ID NO: 495930 - DNA, 25 bp, Homo sapien
tgaaaacccacagaagaactggtat

SEQ ID NO: 495931 - DNA, 25 bp, Homo sapien
tcagatacgcggtgtcgtacaaagt

SEQ ID NO: 495932 - DNA, 25 bp, Homo sapien
gcacgtcaatgccaacatgctgctc

SEQ ID NO: 495933 - DNA, 25 bp, Homo sapien
ctgtacagggtcgggtctctcttga

SEQ ID NO: 495934 - DNA, 25 bp, Homo sapien
tgctgctccatgaggctgtacagga

SEQ ID NO: 495935 - DNA, 25 bp, Homo sapien
gattccctagggtcacaacgaggaa

SEQ ID NO: 495936 - DNA, 25 bp, Homo sapien
cctcaactgaggtctgccaggtggc

SEQ ID NO: 495937 - DNA, 25 bp, Homo sapien
gaaggaactgccagagtgctgccta

SEQ ID NO: 495938 - DNA, 25 bp, Homo sapien
cacaggaaagtgcaaactggctcca

SEQ ID NO: 495939 - DNA, 25 bp, Homo sapien
aaacagtcccaggagcgtccagtag

SEQ ID NO: 495940 - DNA, 25 bp, Homo sapien
ccaaagaagaacaccagtgcgtcaa

SEQ ID NO: 495941 - DNA, 25 bp, Homo sapien
ctgcccgttgcttgtcacagttgta

SEQ ID NO: 495942 - DNA, 25 bp, Homo sapien
ttcaaacacgaaataagcaccaaag

SEQ ID NO: 495943 - DNA, 25 bp, Homo sapien
gatggaccccgctgggaagctgcat

SEQ ID NO: 495944 - DNA, 25 bp, Homo sapien
cactgaattactgcgcaggtggtga

SEQ ID NO: 495945 - DNA, 25 bp, Homo sapien
atgtggtgatggaccccgctgggaa

SEQ ID NO: 495946 - DNA, 25 bp, Homo sapien
ggcctgcactgaattactgcgcagg

SEQ ID NO: 495947 - DNA, 25 bp, Homo sapien
catgtgctacgctgaattactgtgc

SEQ ID NO: 495948 - DNA, 25 bp, Homo sapien
tgctgaattattgcgcacgtggtga

SEQ ID NO: 495949 - DNA, 25 bp, Homo sapien
acgtgctatgctgaattattgcgca

SEQ ID NO: 495950 - DNA, 25 bp, Homo sapien
gggaaactgcatgtgctacgctgaa

SEQ ID NO: 495951 - DNA, 25 bp, Homo sapien
tggtgatgatccccgctgggaagct

SEQ ID NO: 495952 - DNA, 25 bp, Homo sapien
gatgatccccgctgggaagctgcat

SEQ ID NO: 495953 - DNA, 25 bp, Homo sapien
aattactgcccatgtggtgatggac

SEQ ID NO: 495954 - DNA, 25 bp, Homo sapien
tgcatggcctgcactgaattactgc

SEQ ID NO: 495955 - DNA, 25 bp, Homo sapien
actgcccatgtggtgatggaccccg

SEQ ID NO: 495956 - DNA, 25 bp, Homo sapien
cactgaattactgcgcaggtggtga

SEQ ID NO: 495957 - DNA, 25 bp, Homo sapien
tgcatgggccgcactgaattactgc

SEQ ID NO: 495958 - DNA, 25 bp, Homo sapien
caggcctgcactgaattactgcgca

SEQ ID NO: 495959 - DNA, 25 bp, Homo sapien
cgatctttaaagtgacccagagcta

SEQ ID NO: 495960 - DNA, 25 bp, Homo sapien
caggtaatgcgatctttaaagtgac

SEQ ID NO: 495961 - DNA, 25 bp, Homo sapien
acccagagctatgcacatgtggtga

SEQ ID NO: 495962 - DNA, 25 bp, Homo sapien
cccgctgggaagctgcgcgggcctg

SEQ ID NO: 495963 - DNA, 25 bp, Homo sapien
tgagagaagcccctggcactgcgtt

SEQ ID NO: 495964 - DNA, 25 bp, Homo sapien
ggctgccctcctaggacagtggcgc

SEQ ID NO: 495965 - DNA, 25 bp, Homo sapien
ctgcgttgccagcacctcattcagg

SEQ ID NO: 495966 - DNA, 25 bp, Homo sapien
gaagcccctggcactgcgttgccag

SEQ ID NO: 495967 - DNA, 25 bp, Homo sapien
gagaccaggaaacaggagctagtag

SEQ ID NO: 495968 - DNA, 25 bp, Homo sapien
tagaaatcctcggatcccaggaagg

SEQ ID NO: 495969 - DNA, 25 bp, Homo sapien
gtccagggatccgagaaggcggaga

SEQ ID NO: 495970 - DNA, 25 bp, Homo sapien
ctggagggtacagccggaagagacc

SEQ ID NO: 495971 - DNA, 25 bp, Homo sapien
tacgtaaggaccaagagggctgtca

SEQ ID NO: 495972 - DNA, 25 bp, Homo sapien
ccagagggcctctgaactgtaaccc

SEQ ID NO: 495973 - DNA, 25 bp, Homo sapien
caagaacaatcaatcccagagggcc

SEQ ID NO: 495974 - DNA, 25 bp, Homo sapien
tatggcttacgatgtcagtgcagaa

SEQ ID NO: 495975 - DNA, 25 bp, Homo sapien
tgtttggggaaaatagtccaagtca

SEQ ID NO: 495976 - DNA, 25 bp, Homo sapien
gtgtaactgtgaacaccatcacggt

SEQ ID NO: 495977 - DNA, 25 bp, Homo sapien
caccatcacggtgaataccagcgtt

SEQ ID NO: 495978 - DNA, 25 bp, Homo sapien
gaataccagcgttccaaacgtccag

SEQ ID NO: 495979 - DNA, 25 bp, Homo sapien
ctttagtgtaactgtgaacaccatc

SEQ ID NO: 495980 - DNA, 25 bp, Homo sapien
taacggtgtcatctgagcagtgaga

SEQ ID NO: 495981 - DNA, 25 bp, Homo sapien
ctccccagagaagcgaaaagacaac

SEQ ID NO: 495982 - DNA, 25 bp, Homo sapien
agacaacgtagaacagcagcgaccc

SEQ ID NO: 495983 - DNA, 25 bp, Homo sapien
ccaagtccagtagtgtgtgtccaat

SEQ ID NO: 495984 - DNA, 25 bp, Homo sapien
cagcgacccccagatgacaaaatgg

SEQ ID NO: 495985 - DNA, 25 bp, Homo sapien
aacacgtagtacatcctctggtagt

SEQ ID NO: 495986 - DNA, 25 bp, Homo sapien
caggcgggcccgctggacagcatct

SEQ ID NO: 495987 - DNA, 25 bp, Homo sapien
tcttgaggacgtcgggaaggaggct

SEQ ID NO: 495988 - DNA, 25 bp, Homo sapien
caggactttcttgaggacgtcggga

SEQ ID NO: 495989 - DNA, 25 bp, Homo sapien
cactgtctttcaaaacggtcatctc

SEQ ID NO: 495990 - DNA, 25 bp, Homo sapien
tctttcaaaacggtcatctcccaat

SEQ ID NO: 495991 - DNA, 25 bp, Homo sapien
tcacactgtctttcaaaacggtcat

SEQ ID NO: 495992 - DNA, 25 bp, Homo sapien
tgtctttcaaaacggtcatctccca

SEQ ID NO: 495993 - DNA, 25 bp, Homo sapien
ctgctcgacagaaaggcactggctc

SEQ ID NO: 495994 - DNA, 25 bp, Homo sapien
gaaagcataaagatggttgactgct

SEQ ID NO: 495995 - DNA, 25 bp, Homo sapien
taaagatggttgactgctcgacaga

SEQ ID NO: 495996 - DNA, 25 bp, Homo sapien
tggttgactgctcgacagaaaggca

SEQ ID NO: 495997 - DNA, 25 bp, Homo sapien
ctgctgtacccagcgcctggtggac

SEQ ID NO: 495998 - DNA, 25 bp, Homo sapien
taccatcccaggtgcgtggaaggca

SEQ ID NO: 495999 - DNA, 25 bp, Homo sapien
cgtcagagcacgtggactcagggct

SEQ ID NO: 496000 - DNA, 25 bp, Homo sapien
ccgtgtctaccatcccaggtgcgtg

SEQ ID NO: 496001 - DNA, 25 bp, Homo sapien
gctctccgctgtcagctgtgtctga

SEQ ID NO: 496002 - DNA, 25 bp, Homo sapien
ccctggttaactgtgactgatggaa

SEQ ID NO: 496003 - DNA, 25 bp, Homo sapien
gttctgaggctgcacggacgctgag

SEQ ID NO: 496004 - DNA, 25 bp, Homo sapien
gacgctgagggagaaaccctggtta

SEQ ID NO: 496005 - DNA, 25 bp, Homo sapien
tcatcctaaatgtcttcaagtacag

SEQ ID NO: 496006 - DNA, 25 bp, Homo sapien
caaattctgatgacactaaattaga

SEQ ID NO: 496007 - DNA, 25 bp, Homo sapien
taatcagtttcttaaggacctctta

SEQ ID NO: 496008 - DNA, 25 bp, Homo sapien
tctgattaattgcttggacttaaaa

SEQ ID NO: 496009 - DNA, 25 bp, Homo sapien
tgcacaattgcacgtctgaatgggc

SEQ ID NO: 496010 - DNA, 25 bp, Homo sapien
gaactgcgggcttggaattgcacaa

SEQ ID NO: 496011 - DNA, 25 bp, Homo sapien
tattcaaggaataagggaagcacag

SEQ ID NO: 496012 - DNA, 25 bp, Homo sapien
gacggagaagtgaactgcatgcaga

SEQ ID NO: 496013 - DNA, 25 bp, Homo sapien
ccagaactgagacagcgacaggctc

SEQ ID NO: 496014 - DNA, 25 bp, Homo sapien
gaaagatactgagcgacgtgggcca

SEQ ID NO: 496015 - DNA, 25 bp, Homo sapien
ttggccgccgtaggaggtccttcag

SEQ ID NO: 496016 - DNA, 25 bp, Homo sapien
gactttcctgagtccagcgtgctca

SEQ ID NO: 496017 - DNA, 25 bp, Homo sapien
ctttgttatcaaagacagcacagca

SEQ ID NO: 496018 - DNA, 25 bp, Homo sapien
cgtgaacctttgttatcaaagacag

SEQ ID NO: 496019 - DNA, 25 bp, Homo sapien
gtgaacctttgttatcaaagacagc

SEQ ID NO: 496020 - DNA, 25 bp, Homo sapien
tgttatcaaagacagcacagcacag

SEQ ID NO: 496021 - DNA, 25 bp, Homo sapien
cccggatgtgcacgggccctgtggg

SEQ ID NO: 496022 - DNA, 25 bp, Homo sapien
ccccggatgtgcacgggccctgtgg

SEQ ID NO: 496023 - DNA, 25 bp, Homo sapien
gccccggatgtgcacgggccctgtg

SEQ ID NO: 496024 - DNA, 25 bp, Homo sapien
ccggatgtgcacgggccctgtgggt

SEQ ID NO: 496025 - DNA, 25 bp, Homo sapien
tgctagactcaactcaggacacacc

SEQ ID NO: 496026 - DNA, 25 bp, Homo sapien
gacacatggtcagtctcagggatac

SEQ ID NO: 496027 - DNA, 25 bp, Homo sapien
tgagagaacgagacacatggtcagt

SEQ ID NO: 496028 - DNA, 25 bp, Homo sapien
tgggatgcactcactaccatcgcct

SEQ ID NO: 496029 - DNA, 25 bp, Homo sapien
tgaattctgagtcgcggtcccgagg

SEQ ID NO: 496030 - DNA, 25 bp, Homo sapien
ttctgagtcgcggtcccgaggctgt

SEQ ID NO: 496031 - DNA, 25 bp, Homo sapien
ggtgaattctgagtcgcggtcccga

SEQ ID NO: 496032 - DNA, 25 bp, Homo sapien
ggtcccgaggctgtgcgcacccatt

SEQ ID NO: 496033 - DNA, 25 bp, Homo sapien
tgggagctgtaccaggcggccgagg

SEQ ID NO: 496034 - DNA, 25 bp, Homo sapien
gagtgggagctgtaccaggcggccg

SEQ ID NO: 496035 - DNA, 25 bp, Homo sapien
agagtgggagctgtaccaggcggcc

SEQ ID NO: 496036 - DNA, 25 bp, Homo sapien
agtgggagctgtaccaggcggccga

SEQ ID NO: 496037 - DNA, 25 bp, Homo sapien
atcacacgagcattcccacacggga

SEQ ID NO: 496038 - DNA, 25 bp, Homo sapien
aactgcagtggtgatgggaaccgcc

SEQ ID NO: 496039 - DNA, 25 bp, Homo sapien
acacgggacctagggcagctgtgac

SEQ ID NO: 496040 - DNA, 25 bp, Homo sapien
cagctgtgacttgggatggaactgc

SEQ ID NO: 496041 - DNA, 25 bp, Homo sapien
tgcacagtctccacaggcttaggac

SEQ ID NO: 496042 - DNA, 25 bp, Homo sapien
agaatgtccctcctgcgttgagccg

SEQ ID NO: 496043 - DNA, 25 bp, Homo sapien
tggtgtggctcaacaaccacagtgc

SEQ ID NO: 496044 - DNA, 25 bp, Homo sapien
ccagtgacagcaaaggccaatgatg

SEQ ID NO: 496045 - DNA, 25 bp, Homo sapien
atgatggtatccgagtgacccggcc

SEQ ID NO: 496046 - DNA, 25 bp, Homo sapien
gttgagtaaaggacgcaccaccatg

SEQ ID NO: 496047 - DNA, 25 bp, Homo sapien
gaaaccactcccagatgagcagggt

SEQ ID NO: 496048 - DNA, 25 bp, Homo sapien
cctggcgagtggctgatggacatcc

SEQ ID NO: 496049 - DNA, 25 bp, Homo sapien
caacattctcccgtaacagtggact

SEQ ID NO: 496050 - DNA, 25 bp, Homo sapien
tcaacattctcccgtaacagtggac

SEQ ID NO: 496051 - DNA, 25 bp, Homo sapien
aacattctcccgtaacagtggactg

SEQ ID NO: 496052 - DNA, 25 bp, Homo sapien
cattctcccgtaacagtggactgac

SEQ ID NO: 496053 - DNA, 25 bp, Homo sapien
cccgagacaggttctggtgcacgaa

SEQ ID NO: 496054 - DNA, 25 bp, Homo sapien
tgccagtacggagaacaacagggac

SEQ ID NO: 496055 - DNA, 25 bp, Homo sapien
cagagcagcgctggacagatcctaa

SEQ ID NO: 496056 - DNA, 25 bp, Homo sapien
gatcctaagacgaaggagagccctg

SEQ ID NO: 496057 - DNA, 25 bp, Homo sapien
tctgtctgctcaagccagttgctcg

SEQ ID NO: 496058 - DNA, 25 bp, Homo sapien
aaaatacctactgtcgagcacctcg

SEQ ID NO: 496059 - DNA, 25 bp, Homo sapien
catattgggttcctaaaaagggctg

SEQ ID NO: 496060 - DNA, 25 bp, Homo sapien
taactactgcgaggtggaaaattgc

SEQ ID NO: 496061 - DNA, 25 bp, Homo sapien
tacacgtctgggaactcatttgtgg

SEQ ID NO: 496062 - DNA, 25 bp, Homo sapien
catacacgtgtgtgagagcaagcct

SEQ ID NO: 496063 - DNA, 25 bp, Homo sapien
catgtgtgtattcacgcctgcagga

SEQ ID NO: 496064 - DNA, 25 bp, Homo sapien
ttgtttaaacgctcagcaagccgag

SEQ ID NO: 496065 - DNA, 25 bp, Homo sapien
tatgttaatgcacctactatgttta

SEQ ID NO: 496066 - DNA, 25 bp, Homo sapien
aactccagtatttatgatgatgaca

SEQ ID NO: 496067 - DNA, 25 bp, Homo sapien
tactgtgtggagactgatttatgtt

SEQ ID NO: 496068 - DNA, 25 bp, Homo sapien
ctccagtatttatgatgatgacaac

SEQ ID NO: 496069 - DNA, 25 bp, Homo sapien
aaaagtccaatataatattatccag

SEQ ID NO: 496070 - DNA, 25 bp, Homo sapien
ctcctgcttagataatctagagaaa

SEQ ID NO: 496071 - DNA, 25 bp, Homo sapien
gaaaagtccaatataatattatcca

SEQ ID NO: 496072 - DNA, 25 bp, Homo sapien
tgcaagcagattcaggtctcctgct

SEQ ID NO: 496073 - DNA, 25 bp, Homo sapien
gccccgcaggtgtccgcgcgtcctg

SEQ ID NO: 496074 - DNA, 25 bp, Homo sapien
tgctgccctcccgcgtccgccgagc

SEQ ID NO: 496075 - DNA, 25 bp, Homo sapien
cagggctgcgccgacactgggcggg

SEQ ID NO: 496076 - DNA, 25 bp, Homo sapien
gcgtcctgacgcctcctcccagggc

SEQ ID NO: 496077 - DNA, 25 bp, Homo sapien
aggacaccagagttaaccccaagat

SEQ ID NO: 496078 - DNA, 25 bp, Homo sapien
cccaagatacgtgggtagagagagt

SEQ ID NO: 496079 - DNA, 25 bp, Homo sapien
taaccccaagatacgtgggtagaga

SEQ ID NO: 496080 - DNA, 25 bp, Homo sapien
cagagttaaccccaagatacgtggg

SEQ ID NO: 496081 - DNA, 25 bp, Homo sapien
tgctctgaacaaaaccgaaataact

SEQ ID NO: 496082 - DNA, 25 bp, Homo sapien
ctctgaacaaaaccgaaataactag

SEQ ID NO: 496083 - DNA, 25 bp, Homo sapien
tttaaaagcacgatgaggtcatgct

SEQ ID NO: 496084 - DNA, 25 bp, Homo sapien
gctctgaacaaaaccgaaataacta

SEQ ID NO: 496085 - DNA, 25 bp, Homo sapien
cgttgtggggaagaataactgttgc

SEQ ID NO: 496086 - DNA, 25 bp, Homo sapien
caggtctcttgcacaggataaatct

SEQ ID NO: 496087 - DNA, 25 bp, Homo sapien
taaatctccaacagtcaaacatgag

SEQ ID NO: 496088 - DNA, 25 bp, Homo sapien
ttttggcctcattgggccgttgtgg

SEQ ID NO: 496089 - DNA, 25 bp, Homo sapien
gacacatcaatttggtgatccgttt

SEQ ID NO: 496090 - DNA, 25 bp, Homo sapien
tccggtgtgtcttgaacaagcctga

SEQ ID NO: 496091 - DNA, 25 bp, Homo sapien
tggccatggccgtcgcctccggtgt

SEQ ID NO: 496092 - DNA, 25 bp, Homo sapien
gatgacgtcagacacatcaatttgg

SEQ ID NO: 496093 - DNA, 25 bp, Homo sapien
cttgtcaatctctaaaaggaccgga

SEQ ID NO: 496094 - DNA, 25 bp, Homo sapien
gaccggaatagcaaagaacagcaca

SEQ ID NO: 496095 - DNA, 25 bp, Homo sapien
cagtgagacctgcaaaatcaaatga

SEQ ID NO: 496096 - DNA, 25 bp, Homo sapien
gaacagcacaggtctgatcagcagt

SEQ ID NO: 496097 - DNA, 25 bp, Homo sapien
caagtgcgctcctgacgaagacgtt

SEQ ID NO: 496098 - DNA, 25 bp, Homo sapien
tagtgtaggacttcccaagtgcgct

SEQ ID NO: 496099 - DNA, 25 bp, Homo sapien
tgaaggatgtactcacactgccgag

SEQ ID NO: 496100 - DNA, 25 bp, Homo sapien
cagctcactgtggacgagatgccga

SEQ ID NO: 496101 - DNA, 25 bp, Homo sapien
taaggactggcattcctaccagcag

SEQ ID NO: 496102 - DNA, 25 bp, Homo sapien
tatagtgtaagatgtgccagggaga

SEQ ID NO: 496103 - DNA, 25 bp, Homo sapien
taaataacggctgtgatgatcacct

SEQ ID NO: 496104 - DNA, 25 bp, Homo sapien
tcttagaagtgaacattgctgacga

SEQ ID NO: 496105 - DNA, 25 bp, Homo sapien
aggacgagctcccgaagacccgcgg

SEQ ID NO: 496106 - DNA, 25 bp, Homo sapien
caggacgagctcccgaagacccgcg

SEQ ID NO: 496107 - DNA, 25 bp, Homo sapien
tcagcgcatccgtgtgaggtcccgg

SEQ ID NO: 496108 - DNA, 25 bp, Homo sapien
aggaagacggaagaaatcgctgctc

SEQ ID NO: 496109 - DNA, 25 bp, Homo sapien
cgctgctcagcgcatccgtgtgagg

SEQ ID NO: 496110 - DNA, 25 bp, Homo sapien
gaggtcccgggtattctgtgaggaa

SEQ ID NO: 496111 - DNA, 25 bp, Homo sapien
gagcagctcaccattctcaggttgg

SEQ ID NO: 496112 - DNA, 25 bp, Homo sapien
gaagcagttcaatctcacgcatgag

SEQ ID NO: 496113 - DNA, 25 bp, Homo sapien
tcagcctctgggaatgtgagatcca

SEQ ID NO: 496114 - DNA, 25 bp, Homo sapien
ccatgatcacgtggctcacagagcg

SEQ ID NO: 496115 - DNA, 25 bp, Homo sapien
cttcgagaggtcaccgcttgctgtt

SEQ ID NO: 496116 - DNA, 25 bp, Homo sapien
gatacgggcatgagtgaaaacacag

SEQ ID NO: 496117 - DNA, 25 bp, Homo sapien
gactggagctgtggactaggaatca

SEQ ID NO: 496118 - DNA, 25 bp, Homo sapien
cagcgcgacctcaaagtgggagaca

SEQ ID NO: 496119 - DNA, 25 bp, Homo sapien
aagtcacttcccgagcctgtggtca

SEQ ID NO: 496120 - DNA, 25 bp, Homo sapien
gaagaatgaacgtcacaaaacaggg

SEQ ID NO: 496121 - DNA, 25 bp, Homo sapien
tattagagcgttatcccagcaacgg

SEQ ID NO: 496122 - DNA, 25 bp, Homo sapien
gaaaggatcgccacaaacggaagaa

SEQ ID NO: 496123 - DNA, 25 bp, Homo sapien
gaagcctctgttggaactctgacgt

SEQ ID NO: 496124 - DNA, 25 bp, Homo sapien
tactggtcaggtatactggaagcct

SEQ ID NO: 496125 - DNA, 25 bp, Homo sapien
aactcttcggaaccacatagctgcg

SEQ ID NO: 496126 - DNA, 25 bp, Homo sapien
tcggtgctgacctcgattgcctggc

SEQ ID NO: 496127 - DNA, 25 bp, Homo sapien
taagtcagtcaaggtcataattccc

SEQ ID NO: 496128 - DNA, 25 bp, Homo sapien
caatagttcatggtgcggacgtaca

SEQ ID NO: 496129 - DNA, 25 bp, Homo sapien
tcatccaggttgtcacaggtatcaa

SEQ ID NO: 496130 - DNA, 25 bp, Homo sapien
taaagcccttgtaatgcggtgcgtg

SEQ ID NO: 496131 - DNA, 25 bp, Homo sapien
agcccctccccgcagctgtgctgtt

SEQ ID NO: 496132 - DNA, 25 bp, Homo sapien
gcccctccccgcagctgtgctgttg

SEQ ID NO: 496133 - DNA, 25 bp, Homo sapien
ctccccgcagctgtgctgttgtctg

SEQ ID NO: 496134 - DNA, 25 bp, Homo sapien
ccctccccgcagctgtgctgttgtc

SEQ ID NO: 496135 - DNA, 25 bp, Homo sapien
ctacaagcacggctctcgaggaaca

SEQ ID NO: 496136 - DNA, 25 bp, Homo sapien
cagtggatctctttaaacagtgagg

SEQ ID NO: 496137 - DNA, 25 bp, Homo sapien
ctgggtatagaacaaatgcaggtct

SEQ ID NO: 496138 - DNA, 25 bp, Homo sapien
gctgcattgaaatttagctgctccc

SEQ ID NO: 496139 - DNA, 25 bp, Homo sapien
ctcatcatccgtgggccagacgctt

SEQ ID NO: 496140 - DNA, 25 bp, Homo sapien
cacaggtctgcatccggccactgtc

SEQ ID NO: 496141 - DNA, 25 bp, Homo sapien
agcagcctgaaagccgcagccactg

SEQ ID NO: 496142 - DNA, 25 bp, Homo sapien
ctgaaagccgcagccactggcaggg

SEQ ID NO: 496143 - DNA, 25 bp, Homo sapien
taagaccttgaaacagcacgactgg

SEQ ID NO: 496144 - DNA, 25 bp, Homo sapien
catctgaggaagactgacggcgaca

SEQ ID NO: 496145 - DNA, 25 bp, Homo sapien
gcagacctggcctcaaagtggacaa

SEQ ID NO: 496146 - DNA, 25 bp, Homo sapien
tagcagggcgtcacctatgtggcca

SEQ ID NO: 496147 - DNA, 25 bp, Homo sapien
atttatccgcaataccactaccagg

SEQ ID NO: 496148 - DNA, 25 bp, Homo sapien
tctgtgcgtacggaagtttctggaa

SEQ ID NO: 496149 - DNA, 25 bp, Homo sapien
catttgggatgcgacgctcattctg

SEQ ID NO: 496150 - DNA, 25 bp, Homo sapien
accactaccaggcatttgggatgcg

SEQ ID NO: 496151 - DNA, 25 bp, Homo sapien
tggagaacaggtgcaacgtggaggc

SEQ ID NO: 496152 - DNA, 25 bp, Homo sapien
tgtgctcacatggacacacgtggag

SEQ ID NO: 496153 - DNA, 25 bp, Homo sapien
gcatagcagatgcaacgtggaggca

SEQ ID NO: 496154 - DNA, 25 bp, Homo sapien
cttcagggctctgccgtgtgctcac

SEQ ID NO: 496155 - DNA, 25 bp, Homo sapien
gcccaaggacgcaggacccagtgag

SEQ ID NO: 496156 - DNA, 25 bp, Homo sapien
cgcctgcccaaggacgcaggaccca

SEQ ID NO: 496157 - DNA, 25 bp, Homo sapien
gacgcaggacccagtgagggaagcg

SEQ ID NO: 496158 - DNA, 25 bp, Homo sapien
cctgcccaaggacgcaggacccagt

SEQ ID NO: 496159 - DNA, 25 bp, Homo sapien
tgggtccatgcgtgggtccgtggct

SEQ ID NO: 496160 - DNA, 25 bp, Homo sapien
caggtaagcaggtccgtgggtcgct

SEQ ID NO: 496161 - DNA, 25 bp, Homo sapien
taagcaggtccgtgggtcgctgggt

SEQ ID NO: 496162 - DNA, 25 bp, Homo sapien
tccgtgggtcgctgggtccatgcgt

SEQ ID NO: 496163 - DNA, 25 bp, Homo sapien
tccggccgccccgtggcaggtgtag

SEQ ID NO: 496164 - DNA, 25 bp, Homo sapien
cccagcgcgccccttccgtgtggcc

SEQ ID NO: 496165 - DNA, 25 bp, Homo sapien
agcgcgccccttccgtgtggccgca

SEQ ID NO: 496166 - DNA, 25 bp, Homo sapien
ccgccccgtggcaggtgtagaagct

SEQ ID NO: 496167 - DNA, 25 bp, Homo sapien
gcttggaaaccgcatttaatctctg

SEQ ID NO: 496168 - DNA, 25 bp, Homo sapien
ctcatcctccgacacaacaaaaatg

SEQ ID NO: 496169 - DNA, 25 bp, Homo sapien
ccgtgtgcttggaaaccgcatttaa

SEQ ID NO: 496170 - DNA, 25 bp, Homo sapien
aacaaaaatgatcctggcagatccg

SEQ ID NO: 496171 - DNA, 25 bp, Homo sapien
tcatcgaatgcttaaatcaactaga

SEQ ID NO: 496172 - DNA, 25 bp, Homo sapien
attgctccctcgaatgtcttctacc

SEQ ID NO: 496173 - DNA, 25 bp, Homo sapien
aactagatccatagcattgctccct

SEQ ID NO: 496174 - DNA, 25 bp, Homo sapien
tcgaatgcttaaatcaactagatcc

SEQ ID NO: 496175 - DNA, 25 bp, Homo sapien
gatgaccacggcagcggctccctga

SEQ ID NO: 496176 - DNA, 25 bp, Homo sapien
ccacggcagcggctccctgaggatg

SEQ ID NO: 496177 - DNA, 25 bp, Homo sapien
accacggcagcggctccctgaggat

SEQ ID NO: 496178 - DNA, 25 bp, Homo sapien
gaccacggcagcggctccctgagga

SEQ ID NO: 496179 - DNA, 25 bp, Homo sapien
ccacatacttcattactgggatcgt

SEQ ID NO: 496180 - DNA, 25 bp, Homo sapien
ttcattactgggatcgtcagtgcgg

SEQ ID NO: 496181 - DNA, 25 bp, Homo sapien
tgggatcgtcagtgcggtcacacac

SEQ ID NO: 496182 - DNA, 25 bp, Homo sapien
tactgggatcgtcagtgcggtcaca

SEQ ID NO: 496183 - DNA, 25 bp, Homo sapien
ctgccagacgcaacaaggtggtccc

SEQ ID NO: 496184 - DNA, 25 bp, Homo sapien
aaggctgccgtcccctgaagcagct

SEQ ID NO: 496185 - DNA, 25 bp, Homo sapien
acaaggtggtcccaaggctgccgtc

SEQ ID NO: 496186 - DNA, 25 bp, Homo sapien
gacgcaacaaggtggtcccaaggct

SEQ ID NO: 496187 - DNA, 25 bp, Homo sapien
cagttccccggcgcctcctgggcag

SEQ ID NO: 496188 - DNA, 25 bp, Homo sapien
tcgagcgccctgcagttccccggcg

SEQ ID NO: 496189 - DNA, 25 bp, Homo sapien
tgggcagtgaccacagccgccgcag

SEQ ID NO: 496190 - DNA, 25 bp, Homo sapien
gcagtgaccacagccgccgcagggt

SEQ ID NO: 496191 - DNA, 25 bp, Homo sapien
tccaatcggagacgcacatcctggg

SEQ ID NO: 496192 - DNA, 25 bp, Homo sapien
ccaccttccaatcggagacgcacat

SEQ ID NO: 496193 - DNA, 25 bp, Homo sapien
aagaaaacctgcggggtgccgagct

SEQ ID NO: 496194 - DNA, 25 bp, Homo sapien
cctccaccttccaatcggagacgca

SEQ ID NO: 496195 - DNA, 25 bp, Homo sapien
gcttaattggaactcagctccaaat

SEQ ID NO: 496196 - DNA, 25 bp, Homo sapien
ggagatccggcacccggcgagggtg

SEQ ID NO: 496197 - DNA, 25 bp, Homo sapien
tgggagatccggcacccggcgaggg

SEQ ID NO: 496198 - DNA, 25 bp, Homo sapien
ttggcttaattggaactcagctcca

SEQ ID NO: 496199 - DNA, 25 bp, Homo sapien
tcagaatacaggtagtagcttttca

SEQ ID NO: 496200 - DNA, 25 bp, Homo sapien
cacggaaatccggacagcctttccg

SEQ ID NO: 496201 - DNA, 25 bp, Homo sapien
tagcttttcatttccgccacggaaa

SEQ ID NO: 496202 - DNA, 25 bp, Homo sapien
agcaccactcagaatacaggtagta

SEQ ID NO: 496203 - DNA, 25 bp, Homo sapien
gagtgcagcgtacgcgccactgttg

SEQ ID NO: 496204 - DNA, 25 bp, Homo sapien
gcaggacgccagcttgttttcttat

SEQ ID NO: 496205 - DNA, 25 bp, Homo sapien
tattggccaaaagtggctcctgcca

SEQ ID NO: 496206 - DNA, 25 bp, Homo sapien
agtcctgagagaaccctagacggcc

SEQ ID NO: 496207 - DNA, 25 bp, Homo sapien
cagacaacagcgtttcgggaaagcg

SEQ ID NO: 496208 - DNA, 25 bp, Homo sapien
gatcagggggcagacaacgagccct

SEQ ID NO: 496209 - DNA, 25 bp, Homo sapien
ctgggctgcgtccacaaggtgtgct

SEQ ID NO: 496210 - DNA, 25 bp, Homo sapien
ccaccctctgcgtggctgcagacaa

SEQ ID NO: 496211 - DNA, 25 bp, Homo sapien
tgacactgcagggtttggaacaaat

SEQ ID NO: 496212 - DNA, 25 bp, Homo sapien
atatcccacgacagggctggacctg

SEQ ID NO: 496213 - DNA, 25 bp, Homo sapien
ccaccacattctgtaagttccaggg

SEQ ID NO: 496214 - DNA, 25 bp, Homo sapien
gctggacctggtgtagccaccacat

SEQ ID NO: 496215 - DNA, 25 bp, Homo sapien
tccttgtggaatgagtactgtaact

SEQ ID NO: 496216 - DNA, 25 bp, Homo sapien
gaaaggtgttcgtatcctgagagac

SEQ ID NO: 496217 - DNA, 25 bp, Homo sapien
caggcggccggatttcgcagaaagc

SEQ ID NO: 496218 - DNA, 25 bp, Homo sapien
gaatcaggtcccacacaacgtgtac

SEQ ID NO: 496219 - DNA, 25 bp, Homo sapien
tacaggctgggtatcccatatccaa

SEQ ID NO: 496220 - DNA, 25 bp, Homo sapien
taaatacagtgagatcactagggag

SEQ ID NO: 496221 - DNA, 25 bp, Homo sapien
taatgagacatttgggacgtgaccc

SEQ ID NO: 496222 - DNA, 25 bp, Homo sapien
cctcatacacgtagcttgaaggtaa

SEQ ID NO: 496223 - DNA, 25 bp, Homo sapien
tgatgtcagcttggcatcccacgca

SEQ ID NO: 496224 - DNA, 25 bp, Homo sapien
ccgagacacctgcatagtgatgtca

SEQ ID NO: 496225 - DNA, 25 bp, Homo sapien
tgacgtcagcttggcgtcccacgcg

SEQ ID NO: 496226 - DNA, 25 bp, Homo sapien
ccggcacagacagtgacgtcagctt

SEQ ID NO: 496227 - DNA, 25 bp, Homo sapien
ctggatttactgcccgggatgaagg

SEQ ID NO: 496228 - DNA, 25 bp, Homo sapien
ggatttactgcccgggatgaaggac

SEQ ID NO: 496229 - DNA, 25 bp, Homo sapien
tggatttactgcccgggatgaagga

SEQ ID NO: 496230 - DNA, 25 bp, Homo sapien
gctgacatgagcttcgtgccctcag

SEQ ID NO: 496231 - DNA, 25 bp, Homo sapien
catgagcttcgtgccctcagagacg

SEQ ID NO: 496232 - DNA, 25 bp, Homo sapien
gacatgagcttcgtgccctcagaga

SEQ ID NO: 496233 - DNA, 25 bp, Homo sapien
tgacatgagcttcgtgccctcagag

SEQ ID NO: 496234 - DNA, 25 bp, Homo sapien
gcatccaagaaggacattcccgggc

SEQ ID NO: 496235 - DNA, 25 bp, Homo sapien
tgaacccatctgaggacgacagtct

SEQ ID NO: 496236 - DNA, 25 bp, Homo sapien
tctgaggacgacagtctcgggacca

SEQ ID NO: 496237 - DNA, 25 bp, Homo sapien
agtctcgggaccatcgggcgcatcc

SEQ ID NO: 496238 - DNA, 25 bp, Homo sapien
agccgctcagctgggaaagcagtgc

SEQ ID NO: 496239 - DNA, 25 bp, Homo sapien
ccgaggctctcgatgggaatttggg

SEQ ID NO: 496240 - DNA, 25 bp, Homo sapien
tgaggacgagatgatctcagagtcc

SEQ ID NO: 496241 - DNA, 25 bp, Homo sapien
cccagatggagacgtgaggacgaga

SEQ ID NO: 496242 - DNA, 25 bp, Homo sapien
cctcctcccggatggacaatttcat

SEQ ID NO: 496243 - DNA, 25 bp, Homo sapien
ggtcagccctgtctggagccatcag

SEQ ID NO: 496244 - DNA, 25 bp, Homo sapien
gtcagccctgtctggagccatcagg

SEQ ID NO: 496245 - DNA, 25 bp, Homo sapien
gcaaacagctaaaccttaagtcaaa

SEQ ID NO: 496246 - DNA, 25 bp, Homo sapien
aacaatgagcgtcaccacgctggtc

SEQ ID NO: 496247 - DNA, 25 bp, Homo sapien
ctctgaacaatgagcgtcaccacgc

SEQ ID NO: 496248 - DNA, 25 bp, Homo sapien
cgtgtccagcaggaactcgacccat

SEQ ID NO: 496249 - DNA, 25 bp, Homo sapien
gacccatcgcttcccaccccaagga

SEQ ID NO: 496250 - DNA, 25 bp, Homo sapien
tccctgattaaggagcagcatcggc

SEQ ID NO: 496251 - DNA, 25 bp, Homo sapien
cttaactgttgcgatcctggcgaca

SEQ ID NO: 496252 - DNA, 25 bp, Homo sapien
ttcccgggcacacaaaggatggcgc

SEQ ID NO: 496253 - DNA, 25 bp, Homo sapien
tgtccggagagtatgctgacccagg

SEQ ID NO: 496254 - DNA, 25 bp, Homo sapien
gcagtgacagccggcgcaccgtcat

SEQ ID NO: 496255 - DNA, 25 bp, Homo sapien
acagcgcccagaggtcccggcacag

SEQ ID NO: 496256 - DNA, 25 bp, Homo sapien
cagaggtcccggcacagcagtgaca

SEQ ID NO: 496257 - DNA, 25 bp, Homo sapien
gtcccggcacagcagtgacagccgg

SEQ ID NO: 496258 - DNA, 25 bp, Homo sapien
caagtcctgcttacctagagagggc

SEQ ID NO: 496259 - DNA, 25 bp, Homo sapien
acttggcataagtacccgctggaaa

SEQ ID NO: 496260 - DNA, 25 bp, Homo sapien
tagagagggcagcttgtcacgcctt

SEQ ID NO: 496261 - DNA, 25 bp, Homo sapien
tagcctgtctatgaaaaacctcgaa

SEQ ID NO: 496262 - DNA, 25 bp, Homo sapien
caaaagaagcggtgatcagggaaac

SEQ ID NO: 496263 - DNA, 25 bp, Homo sapien
agtgagacagtttgcgcctcgggca

SEQ ID NO: 496264 - DNA, 25 bp, Homo sapien
tgcctagaccccaacagatcagact

SEQ ID NO: 496265 - DNA, 25 bp, Homo sapien
taagaatcccctggagcgtgtcctc

SEQ ID NO: 496266 - DNA, 25 bp, Homo sapien
gccaagacgtctgagcagtatccca

SEQ ID NO: 496267 - DNA, 25 bp, Homo sapien
tggaaatcctctcatggtgcgggtg

SEQ ID NO: 496268 - DNA, 25 bp, Homo sapien
cagggtgacctcgaaagcagcagag

SEQ ID NO: 496269 - DNA, 25 bp, Homo sapien
tccatcagacaggacagtcgtgcct

SEQ ID NO: 496270 - DNA, 25 bp, Homo sapien
ccactgtcctcatcgcagtgtccac

SEQ ID NO: 496271 - DNA, 25 bp, Homo sapien
agtgtccaccgtccacactgcctgt

SEQ ID NO: 496272 - DNA, 25 bp, Homo sapien
ctgtcctcatcgcagtgtccaccgt

SEQ ID NO: 496273 - DNA, 25 bp, Homo sapien
gtgtccaccgtcctcatcgcagtgt

SEQ ID NO: 496274 - DNA, 25 bp, Homo sapien
cctgtccaccgtccgcatcacagtg

SEQ ID NO: 496275 - DNA, 25 bp, Homo sapien
ctgtcctcatcgcagtgtccaccgt

SEQ ID NO: 496276 - DNA, 25 bp, Homo sapien
agtgtccaccgtccacactgcctgt

SEQ ID NO: 496277 - DNA, 25 bp, Homo sapien
gtccaccgtccgcatcacagtgtcc

SEQ ID NO: 496278 - DNA, 25 bp, Homo sapien
gcctgtccaccgtccgcatcacagt

SEQ ID NO: 496279 - DNA, 25 bp, Homo sapien
gtccaccgtccgcatcacagtgtcc

SEQ ID NO: 496280 - DNA, 25 bp, Homo sapien
agtgtccaccgtccacactgcctgt

SEQ ID NO: 496281 - DNA, 25 bp, Homo sapien
gtgtccaccgtccacactgcctgtc

SEQ ID NO: 496282 - DNA, 25 bp, Homo sapien
cctgtccaccgtccgcatcacagtg

SEQ ID NO: 496283 - DNA, 25 bp, Homo sapien
gtccaccgtccgcatcacagtgtcc

SEQ ID NO: 496284 - DNA, 25 bp, Homo sapien
cgcctgtccaccgtccgcatcacag

SEQ ID NO: 496285 - DNA, 25 bp, Homo sapien
gcctgtccaccgtccgcatcacagt

SEQ ID NO: 496286 - DNA, 25 bp, Homo sapien
gtacgcaaccacgtctcggcgatgg

SEQ ID NO: 496287 - DNA, 25 bp, Homo sapien
acggtgtcatgggacctgccagagc

SEQ ID NO: 496288 - DNA, 25 bp, Homo sapien
atgggactgctttgcctccgagcca

SEQ ID NO: 496289 - DNA, 25 bp, Homo sapien
tgtaaacacgggacacagtggaaca

SEQ ID NO: 496290 - DNA, 25 bp, Homo sapien
tagccacatttgcagtcttgaacat

SEQ ID NO: 496291 - DNA, 25 bp, Homo sapien
accacggagcagacacgatttctgg

SEQ ID NO: 496292 - DNA, 25 bp, Homo sapien
gatttctggccaacgctctcatcat

SEQ ID NO: 496293 - DNA, 25 bp, Homo sapien
ccacatttgcagtcttgaacatcca

SEQ ID NO: 496294 - DNA, 25 bp, Homo sapien
gctgggagcactaggccagcgtcag

SEQ ID NO: 496295 - DNA, 25 bp, Homo sapien
gggagcactaggccagcgtcagctc

SEQ ID NO: 496296 - DNA, 25 bp, Homo sapien
gctgggagcactaggccagcatcag

SEQ ID NO: 496297 - DNA, 25 bp, Homo sapien
ctgggagcactaggccagcatcagc

SEQ ID NO: 496298 - DNA, 25 bp, Homo sapien
acagagcgggacgatgtcctggtgc

SEQ ID NO: 496299 - DNA, 25 bp, Homo sapien
ggacaggtaagcaaagcgcttcttt

SEQ ID NO: 496300 - DNA, 25 bp, Homo sapien
cggacaggtaagcaaagcgcttctt

SEQ ID NO: 496301 - DNA, 25 bp, Homo sapien
tcggcagcacagagcgggacgatgt

SEQ ID NO: 496302 - DNA, 25 bp, Homo sapien
ggatggaggccccaccgtgccagcc

SEQ ID NO: 496303 - DNA, 25 bp, Homo sapien
acctcgcagtcagcctccctcagac

SEQ ID NO: 496304 - DNA, 25 bp, Homo sapien
agctgcacctcgcagtcagcctccc

SEQ ID NO: 496305 - DNA, 25 bp, Homo sapien
tgtaggtgcaggtgcgggatggagg

SEQ ID NO: 496306 - DNA, 25 bp, Homo sapien
atctgcaggagaagcgccagccgac

SEQ ID NO: 496307 - DNA, 25 bp, Homo sapien
tggtactgctgctacgacctggatc

SEQ ID NO: 496308 - DNA, 25 bp, Homo sapien
tgatccttctcagacgtggtactgc

SEQ ID NO: 496309 - DNA, 25 bp, Homo sapien
tccaaatccgcgcacatctgcagga

SEQ ID NO: 496310 - DNA, 25 bp, Homo sapien
gcctttcaaaagctgcctcatctgg

SEQ ID NO: 496311 - DNA, 25 bp, Homo sapien
cgcctttcaaaagctgcctcatctg

SEQ ID NO: 496312 - DNA, 25 bp, Homo sapien
agggttctgcgtggcacctgtgcgt

SEQ ID NO: 496313 - DNA, 25 bp, Homo sapien
ggacagagctgtagggttctgcgtg

SEQ ID NO: 496314 - DNA, 25 bp, Homo sapien
cggcaacgtacaggagtccggagcc

SEQ ID NO: 496315 - DNA, 25 bp, Homo sapien
agctcgtcctgactttgggcggcaa

SEQ ID NO: 496316 - DNA, 25 bp, Homo sapien
gtccaggtgtgacttccgcagctcg

SEQ ID NO: 496317 - DNA, 25 bp, Homo sapien
tctgcggatgacagacacagagtcc

SEQ ID NO: 496318 - DNA, 25 bp, Homo sapien
tggctgagacctgtcacacctgcat

SEQ ID NO: 496319 - DNA, 25 bp, Homo sapien
aagcaactgggcctacatccactcg

SEQ ID NO: 496320 - DNA, 25 bp, Homo sapien
tgtcacacctgcatgtgaactctcg

SEQ ID NO: 496321 - DNA, 25 bp, Homo sapien
gtgaactctcgcacccaagcaactg

SEQ ID NO: 496322 - DNA, 25 bp, Homo sapien
tccttgtccggaatctcgctgaagg

SEQ ID NO: 496323 - DNA, 25 bp, Homo sapien
cttgtccggaatctcgctgaaggcc

SEQ ID NO: 496324 - DNA, 25 bp, Homo sapien
gctgaaggccgggtagtcagggaag

SEQ ID NO: 496325 - DNA, 25 bp, Homo sapien
tgtccggaatctcgctgaaggccgg

SEQ ID NO: 496326 - DNA, 25 bp, Homo sapien
tgttaactggattttctggtacctc

SEQ ID NO: 496327 - DNA, 25 bp, Homo sapien
caaaaaactgcagcctgagggaacc

SEQ ID NO: 496328 - DNA, 25 bp, Homo sapien
ttttcagaggacagggacccagctc

SEQ ID NO: 496329 - DNA, 25 bp, Homo sapien
ctgagggaaccatttttgttaactg

SEQ ID NO: 496330 - DNA, 25 bp, Homo sapien
gacgagcacatcagatgagagaccc

SEQ ID NO: 496331 - DNA, 25 bp, Homo sapien
tggtgtgtgttcactataccccaaa

SEQ ID NO: 496332 - DNA, 25 bp, Homo sapien
tataccccaaatggaagcagcaact

SEQ ID NO: 496333 - DNA, 25 bp, Homo sapien
aagcagcaactacactgtctggtgt

SEQ ID NO: 496334 - DNA, 25 bp, Homo sapien
catcagtggacacccgagggtccac

SEQ ID NO: 496335 - DNA, 25 bp, Homo sapien
ggcccacacctgcgtcagcggacac

SEQ ID NO: 496336 - DNA, 25 bp, Homo sapien
gcgtcagcggacacctgagagtcca

SEQ ID NO: 496337 - DNA, 25 bp, Homo sapien
ctgcgtcggcggacacccgagggcc

SEQ ID NO: 496338 - DNA, 25 bp, Homo sapien
gtcagcggacacctgagagtccaca

SEQ ID NO: 496339 - DNA, 25 bp, Homo sapien
gcccacacctgtgtcggcagacacc

SEQ ID NO: 496340 - DNA, 25 bp, Homo sapien
gccctctgacgaacgagggcccaca

SEQ ID NO: 496341 - DNA, 25 bp, Homo sapien
ccgagggcccacatctgcgtcggtg

SEQ ID NO: 496342 - DNA, 25 bp, Homo sapien
gggcccacatctgcgtcggtggaca

SEQ ID NO: 496343 - DNA, 25 bp, Homo sapien
ctatagggttttcagagatccgaac

SEQ ID NO: 496344 - DNA, 25 bp, Homo sapien
aagtgagcacaccaggtccgcttac

SEQ ID NO: 496345 - DNA, 25 bp, Homo sapien
caccaggtccgcttacatcacaggg

SEQ ID NO: 496346 - DNA, 25 bp, Homo sapien
cgggggccactcacgtcatggcagc

SEQ ID NO: 496347 - DNA, 25 bp, Homo sapien
ggccagcccaagtgagcacaccagg

SEQ ID NO: 496348 - DNA, 25 bp, Homo sapien
cagcagtaacagaaaaggacctggg

SEQ ID NO: 496349 - DNA, 25 bp, Homo sapien
tggtcaccgcggtgcgtgcagaacc

SEQ ID NO: 496350 - DNA, 25 bp, Homo sapien
aatggcagggcctccgcgacttgtc

SEQ ID NO: 496351 - DNA, 25 bp, Homo sapien
ggtggtcagtagctgttgaattcaa

SEQ ID NO: 496352 - DNA, 25 bp, Homo sapien
ggaggcggccggccacgaagctgtc

SEQ ID NO: 496353 - DNA, 25 bp, Homo sapien
tggaggcggccggccacgaagctgt

SEQ ID NO: 496354 - DNA, 25 bp, Homo sapien
tccatggaggcggccggccacgaag

SEQ ID NO: 496355 - DNA, 25 bp, Homo sapien
catggaggcggccggccacgaagct

SEQ ID NO: 496356 - DNA, 25 bp, Homo sapien
agtttagtatattgacccctgccca

SEQ ID NO: 496357 - DNA, 25 bp, Homo sapien
gcaaagcgttcaatacctcaccatg

SEQ ID NO: 496358 - DNA, 25 bp, Homo sapien
ttcctgacctcagcggcaaagcgtt

SEQ ID NO: 496359 - DNA, 25 bp, Homo sapien
gggctcacctctgtaaaattccaga

SEQ ID NO: 496360 - DNA, 25 bp, Homo sapien
ccagcggtctcataaagtttcagga

SEQ ID NO: 496361 - DNA, 25 bp, Homo sapien
tcgtgaccttgggagccccatggtc

SEQ ID NO: 496362 - DNA, 25 bp, Homo sapien
cacagtgcgactcggttaccttggc

SEQ ID NO: 496363 - DNA, 25 bp, Homo sapien
taggaatcaacagtgcgtggccagg

SEQ ID NO: 496364 - DNA, 25 bp, Homo sapien
gaaaccttctgggtgagtacacgaa

SEQ ID NO: 496365 - DNA, 25 bp, Homo sapien
tttctcaacgagaaggacggactgg

SEQ ID NO: 496366 - DNA, 25 bp, Homo sapien
tcccaagacatgaagacgaggcagt

SEQ ID NO: 496367 - DNA, 25 bp, Homo sapien
ttatgcagtctatgggcgtggccgc

SEQ ID NO: 496368 - DNA, 25 bp, Homo sapien
gcgttgtataacgacagcctccgtc

SEQ ID NO: 496369 - DNA, 25 bp, Homo sapien
gattcactcgtggtggcatggctac

SEQ ID NO: 496370 - DNA, 25 bp, Homo sapien
tggctacggtgctgggagaaaatcc

SEQ ID NO: 496371 - DNA, 25 bp, Homo sapien
ccgtcctcggatgagcctggtagta

SEQ ID NO: 496372 - DNA, 25 bp, Homo sapien
ggtgaccagctgactaaaccctcca

SEQ ID NO: 496373 - DNA, 25 bp, Homo sapien
tattccacagtaagagccgagtcat

SEQ ID NO: 496374 - DNA, 25 bp, Homo sapien
tcgagtcacagattgaggcagaacc

SEQ ID NO: 496375 - DNA, 25 bp, Homo sapien
tccaaaacagtcttatggcgcatac

SEQ ID NO: 496376 - DNA, 25 bp, Homo sapien
ctctcatctacggaagggcaggcac

SEQ ID NO: 496377 - DNA, 25 bp, Homo sapien
ccagaacctgctctcatctacggaa

SEQ ID NO: 496378 - DNA, 25 bp, Homo sapien
tgtgttcttatttctcagcctaaca

SEQ ID NO: 496379 - DNA, 25 bp, Homo sapien
tcttatttctcagcctaacaccaac

SEQ ID NO: 496380 - DNA, 25 bp, Homo sapien
gacgccgccgttaatgtgtgcaggt

SEQ ID NO: 496381 - DNA, 25 bp, Homo sapien
cctcagaaaacctcttgggagagcg

SEQ ID NO: 496382 - DNA, 25 bp, Homo sapien
agagcgatcccccatattcatgatg

SEQ ID NO: 496383 - DNA, 25 bp, Homo sapien
ggctgcccacgaaatccctcagaaa

SEQ ID NO: 496384 - DNA, 25 bp, Homo sapien
tgcgatgcgcaggacggacgccttc

SEQ ID NO: 496385 - DNA, 25 bp, Homo sapien
ggatgaatccgatgccagcgtcctg

SEQ ID NO: 496386 - DNA, 25 bp, Homo sapien
catttgtcccgtcgccggtctatca

SEQ ID NO: 496387 - DNA, 25 bp, Homo sapien
ccttcacggaggtccatttgtcccg

SEQ ID NO: 496388 - DNA, 25 bp, Homo sapien
taagaggcatattcagtcccgagca

SEQ ID NO: 496389 - DNA, 25 bp, Homo sapien
caatgaaatttggacggacaggcgg

SEQ ID NO: 496390 - DNA, 25 bp, Homo sapien
tgttcggaaacatatgggctgctct

SEQ ID NO: 496391 - DNA, 25 bp, Homo sapien
cagactctcggatgccaagggaaag

SEQ ID NO: 496392 - DNA, 25 bp, Homo sapien
taaagacttcgatgagaaccagcgg

SEQ ID NO: 496393 - DNA, 25 bp, Homo sapien
tcagataacgatgccataggtggtg

SEQ ID NO: 496394 - DNA, 25 bp, Homo sapien
ggcgtgaccccttatgaatggctca

SEQ ID NO: 496395 - DNA, 25 bp, Homo sapien
ggacaggcttgcaccaaaacgatga

SEQ ID NO: 496396 - DNA, 25 bp, Homo sapien
tgcgagggcactggggcacgcgtag

SEQ ID NO: 496397 - DNA, 25 bp, Homo sapien
cacgcgtagcgaggcgtcagcggag

SEQ ID NO: 496398 - DNA, 25 bp, Homo sapien
agcgaggcgtcagcggaggggccgg

SEQ ID NO: 496399 - DNA, 25 bp, Homo sapien
tgtgcgagggcactggggcacgcgt

SEQ ID NO: 496400 - DNA, 25 bp, Homo sapien
cctccctcacatccgtgatgcccag

SEQ ID NO: 496401 - DNA, 25 bp, Homo sapien
tccctcacatccgtgatgcccaggc

SEQ ID NO: 496402 - DNA, 25 bp, Homo sapien
tcctccctcacatccgtgatgccca

SEQ ID NO: 496403 - DNA, 25 bp, Homo sapien
ccagctggcggtgagccttgctcac

SEQ ID NO: 496404 - DNA, 25 bp, Homo sapien
cctcccctgtaatcggcggttggtg

SEQ ID NO: 496405 - DNA, 25 bp, Homo sapien
gcagcttccctcgtcgccccgaagc

SEQ ID NO: 496406 - DNA, 25 bp, Homo sapien
cgcagggtgcgctgaaacgcatttg

SEQ ID NO: 496407 - DNA, 25 bp, Homo sapien
acagcagctggtgcggaggagacag

SEQ ID NO: 496408 - DNA, 25 bp, Homo sapien
gagactctcccaagttttctgtagg

SEQ ID NO: 496409 - DNA, 25 bp, Homo sapien
gatccgaccttcactcaaatgcctg

SEQ ID NO: 496410 - DNA, 25 bp, Homo sapien
ggttctgactccgtgcaacgagctc

SEQ ID NO: 496411 - DNA, 25 bp, Homo sapien
gagaggaaaaagacacgaggctgct

SEQ ID NO: 496412 - DNA, 25 bp, Homo sapien
cattcaggcagaaacggtcagtgga

SEQ ID NO: 496413 - DNA, 25 bp, Homo sapien
gacccactgattaccaagaggagag

SEQ ID NO: 496414 - DNA, 25 bp, Homo sapien
gattcggagccgtgtgaactgagct

SEQ ID NO: 496415 - DNA, 25 bp, Homo sapien
ctgagctcccatcaagagttgagga

SEQ ID NO: 496416 - DNA, 25 bp, Homo sapien
gacacgagtgctcagaatggccgct

SEQ ID NO: 496417 - DNA, 25 bp, Homo sapien
gactggtcctctagcaaatggtcct

SEQ ID NO: 496418 - DNA, 25 bp, Homo sapien
ccaatcctaaaagcgcggccgtttg

SEQ ID NO: 496419 - DNA, 25 bp, Homo sapien
tgaagaagacgttagagccggaatc

SEQ ID NO: 496420 - DNA, 25 bp, Homo sapien
acttggcaggtcctctgcgggtgtc

SEQ ID NO: 496421 - DNA, 25 bp, Homo sapien
ggaccacggccctcagtggccggca

SEQ ID NO: 496422 - DNA, 25 bp, Homo sapien
ggacccctcccatggagacctctgc

SEQ ID NO: 496423 - DNA, 25 bp, Homo sapien
agtggccggcacacttggcaggtcc

SEQ ID NO: 496424 - DNA, 25 bp, Homo sapien
ccagccacactccaatgttcaggct

SEQ ID NO: 496425 - DNA, 25 bp, Homo sapien
cagccacactccaatgttcaggctg

SEQ ID NO: 496426 - DNA, 25 bp, Homo sapien
gtcatctctattgaatttgaaagcg

SEQ ID NO: 496427 - DNA, 25 bp, Homo sapien
tgtcggagagagtcctttggaaaaa

SEQ ID NO: 496428 - DNA, 25 bp, Homo sapien
cgtcgggcgaagcacgaggacgagc

SEQ ID NO: 496429 - DNA, 25 bp, Homo sapien
gacgagctgcaggtttgccgggaaa

SEQ ID NO: 496430 - DNA, 25 bp, Homo sapien
gatgtaaccgtgtaagtctggtacg

SEQ ID NO: 496431 - DNA, 25 bp, Homo sapien
gagtggcagtagtccagggtcccac

SEQ ID NO: 496432 - DNA, 25 bp, Homo sapien
tcggtcagctgcgacttatcgatgt

SEQ ID NO: 496433 - DNA, 25 bp, Homo sapien
ctggtacggagctcagcattatgac

SEQ ID NO: 496434 - DNA, 25 bp, Homo sapien
tgtcgactggacgtcattgggcagc

SEQ ID NO: 496435 - DNA, 25 bp, Homo sapien
gcatctgagccgtctgcttcaccat

SEQ ID NO: 496436 - DNA, 25 bp, Homo sapien
gcttcaccatgagggcgaaactttc

SEQ ID NO: 496437 - DNA, 25 bp, Homo sapien
ggtcccgaaggactgcagcatctga

SEQ ID NO: 496438 - DNA, 25 bp, Homo sapien
gccatcaaaaggcatctcaagcctg

SEQ ID NO: 496439 - DNA, 25 bp, Homo sapien
tggtcttacgtgctgctgacacaaa

SEQ ID NO: 496440 - DNA, 25 bp, Homo sapien
gaggttgccgagctaattgccatca

SEQ ID NO: 496441 - DNA, 25 bp, Homo sapien
cacaaactcccgctgggacgaaaga

SEQ ID NO: 496442 - DNA, 25 bp, Homo sapien
gtgcccctctttcagtgccagcctc

SEQ ID NO: 496443 - DNA, 25 bp, Homo sapien
gtggcctggttgtcaagctggtcct

SEQ ID NO: 496444 - DNA, 25 bp, Homo sapien
ggtggcctggttgtcaagctggtcc

SEQ ID NO: 496445 - DNA, 25 bp, Homo sapien
cggtggcctggttgtcaagctggtc

SEQ ID NO: 496446 - DNA, 25 bp, Homo sapien
tagctggcactccagcgttgcacca

SEQ ID NO: 496447 - DNA, 25 bp, Homo sapien
tgcctccgcgtagctggcactccag

SEQ ID NO: 496448 - DNA, 25 bp, Homo sapien
tccgcgtagctggcactccagctgt

SEQ ID NO: 496449 - DNA, 25 bp, Homo sapien
gagtagctggcactccagcgttgca

SEQ ID NO: 496450 - DNA, 25 bp, Homo sapien
agaactcatcgaaggcagcctcggt

SEQ ID NO: 496451 - DNA, 25 bp, Homo sapien
tgctcaaagtgccggagctgcagac

SEQ ID NO: 496452 - DNA, 25 bp, Homo sapien
tgatgctttgcccagaactcatcga

SEQ ID NO: 496453 - DNA, 25 bp, Homo sapien
cgaaggcagcctcggtttcgttcag

SEQ ID NO: 496454 - DNA, 25 bp, Homo sapien
tcgtgcatttcaaggctcagcctga

SEQ ID NO: 496455 - DNA, 25 bp, Homo sapien
acaggctccacctggcaagcggaga

SEQ ID NO: 496456 - DNA, 25 bp, Homo sapien
caatgacgcagtcatcaatcgtgca

SEQ ID NO: 496457 - DNA, 25 bp, Homo sapien
tcagcctgacttaatctcacaggct

SEQ ID NO: 496458 - DNA, 25 bp, Homo sapien
tcagtatatcaatgtttgtaacagc

SEQ ID NO: 496459 - DNA, 25 bp, Homo sapien
aacccagatacccttcaacaggtga

SEQ ID NO: 496460 - DNA, 25 bp, Homo sapien
tactcaaatccggaaacaacccaga

SEQ ID NO: 496461 - DNA, 25 bp, Homo sapien
aagaactgtggtccgtccacaccgg

SEQ ID NO: 496462 - DNA, 25 bp, Homo sapien
gtctgtgaaggttgctatcttctgg

SEQ ID NO: 496463 - DNA, 25 bp, Homo sapien
gatttctcctcgaagctggccaggt

SEQ ID NO: 496464 - DNA, 25 bp, Homo sapien
caggctgttgccgatgtctgtgaag

SEQ ID NO: 496465 - DNA, 25 bp, Homo sapien
ggtgctccacatgcgccaggctgtt

SEQ ID NO: 496466 - DNA, 25 bp, Homo sapien
tgcgatctccgcagagaactggtca

SEQ ID NO: 496467 - DNA, 25 bp, Homo sapien
cggatggagtctaccgcgtagtgct

SEQ ID NO: 496468 - DNA, 25 bp, Homo sapien
tctaccgcgtagtgcttgttcccaa

SEQ ID NO: 496469 - DNA, 25 bp, Homo sapien
ccaatgagctgctcgccgtccagag

SEQ ID NO: 496470 - DNA, 25 bp, Homo sapien
cttgtaaatcgcgttgagctcctgg

SEQ ID NO: 496471 - DNA, 25 bp, Homo sapien
tggatcttattttccgcaccggtct

SEQ ID NO: 496472 - DNA, 25 bp, Homo sapien
aaacttctcgatttcctggagggca

SEQ ID NO: 496473 - DNA, 25 bp, Homo sapien
ccgtcctgggactggcacttgtcca

SEQ ID NO: 496474 - DNA, 25 bp, Homo sapien
tggcctgcctgcggtggaacacctc

SEQ ID NO: 496475 - DNA, 25 bp, Homo sapien
tctggaagacctttcgcacgtgctc

SEQ ID NO: 496476 - DNA, 25 bp, Homo sapien
ccaccggctgcacgggccgcgtctg

SEQ ID NO: 496477 - DNA, 25 bp, Homo sapien
ggcgactttgccagtgcctcgggtc

SEQ ID NO: 496478 - DNA, 25 bp, Homo sapien
agcgcaccgccctcggagctggagt

SEQ ID NO: 496479 - DNA, 25 bp, Homo sapien
cctcggagctggagttctcagagcc

SEQ ID NO: 496480 - DNA, 25 bp, Homo sapien
gagttctcagagcctcgccgaatgc

SEQ ID NO: 496481 - DNA, 25 bp, Homo sapien
tccggtagggccctctccggagcgc

SEQ ID NO: 496482 - DNA, 25 bp, Homo sapien
cctcccccgctgagccgcggccctg

SEQ ID NO: 496483 - DNA, 25 bp, Homo sapien
ctgcgcaggatggccaggctttcct

SEQ ID NO: 496484 - DNA, 25 bp, Homo sapien
gcgcaggatggccaggctttcctcc

SEQ ID NO: 496485 - DNA, 25 bp, Homo sapien
tgagccgcggccctgccggctctca

SEQ ID NO: 496486 - DNA, 25 bp, Homo sapien
agctcctccacgtaggcccgttctg

SEQ ID NO: 496487 - DNA, 25 bp, Homo sapien
gctcctccacgtaggcccgttctgt

SEQ ID NO: 496488 - DNA, 25 bp, Homo sapien
tcctccacgtaggcccgttctgtgt

SEQ ID NO: 496489 - DNA, 25 bp, Homo sapien
ctcctccacgtaggcccgttctgtg

SEQ ID NO: 496490 - DNA, 25 bp, Homo sapien
gcccaggggagtccccgtggcagtc

SEQ ID NO: 496491 - DNA, 25 bp, Homo sapien
gagtccccgtggcagtcggccctcc

SEQ ID NO: 496492 - DNA, 25 bp, Homo sapien
gcagtcggccctccccgagtccagc

SEQ ID NO: 496493 - DNA, 25 bp, Homo sapien
tggcagtcggccctccccgagtcca

SEQ ID NO: 496494 - DNA, 25 bp, Homo sapien
cagtgggttatccatctccgcggcg

SEQ ID NO: 496495 - DNA, 25 bp, Homo sapien
cttgttgtgaaggcctgttgacagg

SEQ ID NO: 496496 - DNA, 25 bp, Homo sapien
gaaggcctgttgacaggaggtgagc

SEQ ID NO: 496497 - DNA, 25 bp, Homo sapien
ttgtggaagtgatagatttcctcca

SEQ ID NO: 496498 - DNA, 25 bp, Homo sapien
tgggcagtcagtgtagttttccagc

SEQ ID NO: 496499 - DNA, 25 bp, Homo sapien
ctgggcagtcagtgtagttttccag

SEQ ID NO: 496500 - DNA, 25 bp, Homo sapien
gggcagtcagtgtagttttccagct

SEQ ID NO: 496501 - DNA, 25 bp, Homo sapien
ggcagtcagtgtagttttccagctc

SEQ ID NO: 496502 - DNA, 25 bp, Homo sapien
ggagcactgtctccacaggctctca

SEQ ID NO: 496503 - DNA, 25 bp, Homo sapien
gcttgttctgacagtacttctcata

SEQ ID NO: 496504 - DNA, 25 bp, Homo sapien
gaaaaacgggcagtcggagcactgt

SEQ ID NO: 496505 - DNA, 25 bp, Homo sapien
gggcttgttctgacagtacttctca

SEQ ID NO: 496506 - DNA, 25 bp, Homo sapien
ggagtccaggctcagcttgtggtcc

SEQ ID NO: 496507 - DNA, 25 bp, Homo sapien
agctggtacttggtgatcctctgca

SEQ ID NO: 496508 - DNA, 25 bp, Homo sapien
gctcagcttgtggtccagctttctc

SEQ ID NO: 496509 - DNA, 25 bp, Homo sapien
gatcctctgcactggcttcagcagg

SEQ ID NO: 496510 - DNA, 25 bp, Homo sapien
gtcatagccggtgatagcgatgagg

SEQ ID NO: 496511 - DNA, 25 bp, Homo sapien
ccccctcgcagttcctgctgtattt

SEQ ID NO: 496512 - DNA, 25 bp, Homo sapien
tagcgatgaggtgcatggagtcgtt

SEQ ID NO: 496513 - DNA, 25 bp, Homo sapien
cgatgaggtgcatggagtcgttcac

SEQ ID NO: 496514 - DNA, 25 bp, Homo sapien
gcagcttgcccaggtcgccgagatt

SEQ ID NO: 496515 - DNA, 25 bp, Homo sapien
ttgtggtcggtccagacgctgaacg

SEQ ID NO: 496516 - DNA, 25 bp, Homo sapien
ttctcgtgcaggaacaggtgccgct

SEQ ID NO: 496517 - DNA, 25 bp, Homo sapien
gaacgagccctgcatcagcagcttg

SEQ ID NO: 496518 - DNA, 25 bp, Homo sapien
actgcttgtagctgtaggagggagc

SEQ ID NO: 496519 - DNA, 25 bp, Homo sapien
gggagctttctcatacccctcccca

SEQ ID NO: 496520 - DNA, 25 bp, Homo sapien
tttaaggactgcttgtagctgtagg

SEQ ID NO: 496521 - DNA, 25 bp, Homo sapien
cttgtagctgtaggagggagctttc

SEQ ID NO: 496522 - DNA, 25 bp, Homo sapien
tcctcgcgcgcgttgtaccagatct

SEQ ID NO: 496523 - DNA, 25 bp, Homo sapien
ttcacgttctccgtaatgccaacgg

SEQ ID NO: 496524 - DNA, 25 bp, Homo sapien
ctggacgatgtagacctcctcgcgc

SEQ ID NO: 496525 - DNA, 25 bp, Homo sapien
gaacttcttagcatctcccttcacg

SEQ ID NO: 496526 - DNA, 25 bp, Homo sapien
gtttcactctcggaacatccaaaga

SEQ ID NO: 496527 - DNA, 25 bp, Homo sapien
acacgctttggtttcactctcggaa

SEQ ID NO: 496528 - DNA, 25 bp, Homo sapien
cactctcggaacatccaaagataat

SEQ ID NO: 496529 - DNA, 25 bp, Homo sapien
gctttggtttcactctcggaacatc

SEQ ID NO: 496530 - DNA, 25 bp, Homo sapien
tttccgaatttcattcacccacgcg

SEQ ID NO: 496531 - DNA, 25 bp, Homo sapien
tcacccacgcggctttaatctcagg

SEQ ID NO: 496532 - DNA, 25 bp, Homo sapien
cacccacgcggctttaatctcagga

SEQ ID NO: 496533 - DNA, 25 bp, Homo sapien
gaatttcattcacccacgcggcttt

SEQ ID NO: 496534 - DNA, 25 bp, Homo sapien
gtgactgctccagcgcccggtgctg

SEQ ID NO: 496535 - DNA, 25 bp, Homo sapien
gcaggctctgtgactgctccagcgc

SEQ ID NO: 496536 - DNA, 25 bp, Homo sapien
ggcaggctctgtgactgctccagcg

SEQ ID NO: 496537 - DNA, 25 bp, Homo sapien
ctctgtgactgctccagcgcccggt

SEQ ID NO: 496538 - DNA, 25 bp, Homo sapien
ggcgctgagctgacgtatccctcca

SEQ ID NO: 496539 - DNA, 25 bp, Homo sapien
gctgacgtatccctccaggcttagg

SEQ ID NO: 496540 - DNA, 25 bp, Homo sapien
tttcggggggctttgtcagtggcgc

SEQ ID NO: 496541 - DNA, 25 bp, Homo sapien
ctgagctgacgtatccctccaggct

SEQ ID NO: 496542 - DNA, 25 bp, Homo sapien
gttgcacgctcggccgaggctcctt

SEQ ID NO: 496543 - DNA, 25 bp, Homo sapien
aggcgggtccggctgtcgcagggag

SEQ ID NO: 496544 - DNA, 25 bp, Homo sapien
caaggcggctccgggttgcacgctc

SEQ ID NO: 496545 - DNA, 25 bp, Homo sapien
aagaaactatgcagagggcatcgca

SEQ ID NO: 496546 - DNA, 25 bp, Homo sapien
accctgcagggtaaagcgctttctg

SEQ ID NO: 496547 - DNA, 25 bp, Homo sapien
aaccctgcagggtaaagcgctttct

SEQ ID NO: 496548 - DNA, 25 bp, Homo sapien
gcaaaaccctgcagggtaaagcgct

SEQ ID NO: 496549 - DNA, 25 bp, Homo sapien
ctgcagggtaaagcgctttctggaa

SEQ ID NO: 496550 - DNA, 25 bp, Homo sapien
caccaaagggagtcgggtcgctctt

SEQ ID NO: 496551 - DNA, 25 bp, Homo sapien
agtcgggtcgctctttacttcatgc

SEQ ID NO: 496552 - DNA, 25 bp, Homo sapien
ggagtcgggtcgctctttacttcat

SEQ ID NO: 496553 - DNA, 25 bp, Homo sapien
ctcgcacaccaaagggagtcgggtc

SEQ ID NO: 496554 - DNA, 25 bp, Homo sapien
tcaccagagcatcacacattgaaca

SEQ ID NO: 496555 - DNA, 25 bp, Homo sapien
caggctccagatagacctgctgtga

SEQ ID NO: 496556 - DNA, 25 bp, Homo sapien
agcataaagacccacgagagcatcc

SEQ ID NO: 496557 - DNA, 25 bp, Homo sapien
cattgaacacaaccgcgtgtctgcc

SEQ ID NO: 496558 - DNA, 25 bp, Homo sapien
caaaaggattcttgagctgccctgg

SEQ ID NO: 496559 - DNA, 25 bp, Homo sapien
cattcatggatgacgagacggaagc

SEQ ID NO: 496560 - DNA, 25 bp, Homo sapien
tgaccatgatgggaacggcagtgcc

SEQ ID NO: 496561 - DNA, 25 bp, Homo sapien
cacaagcggagagggtttgacagac

SEQ ID NO: 496562 - DNA, 25 bp, Homo sapien
gattttccggttgcagacctgcagc

SEQ ID NO: 496563 - DNA, 25 bp, Homo sapien
ttttccggttgcagacctgcagctt

SEQ ID NO: 496564 - DNA, 25 bp, Homo sapien
ctgcatctgtgtgagaattgaggac

SEQ ID NO: 496565 - DNA, 25 bp, Homo sapien
tccggttgcagacctgcagcttggc

SEQ ID NO: 496566 - DNA, 25 bp, Homo sapien
taacgagatttgagcttgggcacaa

SEQ ID NO: 496567 - DNA, 25 bp, Homo sapien
tgacctatgggataccgagggctgt

SEQ ID NO: 496568 - DNA, 25 bp, Homo sapien
catgttcaacacctagcagaccgag

SEQ ID NO: 496569 - DNA, 25 bp, Homo sapien
tcataaagagctgagcaggacaccc

SEQ ID NO: 496570 - DNA, 25 bp, Homo sapien
cctccagtgagtgggacgttttgct

SEQ ID NO: 496571 - DNA, 25 bp, Homo sapien
cagtgagtgggacgttttgctccaa

SEQ ID NO: 496572 - DNA, 25 bp, Homo sapien
ctgcgtcggacgagttaatctgctc

SEQ ID NO: 496573 - DNA, 25 bp, Homo sapien
gacgagttaatctgctcctctgcac

SEQ ID NO: 496574 - DNA, 25 bp, Homo sapien
cagcttcttggggcccaacccgccg

SEQ ID NO: 496575 - DNA, 25 bp, Homo sapien
ctctgaggaaggtgcacccacgagt

SEQ ID NO: 496576 - DNA, 25 bp, Homo sapien
ccacgagtgggctctacaggaggct

SEQ ID NO: 496577 - DNA, 25 bp, Homo sapien
gtgacagcattctatgacataaagg

SEQ ID NO: 496578 - DNA, 25 bp, Homo sapien
cagcattctatgacataaagggtag

SEQ ID NO: 496579 - DNA, 25 bp, Homo sapien
aaatgagaattgtatgtatagttag

SEQ ID NO: 496580 - DNA, 25 bp, Homo sapien
gaagcggcagctgttcctacagagt

SEQ ID NO: 496581 - DNA, 25 bp, Homo sapien
gcggatgctgcacagatgtcatgga

SEQ ID NO: 496582 - DNA, 25 bp, Homo sapien
cactgtaagagtggaggttcctgtc

SEQ ID NO: 496583 - DNA, 25 bp, Homo sapien
ccctcacgtgatggcctgtactggc

SEQ ID NO: 496584 - DNA, 25 bp, Homo sapien
ctcgtggtccgccacgaccgtgtat

SEQ ID NO: 496585 - DNA, 25 bp, Homo sapien
tggtccgccacgaccgtgtatttac

SEQ ID NO: 496586 - DNA, 25 bp, Homo sapien
tccgccacgaccgtgtatttacctg

SEQ ID NO: 496587 - DNA, 25 bp, Homo sapien
gccacgaccgtgtatttacctggaa

SEQ ID NO: 496588 - DNA, 25 bp, Homo sapien
ccagctccaccacgtccccgctcct

SEQ ID NO: 496589 - DNA, 25 bp, Homo sapien
agctccaccacgtccccgctcctca

SEQ ID NO: 496590 - DNA, 25 bp, Homo sapien
cgctcctcacgcgcagcgcatcggg

SEQ ID NO: 496591 - DNA, 25 bp, Homo sapien
cacgtccccgctcctcacgcgcagc

SEQ ID NO: 496592 - DNA, 25 bp, Homo sapien
aggggcgagggtcagcggcagccac

SEQ ID NO: 496593 - DNA, 25 bp, Homo sapien
cagcggcagccacgtgcggggcagt

SEQ ID NO: 496594 - DNA, 25 bp, Homo sapien
tgctcaggcactgggccgagccgga

SEQ ID NO: 496595 - DNA, 25 bp, Homo sapien
cgagccggacggacaggctgctggc

SEQ ID NO: 496596 - DNA, 25 bp, Homo sapien
gccagtggtcgggtccctgacgtac

SEQ ID NO: 496597 - DNA, 25 bp, Homo sapien
tgggccgagccggacgggccgagcc

SEQ ID NO: 496598 - DNA, 25 bp, Homo sapien
gtgggctcggggcacgtgggcctta

SEQ ID NO: 496599 - DNA, 25 bp, Homo sapien
tcacgggtgggctcggggcacgtgg

SEQ ID NO: 496600 - DNA, 25 bp, Homo sapien
cacgggtgggctcggggcacgtggg

SEQ ID NO: 496601 - DNA, 25 bp, Homo sapien
tgggctcggggcacgtgggccttac

SEQ ID NO: 496602 - DNA, 25 bp, Homo sapien
gggacgggcttcggcgtcggctctg

SEQ ID NO: 496603 - DNA, 25 bp, Homo sapien
ttcctcgcccgggcccttggcagcg

SEQ ID NO: 496604 - DNA, 25 bp, Homo sapien
acgggcttcggcgtcggctctgccg

SEQ ID NO: 496605 - DNA, 25 bp, Homo sapien
gcacacacggggcagcttcctcgcc

SEQ ID NO: 496606 - DNA, 25 bp, Homo sapien
tcgctgcagctggacgagttgctca

SEQ ID NO: 496607 - DNA, 25 bp, Homo sapien
tgcagctggacgagttgctcagcac

SEQ ID NO: 496608 - DNA, 25 bp, Homo sapien
cgccctcgctgcagctggacgagtt

SEQ ID NO: 496609 - DNA, 25 bp, Homo sapien
ggacgagttgctcagcacggccgac

SEQ ID NO: 496610 - DNA, 25 bp, Homo sapien
tctgagctatggtcggcagcactgg

SEQ ID NO: 496611 - DNA, 25 bp, Homo sapien
tgtaaaagctaaagagaccccgtgc

SEQ ID NO: 496612 - DNA, 25 bp, Homo sapien
gagtgccatccgtttccatgggaga

SEQ ID NO: 496613 - DNA, 25 bp, Homo sapien
tgcagactagacaccgaaagggctt

SEQ ID NO: 496614 - DNA, 25 bp, Homo sapien
gcttcctatttgattccgcaccctg

SEQ ID NO: 496615 - DNA, 25 bp, Homo sapien
tgcacagtacatcagggacatcgcg

SEQ ID NO: 496616 - DNA, 25 bp, Homo sapien
catcagaggaaaagctgccgagtct

SEQ ID NO: 496617 - DNA, 25 bp, Homo sapien
gacacagcacgcgttccaaataact

SEQ ID NO: 496618 - DNA, 25 bp, Homo sapien
caatgacttaccatgtgcaagcaca

SEQ ID NO: 496619 - DNA, 25 bp, Homo sapien
gctgagacgttctgtgtcttgacag

SEQ ID NO: 496620 - DNA, 25 bp, Homo sapien
tggaaaccccgactgctgagacgtt

SEQ ID NO: 496621 - DNA, 25 bp, Homo sapien
gaaagcaaagcggttgctcggtgcc

SEQ ID NO: 496622 - DNA, 25 bp, Homo sapien
gagagtgtcggctgcattgtgattc

SEQ ID NO: 496623 - DNA, 25 bp, Homo sapien
gtttctgacacgcacaaccttgttg

SEQ ID NO: 496624 - DNA, 25 bp, Homo sapien
tatgctcccttttctggtctggaga

SEQ ID NO: 496625 - DNA, 25 bp, Homo sapien
tctgtaatggttccactacgcttcc

SEQ ID NO: 496626 - DNA, 25 bp, Homo sapien
tgcccgcatcccgtgagttagaaac

SEQ ID NO: 496627 - DNA, 25 bp, Homo sapien
cagttctagagagcagactgcccgc

SEQ ID NO: 496628 - DNA, 25 bp, Homo sapien
tgtcgacaccaatctgagctggccg

SEQ ID NO: 496629 - DNA, 25 bp, Homo sapien
tgtctgccgactgccaactttgctg

SEQ ID NO: 496630 - DNA, 25 bp, Homo sapien
ttttatttgatatggagtttcttag

SEQ ID NO: 496631 - DNA, 25 bp, Homo sapien
attttttatttgatatggagtttct

SEQ ID NO: 496632 - DNA, 25 bp, Homo sapien
tttttatttgatatggagtttctta

SEQ ID NO: 496633 - DNA, 25 bp, Homo sapien
tttatttgatatggagtttcttagg

SEQ ID NO: 496634 - DNA, 25 bp, Homo sapien
gaaatctctgcagtgctgcccctgc

SEQ ID NO: 496635 - DNA, 25 bp, Homo sapien
gatgaaatctctgcagtgctgcccc

SEQ ID NO: 496636 - DNA, 25 bp, Homo sapien
tgctgcccctgcctgttgacattcc

SEQ ID NO: 496637 - DNA, 25 bp, Homo sapien
gcctgttgacattccccatgggact

SEQ ID NO: 496638 - DNA, 25 bp, Homo sapien
gccctgaagcccaagcagaaggcag

SEQ ID NO: 496639 - DNA, 25 bp, Homo sapien
agccctgaagcccaagcagaaggca

SEQ ID NO: 496640 - DNA, 25 bp, Homo sapien
ggcagccctgaagcccaagcagaag

SEQ ID NO: 496641 - DNA, 25 bp, Homo sapien
gcagccctgaagcccaagcagaagg

SEQ ID NO: 496642 - DNA, 25 bp, Homo sapien
tcctcctgaggccttagcgaccccg

SEQ ID NO: 496643 - DNA, 25 bp, Homo sapien
gtgaggccccggcttccacggcatg

SEQ ID NO: 496644 - DNA, 25 bp, Homo sapien
cggcttccacggcatgtcccgtgtt

SEQ ID NO: 496645 - DNA, 25 bp, Homo sapien
ttccacggcatgtcccgtgtttctc

SEQ ID NO: 496646 - DNA, 25 bp, Homo sapien
ggctgatcccgagggcgcgctcggg

SEQ ID NO: 496647 - DNA, 25 bp, Homo sapien
ccgtcgcccatccttcccggcctgg

SEQ ID NO: 496648 - DNA, 25 bp, Homo sapien
ctgcgggtcgatgccggcgaggaga

SEQ ID NO: 496649 - DNA, 25 bp, Homo sapien
gggcgccgccgcgtaaacgtgaggc

SEQ ID NO: 496650 - DNA, 25 bp, Homo sapien
tgggtgtcctccctgccgtgctccc

SEQ ID NO: 496651 - DNA, 25 bp, Homo sapien
aatgcgagttccgtgaagcgcccac

SEQ ID NO: 496652 - DNA, 25 bp, Homo sapien
gtgccccgcccagtgcctcggagac

SEQ ID NO: 496653 - DNA, 25 bp, Homo sapien
ctgggaaatgcgagttccgtgaagc

SEQ ID NO: 496654 - DNA, 25 bp, Homo sapien
gagttccgtgaagcgcccaccgcgt

SEQ ID NO: 496655 - DNA, 25 bp, Homo sapien
ccttgaagatctcccgggcctcctc

SEQ ID NO: 496656 - DNA, 25 bp, Homo sapien
agctcctccaggaacgcgttggcgc

SEQ ID NO: 496657 - DNA, 25 bp, Homo sapien
gctcctccaggaacgcgttggcgcg

SEQ ID NO: 496658 - DNA, 25 bp, Homo sapien
cgtcctctccgcgtccttgaagatc

SEQ ID NO: 496659 - DNA, 25 bp, Homo sapien
cgccgcctgcagtgtccgcggcgcg

SEQ ID NO: 496660 - DNA, 25 bp, Homo sapien
cgcctgcagtgtccgcggcgcgggg

SEQ ID NO: 496661 - DNA, 25 bp, Homo sapien
gcggggcgccccgaggctgggctca

SEQ ID NO: 496662 - DNA, 25 bp, Homo sapien
cggcgcggggcgccccgaggctggg

SEQ ID NO: 496663 - DNA, 25 bp, Homo sapien
ggactggtggtgatcatccactcac

SEQ ID NO: 496664 - DNA, 25 bp, Homo sapien
cagtaagctgagaagggttgcaggc

SEQ ID NO: 496665 - DNA, 25 bp, Homo sapien
gtaagctgagaagggttgcaggcag

SEQ ID NO: 496666 - DNA, 25 bp, Homo sapien
caggactggtggtgatcatccactc

SEQ ID NO: 496667 - DNA, 25 bp, Homo sapien
cagaagcagatataggactggagct

SEQ ID NO: 496668 - DNA, 25 bp, Homo sapien
tggacttgaggcacactggtcccca

SEQ ID NO: 496669 - DNA, 25 bp, Homo sapien
gcgtctcacagttccggccctcgaa

SEQ ID NO: 496670 - DNA, 25 bp, Homo sapien
aggcagaagcagatataggactgga

SEQ ID NO: 496671 - DNA, 25 bp, Homo sapien
tgggtgtgcaggacaccccgtctgc

SEQ ID NO: 496672 - DNA, 25 bp, Homo sapien
tgccagcagagagtacccctcgtgg

SEQ ID NO: 496673 - DNA, 25 bp, Homo sapien
agccgccgttctcgttcacacagat

SEQ ID NO: 496674 - DNA, 25 bp, Homo sapien
gcttggtgcccgtgtggtcactgca

SEQ ID NO: 496675 - DNA, 25 bp, Homo sapien
ggtatttttccacatggatattcaa

SEQ ID NO: 496676 - DNA, 25 bp, Homo sapien
cttggggtttgctggcatttctttt

SEQ ID NO: 496677 - DNA, 25 bp, Homo sapien
taggtatttttccacatggatattc

SEQ ID NO: 496678 - DNA, 25 bp, Homo sapien
tttctagaataggtatttttccaca

SEQ ID NO: 496679 - DNA, 25 bp, Homo sapien
gcacaccttgccccccacaattcgg

SEQ ID NO: 496680 - DNA, 25 bp, Homo sapien
ggcacaccttgccccccacaattcg

SEQ ID NO: 496681 - DNA, 25 bp, Homo sapien
ctgccatggacactcccctttgggg

SEQ ID NO: 496682 - DNA, 25 bp, Homo sapien
cacaccttgccccccacaattcggc

SEQ ID NO: 496683 - DNA, 25 bp, Homo sapien
tgaggacgacgtgacaactcggatg

SEQ ID NO: 496684 - DNA, 25 bp, Homo sapien
gatcccacctcaaagagtaaccgtg

SEQ ID NO: 496685 - DNA, 25 bp, Homo sapien
catagctttgatccaatgctcctga

SEQ ID NO: 496686 - DNA, 25 bp, Homo sapien
gcaaagatcaggcaaagatcccacc

SEQ ID NO: 496687 - DNA, 25 bp, Homo sapien
tctagccgagacgtgctcttgggca

SEQ ID NO: 496688 - DNA, 25 bp, Homo sapien
tcccgggcatgccaaggaacctctg

SEQ ID NO: 496689 - DNA, 25 bp, Homo sapien
caaggaacctctggcattgcacaat

SEQ ID NO: 496690 - DNA, 25 bp, Homo sapien
gggcacggcccaagaatacaaatgt

SEQ ID NO: 496691 - DNA, 25 bp, Homo sapien
gtgttgatcagggtccccccacaca

SEQ ID NO: 496692 - DNA, 25 bp, Homo sapien
ccagcaccgcgatcaggttcctcca

SEQ ID NO: 496693 - DNA, 25 bp, Homo sapien
cctccagttcttgattttgtcgaaa

SEQ ID NO: 496694 - DNA, 25 bp, Homo sapien
ttttgtcgaaacagtgggccgcgga

SEQ ID NO: 496695 - DNA, 25 bp, Homo sapien
ccagcaccgcggtcggacaggggag

SEQ ID NO: 496696 - DNA, 25 bp, Homo sapien
accgcggtcggacaggggagagtgg

SEQ ID NO: 496697 - DNA, 25 bp, Homo sapien
gcaccgcggtcggacaggggagagt

SEQ ID NO: 496698 - DNA, 25 bp, Homo sapien
cagcaccgcggtcggacaggggaga

SEQ ID NO: 496699 - DNA, 25 bp, Homo sapien
agcaccgcggtcggacagggaagag

SEQ ID NO: 496700 - DNA, 25 bp, Homo sapien
ccagcaccgcggtcggacagggaag

SEQ ID NO: 496701 - DNA, 25 bp, Homo sapien
gcaccgcggtcggacagggaagagt

SEQ ID NO: 496702 - DNA, 25 bp, Homo sapien
cagcaccgcggtcggacagggaaga

SEQ ID NO: 496703 - DNA, 25 bp, Homo sapien
tcccatgaggccctgggtgtcgcat

SEQ ID NO: 496704 - DNA, 25 bp, Homo sapien
ctgagagcacggtggccacagcagt

SEQ ID NO: 496705 - DNA, 25 bp, Homo sapien
ttttatttgggcatgggaaagtggc

SEQ ID NO: 496706 - DNA, 25 bp, Homo sapien
cacagcagtcgtgcccagcatggtt

SEQ ID NO: 496707 - DNA, 25 bp, Homo sapien
caccacatggtcagtgaggaccacg

SEQ ID NO: 496708 - DNA, 25 bp, Homo sapien
ccgtcgtgctcgctgaggtcgtgct

SEQ ID NO: 496709 - DNA, 25 bp, Homo sapien
cagagaacgtccgttcgggcaggca

SEQ ID NO: 496710 - DNA, 25 bp, Homo sapien
atgagaagcgcacgaaggccagcgt

SEQ ID NO: 496711 - DNA, 25 bp, Homo sapien
ctccgtgatatttggggagtctccc

SEQ ID NO: 496712 - DNA, 25 bp, Homo sapien
cccaccttccgtgactgctgcaggc

SEQ ID NO: 496713 - DNA, 25 bp, Homo sapien
gggagtctcccaccttccgtgactg

SEQ ID NO: 496714 - DNA, 25 bp, Homo sapien
gtactccgtgatatttggggagtct

SEQ ID NO: 496715 - DNA, 25 bp, Homo sapien
ggagtccttgctgccatccgagtag

SEQ ID NO: 496716 - DNA, 25 bp, Homo sapien
agaccctggtgtacaccccaaagtg

SEQ ID NO: 496717 - DNA, 25 bp, Homo sapien
cactcgatgtactgggagaccctgg

SEQ ID NO: 496718 - DNA, 25 bp, Homo sapien
agtggcccacggttgcgcagccctg

SEQ ID NO: 496719 - DNA, 25 bp, Homo sapien
aatggggctcgcaggaggactcctg

SEQ ID NO: 496720 - DNA, 25 bp, Homo sapien
gctctgagcgcatgagcttttgcag

SEQ ID NO: 496721 - DNA, 25 bp, Homo sapien
gaggactcctgggcgtggctctgag

SEQ ID NO: 496722 - DNA, 25 bp, Homo sapien
ggctctgagcgcatgagcttttgca

SEQ ID NO: 496723 - DNA, 25 bp, Homo sapien
gagagctaaacaaccgccttcagag

SEQ ID NO: 496724 - DNA, 25 bp, Homo sapien
acagcacacatggagtcagcatcgg

SEQ ID NO: 496725 - DNA, 25 bp, Homo sapien
gatttggtgccaggacagttcgacg

SEQ ID NO: 496726 - DNA, 25 bp, Homo sapien
cagcagatcacgtgcaggtgggctt

SEQ ID NO: 496727 - DNA, 25 bp, Homo sapien
gaagtagatgatgcctgagtgcccc

SEQ ID NO: 496728 - DNA, 25 bp, Homo sapien
agcccacggctgtagttcatagacc

SEQ ID NO: 496729 - DNA, 25 bp, Homo sapien
tgtgagtgccaatggtgcccacctt

SEQ ID NO: 496730 - DNA, 25 bp, Homo sapien
gatggcatcgagtccactctctgag

SEQ ID NO: 496731 - DNA, 25 bp, Homo sapien
aactaagtttagagagcgcagaagc

SEQ ID NO: 496732 - DNA, 25 bp, Homo sapien
gaagcctgagccgaggccgctggca

SEQ ID NO: 496733 - DNA, 25 bp, Homo sapien
cagtgagcgtgggatctgagcccag

SEQ ID NO: 496734 - DNA, 25 bp, Homo sapien
agccgaggccgctggcagtgagcgt

SEQ ID NO: 496735 - DNA, 25 bp, Homo sapien
atcctcatcagtcaccagggccgcg

SEQ ID NO: 496736 - DNA, 25 bp, Homo sapien
ctcatcagtcaccagggccgcgggt

SEQ ID NO: 496737 - DNA, 25 bp, Homo sapien
catcagtcaccagggccgcgggtgt

SEQ ID NO: 496738 - DNA, 25 bp, Homo sapien
ctcatcctcatcagtcaccagggcc

SEQ ID NO: 496739 - DNA, 25 bp, Homo sapien
ttatcacttggcttaggcctcctga

SEQ ID NO: 496740 - DNA, 25 bp, Homo sapien
ctcctgattggagccgagacctgct

SEQ ID NO: 496741 - DNA, 25 bp, Homo sapien
aagtccacgccccagctgggatggc

SEQ ID NO: 496742 - DNA, 25 bp, Homo sapien
tgtggccgagtactgtgtccctgtc

SEQ ID NO: 496743 - DNA, 25 bp, Homo sapien
gaggcactgagcaggacgaggtgca

SEQ ID NO: 496744 - DNA, 25 bp, Homo sapien
actgagcaggacgaggtgcagtggg

SEQ ID NO: 496745 - DNA, 25 bp, Homo sapien
gcaggacgaggtgcagtgggcgccc

SEQ ID NO: 496746 - DNA, 25 bp, Homo sapien
tgagcaggacgaggtgcagtgggcg

SEQ ID NO: 496747 - DNA, 25 bp, Homo sapien
tagtgacaccgacattatcccacca

SEQ ID NO: 496748 - DNA, 25 bp, Homo sapien
gacattatcccaccaacgctagact

SEQ ID NO: 496749 - DNA, 25 bp, Homo sapien
agtgacaccgacattatcccaccaa

SEQ ID NO: 496750 - DNA, 25 bp, Homo sapien
ttatcccaccaacgctagacttaga

SEQ ID NO: 496751 - DNA, 25 bp, Homo sapien
gattgtataaactcctagtgttgag

SEQ ID NO: 496752 - DNA, 25 bp, Homo sapien
tcagctctctcactatgacagatgc

SEQ ID NO: 496753 - DNA, 25 bp, Homo sapien
tagcactgacttttgtcctgagctc

SEQ ID NO: 496754 - DNA, 25 bp, Homo sapien
tctcagaactccaaactctccatgt

SEQ ID NO: 496755 - DNA, 25 bp, Homo sapien
gtcgctgtcctcaaagacctcgcgg

SEQ ID NO: 496756 - DNA, 25 bp, Homo sapien
gcgggcctcttcgtatgagcaggtc

SEQ ID NO: 496757 - DNA, 25 bp, Homo sapien
caagaaaggaattggccctcgtgac

SEQ ID NO: 496758 - DNA, 25 bp, Homo sapien
gtgaccctcgccaggatgttgttgg

SEQ ID NO: 496759 - DNA, 25 bp, Homo sapien
aacagccaggctatccccagccctt

SEQ ID NO: 496760 - DNA, 25 bp, Homo sapien
acagccaggctatccccagccctta

SEQ ID NO: 496761 - DNA, 25 bp, Homo sapien
caacagccaggctatccccagccct

SEQ ID NO: 496762 - DNA, 25 bp, Homo sapien
cagccaggctatccccagcccttac

SEQ ID NO: 496763 - DNA, 25 bp, Homo sapien
cattcttgtcagttcggcatcacca

SEQ ID NO: 496764 - DNA, 25 bp, Homo sapien
tgtaacttcaccctggtccgcaggg

SEQ ID NO: 496765 - DNA, 25 bp, Homo sapien
gacctggccataacttgtaacttca

SEQ ID NO: 496766 - DNA, 25 bp, Homo sapien
gaagcaagcgagtaatgtccacatg

SEQ ID NO: 496767 - DNA, 25 bp, Homo sapien
tcaaataatattgggtctccttgcc

SEQ ID NO: 496768 - DNA, 25 bp, Homo sapien
catatatgtggtgatcttagggcag

SEQ ID NO: 496769 - DNA, 25 bp, Homo sapien
gctttctcagaaagtcactcaggat

SEQ ID NO: 496770 - DNA, 25 bp, Homo sapien
gatgacgttcatcatgagggtttca

SEQ ID NO: 496771 - DNA, 25 bp, Homo sapien
tctcttattccttaactggcatcca

SEQ ID NO: 496772 - DNA, 25 bp, Homo sapien
tctcaaatacaagttaatgtccagc

SEQ ID NO: 496773 - DNA, 25 bp, Homo sapien
ggtagagtcctggagcaattctcaa

SEQ ID NO: 496774 - DNA, 25 bp, Homo sapien
gctactaaccagcatctgaaggtag

SEQ ID NO: 496775 - DNA, 25 bp, Homo sapien
aatgagatcatgacagtctgcacag

SEQ ID NO: 496776 - DNA, 25 bp, Homo sapien
catccctgacataatcttttcttgg

SEQ ID NO: 496777 - DNA, 25 bp, Homo sapien
gaccttgtaaccacctgtgatgtgc

SEQ ID NO: 496778 - DNA, 25 bp, Homo sapien
tggtgggtgaccttgtaaccacctg

SEQ ID NO: 496779 - DNA, 25 bp, Homo sapien
ccacactgattctccagaagggtga

SEQ ID NO: 496780 - DNA, 25 bp, Homo sapien
caaagagctcattatctgcaggtga

SEQ ID NO: 496781 - DNA, 25 bp, Homo sapien
tagtttctggcagcgtcacacccag

SEQ ID NO: 496782 - DNA, 25 bp, Homo sapien
gacaagtttatcaaggcgcctgaat

SEQ ID NO: 496783 - DNA, 25 bp, Homo sapien
ccagggttgcatggaagctttcatc

SEQ ID NO: 496784 - DNA, 25 bp, Homo sapien
gacaaatagctcaaagtgctcagtg

SEQ ID NO: 496785 - DNA, 25 bp, Homo sapien
tagacgtgtcaatgttgcgctttcc

SEQ ID NO: 496786 - DNA, 25 bp, Homo sapien
ctttcttcaagtttcatgccaggag

SEQ ID NO: 496787 - DNA, 25 bp, Homo sapien
tgttgagaatcctataaatgtccat

SEQ ID NO: 496788 - DNA, 25 bp, Homo sapien
cacaggatatagtctaccttgagga

SEQ ID NO: 496789 - DNA, 25 bp, Homo sapien
catgtgtgacttaatttccgagtac

SEQ ID NO: 496790 - DNA, 25 bp, Homo sapien
tcaggtcaagtgatgtctggaagac

SEQ ID NO: 496791 - DNA, 25 bp, Homo sapien
ctttgtatttattccagaattcatt

SEQ ID NO: 496792 - DNA, 25 bp, Homo sapien
gaccacagggaccaactggaaggat

SEQ ID NO: 496793 - DNA, 25 bp, Homo sapien
ccacagggaccaactggaaggatgg

SEQ ID NO: 496794 - DNA, 25 bp, Homo sapien
accacagggaccaactggaaggatg

SEQ ID NO: 496795 - DNA, 25 bp, Homo sapien
aagagaggatttcgaaactggagtc

SEQ ID NO: 496796 - DNA, 25 bp, Homo sapien
ctgcaaagagaggatttcgaaactg

SEQ ID NO: 496797 - DNA, 25 bp, Homo sapien
aggatttcgaaactggagtctgcaa

SEQ ID NO: 496798 - DNA, 25 bp, Homo sapien
tttcgaaactggagtctgcaagctg

SEQ ID NO: 496799 - DNA, 25 bp, Homo sapien
gaggccgtctttacatttgccctgg

SEQ ID NO: 496800 - DNA, 25 bp, Homo sapien
aggtgcaggtgtattccccgaggcc

SEQ ID NO: 496801 - DNA, 25 bp, Homo sapien
tctggcaaggactggtctcacactg

SEQ ID NO: 496802 - DNA, 25 bp, Homo sapien
ttgccttcgaatccttctaaacagg

SEQ ID NO: 496803 - DNA, 25 bp, Homo sapien
cttgaagggcaacctcacgggtcac

SEQ ID NO: 496804 - DNA, 25 bp, Homo sapien
gacaggtacacttgccttgaagggc

SEQ ID NO: 496805 - DNA, 25 bp, Homo sapien
cagcagcactcacattacggtcact

SEQ ID NO: 496806 - DNA, 25 bp, Homo sapien
ccattgggttgagcaaagggccaga

SEQ ID NO: 496807 - DNA, 25 bp, Homo sapien
tctgttcctcgtggcagaactggtc

SEQ ID NO: 496808 - DNA, 25 bp, Homo sapien
gagcacaccacagagttctgttcct

SEQ ID NO: 496809 - DNA, 25 bp, Homo sapien
actggtcacagtccccgttgtccag

SEQ ID NO: 496810 - DNA, 25 bp, Homo sapien
ccttgccgttgtcagccagggtgta

SEQ ID NO: 496811 - DNA, 25 bp, Homo sapien
ccctctcaggctgcgtctggttgaa

SEQ ID NO: 496812 - DNA, 25 bp, Homo sapien
ggtccaggtcggctgcatcatatgg

SEQ ID NO: 496813 - DNA, 25 bp, Homo sapien
tcctggtgaggttgttgtcgcccct

SEQ ID NO: 496814 - DNA, 25 bp, Homo sapien
ctggttgaagtcaagcaggtcgaag

SEQ ID NO: 496815 - DNA, 25 bp, Homo sapien
agttccttcccggattgctattcca

SEQ ID NO: 496816 - DNA, 25 bp, Homo sapien
gcccgaggggacatcctactgttac

SEQ ID NO: 496817 - DNA, 25 bp, Homo sapien
tgcacagcgggacaggtggtctctc

SEQ ID NO: 496818 - DNA, 25 bp, Homo sapien
gtcaggctggcctccccgaggtgca

SEQ ID NO: 496819 - DNA, 25 bp, Homo sapien
ggatgtagaactcgctcagaatggt

SEQ ID NO: 496820 - DNA, 25 bp, Homo sapien
gaatctcttggcttggtagagacag

SEQ ID NO: 496821 - DNA, 25 bp, Homo sapien
ctcagaatggttccaccacagaaac

SEQ ID NO: 496822 - DNA, 25 bp, Homo sapien
tgggctgccgttaggatgtagaact

SEQ ID NO: 496823 - DNA, 25 bp, Homo sapien
aggtctcctttgtgaaccggttgtg

SEQ ID NO: 496824 - DNA, 25 bp, Homo sapien
tgaaccggttgtgcttgatgaccac

SEQ ID NO: 496825 - DNA, 25 bp, Homo sapien
tgatgggggtcttgagccggagcac

SEQ ID NO: 496826 - DNA, 25 bp, Homo sapien
tcctcctgctccgtgttccggtccc

SEQ ID NO: 496827 - DNA, 25 bp, Homo sapien
agctgttgcggtccacgtagggcac

SEQ ID NO: 496828 - DNA, 25 bp, Homo sapien
tcctgcttggtgtcgtagccggcac

SEQ ID NO: 496829 - DNA, 25 bp, Homo sapien
ttgagcctggtggactgccggccct

SEQ ID NO: 496830 - DNA, 25 bp, Homo sapien
tcacgaagtaggtgtccttgaagcg

SEQ ID NO: 496831 - DNA, 25 bp, Homo sapien
gaccttggtgtagatcccgtacttc

SEQ ID NO: 496832 - DNA, 25 bp, Homo sapien
aaggcggtgaccttggtgtagatcc

SEQ ID NO: 496833 - DNA, 25 bp, Homo sapien
tccacttgaggaaggcggtgacctt

SEQ ID NO: 496834 - DNA, 25 bp, Homo sapien
atccacttgaggaaggcggtgacct

SEQ ID NO: 496835 - DNA, 25 bp, Homo sapien
ggacgttatgacctccggggcatgg

SEQ ID NO: 496836 - DNA, 25 bp, Homo sapien
gttatgacctccggggcatggctct

SEQ ID NO: 496837 - DNA, 25 bp, Homo sapien
tatgacctccggggcatggctcttg

SEQ ID NO: 496838 - DNA, 25 bp, Homo sapien
acgttatgacctccggggcatggct

SEQ ID NO: 496839 - DNA, 25 bp, Homo sapien
gatcctctgagtctcgagggtgtcc

SEQ ID NO: 496840 - DNA, 25 bp, Homo sapien
taacaggccagttctgaggtgatcc

SEQ ID NO: 496841 - DNA, 25 bp, Homo sapien
gagggtgtccagtttctcagtgccc

SEQ ID NO: 496842 - DNA, 25 bp, Homo sapien
ggccagttctgaggtgatcctctga

SEQ ID NO: 496843 - DNA, 25 bp, Homo sapien
tttgtcgtgtccttcagatgttggg

SEQ ID NO: 496844 - DNA, 25 bp, Homo sapien
gaataatcgttcttctgtcaccctc

SEQ ID NO: 496845 - DNA, 25 bp, Homo sapien
tctgtatacctgaggagaatcttcc

SEQ ID NO: 496846 - DNA, 25 bp, Homo sapien
taaatcaactgaccccacaactttg

SEQ ID NO: 496847 - DNA, 25 bp, Homo sapien
agcctcggggcacgacctgtgcagc

SEQ ID NO: 496848 - DNA, 25 bp, Homo sapien
ctcggggcacgacctgtgcagctgt

SEQ ID NO: 496849 - DNA, 25 bp, Homo sapien
tcccacccggagcgctgggacaggg

SEQ ID NO: 496850 - DNA, 25 bp, Homo sapien
cacccggagcgctgggacagggcta

SEQ ID NO: 496851 - DNA, 25 bp, Homo sapien
ggctccacacgatggagggcgagga

SEQ ID NO: 496852 - DNA, 25 bp, Homo sapien
agggctccacacgatggagggcgag

SEQ ID NO: 496853 - DNA, 25 bp, Homo sapien
tgagggctccacacgatggagggcg

SEQ ID NO: 496854 - DNA, 25 bp, Homo sapien
ctgagggctccacacgatggagggc

SEQ ID NO: 496855 - DNA, 25 bp, Homo sapien
cagagtcagaatggagtccatgtcg

SEQ ID NO: 496856 - DNA, 25 bp, Homo sapien
tcagaatggagtccatgtcgttcct

SEQ ID NO: 496857 - DNA, 25 bp, Homo sapien
tggagtccatgtcgttccttcagtg

SEQ ID NO: 496858 - DNA, 25 bp, Homo sapien
ccatgtcgttccttcagtgaagtgg

SEQ ID NO: 496859 - DNA, 25 bp, Homo sapien
cagaagataggagcccgcacgcttc

SEQ ID NO: 496860 - DNA, 25 bp, Homo sapien
ttccacctcaccagaacgtcgtttg

SEQ ID NO: 496861 - DNA, 25 bp, Homo sapien
tccagaagataggagcccgcacgct

SEQ ID NO: 496862 - DNA, 25 bp, Homo sapien
agaacgtcgtttgctttggaggccg

SEQ ID NO: 496863 - DNA, 25 bp, Homo sapien
ccttatatcgtctccagaattcatc

SEQ ID NO: 496864 - DNA, 25 bp, Homo sapien
gggtcgtgaagcgtcctaagcccac

SEQ ID NO: 496865 - DNA, 25 bp, Homo sapien
cacgcacctcatcccgaggaattaa

SEQ ID NO: 496866 - DNA, 25 bp, Homo sapien
tccttggggagagtcggagctgccc

SEQ ID NO: 496867 - DNA, 25 bp, Homo sapien
agaggcttggcatccgctgagctgg

SEQ ID NO: 496868 - DNA, 25 bp, Homo sapien
cagctcgcagttgctgccctcatag

SEQ ID NO: 496869 - DNA, 25 bp, Homo sapien
cagatgctgtcctggcaagagccgt

SEQ ID NO: 496870 - DNA, 25 bp, Homo sapien
agctcgcagttgctgccctcatagc

SEQ ID NO: 496871 - DNA, 25 bp, Homo sapien
ctgtcctggcaagagccgttgtgga

SEQ ID NO: 496872 - DNA, 25 bp, Homo sapien
cacagctgcatgtgtaggattcctg

SEQ ID NO: 496873 - DNA, 25 bp, Homo sapien
tgtttgtggtcctcaccaagcctgt

SEQ ID NO: 496874 - DNA, 25 bp, Homo sapien
tcagtccgctctgggtgacattcat

SEQ ID NO: 496875 - DNA, 25 bp, Homo sapien
gaagtgttgacacccatcagtccgc

SEQ ID NO: 496876 - DNA, 25 bp, Homo sapien
catggtttagctcagagtggtccga

SEQ ID NO: 496877 - DNA, 25 bp, Homo sapien
gacgcggaccaccttctgagtcgtg

SEQ ID NO: 496878 - DNA, 25 bp, Homo sapien
cattgctccagcgtggagacgcgga

SEQ ID NO: 496879 - DNA, 25 bp, Homo sapien
gcttatcacaaatccgcgggcttca

SEQ ID NO: 496880 - DNA, 25 bp, Homo sapien
tgtagatccggtgcacgcttctcag

SEQ ID NO: 496881 - DNA, 25 bp, Homo sapien
tccggtgcacgcttctcagaggtca

SEQ ID NO: 496882 - DNA, 25 bp, Homo sapien
tcagaggtcagcaccccgcaggcac

SEQ ID NO: 496883 - DNA, 25 bp, Homo sapien
ggtcctgtagatccggtgcacgctt

SEQ ID NO: 496884 - DNA, 25 bp, Homo sapien
aggcaggagataattgtgttagagg

SEQ ID NO: 496885 - DNA, 25 bp, Homo sapien
ctcaggcaggagataattgtgttag

SEQ ID NO: 496886 - DNA, 25 bp, Homo sapien
actcaggcaggagataattgtgtta

SEQ ID NO: 496887 - DNA, 25 bp, Homo sapien
caggcaggagataattgtgttagag

SEQ ID NO: 496888 - DNA, 25 bp, Homo sapien
cacactcgggtacggagcattgtgg

SEQ ID NO: 496889 - DNA, 25 bp, Homo sapien
tacggagcattgtggacacgagggc

SEQ ID NO: 496890 - DNA, 25 bp, Homo sapien
ctcgggtacggagcattgtggacac

SEQ ID NO: 496891 - DNA, 25 bp, Homo sapien
agccacactcgggtacggagcattg

SEQ ID NO: 496892 - DNA, 25 bp, Homo sapien
tttcccgtattataacaccaccaca

SEQ ID NO: 496893 - DNA, 25 bp, Homo sapien
tacagtaatattcctgtgtaacagt

SEQ ID NO: 496894 - DNA, 25 bp, Homo sapien
cccgtattataacaccaccacagaa

SEQ ID NO: 496895 - DNA, 25 bp, Homo sapien
taacagtgaacattttgctgttgtc

SEQ ID NO: 496896 - DNA, 25 bp, Homo sapien
gtcaaacattggctgttgagaagtg

SEQ ID NO: 496897 - DNA, 25 bp, Homo sapien
caggaagcagtgatgtggaacgtct

SEQ ID NO: 496898 - DNA, 25 bp, Homo sapien
cattggctgttgagaagtggttttc

SEQ ID NO: 496899 - DNA, 25 bp, Homo sapien
cagtgatgtggaacgtctccaggcc

SEQ ID NO: 496900 - DNA, 25 bp, Homo sapien
tatcttgatcatcagcgggtcttgg

SEQ ID NO: 496901 - DNA, 25 bp, Homo sapien
tcatcagcgggtcttggctcgttct

SEQ ID NO: 496902 - DNA, 25 bp, Homo sapien
atcagcgggtcttggctcgttctgt

SEQ ID NO: 496903 - DNA, 25 bp, Homo sapien
gatcatcagcgggtcttggctcgtt

SEQ ID NO: 496904 - DNA, 25 bp, Homo sapien
attctcccccgcgtccgcgtcatac

SEQ ID NO: 496905 - DNA, 25 bp, Homo sapien
acaggtcattctcccccgcgtccgc

SEQ ID NO: 496906 - DNA, 25 bp, Homo sapien
tctcccccgcgtccgcgtcataccg

SEQ ID NO: 496907 - DNA, 25 bp, Homo sapien
tcattctcccccgcgtccgcgtcat

SEQ ID NO: 496908 - DNA, 25 bp, Homo sapien
ggtgctcagcgaagtctttctcagg

SEQ ID NO: 496909 - DNA, 25 bp, Homo sapien
gtcagtgccattgcgtgcccagccg

SEQ ID NO: 496910 - DNA, 25 bp, Homo sapien
cattgcgtgcccagccgctgaggag

SEQ ID NO: 496911 - DNA, 25 bp, Homo sapien
acaagtgtgacaggccgcgtggtca

SEQ ID NO: 496912 - DNA, 25 bp, Homo sapien
gtgttctctggtgaccacacttcca

SEQ ID NO: 496913 - DNA, 25 bp, Homo sapien
gttcatgatctgtttaaaccagagt

SEQ ID NO: 496914 - DNA, 25 bp, Homo sapien
ccttggtgacaaggaccatgtgagc

SEQ ID NO: 496915 - DNA, 25 bp, Homo sapien
cagagtgagtacctggagaccttgg

SEQ ID NO: 496916 - DNA, 25 bp, Homo sapien
tcacagtgctcggtaaacaacccag

SEQ ID NO: 496917 - DNA, 25 bp, Homo sapien
gtgatgaagtttcagcgccctccac

SEQ ID NO: 496918 - DNA, 25 bp, Homo sapien
tgtgttgttcattctggctagctga

SEQ ID NO: 496919 - DNA, 25 bp, Homo sapien
tggaatcccgcttccggttgtgttg

SEQ ID NO: 496920 - DNA, 25 bp, Homo sapien
tcaaaatgcttggttaacttaaggc

SEQ ID NO: 496921 - DNA, 25 bp, Homo sapien
gctcggctcacttttcctaagtgtg

SEQ ID NO: 496922 - DNA, 25 bp, Homo sapien
tatagcttgcctgtatggatgctcc

SEQ ID NO: 496923 - DNA, 25 bp, Homo sapien
cctaagtgtggttcctgaaggctgt

SEQ ID NO: 496924 - DNA, 25 bp, Homo sapien
gatgattggcaaatgcagtgttgta

SEQ ID NO: 496925 - DNA, 25 bp, Homo sapien
gatgatgattggcaaatgcagtgtt

SEQ ID NO: 496926 - DNA, 25 bp, Homo sapien
gcaaatgcagtgttgtaaattgcaa

SEQ ID NO: 496927 - DNA, 25 bp, Homo sapien
gattggcaaatgcagtgttgtaaat

SEQ ID NO: 496928 - DNA, 25 bp, Homo sapien
ctcacttgctggcacgtgtggccgc

SEQ ID NO: 496929 - DNA, 25 bp, Homo sapien
ttggccctcggcgtgttccgtgtgt

SEQ ID NO: 496930 - DNA, 25 bp, Homo sapien
ggtgtaagtagacgcggcggtccca

SEQ ID NO: 496931 - DNA, 25 bp, Homo sapien
gatcgcggagtcgtcgcggtgtaag

SEQ ID NO: 496932 - DNA, 25 bp, Homo sapien
agtgacgccagctggcccgcttgag

SEQ ID NO: 496933 - DNA, 25 bp, Homo sapien
ggcgcacattaccattaaccagtac

SEQ ID NO: 496934 - DNA, 25 bp, Homo sapien
gtggcgctctccgttcggcggcgct

SEQ ID NO: 496935 - DNA, 25 bp, Homo sapien
ggcggcgctcccatggcgcacatta

SEQ ID NO: 496936 - DNA, 25 bp, Homo sapien
tgagaggacggggccccggcagaaa

SEQ ID NO: 496937 - DNA, 25 bp, Homo sapien
ggcgtcccggctgagaggacggggc

SEQ ID NO: 496938 - DNA, 25 bp, Homo sapien
gctgagaggacggggccccggcaga

SEQ ID NO: 496939 - DNA, 25 bp, Homo sapien
aatcagagccgctggcgtcccggct

SEQ ID NO: 496940 - DNA, 25 bp, Homo sapien
ccgggactcccgtcctgagggatcg

SEQ ID NO: 496941 - DNA, 25 bp, Homo sapien
tcgggagccgggacaccctcctgag

SEQ ID NO: 496942 - DNA, 25 bp, Homo sapien
gcgcccggctactcctgagggctta

SEQ ID NO: 496943 - DNA, 25 bp, Homo sapien
gcgtgagaccacctcgagggctcag

SEQ ID NO: 496944 - DNA, 25 bp, Homo sapien
gctgcccttccgcggggcctcgtcc

SEQ ID NO: 496945 - DNA, 25 bp, Homo sapien
ctgcccttccgcggggcctcgtccg

SEQ ID NO: 496946 - DNA, 25 bp, Homo sapien
tgcccttccgcggggcctcgtccgc

SEQ ID NO: 496947 - DNA, 25 bp, Homo sapien
ccttccgcggggcctcgtccgccat

SEQ ID NO: 496948 - DNA, 25 bp, Homo sapien
gccgcgggcttggtgaggccgttgg

SEQ ID NO: 496949 - DNA, 25 bp, Homo sapien
cgcgccccccggcttggcgggcgcg

SEQ ID NO: 496950 - DNA, 25 bp, Homo sapien
ccgcgggcttggtgaggccgttggt

SEQ ID NO: 496951 - DNA, 25 bp, Homo sapien
ggccgcgggcttggtgaggccgttg

SEQ ID NO: 496952 - DNA, 25 bp, Homo sapien
gcgcgccgcgaagcgccccgcgtag

SEQ ID NO: 496953 - DNA, 25 bp, Homo sapien
gcctcgtgcagcttccgccacgtgt

SEQ ID NO: 496954 - DNA, 25 bp, Homo sapien
tagttgtcgggcagccgaggtctgt

SEQ ID NO: 496955 - DNA, 25 bp, Homo sapien
tcctgcgtgtagttgtcgggcagcc

SEQ ID NO: 496956 - DNA, 25 bp, Homo sapien
agcttccgccacgtgtcctgcgtgt

SEQ ID NO: 496957 - DNA, 25 bp, Homo sapien
ctggtagagctcctcgaggttgtac

SEQ ID NO: 496958 - DNA, 25 bp, Homo sapien
tctcttccgtaatgggataacttta

SEQ ID NO: 496959 - DNA, 25 bp, Homo sapien
taactttaaatatggttctaagcag

SEQ ID NO: 496960 - DNA, 25 bp, Homo sapien
tttaaatatggttctaagcagctta

SEQ ID NO: 496961 - DNA, 25 bp, Homo sapien
aaatatggttctaagcagcttaagc

SEQ ID NO: 496962 - DNA, 25 bp, Homo sapien
aatttttacaatgcagtcacttgca

SEQ ID NO: 496963 - DNA, 25 bp, Homo sapien
gcagtcacttgcatatccagaaaaa

SEQ ID NO: 496964 - DNA, 25 bp, Homo sapien
tgtcaacagtagttttctttgggtg

SEQ ID NO: 496965 - DNA, 25 bp, Homo sapien
actgtcaacagtagttttctttggg

SEQ ID NO: 496966 - DNA, 25 bp, Homo sapien
tggggagactttgtgagaacagaga

SEQ ID NO: 496967 - DNA, 25 bp, Homo sapien
tgtgagaacagagattttccacagc

SEQ ID NO: 496968 - DNA, 25 bp, Homo sapien
tttgtgagaacagagattttccaca

SEQ ID NO: 496969 - DNA, 25 bp, Homo sapien
ggagactttgtgagaacagagattt

SEQ ID NO: 496970 - DNA, 25 bp, Homo sapien
caggcctgacgcagttgcttgtaga

SEQ ID NO: 496971 - DNA, 25 bp, Homo sapien
tcacaggcctgacgcagttgcttgt

SEQ ID NO: 496972 - DNA, 25 bp, Homo sapien
cctgacgcagttgcttgtagagcat

SEQ ID NO: 496973 - DNA, 25 bp, Homo sapien
gtcttcacaggcctgacgcagttgc

SEQ ID NO: 496974 - DNA, 25 bp, Homo sapien
tctaaacggaaggatctgtgcctgg

SEQ ID NO: 496975 - DNA, 25 bp, Homo sapien
taaacggaaggatctgtgcctggac

SEQ ID NO: 496976 - DNA, 25 bp, Homo sapien
tctctaaacggaaggatctgtgcct

SEQ ID NO: 496977 - DNA, 25 bp, Homo sapien
ctaaacggaaggatctgtgcctgga

SEQ ID NO: 496978 - DNA, 25 bp, Homo sapien
taaggccctatctcagcaggtcaga

SEQ ID NO: 496979 - DNA, 25 bp, Homo sapien
tggaggatgcctcacacgcaactgt

SEQ ID NO: 496980 - DNA, 25 bp, Homo sapien
ggtgtctccataagtcgccaagtcg

SEQ ID NO: 496981 - DNA, 25 bp, Homo sapien
tgcccgtgctagcaaagacctcagg

SEQ ID NO: 496982 - DNA, 25 bp, Homo sapien
gactggcctggtaagagtcactagg

SEQ ID NO: 496983 - DNA, 25 bp, Homo sapien
tgtccctcaggttcatgcaaagctg

SEQ ID NO: 496984 - DNA, 25 bp, Homo sapien
gaaaatggctcaggtttaacttcca

SEQ ID NO: 496985 - DNA, 25 bp, Homo sapien
tgaacacgtggtcttaagtaatcct

SEQ ID NO: 496986 - DNA, 25 bp, Homo sapien
cagcacgtgttaatcttctttaaaa

SEQ ID NO: 496987 - DNA, 25 bp, Homo sapien
tcctgccagcacgtgttaatcttct

SEQ ID NO: 496988 - DNA, 25 bp, Homo sapien
tgcagtggtcctgccagcacgtgtt

SEQ ID NO: 496989 - DNA, 25 bp, Homo sapien
tggtcctgccagcacgtgttaatct

SEQ ID NO: 496990 - DNA, 25 bp, Homo sapien
taacggccaggtcacactaaaaatg

SEQ ID NO: 496991 - DNA, 25 bp, Homo sapien
gaaatacacccatcgtctcctactg

SEQ ID NO: 496992 - DNA, 25 bp, Homo sapien
caaagcctaagacgctggttgtgca

SEQ ID NO: 496993 - DNA, 25 bp, Homo sapien
tgacgtcaagtcaaagccaagacat

SEQ ID NO: 496994 - DNA, 25 bp, Homo sapien
cataggtgcggtccaagaacaggaa

SEQ ID NO: 496995 - DNA, 25 bp, Homo sapien
cacataggtgcggtccaagaacagg

SEQ ID NO: 496996 - DNA, 25 bp, Homo sapien
ctgcagcacataggtgcggtccaag

SEQ ID NO: 496997 - DNA, 25 bp, Homo sapien
taggtgcggtccaagaacaggaaga

SEQ ID NO: 496998 - DNA, 25 bp, Homo sapien
aaaggaaggcacaagtaatcacaca

SEQ ID NO: 496999 - DNA, 25 bp, Homo sapien
gaaaggaaggcacaagtaatcacac

SEQ ID NO: 497000 - DNA, 25 bp, Homo sapien
aggaaggcacaagtaatcacacaca

SEQ ID NO: 497001 - DNA, 25 bp, Homo sapien
aaggaaggcacaagtaatcacacac

SEQ ID NO: 497002 - DNA, 25 bp, Homo sapien
taaagctcatgagaaggcacgacat

SEQ ID NO: 497003 - DNA, 25 bp, Homo sapien
tcaactgcagcgctggaaagagccg

SEQ ID NO: 497004 - DNA, 25 bp, Homo sapien
tgtttcaaggctaagacccacctgg

SEQ ID NO: 497005 - DNA, 25 bp, Homo sapien
tatacagtccccgaaagatgacgga

SEQ ID NO: 497006 - DNA, 25 bp, Homo sapien
gagacgctgctaggtcatgcatgcc

SEQ ID NO: 497007 - DNA, 25 bp, Homo sapien
taattctctacatctaggtgccaag

SEQ ID NO: 497008 - DNA, 25 bp, Homo sapien
aactggtatcacacaagctgctggc

SEQ ID NO: 497009 - DNA, 25 bp, Homo sapien
ttcctgctgagcgacgggagacact

SEQ ID NO: 497010 - DNA, 25 bp, Homo sapien
tcagcagtaggattccatcaatggt

SEQ ID NO: 497011 - DNA, 25 bp, Homo sapien
tcctctcgcgctcgatcagcagtag

SEQ ID NO: 497012 - DNA, 25 bp, Homo sapien
aggaggctccgcaacaggctccggt

SEQ ID NO: 497013 - DNA, 25 bp, Homo sapien
cactaataatatgggttctaaacag

SEQ ID NO: 497014 - DNA, 25 bp, Homo sapien
gcttgagcgctattccccttctagg

SEQ ID NO: 497015 - DNA, 25 bp, Homo sapien
gctgccatgacctgaacttggaggc

SEQ ID NO: 497016 - DNA, 25 bp, Homo sapien
cacctggtgtggtgttagcttgagc

SEQ ID NO: 497017 - DNA, 25 bp, Homo sapien
tgttctcttcctatagtgccttggg

SEQ ID NO: 497018 - DNA, 25 bp, Homo sapien
ccttcggcagcatataagcaattag

SEQ ID NO: 497019 - DNA, 25 bp, Homo sapien
gcattaacctttggccttcggcagc

SEQ ID NO: 497020 - DNA, 25 bp, Homo sapien
tagtctcttccaaaaatttcagttc

SEQ ID NO: 497021 - DNA, 25 bp, Homo sapien
tctctttcctgcattaacctttggc

SEQ ID NO: 497022 - DNA, 25 bp, Homo sapien
gtgctcatctgcagaaacgaagcca

SEQ ID NO: 497023 - DNA, 25 bp, Homo sapien
gaagccaggggattcggaaacatcc

SEQ ID NO: 497024 - DNA, 25 bp, Homo sapien
gaggaaagtcctcctaggtgctcat

SEQ ID NO: 497025 - DNA, 25 bp, Homo sapien
gattcggaaacatcccatcatctca

SEQ ID NO: 497026 - DNA, 25 bp, Homo sapien
tttcaatgaaacatttgcatgtgtg

SEQ ID NO: 497027 - DNA, 25 bp, Homo sapien
taacacagattaacagggagggaga

SEQ ID NO: 497028 - DNA, 25 bp, Homo sapien
ggagacctcaaagtacgcccatgtt

SEQ ID NO: 497029 - DNA, 25 bp, Homo sapien
tctggcagtagcacgcaccatttgg

SEQ ID NO: 497030 - DNA, 25 bp, Homo sapien
caaacaacacggttgcaggagacct

SEQ ID NO: 497031 - DNA, 25 bp, Homo sapien
tcctctaagcgtttacttacatggt

SEQ ID NO: 497032 - DNA, 25 bp, Homo sapien
gtgctgtggtccaagtaagtgatta

SEQ ID NO: 497033 - DNA, 25 bp, Homo sapien
caagtaagtgattactctgtctccc

SEQ ID NO: 497034 - DNA, 25 bp, Homo sapien
ctcttcctctaagcgtttacttaca

SEQ ID NO: 497035 - DNA, 25 bp, Homo sapien
agccatggtgaagatacgaacgctc

SEQ ID NO: 497036 - DNA, 25 bp, Homo sapien
cgctcagcgagcaaacggtacttac

SEQ ID NO: 497037 - DNA, 25 bp, Homo sapien
tgaagatacgaacgctcagcgagca

SEQ ID NO: 497038 - DNA, 25 bp, Homo sapien
tttatttcaataaccagccaggaga

SEQ ID NO: 497039 - DNA, 25 bp, Homo sapien
gagaaaattgtgtgacagcaccata

SEQ ID NO: 497040 - DNA, 25 bp, Homo sapien
tagctactcatcaacctcaggtttg

SEQ ID NO: 497041 - DNA, 25 bp, Homo sapien
caaagatgccaagtatctcagcaag

SEQ ID NO: 497042 - DNA, 25 bp, Homo sapien
tatgctaggtgcaaaaacactctta

SEQ ID NO: 497043 - DNA, 25 bp, Homo sapien
gagtccagttctgcacaccatatca

SEQ ID NO: 497044 - DNA, 25 bp, Homo sapien
agttggaaggaagcacaacatggcc

SEQ ID NO: 497045 - DNA, 25 bp, Homo sapien
tctgctgagtcctaccaagtcctgt

SEQ ID NO: 497046 - DNA, 25 bp, Homo sapien
tcgagatcctggatttcccacaggc

SEQ ID NO: 497047 - DNA, 25 bp, Homo sapien
tgcttcccagtctcccgggggctgc

SEQ ID NO: 497048 - DNA, 25 bp, Homo sapien
cacaccctggttgtggggcttcgct

SEQ ID NO: 497049 - DNA, 25 bp, Homo sapien
caccctggttgtggggcttcgctgt

SEQ ID NO: 497050 - DNA, 25 bp, Homo sapien
ggggcttcgctgtggctgccgctct

SEQ ID NO: 497051 - DNA, 25 bp, Homo sapien
tataaggaacgttttaatgcaccat

SEQ ID NO: 497052 - DNA, 25 bp, Homo sapien
taatgcaccatcttacggagaaggg

SEQ ID NO: 497053 - DNA, 25 bp, Homo sapien
gagaagggcagagccgacattccgc

SEQ ID NO: 497054 - DNA, 25 bp, Homo sapien
ggcagaaagggctcagggaagctgt

SEQ ID NO: 497055 - DNA, 25 bp, Homo sapien
gggcatttgtctatgacagatgcag

SEQ ID NO: 497056 - DNA, 25 bp, Homo sapien
cagatgcagtctagaggcaatcaga

SEQ ID NO: 497057 - DNA, 25 bp, Homo sapien
tctatgacagatgcagtctagaggc

SEQ ID NO: 497058 - DNA, 25 bp, Homo sapien
tctgcaaaagatgggggcatttgtc

SEQ ID NO: 497059 - DNA, 25 bp, Homo sapien
gttaaatgttctcctaatagctgtt

SEQ ID NO: 497060 - DNA, 25 bp, Homo sapien
ttgctgttaaatgttctcctaatag

SEQ ID NO: 497061 - DNA, 25 bp, Homo sapien
tgctgttaaatgttctcctaatagc

SEQ ID NO: 497062 - DNA, 25 bp, Homo sapien
ctgttaaatgttctcctaatagctg

SEQ ID NO: 497063 - DNA, 25 bp, Homo sapien
tgcttaagcagaccacctagtcggt

SEQ ID NO: 497064 - DNA, 25 bp, Homo sapien
taagatgcacgaagtccgcaggtga

SEQ ID NO: 497065 - DNA, 25 bp, Homo sapien
gggaagcctcacgaaaatctaacag

SEQ ID NO: 497066 - DNA, 25 bp, Homo sapien
tggtacagaaggtctgccgggcctt

SEQ ID NO: 497067 - DNA, 25 bp, Homo sapien
caagcaatgtgattccaggcaccaa

SEQ ID NO: 497068 - DNA, 25 bp, Homo sapien
gaaaagatattcacatcaagtggag

SEQ ID NO: 497069 - DNA, 25 bp, Homo sapien
taaccagattggacccgtgactctc

SEQ ID NO: 497070 - DNA, 25 bp, Homo sapien
catctggctgttttaagccctggtt

SEQ ID NO: 497071 - DNA, 25 bp, Homo sapien
ttctcatccagtaagtggtcgagcc

SEQ ID NO: 497072 - DNA, 25 bp, Homo sapien
tcacccggctgaacagctggtacat

SEQ ID NO: 497073 - DNA, 25 bp, Homo sapien
gcgaggtccggcactctgttctcat

SEQ ID NO: 497074 - DNA, 25 bp, Homo sapien
agctggtacatctgtgcgaggtccg

SEQ ID NO: 497075 - DNA, 25 bp, Homo sapien
ctggaagcagacctcgatcacgtgg

SEQ ID NO: 497076 - DNA, 25 bp, Homo sapien
gttgatgaacgtctcaaaggactcc

SEQ ID NO: 497077 - DNA, 25 bp, Homo sapien
gttgacgaaccgctcattcttctgg

SEQ ID NO: 497078 - DNA, 25 bp, Homo sapien
gattgattacgatcgctgttccaaa

SEQ ID NO: 497079 - DNA, 25 bp, Homo sapien
aaaaaattgtctagaaatgggtgag

SEQ ID NO: 497080 - DNA, 25 bp, Homo sapien
aaaaattgtctagaaatgggtgaga

SEQ ID NO: 497081 - DNA, 25 bp, Homo sapien
gaaaagcagacaattgcacaatgag

SEQ ID NO: 497082 - DNA, 25 bp, Homo sapien
tttactgactagagaaagcctatga

SEQ ID NO: 497083 - DNA, 25 bp, Homo sapien
tctttggcgaagtcaagcatcattt

SEQ ID NO: 497084 - DNA, 25 bp, Homo sapien
caacagtcaatctagtatcgtcgta

SEQ ID NO: 497085 - DNA, 25 bp, Homo sapien
atatctgattttctaaggtaagtac

SEQ ID NO: 497086 - DNA, 25 bp, Homo sapien
gcaacattgtacaggaacattctgg

SEQ ID NO: 497087 - DNA, 25 bp, Homo sapien
ctcaagtcaagtgagagtaaatact

SEQ ID NO: 497088 - DNA, 25 bp, Homo sapien
ccttcccaaaatgactatatgacaa

SEQ ID NO: 497089 - DNA, 25 bp, Homo sapien
ctgtgagcataaacatatagtaaat

SEQ ID NO: 497090 - DNA, 25 bp, Homo sapien
tgtgagcataaacatatagtaaata

SEQ ID NO: 497091 - DNA, 25 bp, Homo sapien
gatcatgatcttgtccaacgtccgc

SEQ ID NO: 497092 - DNA, 25 bp, Homo sapien
atgatcttgtccaacgtccgctcca

SEQ ID NO: 497093 - DNA, 25 bp, Homo sapien
cgtggataaacctgaacaggatcat

SEQ ID NO: 497094 - DNA, 25 bp, Homo sapien
gctcttaactttgaatccacatgct

SEQ ID NO: 497095 - DNA, 25 bp, Homo sapien
ctcatgctaaacctcctctgggaaa

SEQ ID NO: 497096 - DNA, 25 bp, Homo sapien
ctggctctactgatactgacattct

SEQ ID NO: 497097 - DNA, 25 bp, Homo sapien
tcattctaatgcaaactggctctac

SEQ ID NO: 497098 - DNA, 25 bp, Homo sapien
tatgcagcattttctgagtgcccga

SEQ ID NO: 497099 - DNA, 25 bp, Homo sapien
caacaaggagtctttttgccaaatc

SEQ ID NO: 497100 - DNA, 25 bp, Homo sapien
catgcttgagctttgacaacataga

SEQ ID NO: 497101 - DNA, 25 bp, Homo sapien
tttgacaacatagacttttcagcat

SEQ ID NO: 497102 - DNA, 25 bp, Homo sapien
cagcatcgactgaggcacttttccc

SEQ ID NO: 497103 - DNA, 25 bp, Homo sapien
tgtccttcgaaagctccatgtcctt

SEQ ID NO: 497104 - DNA, 25 bp, Homo sapien
catgatgtccttcgaaagctccatg

SEQ ID NO: 497105 - DNA, 25 bp, Homo sapien
gatgtccttcgaaagctccatgtcc

SEQ ID NO: 497106 - DNA, 25 bp, Homo sapien
accatgatgtccttcgaaagctcca

SEQ ID NO: 497107 - DNA, 25 bp, Homo sapien
atgttcactgtgaggtctatagggc

SEQ ID NO: 497108 - DNA, 25 bp, Homo sapien
agtgcacttccatgggcgtgtatgt

SEQ ID NO: 497109 - DNA, 25 bp, Homo sapien
tagcccattgtgagtatgttcactg

SEQ ID NO: 497110 - DNA, 25 bp, Homo sapien
ccatgggcgtgtatgttggccagta

SEQ ID NO: 497111 - DNA, 25 bp, Homo sapien
aatcacggcaagatgagagaccagc

SEQ ID NO: 497112 - DNA, 25 bp, Homo sapien
tacgcaaatggtcaatcaggacatg

SEQ ID NO: 497113 - DNA, 25 bp, Homo sapien
ttggcaatggtttctcagacatgac

SEQ ID NO: 497114 - DNA, 25 bp, Homo sapien
ctcatatggacagggatggctacaa

SEQ ID NO: 497115 - DNA, 25 bp, Homo sapien
gccactgaagttttcgaccactgtg

SEQ ID NO: 497116 - DNA, 25 bp, Homo sapien
aagttttcgaccactgtgctttcca

SEQ ID NO: 497117 - DNA, 25 bp, Homo sapien
agcatgtcccaaagtagtttgccac

SEQ ID NO: 497118 - DNA, 25 bp, Homo sapien
tcccaaagtagtttgccactgaagt

SEQ ID NO: 497119 - DNA, 25 bp, Homo sapien
tttttatctcctcaaagctgaagcc

SEQ ID NO: 497120 - DNA, 25 bp, Homo sapien
ttgaacatgaggagcaccagtgtct

SEQ ID NO: 497121 - DNA, 25 bp, Homo sapien
ccctcgttgaacatgaggagcacca

SEQ ID NO: 497122 - DNA, 25 bp, Homo sapien
tatctcctcaaagctgaagccatct

SEQ ID NO: 497123 - DNA, 25 bp, Homo sapien
tgaatgggaagcaaatgcaggcaaa

SEQ ID NO: 497124 - DNA, 25 bp, Homo sapien
aatgggaagcaaatgcaggcaaagg

SEQ ID NO: 497125 - DNA, 25 bp, Homo sapien
gaatgggaagcaaatgcaggcaaag

SEQ ID NO: 497126 - DNA, 25 bp, Homo sapien
ctgaatgggaagcaaatgcaggcaa

SEQ ID NO: 497127 - DNA, 25 bp, Homo sapien
tcctttgggacttttaatcagcaca

SEQ ID NO: 497128 - DNA, 25 bp, Homo sapien
tcagcacacgtgctttgccacaggc

SEQ ID NO: 497129 - DNA, 25 bp, Homo sapien
gatctttattctaaacaacttgtgc

SEQ ID NO: 497130 - DNA, 25 bp, Homo sapien
agcgttctgcgcaattcactatcct

SEQ ID NO: 497131 - DNA, 25 bp, Homo sapien
ggcaaagagctttctaaacgattca

SEQ ID NO: 497132 - DNA, 25 bp, Homo sapien
tctaacaagtgcacagaaatgtctg

SEQ ID NO: 497133 - DNA, 25 bp, Homo sapien
caaactatctttgggctgctcagaa

SEQ ID NO: 497134 - DNA, 25 bp, Homo sapien
tgtgccagggtgttgaacgtaatct

SEQ ID NO: 497135 - DNA, 25 bp, Homo sapien
caggaaagcgttggctgacgacagt

SEQ ID NO: 497136 - DNA, 25 bp, Homo sapien
taaccttagtccaacaggaacctga

SEQ ID NO: 497137 - DNA, 25 bp, Homo sapien
tctgctacctctctgctggaaaaga

SEQ ID NO: 497138 - DNA, 25 bp, Homo sapien
ccttttggcaacgatgctgcagcca

SEQ ID NO: 497139 - DNA, 25 bp, Homo sapien
ggtcagacattggatgaatcctact

SEQ ID NO: 497140 - DNA, 25 bp, Homo sapien
catgtttacttgttgtagtaaaagg

SEQ ID NO: 497141 - DNA, 25 bp, Homo sapien
ggccggaaatgttcttttgatgcaa

SEQ ID NO: 497142 - DNA, 25 bp, Homo sapien
tgatgcaaagaaaggtcagacattg

SEQ ID NO: 497143 - DNA, 25 bp, Homo sapien
caggatcaagcgattctcttgcctc

SEQ ID NO: 497144 - DNA, 25 bp, Homo sapien
actcagttgcctgggctagagtgca

SEQ ID NO: 497145 - DNA, 25 bp, Homo sapien
gcaatggtgtgatctcggctcactg

SEQ ID NO: 497146 - DNA, 25 bp, Homo sapien
ctcagttgcctgggctagagtgcaa

SEQ ID NO: 497147 - DNA, 25 bp, Homo sapien
tgaaacactctctcagtggtgctaa

SEQ ID NO: 497148 - DNA, 25 bp, Homo sapien
tcagtggtgctaacctgttcctcaa

SEQ ID NO: 497149 - DNA, 25 bp, Homo sapien
tattctgacgatagcagcatcaatc

SEQ ID NO: 497150 - DNA, 25 bp, Homo sapien
caatctgatattgtctatcctgaaa

SEQ ID NO: 497151 - DNA, 25 bp, Homo sapien
tactgattcggattgtctttgtctc

SEQ ID NO: 497152 - DNA, 25 bp, Homo sapien
tcaggccacgtagtggtactgattc

SEQ ID NO: 497153 - DNA, 25 bp, Homo sapien
tttgtctctctccatatagtctctg

SEQ ID NO: 497154 - DNA, 25 bp, Homo sapien
agtctctgtctatcagagattcaat

SEQ ID NO: 497155 - DNA, 25 bp, Homo sapien
tcttgagccttgtgaaagatgaccc

SEQ ID NO: 497156 - DNA, 25 bp, Homo sapien
taaatgctgatcatctgagcgagct

SEQ ID NO: 497157 - DNA, 25 bp, Homo sapien
gaactcagctgacgaacagacgcag

SEQ ID NO: 497158 - DNA, 25 bp, Homo sapien
gagaacaaggatcgtccctgcgcat

SEQ ID NO: 497159 - DNA, 25 bp, Homo sapien
gttacccttctaacatcactactga

SEQ ID NO: 497160 - DNA, 25 bp, Homo sapien
tctaacatcactactgaactttcct

SEQ ID NO: 497161 - DNA, 25 bp, Homo sapien
tgttcaacctcatgtatatatacac

SEQ ID NO: 497162 - DNA, 25 bp, Homo sapien
agtatctttgtcatagttacccttc

SEQ ID NO: 497163 - DNA, 25 bp, Homo sapien
ggtgtcatatttcaaacccgcatgt

SEQ ID NO: 497164 - DNA, 25 bp, Homo sapien
tcttagaccacatatcatggaactc

SEQ ID NO: 497165 - DNA, 25 bp, Homo sapien
cccgcatgtttcaaaaagagactct

SEQ ID NO: 497166 - DNA, 25 bp, Homo sapien
gctttaaacacttatgccatgatca

SEQ ID NO: 497167 - DNA, 25 bp, Homo sapien
cacgtaaatacttgaccacttggaa

SEQ ID NO: 497168 - DNA, 25 bp, Homo sapien
tcagggcctgtgttccttagtaatg

SEQ ID NO: 497169 - DNA, 25 bp, Homo sapien
catgggtagttgttgcaaagttcca

SEQ ID NO: 497170 - DNA, 25 bp, Homo sapien
gcttgactagtccacaatgtatgca

SEQ ID NO: 497171 - DNA, 25 bp, Homo sapien
cattttatccaagatggttccagtt

SEQ ID NO: 497172 - DNA, 25 bp, Homo sapien
acattttatccaagatggttccagt

SEQ ID NO: 497173 - DNA, 25 bp, Homo sapien
gtcgtacattttatccaagatggtt

SEQ ID NO: 497174 - DNA, 25 bp, Homo sapien
tttgtcgtacattttatccaagatg

SEQ ID NO: 497175 - DNA, 25 bp, Homo sapien
taagaatctacctaatgagggcccg

SEQ ID NO: 497176 - DNA, 25 bp, Homo sapien
gactatggcagtgcaatcccttcaa

SEQ ID NO: 497177 - DNA, 25 bp, Homo sapien
taatctgataatagaggccaccaag

SEQ ID NO: 497178 - DNA, 25 bp, Homo sapien
gaagtccggagtcttccagtctgaa

SEQ ID NO: 497179 - DNA, 25 bp, Homo sapien
tgagcagaacaacctcattatccct

SEQ ID NO: 497180 - DNA, 25 bp, Homo sapien
tcttgagcagaacaacctcattatc

SEQ ID NO: 497181 - DNA, 25 bp, Homo sapien
tttcttgagcagaacaacctcatta

SEQ ID NO: 497182 - DNA, 25 bp, Homo sapien
gcagaacaacctcattatcccttag

SEQ ID NO: 497183 - DNA, 25 bp, Homo sapien
caacatgccttgagagagaaatact

SEQ ID NO: 497184 - DNA, 25 bp, Homo sapien
tgacacgtggactggcttgagcctt

SEQ ID NO: 497185 - DNA, 25 bp, Homo sapien
gcatcaatatattcccaccctgtgg

SEQ ID NO: 497186 - DNA, 25 bp, Homo sapien
tactgaagggaattgtctcgaggca

SEQ ID NO: 497187 - DNA, 25 bp, Homo sapien
gcgtcacgtgatcccgcgggtctcg

SEQ ID NO: 497188 - DNA, 25 bp, Homo sapien
tggcgttagagacagcggcgttacc

SEQ ID NO: 497189 - DNA, 25 bp, Homo sapien
cggcgttaccagacgcaagaggccc

SEQ ID NO: 497190 - DNA, 25 bp, Homo sapien
gccggcagcgcttgtcacgtgagct

SEQ ID NO: 497191 - DNA, 25 bp, Homo sapien
cagcagtagcagcagcaggggtcgc

SEQ ID NO: 497192 - DNA, 25 bp, Homo sapien
acagcagtagcagcagcaggggtcg

SEQ ID NO: 497193 - DNA, 25 bp, Homo sapien
caacagcagtagcagcagcaggggt

SEQ ID NO: 497194 - DNA, 25 bp, Homo sapien
gcaacagcagtagcagcagcagggg

SEQ ID NO: 497195 - DNA, 25 bp, Homo sapien
tctttgcgctgctgcgcggccgccg

SEQ ID NO: 497196 - DNA, 25 bp, Homo sapien
cggcggccgcgcagcagcgcaaaga

SEQ ID NO: 497197 - DNA, 25 bp, Homo sapien
gaagcatataaccagaagtagtccc

SEQ ID NO: 497198 - DNA, 25 bp, Homo sapien
tgttcttcaagcctaaagcgaagca

SEQ ID NO: 497199 - DNA, 25 bp, Homo sapien
tcaggcacactgtgagggcagatat

SEQ ID NO: 497200 - DNA, 25 bp, Homo sapien
taagtgtaaatgcaactcaggcaca

SEQ ID NO: 497201 - DNA, 25 bp, Homo sapien
atgaacaaccagacacatggattac

SEQ ID NO: 497202 - DNA, 25 bp, Homo sapien
aatgaacaaccagacacatggatta

SEQ ID NO: 497203 - DNA, 25 bp, Homo sapien
caatgaacaaccagacacatggatt

SEQ ID NO: 497204 - DNA, 25 bp, Homo sapien
cttagggccactcttggtgtcgtag

SEQ ID NO: 497205 - DNA, 25 bp, Homo sapien
tcttggtgtcgtagttcactgagaa

SEQ ID NO: 497206 - DNA, 25 bp, Homo sapien
cacgcggtcccgttgccatttttca

SEQ ID NO: 497207 - DNA, 25 bp, Homo sapien
aagttggccattatgcacgcggtcc

SEQ ID NO: 497208 - DNA, 25 bp, Homo sapien
tgttctcttttccacaggagctgcg

SEQ ID NO: 497209 - DNA, 25 bp, Homo sapien
caaaactcatgagctggacgctgta

SEQ ID NO: 497210 - DNA, 25 bp, Homo sapien
gctgtaacgtgttgcatttctcgtg

SEQ ID NO: 497211 - DNA, 25 bp, Homo sapien
gagtgtatgtcctcttccaaaagca

SEQ ID NO: 497212 - DNA, 25 bp, Homo sapien
tggcatcatggagcgttacggtcac

SEQ ID NO: 497213 - DNA, 25 bp, Homo sapien
tgtcagttatagattccacagtctt

SEQ ID NO: 497214 - DNA, 25 bp, Homo sapien
cgttgttcatgtggacctgggtgcc

SEQ ID NO: 497215 - DNA, 25 bp, Homo sapien
ctgctgttggaaaggtacgcctgga

SEQ ID NO: 497216 - DNA, 25 bp, Homo sapien
ttccatttggaatcacatgcgtgtt

SEQ ID NO: 497217 - DNA, 25 bp, Homo sapien
cacatgcgtgttctccattaaaaaa

SEQ ID NO: 497218 - DNA, 25 bp, Homo sapien
aaggaaccaacgtccaggatctgga

SEQ ID NO: 497219 - DNA, 25 bp, Homo sapien
gaaccaacgtccaggatctggacac

SEQ ID NO: 497220 - DNA, 25 bp, Homo sapien
cacgccccaggcacaccgacatctc

SEQ ID NO: 497221 - DNA, 25 bp, Homo sapien
caggcacaccgacatctccacactg

SEQ ID NO: 497222 - DNA, 25 bp, Homo sapien
aggcacaccgacatctccacactgg

SEQ ID NO: 497223 - DNA, 25 bp, Homo sapien
cccaggcacaccgacatctccacac

SEQ ID NO: 497224 - DNA, 25 bp, Homo sapien
cacgccccaggcacaccgacatctc

SEQ ID NO: 497225 - DNA, 25 bp, Homo sapien
ggcatctccgcactggctccctcca

SEQ ID NO: 497226 - DNA, 25 bp, Homo sapien
acactgactccctccgggaggccac

SEQ ID NO: 497227 - DNA, 25 bp, Homo sapien
aggcacaccgacatctccacactgg

SEQ ID NO: 497228 - DNA, 25 bp, Homo sapien
tgtttctgtagagtggtcacaagaa

SEQ ID NO: 497229 - DNA, 25 bp, Homo sapien
gtttctgtagagtggtcacaagaag

SEQ ID NO: 497230 - DNA, 25 bp, Homo sapien
ctgtttctgtagagtggtcacaaga

SEQ ID NO: 497231 - DNA, 25 bp, Homo sapien
cctgtttctgtagagtggtcacaag

SEQ ID NO: 497232 - DNA, 25 bp, Homo sapien
gttggggaaggcctgtcttgttcac

SEQ ID NO: 497233 - DNA, 25 bp, Homo sapien
ttggggaaggcctgtcttgttcaca

SEQ ID NO: 497234 - DNA, 25 bp, Homo sapien
cgttggtgccgctcacgttgtactt

SEQ ID NO: 497235 - DNA, 25 bp, Homo sapien
gccgctcacgttgtacttgtccaca

SEQ ID NO: 497236 - DNA, 25 bp, Homo sapien
tcacgttgtacttgtccacagaggg

SEQ ID NO: 497237 - DNA, 25 bp, Homo sapien
caggtcccgttggtgccgctcacgt

SEQ ID NO: 497238 - DNA, 25 bp, Homo sapien
ctcccgctggccgaggtcttgttgg

SEQ ID NO: 497239 - DNA, 25 bp, Homo sapien
tgatgttgagaagccttgtcaccgt

SEQ ID NO: 497240 - DNA, 25 bp, Homo sapien
agagtcaccaggtgggcgccgcagc

SEQ ID NO: 497241 - DNA, 25 bp, Homo sapien
acggtggtgccctcgctgtgcagct

SEQ ID NO: 497242 - DNA, 25 bp, Homo sapien
ggactgcaggagctatcacagcaca

SEQ ID NO: 497243 - DNA, 25 bp, Homo sapien
gatctttaatcacggagcagattca

SEQ ID NO: 497244 - DNA, 25 bp, Homo sapien
ggctcatcgcaaccttaactcctgg

SEQ ID NO: 497245 - DNA, 25 bp, Homo sapien
tataaaaggcgttgtgtatctctgg

SEQ ID NO: 497246 - DNA, 25 bp, Homo sapien
ctggcgtcaggaagaattgtattca

SEQ ID NO: 497247 - DNA, 25 bp, Homo sapien
ctctggcgtcaggaagaattgtatt

SEQ ID NO: 497248 - DNA, 25 bp, Homo sapien
tctggcgtcaggaagaattgtattc

SEQ ID NO: 497249 - DNA, 25 bp, Homo sapien
tgcagcgctcgcagggagccgttgg

SEQ ID NO: 497250 - DNA, 25 bp, Homo sapien
ctgcagcgctcgcagggagccgttg

SEQ ID NO: 497251 - DNA, 25 bp, Homo sapien
gcagcgctcgcagggagccgttggc

SEQ ID NO: 497252 - DNA, 25 bp, Homo sapien
acttgtaggaattgccgactgtggc

SEQ ID NO: 497253 - DNA, 25 bp, Homo sapien
tgaatatattgactgaaaacgcctt

SEQ ID NO: 497254 - DNA, 25 bp, Homo sapien
aaaacgccttcgtgacacggacgtg

SEQ ID NO: 497255 - DNA, 25 bp, Homo sapien
ctcctccgcgttgcacttgtaggaa

SEQ ID NO: 497256 - DNA, 25 bp, Homo sapien
gaccggcaagaagaaacagctcctt

SEQ ID NO: 497257 - DNA, 25 bp, Homo sapien
tctagaatctcagaccggcaagaag

SEQ ID NO: 497258 - DNA, 25 bp, Homo sapien
cggagtctgaagcacgtcctccaca

SEQ ID NO: 497259 - DNA, 25 bp, Homo sapien
agcccacacggaagcgactaaacgt

SEQ ID NO: 497260 - DNA, 25 bp, Homo sapien
tggcggaaggttccagctctagctg

SEQ ID NO: 497261 - DNA, 25 bp, Homo sapien
gacagctgtgctgcgtccagggcct

SEQ ID NO: 497262 - DNA, 25 bp, Homo sapien
ggcgaggaaaccacacacgtctctc

SEQ ID NO: 497263 - DNA, 25 bp, Homo sapien
tggtgctctctgcacggcgaggaaa

SEQ ID NO: 497264 - DNA, 25 bp, Homo sapien
tagtctggtagcctgcgtgactcct

SEQ ID NO: 497265 - DNA, 25 bp, Homo sapien
ggtagcctgcgtgactcctcttcct

SEQ ID NO: 497266 - DNA, 25 bp, Homo sapien
gggcaccacccacagcgatggggat

SEQ ID NO: 497267 - DNA, 25 bp, Homo sapien
gatcagcatgctgttctcgtccagc

SEQ ID NO: 497268 - DNA, 25 bp, Homo sapien
tgcaagatgaacttcacattggatg

SEQ ID NO: 497269 - DNA, 25 bp, Homo sapien
ccagttagcaaaattaacaccgtca

SEQ ID NO: 497270 - DNA, 25 bp, Homo sapien
ttactctgttgtgcatagtaaatgc

SEQ ID NO: 497271 - DNA, 25 bp, Homo sapien
caccgtcatttcgatagttactctg

SEQ ID NO: 497272 - DNA, 25 bp, Homo sapien
gctgcagacattagagacgcccaag

SEQ ID NO: 497273 - DNA, 25 bp, Homo sapien
tggagccaatttagagcggcacccc

SEQ ID NO: 497274 - DNA, 25 bp, Homo sapien
gagtgaccttcatgcgtcctacgtg

SEQ ID NO: 497275 - DNA, 25 bp, Homo sapien
tcctacgtgtgacggccagaggctt

SEQ ID NO: 497276 - DNA, 25 bp, Homo sapien
gatcaccccgaatgtcaacagaaga

SEQ ID NO: 497277 - DNA, 25 bp, Homo sapien
caagccacggcaaaacatcaggaga

SEQ ID NO: 497278 - DNA, 25 bp, Homo sapien
caatgcattacgtgagctggtcccg

SEQ ID NO: 497279 - DNA, 25 bp, Homo sapien
tgtacacagcgcagaacaggatcac

SEQ ID NO: 497280 - DNA, 25 bp, Homo sapien
atcatgttacatgaatgaaccagac

SEQ ID NO: 497281 - DNA, 25 bp, Homo sapien
ccattccctacgtctggcaccaaga

SEQ ID NO: 497282 - DNA, 25 bp, Homo sapien
ctctctgcaccgagaccaccctcaa

SEQ ID NO: 497283 - DNA, 25 bp, Homo sapien
ttttagctgacagaaggacaaggcc

SEQ ID NO: 497284 - DNA, 25 bp, Homo sapien
tgcccctttccagagttgacactgg

SEQ ID NO: 497285 - DNA, 25 bp, Homo sapien
gacactggaccaactttcactgctt

SEQ ID NO: 497286 - DNA, 25 bp, Homo sapien
cctgcgttgctcgtctctacactga

SEQ ID NO: 497287 - DNA, 25 bp, Homo sapien
tggaagcttatccatggccaccgtc

SEQ ID NO: 497288 - DNA, 25 bp, Homo sapien
cagtgagccgagatcgcgccactgc

SEQ ID NO: 497289 - DNA, 25 bp, Homo sapien
ggtggctcacgcttatgtagtccca

SEQ ID NO: 497290 - DNA, 25 bp, Homo sapien
cttgaacctgggaggcggaggttgc

SEQ ID NO: 497291 - DNA, 25 bp, Homo sapien
tcgggaggctgaggcacgagaatca

SEQ ID NO: 497292 - DNA, 25 bp, Homo sapien
tgctcctggtcctaatggctgtact

SEQ ID NO: 497293 - DNA, 25 bp, Homo sapien
taagcagataaccaaagggagtttc

SEQ ID NO: 497294 - DNA, 25 bp, Homo sapien
gcatagggcacaggatgagcctcca

SEQ ID NO: 497295 - DNA, 25 bp, Homo sapien
gctttcctgtctatggcggccctgt

SEQ ID NO: 497296 - DNA, 25 bp, Homo sapien
gctgttcagccttagaaagaatgag

SEQ ID NO: 497297 - DNA, 25 bp, Homo sapien
tgagctgagtttgtaccactacgct

SEQ ID NO: 497298 - DNA, 25 bp, Homo sapien
tcagcagagtgctgttcagccttag

SEQ ID NO: 497299 - DNA, 25 bp, Homo sapien
gctgagtttgtaccactacgctcca

SEQ ID NO: 497300 - DNA, 25 bp, Homo sapien
ctcagggcttcaggacatcaggtgg

SEQ ID NO: 497301 - DNA, 25 bp, Homo sapien
cctgcacagctagtgtaggtgtagg

SEQ ID NO: 497302 - DNA, 25 bp, Homo sapien
ttctagggcagttcatgtgtccgct

SEQ ID NO: 497303 - DNA, 25 bp, Homo sapien
tggggtctcgtgttcccagtgcaga

SEQ ID NO: 497304 - DNA, 25 bp, Homo sapien
gagaaacccatgtgagtggccaggg

SEQ ID NO: 497305 - DNA, 25 bp, Homo sapien
ttgaaaaggagaaacccatgtgagt

SEQ ID NO: 497306 - DNA, 25 bp, Homo sapien
gttgaaaaggagaaacccatgtgag

SEQ ID NO: 497307 - DNA, 25 bp, Homo sapien
aaaggagaaacccatgtgagtggcc

SEQ ID NO: 497308 - DNA, 25 bp, Homo sapien
gaaaccagtggagttgtcaagccgg

SEQ ID NO: 497309 - DNA, 25 bp, Homo sapien
ggtgtacacccatctcagcgtcatg

SEQ ID NO: 497310 - DNA, 25 bp, Homo sapien
tcttggaacttgtgcagaaagcggc

SEQ ID NO: 497311 - DNA, 25 bp, Homo sapien
tttgcagccgttgtggagagaccac

SEQ ID NO: 497312 - DNA, 25 bp, Homo sapien
taactgcacgagttggacagtgacg

SEQ ID NO: 497313 - DNA, 25 bp, Homo sapien
tcagtgaagcgctatgtccggaaag

SEQ ID NO: 497314 - DNA, 25 bp, Homo sapien
tgacgtctgccactgaaaccgtgtt

SEQ ID NO: 497315 - DNA, 25 bp, Homo sapien
gtttccacccagtgtctagcctcag

SEQ ID NO: 497316 - DNA, 25 bp, Homo sapien
agtcattctcccgtctttgcctttg

SEQ ID NO: 497317 - DNA, 25 bp, Homo sapien
atttgggtctgtcctattgctgtcc

SEQ ID NO: 497318 - DNA, 25 bp, Homo sapien
ccttttcttcgaccaggagctgcta

SEQ ID NO: 497319 - DNA, 25 bp, Homo sapien
ccactttccaatatggacttgggag

SEQ ID NO: 497320 - DNA, 25 bp, Homo sapien
taaacactttaatcatactgagggc

SEQ ID NO: 497321 - DNA, 25 bp, Homo sapien
caggagcagaagtccacgcttggtt

SEQ ID NO: 497322 - DNA, 25 bp, Homo sapien
caaagtgcaacagggagtttctctc

SEQ ID NO: 497323 - DNA, 25 bp, Homo sapien
cctatagagatgaccgcaggggact

SEQ ID NO: 497324 - DNA, 25 bp, Homo sapien
agtaacgtaaaagtatataagacat

SEQ ID NO: 497325 - DNA, 25 bp, Homo sapien
gtatataagacatgtgaacttaaaa

SEQ ID NO: 497326 - DNA, 25 bp, Homo sapien
agtatataagacatgtgaacttaaa

SEQ ID NO: 497327 - DNA, 25 bp, Homo sapien
gcagacccagatagagactcagagg

SEQ ID NO: 497328 - DNA, 25 bp, Homo sapien
gtcgggagcagacccacatagaggc

SEQ ID NO: 497329 - DNA, 25 bp, Homo sapien
caggaacagggtcgggagcagaccc

SEQ ID NO: 497330 - DNA, 25 bp, Homo sapien
cagggtcgggaacaggccttgacaa

SEQ ID NO: 497331 - DNA, 25 bp, Homo sapien
aggttcagaaatgggcccaggaaga

SEQ ID NO: 497332 - DNA, 25 bp, Homo sapien
gcccagtggcagacccagatagagg

SEQ ID NO: 497333 - DNA, 25 bp, Homo sapien
aaacaggttcaaggagaggttcaga

SEQ ID NO: 497334 - DNA, 25 bp, Homo sapien
aggctcagggacacgctcaagaaca

SEQ ID NO: 497335 - DNA, 25 bp, Homo sapien
gagatgtgaagcatccgttgccgga

SEQ ID NO: 497336 - DNA, 25 bp, Homo sapien
tttgagaattcacacggtcccagga

SEQ ID NO: 497337 - DNA, 25 bp, Homo sapien
gaagggctccgcaacaaatgatcct

SEQ ID NO: 497338 - DNA, 25 bp, Homo sapien
tgagcaagctttcagggatgcaggc

SEQ ID NO: 497339 - DNA, 25 bp, Homo sapien
tcaccgtggaggctgattttatcac

SEQ ID NO: 497340 - DNA, 25 bp, Homo sapien
catacagagaggttcaggcgcttgc

SEQ ID NO: 497341 - DNA, 25 bp, Homo sapien
aaacgacaatggtgagtgctgactc

SEQ ID NO: 497342 - DNA, 25 bp, Homo sapien
tatcctaacaattgcagtgtgcagg

SEQ ID NO: 497343 - DNA, 25 bp, Homo sapien
gaactgtcgatgtttcttagcagag

SEQ ID NO: 497344 - DNA, 25 bp, Homo sapien
aaaacgtgagcgtatcttccaggct

SEQ ID NO: 497345 - DNA, 25 bp, Homo sapien
tagaagtcttcgattctcagagagc

SEQ ID NO: 497346 - DNA, 25 bp, Homo sapien
gaaactgggcctgtctacctttaga

SEQ ID NO: 497347 - DNA, 25 bp, Homo sapien
tcatctgtttctcgtgtccgcctgg

SEQ ID NO: 497348 - DNA, 25 bp, Homo sapien
ctgattggtgagctgaagtctgtcc

SEQ ID NO: 497349 - DNA, 25 bp, Homo sapien
tgtacatcgttgtctgaaaaaaccc

SEQ ID NO: 497350 - DNA, 25 bp, Homo sapien
cttgtggtacccgtagtgcccagca

SEQ ID NO: 497351 - DNA, 25 bp, Homo sapien
gcctaaaagtggtgaacactattca

SEQ ID NO: 497352 - DNA, 25 bp, Homo sapien
gtggtgaacactattcaacatgatt

SEQ ID NO: 497353 - DNA, 25 bp, Homo sapien
attgcctaaaagtggtgaacactat

SEQ ID NO: 497354 - DNA, 25 bp, Homo sapien
aaagtggtgaacactattcaacatg

SEQ ID NO: 497355 - DNA, 25 bp, Homo sapien
tcccggcgtgtaggcacctctgagg

SEQ ID NO: 497356 - DNA, 25 bp, Homo sapien
ccggcgtgtaggcacctctgaggcc

SEQ ID NO: 497357 - DNA, 25 bp, Homo sapien
ggcgtgtaggcacctctgaggccct

SEQ ID NO: 497358 - DNA, 25 bp, Homo sapien
gtcccggcgtgtaggcacctctgag

SEQ ID NO: 497359 - DNA, 25 bp, Homo sapien
ctgttgctcctaggccgtgaacctg

SEQ ID NO: 497360 - DNA, 25 bp, Homo sapien
tgttgctcctaggccgtgaacctgt

SEQ ID NO: 497361 - DNA, 25 bp, Homo sapien
ctcgtctgtggtgcagcctgttgct

SEQ ID NO: 497362 - DNA, 25 bp, Homo sapien
cgtctgtggtgcagcctgttgctcc

SEQ ID NO: 497363 - DNA, 25 bp, Homo sapien
aacagccagacgtgaggtggtgcac

SEQ ID NO: 497364 - DNA, 25 bp, Homo sapien
tggagccatgcatacccacaggaac

SEQ ID NO: 497365 - DNA, 25 bp, Homo sapien
ggtgcacgctgagttcctgattaca

SEQ ID NO: 497366 - DNA, 25 bp, Homo sapien
gattacatccagctagaggcacggt

SEQ ID NO: 497367 - DNA, 25 bp, Homo sapien
tgtggctggaatcgcacactgtgcg

SEQ ID NO: 497368 - DNA, 25 bp, Homo sapien
tacactgtgcagctggagtcgtgcg

SEQ ID NO: 497369 - DNA, 25 bp, Homo sapien
cggctggactcatgcactgtgcggc

SEQ ID NO: 497370 - DNA, 25 bp, Homo sapien
cgtgcgctgtgtggatggaatcata

SEQ ID NO: 497371 - DNA, 25 bp, Homo sapien
caagccgacccggactcccgcccag

SEQ ID NO: 497372 - DNA, 25 bp, Homo sapien
cagcgccggagggcttccttgcatc

SEQ ID NO: 497373 - DNA, 25 bp, Homo sapien
ccccgctcagccaagccgacccgga

SEQ ID NO: 497374 - DNA, 25 bp, Homo sapien
gcagcgccggagggcttccttgcat

SEQ ID NO: 497375 - DNA, 25 bp, Homo sapien
cccgtccggcccgagcatcaccgtt

SEQ ID NO: 497376 - DNA, 25 bp, Homo sapien
gagcatcaccgttccgcggcctggg

SEQ ID NO: 497377 - DNA, 25 bp, Homo sapien
cgggacgcagggatccgcgcccgcc

SEQ ID NO: 497378 - DNA, 25 bp, Homo sapien
ggcccgagcatcaccgttccgcggc

SEQ ID NO: 497379 - DNA, 25 bp, Homo sapien
gggcacagcaatccacgggtctctg

SEQ ID NO: 497380 - DNA, 25 bp, Homo sapien
cagggcacagcaatccacgggtctc

SEQ ID NO: 497381 - DNA, 25 bp, Homo sapien
cacagcaatccacgggtctctgccc

SEQ ID NO: 497382 - DNA, 25 bp, Homo sapien
ggcacagcaatccacgggtctctgc

SEQ ID NO: 497383 - DNA, 25 bp, Homo sapien
acgggaaacagcacccagaagaagc

SEQ ID NO: 497384 - DNA, 25 bp, Homo sapien
cctgcaccgcccagggaaggacggg

SEQ ID NO: 497385 - DNA, 25 bp, Homo sapien
aagaagcttcttcccaacaccttca

SEQ ID NO: 497386 - DNA, 25 bp, Homo sapien
gaaggacgggaaacagcacccagaa

SEQ ID NO: 497387 - DNA, 25 bp, Homo sapien
catgttcacgacatctttgtaatcc

SEQ ID NO: 497388 - DNA, 25 bp, Homo sapien
gacagcttggaaaacggaattttca

SEQ ID NO: 497389 - DNA, 25 bp, Homo sapien
ttcaaacgtgtgcacctgaaacagt

SEQ ID NO: 497390 - DNA, 25 bp, Homo sapien
agggctctctgcagtccgtagacag

SEQ ID NO: 497391 - DNA, 25 bp, Homo sapien
caaaagcatgttcctctatctcttc

SEQ ID NO: 497392 - DNA, 25 bp, Homo sapien
ggataaactttggttttgatgttgc

SEQ ID NO: 497393 - DNA, 25 bp, Homo sapien
cagacgatccgctgcctttcttaca

SEQ ID NO: 497394 - DNA, 25 bp, Homo sapien
tacatcttcaagaatctcgtcaagc

SEQ ID NO: 497395 - DNA, 25 bp, Homo sapien
tgtcttctgattagtgagtggctca

SEQ ID NO: 497396 - DNA, 25 bp, Homo sapien
ttctgattagtgagtggctcaggag

SEQ ID NO: 497397 - DNA, 25 bp, Homo sapien
tggctcaggaggtgaagaagcagct

SEQ ID NO: 497398 - DNA, 25 bp, Homo sapien
acatgtcttctgattagtgagtggc

SEQ ID NO: 497399 - DNA, 25 bp, Homo sapien
ttgtcttcattttcaatctacatta

SEQ ID NO: 497400 - DNA, 25 bp, Homo sapien
cttcattttcaatctacattaaaaa

SEQ ID NO: 497401 - DNA, 25 bp, Homo sapien
gcattttagtttgtcttcattttca

SEQ ID NO: 497402 - DNA, 25 bp, Homo sapien
gtcttcattttcaatctacattaaa

SEQ ID NO: 497403 - DNA, 25 bp, Homo sapien
tcctccacttctcgttttgttatat

SEQ ID NO: 497404 - DNA, 25 bp, Homo sapien
tgcttagaattggcctcttcttcct

SEQ ID NO: 497405 - DNA, 25 bp, Homo sapien
ttttgcttagaattggcctcttctt

SEQ ID NO: 497406 - DNA, 25 bp, Homo sapien
ttgcttagaattggcctcttcttcc

SEQ ID NO: 497407 - DNA, 25 bp, Homo sapien
ggttgttctgggagtcaatcagcat

SEQ ID NO: 497408 - DNA, 25 bp, Homo sapien
tggttgttctgggagtcaatcagca

SEQ ID NO: 497409 - DNA, 25 bp, Homo sapien
tgatctgcacgtgggatggttgaat

SEQ ID NO: 497410 - DNA, 25 bp, Homo sapien
taaagtggtgatctgcacgtgggat

SEQ ID NO: 497411 - DNA, 25 bp, Homo sapien
tttataaagtggtgatctgcacgtg

SEQ ID NO: 497412 - DNA, 25 bp, Homo sapien
tataaagtggtgatctgcacgtggg

SEQ ID NO: 497413 - DNA, 25 bp, Homo sapien
ggcaaggacagcattcctatggtaa

SEQ ID NO: 497414 - DNA, 25 bp, Homo sapien
tgaaggtcccagaagtacaccacaa

SEQ ID NO: 497415 - DNA, 25 bp, Homo sapien
tatggctgtacatagccagccacaa

SEQ ID NO: 497416 - DNA, 25 bp, Homo sapien
cattgtaggcaatcctatggctgta

SEQ ID NO: 497417 - DNA, 25 bp, Homo sapien
acagctggaagcttgggaacctttc

SEQ ID NO: 497418 - DNA, 25 bp, Homo sapien
cacgctgctcgcaccgtgagtgttg

SEQ ID NO: 497419 - DNA, 25 bp, Homo sapien
cctgtcagaagtgccatcagtgtga

SEQ ID NO: 497420 - DNA, 25 bp, Homo sapien
caacactttggttacattcagcacg

SEQ ID NO: 497421 - DNA, 25 bp, Homo sapien
ggtgttttatacttgaatcacgtga

SEQ ID NO: 497422 - DNA, 25 bp, Homo sapien
aaaactacattgaaacagccgttct

SEQ ID NO: 497423 - DNA, 25 bp, Homo sapien
ccattctgccaaggcgagccctgtc

SEQ ID NO: 497424 - DNA, 25 bp, Homo sapien
tgaaacagccgttcttcccagaggc

SEQ ID NO: 497425 - DNA, 25 bp, Homo sapien
ccaaattctcctaatgtctccactt

SEQ ID NO: 497426 - DNA, 25 bp, Homo sapien
accccaaattctcctaatgtctcca

SEQ ID NO: 497427 - DNA, 25 bp, Homo sapien
acaccccaaattctcctaatgtctc

SEQ ID NO: 497428 - DNA, 25 bp, Homo sapien
ggagaaaattctaagccaacaagaa

SEQ ID NO: 497429 - DNA, 25 bp, Homo sapien
cattgccgcggtcatgttacatgct

SEQ ID NO: 497430 - DNA, 25 bp, Homo sapien
agtcatcatggctacccggaacgct

SEQ ID NO: 497431 - DNA, 25 bp, Homo sapien
tgtcttcaggagtgtacacaggaaa

SEQ ID NO: 497432 - DNA, 25 bp, Homo sapien
gcagtggctacctaacactccatgg

SEQ ID NO: 497433 - DNA, 25 bp, Homo sapien
tgtcatgtaacacggcccttgtaag

SEQ ID NO: 497434 - DNA, 25 bp, Homo sapien
gggtttgatccgcaagagatgcccc

SEQ ID NO: 497435 - DNA, 25 bp, Homo sapien
tgaagacgctctgcgtgggtttgat

SEQ ID NO: 497436 - DNA, 25 bp, Homo sapien
gcttgacaaggacagacacgtggaa

SEQ ID NO: 497437 - DNA, 25 bp, Homo sapien
gctccgagcaagtcggcttccactg

SEQ ID NO: 497438 - DNA, 25 bp, Homo sapien
agggacacggtcctgcctaggcttc

SEQ ID NO: 497439 - DNA, 25 bp, Homo sapien
acacggtcctgcctaggtttccgag

SEQ ID NO: 497440 - DNA, 25 bp, Homo sapien
acggtcctgcctaggctccgagcaa

SEQ ID NO: 497441 - DNA, 25 bp, Homo sapien
gtacaaagcatgtcatgaacaacca

SEQ ID NO: 497442 - DNA, 25 bp, Homo sapien
caaagcatgtcatgaacaaccagag

SEQ ID NO: 497443 - DNA, 25 bp, Homo sapien
tcatgaacaaccagagccatcactg

SEQ ID NO: 497444 - DNA, 25 bp, Homo sapien
gcatgtcatgaacaaccagagccat

SEQ ID NO: 497445 - DNA, 25 bp, Homo sapien
caagaagggaatgtttcctcaccac

SEQ ID NO: 497446 - DNA, 25 bp, Homo sapien
tgaagcctaagaagctcatcactgc

SEQ ID NO: 497447 - DNA, 25 bp, Homo sapien
gacaatgagtcttgctccgaggtta

SEQ ID NO: 497448 - DNA, 25 bp, Homo sapien
ccaacgctgcttgtggctggacaat

SEQ ID NO: 497449 - DNA, 25 bp, Homo sapien
tcactactataagcattttgatttc

SEQ ID NO: 497450 - DNA, 25 bp, Homo sapien
tcacatacccactaaggaatttgct

SEQ ID NO: 497451 - DNA, 25 bp, Homo sapien
ttttgtgcttatcactactataagc

SEQ ID NO: 497452 - DNA, 25 bp, Homo sapien
cctgtaacatatttgcttcagattt

SEQ ID NO: 497453 - DNA, 25 bp, Homo sapien
accacacggaatgagccttcgctgt

SEQ ID NO: 497454 - DNA, 25 bp, Homo sapien
ccttcgctgtgagaccaagacagac

SEQ ID NO: 497455 - DNA, 25 bp, Homo sapien
tcacgagggcagaacagtagtagcc

SEQ ID NO: 497456 - DNA, 25 bp, Homo sapien
catgactagctgaagagactaagga

SEQ ID NO: 497457 - DNA, 25 bp, Homo sapien
tgaagacaggtctacgacaactcaa

SEQ ID NO: 497458 - DNA, 25 bp, Homo sapien
ggtctacgacaactcaaaagtatcc

SEQ ID NO: 497459 - DNA, 25 bp, Homo sapien
gacaggtctacgacaactcaaaagt

SEQ ID NO: 497460 - DNA, 25 bp, Homo sapien
tacgacaactcaaaagtatccaaag

SEQ ID NO: 497461 - DNA, 25 bp, Homo sapien
tatgagagtcggcatgacggccatg

SEQ ID NO: 497462 - DNA, 25 bp, Homo sapien
tcctgcgtcaccagcatgccgagga

SEQ ID NO: 497463 - DNA, 25 bp, Homo sapien
gacggccatgaagagcccgagctgc

SEQ ID NO: 497464 - DNA, 25 bp, Homo sapien
agaagatgcactggcgcccgcctgt

SEQ ID NO: 497465 - DNA, 25 bp, Homo sapien
tcttcaggtggaataaccggcacag

SEQ ID NO: 497466 - DNA, 25 bp, Homo sapien
tcagtgtcgctgtcttccacgtccg

SEQ ID NO: 497467 - DNA, 25 bp, Homo sapien
cattagcctaaacccgcacagggtc

SEQ ID NO: 497468 - DNA, 25 bp, Homo sapien
gatggcttgttctagaatagctcct

SEQ ID NO: 497469 - DNA, 25 bp, Homo sapien
gcaggtttcatagctggaacacaga

SEQ ID NO: 497470 - DNA, 25 bp, Homo sapien
cattccttcgagagaagcacaagtc

SEQ ID NO: 497471 - DNA, 25 bp, Homo sapien
taaacccacagatgcgagaagccaa

SEQ ID NO: 497472 - DNA, 25 bp, Homo sapien
gcacaagtctaaacagcagcaggtt

SEQ ID NO: 497473 - DNA, 25 bp, Homo sapien
tgtgcgtggaaaatgctcagacctc

SEQ ID NO: 497474 - DNA, 25 bp, Homo sapien
tatgccagcatgttagacctgcgtg

SEQ ID NO: 497475 - DNA, 25 bp, Homo sapien
tagaagtcatctccggctagcatga

SEQ ID NO: 497476 - DNA, 25 bp, Homo sapien
gagagtccgccctccgttgagaata

SEQ ID NO: 497477 - DNA, 25 bp, Homo sapien
tcacttaccatacaacttacccatt

SEQ ID NO: 497478 - DNA, 25 bp, Homo sapien
cacaaaattacacaactattaccac

SEQ ID NO: 497479 - DNA, 25 bp, Homo sapien
taccagtctactagtagaaaatcat

SEQ ID NO: 497480 - DNA, 25 bp, Homo sapien
tccggcaaccagtaattcatcctgt

SEQ ID NO: 497481 - DNA, 25 bp, Homo sapien
cgtgtttggacaagcttcccatcag

SEQ ID NO: 497482 - DNA, 25 bp, Homo sapien
atctgtatgtacagggcgccgtgcc

SEQ ID NO: 497483 - DNA, 25 bp, Homo sapien
tccacggctgttctgactgtctcag

SEQ ID NO: 497484 - DNA, 25 bp, Homo sapien
atgctgctcttgatctgtatgtaca

SEQ ID NO: 497485 - DNA, 25 bp, Homo sapien
cacctgcaggtccacgcgtgtgctg

SEQ ID NO: 497486 - DNA, 25 bp, Homo sapien
acgcgtgtgctgctcttgatctgca

SEQ ID NO: 497487 - DNA, 25 bp, Homo sapien
ggtccacgcgtgtgctgctcttgat

SEQ ID NO: 497488 - DNA, 25 bp, Homo sapien
cacgcgtgtgctgctcttgatctgc

SEQ ID NO: 497489 - DNA, 25 bp, Homo sapien
tcacctgcaggtccacacgcgtgct

SEQ ID NO: 497490 - DNA, 25 bp, Homo sapien
aagtttctcaggattccggcttgcc

SEQ ID NO: 497491 - DNA, 25 bp, Homo sapien
tctttgaaagacaatcaccgtgaca

SEQ ID NO: 497492 - DNA, 25 bp, Homo sapien
gacaatcaccgtgacaagtttctca

SEQ ID NO: 497493 - DNA, 25 bp, Homo sapien
ctcctggacgctgggatggaaccca

SEQ ID NO: 497494 - DNA, 25 bp, Homo sapien
tgaatcattcgcagggcggttccct

SEQ ID NO: 497495 - DNA, 25 bp, Homo sapien
tgagcccctagagcactgtgtgcag

SEQ ID NO: 497496 - DNA, 25 bp, Homo sapien
tccaaaggtagagcctgtgcgtctg

SEQ ID NO: 497497 - DNA, 25 bp, Homo sapien
gggaggcagcgtccttcagagctca

SEQ ID NO: 497498 - DNA, 25 bp, Homo sapien
ccacgtctgcgacttcaggagggag

SEQ ID NO: 497499 - DNA, 25 bp, Homo sapien
ccacgtctgcgacttcagtaggagg

SEQ ID NO: 497500 - DNA, 25 bp, Homo sapien
cacgtctgcgacttcagtaggaggg

SEQ ID NO: 497501 - DNA, 25 bp, Homo sapien
cccacgtctgcgacttcaggaggga

SEQ ID NO: 497502 - DNA, 25 bp, Homo sapien
aagaatctgaccaatcaaaaccagg

SEQ ID NO: 497503 - DNA, 25 bp, Homo sapien
catgtgcagcttccgataatagggt

SEQ ID NO: 497504 - DNA, 25 bp, Homo sapien
aaaggcagatattcccaagatcagg

SEQ ID NO: 497505 - DNA, 25 bp, Homo sapien
taatagggtccaatgagatacttct

SEQ ID NO: 497506 - DNA, 25 bp, Homo sapien
acataaataacacatagtttgagaa

SEQ ID NO: 497507 - DNA, 25 bp, Homo sapien
aaataacacatagtttgagaattac

SEQ ID NO: 497508 - DNA, 25 bp, Homo sapien
gattacataaataacacatagtttg

SEQ ID NO: 497509 - DNA, 25 bp, Homo sapien
tcagattacataaataacacatagt

SEQ ID NO: 497510 - DNA, 25 bp, Homo sapien
gcaaagtgcttaagagtatgagtca

SEQ ID NO: 497511 - DNA, 25 bp, Homo sapien
ggaaaggtaaagaatggatcacaag

SEQ ID NO: 497512 - DNA, 25 bp, Homo sapien
ggtctatacatgagcgcgaccacgc

SEQ ID NO: 497513 - DNA, 25 bp, Homo sapien
ggatcacaagatttcagtgaaagag

SEQ ID NO: 497514 - DNA, 25 bp, Homo sapien
ggcactctactaggctcatcagcag

SEQ ID NO: 497515 - DNA, 25 bp, Homo sapien
gggcagcagctctaaatggaaacga

SEQ ID NO: 497516 - DNA, 25 bp, Homo sapien
gcaccttccagaaacacgagaatgg

SEQ ID NO: 497517 - DNA, 25 bp, Homo sapien
aatacattgtggcatcgggtgcaga

SEQ ID NO: 497518 - DNA, 25 bp, Homo sapien
agagaaagcgacaggacgacaagca

SEQ ID NO: 497519 - DNA, 25 bp, Homo sapien
tagttgaattaaccttactgggaga

SEQ ID NO: 497520 - DNA, 25 bp, Homo sapien
ggacgcagctttacatgagacccca

SEQ ID NO: 497521 - DNA, 25 bp, Homo sapien
cccggtgggagtgttagaaacgcat

SEQ ID NO: 497522 - DNA, 25 bp, Homo sapien
gccctgagaggagacgagcgctcca

SEQ ID NO: 497523 - DNA, 25 bp, Homo sapien
gaggtggcgatctcctcggtgacca

SEQ ID NO: 497524 - DNA, 25 bp, Homo sapien
aaaacgatggccaggaagtcgcgga

SEQ ID NO: 497525 - DNA, 25 bp, Homo sapien
ccagctccatggagacgtccagcag

SEQ ID NO: 497526 - DNA, 25 bp, Homo sapien
tcaatgcccactgagagcacacatc

SEQ ID NO: 497527 - DNA, 25 bp, Homo sapien
aataaagcatggcagtgatcagcaa

SEQ ID NO: 497528 - DNA, 25 bp, Homo sapien
ggaggtgatgagaataacacgcatt

SEQ ID NO: 497529 - DNA, 25 bp, Homo sapien
cctgaaggtgatctggccgctttca

SEQ ID NO: 497530 - DNA, 25 bp, Homo sapien
tctctgcggctgcaccgggcaggca

SEQ ID NO: 497531 - DNA, 25 bp, Homo sapien
gcaaaggtgccgtctgaagcgggca

SEQ ID NO: 497532 - DNA, 25 bp, Homo sapien
ttctgccgccctgaagtggatatcg

SEQ ID NO: 497533 - DNA, 25 bp, Homo sapien
gtggatatcgggtcccacgcacaga

SEQ ID NO: 497534 - DNA, 25 bp, Homo sapien
ttcctccccagcacgccctgagcct

SEQ ID NO: 497535 - DNA, 25 bp, Homo sapien
tgatgccccggaggctcctgtgctc

SEQ ID NO: 497536 - DNA, 25 bp, Homo sapien
cctcaccccggccagtcgctgatgc

SEQ ID NO: 497537 - DNA, 25 bp, Homo sapien
ccggccagtcgctgatgccccggag

SEQ ID NO: 497538 - DNA, 25 bp, Homo sapien
tccgggctgcgttttctccccgctg

SEQ ID NO: 497539 - DNA, 25 bp, Homo sapien
ccgggctgcgttttctccccgctgc

SEQ ID NO: 497540 - DNA, 25 bp, Homo sapien
tgggcgttccgggctgcgttttctc

SEQ ID NO: 497541 - DNA, 25 bp, Homo sapien
gcgcacactatttctcacaacttca

SEQ ID NO: 497542 - DNA, 25 bp, Homo sapien
ttgggaacaggacagacacgttacg

SEQ ID NO: 497543 - DNA, 25 bp, Homo sapien
tcccaagtgcacgtgtgaaagcaac

SEQ ID NO: 497544 - DNA, 25 bp, Homo sapien
taaaatcctaaatcctcccaagtgc

SEQ ID NO: 497545 - DNA, 25 bp, Homo sapien
caccgtgagctcgtacgccacaaac

SEQ ID NO: 497546 - DNA, 25 bp, Homo sapien
cgtgagctcgtacgccacaaacgtg

SEQ ID NO: 497547 - DNA, 25 bp, Homo sapien
agctcgtacgccacaaacgtgggga

SEQ ID NO: 497548 - DNA, 25 bp, Homo sapien
gctcgtacgccacaaacgtggggaa

SEQ ID NO: 497549 - DNA, 25 bp, Homo sapien
gctcctcggcagaatgagagacagg

SEQ ID NO: 497550 - DNA, 25 bp, Homo sapien
gagacgatccacttgatgtactggc

SEQ ID NO: 497551 - DNA, 25 bp, Homo sapien
ctggctgctcctcggcagaatgaga

SEQ ID NO: 497552 - DNA, 25 bp, Homo sapien
aagccccgcagagacgatccacttg

SEQ ID NO: 497553 - DNA, 25 bp, Homo sapien
cgagagatgacgcccgctcttcgcg

SEQ ID NO: 497554 - DNA, 25 bp, Homo sapien
tcccgagagatgacgcccgctcttc

SEQ ID NO: 497555 - DNA, 25 bp, Homo sapien
ctcccgagagatgacgcccgctctt

SEQ ID NO: 497556 - DNA, 25 bp, Homo sapien
cccgagagatgacgcccgctcttcg

SEQ ID NO: 497557 - DNA, 25 bp, Homo sapien
gagggacgcctgcacatcataaatt

SEQ ID NO: 497558 - DNA, 25 bp, Homo sapien
gacgcctgcaaagctagagtcctga

SEQ ID NO: 497559 - DNA, 25 bp, Homo sapien
gatggaagctaagcgcggtcatgcc

SEQ ID NO: 497560 - DNA, 25 bp, Homo sapien
acagcaaagtgcagagcgggtcaca

SEQ ID NO: 497561 - DNA, 25 bp, Homo sapien
ctcgtgattgcagctctccacagca

SEQ ID NO: 497562 - DNA, 25 bp, Homo sapien
gaggctgagcgtggtcacactcagt

SEQ ID NO: 497563 - DNA, 25 bp, Homo sapien
gattgcagctctccacagcaccggg

SEQ ID NO: 497564 - DNA, 25 bp, Homo sapien
tcacactcagtataaggaggtacac

SEQ ID NO: 497565 - DNA, 25 bp, Homo sapien
tggaccgtctctccggtctgggcac

SEQ ID NO: 497566 - DNA, 25 bp, Homo sapien
gaggctggaccgtctctccggtctg

SEQ ID NO: 497567 - DNA, 25 bp, Homo sapien
gctggaccgtctctccggtctgggc

SEQ ID NO: 497568 - DNA, 25 bp, Homo sapien
tcagaggctggaccgtctctccggt

SEQ ID NO: 497569 - DNA, 25 bp, Homo sapien
cagctgctggccatctaagcgctca

SEQ ID NO: 497570 - DNA, 25 bp, Homo sapien
cttccacggtccatcatctccgagc

SEQ ID NO: 497571 - DNA, 25 bp, Homo sapien
gctgctggccatctaagcgctcact

SEQ ID NO: 497572 - DNA, 25 bp, Homo sapien
tccccacagacgcttcccttccacg

SEQ ID NO: 497573 - DNA, 25 bp, Homo sapien
gctcacggccaggattacaacttca

SEQ ID NO: 497574 - DNA, 25 bp, Homo sapien
cattcaaggtgatcggtaaaacgca

SEQ ID NO: 497575 - DNA, 25 bp, Homo sapien
gggataacacgactgcactgacgct

SEQ ID NO: 497576 - DNA, 25 bp, Homo sapien
tattctgtaaaagccgggataacac

SEQ ID NO: 497577 - DNA, 25 bp, Homo sapien
agctgggtgctgtccgagtcgagct

SEQ ID NO: 497578 - DNA, 25 bp, Homo sapien
tgctgtccgagtcgagctgggtgtt

SEQ ID NO: 497579 - DNA, 25 bp, Homo sapien
tcccggggcctgtccgagttgagct

SEQ ID NO: 497580 - DNA, 25 bp, Homo sapien
gagtcgagctgggtgttgttgggta

SEQ ID NO: 497581 - DNA, 25 bp, Homo sapien
cacgtggttacaggaatgggctgaa

SEQ ID NO: 497582 - DNA, 25 bp, Homo sapien
tggttacaggaatgggctgaactga

SEQ ID NO: 497583 - DNA, 25 bp, Homo sapien
gggatgagcacgtggttacaggaat

SEQ ID NO: 497584 - DNA, 25 bp, Homo sapien
tgagcacgtggttacaggaatgggc

SEQ ID NO: 497585 - DNA, 25 bp, Homo sapien
caccaagggtgggcactgcctagtc

SEQ ID NO: 497586 - DNA, 25 bp, Homo sapien
ggcaccaagggtgggcactgcctag

SEQ ID NO: 497587 - DNA, 25 bp, Homo sapien
ctgcagggcaccaagggtgggcact

SEQ ID NO: 497588 - DNA, 25 bp, Homo sapien
agggcaccaagggtgggcactgcct

SEQ ID NO: 497589 - DNA, 25 bp, Homo sapien
ccaccaggaactcagggacgcggct

SEQ ID NO: 497590 - DNA, 25 bp, Homo sapien
caccaggaactcagggacgcggctc

SEQ ID NO: 497591 - DNA, 25 bp, Homo sapien
ggtcaacccatgacgattacaattc

SEQ ID NO: 497592 - DNA, 25 bp, Homo sapien
aaccatatcatcagggaagtatggg

SEQ ID NO: 497593 - DNA, 25 bp, Homo sapien
caaaccatatcatcagggaagtatg

SEQ ID NO: 497594 - DNA, 25 bp, Homo sapien
aatcacctccctcggtcaacccatg

SEQ ID NO: 497595 - DNA, 25 bp, Homo sapien
gcttcgcacggacccctaaactcca

SEQ ID NO: 497596 - DNA, 25 bp, Homo sapien
aagattagcagggacataggcaagg

SEQ ID NO: 497597 - DNA, 25 bp, Homo sapien
gattagcagggacataggcaaggca

SEQ ID NO: 497598 - DNA, 25 bp, Homo sapien
cagaagattagcagggacataggca

SEQ ID NO: 497599 - DNA, 25 bp, Homo sapien
tggatttgccctgccggacttggat

SEQ ID NO: 497600 - DNA, 25 bp, Homo sapien
gtgtccacaccccagtgcagaaacg

SEQ ID NO: 497601 - DNA, 25 bp, Homo sapien
tgcagaaacggatgtcggttcccct

SEQ ID NO: 497602 - DNA, 25 bp, Homo sapien
gagagaacctccagtcttcaggccc

SEQ ID NO: 497603 - DNA, 25 bp, Homo sapien
ctgagagggtgctgtttgagaaaca

SEQ ID NO: 497604 - DNA, 25 bp, Homo sapien
actgagagggtgctgtttgagaaac

SEQ ID NO: 497605 - DNA, 25 bp, Homo sapien
ttgggagggtcccttcatctgaggg

SEQ ID NO: 497606 - DNA, 25 bp, Homo sapien
gtctgtgggtttgagtggagggtgt

SEQ ID NO: 497607 - DNA, 25 bp, Homo sapien
tctgaaaggagggtccatgggtctg

SEQ ID NO: 497608 - DNA, 25 bp, Homo sapien
ctgagggtgtgaggatctgatggga

SEQ ID NO: 497609 - DNA, 25 bp, Homo sapien
agtgccgcgcgggaagacggcacca

SEQ ID NO: 497610 - DNA, 25 bp, Homo sapien
gggccctgccggaaagccacggaca

SEQ ID NO: 497611 - DNA, 25 bp, Homo sapien
cggacagaaagacgccctcggaaga

SEQ ID NO: 497612 - DNA, 25 bp, Homo sapien
ctcggaagaccaggacgacagcagt

SEQ ID NO: 497613 - DNA, 25 bp, Homo sapien
tcacgctggcttctgagcgccaggg

SEQ ID NO: 497614 - DNA, 25 bp, Homo sapien
gctggcttctgagcgccagggccct

SEQ ID NO: 497615 - DNA, 25 bp, Homo sapien
taggcacggccggaggagaccacct

SEQ ID NO: 497616 - DNA, 25 bp, Homo sapien
ccatgatggaaccagaccatatttc

SEQ ID NO: 497617 - DNA, 25 bp, Homo sapien
accagaccatatttcacagggagac

SEQ ID NO: 497618 - DNA, 25 bp, Homo sapien
agaccacctgacgttttggtacagg

SEQ ID NO: 497619 - DNA, 25 bp, Homo sapien
gagctttccaagggctgtgcgtcct

SEQ ID NO: 497620 - DNA, 25 bp, Homo sapien
ctttccaagggctgtgcgtcctcca

SEQ ID NO: 497621 - DNA, 25 bp, Homo sapien
ttccaagggctgtgcgtcctccagc

SEQ ID NO: 497622 - DNA, 25 bp, Homo sapien
gggagctttccaagggctgtgcgtc

SEQ ID NO: 497623 - DNA, 25 bp, Homo sapien
gcttgcttcgctctggctaagatga

SEQ ID NO: 497624 - DNA, 25 bp, Homo sapien
ccgagattctcctgaagtgtgcctg

SEQ ID NO: 497625 - DNA, 25 bp, Homo sapien
tgtcaggtgatgtcctgtggagtcc

SEQ ID NO: 497626 - DNA, 25 bp, Homo sapien
atttcaggttgaaagatctgtgttc

SEQ ID NO: 497627 - DNA, 25 bp, Homo sapien
gcgcgtgcggagatgtagctggggc

SEQ ID NO: 497628 - DNA, 25 bp, Homo sapien
gtgcgcgtgcggagatgtagctggg

SEQ ID NO: 497629 - DNA, 25 bp, Homo sapien
cgtgcgcgtgcggagatgtagctgg

SEQ ID NO: 497630 - DNA, 25 bp, Homo sapien
cgcgtgcgcgtgcggagatgtagct

SEQ ID NO: 497631 - DNA, 25 bp, Homo sapien
gcgcgcctgcgcgccttttcgcgcc

SEQ ID NO: 497632 - DNA, 25 bp, Homo sapien
tgcgcgccttttcgcgccttcggcg

SEQ ID NO: 497633 - DNA, 25 bp, Homo sapien
ttttcgcgccttcggcgccctcctc

SEQ ID NO: 497634 - DNA, 25 bp, Homo sapien
gccttttcgcgccttcggcgccctc

SEQ ID NO: 497635 - DNA, 25 bp, Homo sapien
tcgggccggcgtgacgtgcgcgcgg

SEQ ID NO: 497636 - DNA, 25 bp, Homo sapien
cgagcgtcgggccggcgtgacgtgc

SEQ ID NO: 497637 - DNA, 25 bp, Homo sapien
cgtcgggccggcgtgacgtgcgcgc

SEQ ID NO: 497638 - DNA, 25 bp, Homo sapien
ggccggcgtgacgtgcgcgcggcgc

SEQ ID NO: 497639 - DNA, 25 bp, Homo sapien
tgggccgagtggcgccgggacgcgg

SEQ ID NO: 497640 - DNA, 25 bp, Homo sapien
ccgcccggctgaccggtaactctga

SEQ ID NO: 497641 - DNA, 25 bp, Homo sapien
gcaacgtgcaggctcgcggcgtcca

SEQ ID NO: 497642 - DNA, 25 bp, Homo sapien
ggggtcccggcgcaacgtgcaggct

SEQ ID NO: 497643 - DNA, 25 bp, Homo sapien
cccgcccggctgaccggtaactctg

SEQ ID NO: 497644 - DNA, 25 bp, Homo sapien
gcccagcggccgagggtggggccga

SEQ ID NO: 497645 - DNA, 25 bp, Homo sapien
cccagcggccgagggtggggccgag

SEQ ID NO: 497646 - DNA, 25 bp, Homo sapien
cgcccagcggccgagggtggggccg

SEQ ID NO: 497647 - DNA, 25 bp, Homo sapien
cagcggccgagggtggggccgagcc

SEQ ID NO: 497648 - DNA, 25 bp, Homo sapien
tcgcctcgccagacggaaatgcccc

SEQ ID NO: 497649 - DNA, 25 bp, Homo sapien
cagtcgcctcgccagacggaaatgc

SEQ ID NO: 497650 - DNA, 25 bp, Homo sapien
tcagtcgcctcgccagacggaaatg

SEQ ID NO: 497651 - DNA, 25 bp, Homo sapien
agtcgcctcgccagacggaaatgcc

SEQ ID NO: 497652 - DNA, 25 bp, Homo sapien
ggagctggccaaaccgactcccaca

SEQ ID NO: 497653 - DNA, 25 bp, Homo sapien
agcggagctggccaaaccgactccc

SEQ ID NO: 497654 - DNA, 25 bp, Homo sapien
gctggccaaaccgactcccacactc

SEQ ID NO: 497655 - DNA, 25 bp, Homo sapien
cttccttcccaaaggcaccctccat

SEQ ID NO: 497656 - DNA, 25 bp, Homo sapien
taccagatccgggaaatcaatgcta

SEQ ID NO: 497657 - DNA, 25 bp, Homo sapien
ccagatccgggaaatcaatgctaca

SEQ ID NO: 497658 - DNA, 25 bp, Homo sapien
gttaccagatccgggaaatcaatgc

SEQ ID NO: 497659 - DNA, 25 bp, Homo sapien
agatccgggaaatcaatgctacaaa

SEQ ID NO: 497660 - DNA, 25 bp, Homo sapien
taacacagtcggtaaagataaggaa

SEQ ID NO: 497661 - DNA, 25 bp, Homo sapien
catcccgcttcagacgctttaaaag

SEQ ID NO: 497662 - DNA, 25 bp, Homo sapien
caactgcagtgtggtatccaaggcc

SEQ ID NO: 497663 - DNA, 25 bp, Homo sapien
ggtggtgaccgcagcttcagagatc

SEQ ID NO: 497664 - DNA, 25 bp, Homo sapien
gcacagcccaagagcgagttcagat

SEQ ID NO: 497665 - DNA, 25 bp, Homo sapien
tgccctgcatctttaccaatggcag

SEQ ID NO: 497666 - DNA, 25 bp, Homo sapien
acaaacaggcaccacagaacggctt

SEQ ID NO: 497667 - DNA, 25 bp, Homo sapien
aaccaaggcacgtgaataccgggca

SEQ ID NO: 497668 - DNA, 25 bp, Homo sapien
tcaggcctgaacttcaccatccagg

SEQ ID NO: 497669 - DNA, 25 bp, Homo sapien
caggcctgaacttcaccatccaggt

SEQ ID NO: 497670 - DNA, 25 bp, Homo sapien
aaggaaacagcagtttgttgctgca

SEQ ID NO: 497671 - DNA, 25 bp, Homo sapien
tgaaggaaacagcagtttgttgctg

SEQ ID NO: 497672 - DNA, 25 bp, Homo sapien
tcaagcactgaaggaaacagcagtt

SEQ ID NO: 497673 - DNA, 25 bp, Homo sapien
aaacagcagtttgttgctgcatcag

SEQ ID NO: 497674 - DNA, 25 bp, Homo sapien
ttctccttctcagcctcgagagtag

SEQ ID NO: 497675 - DNA, 25 bp, Homo sapien
caccgtgcccagcaggggcaaaact

SEQ ID NO: 497676 - DNA, 25 bp, Homo sapien
tgcccagcaggggcaaaacttttaa

SEQ ID NO: 497677 - DNA, 25 bp, Homo sapien
ccgtgcccagcaggggcaaaacttt

SEQ ID NO: 497678 - DNA, 25 bp, Homo sapien
ggatgacaccgaggcagacatctgt

SEQ ID NO: 497679 - DNA, 25 bp, Homo sapien
tcaactcgggctaccgggatgacac

SEQ ID NO: 497680 - DNA, 25 bp, Homo sapien
ctcagcttaaaaacgactcccggag

SEQ ID NO: 497681 - DNA, 25 bp, Homo sapien
tgcatcgttccagataaggcccctc

SEQ ID NO: 497682 - DNA, 25 bp, Homo sapien
ccaggatcagcatccacatgtgata

SEQ ID NO: 497683 - DNA, 25 bp, Homo sapien
tgcccaaaaacacgaagcagggctt

SEQ ID NO: 497684 - DNA, 25 bp, Homo sapien
gggacgcgcagcctttctgtctcaa

SEQ ID NO: 497685 - DNA, 25 bp, Homo sapien
gatgcacagtgaggcaagctcagga

SEQ ID NO: 497686 - DNA, 25 bp, Homo sapien
cacatcacacaggttccggtgggaa

SEQ ID NO: 497687 - DNA, 25 bp, Homo sapien
aacacatcacacaggttccggtggg

SEQ ID NO: 497688 - DNA, 25 bp, Homo sapien
catcacacaggttccggtgggaaaa

SEQ ID NO: 497689 - DNA, 25 bp, Homo sapien
caacacatcacacaggttccggtgg

SEQ ID NO: 497690 - DNA, 25 bp, Homo sapien
actcccttttcttatgaagtcactg

SEQ ID NO: 497691 - DNA, 25 bp, Homo sapien
tcccttttcttatgaagtcactgct

SEQ ID NO: 497692 - DNA, 25 bp, Homo sapien
cttttcttatgaagtcactgctgca

SEQ ID NO: 497693 - DNA, 25 bp, Homo sapien
tccactcccttttcttatgaagtca

SEQ ID NO: 497694 - DNA, 25 bp, Homo sapien
gagctcccacgagtcctcctggacc

SEQ ID NO: 497695 - DNA, 25 bp, Homo sapien
gcctcgagctcccacgagtcctcct

SEQ ID NO: 497696 - DNA, 25 bp, Homo sapien
tcgagctcccacgagtcctcctgga

SEQ ID NO: 497697 - DNA, 25 bp, Homo sapien
ctcccacgagtcctcctggaccctg

SEQ ID NO: 497698 - DNA, 25 bp, Homo sapien
tcgactcctgcaggtaactccgtcc

SEQ ID NO: 497699 - DNA, 25 bp, Homo sapien
cctcgactcctgcaggtaactcagt

SEQ ID NO: 497700 - DNA, 25 bp, Homo sapien
tctcgactcctgcaggtaactccat

SEQ ID NO: 497701 - DNA, 25 bp, Homo sapien
caactcctgcgggtaactctgtcca

SEQ ID NO: 497702 - DNA, 25 bp, Homo sapien
tctgcctacgcaacagccataaaag

SEQ ID NO: 497703 - DNA, 25 bp, Homo sapien
gattcaggcttgagggtcacccagt

SEQ ID NO: 497704 - DNA, 25 bp, Homo sapien
cctggtaagaaaacggcccagcagg

SEQ ID NO: 497705 - DNA, 25 bp, Homo sapien
accccagggcagaaaacacttgcac

SEQ ID NO: 497706 - DNA, 25 bp, Homo sapien
ccttacactcgaaggcccatgaggg

SEQ ID NO: 497707 - DNA, 25 bp, Homo sapien
taaaccaggcttatccgacctgtgt

SEQ ID NO: 497708 - DNA, 25 bp, Homo sapien
gaccatttccattgctaacagctcc

SEQ ID NO: 497709 - DNA, 25 bp, Homo sapien
tgcgagggcatgaagaggactctcc

SEQ ID NO: 497710 - DNA, 25 bp, Homo sapien
cgccatgctgctagaaaaagctgaa

SEQ ID NO: 497711 - DNA, 25 bp, Homo sapien
cacgttcgtaaaacacgccatgctg

SEQ ID NO: 497712 - DNA, 25 bp, Homo sapien
aaaaccatactatgagtagcagcag

SEQ ID NO: 497713 - DNA, 25 bp, Homo sapien
atgtgactaatttccatgccaggcc

SEQ ID NO: 497714 - DNA, 25 bp, Homo sapien
cagcaaagtggcctcggcacaagtc

SEQ ID NO: 497715 - DNA, 25 bp, Homo sapien
tgttaacaggacagccgaggtctgt

SEQ ID NO: 497716 - DNA, 25 bp, Homo sapien
gaggtctgtccgctcagtgctcgtg

SEQ ID NO: 497717 - DNA, 25 bp, Homo sapien
ctcgtgtcaacaggatgcgcaaggg

SEQ ID NO: 497718 - DNA, 25 bp, Homo sapien
cccacaggatcccctgcggacactc

SEQ ID NO: 497719 - DNA, 25 bp, Homo sapien
cacaggatcccctgcggacactcat

SEQ ID NO: 497720 - DNA, 25 bp, Homo sapien
ccacaggatcccctgcggacactca

SEQ ID NO: 497721 - DNA, 25 bp, Homo sapien
tcccacaggatcccctgcggacact

SEQ ID NO: 497722 - DNA, 25 bp, Homo sapien
taagaaccacggactcagaggcatg

SEQ ID NO: 497723 - DNA, 25 bp, Homo sapien
gcttaccccacaccgagtttgacaa

SEQ ID NO: 497724 - DNA, 25 bp, Homo sapien
tatcttggtgggatgcgcttacccc

SEQ ID NO: 497725 - DNA, 25 bp, Homo sapien
tccaactaggaacatgaggctgtaa

SEQ ID NO: 497726 - DNA, 25 bp, Homo sapien
gctgacacaagcgtggcatcgtctg

SEQ ID NO: 497727 - DNA, 25 bp, Homo sapien
catgaaatgccagcaagtcaggccc

SEQ ID NO: 497728 - DNA, 25 bp, Homo sapien
tctgtaaatgttccaccgctgctca

SEQ ID NO: 497729 - DNA, 25 bp, Homo sapien
gccactgtgacgctcgtgtctgtaa

SEQ ID NO: 497730 - DNA, 25 bp, Homo sapien
ctaaaaagtacagggccagggactg

SEQ ID NO: 497731 - DNA, 25 bp, Homo sapien
gccagggactggcactgggaacgca

SEQ ID NO: 497732 - DNA, 25 bp, Homo sapien
ccagggactggcactgggaacgcac

SEQ ID NO: 497733 - DNA, 25 bp, Homo sapien
agggccagggactggcactgggaac

SEQ ID NO: 497734 - DNA, 25 bp, Homo sapien
catgagggcactaccatccaggcca

SEQ ID NO: 497735 - DNA, 25 bp, Homo sapien
gagggcactaccatccaggccaggt

SEQ ID NO: 497736 - DNA, 25 bp, Homo sapien
ggcactaccatccaggccaggttgg

SEQ ID NO: 497737 - DNA, 25 bp, Homo sapien
taccatccaggccaggttggtaagg

SEQ ID NO: 497738 - DNA, 25 bp, Homo sapien
cgtagataacaccatgggaacaagg

SEQ ID NO: 497739 - DNA, 25 bp, Homo sapien
atgggaacaaggagacgccacaacc

SEQ ID NO: 497740 - DNA, 25 bp, Homo sapien
ttgctgccttcgctgagggtaaagg

SEQ ID NO: 497741 - DNA, 25 bp, Homo sapien
cccgaatgcacccttccgtagataa

SEQ ID NO: 497742 - DNA, 25 bp, Homo sapien
cccgggactaaggttctggtctatg

SEQ ID NO: 497743 - DNA, 25 bp, Homo sapien
tatgaagaccttgagttctccgttg

SEQ ID NO: 497744 - DNA, 25 bp, Homo sapien
tctggtctatgaagaccttgagttc

SEQ ID NO: 497745 - DNA, 25 bp, Homo sapien
gagttctccgttggcttcaattaga

SEQ ID NO: 497746 - DNA, 25 bp, Homo sapien
ccacgtggatgttgcgaccagggca

SEQ ID NO: 497747 - DNA, 25 bp, Homo sapien
ccctgggctgatgcgaccacgtgga

SEQ ID NO: 497748 - DNA, 25 bp, Homo sapien
ttgcgaccagggcactcagtggacc

SEQ ID NO: 497749 - DNA, 25 bp, Homo sapien
caaaacggaaacacatccaggcctc

SEQ ID NO: 497750 - DNA, 25 bp, Homo sapien
ggaggcagatggcaccatgggcgcc

SEQ ID NO: 497751 - DNA, 25 bp, Homo sapien
gcagatggcaccatgggcgcccgca

SEQ ID NO: 497752 - DNA, 25 bp, Homo sapien
gggttggaggcagatggcaccatgg

SEQ ID NO: 497753 - DNA, 25 bp, Homo sapien
ttggaggcagatggcaccatgggcg

SEQ ID NO: 497754 - DNA, 25 bp, Homo sapien
gcaggacctagggacaggccccaag

SEQ ID NO: 497755 - DNA, 25 bp, Homo sapien
caggacctagggacaggccccaagg

SEQ ID NO: 497756 - DNA, 25 bp, Homo sapien
gacctagggacaggccccaaggaga

SEQ ID NO: 497757 - DNA, 25 bp, Homo sapien
gaattctctggaacgaacaccggaa

SEQ ID NO: 497758 - DNA, 25 bp, Homo sapien
acagaattctctggaacgaacaccg

SEQ ID NO: 497759 - DNA, 25 bp, Homo sapien
aaacagaattctctggaacgaacac

SEQ ID NO: 497760 - DNA, 25 bp, Homo sapien
cagaattctctggaacgaacaccgg

SEQ ID NO: 497761 - DNA, 25 bp, Homo sapien
gggcccactagtgaagacaggtgtc

SEQ ID NO: 497762 - DNA, 25 bp, Homo sapien
ggcgaggactgcacgcttacacaca

SEQ ID NO: 497763 - DNA, 25 bp, Homo sapien
gcaacggctccatctaagggcgccg

SEQ ID NO: 497764 - DNA, 25 bp, Homo sapien
caaggggggcccactagtgaagaca

SEQ ID NO: 497765 - DNA, 25 bp, Homo sapien
tgggcagattctcagtgagcctgga

SEQ ID NO: 497766 - DNA, 25 bp, Homo sapien
cacctctaggtacaggaggtgcaca

SEQ ID NO: 497767 - DNA, 25 bp, Homo sapien
caggattgcacacatcagggaggag

SEQ ID NO: 497768 - DNA, 25 bp, Homo sapien
gcacctggcctaaacgtgtggaaca

SEQ ID NO: 497769 - DNA, 25 bp, Homo sapien
ggcctgcagggacgtactcacttta

SEQ ID NO: 497770 - DNA, 25 bp, Homo sapien
tacccatacatagagccgtcaggct

SEQ ID NO: 497771 - DNA, 25 bp, Homo sapien
ccttaaatgctgttatgctatgcca

SEQ ID NO: 497772 - DNA, 25 bp, Homo sapien
tccaggatgtgctgaacctaaggct

SEQ ID NO: 497773 - DNA, 25 bp, Homo sapien
ggacggccgcccatccgcagagctg

SEQ ID NO: 497774 - DNA, 25 bp, Homo sapien
cccggacggccgcccatccgcagag

SEQ ID NO: 497775 - DNA, 25 bp, Homo sapien
acggccgcccatccgcagagctgca

SEQ ID NO: 497776 - DNA, 25 bp, Homo sapien
gccgcccatccgcagagctgcagga

SEQ ID NO: 497777 - DNA, 25 bp, Homo sapien
gactttcgggtcacaacaacatcag

SEQ ID NO: 497778 - DNA, 25 bp, Homo sapien
caggaaagaagaactccccgatctc

SEQ ID NO: 497779 - DNA, 25 bp, Homo sapien
aaatacatgatactctcaggtgaag

SEQ ID NO: 497780 - DNA, 25 bp, Homo sapien
gctgagcggatagccccccatttga

SEQ ID NO: 497781 - DNA, 25 bp, Homo sapien
accacggcctggaaaagtctgtgat

SEQ ID NO: 497782 - DNA, 25 bp, Homo sapien
gaccacggcctggaaaagtctgtga

SEQ ID NO: 497783 - DNA, 25 bp, Homo sapien
ggaccacggcctggaaaagtctgtg

SEQ ID NO: 497784 - DNA, 25 bp, Homo sapien
ccacggcctggaaaagtctgtgatt

SEQ ID NO: 497785 - DNA, 25 bp, Homo sapien
cagcccctcggcgatgtctgctatg

SEQ ID NO: 497786 - DNA, 25 bp, Homo sapien
tcggcgatgtctgctatggaacgtg

SEQ ID NO: 497787 - DNA, 25 bp, Homo sapien
gctgacgccacccaggtgacccagg

SEQ ID NO: 497788 - DNA, 25 bp, Homo sapien
ggtgacccaggcagatcatccactg

SEQ ID NO: 497789 - DNA, 25 bp, Homo sapien
ggtgaacggccacgagggacaccac

SEQ ID NO: 497790 - DNA, 25 bp, Homo sapien
gtgaacggccacgagggacaccacg

SEQ ID NO: 497791 - DNA, 25 bp, Homo sapien
cggctgtccgctcctgcgggaggct

SEQ ID NO: 497792 - DNA, 25 bp, Homo sapien
gatcccggctgtccgctcctgcggg

SEQ ID NO: 497793 - DNA, 25 bp, Homo sapien
ctgtccgctcctgcgggaggcttac

SEQ ID NO: 497794 - DNA, 25 bp, Homo sapien
cgagatcccggctgtccgctcctgc

SEQ ID NO: 497795 - DNA, 25 bp, Homo sapien
ccatttctggtgaggtcaggattct

SEQ ID NO: 497796 - DNA, 25 bp, Homo sapien
tgcctggggccccatttctggtgag

SEQ ID NO: 497797 - DNA, 25 bp, Homo sapien
ttctggtgaggtcaggattctgtgt

SEQ ID NO: 497798 - DNA, 25 bp, Homo sapien
aggtcaggattctgtgtgggctccc

SEQ ID NO: 497799 - DNA, 25 bp, Homo sapien
ggacacgtgagagataccctgagag

SEQ ID NO: 497800 - DNA, 25 bp, Homo sapien
tgaggacacgtgagagataccctga

SEQ ID NO: 497801 - DNA, 25 bp, Homo sapien
ctgaggacacgtgagagataccctg

SEQ ID NO: 497802 - DNA, 25 bp, Homo sapien
cacgtgagagataccctgagagaca

SEQ ID NO: 497803 - DNA, 25 bp, Homo sapien
atgtgagagataccctgagagacac

SEQ ID NO: 497804 - DNA, 25 bp, Homo sapien
ctgaggacatgtgagagataccctg

SEQ ID NO: 497805 - DNA, 25 bp, Homo sapien
tgaggacatgtgagagataccctga

SEQ ID NO: 497806 - DNA, 25 bp, Homo sapien
gacatgtgagagataccctgagaga

SEQ ID NO: 497807 - DNA, 25 bp, Homo sapien
atgcctggggatccatgagagacac

SEQ ID NO: 497808 - DNA, 25 bp, Homo sapien
acacctgaggacacgtgagagacac

SEQ ID NO: 497809 - DNA, 25 bp, Homo sapien
gtacagagagctctccacagggcca

SEQ ID NO: 497810 - DNA, 25 bp, Homo sapien
ggacacctgagagacacctgaggac

SEQ ID NO: 497811 - DNA, 25 bp, Homo sapien
tgtgggagcacacacggggaggggg

SEQ ID NO: 497812 - DNA, 25 bp, Homo sapien
gtgtgggagcacacacggggagggg

SEQ ID NO: 497813 - DNA, 25 bp, Homo sapien
ctgtgtgggagcacacacggggagg

SEQ ID NO: 497814 - DNA, 25 bp, Homo sapien
tgtgtgggagcacacacggggaggg

SEQ ID NO: 497815 - DNA, 25 bp, Homo sapien
tactgaaaagccgtgatctgctgtg

SEQ ID NO: 497816 - DNA, 25 bp, Homo sapien
gatctggaaccgctcaatcaggaca

SEQ ID NO: 497817 - DNA, 25 bp, Homo sapien
cgtggtagggcttccacaaaccgct

SEQ ID NO: 497818 - DNA, 25 bp, Homo sapien
caaaccgctactttcaatggccaca

SEQ ID NO: 497819 - DNA, 25 bp, Homo sapien
aaaacagatgccgtcaccgtgccgc

SEQ ID NO: 497820 - DNA, 25 bp, Homo sapien
caaggcactggatcttggccccaaa

SEQ ID NO: 497821 - DNA, 25 bp, Homo sapien
acagatgccgtcaccgtgccgctgt

SEQ ID NO: 497822 - DNA, 25 bp, Homo sapien
aggaatcccaggaccacgcaaggca

SEQ ID NO: 497823 - DNA, 25 bp, Homo sapien
cagcagatgccattctccgggagtt

SEQ ID NO: 497824 - DNA, 25 bp, Homo sapien
tgatgtcagactgagaacccgccag

SEQ ID NO: 497825 - DNA, 25 bp, Homo sapien
ggcttcctacgttgagttcagcaga

SEQ ID NO: 497826 - DNA, 25 bp, Homo sapien
gcataccacacgcacaggtacaggg

SEQ ID NO: 497827 - DNA, 25 bp, Homo sapien
caccagaggcaacgccagtgtggac

SEQ ID NO: 497828 - DNA, 25 bp, Homo sapien
acctgagggtgtcaacaactgtctc

SEQ ID NO: 497829 - DNA, 25 bp, Homo sapien
tgagggtgtcaacaactgtctctcc

SEQ ID NO: 497830 - DNA, 25 bp, Homo sapien
accaccagaggcaacgccagtgtgg

SEQ ID NO: 497831 - DNA, 25 bp, Homo sapien
agcaggaaaaacgtccagcggtgga

SEQ ID NO: 497832 - DNA, 25 bp, Homo sapien
ttttgtcacggtgacggcatcaccc

SEQ ID NO: 497833 - DNA, 25 bp, Homo sapien
caccggttctgaatgtggctcatct

SEQ ID NO: 497834 - DNA, 25 bp, Homo sapien
ggcatcaccccaccggttctgaatg

SEQ ID NO: 497835 - DNA, 25 bp, Homo sapien
caaggtgaggagtcggaaggctggt

SEQ ID NO: 497836 - DNA, 25 bp, Homo sapien
ccggcagaccaaggtgaggagtcgg

SEQ ID NO: 497837 - DNA, 25 bp, Homo sapien
cagaccaaggtgaggagtcggaagg

SEQ ID NO: 497838 - DNA, 25 bp, Homo sapien
gaccaaggtgaggagtcggaaggct

SEQ ID NO: 497839 - DNA, 25 bp, Homo sapien
actgtgtgacacacgtggcccagga

SEQ ID NO: 497840 - DNA, 25 bp, Homo sapien
gcaagcagtcctacaactctaaggg

SEQ ID NO: 497841 - DNA, 25 bp, Homo sapien
actctaagggtccagagggaagtgc

SEQ ID NO: 497842 - DNA, 25 bp, Homo sapien
ccacgatgatgggtgagtgtgattc

SEQ ID NO: 497843 - DNA, 25 bp, Homo sapien
atgccgtaggcccttgccattcttc

SEQ ID NO: 497844 - DNA, 25 bp, Homo sapien
aatgccgtaggcccttgccattctt

SEQ ID NO: 497845 - DNA, 25 bp, Homo sapien
cagctcgtctgccacttcgttgtag

SEQ ID NO: 497846 - DNA, 25 bp, Homo sapien
aaccagctcgtctgccacttcgttg

SEQ ID NO: 497847 - DNA, 25 bp, Homo sapien
actgaactccgcaaccagctcgtct

SEQ ID NO: 497848 - DNA, 25 bp, Homo sapien
ctcgtctgccacttcgttgtaggaa

SEQ ID NO: 497849 - DNA, 25 bp, Homo sapien
gacagggagtggagtttccaaatga

SEQ ID NO: 497850 - DNA, 25 bp, Homo sapien
gatgacagggagtggagtttccaaa

SEQ ID NO: 497851 - DNA, 25 bp, Homo sapien
ggggatgacagggagtggagtttcc

SEQ ID NO: 497852 - DNA, 25 bp, Homo sapien
tgacagggagtggagtttccaaatg

SEQ ID NO: 497853 - DNA, 25 bp, Homo sapien
ttaaggcatcgtagacgcgccgtct

SEQ ID NO: 497854 - DNA, 25 bp, Homo sapien
gatgatgttcatggccattagcacg

SEQ ID NO: 497855 - DNA, 25 bp, Homo sapien
cgtagacgcgccgtcttatgttttt

SEQ ID NO: 497856 - DNA, 25 bp, Homo sapien
cattagcacgtttaaggcatcgtag

SEQ ID NO: 497857 - DNA, 25 bp, Homo sapien
tgacattcctgagccgagttggtgg

SEQ ID NO: 497858 - DNA, 25 bp, Homo sapien
ttctgacattcctgagccgagttgg

SEQ ID NO: 497859 - DNA, 25 bp, Homo sapien
agttctgacattcctgagccgagtt

SEQ ID NO: 497860 - DNA, 25 bp, Homo sapien
ctctaagttctgacattcctgagcc

SEQ ID NO: 497861 - DNA, 25 bp, Homo sapien
agttcttgaagttgagactgtttct

SEQ ID NO: 497862 - DNA, 25 bp, Homo sapien
cttgaagttgagactgtttctgttt

SEQ ID NO: 497863 - DNA, 25 bp, Homo sapien
taagttcttgaagttgagactgttt

SEQ ID NO: 497864 - DNA, 25 bp, Homo sapien
gttcttgaagttgagactgtttctg

SEQ ID NO: 497865 - DNA, 25 bp, Homo sapien
gtgccgtgccgtggactttgcccac

SEQ ID NO: 497866 - DNA, 25 bp, Homo sapien
ccttggagggggtgccgtgccgtgg

SEQ ID NO: 497867 - DNA, 25 bp, Homo sapien
agggggtgccgtgccgtggactttg

SEQ ID NO: 497868 - DNA, 25 bp, Homo sapien
gatggccttggagggggtgccgtgc

SEQ ID NO: 497869 - DNA, 25 bp, Homo sapien
agaaaagcgctcaggaaacgggatc

SEQ ID NO: 497870 - DNA, 25 bp, Homo sapien
cccagggagaaaagcgctcaggaaa

SEQ ID NO: 497871 - DNA, 25 bp, Homo sapien
tccctgcgtccacgtgacagcgagg

SEQ ID NO: 497872 - DNA, 25 bp, Homo sapien
ccacgtgacagcgaggagttggcct

SEQ ID NO: 497873 - DNA, 25 bp, Homo sapien
cagtcgatgaccgtcttcttgctgg

SEQ ID NO: 497874 - DNA, 25 bp, Homo sapien
gtcgatgaccgtcttcttgctggtg

SEQ ID NO: 497875 - DNA, 25 bp, Homo sapien
gatgaccgtcttcttgctggtgttg

SEQ ID NO: 497876 - DNA, 25 bp, Homo sapien
cgatgaccgtcttcttgctggtgtt

SEQ ID NO: 497877 - DNA, 25 bp, Homo sapien
tcccagcggagacggtacacactgg

SEQ ID NO: 497878 - DNA, 25 bp, Homo sapien
aatgagatgagaggcaaatcgaggc

SEQ ID NO: 497879 - DNA, 25 bp, Homo sapien
tcccggaacagagaccttccatctg

SEQ ID NO: 497880 - DNA, 25 bp, Homo sapien
aatcgaggcctattctccccaggag

SEQ ID NO: 497881 - DNA, 25 bp, Homo sapien
ttttaaggtcttcggcagagcagct

SEQ ID NO: 497882 - DNA, 25 bp, Homo sapien
cattttaaggtcttcggcagagcag

SEQ ID NO: 497883 - DNA, 25 bp, Homo sapien
gccattttaaggtcttcggcagagc

SEQ ID NO: 497884 - DNA, 25 bp, Homo sapien
taaggtcttcggcagagcagctccc

SEQ ID NO: 497885 - DNA, 25 bp, Homo sapien
gccacgccaggttgtctgggcattg

SEQ ID NO: 497886 - DNA, 25 bp, Homo sapien
cgccaggttgtctgggcattgctga

SEQ ID NO: 497887 - DNA, 25 bp, Homo sapien
tcctcacacagccacgccaggttgt

SEQ ID NO: 497888 - DNA, 25 bp, Homo sapien
acacagccacgccaggttgtctggg

SEQ ID NO: 497889 - DNA, 25 bp, Homo sapien
gcccccaaggaaagaattcaccaga

SEQ ID NO: 497890 - DNA, 25 bp, Homo sapien
ctgtcagtggctgggaccctacggc

SEQ ID NO: 497891 - DNA, 25 bp, Homo sapien
ccaaggaaagaattcaccagaacag

SEQ ID NO: 497892 - DNA, 25 bp, Homo sapien
cttaaagccatcctgctgtcagtgg

SEQ ID NO: 497893 - DNA, 25 bp, Homo sapien
ggcaaccaacaaaatgacgcgcagt

SEQ ID NO: 497894 - DNA, 25 bp, Homo sapien
ccggatatccttcgcttgtccagta

SEQ ID NO: 497895 - DNA, 25 bp, Homo sapien
gacagacggctgtagaagcttccgg

SEQ ID NO: 497896 - DNA, 25 bp, Homo sapien
gtattttccacactgcgccacggag

SEQ ID NO: 497897 - DNA, 25 bp, Homo sapien
tgatgaacacgcctccaacagttcc

SEQ ID NO: 497898 - DNA, 25 bp, Homo sapien
aacctgccgtcgtgatgaacacgcc

SEQ ID NO: 497899 - DNA, 25 bp, Homo sapien
tgtgccgttagacgtggaacctgcc

SEQ ID NO: 497900 - DNA, 25 bp, Homo sapien
cttgtgccgttagacgtggaacctg

SEQ ID NO: 497901 - DNA, 25 bp, Homo sapien
tgaaaaacacgtgcgccgtgatggc

SEQ ID NO: 497902 - DNA, 25 bp, Homo sapien
tacatgcactgtgatcgcagcacgt

SEQ ID NO: 497903 - DNA, 25 bp, Homo sapien
tacttgctgttacttgggctgccgg

SEQ ID NO: 497904 - DNA, 25 bp, Homo sapien
taccataatcacagacgcgttcgca

SEQ ID NO: 497905 - DNA, 25 bp, Homo sapien
tacctagggacaccattctactctg

SEQ ID NO: 497906 - DNA, 25 bp, Homo sapien
tactatatattgtatcacaatgcaa

SEQ ID NO: 497907 - DNA, 25 bp, Homo sapien
taagatcaatacctagggacaccat

SEQ ID NO: 497908 - DNA, 25 bp, Homo sapien
ctttgaagcactaagatcaatacct

SEQ ID NO: 497909 - DNA, 25 bp, Homo sapien
gaaccggcctctgtcaaaagcttgt

SEQ ID NO: 497910 - DNA, 25 bp, Homo sapien
tagctacaacagaaggagaaccggc

SEQ ID NO: 497911 - DNA, 25 bp, Homo sapien
tgaaactcactatgtcgagccctgt

SEQ ID NO: 497912 - DNA, 25 bp, Homo sapien
ccacctcatggaagaagcagcatta

SEQ ID NO: 497913 - DNA, 25 bp, Homo sapien
tccgggactttcactcataaccagc

SEQ ID NO: 497914 - DNA, 25 bp, Homo sapien
tcattccatcaggagcagtgcccca

SEQ ID NO: 497915 - DNA, 25 bp, Homo sapien
tggccctgtctcctggaacccataa

SEQ ID NO: 497916 - DNA, 25 bp, Homo sapien
acccataacgacagaaacaggaggc

SEQ ID NO: 497917 - DNA, 25 bp, Homo sapien
gggcttgtggtcaaatgacaggctg

SEQ ID NO: 497918 - DNA, 25 bp, Homo sapien
tgagtgtctgcactacagcacgcca

SEQ ID NO: 497919 - DNA, 25 bp, Homo sapien
ttgtcagtcacacaaacagaacggg

SEQ ID NO: 497920 - DNA, 25 bp, Homo sapien
tgcaaggcaggaggcggatggcgcc

SEQ ID NO: 497921 - DNA, 25 bp, Homo sapien
gcatcccatctgcaccgttggtcag

SEQ ID NO: 497922 - DNA, 25 bp, Homo sapien
catcccatctgcaccgttggtcagg

SEQ ID NO: 497923 - DNA, 25 bp, Homo sapien
atcccatctgcaccgttggtcaggt

SEQ ID NO: 497924 - DNA, 25 bp, Homo sapien
cagcatcccatctgcaccgttggtc

SEQ ID NO: 497925 - DNA, 25 bp, Homo sapien
gtcattctcgttgaagtcatcgtcc

SEQ ID NO: 497926 - DNA, 25 bp, Homo sapien
agtcgtcctcgtcattctcgttgaa

SEQ ID NO: 497927 - DNA, 25 bp, Homo sapien
tcagtcgtcctcgtcattctcgttg

SEQ ID NO: 497928 - DNA, 25 bp, Homo sapien
gtcctcgtcattctcgttgaagtca

SEQ ID NO: 497929 - DNA, 25 bp, Homo sapien
caatatcttcttgggagtaggccaa

SEQ ID NO: 497930 - DNA, 25 bp, Homo sapien
tcgctaaacgttttcctgaagccga

SEQ ID NO: 497931 - DNA, 25 bp, Homo sapien
ttcctgaagccgaatctgaagtggg

SEQ ID NO: 497932 - DNA, 25 bp, Homo sapien
tatcttcttgggagtaggccaaaag

SEQ ID NO: 497933 - DNA, 25 bp, Homo sapien
acacatccacagcacgtcctaatcc

SEQ ID NO: 497934 - DNA, 25 bp, Homo sapien
aataaacgctctgcatcagcacact

SEQ ID NO: 497935 - DNA, 25 bp, Homo sapien
cacagcacgtcctaatcctacggga

SEQ ID NO: 497936 - DNA, 25 bp, Homo sapien
atcctaacaagtaaataaacgctct

SEQ ID NO: 497937 - DNA, 25 bp, Homo sapien
acagagtcttgctatccgccagcag

SEQ ID NO: 497938 - DNA, 25 bp, Homo sapien
tcacggcaaataagcggcatcaggg

SEQ ID NO: 497939 - DNA, 25 bp, Homo sapien
gtaccactgaacaaactccacagag

SEQ ID NO: 497940 - DNA, 25 bp, Homo sapien
tgtttgcttggacaccgtaccactg

SEQ ID NO: 497941 - DNA, 25 bp, Homo sapien
tataatttaagggacaataaagtca

SEQ ID NO: 497942 - DNA, 25 bp, Homo sapien
aaagcacttcgcaatttgttgctgc

SEQ ID NO: 497943 - DNA, 25 bp, Homo sapien
gatggaatcacaacagtcaatataa

SEQ ID NO: 497944 - DNA, 25 bp, Homo sapien
catagccgcaccagcatggcaataa

SEQ ID NO: 497945 - DNA, 25 bp, Homo sapien
aagatgcttatgaaacaaatacatt

SEQ ID NO: 497946 - DNA, 25 bp, Homo sapien
gaagatgcttatgaaacaaatacat

SEQ ID NO: 497947 - DNA, 25 bp, Homo sapien
agatgcttatgaaacaaatacattt

SEQ ID NO: 497948 - DNA, 25 bp, Homo sapien
ttttagaacaggcagctaatagcaa

SEQ ID NO: 497949 - DNA, 25 bp, Homo sapien
tttagaacaggcagctaatagcaac

SEQ ID NO: 497950 - DNA, 25 bp, Homo sapien
ttattaataaaaactaacagtgcca

SEQ ID NO: 497951 - DNA, 25 bp, Homo sapien
catgcgcgttttattaataaaaact

SEQ ID NO: 497952 - DNA, 25 bp, Homo sapien
attaataaaaactaacagtgccaag

SEQ ID NO: 497953 - DNA, 25 bp, Homo sapien
gcccatgcgcgttttattaataaaa

SEQ ID NO: 497954 - DNA, 25 bp, Homo sapien
gggaggcggtcatgctcccaaccag

SEQ ID NO: 497955 - DNA, 25 bp, Homo sapien
aactgggaggcggtcatgctcccaa

SEQ ID NO: 497956 - DNA, 25 bp, Homo sapien
ttggctgtgagcccggagtcctcga

SEQ ID NO: 497957 - DNA, 25 bp, Homo sapien
ggttggctgtgagcccggagtcctc

SEQ ID NO: 497958 - DNA, 25 bp, Homo sapien
aggttggctgtgagcccggagtcct

SEQ ID NO: 497959 - DNA, 25 bp, Homo sapien
ctgcggcgggacgtctaagacgcag

SEQ ID NO: 497960 - DNA, 25 bp, Homo sapien
cggcgggacgtctaagacgcagggt

SEQ ID NO: 497961 - DNA, 25 bp, Homo sapien
ccggcgggtgcgacaccagcacaga

SEQ ID NO: 497962 - DNA, 25 bp, Homo sapien
gcgggtgcgacaccagcacagaaga

SEQ ID NO: 497963 - DNA, 25 bp, Homo sapien
ttaccgatggaagacgctgtaccaa

SEQ ID NO: 497964 - DNA, 25 bp, Homo sapien
ttcacgtcatgggacgcgtggccac

SEQ ID NO: 497965 - DNA, 25 bp, Homo sapien
gcatctccagtgcttactccgtcag

SEQ ID NO: 497966 - DNA, 25 bp, Homo sapien
tctcggcgcagacgtgagttcacgt

SEQ ID NO: 497967 - DNA, 25 bp, Homo sapien
aacagtttccaaggagcacacccgg

SEQ ID NO: 497968 - DNA, 25 bp, Homo sapien
gaacaggcatccgagtcgtcagagg

SEQ ID NO: 497969 - DNA, 25 bp, Homo sapien
tccccatcggtgtgcagagcaagtg

SEQ ID NO: 497970 - DNA, 25 bp, Homo sapien
tctgcaaggacgcacaggaaacagt

SEQ ID NO: 497971 - DNA, 25 bp, Homo sapien
atcagccgaggccaagccgggagcg

SEQ ID NO: 497972 - DNA, 25 bp, Homo sapien
ttcctgcccgcttcaggcgtgaggg

SEQ ID NO: 497973 - DNA, 25 bp, Homo sapien
ccgggagcgttcacagacagagcag

SEQ ID NO: 497974 - DNA, 25 bp, Homo sapien
tcaggcgtgagggcccatcagccga

SEQ ID NO: 497975 - DNA, 25 bp, Homo sapien
tcaaagctgcctcgggcggcgatga

SEQ ID NO: 497976 - DNA, 25 bp, Homo sapien
gcctcgggcggcgatgaaggcagag

SEQ ID NO: 497977 - DNA, 25 bp, Homo sapien
gctgctgccgtcaaagctgcctcgg

SEQ ID NO: 497978 - DNA, 25 bp, Homo sapien
cggtctccaaagacccgaaatccat

SEQ ID NO: 497979 - DNA, 25 bp, Homo sapien
gaacctcaggaagtacaggctgccc

SEQ ID NO: 497980 - DNA, 25 bp, Homo sapien
gaaagagcttcttgccgatgggctg

SEQ ID NO: 497981 - DNA, 25 bp, Homo sapien
tgtcgcggagggactcacacttgga

SEQ ID NO: 497982 - DNA, 25 bp, Homo sapien
tctctgccgattgtaggaactgctg

SEQ ID NO: 497983 - DNA, 25 bp, Homo sapien
tgaaaagtgagacgctgagtacgca

SEQ ID NO: 497984 - DNA, 25 bp, Homo sapien
aaaagtgagacgctgagtacgcact

SEQ ID NO: 497985 - DNA, 25 bp, Homo sapien
ctgaaaagtgagacgctgagtacgc

SEQ ID NO: 497986 - DNA, 25 bp, Homo sapien
aagtgagacgctgagtacgcactgg

SEQ ID NO: 497987 - DNA, 25 bp, Homo sapien
ttcaaacgcataggccagagacacg

SEQ ID NO: 497988 - DNA, 25 bp, Homo sapien
cagagacacgatgaacctgctgtgt

SEQ ID NO: 497989 - DNA, 25 bp, Homo sapien
gatgtcacctccgttcatgatggtc

SEQ ID NO: 497990 - DNA, 25 bp, Homo sapien
gacagaggtcggctttggtttcaaa

SEQ ID NO: 497991 - DNA, 25 bp, Homo sapien
atgttttccacggacaggttttgca

SEQ ID NO: 497992 - DNA, 25 bp, Homo sapien
tcatctcttatgttttccacggaca

SEQ ID NO: 497993 - DNA, 25 bp, Homo sapien
catctcttatgttttccacggacag

SEQ ID NO: 497994 - DNA, 25 bp, Homo sapien
tccacggacaggttttgcagagaag

SEQ ID NO: 497995 - DNA, 25 bp, Homo sapien
tgctccaggccgcagatgatctgcg

SEQ ID NO: 497996 - DNA, 25 bp, Homo sapien
tagacgatccgcctctggtgcaggt

SEQ ID NO: 497997 - DNA, 25 bp, Homo sapien
gccgtgtagaagagggcgcgcggct

SEQ ID NO: 497998 - DNA, 25 bp, Homo sapien
cagggttctcctcattcacgttgta

SEQ ID NO: 497999 - DNA, 25 bp, Homo sapien
caacaaacaggcttggcgagccatc

SEQ ID NO: 498000 - DNA, 25 bp, Homo sapien
aatgaaacccaacagcgtgcagtct

SEQ ID NO: 498001 - DNA, 25 bp, Homo sapien
gacatgccacgtgtgcaacaaacag

SEQ ID NO: 498002 - DNA, 25 bp, Homo sapien
tatttgccccgtgtttctgctgaca

SEQ ID NO: 498003 - DNA, 25 bp, Homo sapien
tgtcatgctataaaccaggaggcct

SEQ ID NO: 498004 - DNA, 25 bp, Homo sapien
gatggtcgcaggtgaagaaacgcca

SEQ ID NO: 498005 - DNA, 25 bp, Homo sapien
gaaggaaaagcatcgcgtcctccag

SEQ ID NO: 498006 - DNA, 25 bp, Homo sapien
tattcattgcgtcttcctggccaca

SEQ ID NO: 498007 - DNA, 25 bp, Homo sapien
gtctacacagggatcctacggtggg

SEQ ID NO: 498008 - DNA, 25 bp, Homo sapien
caactacactgatggagcgaccgtc

SEQ ID NO: 498009 - DNA, 25 bp, Homo sapien
tgcaaagtacaagtcctgggctatc

SEQ ID NO: 498010 - DNA, 25 bp, Homo sapien
gctgaaggccacatcgatgcttgga

SEQ ID NO: 498011 - DNA, 25 bp, Homo sapien
gggttatgcccatgagcgagcctac

SEQ ID NO: 498012 - DNA, 25 bp, Homo sapien
tgaatccagcaaatgccgccgaagt

SEQ ID NO: 498013 - DNA, 25 bp, Homo sapien
caggcttgcaaagttctgtccgaca

SEQ ID NO: 498014 - DNA, 25 bp, Homo sapien
tctgtgcccttcaactctggagtga

SEQ ID NO: 498015 - DNA, 25 bp, Homo sapien
cactcaaggtgccatagaaatggga

SEQ ID NO: 498016 - DNA, 25 bp, Homo sapien
gaagggtcccttgtatacacattaa

SEQ ID NO: 498017 - DNA, 25 bp, Homo sapien
aatggtctgacctacctggcttggc

SEQ ID NO: 498018 - DNA, 25 bp, Homo sapien
aatgagctgtttatctgaagggtcc

SEQ ID NO: 498019 - DNA, 25 bp, Homo sapien
cacgcgggatatctggaagcaagcc

SEQ ID NO: 498020 - DNA, 25 bp, Homo sapien
tatattggctcagctcgaacacgcg

SEQ ID NO: 498021 - DNA, 25 bp, Homo sapien
aggacatctgcacccgaaacatggg

SEQ ID NO: 498022 - DNA, 25 bp, Homo sapien
tattgccacggtcagttctgtcagc

SEQ ID NO: 498023 - DNA, 25 bp, Homo sapien
ctctggtttctgcctttggtatcat

SEQ ID NO: 498024 - DNA, 25 bp, Homo sapien
ggcattgatttcacaggcagcaagc

SEQ ID NO: 498025 - DNA, 25 bp, Homo sapien
gcattgatttcacaggcagcaagcc

SEQ ID NO: 498026 - DNA, 25 bp, Homo sapien
gggccttgccggagctgtcactgct

SEQ ID NO: 498027 - DNA, 25 bp, Homo sapien
caggagggccttgccggagctgtca

SEQ ID NO: 498028 - DNA, 25 bp, Homo sapien
caagaaagcaagagtcctccaggaa

SEQ ID NO: 498029 - DNA, 25 bp, Homo sapien
ggaagccggccaagaggcgccttct

SEQ ID NO: 498030 - DNA, 25 bp, Homo sapien
aaatcgcctccaggcacctttacta

SEQ ID NO: 498031 - DNA, 25 bp, Homo sapien
ttttttggtccatggatgcaaatcg

SEQ ID NO: 498032 - DNA, 25 bp, Homo sapien
acctttactatctcagtgctctcct

SEQ ID NO: 498033 - DNA, 25 bp, Homo sapien
catggatgcaaatcgcctccaggca

SEQ ID NO: 498034 - DNA, 25 bp, Homo sapien
tccggtggtgtttccagcgccgtgt

SEQ ID NO: 498035 - DNA, 25 bp, Homo sapien
gaagatctccacttgccaacggaca

SEQ ID NO: 498036 - DNA, 25 bp, Homo sapien
cagttgaggaacagagaagatctcc

SEQ ID NO: 498037 - DNA, 25 bp, Homo sapien
tgtggatgacttccccgcgtgtttc

SEQ ID NO: 498038 - DNA, 25 bp, Homo sapien
tggtgtctcccatcagaggtaagtg

SEQ ID NO: 498039 - DNA, 25 bp, Homo sapien
gaccagagcaaccaccgtcctggtg

SEQ ID NO: 498040 - DNA, 25 bp, Homo sapien
taagtgtggtctcccgaccagagca

SEQ ID NO: 498041 - DNA, 25 bp, Homo sapien
agagcaaccaccgtcctggtgtctc

SEQ ID NO: 498042 - DNA, 25 bp, Homo sapien
tggtgtctcccatcagaggtaagtg

SEQ ID NO: 498043 - DNA, 25 bp, Homo sapien
gaccagagcaaccaccgtcctggtg

SEQ ID NO: 498044 - DNA, 25 bp, Homo sapien
agagcaaccaccgtcctggtgtctc

SEQ ID NO: 498045 - DNA, 25 bp, Homo sapien
tctcccatcagaggtaagtgtggtc

SEQ ID NO: 498046 - DNA, 25 bp, Homo sapien
tggtgtctcccatcagaggtaagtg

SEQ ID NO: 498047 - DNA, 25 bp, Homo sapien
tctcccatcagaggtaagtgtggtc

SEQ ID NO: 498048 - DNA, 25 bp, Homo sapien
taagtgtggtctcccgaccagagca

SEQ ID NO: 498049 - DNA, 25 bp, Homo sapien
tgtctcccatcagaggtaagtgtgg

SEQ ID NO: 498050 - DNA, 25 bp, Homo sapien
acccaagaccccggcctggcgtgca

SEQ ID NO: 498051 - DNA, 25 bp, Homo sapien
ttcgcaggccggaaaagaggcataa

SEQ ID NO: 498052 - DNA, 25 bp, Homo sapien
ttattcgcaggccggaaaagaggca

SEQ ID NO: 498053 - DNA, 25 bp, Homo sapien
tggtttattcgcaggccggaaaaga

SEQ ID NO: 498054 - DNA, 25 bp, Homo sapien
ttaggcagccagtgtttccagtgct

SEQ ID NO: 498055 - DNA, 25 bp, Homo sapien
agccagtgtttccagtgctgcagcc

SEQ ID NO: 498056 - DNA, 25 bp, Homo sapien
agtgtttccagtgctgcagccacag

SEQ ID NO: 498057 - DNA, 25 bp, Homo sapien
aggcagccagtgtttccagtgctgc

SEQ ID NO: 498058 - DNA, 25 bp, Homo sapien
gttggtctgcatgaatggaggctct

SEQ ID NO: 498059 - DNA, 25 bp, Homo sapien
tgcatgaatggaggctctgcagaca

SEQ ID NO: 498060 - DNA, 25 bp, Homo sapien
gctctgcagacagaccctcggactg

SEQ ID NO: 498061 - DNA, 25 bp, Homo sapien
gaatggaggctctgcagacagaccc

SEQ ID NO: 498062 - DNA, 25 bp, Homo sapien
ggttgatggcaaggcggagacgtgt

SEQ ID NO: 498063 - DNA, 25 bp, Homo sapien
ctggttgatggcaaggcggagacgt

SEQ ID NO: 498064 - DNA, 25 bp, Homo sapien
ggagacgtgtgcccccgtgagtcct

SEQ ID NO: 498065 - DNA, 25 bp, Homo sapien
tgtgcccccgtgagtcctgttccat

SEQ ID NO: 498066 - DNA, 25 bp, Homo sapien
ccgtgaaagcactaaactgggtgtg

SEQ ID NO: 498067 - DNA, 25 bp, Homo sapien
ggaacgagcagtatcactgggaagc

SEQ ID NO: 498068 - DNA, 25 bp, Homo sapien
tatttgggccatccttggagatccc

SEQ ID NO: 498069 - DNA, 25 bp, Homo sapien
gccaggtgggaattcacacatgtat

SEQ ID NO: 498070 - DNA, 25 bp, Homo sapien
ccatgagtcaagttcaatatctcac

SEQ ID NO: 498071 - DNA, 25 bp, Homo sapien
ttccatgagtcaagttcaatatctc

SEQ ID NO: 498072 - DNA, 25 bp, Homo sapien
tccatgagtcaagttcaatatctca

SEQ ID NO: 498073 - DNA, 25 bp, Homo sapien
tattccatgagtcaagttcaatatc

SEQ ID NO: 498074 - DNA, 25 bp, Homo sapien
tcaaagataagaaccaaacacccca

SEQ ID NO: 498075 - DNA, 25 bp, Homo sapien
cccagttctgtatttatgcctaaaa

SEQ ID NO: 498076 - DNA, 25 bp, Homo sapien
gacttgtcttttgtcccgtggtgtc

SEQ ID NO: 498077 - DNA, 25 bp, Homo sapien
ttaatgccaccagatatcagcgccc

SEQ ID NO: 498078 - DNA, 25 bp, Homo sapien
gggctgcgaaagtcgggctcacatc

SEQ ID NO: 498079 - DNA, 25 bp, Homo sapien
cgaaagtcgggctcacatcctggcc

SEQ ID NO: 498080 - DNA, 25 bp, Homo sapien
gatgccatcgccagggagttcacat

SEQ ID NO: 498081 - DNA, 25 bp, Homo sapien
gtgtctccaggatgccatcgccagg

SEQ ID NO: 498082 - DNA, 25 bp, Homo sapien
acattcactcaacagccccatgttg

SEQ ID NO: 498083 - DNA, 25 bp, Homo sapien
atgtctgaggcaagcaaccacggtc

SEQ ID NO: 498084 - DNA, 25 bp, Homo sapien
gactcctatgatgctgcgaggccgc

SEQ ID NO: 498085 - DNA, 25 bp, Homo sapien
tgtcacagcagcttagacttggccc

SEQ ID NO: 498086 - DNA, 25 bp, Homo sapien
ccttgagtgacaaggtagcagagct

SEQ ID NO: 498087 - DNA, 25 bp, Homo sapien
tatggtaattagatctgcaatgacc

SEQ ID NO: 498088 - DNA, 25 bp, Homo sapien
ggaacacaaccaacccataccttga

SEQ ID NO: 498089 - DNA, 25 bp, Homo sapien
tcatattctgaggtgctgaagactc

SEQ ID NO: 498090 - DNA, 25 bp, Homo sapien
cccgggtttgtggattcacagcttc

SEQ ID NO: 498091 - DNA, 25 bp, Homo sapien
tcctgtgtcacccttcttcttataa

SEQ ID NO: 498092 - DNA, 25 bp, Homo sapien
gctcccgggtttgtggattcacagc

SEQ ID NO: 498093 - DNA, 25 bp, Homo sapien
tgggctcctgtgtcacccttcttct

SEQ ID NO: 498094 - DNA, 25 bp, Homo sapien
agctccatcagccagaatgcaacct

SEQ ID NO: 498095 - DNA, 25 bp, Homo sapien
agtgaagccggggtgcccatcagct

SEQ ID NO: 498096 - DNA, 25 bp, Homo sapien
catcagccagaatgcaaccttgaag

SEQ ID NO: 498097 - DNA, 25 bp, Homo sapien
tccatcagccagaatgcaaccttga

SEQ ID NO: 498098 - DNA, 25 bp, Homo sapien
ttgacatagctattttaatatatgc

SEQ ID NO: 498099 - DNA, 25 bp, Homo sapien
attgacatagctattttaatatatg

SEQ ID NO: 498100 - DNA, 25 bp, Homo sapien
ttttaatatatgcagagctattttt

SEQ ID NO: 498101 - DNA, 25 bp, Homo sapien
taatatatgcagagctatttttaac

SEQ ID NO: 498102 - DNA, 25 bp, Homo sapien
gaacaaatggagtcccgcagtggct

SEQ ID NO: 498103 - DNA, 25 bp, Homo sapien
gaatatacttctgagcgcaaaccca

SEQ ID NO: 498104 - DNA, 25 bp, Homo sapien
ttttcatgacaccaaagcaaacggc

SEQ ID NO: 498105 - DNA, 25 bp, Homo sapien
tgagacccagaaggtgaggccgtct

SEQ ID NO: 498106 - DNA, 25 bp, Homo sapien
ccttgtgtgggtagcgtgtgggtgg

SEQ ID NO: 498107 - DNA, 25 bp, Homo sapien
acactcaggcatcggccttgtgtgg

SEQ ID NO: 498108 - DNA, 25 bp, Homo sapien
gaggtgttctgtgtttcacactcag

SEQ ID NO: 498109 - DNA, 25 bp, Homo sapien
ggactctgagggtttcgagccctga

SEQ ID NO: 498110 - DNA, 25 bp, Homo sapien
accgctcacggccttgcctgtcgag

SEQ ID NO: 498111 - DNA, 25 bp, Homo sapien
cgctcacggccttgcctgtcgagag

SEQ ID NO: 498112 - DNA, 25 bp, Homo sapien
cacaccgggccgtgtgggaacctga

SEQ ID NO: 498113 - DNA, 25 bp, Homo sapien
caaggaggtcgagagtgtgtgtgtt

SEQ ID NO: 498114 - DNA, 25 bp, Homo sapien
tgcggcacctcaagcgctcggtctg

SEQ ID NO: 498115 - DNA, 25 bp, Homo sapien
acgcgcggtcagagcgcccgggagg

SEQ ID NO: 498116 - DNA, 25 bp, Homo sapien
ggaggctccggtcatcccgtcctgg

SEQ ID NO: 498117 - DNA, 25 bp, Homo sapien
tcaagcgctcggtctgggcgtgttc

SEQ ID NO: 498118 - DNA, 25 bp, Homo sapien
gcccgggcgagagcgaaggggccat

SEQ ID NO: 498119 - DNA, 25 bp, Homo sapien
ggtcgttctcgaacacctcccgcgc

SEQ ID NO: 498120 - DNA, 25 bp, Homo sapien
actgcgtggcctcgcgcgccggcaa

SEQ ID NO: 498121 - DNA, 25 bp, Homo sapien
gcaggaactgcgtggcctcgcgcgc

SEQ ID NO: 498122 - DNA, 25 bp, Homo sapien
tcctcgaagacctgaaaggcgcggc

SEQ ID NO: 498123 - DNA, 25 bp, Homo sapien
gaaatcaccctgacttcagggcggg

SEQ ID NO: 498124 - DNA, 25 bp, Homo sapien
ccgagcccgcaggatagagtggcca

SEQ ID NO: 498125 - DNA, 25 bp, Homo sapien
acgggaatccacaccttctcggact

SEQ ID NO: 498126 - DNA, 25 bp, Homo sapien
cagcagaacggaaaacttcgctatg

SEQ ID NO: 498127 - DNA, 25 bp, Homo sapien
aggccggggagagcgaccaagctag

SEQ ID NO: 498128 - DNA, 25 bp, Homo sapien
gccggggagagcgaccaagctaggc

SEQ ID NO: 498129 - DNA, 25 bp, Homo sapien
cggggagagcgaccaagctaggctg

SEQ ID NO: 498130 - DNA, 25 bp, Homo sapien
gggagagcgaccaagctaggctgag

SEQ ID NO: 498131 - DNA, 25 bp, Homo sapien
cacgcagaatgttccgggtgaggac

SEQ ID NO: 498132 - DNA, 25 bp, Homo sapien
actccgagcgaccagggcacacagg

SEQ ID NO: 498133 - DNA, 25 bp, Homo sapien
aggacgctgttggaggacactgcac

SEQ ID NO: 498134 - DNA, 25 bp, Homo sapien
ccctgtgcacgcagaatgttccggg

SEQ ID NO: 498135 - DNA, 25 bp, Homo sapien
atccaggcagcgtccagtctgattg

SEQ ID NO: 498136 - DNA, 25 bp, Homo sapien
agtctgattgacatgggccctgcag

SEQ ID NO: 498137 - DNA, 25 bp, Homo sapien
tccagtctgattgacatgggccctg

SEQ ID NO: 498138 - DNA, 25 bp, Homo sapien
cagcgtccagtctgattgacatggg

SEQ ID NO: 498139 - DNA, 25 bp, Homo sapien
ttcatttcacacctttgtaaataaa

SEQ ID NO: 498140 - DNA, 25 bp, Homo sapien
tcatttcacacctttgtaaataaag

SEQ ID NO: 498141 - DNA, 25 bp, Homo sapien
cttcatttcacacctttgtaaataa

SEQ ID NO: 498142 - DNA, 25 bp, Homo sapien
catttcacacctttgtaaataaagt

SEQ ID NO: 498143 - DNA, 25 bp, Homo sapien
gtcacctcttgagctcaggccacag

SEQ ID NO: 498144 - DNA, 25 bp, Homo sapien
atggccaggtcctggtcacctcttg

SEQ ID NO: 498145 - DNA, 25 bp, Homo sapien
aaggatgctctgacagtcaccatgg

SEQ ID NO: 498146 - DNA, 25 bp, Homo sapien
caaggatgctctgacagtcaccatg

SEQ ID NO: 498147 - DNA, 25 bp, Homo sapien
ctggatgattttccggcaggcaggc

SEQ ID NO: 498148 - DNA, 25 bp, Homo sapien
tacaggtgcaggttgctaatccagg

SEQ ID NO: 498149 - DNA, 25 bp, Homo sapien
tcagataaagccaggtgatgggatc

SEQ ID NO: 498150 - DNA, 25 bp, Homo sapien
gatcaaagtgcacaaacaggctccc

SEQ ID NO: 498151 - DNA, 25 bp, Homo sapien
ctgtgtgactgtgtaggtacatcta

SEQ ID NO: 498152 - DNA, 25 bp, Homo sapien
gcatgtcattatgcatgtgtacatg

SEQ ID NO: 498153 - DNA, 25 bp, Homo sapien
catgtctgttagtatgtgtgtgcct

SEQ ID NO: 498154 - DNA, 25 bp, Homo sapien
acatgtctgttagtatgtgtgtgca

SEQ ID NO: 498155 - DNA, 25 bp, Homo sapien
gtgtgtgcctatgtatgcatgtctg

SEQ ID NO: 498156 - DNA, 25 bp, Homo sapien
tacatgtctgtgtgtgcctatgtat

SEQ ID NO: 498157 - DNA, 25 bp, Homo sapien
tctgtgtgtgcctatgtatgcatgt

SEQ ID NO: 498158 - DNA, 25 bp, Homo sapien
gtgtgcctatgtatgcatgtctgtg

SEQ ID NO: 498159 - DNA, 25 bp, Homo sapien
cgtgaccttgtgtcactttttagtg

SEQ ID NO: 498160 - DNA, 25 bp, Homo sapien
cagcacggaagacggccctcagagg

SEQ ID NO: 498161 - DNA, 25 bp, Homo sapien
cacagagccccgtgaccttgtgtca

SEQ ID NO: 498162 - DNA, 25 bp, Homo sapien
tctgaccccaaagttgtagaaagag

SEQ ID NO: 498163 - DNA, 25 bp, Homo sapien
atgtgaagctctccggctcgggtga

SEQ ID NO: 498164 - DNA, 25 bp, Homo sapien
gggtgagggtgtcgtgtgcagggcc

SEQ ID NO: 498165 - DNA, 25 bp, Homo sapien
cacagatgtgaagctctccggctcg

SEQ ID NO: 498166 - DNA, 25 bp, Homo sapien
agtgcctgcagacgcccgggtgaaa

SEQ ID NO: 498167 - DNA, 25 bp, Homo sapien
actgcccggtcagatgtggatgctg

SEQ ID NO: 498168 - DNA, 25 bp, Homo sapien
ggtgggtaaccaagctcttctcaca

SEQ ID NO: 498169 - DNA, 25 bp, Homo sapien
tcacagcaccgacgtggtgcctgac

SEQ ID NO: 498170 - DNA, 25 bp, Homo sapien
tcctgggagctcatcctggtgtgac

SEQ ID NO: 498171 - DNA, 25 bp, Homo sapien
tgtgctttgctgttcccggcaggga

SEQ ID NO: 498172 - DNA, 25 bp, Homo sapien
gatgcagccattaggtctctcggag

SEQ ID NO: 498173 - DNA, 25 bp, Homo sapien
aaaagattggacgtccccgtgctgg

SEQ ID NO: 498174 - DNA, 25 bp, Homo sapien
tctgatgagtagatgccacctccgg

SEQ ID NO: 498175 - DNA, 25 bp, Homo sapien
tcatgagccgtcaccaaacacatgg

SEQ ID NO: 498176 - DNA, 25 bp, Homo sapien
gcatgtatggataaatgcacagatg

SEQ ID NO: 498177 - DNA, 25 bp, Homo sapien
acagtggatgagtgcgtgaaagaat

SEQ ID NO: 498178 - DNA, 25 bp, Homo sapien
aaaaagacaacatctacctgcccag

SEQ ID NO: 498179 - DNA, 25 bp, Homo sapien
agtcctggagcaacacgaagtggca

SEQ ID NO: 498180 - DNA, 25 bp, Homo sapien
gcaagaacagccataccaagtgagc

SEQ ID NO: 498181 - DNA, 25 bp, Homo sapien
cgaagtggcaccaggtttctaggct

SEQ ID NO: 498182 - DNA, 25 bp, Homo sapien
ctaagaactagtgagcaaacggcct

SEQ ID NO: 498183 - DNA, 25 bp, Homo sapien
gcttagggtcaaccatgccagcagt

SEQ ID NO: 498184 - DNA, 25 bp, Homo sapien
catggcagaatagtcccagcggcct

SEQ ID NO: 498185 - DNA, 25 bp, Homo sapien
aagtgagctgtcgagtcctggaacc

SEQ ID NO: 498186 - DNA, 25 bp, Homo sapien
ggaatgaggaaacccggcttcagga

SEQ ID NO: 498187 - DNA, 25 bp, Homo sapien
aggcaagcattgaccggcacactac

SEQ ID NO: 498188 - DNA, 25 bp, Homo sapien
aaaggcaagcattgaccggcacact

SEQ ID NO: 498189 - DNA, 25 bp, Homo sapien
agcattgaccggcacactacgaggg

SEQ ID NO: 498190 - DNA, 25 bp, Homo sapien
cattgaccggcacactacgagggtc

SEQ ID NO: 498191 - DNA, 25 bp, Homo sapien
tatgcctctacgacaaccagagtag

SEQ ID NO: 498192 - DNA, 25 bp, Homo sapien
ggagattcctccaacatgaaacacg

SEQ ID NO: 498193 - DNA, 25 bp, Homo sapien
ccttccaagagttacgtggtgagga

SEQ ID NO: 498194 - DNA, 25 bp, Homo sapien
gacctgcatgttccggacagttcca

SEQ ID NO: 498195 - DNA, 25 bp, Homo sapien
ctgaggttccactaacacggaataa

SEQ ID NO: 498196 - DNA, 25 bp, Homo sapien
tgaggttccactaacacggaataaa

SEQ ID NO: 498197 - DNA, 25 bp, Homo sapien
tactgttgcttatccaggcgcagaa

SEQ ID NO: 498198 - DNA, 25 bp, Homo sapien
tggcacatgcacatccagggataac

SEQ ID NO: 498199 - DNA, 25 bp, Homo sapien
tctgatggctgagataacgtctggc

SEQ ID NO: 498200 - DNA, 25 bp, Homo sapien
ttgacagcagacatcccgctagggc

SEQ ID NO: 498201 - DNA, 25 bp, Homo sapien
tacaagaccggatggactgcagagc

SEQ ID NO: 498202 - DNA, 25 bp, Homo sapien
tcctgacggtactcgaaaagctaaa

SEQ ID NO: 498203 - DNA, 25 bp, Homo sapien
gaatcaccgggaatgctcagtaagt

SEQ ID NO: 498204 - DNA, 25 bp, Homo sapien
aactcagcggagttgtgcacccaca

SEQ ID NO: 498205 - DNA, 25 bp, Homo sapien
tgagtttttggtgtacggagaccca

SEQ ID NO: 498206 - DNA, 25 bp, Homo sapien
tttgcacgcaggtggcgaagcctga

SEQ ID NO: 498207 - DNA, 25 bp, Homo sapien
tgtacggagacccatacttgttgat

SEQ ID NO: 498208 - DNA, 25 bp, Homo sapien
ggcgaagcctgagtttttggtgtac

SEQ ID NO: 498209 - DNA, 25 bp, Homo sapien
gaaggcgcaaaggaggccgacttac

SEQ ID NO: 498210 - DNA, 25 bp, Homo sapien
ggaaggcgcaaaggaggccgactta

SEQ ID NO: 498211 - DNA, 25 bp, Homo sapien
agaaagtttggcgaaaagggagcag

SEQ ID NO: 498212 - DNA, 25 bp, Homo sapien
gcaagggaccacagctccttaaaaa

SEQ ID NO: 498213 - DNA, 25 bp, Homo sapien
caggcctcggcaagggaccacagct

SEQ ID NO: 498214 - DNA, 25 bp, Homo sapien
gtttggcgaaaagggagcaggcctc

SEQ ID NO: 498215 - DNA, 25 bp, Homo sapien
ttcaccgccaggcatcttttgaggc

SEQ ID NO: 498216 - DNA, 25 bp, Homo sapien
agggagagtggccggagcttctggc

SEQ ID NO: 498217 - DNA, 25 bp, Homo sapien
catcttttgaggcacgcgaacatca

SEQ ID NO: 498218 - DNA, 25 bp, Homo sapien
ttgaggcacgcgaacatcagaggcc

SEQ ID NO: 498219 - DNA, 25 bp, Homo sapien
ttatctcagcttggcccatgactgc

SEQ ID NO: 498220 - DNA, 25 bp, Homo sapien
cgccagcgcctgttcaggaggtgaa

SEQ ID NO: 498221 - DNA, 25 bp, Homo sapien
ccatgactgcgttgaaggacaggag

SEQ ID NO: 498222 - DNA, 25 bp, Homo sapien
gaggtgaagggtttatctcagcttg

SEQ ID NO: 498223 - DNA, 25 bp, Homo sapien
gtttcctccatatgcctcaatttcc

SEQ ID NO: 498224 - DNA, 25 bp, Homo sapien
agtttcctccatatgcctcaatttc

SEQ ID NO: 498225 - DNA, 25 bp, Homo sapien
tttcctccatacaccccacagtttc

SEQ ID NO: 498226 - DNA, 25 bp, Homo sapien
cagtttcctccatatgcctcaattt

SEQ ID NO: 498227 - DNA, 25 bp, Homo sapien
agcttagccacacagggctccgtgg

SEQ ID NO: 498228 - DNA, 25 bp, Homo sapien
aggggcgcggtccacactcagctca

SEQ ID NO: 498229 - DNA, 25 bp, Homo sapien
agctcagccccacatgaggactcag

SEQ ID NO: 498230 - DNA, 25 bp, Homo sapien
tgagagagggctccggtccattgat

SEQ ID NO: 498231 - DNA, 25 bp, Homo sapien
gggttgggcgtgcactggtcaggca

SEQ ID NO: 498232 - DNA, 25 bp, Homo sapien
caggggttgggcgtgcactggtcag

SEQ ID NO: 498233 - DNA, 25 bp, Homo sapien
ccttcctatcgcaggggttgggcgt

SEQ ID NO: 498234 - DNA, 25 bp, Homo sapien
cttgggtccccttcctatcgcaggg

SEQ ID NO: 498235 - DNA, 25 bp, Homo sapien
aaggggagcccaagggtgcacagcc

SEQ ID NO: 498236 - DNA, 25 bp, Homo sapien
tgaaggggagcccaagggtgcacag

SEQ ID NO: 498237 - DNA, 25 bp, Homo sapien
gaaggggagcccaagggtgcacagc

SEQ ID NO: 498238 - DNA, 25 bp, Homo sapien
ctgaaggggagcccaagggtgcaca

SEQ ID NO: 498239 - DNA, 25 bp, Homo sapien
aggaacagtggaagctacccggctt

SEQ ID NO: 498240 - DNA, 25 bp, Homo sapien
agatctggaggcagcccccgttctc

SEQ ID NO: 498241 - DNA, 25 bp, Homo sapien
tcagaggagagctcgaagccgctgt

SEQ ID NO: 498242 - DNA, 25 bp, Homo sapien
tgccatcagaggagagctcgaagcc

SEQ ID NO: 498243 - DNA, 25 bp, Homo sapien
gggcgcgcacattcacagtgacttt

SEQ ID NO: 498244 - DNA, 25 bp, Homo sapien
acagcgtcgggggcgcgcacattca

SEQ ID NO: 498245 - DNA, 25 bp, Homo sapien
tcgggggcgcgcacattcacagtga

SEQ ID NO: 498246 - DNA, 25 bp, Homo sapien
cgcgcacattcacagtgactttctg

SEQ ID NO: 498247 - DNA, 25 bp, Homo sapien
tgttggtgcacgcttctgatcaagg

SEQ ID NO: 498248 - DNA, 25 bp, Homo sapien
gcagcacagcggcatctcagacggg

SEQ ID NO: 498249 - DNA, 25 bp, Homo sapien
agaggtcgcatccagactctgtggg

SEQ ID NO: 498250 - DNA, 25 bp, Homo sapien
taaatgacggtgctacaggacacgg

SEQ ID NO: 498251 - DNA, 25 bp, Homo sapien
gccttctcctgggagctgtacgcaa

SEQ ID NO: 498252 - DNA, 25 bp, Homo sapien
gcaaagccctcgtcacagaggcagg

SEQ ID NO: 498253 - DNA, 25 bp, Homo sapien
tcctgggagctgtacgcaaagccct

SEQ ID NO: 498254 - DNA, 25 bp, Homo sapien
ccgggcaggttcttgcagcgcgcct

SEQ ID NO: 498255 - DNA, 25 bp, Homo sapien
tagacttgggcgtcagagaaagcga

SEQ ID NO: 498256 - DNA, 25 bp, Homo sapien
ttagcaaccggctcgggcagtgact

SEQ ID NO: 498257 - DNA, 25 bp, Homo sapien
cagaagcacccggttgttagcaacc

SEQ ID NO: 498258 - DNA, 25 bp, Homo sapien
gcagtgactggcacccgtgtctaga

SEQ ID NO: 498259 - DNA, 25 bp, Homo sapien
cgggcatggtggtagcacaggccat

SEQ ID NO: 498260 - DNA, 25 bp, Homo sapien
gcatggtggtagcacaggccattac

SEQ ID NO: 498261 - DNA, 25 bp, Homo sapien
tgcgggcatggtggtagcacaggcc

SEQ ID NO: 498262 - DNA, 25 bp, Homo sapien
tgtgtgcgggcatggtggtagcaca

SEQ ID NO: 498263 - DNA, 25 bp, Homo sapien
tcccatcactgggggcacggcccct

SEQ ID NO: 498264 - DNA, 25 bp, Homo sapien
gttcccatcactgggggcacggccc

SEQ ID NO: 498265 - DNA, 25 bp, Homo sapien
tcttagaggctctacggccaacagg

SEQ ID NO: 498266 - DNA, 25 bp, Homo sapien
ttagaggctctacggccaacagggc

SEQ ID NO: 498267 - DNA, 25 bp, Homo sapien
ccccggagcacagaggggccgacag

SEQ ID NO: 498268 - DNA, 25 bp, Homo sapien
gcagtgaggtgtcccccggagcaca

SEQ ID NO: 498269 - DNA, 25 bp, Homo sapien
gtgcagtgaggtgtcccccggagca

SEQ ID NO: 498270 - DNA, 25 bp, Homo sapien
ctgtgcagtgaggtgtcccccggag

SEQ ID NO: 498271 - DNA, 25 bp, Homo sapien
tgccgggccggtgtggaaggcaggt

SEQ ID NO: 498272 - DNA, 25 bp, Homo sapien
gctgccgggccggtgtggaaggcag

SEQ ID NO: 498273 - DNA, 25 bp, Homo sapien
ctgccgggccggtgtggaaggcagg

SEQ ID NO: 498274 - DNA, 25 bp, Homo sapien
tcacagcggccctgcagacactcgt

SEQ ID NO: 498275 - DNA, 25 bp, Homo sapien
ccacgcccgtcacagtggcaggtgt

SEQ ID NO: 498276 - DNA, 25 bp, Homo sapien
catgtcctgggacagcttgaggccc

SEQ ID NO: 498277 - DNA, 25 bp, Homo sapien
gttcacgcagacctgctcacagcgg

SEQ ID NO: 498278 - DNA, 25 bp, Homo sapien
caccgtgaagggcccgcggggccag

SEQ ID NO: 498279 - DNA, 25 bp, Homo sapien
tcttcacggaagtgtttctcccgaa

SEQ ID NO: 498280 - DNA, 25 bp, Homo sapien
aaggccaggtcttcacggaagtgtt

SEQ ID NO: 498281 - DNA, 25 bp, Homo sapien
tcacggaagtgtttctcccgaaagc

SEQ ID NO: 498282 - DNA, 25 bp, Homo sapien
caggtcttcacggaagtgtttctcc

SEQ ID NO: 498283 - DNA, 25 bp, Homo sapien
acatggccctggagatccccaacac

SEQ ID NO: 498284 - DNA, 25 bp, Homo sapien
tccacatggccctggagatccccaa

SEQ ID NO: 498285 - DNA, 25 bp, Homo sapien
ctccacatggccctggagatcccca

SEQ ID NO: 498286 - DNA, 25 bp, Homo sapien
cacatggccctggagatccccaaca

SEQ ID NO: 498287 - DNA, 25 bp, Homo sapien
aacagaagcgtttctcatcccaaac

SEQ ID NO: 498288 - DNA, 25 bp, Homo sapien
gaacagaagcgtttctcatcccaaa

SEQ ID NO: 498289 - DNA, 25 bp, Homo sapien
ggaacagaagcgtttctcatcccaa

SEQ ID NO: 498290 - DNA, 25 bp, Homo sapien
gtgcccccgtgagtgtcacactggg

SEQ ID NO: 498291 - DNA, 25 bp, Homo sapien
tgagctgggagttgccatagagact

SEQ ID NO: 498292 - DNA, 25 bp, Homo sapien
caggctgatccactgtgagctggga

SEQ ID NO: 498293 - DNA, 25 bp, Homo sapien
aggtcggtcacgttggctccctggc

SEQ ID NO: 498294 - DNA, 25 bp, Homo sapien
tgttgtgacaggtcggtgtgagaca

SEQ ID NO: 498295 - DNA, 25 bp, Homo sapien
aggtaggtcatgctgtgacaggccc

SEQ ID NO: 498296 - DNA, 25 bp, Homo sapien
caggtaggtcatgctgtgacaggcc

SEQ ID NO: 498297 - DNA, 25 bp, Homo sapien
tgagacactggtgtgacaagtcagt

SEQ ID NO: 498298 - DNA, 25 bp, Homo sapien
gaaacgtccacatgtgggtactgca

SEQ ID NO: 498299 - DNA, 25 bp, Homo sapien
tcggtgtgacagacaccggtgacaa

SEQ ID NO: 498300 - DNA, 25 bp, Homo sapien
gacagacaccggtgacaagtcagtg

SEQ ID NO: 498301 - DNA, 25 bp, Homo sapien
gcattcctaccggtgtgacaggtca

SEQ ID NO: 498302 - DNA, 25 bp, Homo sapien
gctcactctcatcaacccccaggca

SEQ ID NO: 498303 - DNA, 25 bp, Homo sapien
tgctcactctcatcaacccccaggc

SEQ ID NO: 498304 - DNA, 25 bp, Homo sapien
atgctcactctcatcaacccccagg

SEQ ID NO: 498305 - DNA, 25 bp, Homo sapien
aatgctcactctcatcaacccccag

SEQ ID NO: 498306 - DNA, 25 bp, Homo sapien
tgcgactccgagaagctgtcctggt

SEQ ID NO: 498307 - DNA, 25 bp, Homo sapien
catgagtacatgaggcagcgaggca

SEQ ID NO: 498308 - DNA, 25 bp, Homo sapien
ccagggtgagctggacatctcgcag

SEQ ID NO: 498309 - DNA, 25 bp, Homo sapien
ggcaaagaacctcaaggcgagggct

SEQ ID NO: 498310 - DNA, 25 bp, Homo sapien
cggtgtgagctgacacccctggaag

SEQ ID NO: 498311 - DNA, 25 bp, Homo sapien
ggacagaaccaaagccggtgtgagc

SEQ ID NO: 498312 - DNA, 25 bp, Homo sapien
gctgtcctggaaagttccctgttct

SEQ ID NO: 498313 - DNA, 25 bp, Homo sapien
gatgccttgaagatggctgtcctgg

SEQ ID NO: 498314 - DNA, 25 bp, Homo sapien
aacatccggcccaggtacaaggact

SEQ ID NO: 498315 - DNA, 25 bp, Homo sapien
tgaagggcacgcacggcaagatgtc

SEQ ID NO: 498316 - DNA, 25 bp, Homo sapien
ccaggtacaaggacttcacactctt

SEQ ID NO: 498317 - DNA, 25 bp, Homo sapien
tgcagcctcttgaagcgcagtcgga

SEQ ID NO: 498318 - DNA, 25 bp, Homo sapien
cgacaccgttgtagcgcagctgcag

SEQ ID NO: 498319 - DNA, 25 bp, Homo sapien
cacatgccatggttgatgaccgggc

SEQ ID NO: 498320 - DNA, 25 bp, Homo sapien
gccgctgctggtgacacggccgaca

SEQ ID NO: 498321 - DNA, 25 bp, Homo sapien
ggtggcctccggcaaagaggaggat

SEQ ID NO: 498322 - DNA, 25 bp, Homo sapien
gggcaccctgcgtgtagcgtcaagc

SEQ ID NO: 498323 - DNA, 25 bp, Homo sapien
tgtggtgcgggttcagtggcggcct

SEQ ID NO: 498324 - DNA, 25 bp, Homo sapien
tgcgtgtagcgtcaagcagccctgg

SEQ ID NO: 498325 - DNA, 25 bp, Homo sapien
tgctcgggataaacagcatggcctc

SEQ ID NO: 498326 - DNA, 25 bp, Homo sapien
cagggaccgcagcgtccacgccgtc

SEQ ID NO: 498327 - DNA, 25 bp, Homo sapien
tggacccttggcatgcatggccgca

SEQ ID NO: 498328 - DNA, 25 bp, Homo sapien
caggtggtcaggacgtctctggcaa

SEQ ID NO: 498329 - DNA, 25 bp, Homo sapien
cctctcgctccacggatggggatgt

SEQ ID NO: 498330 - DNA, 25 bp, Homo sapien
atgcatggccgcactgaccagcagg

SEQ ID NO: 498331 - DNA, 25 bp, Homo sapien
caggttcagatgatacagtcctcgc

SEQ ID NO: 498332 - DNA, 25 bp, Homo sapien
ggaatacctcccacggtcaggttca

SEQ ID NO: 498333 - DNA, 25 bp, Homo sapien
tgaccttgatgaccagattccgcgc

SEQ ID NO: 498334 - DNA, 25 bp, Homo sapien
ggccaccgcgattttcatgacagca

SEQ ID NO: 498335 - DNA, 25 bp, Homo sapien
tccactggtgtatgctcaagaacta

SEQ ID NO: 498336 - DNA, 25 bp, Homo sapien
catgtgggtctaaggtcaaagagta

SEQ ID NO: 498337 - DNA, 25 bp, Homo sapien
cattttaaagctaggaaaggactga

SEQ ID NO: 498338 - DNA, 25 bp, Homo sapien
tctgtgaaacgaggagggtccagcc

SEQ ID NO: 498339 - DNA, 25 bp, Homo sapien
gccttcgcggccctggtatgtgcag

SEQ ID NO: 498340 - DNA, 25 bp, Homo sapien
agctctacggcagaaacgggccagt

SEQ ID NO: 498341 - DNA, 25 bp, Homo sapien
tggtatgtgcagctctacggcagaa

SEQ ID NO: 498342 - DNA, 25 bp, Homo sapien
tgccggatgccccagtcggtgggtg

SEQ ID NO: 498343 - DNA, 25 bp, Homo sapien
gaaaggcagagaaatctccgtggct

SEQ ID NO: 498344 - DNA, 25 bp, Homo sapien
aaaggcagagaaatctccgtggctt

SEQ ID NO: 498345 - DNA, 25 bp, Homo sapien
ttcactttcaccgtttcctggatgg

SEQ ID NO: 498346 - DNA, 25 bp, Homo sapien
tctccgtcaccgagaagcactgcat

SEQ ID NO: 498347 - DNA, 25 bp, Homo sapien
tgcagccatccagacgagggtttat

SEQ ID NO: 498348 - DNA, 25 bp, Homo sapien
gatggtggtgtcttctccgttcagc

SEQ ID NO: 498349 - DNA, 25 bp, Homo sapien
gtctgcttgctttcagcgtatgcct

SEQ ID NO: 498350 - DNA, 25 bp, Homo sapien
ccatctgaggccgtctgcttgcttt

SEQ ID NO: 498351 - DNA, 25 bp, Homo sapien
caccccaacggtaagagccaagact

SEQ ID NO: 498352 - DNA, 25 bp, Homo sapien
cttgtcctgacgctgccatctgagg

SEQ ID NO: 498353 - DNA, 25 bp, Homo sapien
ccattgtagctgtctcaccgggtca

SEQ ID NO: 498354 - DNA, 25 bp, Homo sapien
tcatcggtgaccacggtgtccacca

SEQ ID NO: 498355 - DNA, 25 bp, Homo sapien
tgtttttacacacctcccattgtag

SEQ ID NO: 498356 - DNA, 25 bp, Homo sapien
tttcaggcctaggttcactgtcccc

SEQ ID NO: 498357 - DNA, 25 bp, Homo sapien
ctgtcaggagcacccgcggtctggg

SEQ ID NO: 498358 - DNA, 25 bp, Homo sapien
tctggggtctgagctgtcgggagca

SEQ ID NO: 498359 - DNA, 25 bp, Homo sapien
gtctggggtctgagctgtcgggagc

SEQ ID NO: 498360 - DNA, 25 bp, Homo sapien
gagcacccgcggtctggggtctgag

SEQ ID NO: 498361 - DNA, 25 bp, Homo sapien
agctgtcgggagcacgcgtggtctg

SEQ ID NO: 498362 - DNA, 25 bp, Homo sapien
agctgtcaggagcaccgtggtctgg

SEQ ID NO: 498363 - DNA, 25 bp, Homo sapien
gctgtcgggagcacgcgtggtctgg

SEQ ID NO: 498364 - DNA, 25 bp, Homo sapien
tgagctgtcgggagcacgcgtggtc

SEQ ID NO: 498365 - DNA, 25 bp, Homo sapien
tcaggtagcagcacagggcccagtg

SEQ ID NO: 498366 - DNA, 25 bp, Homo sapien
gtagcagcacagggcccagtggggg

SEQ ID NO: 498367 - DNA, 25 bp, Homo sapien
ctgcagctttcaggtagcagcacag

SEQ ID NO: 498368 - DNA, 25 bp, Homo sapien
aggtagcagcacagggcccagtggg

SEQ ID NO: 498369 - DNA, 25 bp, Homo sapien
ggttgattcagtcccgacgtccaga

SEQ ID NO: 498370 - DNA, 25 bp, Homo sapien
gtgtctgcggctgggcggatgtgag

SEQ ID NO: 498371 - DNA, 25 bp, Homo sapien
tctacttcccaggttgattcagtcc

SEQ ID NO: 498372 - DNA, 25 bp, Homo sapien
atgtgagccacgacttctacttccc

SEQ ID NO: 498373 - DNA, 25 bp, Homo sapien
cagagagaggcacggcacggaggtc

SEQ ID NO: 498374 - DNA, 25 bp, Homo sapien
cgtggagtgatagtctaccagtgcc

SEQ ID NO: 498375 - DNA, 25 bp, Homo sapien
tcttcgtggagtgatagtctaccag

SEQ ID NO: 498376 - DNA, 25 bp, Homo sapien
tcttgagtttcttcgtggagtgata

SEQ ID NO: 498377 - DNA, 25 bp, Homo sapien
taacgagcatttgcatgaaccaagc

SEQ ID NO: 498378 - DNA, 25 bp, Homo sapien
tgggtctggccctggtaacgagcat

SEQ ID NO: 498379 - DNA, 25 bp, Homo sapien
tccttagcacacgagcgagagaata

SEQ ID NO: 498380 - DNA, 25 bp, Homo sapien
tgtctgtcgtatcccagcaagcggg

SEQ ID NO: 498381 - DNA, 25 bp, Homo sapien
cagcttctctgcacgtaaagccagg

SEQ ID NO: 498382 - DNA, 25 bp, Homo sapien
agcttctctgcacgtaaagccaggg

SEQ ID NO: 498383 - DNA, 25 bp, Homo sapien
ctcagcttctctgcacgtaaagcca

SEQ ID NO: 498384 - DNA, 25 bp, Homo sapien
ttctctgcacgtaaagccaggggcc

SEQ ID NO: 498385 - DNA, 25 bp, Homo sapien
tgctcgctgactgtggatgacaccc

SEQ ID NO: 498386 - DNA, 25 bp, Homo sapien
ctgggtctggatgctcgctgactgt

SEQ ID NO: 498387 - DNA, 25 bp, Homo sapien
gagctgttaggtccaagctggtcct

SEQ ID NO: 498388 - DNA, 25 bp, Homo sapien
cacccctacgtgagctgttaggtcc

SEQ ID NO: 498389 - DNA, 25 bp, Homo sapien
tcaccgtccctcagcgagacggtga

SEQ ID NO: 498390 - DNA, 25 bp, Homo sapien
agggccaaggccgtatgctccacgg

SEQ ID NO: 498391 - DNA, 25 bp, Homo sapien
caaggccgtatgctccacggccagg

SEQ ID NO: 498392 - DNA, 25 bp, Homo sapien
accacgtgctcttggccgtcgcaga

SEQ ID NO: 498393 - DNA, 25 bp, Homo sapien
ctctcgagcacggccagcctctcct

SEQ ID NO: 498394 - DNA, 25 bp, Homo sapien
ctcgagcacggccagcctctcctgc

SEQ ID NO: 498395 - DNA, 25 bp, Homo sapien
tctcgagcacggccagcctctcctg

SEQ ID NO: 498396 - DNA, 25 bp, Homo sapien
ccagcaaaggtgagcacggggctcc

SEQ ID NO: 498397 - DNA, 25 bp, Homo sapien
tctgatgggtgtggacgaatgctcc

SEQ ID NO: 498398 - DNA, 25 bp, Homo sapien
ataatagccactaacgacccacctg

SEQ ID NO: 498399 - DNA, 25 bp, Homo sapien
tcttcacccgggttgagcggagcag

SEQ ID NO: 498400 - DNA, 25 bp, Homo sapien
tgaccagcaccgagacaccataata

SEQ ID NO: 498401 - DNA, 25 bp, Homo sapien
tgctgtgtagcccatgggacacggc

SEQ ID NO: 498402 - DNA, 25 bp, Homo sapien
ggctggcggtcactctgttcgctgc

SEQ ID NO: 498403 - DNA, 25 bp, Homo sapien
gacacggcaggacgccctgctggac

SEQ ID NO: 498404 - DNA, 25 bp, Homo sapien
gcggtcactctgttcgctgctaaca

SEQ ID NO: 498405 - DNA, 25 bp, Homo sapien
gcagccgaggacttgccggctccca

SEQ ID NO: 498406 - DNA, 25 bp, Homo sapien
agccgaggacttgccggctcccacg

SEQ ID NO: 498407 - DNA, 25 bp, Homo sapien
ggcagccgaggacttgccggctccc

SEQ ID NO: 498408 - DNA, 25 bp, Homo sapien
gccgaggacttgccggctcccacgt

SEQ ID NO: 498409 - DNA, 25 bp, Homo sapien
cagacagtcccatcggttaaacgtg

SEQ ID NO: 498410 - DNA, 25 bp, Homo sapien
ggccgcagggagagaacaacatatc

SEQ ID NO: 498411 - DNA, 25 bp, Homo sapien
atatcttagctcaccacgtggccgg

SEQ ID NO: 498412 - DNA, 25 bp, Homo sapien
aagagagaaatcctgccgtttgccg

SEQ ID NO: 498413 - DNA, 25 bp, Homo sapien
gatgtcgctgtgcttgtacgccgcc

SEQ ID NO: 498414 - DNA, 25 bp, Homo sapien
cagtgtcatgcagccgcggtagaac

SEQ ID NO: 498415 - DNA, 25 bp, Homo sapien
ccggttgacctccagtgtcatgcag

SEQ ID NO: 498416 - DNA, 25 bp, Homo sapien
aacgcggtgactggcgctgaagtca

SEQ ID NO: 498417 - DNA, 25 bp, Homo sapien
tcctcccggctgtctcggacagaga

SEQ ID NO: 498418 - DNA, 25 bp, Homo sapien
cggctgtctcggacagagactgaga

SEQ ID NO: 498419 - DNA, 25 bp, Homo sapien
agatatgttacaggccgggatggtc

SEQ ID NO: 498420 - DNA, 25 bp, Homo sapien
gtccatctcactatttacagatatg

SEQ ID NO: 498421 - DNA, 25 bp, Homo sapien
gagaattattttcttcgagcccgct

SEQ ID NO: 498422 - DNA, 25 bp, Homo sapien
tattttcttcgagcccgctctgcgc

SEQ ID NO: 498423 - DNA, 25 bp, Homo sapien
gggcccacggctgagtgcgcggcgt

SEQ ID NO: 498424 - DNA, 25 bp, Homo sapien
tagagtcagaaagaagcgcttggta

SEQ ID NO: 498425 - DNA, 25 bp, Homo sapien
aagagctcccaagcagaggcaacta

SEQ ID NO: 498426 - DNA, 25 bp, Homo sapien
agagctcccaagcagaggcaactac

SEQ ID NO: 498427 - DNA, 25 bp, Homo sapien
ccgatggtgccgtggtcttgtgtgg

SEQ ID NO: 498428 - DNA, 25 bp, Homo sapien
tggagctcgggctgtgcccccgaag

SEQ ID NO: 498429 - DNA, 25 bp, Homo sapien
tcagggaaggctctatgggcgccga

SEQ ID NO: 498430 - DNA, 25 bp, Homo sapien
cttgtgtgggcggttcctgggcacc

SEQ ID NO: 498431 - DNA, 25 bp, Homo sapien
cagcgctgtgtctaaccgcctgtga

SEQ ID NO: 498432 - DNA, 25 bp, Homo sapien
gacatgtgttgtgcgttacacgttc

SEQ ID NO: 498433 - DNA, 25 bp, Homo sapien
tgtgctcctgacgtatgccaggaag

SEQ ID NO: 498434 - DNA, 25 bp, Homo sapien
ccaggaagggaaggacgcttcggct

SEQ ID NO: 498435 - DNA, 25 bp, Homo sapien
tttcccgagccgacaactcatccat

SEQ ID NO: 498436 - DNA, 25 bp, Homo sapien
cgatgggttctgcttgtcactggga

SEQ ID NO: 498437 - DNA, 25 bp, Homo sapien
tgttaccgatgggttctgcttgtca

SEQ ID NO: 498438 - DNA, 25 bp, Homo sapien
tctgctgttaccgatgggttctgct

SEQ ID NO: 498439 - DNA, 25 bp, Homo sapien
acgctcgtgcctggtgcgcaggaca

SEQ ID NO: 498440 - DNA, 25 bp, Homo sapien
tgctctgagtctggacgagcaccca

SEQ ID NO: 498441 - DNA, 25 bp, Homo sapien
tttgcaagtgtgaggaggagaccac

SEQ ID NO: 498442 - DNA, 25 bp, Homo sapien
gacaggtccgaacagactcaggctt

SEQ ID NO: 498443 - DNA, 25 bp, Homo sapien
tgagggtcacggtcgatggaactcc

SEQ ID NO: 498444 - DNA, 25 bp, Homo sapien
cagcagttccacgtgagggtcacgg

SEQ ID NO: 498445 - DNA, 25 bp, Homo sapien
acggtcgatggaactcctctctcca

SEQ ID NO: 498446 - DNA, 25 bp, Homo sapien
gggtcacggtcgatggaactcctct

SEQ ID NO: 498447 - DNA, 25 bp, Homo sapien
ctgcgaatccagcgggtagcgttag

SEQ ID NO: 498448 - DNA, 25 bp, Homo sapien
atccagcgggtagcgttagagcctt

SEQ ID NO: 498449 - DNA, 25 bp, Homo sapien
cgaatccagcgggtagcgttagagc

SEQ ID NO: 498450 - DNA, 25 bp, Homo sapien
ttgcgggtgacgataggtgtgcagc

SEQ ID NO: 498451 - DNA, 25 bp, Homo sapien
taccgcctcatcactcacatttaat

SEQ ID NO: 498452 - DNA, 25 bp, Homo sapien
catcggtgactgccaagcgtgggct

SEQ ID NO: 498453 - DNA, 25 bp, Homo sapien
caaggacgcactgacttctgtggac

SEQ ID NO: 498454 - DNA, 25 bp, Homo sapien
tttaatgcaaggtggcatcggtgac

SEQ ID NO: 498455 - DNA, 25 bp, Homo sapien
gcagggaccgtgccggtctgggacc

SEQ ID NO: 498456 - DNA, 25 bp, Homo sapien
tgatgtctgagctctcagaatgtct

SEQ ID NO: 498457 - DNA, 25 bp, Homo sapien
aaagttgccttagaagaaggtgcca

SEQ ID NO: 498458 - DNA, 25 bp, Homo sapien
tatgtattttggaagggcacgtgct

SEQ ID NO: 498459 - DNA, 25 bp, Homo sapien
gaatgtctcgtctgatctgctgtgg

SEQ ID NO: 498460 - DNA, 25 bp, Homo sapien
ctctggaaggactcagcttgccagc

SEQ ID NO: 498461 - DNA, 25 bp, Homo sapien
tggaaggactcagcttgccagctct

SEQ ID NO: 498462 - DNA, 25 bp, Homo sapien
tcagagaacgctctggaaggactca

SEQ ID NO: 498463 - DNA, 25 bp, Homo sapien
ggaaggactcagcttgccagctctg

SEQ ID NO: 498464 - DNA, 25 bp, Homo sapien
cacagttgtgcggattagaaggatg

SEQ ID NO: 498465 - DNA, 25 bp, Homo sapien
aaggatgggtcgagcgaaagaactt

SEQ ID NO: 498466 - DNA, 25 bp, Homo sapien
tggaagctttaaagtgattttcttc

SEQ ID NO: 498467 - DNA, 25 bp, Homo sapien
cgagcgaaagaactttggaagcttt

SEQ ID NO: 498468 - DNA, 25 bp, Homo sapien
cagatttgggcttggtgacccagga

SEQ ID NO: 498469 - DNA, 25 bp, Homo sapien
gctgcaggtgccgtccactctctcc

SEQ ID NO: 498470 - DNA, 25 bp, Homo sapien
gggcagatttgggcttggtgaccca

SEQ ID NO: 498471 - DNA, 25 bp, Homo sapien
gcagatttgggcttggtgacccagg

SEQ ID NO: 498472 - DNA, 25 bp, Homo sapien
tgctcacagaaaccgatgataggtg

SEQ ID NO: 498473 - DNA, 25 bp, Homo sapien
tgcggcttctcttctccgtttgctc

SEQ ID NO: 498474 - DNA, 25 bp, Homo sapien
tgtagggtgtagacagtggcgacca

SEQ ID NO: 498475 - DNA, 25 bp, Homo sapien
tgataggtgaaatgagcaggtcaaa

SEQ ID NO: 498476 - DNA, 25 bp, Homo sapien
tgcaaacctgctagctccacagtca

SEQ ID NO: 498477 - DNA, 25 bp, Homo sapien
acagtcagccacgtgcacgcgcagg

SEQ ID NO: 498478 - DNA, 25 bp, Homo sapien
gggtgttttcggaagagctacattg

SEQ ID NO: 498479 - DNA, 25 bp, Homo sapien
cacgtgcacgcgcaggggtgttttc

SEQ ID NO: 498480 - DNA, 25 bp, Homo sapien
tgttgtctttagcaaatgcatgagc

SEQ ID NO: 498481 - DNA, 25 bp, Homo sapien
tttagcaaatgcatgagcaaagaga

SEQ ID NO: 498482 - DNA, 25 bp, Homo sapien
catgagcaaagagaggtcttagacc

SEQ ID NO: 498483 - DNA, 25 bp, Homo sapien
cttgctgttgtctttagcaaatgca

SEQ ID NO: 498484 - DNA, 25 bp, Homo sapien
tagggtctcatgtttgctcctcgtc

SEQ ID NO: 498485 - DNA, 25 bp, Homo sapien
actcagctggcactagggtctcatg

SEQ ID NO: 498486 - DNA, 25 bp, Homo sapien
ccagctgcggtttctgactcagctg

SEQ ID NO: 498487 - DNA, 25 bp, Homo sapien
gctggcactagggtctcatgtttgc

SEQ ID NO: 498488 - DNA, 25 bp, Homo sapien
cctgacattaggtttttgttgatct

SEQ ID NO: 498489 - DNA, 25 bp, Homo sapien
ctgtaatgatatgacgatgatcacc

SEQ ID NO: 498490 - DNA, 25 bp, Homo sapien
gatcacctgtggtactgtggcatct

SEQ ID NO: 498491 - DNA, 25 bp, Homo sapien
ggcatcttctgggtgagtccggatt

SEQ ID NO: 498492 - DNA, 25 bp, Homo sapien
cttctcctgggtgagtctcgatttc

SEQ ID NO: 498493 - DNA, 25 bp, Homo sapien
tctcctgggtgagtctcgatttcac

SEQ ID NO: 498494 - DNA, 25 bp, Homo sapien
gtcttctcctgggtgagtctcgatt

SEQ ID NO: 498495 - DNA, 25 bp, Homo sapien
ctgtggtactgtggcgtcttctcct

SEQ ID NO: 498496 - DNA, 25 bp, Homo sapien
agagaggagcccacagctgcctgtg

SEQ ID NO: 498497 - DNA, 25 bp, Homo sapien
tcacagagaggagcccacagctgcc

SEQ ID NO: 498498 - DNA, 25 bp, Homo sapien
gagaggagcccacagctgcctgtgc

SEQ ID NO: 498499 - DNA, 25 bp, Homo sapien
acagagaggagcccacagctgcctg

SEQ ID NO: 498500 - DNA, 25 bp, Homo sapien
tctcccatcctgatgcgtgagctgg

SEQ ID NO: 498501 - DNA, 25 bp, Homo sapien
ggttgtctcccatcctgatgcgtga

SEQ ID NO: 498502 - DNA, 25 bp, Homo sapien
ccatcctgatgcgtgagctggtggt

SEQ ID NO: 498503 - DNA, 25 bp, Homo sapien
ccttggttgtctcccatcctgatgc

SEQ ID NO: 498504 - DNA, 25 bp, Homo sapien
ccgacagctacgtccagcccagaca

SEQ ID NO: 498505 - DNA, 25 bp, Homo sapien
tctcttctgcgggcggcacctgctt

SEQ ID NO: 498506 - DNA, 25 bp, Homo sapien
tcgtcctcccgacagctacgtccag

SEQ ID NO: 498507 - DNA, 25 bp, Homo sapien
cttcctgtcgtcctcccgacagcta

SEQ ID NO: 498508 - DNA, 25 bp, Homo sapien
agccatgtgcggcctgtgagctgaa

SEQ ID NO: 498509 - DNA, 25 bp, Homo sapien
tcctccatgcaaacgcctcaggcca

SEQ ID NO: 498510 - DNA, 25 bp, Homo sapien
cagccatgtgcggcctgtgagctga

SEQ ID NO: 498511 - DNA, 25 bp, Homo sapien
caggacaccagtccacacctcctcc

SEQ ID NO: 498512 - DNA, 25 bp, Homo sapien
tcctgtggccctgatgaggccccag

SEQ ID NO: 498513 - DNA, 25 bp, Homo sapien
gagtggagcacaggcggagcatggg

SEQ ID NO: 498514 - DNA, 25 bp, Homo sapien
ctgagggagtggagcacaggcggag

SEQ ID NO: 498515 - DNA, 25 bp, Homo sapien
cacaggcggccacactcgctgggca

SEQ ID NO: 498516 - DNA, 25 bp, Homo sapien
gagcacaggcggagcatgggcacag

SEQ ID NO: 498517 - DNA, 25 bp, Homo sapien
ctggaggacaggcgttgagtgggcc

SEQ ID NO: 498518 - DNA, 25 bp, Homo sapien
ggaggacaggcgttgagtgggcccc

SEQ ID NO: 498519 - DNA, 25 bp, Homo sapien
tgggccccatccacttgccatccaa

SEQ ID NO: 498520 - DNA, 25 bp, Homo sapien
gtgggccccatccacttgccatcca

SEQ ID NO: 498521 - DNA, 25 bp, Homo sapien
ggctctgcgggtcaccggtgaggac

SEQ ID NO: 498522 - DNA, 25 bp, Homo sapien
cccagggcaagagcccgtgccaagg

SEQ ID NO: 498523 - DNA, 25 bp, Homo sapien
ggtttctgggatccctggatggcag

SEQ ID NO: 498524 - DNA, 25 bp, Homo sapien
ctgtgagggtctccgcccctttggg

SEQ ID NO: 498525 - DNA, 25 bp, Homo sapien
tggccttcgtccctggataaaatgc

SEQ ID NO: 498526 - DNA, 25 bp, Homo sapien
tcttgaggtagggatgtctggcctt

SEQ ID NO: 498527 - DNA, 25 bp, Homo sapien
ctcagtggttgaggttcttgaggta

SEQ ID NO: 498528 - DNA, 25 bp, Homo sapien
ggatgtctggccttcgtccctggat

SEQ ID NO: 498529 - DNA, 25 bp, Homo sapien
agccatgctcaggggcatctcaggc

SEQ ID NO: 498530 - DNA, 25 bp, Homo sapien
aggagccatgctcaggggcatctca

SEQ ID NO: 498531 - DNA, 25 bp, Homo sapien
ccaggagccatgctcaggggcatct

SEQ ID NO: 498532 - DNA, 25 bp, Homo sapien
gagccatgctcaggggcatctcagg

SEQ ID NO: 498533 - DNA, 25 bp, Homo sapien
ttaggcctcggcacggtcgttggca

SEQ ID NO: 498534 - DNA, 25 bp, Homo sapien
gagcaagagccgtcttaggcctcgg

SEQ ID NO: 498535 - DNA, 25 bp, Homo sapien
cacctgcgtgggagcaagagccgtc

SEQ ID NO: 498536 - DNA, 25 bp, Homo sapien
tcggcacggtcgttggcaggtccat

SEQ ID NO: 498537 - DNA, 25 bp, Homo sapien
gtcctcatagtcaccgtcgggctgg

SEQ ID NO: 498538 - DNA, 25 bp, Homo sapien
caccaggacggagaatgtgaccgtt

SEQ ID NO: 498539 - DNA, 25 bp, Homo sapien
tacccagggatcattgtgagtgcgc

SEQ ID NO: 498540 - DNA, 25 bp, Homo sapien
aagaagacgtcgctctggtttgtgg

SEQ ID NO: 498541 - DNA, 25 bp, Homo sapien
gacaatgtctgcacggccgtcatcg

SEQ ID NO: 498542 - DNA, 25 bp, Homo sapien
gaagtgtaaatcttcagatgcggac

SEQ ID NO: 498543 - DNA, 25 bp, Homo sapien
ttgccttgccattgagctctgctga

SEQ ID NO: 498544 - DNA, 25 bp, Homo sapien
ccttctagggtgtggacaatgtctg

SEQ ID NO: 498545 - DNA, 25 bp, Homo sapien
tgtaacaatcccttccttgggtgcg

SEQ ID NO: 498546 - DNA, 25 bp, Homo sapien
gaggatgtaacaatcccttccttgg

SEQ ID NO: 498547 - DNA, 25 bp, Homo sapien
caatcccttccttgggtgcgataac

SEQ ID NO: 498548 - DNA, 25 bp, Homo sapien
tttctgaggatgtaacaatcccttc

SEQ ID NO: 498549 - DNA, 25 bp, Homo sapien
tgcctgtgggtgacacatccggagc

SEQ ID NO: 498550 - DNA, 25 bp, Homo sapien
tctgcctctcacatgcgaggatgct

SEQ ID NO: 498551 - DNA, 25 bp, Homo sapien
tgtctgtctggtgtcccctctgcct

SEQ ID NO: 498552 - DNA, 25 bp, Homo sapien
tttccaatgcctgcagcgtgtgcct

SEQ ID NO: 498553 - DNA, 25 bp, Homo sapien
gtgtgtctggaggtagattgtgggt

SEQ ID NO: 498554 - DNA, 25 bp, Homo sapien
gtgtctggaggtagattgtgggttt

SEQ ID NO: 498555 - DNA, 25 bp, Homo sapien
ggtgtgtctggaggtagattgtggg

SEQ ID NO: 498556 - DNA, 25 bp, Homo sapien
tgtgtctggaggtagattgtgggtt

SEQ ID NO: 498557 - DNA, 25 bp, Homo sapien
cacggtgtccgtgtatctgcaaaca

SEQ ID NO: 498558 - DNA, 25 bp, Homo sapien
cgtgtaatcacctcctactgtttca

SEQ ID NO: 498559 - DNA, 25 bp, Homo sapien
catatcctataaccagtttctcagc

SEQ ID NO: 498560 - DNA, 25 bp, Homo sapien
aacatgactcatggtgtccgtgtaa

SEQ ID NO: 498561 - DNA, 25 bp, Homo sapien
ccgtgtatctgcacacatgactcaa

SEQ ID NO: 498562 - DNA, 25 bp, Homo sapien
gcacacatgactcaacgtgtccgtg

SEQ ID NO: 498563 - DNA, 25 bp, Homo sapien
ccgtgtatctgcacacatgactcac

SEQ ID NO: 498564 - DNA, 25 bp, Homo sapien
gactcaacgtgtccgtgtatctgca

SEQ ID NO: 498565 - DNA, 25 bp, Homo sapien
ggtgtccatgtatctgcacacgaga

SEQ ID NO: 498566 - DNA, 25 bp, Homo sapien
gacggtgtccatgtatctgcacacg

SEQ ID NO: 498567 - DNA, 25 bp, Homo sapien
tgtccatgtatctgcacacgagact

SEQ ID NO: 498568 - DNA, 25 bp, Homo sapien
ccatgtatctgcacacgagactcac

SEQ ID NO: 498569 - DNA, 25 bp, Homo sapien
atgggttagagatctgaggaccacg

SEQ ID NO: 498570 - DNA, 25 bp, Homo sapien
gaaccccggtatctctgagtgagta

SEQ ID NO: 498571 - DNA, 25 bp, Homo sapien
agtcatggggaaccccggtatctct

SEQ ID NO: 498572 - DNA, 25 bp, Homo sapien
tgttgcaggaatgggttagagatct

SEQ ID NO: 498573 - DNA, 25 bp, Homo sapien
agttcccattccaagctgcccaaat

SEQ ID NO: 498574 - DNA, 25 bp, Homo sapien
agaccaccagttcccattccaagct

SEQ ID NO: 498575 - DNA, 25 bp, Homo sapien
ctgtggtctaggaagaccaccagtt

SEQ ID NO: 498576 - DNA, 25 bp, Homo sapien
caagctgcccaaatagctgcgaaat

SEQ ID NO: 498577 - DNA, 25 bp, Homo sapien
ggccccactcgtggcttctctgttg

SEQ ID NO: 498578 - DNA, 25 bp, Homo sapien
tgggccccactcgtggcttctctgt

SEQ ID NO: 498579 - DNA, 25 bp, Homo sapien
cgtggcttctctgttgggggcagcc

SEQ ID NO: 498580 - DNA, 25 bp, Homo sapien
ctctgggccccactcgtggcttctc

SEQ ID NO: 498581 - DNA, 25 bp, Homo sapien
tgcacccacaggtgcccggatgtgt

SEQ ID NO: 498582 - DNA, 25 bp, Homo sapien
cttggtgggctccatgacatgccca

SEQ ID NO: 498583 - DNA, 25 bp, Homo sapien
tggccgacttcacgggggcaccagt

SEQ ID NO: 498584 - DNA, 25 bp, Homo sapien
ccggatgtgtgagacgccgcgtcca

SEQ ID NO: 498585 - DNA, 25 bp, Homo sapien
gcttgtcctgtctggcaaagatgtc

SEQ ID NO: 498586 - DNA, 25 bp, Homo sapien
agggaggccgggcttctgtgtggcc

SEQ ID NO: 498587 - DNA, 25 bp, Homo sapien
actgcacgatgggaggtgccgcagc

SEQ ID NO: 498588 - DNA, 25 bp, Homo sapien
gctggatttgcccaaaactgcacga

SEQ ID NO: 498589 - DNA, 25 bp, Homo sapien
caaggaacctgcgtagctggtgttt

SEQ ID NO: 498590 - DNA, 25 bp, Homo sapien
gacacggttggcttctaaaccgcga

SEQ ID NO: 498591 - DNA, 25 bp, Homo sapien
tgtttccaggtgtgccgaacggacg

SEQ ID NO: 498592 - DNA, 25 bp, Homo sapien
taaaccgcgaaacgtgtaggctgcc

SEQ ID NO: 498593 - DNA, 25 bp, Homo sapien
cggagccccggccacatcagggttt

SEQ ID NO: 498594 - DNA, 25 bp, Homo sapien
tcagggtttcgtcctggcgccgtgt

SEQ ID NO: 498595 - DNA, 25 bp, Homo sapien
gcgctgggccggcagcatttgcacc

SEQ ID NO: 498596 - DNA, 25 bp, Homo sapien
tgtgcagttcacaccgtcggcccgg

SEQ ID NO: 498597 - DNA, 25 bp, Homo sapien
ggtcagcccctccaagaggaagtag

SEQ ID NO: 498598 - DNA, 25 bp, Homo sapien
aggtcagcccctccaagaggaagta

SEQ ID NO: 498599 - DNA, 25 bp, Homo sapien
gaggactgccttggttttccagtgg

SEQ ID NO: 498600 - DNA, 25 bp, Homo sapien
gctggtgacagttgacgcctcatga

SEQ ID NO: 498601 - DNA, 25 bp, Homo sapien
gatgccaagtgacgtccctggtgat

SEQ ID NO: 498602 - DNA, 25 bp, Homo sapien
gagcaggatgacattgctgatgcca

SEQ ID NO: 498603 - DNA, 25 bp, Homo sapien
gacttttggacacacagctgttggg

SEQ ID NO: 498604 - DNA, 25 bp, Homo sapien
acagcacgacgtatccttgtaccga

SEQ ID NO: 498605 - DNA, 25 bp, Homo sapien
gtattgcacctgtgttatgaacccc

SEQ ID NO: 498606 - DNA, 25 bp, Homo sapien
gggaagcgccgtttaaatacacagc

SEQ ID NO: 498607 - DNA, 25 bp, Homo sapien
tccacagagtcccttggagggaaag

SEQ ID NO: 498608 - DNA, 25 bp, Homo sapien
gcagaattacacagaagtcccagtc

SEQ ID NO: 498609 - DNA, 25 bp, Homo sapien
gaagcccacatcgttttgctgttga

SEQ ID NO: 498610 - DNA, 25 bp, Homo sapien
agtcccagtctgaggatgtccttgg

SEQ ID NO: 498611 - DNA, 25 bp, Homo sapien
aagtgagccagtgcaaccagaagcg

SEQ ID NO: 498612 - DNA, 25 bp, Homo sapien
gccaaggactggatcgacattctca

SEQ ID NO: 498613 - DNA, 25 bp, Homo sapien
tacatccaggccaacaactgcgtgg

SEQ ID NO: 498614 - DNA, 25 bp, Homo sapien
gagacctcatgtgcgctgtcctgag

SEQ ID NO: 498615 - DNA, 25 bp, Homo sapien
ctcccactcccgctcggggctttgc

SEQ ID NO: 498616 - DNA, 25 bp, Homo sapien
ctcccgctcggggctttgctctgcc

SEQ ID NO: 498617 - DNA, 25 bp, Homo sapien
cccactcccgctcggggctttgctc

SEQ ID NO: 498618 - DNA, 25 bp, Homo sapien
cactcccgctcggggctttgctctg

SEQ ID NO: 498619 - DNA, 25 bp, Homo sapien
tgttgttatacagagagccgtgcac

SEQ ID NO: 498620 - DNA, 25 bp, Homo sapien
tattacaaaggaggcagtagccgcc

SEQ ID NO: 498621 - DNA, 25 bp, Homo sapien
ccgtgcacgtcagatgtgtggcttc

SEQ ID NO: 498622 - DNA, 25 bp, Homo sapien
tcccggtgacctgatttcttccaac

SEQ ID NO: 498623 - DNA, 25 bp, Homo sapien
ggtgcgtggggggaatatccaggcc

SEQ ID NO: 498624 - DNA, 25 bp, Homo sapien
tcactctaggctgcagtcgtggagc

SEQ ID NO: 498625 - DNA, 25 bp, Homo sapien
ctctaggctgcagtcgtggagccct

SEQ ID NO: 498626 - DNA, 25 bp, Homo sapien
tcaggaacgcggtgcgtggggggaa

SEQ ID NO: 498627 - DNA, 25 bp, Homo sapien
gaagaacgtaagtatcgactcaccc

SEQ ID NO: 498628 - DNA, 25 bp, Homo sapien
ttaaaattgagatagaacccacatg

SEQ ID NO: 498629 - DNA, 25 bp, Homo sapien
cagacttggccattagcgattttaa

SEQ ID NO: 498630 - DNA, 25 bp, Homo sapien
caataaaggcgttcggtgcattcac

SEQ ID NO: 498631 - DNA, 25 bp, Homo sapien
caaacgttgggtttctctgagtccg

SEQ ID NO: 498632 - DNA, 25 bp, Homo sapien
tccctgtggatatgaacctccgtcc

SEQ ID NO: 498633 - DNA, 25 bp, Homo sapien
cagggcagttcgatgccttcgggcc

SEQ ID NO: 498634 - DNA, 25 bp, Homo sapien
tcagagctgacgtttgaggcgtccc

SEQ ID NO: 498635 - DNA, 25 bp, Homo sapien
cctggcacgcggcaccaagaagggt

SEQ ID NO: 498636 - DNA, 25 bp, Homo sapien
gtctgagctgaaagagcgttctggt

SEQ ID NO: 498637 - DNA, 25 bp, Homo sapien
tggcacgcggcaccaagaagggtct

SEQ ID NO: 498638 - DNA, 25 bp, Homo sapien
gcacgcggcaccaagaagggtctga

SEQ ID NO: 498639 - DNA, 25 bp, Homo sapien
cttgtgctcggagtgagcgcggtct

SEQ ID NO: 498640 - DNA, 25 bp, Homo sapien
catggattttgggttgtgcgtgttc

SEQ ID NO: 498641 - DNA, 25 bp, Homo sapien
gattttgggttgtgcgtgttcgccc

SEQ ID NO: 498642 - DNA, 25 bp, Homo sapien
tgtgctcggagtgagcgcggtctct

SEQ ID NO: 498643 - DNA, 25 bp, Homo sapien
ccttgactgggaataacgatgagca

SEQ ID NO: 498644 - DNA, 25 bp, Homo sapien
ggctccgactgtggctaaagacgta

SEQ ID NO: 498645 - DNA, 25 bp, Homo sapien
gatgagcagattgcgtgttcgccca

SEQ ID NO: 498646 - DNA, 25 bp, Homo sapien
taaagacgtagatcgggcttcggcc

SEQ ID NO: 498647 - DNA, 25 bp, Homo sapien
tgcagcacgtggacgctgactcgga

SEQ ID NO: 498648 - DNA, 25 bp, Homo sapien
agcacgtggacgctgactcggaagt

SEQ ID NO: 498649 - DNA, 25 bp, Homo sapien
acgtggacgctgactcggaagtgca

SEQ ID NO: 498650 - DNA, 25 bp, Homo sapien
acgctgactcggaagtgcaggtgag

SEQ ID NO: 498651 - DNA, 25 bp, Homo sapien
tgtgcccgtggtgaagtcttctctg

SEQ ID NO: 498652 - DNA, 25 bp, Homo sapien
gaaggaggacttgcagaagtaccac

SEQ ID NO: 498653 - DNA, 25 bp, Homo sapien
tgcagaagtaccacaacagggacac

SEQ ID NO: 498654 - DNA, 25 bp, Homo sapien
ctgtgcccgtggtgaagtcttctct

SEQ ID NO: 498655 - DNA, 25 bp, Homo sapien
tcctgctgtgagaactggccacgga

SEQ ID NO: 498656 - DNA, 25 bp, Homo sapien
cattgccgatggagcggacgttcgc

SEQ ID NO: 498657 - DNA, 25 bp, Homo sapien
ggacgttcgcgccttcacagcgaag

SEQ ID NO: 498658 - DNA, 25 bp, Homo sapien
tggccacggaccacagtgaaagtga

SEQ ID NO: 498659 - DNA, 25 bp, Homo sapien
ggatgggcacacgtttgccgcgcct

SEQ ID NO: 498660 - DNA, 25 bp, Homo sapien
tgggcacacgtttgccgcgcctcgg

SEQ ID NO: 498661 - DNA, 25 bp, Homo sapien
cgtttgccgcgcctcgggaatgttt

SEQ ID NO: 498662 - DNA, 25 bp, Homo sapien
tgggatgggcacacgtttgccgcgc

SEQ ID NO: 498663 - DNA, 25 bp, Homo sapien
ggtgggtggcgtggtccgcagtgtg

SEQ ID NO: 498664 - DNA, 25 bp, Homo sapien
gtgccatgaagggacgcaggatggg

SEQ ID NO: 498665 - DNA, 25 bp, Homo sapien
caggatgggagatggctcggtgccc

SEQ ID NO: 498666 - DNA, 25 bp, Homo sapien
tggtgggtggcgtggtccgcagtgt

SEQ ID NO: 498667 - DNA, 25 bp, Homo sapien
cgctgtcccatagggtctggagctg

SEQ ID NO: 498668 - DNA, 25 bp, Homo sapien
gagctgggcgtgtctcagaccctct

SEQ ID NO: 498669 - DNA, 25 bp, Homo sapien
gtgtctcagaccctctgagtttgca

SEQ ID NO: 498670 - DNA, 25 bp, Homo sapien
cttgcgctgtcccatagggtctgga

SEQ ID NO: 498671 - DNA, 25 bp, Homo sapien
gccctggctgtgagcgggggtcccg

SEQ ID NO: 498672 - DNA, 25 bp, Homo sapien
ccctggctgtgagcgggggtcccgg

SEQ ID NO: 498673 - DNA, 25 bp, Homo sapien
gatcttaggaacccatgagtgcctg

SEQ ID NO: 498674 - DNA, 25 bp, Homo sapien
ctgatcttaggaacccatgagtgcc

SEQ ID NO: 498675 - DNA, 25 bp, Homo sapien
atcttaggaacccatgagtgcctgt

SEQ ID NO: 498676 - DNA, 25 bp, Homo sapien
tgatcttaggaacccatgagtgcct

SEQ ID NO: 498677 - DNA, 25 bp, Homo sapien
agtggtggtttcagcgtcccgtgca

SEQ ID NO: 498678 - DNA, 25 bp, Homo sapien
cattagaggccattggagggagtcc

SEQ ID NO: 498679 - DNA, 25 bp, Homo sapien
accctcgtggtctgcgccattagag

SEQ ID NO: 498680 - DNA, 25 bp, Homo sapien
gagtccacgtggtgtgtcactggat

SEQ ID NO: 498681 - DNA, 25 bp, Homo sapien
gaaagtcttgcctattccacggttg

SEQ ID NO: 498682 - DNA, 25 bp, Homo sapien
tgaaagacgacccttcctccgttga

SEQ ID NO: 498683 - DNA, 25 bp, Homo sapien
aaagcatgtgctttcagcgttcaca

SEQ ID NO: 498684 - DNA, 25 bp, Homo sapien
ttccggcacccttggctgaaagacg

SEQ ID NO: 498685 - DNA, 25 bp, Homo sapien
tccttcgggattccaggcgcaggga

SEQ ID NO: 498686 - DNA, 25 bp, Homo sapien
ggcgcaggctccttcgggattccag

SEQ ID NO: 498687 - DNA, 25 bp, Homo sapien
acagaccggaaactatggctccccg

SEQ ID NO: 498688 - DNA, 25 bp, Homo sapien
atgcgggaaccacggaaatgcgcga

SEQ ID NO: 498689 - DNA, 25 bp, Homo sapien
gctgcagtcagctcccgccacagca

SEQ ID NO: 498690 - DNA, 25 bp, Homo sapien
gcggcgtgaccgtagcctcctctgt

SEQ ID NO: 498691 - DNA, 25 bp, Homo sapien
tcccgggcggcgtgaccgtagcctc

SEQ ID NO: 498692 - DNA, 25 bp, Homo sapien
ctgcagtcagctcccgccacagcag

SEQ ID NO: 498693 - DNA, 25 bp, Homo sapien
tgtgctcagttgcaagttcaggtcc

SEQ ID NO: 498694 - DNA, 25 bp, Homo sapien
ccaggagtgagaggtgcactggcag

SEQ ID NO: 498695 - DNA, 25 bp, Homo sapien
ttggggacgggagggcatcttcagc

SEQ ID NO: 498696 - DNA, 25 bp, Homo sapien
acagctgtgctcagttgcaagttca

SEQ ID NO: 498697 - DNA, 25 bp, Homo sapien
tcctggctgcgtggttctcctggtt

SEQ ID NO: 498698 - DNA, 25 bp, Homo sapien
ttctgggtggaagtgcgcggtggcc

SEQ ID NO: 498699 - DNA, 25 bp, Homo sapien
ttaccgggcatgaaacaccaggttc

SEQ ID NO: 498700 - DNA, 25 bp, Homo sapien
tcctggttctcgtttctagcagccg

SEQ ID NO: 498701 - DNA, 25 bp, Homo sapien
gaaaatgggtggctgtctggatctc

SEQ ID NO: 498702 - DNA, 25 bp, Homo sapien
tacgattatggtgactggacttaga

SEQ ID NO: 498703 - DNA, 25 bp, Homo sapien
tggacttagatgtttcactgtggct

SEQ ID NO: 498704 - DNA, 25 bp, Homo sapien
gtagttcttggtggctttacgatta

SEQ ID NO: 498705 - DNA, 25 bp, Homo sapien
tattaatcattctgttgacgtcgtc

SEQ ID NO: 498706 - DNA, 25 bp, Homo sapien
attaatcattctgttgacgtcgtct

SEQ ID NO: 498707 - DNA, 25 bp, Homo sapien
ttaatcattctgttgacgtcgtctg

SEQ ID NO: 498708 - DNA, 25 bp, Homo sapien
caagttagttctggagttatatgct

SEQ ID NO: 498709 - DNA, 25 bp, Homo sapien
tcaagttagttctggagttatatgc

SEQ ID NO: 498710 - DNA, 25 bp, Homo sapien
ttttgcacattttagtaagagaagc

SEQ ID NO: 498711 - DNA, 25 bp, Homo sapien
atttttgcacattttagtaagagaa

SEQ ID NO: 498712 - DNA, 25 bp, Homo sapien
tttgcacattttagtaagagaagct

SEQ ID NO: 498713 - DNA, 25 bp, Homo sapien
tgcacattttagtaagagaagctga

SEQ ID NO: 498714 - DNA, 25 bp, Homo sapien
ctctccccgaggagtgagggcggct

SEQ ID NO: 498715 - DNA, 25 bp, Homo sapien
ggtctctccccgaggagtgagggcg

SEQ ID NO: 498716 - DNA, 25 bp, Homo sapien
aggagcgaggactctaagtacagtc

SEQ ID NO: 498717 - DNA, 25 bp, Homo sapien
agcgaggactctaagtacagtcagc

SEQ ID NO: 498718 - DNA, 25 bp, Homo sapien
acagcagcaggacttggtccctggg

SEQ ID NO: 498719 - DNA, 25 bp, Homo sapien
agggtgcccatgaccagtcctccga

SEQ ID NO: 498720 - DNA, 25 bp, Homo sapien
cattgtcgggcaggcgaggacgggc

SEQ ID NO: 498721 - DNA, 25 bp, Homo sapien
gggtcggcatagtccagggtgccca

SEQ ID NO: 498722 - DNA, 25 bp, Homo sapien
cctgaattaggttggggggagcagc

SEQ ID NO: 498723 - DNA, 25 bp, Homo sapien
atgcaggagggcctgacggcggctc

SEQ ID NO: 498724 - DNA, 25 bp, Homo sapien
agatgcaggagggcctgacggcggc

SEQ ID NO: 498725 - DNA, 25 bp, Homo sapien
ggcctgaattaggttggggggagca

SEQ ID NO: 498726 - DNA, 25 bp, Homo sapien
agaactgaattcctgtcgtccccat

SEQ ID NO: 498727 - DNA, 25 bp, Homo sapien
tcgtccccatgaggacaaccaggat

SEQ ID NO: 498728 - DNA, 25 bp, Homo sapien
caaccaggatttgctcggcaccgtg

SEQ ID NO: 498729 - DNA, 25 bp, Homo sapien
acctgtggaggcttgggtgaccttc

SEQ ID NO: 498730 - DNA, 25 bp, Homo sapien
gggactcatcggccgcctgtgcctg

SEQ ID NO: 498731 - DNA, 25 bp, Homo sapien
gaggttgctcgtattctgtgagtac

SEQ ID NO: 498732 - DNA, 25 bp, Homo sapien
tgatgcagggggttctctcagccgc

SEQ ID NO: 498733 - DNA, 25 bp, Homo sapien
cacaggaactcagccggcggagagc

SEQ ID NO: 498734 - DNA, 25 bp, Homo sapien
cacgtgtaacactggcgccgtttag

SEQ ID NO: 498735 - DNA, 25 bp, Homo sapien
actggcgccgtttagtgtggacgct

SEQ ID NO: 498736 - DNA, 25 bp, Homo sapien
acgtgtaacactggcgccgtttagt

SEQ ID NO: 498737 - DNA, 25 bp, Homo sapien
taacactggcgccgtttagtgtgga

SEQ ID NO: 498738 - DNA, 25 bp, Homo sapien
tgtggcgccgtttagcgtggacgcc

SEQ ID NO: 498739 - DNA, 25 bp, Homo sapien
gtgtaagactgtggcgccgtttagc

SEQ ID NO: 498740 - DNA, 25 bp, Homo sapien
gcgccgtttagcgtggacgccggca

SEQ ID NO: 498741 - DNA, 25 bp, Homo sapien
taagactgtggcgccgtttagcgtg

SEQ ID NO: 498742 - DNA, 25 bp, Homo sapien
gaagtgcatgtaggcggcggtcccc

SEQ ID NO: 498743 - DNA, 25 bp, Homo sapien
ggcggtccccctgcgtggactcgca

SEQ ID NO: 498744 - DNA, 25 bp, Homo sapien
tgtccaggaagtgcatgtaggcggc

SEQ ID NO: 498745 - DNA, 25 bp, Homo sapien
ccccctgcgtggactcgcacgagtg

SEQ ID NO: 498746 - DNA, 25 bp, Homo sapien
cctcctgcttagtttgaggaggaga

SEQ ID NO: 498747 - DNA, 25 bp, Homo sapien
ctgtccttggtggtgcgtggatgtg

SEQ ID NO: 498748 - DNA, 25 bp, Homo sapien
gcttagtttgaggaggagatgctcc

SEQ ID NO: 498749 - DNA, 25 bp, Homo sapien
tggatgtgaactggtgttggctaaa

SEQ ID NO: 498750 - DNA, 25 bp, Homo sapien
tgtagacaatgtcccgagcgtggac

SEQ ID NO: 498751 - DNA, 25 bp, Homo sapien
gacaatgtcccgagcgtggacatca

SEQ ID NO: 498752 - DNA, 25 bp, Homo sapien
gcgtggacatcaccgtcccattttc

SEQ ID NO: 498753 - DNA, 25 bp, Homo sapien
ctgtgtgtagacaatgtcccgagcg

SEQ ID NO: 498754 - DNA, 25 bp, Homo sapien
gtcaccatcccgttttcccgcatgt

SEQ ID NO: 498755 - DNA, 25 bp, Homo sapien
tgtggagaacgtcccgagcgtgtac

SEQ ID NO: 498756 - DNA, 25 bp, Homo sapien
cctgagcgtgtacatcactgtccca

SEQ ID NO: 498757 - DNA, 25 bp, Homo sapien
ttcccatgtgtagagaatgtcctga

SEQ ID NO: 498758 - DNA, 25 bp, Homo sapien
gcagcgggtgctgctgggaacgcct

SEQ ID NO: 498759 - DNA, 25 bp, Homo sapien
cacgggaggcgttgtccagaccctg

SEQ ID NO: 498760 - DNA, 25 bp, Homo sapien
gcgcggacacgggaggcgttgtcca

SEQ ID NO: 498761 - DNA, 25 bp, Homo sapien
cagtgcctcaggttaatattgtgga

SEQ ID NO: 498762 - DNA, 25 bp, Homo sapien
ggatccggccttttcatgtcgtacg

SEQ ID NO: 498763 - DNA, 25 bp, Homo sapien
tccacagaaagcttgtgtgtttccg

SEQ ID NO: 498764 - DNA, 25 bp, Homo sapien
cgtctgtcttacagggactccacag

SEQ ID NO: 498765 - DNA, 25 bp, Homo sapien
tgtgtttccgtcctgcagtgtccgc

SEQ ID NO: 498766 - DNA, 25 bp, Homo sapien
gcccagaagggctgccgtgggcgtg

SEQ ID NO: 498767 - DNA, 25 bp, Homo sapien
ggcccagaagggctgccgtgggcgt

SEQ ID NO: 498768 - DNA, 25 bp, Homo sapien
gtgttgagcagtacatgaggccagc

SEQ ID NO: 498769 - DNA, 25 bp, Homo sapien
tccgccctcttcactgggcgctgag

SEQ ID NO: 498770 - DNA, 25 bp, Homo sapien
gagctgctgagcgcctgggagacgc

SEQ ID NO: 498771 - DNA, 25 bp, Homo sapien
cctccgccctcttcactgggcgctg

SEQ ID NO: 498772 - DNA, 25 bp, Homo sapien
ctgagcgcctgggagacgcccgctg

SEQ ID NO: 498773 - DNA, 25 bp, Homo sapien
tggaaggagctccactgagacttgg

SEQ ID NO: 498774 - DNA, 25 bp, Homo sapien
ctctgaggcaggctcgttcctgctg

SEQ ID NO: 498775 - DNA, 25 bp, Homo sapien
tccaaggccctctgataagttgtct

SEQ ID NO: 498776 - DNA, 25 bp, Homo sapien
gctgtgtgtgttgctgcctccggcc

SEQ ID NO: 498777 - DNA, 25 bp, Homo sapien
gcaaatgtgaccttacgaaatggat

SEQ ID NO: 498778 - DNA, 25 bp, Homo sapien
taacagcaaactttccaacctggag

SEQ ID NO: 498779 - DNA, 25 bp, Homo sapien
gcttacaagatctatgggacaacat

SEQ ID NO: 498780 - DNA, 25 bp, Homo sapien
gagacgggccctaacatgatgatgg

SEQ ID NO: 498781 - DNA, 25 bp, Homo sapien
caagtctccattaatcagccgcagg

SEQ ID NO: 498782 - DNA, 25 bp, Homo sapien
ggagtgaagccctgagactacagca

SEQ ID NO: 498783 - DNA, 25 bp, Homo sapien
tgcaggaggccacatgtgtgattcc

SEQ ID NO: 498784 - DNA, 25 bp, Homo sapien
tagaaggtggattaatggatgccag

SEQ ID NO: 498785 - DNA, 25 bp, Homo sapien
ccacctggagagcaccccctcccgg

SEQ ID NO: 498786 - DNA, 25 bp, Homo sapien
cctcccggcacaccagtgccaccca

SEQ ID NO: 498787 - DNA, 25 bp, Homo sapien
acctggagagcaccccctcccggca

SEQ ID NO: 498788 - DNA, 25 bp, Homo sapien
agcaccccctcccggcacaccagtg

SEQ ID NO: 498789 - DNA, 25 bp, Homo sapien
gtccctgttgccttgtccgcctgtt

SEQ ID NO: 498790 - DNA, 25 bp, Homo sapien
ctgggtccctgttgccttgtccgcc

SEQ ID NO: 498791 - DNA, 25 bp, Homo sapien
ctgttgccttgtccgcctgttctct

SEQ ID NO: 498792 - DNA, 25 bp, Homo sapien
gccttgtccgcctgttctctgtcct

SEQ ID NO: 498793 - DNA, 25 bp, Homo sapien
agcaaaggttagagtgtagcccaaa

SEQ ID NO: 498794 - DNA, 25 bp, Homo sapien
aaaggttagagtgtagcccaaagct

SEQ ID NO: 498795 - DNA, 25 bp, Homo sapien
caaaggttagagtgtagcccaaagc

SEQ ID NO: 498796 - DNA, 25 bp, Homo sapien
tgaagcaaaggttagagtgtagccc

SEQ ID NO: 498797 - DNA, 25 bp, Homo sapien
gggccccgactgctgtggtccggca

SEQ ID NO: 498798 - DNA, 25 bp, Homo sapien
gtccggcatcagtgggcgttgctgc

SEQ ID NO: 498799 - DNA, 25 bp, Homo sapien
ggccccgactgctgtggtccggcat

SEQ ID NO: 498800 - DNA, 25 bp, Homo sapien
ctgtggtccggcatcagtgggcgtt

SEQ ID NO: 498801 - DNA, 25 bp, Homo sapien
ctgtggcttgggagcgtctgctgtg

SEQ ID NO: 498802 - DNA, 25 bp, Homo sapien
tccgagttgaggctgtttgcccagg

SEQ ID NO: 498803 - DNA, 25 bp, Homo sapien
agaacaaacttccagccagccgtgg

SEQ ID NO: 498804 - DNA, 25 bp, Homo sapien
ttcttcccaactgctagggccggct

SEQ ID NO: 498805 - DNA, 25 bp, Homo sapien
gcattttccatggaagccacgtcag

SEQ ID NO: 498806 - DNA, 25 bp, Homo sapien
ggacatttaaacaggtccgggcagc

SEQ ID NO: 498807 - DNA, 25 bp, Homo sapien
catttaaacaggtccgggcagcaga

SEQ ID NO: 498808 - DNA, 25 bp, Homo sapien
gacatttaaacaggtccgggcagca

SEQ ID NO: 498809 - DNA, 25 bp, Homo sapien
ctggacatttaaacaggtccgggca

SEQ ID NO: 498810 - DNA, 25 bp, Homo sapien
ctggggccttggagtgtttctcgaa

SEQ ID NO: 498811 - DNA, 25 bp, Homo sapien
gcctctccaggtggcgagaacacag

SEQ ID NO: 498812 - DNA, 25 bp, Homo sapien
gtgtttctcgaagggtacacagttc

SEQ ID NO: 498813 - DNA, 25 bp, Homo sapien
caggtggcgagaacacagacgcatg

SEQ ID NO: 498814 - DNA, 25 bp, Homo sapien
cagacacagcaacagtcacggccat

SEQ ID NO: 498815 - DNA, 25 bp, Homo sapien
gagctgcccacgtgagtgtccttgg

SEQ ID NO: 498816 - DNA, 25 bp, Homo sapien
ctggggccggctgcaccggagctgc

SEQ ID NO: 498817 - DNA, 25 bp, Homo sapien
acacagcaacagtcacggccattgg

SEQ ID NO: 498818 - DNA, 25 bp, Homo sapien
cagacaccccgaagggccagggcag

SEQ ID NO: 498819 - DNA, 25 bp, Homo sapien
agacaccccgaagggccagggcagc

SEQ ID NO: 498820 - DNA, 25 bp, Homo sapien
cacagtggggtagggcgaatgtgca

SEQ ID NO: 498821 - DNA, 25 bp, Homo sapien
gtgcacacatttccggtggacttgg

SEQ ID NO: 498822 - DNA, 25 bp, Homo sapien
cttccctttggatgtagtgtgtgtc

SEQ ID NO: 498823 - DNA, 25 bp, Homo sapien
tccctttggatgtagtgtgtgtctg

SEQ ID NO: 498824 - DNA, 25 bp, Homo sapien
ccctttggatgtagtgtgtgtctgg

SEQ ID NO: 498825 - DNA, 25 bp, Homo sapien
ttccctttggatgtagtgtgtgtct

SEQ ID NO: 498826 - DNA, 25 bp, Homo sapien
agccgagactcgggctccggtgtca

SEQ ID NO: 498827 - DNA, 25 bp, Homo sapien
tgagccgagactcgggctccggtgt

SEQ ID NO: 498828 - DNA, 25 bp, Homo sapien
ctgagccgagactcgggctccggtg

SEQ ID NO: 498829 - DNA, 25 bp, Homo sapien
gagccgagactcgggctccggtgtc

SEQ ID NO: 498830 - DNA, 25 bp, Homo sapien
gagactcgggctccggtgtcatcag

SEQ ID NO: 498831 - DNA, 25 bp, Homo sapien
ggctccggtgtcatcaggggtgggt

SEQ ID NO: 498832 - DNA, 25 bp, Homo sapien
cgggctccggtgtcatcaggggtgg

SEQ ID NO: 498833 - DNA, 25 bp, Homo sapien
gccgagactcgggctccggtgtcat

SEQ ID NO: 498834 - DNA, 25 bp, Homo sapien
gcatcgggggtgggtgtccgtggct

SEQ ID NO: 498835 - DNA, 25 bp, Homo sapien
gtgggtgtccgtggctgtggcagcg

SEQ ID NO: 498836 - DNA, 25 bp, Homo sapien
tcgggggtgggtgtccgtggctgtg

SEQ ID NO: 498837 - DNA, 25 bp, Homo sapien
gggtgggtgtccgtggctgtggcag

SEQ ID NO: 498838 - DNA, 25 bp, Homo sapien
gcatcggatgctcgccctgtaattg

SEQ ID NO: 498839 - DNA, 25 bp, Homo sapien
cattgagacgccaaatcttgtgcgg

SEQ ID NO: 498840 - DNA, 25 bp, Homo sapien
tgtaattgcgctgggtgtgcccgcc

SEQ ID NO: 498841 - DNA, 25 bp, Homo sapien
cagaggccggttcttgctagctgca

SEQ ID NO: 498842 - DNA, 25 bp, Homo sapien
tttgctccgtggagatacggtgcgc

SEQ ID NO: 498843 - DNA, 25 bp, Homo sapien
cccactgaaagcctggcacgttagc

SEQ ID NO: 498844 - DNA, 25 bp, Homo sapien
gttttcaagaatgagaagttgtccc

SEQ ID NO: 498845 - DNA, 25 bp, Homo sapien
tagcgtctttctttgcgttagtttc

SEQ ID NO: 498846 - DNA, 25 bp, Homo sapien
agaccgtggctggatggagactgcc

SEQ ID NO: 498847 - DNA, 25 bp, Homo sapien
tgagggtcaaggtgcccagggtcaa

SEQ ID NO: 498848 - DNA, 25 bp, Homo sapien
gcctgaacgctgtccgcagaccgtg

SEQ ID NO: 498849 - DNA, 25 bp, Homo sapien
cccgtgagggtcaaggtgcccaggg

SEQ ID NO: 498850 - DNA, 25 bp, Homo sapien
atcccctgcgaagaccaggacacga

SEQ ID NO: 498851 - DNA, 25 bp, Homo sapien
ccaggacacgaacgtgggacacaca

SEQ ID NO: 498852 - DNA, 25 bp, Homo sapien
aggccacatcccctgcgaagaccag

SEQ ID NO: 498853 - DNA, 25 bp, Homo sapien
cgaagaccaggacacgaacgtggga

SEQ ID NO: 498854 - DNA, 25 bp, Homo sapien
cgtcccccgcaagggtcaggatacg

SEQ ID NO: 498855 - DNA, 25 bp, Homo sapien
tcccccgcaagggtcaggatacgaa

SEQ ID NO: 498856 - DNA, 25 bp, Homo sapien
cccgcaagggtcaggatacgaagga

SEQ ID NO: 498857 - DNA, 25 bp, Homo sapien
ccccgcaagggtcaggatacgaagg

SEQ ID NO: 498858 - DNA, 25 bp, Homo sapien
gggctcaggtttttcgtagtgttca

SEQ ID NO: 498859 - DNA, 25 bp, Homo sapien
gctcaggtttttcgtagtgttcagg

SEQ ID NO: 498860 - DNA, 25 bp, Homo sapien
ggctcaggtttttcgtagtgttcag

SEQ ID NO: 498861 - DNA, 25 bp, Homo sapien
ctcaggtttttcgtagtgttcaggg

SEQ ID NO: 498862 - DNA, 25 bp, Homo sapien
acgctgcatgcagtggactgaactg

SEQ ID NO: 498863 - DNA, 25 bp, Homo sapien
ctctctgtgttaagttggatcttcc

SEQ ID NO: 498864 - DNA, 25 bp, Homo sapien
ttaagttggatcttccttgtgactg

SEQ ID NO: 498865 - DNA, 25 bp, Homo sapien
cttgtgactgattcagaggagccac

SEQ ID NO: 498866 - DNA, 25 bp, Homo sapien
gcaagaccctggcaccagaggcgtg

SEQ ID NO: 498867 - DNA, 25 bp, Homo sapien
ggtcgccgttcacacaagtgccaag

SEQ ID NO: 498868 - DNA, 25 bp, Homo sapien
gaggcttcacgtggtcgccgttcac

SEQ ID NO: 498869 - DNA, 25 bp, Homo sapien
cagaggcgtggactgaaaatgaagc

SEQ ID NO: 498870 - DNA, 25 bp, Homo sapien
ctggccctgaggtctgtgtttcacg

SEQ ID NO: 498871 - DNA, 25 bp, Homo sapien
cagacgctcgttgccctgagggtgc

SEQ ID NO: 498872 - DNA, 25 bp, Homo sapien
gaggtctgtgtttcacggctctcac

SEQ ID NO: 498873 - DNA, 25 bp, Homo sapien
actgggctccgccagacgctcgttg

SEQ ID NO: 498874 - DNA, 25 bp, Homo sapien
aggctgagcgggtgaaggcggctgt

SEQ ID NO: 498875 - DNA, 25 bp, Homo sapien
tcctggtgctctgaggctccggtcc

SEQ ID NO: 498876 - DNA, 25 bp, Homo sapien
tgccggtgtccggatgggtgtgtcc

SEQ ID NO: 498877 - DNA, 25 bp, Homo sapien
ctccggtccgggctgtggggacgcg

SEQ ID NO: 498878 - DNA, 25 bp, Homo sapien
ggctgaaatctgagaccccggtcta

SEQ ID NO: 498879 - DNA, 25 bp, Homo sapien
gagtatcaggagcagaccagcttcc

SEQ ID NO: 498880 - DNA, 25 bp, Homo sapien
ggtaacacccattcacaatagcctg

SEQ ID NO: 498881 - DNA, 25 bp, Homo sapien
cagagagttcccgtccggctgaaat

SEQ ID NO: 498882 - DNA, 25 bp, Homo sapien
gatgttggtgtaccctgcggcccca

SEQ ID NO: 498883 - DNA, 25 bp, Homo sapien
tcagatgttggtgtaccctgcggcc

SEQ ID NO: 498884 - DNA, 25 bp, Homo sapien
tggacgctggcagtcggggcacctt

SEQ ID NO: 498885 - DNA, 25 bp, Homo sapien
tgttggtgtaccctgcggccccacg

SEQ ID NO: 498886 - DNA, 25 bp, Homo sapien
catggttcttcccagtgagtgtagc

SEQ ID NO: 498887 - DNA, 25 bp, Homo sapien
attgatggacatggtgagagctgca

SEQ ID NO: 498888 - DNA, 25 bp, Homo sapien
catggacattgcagatactacagac

SEQ ID NO: 498889 - DNA, 25 bp, Homo sapien
ttggtggacacaatgtgagccagcc

SEQ ID NO: 498890 - DNA, 25 bp, Homo sapien
ctcccctgcacggacatcgcagacg

SEQ ID NO: 498891 - DNA, 25 bp, Homo sapien
cccctgcacggacatcgcagacgct

SEQ ID NO: 498892 - DNA, 25 bp, Homo sapien
ctgcacggacatcgcagacgctcac

SEQ ID NO: 498893 - DNA, 25 bp, Homo sapien
ctctctcccctgcacggacatcgca

SEQ ID NO: 498894 - DNA, 25 bp, Homo sapien
ggagacactcgggaaaactgctacc

SEQ ID NO: 498895 - DNA, 25 bp, Homo sapien
catgttaccgctggacataatggaa

SEQ ID NO: 498896 - DNA, 25 bp, Homo sapien
aaactgctaccgcacggcggcacag

SEQ ID NO: 498897 - DNA, 25 bp, Homo sapien
ggcggcacagggaccgtaaacatgt

SEQ ID NO: 498898 - DNA, 25 bp, Homo sapien
aactgcagacgcctctgagcacatg

SEQ ID NO: 498899 - DNA, 25 bp, Homo sapien
tgatgacaacttcccagggacccca

SEQ ID NO: 498900 - DNA, 25 bp, Homo sapien
cccattcacagagcgtttgggtttc

SEQ ID NO: 498901 - DNA, 25 bp, Homo sapien
cccagaacgtcacccgcctcaactg

SEQ ID NO: 498902 - DNA, 25 bp, Homo sapien
tagggccccttagacaagacagcag

SEQ ID NO: 498903 - DNA, 25 bp, Homo sapien
tcccagtggcttggaacagcggtct

SEQ ID NO: 498904 - DNA, 25 bp, Homo sapien
ttttaatggctctgacgggcgccgc

SEQ ID NO: 498905 - DNA, 25 bp, Homo sapien
tcttctaagggttcgtgtgccgtaa

SEQ ID NO: 498906 - DNA, 25 bp, Homo sapien
cagctagtttgccttgatcttgtca

SEQ ID NO: 498907 - DNA, 25 bp, Homo sapien
tggttccaaaccctcgaggtgctgg

SEQ ID NO: 498908 - DNA, 25 bp, Homo sapien
tgtgcaggacacatgtttccggccc

SEQ ID NO: 498909 - DNA, 25 bp, Homo sapien
agggcccttgcgtgcacccctaaat

SEQ ID NO: 498910 - DNA, 25 bp, Homo sapien
ctgcgtgtcctgggtcccgagagac

SEQ ID NO: 498911 - DNA, 25 bp, Homo sapien
gagagacaccgtgccgggcttctgg

SEQ ID NO: 498912 - DNA, 25 bp, Homo sapien
cgtgtcctgggtcccgagagacacc

SEQ ID NO: 498913 - DNA, 25 bp, Homo sapien
tgtcctgggtcccgagagacaccgt

SEQ ID NO: 498914 - DNA, 25 bp, Homo sapien
aggcagctcactgagcgcgtctcgt

SEQ ID NO: 498915 - DNA, 25 bp, Homo sapien
gggtgcgaggttggacagccgttgt

SEQ ID NO: 498916 - DNA, 25 bp, Homo sapien
tcgtcttacgcagccgcgggtcaga

SEQ ID NO: 498917 - DNA, 25 bp, Homo sapien
tggacagccgttgtggaactgtggt

SEQ ID NO: 498918 - DNA, 25 bp, Homo sapien
caggtgccggtacctctggagggtg

SEQ ID NO: 498919 - DNA, 25 bp, Homo sapien
tggagggtgcgaggttgggcagcag

SEQ ID NO: 498920 - DNA, 25 bp, Homo sapien
tctggagggtgcgaggttgggcagc

SEQ ID NO: 498921 - DNA, 25 bp, Homo sapien
gcaggtgccggtacctctggagggt

SEQ ID NO: 498922 - DNA, 25 bp, Homo sapien
tggagggtgcgaggttgggcagcag

SEQ ID NO: 498923 - DNA, 25 bp, Homo sapien
ctggagggtgcgaggttgggcagca

SEQ ID NO: 498924 - DNA, 25 bp, Homo sapien
cagcaggtgccggtacctctggagg

SEQ ID NO: 498925 - DNA, 25 bp, Homo sapien
tctggagggtgcgaggttgggcagc

SEQ ID NO: 498926 - DNA, 25 bp, Homo sapien
gcaggtgccggtacctctggagggt

SEQ ID NO: 498927 - DNA, 25 bp, Homo sapien
tctggagggtgcgaggttggacagc

SEQ ID NO: 498928 - DNA, 25 bp, Homo sapien
tctgggagggatggctttcaacttg

SEQ ID NO: 498929 - DNA, 25 bp, Homo sapien
tgtctgggagggatggctttcaact

SEQ ID NO: 498930 - DNA, 25 bp, Homo sapien
gggagggatggctttcaacttgctc

SEQ ID NO: 498931 - DNA, 25 bp, Homo sapien
gctttggttttggctgtcatcttgg

SEQ ID NO: 498932 - DNA, 25 bp, Homo sapien
ccccagctatccctctcctgatcac

SEQ ID NO: 498933 - DNA, 25 bp, Homo sapien
ccagctatccctctcctgatcacaa

SEQ ID NO: 498934 - DNA, 25 bp, Homo sapien
cccagctatccctctcctgatcaca

SEQ ID NO: 498935 - DNA, 25 bp, Homo sapien
gtgaagaagacccacggccggtctg

SEQ ID NO: 498936 - DNA, 25 bp, Homo sapien
cccaacattgaaccgctggtgcctg

SEQ ID NO: 498937 - DNA, 25 bp, Homo sapien
cacggccggtctggcccaacattga

SEQ ID NO: 498938 - DNA, 25 bp, Homo sapien
ttgtccgtgaagaagacccacggcc

SEQ ID NO: 498939 - DNA, 25 bp, Homo sapien
aatttccagcacttccgggaacgca

SEQ ID NO: 498940 - DNA, 25 bp, Homo sapien
tctagtgagcaaaaggtcgcgtgcc

SEQ ID NO: 498941 - DNA, 25 bp, Homo sapien
cacaaatgtgagaaggccggtgctt

SEQ ID NO: 498942 - DNA, 25 bp, Homo sapien
tgcgggagccctggatgtatgctca

SEQ ID NO: 498943 - DNA, 25 bp, Homo sapien
tgagtacccactggtcacacgttgg

SEQ ID NO: 498944 - DNA, 25 bp, Homo sapien
gaccctgagttggaatgtgcaccac

SEQ ID NO: 498945 - DNA, 25 bp, Homo sapien
accactcccagctgagtacccactg

SEQ ID NO: 498946 - DNA, 25 bp, Homo sapien
catgagtcgagaggcaggaccttgt

SEQ ID NO: 498947 - DNA, 25 bp, Homo sapien
tggctcggatgtagcagaggtggga

SEQ ID NO: 498948 - DNA, 25 bp, Homo sapien
tgggatcgggagtgatttcgttcca

SEQ ID NO: 498949 - DNA, 25 bp, Homo sapien
caattccccgatgctgctttcatag

SEQ ID NO: 498950 - DNA, 25 bp, Homo sapien
tgagtttgaggtgttgtagttgaac

SEQ ID NO: 498951 - DNA, 25 bp, Homo sapien
accacatgaaaacacgaatgctggg

SEQ ID NO: 498952 - DNA, 25 bp, Homo sapien
gggccttagttagaaccacatgaaa

SEQ ID NO: 498953 - DNA, 25 bp, Homo sapien
aatgctggggagtaaaattgcagga

SEQ ID NO: 498954 - DNA, 25 bp, Homo sapien
gcctctagggccttagttagaacca

SEQ ID NO: 498955 - DNA, 25 bp, Homo sapien
gagctgttgaggcttcagagcgtct

SEQ ID NO: 498956 - DNA, 25 bp, Homo sapien
gggctccctcgcagagagcggaagg

SEQ ID NO: 498957 - DNA, 25 bp, Homo sapien
tgaggcttcagagcgtctcttccac

SEQ ID NO: 498958 - DNA, 25 bp, Homo sapien
cggggggatgtcaggccggcacaca

SEQ ID NO: 498959 - DNA, 25 bp, Homo sapien
tcggttcaggattctccttggggct

SEQ ID NO: 498960 - DNA, 25 bp, Homo sapien
cggttcaggattctccttggggctt

SEQ ID NO: 498961 - DNA, 25 bp, Homo sapien
ggttcaggattctccttggggcttg

SEQ ID NO: 498962 - DNA, 25 bp, Homo sapien
gctgggtcggttctgggttctcctc

SEQ ID NO: 498963 - DNA, 25 bp, Homo sapien
ctgggtcggttctgggttctcctcg

SEQ ID NO: 498964 - DNA, 25 bp, Homo sapien
ggctgggtcggttctgggatctcct

SEQ ID NO: 498965 - DNA, 25 bp, Homo sapien
gggctgggtcggttctgggatctcc

SEQ ID NO: 498966 - DNA, 25 bp, Homo sapien
ggctgggtcggttctgggatctcct

SEQ ID NO: 498967 - DNA, 25 bp, Homo sapien
gggctgggtcggttctgggatctcc

SEQ ID NO: 498968 - DNA, 25 bp, Homo sapien
gggctgggtcggttgtgggatctcc

SEQ ID NO: 498969 - DNA, 25 bp, Homo sapien
ggctgggtcggttctgggatctcct

SEQ ID NO: 498970 - DNA, 25 bp, Homo sapien
ggctgggtcggttgtgggatctcct

SEQ ID NO: 498971 - DNA, 25 bp, Homo sapien
tgggtcggttgtgggatctcctcgg

SEQ ID NO: 498972 - DNA, 25 bp, Homo sapien
ttctgattctggcattggggaaagt

SEQ ID NO: 498973 - DNA, 25 bp, Homo sapien
tctgattctggcattggggaaagtg

SEQ ID NO: 498974 - DNA, 25 bp, Homo sapien
aaatttctgattctggcattgggga

SEQ ID NO: 498975 - DNA, 25 bp, Homo sapien
atttctgattctggcattggggaaa

SEQ ID NO: 498976 - DNA, 25 bp, Homo sapien
atatcctatcaaaaaataaccaaat

SEQ ID NO: 498977 - DNA, 25 bp, Homo sapien
tatatcctatcaaaaaataaccaaa

SEQ ID NO: 498978 - DNA, 25 bp, Homo sapien
ttatatcctatcaaaaaataaccaa

SEQ ID NO: 498979 - DNA, 25 bp, Homo sapien
tatcctatcaaaaaataaccaaata

SEQ ID NO: 498980 - DNA, 25 bp, Homo sapien
gagctctcagcaccgaactgcatgt

SEQ ID NO: 498981 - DNA, 25 bp, Homo sapien
gaagtacgaactaagcacatgcccc

SEQ ID NO: 498982 - DNA, 25 bp, Homo sapien
tccttgtgggaacttagcgtgcacc

SEQ ID NO: 498983 - DNA, 25 bp, Homo sapien
tcacaagaggcgaataagaccagag

SEQ ID NO: 498984 - DNA, 25 bp, Homo sapien
ctcccagcaggtattccagacggaa

SEQ ID NO: 498985 - DNA, 25 bp, Homo sapien
ggaatccctgattaaagctgtgcat

SEQ ID NO: 498986 - DNA, 25 bp, Homo sapien
tccagacggaatccctgattaaagc

SEQ ID NO: 498987 - DNA, 25 bp, Homo sapien
caggtattccagacggaatccctga

SEQ ID NO: 498988 - DNA, 25 bp, Homo sapien
ctggcggagaacccatgggcagtgc

SEQ ID NO: 498989 - DNA, 25 bp, Homo sapien
cctggcggagaacccatgggcagtg

SEQ ID NO: 498990 - DNA, 25 bp, Homo sapien
ggccctggcggagaacccatgggca

SEQ ID NO: 498991 - DNA, 25 bp, Homo sapien
ccctggcggagaacccatgggcagt

SEQ ID NO: 498992 - DNA, 25 bp, Homo sapien
ttctcccttgcatgccacaggtact

SEQ ID NO: 498993 - DNA, 25 bp, Homo sapien
tttctcctgtggtcctgataggctt

SEQ ID NO: 498994 - DNA, 25 bp, Homo sapien
cagcaacaaaatcgtcttgctcatt

SEQ ID NO: 498995 - DNA, 25 bp, Homo sapien
gggctccgtgcatctcagcaacaaa

SEQ ID NO: 498996 - DNA, 25 bp, Homo sapien
tctttcgtggcaccagggattccat

SEQ ID NO: 498997 - DNA, 25 bp, Homo sapien
ggtctttcgtggcaccagggattcc

SEQ ID NO: 498998 - DNA, 25 bp, Homo sapien
ctgctctggggtctttcgtggcacc

SEQ ID NO: 498999 - DNA, 25 bp, Homo sapien
ctgggcgcagtattggaaacagagt

SEQ ID NO: 499000 - DNA, 25 bp, Homo sapien
gtgtctaccagcggctgggcgctct

SEQ ID NO: 499001 - DNA, 25 bp, Homo sapien
gggcgcgggtgtctaccagcggctg

SEQ ID NO: 499002 - DNA, 25 bp, Homo sapien
gtggagatggcggaacgtcagcggg

SEQ ID NO: 499003 - DNA, 25 bp, Homo sapien
agtttcaggtggagatggcggaacg

SEQ ID NO: 499004 - DNA, 25 bp, Homo sapien
taagtaaggtagaaatgaaagtgta

SEQ ID NO: 499005 - DNA, 25 bp, Homo sapien
tctcgatgacggagagccgttcctc

SEQ ID NO: 499006 - DNA, 25 bp, Homo sapien
cgatgacggagagccgttcctcctc

SEQ ID NO: 499007 - DNA, 25 bp, Homo sapien
ctctcgatgacggagagccgttcct

SEQ ID NO: 499008 - DNA, 25 bp, Homo sapien
tccctctcgatgacggagagccgtt

SEQ ID NO: 499009 - DNA, 25 bp, Homo sapien
tgtcccctggtcctcatgacagagg

SEQ ID NO: 499010 - DNA, 25 bp, Homo sapien
ctgtcccctggtcctcatgacagag

SEQ ID NO: 499011 - DNA, 25 bp, Homo sapien
tctgtcccctggtcctcatgacaga

SEQ ID NO: 499012 - DNA, 25 bp, Homo sapien
gtctgtcccctggtcctcatgacag

SEQ ID NO: 499013 - DNA, 25 bp, Homo sapien
aactggacacatagcaaggttccca

SEQ ID NO: 499014 - DNA, 25 bp, Homo sapien
gccaaatcctagagacatgggctgg

SEQ ID NO: 499015 - DNA, 25 bp, Homo sapien
cctggataggaaagcaattgcgtca

SEQ ID NO: 499016 - DNA, 25 bp, Homo sapien
cttattcatattggaggcggcaggg

SEQ ID NO: 499017 - DNA, 25 bp, Homo sapien
gacaaagtccctggaatcataaggc

SEQ ID NO: 499018 - DNA, 25 bp, Homo sapien
taaaggaagacacaacggtggagcc

SEQ ID NO: 499019 - DNA, 25 bp, Homo sapien
tagacaggtcaacacacaagtaagt

SEQ ID NO: 499020 - DNA, 25 bp, Homo sapien
gacaactgtggtgcccgtggtaaag

SEQ ID NO: 499021 - DNA, 25 bp, Homo sapien
tcgtgatcctagagcttgtgcaggg

SEQ ID NO: 499022 - DNA, 25 bp, Homo sapien
ggtgggattcgtgatcctagagctt

SEQ ID NO: 499023 - DNA, 25 bp, Homo sapien
ggtaggatccgtggtcctggagctt

SEQ ID NO: 499024 - DNA, 25 bp, Homo sapien
ccataggggtgggattcgtgatcct

SEQ ID NO: 499025 - DNA, 25 bp, Homo sapien
agttttgctgcgtcatctgctcggg

SEQ ID NO: 499026 - DNA, 25 bp, Homo sapien
tgaaacaccgtttgaggagctgcct

SEQ ID NO: 499027 - DNA, 25 bp, Homo sapien
tgctcgggcacattgttgaaacacc

SEQ ID NO: 499028 - DNA, 25 bp, Homo sapien
caggcttggctgtgcgcttgctaat

SEQ ID NO: 499029 - DNA, 25 bp, Homo sapien
atacagtaacagaataagtcttcat

SEQ ID NO: 499030 - DNA, 25 bp, Homo sapien
ccgccccaggactcgaaggccgcgg

SEQ ID NO: 499031 - DNA, 25 bp, Homo sapien
gggcccggcctcacgccacactccg

SEQ ID NO: 499032 - DNA, 25 bp, Homo sapien
tcacgccacactccgccgctaggcg

SEQ ID NO: 499033 - DNA, 25 bp, Homo sapien
cgcggactcgaaggccgcaggtccc

SEQ ID NO: 499034 - DNA, 25 bp, Homo sapien
gcttccgcagccgctctaggttcat

SEQ ID NO: 499035 - DNA, 25 bp, Homo sapien
gcgcttccgcagccgctctaggttc

SEQ ID NO: 499036 - DNA, 25 bp, Homo sapien
cgcttccgcagccgctctaggttca

SEQ ID NO: 499037 - DNA, 25 bp, Homo sapien
cgagagagtgaagctactttatctg

SEQ ID NO: 499038 - DNA, 25 bp, Homo sapien
cacgagagagtgaagctactttatc

SEQ ID NO: 499039 - DNA, 25 bp, Homo sapien
gagagagtgaagctactttatctgc

SEQ ID NO: 499040 - DNA, 25 bp, Homo sapien
gagagtgaagctactttatctgccc

SEQ ID NO: 499041 - DNA, 25 bp, Homo sapien
tgagccaaccaatagatgtcctggg

SEQ ID NO: 499042 - DNA, 25 bp, Homo sapien
tgatattgtgctgtcaggtaaagac

SEQ ID NO: 499043 - DNA, 25 bp, Homo sapien
catgggcggctctgtgatattgtgc

SEQ ID NO: 499044 - DNA, 25 bp, Homo sapien
ttttcgtgaccgaagtgcatgggcg

SEQ ID NO: 499045 - DNA, 25 bp, Homo sapien
ggcctactgtgatgactcacatcta

SEQ ID NO: 499046 - DNA, 25 bp, Homo sapien
actgtgatgactcacatctataatc

SEQ ID NO: 499047 - DNA, 25 bp, Homo sapien
cctactgtgatgactcacatctata

SEQ ID NO: 499048 - DNA, 25 bp, Homo sapien
gggcctactgtgatgactcacatct

SEQ ID NO: 499049 - DNA, 25 bp, Homo sapien
cagctccacttcaggcactgagtgt

SEQ ID NO: 499050 - DNA, 25 bp, Homo sapien
gtgtgaataactgctgggcgtccga

SEQ ID NO: 499051 - DNA, 25 bp, Homo sapien
agtgtgaataactgctgggcgtccg

SEQ ID NO: 499052 - DNA, 25 bp, Homo sapien
tgtgaataactgctgggcgtccgag

SEQ ID NO: 499053 - DNA, 25 bp, Homo sapien
gtgtgaataactgctgggcatccga

SEQ ID NO: 499054 - DNA, 25 bp, Homo sapien
tgtgaataactgctgggcatccgag

SEQ ID NO: 499055 - DNA, 25 bp, Homo sapien
gtgaataactgctgggcatccgagg

SEQ ID NO: 499056 - DNA, 25 bp, Homo sapien
tagctcttcaagcactgagtgtgaa

SEQ ID NO: 499057 - DNA, 25 bp, Homo sapien
ggtagctcttcaagcactgagtgtg

SEQ ID NO: 499058 - DNA, 25 bp, Homo sapien
agctcttcaagcactgagtgtgaat

SEQ ID NO: 499059 - DNA, 25 bp, Homo sapien
tgggtagctcttcaagcactgagtg

SEQ ID NO: 499060 - DNA, 25 bp, Homo sapien
gagtaagtgaggcagcgagtaagtg

SEQ ID NO: 499061 - DNA, 25 bp, Homo sapien
catctgcaggagagcgagtaagtga

SEQ ID NO: 499062 - DNA, 25 bp, Homo sapien
gagaagtaaacatctgcaggagagc

SEQ ID NO: 499063 - DNA, 25 bp, Homo sapien
tcaaccaggtggagaagtaaacatc

SEQ ID NO: 499064 - DNA, 25 bp, Homo sapien
gctgcaaggtaacgacatgcttcat

SEQ ID NO: 499065 - DNA, 25 bp, Homo sapien
caaggtaacgacatgcttcatacaa

SEQ ID NO: 499066 - DNA, 25 bp, Homo sapien
atggcacctagctgcaaggtaacga

SEQ ID NO: 499067 - DNA, 25 bp, Homo sapien
cctagctgcaaggtaacgacatgct

SEQ ID NO: 499068 - DNA, 25 bp, Homo sapien
actatgcccattatttaaatgtgaa

SEQ ID NO: 499069 - DNA, 25 bp, Homo sapien
aaaggataacatatactatgcccat

SEQ ID NO: 499070 - DNA, 25 bp, Homo sapien
tatactatgcccattatttaaatgt

SEQ ID NO: 499071 - DNA, 25 bp, Homo sapien
ggataacatatactatgcccattat

SEQ ID NO: 499072 - DNA, 25 bp, Homo sapien
aacagaagtgccgctcatcactcac

SEQ ID NO: 499073 - DNA, 25 bp, Homo sapien
aaaacagaagtgccgctcatcactc

SEQ ID NO: 499074 - DNA, 25 bp, Homo sapien
gaaaacagaagtgccgctcatcact

SEQ ID NO: 499075 - DNA, 25 bp, Homo sapien
aaacagaagtgccgctcatcactca

SEQ ID NO: 499076 - DNA, 25 bp, Homo sapien
tcaagaacatcaagggcctgctggt

SEQ ID NO: 499077 - DNA, 25 bp, Homo sapien
gtcaagaacatcaagggcctgctgg

SEQ ID NO: 499078 - DNA, 25 bp, Homo sapien
gatctttgaagccactttcgtcctt

SEQ ID NO: 499079 - DNA, 25 bp, Homo sapien
agccactttcgtccttcaagtattt

SEQ ID NO: 499080 - DNA, 25 bp, Homo sapien
agtcgctggaaggatctttgaagcc

SEQ ID NO: 499081 - DNA, 25 bp, Homo sapien
ccagtcgctggaaggatctttgaag

SEQ ID NO: 499082 - DNA, 25 bp, Homo sapien
cagtagacatcaagcttcaaagctt

SEQ ID NO: 499083 - DNA, 25 bp, Homo sapien
aagatcgaacgcttcaaaacagtag

SEQ ID NO: 499084 - DNA, 25 bp, Homo sapien
cagggttcggttatctagagcatca

SEQ ID NO: 499085 - DNA, 25 bp, Homo sapien
gattttcccgcgtagaagacagata

SEQ ID NO: 499086 - DNA, 25 bp, Homo sapien
tccaggcctgaagacgggaatcatc

SEQ ID NO: 499087 - DNA, 25 bp, Homo sapien
tcccaaggatgtaaagagcaacacg

SEQ ID NO: 499088 - DNA, 25 bp, Homo sapien
tccctagattcggacagcacaaggc

SEQ ID NO: 499089 - DNA, 25 bp, Homo sapien
atcatctggtgggtggaggctactc

SEQ ID NO: 499090 - DNA, 25 bp, Homo sapien
taaggggtagtgattcaagaagttc

SEQ ID NO: 499091 - DNA, 25 bp, Homo sapien
ctaaggggtagtgattcaagaagtt

SEQ ID NO: 499092 - DNA, 25 bp, Homo sapien
aggggtagtgattcaagaagttctt

SEQ ID NO: 499093 - DNA, 25 bp, Homo sapien
aaggggtagtgattcaagaagttct

SEQ ID NO: 499094 - DNA, 25 bp, Homo sapien
aaatagaaaacgcagcaattcctgt

SEQ ID NO: 499095 - DNA, 25 bp, Homo sapien
ttcctgttcttcattacacagcttg

SEQ ID NO: 499096 - DNA, 25 bp, Homo sapien
tctcaaatagaaaacgcagcaattc

SEQ ID NO: 499097 - DNA, 25 bp, Homo sapien
tttgttctcaaatagaaaacgcagc

SEQ ID NO: 499098 - DNA, 25 bp, Homo sapien
gtatcttaaacgctctattcttaaa

SEQ ID NO: 499099 - DNA, 25 bp, Homo sapien
aattttatggaataagatatttaca

SEQ ID NO: 499100 - DNA, 25 bp, Homo sapien
atttacataaagcaagtgctaactc

SEQ ID NO: 499101 - DNA, 25 bp, Homo sapien
taaagcaagtgctaactctttggtt

SEQ ID NO: 499102 - DNA, 25 bp, Homo sapien
taataatgtctctcagctaaagaca

SEQ ID NO: 499103 - DNA, 25 bp, Homo sapien
tctcagctaaagacactaccacatc

SEQ ID NO: 499104 - DNA, 25 bp, Homo sapien
gattctcttgcaagccatctacaga

SEQ ID NO: 499105 - DNA, 25 bp, Homo sapien
gattcagggatgaccgtttcactag

SEQ ID NO: 499106 - DNA, 25 bp, Homo sapien
cgatcggctatgtgtagacagtcat

SEQ ID NO: 499107 - DNA, 25 bp, Homo sapien
gaaagttaaagcgacacattactac

SEQ ID NO: 499108 - DNA, 25 bp, Homo sapien
tgacagcactcacgacgatcggcta

SEQ ID NO: 499109 - DNA, 25 bp, Homo sapien
cttcaggttgattcagttaaggcca

SEQ ID NO: 499110 - DNA, 25 bp, Homo sapien
acaacttgcatggaaaggatctttc

SEQ ID NO: 499111 - DNA, 25 bp, Homo sapien
gtaaacaacttgcatggaaaggatc

SEQ ID NO: 499112 - DNA, 25 bp, Homo sapien
tccctatatgtacaggtaaacaact

SEQ ID NO: 499113 - DNA, 25 bp, Homo sapien
ggctttattcagctctacaagcgtc

SEQ ID NO: 499114 - DNA, 25 bp, Homo sapien
taagacagcacttcccgaatactgc

SEQ ID NO: 499115 - DNA, 25 bp, Homo sapien
cgaatactgcagaggatacagcaaa

SEQ ID NO: 499116 - DNA, 25 bp, Homo sapien
gaacaattgttcgtatcacatgtaa

SEQ ID NO: 499117 - DNA, 25 bp, Homo sapien
caatcatataattctgctcttacag

SEQ ID NO: 499118 - DNA, 25 bp, Homo sapien
taggatataaatccaccagtttatg

SEQ ID NO: 499119 - DNA, 25 bp, Homo sapien
ttactaggatataaatccaccagtt

SEQ ID NO: 499120 - DNA, 25 bp, Homo sapien
tactaggatataaatccaccagttt

SEQ ID NO: 499121 - DNA, 25 bp, Homo sapien
gatataaatccaccagtttatgaga

SEQ ID NO: 499122 - DNA, 25 bp, Homo sapien
ttatgaccgaccatgagatagtaac

SEQ ID NO: 499123 - DNA, 25 bp, Homo sapien
tcatttttatgaccgaccatgagat

SEQ ID NO: 499124 - DNA, 25 bp, Homo sapien
gttcatttttatgaccgaccatgag

SEQ ID NO: 499125 - DNA, 25 bp, Homo sapien
tttttatgaccgaccatgagatagt

SEQ ID NO: 499126 - DNA, 25 bp, Homo sapien
acagagtgagaaccctcgagagaga

SEQ ID NO: 499127 - DNA, 25 bp, Homo sapien
tactacttgaaagcttatgagcaag

SEQ ID NO: 499128 - DNA, 25 bp, Homo sapien
tctacaggttaactagagaggaaaa

SEQ ID NO: 499129 - DNA, 25 bp, Homo sapien
gagcaagacatcaattctacaggtt

SEQ ID NO: 499130 - DNA, 25 bp, Homo sapien
aatgtccataggctatccatgcagg

SEQ ID NO: 499131 - DNA, 25 bp, Homo sapien
tctccaccgcaaatgaatgtccata

SEQ ID NO: 499132 - DNA, 25 bp, Homo sapien
tgctgtgaagtaagcagccatcgct

SEQ ID NO: 499133 - DNA, 25 bp, Homo sapien
cagccatcgcttggtcgtgctcact

SEQ ID NO: 499134 - DNA, 25 bp, Homo sapien
tgattccacccctgcatacaagtaa

SEQ ID NO: 499135 - DNA, 25 bp, Homo sapien
tccaggaggtatgactccagaccag

SEQ ID NO: 499136 - DNA, 25 bp, Homo sapien
taagttgtaaccgatggtgagacca

SEQ ID NO: 499137 - DNA, 25 bp, Homo sapien
catcagtcaatagaagcagtccaca

SEQ ID NO: 499138 - DNA, 25 bp, Homo sapien
tagggctcttatccaacagggctag

SEQ ID NO: 499139 - DNA, 25 bp, Homo sapien
tgtagggctcttatccaacagggct

SEQ ID NO: 499140 - DNA, 25 bp, Homo sapien
gggctcttatccaacagggctagtg

SEQ ID NO: 499141 - DNA, 25 bp, Homo sapien
gtgtagggctcttatccaacagggc

SEQ ID NO: 499142 - DNA, 25 bp, Homo sapien
ccataactgggtgtgcaactctact

SEQ ID NO: 499143 - DNA, 25 bp, Homo sapien
cattgattctgattcccagctagga

SEQ ID NO: 499144 - DNA, 25 bp, Homo sapien
tggcttttacccaacagggctagtg

SEQ ID NO: 499145 - DNA, 25 bp, Homo sapien
tatgcagatactggagctgagcttc

SEQ ID NO: 499146 - DNA, 25 bp, Homo sapien
atttagacggccctggcctagagga

SEQ ID NO: 499147 - DNA, 25 bp, Homo sapien
aactctaagaactcgaagtgcaggc

SEQ ID NO: 499148 - DNA, 25 bp, Homo sapien
cttatcagactgaaggtccatttga

SEQ ID NO: 499149 - DNA, 25 bp, Homo sapien
tatgataagaggttgcagagaccaa

SEQ ID NO: 499150 - DNA, 25 bp, Homo sapien
tggatgttaacttgaacccacagga

SEQ ID NO: 499151 - DNA, 25 bp, Homo sapien
tagggatactcaatgtgcaattata

SEQ ID NO: 499152 - DNA, 25 bp, Homo sapien
gttgggcctatcatatacagaaatg

SEQ ID NO: 499153 - DNA, 25 bp, Homo sapien
cagtaacagtgtaataggaagcggg

SEQ ID NO: 499154 - DNA, 25 bp, Homo sapien
ggtcttccggtgcaatgctcagagc

SEQ ID NO: 499155 - DNA, 25 bp, Homo sapien
attctgaaatgcaaccacgccgacc

SEQ ID NO: 499156 - DNA, 25 bp, Homo sapien
gaagaacctttcagctagttttgag

SEQ ID NO: 499157 - DNA, 25 bp, Homo sapien
ccaatatacagcataggcaaatgac

SEQ ID NO: 499158 - DNA, 25 bp, Homo sapien
tgccttcttagactccagctggaag

SEQ ID NO: 499159 - DNA, 25 bp, Homo sapien
tagatagcatttcactaagcttggg

SEQ ID NO: 499160 - DNA, 25 bp, Homo sapien
tagcaaatattgaaccgcggctgcc

SEQ ID NO: 499161 - DNA, 25 bp, Homo sapien
tacactggtttatagttgaactggg

SEQ ID NO: 499162 - DNA, 25 bp, Homo sapien
gattattcgaaattagcaaatataa

SEQ ID NO: 499163 - DNA, 25 bp, Homo sapien
agattattcgaaattagcaaatata

SEQ ID NO: 499164 - DNA, 25 bp, Homo sapien
aatgcaatggggtaaactgctggaa

SEQ ID NO: 499165 - DNA, 25 bp, Homo sapien
tttctagtagtactaaaatgcaatg

SEQ ID NO: 499166 - DNA, 25 bp, Homo sapien
ttttccaaagcatcaagaaaccatt

SEQ ID NO: 499167 - DNA, 25 bp, Homo sapien
atcaagaaaccatttttcggctgtt

SEQ ID NO: 499168 - DNA, 25 bp, Homo sapien
tttccaaagcatcaagaaaccattt

SEQ ID NO: 499169 - DNA, 25 bp, Homo sapien
agcatcaagaaaccatttttcggct

SEQ ID NO: 499170 - DNA, 25 bp, Homo sapien
ctgacaaggtggcaagtggcaatcc

SEQ ID NO: 499171 - DNA, 25 bp, Homo sapien
tctgggccccaatcataaaagtctg

SEQ ID NO: 499172 - DNA, 25 bp, Homo sapien
tacccaagactatgcgacagaggca

SEQ ID NO: 499173 - DNA, 25 bp, Homo sapien
tattgagaccagttctaggaggcac

SEQ ID NO: 499174 - DNA, 25 bp, Homo sapien
gacatgccccaagttgttcaacaaa

SEQ ID NO: 499175 - DNA, 25 bp, Homo sapien
cagacatgccccaagttgttcaaca

SEQ ID NO: 499176 - DNA, 25 bp, Homo sapien
caagttgttcaacaaaggttcccat

SEQ ID NO: 499177 - DNA, 25 bp, Homo sapien
catgccccaagttgttcaacaaagg

SEQ ID NO: 499178 - DNA, 25 bp, Homo sapien
cagtctagactggtgaatgttctcc

SEQ ID NO: 499179 - DNA, 25 bp, Homo sapien
caagaaacgctgtctcaatgagaac

SEQ ID NO: 499180 - DNA, 25 bp, Homo sapien
caaggagtatcgctttaaggtccaa

SEQ ID NO: 499181 - DNA, 25 bp, Homo sapien
gtgggacactgcaaccagaacctaa

SEQ ID NO: 499182 - DNA, 25 bp, Homo sapien
tgtggaagtagtccacagcattttc

SEQ ID NO: 499183 - DNA, 25 bp, Homo sapien
ggtggtaatccaaggcctcagcata

SEQ ID NO: 499184 - DNA, 25 bp, Homo sapien
cccatcagactgtggatatatccaa

SEQ ID NO: 499185 - DNA, 25 bp, Homo sapien
ccaatagcagagtaggtggatgcgt

SEQ ID NO: 499186 - DNA, 25 bp, Homo sapien
cacgtaaggttgcctaaagaatatt

SEQ ID NO: 499187 - DNA, 25 bp, Homo sapien
acacgtaaggttgcctaaagaatat

SEQ ID NO: 499188 - DNA, 25 bp, Homo sapien
caaacactaaggacaggattcatgt

SEQ ID NO: 499189 - DNA, 25 bp, Homo sapien
aacactaaggacaggattcatgttt

SEQ ID NO: 499190 - DNA, 25 bp, Homo sapien
aaacactaaggacaggattcatgtt

SEQ ID NO: 499191 - DNA, 25 bp, Homo sapien
agatcactggtgagtgccactgggc

SEQ ID NO: 499192 - DNA, 25 bp, Homo sapien
tactgtggacagataaccccgtgct

SEQ ID NO: 499193 - DNA, 25 bp, Homo sapien
catgaacagaaagactgcgagttcc

SEQ ID NO: 499194 - DNA, 25 bp, Homo sapien
tctttccttgtgatgactgcagaga

SEQ ID NO: 499195 - DNA, 25 bp, Homo sapien
tctgtattaatcagatctcagaaga

SEQ ID NO: 499196 - DNA, 25 bp, Homo sapien
gttatgggtcatggaggttcatcac

SEQ ID NO: 499197 - DNA, 25 bp, Homo sapien
aaagttctatctcgactgggcgcag

SEQ ID NO: 499198 - DNA, 25 bp, Homo sapien
gccatgaaccaaagattgttgaagt

SEQ ID NO: 499199 - DNA, 25 bp, Homo sapien
tacatgactggccatgaaccaaaga

SEQ ID NO: 499200 - DNA, 25 bp, Homo sapien
tacatttcgatgcaatgaccaagca

SEQ ID NO: 499201 - DNA, 25 bp, Homo sapien
gcttcagaatcaccaatgtacattt

SEQ ID NO: 499202 - DNA, 25 bp, Homo sapien
tatcatctcgcctaagaccaagggc

SEQ ID NO: 499203 - DNA, 25 bp, Homo sapien
tgaccaagcattgtaacagaaaatg

SEQ ID NO: 499204 - DNA, 25 bp, Homo sapien
gtttccgtgtggaagcctgaccacc

SEQ ID NO: 499205 - DNA, 25 bp, Homo sapien
ctccttggaggaatgagagagtaac

SEQ ID NO: 499206 - DNA, 25 bp, Homo sapien
tcatttgcaggcatgagctggagct

SEQ ID NO: 499207 - DNA, 25 bp, Homo sapien
aactcgggacccttggtggacagca

SEQ ID NO: 499208 - DNA, 25 bp, Homo sapien
tctcctactggtggacgtttgagtc

SEQ ID NO: 499209 - DNA, 25 bp, Homo sapien
tcctctctcctactggtggacgttt

SEQ ID NO: 499210 - DNA, 25 bp, Homo sapien
cctactggtggacgtttgagtcatt

SEQ ID NO: 499211 - DNA, 25 bp, Homo sapien
ctggtggacgtttgagtcatttcca

SEQ ID NO: 499212 - DNA, 25 bp, Homo sapien
tcttcattgtatgcacatcaaagtc

SEQ ID NO: 499213 - DNA, 25 bp, Homo sapien
gaaatcccacggaggtgaaataatg

SEQ ID NO: 499214 - DNA, 25 bp, Homo sapien
cattgtatgcacatcaaagtcataa

SEQ ID NO: 499215 - DNA, 25 bp, Homo sapien
tgaaatcccacggaggtgaaataat

SEQ ID NO: 499216 - DNA, 25 bp, Homo sapien
agatgtctctaacatcatgtcactt

SEQ ID NO: 499217 - DNA, 25 bp, Homo sapien
gatgtctctaacatcatgtcacttt

SEQ ID NO: 499218 - DNA, 25 bp, Homo sapien
ctgtggtctgacatagatgtctcta

SEQ ID NO: 499219 - DNA, 25 bp, Homo sapien
tggtctgacatagatgtctctaaca

SEQ ID NO: 499220 - DNA, 25 bp, Homo sapien
agtgggaccaggaccactgactgga

SEQ ID NO: 499221 - DNA, 25 bp, Homo sapien
actgggacagtgggaccaggaccac

SEQ ID NO: 499222 - DNA, 25 bp, Homo sapien
ctgggacagtgggaccaggaccact

SEQ ID NO: 499223 - DNA, 25 bp, Homo sapien
gacagtgggaccaggaccactgact

SEQ ID NO: 499224 - DNA, 25 bp, Homo sapien
gatgcagtttggagtcacgttagga

SEQ ID NO: 499225 - DNA, 25 bp, Homo sapien
gagtcacgttaggaagtgggacatt

SEQ ID NO: 499226 - DNA, 25 bp, Homo sapien
taggaagtgggacattcttaagcca

SEQ ID NO: 499227 - DNA, 25 bp, Homo sapien
tgggacattcttaagccatggagag

SEQ ID NO: 499228 - DNA, 25 bp, Homo sapien
ccttctttattccactatgtataac

SEQ ID NO: 499229 - DNA, 25 bp, Homo sapien
catctgttgcaaaggtgtgcgatcc

SEQ ID NO: 499230 - DNA, 25 bp, Homo sapien
ttgtaggttcagagaatcagaacac

SEQ ID NO: 499231 - DNA, 25 bp, Homo sapien
tgtgcgatccagtctcttaaggcgg

SEQ ID NO: 499232 - DNA, 25 bp, Homo sapien
ctgctgcagcctgtcctcagcgagg

SEQ ID NO: 499233 - DNA, 25 bp, Homo sapien
gctgcagcctgtcctcagcgaggac

SEQ ID NO: 499234 - DNA, 25 bp, Homo sapien
ctgcagcctgtcctcagcgaggacc

SEQ ID NO: 499235 - DNA, 25 bp, Homo sapien
tgctgcagcctgtcctcagcgagga

SEQ ID NO: 499236 - DNA, 25 bp, Homo sapien
taccaggaggtagcaattacaaaga

SEQ ID NO: 499237 - DNA, 25 bp, Homo sapien
gagagcctataacatttgccaacag

SEQ ID NO: 499238 - DNA, 25 bp, Homo sapien
tttcagatgctcctacaaaacaggg

SEQ ID NO: 499239 - DNA, 25 bp, Homo sapien
caacagttaaaaggatacgtcacca

SEQ ID NO: 499240 - DNA, 25 bp, Homo sapien
gggaggcatacatgatgcctgacag

SEQ ID NO: 499241 - DNA, 25 bp, Homo sapien
tgaaaacgcattagtttgagtctaa

SEQ ID NO: 499242 - DNA, 25 bp, Homo sapien
aataattaccttaagttcagtcact

SEQ ID NO: 499243 - DNA, 25 bp, Homo sapien
attttttagccccaactcaagacag

SEQ ID NO: 499244 - DNA, 25 bp, Homo sapien
gccgcactctccgccgagccgcagc

SEQ ID NO: 499245 - DNA, 25 bp, Homo sapien
gccagcccccgacgaaacctcgcga

SEQ ID NO: 499246 - DNA, 25 bp, Homo sapien
cgccagcccccgacgaaacctcgcg

SEQ ID NO: 499247 - DNA, 25 bp, Homo sapien
ccgcaaccggaggacgaagttggcg

SEQ ID NO: 499248 - DNA, 25 bp, Homo sapien
gaagttggcggcgtctcagcctcct

SEQ ID NO: 499249 - DNA, 25 bp, Homo sapien
cgtcctcttctcctcgcgaggtttg

SEQ ID NO: 499250 - DNA, 25 bp, Homo sapien
gcctcctgctgctgcgagtcgcggt

SEQ ID NO: 499251 - DNA, 25 bp, Homo sapien
ggcggagcgtggacaaggagctcaa

SEQ ID NO: 499252 - DNA, 25 bp, Homo sapien
gacaaggagctcaaaaggcaccgcg

SEQ ID NO: 499253 - DNA, 25 bp, Homo sapien
aaaggcaccgcgtaccgcgctggga

SEQ ID NO: 499254 - DNA, 25 bp, Homo sapien
agctcaaaaggcaccgcgtaccgcg

SEQ ID NO: 499255 - DNA, 25 bp, Homo sapien
gcggcgaagaactcgaagtagtcgt

SEQ ID NO: 499256 - DNA, 25 bp, Homo sapien
ggcgaagaactcgaagtagtcgtgt

SEQ ID NO: 499257 - DNA, 25 bp, Homo sapien
aggtcggcggcgaagaactcgaagt

SEQ ID NO: 499258 - DNA, 25 bp, Homo sapien
tcggcggcgaagaactcgaagtagt

SEQ ID NO: 499259 - DNA, 25 bp, Homo sapien
ttcaaaaagctcacacgactcccat

SEQ ID NO: 499260 - DNA, 25 bp, Homo sapien
gctcacacgactcccatataggaga

SEQ ID NO: 499261 - DNA, 25 bp, Homo sapien
gagctctgggttccgccctctcttc

SEQ ID NO: 499262 - DNA, 25 bp, Homo sapien
ggaacgtaaggcaacgagacggcca

SEQ ID NO: 499263 - DNA, 25 bp, Homo sapien
ctgaaataagagataacagtgaaaa

SEQ ID NO: 499264 - DNA, 25 bp, Homo sapien
aatggtcagtgaaaaatacaatagt

SEQ ID NO: 499265 - DNA, 25 bp, Homo sapien
aagagataacagtgaaaatggtcag

SEQ ID NO: 499266 - DNA, 25 bp, Homo sapien
aataagagataacagtgaaaatggt

SEQ ID NO: 499267 - DNA, 25 bp, Homo sapien
atgtatgctcttgagtagagatgag

SEQ ID NO: 499268 - DNA, 25 bp, Homo sapien
taatgtatgctcttgagtagagatg

SEQ ID NO: 499269 - DNA, 25 bp, Homo sapien
aggattcctaaaattaatgtatgct

SEQ ID NO: 499270 - DNA, 25 bp, Homo sapien
aattaatgtatgctcttgagtagag

SEQ ID NO: 499271 - DNA, 25 bp, Homo sapien
gaagatatatccatcaaaacgatct

SEQ ID NO: 499272 - DNA, 25 bp, Homo sapien
caaggaagatatatccatcaaaacg

SEQ ID NO: 499273 - DNA, 25 bp, Homo sapien
gctgtcaaggaagatatatccatca

SEQ ID NO: 499274 - DNA, 25 bp, Homo sapien
tttgctgtcaaggaagatatatcca

SEQ ID NO: 499275 - DNA, 25 bp, Homo sapien
tatctgcacataattacagtaacat

SEQ ID NO: 499276 - DNA, 25 bp, Homo sapien
aattaaaatgcacaaatagaccgga

SEQ ID NO: 499277 - DNA, 25 bp, Homo sapien
taaaatgcacaaatagaccggatgc

SEQ ID NO: 499278 - DNA, 25 bp, Homo sapien
acaaatagaccggatgctgtggctc

SEQ ID NO: 499279 - DNA, 25 bp, Homo sapien
agttgaagactgctgtctccgcagg

SEQ ID NO: 499280 - DNA, 25 bp, Homo sapien
tattgagagtagagttgaagactgc

SEQ ID NO: 499281 - DNA, 25 bp, Homo sapien
agtgacttcctggtgacattatcat

SEQ ID NO: 499282 - DNA, 25 bp, Homo sapien
ggcaaagctgtttaacagcagtgac

SEQ ID NO: 499283 - DNA, 25 bp, Homo sapien
tagtccttacccctcattggagaaa

SEQ ID NO: 499284 - DNA, 25 bp, Homo sapien
cacatttgcttctagtcacaggaac

SEQ ID NO: 499285 - DNA, 25 bp, Homo sapien
tcaaaacacgtggagtcggaagagg

SEQ ID NO: 499286 - DNA, 25 bp, Homo sapien
tacaaacttgacagccaggaacaca

SEQ ID NO: 499287 - DNA, 25 bp, Homo sapien
cactggaccagcagggacgatgtcc

SEQ ID NO: 499288 - DNA, 25 bp, Homo sapien
agataaccggaaacaaggacgactg

SEQ ID NO: 499289 - DNA, 25 bp, Homo sapien
gagaccataaaaacaacggcagggc

SEQ ID NO: 499290 - DNA, 25 bp, Homo sapien
tacaggtgggaacctaaaatggcgc

SEQ ID NO: 499291 - DNA, 25 bp, Homo sapien
taacaggaaacatgttccagaagcc

SEQ ID NO: 499292 - DNA, 25 bp, Homo sapien
cttttaacaggaaacatgttccaga

SEQ ID NO: 499293 - DNA, 25 bp, Homo sapien
tttaacaggaaacatgttccagaag

SEQ ID NO: 499294 - DNA, 25 bp, Homo sapien
acaggaaacatgttccagaagccat

SEQ ID NO: 499295 - DNA, 25 bp, Homo sapien
ctctaccactgcaggatattctagg

SEQ ID NO: 499296 - DNA, 25 bp, Homo sapien
catcttcgatgcttccagtcttggc

SEQ ID NO: 499297 - DNA, 25 bp, Homo sapien
ggagcaaactctaccactgcaggat

SEQ ID NO: 499298 - DNA, 25 bp, Homo sapien
ctttttggctatcttctggaatgga

SEQ ID NO: 499299 - DNA, 25 bp, Homo sapien
ataacgtagcacttggaaagggctc

SEQ ID NO: 499300 - DNA, 25 bp, Homo sapien
tataatctttcccaactacgggaga

SEQ ID NO: 499301 - DNA, 25 bp, Homo sapien
cgggagaattacatttgctcagtgt

SEQ ID NO: 499302 - DNA, 25 bp, Homo sapien
gcagcttcataacgtagcacttgga

SEQ ID NO: 499303 - DNA, 25 bp, Homo sapien
ctcttgtcttcgcctccatctcccc

SEQ ID NO: 499304 - DNA, 25 bp, Homo sapien
ccccagcagagtctcagggttggca

SEQ ID NO: 499305 - DNA, 25 bp, Homo sapien
gacgctcaggaacagaccattcatg

SEQ ID NO: 499306 - DNA, 25 bp, Homo sapien
gctgggcttatccacaagttggcct

SEQ ID NO: 499307 - DNA, 25 bp, Homo sapien
tgaggcatccgtctgtgaccactga

SEQ ID NO: 499308 - DNA, 25 bp, Homo sapien
cactaccaggtgtgtctgggactaa

SEQ ID NO: 499309 - DNA, 25 bp, Homo sapien
taaagtgaccgatcctttgcaaggg

SEQ ID NO: 499310 - DNA, 25 bp, Homo sapien
gaagactctacagccaagtcctgga

SEQ ID NO: 499311 - DNA, 25 bp, Homo sapien
gaatgaattaatcgctcccatcagg

SEQ ID NO: 499312 - DNA, 25 bp, Homo sapien
cgtgtctgccccaaaaaggtatgtc

SEQ ID NO: 499313 - DNA, 25 bp, Homo sapien
caccgcacccggccaagtttcaatt

SEQ ID NO: 499314 - DNA, 25 bp, Homo sapien
aatacgggaaccatatcattacttt

SEQ ID NO: 499315 - DNA, 25 bp, Homo sapien
tgtatttaactcctaaagaaagatg

SEQ ID NO: 499316 - DNA, 25 bp, Homo sapien
aaataaatacgggaaccatatcatt

SEQ ID NO: 499317 - DNA, 25 bp, Homo sapien
ttactgtcaggtcaagtaatttgaa

SEQ ID NO: 499318 - DNA, 25 bp, Homo sapien
tccaaaagaggtgtggttcttctag

SEQ ID NO: 499319 - DNA, 25 bp, Homo sapien
atatattccaaaagaggtgtggttc

SEQ ID NO: 499320 - DNA, 25 bp, Homo sapien
tatattccaaaagaggtgtggttct

SEQ ID NO: 499321 - DNA, 25 bp, Homo sapien
tattccaaaagaggtgtggttcttc

SEQ ID NO: 499322 - DNA, 25 bp, Homo sapien
cagggagggtgttcatcaggtaaag

SEQ ID NO: 499323 - DNA, 25 bp, Homo sapien
ttcatcaggtaaaggccagacctac

SEQ ID NO: 499324 - DNA, 25 bp, Homo sapien
agacatggaagagcgtgtgtataaa

SEQ ID NO: 499325 - DNA, 25 bp, Homo sapien
aaagacatggaagagcgtgtgtata

SEQ ID NO: 499326 - DNA, 25 bp, Homo sapien
ctaaagacatggaagagcgtgtgta

SEQ ID NO: 499327 - DNA, 25 bp, Homo sapien
taaagacatggaagagcgtgtgtat

SEQ ID NO: 499328 - DNA, 25 bp, Homo sapien
cttaatccttacttctttctctgca

SEQ ID NO: 499329 - DNA, 25 bp, Homo sapien
gttcttctcgcttctcttctcgaat

SEQ ID NO: 499330 - DNA, 25 bp, Homo sapien
cttctcgcttctcttctcgaattct

SEQ ID NO: 499331 - DNA, 25 bp, Homo sapien
tcctcctccgttcttctcgcttctc

SEQ ID NO: 499332 - DNA, 25 bp, Homo sapien
gcacgtgtacgccttgagccgaaaa

SEQ ID NO: 499333 - DNA, 25 bp, Homo sapien
tgtacgccttgagccgaaaatgaac

SEQ ID NO: 499334 - DNA, 25 bp, Homo sapien
ctgcacgtgtacgccttgagccgaa

SEQ ID NO: 499335 - DNA, 25 bp, Homo sapien
cgtgtacgccttgagccgaaaatga

SEQ ID NO: 499336 - DNA, 25 bp, Homo sapien
gaatagccatgagtgctacgcacgg

SEQ ID NO: 499337 - DNA, 25 bp, Homo sapien
ggtactgtgctgattacctgggcaa

SEQ ID NO: 499338 - DNA, 25 bp, Homo sapien
gaaactcattagtgctactgccaaa

SEQ ID NO: 499339 - DNA, 25 bp, Homo sapien
gatgttgcacccctgtaatgggagg

SEQ ID NO: 499340 - DNA, 25 bp, Homo sapien
ttgatgtgctcaccaacccggaagg

SEQ ID NO: 499341 - DNA, 25 bp, Homo sapien
ttagcaccagaacccacgggtcaag

SEQ ID NO: 499342 - DNA, 25 bp, Homo sapien
tgtgaaccataggaagtgcaaatct

SEQ ID NO: 499343 - DNA, 25 bp, Homo sapien
tcaccggtacttctgaccagtcagc

SEQ ID NO: 499344 - DNA, 25 bp, Homo sapien
ctgtattaatagtgattatttcctt

SEQ ID NO: 499345 - DNA, 25 bp, Homo sapien
tgtattaatagtgattatttccttt

SEQ ID NO: 499346 - DNA, 25 bp, Homo sapien
gggcctggcttttacgactgcaccg

SEQ ID NO: 499347 - DNA, 25 bp, Homo sapien
gcctggcttttacgactgcaccggg

SEQ ID NO: 499348 - DNA, 25 bp, Homo sapien
ggcctggcttttacgactgcaccgg

SEQ ID NO: 499349 - DNA, 25 bp, Homo sapien
ggggctcctccagcgagccttccat

SEQ ID NO: 499350 - DNA, 25 bp, Homo sapien
cctggggctcctccagcgagccttc

SEQ ID NO: 499351 - DNA, 25 bp, Homo sapien
tggggctcctccagcgagccttcca

SEQ ID NO: 499352 - DNA, 25 bp, Homo sapien
ctcctggggctcctccagcgagcct

SEQ ID NO: 499353 - DNA, 25 bp, Homo sapien
aaatccacgtccatcatcccctgtg

SEQ ID NO: 499354 - DNA, 25 bp, Homo sapien
tccacgtccatcatcccctgtgggc

SEQ ID NO: 499355 - DNA, 25 bp, Homo sapien
ctaaaatccacgtccatcatcccct

SEQ ID NO: 499356 - DNA, 25 bp, Homo sapien
aatccacgtccatcatcccctgtgg

SEQ ID NO: 499357 - DNA, 25 bp, Homo sapien
tgtgctctttatcactgccgctgtg

SEQ ID NO: 499358 - DNA, 25 bp, Homo sapien
tccacatccctgtgctctttatcac

SEQ ID NO: 499359 - DNA, 25 bp, Homo sapien
cctgtgctctttatcactgccgctg

SEQ ID NO: 499360 - DNA, 25 bp, Homo sapien
gctctttatcactgccgctgtgtga

SEQ ID NO: 499361 - DNA, 25 bp, Homo sapien
tcttccctctgtcttggccaggtcc

SEQ ID NO: 499362 - DNA, 25 bp, Homo sapien
cttgtttgccagtcgctcttttctg

SEQ ID NO: 499363 - DNA, 25 bp, Homo sapien
tggactgtcgtcacacctctgcgct

SEQ ID NO: 499364 - DNA, 25 bp, Homo sapien
tttctgggtgctggactgtcgtcac

SEQ ID NO: 499365 - DNA, 25 bp, Homo sapien
cctcagtttgctaggaggccagggt

SEQ ID NO: 499366 - DNA, 25 bp, Homo sapien
catctgtagtgctgcgctgggaaaa

SEQ ID NO: 499367 - DNA, 25 bp, Homo sapien
cgtccgtgcagatctaacttacagg

SEQ ID NO: 499368 - DNA, 25 bp, Homo sapien
tgttaataatgtggaagaaacctcc

SEQ ID NO: 499369 - DNA, 25 bp, Homo sapien
gaaagccactctcaaagctcacata

SEQ ID NO: 499370 - DNA, 25 bp, Homo sapien
tgaacatcgttcatacacacaacaa

SEQ ID NO: 499371 - DNA, 25 bp, Homo sapien
ctgaaaggaattagactgagtgaag

SEQ ID NO: 499372 - DNA, 25 bp, Homo sapien
tgtgtgtttccatttatcaagcatt

SEQ ID NO: 499373 - DNA, 25 bp, Homo sapien
ttctgccttgcagatcctcctgttt

SEQ ID NO: 499374 - DNA, 25 bp, Homo sapien
cttccctcttctcaggaccagtccc

SEQ ID NO: 499375 - DNA, 25 bp, Homo sapien
ccctcttctcaggaccagtccccga

SEQ ID NO: 499376 - DNA, 25 bp, Homo sapien
ttccctcttctcaggaccagtcccc

SEQ ID NO: 499377 - DNA, 25 bp, Homo sapien
ctcttctcaggaccagtccccgaac

SEQ ID NO: 499378 - DNA, 25 bp, Homo sapien
agcacgagtgactgacagctcctct

SEQ ID NO: 499379 - DNA, 25 bp, Homo sapien
gcatggctgactcacaaaggttgta

SEQ ID NO: 499380 - DNA, 25 bp, Homo sapien
gaactactcttcactcgacaccatg

SEQ ID NO: 499381 - DNA, 25 bp, Homo sapien
tctgcttacaaacgaatgaaaccca

SEQ ID NO: 499382 - DNA, 25 bp, Homo sapien
acagaatgcacggtttcagaaagct

SEQ ID NO: 499383 - DNA, 25 bp, Homo sapien
taaatggttaaaatcgcagtgccaa

SEQ ID NO: 499384 - DNA, 25 bp, Homo sapien
agaaactacagaatgcacggtttca

SEQ ID NO: 499385 - DNA, 25 bp, Homo sapien
taaaatcgcagtgccaaaaatacat

SEQ ID NO: 499386 - DNA, 25 bp, Homo sapien
tgatgaaacaaacaactagcctccc

SEQ ID NO: 499387 - DNA, 25 bp, Homo sapien
ttcattcatcctggtgtggaaatcc

SEQ ID NO: 499388 - DNA, 25 bp, Homo sapien
cacacaacggccaaagaacacttgg

SEQ ID NO: 499389 - DNA, 25 bp, Homo sapien
ttgatgtcaagtagaaccaatagac

SEQ ID NO: 499390 - DNA, 25 bp, Homo sapien
tcttcacagactcaggcgggattcg

SEQ ID NO: 499391 - DNA, 25 bp, Homo sapien
ttcgatggtcaaagctctaaaagca

SEQ ID NO: 499392 - DNA, 25 bp, Homo sapien
tctaaaagcattggccatcgaccat

SEQ ID NO: 499393 - DNA, 25 bp, Homo sapien
tttttggatttcatctcaggcttcc

SEQ ID NO: 499394 - DNA, 25 bp, Homo sapien
gctgacgggaagcaagtttggcgcc

SEQ ID NO: 499395 - DNA, 25 bp, Homo sapien
aatcagatcgccgatcgcgtggcgc

SEQ ID NO: 499396 - DNA, 25 bp, Homo sapien
tgcgtgggcaaaactagcggctcgc

SEQ ID NO: 499397 - DNA, 25 bp, Homo sapien
tcccgaatggcgactggatgcagga

SEQ ID NO: 499398 - DNA, 25 bp, Homo sapien
cttaaaagtggtcttcaaaaggcag

SEQ ID NO: 499399 - DNA, 25 bp, Homo sapien
catggctttttgactaaaccacagc

SEQ ID NO: 499400 - DNA, 25 bp, Homo sapien
cagcctatagtatatgaagaagaac

SEQ ID NO: 499401 - DNA, 25 bp, Homo sapien
caaaaggcaggcattctacatggct

SEQ ID NO: 499402 - DNA, 25 bp, Homo sapien
gctaaaaaggtgacagatacttgag

SEQ ID NO: 499403 - DNA, 25 bp, Homo sapien
gttctcactggcaatactgcttcct

SEQ ID NO: 499404 - DNA, 25 bp, Homo sapien
gcccagcagttatcctgtattttag

SEQ ID NO: 499405 - DNA, 25 bp, Homo sapien
ttttatccaaggtatatcatttgcc

SEQ ID NO: 499406 - DNA, 25 bp, Homo sapien
tgcaggctctccctttattaattac

SEQ ID NO: 499407 - DNA, 25 bp, Homo sapien
caggccaatcgcttggaccagaagt

SEQ ID NO: 499408 - DNA, 25 bp, Homo sapien
caggctctccctttattaattacaa

SEQ ID NO: 499409 - DNA, 25 bp, Homo sapien
aggcaggccaatcgcttggaccaga

SEQ ID NO: 499410 - DNA, 25 bp, Homo sapien
tggtcacactccaaacgtgctgatg

SEQ ID NO: 499411 - DNA, 25 bp, Homo sapien
tatcattttgcctagcccaccagca

SEQ ID NO: 499412 - DNA, 25 bp, Homo sapien
gcctctgaaactgcaatggtcacac

SEQ ID NO: 499413 - DNA, 25 bp, Homo sapien
gctgatggtttacgaagttcctgga

SEQ ID NO: 499414 - DNA, 25 bp, Homo sapien
cagaggcaggttttgaaggctcagg

SEQ ID NO: 499415 - DNA, 25 bp, Homo sapien
tttctgtgtttccattgaaagggca

SEQ ID NO: 499416 - DNA, 25 bp, Homo sapien
taggttttggcgattctggagacaa

SEQ ID NO: 499417 - DNA, 25 bp, Homo sapien
tttctgagactcacaaacagggact

SEQ ID NO: 499418 - DNA, 25 bp, Homo sapien
taagagtagcctttactgactcagg

SEQ ID NO: 499419 - DNA, 25 bp, Homo sapien
tgtttccgggaaatgagactgcttc

SEQ ID NO: 499420 - DNA, 25 bp, Homo sapien
ttactaagagtagcctttactgact

SEQ ID NO: 499421 - DNA, 25 bp, Homo sapien
tactgactcaggagatacaggggca

SEQ ID NO: 499422 - DNA, 25 bp, Homo sapien
ccgggtttgcgaagctctggagaca

SEQ ID NO: 499423 - DNA, 25 bp, Homo sapien
tccagtggcggttcaagagcttcca

SEQ ID NO: 499424 - DNA, 25 bp, Homo sapien
tccgctgatcaggagaaagcttcca

SEQ ID NO: 499425 - DNA, 25 bp, Homo sapien
tcagtatcgatagagagaacaggct

SEQ ID NO: 499426 - DNA, 25 bp, Homo sapien
gatccaactatgctatctgataagc

SEQ ID NO: 499427 - DNA, 25 bp, Homo sapien
ggtacaccatacatgtcatctactg

SEQ ID NO: 499428 - DNA, 25 bp, Homo sapien
tcattcttagtaacacaactgagac

SEQ ID NO: 499429 - DNA, 25 bp, Homo sapien
gagacagtgaaacacggtacaccat

SEQ ID NO: 499430 - DNA, 25 bp, Homo sapien
ggaagaaccagatcttagggtaaga

SEQ ID NO: 499431 - DNA, 25 bp, Homo sapien
tcaacctggtcttaagccccaacag

SEQ ID NO: 499432 - DNA, 25 bp, Homo sapien
cccaacaggcgacatgtaaggccca

SEQ ID NO: 499433 - DNA, 25 bp, Homo sapien
ggcccaggagtaggatatacaaact

SEQ ID NO: 499434 - DNA, 25 bp, Homo sapien
cacccggcccacatgtttgtcttct

SEQ ID NO: 499435 - DNA, 25 bp, Homo sapien
ggagaagtgtctcttcatgtccttg

SEQ ID NO: 499436 - DNA, 25 bp, Homo sapien
cacacccggcccacatgtttgtctt

SEQ ID NO: 499437 - DNA, 25 bp, Homo sapien
cccggcccacatgtttgtcttcttt

SEQ ID NO: 499438 - DNA, 25 bp, Homo sapien
gtgtttttctctccagtgggggctg

SEQ ID NO: 499439 - DNA, 25 bp, Homo sapien
taaaactctctggtgtttttctctc

SEQ ID NO: 499440 - DNA, 25 bp, Homo sapien
aaactctctggtgtttttctctcca

SEQ ID NO: 499441 - DNA, 25 bp, Homo sapien
tttttctctccagtgggggctgcat

SEQ ID NO: 499442 - DNA, 25 bp, Homo sapien
aataaccaagatctcctgcaggtgc

SEQ ID NO: 499443 - DNA, 25 bp, Homo sapien
ataaccaagatctcctgcaggtgcc

SEQ ID NO: 499444 - DNA, 25 bp, Homo sapien
aggtttctcactgatatttctccaa

SEQ ID NO: 499445 - DNA, 25 bp, Homo sapien
aaaatctgtacattatatagggcaa

SEQ ID NO: 499446 - DNA, 25 bp, Homo sapien
tatatagggcaagtaaaggtattac

SEQ ID NO: 499447 - DNA, 25 bp, Homo sapien
ataggcataatctttagtatgaatt

SEQ ID NO: 499448 - DNA, 25 bp, Homo sapien
cacagtcttccgatttgtttgattt

SEQ ID NO: 499449 - DNA, 25 bp, Homo sapien
ttttgccacagtcttccgatttgtt

SEQ ID NO: 499450 - DNA, 25 bp, Homo sapien
tgccacagtcttccgatttgtttga

SEQ ID NO: 499451 - DNA, 25 bp, Homo sapien
ttgccacagtcttccgatttgtttg

SEQ ID NO: 499452 - DNA, 25 bp, Homo sapien
ttgacatttgtagtgtatctctcca

SEQ ID NO: 499453 - DNA, 25 bp, Homo sapien
agtgtatctctccagtatgaactct

SEQ ID NO: 499454 - DNA, 25 bp, Homo sapien
tcttgacatttgtagtgtatctctc

SEQ ID NO: 499455 - DNA, 25 bp, Homo sapien
gtagtgtatctctccagtatgaact

SEQ ID NO: 499456 - DNA, 25 bp, Homo sapien
tcttcacatttctggattcctctcc

SEQ ID NO: 499457 - DNA, 25 bp, Homo sapien
tctcttatgtatagtgaggcctgaa

SEQ ID NO: 499458 - DNA, 25 bp, Homo sapien
cacatttctggattcctctccagta

SEQ ID NO: 499459 - DNA, 25 bp, Homo sapien
tcttatgtatagtgaggcctgaaga

SEQ ID NO: 499460 - DNA, 25 bp, Homo sapien
gtttaaagactctgacacattcttc

SEQ ID NO: 499461 - DNA, 25 bp, Homo sapien
tcagttttgaggagtgtttaaagac

SEQ ID NO: 499462 - DNA, 25 bp, Homo sapien
ctctgatgtatagtaagctcagagg

SEQ ID NO: 499463 - DNA, 25 bp, Homo sapien
tgatgtatagtaagctcagaggacc

SEQ ID NO: 499464 - DNA, 25 bp, Homo sapien
cttgaggaacagtaaaagcctttgc

SEQ ID NO: 499465 - DNA, 25 bp, Homo sapien
tgaactatcatatgcttagtaaggc

SEQ ID NO: 499466 - DNA, 25 bp, Homo sapien
tcagtatgaactatcatatgcttag

SEQ ID NO: 499467 - DNA, 25 bp, Homo sapien
atatgcttagtaaggcttgaggaac

SEQ ID NO: 499468 - DNA, 25 bp, Homo sapien
aatgttcattcagttttgaggatag

SEQ ID NO: 499469 - DNA, 25 bp, Homo sapien
cattcagttttgaggatagtttaaa

SEQ ID NO: 499470 - DNA, 25 bp, Homo sapien
tcagttttgaggatagtttaaagac

SEQ ID NO: 499471 - DNA, 25 bp, Homo sapien
taatgttcattcagttttgaggata

SEQ ID NO: 499472 - DNA, 25 bp, Homo sapien
tctcttatgaactatgttattttga

SEQ ID NO: 499473 - DNA, 25 bp, Homo sapien
tgtagtgtttctcttatgaactatg

SEQ ID NO: 499474 - DNA, 25 bp, Homo sapien
ttgaggaacagtaaaacgctttgcc

SEQ ID NO: 499475 - DNA, 25 bp, Homo sapien
ttatatatagtaagatttgaagacc

SEQ ID NO: 499476 - DNA, 25 bp, Homo sapien
ttaaaagctttgatgcattcttgac

SEQ ID NO: 499477 - DNA, 25 bp, Homo sapien
atgaactatcatgtttagtaaagct

SEQ ID NO: 499478 - DNA, 25 bp, Homo sapien
tccagtatgaactatcatgtttagt

SEQ ID NO: 499479 - DNA, 25 bp, Homo sapien
gtatgaactatcatgtttagtaaag

SEQ ID NO: 499480 - DNA, 25 bp, Homo sapien
cagtatgaactatcatgtttagtaa

SEQ ID NO: 499481 - DNA, 25 bp, Homo sapien
caaagactgcttacaagctttgcca

SEQ ID NO: 499482 - DNA, 25 bp, Homo sapien
tgaactatgttatgttgagtaaggc

SEQ ID NO: 499483 - DNA, 25 bp, Homo sapien
gtaggttgtatctccagtataaatt

SEQ ID NO: 499484 - DNA, 25 bp, Homo sapien
ctgaggaatagtaaaaagctttgcc

SEQ ID NO: 499485 - DNA, 25 bp, Homo sapien
aattctctcaggtatagtaagacct

SEQ ID NO: 499486 - DNA, 25 bp, Homo sapien
ctttcttcaaatttgtaggttgtat

SEQ ID NO: 499487 - DNA, 25 bp, Homo sapien
atgtcttctcctaagtctatttgaa

SEQ ID NO: 499488 - DNA, 25 bp, Homo sapien
ggtgtgagaacctgtgaaagaattg

SEQ ID NO: 499489 - DNA, 25 bp, Homo sapien
tgaaatgagaacacagctgaaagaa

SEQ ID NO: 499490 - DNA, 25 bp, Homo sapien
ctagccaaaggtcttcggtgaaatg

SEQ ID NO: 499491 - DNA, 25 bp, Homo sapien
cggtgaaatgagaacacagctgaaa

SEQ ID NO: 499492 - DNA, 25 bp, Homo sapien
gaaatgagaacacagctgaaagaaa

SEQ ID NO: 499493 - DNA, 25 bp, Homo sapien
gttcagtgtaccaggtgagcaaaat

SEQ ID NO: 499494 - DNA, 25 bp, Homo sapien
ttcagtgtaccaggtgagcaaaatg

SEQ ID NO: 499495 - DNA, 25 bp, Homo sapien
ctggccaatatggtgaaaccccatc

SEQ ID NO: 499496 - DNA, 25 bp, Homo sapien
acctgaggtcaggaggtagagatca

SEQ ID NO: 499497 - DNA, 25 bp, Homo sapien
gcctggccaatatggtgaaacccca

SEQ ID NO: 499498 - DNA, 25 bp, Homo sapien
ggccaatatggtgaaaccccatctc

SEQ ID NO: 499499 - DNA, 25 bp, Homo sapien
ggtgcttcatactccatggcttttt

SEQ ID NO: 499500 - DNA, 25 bp, Homo sapien
tgaccaggtctggcttagagaagac

SEQ ID NO: 499501 - DNA, 25 bp, Homo sapien
accaggtctggcttagagaagacaa

SEQ ID NO: 499502 - DNA, 25 bp, Homo sapien
tgcttcatactccatggctttttcc

SEQ ID NO: 499503 - DNA, 25 bp, Homo sapien
caaaacacatcctacaaaggaagaa

SEQ ID NO: 499504 - DNA, 25 bp, Homo sapien
cacatcctacaaaggaagaaaatga

SEQ ID NO: 499505 - DNA, 25 bp, Homo sapien
catcctacaaaggaagaaaatgaaa

SEQ ID NO: 499506 - DNA, 25 bp, Homo sapien
aacacatcctacaaaggaagaaaat

SEQ ID NO: 499507 - DNA, 25 bp, Homo sapien
tatcctcaaccaagaagacagggtt

SEQ ID NO: 499508 - DNA, 25 bp, Homo sapien
gttatcctcaaccaagaagacaggg

SEQ ID NO: 499509 - DNA, 25 bp, Homo sapien
gaagttatcctcaaccaagaagaca

SEQ ID NO: 499510 - DNA, 25 bp, Homo sapien
agggtaaattaggaattctatattg

SEQ ID NO: 499511 - DNA, 25 bp, Homo sapien
tagttctgtaacatcacatccatac

SEQ ID NO: 499512 - DNA, 25 bp, Homo sapien
tattgacactcctccagacagaatt

SEQ ID NO: 499513 - DNA, 25 bp, Homo sapien
gttctgtaacatcacatccatacac

SEQ ID NO: 499514 - DNA, 25 bp, Homo sapien
gagcagcatccaggtattgacactc

SEQ ID NO: 499515 - DNA, 25 bp, Homo sapien
ctgagaaaaagccatttttctcttc

SEQ ID NO: 499516 - DNA, 25 bp, Homo sapien
catttttctcttcatcatccttctc

SEQ ID NO: 499517 - DNA, 25 bp, Homo sapien
ttctcttcatcatccttctctagca

SEQ ID NO: 499518 - DNA, 25 bp, Homo sapien
tttttctcttcatcatccttctcta

SEQ ID NO: 499519 - DNA, 25 bp, Homo sapien
gtagaaagatccaggcatgcagaac

SEQ ID NO: 499520 - DNA, 25 bp, Homo sapien
ctttaaaggaatcagcacaatctct

SEQ ID NO: 499521 - DNA, 25 bp, Homo sapien
tgctaccaccacaaacacaggtaga

SEQ ID NO: 499522 - DNA, 25 bp, Homo sapien
caggcatgcagaacatgtccaccca

SEQ ID NO: 499523 - DNA, 25 bp, Homo sapien
aaattcgaagtattccaacgtctgc

SEQ ID NO: 499524 - DNA, 25 bp, Homo sapien
aggagaaattcgaagtattccaacg

SEQ ID NO: 499525 - DNA, 25 bp, Homo sapien
gagaaattcgaagtattccaacgtc

SEQ ID NO: 499526 - DNA, 25 bp, Homo sapien
gatgaggagaaattcgaagtattcc

SEQ ID NO: 499527 - DNA, 25 bp, Homo sapien
tggcagggtcggagtttgccacagc

SEQ ID NO: 499528 - DNA, 25 bp, Homo sapien
ggcagggtcggagtttgccacagct

SEQ ID NO: 499529 - DNA, 25 bp, Homo sapien
gcagggtcggagtttgccacagctg

SEQ ID NO: 499530 - DNA, 25 bp, Homo sapien
gagtcagttctttcttgccggagcc

SEQ ID NO: 499531 - DNA, 25 bp, Homo sapien
gcctgaccacctgaattagcctctg

SEQ ID NO: 499532 - DNA, 25 bp, Homo sapien
ctggctggtgtaggagcatggtctg

SEQ ID NO: 499533 - DNA, 25 bp, Homo sapien
tgaattagcctctgggcggcgtctg

SEQ ID NO: 499534 - DNA, 25 bp, Homo sapien
gtctggccctgggatccgcctggct

SEQ ID NO: 499535 - DNA, 25 bp, Homo sapien
agggtacgctcttcctttgcctgca

SEQ ID NO: 499536 - DNA, 25 bp, Homo sapien
ctagggtacgctcttcctttgcctg

SEQ ID NO: 499537 - DNA, 25 bp, Homo sapien
gggtacgctcttcctttgcctgcac

SEQ ID NO: 499538 - DNA, 25 bp, Homo sapien
tagggtacgctcttcctttgcctgc

SEQ ID NO: 499539 - DNA, 25 bp, Homo sapien
gtcctggctcttggtggtgcatgca

SEQ ID NO: 499540 - DNA, 25 bp, Homo sapien
gttctcagtagacgccggcagggtt

SEQ ID NO: 499541 - DNA, 25 bp, Homo sapien
tgcggcgctgactgcctgaattagg

SEQ ID NO: 499542 - DNA, 25 bp, Homo sapien
aagtgcccggttgctctgttgctgc

SEQ ID NO: 499543 - DNA, 25 bp, Homo sapien
cgccatgcgcaggtgccagctgcag

SEQ ID NO: 499544 - DNA, 25 bp, Homo sapien
cagggtcaggactgccactactact

SEQ ID NO: 499545 - DNA, 25 bp, Homo sapien
tactactgccgtgcgccatgcgcag

SEQ ID NO: 499546 - DNA, 25 bp, Homo sapien
atgccttggaggcatccggccctgg

SEQ ID NO: 499547 - DNA, 25 bp, Homo sapien
ctggtccggtcccagacggcctgag

SEQ ID NO: 499548 - DNA, 25 bp, Homo sapien
tgagggtcatttgcccgcgcccaga

SEQ ID NO: 499549 - DNA, 25 bp, Homo sapien
tcccagacggcctgagggtcatttg

SEQ ID NO: 499550 - DNA, 25 bp, Homo sapien
gacggcctgagggtcatttgcccgc

SEQ ID NO: 499551 - DNA, 25 bp, Homo sapien
gaatccgctgaagggcaagttcccg

SEQ ID NO: 499552 - DNA, 25 bp, Homo sapien
aagttcccgctcttctacagctgtg

SEQ ID NO: 499553 - DNA, 25 bp, Homo sapien
agcctccaggaatccgctgaagggc

SEQ ID NO: 499554 - DNA, 25 bp, Homo sapien
gtggctggcgctgggcattgtgcag

SEQ ID NO: 499555 - DNA, 25 bp, Homo sapien
tcggcgggcggagtccgggtttgca

SEQ ID NO: 499556 - DNA, 25 bp, Homo sapien
tatggctctagggtttcgaggccgc

SEQ ID NO: 499557 - DNA, 25 bp, Homo sapien
ccatgagcaggtagcagctgcagcg

SEQ ID NO: 499558 - DNA, 25 bp, Homo sapien
tccgggtttgcagccgctgtgcgcc

SEQ ID NO: 499559 - DNA, 25 bp, Homo sapien
cggcgccgggctctgtgcgggcgct

SEQ ID NO: 499560 - DNA, 25 bp, Homo sapien
gtgccggcgccgggctctgtgcggg

SEQ ID NO: 499561 - DNA, 25 bp, Homo sapien
cgccgggctctgtgcgggcgctggg

SEQ ID NO: 499562 - DNA, 25 bp, Homo sapien
cagagcgggttgtgccggcgccggg

SEQ ID NO: 499563 - DNA, 25 bp, Homo sapien
gtgctgagtgcaggttcccgtcttc

SEQ ID NO: 499564 - DNA, 25 bp, Homo sapien
ggatggtgctgagtgcaggttcccg

SEQ ID NO: 499565 - DNA, 25 bp, Homo sapien
atggtgctgagtgcaggttcccgtc

SEQ ID NO: 499566 - DNA, 25 bp, Homo sapien
ggtgctgagtgcaggttcccgtctt

SEQ ID NO: 499567 - DNA, 25 bp, Homo sapien
tgtcgtctggaacaggctggtctgt

SEQ ID NO: 499568 - DNA, 25 bp, Homo sapien
ggtcgaagtcgcctctgttgctgca

SEQ ID NO: 499569 - DNA, 25 bp, Homo sapien
gtccgagctgctgatggcgtgggcg

SEQ ID NO: 499570 - DNA, 25 bp, Homo sapien
tgcagcgtgccatttgcactgtcgt

SEQ ID NO: 499571 - DNA, 25 bp, Homo sapien
aagccggtgacactgccctgcggga

SEQ ID NO: 499572 - DNA, 25 bp, Homo sapien
tgccctgcgggatcacggtctgtga

SEQ ID NO: 499573 - DNA, 25 bp, Homo sapien
ccgcggctgctgcacaagccggtga

SEQ ID NO: 499574 - DNA, 25 bp, Homo sapien
gcggctgctgcacaagccggtgaca

SEQ ID NO: 499575 - DNA, 25 bp, Homo sapien
ggggaagcaagtcacagtcagggca

SEQ ID NO: 499576 - DNA, 25 bp, Homo sapien
ggaagcaagtcacagtcagggcact

SEQ ID NO: 499577 - DNA, 25 bp, Homo sapien
gggaagcaagtcacagtcagggcac

SEQ ID NO: 499578 - DNA, 25 bp, Homo sapien
ggggggaagcaagtcacagtcaggg

SEQ ID NO: 499579 - DNA, 25 bp, Homo sapien
ggtcttgaccacaattgggcgcatg

SEQ ID NO: 499580 - DNA, 25 bp, Homo sapien
gtcttgaccacaattgggcgcatga

SEQ ID NO: 499581 - DNA, 25 bp, Homo sapien
ttggtcttgaccacaattgggcgca

SEQ ID NO: 499582 - DNA, 25 bp, Homo sapien
tcttggtcttgaccacaattgggcg

SEQ ID NO: 499583 - DNA, 25 bp, Homo sapien
cgtctctgctttaccgcctttttct

SEQ ID NO: 499584 - DNA, 25 bp, Homo sapien
atgttttatatccacagaatttctg

SEQ ID NO: 499585 - DNA, 25 bp, Homo sapien
tgttctcgtctctgctttaccgcct

SEQ ID NO: 499586 - DNA, 25 bp, Homo sapien
ttttatccacttgcatgtattcaat

SEQ ID NO: 499587 - DNA, 25 bp, Homo sapien
tatatctgcatatctaggttctgaa

SEQ ID NO: 499588 - DNA, 25 bp, Homo sapien
tctgcatatctaggttctgaaaagc

SEQ ID NO: 499589 - DNA, 25 bp, Homo sapien
ctatatctgcatatctaggttctga

SEQ ID NO: 499590 - DNA, 25 bp, Homo sapien
tatctgcatatctaggttctgaaaa

SEQ ID NO: 499591 - DNA, 25 bp, Homo sapien
accacctggaccatggtgtcagcag

SEQ ID NO: 499592 - DNA, 25 bp, Homo sapien
cagacactgagatgcttgctaggag

SEQ ID NO: 499593 - DNA, 25 bp, Homo sapien
ctgcagacactgagatgcttgctag

SEQ ID NO: 499594 - DNA, 25 bp, Homo sapien
agacactgagatgcttgctaggagg

SEQ ID NO: 499595 - DNA, 25 bp, Homo sapien
gcagacactgagatgcttgctagga

SEQ ID NO: 499596 - DNA, 25 bp, Homo sapien
cgtgtcaggaccatgcaagaagctg

SEQ ID NO: 499597 - DNA, 25 bp, Homo sapien
atgctgatgggggtgaccaaaatac

SEQ ID NO: 499598 - DNA, 25 bp, Homo sapien
tacagtatggggcagctgcgtgcca

SEQ ID NO: 499599 - DNA, 25 bp, Homo sapien
tgatgggggtgaccaaaatacagta

SEQ ID NO: 499600 - DNA, 25 bp, Homo sapien
ggttcagcgcccgagcgtgcgcgcg

SEQ ID NO: 499601 - DNA, 25 bp, Homo sapien
tcgtcgcccggctcggcgtcgggag

SEQ ID NO: 499602 - DNA, 25 bp, Homo sapien
accgggttcagcgcccgagcgtgcg

SEQ ID NO: 499603 - DNA, 25 bp, Homo sapien
gtgcgcgcgcgtccccgctcgtcgc

SEQ ID NO: 499604 - DNA, 25 bp, Homo sapien
gcccgtgcggctccgggtgtgggac

SEQ ID NO: 499605 - DNA, 25 bp, Homo sapien
tggcggggatgggcccgtgcggctc

SEQ ID NO: 499606 - DNA, 25 bp, Homo sapien
ggatgggcccgtgcggctccgggtg

SEQ ID NO: 499607 - DNA, 25 bp, Homo sapien
gtgcggctccgggtgtgggacgtac

SEQ ID NO: 499608 - DNA, 25 bp, Homo sapien
gcgaacggtgcggacatgggccttg

SEQ ID NO: 499609 - DNA, 25 bp, Homo sapien
ggcgaacggtgcggacatgggcctt

SEQ ID NO: 499610 - DNA, 25 bp, Homo sapien
gggcgaacggtgcggacatgggcct

SEQ ID NO: 499611 - DNA, 25 bp, Homo sapien
ttggccggtgtagacagcagcaaac

SEQ ID NO: 499612 - DNA, 25 bp, Homo sapien
gttcttggccggtgtagacagcagc

SEQ ID NO: 499613 - DNA, 25 bp, Homo sapien
ggagcaggttcttggccggtgtaga

SEQ ID NO: 499614 - DNA, 25 bp, Homo sapien
agccattctcactacatcctccctg

SEQ ID NO: 499615 - DNA, 25 bp, Homo sapien
gtttcagaggctgtctattataagc

SEQ ID NO: 499616 - DNA, 25 bp, Homo sapien
gaggctgtctattataagcagctcc

SEQ ID NO: 499617 - DNA, 25 bp, Homo sapien
gctgtctattataagcagctccgat

SEQ ID NO: 499618 - DNA, 25 bp, Homo sapien
tccagggtagaccatctggggctac

SEQ ID NO: 499619 - DNA, 25 bp, Homo sapien
caaacaatatttgaggagctaggta

SEQ ID NO: 499620 - DNA, 25 bp, Homo sapien
taaaacttctgggaccttcaataga

SEQ ID NO: 499621 - DNA, 25 bp, Homo sapien
aatcatatgcctttccatgggacaa

SEQ ID NO: 499622 - DNA, 25 bp, Homo sapien
tcaaggtcatggactgagttagagc

SEQ ID NO: 499623 - DNA, 25 bp, Homo sapien
agctctttctacatgaggctgaggg

SEQ ID NO: 499624 - DNA, 25 bp, Homo sapien
ttctacatgaggctgagggtttggc

SEQ ID NO: 499625 - DNA, 25 bp, Homo sapien
aggtcatggccttccaagaagagat

SEQ ID NO: 499626 - DNA, 25 bp, Homo sapien
gccttccaagaagagatattttagt

SEQ ID NO: 499627 - DNA, 25 bp, Homo sapien
tgcctcatattcaaggtaccaggta

SEQ ID NO: 499628 - DNA, 25 bp, Homo sapien
gcctcatattcaaggtaccaggtac

SEQ ID NO: 499629 - DNA, 25 bp, Homo sapien
ctcatattcaaggtaccaggtacca

SEQ ID NO: 499630 - DNA, 25 bp, Homo sapien
gtgtgcctcatattcaaggtaccag

SEQ ID NO: 499631 - DNA, 25 bp, Homo sapien
acatcttttatcaggaagcccagca

SEQ ID NO: 499632 - DNA, 25 bp, Homo sapien
gatagcaggttgtgtaccacctcac

SEQ ID NO: 499633 - DNA, 25 bp, Homo sapien
caaagaagatcttaactctgaaacc

SEQ ID NO: 499634 - DNA, 25 bp, Homo sapien
cagtcatggtaaggactgtcccagg

SEQ ID NO: 499635 - DNA, 25 bp, Homo sapien
caaatacttctgatcagagggatga

SEQ ID NO: 499636 - DNA, 25 bp, Homo sapien
acaaatacttctgatcagagggatg

SEQ ID NO: 499637 - DNA, 25 bp, Homo sapien
aatacttctgatcagagggatgagc

SEQ ID NO: 499638 - DNA, 25 bp, Homo sapien
tacttctgatcagagggatgagctt

SEQ ID NO: 499639 - DNA, 25 bp, Homo sapien
caacaaaataagtcatgattatgat

SEQ ID NO: 499640 - DNA, 25 bp, Homo sapien
agcttcatggattcaacaaaataag

SEQ ID NO: 499641 - DNA, 25 bp, Homo sapien
tcaacaaaataagtcatgattatga

SEQ ID NO: 499642 - DNA, 25 bp, Homo sapien
ataagcttcatggattcaacaaaat

SEQ ID NO: 499643 - DNA, 25 bp, Homo sapien
ttaatggtaacacctaatagagcat

SEQ ID NO: 499644 - DNA, 25 bp, Homo sapien
ttatttaatggtaacacctaataga

SEQ ID NO: 499645 - DNA, 25 bp, Homo sapien
catttgtcactacatgcgtaactta

SEQ ID NO: 499646 - DNA, 25 bp, Homo sapien
agtttaaatacgctacaacgtcttg

SEQ ID NO: 499647 - DNA, 25 bp, Homo sapien
ctggaagaaggcaagaagcagctag

SEQ ID NO: 499648 - DNA, 25 bp, Homo sapien
agaaggcaagaagcagctaggtctc

SEQ ID NO: 499649 - DNA, 25 bp, Homo sapien
tggaagaaggcaagaagcagctagg

SEQ ID NO: 499650 - DNA, 25 bp, Homo sapien
gaagaaggcaagaagcagctaggtc

SEQ ID NO: 499651 - DNA, 25 bp, Homo sapien
ctcacaggattgttctgaagattag

SEQ ID NO: 499652 - DNA, 25 bp, Homo sapien
ttagaggggctttttcatggaaagc

SEQ ID NO: 499653 - DNA, 25 bp, Homo sapien
ttctgaagattagaggggctttttc

SEQ ID NO: 499654 - DNA, 25 bp, Homo sapien
caggattgttctgaagattagaggg

SEQ ID NO: 499655 - DNA, 25 bp, Homo sapien
taccccagtcctgaattagccagat

SEQ ID NO: 499656 - DNA, 25 bp, Homo sapien
caggtctcaggactcgagaacatgt

SEQ ID NO: 499657 - DNA, 25 bp, Homo sapien
aataccccagtcctgaattagccag

SEQ ID NO: 499658 - DNA, 25 bp, Homo sapien
caggactcgagaacatgtcatagat

SEQ ID NO: 499659 - DNA, 25 bp, Homo sapien
gcataatgatctcttatgctttttg

SEQ ID NO: 499660 - DNA, 25 bp, Homo sapien
aatgatctcttatgctttttgttag

SEQ ID NO: 499661 - DNA, 25 bp, Homo sapien
tcctttggtgatccagcataatgat

SEQ ID NO: 499662 - DNA, 25 bp, Homo sapien
ctttcctttggtgatccagcataat

SEQ ID NO: 499663 - DNA, 25 bp, Homo sapien
tccctgaagaatcaagattccttct

SEQ ID NO: 499664 - DNA, 25 bp, Homo sapien
ccctgaagaatcaagattccttctt

SEQ ID NO: 499665 - DNA, 25 bp, Homo sapien
gttccctgaagaatcaagattcctt

SEQ ID NO: 499666 - DNA, 25 bp, Homo sapien
ctgttccctgaagaatcaagattcc

SEQ ID NO: 499667 - DNA, 25 bp, Homo sapien
gtaaatcttgattgtccatgtaatg

SEQ ID NO: 499668 - DNA, 25 bp, Homo sapien
aacaaatcttgattgcccatgtaaa

SEQ ID NO: 499669 - DNA, 25 bp, Homo sapien
gcccatgtaaatcttgattgtccat

SEQ ID NO: 499670 - DNA, 25 bp, Homo sapien
gattgtccatgtaatgtttagtttg

SEQ ID NO: 499671 - DNA, 25 bp, Homo sapien
gtttgtcatatcattcttgaaatac

SEQ ID NO: 499672 - DNA, 25 bp, Homo sapien
agtttgtcatatcattcttgaaata

SEQ ID NO: 499673 - DNA, 25 bp, Homo sapien
tttgagtcatattcgtcaacataac

SEQ ID NO: 499674 - DNA, 25 bp, Homo sapien
ctggtcgtaaaaaaggctattagtg

SEQ ID NO: 499675 - DNA, 25 bp, Homo sapien
tttttccatgctgatgcattctcac

SEQ ID NO: 499676 - DNA, 25 bp, Homo sapien
aaaacctggcattgaagagctttga

SEQ ID NO: 499677 - DNA, 25 bp, Homo sapien
gcaaaaacctggcattgaagagctt

SEQ ID NO: 499678 - DNA, 25 bp, Homo sapien
cacgtcttcctttacagctatgatg

SEQ ID NO: 499679 - DNA, 25 bp, Homo sapien
cagaaatgacccctgtcacgtcttc

SEQ ID NO: 499680 - DNA, 25 bp, Homo sapien
cacaggcaactacagctagatgcat

SEQ ID NO: 499681 - DNA, 25 bp, Homo sapien
ggaccagcgctgcccgcgcctctca

SEQ ID NO: 499682 - DNA, 25 bp, Homo sapien
gaccagcgctgcccgcgcctctcac

SEQ ID NO: 499683 - DNA, 25 bp, Homo sapien
cctcctgccagccaggaagccactg

SEQ ID NO: 499684 - DNA, 25 bp, Homo sapien
aggaagccactgaggcctgctgctt

SEQ ID NO: 499685 - DNA, 25 bp, Homo sapien
ggcaccgcatccgcctcctgccagc

SEQ ID NO: 499686 - DNA, 25 bp, Homo sapien
actgaggcctgctgcttcccgccac

SEQ ID NO: 499687 - DNA, 25 bp, Homo sapien
acagcgccaccacgtgcgggtagcg

SEQ ID NO: 499688 - DNA, 25 bp, Homo sapien
acacagcgccaccacgtgcgggtag

SEQ ID NO: 499689 - DNA, 25 bp, Homo sapien
agacacagcgccaccacgtgcgggt

SEQ ID NO: 499690 - DNA, 25 bp, Homo sapien
gacacagcgccaccacgtgcgggta

SEQ ID NO: 499691 - DNA, 25 bp, Homo sapien
agaaccggctcctgtccatatatga

SEQ ID NO: 499692 - DNA, 25 bp, Homo sapien
ccatatatgactcgcagaaggaggt

SEQ ID NO: 499693 - DNA, 25 bp, Homo sapien
cagtgagtcccgacttccagaaggg

SEQ ID NO: 499694 - DNA, 25 bp, Homo sapien
agccagctgtaagctccacgcagtt

SEQ ID NO: 499695 - DNA, 25 bp, Homo sapien
aacaaacgcgccagccagtcaggca

SEQ ID NO: 499696 - DNA, 25 bp, Homo sapien
cacgactgtgtacggcagagcacga

SEQ ID NO: 499697 - DNA, 25 bp, Homo sapien
cagccagtcaggcacgactgtgtac

SEQ ID NO: 499698 - DNA, 25 bp, Homo sapien
caggcacgactgtgtacggcagagc

SEQ ID NO: 499699 - DNA, 25 bp, Homo sapien
atgggtacaagcaagtgcgccagcc

SEQ ID NO: 499700 - DNA, 25 bp, Homo sapien
atggaccactcgaccatcagcctcc

SEQ ID NO: 499701 - DNA, 25 bp, Homo sapien
agatgggtacaagcaagtgcgccag

SEQ ID NO: 499702 - DNA, 25 bp, Homo sapien
gtacaagcaagtgcgccagccaggt

SEQ ID NO: 499703 - DNA, 25 bp, Homo sapien
ctgatatccctaaatatgaaaggct

SEQ ID NO: 499704 - DNA, 25 bp, Homo sapien
tatccctaaatatgaaaggctttca

SEQ ID NO: 499705 - DNA, 25 bp, Homo sapien
atgaaaggctttcatagcagtgcat

SEQ ID NO: 499706 - DNA, 25 bp, Homo sapien
gatatccctaaatatgaaaggcttt

SEQ ID NO: 499707 - DNA, 25 bp, Homo sapien
cccatggaacgtttcactgtgatca

SEQ ID NO: 499708 - DNA, 25 bp, Homo sapien
tcccatggaacgtttcactgtgatc

SEQ ID NO: 499709 - DNA, 25 bp, Homo sapien
ttctgcagtcacgtggttaggaagg

SEQ ID NO: 499710 - DNA, 25 bp, Homo sapien
ctgcagtcacgtggttaggaaggat

SEQ ID NO: 499711 - DNA, 25 bp, Homo sapien
caaaatggtacaggttagactaaca

SEQ ID NO: 499712 - DNA, 25 bp, Homo sapien
tgtaccagacatggtgctacgaccc

SEQ ID NO: 499713 - DNA, 25 bp, Homo sapien
caaagtaaacttcccttgagcatct

SEQ ID NO: 499714 - DNA, 25 bp, Homo sapien
taacagtaacatctcccaggtaaac

SEQ ID NO: 499715 - DNA, 25 bp, Homo sapien
tagtagagatcccagatcagttgag

SEQ ID NO: 499716 - DNA, 25 bp, Homo sapien
ggtcatgaagcataaccagaccatg

SEQ ID NO: 499717 - DNA, 25 bp, Homo sapien
aaccagaccatgaaggcacgtccag

SEQ ID NO: 499718 - DNA, 25 bp, Homo sapien
gaccacagtgcaggtcatgaagcat

SEQ ID NO: 499719 - DNA, 25 bp, Homo sapien
ggttacagacaaggactgcaggtac

SEQ ID NO: 499720 - DNA, 25 bp, Homo sapien
tggttacagacaaggactgcaggta

SEQ ID NO: 499721 - DNA, 25 bp, Homo sapien
ttacagacaaggactgcaggtacag

SEQ ID NO: 499722 - DNA, 25 bp, Homo sapien
gttacagacaaggactgcaggtaca

SEQ ID NO: 499723 - DNA, 25 bp, Homo sapien
cagggttgaggacagggcccctgac

SEQ ID NO: 499724 - DNA, 25 bp, Homo sapien
agctgcaagggtcagacccagggtt

SEQ ID NO: 499725 - DNA, 25 bp, Homo sapien
acagtgcctccagcaataagcagga

SEQ ID NO: 499726 - DNA, 25 bp, Homo sapien
ctgacagtgcctccagcaataagca

SEQ ID NO: 499727 - DNA, 25 bp, Homo sapien
gaactcttgcaccacatgatggcat

SEQ ID NO: 499728 - DNA, 25 bp, Homo sapien
ggcatcactcctgggtgtcttctga

SEQ ID NO: 499729 - DNA, 25 bp, Homo sapien
tcttgcaccacatgatggcatcact

SEQ ID NO: 499730 - DNA, 25 bp, Homo sapien
ggtgtcttctgaggttgcataggat

SEQ ID NO: 499731 - DNA, 25 bp, Homo sapien
tagaggccagtggctgtgctgtcat

SEQ ID NO: 499732 - DNA, 25 bp, Homo sapien
gaggccagtggctgtgctgtcatat

SEQ ID NO: 499733 - DNA, 25 bp, Homo sapien
tcagtagaggccagtggctgtgctg

SEQ ID NO: 499734 - DNA, 25 bp, Homo sapien
ggccagtggctgtgctgtcatatcc

SEQ ID NO: 499735 - DNA, 25 bp, Homo sapien
taagaggcagccacgcagtcttggg

SEQ ID NO: 499736 - DNA, 25 bp, Homo sapien
ccagaggttggacagcgcccatgca

SEQ ID NO: 499737 - DNA, 25 bp, Homo sapien
caccagaggttggacagcgcccatg

SEQ ID NO: 499738 - DNA, 25 bp, Homo sapien
ggcagccacgcagtcttgggtctct

SEQ ID NO: 499739 - DNA, 25 bp, Homo sapien
aagatgtcagcctccatttatatgt

SEQ ID NO: 499740 - DNA, 25 bp, Homo sapien
tgtcagcctccatttatatgtcctc

SEQ ID NO: 499741 - DNA, 25 bp, Homo sapien
catgaagatgtcagcctccatttat

SEQ ID NO: 499742 - DNA, 25 bp, Homo sapien
tcagcctccatttatatgtcctcat

SEQ ID NO: 499743 - DNA, 25 bp, Homo sapien
ccagcataagtgcatcactgaagtc

SEQ ID NO: 499744 - DNA, 25 bp, Homo sapien
cttgcccagcataagtgcatcactg

SEQ ID NO: 499745 - DNA, 25 bp, Homo sapien
gcccagcataagtgcatcactgaag

SEQ ID NO: 499746 - DNA, 25 bp, Homo sapien
tgcccagcataagtgcatcactgaa

SEQ ID NO: 499747 - DNA, 25 bp, Homo sapien
ccaggatgatggtgtctaaagttgt

SEQ ID NO: 499748 - DNA, 25 bp, Homo sapien
tggccttgaggaagtcatgaacacc

SEQ ID NO: 499749 - DNA, 25 bp, Homo sapien
tgtctaaagttgtgcaccaggtcac

SEQ ID NO: 499750 - DNA, 25 bp, Homo sapien
ttaagtcttgaacgtggccttggcc

SEQ ID NO: 499751 - DNA, 25 bp, Homo sapien
gcagaagcatcaccgtcaggaatgg

SEQ ID NO: 499752 - DNA, 25 bp, Homo sapien
ctgcagaagcatcaccgtcaggaat

SEQ ID NO: 499753 - DNA, 25 bp, Homo sapien
agcatcaccgtcaggaatgggtagt

SEQ ID NO: 499754 - DNA, 25 bp, Homo sapien
tgggtagtacaggaagtccatgcac

SEQ ID NO: 499755 - DNA, 25 bp, Homo sapien
gagggcactgagctcaaatagggtg

SEQ ID NO: 499756 - DNA, 25 bp, Homo sapien
actgagctcaaatagggtggcaata

SEQ ID NO: 499757 - DNA, 25 bp, Homo sapien
ggcactgagctcaaatagggtggca

SEQ ID NO: 499758 - DNA, 25 bp, Homo sapien
gctcaaatagggtggcaatatattc

SEQ ID NO: 499759 - DNA, 25 bp, Homo sapien
tgggatcctccagccccataggcct

SEQ ID NO: 499760 - DNA, 25 bp, Homo sapien
ctgcctgggatcctccagccccata

SEQ ID NO: 499761 - DNA, 25 bp, Homo sapien
gatcctccagccccataggccttac

SEQ ID NO: 499762 - DNA, 25 bp, Homo sapien
tgcctgggatcctccagccccatag

SEQ ID NO: 499763 - DNA, 25 bp, Homo sapien
ttgctggggacttcttgctgatttc

SEQ ID NO: 499764 - DNA, 25 bp, Homo sapien
atgtttgctggggacttcttgctga

SEQ ID NO: 499765 - DNA, 25 bp, Homo sapien
agccctcccagaacatgacatgttt

SEQ ID NO: 499766 - DNA, 25 bp, Homo sapien
gctggggacttcttgctgatttcct

SEQ ID NO: 499767 - DNA, 25 bp, Homo sapien
ggaccaaaggctcactgccccagtg

SEQ ID NO: 499768 - DNA, 25 bp, Homo sapien
cagcagtgcttctgaaaggaaagaa

SEQ ID NO: 499769 - DNA, 25 bp, Homo sapien
atggaccaaaggctcactgccccag

SEQ ID NO: 499770 - DNA, 25 bp, Homo sapien
gggaggggtaccaatccctgcatac

SEQ ID NO: 499771 - DNA, 25 bp, Homo sapien
tgtggtgcctacgttaccatctctg

SEQ ID NO: 499772 - DNA, 25 bp, Homo sapien
ctgtggtgcctacgttaccatctct

SEQ ID NO: 499773 - DNA, 25 bp, Homo sapien
tggtgcctacgttaccatctctgcc

SEQ ID NO: 499774 - DNA, 25 bp, Homo sapien
gtggtgcctacgttaccatctctgc

SEQ ID NO: 499775 - DNA, 25 bp, Homo sapien
ctggatgagggtggaaagggtgtac

SEQ ID NO: 499776 - DNA, 25 bp, Homo sapien
agtgggactcccttgtggagcagcc

SEQ ID NO: 499777 - DNA, 25 bp, Homo sapien
cctggggaggatctggggccggagg

SEQ ID NO: 499778 - DNA, 25 bp, Homo sapien
atgctctggtgagataggccacagg

SEQ ID NO: 499779 - DNA, 25 bp, Homo sapien
ctacagatggaagaatgctctggtg

SEQ ID NO: 499780 - DNA, 25 bp, Homo sapien
caggggtccctggggaggatctggg

SEQ ID NO: 499781 - DNA, 25 bp, Homo sapien
tcagggcactgagtgatccatctca

SEQ ID NO: 499782 - DNA, 25 bp, Homo sapien
agggcactgagtgatccatctcact

SEQ ID NO: 499783 - DNA, 25 bp, Homo sapien
cttcagggcactgagtgatccatct

SEQ ID NO: 499784 - DNA, 25 bp, Homo sapien
cagggcactgagtgatccatctcac

SEQ ID NO: 499785 - DNA, 25 bp, Homo sapien
ctttgtcctgtcagaatctctgagc

SEQ ID NO: 499786 - DNA, 25 bp, Homo sapien
gactgggccattgaacaccactggg

SEQ ID NO: 499787 - DNA, 25 bp, Homo sapien
tccacagggccctcgataacatgca

SEQ ID NO: 499788 - DNA, 25 bp, Homo sapien
gctgtccacagggccctcgataaca

SEQ ID NO: 499789 - DNA, 25 bp, Homo sapien
catctccctgtagtgctcagcaccc

SEQ ID NO: 499790 - DNA, 25 bp, Homo sapien
acatctccctgtagtgctcagcacc

SEQ ID NO: 499791 - DNA, 25 bp, Homo sapien
gacatctccctgtagtgctcagcac

SEQ ID NO: 499792 - DNA, 25 bp, Homo sapien
atctccctgtagtgctcagcacccc

SEQ ID NO: 499793 - DNA, 25 bp, Homo sapien
ttggtagggacatagagaaaaacca

SEQ ID NO: 499794 - DNA, 25 bp, Homo sapien
tgcctatgagtctctgaaacaaaaa

SEQ ID NO: 499795 - DNA, 25 bp, Homo sapien
tatcattcgtgaaggatctacctgc

SEQ ID NO: 499796 - DNA, 25 bp, Homo sapien
cccgcctctgacatcacagaatata

SEQ ID NO: 499797 - DNA, 25 bp, Homo sapien
tagtatctcttgttgcaagaaatgc

SEQ ID NO: 499798 - DNA, 25 bp, Homo sapien
gtatctcttgttgcaagaaatgctg

SEQ ID NO: 499799 - DNA, 25 bp, Homo sapien
agtatctcttgttgcaagaaatgct

SEQ ID NO: 499800 - DNA, 25 bp, Homo sapien
ttgttgtctgctctccgtgactttt

SEQ ID NO: 499801 - DNA, 25 bp, Homo sapien
tctgccacttgttgtctgctctccg

SEQ ID NO: 499802 - DNA, 25 bp, Homo sapien
cacttgttgtctgctctccgtgact

SEQ ID NO: 499803 - DNA, 25 bp, Homo sapien
gccacttgttgtctgctctccgtga

SEQ ID NO: 499804 - DNA, 25 bp, Homo sapien
cagtgtggaaggcatctatactgaa

SEQ ID NO: 499805 - DNA, 25 bp, Homo sapien
actgacagtgtggaaggcatctata

SEQ ID NO: 499806 - DNA, 25 bp, Homo sapien
ctgacagtgtggaaggcatctatac

SEQ ID NO: 499807 - DNA, 25 bp, Homo sapien
gtggaaggcatctatactgaagtga

SEQ ID NO: 499808 - DNA, 25 bp, Homo sapien
actctaaaggttgagtgtcgccctg

SEQ ID NO: 499809 - DNA, 25 bp, Homo sapien
taaagcctgtcaccactcattggct

SEQ ID NO: 499810 - DNA, 25 bp, Homo sapien
agcctgtcaccactcattggctgtg

SEQ ID NO: 499811 - DNA, 25 bp, Homo sapien
tctcccactctaaaggttgagtgtc

SEQ ID NO: 499812 - DNA, 25 bp, Homo sapien
tctctttggtgctggtggggcgcat

SEQ ID NO: 499813 - DNA, 25 bp, Homo sapien
ctgtctctttggtgctggtggggcg

SEQ ID NO: 499814 - DNA, 25 bp, Homo sapien
ggggcgcatcaggaagtgacaaaaa

SEQ ID NO: 499815 - DNA, 25 bp, Homo sapien
tctttggtgctggtggggcgcatca

SEQ ID NO: 499816 - DNA, 25 bp, Homo sapien
ttcaccatagatgccttccacactg

SEQ ID NO: 499817 - DNA, 25 bp, Homo sapien
cttcaccatagatgccttccacact

SEQ ID NO: 499818 - DNA, 25 bp, Homo sapien
ccacttcaccatagatgccttccac

SEQ ID NO: 499819 - DNA, 25 bp, Homo sapien
ccctgatgcatggaatggagcccga

SEQ ID NO: 499820 - DNA, 25 bp, Homo sapien
gaagccctgatgcatggaatggagc

SEQ ID NO: 499821 - DNA, 25 bp, Homo sapien
tttgcagcacatttgttgcattgag

SEQ ID NO: 499822 - DNA, 25 bp, Homo sapien
tgatgcatggaatggagcccgaaag

SEQ ID NO: 499823 - DNA, 25 bp, Homo sapien
tgagacgaccgtcagcacagaacag

SEQ ID NO: 499824 - DNA, 25 bp, Homo sapien
atgagacgaccgtcagcacagaaca

SEQ ID NO: 499825 - DNA, 25 bp, Homo sapien
acacgctggggagggctcgcctgtg

SEQ ID NO: 499826 - DNA, 25 bp, Homo sapien
ggggaccagtgagtacacgctgggg

SEQ ID NO: 499827 - DNA, 25 bp, Homo sapien
ctcagtggatgcggcagctgttctt

SEQ ID NO: 499828 - DNA, 25 bp, Homo sapien
agtggatgcggcagctgttcttctg

SEQ ID NO: 499829 - DNA, 25 bp, Homo sapien
aaaatagatgggagcaagtgtccaa

SEQ ID NO: 499830 - DNA, 25 bp, Homo sapien
cagtggattctagagaagaaaatag

SEQ ID NO: 499831 - DNA, 25 bp, Homo sapien
gagaagaaaatagatgggagcaagt

SEQ ID NO: 499832 - DNA, 25 bp, Homo sapien
aagaaaatagatgggagcaagtgtc

SEQ ID NO: 499833 - DNA, 25 bp, Homo sapien
ttctctaattatttgttctacacag

SEQ ID NO: 499834 - DNA, 25 bp, Homo sapien
tatttgttctacacagtccagctcc

SEQ ID NO: 499835 - DNA, 25 bp, Homo sapien
taattatttgttctacacagtccag

SEQ ID NO: 499836 - DNA, 25 bp, Homo sapien
atttgttctacacagtccagctcca

SEQ ID NO: 499837 - DNA, 25 bp, Homo sapien
agtaggaattcttacgggcatttgg

SEQ ID NO: 499838 - DNA, 25 bp, Homo sapien
cccgctctttctccataaggagctt

SEQ ID NO: 499839 - DNA, 25 bp, Homo sapien
ctcagtcaagtagttcttgcagtta

SEQ ID NO: 499840 - DNA, 25 bp, Homo sapien
tctgggcctcgccttgtaggaagag

SEQ ID NO: 499841 - DNA, 25 bp, Homo sapien
tgctgcaaaggcttccttatattct

SEQ ID NO: 499842 - DNA, 25 bp, Homo sapien
cataagtagttttcattttggagaa

SEQ ID NO: 499843 - DNA, 25 bp, Homo sapien
ggaattgttagctttcagtgctgct

SEQ ID NO: 499844 - DNA, 25 bp, Homo sapien
ttctaatttggttgtaacctcttca

SEQ ID NO: 499845 - DNA, 25 bp, Homo sapien
agtgaagccgtattatccttaactg

SEQ ID NO: 499846 - DNA, 25 bp, Homo sapien
atttagtgaagccgtattatcctta

SEQ ID NO: 499847 - DNA, 25 bp, Homo sapien
cttatttagtgaagccgtattatcc

SEQ ID NO: 499848 - DNA, 25 bp, Homo sapien
ttagtgaagccgtattatccttaac

SEQ ID NO: 499849 - DNA, 25 bp, Homo sapien
taattgtttttcatattgtgcttgt

SEQ ID NO: 499850 - DNA, 25 bp, Homo sapien
ctaattgtttttcatattgtgcttg

SEQ ID NO: 499851 - DNA, 25 bp, Homo sapien
aagatacagcttccttctctactgt

SEQ ID NO: 499852 - DNA, 25 bp, Homo sapien
acagcttccttctctactgtaagat

SEQ ID NO: 499853 - DNA, 25 bp, Homo sapien
gatacagcttccttctctactgtaa

SEQ ID NO: 499854 - DNA, 25 bp, Homo sapien
agtttactaagttctaccatattgt

SEQ ID NO: 499855 - DNA, 25 bp, Homo sapien
gcaccaagaaaaggattagccacag

SEQ ID NO: 499856 - DNA, 25 bp, Homo sapien
ctgtttcagtaaaaggcggtcaata

SEQ ID NO: 499857 - DNA, 25 bp, Homo sapien
tagccacagtgctacccaagagaac

SEQ ID NO: 499858 - DNA, 25 bp, Homo sapien
tctactgagctagaaagcagagctg

SEQ ID NO: 499859 - DNA, 25 bp, Homo sapien
gtctccatggcaatcgaagtcttca

SEQ ID NO: 499860 - DNA, 25 bp, Homo sapien
catggcaatcgaagtcttcatttcc

SEQ ID NO: 499861 - DNA, 25 bp, Homo sapien
aagtctccatggcaatcgaagtctt

SEQ ID NO: 499862 - DNA, 25 bp, Homo sapien
tccatggcaatcgaagtcttcattt

SEQ ID NO: 499863 - DNA, 25 bp, Homo sapien
ttgtatctcagttttagtcaagtaa

SEQ ID NO: 499864 - DNA, 25 bp, Homo sapien
atgcccataaagttgtgttgtgagt

SEQ ID NO: 499865 - DNA, 25 bp, Homo sapien
atttgtatctcagttttagtcaagt

SEQ ID NO: 499866 - DNA, 25 bp, Homo sapien
gttgtgttgtgagtttctgaaatac

SEQ ID NO: 499867 - DNA, 25 bp, Homo sapien
tatactccagtgatgatactaactt

SEQ ID NO: 499868 - DNA, 25 bp, Homo sapien
tgatgatactaacttaaaaagtttc

SEQ ID NO: 499869 - DNA, 25 bp, Homo sapien
actccagtgatgatactaacttaaa

SEQ ID NO: 499870 - DNA, 25 bp, Homo sapien
tgattcacattatactccagtgatg

SEQ ID NO: 499871 - DNA, 25 bp, Homo sapien
gatgccaataagtgcagatttcaaa

SEQ ID NO: 499872 - DNA, 25 bp, Homo sapien
taaacctgatgccaataagtgcaga

SEQ ID NO: 499873 - DNA, 25 bp, Homo sapien
gtgcattttataaacctgatgccaa

SEQ ID NO: 499874 - DNA, 25 bp, Homo sapien
tgccaaaaatgttcgttacaaacaa

SEQ ID NO: 499875 - DNA, 25 bp, Homo sapien
agagacaggctaaagacactgagct

SEQ ID NO: 499876 - DNA, 25 bp, Homo sapien
actgtcgacatgttaaattccatac

SEQ ID NO: 499877 - DNA, 25 bp, Homo sapien
aataactgtcgacatgttaaattcc

SEQ ID NO: 499878 - DNA, 25 bp, Homo sapien
tcgacatgttaaattccatacatac

SEQ ID NO: 499879 - DNA, 25 bp, Homo sapien
tgtcgacatgttaaattccatacat

SEQ ID NO: 499880 - DNA, 25 bp, Homo sapien
ttttaagggaatcagccacttcttg

SEQ ID NO: 499881 - DNA, 25 bp, Homo sapien
aaattaatgtgacaacatgatgtac

SEQ ID NO: 499882 - DNA, 25 bp, Homo sapien
tccagtggagactctaacatagtta

SEQ ID NO: 499883 - DNA, 25 bp, Homo sapien
tgtgacaacatgatgtaccttccag

SEQ ID NO: 499884 - DNA, 25 bp, Homo sapien
actatctaccttaaaatatgactct

SEQ ID NO: 499885 - DNA, 25 bp, Homo sapien
tatctaccttaaaatatgactctgt

SEQ ID NO: 499886 - DNA, 25 bp, Homo sapien
tctaccttaaaatatgactctgtgc

SEQ ID NO: 499887 - DNA, 25 bp, Homo sapien
ctaccttaaaatatgactctgtgcc

SEQ ID NO: 499888 - DNA, 25 bp, Homo sapien
caataaagcctctttggatattaat

SEQ ID NO: 499889 - DNA, 25 bp, Homo sapien
gctttctgtctctcatattgaaaga

SEQ ID NO: 499890 - DNA, 25 bp, Homo sapien
gtctctcatattgaaagagactttc

SEQ ID NO: 499891 - DNA, 25 bp, Homo sapien
cttctagcatgaggtctttctactc

SEQ ID NO: 499892 - DNA, 25 bp, Homo sapien
actgactttagcttctgcactttga

SEQ ID NO: 499893 - DNA, 25 bp, Homo sapien
tactgactttagcttctgcactttg

SEQ ID NO: 499894 - DNA, 25 bp, Homo sapien
ctgactttagcttctgcactttgat

SEQ ID NO: 499895 - DNA, 25 bp, Homo sapien
ttactgactttagcttctgcacttt

SEQ ID NO: 499896 - DNA, 25 bp, Homo sapien
gtatctcttgtcttacagaacttat

SEQ ID NO: 499897 - DNA, 25 bp, Homo sapien
tctgagagtatctcttgtcttacag

SEQ ID NO: 499898 - DNA, 25 bp, Homo sapien
ggcttaggtcattttgtacagtttc

SEQ ID NO: 499899 - DNA, 25 bp, Homo sapien
gcttaggtcattttgtacagtttct

SEQ ID NO: 499900 - DNA, 25 bp, Homo sapien
actatacagacgacattagcctgag

SEQ ID NO: 499901 - DNA, 25 bp, Homo sapien
cactatacagacgacattagcctga

SEQ ID NO: 499902 - DNA, 25 bp, Homo sapien
acatcagctggaatggtgatttctt

SEQ ID NO: 499903 - DNA, 25 bp, Homo sapien
tgacatcagctggaatggtgatttc

SEQ ID NO: 499904 - DNA, 25 bp, Homo sapien
ggtgacatcagctggaatggtgatt

SEQ ID NO: 499905 - DNA, 25 bp, Homo sapien
gggtgacatcagctggaatggtgat

SEQ ID NO: 499906 - DNA, 25 bp, Homo sapien
ctgcccggggaggaacctcttctgg

SEQ ID NO: 499907 - DNA, 25 bp, Homo sapien
tgcccggggaggaacctcttctgga

SEQ ID NO: 499908 - DNA, 25 bp, Homo sapien
agacataatcagtgacgtcttccca

SEQ ID NO: 499909 - DNA, 25 bp, Homo sapien
gacataatcagtgacgtcttcccaa

SEQ ID NO: 499910 - DNA, 25 bp, Homo sapien
tcttcccaactctaggttctcctac

SEQ ID NO: 499911 - DNA, 25 bp, Homo sapien
gacgtcttcccaactctaggttctc

SEQ ID NO: 499912 - DNA, 25 bp, Homo sapien
cagcaggatccgcacgtctttcttc

SEQ ID NO: 499913 - DNA, 25 bp, Homo sapien
gcaggatccgcacgtctttcttcat

SEQ ID NO: 499914 - DNA, 25 bp, Homo sapien
agcaggatccgcacgtctttcttca

SEQ ID NO: 499915 - DNA, 25 bp, Homo sapien
ggcctccgcccacatgcatggagtg

SEQ ID NO: 499916 - DNA, 25 bp, Homo sapien
ccgcccacatgcatggagtggactc

SEQ ID NO: 499917 - DNA, 25 bp, Homo sapien
ggcggctctcgggggatggcctccg

SEQ ID NO: 499918 - DNA, 25 bp, Homo sapien
ggatggcctccgcccacatgcatgg

SEQ ID NO: 499919 - DNA, 25 bp, Homo sapien
ctcagttgcttccccgcaagagagc

SEQ ID NO: 499920 - DNA, 25 bp, Homo sapien
tcagttgcttccccgcaagagagcc

SEQ ID NO: 499921 - DNA, 25 bp, Homo sapien
tcttatcttctacttcggaaatatc

SEQ ID NO: 499922 - DNA, 25 bp, Homo sapien
tatcttctacttcggaaatatcaga

SEQ ID NO: 499923 - DNA, 25 bp, Homo sapien
ttctacttcggaaatatcagaactc

SEQ ID NO: 499924 - DNA, 25 bp, Homo sapien
attcttatcttctacttcggaaata

SEQ ID NO: 499925 - DNA, 25 bp, Homo sapien
cagcagccagtctagactgataaga

SEQ ID NO: 499926 - DNA, 25 bp, Homo sapien
gcagccagtctagactgataagatt

SEQ ID NO: 499927 - DNA, 25 bp, Homo sapien
gccagtctagactgataagattcaa

SEQ ID NO: 499928 - DNA, 25 bp, Homo sapien
cagccagtctagactgataagattc

SEQ ID NO: 499929 - DNA, 25 bp, Homo sapien
ttcttgcagtcttcggtttcatctc

SEQ ID NO: 499930 - DNA, 25 bp, Homo sapien
tcttcggtttcatctctagtgattg

SEQ ID NO: 499931 - DNA, 25 bp, Homo sapien
cggtttcatctctagtgattgaaca

SEQ ID NO: 499932 - DNA, 25 bp, Homo sapien
agtcttcggtttcatctctagtgat

SEQ ID NO: 499933 - DNA, 25 bp, Homo sapien
gcagcagaagatgtactatgacata

SEQ ID NO: 499934 - DNA, 25 bp, Homo sapien
cagcagcagaagatgtactatgaca

SEQ ID NO: 499935 - DNA, 25 bp, Homo sapien
tttgttgggttaatctgtcagcagc

SEQ ID NO: 499936 - DNA, 25 bp, Homo sapien
gcagaagatgtactatgacatatat

SEQ ID NO: 499937 - DNA, 25 bp, Homo sapien
ttcacttctttcacgtctttgttgc

SEQ ID NO: 499938 - DNA, 25 bp, Homo sapien
ttctttcacgtctttgttgctcttc

SEQ ID NO: 499939 - DNA, 25 bp, Homo sapien
cacttctttcacgtctttgttgctc

SEQ ID NO: 499940 - DNA, 25 bp, Homo sapien
tttcacgtctttgttgctcttcctc

SEQ ID NO: 499941 - DNA, 25 bp, Homo sapien
agccgctatgcaatcacgttttaaa

SEQ ID NO: 499942 - DNA, 25 bp, Homo sapien
ttggtagccgctatgcaatcacgtt

SEQ ID NO: 499943 - DNA, 25 bp, Homo sapien
tgttggtagccgctatgcaatcacg

SEQ ID NO: 499944 - DNA, 25 bp, Homo sapien
ggtagccgctatgcaatcacgtttt

SEQ ID NO: 499945 - DNA, 25 bp, Homo sapien
cagcaggatcttccatttcagtgct

SEQ ID NO: 499946 - DNA, 25 bp, Homo sapien
tctttgtactgctcctttcacagca

SEQ ID NO: 499947 - DNA, 25 bp, Homo sapien
caggatcttccatttcagtgctagg

SEQ ID NO: 499948 - DNA, 25 bp, Homo sapien
gctctcaatgtctgtacattctttc

SEQ ID NO: 499949 - DNA, 25 bp, Homo sapien
caaggaaggatgttttgcaggaggc

SEQ ID NO: 499950 - DNA, 25 bp, Homo sapien
ttcaaggaaggatgttttgcaggag

SEQ ID NO: 499951 - DNA, 25 bp, Homo sapien
aaggaaggatgttttgcaggaggcc

SEQ ID NO: 499952 - DNA, 25 bp, Homo sapien
cttcaaggaaggatgttttgcagga

SEQ ID NO: 499953 - DNA, 25 bp, Homo sapien
ttccttttccatgggaaggtccaca

SEQ ID NO: 499954 - DNA, 25 bp, Homo sapien
ccatgggaaggtccacataaaggct

SEQ ID NO: 499955 - DNA, 25 bp, Homo sapien
ttccatgggaaggtccacataaagg

SEQ ID NO: 499956 - DNA, 25 bp, Homo sapien
ttttccatgggaaggtccacataaa

SEQ ID NO: 499957 - DNA, 25 bp, Homo sapien
acttcgtcatctaatgcaggcaatg

SEQ ID NO: 499958 - DNA, 25 bp, Homo sapien
cttcgtcatctaatgcaggcaatga

SEQ ID NO: 499959 - DNA, 25 bp, Homo sapien
gcagattcatcagaacttccaacat

SEQ ID NO: 499960 - DNA, 25 bp, Homo sapien
ctgactgcagattcatcagaacttc

SEQ ID NO: 499961 - DNA, 25 bp, Homo sapien
tgactgcagattcatcagaacttcc

SEQ ID NO: 499962 - DNA, 25 bp, Homo sapien
actgcagattcatcagaacttccaa

SEQ ID NO: 499963 - DNA, 25 bp, Homo sapien
atgttccaaaatttgttgttgaatt

SEQ ID NO: 499964 - DNA, 25 bp, Homo sapien
catttttaagtatcatctttttatg

SEQ ID NO: 499965 - DNA, 25 bp, Homo sapien
aagtatcatctttttatgttccaaa

SEQ ID NO: 499966 - DNA, 25 bp, Homo sapien
tttaagtatcatctttttatgttcc

SEQ ID NO: 499967 - DNA, 25 bp, Homo sapien
ctttctgaatttgtgtgccatccct

SEQ ID NO: 499968 - DNA, 25 bp, Homo sapien
ccatgcttacctgctctgtattgat

SEQ ID NO: 499969 - DNA, 25 bp, Homo sapien
aggcagcagccatgcttacctgctc

SEQ ID NO: 499970 - DNA, 25 bp, Homo sapien
tgtgtgccatccctaggcagcagcc

SEQ ID NO: 499971 - DNA, 25 bp, Homo sapien
tcaacttgctcgacatttgtgtggg

SEQ ID NO: 499972 - DNA, 25 bp, Homo sapien
taggaggcctagctgccagatcagg

SEQ ID NO: 499973 - DNA, 25 bp, Homo sapien
taagtctagctaagatgtgggctcc

SEQ ID NO: 499974 - DNA, 25 bp, Homo sapien
tactgtagggtgaggatcaacttgc

SEQ ID NO: 499975 - DNA, 25 bp, Homo sapien
caacgactgagcataagtacataaa

SEQ ID NO: 499976 - DNA, 25 bp, Homo sapien
ctgggaacaacgactgagcataagt

SEQ ID NO: 499977 - DNA, 25 bp, Homo sapien
cgactgagcataagtacataaatta

SEQ ID NO: 499978 - DNA, 25 bp, Homo sapien
gaacaacgactgagcataagtacat

SEQ ID NO: 499979 - DNA, 25 bp, Homo sapien
tctgcatcttgtccacacgtcttga

SEQ ID NO: 499980 - DNA, 25 bp, Homo sapien
catcttgtccacacgtcttgagtaa

SEQ ID NO: 499981 - DNA, 25 bp, Homo sapien
ctgtcagtgtagacataataacatt

SEQ ID NO: 499982 - DNA, 25 bp, Homo sapien
tgtcagtgtagacataataacattt

SEQ ID NO: 499983 - DNA, 25 bp, Homo sapien
ctcaggctatcaacggcatgtgtac

SEQ ID NO: 499984 - DNA, 25 bp, Homo sapien
aacggcatgtgtacttgctttgttt

SEQ ID NO: 499985 - DNA, 25 bp, Homo sapien
ctctttcttgcaaattatagcgaat

SEQ ID NO: 499986 - DNA, 25 bp, Homo sapien
catctcaggctatcaacggcatgtg

SEQ ID NO: 499987 - DNA, 25 bp, Homo sapien
ctcctctgtctccccggattaactg

SEQ ID NO: 499988 - DNA, 25 bp, Homo sapien
ctctgtctccccggattaactgtgg

SEQ ID NO: 499989 - DNA, 25 bp, Homo sapien
gtctccccggattaactgtggtcat

SEQ ID NO: 499990 - DNA, 25 bp, Homo sapien
cctctgtctccccggattaactgtg

SEQ ID NO: 499991 - DNA, 25 bp, Homo sapien
taaatcatatcccatctgagttgct

SEQ ID NO: 499992 - DNA, 25 bp, Homo sapien
tttgggcttagttctctgtttacag

SEQ ID NO: 499993 - DNA, 25 bp, Homo sapien
tataaacttagaatggctcaactcc

SEQ ID NO: 499994 - DNA, 25 bp, Homo sapien
gaaaaactagatggctaagtcctct

SEQ ID NO: 499995 - DNA, 25 bp, Homo sapien
tggtgactgtgacttaaaccttcac

SEQ ID NO: 499996 - DNA, 25 bp, Homo sapien
ccactttctcaatggtgcaatggtg

SEQ ID NO: 499997 - DNA, 25 bp, Homo sapien
gctcccatactacttcttatagctg

SEQ ID NO: 499998 - DNA, 25 bp, Homo sapien
tcctcttaggaactggagccagtta

SEQ ID NO: 499999 - DNA, 25 bp, Homo sapien
tccactgttctgttagtagcaagag

SEQ ID NO: 500000 - DNA, 25 bp, Homo sapien
gacttgttaaattagctacctgcac

SEQ ID NO: 500001 - DNA, 25 bp, Homo sapien
tggacttgttaaattagctacctgc

SEQ ID NO: 500002 - DNA, 25 bp, Homo sapien
tgtccccaaggcagtaaatcaaatg

SEQ ID NO: 500003 - DNA, 25 bp, Homo sapien
ttgctggatcgtgggctggcacagc

SEQ ID NO: 500004 - DNA, 25 bp, Homo sapien
ctctgttcctgaaccgtcgttgctg

SEQ ID NO: 500005 - DNA, 25 bp, Homo sapien
ttcctgaaccgtcgttgctggatcg

SEQ ID NO: 500006 - DNA, 25 bp, Homo sapien
ctgaaccgtcgttgctggatcgtgg

SEQ ID NO: 500007 - DNA, 25 bp, Homo sapien
ctggggcttctgttgcctccatctc

SEQ ID NO: 500008 - DNA, 25 bp, Homo sapien
ttctgttgcctccatctccagtaac

SEQ ID NO: 500009 - DNA, 25 bp, Homo sapien
agcagctgtccacatgtcctttggg

SEQ ID NO: 500010 - DNA, 25 bp, Homo sapien
aagcagctgtccacatgtcctttgg

SEQ ID NO: 500011 - DNA, 25 bp, Homo sapien
cagacatggatagggtcttggactc

SEQ ID NO: 500012 - DNA, 25 bp, Homo sapien
atcccagacatggatagggtcttgg

SEQ ID NO: 500013 - DNA, 25 bp, Homo sapien
gacatggatagggtcttggactcca

SEQ ID NO: 500014 - DNA, 25 bp, Homo sapien
cccagacatggatagggtcttggac

SEQ ID NO: 500015 - DNA, 25 bp, Homo sapien
ccataaatggtttcttgacaaagga

SEQ ID NO: 500016 - DNA, 25 bp, Homo sapien
tcttgacaaaggaaatgcgagcatc

SEQ ID NO: 500017 - DNA, 25 bp, Homo sapien
aatggtttcttgacaaaggaaatgc

SEQ ID NO: 500018 - DNA, 25 bp, Homo sapien
aaggaaatgcgagcatctgtgttca

SEQ ID NO: 500019 - DNA, 25 bp, Homo sapien
tggaagatctggaaagagcttttta

SEQ ID NO: 500020 - DNA, 25 bp, Homo sapien
ggaagatctggaaagagctttttag

SEQ ID NO: 500021 - DNA, 25 bp, Homo sapien
ggtttcttctcctgacggcctgcag

SEQ ID NO: 500022 - DNA, 25 bp, Homo sapien
tctcctgacggcctgcagattcaag

SEQ ID NO: 500023 - DNA, 25 bp, Homo sapien
tcctgacggcctgcagattcaagaa

SEQ ID NO: 500024 - DNA, 25 bp, Homo sapien
tttcttctcctgacggcctgcagat

SEQ ID NO: 500025 - DNA, 25 bp, Homo sapien
gactaggatcaaggtaggtcacatc

SEQ ID NO: 500026 - DNA, 25 bp, Homo sapien
cagactaggatcaaggtaggtcaca

SEQ ID NO: 500027 - DNA, 25 bp, Homo sapien
ctaggatcaaggtaggtcacatcat

SEQ ID NO: 500028 - DNA, 25 bp, Homo sapien
gcagactaggatcaaggtaggtcac

SEQ ID NO: 500029 - DNA, 25 bp, Homo sapien
ttttcagacattccacccaaatctc

SEQ ID NO: 500030 - DNA, 25 bp, Homo sapien
ttcttttttcagacattccacccaa

SEQ ID NO: 500031 - DNA, 25 bp, Homo sapien
tggccaccttcaacctctgaggagg

SEQ ID NO: 500032 - DNA, 25 bp, Homo sapien
ttcttagcctacttcagacagcaga

SEQ ID NO: 500033 - DNA, 25 bp, Homo sapien
cagtggcagagatgtgggcactgag

SEQ ID NO: 500034 - DNA, 25 bp, Homo sapien
ctgctgtacctcagcaatcagtggc

SEQ ID NO: 500035 - DNA, 25 bp, Homo sapien
gctactggagaaggagccctccctt

SEQ ID NO: 500036 - DNA, 25 bp, Homo sapien
ggatctctggccttggaaaagatac

SEQ ID NO: 500037 - DNA, 25 bp, Homo sapien
tggcatccagtatgagtctccaagt

SEQ ID NO: 500038 - DNA, 25 bp, Homo sapien
agttcaaccactacatggcatccag

SEQ ID NO: 500039 - DNA, 25 bp, Homo sapien
gactacactgcatatgatgagttca

SEQ ID NO: 500040 - DNA, 25 bp, Homo sapien
gcaacaaattcacaataccacatgt

SEQ ID NO: 500041 - DNA, 25 bp, Homo sapien
cattcttccctgtagtggcctcctt

SEQ ID NO: 500042 - DNA, 25 bp, Homo sapien
ctggaccattcttccctgtagtggc

SEQ ID NO: 500043 - DNA, 25 bp, Homo sapien
gaccattcttccctgtagtggcctc

SEQ ID NO: 500044 - DNA, 25 bp, Homo sapien
tggcctcctttgcctgaatgtagct

SEQ ID NO: 500045 - DNA, 25 bp, Homo sapien
ctgcaggtgaaaaacgacagagagg

SEQ ID NO: 500046 - DNA, 25 bp, Homo sapien
ggtgaaaaacgacagagaggcagaa

SEQ ID NO: 500047 - DNA, 25 bp, Homo sapien
aaaaacgacagagaggcagaacact

SEQ ID NO: 500048 - DNA, 25 bp, Homo sapien
aaacgacagagaggcagaacactct

SEQ ID NO: 500049 - DNA, 25 bp, Homo sapien
tcctggctcacagaacggtacaagg

SEQ ID NO: 500050 - DNA, 25 bp, Homo sapien
cacagaacggtacaaggataatata

SEQ ID NO: 500051 - DNA, 25 bp, Homo sapien
ggtacaaggataatataaaatctca

SEQ ID NO: 500052 - DNA, 25 bp, Homo sapien
ggagcagtggacttgaagccactcc

SEQ ID NO: 500053 - DNA, 25 bp, Homo sapien
agtctcccggaacgatggcactgtt

SEQ ID NO: 500054 - DNA, 25 bp, Homo sapien
ctggatccagctggagtctcccgga

SEQ ID NO: 500055 - DNA, 25 bp, Homo sapien
tccagctggagtctcccggaacgat

SEQ ID NO: 500056 - DNA, 25 bp, Homo sapien
tactcaacaggttattaaggtgaca

SEQ ID NO: 500057 - DNA, 25 bp, Homo sapien
tgcctttgatgaaaccagcccctgc

SEQ ID NO: 500058 - DNA, 25 bp, Homo sapien
caggtcccagttgtgcctttgatga

SEQ ID NO: 500059 - DNA, 25 bp, Homo sapien
gacaaggtgagcctctaacactacc

SEQ ID NO: 500060 - DNA, 25 bp, Homo sapien
tggacctcgccaggggccggtttca

SEQ ID NO: 500061 - DNA, 25 bp, Homo sapien
tcagaaggtgcttcactgagccagc

SEQ ID NO: 500062 - DNA, 25 bp, Homo sapien
gaagtcaccgtctgtactgaggtct

SEQ ID NO: 500063 - DNA, 25 bp, Homo sapien
gacactggagcttaatagttgcacc

SEQ ID NO: 500064 - DNA, 25 bp, Homo sapien
ttagctaagttcatggaagtcaccg

SEQ ID NO: 500065 - DNA, 25 bp, Homo sapien
gcatattgggaacataggagaagca

SEQ ID NO: 500066 - DNA, 25 bp, Homo sapien
ctgatgtccagcatattgggaacat

SEQ ID NO: 500067 - DNA, 25 bp, Homo sapien
ccagcatattgggaacataggagaa

SEQ ID NO: 500068 - DNA, 25 bp, Homo sapien
tgtccagcatattgggaacatagga

SEQ ID NO: 500069 - DNA, 25 bp, Homo sapien
taagcaaggcagtagactccaggag

SEQ ID NO: 500070 - DNA, 25 bp, Homo sapien
caggcagtggctgactttgtcgtcc

SEQ ID NO: 500071 - DNA, 25 bp, Homo sapien
gtttagtaacctgtgacacctggag

SEQ ID NO: 500072 - DNA, 25 bp, Homo sapien
tgtcgtccaactgtataagcaaggc

SEQ ID NO: 500073 - DNA, 25 bp, Homo sapien
catatgacgactactgtcctccttc

SEQ ID NO: 500074 - DNA, 25 bp, Homo sapien
cactcatatgacgactactgtcctc

SEQ ID NO: 500075 - DNA, 25 bp, Homo sapien
gacgactactgtcctccttctgttc

SEQ ID NO: 500076 - DNA, 25 bp, Homo sapien
tatgacgactactgtcctccttctg

SEQ ID NO: 500077 - DNA, 25 bp, Homo sapien
tattttataagatcgttacatacgt

SEQ ID NO: 500078 - DNA, 25 bp, Homo sapien
aaatagatgccagaaccctcatgtc

SEQ ID NO: 500079 - DNA, 25 bp, Homo sapien
aattctgttgctgtaacctttgtga

SEQ ID NO: 500080 - DNA, 25 bp, Homo sapien
catacgtaactacaggatttctgct

SEQ ID NO: 500081 - DNA, 25 bp, Homo sapien
ccaggtccgcgctgttcttggcagc

SEQ ID NO: 500082 - DNA, 25 bp, Homo sapien
tgggatgccagcgagctcctcttgg

SEQ ID NO: 500083 - DNA, 25 bp, Homo sapien
ggatgccagcgagctcctcttggcc

SEQ ID NO: 500084 - DNA, 25 bp, Homo sapien
catgggatgccagcgagctcctctt

SEQ ID NO: 500085 - DNA, 25 bp, Homo sapien
ctcctcttggcctggccagtgcacc

SEQ ID NO: 500086 - DNA, 25 bp, Homo sapien
cacccgatatgtgatcagcctgtct

SEQ ID NO: 500087 - DNA, 25 bp, Homo sapien
cccagagaaccaggggcttggtgct

SEQ ID NO: 500088 - DNA, 25 bp, Homo sapien
aagcttctgaaacacccgatatgtg

SEQ ID NO: 500089 - DNA, 25 bp, Homo sapien
agcctgtctagacacacaaagtggt

SEQ ID NO: 500090 - DNA, 25 bp, Homo sapien
tgcatctgggcactcctgggcccat

SEQ ID NO: 500091 - DNA, 25 bp, Homo sapien
gcatctgggcactcctgggcccata

SEQ ID NO: 500092 - DNA, 25 bp, Homo sapien
actgcatctgggcactcctgggccc

SEQ ID NO: 500093 - DNA, 25 bp, Homo sapien
tcactgcatctgggcactcctgggc

SEQ ID NO: 500094 - DNA, 25 bp, Homo sapien
tcagcatcactgtctctcgagctgc

SEQ ID NO: 500095 - DNA, 25 bp, Homo sapien
tcactgtctctcgagctgcccatcc

SEQ ID NO: 500096 - DNA, 25 bp, Homo sapien
caggactcctgcatcagcatcactg

SEQ ID NO: 500097 - DNA, 25 bp, Homo sapien
tgtctctcgagctgcccatcccctc

SEQ ID NO: 500098 - DNA, 25 bp, Homo sapien
tgtacccatctatgtcaccagacac

SEQ ID NO: 500099 - DNA, 25 bp, Homo sapien
cagcacacatgtgagacaagaaaga

SEQ ID NO: 500100 - DNA, 25 bp, Homo sapien
atgcctgtacccatctatgtcacca

SEQ ID NO: 500101 - DNA, 25 bp, Homo sapien
cccatctatgtcaccagacacagag

SEQ ID NO: 500102 - DNA, 25 bp, Homo sapien
gcaagagggctcctaagactgaggt

SEQ ID NO: 500103 - DNA, 25 bp, Homo sapien
gagaaaatcaagcacggtcagcctg

SEQ ID NO: 500104 - DNA, 25 bp, Homo sapien
tgctcgctgagggtccagtggactc

SEQ ID NO: 500105 - DNA, 25 bp, Homo sapien
ggtttgaaagccacaccaatgagaa

SEQ ID NO: 500106 - DNA, 25 bp, Homo sapien
aggcccagaaagactggagggcggg

SEQ ID NO: 500107 - DNA, 25 bp, Homo sapien
ctgcaaggcccagaaagactggagg

SEQ ID NO: 500108 - DNA, 25 bp, Homo sapien
caaggcccagaaagactggagggcg

SEQ ID NO: 500109 - DNA, 25 bp, Homo sapien
tgcaaggcccagaaagactggaggg

SEQ ID NO: 500110 - DNA, 25 bp, Homo sapien
tgcacactccccgaaggtatgggtt

SEQ ID NO: 500111 - DNA, 25 bp, Homo sapien
atatgcacgtgcacactccccgaag

SEQ ID NO: 500112 - DNA, 25 bp, Homo sapien
agattttgggagaggaactgcctgc

SEQ ID NO: 500113 - DNA, 25 bp, Homo sapien
tccccgaaggtatgggttcagcagg

SEQ ID NO: 500114 - DNA, 25 bp, Homo sapien
agtgtgccctctggcattagagcag

SEQ ID NO: 500115 - DNA, 25 bp, Homo sapien
ccctctggcattagagcagcatctg

SEQ ID NO: 500116 - DNA, 25 bp, Homo sapien
tgtgccctctggcattagagcagca

SEQ ID NO: 500117 - DNA, 25 bp, Homo sapien
tctggcattagagcagcatctgtac

SEQ ID NO: 500118 - DNA, 25 bp, Homo sapien
aggctccaagcaccatggccgaagg

SEQ ID NO: 500119 - DNA, 25 bp, Homo sapien
accatggccgaaggccagccctgga

SEQ ID NO: 500120 - DNA, 25 bp, Homo sapien
cctgcctggtccccactcttgggtg

SEQ ID NO: 500121 - DNA, 25 bp, Homo sapien
ctgcctggtccccactcttgggtgc

SEQ ID NO: 500122 - DNA, 25 bp, Homo sapien
ccagggcaccgatctcctcgctggc

SEQ ID NO: 500123 - DNA, 25 bp, Homo sapien
ttccagggcaccgatctcctcgctg

SEQ ID NO: 500124 - DNA, 25 bp, Homo sapien
tccagggcaccgatctcctcgctgg

SEQ ID NO: 500125 - DNA, 25 bp, Homo sapien
tattccagggcaccgatctcctcgc

SEQ ID NO: 500126 - DNA, 25 bp, Homo sapien
tgcagcaggtgcaagatgtcggctg

SEQ ID NO: 500127 - DNA, 25 bp, Homo sapien
ggtgcaagatgtcggctgccaagct

SEQ ID NO: 500128 - DNA, 25 bp, Homo sapien
caggtgcaagatgtcggctgccaag

SEQ ID NO: 500129 - DNA, 25 bp, Homo sapien
gcaagatgtcggctgccaagctccc

SEQ ID NO: 500130 - DNA, 25 bp, Homo sapien
caaaccctcgaccaaggagtcgtca

SEQ ID NO: 500131 - DNA, 25 bp, Homo sapien
ggccggggcttggtgtccgtgtcga

SEQ ID NO: 500132 - DNA, 25 bp, Homo sapien
tgcagcaaaccctcgaccaaggagt

SEQ ID NO: 500133 - DNA, 25 bp, Homo sapien
cgatgtgcagcaaaccctcgaccaa

SEQ ID NO: 500134 - DNA, 25 bp, Homo sapien
gcgtgagagacagggcaccggtcag

SEQ ID NO: 500135 - DNA, 25 bp, Homo sapien
acgcgtgagagacagggcaccggtc

SEQ ID NO: 500136 - DNA, 25 bp, Homo sapien
ctgtgacgcgtgagagacagggcac

SEQ ID NO: 500137 - DNA, 25 bp, Homo sapien
gtgacgcgtgagagacagggcaccg

SEQ ID NO: 500138 - DNA, 25 bp, Homo sapien
cacatataaagagatgccgcgatga

SEQ ID NO: 500139 - DNA, 25 bp, Homo sapien
gtctcaggaccacaaaggaccaaac

SEQ ID NO: 500140 - DNA, 25 bp, Homo sapien
cacactgtgcaccatattcacagag

SEQ ID NO: 500141 - DNA, 25 bp, Homo sapien
gagagccccagtgtgtaacacatat

SEQ ID NO: 500142 - DNA, 25 bp, Homo sapien
atcatcttgcgcagaaacaccctca

SEQ ID NO: 500143 - DNA, 25 bp, Homo sapien
tctccatcatcttgcgcagaaacac

SEQ ID NO: 500144 - DNA, 25 bp, Homo sapien
catcttgcgcagaaacaccctcaga

SEQ ID NO: 500145 - DNA, 25 bp, Homo sapien
ggttgagagtaaggggcctctccat

SEQ ID NO: 500146 - DNA, 25 bp, Homo sapien
cttgtacgctgctgagtcaagcttt

SEQ ID NO: 500147 - DNA, 25 bp, Homo sapien
ttgtacgctgctgagtcaagctttg

SEQ ID NO: 500148 - DNA, 25 bp, Homo sapien
tgtacgctgctgagtcaagctttgg

SEQ ID NO: 500149 - DNA, 25 bp, Homo sapien
ttcatgacaggtgtggacagcacca

SEQ ID NO: 500150 - DNA, 25 bp, Homo sapien
tggacagcaccaccttcatatgcaa

SEQ ID NO: 500151 - DNA, 25 bp, Homo sapien
caggtgtggacagcaccaccttcat

SEQ ID NO: 500152 - DNA, 25 bp, Homo sapien
gacagcaccaccttcatatgcaaca

SEQ ID NO: 500153 - DNA, 25 bp, Homo sapien
ggggagccagccactccaggaatac

SEQ ID NO: 500154 - DNA, 25 bp, Homo sapien
cagccttggggggagccagccactc

SEQ ID NO: 500155 - DNA, 25 bp, Homo sapien
aagcacagcagatgggagcccagtg

SEQ ID NO: 500156 - DNA, 25 bp, Homo sapien
gaaagcacagcagatgggagcccag

SEQ ID NO: 500157 - DNA, 25 bp, Homo sapien
gcatgacgggcctctcccaacccct

SEQ ID NO: 500158 - DNA, 25 bp, Homo sapien
ctctcagggcatgacgggcctctcc

SEQ ID NO: 500159 - DNA, 25 bp, Homo sapien
gggcatgacgggcctctcccaaccc

SEQ ID NO: 500160 - DNA, 25 bp, Homo sapien
tcagggcatgacgggcctctcccaa

SEQ ID NO: 500161 - DNA, 25 bp, Homo sapien
tgagctcgccattgtccgaaacgta

SEQ ID NO: 500162 - DNA, 25 bp, Homo sapien
ttgtccgaaacgtactcatactcgt

SEQ ID NO: 500163 - DNA, 25 bp, Homo sapien
aactcgttgatcttgagctcgccat

SEQ ID NO: 500164 - DNA, 25 bp, Homo sapien
tgatcttgagctcgccattgtccga

SEQ ID NO: 500165 - DNA, 25 bp, Homo sapien
tgtctttgtttccacctagaggcaa

SEQ ID NO: 500166 - DNA, 25 bp, Homo sapien
agaagttgtctttgtttccacctag

SEQ ID NO: 500167 - DNA, 25 bp, Homo sapien
caaggagtttcctgttggagaaaga

SEQ ID NO: 500168 - DNA, 25 bp, Homo sapien
ctttgtttccacctagaggcaactt

SEQ ID NO: 500169 - DNA, 25 bp, Homo sapien
cttcagtaaggagttgggtttgctg

SEQ ID NO: 500170 - DNA, 25 bp, Homo sapien
tcagtaaggagttgggtttgctgtt

SEQ ID NO: 500171 - DNA, 25 bp, Homo sapien
ctcttccatcttcagtaaggagttg

SEQ ID NO: 500172 - DNA, 25 bp, Homo sapien
ttccatcttcagtaaggagttgggt

SEQ ID NO: 500173 - DNA, 25 bp, Homo sapien
ctgaaaagcaagaccagggctgtcc

SEQ ID NO: 500174 - DNA, 25 bp, Homo sapien
catccatgcacacgtgcatgtctca

SEQ ID NO: 500175 - DNA, 25 bp, Homo sapien
atccatgcacacgtgcatgtctcac

SEQ ID NO: 500176 - DNA, 25 bp, Homo sapien
tgcatccatgcacacgtgcatgtct

SEQ ID NO: 500177 - DNA, 25 bp, Homo sapien
catgcatccatgcacacgtgcatgt

SEQ ID NO: 500178 - DNA, 25 bp, Homo sapien
tcattttctatgtggaccacgtcct

SEQ ID NO: 500179 - DNA, 25 bp, Homo sapien
cacatcattttctatgtggaccacg

SEQ ID NO: 500180 - DNA, 25 bp, Homo sapien
atcattttctatgtggaccacgtcc

SEQ ID NO: 500181 - DNA, 25 bp, Homo sapien
catcattttctatgtggaccacgtc

SEQ ID NO: 500182 - DNA, 25 bp, Homo sapien
tgagtgccaccgctgccacagcaca

SEQ ID NO: 500183 - DNA, 25 bp, Homo sapien
gtggccctcctgagtgccaccgctg

SEQ ID NO: 500184 - DNA, 25 bp, Homo sapien
caggtggccctcctgagtgccaccg

SEQ ID NO: 500185 - DNA, 25 bp, Homo sapien
cctcctgagtgccaccgctgccaca

SEQ ID NO: 500186 - DNA, 25 bp, Homo sapien
gcagagcctgtccaccctgaagggt

SEQ ID NO: 500187 - DNA, 25 bp, Homo sapien
ggggcagagcctgtccaccctgaag

SEQ ID NO: 500188 - DNA, 25 bp, Homo sapien
tgtgctgccttcctcaatgagggcc

SEQ ID NO: 500189 - DNA, 25 bp, Homo sapien
gtgctgccttcctcaatgagggccc

SEQ ID NO: 500190 - DNA, 25 bp, Homo sapien
ggatattgcaggattgggtcacgac

SEQ ID NO: 500191 - DNA, 25 bp, Homo sapien
tgcaggattgggtcacgaccaggca

SEQ ID NO: 500192 - DNA, 25 bp, Homo sapien
ggcagactgacctcacagaagagcc

SEQ ID NO: 500193 - DNA, 25 bp, Homo sapien
gaagtgcatcttctgggcagactga

SEQ ID NO: 500194 - DNA, 25 bp, Homo sapien
ttgcccttcttgggtggctccatct

SEQ ID NO: 500195 - DNA, 25 bp, Homo sapien
gggtggctccatcttggtcagtgcc

SEQ ID NO: 500196 - DNA, 25 bp, Homo sapien
catcttggtcagtgcctccttggtg

SEQ ID NO: 500197 - DNA, 25 bp, Homo sapien
tggctccatcttggtcagtgcctcc

SEQ ID NO: 500198 - DNA, 25 bp, Homo sapien
ggtccaggttggagatattaggcaa

SEQ ID NO: 500199 - DNA, 25 bp, Homo sapien
gcaggtccaggttggagatattagg

SEQ ID NO: 500200 - DNA, 25 bp, Homo sapien
caggtccaggttggagatattaggc

SEQ ID NO: 500201 - DNA, 25 bp, Homo sapien
tccaggttggagatattaggcaagg

SEQ ID NO: 500202 - DNA, 25 bp, Homo sapien
cagcattttgtggagccttgggggc

SEQ ID NO: 500203 - DNA, 25 bp, Homo sapien
tcagcattttgtggagccttggggg

SEQ ID NO: 500204 - DNA, 25 bp, Homo sapien
gagattcagcattttgtggagcctt

SEQ ID NO: 500205 - DNA, 25 bp, Homo sapien
gattcagcattttgtggagccttgg

SEQ ID NO: 500206 - DNA, 25 bp, Homo sapien
tctccaggagggattgaggcggggt

SEQ ID NO: 500207 - DNA, 25 bp, Homo sapien
ttctccaggagggattgaggcgggg

SEQ ID NO: 500208 - DNA, 25 bp, Homo sapien
ctccaggagggattgaggcggggtg

SEQ ID NO: 500209 - DNA, 25 bp, Homo sapien
tccaggagggattgaggcggggtgg

SEQ ID NO: 500210 - DNA, 25 bp, Homo sapien
cttccggtcaggtggctttggaggc

SEQ ID NO: 500211 - DNA, 25 bp, Homo sapien
ttccggtcaggtggctttggaggca

SEQ ID NO: 500212 - DNA, 25 bp, Homo sapien
tccggtcaggtggctttggaggcat

SEQ ID NO: 500213 - DNA, 25 bp, Homo sapien
ccggtcaggtggctttggaggcatt

SEQ ID NO: 500214 - DNA, 25 bp, Homo sapien
gagagtgcagagagtactgtctgga

SEQ ID NO: 500215 - DNA, 25 bp, Homo sapien
cacaaaggcaagcttgcccaggaga

SEQ ID NO: 500216 - DNA, 25 bp, Homo sapien
gaccctgagccctcacaaaggcaag

SEQ ID NO: 500217 - DNA, 25 bp, Homo sapien
agacctgggaccctgagccctcaca

SEQ ID NO: 500218 - DNA, 25 bp, Homo sapien
tcactgagccagatctctttggcca

SEQ ID NO: 500219 - DNA, 25 bp, Homo sapien
ggtctttgacaagctgtgaaggttt

SEQ ID NO: 500220 - DNA, 25 bp, Homo sapien
ctgtgaaggtttgaagtgctccagg

SEQ ID NO: 500221 - DNA, 25 bp, Homo sapien
tctttggccaggtctttgacaagct

SEQ ID NO: 500222 - DNA, 25 bp, Homo sapien
agggtcagcgccaaacatgccccat

SEQ ID NO: 500223 - DNA, 25 bp, Homo sapien
ctgccaaagcatacagggcaacggg

SEQ ID NO: 500224 - DNA, 25 bp, Homo sapien
caaacatgccccatggccttgatct

SEQ ID NO: 500225 - DNA, 25 bp, Homo sapien
atgccccatggccttgatctattcc

SEQ ID NO: 500226 - DNA, 25 bp, Homo sapien
caaattctgccccagcaagaggtct

SEQ ID NO: 500227 - DNA, 25 bp, Homo sapien
aggggacaagcatgcctgaggccac

SEQ ID NO: 500228 - DNA, 25 bp, Homo sapien
accaccagcgggctatggagtaaac

SEQ ID NO: 500229 - DNA, 25 bp, Homo sapien
ggagtaaacatgagtcccatccctt

SEQ ID NO: 500230 - DNA, 25 bp, Homo sapien
ggctatggagtaaacatgagtccca

SEQ ID NO: 500231 - DNA, 25 bp, Homo sapien
tcctccacccgcagacccactttcc

SEQ ID NO: 500232 - DNA, 25 bp, Homo sapien
gtcctccacccgcagacccactttc

SEQ ID NO: 500233 - DNA, 25 bp, Homo sapien
ctccacccgcagacccactttcctc

SEQ ID NO: 500234 - DNA, 25 bp, Homo sapien
tccacccgcagacccactttcctcc

SEQ ID NO: 500235 - DNA, 25 bp, Homo sapien
ccagctctcaagtggcccagtcagt

SEQ ID NO: 500236 - DNA, 25 bp, Homo sapien
catggggtgtctggggcaaattcac

SEQ ID NO: 500237 - DNA, 25 bp, Homo sapien
gtgctctgcacctacatctgtcctc

SEQ ID NO: 500238 - DNA, 25 bp, Homo sapien
tcaagtggcccagtcagtggagagc

SEQ ID NO: 500239 - DNA, 25 bp, Homo sapien
cttcgtccacggttggaaagcatca

SEQ ID NO: 500240 - DNA, 25 bp, Homo sapien
ctgcttgccagatttgtgagagccc

SEQ ID NO: 500241 - DNA, 25 bp, Homo sapien
agatttgtgagagcccaggaaagag

SEQ ID NO: 500242 - DNA, 25 bp, Homo sapien
gcttgccagatttgtgagagcccag

SEQ ID NO: 500243 - DNA, 25 bp, Homo sapien
gccagatttgtgagagcccaggaaa

SEQ ID NO: 500244 - DNA, 25 bp, Homo sapien
cacaggtgccttcaagcccagccac

SEQ ID NO: 500245 - DNA, 25 bp, Homo sapien
caggtgccttcaagcccagccacac

SEQ ID NO: 500246 - DNA, 25 bp, Homo sapien
ctgcccacaggtgccttcaagccca

SEQ ID NO: 500247 - DNA, 25 bp, Homo sapien
cccacaggtgccttcaagcccagcc

SEQ ID NO: 500248 - DNA, 25 bp, Homo sapien
agtgtggagcaggtgtgactgatac

SEQ ID NO: 500249 - DNA, 25 bp, Homo sapien
ccatggccctgagggatcctaaggg

SEQ ID NO: 500250 - DNA, 25 bp, Homo sapien
tcctaagctcgtgacagagccaggg

SEQ ID NO: 500251 - DNA, 25 bp, Homo sapien
ccttcccaatggagacaagtgtgga

SEQ ID NO: 500252 - DNA, 25 bp, Homo sapien
accagaagacagtttagaagttggg

SEQ ID NO: 500253 - DNA, 25 bp, Homo sapien
tgcacaattgcaaccttctttctac

SEQ ID NO: 500254 - DNA, 25 bp, Homo sapien
gtaccagaagacagtttagaagttg

SEQ ID NO: 500255 - DNA, 25 bp, Homo sapien
caattgcaaccttctttctacttca

SEQ ID NO: 500256 - DNA, 25 bp, Homo sapien
ggaccagcggacaatcgccctgggt

SEQ ID NO: 500257 - DNA, 25 bp, Homo sapien
ccagcggacaatcgccctgggtggc

SEQ ID NO: 500258 - DNA, 25 bp, Homo sapien
ggtggaccagcggacaatcgccctg

SEQ ID NO: 500259 - DNA, 25 bp, Homo sapien
ctgaggtggaccagcggacaatcgc

SEQ ID NO: 500260 - DNA, 25 bp, Homo sapien
acagaagtgagtgtggcatagatcc

SEQ ID NO: 500261 - DNA, 25 bp, Homo sapien
gggaggaaatgtcccacgagggcca

SEQ ID NO: 500262 - DNA, 25 bp, Homo sapien
agaagtgagtgtggcatagatccag

SEQ ID NO: 500263 - DNA, 25 bp, Homo sapien
cagtccacagaagtgagtgtggcat

SEQ ID NO: 500264 - DNA, 25 bp, Homo sapien
ctgaccagacagcacaagctccatt

SEQ ID NO: 500265 - DNA, 25 bp, Homo sapien
tgctgaccagacagcacaagctcca

SEQ ID NO: 500266 - DNA, 25 bp, Homo sapien
tggctctgatgccgtggctgccgtc

SEQ ID NO: 500267 - DNA, 25 bp, Homo sapien
ctctgatgccgtggctgccgtcccc

SEQ ID NO: 500268 - DNA, 25 bp, Homo sapien
gtctggccctgcttgacgatgcact

SEQ ID NO: 500269 - DNA, 25 bp, Homo sapien
ggtctggccctgcttgacgatgcac

SEQ ID NO: 500270 - DNA, 25 bp, Homo sapien
tctggccctgcttgacgatgcactt

SEQ ID NO: 500271 - DNA, 25 bp, Homo sapien
ctggccctgcttgacgatgcacttg

SEQ ID NO: 500272 - DNA, 25 bp, Homo sapien
tgctcatgtggaacacgggggtggg

SEQ ID NO: 500273 - DNA, 25 bp, Homo sapien
ctcatgtggaacacgggggtggggg

SEQ ID NO: 500274 - DNA, 25 bp, Homo sapien
gctcatgtggaacacgggggtgggg

SEQ ID NO: 500275 - DNA, 25 bp, Homo sapien
ctgctcatgtggaacacgggggtgg

SEQ ID NO: 500276 - DNA, 25 bp, Homo sapien
acggcaaagccgaggtgccccaagg

SEQ ID NO: 500277 - DNA, 25 bp, Homo sapien
cctgtcccaaggatggatggtccgg

SEQ ID NO: 500278 - DNA, 25 bp, Homo sapien
ctcctgtcccaaggatggatggtcc

SEQ ID NO: 500279 - DNA, 25 bp, Homo sapien
gggtcatggccacggcaaagccgag

SEQ ID NO: 500280 - DNA, 25 bp, Homo sapien
ccccacaatcgacgtggaagtcggt

SEQ ID NO: 500281 - DNA, 25 bp, Homo sapien
agaggcgcccccacaatcgacgtgg

SEQ ID NO: 500282 - DNA, 25 bp, Homo sapien
aatcgacgtggaagtcggtgtagct

SEQ ID NO: 500283 - DNA, 25 bp, Homo sapien
cacaatcgacgtggaagtcggtgta

SEQ ID NO: 500284 - DNA, 25 bp, Homo sapien
tcaacgcagatcaggcaggacttgg

SEQ ID NO: 500285 - DNA, 25 bp, Homo sapien
cttcaacgcagatcaggcaggactt

SEQ ID NO: 500286 - DNA, 25 bp, Homo sapien
caacgcagatcaggcaggacttggt

SEQ ID NO: 500287 - DNA, 25 bp, Homo sapien
cgcagatcaggcaggacttggtcac

SEQ ID NO: 500288 - DNA, 25 bp, Homo sapien
gccattccacccagaacagtttctt

SEQ ID NO: 500289 - DNA, 25 bp, Homo sapien
aatgcatctggccattccacccaga

SEQ ID NO: 500290 - DNA, 25 bp, Homo sapien
atctggccattccacccagaacagt

SEQ ID NO: 500291 - DNA, 25 bp, Homo sapien
ctggccattccacccagaacagttt

SEQ ID NO: 500292 - DNA, 25 bp, Homo sapien
ggattttagctctaggtgtcctccc

SEQ ID NO: 500293 - DNA, 25 bp, Homo sapien
taataaagcacgaaaagccaccact

SEQ ID NO: 500294 - DNA, 25 bp, Homo sapien
tgtctgcaggtcaccagtgtgccta

SEQ ID NO: 500295 - DNA, 25 bp, Homo sapien
gcaaggcctcttacatgtcaggagc

SEQ ID NO: 500296 - DNA, 25 bp, Homo sapien
tctcttctggctgttacccatttct

SEQ ID NO: 500297 - DNA, 25 bp, Homo sapien
ctggctgttacccatttctggttgt

SEQ ID NO: 500298 - DNA, 25 bp, Homo sapien
gaaagggccattttgttctcttctg

SEQ ID NO: 500299 - DNA, 25 bp, Homo sapien
agaggaaagggccattttgttctct

SEQ ID NO: 500300 - DNA, 25 bp, Homo sapien
gtggcaacacttgagaaatgctggt

SEQ ID NO: 500301 - DNA, 25 bp, Homo sapien
ggtggcaacacttgagaaatgctgg

SEQ ID NO: 500302 - DNA, 25 bp, Homo sapien
tggtggcaacacttgagaaatgctg

SEQ ID NO: 500303 - DNA, 25 bp, Homo sapien
tggggtagggttagaatattgatgc

SEQ ID NO: 500304 - DNA, 25 bp, Homo sapien
ctggggtagggttagaatattgatg

SEQ ID NO: 500305 - DNA, 25 bp, Homo sapien
ggggtagggttagaatattgatgct

SEQ ID NO: 500306 - DNA, 25 bp, Homo sapien
tccaagttccctccaaggcgtctct

SEQ ID NO: 500307 - DNA, 25 bp, Homo sapien
ctccgagttgtttcttgctggtatc

SEQ ID NO: 500308 - DNA, 25 bp, Homo sapien
ttgctggtatctctttccaagttcc

SEQ ID NO: 500309 - DNA, 25 bp, Homo sapien
ccaaggcgtctctccaggagtccat

SEQ ID NO: 500310 - DNA, 25 bp, Homo sapien
catctgatttggagagctgataacc

SEQ ID NO: 500311 - DNA, 25 bp, Homo sapien
tttggagagctgataacctgtttgc

SEQ ID NO: 500312 - DNA, 25 bp, Homo sapien
gctgataacctgtttgcagaaaaca

SEQ ID NO: 500313 - DNA, 25 bp, Homo sapien
attcacatctgatttggagagctga

SEQ ID NO: 500314 - DNA, 25 bp, Homo sapien
gaatgtttcgttctgtgctgagatc

SEQ ID NO: 500315 - DNA, 25 bp, Homo sapien
tgaatgtttcgttctgtgctgagat

SEQ ID NO: 500316 - DNA, 25 bp, Homo sapien
ctgaatgtttcgttctgtgctgaga

SEQ ID NO: 500317 - DNA, 25 bp, Homo sapien
tctcttttagggaatgattggccaa

SEQ ID NO: 500318 - DNA, 25 bp, Homo sapien
gatgagtttcaatcgtatgtccact

SEQ ID NO: 500319 - DNA, 25 bp, Homo sapien
caggcaggtgagttaagcactggaa

SEQ ID NO: 500320 - DNA, 25 bp, Homo sapien
tgtgagtcctttctgggcggtgtcc

SEQ ID NO: 500321 - DNA, 25 bp, Homo sapien
tttctcatcactgcacgtgctccat

SEQ ID NO: 500322 - DNA, 25 bp, Homo sapien
gctccatgggcggtcatatctgggc

SEQ ID NO: 500323 - DNA, 25 bp, Homo sapien
catggtgttcccctgatgaggcagc

SEQ ID NO: 500324 - DNA, 25 bp, Homo sapien
gggcccatggtgttcccctgatgag

SEQ ID NO: 500325 - DNA, 25 bp, Homo sapien
ttagaatgtttcacatgattcttac

SEQ ID NO: 500326 - DNA, 25 bp, Homo sapien
cagcttggttagaacagacatccag

SEQ ID NO: 500327 - DNA, 25 bp, Homo sapien
atccaggcattattaggcccatggg

SEQ ID NO: 500328 - DNA, 25 bp, Homo sapien
taaaatcagcttggttagaacagac

SEQ ID NO: 500329 - DNA, 25 bp, Homo sapien
tattaggcccatgggaccgaggaga

SEQ ID NO: 500330 - DNA, 25 bp, Homo sapien
tgctgtacaaagctgactcgagtct

SEQ ID NO: 500331 - DNA, 25 bp, Homo sapien
gctgtacaaagctgactcgagtctt

SEQ ID NO: 500332 - DNA, 25 bp, Homo sapien
ctttggtgatccctggcattctcat

SEQ ID NO: 500333 - DNA, 25 bp, Homo sapien
ggtgatccctggcattctcatcaga

SEQ ID NO: 500334 - DNA, 25 bp, Homo sapien
ttggtgatccctggcattctcatca

SEQ ID NO: 500335 - DNA, 25 bp, Homo sapien
tgatccctggcattctcatcagacc

SEQ ID NO: 500336 - DNA, 25 bp, Homo sapien
gcatgcgggcattatatcattgaca

SEQ ID NO: 500337 - DNA, 25 bp, Homo sapien
ggtggaagagcatgcgggcattata

SEQ ID NO: 500338 - DNA, 25 bp, Homo sapien
agagcatgcgggcattatatcattg

SEQ ID NO: 500339 - DNA, 25 bp, Homo sapien
gtggaagagcatgcgggcattatat

SEQ ID NO: 500340 - DNA, 25 bp, Homo sapien
aggatctcattatttaggttgaatt

SEQ ID NO: 500341 - DNA, 25 bp, Homo sapien
caggatctcattatttaggttgaat

SEQ ID NO: 500342 - DNA, 25 bp, Homo sapien
ggatctcattatttaggttgaattc

SEQ ID NO: 500343 - DNA, 25 bp, Homo sapien
gatctcattatttaggttgaattct

SEQ ID NO: 500344 - DNA, 25 bp, Homo sapien
tgtcatttactttataccactttcc

SEQ ID NO: 500345 - DNA, 25 bp, Homo sapien
gtgtcatttactttataccactttc

SEQ ID NO: 500346 - DNA, 25 bp, Homo sapien
tgtgtcatttactttataccacttt

SEQ ID NO: 500347 - DNA, 25 bp, Homo sapien
tggatctatacttcacccatcttca

SEQ ID NO: 500348 - DNA, 25 bp, Homo sapien
ctgagtgcacagtcctccgtgaggg

SEQ ID NO: 500349 - DNA, 25 bp, Homo sapien
caccttcctggatctatacttcacc

SEQ ID NO: 500350 - DNA, 25 bp, Homo sapien
tgagtgcacagtcctccgtgagggc

SEQ ID NO: 500351 - DNA, 25 bp, Homo sapien
tatttagtggagcagccaaatccaa

SEQ ID NO: 500352 - DNA, 25 bp, Homo sapien
catatttagtggagcagccaaatcc

SEQ ID NO: 500353 - DNA, 25 bp, Homo sapien
gttcatcatatttagtggagcagcc

SEQ ID NO: 500354 - DNA, 25 bp, Homo sapien
ttcatcatatttagtggagcagcca

SEQ ID NO: 500355 - DNA, 25 bp, Homo sapien
agatgcttctttggctctaagaaag

SEQ ID NO: 500356 - DNA, 25 bp, Homo sapien
ctagatgcttctttggctctaagaa

SEQ ID NO: 500357 - DNA, 25 bp, Homo sapien
tagatgcttctttggctctaagaaa

SEQ ID NO: 500358 - DNA, 25 bp, Homo sapien
atgcttctttggctctaagaaagat

SEQ ID NO: 500359 - DNA, 25 bp, Homo sapien
agggttgcaagatcatagttttcag

SEQ ID NO: 500360 - DNA, 25 bp, Homo sapien
tctggaagcccctgtactatcaaag

SEQ ID NO: 500361 - DNA, 25 bp, Homo sapien
tttcagggtgtttaaaggcaacatc

SEQ ID NO: 500362 - DNA, 25 bp, Homo sapien
agctgactggtcttgtcgcatcttc

SEQ ID NO: 500363 - DNA, 25 bp, Homo sapien
gggagatgaaaagcagataaatgtc

SEQ ID NO: 500364 - DNA, 25 bp, Homo sapien
cagataaatgtcattaaattgtaag

SEQ ID NO: 500365 - DNA, 25 bp, Homo sapien
agcagataaatgtcattaaattgta

SEQ ID NO: 500366 - DNA, 25 bp, Homo sapien
tgggggagatgaaaagcagataaat

SEQ ID NO: 500367 - DNA, 25 bp, Homo sapien
ctcaactgtttttccgagtgttgcc

SEQ ID NO: 500368 - DNA, 25 bp, Homo sapien
tcaactgtttttccgagtgttgcca

SEQ ID NO: 500369 - DNA, 25 bp, Homo sapien
caactgtttttccgagtgttgccac

SEQ ID NO: 500370 - DNA, 25 bp, Homo sapien
ttatgcatctctgcaaccttttctc

SEQ ID NO: 500371 - DNA, 25 bp, Homo sapien
cactttggccttaaacttggccagt

SEQ ID NO: 500372 - DNA, 25 bp, Homo sapien
tgaaaaaattgtgtcctctgtcctt

SEQ ID NO: 500373 - DNA, 25 bp, Homo sapien
aagagatctgctttatactctgtga

SEQ ID NO: 500374 - DNA, 25 bp, Homo sapien
tgtgatgcaggccactttggcctta

SEQ ID NO: 500375 - DNA, 25 bp, Homo sapien
aacatctttgtagttcccatggaac

SEQ ID NO: 500376 - DNA, 25 bp, Homo sapien
cctcaaagttgctcgggtttagaca

SEQ ID NO: 500377 - DNA, 25 bp, Homo sapien
catgtatgggagtaagagccactga

SEQ ID NO: 500378 - DNA, 25 bp, Homo sapien
taaagatcagacttgccggcacttc

SEQ ID NO: 500379 - DNA, 25 bp, Homo sapien
agcaggcagttttgaagttgggaaa

SEQ ID NO: 500380 - DNA, 25 bp, Homo sapien
accaaagagccattctcagtgcact

SEQ ID NO: 500381 - DNA, 25 bp, Homo sapien
tctcagtgcactgaccatcaagcag

SEQ ID NO: 500382 - DNA, 25 bp, Homo sapien
caaagagccattctcagtgcactga

SEQ ID NO: 500383 - DNA, 25 bp, Homo sapien
tgaccatcaagcaggcgacgatggg

SEQ ID NO: 500384 - DNA, 25 bp, Homo sapien
tgcagggctcggggcccacgagagc

SEQ ID NO: 500385 - DNA, 25 bp, Homo sapien
gggcccacgagagctctgtcagtgc

SEQ ID NO: 500386 - DNA, 25 bp, Homo sapien
gctcggggcccacgagagctctgtc

SEQ ID NO: 500387 - DNA, 25 bp, Homo sapien
gggctcggggcccacgagagctctg

SEQ ID NO: 500388 - DNA, 25 bp, Homo sapien
ccacaggagtgagcgtggcacagat

SEQ ID NO: 500389 - DNA, 25 bp, Homo sapien
caggagtgagcgtggcacagatgca

SEQ ID NO: 500390 - DNA, 25 bp, Homo sapien
tccacaggagtgagcgtggcacaga

SEQ ID NO: 500391 - DNA, 25 bp, Homo sapien
cagtccacaggagtgagcgtggcac

SEQ ID NO: 500392 - DNA, 25 bp, Homo sapien
caaagactcaaaatgtcccctaata

SEQ ID NO: 500393 - DNA, 25 bp, Homo sapien
ctaatattgccttaattagcagcca

SEQ ID NO: 500394 - DNA, 25 bp, Homo sapien
cctaggacacggtccccaaagctgc

SEQ ID NO: 500395 - DNA, 25 bp, Homo sapien
gtggcgttaagctccggacaaggga

SEQ ID NO: 500396 - DNA, 25 bp, Homo sapien
agtaaccttgacgagggcccgcaag

SEQ ID NO: 500397 - DNA, 25 bp, Homo sapien
taagctccggacaagggagcaggca

SEQ ID NO: 500398 - DNA, 25 bp, Homo sapien
agggtctggccctgcttgacgatgc

SEQ ID NO: 500399 - DNA, 25 bp, Homo sapien
gggtctggccctgcttgacgatgca

SEQ ID NO: 500400 - DNA, 25 bp, Homo sapien
ggcagactatcagcactcatacagg

SEQ ID NO: 500401 - DNA, 25 bp, Homo sapien
tgtggttagcggcagactatcagca

SEQ ID NO: 500402 - DNA, 25 bp, Homo sapien
tcatacaggagatgtcgaccgaggc

SEQ ID NO: 500403 - DNA, 25 bp, Homo sapien
gtcgaccgaggccagcctgatgaga

SEQ ID NO: 500404 - DNA, 25 bp, Homo sapien
acgatcttgcagatgggtcatggcc

SEQ ID NO: 500405 - DNA, 25 bp, Homo sapien
gctcccagggactgcagacgatctt

SEQ ID NO: 500406 - DNA, 25 bp, Homo sapien
ttctgttccagggatggatggtctg

SEQ ID NO: 500407 - DNA, 25 bp, Homo sapien
ctccacccagcgatgtctccatggc

SEQ ID NO: 500408 - DNA, 25 bp, Homo sapien
gcttggccagcaatgcatcatctgg

SEQ ID NO: 500409 - DNA, 25 bp, Homo sapien
tgggcttggccagcaatgcatcatc

SEQ ID NO: 500410 - DNA, 25 bp, Homo sapien
ggcttggccagcaatgcatcatctg

SEQ ID NO: 500411 - DNA, 25 bp, Homo sapien
tcagtgtctcagtgcatcaaggatg

SEQ ID NO: 500412 - DNA, 25 bp, Homo sapien
gattggccacgtgcatgtgactgta

SEQ ID NO: 500413 - DNA, 25 bp, Homo sapien
cagtcctatgtatcgagtgtgtcca

SEQ ID NO: 500414 - DNA, 25 bp, Homo sapien
aaaaatcagtgcgtgccgtgtgcag

SEQ ID NO: 500415 - DNA, 25 bp, Homo sapien
tgtcgaagaactcaaggttggtgat

SEQ ID NO: 500416 - DNA, 25 bp, Homo sapien
cgaagaactcaaggttggtgatggt

SEQ ID NO: 500417 - DNA, 25 bp, Homo sapien
gtgtcgaagaactcaaggttggtga

SEQ ID NO: 500418 - DNA, 25 bp, Homo sapien
tgggtgtcgaagaactcaaggttgg

SEQ ID NO: 500419 - DNA, 25 bp, Homo sapien
ctgcagccatggggcggtggcgggc

SEQ ID NO: 500420 - DNA, 25 bp, Homo sapien
ccaggacgtgtacagtgggcacaca

SEQ ID NO: 500421 - DNA, 25 bp, Homo sapien
gtggcgggcggagcctgagcaccct

SEQ ID NO: 500422 - DNA, 25 bp, Homo sapien
caggacgtgtacagtgggcacacac

SEQ ID NO: 500423 - DNA, 25 bp, Homo sapien
ggctctgggtgccaacgtccagctt

SEQ ID NO: 500424 - DNA, 25 bp, Homo sapien
ttttctcttggctcagtgaagtgcc

SEQ ID NO: 500425 - DNA, 25 bp, Homo sapien
gtgaagtgccccgaccactcttcct

SEQ ID NO: 500426 - DNA, 25 bp, Homo sapien
tctgggtgccaacgtccagcttcac

SEQ ID NO: 500427 - DNA, 25 bp, Homo sapien
tgcgaggtggccaggtgacaggcct

SEQ ID NO: 500428 - DNA, 25 bp, Homo sapien
ccttagcgagggtggccagattagc

SEQ ID NO: 500429 - DNA, 25 bp, Homo sapien
tgacaggccttagcgagggtggcca

SEQ ID NO: 500430 - DNA, 25 bp, Homo sapien
ggtggccagattagcaaatgaaaac

SEQ ID NO: 500431 - DNA, 25 bp, Homo sapien
catgggattagtgtgaacagatgag

SEQ ID NO: 500432 - DNA, 25 bp, Homo sapien
tagtgtgaacagatgaggtgggtgc

SEQ ID NO: 500433 - DNA, 25 bp, Homo sapien
aaggtcatgggattagtgtgaacag

SEQ ID NO: 500434 - DNA, 25 bp, Homo sapien
tgtgaacagatgaggtgggtgccgg

SEQ ID NO: 500435 - DNA, 25 bp, Homo sapien
ctgtccggcacatgggccactatgt

SEQ ID NO: 500436 - DNA, 25 bp, Homo sapien
cagcgtgagctgactgtccggcaca

SEQ ID NO: 500437 - DNA, 25 bp, Homo sapien
tgactgtccggcacatgggccacta

SEQ ID NO: 500438 - DNA, 25 bp, Homo sapien
tgagctgactgtccggcacatgggc

SEQ ID NO: 500439 - DNA, 25 bp, Homo sapien
ttctcctggggcaccaggtacggac

SEQ ID NO: 500440 - DNA, 25 bp, Homo sapien
ctcctggggcaccaggtacggacat

SEQ ID NO: 500441 - DNA, 25 bp, Homo sapien
ccttctcctggggcaccaggtacgg

SEQ ID NO: 500442 - DNA, 25 bp, Homo sapien
actgcccaggtcacaccttctcctg

SEQ ID NO: 500443 - DNA, 25 bp, Homo sapien
ctgttttcaagcagtaaccagatga

SEQ ID NO: 500444 - DNA, 25 bp, Homo sapien
gatgatgggttaatgagcttgccac

SEQ ID NO: 500445 - DNA, 25 bp, Homo sapien
atgggttaatgagcttgccacaggc

SEQ ID NO: 500446 - DNA, 25 bp, Homo sapien
ttcaagcagtaaccagatgatgggt

SEQ ID NO: 500447 - DNA, 25 bp, Homo sapien
cttcagcaagaggtggccgcttggg

SEQ ID NO: 500448 - DNA, 25 bp, Homo sapien
tcagcaagaggtggccgcttgggct

SEQ ID NO: 500449 - DNA, 25 bp, Homo sapien
cagcaagaggtggccgcttgggctg

SEQ ID NO: 500450 - DNA, 25 bp, Homo sapien
ttcagcaagaggtggccgcttgggc

SEQ ID NO: 500451 - DNA, 25 bp, Homo sapien
atatgccgatgtcgggggcctcctc

SEQ ID NO: 500452 - DNA, 25 bp, Homo sapien
ggtggacttcacatgggttttctca

SEQ ID NO: 500453 - DNA, 25 bp, Homo sapien
catagtttgggcagtggtatatgcc

SEQ ID NO: 500454 - DNA, 25 bp, Homo sapien
tcacatgggttttctcatagtttgg

SEQ ID NO: 500455 - DNA, 25 bp, Homo sapien
aaacagaccattacctaggcactca

SEQ ID NO: 500456 - DNA, 25 bp, Homo sapien
caagatgaaacagaccattacctag

SEQ ID NO: 500457 - DNA, 25 bp, Homo sapien
aacaagatgaaacagaccattacct

SEQ ID NO: 500458 - DNA, 25 bp, Homo sapien
gatgaaacagaccattacctaggca

SEQ ID NO: 500459 - DNA, 25 bp, Homo sapien
ccagcgtcttgggccccagacgaat

SEQ ID NO: 500460 - DNA, 25 bp, Homo sapien
ctgccaggccaccagcgtcttgggc

SEQ ID NO: 500461 - DNA, 25 bp, Homo sapien
gcgtcttgggccccagacgaatgtt

SEQ ID NO: 500462 - DNA, 25 bp, Homo sapien
tgggccccagacgaatgttctcttc

SEQ ID NO: 500463 - DNA, 25 bp, Homo sapien
cacaggatgacctataccaccctga

SEQ ID NO: 500464 - DNA, 25 bp, Homo sapien
gccacatccacgctccatgtccatg

SEQ ID NO: 500465 - DNA, 25 bp, Homo sapien
ccacatccatagtcacacccatgcc

SEQ ID NO: 500466 - DNA, 25 bp, Homo sapien
cagaccccatatccatgttgagacc

SEQ ID NO: 500467 - DNA, 25 bp, Homo sapien
agtggaccctccacagggatccagg

SEQ ID NO: 500468 - DNA, 25 bp, Homo sapien
cttggcaggtgaaactaagtcttgg

SEQ ID NO: 500469 - DNA, 25 bp, Homo sapien
tgctggcactgatcctacatctgca

SEQ ID NO: 500470 - DNA, 25 bp, Homo sapien
cttggttctgtcactagctgtggtt

SEQ ID NO: 500471 - DNA, 25 bp, Homo sapien
taacaagcaacgaaagtcctgcttt

SEQ ID NO: 500472 - DNA, 25 bp, Homo sapien
tataacaagcaacgaaagtcctgct

SEQ ID NO: 500473 - DNA, 25 bp, Homo sapien
caagcaacgaaagtcctgctttatt

SEQ ID NO: 500474 - DNA, 25 bp, Homo sapien
tttataacaagcaacgaaagtcctg

SEQ ID NO: 500475 - DNA, 25 bp, Homo sapien
ggatccctgtctccggaccagtggg

SEQ ID NO: 500476 - DNA, 25 bp, Homo sapien
ggcggaggatccctgtctccggacc

SEQ ID NO: 500477 - DNA, 25 bp, Homo sapien
atggattccggctgtttggagtccc

SEQ ID NO: 500478 - DNA, 25 bp, Homo sapien
tgggcagatggattccggctgtttg

SEQ ID NO: 500479 - DNA, 25 bp, Homo sapien
tgagcacaagccctcagcaccaaag

SEQ ID NO: 500480 - DNA, 25 bp, Homo sapien
aactaatgagccactgattccttca

SEQ ID NO: 500481 - DNA, 25 bp, Homo sapien
tgctctgccccgagagctccaggaa

SEQ ID NO: 500482 - DNA, 25 bp, Homo sapien
gcaccaaagcggaatccacgagatt

SEQ ID NO: 500483 - DNA, 25 bp, Homo sapien
agcatgaggcccatggtcgtcctat

SEQ ID NO: 500484 - DNA, 25 bp, Homo sapien
catggtcgtcctatctctcttggcc

SEQ ID NO: 500485 - DNA, 25 bp, Homo sapien
tgaggcccatggtcgtcctatctct

SEQ ID NO: 500486 - DNA, 25 bp, Homo sapien
taatcggggctattcctgggcagca

SEQ ID NO: 500487 - DNA, 25 bp, Homo sapien
aatcaaacacggcagaaacccaaag

SEQ ID NO: 500488 - DNA, 25 bp, Homo sapien
atcaaacacggcagaaacccaaagt

SEQ ID NO: 500489 - DNA, 25 bp, Homo sapien
ttgtgatgggtctcaggctgtagac

SEQ ID NO: 500490 - DNA, 25 bp, Homo sapien
tgtgatgggtctcaggctgtagact

SEQ ID NO: 500491 - DNA, 25 bp, Homo sapien
cttgtgatgggtctcaggctgtaga

SEQ ID NO: 500492 - DNA, 25 bp, Homo sapien
tgatgggtctcaggctgtagactgc

SEQ ID NO: 500493 - DNA, 25 bp, Homo sapien
tctctccatcttctcggggagtttc

SEQ ID NO: 500494 - DNA, 25 bp, Homo sapien
tctccatcttctcggggagtttccc

SEQ ID NO: 500495 - DNA, 25 bp, Homo sapien
catcttctcggggagtttccctcag

SEQ ID NO: 500496 - DNA, 25 bp, Homo sapien
tcttctcggggagtttccctcagaa

SEQ ID NO: 500497 - DNA, 25 bp, Homo sapien
cctcagtagtcagcgccatggacaa

SEQ ID NO: 500498 - DNA, 25 bp, Homo sapien
catcctcaagttatcccgaagctgc

SEQ ID NO: 500499 - DNA, 25 bp, Homo sapien
acaccgaagctgtcctcagtagtca

SEQ ID NO: 500500 - DNA, 25 bp, Homo sapien
aaaagccacaccgaagctgtcctca

SEQ ID NO: 500501 - DNA, 25 bp, Homo sapien
agtgcacgaacaggaggaggttatc

SEQ ID NO: 500502 - DNA, 25 bp, Homo sapien
cctgccatgttcgagagtgcacgaa

SEQ ID NO: 500503 - DNA, 25 bp, Homo sapien
ccaagtgcagctggccacaaattgc

SEQ ID NO: 500504 - DNA, 25 bp, Homo sapien
cagggaccagttttagtgaaggcac

SEQ ID NO: 500505 - DNA, 25 bp, Homo sapien
tccaactgcagtgaggcgagctgcg

SEQ ID NO: 500506 - DNA, 25 bp, Homo sapien
gcagatactgagcactgacactgaa

SEQ ID NO: 500507 - DNA, 25 bp, Homo sapien
tctggccaagctgtagtgtccaacg

SEQ ID NO: 500508 - DNA, 25 bp, Homo sapien
tctcgtagttctctaaggcagatac

SEQ ID NO: 500509 - DNA, 25 bp, Homo sapien
cttgtgcataaccattgttgagtac

SEQ ID NO: 500510 - DNA, 25 bp, Homo sapien
cttttccttgtgcataaccattgtt

SEQ ID NO: 500511 - DNA, 25 bp, Homo sapien
ttccttgtgcataaccattgttgag

SEQ ID NO: 500512 - DNA, 25 bp, Homo sapien
ccttgtgcataaccattgttgagta

SEQ ID NO: 500513 - DNA, 25 bp, Homo sapien
gctgaggaattcaggcaaaactgag

SEQ ID NO: 500514 - DNA, 25 bp, Homo sapien
tagctgaggaattcaggcaaaactg

SEQ ID NO: 500515 - DNA, 25 bp, Homo sapien
gaggaattcaggcaaaactgagttt

SEQ ID NO: 500516 - DNA, 25 bp, Homo sapien
tttagctgaggaattcaggcaaaac

SEQ ID NO: 500517 - DNA, 25 bp, Homo sapien
ctgacggtatagggagtgttctttg

SEQ ID NO: 500518 - DNA, 25 bp, Homo sapien
gagtgttctttgttgcggtgttact

SEQ ID NO: 500519 - DNA, 25 bp, Homo sapien
gggagtgttctttgttgcggtgtta

SEQ ID NO: 500520 - DNA, 25 bp, Homo sapien
gtgttctttgttgcggtgttactga

SEQ ID NO: 500521 - DNA, 25 bp, Homo sapien
ctttgttgcggtgttactgacagta

SEQ ID NO: 500522 - DNA, 25 bp, Homo sapien
tactgacggtatagggagtgttctt

SEQ ID NO: 500523 - DNA, 25 bp, Homo sapien
ctttgttgcggtgttactgacggta

SEQ ID NO: 500524 - DNA, 25 bp, Homo sapien
tctttgttgcggtgttactgacggt

SEQ ID NO: 500525 - DNA, 25 bp, Homo sapien
catgacaagttgagggcttgatctg

SEQ ID NO: 500526 - DNA, 25 bp, Homo sapien
acaagttgagggcttgatctgggct

SEQ ID NO: 500527 - DNA, 25 bp, Homo sapien
acattgtcatgacaagttgagggct

SEQ ID NO: 500528 - DNA, 25 bp, Homo sapien
tgtcatgacaagttgagggcttgat

SEQ ID NO: 500529 - DNA, 25 bp, Homo sapien
gttgtcactgtgtacccttctccat

SEQ ID NO: 500530 - DNA, 25 bp, Homo sapien
agaggtcccgccctttttatgtgca

SEQ ID NO: 500531 - DNA, 25 bp, Homo sapien
tttatgtgcactaccccatcatttg

SEQ ID NO: 500532 - DNA, 25 bp, Homo sapien
gcagccctctggtgataagaggtcc

SEQ ID NO: 500533 - DNA, 25 bp, Homo sapien
atgcaggtggctcaaagcaccgaga

SEQ ID NO: 500534 - DNA, 25 bp, Homo sapien
aggtggctcaaagcaccgagagggg

SEQ ID NO: 500535 - DNA, 25 bp, Homo sapien
caggtggctcaaagcaccgagaggg

SEQ ID NO: 500536 - DNA, 25 bp, Homo sapien
tgcaggtggctcaaagcaccgagag

SEQ ID NO: 500537 - DNA, 25 bp, Homo sapien
gactcgccatttcttggagagactc

SEQ ID NO: 500538 - DNA, 25 bp, Homo sapien
atggtttcctggtccctcggtgaag

SEQ ID NO: 500539 - DNA, 25 bp, Homo sapien
cgccatttcttggagagactcttgg

SEQ ID NO: 500540 - DNA, 25 bp, Homo sapien
tcgccatttcttggagagactcttg

SEQ ID NO: 500541 - DNA, 25 bp, Homo sapien
gcctctggcccttttgcaggaggga

SEQ ID NO: 500542 - DNA, 25 bp, Homo sapien
caccggggcctctggcccttttgca

SEQ ID NO: 500543 - DNA, 25 bp, Homo sapien
ctctggcccttttgcaggagggact

SEQ ID NO: 500544 - DNA, 25 bp, Homo sapien
gcccttttgcaggagggacttgagt

SEQ ID NO: 500545 - DNA, 25 bp, Homo sapien
gggcctgcaagatgttgacatttcg

SEQ ID NO: 500546 - DNA, 25 bp, Homo sapien
cctgcaagatgttgacatttcgctc

SEQ ID NO: 500547 - DNA, 25 bp, Homo sapien
aagatgttgacatttcgctctgaca

SEQ ID NO: 500548 - DNA, 25 bp, Homo sapien
tgacatttcgctctgacatttcaca

SEQ ID NO: 500549 - DNA, 25 bp, Homo sapien
caggtgcgggggcagggtcattggg

SEQ ID NO: 500550 - DNA, 25 bp, Homo sapien
tcattggggggtgtgctcccatcac

SEQ ID NO: 500551 - DNA, 25 bp, Homo sapien
ggcagggtcattggggggtgtgctc

SEQ ID NO: 500552 - DNA, 25 bp, Homo sapien
gggtcattggggggtgtgctcccat

SEQ ID NO: 500553 - DNA, 25 bp, Homo sapien
gtggccaacaccatcagggctgctg

SEQ ID NO: 500554 - DNA, 25 bp, Homo sapien
ttctctgaagacagtggccaacacc

SEQ ID NO: 500555 - DNA, 25 bp, Homo sapien
gggctgtatggcagatccccccagc

SEQ ID NO: 500556 - DNA, 25 bp, Homo sapien
gggtggggctgtatggcagatcccc

SEQ ID NO: 500557 - DNA, 25 bp, Homo sapien
ggctcatgaaatgataagagacaga

SEQ ID NO: 500558 - DNA, 25 bp, Homo sapien
caaggaagtcgtcccaggaacacag

SEQ ID NO: 500559 - DNA, 25 bp, Homo sapien
ctgcatctgcccatgaggcttagca

SEQ ID NO: 500560 - DNA, 25 bp, Homo sapien
ccatgaggcttagcaggtgcctgct

SEQ ID NO: 500561 - DNA, 25 bp, Homo sapien
cagacgaccactggaagagcacaca

SEQ ID NO: 500562 - DNA, 25 bp, Homo sapien
tggcaatctcgtagctccagatgga

SEQ ID NO: 500563 - DNA, 25 bp, Homo sapien
atggcagacgaccactggaagagca

SEQ ID NO: 500564 - DNA, 25 bp, Homo sapien
caatctcgtagctccagatggactg

SEQ ID NO: 500565 - DNA, 25 bp, Homo sapien
ggtcccctggtactcaatgtcaaac

SEQ ID NO: 500566 - DNA, 25 bp, Homo sapien
ctcacccacggtgcagtcgaggagc

SEQ ID NO: 500567 - DNA, 25 bp, Homo sapien
gcatgaggatgagtccatcctcacc

SEQ ID NO: 500568 - DNA, 25 bp, Homo sapien
cccacggtgcagtcgaggagctgct

SEQ ID NO: 500569 - DNA, 25 bp, Homo sapien
ggtactgacccagcggcatgaggat

SEQ ID NO: 500570 - DNA, 25 bp, Homo sapien
gcaagtgtgaattgtgtgagctgtg

SEQ ID NO: 500571 - DNA, 25 bp, Homo sapien
cccaaggcaagtgtgaattgtgtga

SEQ ID NO: 500572 - DNA, 25 bp, Homo sapien
caaggcaagtgtgaattgtgtgagc

SEQ ID NO: 500573 - DNA, 25 bp, Homo sapien
gtgcccaaggcaagtgtgaattgtg

SEQ ID NO: 500574 - DNA, 25 bp, Homo sapien
cacagacttgacactcagtctgggc

SEQ ID NO: 500575 - DNA, 25 bp, Homo sapien
ccagcctcttaacagtggcaacaag

SEQ ID NO: 500576 - DNA, 25 bp, Homo sapien
ggaactggtacttgggctgaccaca

SEQ ID NO: 500577 - DNA, 25 bp, Homo sapien
cctggaactggtacttgggctgacc

SEQ ID NO: 500578 - DNA, 25 bp, Homo sapien
gggccgcctccaggtacttgtctgt

SEQ ID NO: 500579 - DNA, 25 bp, Homo sapien
cttgtctgtcttctggacactgtcc

SEQ ID NO: 500580 - DNA, 25 bp, Homo sapien
gggaatatctggtgcaggtactcca

SEQ ID NO: 500581 - DNA, 25 bp, Homo sapien
tctggacactgtcccgccccatctt

SEQ ID NO: 500582 - DNA, 25 bp, Homo sapien
gccgttggtattcatgggggccaaa

SEQ ID NO: 500583 - DNA, 25 bp, Homo sapien
gttggtattcatgggggccaaagcc

SEQ ID NO: 500584 - DNA, 25 bp, Homo sapien
taggagccgttggtattcatggggg

SEQ ID NO: 500585 - DNA, 25 bp, Homo sapien
gagccgttggtattcatgggggcca

SEQ ID NO: 500586 - DNA, 25 bp, Homo sapien
taagataccaattctagggcctggc

SEQ ID NO: 500587 - DNA, 25 bp, Homo sapien
tgggcgtcactgaacatatgtctgg

SEQ ID NO: 500588 - DNA, 25 bp, Homo sapien
cactgctctactctgtgctggtgag

SEQ ID NO: 500589 - DNA, 25 bp, Homo sapien
gctcaagggatagtttgggcgtcac

SEQ ID NO: 500590 - DNA, 25 bp, Homo sapien
ttgtcaggcacataccgccatggct

SEQ ID NO: 500591 - DNA, 25 bp, Homo sapien
gcttgtcaggcacataccgccatgg

SEQ ID NO: 500592 - DNA, 25 bp, Homo sapien
gcacataccgccatggctgcaggta

SEQ ID NO: 500593 - DNA, 25 bp, Homo sapien
gtcaggcacataccgccatggctgc

SEQ ID NO: 500594 - DNA, 25 bp, Homo sapien
ttgcaggcccttcagaagccagggc

SEQ ID NO: 500595 - DNA, 25 bp, Homo sapien
agccctgtgaggtttggctctcttg

SEQ ID NO: 500596 - DNA, 25 bp, Homo sapien
tgtgaggtttggctctcttgcaggc

SEQ ID NO: 500597 - DNA, 25 bp, Homo sapien
gaggtttggctctcttgcaggccct

SEQ ID NO: 500598 - DNA, 25 bp, Homo sapien
ctccaaggcctcacgacaacacttg

SEQ ID NO: 500599 - DNA, 25 bp, Homo sapien
tccaaggcctcacgacaacacttgt

SEQ ID NO: 500600 - DNA, 25 bp, Homo sapien
aggcctcacgacaacacttgttctc

SEQ ID NO: 500601 - DNA, 25 bp, Homo sapien
caaggcctcacgacaacacttgttc

SEQ ID NO: 500602 - DNA, 25 bp, Homo sapien
agtggccaaagtaacgctgcaggaa

SEQ ID NO: 500603 - DNA, 25 bp, Homo sapien
ttggcaaatgcctgcaggtgcttca

SEQ ID NO: 500604 - DNA, 25 bp, Homo sapien
agcaggcacaccaccagcacgtgct

SEQ ID NO: 500605 - DNA, 25 bp, Homo sapien
atttcaactcctccaggcggctggt

SEQ ID NO: 500606 - DNA, 25 bp, Homo sapien
gcacgtgctccccagtgggcctgaa

SEQ ID NO: 500607 - DNA, 25 bp, Homo sapien
cacagccagatgagggctcagccca

SEQ ID NO: 500608 - DNA, 25 bp, Homo sapien
ttcatcctggacacagccagatgag

SEQ ID NO: 500609 - DNA, 25 bp, Homo sapien
tcagcccaggagaagctccaggcat

SEQ ID NO: 500610 - DNA, 25 bp, Homo sapien
agctccaggcatcacttcctctgtt

SEQ ID NO: 500611 - DNA, 25 bp, Homo sapien
tgtgggcctcctctggttgctcagc

SEQ ID NO: 500612 - DNA, 25 bp, Homo sapien
ctggttgctcagcattgggaggaca

SEQ ID NO: 500613 - DNA, 25 bp, Homo sapien
ctcagcattgggaggacaggtcgaa

SEQ ID NO: 500614 - DNA, 25 bp, Homo sapien
cattgggaggacaggtcgaagcatc

SEQ ID NO: 500615 - DNA, 25 bp, Homo sapien
caggaccccgagtctgagtggacgt

SEQ ID NO: 500616 - DNA, 25 bp, Homo sapien
gaccccgagtctgagtggacgtgct

SEQ ID NO: 500617 - DNA, 25 bp, Homo sapien
gtctgagtggacgtgctcgcctctc

SEQ ID NO: 500618 - DNA, 25 bp, Homo sapien
ccgagtctgagtggacgtgctcgcc

SEQ ID NO: 500619 - DNA, 25 bp, Homo sapien
tcattctgcctggaactaaactctt

SEQ ID NO: 500620 - DNA, 25 bp, Homo sapien
ctaaactcttcagtcacctgcggct

SEQ ID NO: 500621 - DNA, 25 bp, Homo sapien
tgcctggaactaaactcttcagtca

SEQ ID NO: 500622 - DNA, 25 bp, Homo sapien
acctgcggctgaccccttgctttgc

SEQ ID NO: 500623 - DNA, 25 bp, Homo sapien
gaggtgttgctctccacagtcttcc

SEQ ID NO: 500624 - DNA, 25 bp, Homo sapien
ctccagataatggtgggcttccaag

SEQ ID NO: 500625 - DNA, 25 bp, Homo sapien
tcagttctgacgctagaaggcatcc

SEQ ID NO: 500626 - DNA, 25 bp, Homo sapien
tagacatcaagacacgcagagcagg

SEQ ID NO: 500627 - DNA, 25 bp, Homo sapien
gaccaccggggagtaagcacacacc

SEQ ID NO: 500628 - DNA, 25 bp, Homo sapien
atccttactgcccacgggaccaccg

SEQ ID NO: 500629 - DNA, 25 bp, Homo sapien
gggaccaccggggagtaagcacaca

SEQ ID NO: 500630 - DNA, 25 bp, Homo sapien
tgggcaggaatctgacatacagttc

SEQ ID NO: 500631 - DNA, 25 bp, Homo sapien
cacaaccagggtgaggagaatgacc

SEQ ID NO: 500632 - DNA, 25 bp, Homo sapien
aaccagggtgaggagaatgacccca

SEQ ID NO: 500633 - DNA, 25 bp, Homo sapien
tggacacaaccagggtgaggagaat

SEQ ID NO: 500634 - DNA, 25 bp, Homo sapien
ctggacacaaccagggtgaggagaa

SEQ ID NO: 500635 - DNA, 25 bp, Homo sapien
gaaaagtcacaggatgctgttctga

SEQ ID NO: 500636 - DNA, 25 bp, Homo sapien
ttgtcagtgacaatgccaaagtctc

SEQ ID NO: 500637 - DNA, 25 bp, Homo sapien
ctgtcacccacagagcctttattct

SEQ ID NO: 500638 - DNA, 25 bp, Homo sapien
caaagcctggggccgtagaactggc

SEQ ID NO: 500639 - DNA, 25 bp, Homo sapien
cacatccccaaggaatactggtgaa

SEQ ID NO: 500640 - DNA, 25 bp, Homo sapien
ttgtcacatccccaaggaatactgg

SEQ ID NO: 500641 - DNA, 25 bp, Homo sapien
ttttttgtcacatccccaaggaata

SEQ ID NO: 500642 - DNA, 25 bp, Homo sapien
cccaaggaatactggtgaagccaca

SEQ ID NO: 500643 - DNA, 25 bp, Homo sapien
agagatgttttgctgcaggaggcta

SEQ ID NO: 500644 - DNA, 25 bp, Homo sapien
gatgagagatgttttgctgcaggag

SEQ ID NO: 500645 - DNA, 25 bp, Homo sapien
aattataggtagaggttcggcctgg

SEQ ID NO: 500646 - DNA, 25 bp, Homo sapien
tgtgtgaattataggtagaggttcg

SEQ ID NO: 500647 - DNA, 25 bp, Homo sapien
tgcacatgccagcagatttgggatg

SEQ ID NO: 500648 - DNA, 25 bp, Homo sapien
tagaggttcggcctggtttgcacat

SEQ ID NO: 500649 - DNA, 25 bp, Homo sapien
catgggagcccttggttcacactcc

SEQ ID NO: 500650 - DNA, 25 bp, Homo sapien
agattgaggagggtcagaggtgcac

SEQ ID NO: 500651 - DNA, 25 bp, Homo sapien
tgggaagccgataggccagagagat

SEQ ID NO: 500652 - DNA, 25 bp, Homo sapien
cacagccagacatgggagcccttgg

SEQ ID NO: 500653 - DNA, 25 bp, Homo sapien
cctgtgcaccaagatgaagtaggca

SEQ ID NO: 500654 - DNA, 25 bp, Homo sapien
gagctggtgagcgtctggcttccct

SEQ ID NO: 500655 - DNA, 25 bp, Homo sapien
cataacaggtacctgtgcaccaaga

SEQ ID NO: 500656 - DNA, 25 bp, Homo sapien
ggtacctgtgcaccaagatgaagta

SEQ ID NO: 500657 - DNA, 25 bp, Homo sapien
aagtgcagacgtggagggacacagg

SEQ ID NO: 500658 - DNA, 25 bp, Homo sapien
tgaagtgcagacgtggagggacaca

SEQ ID NO: 500659 - DNA, 25 bp, Homo sapien
ctgaagtgcagacgtggagggacac

SEQ ID NO: 500660 - DNA, 25 bp, Homo sapien
gtgcagacgtggagggacacaggga

SEQ ID NO: 500661 - DNA, 25 bp, Homo sapien
tgatgaggctcaaggcaaaggagaa

SEQ ID NO: 500662 - DNA, 25 bp, Homo sapien
ggctcaaggcaaaggagaatatgta

SEQ ID NO: 500663 - DNA, 25 bp, Homo sapien
gagaatatgtaatactccaacagat

SEQ ID NO: 500664 - DNA, 25 bp, Homo sapien
cttttgagtgatgaggctcaaggca

SEQ ID NO: 500665 - DNA, 25 bp, Homo sapien
ggactagattcaggccaaggtcccc

SEQ ID NO: 500666 - DNA, 25 bp, Homo sapien
caggactagattcaggccaaggtcc

SEQ ID NO: 500667 - DNA, 25 bp, Homo sapien
tcaggactagattcaggccaaggtc

SEQ ID NO: 500668 - DNA, 25 bp, Homo sapien
ctagattcaggccaaggtccccagt

SEQ ID NO: 500669 - DNA, 25 bp, Homo sapien
tagaacttctcctaccatcacataa

SEQ ID NO: 500670 - DNA, 25 bp, Homo sapien
ctgtatctgagcagtgcctgtgcaa

SEQ ID NO: 500671 - DNA, 25 bp, Homo sapien
tatctgagcagtgcctgtgcaagag

SEQ ID NO: 500672 - DNA, 25 bp, Homo sapien
tgtgcaagagtctttgcttagaact

SEQ ID NO: 500673 - DNA, 25 bp, Homo sapien
agggtagcaacccatctcctttgtc

SEQ ID NO: 500674 - DNA, 25 bp, Homo sapien
ctgcagacagcaagggtagcaaccc

SEQ ID NO: 500675 - DNA, 25 bp, Homo sapien
gagcaaataactcctcaatttgtcc

SEQ ID NO: 500676 - DNA, 25 bp, Homo sapien
ccccagagcaaataactcctcaatt

SEQ ID NO: 500677 - DNA, 25 bp, Homo sapien
cacagggctgtgcaatgtccactgt

SEQ ID NO: 500678 - DNA, 25 bp, Homo sapien
actgtcccgagcactgctcccacca

SEQ ID NO: 500679 - DNA, 25 bp, Homo sapien
tgtgcaatgtccactgtcccgagca

SEQ ID NO: 500680 - DNA, 25 bp, Homo sapien
aatgtccactgtcccgagcactgct

SEQ ID NO: 500681 - DNA, 25 bp, Homo sapien
tagtcttcagcttgaagcttataaa

SEQ ID NO: 500682 - DNA, 25 bp, Homo sapien
tcagcttgaagcttataaaccaact

SEQ ID NO: 500683 - DNA, 25 bp, Homo sapien
aacttatagtcttcagcttgaagct

SEQ ID NO: 500684 - DNA, 25 bp, Homo sapien
tcttcagcttgaagcttataaacca

SEQ ID NO: 500685 - DNA, 25 bp, Homo sapien
tcacgatgctgtactccacaggatc

SEQ ID NO: 500686 - DNA, 25 bp, Homo sapien
gatgctgtactccacaggatccacg

SEQ ID NO: 500687 - DNA, 25 bp, Homo sapien
attgagaaactccatcacgatgctg

SEQ ID NO: 500688 - DNA, 25 bp, Homo sapien
ccaggattgagaaactccatcacga

SEQ ID NO: 500689 - DNA, 25 bp, Homo sapien
gtaaacagcagaggttccagccaat

SEQ ID NO: 500690 - DNA, 25 bp, Homo sapien
cagccatgggaagatggtgtgcagc

SEQ ID NO: 500691 - DNA, 25 bp, Homo sapien
gccatgggaagatggtgtgcagctc

SEQ ID NO: 500692 - DNA, 25 bp, Homo sapien
accagccatgggaagatggtgtgca

SEQ ID NO: 500693 - DNA, 25 bp, Homo sapien
taccagccatgggaagatggtgtgc

SEQ ID NO: 500694 - DNA, 25 bp, Homo sapien
ctggaggatgaggtggcgagcccct

SEQ ID NO: 500695 - DNA, 25 bp, Homo sapien
ggaggatgaggtggcgagcccctgc

SEQ ID NO: 500696 - DNA, 25 bp, Homo sapien
atgaggtggcgagcccctgctgctg

SEQ ID NO: 500697 - DNA, 25 bp, Homo sapien
ggatgaggtggcgagcccctgctgc

SEQ ID NO: 500698 - DNA, 25 bp, Homo sapien
caaagaacttgaaagcagccacgct

SEQ ID NO: 500699 - DNA, 25 bp, Homo sapien
tacagaacctttaattgcaaagaac

SEQ ID NO: 500700 - DNA, 25 bp, Homo sapien
aaagaacttgaaagcagccacgctg

SEQ ID NO: 500701 - DNA, 25 bp, Homo sapien
tttatacagaacctttaattgcaaa

SEQ ID NO: 500702 - DNA, 25 bp, Homo sapien
gagtggagaacccaccacaccctcc

SEQ ID NO: 500703 - DNA, 25 bp, Homo sapien
ggagtggagaacccaccacaccctc

SEQ ID NO: 500704 - DNA, 25 bp, Homo sapien
cagcctcggcttccacggaatccac

SEQ ID NO: 500705 - DNA, 25 bp, Homo sapien
ggcttccacggaatccacgcccacc

SEQ ID NO: 500706 - DNA, 25 bp, Homo sapien
ttcttcagcctcggcttccacggaa

SEQ ID NO: 500707 - DNA, 25 bp, Homo sapien
gcctcggcttccacggaatccacgc

SEQ ID NO: 500708 - DNA, 25 bp, Homo sapien
tcgcgggcctcagagaactccccct

SEQ ID NO: 500709 - DNA, 25 bp, Homo sapien
ttctcccacgtaccagtgcacaaag

SEQ ID NO: 500710 - DNA, 25 bp, Homo sapien
ttggcatacatgagatcgaacttat

SEQ ID NO: 500711 - DNA, 25 bp, Homo sapien
catacatgagatcgaacttatggtc

SEQ ID NO: 500712 - DNA, 25 bp, Homo sapien
gatggccgtggtgttgctcagcatg

SEQ ID NO: 500713 - DNA, 25 bp, Homo sapien
ggccgtggtgttgctcagcatgcac

SEQ ID NO: 500714 - DNA, 25 bp, Homo sapien
ctccgcgatggccgtggtgttgctc

SEQ ID NO: 500715 - DNA, 25 bp, Homo sapien
tccgcgatggccgtggtgttgctca

SEQ ID NO: 500716 - DNA, 25 bp, Homo sapien
caccgtggggggctggtagttaatg

SEQ ID NO: 500717 - DNA, 25 bp, Homo sapien
caggtctcccccagggaccaccgtg

SEQ ID NO: 500718 - DNA, 25 bp, Homo sapien
ttggccaggtctcccccagggacca

SEQ ID NO: 500719 - DNA, 25 bp, Homo sapien
acagcccgctgcaccttggccaggt

SEQ ID NO: 500720 - DNA, 25 bp, Homo sapien
catttctctgttgggcctgtgcgtt

SEQ ID NO: 500721 - DNA, 25 bp, Homo sapien
ttcagctttatcaatagttggttac

SEQ ID NO: 500722 - DNA, 25 bp, Homo sapien
gttggttactaaatcttgtggcatt

SEQ ID NO: 500723 - DNA, 25 bp, Homo sapien
ggcatttctctgttgggcctgtgcg

SEQ ID NO: 500724 - DNA, 25 bp, Homo sapien
ctggaattccgtcaagtccacattc

SEQ ID NO: 500725 - DNA, 25 bp, Homo sapien
tgtccaggttgcgccgacatatgtc

SEQ ID NO: 500726 - DNA, 25 bp, Homo sapien
gttgcgccgacatatgtcatagatg

SEQ ID NO: 500727 - DNA, 25 bp, Homo sapien
ttggtctggaattccgtcaagtcca

SEQ ID NO: 500728 - DNA, 25 bp, Homo sapien
agggctccaccacggccgtggagac

SEQ ID NO: 500729 - DNA, 25 bp, Homo sapien
tccaccacggccgtggagacctggg

SEQ ID NO: 500730 - DNA, 25 bp, Homo sapien
gctccaccacggccgtggagacctg

SEQ ID NO: 500731 - DNA, 25 bp, Homo sapien
agtcagaatgttccagggtcgtgtg

SEQ ID NO: 500732 - DNA, 25 bp, Homo sapien
cttcttgccgtaatccactgagagc

SEQ ID NO: 500733 - DNA, 25 bp, Homo sapien
ttgccgtaatccactgagagccgct

SEQ ID NO: 500734 - DNA, 25 bp, Homo sapien
ctccatgagcagagatgcgaaccca

SEQ ID NO: 500735 - DNA, 25 bp, Homo sapien
taaatggcaaattctagcttggact

SEQ ID NO: 500736 - DNA, 25 bp, Homo sapien
caggtcgacgatctccttgccgatg

SEQ ID NO: 500737 - DNA, 25 bp, Homo sapien
aggaccaggtcgacgatctccttgc

SEQ ID NO: 500738 - DNA, 25 bp, Homo sapien
tccggtccaggaccaggtcgacgat

SEQ ID NO: 500739 - DNA, 25 bp, Homo sapien
tccaggaccaggtcgacgatctcct

SEQ ID NO: 500740 - DNA, 25 bp, Homo sapien
cctataggttcctgtgcgcacttca

SEQ ID NO: 500741 - DNA, 25 bp, Homo sapien
gcctataggttcctgtgcgcacttc

SEQ ID NO: 500742 - DNA, 25 bp, Homo sapien
ctataggttcctgtgcgcacttcat

SEQ ID NO: 500743 - DNA, 25 bp, Homo sapien
ctgcctataggttcctgtgcgcact

SEQ ID NO: 500744 - DNA, 25 bp, Homo sapien
tatgtactgtgaatctttaaggcct

SEQ ID NO: 500745 - DNA, 25 bp, Homo sapien
ttaaggcctatactcaccaagatgg

SEQ ID NO: 500746 - DNA, 25 bp, Homo sapien
tatactcaccaagatggacacattc

SEQ ID NO: 500747 - DNA, 25 bp, Homo sapien
ctacaaaagagaccgtatgtactgt

SEQ ID NO: 500748 - DNA, 25 bp, Homo sapien
caggtcaagactctcttgcaccagc

SEQ ID NO: 500749 - DNA, 25 bp, Homo sapien
gctccagtctcactgaagaacgtgt

SEQ ID NO: 500750 - DNA, 25 bp, Homo sapien
aggcattgccgatctggactcctgc

SEQ ID NO: 500751 - DNA, 25 bp, Homo sapien
gaacgtgttgaaggagtcgtcccca

SEQ ID NO: 500752 - DNA, 25 bp, Homo sapien
tggcatctgaccatcgggctgaatt

SEQ ID NO: 500753 - DNA, 25 bp, Homo sapien
ccccacgtggatagagatacactca

SEQ ID NO: 500754 - DNA, 25 bp, Homo sapien
tgccccacgtggatagagatacact

SEQ ID NO: 500755 - DNA, 25 bp, Homo sapien
ccacgtggatagagatacactcacg

SEQ ID NO: 500756 - DNA, 25 bp, Homo sapien
ctgccccacgtggatagagatacac

SEQ ID NO: 500757 - DNA, 25 bp, Homo sapien
gagctcctccgctgccgcagcccaa

SEQ ID NO: 500758 - DNA, 25 bp, Homo sapien
gctcctccgctgccgcagcccaacg

SEQ ID NO: 500759 - DNA, 25 bp, Homo sapien
tgagctcctccgctgccgcagccca

SEQ ID NO: 500760 - DNA, 25 bp, Homo sapien
gttgagctcctccgctgccgcagcc

SEQ ID NO: 500761 - DNA, 25 bp, Homo sapien
actacttgacctcaaccgccgctgc

SEQ ID NO: 500762 - DNA, 25 bp, Homo sapien
acttgacctcaaccgccgctgcagc

SEQ ID NO: 500763 - DNA, 25 bp, Homo sapien
tacttgacctcaaccgccgctgcag

SEQ ID NO: 500764 - DNA, 25 bp, Homo sapien
ctactacttgacctcaaccgccgct

SEQ ID NO: 500765 - DNA, 25 bp, Homo sapien
ggccaagcaggctcttaactttccc

SEQ ID NO: 500766 - DNA, 25 bp, Homo sapien
gccaagcaggctcttaactttccct

SEQ ID NO: 500767 - DNA, 25 bp, Homo sapien
cctatcatggcatctccctagaggg

SEQ ID NO: 500768 - DNA, 25 bp, Homo sapien
tctccctagagggtggccaagcagg

SEQ ID NO: 500769 - DNA, 25 bp, Homo sapien
ggcccgtaagtattgctgctttgtg

SEQ ID NO: 500770 - DNA, 25 bp, Homo sapien
ttatgattccataactgacttgtag

SEQ ID NO: 500771 - DNA, 25 bp, Homo sapien
tatttctggcccgtaagtattgctg

SEQ ID NO: 500772 - DNA, 25 bp, Homo sapien
tccataactgacttgtagtaaacag

SEQ ID NO: 500773 - DNA, 25 bp, Homo sapien
taggtggctcagttctgggtgagaa

SEQ ID NO: 500774 - DNA, 25 bp, Homo sapien
tgcgcaaggtaggtggctcagttct

SEQ ID NO: 500775 - DNA, 25 bp, Homo sapien
caaggtaggtggctcagttctgggt

SEQ ID NO: 500776 - DNA, 25 bp, Homo sapien
ctgcgcaaggtaggtggctcagttc

SEQ ID NO: 500777 - DNA, 25 bp, Homo sapien
tacagatgtttaaagaccttcttgg

SEQ ID NO: 500778 - DNA, 25 bp, Homo sapien
gacaccagggccaagcctggatcta

SEQ ID NO: 500779 - DNA, 25 bp, Homo sapien
tgtaaggttgagttcatacagatgt

SEQ ID NO: 500780 - DNA, 25 bp, Homo sapien
tcctactcatggactgtccctgctg

SEQ ID NO: 500781 - DNA, 25 bp, Homo sapien
gcactggccttcgagtgttcttgaa

SEQ ID NO: 500782 - DNA, 25 bp, Homo sapien
gtagaactctgttcttggtgccaga

SEQ ID NO: 500783 - DNA, 25 bp, Homo sapien
taagacatctttttgtgcactggcc

SEQ ID NO: 500784 - DNA, 25 bp, Homo sapien
taactgggagttcagagatgctcca

SEQ ID NO: 500785 - DNA, 25 bp, Homo sapien
caaatcgttttcaaagaactgccaa

SEQ ID NO: 500786 - DNA, 25 bp, Homo sapien
ccaaatcgttttcaaagaactgcca

SEQ ID NO: 500787 - DNA, 25 bp, Homo sapien
gatgagcatcattaccattctaatc

SEQ ID NO: 500788 - DNA, 25 bp, Homo sapien
cattctaatctacaaagctcatgaa

SEQ ID NO: 500789 - DNA, 25 bp, Homo sapien
ttagctaaagtcacaaacacatttc

SEQ ID NO: 500790 - DNA, 25 bp, Homo sapien
aaagtataaaggcataccactgact

SEQ ID NO: 500791 - DNA, 25 bp, Homo sapien
taatatctacgacgcttattagggc

SEQ ID NO: 500792 - DNA, 25 bp, Homo sapien
gcttattagggccttcaaagttgcc

SEQ ID NO: 500793 - DNA, 25 bp, Homo sapien
tactccccataggtgaacccatctg

SEQ ID NO: 500794 - DNA, 25 bp, Homo sapien
catctgagatggtggtccttgagga

SEQ ID NO: 500795 - DNA, 25 bp, Homo sapien
gaatataatcaaaacaatgtttatg

SEQ ID NO: 500796 - DNA, 25 bp, Homo sapien
ttactgaatataatcaaaacaatgt

SEQ ID NO: 500797 - DNA, 25 bp, Homo sapien
caaaacaatgtttatgatacattac

SEQ ID NO: 500798 - DNA, 25 bp, Homo sapien
tcaaaacaatgtttatgatacatta

SEQ ID NO: 500799 - DNA, 25 bp, Homo sapien
agttcccatatttgcggctccttct

SEQ ID NO: 500800 - DNA, 25 bp, Homo sapien
ccatatttgcggctccttctggtcc

SEQ ID NO: 500801 - DNA, 25 bp, Homo sapien
tggaggaggaccttggttaccagca

SEQ ID NO: 500802 - DNA, 25 bp, Homo sapien
aggtatagttgctctgttgttcata

SEQ ID NO: 500803 - DNA, 25 bp, Homo sapien
tgtttattgctccacagggacccat

SEQ ID NO: 500804 - DNA, 25 bp, Homo sapien
tcccatgtttattgctccacaggga

SEQ ID NO: 500805 - DNA, 25 bp, Homo sapien
agggacccatatcacccattctcat

SEQ ID NO: 500806 - DNA, 25 bp, Homo sapien
ggacccatatcacccattctcattt

SEQ ID NO: 500807 - DNA, 25 bp, Homo sapien
tactgaaagctcgacataacattgc

SEQ ID NO: 500808 - DNA, 25 bp, Homo sapien
ctatagatagcccacacaagcaatt

SEQ ID NO: 500809 - DNA, 25 bp, Homo sapien
tactcaagcattattccatccaggg

SEQ ID NO: 500810 - DNA, 25 bp, Homo sapien
gtatttgtattcatctactcaagca

SEQ ID NO: 500811 - DNA, 25 bp, Homo sapien
aaatgctggccaagatgcgatacaa

SEQ ID NO: 500812 - DNA, 25 bp, Homo sapien
tagaatggtgacgatccgaaacacc

SEQ ID NO: 500813 - DNA, 25 bp, Homo sapien
tgacgatccgaaacaccgacaaaaa

SEQ ID NO: 500814 - DNA, 25 bp, Homo sapien
tgcgatacaacaagaacttcaacgt

SEQ ID NO: 500815 - DNA, 25 bp, Homo sapien
tggtttatctgcatagaggtgtttg

SEQ ID NO: 500816 - DNA, 25 bp, Homo sapien
ggtttatctgcatagaggtgtttgt

SEQ ID NO: 500817 - DNA, 25 bp, Homo sapien
ttgttctgttgctggtgaagaactg

SEQ ID NO: 500818 - DNA, 25 bp, Homo sapien
gctttgttctgttgctggtgaagaa

SEQ ID NO: 500819 - DNA, 25 bp, Homo sapien
tctctcaactcgtcattctccgtcc

SEQ ID NO: 500820 - DNA, 25 bp, Homo sapien
ctctcaactcgtcattctccgtcca

SEQ ID NO: 500821 - DNA, 25 bp, Homo sapien
agtttctcccaagaggatcagctgt

SEQ ID NO: 500822 - DNA, 25 bp, Homo sapien
ttattttgctctttagctgatgcaa

SEQ ID NO: 500823 - DNA, 25 bp, Homo sapien
tattggaattgctcttctcgaagag

SEQ ID NO: 500824 - DNA, 25 bp, Homo sapien
ctcccaagaggatcagctgttagtc

SEQ ID NO: 500825 - DNA, 25 bp, Homo sapien
ttctgagttcttccaagcatctgag

SEQ ID NO: 500826 - DNA, 25 bp, Homo sapien
caccctctgcaactcttgatttctg

SEQ ID NO: 500827 - DNA, 25 bp, Homo sapien
tccaagcatctgagttcttcttgat

SEQ ID NO: 500828 - DNA, 25 bp, Homo sapien
gagttcttcttgatgcctcattaga

SEQ ID NO: 500829 - DNA, 25 bp, Homo sapien
gagatgcatacgtcccaggttgagc

SEQ ID NO: 500830 - DNA, 25 bp, Homo sapien
agatgcatacgtcccaggttgagca

SEQ ID NO: 500831 - DNA, 25 bp, Homo sapien
tcgagatgcatacgtcccaggttga

SEQ ID NO: 500832 - DNA, 25 bp, Homo sapien
catcgagatgcatacgtcccaggtt

SEQ ID NO: 500833 - DNA, 25 bp, Homo sapien
tcaggataggtggacagctttccca

SEQ ID NO: 500834 - DNA, 25 bp, Homo sapien
ttcagttacaggagaggacccagtt

SEQ ID NO: 500835 - DNA, 25 bp, Homo sapien
aacttgccgggaagaactccagcgg

SEQ ID NO: 500836 - DNA, 25 bp, Homo sapien
gaatacggtcccatagaacttgccg

SEQ ID NO: 500837 - DNA, 25 bp, Homo sapien
ggcactagttttcacactaggatca

SEQ ID NO: 500838 - DNA, 25 bp, Homo sapien
cactagttttcacactaggatcatc

SEQ ID NO: 500839 - DNA, 25 bp, Homo sapien
acaaggtaggcactagttttcacac

SEQ ID NO: 500840 - DNA, 25 bp, Homo sapien
ggtaggcactagttttcacactagg

SEQ ID NO: 500841 - DNA, 25 bp, Homo sapien
tcatagctggcatggagtctatgcc

SEQ ID NO: 500842 - DNA, 25 bp, Homo sapien
tagcccaagaagtggtgtactcatc

SEQ ID NO: 500843 - DNA, 25 bp, Homo sapien
tccgagatgaagaataagtaaaccg

SEQ ID NO: 500844 - DNA, 25 bp, Homo sapien
ggtttctattcacgaagacactagc

SEQ ID NO: 500845 - DNA, 25 bp, Homo sapien
gtctcttgtgttcatgacaaatgcc

SEQ ID NO: 500846 - DNA, 25 bp, Homo sapien
gatattcatagatgtctctctgaag

SEQ ID NO: 500847 - DNA, 25 bp, Homo sapien
tgtctatctctgatggaaagccagc

SEQ ID NO: 500848 - DNA, 25 bp, Homo sapien
atctaacggcaccagatggacatga

SEQ ID NO: 500849 - DNA, 25 bp, Homo sapien
ttcctgttgttattgaaatcagctc

SEQ ID NO: 500850 - DNA, 25 bp, Homo sapien
cctgttgttattgaaatcagctcca

SEQ ID NO: 500851 - DNA, 25 bp, Homo sapien
ctgttgttattgaaatcagctccat

SEQ ID NO: 500852 - DNA, 25 bp, Homo sapien
gtcaaatcttcacaagctgtttttc

SEQ ID NO: 500853 - DNA, 25 bp, Homo sapien
ttaatgtctttgcacactggatcca

SEQ ID NO: 500854 - DNA, 25 bp, Homo sapien
gcacactggatccatcatataattg

SEQ ID NO: 500855 - DNA, 25 bp, Homo sapien
cactggatccatcatataattgtga

SEQ ID NO: 500856 - DNA, 25 bp, Homo sapien
tataattgtgattagcagctggaac

SEQ ID NO: 500857 - DNA, 25 bp, Homo sapien
cataatgggaagcaaaatgtcaggt

SEQ ID NO: 500858 - DNA, 25 bp, Homo sapien
tatttgactcatcactagttcctag

SEQ ID NO: 500859 - DNA, 25 bp, Homo sapien
gattttcacgtcatatacataatgg

SEQ ID NO: 500860 - DNA, 25 bp, Homo sapien
tacattctactgtctttcagatcat

SEQ ID NO: 500861 - DNA, 25 bp, Homo sapien
gatcccaattcaaattcagcagcat

SEQ ID NO: 500862 - DNA, 25 bp, Homo sapien
gaaggaattacttatctcaaatatt

SEQ ID NO: 500863 - DNA, 25 bp, Homo sapien
tcagtaacatgagttgagaacttca

SEQ ID NO: 500864 - DNA, 25 bp, Homo sapien
tgtaagtcagtaacatgagttgaga

SEQ ID NO: 500865 - DNA, 25 bp, Homo sapien
tacttatctcaaatattccatagtt

SEQ ID NO: 500866 - DNA, 25 bp, Homo sapien
catttattcaacaaccatatgttca

SEQ ID NO: 500867 - DNA, 25 bp, Homo sapien
cattgtggttaagtatcagagctcc

SEQ ID NO: 500868 - DNA, 25 bp, Homo sapien
ttattcaacaaccatatgttcagga

SEQ ID NO: 500869 - DNA, 25 bp, Homo sapien
tcagagctcctggttttctcatttt

SEQ ID NO: 500870 - DNA, 25 bp, Homo sapien
ctaggacaagcaccgaaattacatg

SEQ ID NO: 500871 - DNA, 25 bp, Homo sapien
gtccacccctcaacattgcatgcta

SEQ ID NO: 500872 - DNA, 25 bp, Homo sapien
aagcaccgaaattacatgacgaaga

SEQ ID NO: 500873 - DNA, 25 bp, Homo sapien
attacatgacgaagatgatacagtc

SEQ ID NO: 500874 - DNA, 25 bp, Homo sapien
tgtctcttggccttaaatcaccacc

SEQ ID NO: 500875 - DNA, 25 bp, Homo sapien
gtgttactagatgagcctggagtct

SEQ ID NO: 500876 - DNA, 25 bp, Homo sapien
tcttggccttaaatcaccaccataa

SEQ ID NO: 500877 - DNA, 25 bp, Homo sapien
gtagcctgagtgttactagatgagc

SEQ ID NO: 500878 - DNA, 25 bp, Homo sapien
ctgggaagtcgatgatgcctttgtt

SEQ ID NO: 500879 - DNA, 25 bp, Homo sapien
gtgaagaaagtgtagagccagagga

SEQ ID NO: 500880 - DNA, 25 bp, Homo sapien
gctctctagctatactgtcttgaaa

SEQ ID NO: 500881 - DNA, 25 bp, Homo sapien
tctagctatactgtcttgaaactcc

SEQ ID NO: 500882 - DNA, 25 bp, Homo sapien
gtagctctctagctatactgtcttg

SEQ ID NO: 500883 - DNA, 25 bp, Homo sapien
ttagtagctctctagctatactgtc

SEQ ID NO: 500884 - DNA, 25 bp, Homo sapien
cttttaagctcctggctgcaatgct

SEQ ID NO: 500885 - DNA, 25 bp, Homo sapien
tgattgaactggaaggttcctgtca

SEQ ID NO: 500886 - DNA, 25 bp, Homo sapien
acatgattgaactggaaggttcctg

SEQ ID NO: 500887 - DNA, 25 bp, Homo sapien
atgattgaactggaaggttcctgtc

SEQ ID NO: 500888 - DNA, 25 bp, Homo sapien
catgattgaactggaaggttcctgt

SEQ ID NO: 500889 - DNA, 25 bp, Homo sapien
tttaagggtatctgccaattcttgt

SEQ ID NO: 500890 - DNA, 25 bp, Homo sapien
ttgtacatgacttctgatttgccct

SEQ ID NO: 500891 - DNA, 25 bp, Homo sapien
ttgtgtgccctcttctaaatggatg

SEQ ID NO: 500892 - DNA, 25 bp, Homo sapien
tgtttttaagggtatctgccaattc

SEQ ID NO: 500893 - DNA, 25 bp, Homo sapien
ttttcacagtagcacgagattggtc

SEQ ID NO: 500894 - DNA, 25 bp, Homo sapien
tgattgcattcgttgattaatgtct

SEQ ID NO: 500895 - DNA, 25 bp, Homo sapien
tagcacgagattggtcttggatagt

SEQ ID NO: 500896 - DNA, 25 bp, Homo sapien
gattgcattcgttgattaatgtctg

SEQ ID NO: 500897 - DNA, 25 bp, Homo sapien
agttgagacagcctcgcctctacag

SEQ ID NO: 500898 - DNA, 25 bp, Homo sapien
ttgagacagcctcgcctctacagat

SEQ ID NO: 500899 - DNA, 25 bp, Homo sapien
gcagttgagacagcctcgcctctac

SEQ ID NO: 500900 - DNA, 25 bp, Homo sapien
tgcagttgagacagcctcgcctcta

SEQ ID NO: 500901 - DNA, 25 bp, Homo sapien
ctgctttccaatgaattccttcagt

SEQ ID NO: 500902 - DNA, 25 bp, Homo sapien
tgctttccaatgaattccttcagtt

SEQ ID NO: 500903 - DNA, 25 bp, Homo sapien
ctttccaatgaattccttcagttac

SEQ ID NO: 500904 - DNA, 25 bp, Homo sapien
gctttccaatgaattccttcagtta

SEQ ID NO: 500905 - DNA, 25 bp, Homo sapien
tgggtttggcgtaggtctcttccca

SEQ ID NO: 500906 - DNA, 25 bp, Homo sapien
ttggcgtaggtctcttcccatgcat

SEQ ID NO: 500907 - DNA, 25 bp, Homo sapien
tttggcgtaggtctcttcccatgca

SEQ ID NO: 500908 - DNA, 25 bp, Homo sapien
ggtttggcgtaggtctcttcccatg

SEQ ID NO: 500909 - DNA, 25 bp, Homo sapien
ccaagttactttgagttctagacag

SEQ ID NO: 500910 - DNA, 25 bp, Homo sapien
tgtgttggaacttaaggcttaggct

SEQ ID NO: 500911 - DNA, 25 bp, Homo sapien
gaaggacactgttagcttttaggtc

SEQ ID NO: 500912 - DNA, 25 bp, Homo sapien
gcttttctgtaagagcatctcttgt

SEQ ID NO: 500913 - DNA, 25 bp, Homo sapien
tcacaatcacgtctaacagcagcca

SEQ ID NO: 500914 - DNA, 25 bp, Homo sapien
gcaagttccacgtctcttttggatg

SEQ ID NO: 500915 - DNA, 25 bp, Homo sapien
gtctcactttgttcacaatcacgtc

SEQ ID NO: 500916 - DNA, 25 bp, Homo sapien
agccagtctgcaacggtgtgattca

SEQ ID NO: 500917 - DNA, 25 bp, Homo sapien
ttgcaggtcaccaatgtcctcaaaa

SEQ ID NO: 500918 - DNA, 25 bp, Homo sapien
gcagtatactcggatatcattgttg

SEQ ID NO: 500919 - DNA, 25 bp, Homo sapien
tctcagctgtcaggacaccaagctg

SEQ ID NO: 500920 - DNA, 25 bp, Homo sapien
tttccagtctgagggtggcaatttc

SEQ ID NO: 500921 - DNA, 25 bp, Homo sapien
aattccttttccttcgagccagtgc

SEQ ID NO: 500922 - DNA, 25 bp, Homo sapien
tgcctctgggtgtcatttagctctt

SEQ ID NO: 500923 - DNA, 25 bp, Homo sapien
aatattctggcgttctgttcccgag

SEQ ID NO: 500924 - DNA, 25 bp, Homo sapien
agccagtgctatctccttttgtttg

SEQ ID NO: 500925 - DNA, 25 bp, Homo sapien
tgttctcagcgtcagctgaagttgt

SEQ ID NO: 500926 - DNA, 25 bp, Homo sapien
actgtcctcaattccgtatctcgtg

SEQ ID NO: 500927 - DNA, 25 bp, Homo sapien
gcgtcagctgaagttgtttgtttgc

SEQ ID NO: 500928 - DNA, 25 bp, Homo sapien
aattccgtatctcgtgttctcagcg

SEQ ID NO: 500929 - DNA, 25 bp, Homo sapien
attttttcatacaatgcactggcat

SEQ ID NO: 500930 - DNA, 25 bp, Homo sapien
cttgatattagtttcattagaaaat

SEQ ID NO: 500931 - DNA, 25 bp, Homo sapien
gaaatgtgtttatcttgatattagt

SEQ ID NO: 500932 - DNA, 25 bp, Homo sapien
cagtgaaatgtgtttatcttgatat

SEQ ID NO: 500933 - DNA, 25 bp, Homo sapien
ctgcagtgaaatgtgtttatcttga

SEQ ID NO: 500934 - DNA, 25 bp, Homo sapien
ccatttctttataactagggtgtca

SEQ ID NO: 500935 - DNA, 25 bp, Homo sapien
caaccatttctttataactagggtg

SEQ ID NO: 500936 - DNA, 25 bp, Homo sapien
tttgtagtacatggacctcattttc

SEQ ID NO: 500937 - DNA, 25 bp, Homo sapien
tagtacatggacctcattttccatt

SEQ ID NO: 500938 - DNA, 25 bp, Homo sapien
ccttttgtagtacatggacctcatt

SEQ ID NO: 500939 - DNA, 25 bp, Homo sapien
tgtagtacatggacctcattttcca

SEQ ID NO: 500940 - DNA, 25 bp, Homo sapien
tgaatgaactgcatcctgaattttc

SEQ ID NO: 500941 - DNA, 25 bp, Homo sapien
cctgaattttcagtaggttaacagg

SEQ ID NO: 500942 - DNA, 25 bp, Homo sapien
tctattgatctttcccatgaatgaa

SEQ ID NO: 500943 - DNA, 25 bp, Homo sapien
tgatctttcccatgaatgaactgca

SEQ ID NO: 500944 - DNA, 25 bp, Homo sapien
ggactgcattcactgagattaatgc

SEQ ID NO: 500945 - DNA, 25 bp, Homo sapien
tgcattcactgagattaatgcggcc

SEQ ID NO: 500946 - DNA, 25 bp, Homo sapien
tcactgagattaatgcggcccgtcc

SEQ ID NO: 500947 - DNA, 25 bp, Homo sapien
actgagattaatgcggcccgtccaa

SEQ ID NO: 500948 - DNA, 25 bp, Homo sapien
tcctttgtccagcctttaacataca

SEQ ID NO: 500949 - DNA, 25 bp, Homo sapien
taccgaaacaggttgcaccatagtc

SEQ ID NO: 500950 - DNA, 25 bp, Homo sapien
ttctttaccgaaacaggttgcacca

SEQ ID NO: 500951 - DNA, 25 bp, Homo sapien
gaaacaggttgcaccatagtcccca

SEQ ID NO: 500952 - DNA, 25 bp, Homo sapien
taaggtatcttaggaaatatgtagt

SEQ ID NO: 500953 - DNA, 25 bp, Homo sapien
agattgacaaaacttgtatcaaagt

SEQ ID NO: 500954 - DNA, 25 bp, Homo sapien
gattgacaaaacttgtatcaaagtt

SEQ ID NO: 500955 - DNA, 25 bp, Homo sapien
tagacatcttaaggtatcttaggaa

SEQ ID NO: 500956 - DNA, 25 bp, Homo sapien
ggtgattattatattactctggctc

SEQ ID NO: 500957 - DNA, 25 bp, Homo sapien
gtgattattatattactctggctca

SEQ ID NO: 500958 - DNA, 25 bp, Homo sapien
aatagaaggcacactaggctgacac

SEQ ID NO: 500959 - DNA, 25 bp, Homo sapien
cataatagaaggcacactaggctga

SEQ ID NO: 500960 - DNA, 25 bp, Homo sapien
gcaaacataatagaaggcacactag

SEQ ID NO: 500961 - DNA, 25 bp, Homo sapien
aacataatagaaggcacactaggct

SEQ ID NO: 500962 - DNA, 25 bp, Homo sapien
aagcaatttttatgtccaggtacag

SEQ ID NO: 500963 - DNA, 25 bp, Homo sapien
gcaatttttatgtccaggtacagag

SEQ ID NO: 500964 - DNA, 25 bp, Homo sapien
gaatggtagatttttaccgagatcc

SEQ ID NO: 500965 - DNA, 25 bp, Homo sapien
gatccttatatgcaggcagtttaga

SEQ ID NO: 500966 - DNA, 25 bp, Homo sapien
tccccatcttttcatgacaccttga

SEQ ID NO: 500967 - DNA, 25 bp, Homo sapien
tggcctttaaatccccatcttttca

SEQ ID NO: 500968 - DNA, 25 bp, Homo sapien
ttttccaggcattttagttccaggc

SEQ ID NO: 500969 - DNA, 25 bp, Homo sapien
tctcctgtgggttttcgtttgacca

SEQ ID NO: 500970 - DNA, 25 bp, Homo sapien
ctgttttgacggcaatccaagttct

SEQ ID NO: 500971 - DNA, 25 bp, Homo sapien
acagggctgccgtttttccattacg

SEQ ID NO: 500972 - DNA, 25 bp, Homo sapien
cagggctgccgtttttccattacgg

SEQ ID NO: 500973 - DNA, 25 bp, Homo sapien
ccttggtccataaaggcatcatgcc

SEQ ID NO: 500974 - DNA, 25 bp, Homo sapien
ttggtccataaaggcatcatgccca

SEQ ID NO: 500975 - DNA, 25 bp, Homo sapien
cttggtccataaaggcatcatgccc

SEQ ID NO: 500976 - DNA, 25 bp, Homo sapien
tatcttcatcagagaccaactgctt

SEQ ID NO: 500977 - DNA, 25 bp, Homo sapien
tcttcatcagagaccaactgcttaa

SEQ ID NO: 500978 - DNA, 25 bp, Homo sapien
ggacacagtttacttgctaattggg

SEQ ID NO: 500979 - DNA, 25 bp, Homo sapien
ataggccatggttcatctttcagag

SEQ ID NO: 500980 - DNA, 25 bp, Homo sapien
gacccagcacctgggcgccgacctg

SEQ ID NO: 500981 - DNA, 25 bp, Homo sapien
accacgcggacgcagcagccatggg

SEQ ID NO: 500982 - DNA, 25 bp, Homo sapien
agactcaactcatgacttccgggtg

SEQ ID NO: 500983 - DNA, 25 bp, Homo sapien
tcaactcatgacttccgggtgccca

SEQ ID NO: 500984 - DNA, 25 bp, Homo sapien
catgacttccgggtgcccagctgct

SEQ ID NO: 500985 - DNA, 25 bp, Homo sapien
aagttcttcaatgagcaatataaac

SEQ ID NO: 500986 - DNA, 25 bp, Homo sapien
gctcacaacactctgaggctatttc

SEQ ID NO: 500987 - DNA, 25 bp, Homo sapien
tacaatccacgccaagttcttcaat

SEQ ID NO: 500988 - DNA, 25 bp, Homo sapien
taattagagtaaggtagctcacaac

SEQ ID NO: 500989 - DNA, 25 bp, Homo sapien
ttgtccttctcgttagatgttttct

SEQ ID NO: 500990 - DNA, 25 bp, Homo sapien
tgtccttctcgttagatgttttctt

SEQ ID NO: 500991 - DNA, 25 bp, Homo sapien
cttgtccttctcgttagatgttttc

SEQ ID NO: 500992 - DNA, 25 bp, Homo sapien
ttttcggtcatcatttttatgttca

SEQ ID NO: 500993 - DNA, 25 bp, Homo sapien
tgttcaatttcattagaatattcca

SEQ ID NO: 500994 - DNA, 25 bp, Homo sapien
caatagtttaacttttcggtcatca

SEQ ID NO: 500995 - DNA, 25 bp, Homo sapien
agaatattccatttccaactcaatt

SEQ ID NO: 500996 - DNA, 25 bp, Homo sapien
aagtcacagattctgttgtggtcca

SEQ ID NO: 500997 - DNA, 25 bp, Homo sapien
tcttaaatactagtgaagtcacaga

SEQ ID NO: 500998 - DNA, 25 bp, Homo sapien
gttaaactgctctcatcagtcactt

SEQ ID NO: 500999 - DNA, 25 bp, Homo sapien
gatcaagagttattaaatcagcctt

SEQ ID NO: 501000 - DNA, 25 bp, Homo sapien
tgtcctaggaatttgctgaccatca

SEQ ID NO: 501001 - DNA, 25 bp, Homo sapien
gtcctaggaatttgctgaccatcag

SEQ ID NO: 501002 - DNA, 25 bp, Homo sapien
tccttgttgaattaacccattatca

SEQ ID NO: 501003 - DNA, 25 bp, Homo sapien
tctgtcctaggaatttgctgaccat

SEQ ID NO: 501004 - DNA, 25 bp, Homo sapien
tgtttcattccttgcatgtgtcttc

SEQ ID NO: 501005 - DNA, 25 bp, Homo sapien
ctgtggagacatcatgtaggtttct

SEQ ID NO: 501006 - DNA, 25 bp, Homo sapien
ggagacatcatgtaggtttcttgat

SEQ ID NO: 501007 - DNA, 25 bp, Homo sapien
tgtggagacatcatgtaggtttctt

SEQ ID NO: 501008 - DNA, 25 bp, Homo sapien
tctgacgtcacttctaaatcttgtt

SEQ ID NO: 501009 - DNA, 25 bp, Homo sapien
ctctgacgtcacttctaaatcttgt

SEQ ID NO: 501010 - DNA, 25 bp, Homo sapien
tccaaaatagaagcgcacctacagt

SEQ ID NO: 501011 - DNA, 25 bp, Homo sapien
cttgatctattaagttcttctgccc

SEQ ID NO: 501012 - DNA, 25 bp, Homo sapien
ttcttgatctattaagttcttctgc

SEQ ID NO: 501013 - DNA, 25 bp, Homo sapien
gaagcgcacctacagtggtcatctt

SEQ ID NO: 501014 - DNA, 25 bp, Homo sapien
cattccgaccgcctggttcgaaaca

SEQ ID NO: 501015 - DNA, 25 bp, Homo sapien
gcctggttcgaaacacactctttga

SEQ ID NO: 501016 - DNA, 25 bp, Homo sapien
cacactctttgatttcaaccttagg

SEQ ID NO: 501017 - DNA, 25 bp, Homo sapien
tgtacatctttcattccgaccgcct

SEQ ID NO: 501018 - DNA, 25 bp, Homo sapien
caagtgatgatattgctcaagagaa

SEQ ID NO: 501019 - DNA, 25 bp, Homo sapien
cttcaagtgatgatattgctcaaga

SEQ ID NO: 501020 - DNA, 25 bp, Homo sapien
aagtgatgatattgctcaagagaat

SEQ ID NO: 501021 - DNA, 25 bp, Homo sapien
tcaagtgatgatattgctcaagaga

SEQ ID NO: 501022 - DNA, 25 bp, Homo sapien
gataggtctacatttcttatatcct

SEQ ID NO: 501023 - DNA, 25 bp, Homo sapien
ctatttgggcttactgataggtcta

SEQ ID NO: 501024 - DNA, 25 bp, Homo sapien
ggtctacatttcttatatcctctag

SEQ ID NO: 501025 - DNA, 25 bp, Homo sapien
gggcttactgataggtctacatttc

SEQ ID NO: 501026 - DNA, 25 bp, Homo sapien
ccatcagctccagttaagcgactat

SEQ ID NO: 501027 - DNA, 25 bp, Homo sapien
tccagttaagcgactatcatatttc

SEQ ID NO: 501028 - DNA, 25 bp, Homo sapien
cagctccagttaagcgactatcata

SEQ ID NO: 501029 - DNA, 25 bp, Homo sapien
agttaagcgactatcatatttctgt

SEQ ID NO: 501030 - DNA, 25 bp, Homo sapien
aatcaaagggttcgtcatctactga

SEQ ID NO: 501031 - DNA, 25 bp, Homo sapien
cttggtatcagaatcaaagggttcg

SEQ ID NO: 501032 - DNA, 25 bp, Homo sapien
tatcagaatcaaagggttcgtcatc

SEQ ID NO: 501033 - DNA, 25 bp, Homo sapien
cagaatcaaagggttcgtcatctac

SEQ ID NO: 501034 - DNA, 25 bp, Homo sapien
gcagagaaaggatccgccgcatcgt

SEQ ID NO: 501035 - DNA, 25 bp, Homo sapien
catcgtctctgtccggtgtcggccg

SEQ ID NO: 501036 - DNA, 25 bp, Homo sapien
cacgccactcttcggcagagaaagg

SEQ ID NO: 501037 - DNA, 25 bp, Homo sapien
ggcagctctgcggagcctgtcgaac

SEQ ID NO: 501038 - DNA, 25 bp, Homo sapien
ggaggaggcgtggtcctcactctca

SEQ ID NO: 501039 - DNA, 25 bp, Homo sapien
ggaggcgtggtcctcactctcactc

SEQ ID NO: 501040 - DNA, 25 bp, Homo sapien
gaggaggcgtggtcctcactctcac

SEQ ID NO: 501041 - DNA, 25 bp, Homo sapien
tgggaggaggcgtggtcctcactct

SEQ ID NO: 501042 - DNA, 25 bp, Homo sapien
ttcatggctccgtctaccggcttcg

SEQ ID NO: 501043 - DNA, 25 bp, Homo sapien
tcttcttcatggctccgtctaccgg

SEQ ID NO: 501044 - DNA, 25 bp, Homo sapien
tggctccgtctaccggcttcggaga

SEQ ID NO: 501045 - DNA, 25 bp, Homo sapien
ttcttcatggctccgtctaccggct

SEQ ID NO: 501046 - DNA, 25 bp, Homo sapien
gaggaagcaaatcgcgtccgccaca

SEQ ID NO: 501047 - DNA, 25 bp, Homo sapien
ctatatgaggaagcaaatcgcgtcc

SEQ ID NO: 501048 - DNA, 25 bp, Homo sapien
tatgaggaagcaaatcgcgtccgcc

SEQ ID NO: 501049 - DNA, 25 bp, Homo sapien
aggaaactccgcgactctcagcccc

SEQ ID NO: 501050 - DNA, 25 bp, Homo sapien
gaactgagcctccgaagtgggaaac

SEQ ID NO: 501051 - DNA, 25 bp, Homo sapien
ctgagcctccgaagtgggaaacagt

SEQ ID NO: 501052 - DNA, 25 bp, Homo sapien
ccccacacgctcaagggccaggcag

SEQ ID NO: 501053 - DNA, 25 bp, Homo sapien
agtggctcccccacacgctcaaggg

SEQ ID NO: 501054 - DNA, 25 bp, Homo sapien
gccttgcatggcccaggtgtgagcc

SEQ ID NO: 501055 - DNA, 25 bp, Homo sapien
ttcatcttgggtcacccaaaggccg

SEQ ID NO: 501056 - DNA, 25 bp, Homo sapien
acttcatcttgggtcacccaaaggc

SEQ ID NO: 501057 - DNA, 25 bp, Homo sapien
catcttgggtcacccaaaggccgag

SEQ ID NO: 501058 - DNA, 25 bp, Homo sapien
ggacttcatcttgggtcacccaaag

SEQ ID NO: 501059 - DNA, 25 bp, Homo sapien
tgtaattgcgcagctgcgggctgct

SEQ ID NO: 501060 - DNA, 25 bp, Homo sapien
ggtgctggccggcagtgcattctgg

SEQ ID NO: 501061 - DNA, 25 bp, Homo sapien
acagctgtgtgtaattgcgcagctg

SEQ ID NO: 501062 - DNA, 25 bp, Homo sapien
taattgcgcagctgcgggctgctgc

SEQ ID NO: 501063 - DNA, 25 bp, Homo sapien
tggccggagggggaactgctggccg

SEQ ID NO: 501064 - DNA, 25 bp, Homo sapien
ggccggagggggaactgctggccgc

SEQ ID NO: 501065 - DNA, 25 bp, Homo sapien
gccggagggggaactgctggccgcc

SEQ ID NO: 501066 - DNA, 25 bp, Homo sapien
tcagctgttctgatgagtactcctc

SEQ ID NO: 501067 - DNA, 25 bp, Homo sapien
gttctgatgagtactcctctgactg

SEQ ID NO: 501068 - DNA, 25 bp, Homo sapien
acgggtgaaccctcagctgttctga

SEQ ID NO: 501069 - DNA, 25 bp, Homo sapien
caacctaacgggtgaaccctcagct

SEQ ID NO: 501070 - DNA, 25 bp, Homo sapien
tgcctccctgacagggcaatggaga

SEQ ID NO: 501071 - DNA, 25 bp, Homo sapien
tcatctgtaaagtgcctccctgaca

SEQ ID NO: 501072 - DNA, 25 bp, Homo sapien
gaatgtagggtcgatggctgcacac

SEQ ID NO: 501073 - DNA, 25 bp, Homo sapien
gccctgctgttgagcatctgtgtaa

SEQ ID NO: 501074 - DNA, 25 bp, Homo sapien
agggaagccccacggcatgcaccag

SEQ ID NO: 501075 - DNA, 25 bp, Homo sapien
ctgagcaactctccccacagggaag

SEQ ID NO: 501076 - DNA, 25 bp, Homo sapien
aaggggccagcccatcctgagcaac

SEQ ID NO: 501077 - DNA, 25 bp, Homo sapien
cttggcccaatcatctgggtagttg

SEQ ID NO: 501078 - DNA, 25 bp, Homo sapien
gttggatgtggaggacgtatcgcac

SEQ ID NO: 501079 - DNA, 25 bp, Homo sapien
ctgccaatgagttggatgtggagga

SEQ ID NO: 501080 - DNA, 25 bp, Homo sapien
atgagttggatgtggaggacgtatc

SEQ ID NO: 501081 - DNA, 25 bp, Homo sapien
gagttggatgtggaggacgtatcgc

SEQ ID NO: 501082 - DNA, 25 bp, Homo sapien
tgaggactcagatggccccgtgctg

SEQ ID NO: 501083 - DNA, 25 bp, Homo sapien
tctcctgaggactcagatggccccg

SEQ ID NO: 501084 - DNA, 25 bp, Homo sapien
tagccctctcctgaggactcagatg

SEQ ID NO: 501085 - DNA, 25 bp, Homo sapien
ctgctggtagccctctcctgaggac

SEQ ID NO: 501086 - DNA, 25 bp, Homo sapien
tgtggaggatttagttgtttgggta

SEQ ID NO: 501087 - DNA, 25 bp, Homo sapien
ttgtaccctgaaatgcatactggat

SEQ ID NO: 501088 - DNA, 25 bp, Homo sapien
agctagaaagctaatccatggtcaa

SEQ ID NO: 501089 - DNA, 25 bp, Homo sapien
aagctaatccatggtcaaatgtgtc

SEQ ID NO: 501090 - DNA, 25 bp, Homo sapien
ccttcttaaatggagtgacttcaac

SEQ ID NO: 501091 - DNA, 25 bp, Homo sapien
caagtttcagaggtgtcctgcagcc

SEQ ID NO: 501092 - DNA, 25 bp, Homo sapien
ccttgatagcagtgagcctcagtcc

SEQ ID NO: 501093 - DNA, 25 bp, Homo sapien
cagtccaccgttctgctgaagagga

SEQ ID NO: 501094 - DNA, 25 bp, Homo sapien
acagctgccctcagccgtacccccg

SEQ ID NO: 501095 - DNA, 25 bp, Homo sapien
tgccctcagccgtacccccgtctcc

SEQ ID NO: 501096 - DNA, 25 bp, Homo sapien
agctgccctcagccgtacccccgtc

SEQ ID NO: 501097 - DNA, 25 bp, Homo sapien
ccgtctcccccaacaactgccccat

SEQ ID NO: 501098 - DNA, 25 bp, Homo sapien
gcaaacctggcaatgtgaggccctt

SEQ ID NO: 501099 - DNA, 25 bp, Homo sapien
aaacctggcaatgtgaggcccttgt

SEQ ID NO: 501100 - DNA, 25 bp, Homo sapien
agtggatgtcttgcagatatttaga

SEQ ID NO: 501101 - DNA, 25 bp, Homo sapien
gtcttgcagatatttagagttggca

SEQ ID NO: 501102 - DNA, 25 bp, Homo sapien
catgtcaaccaaaagcaagggtaga

SEQ ID NO: 501103 - DNA, 25 bp, Homo sapien
atgtcaaccaaaagcaagggtagac

SEQ ID NO: 501104 - DNA, 25 bp, Homo sapien
tgtcaaccaaaagcaagggtagacc

SEQ ID NO: 501105 - DNA, 25 bp, Homo sapien
caaccaaaagcaagggtagaccttg

SEQ ID NO: 501106 - DNA, 25 bp, Homo sapien
agttctggactaggcacattggctc

SEQ ID NO: 501107 - DNA, 25 bp, Homo sapien
agttctcgaacacaaaacaggtgtt

SEQ ID NO: 501108 - DNA, 25 bp, Homo sapien
gattaagaaaaagttctcgaacaca

SEQ ID NO: 501109 - DNA, 25 bp, Homo sapien
gttctggactaggcacattggctca

SEQ ID NO: 501110 - DNA, 25 bp, Homo sapien
tcaaagaatagtcccacctcagcat

SEQ ID NO: 501111 - DNA, 25 bp, Homo sapien
cccagccagtgtttcagagctttat

SEQ ID NO: 501112 - DNA, 25 bp, Homo sapien
tctcctcacattcaggagtccagtg

SEQ ID NO: 501113 - DNA, 25 bp, Homo sapien
gtgtacaagcaatgcttctgccttg

SEQ ID NO: 501114 - DNA, 25 bp, Homo sapien
gttgagttggatattttagtcaaca

SEQ ID NO: 501115 - DNA, 25 bp, Homo sapien
tgcctcagcagtagttgacttttgt

SEQ ID NO: 501116 - DNA, 25 bp, Homo sapien
ttgagttggatattttagtcaacat

SEQ ID NO: 501117 - DNA, 25 bp, Homo sapien
ggagctatacttagtcggatccagc

SEQ ID NO: 501118 - DNA, 25 bp, Homo sapien
cttagtcggatccagctacaacatc

SEQ ID NO: 501119 - DNA, 25 bp, Homo sapien
tgcatcatcaaggaagacttaggac

SEQ ID NO: 501120 - DNA, 25 bp, Homo sapien
cttaggacacatgaacatgtggcag

SEQ ID NO: 501121 - DNA, 25 bp, Homo sapien
tggtggataaattttccatgctttt

SEQ ID NO: 501122 - DNA, 25 bp, Homo sapien
tctccacagcaaattctggtggata

SEQ ID NO: 501123 - DNA, 25 bp, Homo sapien
tctcgccaaaaagtatctccacagc

SEQ ID NO: 501124 - DNA, 25 bp, Homo sapien
tcatttctcgccaaaaagtatctcc

SEQ ID NO: 501125 - DNA, 25 bp, Homo sapien
tcagtaacacatgctgactctctta

SEQ ID NO: 501126 - DNA, 25 bp, Homo sapien
ttgaataaaagacgtgttgaaccag

SEQ ID NO: 501127 - DNA, 25 bp, Homo sapien
atggacaattgtcatagtatttagg

SEQ ID NO: 501128 - DNA, 25 bp, Homo sapien
gacaattgtcatagtatttaggaag

SEQ ID NO: 501129 - DNA, 25 bp, Homo sapien
gaaaaatggacaattgtcatagtat

SEQ ID NO: 501130 - DNA, 25 bp, Homo sapien
tgctcccacccatcagtcgagcaca

SEQ ID NO: 501131 - DNA, 25 bp, Homo sapien
gaggtggaccgtcatatacattaat

SEQ ID NO: 501132 - DNA, 25 bp, Homo sapien
cagaggtggaccgtcatatacatta

SEQ ID NO: 501133 - DNA, 25 bp, Homo sapien
catacagaggtggaccgtcatatac

SEQ ID NO: 501134 - DNA, 25 bp, Homo sapien
ttgtctgtttcaatgtcatgcaata

SEQ ID NO: 501135 - DNA, 25 bp, Homo sapien
caatttcctaatgaagtactggaaa

SEQ ID NO: 501136 - DNA, 25 bp, Homo sapien
ggcttgagggcacatgggtcctcct

SEQ ID NO: 501137 - DNA, 25 bp, Homo sapien
tggttctgagaaataagcaggcttg

SEQ ID NO: 501138 - DNA, 25 bp, Homo sapien
gcaaactctgaactagaggtggttc

SEQ ID NO: 501139 - DNA, 25 bp, Homo sapien
caaggcaaactctgaactagaggtg

SEQ ID NO: 501140 - DNA, 25 bp, Homo sapien
agagtatccgtcttggagggagatt

SEQ ID NO: 501141 - DNA, 25 bp, Homo sapien
ataaagagtatccgtcttggaggga

SEQ ID NO: 501142 - DNA, 25 bp, Homo sapien
taaagagtatccgtcttggagggag

SEQ ID NO: 501143 - DNA, 25 bp, Homo sapien
aaagagtatccgtcttggagggaga

SEQ ID NO: 501144 - DNA, 25 bp, Homo sapien
ctggatgccattatataactggaca

SEQ ID NO: 501145 - DNA, 25 bp, Homo sapien
gccaacacagctctcaaacatgcag

SEQ ID NO: 501146 - DNA, 25 bp, Homo sapien
tagagggcactctgtcctgaggtct

SEQ ID NO: 501147 - DNA, 25 bp, Homo sapien
aatcaccaccagacatagagggcac

SEQ ID NO: 501148 - DNA, 25 bp, Homo sapien
catgcgtagtgatgggcacctataa

SEQ ID NO: 501149 - DNA, 25 bp, Homo sapien
ttaaagaaaaactcatttacagcca

SEQ ID NO: 501150 - DNA, 25 bp, Homo sapien
catttacagccacatccaaatccat

SEQ ID NO: 501151 - DNA, 25 bp, Homo sapien
aaagaaaaactcatttacagccaca

SEQ ID NO: 501152 - DNA, 25 bp, Homo sapien
agaaaaactcatttacagccacatc

SEQ ID NO: 501153 - DNA, 25 bp, Homo sapien
tgctgtgggttttattggttcgcct

SEQ ID NO: 501154 - DNA, 25 bp, Homo sapien
ttattgctgtgggttttattggttc

SEQ ID NO: 501155 - DNA, 25 bp, Homo sapien
aatttattgctgtgggttttattgg

SEQ ID NO: 501156 - DNA, 25 bp, Homo sapien
ttgctgtgggttttattggttcgcc

SEQ ID NO: 501157 - DNA, 25 bp, Homo sapien
taatcatcttaacgtcctaccagcg

SEQ ID NO: 501158 - DNA, 25 bp, Homo sapien
aatcatcttaacgtcctaccagcga

SEQ ID NO: 501159 - DNA, 25 bp, Homo sapien
aataatcatcttaacgtcctaccag

SEQ ID NO: 501160 - DNA, 25 bp, Homo sapien
atcatcttaacgtcctaccagcgat

SEQ ID NO: 501161 - DNA, 25 bp, Homo sapien
tttcggaggcaataaggagggcaca

SEQ ID NO: 501162 - DNA, 25 bp, Homo sapien
aataaggagggcacaaaccatagtc

SEQ ID NO: 501163 - DNA, 25 bp, Homo sapien
aatatttcggaggcaataaggaggg

SEQ ID NO: 501164 - DNA, 25 bp, Homo sapien
aggagggcacaaaccatagtcccgg

SEQ ID NO: 501165 - DNA, 25 bp, Homo sapien
tggagctcatttgaggagagacttg

SEQ ID NO: 501166 - DNA, 25 bp, Homo sapien
cttggagctcatttgaggagagact

SEQ ID NO: 501167 - DNA, 25 bp, Homo sapien
aagccttggagctcatttgaggaga

SEQ ID NO: 501168 - DNA, 25 bp, Homo sapien
gccttggagctcatttgaggagaga

SEQ ID NO: 501169 - DNA, 25 bp, Homo sapien
gaagtgcatagggctgcagaagcaa

SEQ ID NO: 501170 - DNA, 25 bp, Homo sapien
aatgcttcctaccaaaatgaaaact

SEQ ID NO: 501171 - DNA, 25 bp, Homo sapien
tctggcaatgcttcctaccaaaatg

SEQ ID NO: 501172 - DNA, 25 bp, Homo sapien
gctctacagtcacaccctctaggga

SEQ ID NO: 501173 - DNA, 25 bp, Homo sapien
gaatcgctacgatgttttcaagatc

SEQ ID NO: 501174 - DNA, 25 bp, Homo sapien
gtgaatcgctacgatgttttcaaga

SEQ ID NO: 501175 - DNA, 25 bp, Homo sapien
ttgagccatccactcatttacttcc

SEQ ID NO: 501176 - DNA, 25 bp, Homo sapien
atcgctacgatgttttcaagatctt

SEQ ID NO: 501177 - DNA, 25 bp, Homo sapien
gatcatcaatcatgattctactgac

SEQ ID NO: 501178 - DNA, 25 bp, Homo sapien
attatgatcatcaatcatgattcta

SEQ ID NO: 501179 - DNA, 25 bp, Homo sapien
acattatgatcatcaatcatgattc

SEQ ID NO: 501180 - DNA, 25 bp, Homo sapien
tatgatcatcaatcatgattctact

SEQ ID NO: 501181 - DNA, 25 bp, Homo sapien
ggaagtgcttaggatcataagctct

SEQ ID NO: 501182 - DNA, 25 bp, Homo sapien
tatggaagtgcttaggatcataagc

SEQ ID NO: 501183 - DNA, 25 bp, Homo sapien
tattatggaagtgcttaggatcata

SEQ ID NO: 501184 - DNA, 25 bp, Homo sapien
cctattatggaagtgcttaggatca

SEQ ID NO: 501185 - DNA, 25 bp, Homo sapien
ttctacctacagtagcaaaatatag

SEQ ID NO: 501186 - DNA, 25 bp, Homo sapien
cctacagtagcaaaatatagagtaa

SEQ ID NO: 501187 - DNA, 25 bp, Homo sapien
gcagtaatctgttttctacctacag

SEQ ID NO: 501188 - DNA, 25 bp, Homo sapien
gcaaaatatagagtaatgtacatac

SEQ ID NO: 501189 - DNA, 25 bp, Homo sapien
tcgatagtggtttcgatgtttctta

SEQ ID NO: 501190 - DNA, 25 bp, Homo sapien
tagactcgatagtggtttcgatgtt

SEQ ID NO: 501191 - DNA, 25 bp, Homo sapien
gtagactcgatagtggtttcgatgt

SEQ ID NO: 501192 - DNA, 25 bp, Homo sapien
gactcgatagtggtttcgatgtttc

SEQ ID NO: 501193 - DNA, 25 bp, Homo sapien
aaatgtaaccctgcaacttgattcc

SEQ ID NO: 501194 - DNA, 25 bp, Homo sapien
tgctcattcgctgttgttcaaaatg

SEQ ID NO: 501195 - DNA, 25 bp, Homo sapien
tatgaaattgtaatgtctgctttgc

SEQ ID NO: 501196 - DNA, 25 bp, Homo sapien
tctgctttgctcattcgctgttgtt

SEQ ID NO: 501197 - DNA, 25 bp, Homo sapien
aagccctcacatttcacctcgtagt

SEQ ID NO: 501198 - DNA, 25 bp, Homo sapien
agccctcacatttcacctcgtagtg

SEQ ID NO: 501199 - DNA, 25 bp, Homo sapien
caagccctcacatttcacctcgtag

SEQ ID NO: 501200 - DNA, 25 bp, Homo sapien
tatcagtctctgtgtaagataatcc

SEQ ID NO: 501201 - DNA, 25 bp, Homo sapien
tcagtctctgtgtaagataatccaa

SEQ ID NO: 501202 - DNA, 25 bp, Homo sapien
tcttatcagtctctgtgtaagataa

SEQ ID NO: 501203 - DNA, 25 bp, Homo sapien
ttatcagtctctgtgtaagataatc

SEQ ID NO: 501204 - DNA, 25 bp, Homo sapien
gattaggcccagtcttttgcttgcc

SEQ ID NO: 501205 - DNA, 25 bp, Homo sapien
accatggagattaggcccagtcttt

SEQ ID NO: 501206 - DNA, 25 bp, Homo sapien
ggcacacttctgaacaaaaattttc

SEQ ID NO: 501207 - DNA, 25 bp, Homo sapien
ttgcttgcctcccttttccacggtg

SEQ ID NO: 501208 - DNA, 25 bp, Homo sapien
gaagatggaaatgacatagcaataa

SEQ ID NO: 501209 - DNA, 25 bp, Homo sapien
ctcaattggatttctatagaaagac

SEQ ID NO: 501210 - DNA, 25 bp, Homo sapien
ttctatagaaagactgccttccaga

SEQ ID NO: 501211 - DNA, 25 bp, Homo sapien
ggatttctatagaaagactgccttc

SEQ ID NO: 501212 - DNA, 25 bp, Homo sapien
tccatcccttgtgtatcgccttttg

SEQ ID NO: 501213 - DNA, 25 bp, Homo sapien
catcccttgtgtatcgccttttgtt

SEQ ID NO: 501214 - DNA, 25 bp, Homo sapien
atcccttgtgtatcgccttttgttt

SEQ ID NO: 501215 - DNA, 25 bp, Homo sapien
ccatcccttgtgtatcgccttttgt

SEQ ID NO: 501216 - DNA, 25 bp, Homo sapien
agcagatgaaaaattcttatcagaa

SEQ ID NO: 501217 - DNA, 25 bp, Homo sapien
tcagaataataagtcgtagaagtcg

SEQ ID NO: 501218 - DNA, 25 bp, Homo sapien
cgtagaagtcgaactaaatgtgtcc

SEQ ID NO: 501219 - DNA, 25 bp, Homo sapien
tgtcttttttgatgaagcagatgaa

SEQ ID NO: 501220 - DNA, 25 bp, Homo sapien
ggaatattcctaagcaacttaatgt

SEQ ID NO: 501221 - DNA, 25 bp, Homo sapien
gggaatattcctaagcaacttaatg

SEQ ID NO: 501222 - DNA, 25 bp, Homo sapien
gaatattcctaagcaacttaatgtc

SEQ ID NO: 501223 - DNA, 25 bp, Homo sapien
aatattcctaagcaacttaatgtca

SEQ ID NO: 501224 - DNA, 25 bp, Homo sapien
ggtatagcccaagtaatttttgctc

SEQ ID NO: 501225 - DNA, 25 bp, Homo sapien
gatgttaagcatctcttgatatgcc

SEQ ID NO: 501226 - DNA, 25 bp, Homo sapien
tcatggtagttttctacactgcgaa

SEQ ID NO: 501227 - DNA, 25 bp, Homo sapien
gtgggctgcctcttcactttgctaa

SEQ ID NO: 501228 - DNA, 25 bp, Homo sapien
tgtcactcaaaccacaagatgcagt

SEQ ID NO: 501229 - DNA, 25 bp, Homo sapien
tgccagactaccaccaatgttctca

SEQ ID NO: 501230 - DNA, 25 bp, Homo sapien
agtgttttattgtgctacggctgag

SEQ ID NO: 501231 - DNA, 25 bp, Homo sapien
tcataaggcccaaaggctcttaagt

SEQ ID NO: 501232 - DNA, 25 bp, Homo sapien
gaacatccatgagaaaaaataagcc

SEQ ID NO: 501233 - DNA, 25 bp, Homo sapien
tctacaaatactcgaagaagaacat

SEQ ID NO: 501234 - DNA, 25 bp, Homo sapien
tactcgaagaagaacatccatgaga

SEQ ID NO: 501235 - DNA, 25 bp, Homo sapien
agaacatccatgagaaaaaataagc

SEQ ID NO: 501236 - DNA, 25 bp, Homo sapien
ctagagaaatagaacgatactccaa

SEQ ID NO: 501237 - DNA, 25 bp, Homo sapien
tagagaaatagaacgatactccaaa

SEQ ID NO: 501238 - DNA, 25 bp, Homo sapien
gaaatagaacgatactccaaaggaa

SEQ ID NO: 501239 - DNA, 25 bp, Homo sapien
gagaaatagaacgatactccaaagg

SEQ ID NO: 501240 - DNA, 25 bp, Homo sapien
gtgaaaattaggtcggcaaggagga

SEQ ID NO: 501241 - DNA, 25 bp, Homo sapien
tgacatccagtaagaccaggaaaac

SEQ ID NO: 501242 - DNA, 25 bp, Homo sapien
tccagtaagaccaggaaaactccaa

SEQ ID NO: 501243 - DNA, 25 bp, Homo sapien
agagtgacatccagtaagaccagga

SEQ ID NO: 501244 - DNA, 25 bp, Homo sapien
tagactatttgcctaatccataaag

SEQ ID NO: 501245 - DNA, 25 bp, Homo sapien
ttccagaactaaagagtaattccag

SEQ ID NO: 501246 - DNA, 25 bp, Homo sapien
tatgaaatcgtactcttatgtagag

SEQ ID NO: 501247 - DNA, 25 bp, Homo sapien
tgaactctaaagtacttcctgccac

SEQ ID NO: 501248 - DNA, 25 bp, Homo sapien
aaggatgatacaattgaatgcacaa

SEQ ID NO: 501249 - DNA, 25 bp, Homo sapien
caaatgcaaaggatgatacaattga

SEQ ID NO: 501250 - DNA, 25 bp, Homo sapien
ccaaatgcaaaggatgatacaattg

SEQ ID NO: 501251 - DNA, 25 bp, Homo sapien
gatgatacaattgaatgcacaattt

SEQ ID NO: 501252 - DNA, 25 bp, Homo sapien
tgacttgctgagtatcaggtgaatg

SEQ ID NO: 501253 - DNA, 25 bp, Homo sapien
ctgtctaattttgtttcggccctgg

SEQ ID NO: 501254 - DNA, 25 bp, Homo sapien
ttaatctgtctaattttgtttcggc

SEQ ID NO: 501255 - DNA, 25 bp, Homo sapien
tagtgacttgctgagtatcaggtga

SEQ ID NO: 501256 - DNA, 25 bp, Homo sapien
atatgaagcaacattttcagcatct

SEQ ID NO: 501257 - DNA, 25 bp, Homo sapien
caaacttggaaagtcgttctaacat

SEQ ID NO: 501258 - DNA, 25 bp, Homo sapien
agcatcttcaacttcaaacttggaa

SEQ ID NO: 501259 - DNA, 25 bp, Homo sapien
atgaagcaacattttcagcatcttc

SEQ ID NO: 501260 - DNA, 25 bp, Homo sapien
gacaccagggctgctcctttaaatt

SEQ ID NO: 501261 - DNA, 25 bp, Homo sapien
cttttactgataggtgacaccaggg

SEQ ID NO: 501262 - DNA, 25 bp, Homo sapien
ttttactgataggtgacaccagggc

SEQ ID NO: 501263 - DNA, 25 bp, Homo sapien
ctcctttaaattcacttgtgtgtgg

SEQ ID NO: 501264 - DNA, 25 bp, Homo sapien
caggtgcctcctcggttgttccttt

SEQ ID NO: 501265 - DNA, 25 bp, Homo sapien
cgcaggtgcctcctcggttgttcct

SEQ ID NO: 501266 - DNA, 25 bp, Homo sapien
tcctttaaattcgtttgtctgtgga

SEQ ID NO: 501267 - DNA, 25 bp, Homo sapien
ctttctttcgcaggtgcctcctcgg

SEQ ID NO: 501268 - DNA, 25 bp, Homo sapien
tgtcactgggggctctctcaatgat

SEQ ID NO: 501269 - DNA, 25 bp, Homo sapien
actgggggctctctcaatgatgact

SEQ ID NO: 501270 - DNA, 25 bp, Homo sapien
tgggggctctctcaatgatgactcc

SEQ ID NO: 501271 - DNA, 25 bp, Homo sapien
tcactgggggctctctcaatgatga

SEQ ID NO: 501272 - DNA, 25 bp, Homo sapien
aaaagttgcggccaagtagctggag

SEQ ID NO: 501273 - DNA, 25 bp, Homo sapien
aatgaggtttcctatgccaacagtg

SEQ ID NO: 501274 - DNA, 25 bp, Homo sapien
ggtatgggcaaaggcagtcagcctc

SEQ ID NO: 501275 - DNA, 25 bp, Homo sapien
tatcactaaattgacctgggatggc

SEQ ID NO: 501276 - DNA, 25 bp, Homo sapien
tcaactctactgtgtaggcattcct

SEQ ID NO: 501277 - DNA, 25 bp, Homo sapien
tggccaatgcacgacagccttttgt

SEQ ID NO: 501278 - DNA, 25 bp, Homo sapien
aatcccaactatggcccacttcctg

SEQ ID NO: 501279 - DNA, 25 bp, Homo sapien
tgactcaagagttcaccaaaactct

SEQ ID NO: 501280 - DNA, 25 bp, Homo sapien
catccaatgaggtgctgtgcttgtg

SEQ ID NO: 501281 - DNA, 25 bp, Homo sapien
aaggtctgcatccaatgaggtgctg

SEQ ID NO: 501282 - DNA, 25 bp, Homo sapien
gacacaggctagtagctgtgggtct

SEQ ID NO: 501283 - DNA, 25 bp, Homo sapien
ctgtgggtctaaggaaggtctgcat

SEQ ID NO: 501284 - DNA, 25 bp, Homo sapien
tcttttctgcccagggcttccctgc

SEQ ID NO: 501285 - DNA, 25 bp, Homo sapien
tgctccttgtcagctgctatctcct

SEQ ID NO: 501286 - DNA, 25 bp, Homo sapien
atgttccattagctctgttcttttc

SEQ ID NO: 501287 - DNA, 25 bp, Homo sapien
tgtgagggacaagtccatgttccat

SEQ ID NO: 501288 - DNA, 25 bp, Homo sapien
gtgcctctgggttcactcctgataa

SEQ ID NO: 501289 - DNA, 25 bp, Homo sapien
cgtgcctctgggttcactcctgata

SEQ ID NO: 501290 - DNA, 25 bp, Homo sapien
ctaaacttttgtgtggaggtagtca

SEQ ID NO: 501291 - DNA, 25 bp, Homo sapien
ctcttattccactaaatgtgctgcc

SEQ ID NO: 501292 - DNA, 25 bp, Homo sapien
aaagtaactgcaggtctgagtcaag

SEQ ID NO: 501293 - DNA, 25 bp, Homo sapien
ggtagtcagccctcttattccacta

SEQ ID NO: 501294 - DNA, 25 bp, Homo sapien
ctgcagggtcaaaaacatttctagg

SEQ ID NO: 501295 - DNA, 25 bp, Homo sapien
tgcagggtcaaaaacatttctaggg

SEQ ID NO: 501296 - DNA, 25 bp, Homo sapien
taagtccttctgtcacttctttact

SEQ ID NO: 501297 - DNA, 25 bp, Homo sapien
cagagcatatagtagaatctgttag

SEQ ID NO: 501298 - DNA, 25 bp, Homo sapien
tagttgtcagagcatatagtagaat

SEQ ID NO: 501299 - DNA, 25 bp, Homo sapien
tgtcagagcatatagtagaatctgt

SEQ ID NO: 501300 - DNA, 25 bp, Homo sapien
agaatctgttagtgaatccataact

SEQ ID NO: 501301 - DNA, 25 bp, Homo sapien
cagaggccaaaatcttcttaaacct

SEQ ID NO: 501302 - DNA, 25 bp, Homo sapien
caacagattcctaatgtttcagagg

SEQ ID NO: 501303 - DNA, 25 bp, Homo sapien
tgtttcagaggccaaaatcttctta

SEQ ID NO: 501304 - DNA, 25 bp, Homo sapien
tcaacagattcctaatgtttcagag

SEQ ID NO: 501305 - DNA, 25 bp, Homo sapien
cagctcatctgcagtaggagtagaa

SEQ ID NO: 501306 - DNA, 25 bp, Homo sapien
ttcggagttataccagctcatctgc

SEQ ID NO: 501307 - DNA, 25 bp, Homo sapien
cttcggagttataccagctcatctg

SEQ ID NO: 501308 - DNA, 25 bp, Homo sapien
ctcatctgcagtaggagtagaaata

SEQ ID NO: 501309 - DNA, 25 bp, Homo sapien
ctacagatgagactgcttccagcgc

SEQ ID NO: 501310 - DNA, 25 bp, Homo sapien
gatgagactgcttccagcgccactg

SEQ ID NO: 501311 - DNA, 25 bp, Homo sapien
ctgttcggctgccagaataacacaa

SEQ ID NO: 501312 - DNA, 25 bp, Homo sapien
gtctgttcggctgccagaataacac

SEQ ID NO: 501313 - DNA, 25 bp, Homo sapien
ccactggttgtcccccagtaccctg

SEQ ID NO: 501314 - DNA, 25 bp, Homo sapien
cctgagggtaaggggactctgtaag

SEQ ID NO: 501315 - DNA, 25 bp, Homo sapien
ctgagggtaaggggactctgtaagg

SEQ ID NO: 501316 - DNA, 25 bp, Homo sapien
ctggttgtcccccagtaccctgagg

SEQ ID NO: 501317 - DNA, 25 bp, Homo sapien
gattttctgcccaattgtctagcta

SEQ ID NO: 501318 - DNA, 25 bp, Homo sapien
taaagactgtatactctgttgttgc

SEQ ID NO: 501319 - DNA, 25 bp, Homo sapien
tttaagcatggcattagctgcattc

SEQ ID NO: 501320 - DNA, 25 bp, Homo sapien
gttccatgtgcacttataaagactg

SEQ ID NO: 501321 - DNA, 25 bp, Homo sapien
aggggctggcgccttgaggacttac

SEQ ID NO: 501322 - DNA, 25 bp, Homo sapien
agaagcaggggctggcgccttgagg

SEQ ID NO: 501323 - DNA, 25 bp, Homo sapien
tcaatctgtgtggagaagcaggggc

SEQ ID NO: 501324 - DNA, 25 bp, Homo sapien
gcaggggctggcgccttgaggactt

SEQ ID NO: 501325 - DNA, 25 bp, Homo sapien
aagactgttctaaggccacagtgtg

SEQ ID NO: 501326 - DNA, 25 bp, Homo sapien
gcactggggtttcaggactggataa

SEQ ID NO: 501327 - DNA, 25 bp, Homo sapien
gactggataagactgttctaaggcc

SEQ ID NO: 501328 - DNA, 25 bp, Homo sapien
tgtccttctgaccagtcctgatgtt

SEQ ID NO: 501329 - DNA, 25 bp, Homo sapien
gtggcaactgcagtaagtcacaggc

SEQ ID NO: 501330 - DNA, 25 bp, Homo sapien
tcaactctggcactatctaaagtac

SEQ ID NO: 501331 - DNA, 25 bp, Homo sapien
gcagtgtggcaactgcagtaagtca

SEQ ID NO: 501332 - DNA, 25 bp, Homo sapien
ctcaactctggcactatctaaagta

SEQ ID NO: 501333 - DNA, 25 bp, Homo sapien
tctgtagcaatgaatctgtagcctg

SEQ ID NO: 501334 - DNA, 25 bp, Homo sapien
tgtagcaatgaatctgtagcctgtc

SEQ ID NO: 501335 - DNA, 25 bp, Homo sapien
attctgtagcaatgaatctgtagcc

SEQ ID NO: 501336 - DNA, 25 bp, Homo sapien
ctgtagcaatgaatctgtagcctgt

SEQ ID NO: 501337 - DNA, 25 bp, Homo sapien
cactcagcgttgtttctgaaatttg

SEQ ID NO: 501338 - DNA, 25 bp, Homo sapien
tagctctatttcaatcattttcact

SEQ ID NO: 501339 - DNA, 25 bp, Homo sapien
tagtgttccattgcaaggataaacc

SEQ ID NO: 501340 - DNA, 25 bp, Homo sapien
cacgttctcccctgatttgtactgc

SEQ ID NO: 501341 - DNA, 25 bp, Homo sapien
ggctcttgttcccaggccataatct

SEQ ID NO: 501342 - DNA, 25 bp, Homo sapien
ctcttgttcccaggccataatctca

SEQ ID NO: 501343 - DNA, 25 bp, Homo sapien
ttaaggctcttgttcccaggccata

SEQ ID NO: 501344 - DNA, 25 bp, Homo sapien
taaggctcttgttcccaggccataa

SEQ ID NO: 501345 - DNA, 25 bp, Homo sapien
caaagccattctgaaggggttgttc

SEQ ID NO: 501346 - DNA, 25 bp, Homo sapien
gggttgttcattgactgtggctaac

SEQ ID NO: 501347 - DNA, 25 bp, Homo sapien
tcttttgtccacaggatcagctctt

SEQ ID NO: 501348 - DNA, 25 bp, Homo sapien
ttcattgttaactgggaactcccac

SEQ ID NO: 501349 - DNA, 25 bp, Homo sapien
ttccacatcccaaagtgaaggtgat

SEQ ID NO: 501350 - DNA, 25 bp, Homo sapien
cttagcaaattccacatcccaaagt

SEQ ID NO: 501351 - DNA, 25 bp, Homo sapien
aattccacatcccaaagtgaaggtg

SEQ ID NO: 501352 - DNA, 25 bp, Homo sapien
ccacatcccaaagtgaaggtgatgt

SEQ ID NO: 501353 - DNA, 25 bp, Homo sapien
tttaagtaagaacaagtcaatgtaa

SEQ ID NO: 501354 - DNA, 25 bp, Homo sapien
aatgtctagactgctaattgaagaa

SEQ ID NO: 501355 - DNA, 25 bp, Homo sapien
aaatgtctagactgctaattgaaga

SEQ ID NO: 501356 - DNA, 25 bp, Homo sapien
taaaatgtctagactgctaattgaa

SEQ ID NO: 501357 - DNA, 25 bp, Homo sapien
aaaatgtctagactgctaattgaag

SEQ ID NO: 501358 - DNA, 25 bp, Homo sapien
aataaaatggctatagacctcactg

SEQ ID NO: 501359 - DNA, 25 bp, Homo sapien
taaaatggctatagacctcactgta

SEQ ID NO: 501360 - DNA, 25 bp, Homo sapien
taataaaatggctatagacctcact

SEQ ID NO: 501361 - DNA, 25 bp, Homo sapien
ataaaatggctatagacctcactgt

SEQ ID NO: 501362 - DNA, 25 bp, Homo sapien
tgctggctgtaacagtactggcatt

SEQ ID NO: 501363 - DNA, 25 bp, Homo sapien
gtcagtgctggctgtaacagtactg

SEQ ID NO: 501364 - DNA, 25 bp, Homo sapien
ggctgtaacagtactggcattactt

SEQ ID NO: 501365 - DNA, 25 bp, Homo sapien
tgtaacagtactggcattacttgaa

SEQ ID NO: 501366 - DNA, 25 bp, Homo sapien
tggcctcgagcatctccaagaacag

SEQ ID NO: 501367 - DNA, 25 bp, Homo sapien
tgggccagcactttgcccgctgtct

SEQ ID NO: 501368 - DNA, 25 bp, Homo sapien
ttcaccccatagaaatgggccagca

SEQ ID NO: 501369 - DNA, 25 bp, Homo sapien
tgcatgggcaccttgccctccagct

SEQ ID NO: 501370 - DNA, 25 bp, Homo sapien
cttcagtagaacgtactcccctcgc

SEQ ID NO: 501371 - DNA, 25 bp, Homo sapien
ttcagtagaacgtactcccctcgct

SEQ ID NO: 501372 - DNA, 25 bp, Homo sapien
cagggccttcagtagaacgtactcc

SEQ ID NO: 501373 - DNA, 25 bp, Homo sapien
ggccagggccttcagtagaacgtac

SEQ ID NO: 501374 - DNA, 25 bp, Homo sapien
tgagcgctgggccacacccggcacc

SEQ ID NO: 501375 - DNA, 25 bp, Homo sapien
cacccggcaccagcacctccattca

SEQ ID NO: 501376 - DNA, 25 bp, Homo sapien
ccggcaccagcacctccattcatac

SEQ ID NO: 501377 - DNA, 25 bp, Homo sapien
cagtggcagtgagcgctgggccaca

SEQ ID NO: 501378 - DNA, 25 bp, Homo sapien
tcagacagcgacagcgatgagaagc

SEQ ID NO: 501379 - DNA, 25 bp, Homo sapien
tggtcagacagcgacagcgatgaga

SEQ ID NO: 501380 - DNA, 25 bp, Homo sapien
atctggtcagacagcgacagcgatg

SEQ ID NO: 501381 - DNA, 25 bp, Homo sapien
tctggtcagacagcgacagcgatga

SEQ ID NO: 501382 - DNA, 25 bp, Homo sapien
catagagcttctcaggctcaaccac

SEQ ID NO: 501383 - DNA, 25 bp, Homo sapien
tagagcttctcaggctcaaccacca

SEQ ID NO: 501384 - DNA, 25 bp, Homo sapien
aagaggtcacagagggtagccacgg

SEQ ID NO: 501385 - DNA, 25 bp, Homo sapien
ggcatagagcttctcaggctcaacc

SEQ ID NO: 501386 - DNA, 25 bp, Homo sapien
ggcctgtcgtctgggggcctccagc

SEQ ID NO: 501387 - DNA, 25 bp, Homo sapien
gggcctgtcgtctgggggcctccag

SEQ ID NO: 501388 - DNA, 25 bp, Homo sapien
cctgtcgtctgggggcctccagcga

SEQ ID NO: 501389 - DNA, 25 bp, Homo sapien
ctgggcctgtcgtctgggggcctcc

SEQ ID NO: 501390 - DNA, 25 bp, Homo sapien
gcgcccgggaagggcagcgggtcca

SEQ ID NO: 501391 - DNA, 25 bp, Homo sapien
ccaggggcccagcagggaaggcgcc

SEQ ID NO: 501392 - DNA, 25 bp, Homo sapien
cagggaaggcgcccgggaagggcag

SEQ ID NO: 501393 - DNA, 25 bp, Homo sapien
ggcccagcagggaaggcgcccggga

SEQ ID NO: 501394 - DNA, 25 bp, Homo sapien
ctctggcaccgcttgtactcccgcc

SEQ ID NO: 501395 - DNA, 25 bp, Homo sapien
ctggcaccgcttgtactcccgccca

SEQ ID NO: 501396 - DNA, 25 bp, Homo sapien
tctggcaccgcttgtactcccgccc

SEQ ID NO: 501397 - DNA, 25 bp, Homo sapien
tggcaccgcttgtactcccgcccac

SEQ ID NO: 501398 - DNA, 25 bp, Homo sapien
gtccaggcgcgctcccgcaggctct

SEQ ID NO: 501399 - DNA, 25 bp, Homo sapien
cccggacgcggtccaggcgcgctcc

SEQ ID NO: 501400 - DNA, 25 bp, Homo sapien
aggctcttggtgaagcggcaggcct

SEQ ID NO: 501401 - DNA, 25 bp, Homo sapien
ccgcaggctcttggtgaagcggcag

SEQ ID NO: 501402 - DNA, 25 bp, Homo sapien
aggccttgcgtctccgcttggtgat

SEQ ID NO: 501403 - DNA, 25 bp, Homo sapien
cttgcgtctccgcttggtgatctca

SEQ ID NO: 501404 - DNA, 25 bp, Homo sapien
ttgcgtctccgcttggtgatctcac

SEQ ID NO: 501405 - DNA, 25 bp, Homo sapien
gccttgcgtctccgcttggtgatct

SEQ ID NO: 501406 - DNA, 25 bp, Homo sapien
ggccagacagctgtactccatactc

SEQ ID NO: 501407 - DNA, 25 bp, Homo sapien
ctgtactccatactcccctggatgg

SEQ ID NO: 501408 - DNA, 25 bp, Homo sapien
agctgtactccatactcccctggat

SEQ ID NO: 501409 - DNA, 25 bp, Homo sapien
ggaggccagacagctgtactccata

SEQ ID NO: 501410 - DNA, 25 bp, Homo sapien
ccctttggactgtcaggcctggccg

SEQ ID NO: 501411 - DNA, 25 bp, Homo sapien
gctctgccatgatgtagtggctcac

SEQ ID NO: 501412 - DNA, 25 bp, Homo sapien
ccggctctgccatgatgtagtggct

SEQ ID NO: 501413 - DNA, 25 bp, Homo sapien
tcgggtctctgtctccgaggagccc

SEQ ID NO: 501414 - DNA, 25 bp, Homo sapien
cctggctggacatggcgctggtcac

SEQ ID NO: 501415 - DNA, 25 bp, Homo sapien
caccacctggctggacatggcgctg

SEQ ID NO: 501416 - DNA, 25 bp, Homo sapien
cccaccacctggctggacatggcgc

SEQ ID NO: 501417 - DNA, 25 bp, Homo sapien
cacctggctggacatggcgctggtc

SEQ ID NO: 501418 - DNA, 25 bp, Homo sapien
cagaactcggacgccagatcccgcc

SEQ ID NO: 501419 - DNA, 25 bp, Homo sapien
tcggacgccagatcccgcctgaacc

SEQ ID NO: 501420 - DNA, 25 bp, Homo sapien
actcggacgccagatcccgcctgaa

SEQ ID NO: 501421 - DNA, 25 bp, Homo sapien
gaactcggacgccagatcccgcctg

SEQ ID NO: 501422 - DNA, 25 bp, Homo sapien
cagtccggacctcgactgggccccg

SEQ ID NO: 501423 - DNA, 25 bp, Homo sapien
ggccccgaccgtggcccagactggc

SEQ ID NO: 501424 - DNA, 25 bp, Homo sapien
ccagactggccccagagccggcccc

SEQ ID NO: 501425 - DNA, 25 bp, Homo sapien
ggcccccgcctggagcccgccctgc

SEQ ID NO: 501426 - DNA, 25 bp, Homo sapien
catactgtccagtgtttggctgcca

SEQ ID NO: 501427 - DNA, 25 bp, Homo sapien
gggaggtgactttgtacacatactg

SEQ ID NO: 501428 - DNA, 25 bp, Homo sapien
tacacatactgtccagtgtttggct

SEQ ID NO: 501429 - DNA, 25 bp, Homo sapien
ttgtacacatactgtccagtgtttg

SEQ ID NO: 501430 - DNA, 25 bp, Homo sapien
aatgttgctttccatagtctgcagg

SEQ ID NO: 501431 - DNA, 25 bp, Homo sapien
aaatgttgctttccatagtctgcag

SEQ ID NO: 501432 - DNA, 25 bp, Homo sapien
ttaaaggacatcattgaaatgttgc

SEQ ID NO: 501433 - DNA, 25 bp, Homo sapien
ggacatcattgaaatgttgctttcc

SEQ ID NO: 501434 - DNA, 25 bp, Homo sapien
ccatcttcttcccaattgcaagcta

SEQ ID NO: 501435 - DNA, 25 bp, Homo sapien
tcttcccaattgcaagctagctcag

SEQ ID NO: 501436 - DNA, 25 bp, Homo sapien
cccaattgcaagctagctcagcctg

SEQ ID NO: 501437 - DNA, 25 bp, Homo sapien
tcttcttcccaattgcaagctagct

SEQ ID NO: 501438 - DNA, 25 bp, Homo sapien
tatggaactcactgattctatcctt

SEQ ID NO: 501439 - DNA, 25 bp, Homo sapien
aatttatggaactcactgattctat

SEQ ID NO: 501440 - DNA, 25 bp, Homo sapien
gaactcactgattctatccttggta

SEQ ID NO: 501441 - DNA, 25 bp, Homo sapien
ctcactgattctatccttggtagcc

SEQ ID NO: 501442 - DNA, 25 bp, Homo sapien
tccagttggaagatgggagattgcc

SEQ ID NO: 501443 - DNA, 25 bp, Homo sapien
ggaagatgggagattgcctgatgac

SEQ ID NO: 501444 - DNA, 25 bp, Homo sapien
gagagaggttgtccagttggaagat

SEQ ID NO: 501445 - DNA, 25 bp, Homo sapien
gttggaagatgggagattgcctgat

SEQ ID NO: 501446 - DNA, 25 bp, Homo sapien
gtactacttgatcgtttatacccag

SEQ ID NO: 501447 - DNA, 25 bp, Homo sapien
tttgattgaatcttgagggcctctt

SEQ ID NO: 501448 - DNA, 25 bp, Homo sapien
atttgattgaatcttgagggcctct

SEQ ID NO: 501449 - DNA, 25 bp, Homo sapien
cttgatcgtttatacccagttcttt

SEQ ID NO: 501450 - DNA, 25 bp, Homo sapien
gctctcaattccttgatctgctgtc

SEQ ID NO: 501451 - DNA, 25 bp, Homo sapien
tcatgctgtgctctcaattccttga

SEQ ID NO: 501452 - DNA, 25 bp, Homo sapien
ctcaattccttgatctgctgtccac

SEQ ID NO: 501453 - DNA, 25 bp, Homo sapien
ctgtgctctcaattccttgatctgc

SEQ ID NO: 501454 - DNA, 25 bp, Homo sapien
aagaaactcctgacgaagccctcgg

SEQ ID NO: 501455 - DNA, 25 bp, Homo sapien
gaagaaactcctgacgaagccctcg

SEQ ID NO: 501456 - DNA, 25 bp, Homo sapien
cctcggcaaggtgctcctttaaatg

SEQ ID NO: 501457 - DNA, 25 bp, Homo sapien
cgaagccctcggcaaggtgctcctt

SEQ ID NO: 501458 - DNA, 25 bp, Homo sapien
atgatatgtcgttctgtagtttaac

SEQ ID NO: 501459 - DNA, 25 bp, Homo sapien
catctgatatgatatgtcgttctgt

SEQ ID NO: 501460 - DNA, 25 bp, Homo sapien
ctgccatctgatatgatatgtcgtt

SEQ ID NO: 501461 - DNA, 25 bp, Homo sapien
tgccatctgatatgatatgtcgttc

SEQ ID NO: 501462 - DNA, 25 bp, Homo sapien
tgtcatcctcgcatctcttccccag

SEQ ID NO: 501463 - DNA, 25 bp, Homo sapien
tttgtcatcctcgcatctcttcccc

SEQ ID NO: 501464 - DNA, 25 bp, Homo sapien
gcatctcttccccaggccctgtctg

SEQ ID NO: 501465 - DNA, 25 bp, Homo sapien
atctcttccccaggccctgtctgac

SEQ ID NO: 501466 - DNA, 25 bp, Homo sapien
tgttgaggcggccctagtcggcctc

SEQ ID NO: 501467 - DNA, 25 bp, Homo sapien
gtgatctgtttcttgtgcgtgtcca

SEQ ID NO: 501468 - DNA, 25 bp, Homo sapien
tgcagccggctgttgaggcggccct

SEQ ID NO: 501469 - DNA, 25 bp, Homo sapien
tagtcggcctccttctggtgatctg

SEQ ID NO: 501470 - DNA, 25 bp, Homo sapien
caggacgtggcaagaagagatgctc

SEQ ID NO: 501471 - DNA, 25 bp, Homo sapien
cgtggcaagaagagatgctccagca

SEQ ID NO: 501472 - DNA, 25 bp, Homo sapien
ggcaagaagagatgctccagcagtt

SEQ ID NO: 501473 - DNA, 25 bp, Homo sapien
ggacgtggcaagaagagatgctcca

SEQ ID NO: 501474 - DNA, 25 bp, Homo sapien
gagaaggcaggcggcgagccggccg

SEQ ID NO: 501475 - DNA, 25 bp, Homo sapien
aggcaggcggcgagccggccggttg

SEQ ID NO: 501476 - DNA, 25 bp, Homo sapien
aagagaaggcaggcggcgagccggc

SEQ ID NO: 501477 - DNA, 25 bp, Homo sapien
gaaggcaggcggcgagccggccggt

SEQ ID NO: 501478 - DNA, 25 bp, Homo sapien
tcaggtgtgtctttagtaactgacg

SEQ ID NO: 501479 - DNA, 25 bp, Homo sapien
tgtctttagtaactgacgtcaggtc

SEQ ID NO: 501480 - DNA, 25 bp, Homo sapien
tagtaactgacgtcaggtcaaaaat

SEQ ID NO: 501481 - DNA, 25 bp, Homo sapien
ctgacgtcaggtcaaaaatattaag

SEQ ID NO: 501482 - DNA, 25 bp, Homo sapien
caaagtcaccataacctcttgaact

SEQ ID NO: 501483 - DNA, 25 bp, Homo sapien
aaagtcaccataacctcttgaactt

SEQ ID NO: 501484 - DNA, 25 bp, Homo sapien
tccaaagtcaccataacctcttgaa

SEQ ID NO: 501485 - DNA, 25 bp, Homo sapien
agtcaccataacctcttgaacttcc

SEQ ID NO: 501486 - DNA, 25 bp, Homo sapien
ccttgtcaaactgaatctgatgctc

SEQ ID NO: 501487 - DNA, 25 bp, Homo sapien
ctttttgtaagatcagcagtcttct

SEQ ID NO: 501488 - DNA, 25 bp, Homo sapien
tagctgtagcagatctggcaacatt

SEQ ID NO: 501489 - DNA, 25 bp, Homo sapien
tggtcttgaacaaactctagctgta

SEQ ID NO: 501490 - DNA, 25 bp, Homo sapien
gatgcagctgccaccaactcaggac

SEQ ID NO: 501491 - DNA, 25 bp, Homo sapien
cacggagaggcccgcagcaacagaa

SEQ ID NO: 501492 - DNA, 25 bp, Homo sapien
gggcacggagaggcccgcagcaaca

SEQ ID NO: 501493 - DNA, 25 bp, Homo sapien
ggaaaggcccgcagcagcggaactt

SEQ ID NO: 501494 - DNA, 25 bp, Homo sapien
acggaaaggcccgcagcagcggaac

SEQ ID NO: 501495 - DNA, 25 bp, Homo sapien
catgttggcatgaaggtctcctgtg

SEQ ID NO: 501496 - DNA, 25 bp, Homo sapien
gaaatcttctattccgtccttgatc

SEQ ID NO: 501497 - DNA, 25 bp, Homo sapien
tccatgttggcatgaaggtctcctg

SEQ ID NO: 501498 - DNA, 25 bp, Homo sapien
aatccatgttggcatgaaggtctcc

SEQ ID NO: 501499 - DNA, 25 bp, Homo sapien
agctggctgagggtccgacctcaga

SEQ ID NO: 501500 - DNA, 25 bp, Homo sapien
gacacgccagctcgcgggctaggct

SEQ ID NO: 501501 - DNA, 25 bp, Homo sapien
acctgcctgagcgtggcactgcgca

SEQ ID NO: 501502 - DNA, 25 bp, Homo sapien
gccgacgtcggtgttaagtggccgc

SEQ ID NO: 501503 - DNA, 25 bp, Homo sapien
agtcctatcatttggccgggctccg

SEQ ID NO: 501504 - DNA, 25 bp, Homo sapien
cctcaagtcctatcatttggccggg

SEQ ID NO: 501505 - DNA, 25 bp, Homo sapien
tcctttgccctcaagtcctatcatt

SEQ ID NO: 501506 - DNA, 25 bp, Homo sapien
ggtcgtcggcctccttcccgcagtg

SEQ ID NO: 501507 - DNA, 25 bp, Homo sapien
cttgcaggctgccagagagtgggtg

SEQ ID NO: 501508 - DNA, 25 bp, Homo sapien
ttgcaggctgccagagagtgggtgg

SEQ ID NO: 501509 - DNA, 25 bp, Homo sapien
gacttgcaggctgccagagagtggg

SEQ ID NO: 501510 - DNA, 25 bp, Homo sapien
gagacttgcaggctgccagagagtg

SEQ ID NO: 501511 - DNA, 25 bp, Homo sapien
atgttctcatcgcccccatccacca

SEQ ID NO: 501512 - DNA, 25 bp, Homo sapien
cattcctgtggttcttgccttcatc

SEQ ID NO: 501513 - DNA, 25 bp, Homo sapien
gacctccctcattcctgtggttctt

SEQ ID NO: 501514 - DNA, 25 bp, Homo sapien
cagccacccaagacctccctcattc

SEQ ID NO: 501515 - DNA, 25 bp, Homo sapien
aacttctttgctatgggtttgaact

SEQ ID NO: 501516 - DNA, 25 bp, Homo sapien
tcttgcagttgatcgaatcagctac

SEQ ID NO: 501517 - DNA, 25 bp, Homo sapien
ctttgctatgggtttgaacttcctc

SEQ ID NO: 501518 - DNA, 25 bp, Homo sapien
tttaacttctttgctatgggtttga

SEQ ID NO: 501519 - DNA, 25 bp, Homo sapien
gaaatctgctccttgggcgaactgt

SEQ ID NO: 501520 - DNA, 25 bp, Homo sapien
cagtcaacccgctagagattctagg

SEQ ID NO: 501521 - DNA, 25 bp, Homo sapien
cgaactgtcaaaaggcctgcgcatt

SEQ ID NO: 501522 - DNA, 25 bp, Homo sapien
ttatacagggtaagaccttcaccag

SEQ ID NO: 501523 - DNA, 25 bp, Homo sapien
tggtcacgtactcctgagcgcagac

SEQ ID NO: 501524 - DNA, 25 bp, Homo sapien
gcctggtcacgtactcctgagcgca

SEQ ID NO: 501525 - DNA, 25 bp, Homo sapien
tcacgtactcctgagcgcagacgat

SEQ ID NO: 501526 - DNA, 25 bp, Homo sapien
acgtactcctgagcgcagacgatcc

SEQ ID NO: 501527 - DNA, 25 bp, Homo sapien
tggaaattccacttaaaggcctgag

SEQ ID NO: 501528 - DNA, 25 bp, Homo sapien
tgctaacattgatcagtgggctttc

SEQ ID NO: 501529 - DNA, 25 bp, Homo sapien
gaaacagtcagttgtccaataggat

SEQ ID NO: 501530 - DNA, 25 bp, Homo sapien
tgttaacagaaagcatacagtctgg

SEQ ID NO: 501531 - DNA, 25 bp, Homo sapien
gcagtatttcgctaactttgggtgg

SEQ ID NO: 501532 - DNA, 25 bp, Homo sapien
ggcaaagggcgctagaacttggaaa

SEQ ID NO: 501533 - DNA, 25 bp, Homo sapien
tcagttgcacatccgaaattcaaag

SEQ ID NO: 501534 - DNA, 25 bp, Homo sapien
tacttttaatcacgtccttctccga

SEQ ID NO: 501535 - DNA, 25 bp, Homo sapien
tcctcggcggtttgcggagctgcta

SEQ ID NO: 501536 - DNA, 25 bp, Homo sapien
aagggtgaccgcagtccctgtgtca

SEQ ID NO: 501537 - DNA, 25 bp, Homo sapien
agataatgacgcagccgcgagagga

SEQ ID NO: 501538 - DNA, 25 bp, Homo sapien
gagcggaggcctttggcgacagtga

SEQ ID NO: 501539 - DNA, 25 bp, Homo sapien
tttaagggctatgttgaataacgca

SEQ ID NO: 501540 - DNA, 25 bp, Homo sapien
gaaggttcctgaaacatagtgacca

SEQ ID NO: 501541 - DNA, 25 bp, Homo sapien
tagactctcatataccttcacccag

SEQ ID NO: 501542 - DNA, 25 bp, Homo sapien
tagctgataaaatccacccgcctcg

SEQ ID NO: 501543 - DNA, 25 bp, Homo sapien
taactaggacctatcttctccctgc

SEQ ID NO: 501544 - DNA, 25 bp, Homo sapien
gagaactctggtcacaacagtattg

SEQ ID NO: 501545 - DNA, 25 bp, Homo sapien
tgtacatttagctggaaccccttca

SEQ ID NO: 501546 - DNA, 25 bp, Homo sapien
tgctgacctctgtaactcggcctgt

SEQ ID NO: 501547 - DNA, 25 bp, Homo sapien
tgagtcagagatagaggtagcatac

SEQ ID NO: 501548 - DNA, 25 bp, Homo sapien
ggacattccaggatccagggtctta

SEQ ID NO: 501549 - DNA, 25 bp, Homo sapien
catacgatttcagcttaggtaagca

SEQ ID NO: 501550 - DNA, 25 bp, Homo sapien
tacataactgtcaaacgtaggagca

SEQ ID NO: 501551 - DNA, 25 bp, Homo sapien
tcttggataccgagggaaaatgtgc

SEQ ID NO: 501552 - DNA, 25 bp, Homo sapien
gctgttgagataccaggcagtaaaa

SEQ ID NO: 501553 - DNA, 25 bp, Homo sapien
caaggaggaagaggtatgtcgccca

SEQ ID NO: 501554 - DNA, 25 bp, Homo sapien
tatatgacagactagatcgcctggg

SEQ ID NO: 501555 - DNA, 25 bp, Homo sapien
cgaactgggaggagcgcaccgtagc

SEQ ID NO: 501556 - DNA, 25 bp, Homo sapien
actgggaggagcgcaccgtagctca

SEQ ID NO: 501557 - DNA, 25 bp, Homo sapien
gggaggagcgcaccgtagctcagca

SEQ ID NO: 501558 - DNA, 25 bp, Homo sapien
aactgggaggagcgcaccgtagctc

SEQ ID NO: 501559 - DNA, 25 bp, Homo sapien
agaccaaatctacgtttaattagtg

SEQ ID NO: 501560 - DNA, 25 bp, Homo sapien
caaatctacgtttaattagtgtacg

SEQ ID NO: 501561 - DNA, 25 bp, Homo sapien
ttagtgtacgtgaaagtgacgagga

SEQ ID NO: 501562 - DNA, 25 bp, Homo sapien
cgtttaattagtgtacgtgaaagtg

SEQ ID NO: 501563 - DNA, 25 bp, Homo sapien
gcttttgggtatcttgtcttgctta

SEQ ID NO: 501564 - DNA, 25 bp, Homo sapien
agttttaggcaatcatatctgttga

SEQ ID NO: 501565 - DNA, 25 bp, Homo sapien
gcatcttctgtctaggaacatggta

SEQ ID NO: 501566 - DNA, 25 bp, Homo sapien
gcatattgaccctttctccctagat

SEQ ID NO: 501567 - DNA, 25 bp, Homo sapien
cagacagtagcgaactcaaggcggt

SEQ ID NO: 501568 - DNA, 25 bp, Homo sapien
tgagcggagggtacagatttccaag

SEQ ID NO: 501569 - DNA, 25 bp, Homo sapien
catagatccagcaagtagagtgacc

SEQ ID NO: 501570 - DNA, 25 bp, Homo sapien
tgggaccgcgcctgttgaactcagt

SEQ ID NO: 501571 - DNA, 25 bp, Homo sapien
taccagaaggtaagccgatgcctcc

SEQ ID NO: 501572 - DNA, 25 bp, Homo sapien
gcagaccggttaacagtagagccac

SEQ ID NO: 501573 - DNA, 25 bp, Homo sapien
gaagccctcactggtattcgacagg

SEQ ID NO: 501574 - DNA, 25 bp, Homo sapien
tatgagtaccagagaacgatgccct

SEQ ID NO: 501575 - DNA, 25 bp, Homo sapien
cactcagacccacacccaaagatgc

SEQ ID NO: 501576 - DNA, 25 bp, Homo sapien
accactcagacccacacccaaagat

SEQ ID NO: 501577 - DNA, 25 bp, Homo sapien
aaatggaaaaccactcagacccaca

SEQ ID NO: 501578 - DNA, 25 bp, Homo sapien
tggaaggggcaaaagggtatgtgga

SEQ ID NO: 501579 - DNA, 25 bp, Homo sapien
attgctcggctctgtggaccgtgta

SEQ ID NO: 501580 - DNA, 25 bp, Homo sapien
tgaaaaatgccaggtgacacgagct

SEQ ID NO: 501581 - DNA, 25 bp, Homo sapien
aactgtcagcagagattacttgggc

SEQ ID NO: 501582 - DNA, 25 bp, Homo sapien
tgtgctcaccatactgtcttagggc

SEQ ID NO: 501583 - DNA, 25 bp, Homo sapien
aactacctgggactaaaaatgcacg

SEQ ID NO: 501584 - DNA, 25 bp, Homo sapien
actacctgggactaaaaatgcacgc

SEQ ID NO: 501585 - DNA, 25 bp, Homo sapien
tctgtgccagtatgccggaatctca

SEQ ID NO: 501586 - DNA, 25 bp, Homo sapien
taatgcggcaggaaaagaactaggt

SEQ ID NO: 501587 - DNA, 25 bp, Homo sapien
caaatgtatgtctttaggccggtcc

SEQ ID NO: 501588 - DNA, 25 bp, Homo sapien
tcataaggttgacagaagcaccctc

SEQ ID NO: 501589 - DNA, 25 bp, Homo sapien
tgtaaaccagtacactatgagacct

SEQ ID NO: 501590 - DNA, 25 bp, Homo sapien
ggaggcctgatctttttctagtaga

SEQ ID NO: 501591 - DNA, 25 bp, Homo sapien
taaagtgtgggtttgctgcccttga

SEQ ID NO: 501592 - DNA, 25 bp, Homo sapien
ttctagtagacagttgccacacatt

SEQ ID NO: 501593 - DNA, 25 bp, Homo sapien
tagatgtgaatgaacagcctcagag

SEQ ID NO: 501594 - DNA, 25 bp, Homo sapien
gttttctagctaaatgagggccaag

SEQ ID NO: 501595 - DNA, 25 bp, Homo sapien
ttgttttgaacaccgactgggaaga

SEQ ID NO: 501596 - DNA, 25 bp, Homo sapien
gcttaggtaacagccaaacctggct

SEQ ID NO: 501597 - DNA, 25 bp, Homo sapien
gaaaggctggattggatgcccagaa

SEQ ID NO: 501598 - DNA, 25 bp, Homo sapien
tgaaaacagtggagctcaaggagga

SEQ ID NO: 501599 - DNA, 25 bp, Homo sapien
gaggatgattagcaaaacaaggaaa

SEQ ID NO: 501600 - DNA, 25 bp, Homo sapien
ggaaaagcaggagacatagagcaga

SEQ ID NO: 501601 - DNA, 25 bp, Homo sapien
gaaaagcctcactaggcaagtggca

SEQ ID NO: 501602 - DNA, 25 bp, Homo sapien
gggatttctagacgtctccttccag

SEQ ID NO: 501603 - DNA, 25 bp, Homo sapien
tatagacttccactgacttgcagct

SEQ ID NO: 501604 - DNA, 25 bp, Homo sapien
gcagctaatggtccttacacagcaa

SEQ ID NO: 501605 - DNA, 25 bp, Homo sapien
tcccaattttgagagttgacccaaa

SEQ ID NO: 501606 - DNA, 25 bp, Homo sapien
tggttcccaggcacagagcgttgaa

SEQ ID NO: 501607 - DNA, 25 bp, Homo sapien
caaggactcatctgtccgcctggca

SEQ ID NO: 501608 - DNA, 25 bp, Homo sapien
gactcccgctatttgcttgcctgag

SEQ ID NO: 501609 - DNA, 25 bp, Homo sapien
cacttattctggagatcatttttaa

SEQ ID NO: 501610 - DNA, 25 bp, Homo sapien
taaactgcttgtatggagtaagaaa

SEQ ID NO: 501611 - DNA, 25 bp, Homo sapien
aaagccaaaaccctcaatgcaaagg

SEQ ID NO: 501612 - DNA, 25 bp, Homo sapien
agtgctatgattgcccagacatcca

SEQ ID NO: 501613 - DNA, 25 bp, Homo sapien
gtcacgaacaggatatttcccacaa

SEQ ID NO: 501614 - DNA, 25 bp, Homo sapien
tcacgaacaggatatttcccacaaa

SEQ ID NO: 501615 - DNA, 25 bp, Homo sapien
tacatgtttctggagtgaacctcgg

SEQ ID NO: 501616 - DNA, 25 bp, Homo sapien
acaggcttgatctatgccacagaca

SEQ ID NO: 501617 - DNA, 25 bp, Homo sapien
tggaggaaactgtcatggaaatggc

SEQ ID NO: 501618 - DNA, 25 bp, Homo sapien
tgaacctcggttacttttcactgac

SEQ ID NO: 501619 - DNA, 25 bp, Homo sapien
cataaagactgcattaatgtttcaa

SEQ ID NO: 501620 - DNA, 25 bp, Homo sapien
tctggatctattaggatgacaatgt

SEQ ID NO: 501621 - DNA, 25 bp, Homo sapien
ttaagattacatattttctggccgg

SEQ ID NO: 501622 - DNA, 25 bp, Homo sapien
gatgacaatgtacccatgggaattt

SEQ ID NO: 501623 - DNA, 25 bp, Homo sapien
cagggtttcctacgaagacaggcca

SEQ ID NO: 501624 - DNA, 25 bp, Homo sapien
caggccaagctatagaggcttcagc

SEQ ID NO: 501625 - DNA, 25 bp, Homo sapien
tagccttgctgagatatgatgccag

SEQ ID NO: 501626 - DNA, 25 bp, Homo sapien
taatatacgcattacaccagtgagg

SEQ ID NO: 501627 - DNA, 25 bp, Homo sapien
tagaaaataatgagcagatacggac

SEQ ID NO: 501628 - DNA, 25 bp, Homo sapien
tgttagaaaataatgagcagatacg

SEQ ID NO: 501629 - DNA, 25 bp, Homo sapien
gttagaaaataatgagcagatacgg

SEQ ID NO: 501630 - DNA, 25 bp, Homo sapien
ctgttagaaaataatgagcagatac

SEQ ID NO: 501631 - DNA, 25 bp, Homo sapien
aaaggaagtatgattccagtacttc

SEQ ID NO: 501632 - DNA, 25 bp, Homo sapien
gattccagtacttctggtcttaact

SEQ ID NO: 501633 - DNA, 25 bp, Homo sapien
cactgcaagctgaacttcgggtaac

SEQ ID NO: 501634 - DNA, 25 bp, Homo sapien
tctgaattacactgcaagctgaact

SEQ ID NO: 501635 - DNA, 25 bp, Homo sapien
gaaactgtagacaagactgcctgca

SEQ ID NO: 501636 - DNA, 25 bp, Homo sapien
gataccatgtagtgctgcgtgctga

SEQ ID NO: 501637 - DNA, 25 bp, Homo sapien
tttgggacacataaacatacagctg

SEQ ID NO: 501638 - DNA, 25 bp, Homo sapien
taccaatgtgtgtgtcgtgctccat

SEQ ID NO: 501639 - DNA, 25 bp, Homo sapien
tctcccagcctttgagtaaaagaag

SEQ ID NO: 501640 - DNA, 25 bp, Homo sapien
cctgtgaggcagacacctgttgtgc

SEQ ID NO: 501641 - DNA, 25 bp, Homo sapien
gaagctgagctgttcaaattacaac

SEQ ID NO: 501642 - DNA, 25 bp, Homo sapien
taatggatgtaacattctcccagcc

SEQ ID NO: 501643 - DNA, 25 bp, Homo sapien
tcatgtagcaactcaacgttgagaa

SEQ ID NO: 501644 - DNA, 25 bp, Homo sapien
tgaataactgacagggtaaccctaa

SEQ ID NO: 501645 - DNA, 25 bp, Homo sapien
caggatggactgactacaaaggagc

SEQ ID NO: 501646 - DNA, 25 bp, Homo sapien
caaaggagctcataagaccttacgt

SEQ ID NO: 501647 - DNA, 25 bp, Homo sapien
caacagtgatctttgcagaccaagc

SEQ ID NO: 501648 - DNA, 25 bp, Homo sapien
tcaccactagtgcagcagcaagagt

SEQ ID NO: 501649 - DNA, 25 bp, Homo sapien
gcacaggaagcacctctatgagggt

SEQ ID NO: 501650 - DNA, 25 bp, Homo sapien
gacctaggcaaagtctctccgctga

SEQ ID NO: 501651 - DNA, 25 bp, Homo sapien
tcctctggtcttcttactgcttggg

SEQ ID NO: 501652 - DNA, 25 bp, Homo sapien
cacgtcctctggtcttcttactgct

SEQ ID NO: 501653 - DNA, 25 bp, Homo sapien
ttccacgtcctctggtcttcttact

SEQ ID NO: 501654 - DNA, 25 bp, Homo sapien
tcttcttactgcttggggttccacc

SEQ ID NO: 501655 - DNA, 25 bp, Homo sapien
gggcctccacgaagcgaggaatctg

SEQ ID NO: 501656 - DNA, 25 bp, Homo sapien
tagaagcagcctaatgtcgtagacc

SEQ ID NO: 501657 - DNA, 25 bp, Homo sapien
gataacactgattgcaccttctcca

SEQ ID NO: 501658 - DNA, 25 bp, Homo sapien
gaggaatctgactctgaacagaaga

SEQ ID NO: 501659 - DNA, 25 bp, Homo sapien
gggttcttaccaacagtagcagcgt

SEQ ID NO: 501660 - DNA, 25 bp, Homo sapien
caatctacagtgtactgggacagtc

SEQ ID NO: 501661 - DNA, 25 bp, Homo sapien
ccatgagggtaagtaaagacaggac

SEQ ID NO: 501662 - DNA, 25 bp, Homo sapien
tcatactggtatgctgagaatctgc

SEQ ID NO: 501663 - DNA, 25 bp, Homo sapien
tgtggtaagcctttaaacactgtct

SEQ ID NO: 501664 - DNA, 25 bp, Homo sapien
ttgtggtaagcctttaaacactgtc

SEQ ID NO: 501665 - DNA, 25 bp, Homo sapien
tttcaatcattaatattgttattcc

SEQ ID NO: 501666 - DNA, 25 bp, Homo sapien
tattctcacaacacatagaagacac

SEQ ID NO: 501667 - DNA, 25 bp, Homo sapien
gagtaacagtccataaattaactga

SEQ ID NO: 501668 - DNA, 25 bp, Homo sapien
catagaagacactacttttgatatt

SEQ ID NO: 501669 - DNA, 25 bp, Homo sapien
tccataaattaactgatggatactc

SEQ ID NO: 501670 - DNA, 25 bp, Homo sapien
gaggtggactcttcgatttcaagaa

SEQ ID NO: 501671 - DNA, 25 bp, Homo sapien
tgtttccatgctgggctacataaga

SEQ ID NO: 501672 - DNA, 25 bp, Homo sapien
gtataagactactcccaattcattg

SEQ ID NO: 501673 - DNA, 25 bp, Homo sapien
caagtaacatcaagcctgctactta

SEQ ID NO: 501674 - DNA, 25 bp, Homo sapien
gaaagctaacactactgaatttcct

SEQ ID NO: 501675 - DNA, 25 bp, Homo sapien
cacactaattacaagtagcacatga

SEQ ID NO: 501676 - DNA, 25 bp, Homo sapien
gatagcatatatgacaacttcacac

SEQ ID NO: 501677 - DNA, 25 bp, Homo sapien
agcacatgaaacattaagtcctgaa

SEQ ID NO: 501678 - DNA, 25 bp, Homo sapien
ccttggtttaacatcaaaggatcaa

SEQ ID NO: 501679 - DNA, 25 bp, Homo sapien
cgagtgttcttgaatgaatcataca

SEQ ID NO: 501680 - DNA, 25 bp, Homo sapien
catcaaaggatcaagtttctcccaa

SEQ ID NO: 501681 - DNA, 25 bp, Homo sapien
taagacatctttttgtgcactggcc

SEQ ID NO: 501682 - DNA, 25 bp, Homo sapien
cctatgaataccacaaattttggaa

SEQ ID NO: 501683 - DNA, 25 bp, Homo sapien
tatgaataccacaaattttggaaaa

SEQ ID NO: 501684 - DNA, 25 bp, Homo sapien
gcctatgaataccacaaattttgga

SEQ ID NO: 501685 - DNA, 25 bp, Homo sapien
aagcctatgaataccacaaattttg

SEQ ID NO: 501686 - DNA, 25 bp, Homo sapien
tatgaaatgtagctggaaattccga

SEQ ID NO: 501687 - DNA, 25 bp, Homo sapien
tagtaagaccgtaagagaataccac

SEQ ID NO: 501688 - DNA, 25 bp, Homo sapien
ccatcagacacgttttactggagaa

SEQ ID NO: 501689 - DNA, 25 bp, Homo sapien
aaaccactgccattccttggagaca

SEQ ID NO: 501690 - DNA, 25 bp, Homo sapien
cattctaatctacaaagctcatgaa

SEQ ID NO: 501691 - DNA, 25 bp, Homo sapien
gatgagcatcattaccattctaatc

SEQ ID NO: 501692 - DNA, 25 bp, Homo sapien
ttagctaaagtcacaaacacatttc

SEQ ID NO: 501693 - DNA, 25 bp, Homo sapien
aaagtataaaggcataccactgact

SEQ ID NO: 501694 - DNA, 25 bp, Homo sapien
taatatctacgacgcttattagggc

SEQ ID NO: 501695 - DNA, 25 bp, Homo sapien
gcttattagggccttcaaagttgcc

SEQ ID NO: 501696 - DNA, 25 bp, Homo sapien
tactccccataggtgaacccatctg

SEQ ID NO: 501697 - DNA, 25 bp, Homo sapien
catctgagatggtggtccttgagga

SEQ ID NO: 501698 - DNA, 25 bp, Homo sapien
ccatttggaacacgccaaatataag

SEQ ID NO: 501699 - DNA, 25 bp, Homo sapien
gaagtccatttggaacacgccaaat

SEQ ID NO: 501700 - DNA, 25 bp, Homo sapien
gtccatttggaacacgccaaatata

SEQ ID NO: 501701 - DNA, 25 bp, Homo sapien
tttggaacacgccaaatataagtga

SEQ ID NO: 501702 - DNA, 25 bp, Homo sapien
ttactgaatataatcaaaataatgt

SEQ ID NO: 501703 - DNA, 25 bp, Homo sapien
tactgaatataatcaaaataatgtt

SEQ ID NO: 501704 - DNA, 25 bp, Homo sapien
taatcaaaataatgtttatgataca

SEQ ID NO: 501705 - DNA, 25 bp, Homo sapien
caaaataatgtttatgatacattac

SEQ ID NO: 501706 - DNA, 25 bp, Homo sapien
ggtatagttgctctgttgttcatat

SEQ ID NO: 501707 - DNA, 25 bp, Homo sapien
ccatatttgcggctccttctggtcc

SEQ ID NO: 501708 - DNA, 25 bp, Homo sapien
agttcccatatttgcggctccttct

SEQ ID NO: 501709 - DNA, 25 bp, Homo sapien
aggtatagttgctctgttgttcata

SEQ ID NO: 501710 - DNA, 25 bp, Homo sapien
cttggttaccagcaggggctgggct

SEQ ID NO: 501711 - DNA, 25 bp, Homo sapien
ccagcaggggctgggctaaacgcat

SEQ ID NO: 501712 - DNA, 25 bp, Homo sapien
taccagcaggggctgggctaaacgc

SEQ ID NO: 501713 - DNA, 25 bp, Homo sapien
gttaccagcaggggctgggctaaac

SEQ ID NO: 501714 - DNA, 25 bp, Homo sapien
aattattttcgctccttaagaatgc

SEQ ID NO: 501715 - DNA, 25 bp, Homo sapien
tatgcaatctatataccaagaccat

SEQ ID NO: 501716 - DNA, 25 bp, Homo sapien
agagctgtcctatcttagtttagta

SEQ ID NO: 501717 - DNA, 25 bp, Homo sapien
gcgatatgcgttatctactctgtaa

SEQ ID NO: 501718 - DNA, 25 bp, Homo sapien
aatgcagctgaaatctctatatggc

SEQ ID NO: 501719 - DNA, 25 bp, Homo sapien
ccaaatgctcttgccgataaacaga

SEQ ID NO: 501720 - DNA, 25 bp, Homo sapien
gaatatttccgctccctcagtatag

SEQ ID NO: 501721 - DNA, 25 bp, Homo sapien
tatatggctgagtccttaccagccc

SEQ ID NO: 501722 - DNA, 25 bp, Homo sapien
ccatgtttattgctccacggggacc

SEQ ID NO: 501723 - DNA, 25 bp, Homo sapien
tgtttattgctccacggggacccat

SEQ ID NO: 501724 - DNA, 25 bp, Homo sapien
tcccatgtttattgctccacgggga

SEQ ID NO: 501725 - DNA, 25 bp, Homo sapien
tttattgctccacggggacccatat

SEQ ID NO: 501726 - DNA, 25 bp, Homo sapien
caacctatcgatcttatgactttac

SEQ ID NO: 501727 - DNA, 25 bp, Homo sapien
gcttaatgcatccagtttatattgc

SEQ ID NO: 501728 - DNA, 25 bp, Homo sapien
taagtaaacatagttgtcacagtca

SEQ ID NO: 501729 - DNA, 25 bp, Homo sapien
aagaaacttcagtctcccaggctta

SEQ ID NO: 501730 - DNA, 25 bp, Homo sapien
aatcctacctcctcaggaggctgcg

SEQ ID NO: 501731 - DNA, 25 bp, Homo sapien
tcctacctcctcaggaggctgcggt

SEQ ID NO: 501732 - DNA, 25 bp, Homo sapien
gcaatgaaccaagattgcactattg

SEQ ID NO: 501733 - DNA, 25 bp, Homo sapien
tacctcctcaggaggctgcggtagg

SEQ ID NO: 501734 - DNA, 25 bp, Homo sapien
caatatctaaccactaatatagggt

SEQ ID NO: 501735 - DNA, 25 bp, Homo sapien
ccagcaccatcgagtaaaatacatg

SEQ ID NO: 501736 - DNA, 25 bp, Homo sapien
gttgttcagaagctggttacacacc

SEQ ID NO: 501737 - DNA, 25 bp, Homo sapien
taactattggcctatgattcactgg

SEQ ID NO: 501738 - DNA, 25 bp, Homo sapien
cacattgccaggtgactagaagcca

SEQ ID NO: 501739 - DNA, 25 bp, Homo sapien
tctatgaaaagcttggcgacacagc

SEQ ID NO: 501740 - DNA, 25 bp, Homo sapien
tgtagtatgaccacctaaacttggg

SEQ ID NO: 501741 - DNA, 25 bp, Homo sapien
gcaaaagcaaacgtgggaagccaac

SEQ ID NO: 501742 - DNA, 25 bp, Homo sapien
tacatagggtggctttctaaccgaa

SEQ ID NO: 501743 - DNA, 25 bp, Homo sapien
tagcacacatcaagggacagaagga

SEQ ID NO: 501744 - DNA, 25 bp, Homo sapien
gagattttaagagacgggcctctca

SEQ ID NO: 501745 - DNA, 25 bp, Homo sapien
aagcctcggtcaggtaattgagtga

SEQ ID NO: 501746 - DNA, 25 bp, Homo sapien
tcaaggtcacagggcgctatgatcg

SEQ ID NO: 501747 - DNA, 25 bp, Homo sapien
caaggtcacagggcgctatgatcgt

SEQ ID NO: 501748 - DNA, 25 bp, Homo sapien
aggtcacagggcgctatgatcgtgc

SEQ ID NO: 501749 - DNA, 25 bp, Homo sapien
ggtcacagggcgctatgatcgtgcc

SEQ ID NO: 501750 - DNA, 25 bp, Homo sapien
aaattctacggtttcccacacatca

SEQ ID NO: 501751 - DNA, 25 bp, Homo sapien
gaagaaacacatgacctgagtctga

SEQ ID NO: 501752 - DNA, 25 bp, Homo sapien
aagtgtcctctgatgaagtgtgtac

SEQ ID NO: 501753 - DNA, 25 bp, Homo sapien
tcctggttcacctaagaaagcccat

SEQ ID NO: 501754 - DNA, 25 bp, Homo sapien
ctggatactaatttggattcctcag

SEQ ID NO: 501755 - DNA, 25 bp, Homo sapien
ggaatatgaggtactgtgctcagtg

SEQ ID NO: 501756 - DNA, 25 bp, Homo sapien
tactaatttggattcctcaggaatc

SEQ ID NO: 501757 - DNA, 25 bp, Homo sapien
tgaggtactgtgctcagtgagcctt

SEQ ID NO: 501758 - DNA, 25 bp, Homo sapien
atgtgcttgttgtctcagccactca

SEQ ID NO: 501759 - DNA, 25 bp, Homo sapien
ggaaaaacactgttctgctgggcac

SEQ ID NO: 501760 - DNA, 25 bp, Homo sapien
cacagtggcatgtgcttgttgtctc

SEQ ID NO: 501761 - DNA, 25 bp, Homo sapien
attggaaaaacactgttctgctggg

SEQ ID NO: 501762 - DNA, 25 bp, Homo sapien
cctgttctctgtgtcggatcatttc

SEQ ID NO: 501763 - DNA, 25 bp, Homo sapien
aaagccctcttgctgtcgcctcagt

SEQ ID NO: 501764 - DNA, 25 bp, Homo sapien
gtagtttggcttaaagccctcttgc

SEQ ID NO: 501765 - DNA, 25 bp, Homo sapien
atttcttcctcacgccgccgatgct

SEQ ID NO: 501766 - DNA, 25 bp, Homo sapien
aacttaatgcggacatccaatcgac

SEQ ID NO: 501767 - DNA, 25 bp, Homo sapien
cttaatgcggacatccaatcgacat

SEQ ID NO: 501768 - DNA, 25 bp, Homo sapien
aaacttaatgcggacatccaatcga

SEQ ID NO: 501769 - DNA, 25 bp, Homo sapien
taatgcggacatccaatcgacatag

SEQ ID NO: 501770 - DNA, 25 bp, Homo sapien
gtatttgcttccgtttttgcaactc

SEQ ID NO: 501771 - DNA, 25 bp, Homo sapien
atttgcttccgtttttgcaactctt

SEQ ID NO: 501772 - DNA, 25 bp, Homo sapien
tttgcttccgtttttgcaactcttg

SEQ ID NO: 501773 - DNA, 25 bp, Homo sapien
tatttgcttccgtttttgcaactct

SEQ ID NO: 501774 - DNA, 25 bp, Homo sapien
ttttggtatatgagacagggcccag

SEQ ID NO: 501775 - DNA, 25 bp, Homo sapien
cagtatttaagtaatggctcacacc

SEQ ID NO: 501776 - DNA, 25 bp, Homo sapien
tacatgattcaactgggatgccagg

SEQ ID NO: 501777 - DNA, 25 bp, Homo sapien
ccaggtagttctcataataggccca

SEQ ID NO: 501778 - DNA, 25 bp, Homo sapien
tctaaactcctaaatggcactttac

SEQ ID NO: 501779 - DNA, 25 bp, Homo sapien
cacacctaatatgttgagttccaac

SEQ ID NO: 501780 - DNA, 25 bp, Homo sapien
ggcactttacacagtagtacatgaa

SEQ ID NO: 501781 - DNA, 25 bp, Homo sapien
aaaaatcataccacatgtacatgaa

SEQ ID NO: 501782 - DNA, 25 bp, Homo sapien
aaattcaaatgtcccaggttgagca

SEQ ID NO: 501783 - DNA, 25 bp, Homo sapien
tactcaaattcaaatgtcccaggtt

SEQ ID NO: 501784 - DNA, 25 bp, Homo sapien
catcgagatgcatactcaaattcaa

SEQ ID NO: 501785 - DNA, 25 bp, Homo sapien
gatgcatactcaaattcaaatgtcc

SEQ ID NO: 501786 - DNA, 25 bp, Homo sapien
agcttctctggcaagccatcttcat

SEQ ID NO: 501787 - DNA, 25 bp, Homo sapien
tctctggcaagccatcttcatcatc

SEQ ID NO: 501788 - DNA, 25 bp, Homo sapien
cttctctggcaagccatcttcatca

SEQ ID NO: 501789 - DNA, 25 bp, Homo sapien
atcaaactgctccatgggttccaca

SEQ ID NO: 501790 - DNA, 25 bp, Homo sapien
taaaactggatccaattagcactga

SEQ ID NO: 501791 - DNA, 25 bp, Homo sapien
gcactgatagtatatcaagggttaa

SEQ ID NO: 501792 - DNA, 25 bp, Homo sapien
ggtgcctactactacactcagcttg

SEQ ID NO: 501793 - DNA, 25 bp, Homo sapien
cagcaggttttcctagataactcat

SEQ ID NO: 501794 - DNA, 25 bp, Homo sapien
tctgaagaaagagcattctctaagg

SEQ ID NO: 501795 - DNA, 25 bp, Homo sapien
ggaaagagaataagagcacaatctc

SEQ ID NO: 501796 - DNA, 25 bp, Homo sapien
cctgggaggcacactgagacattgc

SEQ ID NO: 501797 - DNA, 25 bp, Homo sapien
gaaaagcaagatctatgacaatctg

SEQ ID NO: 501798 - DNA, 25 bp, Homo sapien
tgttagcaagaatgccccatcacca

SEQ ID NO: 501799 - DNA, 25 bp, Homo sapien
gaatccgtagaggtctgctcttgag

SEQ ID NO: 501800 - DNA, 25 bp, Homo sapien
gatcatccacaaccacaacagcttt

SEQ ID NO: 501801 - DNA, 25 bp, Homo sapien
tccatgtgtagcgaagcgaatccgt

SEQ ID NO: 501802 - DNA, 25 bp, Homo sapien
caccccaaaacgctgcccgcccctg

SEQ ID NO: 501803 - DNA, 25 bp, Homo sapien
ctggacagggtgcaccatgcccgat

SEQ ID NO: 501804 - DNA, 25 bp, Homo sapien
accgcaaagcacgatcggcgcacgg

SEQ ID NO: 501805 - DNA, 25 bp, Homo sapien
acgatcggcgcacggcagaaaacgg

SEQ ID NO: 501806 - DNA, 25 bp, Homo sapien
atgcccgatccagcgcagggcagca

SEQ ID NO: 501807 - DNA, 25 bp, Homo sapien
gtgaactcgaaaccaaaggcgccga

SEQ ID NO: 501808 - DNA, 25 bp, Homo sapien
tgaactcgaaaccaaaggcgccgag

SEQ ID NO: 501809 - DNA, 25 bp, Homo sapien
cgtgaactcgaaaccaaaggcgccg

SEQ ID NO: 501810 - DNA, 25 bp, Homo sapien
ctcgcccggcttgaggaaactcttg

SEQ ID NO: 501811 - DNA, 25 bp, Homo sapien
tgatgaagacttcgctgggctcgcc

SEQ ID NO: 501812 - DNA, 25 bp, Homo sapien
gccatagcgttcgaagagcctcttg

SEQ ID NO: 501813 - DNA, 25 bp, Homo sapien
ctcttgatgtcgatagtgaacccca

SEQ ID NO: 501814 - DNA, 25 bp, Homo sapien
tcgcccaccgcggactccagggcgc

SEQ ID NO: 501815 - DNA, 25 bp, Homo sapien
gggccgggtttttctcaatgcgcac

SEQ ID NO: 501816 - DNA, 25 bp, Homo sapien
gtttttctcaatgcgcacttgcttc

SEQ ID NO: 501817 - DNA, 25 bp, Homo sapien
cgggtttttctcaatgcgcacttgc

SEQ ID NO: 501818 - DNA, 25 bp, Homo sapien
agttcgcctcggacaccggatacag

SEQ ID NO: 501819 - DNA, 25 bp, Homo sapien
ttcgcctcggacaccggatacaggc

SEQ ID NO: 501820 - DNA, 25 bp, Homo sapien
cttactgagttcgcctcggacaccg

SEQ ID NO: 501821 - DNA, 25 bp, Homo sapien
ctgagttcgcctcggacaccggata

SEQ ID NO: 501822 - DNA, 25 bp, Homo sapien
tagatttatagacagtgtgtctata

SEQ ID NO: 501823 - DNA, 25 bp, Homo sapien
ctagatttatagacagtgtgtctat

SEQ ID NO: 501824 - DNA, 25 bp, Homo sapien
agatttatagacagtgtgtctatat

SEQ ID NO: 501825 - DNA, 25 bp, Homo sapien
gatttatagacagtgtgtctatata

SEQ ID NO: 501826 - DNA, 25 bp, Homo sapien
aaatatcgacaatcaagagaccgct

SEQ ID NO: 501827 - DNA, 25 bp, Homo sapien
tcaagagaccgctaggtaggcgagt

SEQ ID NO: 501828 - DNA, 25 bp, Homo sapien
cctatgccaacaaaatatcgacaat

SEQ ID NO: 501829 - DNA, 25 bp, Homo sapien
cgctaggtaggcgagtcggcaaccc

SEQ ID NO: 501830 - DNA, 25 bp, Homo sapien
gctgcacattcaaaatggcgctgcc

SEQ ID NO: 501831 - DNA, 25 bp, Homo sapien
cagttagaagaagagacgccggtgc

SEQ ID NO: 501832 - DNA, 25 bp, Homo sapien
gcgtgcaatcgacaaatctcctagg

SEQ ID NO: 501833 - DNA, 25 bp, Homo sapien
tctcctaggagggtgaagacgtcct

SEQ ID NO: 501834 - DNA, 25 bp, Homo sapien
gggaactcagcataacccgtttgtc

SEQ ID NO: 501835 - DNA, 25 bp, Homo sapien
tgacagcactctggcttgaatgaca

SEQ ID NO: 501836 - DNA, 25 bp, Homo sapien
tcaactaggattgcgtgacagcact

SEQ ID NO: 501837 - DNA, 25 bp, Homo sapien
atctggcttctgaggcactcctgcc

SEQ ID NO: 501838 - DNA, 25 bp, Homo sapien
taaagaatgtatctaccaaacaccc

SEQ ID NO: 501839 - DNA, 25 bp, Homo sapien
tgtctgtcagccactctttcaagta

SEQ ID NO: 501840 - DNA, 25 bp, Homo sapien
gaagtgacaagattctcctggttaa

SEQ ID NO: 501841 - DNA, 25 bp, Homo sapien
gaaaactgtcaagctcaaagtagca

SEQ ID NO: 501842 - DNA, 25 bp, Homo sapien
aaaagtcaggttggtggccaggcac

SEQ ID NO: 501843 - DNA, 25 bp, Homo sapien
gccctggagttcaaagccaaactgg

SEQ ID NO: 501844 - DNA, 25 bp, Homo sapien
caaagccaaactgggcaatatagca

SEQ ID NO: 501845 - DNA, 25 bp, Homo sapien
gaggattgctacagctcaggaagtt

SEQ ID NO: 501846 - DNA, 25 bp, Homo sapien
gctcatatgagatgccccgcagggt

SEQ ID NO: 501847 - DNA, 25 bp, Homo sapien
ttctggaagtcatagtaaggcaccg

SEQ ID NO: 501848 - DNA, 25 bp, Homo sapien
tgtgagcggttatgcagcagcacgc

SEQ ID NO: 501849 - DNA, 25 bp, Homo sapien
gatgcctccttggtgatgaaacggt

SEQ ID NO: 501850 - DNA, 25 bp, Homo sapien
ggtgccggagcacgcacttggcccc

SEQ ID NO: 501851 - DNA, 25 bp, Homo sapien
cccgggtgccggagcacgcacttgg

SEQ ID NO: 501852 - DNA, 25 bp, Homo sapien
tgccggagcacgcacttggccccat

SEQ ID NO: 501853 - DNA, 25 bp, Homo sapien
cgggtgccggagcacgcacttggcc

SEQ ID NO: 501854 - DNA, 25 bp, Homo sapien
gtgcccagggctcagccaggcatct

SEQ ID NO: 501855 - DNA, 25 bp, Homo sapien
ggatctctgtgcccagggctcagcc

SEQ ID NO: 501856 - DNA, 25 bp, Homo sapien
cagggctcagccaggcatctggccg

SEQ ID NO: 501857 - DNA, 25 bp, Homo sapien
gcccagggctcagccaggcatctgg

SEQ ID NO: 501858 - DNA, 25 bp, Homo sapien
tatattcccgaactaatttcacacc

SEQ ID NO: 501859 - DNA, 25 bp, Homo sapien
caaagattctattaattggctcaaa

SEQ ID NO: 501860 - DNA, 25 bp, Homo sapien
aacaggagtgaggtgttaagtctta

SEQ ID NO: 501861 - DNA, 25 bp, Homo sapien
ggattaatatgctcttcactctaaa

SEQ ID NO: 501862 - DNA, 25 bp, Homo sapien
gtaagtcaaccttatagagcagtgg

SEQ ID NO: 501863 - DNA, 25 bp, Homo sapien
aatcgaatgctaaccctgatctgac

SEQ ID NO: 501864 - DNA, 25 bp, Homo sapien
ggaacgtcagagctttggagacaaa

SEQ ID NO: 501865 - DNA, 25 bp, Homo sapien
gggttcccagtcctatgaaaatcga

SEQ ID NO: 501866 - DNA, 25 bp, Homo sapien
tcaaatttcaagcatgccatctctt

SEQ ID NO: 501867 - DNA, 25 bp, Homo sapien
agaaaaaagcccataacacttgaag

SEQ ID NO: 501868 - DNA, 25 bp, Homo sapien
cctagtcactgctcatatgccattt

SEQ ID NO: 501869 - DNA, 25 bp, Homo sapien
taattttcattggtgtatctcaaat

SEQ ID NO: 501870 - DNA, 25 bp, Homo sapien
tagtactgactattgcaggacagat

SEQ ID NO: 501871 - DNA, 25 bp, Homo sapien
actctgtagaggagacttacaacac

SEQ ID NO: 501872 - DNA, 25 bp, Homo sapien
gaactgctgcaagttactctgtaga

SEQ ID NO: 501873 - DNA, 25 bp, Homo sapien
catacttattgctaaggaactgctg

SEQ ID NO: 501874 - DNA, 25 bp, Homo sapien
cacgtacctggatctgcggaaagca

SEQ ID NO: 501875 - DNA, 25 bp, Homo sapien
ggatcagtaatgtatccgtgccaca

SEQ ID NO: 501876 - DNA, 25 bp, Homo sapien
ggaaagcacaactggtacaatggag

SEQ ID NO: 501877 - DNA, 25 bp, Homo sapien
tcagctatggttgacgtggaagaag

SEQ ID NO: 501878 - DNA, 25 bp, Homo sapien
ttcgttaatacaactttggcagcaa

SEQ ID NO: 501879 - DNA, 25 bp, Homo sapien
tcttactaggcatgtactctccaca

SEQ ID NO: 501880 - DNA, 25 bp, Homo sapien
agttcattattagaccattggccaa

SEQ ID NO: 501881 - DNA, 25 bp, Homo sapien
ggccaatctgtacttattaaagcaa

SEQ ID NO: 501882 - DNA, 25 bp, Homo sapien
caatcaccaggatgttgtttccagt

SEQ ID NO: 501883 - DNA, 25 bp, Homo sapien
tttagaagattttgacatgacccgc

SEQ ID NO: 501884 - DNA, 25 bp, Homo sapien
taagtaaagttcactgccctagaac

SEQ ID NO: 501885 - DNA, 25 bp, Homo sapien
cctagaacatttgtggagggagcta

SEQ ID NO: 501886 - DNA, 25 bp, Homo sapien
catgtgttcttgtaccgggatctgc

SEQ ID NO: 501887 - DNA, 25 bp, Homo sapien
atcccataagatagttctaacatat

SEQ ID NO: 501888 - DNA, 25 bp, Homo sapien
cccataagatagttctaacatatcc

SEQ ID NO: 501889 - DNA, 25 bp, Homo sapien
ccataagatagttctaacatatcct

SEQ ID NO: 501890 - DNA, 25 bp, Homo sapien
tcccataagatagttctaacatatc

SEQ ID NO: 501891 - DNA, 25 bp, Homo sapien
cagaacacgtgcattatgtagatga

SEQ ID NO: 501892 - DNA, 25 bp, Homo sapien
tatacatccagaacacgtgcattat

SEQ ID NO: 501893 - DNA, 25 bp, Homo sapien
tagcctaaacaacaacttaggtata

SEQ ID NO: 501894 - DNA, 25 bp, Homo sapien
actgttagcctaaacaacaacttag

SEQ ID NO: 501895 - DNA, 25 bp, Homo sapien
tataaaattcttggaaggatttgct

SEQ ID NO: 501896 - DNA, 25 bp, Homo sapien
aatttactacaaattgtacatcttg

SEQ ID NO: 501897 - DNA, 25 bp, Homo sapien
ctctgctaatttactacaaattgta

SEQ ID NO: 501898 - DNA, 25 bp, Homo sapien
tttcacagggagacaaacaagatgt

SEQ ID NO: 501899 - DNA, 25 bp, Homo sapien
attagccttctttgtagatgcatct

SEQ ID NO: 501900 - DNA, 25 bp, Homo sapien
actggaagaatgacattagccttct

SEQ ID NO: 501901 - DNA, 25 bp, Homo sapien
tggaagaatgacattagccttcttt

SEQ ID NO: 501902 - DNA, 25 bp, Homo sapien
ctggaagaatgacattagccttctt

SEQ ID NO: 501903 - DNA, 25 bp, Homo sapien
gcagcaaatccacttttggctttat

SEQ ID NO: 501904 - DNA, 25 bp, Homo sapien
gaaatcaagtataacttttagatgc

SEQ ID NO: 501905 - DNA, 25 bp, Homo sapien
tagatgcagcaaatccacttttggc

SEQ ID NO: 501906 - DNA, 25 bp, Homo sapien
caagtataacttttagatgcagcaa

SEQ ID NO: 501907 - DNA, 25 bp, Homo sapien
ttgagtacgtttatgagagaaggaa

SEQ ID NO: 501908 - DNA, 25 bp, Homo sapien
tatgcttcgtgtgttttgagtacgt

SEQ ID NO: 501909 - DNA, 25 bp, Homo sapien
tgtgttttgagtacgtttatgagag

SEQ ID NO: 501910 - DNA, 25 bp, Homo sapien
tacatattatgcttcgtgtgttttg

SEQ ID NO: 501911 - DNA, 25 bp, Homo sapien
tgttgttgggctgtaggctggaaat

SEQ ID NO: 501912 - DNA, 25 bp, Homo sapien
gttgttgttgggctgtaggctggaa

SEQ ID NO: 501913 - DNA, 25 bp, Homo sapien
tagctggtttagtaagttgttgttg

SEQ ID NO: 501914 - DNA, 25 bp, Homo sapien
caagtgattttagctggtttagtaa

SEQ ID NO: 501915 - DNA, 25 bp, Homo sapien
aaatgaagctgactgggagatccaa

SEQ ID NO: 501916 - DNA, 25 bp, Homo sapien
atgaagctgactgggagatccaaga

SEQ ID NO: 501917 - DNA, 25 bp, Homo sapien
ggaaatgaagctgactgggagatcc

SEQ ID NO: 501918 - DNA, 25 bp, Homo sapien
gaagctgactgggagatccaagaat

SEQ ID NO: 501919 - DNA, 25 bp, Homo sapien
ccactgcgcccggactagttttaat

SEQ ID NO: 501920 - DNA, 25 bp, Homo sapien
caacctcagcatcctgagatcaagc

SEQ ID NO: 501921 - DNA, 25 bp, Homo sapien
gctgtgactgcaggagcatgccacc

SEQ ID NO: 501922 - DNA, 25 bp, Homo sapien
ctcagcatcctgagatcaagcaatt

SEQ ID NO: 501923 - DNA, 25 bp, Homo sapien
tctgaaataagtctcctgccacatt

SEQ ID NO: 501924 - DNA, 25 bp, Homo sapien
caggactatgatgagttgcaaattc

SEQ ID NO: 501925 - DNA, 25 bp, Homo sapien
tctccattctgaaataagtctcctg

SEQ ID NO: 501926 - DNA, 25 bp, Homo sapien
gactatgatgagttgcaaattctcc

SEQ ID NO: 501927 - DNA, 25 bp, Homo sapien
ttgactgaagtcctttagcgacatc

SEQ ID NO: 501928 - DNA, 25 bp, Homo sapien
aagtcctttagcgacatctcccaag

SEQ ID NO: 501929 - DNA, 25 bp, Homo sapien
ttacttgactgaagtcctttagcga

SEQ ID NO: 501930 - DNA, 25 bp, Homo sapien
tgaagtcctttagcgacatctccca

SEQ ID NO: 501931 - DNA, 25 bp, Homo sapien
taataattatgttcacatcttgccc

SEQ ID NO: 501932 - DNA, 25 bp, Homo sapien
tgtaataattatgttcacatcttgc

SEQ ID NO: 501933 - DNA, 25 bp, Homo sapien
taattatgttcacatcttgcccagc

SEQ ID NO: 501934 - DNA, 25 bp, Homo sapien
ataattatgttcacatcttgcccag

SEQ ID NO: 501935 - DNA, 25 bp, Homo sapien
gtccccattcgataaaacaggaaga

SEQ ID NO: 501936 - DNA, 25 bp, Homo sapien
caggaagtccccattcgataaaaca

SEQ ID NO: 501937 - DNA, 25 bp, Homo sapien
gaagtccccattcgataaaacagga

SEQ ID NO: 501938 - DNA, 25 bp, Homo sapien
aggaagtccccattcgataaaacag

SEQ ID NO: 501939 - DNA, 25 bp, Homo sapien
tatgaagtttctttgatcagctatt

SEQ ID NO: 501940 - DNA, 25 bp, Homo sapien
atgaagtttctttgatcagctattg

SEQ ID NO: 501941 - DNA, 25 bp, Homo sapien
gactaaaggacaagctggatgacca

SEQ ID NO: 501942 - DNA, 25 bp, Homo sapien
aaatgaatcccctatgtccatgaga

SEQ ID NO: 501943 - DNA, 25 bp, Homo sapien
gtgagttcctagatctactgactaa

SEQ ID NO: 501944 - DNA, 25 bp, Homo sapien
gaaggaggttgtatagattcaataa

SEQ ID NO: 501945 - DNA, 25 bp, Homo sapien
actgagattccaggtgtgagtcacc

SEQ ID NO: 501946 - DNA, 25 bp, Homo sapien
aagtactgagattccaggtgtgagt

SEQ ID NO: 501947 - DNA, 25 bp, Homo sapien
gtactgagattccaggtgtgagtca

SEQ ID NO: 501948 - DNA, 25 bp, Homo sapien
atgcccagcccatttttgtattttt

SEQ ID NO: 501949 - DNA, 25 bp, Homo sapien
cacgacataggcttgaaggtgattc

SEQ ID NO: 501950 - DNA, 25 bp, Homo sapien
gcctcacgacataggcttgaaggtg

SEQ ID NO: 501951 - DNA, 25 bp, Homo sapien
ctgccaaagcctcacgacataggct

SEQ ID NO: 501952 - DNA, 25 bp, Homo sapien
aaagcctcacgacataggcttgaag

SEQ ID NO: 501953 - DNA, 25 bp, Homo sapien
agttgcctcaagaagttgccctggg

SEQ ID NO: 501954 - DNA, 25 bp, Homo sapien
agatccgccattaaactcgcccaga

SEQ ID NO: 501955 - DNA, 25 bp, Homo sapien
agcagtcgacgacagggccccagat

SEQ ID NO: 501956 - DNA, 25 bp, Homo sapien
tcagcagcaaagagtaaaagccgcg

SEQ ID NO: 501957 - DNA, 25 bp, Homo sapien
tgcggctgcgcggaacgaacaagcc

SEQ ID NO: 501958 - DNA, 25 bp, Homo sapien
cagcggggataagcgtcacccggtt

SEQ ID NO: 501959 - DNA, 25 bp, Homo sapien
ggcgacaagcacaactccgcgaggt

SEQ ID NO: 501960 - DNA, 25 bp, Homo sapien
aagcccaccccgcttcggcgacaag

SEQ ID NO: 501961 - DNA, 25 bp, Homo sapien
aggaggcggagaagcaggggacggc

SEQ ID NO: 501962 - DNA, 25 bp, Homo sapien
gctccgacggccgtccttcagggcg

SEQ ID NO: 501963 - DNA, 25 bp, Homo sapien
cacgcccattggctccgacggccgt

SEQ ID NO: 501964 - DNA, 25 bp, Homo sapien
cctccgtgcgctcgttggctggcga

SEQ ID NO: 501965 - DNA, 25 bp, Homo sapien
caggaggagacgacgtcctccattt

SEQ ID NO: 501966 - DNA, 25 bp, Homo sapien
aggaggagacgacgtcctccatttt

SEQ ID NO: 501967 - DNA, 25 bp, Homo sapien
ggaggagacgacgtcctccattttg

SEQ ID NO: 501968 - DNA, 25 bp, Homo sapien
agcagaatcagggacagatggcgcc

SEQ ID NO: 501969 - DNA, 25 bp, Homo sapien
agggacagatggcgcccggtgaggg

SEQ ID NO: 501970 - DNA, 25 bp, Homo sapien
cagaatcagggacagatggcgcccg

SEQ ID NO: 501971 - DNA, 25 bp, Homo sapien
ggagcagaatcagggacagatggcg

SEQ ID NO: 501972 - DNA, 25 bp, Homo sapien
ggcgtcttcctgtctgaaccattct

SEQ ID NO: 501973 - DNA, 25 bp, Homo sapien
tttgagaaccaccacgtcagaggcg

SEQ ID NO: 501974 - DNA, 25 bp, Homo sapien
tgggctcaccccatactcatctggg

SEQ ID NO: 501975 - DNA, 25 bp, Homo sapien
gcagaaaggtacagctgggctcacc

SEQ ID NO: 501976 - DNA, 25 bp, Homo sapien
tcagagattgctatattagccttca

SEQ ID NO: 501977 - DNA, 25 bp, Homo sapien
ttccgttctctactttcagagattg

SEQ ID NO: 501978 - DNA, 25 bp, Homo sapien
ggtaactgccacacaacttcttttc

SEQ ID NO: 501979 - DNA, 25 bp, Homo sapien
gagattgctatattagccttcagga

SEQ ID NO: 501980 - DNA, 25 bp, Homo sapien
ttcttcttcaatcacctctccttcc

SEQ ID NO: 501981 - DNA, 25 bp, Homo sapien
tttcttcttcaatcacctctccttc

SEQ ID NO: 501982 - DNA, 25 bp, Homo sapien
gaatttcttcttcaatcacctctcc

SEQ ID NO: 501983 - DNA, 25 bp, Homo sapien
tgtgaatttcttcttcaatcacctc

SEQ ID NO: 501984 - DNA, 25 bp, Homo sapien
cagcgcggtcgggattccagttcac

SEQ ID NO: 501985 - DNA, 25 bp, Homo sapien
agtttacacatcagtctttcacggg

SEQ ID NO: 501986 - DNA, 25 bp, Homo sapien
taatcgtgaaattgagaagtcgccc

SEQ ID NO: 501987 - DNA, 25 bp, Homo sapien
gattatcctctgtaagttgcgtcta

SEQ ID NO: 501988 - DNA, 25 bp, Homo sapien
tggaccgagcggagttgtgcgtgtc

SEQ ID NO: 501989 - DNA, 25 bp, Homo sapien
gaccgagcggagttgtgcgtgtcgc

SEQ ID NO: 501990 - DNA, 25 bp, Homo sapien
accgagcggagttgtgcgtgtcgcc

SEQ ID NO: 501991 - DNA, 25 bp, Homo sapien
gaggttcgttccgcggagccccagc

SEQ ID NO: 501992 - DNA, 25 bp, Homo sapien
ctagggaggcggagatgggtgaggg

SEQ ID NO: 501993 - DNA, 25 bp, Homo sapien
ggagatgggtgagggcagcctccgg

SEQ ID NO: 501994 - DNA, 25 bp, Homo sapien
ggaggcggagatgggtgagggcagc

SEQ ID NO: 501995 - DNA, 25 bp, Homo sapien
gcggagatgggtgagggcagcctcc

SEQ ID NO: 501996 - DNA, 25 bp, Homo sapien
tgcgcggctcttgctccgcacgtat

SEQ ID NO: 501997 - DNA, 25 bp, Homo sapien
cacgtattgtttggctgggtctcta

SEQ ID NO: 501998 - DNA, 25 bp, Homo sapien
tcttgctccgcacgtattgtttggc

SEQ ID NO: 501999 - DNA, 25 bp, Homo sapien
tttggctgggtctctaatggcggac

SEQ ID NO: 502000 - DNA, 25 bp, Homo sapien
gcaaatgtgggcgatatcggcccag

SEQ ID NO: 502001 - DNA, 25 bp, Homo sapien
gcgatatcggcccagcagtgacgtg

SEQ ID NO: 502002 - DNA, 25 bp, Homo sapien
agcagtgacgtgagccgccccttac

SEQ ID NO: 502003 - DNA, 25 bp, Homo sapien
atatcggcccagcagtgacgtgagc

SEQ ID NO: 502004 - DNA, 25 bp, Homo sapien
tgtattttgcgctgttttgccccac

SEQ ID NO: 502005 - DNA, 25 bp, Homo sapien
tgctggcgtcgaggcaacgttttcc

SEQ ID NO: 502006 - DNA, 25 bp, Homo sapien
agcaggctcggtgtccttaggcccc

SEQ ID NO: 502007 - DNA, 25 bp, Homo sapien
gagggaatacaaatcccttgctggc

SEQ ID NO: 502008 - DNA, 25 bp, Homo sapien
ttttcctcctatcccaggaccaaga

SEQ ID NO: 502009 - DNA, 25 bp, Homo sapien
ataatagaaggaccgaacctccttg

SEQ ID NO: 502010 - DNA, 25 bp, Homo sapien
taatagaaggaccgaacctccttga

SEQ ID NO: 502011 - DNA, 25 bp, Homo sapien
aggaccaagaatcgccttcagccct

SEQ ID NO: 502012 - DNA, 25 bp, Homo sapien
gcagaaagtgaggaggaaaacaccc

SEQ ID NO: 502013 - DNA, 25 bp, Homo sapien
ccttggcagaaagtgaggaggaaaa

SEQ ID NO: 502014 - DNA, 25 bp, Homo sapien
cttggcagaaagtgaggaggaaaac

SEQ ID NO: 502015 - DNA, 25 bp, Homo sapien
tggcagaaagtgaggaggaaaacac

SEQ ID NO: 502016 - DNA, 25 bp, Homo sapien
tggtggcctttcagaatttaagtag

SEQ ID NO: 502017 - DNA, 25 bp, Homo sapien
tgctgcatgggatattgttaagact

SEQ ID NO: 502018 - DNA, 25 bp, Homo sapien
ttttagttgccctctatagagactg

SEQ ID NO: 502019 - DNA, 25 bp, Homo sapien
gacttggtgggcctttgttaatata

SEQ ID NO: 502020 - DNA, 25 bp, Homo sapien
gatgttgtttttatcgaacctgtac

SEQ ID NO: 502021 - DNA, 25 bp, Homo sapien
ctcaaaagagttggcatctcagaag

SEQ ID NO: 502022 - DNA, 25 bp, Homo sapien
ggaagtgtaagtgagacaattgtca

SEQ ID NO: 502023 - DNA, 25 bp, Homo sapien
taccagtggtagctgatcaaagaac

SEQ ID NO: 502024 - DNA, 25 bp, Homo sapien
cactgcagaataccaacttgggaga

SEQ ID NO: 502025 - DNA, 25 bp, Homo sapien
ttaacttcacagaccaagactggag

SEQ ID NO: 502026 - DNA, 25 bp, Homo sapien
tgtaagctctgtgaatgatggccaa

SEQ ID NO: 502027 - DNA, 25 bp, Homo sapien
actgacgggcgagatatgaacttaa

SEQ ID NO: 502028 - DNA, 25 bp, Homo sapien
tttgctgagaagtagaacgattgga

SEQ ID NO: 502029 - DNA, 25 bp, Homo sapien
taaacaagcaggcagactacacaag

SEQ ID NO: 502030 - DNA, 25 bp, Homo sapien
ttttccctgaggttgggaacactca

SEQ ID NO: 502031 - DNA, 25 bp, Homo sapien
gattctcccagaggatgatttcgga

SEQ ID NO: 502032 - DNA, 25 bp, Homo sapien
acttgcccagtaaaggtgctggaaa

SEQ ID NO: 502033 - DNA, 25 bp, Homo sapien
tcatatcatggagcatactgaatgc

SEQ ID NO: 502034 - DNA, 25 bp, Homo sapien
aatgttctggtgattgatggtcaac

SEQ ID NO: 502035 - DNA, 25 bp, Homo sapien
catttgaggtaggtcatttccgtga

SEQ ID NO: 502036 - DNA, 25 bp, Homo sapien
tgtttgctaaccttctatctgtaga

SEQ ID NO: 502037 - DNA, 25 bp, Homo sapien
tttttgttacaagcctacagatccc

SEQ ID NO: 502038 - DNA, 25 bp, Homo sapien
aatttgaatttggtgtatcttggtg

SEQ ID NO: 502039 - DNA, 25 bp, Homo sapien
tcaaacagtagtgtttttggaggac

SEQ ID NO: 502040 - DNA, 25 bp, Homo sapien
catgtcggtcaggctcctgacctca

SEQ ID NO: 502041 - DNA, 25 bp, Homo sapien
atgtcggtcaggctcctgacctcag

SEQ ID NO: 502042 - DNA, 25 bp, Homo sapien
tgtcggtcaggctcctgacctcagg

SEQ ID NO: 502043 - DNA, 25 bp, Homo sapien
aatcacctgtgaataccatgcagca

SEQ ID NO: 502044 - DNA, 25 bp, Homo sapien
gatgttatgtttttcgtctctaaaa

SEQ ID NO: 502045 - DNA, 25 bp, Homo sapien
tttcctgcctaattatgttcatgtt

SEQ ID NO: 502046 - DNA, 25 bp, Homo sapien
aaatcacctgtgaataccatgcagc

SEQ ID NO: 502047 - DNA, 25 bp, Homo sapien
aaggtcatcctactcttgaacaggt

SEQ ID NO: 502048 - DNA, 25 bp, Homo sapien
cagagtactcctggccatgtgtgtt

SEQ ID NO: 502049 - DNA, 25 bp, Homo sapien
ggcatcctgtcaaattaacctcgaa

SEQ ID NO: 502050 - DNA, 25 bp, Homo sapien
catactaccgcggtgatacctggag

SEQ ID NO: 502051 - DNA, 25 bp, Homo sapien
gttcaaacccgtgcataaagccatg

SEQ ID NO: 502052 - DNA, 25 bp, Homo sapien
taacctggttgaccactaggaagga

SEQ ID NO: 502053 - DNA, 25 bp, Homo sapien
cactgagcttaggtgataaaccacg

SEQ ID NO: 502054 - DNA, 25 bp, Homo sapien
gatagattcttggaagcgttcaaac

SEQ ID NO: 502055 - DNA, 25 bp, Homo sapien
tttagactgttttctagggagctgt

SEQ ID NO: 502056 - DNA, 25 bp, Homo sapien
tggtctcttttaggcataccaacac

SEQ ID NO: 502057 - DNA, 25 bp, Homo sapien
gacttccaacataaagcaggtttta

SEQ ID NO: 502058 - DNA, 25 bp, Homo sapien
gacagtttgatcattcaggtagacc

SEQ ID NO: 502059 - DNA, 25 bp, Homo sapien
ctttgtggttgaaattcagagtctt

SEQ ID NO: 502060 - DNA, 25 bp, Homo sapien
gtcttttgccaactcttttagtcat

SEQ ID NO: 502061 - DNA, 25 bp, Homo sapien
atagtatataggactacttttcaaa

SEQ ID NO: 502062 - DNA, 25 bp, Homo sapien
tatcaatctgactttctggctgtgg

SEQ ID NO: 502063 - DNA, 25 bp, Homo sapien
aggtccagtggctgaaactgtgttt

SEQ ID NO: 502064 - DNA, 25 bp, Homo sapien
tccagtggctgaaactgtgtttccc

SEQ ID NO: 502065 - DNA, 25 bp, Homo sapien
agtggctgaaactgtgtttccctgc

SEQ ID NO: 502066 - DNA, 25 bp, Homo sapien
taaaaggtccagtggctgaaactgt

SEQ ID NO: 502067 - DNA, 25 bp, Homo sapien
ttgagaccaataagccattgtcttt

SEQ ID NO: 502068 - DNA, 25 bp, Homo sapien
aatggagcaagtacattaagagttc

SEQ ID NO: 502069 - DNA, 25 bp, Homo sapien
ttcttcagtgtagatcctttgagac

SEQ ID NO: 502070 - DNA, 25 bp, Homo sapien
caataagccattgtctttttacaaa

SEQ ID NO: 502071 - DNA, 25 bp, Homo sapien
gagagtagcctttgctatgtgggca

SEQ ID NO: 502072 - DNA, 25 bp, Homo sapien
taaacaacaaaggaacgaagcagcg

SEQ ID NO: 502073 - DNA, 25 bp, Homo sapien
agttctagatctctggtcccaatga

SEQ ID NO: 502074 - DNA, 25 bp, Homo sapien
caagtggctctagggctgagttaca

SEQ ID NO: 502075 - DNA, 25 bp, Homo sapien
ggatccagtgcagggttgcgttaac

SEQ ID NO: 502076 - DNA, 25 bp, Homo sapien
tggccagcactttctagtaagcttc

SEQ ID NO: 502077 - DNA, 25 bp, Homo sapien
tgctttcctttaagagtcctctggg

SEQ ID NO: 502078 - DNA, 25 bp, Homo sapien
tggccggttcagagaggaagacacc

SEQ ID NO: 502079 - DNA, 25 bp, Homo sapien
tacatgcttttcaactctctgttag

SEQ ID NO: 502080 - DNA, 25 bp, Homo sapien
agtagaatctatctaatagccctca

SEQ ID NO: 502081 - DNA, 25 bp, Homo sapien
gaacaaacatgccaatagtctgaac

SEQ ID NO: 502082 - DNA, 25 bp, Homo sapien
tcttgctttagctagctctccgaaa

SEQ ID NO: 502083 - DNA, 25 bp, Homo sapien
tcactggaccgaaacaccttggaaa

SEQ ID NO: 502084 - DNA, 25 bp, Homo sapien
tttgtagcagtgtacccacgctggg

SEQ ID NO: 502085 - DNA, 25 bp, Homo sapien
ccagatggttgtgtatgggtagcac

SEQ ID NO: 502086 - DNA, 25 bp, Homo sapien
tgctctagttctacagatagccctg

SEQ ID NO: 502087 - DNA, 25 bp, Homo sapien
tccatagtggctagcaattgctaca

SEQ ID NO: 502088 - DNA, 25 bp, Homo sapien
tctatttaacgaagacaagtgggta

SEQ ID NO: 502089 - DNA, 25 bp, Homo sapien
taaagactgaacaaagtgctagctg

SEQ ID NO: 502090 - DNA, 25 bp, Homo sapien
tagtactactatcaagcaccttgtc

SEQ ID NO: 502091 - DNA, 25 bp, Homo sapien
acccaggtgcaatgcagagctcatg

SEQ ID NO: 502092 - DNA, 25 bp, Homo sapien
agaggctggagttgatcacaaagag

SEQ ID NO: 502093 - DNA, 25 bp, Homo sapien
ttgatcacaaagagacgcggaccca

SEQ ID NO: 502094 - DNA, 25 bp, Homo sapien
ggtgtggcccgtcctcagtccagct

SEQ ID NO: 502095 - DNA, 25 bp, Homo sapien
cctctgccaaccgtgtgttctcaga

SEQ ID NO: 502096 - DNA, 25 bp, Homo sapien
gagcatcgtcaagcaaccactggat

SEQ ID NO: 502097 - DNA, 25 bp, Homo sapien
ctgccaaccgtgtgttctcagagtc

SEQ ID NO: 502098 - DNA, 25 bp, Homo sapien
actccgtgtcaggagcatcgtcaag

SEQ ID NO: 502099 - DNA, 25 bp, Homo sapien
tgagtcctggtgcggaggctcctct

SEQ ID NO: 502100 - DNA, 25 bp, Homo sapien
actgagtcctggtgcggaggctcct

SEQ ID NO: 502101 - DNA, 25 bp, Homo sapien
agtcctggtgcggaggctcctctgc

SEQ ID NO: 502102 - DNA, 25 bp, Homo sapien
tcctggtgcggaggctcctctgcca

SEQ ID NO: 502103 - DNA, 25 bp, Homo sapien
ccagacccaaggccagctcagagca

SEQ ID NO: 502104 - DNA, 25 bp, Homo sapien
ctgcccagacccaaggccagctcag

SEQ ID NO: 502105 - DNA, 25 bp, Homo sapien
gcccagacccaaggccagctcagag

SEQ ID NO: 502106 - DNA, 25 bp, Homo sapien
cagacccaaggccagctcagagcaa

SEQ ID NO: 502107 - DNA, 25 bp, Homo sapien
acatcaaccctgtgaaatctgcttg

SEQ ID NO: 502108 - DNA, 25 bp, Homo sapien
actagcagcaaggacaacactccac

SEQ ID NO: 502109 - DNA, 25 bp, Homo sapien
ctgtctggcttttcacatcaaccct

SEQ ID NO: 502110 - DNA, 25 bp, Homo sapien
aatctgcttggggaactagcagcaa

SEQ ID NO: 502111 - DNA, 25 bp, Homo sapien
tagggccgccacagttcaggcggat

SEQ ID NO: 502112 - DNA, 25 bp, Homo sapien
cccctagtggtgtcggaggactgtc

SEQ ID NO: 502113 - DNA, 25 bp, Homo sapien
tcaggcggatagtggagcccctagt

SEQ ID NO: 502114 - DNA, 25 bp, Homo sapien
gagtgggcagctccctttgctccct

SEQ ID NO: 502115 - DNA, 25 bp, Homo sapien
tgagcacccggcctgcccaggtggc

SEQ ID NO: 502116 - DNA, 25 bp, Homo sapien
gcctggatcctcggcggggtcccca

SEQ ID NO: 502117 - DNA, 25 bp, Homo sapien
ctgagcacccggcctgcccaggtgg

SEQ ID NO: 502118 - DNA, 25 bp, Homo sapien
cttcgatgggacagcccgggctgcg

SEQ ID NO: 502119 - DNA, 25 bp, Homo sapien
cagccacaccaacgcggcacttctt

SEQ ID NO: 502120 - DNA, 25 bp, Homo sapien
tcttccaggaggcgtttctcagcca

SEQ ID NO: 502121 - DNA, 25 bp, Homo sapien
tcagccacaccaacgcggcacttct

SEQ ID NO: 502122 - DNA, 25 bp, Homo sapien
tccaggaggcgtttctcagccacac

SEQ ID NO: 502123 - DNA, 25 bp, Homo sapien
cagctggcagagaacgttgagtgtt

SEQ ID NO: 502124 - DNA, 25 bp, Homo sapien
gaacgttgagtgttctctctgccag

SEQ ID NO: 502125 - DNA, 25 bp, Homo sapien
cattcttgggtgcaaagggccttcc

SEQ ID NO: 502126 - DNA, 25 bp, Homo sapien
ttccttaacagtcggcggcagctct

SEQ ID NO: 502127 - DNA, 25 bp, Homo sapien
cggcctgactttggactcgagtgca

SEQ ID NO: 502128 - DNA, 25 bp, Homo sapien
cgtggcttctcacgcggcctgactt

SEQ ID NO: 502129 - DNA, 25 bp, Homo sapien
tggactcgagtgcaggctcttagct

SEQ ID NO: 502130 - DNA, 25 bp, Homo sapien
ttctcacgcggcctgactttggact

SEQ ID NO: 502131 - DNA, 25 bp, Homo sapien
aggtggcgccgattccggacgccca

SEQ ID NO: 502132 - DNA, 25 bp, Homo sapien
tttgttaaagcagccacgggaccac

SEQ ID NO: 502133 - DNA, 25 bp, Homo sapien
ttccggacgcccagaactctgtggg

SEQ ID NO: 502134 - DNA, 25 bp, Homo sapien
cagctgtactgtgcggcgtgtaaac

SEQ ID NO: 502135 - DNA, 25 bp, Homo sapien
tgagtcaacccaagatttgcactgt

SEQ ID NO: 502136 - DNA, 25 bp, Homo sapien
ccaggaaagacactgttatggcaca

SEQ ID NO: 502137 - DNA, 25 bp, Homo sapien
cagtcagaaaccttaaagtgagtca

SEQ ID NO: 502138 - DNA, 25 bp, Homo sapien
tgatggtggcaggactctattcatc

SEQ ID NO: 502139 - DNA, 25 bp, Homo sapien
atggccaagtcctccggtctggccc

SEQ ID NO: 502140 - DNA, 25 bp, Homo sapien
ctccggtctggcccgcccgctgctg

SEQ ID NO: 502141 - DNA, 25 bp, Homo sapien
gtcctccggtctggcccgcccgctg

SEQ ID NO: 502142 - DNA, 25 bp, Homo sapien
caagtcctccggtctggcccgcccg

SEQ ID NO: 502143 - DNA, 25 bp, Homo sapien
ggctggtgcatctgggccgcggtgg

SEQ ID NO: 502144 - DNA, 25 bp, Homo sapien
aggggcaagggcggctggtgcatct

SEQ ID NO: 502145 - DNA, 25 bp, Homo sapien
gctgcaggcgtggacgctgccgggt

SEQ ID NO: 502146 - DNA, 25 bp, Homo sapien
cgctgccgggtaagccttgagcgcc

SEQ ID NO: 502147 - DNA, 25 bp, Homo sapien
cctcagcctcgtgcgcgagtggcgg

SEQ ID NO: 502148 - DNA, 25 bp, Homo sapien
ccgcctcagcctcgtgcgcgagtgg

SEQ ID NO: 502149 - DNA, 25 bp, Homo sapien
ccgtacagaaagtactggccggcga

SEQ ID NO: 502150 - DNA, 25 bp, Homo sapien
tagcagtttgaagtccgcggctggt

SEQ ID NO: 502151 - DNA, 25 bp, Homo sapien
tcgcagcggtagagcggcttcagct

SEQ ID NO: 502152 - DNA, 25 bp, Homo sapien
tagagcttggcggactggccctttc

SEQ ID NO: 502153 - DNA, 25 bp, Homo sapien
ttgaagacgtaggtccgcagcagcg

SEQ ID NO: 502154 - DNA, 25 bp, Homo sapien
catgcgcaccctgccgcggtcgtcc

SEQ ID NO: 502155 - DNA, 25 bp, Homo sapien
atgatgttgaagacgtaggtccgca

SEQ ID NO: 502156 - DNA, 25 bp, Homo sapien
cggtcgtcccgcgacgagggattgt

SEQ ID NO: 502157 - DNA, 25 bp, Homo sapien
ggggctggggctctctctcttcagc

SEQ ID NO: 502158 - DNA, 25 bp, Homo sapien
ttggggctggggctctctctcttca

SEQ ID NO: 502159 - DNA, 25 bp, Homo sapien
cttggggctggggctctctctcttc

SEQ ID NO: 502160 - DNA, 25 bp, Homo sapien
ggctggggctctctctcttcagctg

SEQ ID NO: 502161 - DNA, 25 bp, Homo sapien
gggtgggcgtggacacgaagatgat

SEQ ID NO: 502162 - DNA, 25 bp, Homo sapien
gggaaggccctgtcgtagcagacgt

SEQ ID NO: 502163 - DNA, 25 bp, Homo sapien
ggggaaggccctgtcgtagcagacg

SEQ ID NO: 502164 - DNA, 25 bp, Homo sapien
gagggtgggcgtggacacgaagatg

SEQ ID NO: 502165 - DNA, 25 bp, Homo sapien
gcaggtgaagtctgactgctcatcg

SEQ ID NO: 502166 - DNA, 25 bp, Homo sapien
tgcaggtgaagtctgactgctcatc

SEQ ID NO: 502167 - DNA, 25 bp, Homo sapien
caggtgaagtctgactgctcatcgc

SEQ ID NO: 502168 - DNA, 25 bp, Homo sapien
gttgcaggtgaagtctgactgctca

SEQ ID NO: 502169 - DNA, 25 bp, Homo sapien
accaagatgcggaagatgaacagca

SEQ ID NO: 502170 - DNA, 25 bp, Homo sapien
ccaagatgcggaagatgaacagcac

SEQ ID NO: 502171 - DNA, 25 bp, Homo sapien
aagatgcggaagatgaacagcacgg

SEQ ID NO: 502172 - DNA, 25 bp, Homo sapien
caagatgcggaagatgaacagcacg

SEQ ID NO: 502173 - DNA, 25 bp, Homo sapien
ctgtgcattttctaagagtcttccc

SEQ ID NO: 502174 - DNA, 25 bp, Homo sapien
agtcttcccagaaagctccagtcgc

SEQ ID NO: 502175 - DNA, 25 bp, Homo sapien
gagtcttcccagaaagctccagtcg

SEQ ID NO: 502176 - DNA, 25 bp, Homo sapien
gcattttctaagagtcttcccagaa

SEQ ID NO: 502177 - DNA, 25 bp, Homo sapien
caacggctgagtgccgggtccgcac

SEQ ID NO: 502178 - DNA, 25 bp, Homo sapien
gcagcggcctggatggtactgggat

SEQ ID NO: 502179 - DNA, 25 bp, Homo sapien
gaaaatgctcatgaacaccgggctg

SEQ ID NO: 502180 - DNA, 25 bp, Homo sapien
ggacaggcatcgcagctccccagga

SEQ ID NO: 502181 - DNA, 25 bp, Homo sapien
caattcagcaagtgttaggtaaaca

SEQ ID NO: 502182 - DNA, 25 bp, Homo sapien
gccccagaagtgtgactccgaagaa

SEQ ID NO: 502183 - DNA, 25 bp, Homo sapien
ccaggcccaattcagcaagtgttag

SEQ ID NO: 502184 - DNA, 25 bp, Homo sapien
aagtgtgactccgaagaaggcagcc

SEQ ID NO: 502185 - DNA, 25 bp, Homo sapien
gatgagatggcatcccgtgtcgctg

SEQ ID NO: 502186 - DNA, 25 bp, Homo sapien
cacagacacgggatgaagatgagat

SEQ ID NO: 502187 - DNA, 25 bp, Homo sapien
gggaccacggtcatacacagggatg

SEQ ID NO: 502188 - DNA, 25 bp, Homo sapien
ggtgagactgccagcctgctaagaa

SEQ ID NO: 502189 - DNA, 25 bp, Homo sapien
tgggctctagagtacacctgctccc

SEQ ID NO: 502190 - DNA, 25 bp, Homo sapien
acctgccaagctttcccgggcaaga

SEQ ID NO: 502191 - DNA, 25 bp, Homo sapien
ccacctgccaagctttcccgggcaa

SEQ ID NO: 502192 - DNA, 25 bp, Homo sapien
ctgccaagctttcccgggcaagagc

SEQ ID NO: 502193 - DNA, 25 bp, Homo sapien
tctgctgcccgtcacagactggaca

SEQ ID NO: 502194 - DNA, 25 bp, Homo sapien
aatgccactggcgtttccctgtggg

SEQ ID NO: 502195 - DNA, 25 bp, Homo sapien
tggaggcaaaatgttctgccgtgtt

SEQ ID NO: 502196 - DNA, 25 bp, Homo sapien
gggtgacctcatgggaaagaactgt

SEQ ID NO: 502197 - DNA, 25 bp, Homo sapien
cactggaatatatgcccttggaaga

SEQ ID NO: 502198 - DNA, 25 bp, Homo sapien
gcgacctctgagtgcaacctacaag

SEQ ID NO: 502199 - DNA, 25 bp, Homo sapien
ctacaagaatgatgaccagccacca

SEQ ID NO: 502200 - DNA, 25 bp, Homo sapien
aacactggaatatatgcccttggaa

SEQ ID NO: 502201 - DNA, 25 bp, Homo sapien
ccgtcagactttagttggctctgga

SEQ ID NO: 502202 - DNA, 25 bp, Homo sapien
ttggctctggatgacatgcagaggc

SEQ ID NO: 502203 - DNA, 25 bp, Homo sapien
ctctggatgacatgcagaggctctg

SEQ ID NO: 502204 - DNA, 25 bp, Homo sapien
ctcccttcgccgtcagactttagtt

SEQ ID NO: 502205 - DNA, 25 bp, Homo sapien
aagagttgcagcgtaattagaaaca

SEQ ID NO: 502206 - DNA, 25 bp, Homo sapien
tctagaaatcagcactaaagcacca

SEQ ID NO: 502207 - DNA, 25 bp, Homo sapien
ccacagggagttctaacattaagct

SEQ ID NO: 502208 - DNA, 25 bp, Homo sapien
ttagaaacaactgcctgccaagacg

SEQ ID NO: 502209 - DNA, 25 bp, Homo sapien
cgtcactgccgtttgttttctcaag

SEQ ID NO: 502210 - DNA, 25 bp, Homo sapien
tgtggagtcggcaacaaagcaaatg

SEQ ID NO: 502211 - DNA, 25 bp, Homo sapien
atctggtcgtggcattaatagctac

SEQ ID NO: 502212 - DNA, 25 bp, Homo sapien
catacaggtcgagaaatctggtcgt

SEQ ID NO: 502213 - DNA, 25 bp, Homo sapien
tgcggtgctgcttcacgcgtgcgcc

SEQ ID NO: 502214 - DNA, 25 bp, Homo sapien
acccgggtgcgttcctccggagcag

SEQ ID NO: 502215 - DNA, 25 bp, Homo sapien
gctcccggccgctctgaaaagaatt

SEQ ID NO: 502216 - DNA, 25 bp, Homo sapien
aagaattcctttcacacgtgcggtg

SEQ ID NO: 502217 - DNA, 25 bp, Homo sapien
tgtacgcgcagccacagcactcgcc

SEQ ID NO: 502218 - DNA, 25 bp, Homo sapien
gcactcgcccgcgtccgcattccac

SEQ ID NO: 502219 - DNA, 25 bp, Homo sapien
accctgtacgcgcagccacagcact

SEQ ID NO: 502220 - DNA, 25 bp, Homo sapien
gcccgcgtccgcattccacacccta

SEQ ID NO: 502221 - DNA, 25 bp, Homo sapien
catcccgcacctgcgcgggccctgg

SEQ ID NO: 502222 - DNA, 25 bp, Homo sapien
tgccgcctacgcactccggggcatg

SEQ ID NO: 502223 - DNA, 25 bp, Homo sapien
catgcctagcgcctgcatccccatc

SEQ ID NO: 502224 - DNA, 25 bp, Homo sapien
ggctcttccctgccgcctacgcact

SEQ ID NO: 502225 - DNA, 25 bp, Homo sapien
cgctcccacggtcggaggcgcgtgg

SEQ ID NO: 502226 - DNA, 25 bp, Homo sapien
gtgggcgtcgggcacctaggtctcg

SEQ ID NO: 502227 - DNA, 25 bp, Homo sapien
gtcgggcacctaggtctcgcccgcc

SEQ ID NO: 502228 - DNA, 25 bp, Homo sapien
ggcgctcccacggtcggaggcgcgt

SEQ ID NO: 502229 - DNA, 25 bp, Homo sapien
gctggcgcccaacgaagattttaac

SEQ ID NO: 502230 - DNA, 25 bp, Homo sapien
accgagggcggcatcgcgtccttgt

SEQ ID NO: 502231 - DNA, 25 bp, Homo sapien
gcatcgcgtccttgtctgctgtctg

SEQ ID NO: 502232 - DNA, 25 bp, Homo sapien
ttttaccacgcttgagagggacgcc

SEQ ID NO: 502233 - DNA, 25 bp, Homo sapien
ttcttggtggcacaacctgccccag

SEQ ID NO: 502234 - DNA, 25 bp, Homo sapien
gcttcggctgcagccaagggtgaac

SEQ ID NO: 502235 - DNA, 25 bp, Homo sapien
tgccccaggcagcttcggctgcagc

SEQ ID NO: 502236 - DNA, 25 bp, Homo sapien
gctggcctctttcttggtggcacaa

SEQ ID NO: 502237 - DNA, 25 bp, Homo sapien
ggaattcctcgtggcctcatggcct

SEQ ID NO: 502238 - DNA, 25 bp, Homo sapien
tctggtccaccttgtactcggtgcc

SEQ ID NO: 502239 - DNA, 25 bp, Homo sapien
ccagcggtctggtccaccttgtact

SEQ ID NO: 502240 - DNA, 25 bp, Homo sapien
cctactccagggaattcctcgtggc

SEQ ID NO: 502241 - DNA, 25 bp, Homo sapien
ctgagacctggtacacagggaggct

SEQ ID NO: 502242 - DNA, 25 bp, Homo sapien
tgagacctggtacacagggaggctt

SEQ ID NO: 502243 - DNA, 25 bp, Homo sapien
gagacctggtacacagggaggcttc

SEQ ID NO: 502244 - DNA, 25 bp, Homo sapien
ccgaaaagcatcgtgtgttgttgca

SEQ ID NO: 502245 - DNA, 25 bp, Homo sapien
gttgcaaaggcctgccttatcctgg

SEQ ID NO: 502246 - DNA, 25 bp, Homo sapien
tcttcaggaaggaccccgaaaagca

SEQ ID NO: 502247 - DNA, 25 bp, Homo sapien
gagggcctcactcatggaacaaatg

SEQ ID NO: 502248 - DNA, 25 bp, Homo sapien
tgaggttgcacgaagtaggtccagg

SEQ ID NO: 502249 - DNA, 25 bp, Homo sapien
ctgaggttgcacgaagtaggtccag

SEQ ID NO: 502250 - DNA, 25 bp, Homo sapien
gaggttgcacgaagtaggtccaggc

SEQ ID NO: 502251 - DNA, 25 bp, Homo sapien
tgtctggagacacgccccaatgtgg

SEQ ID NO: 502252 - DNA, 25 bp, Homo sapien
gcacgtgccggaagcagagacacat

SEQ ID NO: 502253 - DNA, 25 bp, Homo sapien
tggttgccgccctcccctcggagac

SEQ ID NO: 502254 - DNA, 25 bp, Homo sapien
acacatcttggagccgtggaggacg

SEQ ID NO: 502255 - DNA, 25 bp, Homo sapien
gctgcgcctttgagcctggtcggcc

SEQ ID NO: 502256 - DNA, 25 bp, Homo sapien
ccaggtcctaacagggcggctgtgc

SEQ ID NO: 502257 - DNA, 25 bp, Homo sapien
cgctccagctaggatgggcacatga

SEQ ID NO: 502258 - DNA, 25 bp, Homo sapien
gaagctgccaagctctgtccgaaac

SEQ ID NO: 502259 - DNA, 25 bp, Homo sapien
tgactcctcatgggcgaatcctcct

SEQ ID NO: 502260 - DNA, 25 bp, Homo sapien
tgcccaggtctacatctgtggcctt

SEQ ID NO: 502261 - DNA, 25 bp, Homo sapien
tgcagttctgcccaggtctacatct

SEQ ID NO: 502262 - DNA, 25 bp, Homo sapien
tcttccaccaagttgctggcacgca

SEQ ID NO: 502263 - DNA, 25 bp, Homo sapien
tgcaaggacatagcccacacgaata

SEQ ID NO: 502264 - DNA, 25 bp, Homo sapien
catagcccacacgaatatttctagc

SEQ ID NO: 502265 - DNA, 25 bp, Homo sapien
tgacctcagccatcagggatgcaag

SEQ ID NO: 502266 - DNA, 25 bp, Homo sapien
agggatgcaaggacatagcccacac

SEQ ID NO: 502267 - DNA, 25 bp, Homo sapien
ttattggagttgtccacatttggca

SEQ ID NO: 502268 - DNA, 25 bp, Homo sapien
tccacatttggcaatggtgatcttg

SEQ ID NO: 502269 - DNA, 25 bp, Homo sapien
aaagcgctccatggcttccatgata

SEQ ID NO: 502270 - DNA, 25 bp, Homo sapien
gatcttgctggtcttgctcttcctg

SEQ ID NO: 502271 - DNA, 25 bp, Homo sapien
tgctgccagtgtcatgatggcgtgt

SEQ ID NO: 502272 - DNA, 25 bp, Homo sapien
tcctgctatgtttggaactttgtct

SEQ ID NO: 502273 - DNA, 25 bp, Homo sapien
cacagcatgaatgtttcctgctatg

SEQ ID NO: 502274 - DNA, 25 bp, Homo sapien
ggctcagcaatgtcataaaacatgg

SEQ ID NO: 502275 - DNA, 25 bp, Homo sapien
tggcctgcgccatctgtcccagcca

SEQ ID NO: 502276 - DNA, 25 bp, Homo sapien
ccagccacgccctccttggccccat

SEQ ID NO: 502277 - DNA, 25 bp, Homo sapien
gcgtggcctgcgccatctgtcccag

SEQ ID NO: 502278 - DNA, 25 bp, Homo sapien
ggcctgcgtggcctgcgccatctgt

SEQ ID NO: 502279 - DNA, 25 bp, Homo sapien
tacaaaattattttagttacaagca

SEQ ID NO: 502280 - DNA, 25 bp, Homo sapien
taatgttttaaatgtatttgataca

SEQ ID NO: 502281 - DNA, 25 bp, Homo sapien
taaatgtatttgatacattacaaaa

SEQ ID NO: 502282 - DNA, 25 bp, Homo sapien
tgatacattacaaaattattttagt

SEQ ID NO: 502283 - DNA, 25 bp, Homo sapien
catgtcaagcataatggcaatattc

SEQ ID NO: 502284 - DNA, 25 bp, Homo sapien
gacaacaggaaaatacttaccctca

SEQ ID NO: 502285 - DNA, 25 bp, Homo sapien
tacaatgctattcttgacaacagga

SEQ ID NO: 502286 - DNA, 25 bp, Homo sapien
ggttcaatcttcctatagatctgct

SEQ ID NO: 502287 - DNA, 25 bp, Homo sapien
ccttgacagctgagcacgggttgcc

SEQ ID NO: 502288 - DNA, 25 bp, Homo sapien
cttaatctaacaactgggcaatgcg

SEQ ID NO: 502289 - DNA, 25 bp, Homo sapien
gaaatgctagcgactgagccttgac

SEQ ID NO: 502290 - DNA, 25 bp, Homo sapien
gcgttctttccgatgctggctacca

SEQ ID NO: 502291 - DNA, 25 bp, Homo sapien
cagcaggatgcaaattccagacact

SEQ ID NO: 502292 - DNA, 25 bp, Homo sapien
tggcttttttgacttcccagaacaa

SEQ ID NO: 502293 - DNA, 25 bp, Homo sapien
cccagaacaatatctaattagcaaa

SEQ ID NO: 502294 - DNA, 25 bp, Homo sapien
cactgcaatcatgaacactgtgaag

SEQ ID NO: 502295 - DNA, 25 bp, Homo sapien
tggcgtggacacgaagatcagctgc

SEQ ID NO: 502296 - DNA, 25 bp, Homo sapien
gccgctgcatggagaagccgtcgta

SEQ ID NO: 502297 - DNA, 25 bp, Homo sapien
acagggagccttcgatgcggacctt

SEQ ID NO: 502298 - DNA, 25 bp, Homo sapien
catagaagacgtacatgaaggcggc

SEQ ID NO: 502299 - DNA, 25 bp, Homo sapien
tggagtgtttgttcacaccccccag

SEQ ID NO: 502300 - DNA, 25 bp, Homo sapien
ggatcgtctgcagcgtgccccaatc

SEQ ID NO: 502301 - DNA, 25 bp, Homo sapien
gtgtttgttcacaccccccaggatc

SEQ ID NO: 502302 - DNA, 25 bp, Homo sapien
ccccaggatcgtctgcagcgtgccc

SEQ ID NO: 502303 - DNA, 25 bp, Homo sapien
tggaaaagacgaatgcacacaacac

SEQ ID NO: 502304 - DNA, 25 bp, Homo sapien
tctgagtctgggtaagcaagcatgc

SEQ ID NO: 502305 - DNA, 25 bp, Homo sapien
gcaagcatgcttaaatctcttcctg

SEQ ID NO: 502306 - DNA, 25 bp, Homo sapien
gaaccaacttagtttgtcataggat

SEQ ID NO: 502307 - DNA, 25 bp, Homo sapien
gcagaaaccatccagtgccaccttg

SEQ ID NO: 502308 - DNA, 25 bp, Homo sapien
taggcaagttgcatcccgttttctg

SEQ ID NO: 502309 - DNA, 25 bp, Homo sapien
tgtctttcatgacccacagtcgctg

SEQ ID NO: 502310 - DNA, 25 bp, Homo sapien
tctgatggactccagaagcaggctc

SEQ ID NO: 502311 - DNA, 25 bp, Homo sapien
gagagaggtggccacgaaagttaca

SEQ ID NO: 502312 - DNA, 25 bp, Homo sapien
aaagttacatcagattgacataggc

SEQ ID NO: 502313 - DNA, 25 bp, Homo sapien
ccacgaaagttacatcagattgaca

SEQ ID NO: 502314 - DNA, 25 bp, Homo sapien
ggtggccacgaaagttacatcagat

SEQ ID NO: 502315 - DNA, 25 bp, Homo sapien
ctgtgaaacatttagcttcactgag

SEQ ID NO: 502316 - DNA, 25 bp, Homo sapien
tagggaagacactaggtgaatcacc

SEQ ID NO: 502317 - DNA, 25 bp, Homo sapien
gccagcggaggagttggttcagttc

SEQ ID NO: 502318 - DNA, 25 bp, Homo sapien
gttccttagggaagacactaggtga

SEQ ID NO: 502319 - DNA, 25 bp, Homo sapien
ttggttcagttccttagggaagaca

SEQ ID NO: 502320 - DNA, 25 bp, Homo sapien
cccgaagggacatcggcgacaccac

SEQ ID NO: 502321 - DNA, 25 bp, Homo sapien
gggacatcggcgacaccacaaacct

SEQ ID NO: 502322 - DNA, 25 bp, Homo sapien
gacaccacaaacctcgcgctggcgg

SEQ ID NO: 502323 - DNA, 25 bp, Homo sapien
ggcgacaccacaaacctcgcgctgg

SEQ ID NO: 502324 - DNA, 25 bp, Homo sapien
ctcctgcgctcctaggcgggtcctg

SEQ ID NO: 502325 - DNA, 25 bp, Homo sapien
tcggcgttggggtctctgcgctggg

SEQ ID NO: 502326 - DNA, 25 bp, Homo sapien
gggtctcggcgttggggtctctgcg

SEQ ID NO: 502327 - DNA, 25 bp, Homo sapien
ggctccgagtcggggagaggagcgc

SEQ ID NO: 502328 - DNA, 25 bp, Homo sapien
taatgtaccagtccctagagaagct

SEQ ID NO: 502329 - DNA, 25 bp, Homo sapien
agagaagctgaagcccaatcctgtg

SEQ ID NO: 502330 - DNA, 25 bp, Homo sapien
gaagctgaagcccaatcctgtgttc

SEQ ID NO: 502331 - DNA, 25 bp, Homo sapien
tatgtcttcatctcttaatgtacca

SEQ ID NO: 502332 - DNA, 25 bp, Homo sapien
tatgtgaagaatcatgttgaggcag

SEQ ID NO: 502333 - DNA, 25 bp, Homo sapien
ctcagtatgtgaagaatcatgttga

SEQ ID NO: 502334 - DNA, 25 bp, Homo sapien
aagaatcatgttgaggcaggagcaa

SEQ ID NO: 502335 - DNA, 25 bp, Homo sapien
ttggtactcagtatgtgaagaatca

SEQ ID NO: 502336 - DNA, 25 bp, Homo sapien
tgcaggagattgatgggcaggtgga

SEQ ID NO: 502337 - DNA, 25 bp, Homo sapien
agtgcaggagattgatgggcaggtg

SEQ ID NO: 502338 - DNA, 25 bp, Homo sapien
ccagtgcaggagattgatgggcagg

SEQ ID NO: 502339 - DNA, 25 bp, Homo sapien
gccagtgcaggagattgatgggcag

SEQ ID NO: 502340 - DNA, 25 bp, Homo sapien
gacagaagtctccttatgacgcagc

SEQ ID NO: 502341 - DNA, 25 bp, Homo sapien
tccaggtaaggaagaccagtcatta

SEQ ID NO: 502342 - DNA, 25 bp, Homo sapien
gggacgagctttattgaggcaatca

SEQ ID NO: 502343 - DNA, 25 bp, Homo sapien
gaggcaatcacatccacatttcagt

SEQ ID NO: 502344 - DNA, 25 bp, Homo sapien
gcaggtggtacccattgtaaaggaa

SEQ ID NO: 502345 - DNA, 25 bp, Homo sapien
gattgcattttgaccactatctgaa

SEQ ID NO: 502346 - DNA, 25 bp, Homo sapien
aaaatggtaaacacggtcttctctg

SEQ ID NO: 502347 - DNA, 25 bp, Homo sapien
gccacgttaagcagcatgcaaatca

SEQ ID NO: 502348 - DNA, 25 bp, Homo sapien
tgggcagccaccacgaggatcatga

SEQ ID NO: 502349 - DNA, 25 bp, Homo sapien
gcagtgtgttgcagacgaagtcctc

SEQ ID NO: 502350 - DNA, 25 bp, Homo sapien
tgaacttgcgagtggtttcgtgcct

SEQ ID NO: 502351 - DNA, 25 bp, Homo sapien
caccgggaaaaagtggtcatagcac

SEQ ID NO: 502352 - DNA, 25 bp, Homo sapien
cagcaagttttaaggaggactcaac

SEQ ID NO: 502353 - DNA, 25 bp, Homo sapien
ggtcagctgcgggttatcaagcccc

SEQ ID NO: 502354 - DNA, 25 bp, Homo sapien
tggcagtaaacgcaggagactcagc

SEQ ID NO: 502355 - DNA, 25 bp, Homo sapien
caagtgtcaagagataggccagggt

SEQ ID NO: 502356 - DNA, 25 bp, Homo sapien
ctgccagtgtttcagacccaaagaa

SEQ ID NO: 502357 - DNA, 25 bp, Homo sapien
tgtcaatctttgctcggtcagtgag

SEQ ID NO: 502358 - DNA, 25 bp, Homo sapien
taccccactggagtgcctagaagcc

SEQ ID NO: 502359 - DNA, 25 bp, Homo sapien
gagtcctgtttccaacgactgccag

SEQ ID NO: 502360 - DNA, 25 bp, Homo sapien
aagatgcatgaagagggcgtacaag

SEQ ID NO: 502361 - DNA, 25 bp, Homo sapien
acagaaattgtttagccagatcttc

SEQ ID NO: 502362 - DNA, 25 bp, Homo sapien
tgaagagggcgtacaagttagaatt

SEQ ID NO: 502363 - DNA, 25 bp, Homo sapien
tagaatttttctttcgccatacaga

SEQ ID NO: 502364 - DNA, 25 bp, Homo sapien
aaacaaccagtggggcaggtgaact

SEQ ID NO: 502365 - DNA, 25 bp, Homo sapien
aacaaccagtggggcaggtgaactg

SEQ ID NO: 502366 - DNA, 25 bp, Homo sapien
caaccagtggggcaggtgaactgac

SEQ ID NO: 502367 - DNA, 25 bp, Homo sapien
tgtatcagaatttgtttaaaaaaca

SEQ ID NO: 502368 - DNA, 25 bp, Homo sapien
tgtgacaggctagagccctggtgtt

SEQ ID NO: 502369 - DNA, 25 bp, Homo sapien
tccttggcaagcttcaagcaacacc

SEQ ID NO: 502370 - DNA, 25 bp, Homo sapien
caaagacgctgctggatccaaacaa

SEQ ID NO: 502371 - DNA, 25 bp, Homo sapien
cagtggcaatgaggcgctctccaca

SEQ ID NO: 502372 - DNA, 25 bp, Homo sapien
atgcccgtgacaccggagacaggtc

SEQ ID NO: 502373 - DNA, 25 bp, Homo sapien
gccttctggtgcctgcacgttttaa

SEQ ID NO: 502374 - DNA, 25 bp, Homo sapien
ggtcagccccgtttgcaaaacacag

SEQ ID NO: 502375 - DNA, 25 bp, Homo sapien
gaagggaggtcagccccgtttgcaa

SEQ ID NO: 502376 - DNA, 25 bp, Homo sapien
agtttctcggaagcccatcacgcag

SEQ ID NO: 502377 - DNA, 25 bp, Homo sapien
tgtcgtccacgctattgtcatcagc

SEQ ID NO: 502378 - DNA, 25 bp, Homo sapien
catcagcatttcacaagtttctcgg

SEQ ID NO: 502379 - DNA, 25 bp, Homo sapien
agatgtgtcgccaattacttttaat

SEQ ID NO: 502380 - DNA, 25 bp, Homo sapien
tcgggcgccgccggctgtcgggctc

SEQ ID NO: 502381 - DNA, 25 bp, Homo sapien
cggcgcccttcgctccggctgggca

SEQ ID NO: 502382 - DNA, 25 bp, Homo sapien
gcgccgccggctgtcgggctctcgt

SEQ ID NO: 502383 - DNA, 25 bp, Homo sapien
tgcgcggggcggcgcccttcgctcc

SEQ ID NO: 502384 - DNA, 25 bp, Homo sapien
gctgaaccagcatagcagatagtcc

SEQ ID NO: 502385 - DNA, 25 bp, Homo sapien
catagtatgtgctgctccatgagta

SEQ ID NO: 502386 - DNA, 25 bp, Homo sapien
gattccatgcagtactgtgtctgag

SEQ ID NO: 502387 - DNA, 25 bp, Homo sapien
catcctggaccagtggaaattgttc

SEQ ID NO: 502388 - DNA, 25 bp, Homo sapien
gtggtcacaggcattctcagtgagg

SEQ ID NO: 502389 - DNA, 25 bp, Homo sapien
tagggacggggctgttaaatatgaa

SEQ ID NO: 502390 - DNA, 25 bp, Homo sapien
agccagtggtcacaggcattctcag

SEQ ID NO: 502391 - DNA, 25 bp, Homo sapien
aggtgtcccctatccagccagtggt

SEQ ID NO: 502392 - DNA, 25 bp, Homo sapien
tctctgggagatgcctctggcctgg

SEQ ID NO: 502393 - DNA, 25 bp, Homo sapien
tccaaagccacagtgccaatgtgac

SEQ ID NO: 502394 - DNA, 25 bp, Homo sapien
ccagtctcctctcacatggcttctg

SEQ ID NO: 502395 - DNA, 25 bp, Homo sapien
cctgggatgcgcttggtgggaaggc

SEQ ID NO: 502396 - DNA, 25 bp, Homo sapien
caacacgagacatatgaaaggcaaa

SEQ ID NO: 502397 - DNA, 25 bp, Homo sapien
ttgtttcacaacacgagacatatga

SEQ ID NO: 502398 - DNA, 25 bp, Homo sapien
cacagaatattgtttcacaacacga

SEQ ID NO: 502399 - DNA, 25 bp, Homo sapien
gaatattgtttcacaacacgagaca

SEQ ID NO: 502400 - DNA, 25 bp, Homo sapien
actgaaagttctagggccaccgcag

SEQ ID NO: 502401 - DNA, 25 bp, Homo sapien
ccagcagaggcttcggagtcctgcc

SEQ ID NO: 502402 - DNA, 25 bp, Homo sapien
agaggcttcggagtcctgccacact

SEQ ID NO: 502403 - DNA, 25 bp, Homo sapien
cactgaaagttctagggccaccgca

SEQ ID NO: 502404 - DNA, 25 bp, Homo sapien
gggccgatggttgagcagggcagcc

SEQ ID NO: 502405 - DNA, 25 bp, Homo sapien
gagcagggcagccagtaaaccagaa

SEQ ID NO: 502406 - DNA, 25 bp, Homo sapien
ccagaaggtgcaggcccatagggag

SEQ ID NO: 502407 - DNA, 25 bp, Homo sapien
gcagccagtaaaccagaaggtgcag

SEQ ID NO: 502408 - DNA, 25 bp, Homo sapien
taaaatctcccgtaacaggaatgcc

SEQ ID NO: 502409 - DNA, 25 bp, Homo sapien
gcggaactcaaccatcctctaagga

SEQ ID NO: 502410 - DNA, 25 bp, Homo sapien
cagcagtcctacaacagcggtcata

SEQ ID NO: 502411 - DNA, 25 bp, Homo sapien
cattgtgacttcaagaggcctccca

SEQ ID NO: 502412 - DNA, 25 bp, Homo sapien
cctcggagctgttggagtgagcatc

SEQ ID NO: 502413 - DNA, 25 bp, Homo sapien
cattcgggctcagctacctggtgaa

SEQ ID NO: 502414 - DNA, 25 bp, Homo sapien
aagattcttgggaactcatagcgcc

SEQ ID NO: 502415 - DNA, 25 bp, Homo sapien
agcgcccattggatcttcagcacga

SEQ ID NO: 502416 - DNA, 25 bp, Homo sapien
tcaggttcccactggcagtctcggc

SEQ ID NO: 502417 - DNA, 25 bp, Homo sapien
caggttcccactggcagtctcggcc

SEQ ID NO: 502418 - DNA, 25 bp, Homo sapien
actctctgcgtgaggtgagtggctc

SEQ ID NO: 502419 - DNA, 25 bp, Homo sapien
gtgtctgcaggtctgccaaccccat

SEQ ID NO: 502420 - DNA, 25 bp, Homo sapien
cataggagccgttgacgcagcttcc

SEQ ID NO: 502421 - DNA, 25 bp, Homo sapien
tggctcgggtacaaagagacgacgt

SEQ ID NO: 502422 - DNA, 25 bp, Homo sapien
tctgcatcccttgcaagcctgcatt

SEQ ID NO: 502423 - DNA, 25 bp, Homo sapien
catgatgtcaggcacctaaggtcgt

SEQ ID NO: 502424 - DNA, 25 bp, Homo sapien
cacgcatggcagttctagtgtgttc

SEQ ID NO: 502425 - DNA, 25 bp, Homo sapien
cggaagtggtggataggctggatca

SEQ ID NO: 502426 - DNA, 25 bp, Homo sapien
gcttcttggaaggatgcgttgccca

SEQ ID NO: 502427 - DNA, 25 bp, Homo sapien
gaaggatgcgttgcccatctcctga

SEQ ID NO: 502428 - DNA, 25 bp, Homo sapien
caccttcacttcaggtaagtgagag

SEQ ID NO: 502429 - DNA, 25 bp, Homo sapien
ttccttgtgtcccacgaccaaccat

SEQ ID NO: 502430 - DNA, 25 bp, Homo sapien
actgcgttttcatgtggagtgcccc

SEQ ID NO: 502431 - DNA, 25 bp, Homo sapien
tgcggacaccatagcattgcgcttg

SEQ ID NO: 502432 - DNA, 25 bp, Homo sapien
gctttgtgcggcagacaacagccac

SEQ ID NO: 502433 - DNA, 25 bp, Homo sapien
tatccactatattctggtcctcagg

SEQ ID NO: 502434 - DNA, 25 bp, Homo sapien
aggtgttctgaacgctgctgaagga

SEQ ID NO: 502435 - DNA, 25 bp, Homo sapien
ttaagaagtgatgacataaaagctc

SEQ ID NO: 502436 - DNA, 25 bp, Homo sapien
tgacataaaagctcaaggtgctgct

SEQ ID NO: 502437 - DNA, 25 bp, Homo sapien
gattctctcgtaacattttcaggtg

SEQ ID NO: 502438 - DNA, 25 bp, Homo sapien
catgctgtgcattggccctctggag

SEQ ID NO: 502439 - DNA, 25 bp, Homo sapien
cacaagttgcgtggttgacacttag

SEQ ID NO: 502440 - DNA, 25 bp, Homo sapien
gagtcagtaagagtcagcactggcc

SEQ ID NO: 502441 - DNA, 25 bp, Homo sapien
tgtctgtggacgatctttctctgtg

SEQ ID NO: 502442 - DNA, 25 bp, Homo sapien
gcaattcttgatctggaatccatgg

SEQ ID NO: 502443 - DNA, 25 bp, Homo sapien
gagtcatcatgcaagcaattcttga

SEQ ID NO: 502444 - DNA, 25 bp, Homo sapien
gacttcttactcatgagctccatga

SEQ ID NO: 502445 - DNA, 25 bp, Homo sapien
gctcaaggatggacttcttactcat

SEQ ID NO: 502446 - DNA, 25 bp, Homo sapien
ctcctgtctgggcaactagagcttg

SEQ ID NO: 502447 - DNA, 25 bp, Homo sapien
tgggcaactagagcttgaccagcat

SEQ ID NO: 502448 - DNA, 25 bp, Homo sapien
agcatcctgacattctatcacacac

SEQ ID NO: 502449 - DNA, 25 bp, Homo sapien
tgtctgggcaactagagcttgacca

SEQ ID NO: 502450 - DNA, 25 bp, Homo sapien
aacacaaggtgggtggccaagtgca

SEQ ID NO: 502451 - DNA, 25 bp, Homo sapien
tgaccgctcaagatgggtggagaac

SEQ ID NO: 502452 - DNA, 25 bp, Homo sapien
ggccaagtgcagaagaacagcaggt

SEQ ID NO: 502453 - DNA, 25 bp, Homo sapien
cttagcatctcatcagcaggactgt

SEQ ID NO: 502454 - DNA, 25 bp, Homo sapien
caaagataagtgggaatgaggttcc

SEQ ID NO: 502455 - DNA, 25 bp, Homo sapien
gttccctggagcatgagtcgcaggt

SEQ ID NO: 502456 - DNA, 25 bp, Homo sapien
cgggatgtggataggctttgaggaa

SEQ ID NO: 502457 - DNA, 25 bp, Homo sapien
tgctggctgcgggatgtggataggc

SEQ ID NO: 502458 - DNA, 25 bp, Homo sapien
tttgttctcagaagggagcccggtg

SEQ ID NO: 502459 - DNA, 25 bp, Homo sapien
cctttgaaagcgcagtggtgtccgg

SEQ ID NO: 502460 - DNA, 25 bp, Homo sapien
cccggtggaaaatttgaagctgcag

SEQ ID NO: 502461 - DNA, 25 bp, Homo sapien
gggctcgccactgaatagcgtttgt

SEQ ID NO: 502462 - DNA, 25 bp, Homo sapien
gcacaggtcatcacaatacatgact

SEQ ID NO: 502463 - DNA, 25 bp, Homo sapien
ttagcacaggtcatcacaatacatg

SEQ ID NO: 502464 - DNA, 25 bp, Homo sapien
cgttagcacaggtcatcacaataca

SEQ ID NO: 502465 - DNA, 25 bp, Homo sapien
tgactgaatggtcatcgttagcaca

SEQ ID NO: 502466 - DNA, 25 bp, Homo sapien
tcagccttccagaaggaatcaatct

SEQ ID NO: 502467 - DNA, 25 bp, Homo sapien
ggctctattaagatgccgagtgcat

SEQ ID NO: 502468 - DNA, 25 bp, Homo sapien
ccgagtgcatccgtggcacggccag

SEQ ID NO: 502469 - DNA, 25 bp, Homo sapien
gctgcccataggctctattaagatg

SEQ ID NO: 502470 - DNA, 25 bp, Homo sapien
gcgccctgcacggtttgatcagtaa

SEQ ID NO: 502471 - DNA, 25 bp, Homo sapien
gcacggtttgatcagtaaatggtgg

SEQ ID NO: 502472 - DNA, 25 bp, Homo sapien
tttttgtcccttcatcctgcgccct

SEQ ID NO: 502473 - DNA, 25 bp, Homo sapien
tcatcctgcgccctgcacggtttga

SEQ ID NO: 502474 - DNA, 25 bp, Homo sapien
agctgctctcgggtgttctacttgg

SEQ ID NO: 502475 - DNA, 25 bp, Homo sapien
ccagctgctctcgggtgttctactt

SEQ ID NO: 502476 - DNA, 25 bp, Homo sapien
tgctctcgggtgttctacttgggtg

SEQ ID NO: 502477 - DNA, 25 bp, Homo sapien
gctgctctcgggtgttctacttggg

SEQ ID NO: 502478 - DNA, 25 bp, Homo sapien
aatcttgcaaaataacgagctttcc

SEQ ID NO: 502479 - DNA, 25 bp, Homo sapien
tcttgcaaaataacgagctttcctt

SEQ ID NO: 502480 - DNA, 25 bp, Homo sapien
aataacgagctttcctttgaatctt

SEQ ID NO: 502481 - DNA, 25 bp, Homo sapien
caaaataacgagctttcctttgaat

SEQ ID NO: 502482 - DNA, 25 bp, Homo sapien
tatcctgcaaccctgattgtcgctg

SEQ ID NO: 502483 - DNA, 25 bp, Homo sapien
cctcctttgcaagccctatcctgca

SEQ ID NO: 502484 - DNA, 25 bp, Homo sapien
gattgtcgctgagctagggtcgccc

SEQ ID NO: 502485 - DNA, 25 bp, Homo sapien
ctgagctagggtcgccctatgatgg

SEQ ID NO: 502486 - DNA, 25 bp, Homo sapien
ccagaaaccgcgcttggtgatgttg

SEQ ID NO: 502487 - DNA, 25 bp, Homo sapien
tcagacgctgcaaagggccttctgt

SEQ ID NO: 502488 - DNA, 25 bp, Homo sapien
gcctggtgtgtttccccgggaagca

SEQ ID NO: 502489 - DNA, 25 bp, Homo sapien
cgaatctgcctgaatcgccgtgaat

SEQ ID NO: 502490 - DNA, 25 bp, Homo sapien
tgggcttccgcgcttccccgctgcc

SEQ ID NO: 502491 - DNA, 25 bp, Homo sapien
ctttccccagccgttcctcactcat

SEQ ID NO: 502492 - DNA, 25 bp, Homo sapien
cccgctgccgagacctttccccagc

SEQ ID NO: 502493 - DNA, 25 bp, Homo sapien
cgctgacccggcctcactcggcctc

SEQ ID NO: 502494 - DNA, 25 bp, Homo sapien
gcacagcacttagcgccgtgggtgt

SEQ ID NO: 502495 - DNA, 25 bp, Homo sapien
cacttagcgccgtgggtgtactgtg

SEQ ID NO: 502496 - DNA, 25 bp, Homo sapien
cagcacttagcgccgtgggtgtact

SEQ ID NO: 502497 - DNA, 25 bp, Homo sapien
tgcacagcacttagcgccgtgggtg

SEQ ID NO: 502498 - DNA, 25 bp, Homo sapien
ggcatccactaacacgctcaagact

SEQ ID NO: 502499 - DNA, 25 bp, Homo sapien
tacttcgttgaggacggcttgccag

SEQ ID NO: 502500 - DNA, 25 bp, Homo sapien
gatactgactgtccttcgtgtgcca

SEQ ID NO: 502501 - DNA, 25 bp, Homo sapien
tgccagaggctgacggcacagttgc

SEQ ID NO: 502502 - DNA, 25 bp, Homo sapien
aaagattctccctcgtattcatttt

SEQ ID NO: 502503 - DNA, 25 bp, Homo sapien
aaaagattctccctcgtattcattt

SEQ ID NO: 502504 - DNA, 25 bp, Homo sapien
atggcctttccggttaaagacacag

SEQ ID NO: 502505 - DNA, 25 bp, Homo sapien
ctaattgtgcagtcttaatttccta

SEQ ID NO: 502506 - DNA, 25 bp, Homo sapien
gagacatggcctttccggttaaaga

SEQ ID NO: 502507 - DNA, 25 bp, Homo sapien
aattgtgcagtcttaatttcctagt

SEQ ID NO: 502508 - DNA, 25 bp, Homo sapien
tgcctcgctcttgccctgtctgtca

SEQ ID NO: 502509 - DNA, 25 bp, Homo sapien
aggtgagtctctgcctcgctcttgc

SEQ ID NO: 502510 - DNA, 25 bp, Homo sapien
caggtgagtctctgcctcgctcttg

SEQ ID NO: 502511 - DNA, 25 bp, Homo sapien
ctctgcctcgctcttgccctgtctg

SEQ ID NO: 502512 - DNA, 25 bp, Homo sapien
gaacttcactagacatgtgtgaaca

SEQ ID NO: 502513 - DNA, 25 bp, Homo sapien
aagtctgaaaatcctgagctccagg

SEQ ID NO: 502514 - DNA, 25 bp, Homo sapien
cgtagcgtctccctaatgatgcaca

SEQ ID NO: 502515 - DNA, 25 bp, Homo sapien
gaacaactctacattctgatccgta

SEQ ID NO: 502516 - DNA, 25 bp, Homo sapien
aaggtggcctcgaggggctctcatc

SEQ ID NO: 502517 - DNA, 25 bp, Homo sapien
taaagatttaagctgtacttctgtg

SEQ ID NO: 502518 - DNA, 25 bp, Homo sapien
agaaggtgggtagcgagggctccag

SEQ ID NO: 502519 - DNA, 25 bp, Homo sapien
gttaattaagcacgttgaagaagag

SEQ ID NO: 502520 - DNA, 25 bp, Homo sapien
atcccggaaggcctagaacaccagg

SEQ ID NO: 502521 - DNA, 25 bp, Homo sapien
ggaatgggagcatgaatgccctcag

SEQ ID NO: 502522 - DNA, 25 bp, Homo sapien
gtctgctttccatctatcctctctg

SEQ ID NO: 502523 - DNA, 25 bp, Homo sapien
tgcttggtccctgaaaagcaggagg

SEQ ID NO: 502524 - DNA, 25 bp, Homo sapien
cctgaaatgcctccggtcctcacat

SEQ ID NO: 502525 - DNA, 25 bp, Homo sapien
gcgatcccccattaatacccaagaa

SEQ ID NO: 502526 - DNA, 25 bp, Homo sapien
catccatcatagtcaggctccgggc

SEQ ID NO: 502527 - DNA, 25 bp, Homo sapien
gtcagctggctacattccagagctg

SEQ ID NO: 502528 - DNA, 25 bp, Homo sapien
tgaacccgaatcactctgctggatg

SEQ ID NO: 502529 - DNA, 25 bp, Homo sapien
gtgaaggattgcttccgcccaaggg

SEQ ID NO: 502530 - DNA, 25 bp, Homo sapien
ctccaagacagaaccggcatcctgg

SEQ ID NO: 502531 - DNA, 25 bp, Homo sapien
ggagaatccataagccccagttaca

SEQ ID NO: 502532 - DNA, 25 bp, Homo sapien
tcagagttgaaggacactcctccca

SEQ ID NO: 502533 - DNA, 25 bp, Homo sapien
cacacaaattggacccctggattca

SEQ ID NO: 502534 - DNA, 25 bp, Homo sapien
cgatggataccccagatctgtgctg

SEQ ID NO: 502535 - DNA, 25 bp, Homo sapien
tctgtgctgggactacgtagctgct

SEQ ID NO: 502536 - DNA, 25 bp, Homo sapien
ggaaccagagcattcattttcccat

SEQ ID NO: 502537 - DNA, 25 bp, Homo sapien
cttcatggccacgacacatccagtg

SEQ ID NO: 502538 - DNA, 25 bp, Homo sapien
aacacaaagttattgggaaccagag

SEQ ID NO: 502539 - DNA, 25 bp, Homo sapien
tgttatttatgcgtttctccctgga

SEQ ID NO: 502540 - DNA, 25 bp, Homo sapien
ttctctgaggctttgcccacaaagt

SEQ ID NO: 502541 - DNA, 25 bp, Homo sapien
aaaggcaaacagtatcatccgtgga

SEQ ID NO: 502542 - DNA, 25 bp, Homo sapien
gtatcatccgtggagataattttct

SEQ ID NO: 502543 - DNA, 25 bp, Homo sapien
caaacagtatcatccgtggagataa

SEQ ID NO: 502544 - DNA, 25 bp, Homo sapien
tattatcctcctgaagtcgacagcg

SEQ ID NO: 502545 - DNA, 25 bp, Homo sapien
caagaaagccgtgatcctgaaaact

SEQ ID NO: 502546 - DNA, 25 bp, Homo sapien
gcttgcccgttttgagctacaatcg

SEQ ID NO: 502547 - DNA, 25 bp, Homo sapien
ttctcaggataggaacatgaagtcc

SEQ ID NO: 502548 - DNA, 25 bp, Homo sapien
ctgagaattaggctgtgatgttatc

SEQ ID NO: 502549 - DNA, 25 bp, Homo sapien
tgatgttatctgtttgcagcgaaga

SEQ ID NO: 502550 - DNA, 25 bp, Homo sapien
tccactcacagtagcataggccttg

SEQ ID NO: 502551 - DNA, 25 bp, Homo sapien
gaatctgagcaagaatgctgcatct

SEQ ID NO: 502552 - DNA, 25 bp, Homo sapien
tcctttggtcatgggcggccctgcg

SEQ ID NO: 502553 - DNA, 25 bp, Homo sapien
cagactcgtcctcggagaacaaaaa

SEQ ID NO: 502554 - DNA, 25 bp, Homo sapien
ccttccgctgtggtcaggacaggaa

SEQ ID NO: 502555 - DNA, 25 bp, Homo sapien
ccaggctttctagcaggaagtttgt

SEQ ID NO: 502556 - DNA, 25 bp, Homo sapien
cagaggtgtccttgcatcagagttt

SEQ ID NO: 502557 - DNA, 25 bp, Homo sapien
tgtgtagatacacactctggtgtca

SEQ ID NO: 502558 - DNA, 25 bp, Homo sapien
gagtttgtgacaaggcctgagccgt

SEQ ID NO: 502559 - DNA, 25 bp, Homo sapien
gcttggtagaatgacgggcgctcct

SEQ ID NO: 502560 - DNA, 25 bp, Homo sapien
ctgtggccgctcctcttggaatgcg

SEQ ID NO: 502561 - DNA, 25 bp, Homo sapien
ggctcagggataccatgagcccagc

SEQ ID NO: 502562 - DNA, 25 bp, Homo sapien
gccctgcatgctggcgccagtgctg

SEQ ID NO: 502563 - DNA, 25 bp, Homo sapien
tcgtttcagcgaccccacatctggg

SEQ ID NO: 502564 - DNA, 25 bp, Homo sapien
tgggatggtttctgcgttcactgcc

SEQ ID NO: 502565 - DNA, 25 bp, Homo sapien
ctgggatggtttctgcgttcactgc

SEQ ID NO: 502566 - DNA, 25 bp, Homo sapien
agagcctgacctgattggggcaact

SEQ ID NO: 502567 - DNA, 25 bp, Homo sapien
gcaactccttgcctgaggaacgctt

SEQ ID NO: 502568 - DNA, 25 bp, Homo sapien
ttaggatctccgtgggctgctacct

SEQ ID NO: 502569 - DNA, 25 bp, Homo sapien
ggtaggtgcctcataaatgcagggc

SEQ ID NO: 502570 - DNA, 25 bp, Homo sapien
aaaatctccaggttatctgcccagg

SEQ ID NO: 502571 - DNA, 25 bp, Homo sapien
cagggctatgatccaaagtgacggg

SEQ ID NO: 502572 - DNA, 25 bp, Homo sapien
taagtgctccgggtcatcagggacc

SEQ ID NO: 502573 - DNA, 25 bp, Homo sapien
tgctccgggtcatcagggaccttca

SEQ ID NO: 502574 - DNA, 25 bp, Homo sapien
cgagtctcatgaggcactcgtccct

SEQ ID NO: 502575 - DNA, 25 bp, Homo sapien
actcttcaacttggcgagtctcatg

SEQ ID NO: 502576 - DNA, 25 bp, Homo sapien
ggacatgttttatgccttcgctgta

SEQ ID NO: 502577 - DNA, 25 bp, Homo sapien
aactctggaatgggtccaaaagtct

SEQ ID NO: 502578 - DNA, 25 bp, Homo sapien
ggtccaaaagtctgtaggacatgtt

SEQ ID NO: 502579 - DNA, 25 bp, Homo sapien
tatctgtcgcagtagcttaacatac

SEQ ID NO: 502580 - DNA, 25 bp, Homo sapien
tctgctggtgcatctcatgggaccc

SEQ ID NO: 502581 - DNA, 25 bp, Homo sapien
gttggcctgcgttcacacactgatt

SEQ ID NO: 502582 - DNA, 25 bp, Homo sapien
cactgtattgggtacggtcaaggct

SEQ ID NO: 502583 - DNA, 25 bp, Homo sapien
tcctccaaccatgggtgtacaaggt

SEQ ID NO: 502584 - DNA, 25 bp, Homo sapien
cttgtaccttgctggtttgggtgga

SEQ ID NO: 502585 - DNA, 25 bp, Homo sapien
ggatggagccaggcgctcatctgca

SEQ ID NO: 502586 - DNA, 25 bp, Homo sapien
gagccaggcgctcatctgcacaagc

SEQ ID NO: 502587 - DNA, 25 bp, Homo sapien
gttggagagctcacgttggcttgta

SEQ ID NO: 502588 - DNA, 25 bp, Homo sapien
ttgccacccatacatgggaagtccg

SEQ ID NO: 502589 - DNA, 25 bp, Homo sapien
gaagtccggttttctttcacgcagc

SEQ ID NO: 502590 - DNA, 25 bp, Homo sapien
gctatgaacccacacctgtatgaat

SEQ ID NO: 502591 - DNA, 25 bp, Homo sapien
ccttggagagccttaattgccaccc

SEQ ID NO: 502592 - DNA, 25 bp, Homo sapien
caggtcactaggagacacgattcct

SEQ ID NO: 502593 - DNA, 25 bp, Homo sapien
tttccaggggtccaatgaatgcata

SEQ ID NO: 502594 - DNA, 25 bp, Homo sapien
cattgagatgcatggtttccagggg

SEQ ID NO: 502595 - DNA, 25 bp, Homo sapien
gcatgcccaacccttctgacatgac

SEQ ID NO: 502596 - DNA, 25 bp, Homo sapien
accgtggacgatgcgtcgcgccctt

SEQ ID NO: 502597 - DNA, 25 bp, Homo sapien
taggactgaggcagtagcgctggcc

SEQ ID NO: 502598 - DNA, 25 bp, Homo sapien
actgaggcagtagcgctggcccgcc

SEQ ID NO: 502599 - DNA, 25 bp, Homo sapien
ctgcgagagcccgaccgtggacgat

SEQ ID NO: 502600 - DNA, 25 bp, Homo sapien
ggatttagcccacccagactatgga

SEQ ID NO: 502601 - DNA, 25 bp, Homo sapien
tgagtgactggacgctctagcctgg

SEQ ID NO: 502602 - DNA, 25 bp, Homo sapien
ggaactaccccacagtctgcaggtg

SEQ ID NO: 502603 - DNA, 25 bp, Homo sapien
gaaagccatggacaggccatcagga

SEQ ID NO: 502604 - DNA, 25 bp, Homo sapien
aagttcttccactcctcagctagag

SEQ ID NO: 502605 - DNA, 25 bp, Homo sapien
tgtcaaataaagaaacgcaacagcg

SEQ ID NO: 502606 - DNA, 25 bp, Homo sapien
gaacacagacttgctacccaggaat

SEQ ID NO: 502607 - DNA, 25 bp, Homo sapien
cgcaacagcgagaagtagagtactc

SEQ ID NO: 502608 - DNA, 25 bp, Homo sapien
gaacatctgcactactctagagaga

SEQ ID NO: 502609 - DNA, 25 bp, Homo sapien
gggtcgcccagcaagtgtaagcaaa

SEQ ID NO: 502610 - DNA, 25 bp, Homo sapien
tgtaagcaaacctgtgggaaagctg

SEQ ID NO: 502611 - DNA, 25 bp, Homo sapien
ggtggcatgcagcttctgactctaa

SEQ ID NO: 502612 - DNA, 25 bp, Homo sapien
tcattccgaaggacaggcagaaccc

SEQ ID NO: 502613 - DNA, 25 bp, Homo sapien
cctaaggacagcagtccagcacagg

SEQ ID NO: 502614 - DNA, 25 bp, Homo sapien
gagaccaagaactcaatctctgcgg

SEQ ID NO: 502615 - DNA, 25 bp, Homo sapien
cctaacagttggcagacatgtctga

SEQ ID NO: 502616 - DNA, 25 bp, Homo sapien
gctgcttcatcccaaaactgaagcc

SEQ ID NO: 502617 - DNA, 25 bp, Homo sapien
tcagtagattgtggccagacatgtc

SEQ ID NO: 502618 - DNA, 25 bp, Homo sapien
ccaataagatcacgtgacccaggga

SEQ ID NO: 502619 - DNA, 25 bp, Homo sapien
gaaatgacatcccagccaataagat

SEQ ID NO: 502620 - DNA, 25 bp, Homo sapien
caaaaaggttctgatagatccgtgt

SEQ ID NO: 502621 - DNA, 25 bp, Homo sapien
caacaagtgaacatgggcaaggagt

SEQ ID NO: 502622 - DNA, 25 bp, Homo sapien
taaaaataccttgacactgactgat

SEQ ID NO: 502623 - DNA, 25 bp, Homo sapien
gccctaacagtggaaacccgagcac

SEQ ID NO: 502624 - DNA, 25 bp, Homo sapien
gtgtgtgtccatgcgagtccaaaca

SEQ ID NO: 502625 - DNA, 25 bp, Homo sapien
caaggctcggtgtgtgtccatgcga

SEQ ID NO: 502626 - DNA, 25 bp, Homo sapien
gtgtccatgcgagtccaaacaagga

SEQ ID NO: 502627 - DNA, 25 bp, Homo sapien
tcggtgtgtgtccatgcgagtccaa

SEQ ID NO: 502628 - DNA, 25 bp, Homo sapien
ggtgcagatgactcgagcccgagca

SEQ ID NO: 502629 - DNA, 25 bp, Homo sapien
tccctacgcggtgcagctgggtact

SEQ ID NO: 502630 - DNA, 25 bp, Homo sapien
aatgtttttgcaacacaggcgtggg

SEQ ID NO: 502631 - DNA, 25 bp, Homo sapien
ggcccttgagccttccacaatgttt

SEQ ID NO: 502632 - DNA, 25 bp, Homo sapien
aatcttcttcatcagggcgtgggtt

SEQ ID NO: 502633 - DNA, 25 bp, Homo sapien
gaccagctcaaccagcgggatgtag

SEQ ID NO: 502634 - DNA, 25 bp, Homo sapien
aggcggttcagaacgaagccggcca

SEQ ID NO: 502635 - DNA, 25 bp, Homo sapien
gatgattgcatattgcaggcggttc

SEQ ID NO: 502636 - DNA, 25 bp, Homo sapien
ctcttccagtctaatgtcaccttcc

SEQ ID NO: 502637 - DNA, 25 bp, Homo sapien
cttccagtctaatgtcaccttcctg

SEQ ID NO: 502638 - DNA, 25 bp, Homo sapien
tcttccagtctaatgtcaccttcct

SEQ ID NO: 502639 - DNA, 25 bp, Homo sapien
acacaggaaggcattgtccaggtga

SEQ ID NO: 502640 - DNA, 25 bp, Homo sapien
tccaggtgagcatgccccaagggag

SEQ ID NO: 502641 - DNA, 25 bp, Homo sapien
ggacttcactgttcaactctggtgt

SEQ ID NO: 502642 - DNA, 25 bp, Homo sapien
caactctggtgttcttggtttactt

SEQ ID NO: 502643 - DNA, 25 bp, Homo sapien
agtgctggacgccttcccttgggca

SEQ ID NO: 502644 - DNA, 25 bp, Homo sapien
gcacagacttgtctcatgtgggtta

SEQ ID NO: 502645 - DNA, 25 bp, Homo sapien
cctggcccacatctgcaactgagtg

SEQ ID NO: 502646 - DNA, 25 bp, Homo sapien
gacttgtctcatgtgggttatcccc

SEQ ID NO: 502647 - DNA, 25 bp, Homo sapien
ggtgagttcgaaaaggccacgcaca

SEQ ID NO: 502648 - DNA, 25 bp, Homo sapien
tatttaccaccaataccagggcaga

SEQ ID NO: 502649 - DNA, 25 bp, Homo sapien
tacagcacagtacttggtgggctcc

SEQ ID NO: 502650 - DNA, 25 bp, Homo sapien
gcacgggcgctttgcagacagcaag

SEQ ID NO: 502651 - DNA, 25 bp, Homo sapien
caatagtgggatggaaaaagagtag

SEQ ID NO: 502652 - DNA, 25 bp, Homo sapien
taaacgtctcgtcaaataactcagg

SEQ ID NO: 502653 - DNA, 25 bp, Homo sapien
gaagtgtcattattcaacagttacc

SEQ ID NO: 502654 - DNA, 25 bp, Homo sapien
aagaaagtgactcaggtgtcctctc

SEQ ID NO: 502655 - DNA, 25 bp, Homo sapien
caatcctctggatttaaaatactca

SEQ ID NO: 502656 - DNA, 25 bp, Homo sapien
tcaatcctctggatttaaaatactc

SEQ ID NO: 502657 - DNA, 25 bp, Homo sapien
aatcctctggatttaaaatactcac

SEQ ID NO: 502658 - DNA, 25 bp, Homo sapien
tggaactgcttaagatcactcgatc

SEQ ID NO: 502659 - DNA, 25 bp, Homo sapien
caatgatggaatctaactgagcaaa

SEQ ID NO: 502660 - DNA, 25 bp, Homo sapien
cacgatgcattgcttcacatggacc

SEQ ID NO: 502661 - DNA, 25 bp, Homo sapien
caaacaacttggaaggcatgagaca

SEQ ID NO: 502662 - DNA, 25 bp, Homo sapien
cagtgggaattttacacctgacaac

SEQ ID NO: 502663 - DNA, 25 bp, Homo sapien
gctacatccatctgaccagcagtta

SEQ ID NO: 502664 - DNA, 25 bp, Homo sapien
aatctggtgccaaagcagtcagcta

SEQ ID NO: 502665 - DNA, 25 bp, Homo sapien
caaatagtgccgttctggacccaga

SEQ ID NO: 502666 - DNA, 25 bp, Homo sapien
cctaaagcagcaggcatacgatgca

SEQ ID NO: 502667 - DNA, 25 bp, Homo sapien
agcagcaggcatacgatgcaggttt

SEQ ID NO: 502668 - DNA, 25 bp, Homo sapien
tggagccttaagtttggcacttcag

SEQ ID NO: 502669 - DNA, 25 bp, Homo sapien
gctgagtttgttgtctcctaaagca

SEQ ID NO: 502670 - DNA, 25 bp, Homo sapien
tggatggatatacatgagtcgtcac

SEQ ID NO: 502671 - DNA, 25 bp, Homo sapien
tcattgaaaatgctatgaggttcac

SEQ ID NO: 502672 - DNA, 25 bp, Homo sapien
catgagtcgtcactatattattcta

SEQ ID NO: 502673 - DNA, 25 bp, Homo sapien
gatggatatacatgagtcgtcacta

SEQ ID NO: 502674 - DNA, 25 bp, Homo sapien
ttaaggcgttaaacatgcctacaat

SEQ ID NO: 502675 - DNA, 25 bp, Homo sapien
ttttaaggcgttaaacatgcctaca

SEQ ID NO: 502676 - DNA, 25 bp, Homo sapien
ccaactcagctatctcttctaaact

SEQ ID NO: 502677 - DNA, 25 bp, Homo sapien
actcagctatctcttctaaacttac

SEQ ID NO: 502678 - DNA, 25 bp, Homo sapien
cacagtgggattcatttcactgacc

SEQ ID NO: 502679 - DNA, 25 bp, Homo sapien
cagcttcgaagccttctttctagag

SEQ ID NO: 502680 - DNA, 25 bp, Homo sapien
tccagcattcaacaatctaccagtg

SEQ ID NO: 502681 - DNA, 25 bp, Homo sapien
taactgaacaaagaagaagccagct

SEQ ID NO: 502682 - DNA, 25 bp, Homo sapien
tcggagagcgatcaccttaggcttc

SEQ ID NO: 502683 - DNA, 25 bp, Homo sapien
catctagtgctatgagtcggagagc

SEQ ID NO: 502684 - DNA, 25 bp, Homo sapien
cctggacggcatccctgttacaact

SEQ ID NO: 502685 - DNA, 25 bp, Homo sapien
gagagtgtcgacgtcaagctccgct

SEQ ID NO: 502686 - DNA, 25 bp, Homo sapien
attaagtaacttcttcactttgatg

SEQ ID NO: 502687 - DNA, 25 bp, Homo sapien
aacttcttcactttgatgacaactg

SEQ ID NO: 502688 - DNA, 25 bp, Homo sapien
ttaagtaacttcttcactttgatga

SEQ ID NO: 502689 - DNA, 25 bp, Homo sapien
tcttcactttgatgacaactgtgta

SEQ ID NO: 502690 - DNA, 25 bp, Homo sapien
aagatgggattctgatagcttaagg

SEQ ID NO: 502691 - DNA, 25 bp, Homo sapien
taaggacagcgcgtggccctctgag

SEQ ID NO: 502692 - DNA, 25 bp, Homo sapien
atagcttaaggacagcgcgtggccc

SEQ ID NO: 502693 - DNA, 25 bp, Homo sapien
gattctgatagcttaaggacagcgc

SEQ ID NO: 502694 - DNA, 25 bp, Homo sapien
ggcaggcctgtcactggaagaagct

SEQ ID NO: 502695 - DNA, 25 bp, Homo sapien
ggattcgctctgctcgaacaccttc

SEQ ID NO: 502696 - DNA, 25 bp, Homo sapien
tgcatctcccaggtcccagacagct

SEQ ID NO: 502697 - DNA, 25 bp, Homo sapien
tcccagacagctggaacaacacatg

SEQ ID NO: 502698 - DNA, 25 bp, Homo sapien
gtggccagtggagcaaactcgagtg

SEQ ID NO: 502699 - DNA, 25 bp, Homo sapien
ttgggcctcttcttgccatcgggat

SEQ ID NO: 502700 - DNA, 25 bp, Homo sapien
ttgccatcgggatgttaggatttgg

SEQ ID NO: 502701 - DNA, 25 bp, Homo sapien
gatccagtctctttggtggaacggg

SEQ ID NO: 502702 - DNA, 25 bp, Homo sapien
cgggcgccaaggatggcgctccaaa

SEQ ID NO: 502703 - DNA, 25 bp, Homo sapien
tggcgctccaaagtagagggcacac

SEQ ID NO: 502704 - DNA, 25 bp, Homo sapien
caaggatggcgctccaaagtagagg

SEQ ID NO: 502705 - DNA, 25 bp, Homo sapien
ggcgccaaggatggcgctccaaagt

SEQ ID NO: 502706 - DNA, 25 bp, Homo sapien
tgcttcacgaaagtacaaacaacgt

SEQ ID NO: 502707 - DNA, 25 bp, Homo sapien
catcacagataacatggtgtgcttc

SEQ ID NO: 502708 - DNA, 25 bp, Homo sapien
gataacatggtgtgcttcacgaaag

SEQ ID NO: 502709 - DNA, 25 bp, Homo sapien
caaacaacgtagaaggagcccgttg

SEQ ID NO: 502710 - DNA, 25 bp, Homo sapien
cccagccgttgctgcatagggatgg

SEQ ID NO: 502711 - DNA, 25 bp, Homo sapien
tagggatgggatgtaggcttcctct

SEQ ID NO: 502712 - DNA, 25 bp, Homo sapien
agcaggcagctctcacgcccacctg

SEQ ID NO: 502713 - DNA, 25 bp, Homo sapien
cgtccccagccgttgctgcataggg

SEQ ID NO: 502714 - DNA, 25 bp, Homo sapien
gcccctcagaggcagcggcgactcc

SEQ ID NO: 502715 - DNA, 25 bp, Homo sapien
ataaaatgctcctggcccctcagag

SEQ ID NO: 502716 - DNA, 25 bp, Homo sapien
cagcaaagtcctctcgcgatgtcca

SEQ ID NO: 502717 - DNA, 25 bp, Homo sapien
acacccggaacacagggcagcaaag

SEQ ID NO: 502718 - DNA, 25 bp, Homo sapien
tcgcgatgtccattgcccagagtgg

SEQ ID NO: 502719 - DNA, 25 bp, Homo sapien
cccagagtggcgagtcagaagtcag

SEQ ID NO: 502720 - DNA, 25 bp, Homo sapien
agggacagggaaggagcagacaact

SEQ ID NO: 502721 - DNA, 25 bp, Homo sapien
ggacagggaaggagcagacaactgg

SEQ ID NO: 502722 - DNA, 25 bp, Homo sapien
acagggaaggagcagacaactggac

SEQ ID NO: 502723 - DNA, 25 bp, Homo sapien
cagggaaggagcagacaactggaca

SEQ ID NO: 502724 - DNA, 25 bp, Homo sapien
caacagaaatagctactccagtgtc

SEQ ID NO: 502725 - DNA, 25 bp, Homo sapien
cacaaatgtgcaatgcgatacttgc

SEQ ID NO: 502726 - DNA, 25 bp, Homo sapien
caggtcctgcgcacgcggcaggaag

SEQ ID NO: 502727 - DNA, 25 bp, Homo sapien
aaccacagtaggtctctcagaggaa

SEQ ID NO: 502728 - DNA, 25 bp, Homo sapien
agggcctgtgcgtgggcacaggagc

SEQ ID NO: 502729 - DNA, 25 bp, Homo sapien
gggcctgtgcgtgggcacaggagct

SEQ ID NO: 502730 - DNA, 25 bp, Homo sapien
ggcctgtgcgtgggcacaggagctc

SEQ ID NO: 502731 - DNA, 25 bp, Homo sapien
gcccttgaagatgcaaaatgcccac

SEQ ID NO: 502732 - DNA, 25 bp, Homo sapien
cacggataaggcattggtctcttga

SEQ ID NO: 502733 - DNA, 25 bp, Homo sapien
tcacgctagtttgatgagaacccag

SEQ ID NO: 502734 - DNA, 25 bp, Homo sapien
tgaaacagaacattgtcacgctagt

SEQ ID NO: 502735 - DNA, 25 bp, Homo sapien
ccccacagatgcggcgccagtgtcc

SEQ ID NO: 502736 - DNA, 25 bp, Homo sapien
ggccccacagatgcggcgccagtgt

SEQ ID NO: 502737 - DNA, 25 bp, Homo sapien
aggccccacagatgcggcgccagtg

SEQ ID NO: 502738 - DNA, 25 bp, Homo sapien
tcaggccccacagatgcggcgccag

SEQ ID NO: 502739 - DNA, 25 bp, Homo sapien
tgatgagtgacagctgctcttccac

SEQ ID NO: 502740 - DNA, 25 bp, Homo sapien
ctttcagagaacctgcctgctccag

SEQ ID NO: 502741 - DNA, 25 bp, Homo sapien
gcatggcaccctctactgcttcttg

SEQ ID NO: 502742 - DNA, 25 bp, Homo sapien
tgcttcttggatattgggacaacca

SEQ ID NO: 502743 - DNA, 25 bp, Homo sapien
ggactggaccccacatgtgaatctg

SEQ ID NO: 502744 - DNA, 25 bp, Homo sapien
gccaatggcagaggcccataggcag

SEQ ID NO: 502745 - DNA, 25 bp, Homo sapien
cagtaaccagcccaagggaagcctg

SEQ ID NO: 502746 - DNA, 25 bp, Homo sapien
taccatgacttccacggactggacc

SEQ ID NO: 502747 - DNA, 25 bp, Homo sapien
gcattggtctagatgcacagcacac

SEQ ID NO: 502748 - DNA, 25 bp, Homo sapien
tagcccaaccatgactgctaatgtg

SEQ ID NO: 502749 - DNA, 25 bp, Homo sapien
tcatgccggaagcacgcaggatcat

SEQ ID NO: 502750 - DNA, 25 bp, Homo sapien
accggaagcgcacggcctcagaata

SEQ ID NO: 502751 - DNA, 25 bp, Homo sapien
attacttcctattgctccctaaatc

SEQ ID NO: 502752 - DNA, 25 bp, Homo sapien
gtttgtgttacatttcctgtgatgc

SEQ ID NO: 502753 - DNA, 25 bp, Homo sapien
tacttcctattgctccctaaatcac

SEQ ID NO: 502754 - DNA, 25 bp, Homo sapien
taaatcacctccataaaaccaaata

SEQ ID NO: 502755 - DNA, 25 bp, Homo sapien
gatatggagcaatgggatctctcct

SEQ ID NO: 502756 - DNA, 25 bp, Homo sapien
ggatatggagcaatgggatctctcc

SEQ ID NO: 502757 - DNA, 25 bp, Homo sapien
ccattatttgcctattagaatggct

SEQ ID NO: 502758 - DNA, 25 bp, Homo sapien
accattatttgcctattagaatggc

SEQ ID NO: 502759 - DNA, 25 bp, Homo sapien
attccttctggagagcgccggctgg

SEQ ID NO: 502760 - DNA, 25 bp, Homo sapien
tatgacaaacaagaccaactgagag

SEQ ID NO: 502761 - DNA, 25 bp, Homo sapien
tgcagtagccatcagacgaaaatgt

SEQ ID NO: 502762 - DNA, 25 bp, Homo sapien
ccactgtaggcctggcctttaccaa

SEQ ID NO: 502763 - DNA, 25 bp, Homo sapien
ctgatgttttccagggcgttcctta

SEQ ID NO: 502764 - DNA, 25 bp, Homo sapien
tttccagggcgttccttatctgctg

SEQ ID NO: 502765 - DNA, 25 bp, Homo sapien
gttccttatctgctgttgctcaatg

SEQ ID NO: 502766 - DNA, 25 bp, Homo sapien
atgtcatagagtttcacctggaagc

SEQ ID NO: 502767 - DNA, 25 bp, Homo sapien
ggcccagcttcgcccaatgactcca

SEQ ID NO: 502768 - DNA, 25 bp, Homo sapien
catggaggaattaagtccacaaggg

SEQ ID NO: 502769 - DNA, 25 bp, Homo sapien
tgagatgaagccaagcaatctgact

SEQ ID NO: 502770 - DNA, 25 bp, Homo sapien
ccacaagggtgataagttatggatc

SEQ ID NO: 502771 - DNA, 25 bp, Homo sapien
tacataagtgataaactgaggcatg

SEQ ID NO: 502772 - DNA, 25 bp, Homo sapien
agacagaaagctagaagggtggatg

SEQ ID NO: 502773 - DNA, 25 bp, Homo sapien
gcagctgttgttcaatgggtacaga

SEQ ID NO: 502774 - DNA, 25 bp, Homo sapien
cagaaagctagaagggtggatgcca

SEQ ID NO: 502775 - DNA, 25 bp, Homo sapien
ggggaaatgagcagctgttgttcaa

SEQ ID NO: 502776 - DNA, 25 bp, Homo sapien
tccctcaaggaatcagaagtaaact

SEQ ID NO: 502777 - DNA, 25 bp, Homo sapien
ccaggaaagaaatagagggacgaga

SEQ ID NO: 502778 - DNA, 25 bp, Homo sapien
gacattccccaagccctatttgtta

SEQ ID NO: 502779 - DNA, 25 bp, Homo sapien
gaaagacaagattttcacaccagaa

SEQ ID NO: 502780 - DNA, 25 bp, Homo sapien
ctccacaccgggttgtacactgatg

SEQ ID NO: 502781 - DNA, 25 bp, Homo sapien
gaacaaaggcacagttaactccact

SEQ ID NO: 502782 - DNA, 25 bp, Homo sapien
gaaagctgacaacaaggaatctgat

SEQ ID NO: 502783 - DNA, 25 bp, Homo sapien
gacattggaagtggtctccacaccg

SEQ ID NO: 502784 - DNA, 25 bp, Homo sapien
gatcaccacgcagccggccgcggag

SEQ ID NO: 502785 - DNA, 25 bp, Homo sapien
cacgcagccggccgcggaggacgcc

SEQ ID NO: 502786 - DNA, 25 bp, Homo sapien
tgccaacgatcaccacgcagccggc

SEQ ID NO: 502787 - DNA, 25 bp, Homo sapien
ctgccaacgatcaccacgcagccgg

SEQ ID NO: 502788 - DNA, 25 bp, Homo sapien
cgggcgctgggaccaggcgccggcg

SEQ ID NO: 502789 - DNA, 25 bp, Homo sapien
gcgggcgctgggaccaggcgccggc

SEQ ID NO: 502790 - DNA, 25 bp, Homo sapien
gggcgctgggaccaggcgccggcgg

SEQ ID NO: 502791 - DNA, 25 bp, Homo sapien
gaccacgcgcttgtgactgtcagca

SEQ ID NO: 502792 - DNA, 25 bp, Homo sapien
tggaaagcgggaagaccacgcgctt

SEQ ID NO: 502793 - DNA, 25 bp, Homo sapien
gcattcaccgtgaagtccgtgtcta

SEQ ID NO: 502794 - DNA, 25 bp, Homo sapien
cgggcccgagacaccgggagacaca

SEQ ID NO: 502795 - DNA, 25 bp, Homo sapien
acagtagaaggcaagcttaaatgtt

SEQ ID NO: 502796 - DNA, 25 bp, Homo sapien
tgttgagacagccgctagcctgagc

SEQ ID NO: 502797 - DNA, 25 bp, Homo sapien
agcaaccgcgcctgctctggctgag

SEQ ID NO: 502798 - DNA, 25 bp, Homo sapien
agacagccgctagcctgagcaaccg

SEQ ID NO: 502799 - DNA, 25 bp, Homo sapien
gagcaaccgcgcctgctctggctga

SEQ ID NO: 502800 - DNA, 25 bp, Homo sapien
aaagagagggccttaagccctgagg

SEQ ID NO: 502801 - DNA, 25 bp, Homo sapien
gccgtaagtcttcttgatcataaag

SEQ ID NO: 502802 - DNA, 25 bp, Homo sapien
gtgagatgaagacagccgtaagtct

SEQ ID NO: 502803 - DNA, 25 bp, Homo sapien
tcttcttgatcataaagtgcttgaa

SEQ ID NO: 502804 - DNA, 25 bp, Homo sapien
ctccgaaaagttactcctgggtgag

SEQ ID NO: 502805 - DNA, 25 bp, Homo sapien
agacggtagtatactggtggtccag

SEQ ID NO: 502806 - DNA, 25 bp, Homo sapien
gaaaagttactcctgggtgaggata

SEQ ID NO: 502807 - DNA, 25 bp, Homo sapien
ggtgaggataagacggtagtatact

SEQ ID NO: 502808 - DNA, 25 bp, Homo sapien
ctacaggtgacagccccaagacttc

SEQ ID NO: 502809 - DNA, 25 bp, Homo sapien
tctacaggtgacagccccaagactt

SEQ ID NO: 502810 - DNA, 25 bp, Homo sapien
ttctacaggtgacagccccaagact

SEQ ID NO: 502811 - DNA, 25 bp, Homo sapien
ccagatcccaggtcgctccagagcc

SEQ ID NO: 502812 - DNA, 25 bp, Homo sapien
tttcctgacggagaccggattctta

SEQ ID NO: 502813 - DNA, 25 bp, Homo sapien
tgacggagaccggattcttagggcc

SEQ ID NO: 502814 - DNA, 25 bp, Homo sapien
tcccaggtcgctccagagcccacag

SEQ ID NO: 502815 - DNA, 25 bp, Homo sapien
cacactatggagtttagacttggtc

SEQ ID NO: 502816 - DNA, 25 bp, Homo sapien
gtggagaatccattgagtgagagca

SEQ ID NO: 502817 - DNA, 25 bp, Homo sapien
tgtgaagggccttctaagccacact

SEQ ID NO: 502818 - DNA, 25 bp, Homo sapien
ggaccgtgtggagaatccattgagt

SEQ ID NO: 502819 - DNA, 25 bp, Homo sapien
gagtagagagaaagcagggagaaaa

SEQ ID NO: 502820 - DNA, 25 bp, Homo sapien
ctggaagacagaagagtagagagaa

SEQ ID NO: 502821 - DNA, 25 bp, Homo sapien
aagagtagagagaaagcagggagaa

SEQ ID NO: 502822 - DNA, 25 bp, Homo sapien
gtagagagaaagcagggagaaaagg

SEQ ID NO: 502823 - DNA, 25 bp, Homo sapien
tcgctgaataaatgttcccaggctg

SEQ ID NO: 502824 - DNA, 25 bp, Homo sapien
ctccaccaccttcgctgaataaatg

SEQ ID NO: 502825 - DNA, 25 bp, Homo sapien
catcagcctcacgtaggaaaccagc

SEQ ID NO: 502826 - DNA, 25 bp, Homo sapien
gggaaaccatgacagcatcagcctc

SEQ ID NO: 502827 - DNA, 25 bp, Homo sapien
tgaacagtgaactgcaagccaacat

SEQ ID NO: 502828 - DNA, 25 bp, Homo sapien
caaagctgttccttgaaagggtata

SEQ ID NO: 502829 - DNA, 25 bp, Homo sapien
caagtttaggaaagcccagtcttga

SEQ ID NO: 502830 - DNA, 25 bp, Homo sapien
tgtgattggttttaccgcccaggta

SEQ ID NO: 502831 - DNA, 25 bp, Homo sapien
tttatttgaaggaattggctcaatc

SEQ ID NO: 502832 - DNA, 25 bp, Homo sapien
caattggaggctggtgttagatatg

SEQ ID NO: 502833 - DNA, 25 bp, Homo sapien
tcttcgaagaatcaatgtcagtatg

SEQ ID NO: 502834 - DNA, 25 bp, Homo sapien
tttctcttcgaagaatcaatgtcag

SEQ ID NO: 502835 - DNA, 25 bp, Homo sapien
attgctccatctgtgagggcgcacc

SEQ ID NO: 502836 - DNA, 25 bp, Homo sapien
ccttctatagaagtaaattgccttg

SEQ ID NO: 502837 - DNA, 25 bp, Homo sapien
tctgtgagggcgcacccttctatag

SEQ ID NO: 502838 - DNA, 25 bp, Homo sapien
gctccatctgtgagggcgcaccctt

SEQ ID NO: 502839 - DNA, 25 bp, Homo sapien
cggctccgggagttatgtcacagta

SEQ ID NO: 502840 - DNA, 25 bp, Homo sapien
agtgactgcgcggaaaacgggcttc

SEQ ID NO: 502841 - DNA, 25 bp, Homo sapien
gcttccaaggttcacaaggctcgtg

SEQ ID NO: 502842 - DNA, 25 bp, Homo sapien
agaacaatacgcagacaggaggagg

SEQ ID NO: 502843 - DNA, 25 bp, Homo sapien
tttaaaggatcttggttccatatcc

SEQ ID NO: 502844 - DNA, 25 bp, Homo sapien
tgagttcatcaggatttaaaggatc

SEQ ID NO: 502845 - DNA, 25 bp, Homo sapien
ctgctttacggatgagttcatcagg

SEQ ID NO: 502846 - DNA, 25 bp, Homo sapien
ggatttaaaggatcttggttccata

SEQ ID NO: 502847 - DNA, 25 bp, Homo sapien
cactcccttccactgagggggaccg

SEQ ID NO: 502848 - DNA, 25 bp, Homo sapien
cacatgaaattcacaaacactaagg

SEQ ID NO: 502849 - DNA, 25 bp, Homo sapien
cacaaacactaaggtagccgatgag

SEQ ID NO: 502850 - DNA, 25 bp, Homo sapien
taaggtagccgatgagctttaaaaa

SEQ ID NO: 502851 - DNA, 25 bp, Homo sapien
tttttttcgagaaactgcagtaggc

SEQ ID NO: 502852 - DNA, 25 bp, Homo sapien
aaatatggccttttctatcctgagg

SEQ ID NO: 502853 - DNA, 25 bp, Homo sapien
aaatctccaattccaagccaccagg

SEQ ID NO: 502854 - DNA, 25 bp, Homo sapien
gattagctccagtctgcgtctcaga

SEQ ID NO: 502855 - DNA, 25 bp, Homo sapien
cagtgcaggttggacttgttgagcc

SEQ ID NO: 502856 - DNA, 25 bp, Homo sapien
caatcttgaagggtattatttttca

SEQ ID NO: 502857 - DNA, 25 bp, Homo sapien
atttaagatgttaagttgtgtcagc

SEQ ID NO: 502858 - DNA, 25 bp, Homo sapien
gttgtgtcagcttacatatggaaca

SEQ ID NO: 502859 - DNA, 25 bp, Homo sapien
gaagtgtccctgttcgctagtctgt

SEQ ID NO: 502860 - DNA, 25 bp, Homo sapien
taggctacgtaagttccgctgcagg

SEQ ID NO: 502861 - DNA, 25 bp, Homo sapien
tccagtaaccttgacgataacacat

SEQ ID NO: 502862 - DNA, 25 bp, Homo sapien
tgacccggcaggcaatcatggcttg

SEQ ID NO: 502863 - DNA, 25 bp, Homo sapien
ctttcgtgtctgcagtgtaggctac

SEQ ID NO: 502864 - DNA, 25 bp, Homo sapien
tacccggtggggcatcacagagtct

SEQ ID NO: 502865 - DNA, 25 bp, Homo sapien
catcacactcttaaagggcaaggtc

SEQ ID NO: 502866 - DNA, 25 bp, Homo sapien
acagagtctgtcctgttgcctggtg

SEQ ID NO: 502867 - DNA, 25 bp, Homo sapien
tgggccagccctggaatacccggtg

SEQ ID NO: 502868 - DNA, 25 bp, Homo sapien
ggcaagaaggcctgtttggaccact

SEQ ID NO: 502869 - DNA, 25 bp, Homo sapien
tatgcccttgcccttcgttgactgc

SEQ ID NO: 502870 - DNA, 25 bp, Homo sapien
tccacagtattcctcagtgagcagt

SEQ ID NO: 502871 - DNA, 25 bp, Homo sapien
tgagtcaaagaactgtgtatgccct

SEQ ID NO: 502872 - DNA, 25 bp, Homo sapien
taaatgcagtcctgcaccacatgac

SEQ ID NO: 502873 - DNA, 25 bp, Homo sapien
gtgttgtagcctaaactacacccca

SEQ ID NO: 502874 - DNA, 25 bp, Homo sapien
tacaacctagggtgttcacacagca

SEQ ID NO: 502875 - DNA, 25 bp, Homo sapien
ccccacagagccgagttgtatagta

SEQ ID NO: 502876 - DNA, 25 bp, Homo sapien
gctgcaaaccatttagggagtcatc

SEQ ID NO: 502877 - DNA, 25 bp, Homo sapien
ggctcatttcacgtgactgcttgca

SEQ ID NO: 502878 - DNA, 25 bp, Homo sapien
tcaaaaagcttacagctgggatggg

SEQ ID NO: 502879 - DNA, 25 bp, Homo sapien
cttcattcgcagactatcaggctca

SEQ ID NO: 502880 - DNA, 25 bp, Homo sapien
ggtagctctaaggagaatccctctg

SEQ ID NO: 502881 - DNA, 25 bp, Homo sapien
gtacagaatctcaagaggtagctct

SEQ ID NO: 502882 - DNA, 25 bp, Homo sapien
cctctaatttcctcgaagtacagaa

SEQ ID NO: 502883 - DNA, 25 bp, Homo sapien
catgttgttgaggagaaaggagcaa

SEQ ID NO: 502884 - DNA, 25 bp, Homo sapien
tgcgtggcccttcgggttattccgc

SEQ ID NO: 502885 - DNA, 25 bp, Homo sapien
gcgccccgccgcatgctcgcggctg

SEQ ID NO: 502886 - DNA, 25 bp, Homo sapien
ctcctcctgcgtggcgcagcacagg

SEQ ID NO: 502887 - DNA, 25 bp, Homo sapien
gctggaagccccagtttgcgtggcc

SEQ ID NO: 502888 - DNA, 25 bp, Homo sapien
gggcactggtgagtacactgcacaa

SEQ ID NO: 502889 - DNA, 25 bp, Homo sapien
ccatctcggcgcgaatctgaaagcg

SEQ ID NO: 502890 - DNA, 25 bp, Homo sapien
cagagtcgctctgtgtccgtgaggc

SEQ ID NO: 502891 - DNA, 25 bp, Homo sapien
tcctggaggcgaaaggtgcagagtc

SEQ ID NO: 502892 - DNA, 25 bp, Homo sapien
ctgcgaggcggcgggtccgggcgtc

SEQ ID NO: 502893 - DNA, 25 bp, Homo sapien
cgtcttaggctccggggctccctcg

SEQ ID NO: 502894 - DNA, 25 bp, Homo sapien
tgcgaggcggcgggtccgggcgtct

SEQ ID NO: 502895 - DNA, 25 bp, Homo sapien
gcgtcttaggctccggggctccctc

SEQ ID NO: 502896 - DNA, 25 bp, Homo sapien
cacacgtgcacgcgcgccccgcacc

SEQ ID NO: 502897 - DNA, 25 bp, Homo sapien
gcacacgtgcacgcgcgccccgcac

SEQ ID NO: 502898 - DNA, 25 bp, Homo sapien
cgcacacgtgcacgcgcgccccgca

SEQ ID NO: 502899 - DNA, 25 bp, Homo sapien
tgagcaggcgcgcaacgcgagctgc

SEQ ID NO: 502900 - DNA, 25 bp, Homo sapien
aacctgcgcagcgtgtcgccctggg

SEQ ID NO: 502901 - DNA, 25 bp, Homo sapien
cacacgctgcagctggggccgcgtg

SEQ ID NO: 502902 - DNA, 25 bp, Homo sapien
caggcccgccgaccgccgcttccgg

SEQ ID NO: 502903 - DNA, 25 bp, Homo sapien
gacccttccgtgatgtggacacagt

SEQ ID NO: 502904 - DNA, 25 bp, Homo sapien
tggacacagtgatgtggaccgtact

SEQ ID NO: 502905 - DNA, 25 bp, Homo sapien
tggatgggtccgcaaggcactagct

SEQ ID NO: 502906 - DNA, 25 bp, Homo sapien
gtatttcctatgcaacacgtatctc

SEQ ID NO: 502907 - DNA, 25 bp, Homo sapien
gtcaagaaaggcttcgtgaaagagc

SEQ ID NO: 502908 - DNA, 25 bp, Homo sapien
ttgatggaggagagcaagtcgccta

SEQ ID NO: 502909 - DNA, 25 bp, Homo sapien
gagcaagtcgcctacaaaggcagtg

SEQ ID NO: 502910 - DNA, 25 bp, Homo sapien
caagaaaggcttcgtgaaagagctg

SEQ ID NO: 502911 - DNA, 25 bp, Homo sapien
catttccaggacctgaagggatgga

SEQ ID NO: 502912 - DNA, 25 bp, Homo sapien
gatggactacggcattcttctttct

SEQ ID NO: 502913 - DNA, 25 bp, Homo sapien
tctttctctaacctcgtgttatgct

SEQ ID NO: 502914 - DNA, 25 bp, Homo sapien
acacatggcgccattcattctggta

SEQ ID NO: 502915 - DNA, 25 bp, Homo sapien
ggatcgtggtctgggccacccagat

SEQ ID NO: 502916 - DNA, 25 bp, Homo sapien
cccacatgtggaacctcagtgctgg

SEQ ID NO: 502917 - DNA, 25 bp, Homo sapien
tctgcccacatgtggaacctcagtg

SEQ ID NO: 502918 - DNA, 25 bp, Homo sapien
cagcagggtggctgaaggtgtcatg

SEQ ID NO: 502919 - DNA, 25 bp, Homo sapien
caagggcattggttgaagggcaccg

SEQ ID NO: 502920 - DNA, 25 bp, Homo sapien
gcattggttgaagggcaccgtttgc

SEQ ID NO: 502921 - DNA, 25 bp, Homo sapien
tgaagggcaccgtttgctcttaaag

SEQ ID NO: 502922 - DNA, 25 bp, Homo sapien
ttggttgaagggcaccgtttgctct

SEQ ID NO: 502923 - DNA, 25 bp, Homo sapien
cacctgaatgaccgcctataggcag

SEQ ID NO: 502924 - DNA, 25 bp, Homo sapien
tcacctgaatgaccgcctataggca

SEQ ID NO: 502925 - DNA, 25 bp, Homo sapien
aatgtgcccaagttcagcttccagt

SEQ ID NO: 502926 - DNA, 25 bp, Homo sapien
atgtgcccaagttcagcttccagtt

SEQ ID NO: 502927 - DNA, 25 bp, Homo sapien
tgtgggcagttcagcaatggcccat

SEQ ID NO: 502928 - DNA, 25 bp, Homo sapien
tcccatgtgggctgtccattaatta

SEQ ID NO: 502929 - DNA, 25 bp, Homo sapien
cattcactgcgacctgtttcccatg

SEQ ID NO: 502930 - DNA, 25 bp, Homo sapien
acttgaccgatattgaaacccaggg

SEQ ID NO: 502931 - DNA, 25 bp, Homo sapien
ctgcagcggcgtctctggccgacag

SEQ ID NO: 502932 - DNA, 25 bp, Homo sapien
gctgagacccctgtggtacgcgcgt

SEQ ID NO: 502933 - DNA, 25 bp, Homo sapien
ctggcgaaggtgtctgcagcggcgt

SEQ ID NO: 502934 - DNA, 25 bp, Homo sapien
actgtcttgagcaccggctggcgaa

SEQ ID NO: 502935 - DNA, 25 bp, Homo sapien
ctgtctccacggacacatttcggtg

SEQ ID NO: 502936 - DNA, 25 bp, Homo sapien
tgcttgtgggttctagccaagattg

SEQ ID NO: 502937 - DNA, 25 bp, Homo sapien
gccacgctaccgaggcaggctgtct

SEQ ID NO: 502938 - DNA, 25 bp, Homo sapien
ttcggatctggcgagccacgctacc

SEQ ID NO: 502939 - DNA, 25 bp, Homo sapien
ctgggatggggtctttcaactgctg

SEQ ID NO: 502940 - DNA, 25 bp, Homo sapien
tcaactgctgtgagataaacagtca

SEQ ID NO: 502941 - DNA, 25 bp, Homo sapien
gatggggtctttcaactgctgtgag

SEQ ID NO: 502942 - DNA, 25 bp, Homo sapien
gggtctttcaactgctgtgagataa

SEQ ID NO: 502943 - DNA, 25 bp, Homo sapien
gaagcctactgcctgtgccggggct

SEQ ID NO: 502944 - DNA, 25 bp, Homo sapien
tgtctacatgcccaccgtcgtcctg

SEQ ID NO: 502945 - DNA, 25 bp, Homo sapien
tgcctgaccgggctgttcggcgagg

SEQ ID NO: 502946 - DNA, 25 bp, Homo sapien
ggaggacgtgcgcttccgcagcgcc

SEQ ID NO: 502947 - DNA, 25 bp, Homo sapien
gcgtccccgagccggagaaggacgc

SEQ ID NO: 502948 - DNA, 25 bp, Homo sapien
gtccccgagccggagaaggacgcag

SEQ ID NO: 502949 - DNA, 25 bp, Homo sapien
cgtccccgagccggagaaggacgca

SEQ ID NO: 502950 - DNA, 25 bp, Homo sapien
tggctgactgatgaaatggacacgt

SEQ ID NO: 502951 - DNA, 25 bp, Homo sapien
tctgccacgagagctaggtccttga

SEQ ID NO: 502952 - DNA, 25 bp, Homo sapien
ccagggccagctaagagttccaaag

SEQ ID NO: 502953 - DNA, 25 bp, Homo sapien
gcttgctgaaggatacactggctgt

SEQ ID NO: 502954 - DNA, 25 bp, Homo sapien
gccaaagcaagtcttatgaggtggg

SEQ ID NO: 502955 - DNA, 25 bp, Homo sapien
ggccaaagcaagtcttatgaggtgg

SEQ ID NO: 502956 - DNA, 25 bp, Homo sapien
gcaagtcttatgaggtggggaagta

SEQ ID NO: 502957 - DNA, 25 bp, Homo sapien
aaagcaagtcttatgaggtggggaa

SEQ ID NO: 502958 - DNA, 25 bp, Homo sapien
tgaagccaccaccacagacaagata

SEQ ID NO: 502959 - DNA, 25 bp, Homo sapien
gataaagaacaagctaccaccaagg

SEQ ID NO: 502960 - DNA, 25 bp, Homo sapien
gtgtgtggttctatgcaatgctgcc

SEQ ID NO: 502961 - DNA, 25 bp, Homo sapien
agttcaccagtttcacgcgagctca

SEQ ID NO: 502962 - DNA, 25 bp, Homo sapien
tgtgttcacttctgattgttgagac

SEQ ID NO: 502963 - DNA, 25 bp, Homo sapien
tgtgtgacctctgcggagcggcttt

SEQ ID NO: 502964 - DNA, 25 bp, Homo sapien
gtgatgccctcgagacccagccatg

SEQ ID NO: 502965 - DNA, 25 bp, Homo sapien
tttcactcagcgtgatgccctcgag

SEQ ID NO: 502966 - DNA, 25 bp, Homo sapien
gacgctagttactggattattgcct

SEQ ID NO: 502967 - DNA, 25 bp, Homo sapien
tctaagaggcattcagacgctagtt

SEQ ID NO: 502968 - DNA, 25 bp, Homo sapien
tctgaacggtgagaatctagcacac

SEQ ID NO: 502969 - DNA, 25 bp, Homo sapien
tctgagccacgcagggagggcacct

SEQ ID NO: 502970 - DNA, 25 bp, Homo sapien
caactcgaattccatggattcaggt

SEQ ID NO: 502971 - DNA, 25 bp, Homo sapien
agaagactgagctctagggacgccc

SEQ ID NO: 502972 - DNA, 25 bp, Homo sapien
gatcaggcagattctaaggtttctt

SEQ ID NO: 502973 - DNA, 25 bp, Homo sapien
tccatggattcaggttggcagaaga

SEQ ID NO: 502974 - DNA, 25 bp, Homo sapien
ttcctgtgttatgtcaccgtctgta

SEQ ID NO: 502975 - DNA, 25 bp, Homo sapien
tcctgtgttatgtcaccgtctgtaa

SEQ ID NO: 502976 - DNA, 25 bp, Homo sapien
gccaagttccgggtgtgtcttggaa

SEQ ID NO: 502977 - DNA, 25 bp, Homo sapien
tcttcactccaaggagttctgctgc

SEQ ID NO: 502978 - DNA, 25 bp, Homo sapien
cataacagcgaaactcatttgccaa

SEQ ID NO: 502979 - DNA, 25 bp, Homo sapien
taattcacataacagcgaaactcat

SEQ ID NO: 502980 - DNA, 25 bp, Homo sapien
taatatccaatcttgcaaacacagg

SEQ ID NO: 502981 - DNA, 25 bp, Homo sapien
tttcccaacgttgagccaagagcct

SEQ ID NO: 502982 - DNA, 25 bp, Homo sapien
tctgcaaagccgagacacttagaaa

SEQ ID NO: 502983 - DNA, 25 bp, Homo sapien
tctaggcggaccaccggtggcaatt

SEQ ID NO: 502984 - DNA, 25 bp, Homo sapien
cagcaattctttcgggtaagtccaa

SEQ ID NO: 502985 - DNA, 25 bp, Homo sapien
aataaactcctctccatacatggca

SEQ ID NO: 502986 - DNA, 25 bp, Homo sapien
tgagacattcctccgaaagataggg

SEQ ID NO: 502987 - DNA, 25 bp, Homo sapien
atcttgccccgcgtcaggtacttga

SEQ ID NO: 502988 - DNA, 25 bp, Homo sapien
aattttgaggtatgaaaggctatag

SEQ ID NO: 502989 - DNA, 25 bp, Homo sapien
ggaacacattatgacaaaatttaga

SEQ ID NO: 502990 - DNA, 25 bp, Homo sapien
gcctggcctatagcttataattttg

SEQ ID NO: 502991 - DNA, 25 bp, Homo sapien
tagatgtagttagcccaaagcctaa

SEQ ID NO: 502992 - DNA, 25 bp, Homo sapien
ctcagtagaaagtttagaagataaa

SEQ ID NO: 502993 - DNA, 25 bp, Homo sapien
agaagatcaggtccaatattcaaag

SEQ ID NO: 502994 - DNA, 25 bp, Homo sapien
ttcttaaactgaaggacatgtgtgt

SEQ ID NO: 502995 - DNA, 25 bp, Homo sapien
agatcaggtccaatattcaaagaat

SEQ ID NO: 502996 - DNA, 25 bp, Homo sapien
gcagagcagtttcctgactatacca

SEQ ID NO: 502997 - DNA, 25 bp, Homo sapien
gtttcctgactataccaaaactggc

SEQ ID NO: 502998 - DNA, 25 bp, Homo sapien
gagcagtttcctgactataccaaaa

SEQ ID NO: 502999 - DNA, 25 bp, Homo sapien
gactataccaaaactggctcagttg

SEQ ID NO: 503000 - DNA, 25 bp, Homo sapien
tgaaatgtcccgagtagcaagtcta

SEQ ID NO: 503001 - DNA, 25 bp, Homo sapien
gaggattacaactcctaagatggca

SEQ ID NO: 503002 - DNA, 25 bp, Homo sapien
gcagaccttcgccaagaggattaca

SEQ ID NO: 503003 - DNA, 25 bp, Homo sapien
gagttggtagttcctcccatccgaa

SEQ ID NO: 503004 - DNA, 25 bp, Homo sapien
ttgcactgctgatatcacaggacaa

SEQ ID NO: 503005 - DNA, 25 bp, Homo sapien
aaatgttgcactgctgatatcacag

SEQ ID NO: 503006 - DNA, 25 bp, Homo sapien
tgttgcactgctgatatcacaggac

SEQ ID NO: 503007 - DNA, 25 bp, Homo sapien
aatgttgcactgctgatatcacagg

SEQ ID NO: 503008 - DNA, 25 bp, Homo sapien
taggctccagcttcattctcacagg

SEQ ID NO: 503009 - DNA, 25 bp, Homo sapien
cagcttcattctcacaggttatcac

SEQ ID NO: 503010 - DNA, 25 bp, Homo sapien
tccagcttcattctcacaggttatc

SEQ ID NO: 503011 - DNA, 25 bp, Homo sapien
ggctccagcttcattctcacaggtt

SEQ ID NO: 503012 - DNA, 25 bp, Homo sapien
acttctatttaaatcgtgctcatat

SEQ ID NO: 503013 - DNA, 25 bp, Homo sapien
ttctatttaaatcgtgctcatattg

SEQ ID NO: 503014 - DNA, 25 bp, Homo sapien
tatttaaatcgtgctcatattgcac

SEQ ID NO: 503015 - DNA, 25 bp, Homo sapien
ctatttaaatcgtgctcatattgca

SEQ ID NO: 503016 - DNA, 25 bp, Homo sapien
tcctgtcctttatacccactcagtt

SEQ ID NO: 503017 - DNA, 25 bp, Homo sapien
actcagttgccctcaacacaatggg

SEQ ID NO: 503018 - DNA, 25 bp, Homo sapien
ctgtcctttatacccactcagttgc

SEQ ID NO: 503019 - DNA, 25 bp, Homo sapien
gggatgttttcacataaacgtacca

SEQ ID NO: 503020 - DNA, 25 bp, Homo sapien
taactctcgatatcacatcaaacat

SEQ ID NO: 503021 - DNA, 25 bp, Homo sapien
caaacattataatggcatgctgggc

SEQ ID NO: 503022 - DNA, 25 bp, Homo sapien
tctctcactccaccaaatttcttct

SEQ ID NO: 503023 - DNA, 25 bp, Homo sapien
taatggcatgctgggcttggatata

SEQ ID NO: 503024 - DNA, 25 bp, Homo sapien
aaggcaatgaacctcaatacccaag

SEQ ID NO: 503025 - DNA, 25 bp, Homo sapien
gtagctatgtacgtctcaaattcac

SEQ ID NO: 503026 - DNA, 25 bp, Homo sapien
tgtatcccatacaatgaatgggtcc

SEQ ID NO: 503027 - DNA, 25 bp, Homo sapien
tacccaaggtagctatgtacgtctc

SEQ ID NO: 503028 - DNA, 25 bp, Homo sapien
ttcataaatctagtttttccagtac

SEQ ID NO: 503029 - DNA, 25 bp, Homo sapien
ctgacatttcataaatctagttttt

SEQ ID NO: 503030 - DNA, 25 bp, Homo sapien
atttcataaatctagtttttccagt

SEQ ID NO: 503031 - DNA, 25 bp, Homo sapien
caactgacatttcataaatctagtt

SEQ ID NO: 503032 - DNA, 25 bp, Homo sapien
gtttgaactggacttgggactctcc

SEQ ID NO: 503033 - DNA, 25 bp, Homo sapien
ctggacttgggactctccttgggca

SEQ ID NO: 503034 - DNA, 25 bp, Homo sapien
tgaactggacttgggactctccttg

SEQ ID NO: 503035 - DNA, 25 bp, Homo sapien
aagtttgaactggacttgggactct

SEQ ID NO: 503036 - DNA, 25 bp, Homo sapien
gttccttccagaatcgtctttgtgc

SEQ ID NO: 503037 - DNA, 25 bp, Homo sapien
ccttccagaatcgtctttgtgcctg

SEQ ID NO: 503038 - DNA, 25 bp, Homo sapien
ttccagaatcgtctttgtgcctgtc

SEQ ID NO: 503039 - DNA, 25 bp, Homo sapien
tccttccagaatcgtctttgtgcct

SEQ ID NO: 503040 - DNA, 25 bp, Homo sapien
caataatgtggcatgaagaatgctt

SEQ ID NO: 503041 - DNA, 25 bp, Homo sapien
tgacaataatgtggcatgaagaatg

SEQ ID NO: 503042 - DNA, 25 bp, Homo sapien
acaataatgtggcatgaagaatgct

SEQ ID NO: 503043 - DNA, 25 bp, Homo sapien
ttgacaataatgtggcatgaagaat

SEQ ID NO: 503044 - DNA, 25 bp, Homo sapien
gagcaaagccatcacgtggtctcca

SEQ ID NO: 503045 - DNA, 25 bp, Homo sapien
tgtgctccctatctggagcaaagcc

SEQ ID NO: 503046 - DNA, 25 bp, Homo sapien
cagtggggttgctttgctgccaatg

SEQ ID NO: 503047 - DNA, 25 bp, Homo sapien
acttttaattgtgcagtgatcctgc

SEQ ID NO: 503048 - DNA, 25 bp, Homo sapien
gggtacgagctataacacagccaag

SEQ ID NO: 503049 - DNA, 25 bp, Homo sapien
gactaatgcacagagtaggttccac

SEQ ID NO: 503050 - DNA, 25 bp, Homo sapien
cagagattccggttttaggtgagac

SEQ ID NO: 503051 - DNA, 25 bp, Homo sapien
cagtagaagaacttgggaaccgccg

SEQ ID NO: 503052 - DNA, 25 bp, Homo sapien
ctcagcataaaattcctggagagct

SEQ ID NO: 503053 - DNA, 25 bp, Homo sapien
gttatatttatcatcctcgcctggc

SEQ ID NO: 503054 - DNA, 25 bp, Homo sapien
cagcataaaattcctggagagctgc

SEQ ID NO: 503055 - DNA, 25 bp, Homo sapien
tatttatcatcctcgcctggctcaa

SEQ ID NO: 503056 - DNA, 25 bp, Homo sapien
aaattcccttttagcaacatcccag

SEQ ID NO: 503057 - DNA, 25 bp, Homo sapien
aacgaattggtctgcttcatctaag

SEQ ID NO: 503058 - DNA, 25 bp, Homo sapien
ctctctggcccatatatttagaagg

SEQ ID NO: 503059 - DNA, 25 bp, Homo sapien
ttacacggctattcacattatcagt

SEQ ID NO: 503060 - DNA, 25 bp, Homo sapien
tcttgaatgagtcaggtattgttcc

SEQ ID NO: 503061 - DNA, 25 bp, Homo sapien
tgtttatttccctatcttccagtag

SEQ ID NO: 503062 - DNA, 25 bp, Homo sapien
ttggacacctcaatcttttgaaggg

SEQ ID NO: 503063 - DNA, 25 bp, Homo sapien
ctactggaaggcttagatggtaaat

SEQ ID NO: 503064 - DNA, 25 bp, Homo sapien
ttttgtgcacccacgagagagggct

SEQ ID NO: 503065 - DNA, 25 bp, Homo sapien
tccaggagcagcttggctatgcaca

SEQ ID NO: 503066 - DNA, 25 bp, Homo sapien
gcataaaacttacaggaaccacctg

SEQ ID NO: 503067 - DNA, 25 bp, Homo sapien
gatgtcccctgttgggcataaagca

SEQ ID NO: 503068 - DNA, 25 bp, Homo sapien
gggttgtctatagaagtcccaccaa

SEQ ID NO: 503069 - DNA, 25 bp, Homo sapien
tagttctagtttactgcaataagca

SEQ ID NO: 503070 - DNA, 25 bp, Homo sapien
gaaagcataccagaacccaacaggc

SEQ ID NO: 503071 - DNA, 25 bp, Homo sapien
agggtttaatgggtgtactgttcag

SEQ ID NO: 503072 - DNA, 25 bp, Homo sapien
tgacaggagtgagactacatttcaa

SEQ ID NO: 503073 - DNA, 25 bp, Homo sapien
aattttttctggctactctgggcac

SEQ ID NO: 503074 - DNA, 25 bp, Homo sapien
aaatccaaaagagctgggaagtact

SEQ ID NO: 503075 - DNA, 25 bp, Homo sapien
gggcacactgtctatggctggccct

SEQ ID NO: 503076 - DNA, 25 bp, Homo sapien
cattcacgccatgggatcagagtgg

SEQ ID NO: 503077 - DNA, 25 bp, Homo sapien
ggcggacacgttagcttgcagcata

SEQ ID NO: 503078 - DNA, 25 bp, Homo sapien
tggagcttcaactcggcctcaggaa

SEQ ID NO: 503079 - DNA, 25 bp, Homo sapien
gcgacgttgtgatgtacgccccatg

SEQ ID NO: 503080 - DNA, 25 bp, Homo sapien
agccaaccctacagctgcgcccgaa

SEQ ID NO: 503081 - DNA, 25 bp, Homo sapien
acagctgcgcccgaacccgccactc

SEQ ID NO: 503082 - DNA, 25 bp, Homo sapien
tcggcggcgcgcagccaaccctaca

SEQ ID NO: 503083 - DNA, 25 bp, Homo sapien
agtccaaaacgcctcggcggcgcgc

SEQ ID NO: 503084 - DNA, 25 bp, Homo sapien
gcagtcgcccagactcgccgtgtgc

SEQ ID NO: 503085 - DNA, 25 bp, Homo sapien
gcgcgtgcgcagtcgcccagactcg

SEQ ID NO: 503086 - DNA, 25 bp, Homo sapien
cgcgcgtgcgcagtcgcccagactc

SEQ ID NO: 503087 - DNA, 25 bp, Homo sapien
tgcgcagtcgcccagactcgccgtg

SEQ ID NO: 503088 - DNA, 25 bp, Homo sapien
gaaattaatgtaagccctaagcagc

SEQ ID NO: 503089 - DNA, 25 bp, Homo sapien
gttcaagtagctttaccaggtcagt

SEQ ID NO: 503090 - DNA, 25 bp, Homo sapien
taggaggttgaattatacgccagac

SEQ ID NO: 503091 - DNA, 25 bp, Homo sapien
gaaataaccataacatccagggcag

SEQ ID NO: 503092 - DNA, 25 bp, Homo sapien
tttaaacagtacactcatccctggg

SEQ ID NO: 503093 - DNA, 25 bp, Homo sapien
taaaatcatattgcagcatcttctg

SEQ ID NO: 503094 - DNA, 25 bp, Homo sapien
gacacattttaactcccatttatga

SEQ ID NO: 503095 - DNA, 25 bp, Homo sapien
gcctataactggctcaatacatagc

SEQ ID NO: 503096 - DNA, 25 bp, Homo sapien
taagaggcctaagaatgcagacggg

SEQ ID NO: 503097 - DNA, 25 bp, Homo sapien
cagttcctaggagggaatcgccacg

SEQ ID NO: 503098 - DNA, 25 bp, Homo sapien
tgtcttctaacagagatggccaccc

SEQ ID NO: 503099 - DNA, 25 bp, Homo sapien
ttcaagcgggtaatgggcaagccac

SEQ ID NO: 503100 - DNA, 25 bp, Homo sapien
tgtaagctggcacactgaattaggg

SEQ ID NO: 503101 - DNA, 25 bp, Homo sapien
tgaaaaggtctagccgttgcaactc

SEQ ID NO: 503102 - DNA, 25 bp, Homo sapien
taatgccccaacgtgcaatagtctg

SEQ ID NO: 503103 - DNA, 25 bp, Homo sapien
taagcatccaatcaggcaaacatgg

SEQ ID NO: 503104 - DNA, 25 bp, Homo sapien
tattttacacaaaggagaccaccaa

SEQ ID NO: 503105 - DNA, 25 bp, Homo sapien
ttattttacacaaaggagaccacca

SEQ ID NO: 503106 - DNA, 25 bp, Homo sapien
gcttgttgaaggcatctgctaatct

SEQ ID NO: 503107 - DNA, 25 bp, Homo sapien
tccgatccagcgtaggaggagtgct

SEQ ID NO: 503108 - DNA, 25 bp, Homo sapien
tctctggtaaataactgggtcttgc

SEQ ID NO: 503109 - DNA, 25 bp, Homo sapien
gacttgatagtaatgtttcgaccag

SEQ ID NO: 503110 - DNA, 25 bp, Homo sapien
caacgtgtagaaagcttcgccagcc

SEQ ID NO: 503111 - DNA, 25 bp, Homo sapien
tgtgttgtgcttttgcaaaaccagc

SEQ ID NO: 503112 - DNA, 25 bp, Homo sapien
tctctgtgttgtgcttttgcaaaac

SEQ ID NO: 503113 - DNA, 25 bp, Homo sapien
ttcgccagccgcagtggtcatctct

SEQ ID NO: 503114 - DNA, 25 bp, Homo sapien
aaagtgccgtgttgctagaaaaagt

SEQ ID NO: 503115 - DNA, 25 bp, Homo sapien
aaagctggcaaacctccgaactcat

SEQ ID NO: 503116 - DNA, 25 bp, Homo sapien
tgtcaaggcctccaggcaaagctgg

SEQ ID NO: 503117 - DNA, 25 bp, Homo sapien
ttttgcacactgttcagctaacggt

SEQ ID NO: 503118 - DNA, 25 bp, Homo sapien
ctgatcatgaaggtcaaagaacaaa

SEQ ID NO: 503119 - DNA, 25 bp, Homo sapien
taacagtgatgttcatttaaaggat

SEQ ID NO: 503120 - DNA, 25 bp, Homo sapien
acagtgatgttcatttaaaggatat

SEQ ID NO: 503121 - DNA, 25 bp, Homo sapien
gtaacagtgatgttcatttaaagga

SEQ ID NO: 503122 - DNA, 25 bp, Homo sapien
aagtaacagtgatgttcatttaaag

SEQ ID NO: 503123 - DNA, 25 bp, Homo sapien
tgtcattcctaattctagggagtac

SEQ ID NO: 503124 - DNA, 25 bp, Homo sapien
ttttaaacagatcctcaggaagctg

SEQ ID NO: 503125 - DNA, 25 bp, Homo sapien
gacttttaaacagatcctcaggaag

SEQ ID NO: 503126 - DNA, 25 bp, Homo sapien
ttaaacagatcctcaggaagctgtg

SEQ ID NO: 503127 - DNA, 25 bp, Homo sapien
tcagacttttaaacagatcctcagg

SEQ ID NO: 503128 - DNA, 25 bp, Homo sapien
tgtgattaatttgtagtactgatta

SEQ ID NO: 503129 - DNA, 25 bp, Homo sapien
gtgattaatttgtagtactgattac

SEQ ID NO: 503130 - DNA, 25 bp, Homo sapien
tgattaatttgtagtactgattaca

SEQ ID NO: 503131 - DNA, 25 bp, Homo sapien
tgtttccaatagttagagacgctct

SEQ ID NO: 503132 - DNA, 25 bp, Homo sapien
cacggttagatcctgctatgctggc

SEQ ID NO: 503133 - DNA, 25 bp, Homo sapien
tcgtatgtactcaccttctggacac

SEQ ID NO: 503134 - DNA, 25 bp, Homo sapien
gaatgccatgggtcatcaacattgt

SEQ ID NO: 503135 - DNA, 25 bp, Homo sapien
tacaacacaacatccgctgctgaca

SEQ ID NO: 503136 - DNA, 25 bp, Homo sapien
tcaagggcagaattaggtttactcc

SEQ ID NO: 503137 - DNA, 25 bp, Homo sapien
ggctcatgtcctctaaacacttcat

SEQ ID NO: 503138 - DNA, 25 bp, Homo sapien
gagatcctgtgacatcaagggcaga

SEQ ID NO: 503139 - DNA, 25 bp, Homo sapien
ggtccagggcaagtcgtacagaaat

SEQ ID NO: 503140 - DNA, 25 bp, Homo sapien
taatggctatcccttattgttggta

SEQ ID NO: 503141 - DNA, 25 bp, Homo sapien
cgtacagaaattatgttactcaaag

SEQ ID NO: 503142 - DNA, 25 bp, Homo sapien
gtacaagtcctactgggtccagggc

SEQ ID NO: 503143 - DNA, 25 bp, Homo sapien
acagagctgtgaccatgcgactgca

SEQ ID NO: 503144 - DNA, 25 bp, Homo sapien
cactgtgaagttgatggtacctagc

SEQ ID NO: 503145 - DNA, 25 bp, Homo sapien
cctggattaagcagaactgacctga

SEQ ID NO: 503146 - DNA, 25 bp, Homo sapien
cagatattggaaaaaccgttgccca

SEQ ID NO: 503147 - DNA, 25 bp, Homo sapien
taagaagttccataatgagaagcag

SEQ ID NO: 503148 - DNA, 25 bp, Homo sapien
aattcttttgacagcaggttagtaa

SEQ ID NO: 503149 - DNA, 25 bp, Homo sapien
gtaaggcaggcttcatataagttca

SEQ ID NO: 503150 - DNA, 25 bp, Homo sapien
aacatctattctttgccgccctaaa

SEQ ID NO: 503151 - DNA, 25 bp, Homo sapien
ccaatgcaattggtaaggaagtcca

SEQ ID NO: 503152 - DNA, 25 bp, Homo sapien
tgggtagcctcagcaatgccacaca

SEQ ID NO: 503153 - DNA, 25 bp, Homo sapien
gggtattcttgtaaacttccatcaa

SEQ ID NO: 503154 - DNA, 25 bp, Homo sapien
taaacaggattgctacgttgtcaat

SEQ ID NO: 503155 - DNA, 25 bp, Homo sapien
tctgtgtccatatgtgcaaaacctc

SEQ ID NO: 503156 - DNA, 25 bp, Homo sapien
caagaaattaagaggtgggcttcgg

SEQ ID NO: 503157 - DNA, 25 bp, Homo sapien
tgggcttcggcttgcaaactgctta

SEQ ID NO: 503158 - DNA, 25 bp, Homo sapien
gactagagccttcatcaatgtcctc

SEQ ID NO: 503159 - DNA, 25 bp, Homo sapien
gaggtagccaattatccactgagaa

SEQ ID NO: 503160 - DNA, 25 bp, Homo sapien
ggtcctgctcactactccagactga

SEQ ID NO: 503161 - DNA, 25 bp, Homo sapien
caaggagctgcacagtgtcatttgc

SEQ ID NO: 503162 - DNA, 25 bp, Homo sapien
gagaaccctctgtatctgctccgaa

SEQ ID NO: 503163 - DNA, 25 bp, Homo sapien
tattgctcgagattcaacttctgaa

SEQ ID NO: 503164 - DNA, 25 bp, Homo sapien
ttcatccaccaggagataagtcttt

SEQ ID NO: 503165 - DNA, 25 bp, Homo sapien
gataagtctttgcccagcgttttaa

SEQ ID NO: 503166 - DNA, 25 bp, Homo sapien
gggacttagtagatgagtgagatct

SEQ ID NO: 503167 - DNA, 25 bp, Homo sapien
aaagtgaatcacctcatttgaggca

SEQ ID NO: 503168 - DNA, 25 bp, Homo sapien
attttgccattagtattaggaagat

SEQ ID NO: 503169 - DNA, 25 bp, Homo sapien
gaggcactctcctgtattataacag

SEQ ID NO: 503170 - DNA, 25 bp, Homo sapien
catttttaatacaggcttatccctc

SEQ ID NO: 503171 - DNA, 25 bp, Homo sapien
taatcacagaatctgttctgttgta

SEQ ID NO: 503172 - DNA, 25 bp, Homo sapien
ctaatcacagaatctgttctgttgt

SEQ ID NO: 503173 - DNA, 25 bp, Homo sapien
caacttcagatgaatgcttaatgga

SEQ ID NO: 503174 - DNA, 25 bp, Homo sapien
gtgttgtattaatgtcaacttcaga

SEQ ID NO: 503175 - DNA, 25 bp, Homo sapien
ggagtctctccctgagtatcatcag

SEQ ID NO: 503176 - DNA, 25 bp, Homo sapien
atttctggaggtattagcggagtct

SEQ ID NO: 503177 - DNA, 25 bp, Homo sapien
tttgttgtcaacagtgcttgaaccc

SEQ ID NO: 503178 - DNA, 25 bp, Homo sapien
tgaacccggtgaagcaagtaactgt

SEQ ID NO: 503179 - DNA, 25 bp, Homo sapien
tcgttgtaactgaccatggagtctt

SEQ ID NO: 503180 - DNA, 25 bp, Homo sapien
taactgttgctgatgtcgttgtaac

SEQ ID NO: 503181 - DNA, 25 bp, Homo sapien
cagttgatcagaaaactggtctcga

SEQ ID NO: 503182 - DNA, 25 bp, Homo sapien
ttcttcctagcattcctacactggc

SEQ ID NO: 503183 - DNA, 25 bp, Homo sapien
agtgttctgcagcaattcttcctag

SEQ ID NO: 503184 - DNA, 25 bp, Homo sapien
tggtctcgatcatcctcttgaagtt

SEQ ID NO: 503185 - DNA, 25 bp, Homo sapien
gaactgcatgttgggtaaaaaagcc

SEQ ID NO: 503186 - DNA, 25 bp, Homo sapien
ctggagcagctaggtggcactgaat

SEQ ID NO: 503187 - DNA, 25 bp, Homo sapien
tgaaccaaagttaaccaggactcca

SEQ ID NO: 503188 - DNA, 25 bp, Homo sapien
tataggaattgaaaacttgaactgc

SEQ ID NO: 503189 - DNA, 25 bp, Homo sapien
tgaggtgtgtgaggcagttaacaaa

SEQ ID NO: 503190 - DNA, 25 bp, Homo sapien
cttcgcccaaaagaacaagtgaggt

SEQ ID NO: 503191 - DNA, 25 bp, Homo sapien
tcacttggaatggcagttaaaacat

SEQ ID NO: 503192 - DNA, 25 bp, Homo sapien
acatttcgtgggaacacggttatca

SEQ ID NO: 503193 - DNA, 25 bp, Homo sapien
gatgggtccatgaagagaagctaac

SEQ ID NO: 503194 - DNA, 25 bp, Homo sapien
tcagtaatccctcaatgaagtgtgc

SEQ ID NO: 503195 - DNA, 25 bp, Homo sapien
aatcaacttgtgatccttcatctgg

SEQ ID NO: 503196 - DNA, 25 bp, Homo sapien
gaatcttctctgatttttcgatgta

SEQ ID NO: 503197 - DNA, 25 bp, Homo sapien
tctccagcatgttatgacaaagaga

SEQ ID NO: 503198 - DNA, 25 bp, Homo sapien
gtctccagcatgttatgacaaagag

SEQ ID NO: 503199 - DNA, 25 bp, Homo sapien
cagcatgttatgacaaagagagaaa

SEQ ID NO: 503200 - DNA, 25 bp, Homo sapien
taaaacggaaagctgaatcaccacc

SEQ ID NO: 503201 - DNA, 25 bp, Homo sapien
tgttcattatggtctcgaagcgagc

SEQ ID NO: 503202 - DNA, 25 bp, Homo sapien
gacggtgtgtgctgttcaagcttaa

SEQ ID NO: 503203 - DNA, 25 bp, Homo sapien
cagcatttaagcatgatatccaggg

SEQ ID NO: 503204 - DNA, 25 bp, Homo sapien
tcaacagcacattttgcgaggattc

SEQ ID NO: 503205 - DNA, 25 bp, Homo sapien
agagtctcccgccaggactctgttg

SEQ ID NO: 503206 - DNA, 25 bp, Homo sapien
cattttgcgaggattcaaacatagc

SEQ ID NO: 503207 - DNA, 25 bp, Homo sapien
aacatagctatataatgtctgccca

SEQ ID NO: 503208 - DNA, 25 bp, Homo sapien
tcaactgcaccacagaagagtgaag

SEQ ID NO: 503209 - DNA, 25 bp, Homo sapien
gttccggcaagggatccaattctga

SEQ ID NO: 503210 - DNA, 25 bp, Homo sapien
acttaggaaagctcaccaacttctg

SEQ ID NO: 503211 - DNA, 25 bp, Homo sapien
tgaagtgctaaaacccaaccaatct

SEQ ID NO: 503212 - DNA, 25 bp, Homo sapien
gtgaacaaacatccgaaaactgagc

SEQ ID NO: 503213 - DNA, 25 bp, Homo sapien
gattagcattgccaaaacccttaag

SEQ ID NO: 503214 - DNA, 25 bp, Homo sapien
gaacaccaggtgaactactagccga

SEQ ID NO: 503215 - DNA, 25 bp, Homo sapien
gagcttcgcgcagtaggtaaacaga

SEQ ID NO: 503216 - DNA, 25 bp, Homo sapien
tctcccctcaagcaataaacaggtt

SEQ ID NO: 503217 - DNA, 25 bp, Homo sapien
gacaaagctggtcaaatcagcactt

SEQ ID NO: 503218 - DNA, 25 bp, Homo sapien
gccctgggctatctcaacatctatg

SEQ ID NO: 503219 - DNA, 25 bp, Homo sapien
tatggatcatcaaggcaggcagttc

SEQ ID NO: 503220 - DNA, 25 bp, Homo sapien
tctaaatgggtatatagtatagtgt

SEQ ID NO: 503221 - DNA, 25 bp, Homo sapien
gacaattattgctgtacaactctat

SEQ ID NO: 503222 - DNA, 25 bp, Homo sapien
gggtatatagtatagtgtgtgaatt

SEQ ID NO: 503223 - DNA, 25 bp, Homo sapien
tatacattctaaatgggtatatagt

SEQ ID NO: 503224 - DNA, 25 bp, Homo sapien
tttccctaatgagtgctaaatctgt

SEQ ID NO: 503225 - DNA, 25 bp, Homo sapien
ggtacaaggctgcataattattcca

SEQ ID NO: 503226 - DNA, 25 bp, Homo sapien
attatttagaccctctccatggtac

SEQ ID NO: 503227 - DNA, 25 bp, Homo sapien
gcacccagcagataaaccatctttt

SEQ ID NO: 503228 - DNA, 25 bp, Homo sapien
cagatgtcccagcatagtaaatgag

SEQ ID NO: 503229 - DNA, 25 bp, Homo sapien
gagcagagccttgaatccagatcta

SEQ ID NO: 503230 - DNA, 25 bp, Homo sapien
gtatattactatcaacgggcagcag

SEQ ID NO: 503231 - DNA, 25 bp, Homo sapien
tacacaacaaatgggtagtcactgt

SEQ ID NO: 503232 - DNA, 25 bp, Homo sapien
gcaaggtaacgctgaaatactgaag

SEQ ID NO: 503233 - DNA, 25 bp, Homo sapien
atctgagcattgaggttttcccgcc

SEQ ID NO: 503234 - DNA, 25 bp, Homo sapien
tgaagatctgacgaaggtcttcttc

SEQ ID NO: 503235 - DNA, 25 bp, Homo sapien
gctcaagacttgattggcgagtgca

SEQ ID NO: 503236 - DNA, 25 bp, Homo sapien
aaagagcccgcaccatctgcaataa

SEQ ID NO: 503237 - DNA, 25 bp, Homo sapien
gaagtacaggctaccattcaactac

SEQ ID NO: 503238 - DNA, 25 bp, Homo sapien
tccagacctatttttaaggccagca

SEQ ID NO: 503239 - DNA, 25 bp, Homo sapien
tacacggccttctggcattcttcca

SEQ ID NO: 503240 - DNA, 25 bp, Homo sapien
aaattcactcaatagcgcagtcaga

SEQ ID NO: 503241 - DNA, 25 bp, Homo sapien
gaattccatgctcaatccaatgttg

SEQ ID NO: 503242 - DNA, 25 bp, Homo sapien
tgctagttttacttgaacttgaaaa

SEQ ID NO: 503243 - DNA, 25 bp, Homo sapien
aactcttttgcagttaccatggaat

SEQ ID NO: 503244 - DNA, 25 bp, Homo sapien
tgtgaggcattactgtttcaacgct

SEQ ID NO: 503245 - DNA, 25 bp, Homo sapien
ccctaactttagatcttccactgta

SEQ ID NO: 503246 - DNA, 25 bp, Homo sapien
tcctttctaagtggtctggtcagtg

SEQ ID NO: 503247 - DNA, 25 bp, Homo sapien
tggtcagtgttaatagtacttcctc

SEQ ID NO: 503248 - DNA, 25 bp, Homo sapien
gggctgccgtagacaagtgaatttc

SEQ ID NO: 503249 - DNA, 25 bp, Homo sapien
ggttgccatacataaagcagacttc

SEQ ID NO: 503250 - DNA, 25 bp, Homo sapien
gattaacttggctatcacatccagg

SEQ ID NO: 503251 - DNA, 25 bp, Homo sapien
cagctgctcttctatgcaaacatca

SEQ ID NO: 503252 - DNA, 25 bp, Homo sapien
ctgttcccgaacatacttttgaagg

SEQ ID NO: 503253 - DNA, 25 bp, Homo sapien
tactgctactgctagtagaatctgt

SEQ ID NO: 503254 - DNA, 25 bp, Homo sapien
gggattgccactactaatcaactgg

SEQ ID NO: 503255 - DNA, 25 bp, Homo sapien
tggctgacttcatgaaaaatgcttt

SEQ ID NO: 503256 - DNA, 25 bp, Homo sapien
taaagtatcatgatgtctgtggcac

SEQ ID NO: 503257 - DNA, 25 bp, Homo sapien
tctgtggcactctcgaatagttaag

SEQ ID NO: 503258 - DNA, 25 bp, Homo sapien
tgaagtgacagactgcaataccaaa

SEQ ID NO: 503259 - DNA, 25 bp, Homo sapien
aatctctggctcacctagattaaaa

SEQ ID NO: 503260 - DNA, 25 bp, Homo sapien
aaatgtttaagcaatacagatatgt

SEQ ID NO: 503261 - DNA, 25 bp, Homo sapien
aatgtttaagcaatacagatatgta

SEQ ID NO: 503262 - DNA, 25 bp, Homo sapien
gctcaaggagatcctccctctcagc

SEQ ID NO: 503263 - DNA, 25 bp, Homo sapien
tatttcagcagtccccctccatgta

SEQ ID NO: 503264 - DNA, 25 bp, Homo sapien
aaaagatacacataagctcagcaaa

SEQ ID NO: 503265 - DNA, 25 bp, Homo sapien
taagctcagcaaaagtatttcagca

SEQ ID NO: 503266 - DNA, 25 bp, Homo sapien
ttttccaagagaatccactctcgga

SEQ ID NO: 503267 - DNA, 25 bp, Homo sapien
gacataggttaaaaggaatgttcgc

SEQ ID NO: 503268 - DNA, 25 bp, Homo sapien
cactctcggacaactgcttccatta

SEQ ID NO: 503269 - DNA, 25 bp, Homo sapien
tcgcagagactcgatgctacctttt

SEQ ID NO: 503270 - DNA, 25 bp, Homo sapien
taatcaccgatcacaattttcacaa

SEQ ID NO: 503271 - DNA, 25 bp, Homo sapien
gaggttagttcctctcagaagacac

SEQ ID NO: 503272 - DNA, 25 bp, Homo sapien
tgaccttgctctagcaccacaaaga

SEQ ID NO: 503273 - DNA, 25 bp, Homo sapien
ggcaggtggcagctaatcaccgatc

SEQ ID NO: 503274 - DNA, 25 bp, Homo sapien
tcccgtctggctttacagaatatct

SEQ ID NO: 503275 - DNA, 25 bp, Homo sapien
gacagcaaacccagatctgattatg

SEQ ID NO: 503276 - DNA, 25 bp, Homo sapien
gctactccagtagaatgattattaa

SEQ ID NO: 503277 - DNA, 25 bp, Homo sapien
aaatagctaatgtttaagacagcaa

SEQ ID NO: 503278 - DNA, 25 bp, Homo sapien
caaaatatgcttgcaaactgcaaat

SEQ ID NO: 503279 - DNA, 25 bp, Homo sapien
gataagaatatgtgctctgcatgct

SEQ ID NO: 503280 - DNA, 25 bp, Homo sapien
tgctggcgttgttcattattgacca

SEQ ID NO: 503281 - DNA, 25 bp, Homo sapien
tgcaaactgcaaatggtgattttga

SEQ ID NO: 503282 - DNA, 25 bp, Homo sapien
gcacagtagcttacgcctataattc

SEQ ID NO: 503283 - DNA, 25 bp, Homo sapien
ctgggcacagtagcttacgcctata

SEQ ID NO: 503284 - DNA, 25 bp, Homo sapien
caaggcaagagtatcacttgagctc

SEQ ID NO: 503285 - DNA, 25 bp, Homo sapien
cagcactttaggaggccaaggcaag

SEQ ID NO: 503286 - DNA, 25 bp, Homo sapien
cactatattcccacgcccgactggg

SEQ ID NO: 503287 - DNA, 25 bp, Homo sapien
gaaagtaggctgaagaatcctgcgc

SEQ ID NO: 503288 - DNA, 25 bp, Homo sapien
cttgctctgcgacccagtctgtggg

SEQ ID NO: 503289 - DNA, 25 bp, Homo sapien
cagggtgtaaggtgaagaaattctc

SEQ ID NO: 503290 - DNA, 25 bp, Homo sapien
ggggtctgaggggcgcggcgtcctc

SEQ ID NO: 503291 - DNA, 25 bp, Homo sapien
ggtctgaggggcgcggcgtcctcac

SEQ ID NO: 503292 - DNA, 25 bp, Homo sapien
gggtctgaggggcgcggcgtcctca

SEQ ID NO: 503293 - DNA, 25 bp, Homo sapien
cggggtctgaggggcgcggcgtcct

SEQ ID NO: 503294 - DNA, 25 bp, Homo sapien
gcgttctccagctgagcgatcactt

SEQ ID NO: 503295 - DNA, 25 bp, Homo sapien
ctccagctgagcgatcacttctggg

SEQ ID NO: 503296 - DNA, 25 bp, Homo sapien
tttagccgcgttctccagctgagcg

SEQ ID NO: 503297 - DNA, 25 bp, Homo sapien
catcagaactttagccgcgttctcc

SEQ ID NO: 503298 - DNA, 25 bp, Homo sapien
gcctcggcgggtctggccgggctgc

SEQ ID NO: 503299 - DNA, 25 bp, Homo sapien
ggtctctcttcaatgacgcgccatg

SEQ ID NO: 503300 - DNA, 25 bp, Homo sapien
tcgcagccgctgtcgacaccggcgt

SEQ ID NO: 503301 - DNA, 25 bp, Homo sapien
aggcggtctgcccagactgctgcag

SEQ ID NO: 503302 - DNA, 25 bp, Homo sapien
ggctttccaaacagcatcgaagaca

SEQ ID NO: 503303 - DNA, 25 bp, Homo sapien
ctaaggctttccaaacagcatcgaa

SEQ ID NO: 503304 - DNA, 25 bp, Homo sapien
gctttccaaacagcatcgaagacat

SEQ ID NO: 503305 - DNA, 25 bp, Homo sapien
tgctaaggctttccaaacagcatcg

SEQ ID NO: 503306 - DNA, 25 bp, Homo sapien
ggtgcttgggtctggtggtatgggg

SEQ ID NO: 503307 - DNA, 25 bp, Homo sapien
aggtgcttgggtctggtggtatggg

SEQ ID NO: 503308 - DNA, 25 bp, Homo sapien
agaatagtagctgtgactctgcccc

SEQ ID NO: 503309 - DNA, 25 bp, Homo sapien
accagatgaacggacaggaatgact

SEQ ID NO: 503310 - DNA, 25 bp, Homo sapien
tccgaaggcaattgttcactgtgac

SEQ ID NO: 503311 - DNA, 25 bp, Homo sapien
gacagggctgggttgtccaagaata

SEQ ID NO: 503312 - DNA, 25 bp, Homo sapien
catttgtcagttgggctctgcagtg

SEQ ID NO: 503313 - DNA, 25 bp, Homo sapien
cctatcatctaaacccatggagaga

SEQ ID NO: 503314 - DNA, 25 bp, Homo sapien
ttggtgttcagctgcgagcgatttt

SEQ ID NO: 503315 - DNA, 25 bp, Homo sapien
tctgcagtggtatcatttggatctt

SEQ ID NO: 503316 - DNA, 25 bp, Homo sapien
gcctagaaatgcctgagtgctccac

SEQ ID NO: 503317 - DNA, 25 bp, Homo sapien
tgcaggtggtgtttaatcttcagct

SEQ ID NO: 503318 - DNA, 25 bp, Homo sapien
tagatgcaggtggtgtttaatcttc

SEQ ID NO: 503319 - DNA, 25 bp, Homo sapien
cagctgcagggttctgttgagccta

SEQ ID NO: 503320 - DNA, 25 bp, Homo sapien
ccactgggtcagctaggcactgaga

SEQ ID NO: 503321 - DNA, 25 bp, Homo sapien
catagtgtgctactattgatggcaa

SEQ ID NO: 503322 - DNA, 25 bp, Homo sapien
gccctgagagctagagatgatgtga

SEQ ID NO: 503323 - DNA, 25 bp, Homo sapien
gggacaacagctagcctgaacatag

SEQ ID NO: 503324 - DNA, 25 bp, Homo sapien
cagtgtgaatctgatgccaacggga

SEQ ID NO: 503325 - DNA, 25 bp, Homo sapien
caacgggatcagtcagtctggcagc

SEQ ID NO: 503326 - DNA, 25 bp, Homo sapien
gggttatacacactagagccttctg

SEQ ID NO: 503327 - DNA, 25 bp, Homo sapien
tggacatggctttctattcacagga

SEQ ID NO: 503328 - DNA, 25 bp, Homo sapien
ctttaaccttcaatgcaatttgcac

SEQ ID NO: 503329 - DNA, 25 bp, Homo sapien
caatttgcactagtgccttatcatc

SEQ ID NO: 503330 - DNA, 25 bp, Homo sapien
gggatggaggtgtcagcttcacttt

SEQ ID NO: 503331 - DNA, 25 bp, Homo sapien
cattgcgtagccagtccactgaaga

SEQ ID NO: 503332 - DNA, 25 bp, Homo sapien
tggcagacgggaattaccactgctt

SEQ ID NO: 503333 - DNA, 25 bp, Homo sapien
ccactgcttatgatacaatggtatt

SEQ ID NO: 503334 - DNA, 25 bp, Homo sapien
cccggtagacacctggcagacggga

SEQ ID NO: 503335 - DNA, 25 bp, Homo sapien
gagcaagaccccttcacccggtaga

SEQ ID NO: 503336 - DNA, 25 bp, Homo sapien
gacagaaggcgatgagtcaggaatc

SEQ ID NO: 503337 - DNA, 25 bp, Homo sapien
gatttctcatggaggaatgcaagcc

SEQ ID NO: 503338 - DNA, 25 bp, Homo sapien
gattgggtcaccaaaagcctgggtc

SEQ ID NO: 503339 - DNA, 25 bp, Homo sapien
aatgcaagcctatgggacagaaggc

SEQ ID NO: 503340 - DNA, 25 bp, Homo sapien
cccttcgcttgagcaggccggaggc

SEQ ID NO: 503341 - DNA, 25 bp, Homo sapien
ccttcgcttgagcaggccggaggcc

SEQ ID NO: 503342 - DNA, 25 bp, Homo sapien
cttcgcttgagcaggccggaggcca

SEQ ID NO: 503343 - DNA, 25 bp, Homo sapien
ggagctggtcaccattgggcatctg

SEQ ID NO: 503344 - DNA, 25 bp, Homo sapien
ccattgggcatctgacaactgattg

SEQ ID NO: 503345 - DNA, 25 bp, Homo sapien
ttgggcttctgggactgtttctgga

SEQ ID NO: 503346 - DNA, 25 bp, Homo sapien
caactgattgtttgggcttctggga

SEQ ID NO: 503347 - DNA, 25 bp, Homo sapien
cagcagggtggagtaagcgtccaac

SEQ ID NO: 503348 - DNA, 25 bp, Homo sapien
gcgtccaacggtgtccaaagatttg

SEQ ID NO: 503349 - DNA, 25 bp, Homo sapien
tattgtgggtttctcaagcataggg

SEQ ID NO: 503350 - DNA, 25 bp, Homo sapien
ttctctgacttattgtgggtttctc

SEQ ID NO: 503351 - DNA, 25 bp, Homo sapien
cacgagcaacaaggtaagtagagat

SEQ ID NO: 503352 - DNA, 25 bp, Homo sapien
aggtaagtagagataactgggcctt

SEQ ID NO: 503353 - DNA, 25 bp, Homo sapien
aagaggtgtttacacgagcaacaag

SEQ ID NO: 503354 - DNA, 25 bp, Homo sapien
tgtttacacgagcaacaaggtaagt

SEQ ID NO: 503355 - DNA, 25 bp, Homo sapien
cgtgccgctgcggtaggacctggcg

SEQ ID NO: 503356 - DNA, 25 bp, Homo sapien
tgaagagatcgggagtcctctgcga

SEQ ID NO: 503357 - DNA, 25 bp, Homo sapien
taagaggctagtgcgccccgtgccg

SEQ ID NO: 503358 - DNA, 25 bp, Homo sapien
ctctggagcacccggcgcctaagag

SEQ ID NO: 503359 - DNA, 25 bp, Homo sapien
actgttatgatttttgtgaccagcc

SEQ ID NO: 503360 - DNA, 25 bp, Homo sapien
ttacgaccaatggaacatatgattt

SEQ ID NO: 503361 - DNA, 25 bp, Homo sapien
gtgttggttaattcatggtagaagc

SEQ ID NO: 503362 - DNA, 25 bp, Homo sapien
ttgtgaccagccattacgaccaatg

SEQ ID NO: 503363 - DNA, 25 bp, Homo sapien
agtcctcaggatttttgcccataca

SEQ ID NO: 503364 - DNA, 25 bp, Homo sapien
gtcctcaggatttttgcccatacac

SEQ ID NO: 503365 - DNA, 25 bp, Homo sapien
acaaatacagtcctcaggatttttg

SEQ ID NO: 503366 - DNA, 25 bp, Homo sapien
atacagtcctcaggatttttgccca

SEQ ID NO: 503367 - DNA, 25 bp, Homo sapien
attctgccacagccatagctaactg

SEQ ID NO: 503368 - DNA, 25 bp, Homo sapien
tctgccacagccatagctaactgct

SEQ ID NO: 503369 - DNA, 25 bp, Homo sapien
ttctgccacagccatagctaactgc

SEQ ID NO: 503370 - DNA, 25 bp, Homo sapien
ctgaagagtacaatttttcttggtt

SEQ ID NO: 503371 - DNA, 25 bp, Homo sapien
ttggcaaagtattggcctccatcac

SEQ ID NO: 503372 - DNA, 25 bp, Homo sapien
agtacaatttttcttggtttcatgg

SEQ ID NO: 503373 - DNA, 25 bp, Homo sapien
gtttggcaaagtattggcctccatc

SEQ ID NO: 503374 - DNA, 25 bp, Homo sapien
atatccaccaccaccatggctgcca

SEQ ID NO: 503375 - DNA, 25 bp, Homo sapien
attgcttccatcattaccaaatcca

SEQ ID NO: 503376 - DNA, 25 bp, Homo sapien
tccaccaccaccatggctgccacca

SEQ ID NO: 503377 - DNA, 25 bp, Homo sapien
ccaccaccatggctgccaccaaagc

SEQ ID NO: 503378 - DNA, 25 bp, Homo sapien
agttgtcattcccatgacaccacca

SEQ ID NO: 503379 - DNA, 25 bp, Homo sapien
tgtcattcccatgacaccaccatga

SEQ ID NO: 503380 - DNA, 25 bp, Homo sapien
ccatgacaccaccatgatcaccacc

SEQ ID NO: 503381 - DNA, 25 bp, Homo sapien
acaccaccatgatcaccaccaaagt

SEQ ID NO: 503382 - DNA, 25 bp, Homo sapien
cactcgccatcttttgctttgacaa

SEQ ID NO: 503383 - DNA, 25 bp, Homo sapien
ccatcttttgctttgacaaggcttc

SEQ ID NO: 503384 - DNA, 25 bp, Homo sapien
catcttttgctttgacaaggcttcc

SEQ ID NO: 503385 - DNA, 25 bp, Homo sapien
cttttgctttgacaaggcttcctaa

SEQ ID NO: 503386 - DNA, 25 bp, Homo sapien
cgtgatttcgatcacttccattttc

SEQ ID NO: 503387 - DNA, 25 bp, Homo sapien
ttcacagttgtggacattcacgtta

SEQ ID NO: 503388 - DNA, 25 bp, Homo sapien
cagttgtggacattcacgttatggt

SEQ ID NO: 503389 - DNA, 25 bp, Homo sapien
gacattcacgttatggtatttctga

SEQ ID NO: 503390 - DNA, 25 bp, Homo sapien
tttaatgccaccaacaaatatcttt

SEQ ID NO: 503391 - DNA, 25 bp, Homo sapien
tgaggggatgttcctcagtgtcttc

SEQ ID NO: 503392 - DNA, 25 bp, Homo sapien
tgccaccaacaaatatctttttctt

SEQ ID NO: 503393 - DNA, 25 bp, Homo sapien
ctgaggggatgttcctcagtgtctt

SEQ ID NO: 503394 - DNA, 25 bp, Homo sapien
acagtggcatagatgacaaacccaa

SEQ ID NO: 503395 - DNA, 25 bp, Homo sapien
gccttgcattcgtggctgcgtccac

SEQ ID NO: 503396 - DNA, 25 bp, Homo sapien
aaagcccctggcgtgcttggtgttt

SEQ ID NO: 503397 - DNA, 25 bp, Homo sapien
tgtggccttgcattcgtggctgcgt

SEQ ID NO: 503398 - DNA, 25 bp, Homo sapien
tcacagtccaggagcgttcctcatt

SEQ ID NO: 503399 - DNA, 25 bp, Homo sapien
tacctcacagtccaggagcgttcct

SEQ ID NO: 503400 - DNA, 25 bp, Homo sapien
acctcacagtccaggagcgttcctc

SEQ ID NO: 503401 - DNA, 25 bp, Homo sapien
ctcacagtccaggagcgttcctcat

SEQ ID NO: 503402 - DNA, 25 bp, Homo sapien
agtcataaatcctggcacataaacc

SEQ ID NO: 503403 - DNA, 25 bp, Homo sapien
caatgcctgggaatatagtggggtt

SEQ ID NO: 503404 - DNA, 25 bp, Homo sapien
aacggctcgaaggaaatgaggccca

SEQ ID NO: 503405 - DNA, 25 bp, Homo sapien
tggtgtgtgaagtcataaatcctgg

SEQ ID NO: 503406 - DNA, 25 bp, Homo sapien
aggtggcaccaatcttgacttccag

SEQ ID NO: 503407 - DNA, 25 bp, Homo sapien
tgacttccagatggaacagtacatc

SEQ ID NO: 503408 - DNA, 25 bp, Homo sapien
tccttgcagcaggaacccacttagg

SEQ ID NO: 503409 - DNA, 25 bp, Homo sapien
aggaacccacttaggtggcaccaat

SEQ ID NO: 503410 - DNA, 25 bp, Homo sapien
taaaaacgtattcacaggacctgct

SEQ ID NO: 503411 - DNA, 25 bp, Homo sapien
tacaatcatagcgaagaggtcaccc

SEQ ID NO: 503412 - DNA, 25 bp, Homo sapien
tacggactacagaaacggacatgtg

SEQ ID NO: 503413 - DNA, 25 bp, Homo sapien
tactgacagtcacgacgacaggcac

SEQ ID NO: 503414 - DNA, 25 bp, Homo sapien
tcctaaatgtgaataagtgctatgg

SEQ ID NO: 503415 - DNA, 25 bp, Homo sapien
ataacagcagcatgatttgtcaaag

SEQ ID NO: 503416 - DNA, 25 bp, Homo sapien
cctaaatgtgaataagtgctatgga

SEQ ID NO: 503417 - DNA, 25 bp, Homo sapien
tgtcaaagttaatccctataattta

SEQ ID NO: 503418 - DNA, 25 bp, Homo sapien
aaagcgatgctgagtcctgttttca

SEQ ID NO: 503419 - DNA, 25 bp, Homo sapien
tcaagtgaagtaatcgacggactaa

SEQ ID NO: 503420 - DNA, 25 bp, Homo sapien
cctgaaaagcctattgaaagcgatg

SEQ ID NO: 503421 - DNA, 25 bp, Homo sapien
ctattggcctgtgagggcaccggct

SEQ ID NO: 503422 - DNA, 25 bp, Homo sapien
tggagcgtgttctcccagttgatca

SEQ ID NO: 503423 - DNA, 25 bp, Homo sapien
gaattcgtaaaatgcgtgctcagga

SEQ ID NO: 503424 - DNA, 25 bp, Homo sapien
ttcgctggcatcgttccaagggctt

SEQ ID NO: 503425 - DNA, 25 bp, Homo sapien
ggccttggtgctaccttcgctggca

SEQ ID NO: 503426 - DNA, 25 bp, Homo sapien
tcatttcagtcgatggctcacagcc

SEQ ID NO: 503427 - DNA, 25 bp, Homo sapien
gaataaagctgactgaccccatgtg

SEQ ID NO: 503428 - DNA, 25 bp, Homo sapien
tctactgtgaagacaaaacctaggg

SEQ ID NO: 503429 - DNA, 25 bp, Homo sapien
cagcgtgtgatgacgtgactttcaa

SEQ ID NO: 503430 - DNA, 25 bp, Homo sapien
taggtgccaaaaagggcggctgccc

SEQ ID NO: 503431 - DNA, 25 bp, Homo sapien
accagcatctcgaagagaatcactc

SEQ ID NO: 503432 - DNA, 25 bp, Homo sapien
tcgaagagaatcactccaacactcc

SEQ ID NO: 503433 - DNA, 25 bp, Homo sapien
ccaccagtcacagagttgagtgtac

SEQ ID NO: 503434 - DNA, 25 bp, Homo sapien
aagtagaccttcactgggcaccaag

SEQ ID NO: 503435 - DNA, 25 bp, Homo sapien
caagccaggatcgtcttcatgtcac

SEQ ID NO: 503436 - DNA, 25 bp, Homo sapien
ttaagaggtcagtctgcgggtgcct

SEQ ID NO: 503437 - DNA, 25 bp, Homo sapien
tgcagctgcatatgccagggtagcc

SEQ ID NO: 503438 - DNA, 25 bp, Homo sapien
gggtggctggccatggcgcatgtac

SEQ ID NO: 503439 - DNA, 25 bp, Homo sapien
tgcggggtggctggccatggcgcat

SEQ ID NO: 503440 - DNA, 25 bp, Homo sapien
ggagacctcctgcggggtggctggc

SEQ ID NO: 503441 - DNA, 25 bp, Homo sapien
ggggtggctggccatggcgcatgta

SEQ ID NO: 503442 - DNA, 25 bp, Homo sapien
ccacaccgacagttagacacatcat

SEQ ID NO: 503443 - DNA, 25 bp, Homo sapien
cacctcgggtgcgatgtagtttgga

SEQ ID NO: 503444 - DNA, 25 bp, Homo sapien
gcttccgcgccctctgctctagggt

SEQ ID NO: 503445 - DNA, 25 bp, Homo sapien
ctctagggtcttcagcctgtcccca

SEQ ID NO: 503446 - DNA, 25 bp, Homo sapien
tgaagaatcacaggacaccatgcac

SEQ ID NO: 503447 - DNA, 25 bp, Homo sapien
cctagtttggagacacacgtggtga

SEQ ID NO: 503448 - DNA, 25 bp, Homo sapien
tatcaggacagagaatccccgctga

SEQ ID NO: 503449 - DNA, 25 bp, Homo sapien
tagcgcttaggccataatcaaaagg

SEQ ID NO: 503450 - DNA, 25 bp, Homo sapien
gaattgtgagtccacctgaacccag

SEQ ID NO: 503451 - DNA, 25 bp, Homo sapien
tcagctctgcgatgtagaaccgggc

SEQ ID NO: 503452 - DNA, 25 bp, Homo sapien
cagggcgtgagtgtccaccttacaa

SEQ ID NO: 503453 - DNA, 25 bp, Homo sapien
ttagggtcttcatggcgtacagggc

SEQ ID NO: 503454 - DNA, 25 bp, Homo sapien
gactgtcgcccattagccgttttga

SEQ ID NO: 503455 - DNA, 25 bp, Homo sapien
gaaaagggattgtgcgtgcttccta

SEQ ID NO: 503456 - DNA, 25 bp, Homo sapien
aaaggcgaaagggaggtcacaccat

SEQ ID NO: 503457 - DNA, 25 bp, Homo sapien
cctattgccagtagagggatgagcc

SEQ ID NO: 503458 - DNA, 25 bp, Homo sapien
cacaggctgtccaggtcgtactgct

SEQ ID NO: 503459 - DNA, 25 bp, Homo sapien
tctctgctgtttttgcggacgggaa

SEQ ID NO: 503460 - DNA, 25 bp, Homo sapien
tactgctccgacttgctgcgcagca

SEQ ID NO: 503461 - DNA, 25 bp, Homo sapien
cttaaaggcgtatggcgagtagctc

SEQ ID NO: 503462 - DNA, 25 bp, Homo sapien
ccagcgccagggcatgctcctcctt

SEQ ID NO: 503463 - DNA, 25 bp, Homo sapien
aggcgggcacctccggtctgggcct

SEQ ID NO: 503464 - DNA, 25 bp, Homo sapien
gtactccacgtccagcgggaaggcg

SEQ ID NO: 503465 - DNA, 25 bp, Homo sapien
cggtctgggcctccgtactccacgt

SEQ ID NO: 503466 - DNA, 25 bp, Homo sapien
gcgggggccggggcaggcgcgggca

SEQ ID NO: 503467 - DNA, 25 bp, Homo sapien
ccgtctgcggctccggcctcagcac

SEQ ID NO: 503468 - DNA, 25 bp, Homo sapien
tctgcggctccggcctcagcacacg

SEQ ID NO: 503469 - DNA, 25 bp, Homo sapien
agccgtctgcggctccggcctcagc

SEQ ID NO: 503470 - DNA, 25 bp, Homo sapien
tgcggctccggcctcagcacacgca

SEQ ID NO: 503471 - DNA, 25 bp, Homo sapien
ctggacggaggtgctgcccaattca

SEQ ID NO: 503472 - DNA, 25 bp, Homo sapien
tgttccgcgagggagtgagcaggct

SEQ ID NO: 503473 - DNA, 25 bp, Homo sapien
atgtgcgcggccgtgacagccgtca

SEQ ID NO: 503474 - DNA, 25 bp, Homo sapien
tcatacaggtccacgttgaggctgt

SEQ ID NO: 503475 - DNA, 25 bp, Homo sapien
cttgtggtgtgggtgcggcacgtag

SEQ ID NO: 503476 - DNA, 25 bp, Homo sapien
tgcggcacgtagagcccggcggcag

SEQ ID NO: 503477 - DNA, 25 bp, Homo sapien
cggcgcctggcggtcctccctggcc

SEQ ID NO: 503478 - DNA, 25 bp, Homo sapien
gtctccggcggcgtcttgctctgga

SEQ ID NO: 503479 - DNA, 25 bp, Homo sapien
tgctgcctctacgctggcaccgtag

SEQ ID NO: 503480 - DNA, 25 bp, Homo sapien
tgtgcccctgctgcctctacgctgg

SEQ ID NO: 503481 - DNA, 25 bp, Homo sapien
tgcggccgcccgtagtgcgcgccct

SEQ ID NO: 503482 - DNA, 25 bp, Homo sapien
gtagtgcgcgccctgcagcgggaag

SEQ ID NO: 503483 - DNA, 25 bp, Homo sapien
agcgccgaagcttgggccctcgtag

SEQ ID NO: 503484 - DNA, 25 bp, Homo sapien
gtagtccacgtacggccgcggcatc

SEQ ID NO: 503485 - DNA, 25 bp, Homo sapien
gccgtcagcgccgaagcttgggccc

SEQ ID NO: 503486 - DNA, 25 bp, Homo sapien
aggtagtccacgtacggccgcggca

SEQ ID NO: 503487 - DNA, 25 bp, Homo sapien
gaatcgccggttccttcgaagctgg

SEQ ID NO: 503488 - DNA, 25 bp, Homo sapien
taggacgcaaacgaatcgccggttc

SEQ ID NO: 503489 - DNA, 25 bp, Homo sapien
tcgaagctgggcctccgcgtcactg

SEQ ID NO: 503490 - DNA, 25 bp, Homo sapien
tcagctggtggtaggacgcaaacga

SEQ ID NO: 503491 - DNA, 25 bp, Homo sapien
cccactctcagaagctacgatgtga

SEQ ID NO: 503492 - DNA, 25 bp, Homo sapien
aggttggacccctctgcacgtggtt

SEQ ID NO: 503493 - DNA, 25 bp, Homo sapien
tactaaggtaatttcagacaaggct

SEQ ID NO: 503494 - DNA, 25 bp, Homo sapien
gggcctcaggtaccaatcacagggc

SEQ ID NO: 503495 - DNA, 25 bp, Homo sapien
aatctgctcattcctcgggtccagg

SEQ ID NO: 503496 - DNA, 25 bp, Homo sapien
ccagtctgcttgagagctcggccag

SEQ ID NO: 503497 - DNA, 25 bp, Homo sapien
ggtctgcttaatgacccgcacaatc

SEQ ID NO: 503498 - DNA, 25 bp, Homo sapien
cttaatgacccgcacaatctgctca

SEQ ID NO: 503499 - DNA, 25 bp, Homo sapien
tcttaagcatgtatggagaccaagc

SEQ ID NO: 503500 - DNA, 25 bp, Homo sapien
taagcatgtatggagaccaagctgg

SEQ ID NO: 503501 - DNA, 25 bp, Homo sapien
ttcttaagcatgtatggagaccaag

SEQ ID NO: 503502 - DNA, 25 bp, Homo sapien
ttaagcatgtatggagaccaagctg

SEQ ID NO: 503503 - DNA, 25 bp, Homo sapien
tgcactgtctctggcgggatcctgt

SEQ ID NO: 503504 - DNA, 25 bp, Homo sapien
cctgtgcttgcttggaggattgcca

SEQ ID NO: 503505 - DNA, 25 bp, Homo sapien
gcctgggcaagacccgcatgtttgt

SEQ ID NO: 503506 - DNA, 25 bp, Homo sapien
gaatctctgacccaaaggcctagat

SEQ ID NO: 503507 - DNA, 25 bp, Homo sapien
gggccgcagcgacattgtgcacgcc

SEQ ID NO: 503508 - DNA, 25 bp, Homo sapien
gccgcagcgacattgtgcacgccgg

SEQ ID NO: 503509 - DNA, 25 bp, Homo sapien
tgggggccctgcgacattgtccacg

SEQ ID NO: 503510 - DNA, 25 bp, Homo sapien
cgcagcgacattgtgcacgccgggt

SEQ ID NO: 503511 - DNA, 25 bp, Homo sapien
agggatccccgcgaccttgtgcacg

SEQ ID NO: 503512 - DNA, 25 bp, Homo sapien
gttctggcgacctggtccacaacct

SEQ ID NO: 503513 - DNA, 25 bp, Homo sapien
ggccctggcgacgttgtccacgcag

SEQ ID NO: 503514 - DNA, 25 bp, Homo sapien
cacacggcgcaagggccctggtgac

SEQ ID NO: 503515 - DNA, 25 bp, Homo sapien
gggcaggcgcagcacgtgccgtgtg

SEQ ID NO: 503516 - DNA, 25 bp, Homo sapien
cacgtgccgtgtgcgagccaattat

SEQ ID NO: 503517 - DNA, 25 bp, Homo sapien
gcagcacgtgccgtgtgcgagccaa

SEQ ID NO: 503518 - DNA, 25 bp, Homo sapien
cgtgccgtgtgcgagccaattatga

SEQ ID NO: 503519 - DNA, 25 bp, Homo sapien
cagttctaacccatgagtgaagccc

SEQ ID NO: 503520 - DNA, 25 bp, Homo sapien
gaatgagctacatggaaccccagca

SEQ ID NO: 503521 - DNA, 25 bp, Homo sapien
ccccagtgtgaagcggaatctactt

SEQ ID NO: 503522 - DNA, 25 bp, Homo sapien
tttcagtcctcagatcgcaccatgg

SEQ ID NO: 503523 - DNA, 25 bp, Homo sapien
actgcgcccggccaaaaagccatta

SEQ ID NO: 503524 - DNA, 25 bp, Homo sapien
tgcgcccggccaaaaagccattatt

SEQ ID NO: 503525 - DNA, 25 bp, Homo sapien
ctgcgcccggccaaaaagccattat

SEQ ID NO: 503526 - DNA, 25 bp, Homo sapien
tgagactgcaaaagagcttcatgag

SEQ ID NO: 503527 - DNA, 25 bp, Homo sapien
gttcaacagtatcccgaatccaagg

SEQ ID NO: 503528 - DNA, 25 bp, Homo sapien
gctttggcaggaagcgctttgctct

SEQ ID NO: 503529 - DNA, 25 bp, Homo sapien
gagagccaagcccaatgtgagactg

SEQ ID NO: 503530 - DNA, 25 bp, Homo sapien
gcgaatcatcacaaccgactaattt

SEQ ID NO: 503531 - DNA, 25 bp, Homo sapien
gatgcgaatcatcacaaccgactaa

SEQ ID NO: 503532 - DNA, 25 bp, Homo sapien
aattacagatgcgaatcatcacaac

SEQ ID NO: 503533 - DNA, 25 bp, Homo sapien
cttctgttttaaaaggcccactctg

SEQ ID NO: 503534 - DNA, 25 bp, Homo sapien
cattgccagctactactgtaggaca

SEQ ID NO: 503535 - DNA, 25 bp, Homo sapien
ggacctctttggctcttgctgctcc

SEQ ID NO: 503536 - DNA, 25 bp, Homo sapien
ctccagactacagccttgggcgtgg

SEQ ID NO: 503537 - DNA, 25 bp, Homo sapien
cagtggtgctcgctgctgcattgcc

SEQ ID NO: 503538 - DNA, 25 bp, Homo sapien
tcatgaatggttagatacacatttt

SEQ ID NO: 503539 - DNA, 25 bp, Homo sapien
cctctggtgtgagtgggatttgggc

SEQ ID NO: 503540 - DNA, 25 bp, Homo sapien
ctgttttgttgtgactgtcaggatc

SEQ ID NO: 503541 - DNA, 25 bp, Homo sapien
tgccatcagcctctggtgtgagtgg

SEQ ID NO: 503542 - DNA, 25 bp, Homo sapien
ttgtgactgtcaggatcctgccctg

SEQ ID NO: 503543 - DNA, 25 bp, Homo sapien
taaaaccaacttgcccgatccatgg

SEQ ID NO: 503544 - DNA, 25 bp, Homo sapien
caacttgcccgatccatggccatgc

SEQ ID NO: 503545 - DNA, 25 bp, Homo sapien
aaccaacttgcccgatccatggcca

SEQ ID NO: 503546 - DNA, 25 bp, Homo sapien
agtaaaaccaacttgcccgatccat

SEQ ID NO: 503547 - DNA, 25 bp, Homo sapien
gagttcagaaggggaagggctggct

SEQ ID NO: 503548 - DNA, 25 bp, Homo sapien
ctagagttcagaaggggaagggctg

SEQ ID NO: 503549 - DNA, 25 bp, Homo sapien
gttcagaaggggaagggctggctcc

SEQ ID NO: 503550 - DNA, 25 bp, Homo sapien
tcagaaggggaagggctggctccag

SEQ ID NO: 503551 - DNA, 25 bp, Homo sapien
ccctgcttgcgcagcaggtccagga

SEQ ID NO: 503552 - DNA, 25 bp, Homo sapien
actgtggtcgcttccctgatgtcct

SEQ ID NO: 503553 - DNA, 25 bp, Homo sapien
tccttcacccaggtgcctgagagtg

SEQ ID NO: 503554 - DNA, 25 bp, Homo sapien
aggaagactgtggtcgcttccctga

SEQ ID NO: 503555 - DNA, 25 bp, Homo sapien
cccaaccactgatgtgtggcttaaa

SEQ ID NO: 503556 - DNA, 25 bp, Homo sapien
ccactgatgtgtggcttaaagataa

SEQ ID NO: 503557 - DNA, 25 bp, Homo sapien
tttgaagaattgaggacaccttccc

SEQ ID NO: 503558 - DNA, 25 bp, Homo sapien
ggacaccttcccaaccactgatgtg

SEQ ID NO: 503559 - DNA, 25 bp, Homo sapien
caggggggcagtgtcgctcgagccg

SEQ ID NO: 503560 - DNA, 25 bp, Homo sapien
gctcccggcatccatagcgctgcat

SEQ ID NO: 503561 - DNA, 25 bp, Homo sapien
actcctttccaaagatcgctcccgg

SEQ ID NO: 503562 - DNA, 25 bp, Homo sapien
ggcagtgtcgctcgagccggggact

SEQ ID NO: 503563 - DNA, 25 bp, Homo sapien
ggtagaatagaacccaactgcaagt

SEQ ID NO: 503564 - DNA, 25 bp, Homo sapien
caggactctccacgctgccggagag

SEQ ID NO: 503565 - DNA, 25 bp, Homo sapien
aattttcagtgtgaaagctcttggt

SEQ ID NO: 503566 - DNA, 25 bp, Homo sapien
tgcaagtacacggacccctgcactt

SEQ ID NO: 503567 - DNA, 25 bp, Homo sapien
catgaaatcaacaccaatccctgga

SEQ ID NO: 503568 - DNA, 25 bp, Homo sapien
aatccctggaatacccatcggatgc

SEQ ID NO: 503569 - DNA, 25 bp, Homo sapien
gagggctgcccatgaaatcaacacc

SEQ ID NO: 503570 - DNA, 25 bp, Homo sapien
tggccataaagagggctgcccatga

SEQ ID NO: 503571 - DNA, 25 bp, Homo sapien
atcttagaggcaagttatttggttt

SEQ ID NO: 503572 - DNA, 25 bp, Homo sapien
gaaagaggacatcacactgtattac

SEQ ID NO: 503573 - DNA, 25 bp, Homo sapien
tagctaggacctccaacagaagatg

SEQ ID NO: 503574 - DNA, 25 bp, Homo sapien
ctgtattactaatcttagaggcaag

SEQ ID NO: 503575 - DNA, 25 bp, Homo sapien
tcaggagatggcaggcaggtcatct

SEQ ID NO: 503576 - DNA, 25 bp, Homo sapien
gttggactgagctgagattgagtca

SEQ ID NO: 503577 - DNA, 25 bp, Homo sapien
tggactgagctgagattgagtcact

SEQ ID NO: 503578 - DNA, 25 bp, Homo sapien
gaggtcaggagatggcaggcaggtc

SEQ ID NO: 503579 - DNA, 25 bp, Homo sapien
tccctggatggtaccgacacaaatg

SEQ ID NO: 503580 - DNA, 25 bp, Homo sapien
gagaggcctaccatggttccctgga

SEQ ID NO: 503581 - DNA, 25 bp, Homo sapien
ccgtagaaggccacaaggatgggtc

SEQ ID NO: 503582 - DNA, 25 bp, Homo sapien
taaataatccctaagaccctgagag

SEQ ID NO: 503583 - DNA, 25 bp, Homo sapien
gacccaatgagaacaggaaggctgg

SEQ ID NO: 503584 - DNA, 25 bp, Homo sapien
cagacccaatgagaacaggaaggct

SEQ ID NO: 503585 - DNA, 25 bp, Homo sapien
cagagggcagacccaatgagaacag

SEQ ID NO: 503586 - DNA, 25 bp, Homo sapien
agagggcagacccaatgagaacagg

SEQ ID NO: 503587 - DNA, 25 bp, Homo sapien
caaggttgacagacggcacagagta

SEQ ID NO: 503588 - DNA, 25 bp, Homo sapien
cttggcatggagaaggtgacagaca

SEQ ID NO: 503589 - DNA, 25 bp, Homo sapien
gacacacacggtatcgctgaaggct

SEQ ID NO: 503590 - DNA, 25 bp, Homo sapien
aacagttccagcctaaaatgccaga

SEQ ID NO: 503591 - DNA, 25 bp, Homo sapien
tgctgactacatttcaagttgttat

SEQ ID NO: 503592 - DNA, 25 bp, Homo sapien
ctacatttcaagttgttatggtggg

SEQ ID NO: 503593 - DNA, 25 bp, Homo sapien
catttcaagttgttatggtggggta

SEQ ID NO: 503594 - DNA, 25 bp, Homo sapien
gtgctgactacatttcaagttgtta

SEQ ID NO: 503595 - DNA, 25 bp, Homo sapien
tggccctgcagaggtctgtacccac

SEQ ID NO: 503596 - DNA, 25 bp, Homo sapien
caaagccttcaagtagttgccaaac

SEQ ID NO: 503597 - DNA, 25 bp, Homo sapien
tataagtagtaaccaattcaaagcc

SEQ ID NO: 503598 - DNA, 25 bp, Homo sapien
aaaccattctgactgccccagctgt

SEQ ID NO: 503599 - DNA, 25 bp, Homo sapien
tcactgtttggtcctgcgggtagcc

SEQ ID NO: 503600 - DNA, 25 bp, Homo sapien
gtcgctgccggctatttccagaata

SEQ ID NO: 503601 - DNA, 25 bp, Homo sapien
cctgaaccgaagacttggatggctg

SEQ ID NO: 503602 - DNA, 25 bp, Homo sapien
caaggctttctgataaggtccgaac

SEQ ID NO: 503603 - DNA, 25 bp, Homo sapien
ccttccatttttgtagttcctatag

SEQ ID NO: 503604 - DNA, 25 bp, Homo sapien
ccataaatacaatcttcttaaagtg

SEQ ID NO: 503605 - DNA, 25 bp, Homo sapien
caatagtatcagtttgttgtaaaca

SEQ ID NO: 503606 - DNA, 25 bp, Homo sapien
tgtagttcctatagagaacctaaaa

SEQ ID NO: 503607 - DNA, 25 bp, Homo sapien
tgaggacaaagcctgccagtgccac

SEQ ID NO: 503608 - DNA, 25 bp, Homo sapien
ctgaggacaaagcctgccagtgcca

SEQ ID NO: 503609 - DNA, 25 bp, Homo sapien
gaggacaaagcctgccagtgccacc

SEQ ID NO: 503610 - DNA, 25 bp, Homo sapien
tagtctagggataccacaagggctg

SEQ ID NO: 503611 - DNA, 25 bp, Homo sapien
tagtacctacggataaactgtgttc

SEQ ID NO: 503612 - DNA, 25 bp, Homo sapien
tctcccaccatagtgaggcactagt

SEQ ID NO: 503613 - DNA, 25 bp, Homo sapien
tgtccctgtcttaagtgaatatgaa

SEQ ID NO: 503614 - DNA, 25 bp, Homo sapien
gatgtgatggcaagatgtgaatgat

SEQ ID NO: 503615 - DNA, 25 bp, Homo sapien
actggagacttgcatttcacaaacg

SEQ ID NO: 503616 - DNA, 25 bp, Homo sapien
gccgcactccatccccgagggaaag

SEQ ID NO: 503617 - DNA, 25 bp, Homo sapien
gaaagctccccagaagttctggagt

SEQ ID NO: 503618 - DNA, 25 bp, Homo sapien
cgggcctctcgcgccgggagaccgg

SEQ ID NO: 503619 - DNA, 25 bp, Homo sapien
cggcggtggcgtggacggcgactgc

SEQ ID NO: 503620 - DNA, 25 bp, Homo sapien
cggtggcgtggacggcgactgctcc

SEQ ID NO: 503621 - DNA, 25 bp, Homo sapien
ctcgggggcgtcctggccggcggct

SEQ ID NO: 503622 - DNA, 25 bp, Homo sapien
tgggacattcgctacattgttggca

SEQ ID NO: 503623 - DNA, 25 bp, Homo sapien
gacccaagtgggacattcgctacat

SEQ ID NO: 503624 - DNA, 25 bp, Homo sapien
gttccaaagcgcagacccaagtggg

SEQ ID NO: 503625 - DNA, 25 bp, Homo sapien
tcacgccgcggttccaaagcgcaga

SEQ ID NO: 503626 - DNA, 25 bp, Homo sapien
gaggaagggcacgtggaggctgcag

SEQ ID NO: 503627 - DNA, 25 bp, Homo sapien
gcatttgaagtactcttcgagggac

SEQ ID NO: 503628 - DNA, 25 bp, Homo sapien
agtactcttcgagggacatccttgg

SEQ ID NO: 503629 - DNA, 25 bp, Homo sapien
aagtactcttcgagggacatccttg

SEQ ID NO: 503630 - DNA, 25 bp, Homo sapien
ttgaagtactcttcgagggacatcc

SEQ ID NO: 503631 - DNA, 25 bp, Homo sapien
gtttcccctctctgtcagttttaca

SEQ ID NO: 503632 - DNA, 25 bp, Homo sapien
tcccctctctgtcagttttacagag

SEQ ID NO: 503633 - DNA, 25 bp, Homo sapien
cctctctgtcagttttacagagacc

SEQ ID NO: 503634 - DNA, 25 bp, Homo sapien
ttcccctctctgtcagttttacaga

SEQ ID NO: 503635 - DNA, 25 bp, Homo sapien
atgaagttgatttggtgtttagcac

SEQ ID NO: 503636 - DNA, 25 bp, Homo sapien
ttggtgtttagcacaaatggcttcc

SEQ ID NO: 503637 - DNA, 25 bp, Homo sapien
ccaacgtttttcatagcagccgggc

SEQ ID NO: 503638 - DNA, 25 bp, Homo sapien
cgtttttcatagcagccgggcacac

SEQ ID NO: 503639 - DNA, 25 bp, Homo sapien
tcccaacgtttttcatagcagccgg

SEQ ID NO: 503640 - DNA, 25 bp, Homo sapien
aacgtttttcatagcagccgggcac

SEQ ID NO: 503641 - DNA, 25 bp, Homo sapien
accgagtcgacatcatggtattgtc

SEQ ID NO: 503642 - DNA, 25 bp, Homo sapien
catcatggtattgtctttggcacgt

SEQ ID NO: 503643 - DNA, 25 bp, Homo sapien
tcgacatcatggtattgtctttggc

SEQ ID NO: 503644 - DNA, 25 bp, Homo sapien
ccgagtcgacatcatggtattgtct

SEQ ID NO: 503645 - DNA, 25 bp, Homo sapien
gatagggaatgctctcgtagggctt

SEQ ID NO: 503646 - DNA, 25 bp, Homo sapien
gtcaaggtccaccacagacatggag

SEQ ID NO: 503647 - DNA, 25 bp, Homo sapien
tgacaggcctttgatcagatctggc

SEQ ID NO: 503648 - DNA, 25 bp, Homo sapien
agacatggagaaagcaaccctgggc

SEQ ID NO: 503649 - DNA, 25 bp, Homo sapien
agaatcggccgatggtgctctgaaa

SEQ ID NO: 503650 - DNA, 25 bp, Homo sapien
ctggttaaatggagaaggcacatac

SEQ ID NO: 503651 - DNA, 25 bp, Homo sapien
aggtctgaagtctggttaaatggag

SEQ ID NO: 503652 - DNA, 25 bp, Homo sapien
cacatactgtaaccactgagagtgt

SEQ ID NO: 503653 - DNA, 25 bp, Homo sapien
ggctgaacaacttccccacaatgaa

SEQ ID NO: 503654 - DNA, 25 bp, Homo sapien
cacgtgtggtaggtaccctcattaa

SEQ ID NO: 503655 - DNA, 25 bp, Homo sapien
taattcgcgtccattagcccctctt

SEQ ID NO: 503656 - DNA, 25 bp, Homo sapien
tcagaaaactcagcgagacacagcg

SEQ ID NO: 503657 - DNA, 25 bp, Homo sapien
attggaagtgacgtggacaacgtcc

SEQ ID NO: 503658 - DNA, 25 bp, Homo sapien
ttgcaaatgacggtgagggcttccc

SEQ ID NO: 503659 - DNA, 25 bp, Homo sapien
tgagtctcgcccacagtgcacggtg

SEQ ID NO: 503660 - DNA, 25 bp, Homo sapien
catggattttagcagggccatggcc

SEQ ID NO: 503661 - DNA, 25 bp, Homo sapien
gtgaaaggggtcacactcataatgg

SEQ ID NO: 503662 - DNA, 25 bp, Homo sapien
tgaaaggggtcacactcataatggc

SEQ ID NO: 503663 - DNA, 25 bp, Homo sapien
gtgatggttatctcttctccctctg

SEQ ID NO: 503664 - DNA, 25 bp, Homo sapien
tggtgatggttatctcttctccctc

SEQ ID NO: 503665 - DNA, 25 bp, Homo sapien
ttggtgatggttatctcttctccct

SEQ ID NO: 503666 - DNA, 25 bp, Homo sapien
ggtgatggttatctcttctccctct

SEQ ID NO: 503667 - DNA, 25 bp, Homo sapien
tctaattgaagacgtaactaacgta

SEQ ID NO: 503668 - DNA, 25 bp, Homo sapien
ttcttaagtgtaataggtaggacca

SEQ ID NO: 503669 - DNA, 25 bp, Homo sapien
taacgtaaccacctttgcttcatat

SEQ ID NO: 503670 - DNA, 25 bp, Homo sapien
cctagaagtctaattgaagacgtaa

SEQ ID NO: 503671 - DNA, 25 bp, Homo sapien
tgcaaagcccacataactcgctgag

SEQ ID NO: 503672 - DNA, 25 bp, Homo sapien
tcagtacgcttcagcacactccagt

SEQ ID NO: 503673 - DNA, 25 bp, Homo sapien
cactccagtgtgtgagtacaaggca

SEQ ID NO: 503674 - DNA, 25 bp, Homo sapien
tctccaagctgtgaagctaaggttt

SEQ ID NO: 503675 - DNA, 25 bp, Homo sapien
ccccgattcgtaatgcgcttgcgca

SEQ ID NO: 503676 - DNA, 25 bp, Homo sapien
tctgtcatctaggttgctggactgc

SEQ ID NO: 503677 - DNA, 25 bp, Homo sapien
tcaagtcgggagtcaggaggtcaaa

SEQ ID NO: 503678 - DNA, 25 bp, Homo sapien
tacaggcttgtgacaccacgagtgg

SEQ ID NO: 503679 - DNA, 25 bp, Homo sapien
gatggtatcacttgtaagttcagtc

SEQ ID NO: 503680 - DNA, 25 bp, Homo sapien
cagtcgtaagatggtatcacttgta

SEQ ID NO: 503681 - DNA, 25 bp, Homo sapien
cacttgtaagttcagtcatatactt

SEQ ID NO: 503682 - DNA, 25 bp, Homo sapien
cactcttcagtcgtaagatggtatc

SEQ ID NO: 503683 - DNA, 25 bp, Homo sapien
tctaagccacccgaactgtgtgtgg

SEQ ID NO: 503684 - DNA, 25 bp, Homo sapien
ggaaggatcgctccatgaccacgta

SEQ ID NO: 503685 - DNA, 25 bp, Homo sapien
tgtcgtaacccagtcaaatcaattg

SEQ ID NO: 503686 - DNA, 25 bp, Homo sapien
tgtacgcgttcaggtctctaagcca

SEQ ID NO: 503687 - DNA, 25 bp, Homo sapien
taggtaaatcactaggccataaggt

SEQ ID NO: 503688 - DNA, 25 bp, Homo sapien
ctgaagtcccttttagcactaagag

SEQ ID NO: 503689 - DNA, 25 bp, Homo sapien
taatctctagtataagaccctggca

SEQ ID NO: 503690 - DNA, 25 bp, Homo sapien
gttgtgtagcaacagaagatagcat

SEQ ID NO: 503691 - DNA, 25 bp, Homo sapien
accacctccttcagggcgcatgaga

SEQ ID NO: 503692 - DNA, 25 bp, Homo sapien
tccagataggagattacttggacat

SEQ ID NO: 503693 - DNA, 25 bp, Homo sapien
agcaattacccctccaaatcgggca

SEQ ID NO: 503694 - DNA, 25 bp, Homo sapien
ctccttcagggcgcatgagaccata

SEQ ID NO: 503695 - DNA, 25 bp, Homo sapien
gaatggtgcctgacaaatgagaaac

SEQ ID NO: 503696 - DNA, 25 bp, Homo sapien
gaacattgaagtcctgattgcagca

SEQ ID NO: 503697 - DNA, 25 bp, Homo sapien
catctgatctgagaggcagtaaagc

SEQ ID NO: 503698 - DNA, 25 bp, Homo sapien
cggcctataggattgttaagactga

SEQ ID NO: 503699 - DNA, 25 bp, Homo sapien
cattcagattagatagactggagcc

SEQ ID NO: 503700 - DNA, 25 bp, Homo sapien
gggaaccctatgatttactatgcag

SEQ ID NO: 503701 - DNA, 25 bp, Homo sapien
gcacctagctttttggagaatagcc

SEQ ID NO: 503702 - DNA, 25 bp, Homo sapien
catgattaactgctattcgtggtgg

SEQ ID NO: 503703 - DNA, 25 bp, Homo sapien
gaatatattccctccctaagcagct

SEQ ID NO: 503704 - DNA, 25 bp, Homo sapien
tcctctaaagttgggagaactccag

SEQ ID NO: 503705 - DNA, 25 bp, Homo sapien
caatggcatacataaggctgactac

SEQ ID NO: 503706 - DNA, 25 bp, Homo sapien
tatacacacggtacacagtgaaagg

SEQ ID NO: 503707 - DNA, 25 bp, Homo sapien
tgactttcaaggaacaatcataaaa

SEQ ID NO: 503708 - DNA, 25 bp, Homo sapien
taatagagcacaatggacaggtccc

SEQ ID NO: 503709 - DNA, 25 bp, Homo sapien
taactcctagaacaaggacaaactc

SEQ ID NO: 503710 - DNA, 25 bp, Homo sapien
actacgcctttgaagtaagttgaca

SEQ ID NO: 503711 - DNA, 25 bp, Homo sapien
cagtatatagttacccaggcctgga

SEQ ID NO: 503712 - DNA, 25 bp, Homo sapien
ttaaatcagaaggatcgtaggcctg

SEQ ID NO: 503713 - DNA, 25 bp, Homo sapien
aaattcagggtctactgggtgtcca

SEQ ID NO: 503714 - DNA, 25 bp, Homo sapien
ggttctccacagtatgctaggtcct

SEQ ID NO: 503715 - DNA, 25 bp, Homo sapien
gttgtttgcaaacagcaactgcatc

SEQ ID NO: 503716 - DNA, 25 bp, Homo sapien
actgagcaagtaaaaggtgtgggac

SEQ ID NO: 503717 - DNA, 25 bp, Homo sapien
agacagcactgagcaagtaaaaggt

SEQ ID NO: 503718 - DNA, 25 bp, Homo sapien
cagcactgagcaagtaaaaggtgtg

SEQ ID NO: 503719 - DNA, 25 bp, Homo sapien
cagtttctgtgttggatagatccac

SEQ ID NO: 503720 - DNA, 25 bp, Homo sapien
ccttaaagagtgaatgactgggcta

SEQ ID NO: 503721 - DNA, 25 bp, Homo sapien
ggcggcctcatctgagtagcaaaca

SEQ ID NO: 503722 - DNA, 25 bp, Homo sapien
gaatgttaaaatcggtccagctcgg

SEQ ID NO: 503723 - DNA, 25 bp, Homo sapien
ggaaccttttactgggtggcactgc

SEQ ID NO: 503724 - DNA, 25 bp, Homo sapien
tggagtagctaggtttgagttgtat

SEQ ID NO: 503725 - DNA, 25 bp, Homo sapien
ggcactgctttaattgctattggag

SEQ ID NO: 503726 - DNA, 25 bp, Homo sapien
gctgacatctcggatgttctgtcca

SEQ ID NO: 503727 - DNA, 25 bp, Homo sapien
gtgtaggtgttctgagcagattctc

SEQ ID NO: 503728 - DNA, 25 bp, Homo sapien
taaaaccaacgaagtacgatcttca

SEQ ID NO: 503729 - DNA, 25 bp, Homo sapien
cataagaagaaatcgtaggtgaaga

SEQ ID NO: 503730 - DNA, 25 bp, Homo sapien
ggtgaagagggatctgttaaattct

SEQ ID NO: 503731 - DNA, 25 bp, Homo sapien
ttgtaaatggcaggtactaacaggc

SEQ ID NO: 503732 - DNA, 25 bp, Homo sapien
tccacgtgaacataaggagtagatg

SEQ ID NO: 503733 - DNA, 25 bp, Homo sapien
cagtagggtaccttccacgtgaaca

SEQ ID NO: 503734 - DNA, 25 bp, Homo sapien
ttcaactgataacacagccctgtgt

SEQ ID NO: 503735 - DNA, 25 bp, Homo sapien
caaaggagagttggtatattcggca

SEQ ID NO: 503736 - DNA, 25 bp, Homo sapien
ccaggagtacagaatgtaggtacca

SEQ ID NO: 503737 - DNA, 25 bp, Homo sapien
gtacagaatgtaggtaccaaaggag

SEQ ID NO: 503738 - DNA, 25 bp, Homo sapien
caaagctatgctgttctttgtagat

SEQ ID NO: 503739 - DNA, 25 bp, Homo sapien
cttttttccaactgctggatgatgg

SEQ ID NO: 503740 - DNA, 25 bp, Homo sapien
cacttttttccaactgctggatgat

SEQ ID NO: 503741 - DNA, 25 bp, Homo sapien
tttttccaactgctggatgatgggg

SEQ ID NO: 503742 - DNA, 25 bp, Homo sapien
ttttttccaactgctggatgatggg

SEQ ID NO: 503743 - DNA, 25 bp, Homo sapien
gcaaaaacattatcattgagcctgg

SEQ ID NO: 503744 - DNA, 25 bp, Homo sapien
ctgggagtggcaaaaacattatcat

SEQ ID NO: 503745 - DNA, 25 bp, Homo sapien
acattatcattgagcctggattctg

SEQ ID NO: 503746 - DNA, 25 bp, Homo sapien
gtggcaaaaacattatcattgagcc

SEQ ID NO: 503747 - DNA, 25 bp, Homo sapien
ggaactatgtaactcctgggacttc

SEQ ID NO: 503748 - DNA, 25 bp, Homo sapien
ggaattttataaccagtgtacacat

SEQ ID NO: 503749 - DNA, 25 bp, Homo sapien
gactgatcctgtcatatgattatca

SEQ ID NO: 503750 - DNA, 25 bp, Homo sapien
cattgtcctagccagttacacagat

SEQ ID NO: 503751 - DNA, 25 bp, Homo sapien
tggaagaaccactcgaacccagttc

SEQ ID NO: 503752 - DNA, 25 bp, Homo sapien
tcttcaggctatgagttggagatca

SEQ ID NO: 503753 - DNA, 25 bp, Homo sapien
tggagatcaggctgcgcaacatagc

SEQ ID NO: 503754 - DNA, 25 bp, Homo sapien
aattagctgggagttgcggcacata

SEQ ID NO: 503755 - DNA, 25 bp, Homo sapien
cctctatggaagcttcccaacttgg

SEQ ID NO: 503756 - DNA, 25 bp, Homo sapien
tttctgtctagatttgcttggtact

SEQ ID NO: 503757 - DNA, 25 bp, Homo sapien
aactacttgtgtactcttaatataa

SEQ ID NO: 503758 - DNA, 25 bp, Homo sapien
tacccatctctgccctacagaggga

SEQ ID NO: 503759 - DNA, 25 bp, Homo sapien
gcctgactcatgttcccttccatat

SEQ ID NO: 503760 - DNA, 25 bp, Homo sapien
tggtaattgcagtatacgctttcac

SEQ ID NO: 503761 - DNA, 25 bp, Homo sapien
tcccaagcaggtggaactaaggcat

SEQ ID NO: 503762 - DNA, 25 bp, Homo sapien
tcgttaagatgtctaatcatgtcaa

SEQ ID NO: 503763 - DNA, 25 bp, Homo sapien
aaacacacaatatagtccttagttc

SEQ ID NO: 503764 - DNA, 25 bp, Homo sapien
acaaaacacacaatatagtccttag

SEQ ID NO: 503765 - DNA, 25 bp, Homo sapien
cacaatatagtccttagttcttaat

SEQ ID NO: 503766 - DNA, 25 bp, Homo sapien
tatagtccttagttcttaatgctct

SEQ ID NO: 503767 - DNA, 25 bp, Homo sapien
tagaacttgggatacgatgtaccgc

SEQ ID NO: 503768 - DNA, 25 bp, Homo sapien
gttgttcactgcctgtggagggttt

SEQ ID NO: 503769 - DNA, 25 bp, Homo sapien
cctcgcatttttaagtcccattgtg

SEQ ID NO: 503770 - DNA, 25 bp, Homo sapien
tacgggctcttccttatagttgttc

SEQ ID NO: 503771 - DNA, 25 bp, Homo sapien
cacaattagacaactctgggtcaga

SEQ ID NO: 503772 - DNA, 25 bp, Homo sapien
tgtggactacgtggagacttctcag

SEQ ID NO: 503773 - DNA, 25 bp, Homo sapien
tctgggtcagagttaatggcttctt

SEQ ID NO: 503774 - DNA, 25 bp, Homo sapien
tacaactgcttgcaacaggaggatc

SEQ ID NO: 503775 - DNA, 25 bp, Homo sapien
tggcgtgatagtagctcactgtggc

SEQ ID NO: 503776 - DNA, 25 bp, Homo sapien
tggtggagcccgtatttgaatctgt

SEQ ID NO: 503777 - DNA, 25 bp, Homo sapien
tcattatcactactccatagggaga

SEQ ID NO: 503778 - DNA, 25 bp, Homo sapien
actgaattctatgattccacgtggg

SEQ ID NO: 503779 - DNA, 25 bp, Homo sapien
ttgtcttaatcatgctgccttgttt

SEQ ID NO: 503780 - DNA, 25 bp, Homo sapien
agttgtcttaatcatgctgccttgt

SEQ ID NO: 503781 - DNA, 25 bp, Homo sapien
gttgtcttaatcatgctgccttgtt

SEQ ID NO: 503782 - DNA, 25 bp, Homo sapien
ttcttgacacgtggactatatccat

SEQ ID NO: 503783 - DNA, 25 bp, Homo sapien
ttgacacgtggactatatccatact

SEQ ID NO: 503784 - DNA, 25 bp, Homo sapien
gacacgtggactatatccatacttc

SEQ ID NO: 503785 - DNA, 25 bp, Homo sapien
tcttgacacgtggactatatccata

SEQ ID NO: 503786 - DNA, 25 bp, Homo sapien
ttatcaagaagaatattaacatcat

SEQ ID NO: 503787 - DNA, 25 bp, Homo sapien
gctttatcaagaagaatattaacat

SEQ ID NO: 503788 - DNA, 25 bp, Homo sapien
gttgcctttatgaaatcaatgcctt

SEQ ID NO: 503789 - DNA, 25 bp, Homo sapien
tgcctttatgaaatcaatgccttct

SEQ ID NO: 503790 - DNA, 25 bp, Homo sapien
taaaattctcattggataatcttca

SEQ ID NO: 503791 - DNA, 25 bp, Homo sapien
tataaaattctcattggataatctt

SEQ ID NO: 503792 - DNA, 25 bp, Homo sapien
tgaatgaaggtcatataaaattctc

SEQ ID NO: 503793 - DNA, 25 bp, Homo sapien
ctgaacttctgaatgaaggtcatat

SEQ ID NO: 503794 - DNA, 25 bp, Homo sapien
tgccctggccgcccgcctcacgcac

SEQ ID NO: 503795 - DNA, 25 bp, Homo sapien
cgtgccctggccgcccgcctcacgc

SEQ ID NO: 503796 - DNA, 25 bp, Homo sapien
gtgccctggccgcccgcctcacgca

SEQ ID NO: 503797 - DNA, 25 bp, Homo sapien
tgcagccgggccgtctcgcagtcca

SEQ ID NO: 503798 - DNA, 25 bp, Homo sapien
gccgtctcgcagtccagcgtgctgg

SEQ ID NO: 503799 - DNA, 25 bp, Homo sapien
tttcctctccgtccagcgctcgctg

SEQ ID NO: 503800 - DNA, 25 bp, Homo sapien
gtccagcgctcgctgcagccgggcc

SEQ ID NO: 503801 - DNA, 25 bp, Homo sapien
ttacgccacggcgtctgctggcggc

SEQ ID NO: 503802 - DNA, 25 bp, Homo sapien
ccactagtttgaatctcggcgccgg

SEQ ID NO: 503803 - DNA, 25 bp, Homo sapien
agaccccgcgagacgggtgcgctta

SEQ ID NO: 503804 - DNA, 25 bp, Homo sapien
tcctctctcgcgagagccgaagtct

SEQ ID NO: 503805 - DNA, 25 bp, Homo sapien
gatcgaggcggagaaccattactgg

SEQ ID NO: 503806 - DNA, 25 bp, Homo sapien
gaaatggtcctaatcctgagtcgtc

SEQ ID NO: 503807 - DNA, 25 bp, Homo sapien
catagattcattgcggaccagctcg

SEQ ID NO: 503808 - DNA, 25 bp, Homo sapien
tgcgcgccaagcagaacatgatccg

SEQ ID NO: 503809 - DNA, 25 bp, Homo sapien
tatgttggtgcaggcttgcaatccc

SEQ ID NO: 503810 - DNA, 25 bp, Homo sapien
gattttatggatcacggagctgacc

SEQ ID NO: 503811 - DNA, 25 bp, Homo sapien
tgtgtgaaaatgagcctttggacca

SEQ ID NO: 503812 - DNA, 25 bp, Homo sapien
gccaaggtgataaaacccgtctcta

SEQ ID NO: 503813 - DNA, 25 bp, Homo sapien
tgcatgacgggagtgagacaccatc

SEQ ID NO: 503814 - DNA, 25 bp, Homo sapien
cctgcatgacgggagtgagacacca

SEQ ID NO: 503815 - DNA, 25 bp, Homo sapien
gaagatgttcgctttcagaatataa

SEQ ID NO: 503816 - DNA, 25 bp, Homo sapien
ttaatataccatgtaatttaccagt

SEQ ID NO: 503817 - DNA, 25 bp, Homo sapien
cctgcagtagccttctgctttcagg

SEQ ID NO: 503818 - DNA, 25 bp, Homo sapien
ctccctgcagtagccttctgctttc

SEQ ID NO: 503819 - DNA, 25 bp, Homo sapien
gcagtagccttctgctttcaggccc

SEQ ID NO: 503820 - DNA, 25 bp, Homo sapien
tgcagtagccttctgctttcaggcc

SEQ ID NO: 503821 - DNA, 25 bp, Homo sapien
tcccgagcctgaataaaatggaatc

SEQ ID NO: 503822 - DNA, 25 bp, Homo sapien
tgattgacacaggactcacccactg

SEQ ID NO: 503823 - DNA, 25 bp, Homo sapien
tcttggcagagttttccacaggtgc

SEQ ID NO: 503824 - DNA, 25 bp, Homo sapien
tggcaatagccagaaaacacagccc

SEQ ID NO: 503825 - DNA, 25 bp, Homo sapien
ggtcatccgagtggacatgccagca

SEQ ID NO: 503826 - DNA, 25 bp, Homo sapien
caagaagaaatgagtccggcaacaa

SEQ ID NO: 503827 - DNA, 25 bp, Homo sapien
gaggcaaacctcgtgagagcagaaa

SEQ ID NO: 503828 - DNA, 25 bp, Homo sapien
cacctggattgcctatatctggagg

SEQ ID NO: 503829 - DNA, 25 bp, Homo sapien
agccacagtcaatgaacaacccctt

SEQ ID NO: 503830 - DNA, 25 bp, Homo sapien
tagccacagtcaatgaacaacccct

SEQ ID NO: 503831 - DNA, 25 bp, Homo sapien
gccacagtcaatgaacaaccccttc

SEQ ID NO: 503832 - DNA, 25 bp, Homo sapien
atttcaaaacactttgtagatatct

SEQ ID NO: 503833 - DNA, 25 bp, Homo sapien
ttcaaaacactttgtagatatcttc

SEQ ID NO: 503834 - DNA, 25 bp, Homo sapien
atgaatttcaaaacactttgtagat

SEQ ID NO: 503835 - DNA, 25 bp, Homo sapien
caaaacactttgtagatatcttcat

SEQ ID NO: 503836 - DNA, 25 bp, Homo sapien
aaatgcagacaaagctacagacctc

SEQ ID NO: 503837 - DNA, 25 bp, Homo sapien
catcactagtggtactttctttggg

SEQ ID NO: 503838 - DNA, 25 bp, Homo sapien
ggatgagaagccttacccataacat

SEQ ID NO: 503839 - DNA, 25 bp, Homo sapien
tacagacctcaaaccgtggtacata

SEQ ID NO: 503840 - DNA, 25 bp, Homo sapien
gtaggaatacacttcacctaagaag

SEQ ID NO: 503841 - DNA, 25 bp, Homo sapien
tccatatcgttaaaatgtccatcct

SEQ ID NO: 503842 - DNA, 25 bp, Homo sapien
tgaagtccctatcaacataccagtg

SEQ ID NO: 503843 - DNA, 25 bp, Homo sapien
tgtccatcctatgcaaagcaatcta

SEQ ID NO: 503844 - DNA, 25 bp, Homo sapien
ccagctcttctacgtatatacataa

SEQ ID NO: 503845 - DNA, 25 bp, Homo sapien
aattccattcacactctaacctagg

SEQ ID NO: 503846 - DNA, 25 bp, Homo sapien
gaactactgattgtccctcccgtaa

SEQ ID NO: 503847 - DNA, 25 bp, Homo sapien
caaactgtgggccaacaaatcaata

SEQ ID NO: 503848 - DNA, 25 bp, Homo sapien
cagggaaaatcccattagactgctt

SEQ ID NO: 503849 - DNA, 25 bp, Homo sapien
gagggaagcgcaaccctagcctttc

SEQ ID NO: 503850 - DNA, 25 bp, Homo sapien
tctagagacaggaggcgctatgcag

SEQ ID NO: 503851 - DNA, 25 bp, Homo sapien
gattatgtcatgattttgcctgccc

SEQ ID NO: 503852 - DNA, 25 bp, Homo sapien
catctcctgagttccaagcagttcc

SEQ ID NO: 503853 - DNA, 25 bp, Homo sapien
ccatctcctgagttccaagcagttc

SEQ ID NO: 503854 - DNA, 25 bp, Homo sapien
gacacaatctgttacttcacggagt

SEQ ID NO: 503855 - DNA, 25 bp, Homo sapien
ggcaccagggatacatgcaggaatg

SEQ ID NO: 503856 - DNA, 25 bp, Homo sapien
ccaggcagggtatctgtcgagctct

SEQ ID NO: 503857 - DNA, 25 bp, Homo sapien
ttcacaagagggaagaaaggcactg

SEQ ID NO: 503858 - DNA, 25 bp, Homo sapien
ggagctgtggaacgcactgccaaaa

SEQ ID NO: 503859 - DNA, 25 bp, Homo sapien
ccagattcgggcatctgtagagtca

SEQ ID NO: 503860 - DNA, 25 bp, Homo sapien
tgccaaaaggaggtttcataccctg

SEQ ID NO: 503861 - DNA, 25 bp, Homo sapien
tccttgtcgctgttgcatgaaataa

SEQ ID NO: 503862 - DNA, 25 bp, Homo sapien
tttgtccttcacaagatgcatcctc

SEQ ID NO: 503863 - DNA, 25 bp, Homo sapien
ttttgtccttcacaagatgcatcct

SEQ ID NO: 503864 - DNA, 25 bp, Homo sapien
tgagcagctggtagagccctcacgt

SEQ ID NO: 503865 - DNA, 25 bp, Homo sapien
aattggaaaggatagactgagcagc

SEQ ID NO: 503866 - DNA, 25 bp, Homo sapien
cagaacctgaaatgccacgatgaca

SEQ ID NO: 503867 - DNA, 25 bp, Homo sapien
gagttcttgtcaaggcaggctcagc

SEQ ID NO: 503868 - DNA, 25 bp, Homo sapien
tgagatcgatgccactcccaagaac

SEQ ID NO: 503869 - DNA, 25 bp, Homo sapien
ccaagaacttagcaaatgcaggggt

SEQ ID NO: 503870 - DNA, 25 bp, Homo sapien
gcaaatgcaggggtggtcatcctca

SEQ ID NO: 503871 - DNA, 25 bp, Homo sapien
tcatcctcatcatatccccattcaa

SEQ ID NO: 503872 - DNA, 25 bp, Homo sapien
aagaaatggcggcagatgctccagt

SEQ ID NO: 503873 - DNA, 25 bp, Homo sapien
gaacgtgactatcacagcctgtgcg

SEQ ID NO: 503874 - DNA, 25 bp, Homo sapien
gagctgcggctcagtctcgaacgtg

SEQ ID NO: 503875 - DNA, 25 bp, Homo sapien
atggccgagtatgaagcgaccccgg

SEQ ID NO: 503876 - DNA, 25 bp, Homo sapien
tttgccgactacctcaacagcatct

SEQ ID NO: 503877 - DNA, 25 bp, Homo sapien
atggccccttttgccgactacctca

SEQ ID NO: 503878 - DNA, 25 bp, Homo sapien
agcatggccccttttgccgactacc

SEQ ID NO: 503879 - DNA, 25 bp, Homo sapien
ccccttttgccgactacctcaacag

SEQ ID NO: 503880 - DNA, 25 bp, Homo sapien
aagctgaacttcaagcgggtgggag

SEQ ID NO: 503881 - DNA, 25 bp, Homo sapien
cggcatgctggagccgcccttcaag

SEQ ID NO: 503882 - DNA, 25 bp, Homo sapien
gtgggagccggcatgctggagccgc

SEQ ID NO: 503883 - DNA, 25 bp, Homo sapien
acttcaagcgggtgggagccggcat

SEQ ID NO: 503884 - DNA, 25 bp, Homo sapien
gatcacagcttcgtagatagacggc

SEQ ID NO: 503885 - DNA, 25 bp, Homo sapien
agcctacgtggttctatcaatgcag

SEQ ID NO: 503886 - DNA, 25 bp, Homo sapien
tagacggctgtttccctttgggtga

SEQ ID NO: 503887 - DNA, 25 bp, Homo sapien
gcctggcccaacatcctatagggaa

SEQ ID NO: 503888 - DNA, 25 bp, Homo sapien
cataatatgttaactctgggtcaga

SEQ ID NO: 503889 - DNA, 25 bp, Homo sapien
tgtggctccacaatccataatatgt

SEQ ID NO: 503890 - DNA, 25 bp, Homo sapien
ggctgcttgggcaccagacatggta

SEQ ID NO: 503891 - DNA, 25 bp, Homo sapien
tagccttgactaacagaaccatcag

SEQ ID NO: 503892 - DNA, 25 bp, Homo sapien
ttaatacatagtcagcataaagctg

SEQ ID NO: 503893 - DNA, 25 bp, Homo sapien
atattaatacatagtcagcataaag

SEQ ID NO: 503894 - DNA, 25 bp, Homo sapien
tagaagagtaaggaatggctttata

SEQ ID NO: 503895 - DNA, 25 bp, Homo sapien
ttaaggtagaagagtaaggaatggc

SEQ ID NO: 503896 - DNA, 25 bp, Homo sapien
cgtggcagacggcatcatctaggaa

SEQ ID NO: 503897 - DNA, 25 bp, Homo sapien
tttaccagttcacaacgtaaatatc

SEQ ID NO: 503898 - DNA, 25 bp, Homo sapien
cagttcagattttaccagttcacaa

SEQ ID NO: 503899 - DNA, 25 bp, Homo sapien
cagattttaccagttcacaacgtaa

SEQ ID NO: 503900 - DNA, 25 bp, Homo sapien
gaaaagcaagtctcactcagttgat

SEQ ID NO: 503901 - DNA, 25 bp, Homo sapien
ctcttagaaccctttgaagcactgg

SEQ ID NO: 503902 - DNA, 25 bp, Homo sapien
ggctgagccagtctcttagaaccct

SEQ ID NO: 503903 - DNA, 25 bp, Homo sapien
cagtttcgaaatgaccaggctggca

SEQ ID NO: 503904 - DNA, 25 bp, Homo sapien
ggagcccacacagcggctaatggct

SEQ ID NO: 503905 - DNA, 25 bp, Homo sapien
gcaaaggagcccacacagcggctaa

SEQ ID NO: 503906 - DNA, 25 bp, Homo sapien
ccacacagcggctaatggctgctca

SEQ ID NO: 503907 - DNA, 25 bp, Homo sapien
cacagcggctaatggctgctcaggt

SEQ ID NO: 503908 - DNA, 25 bp, Homo sapien
accccaagaaggcagtcagtttcct

SEQ ID NO: 503909 - DNA, 25 bp, Homo sapien
taagaaaaccccaagaaggcagtca

SEQ ID NO: 503910 - DNA, 25 bp, Homo sapien
gcagaaaaagcacagttaagaaaac

SEQ ID NO: 503911 - DNA, 25 bp, Homo sapien
cccaagaaggcagtcagtttcctcc

SEQ ID NO: 503912 - DNA, 25 bp, Homo sapien
gggagataatcttcctgtgcagagg

SEQ ID NO: 503913 - DNA, 25 bp, Homo sapien
cctcctgcttaccaacgagctcccg

SEQ ID NO: 503914 - DNA, 25 bp, Homo sapien
tgggggagataatcttcctgtgcag

SEQ ID NO: 503915 - DNA, 25 bp, Homo sapien
aacgagctcccggttcccacccatg

SEQ ID NO: 503916 - DNA, 25 bp, Homo sapien
caccagccattgtgaggacaggatg

SEQ ID NO: 503917 - DNA, 25 bp, Homo sapien
accagccattgtgaggacaggatga

SEQ ID NO: 503918 - DNA, 25 bp, Homo sapien
ccacaccagccattgtgaggacagg

SEQ ID NO: 503919 - DNA, 25 bp, Homo sapien
cacaccagccattgtgaggacagga

SEQ ID NO: 503920 - DNA, 25 bp, Homo sapien
ccagtggttccctttatgcaggaca

SEQ ID NO: 503921 - DNA, 25 bp, Homo sapien
taatgattatcgaggttaagcccct

SEQ ID NO: 503922 - DNA, 25 bp, Homo sapien
gctgccgggcacataggtgtacaaa

SEQ ID NO: 503923 - DNA, 25 bp, Homo sapien
tgaagaatgtctgctcaagtcctct

SEQ ID NO: 503924 - DNA, 25 bp, Homo sapien
tgtttcagtaatgccactttccagc

SEQ ID NO: 503925 - DNA, 25 bp, Homo sapien
gagtgacttcagctcgtttctggaa

SEQ ID NO: 503926 - DNA, 25 bp, Homo sapien
tgccaggtcgcagtgttcagtgctg

SEQ ID NO: 503927 - DNA, 25 bp, Homo sapien
tgtgaatgtctaccatgcgctgccc

SEQ ID NO: 503928 - DNA, 25 bp, Homo sapien
caccctgccccaggcagacagtgac

SEQ ID NO: 503929 - DNA, 25 bp, Homo sapien
gtgacagatgtccactctgttagcc

SEQ ID NO: 503930 - DNA, 25 bp, Homo sapien
ggcaagtccatgttcctcacaccaa

SEQ ID NO: 503931 - DNA, 25 bp, Homo sapien
attgattggaatgcccatggtggcc

SEQ ID NO: 503932 - DNA, 25 bp, Homo sapien
gggaaggtacctgggatatctctgt

SEQ ID NO: 503933 - DNA, 25 bp, Homo sapien
gcagacaatggcgtattacttagcg

SEQ ID NO: 503934 - DNA, 25 bp, Homo sapien
caactcggcaaaatggacactgtca

SEQ ID NO: 503935 - DNA, 25 bp, Homo sapien
ttcctcgttcgacaaacagctccat

SEQ ID NO: 503936 - DNA, 25 bp, Homo sapien
ggtgctgaatatggtgcagagccca

SEQ ID NO: 503937 - DNA, 25 bp, Homo sapien
tggtgctgaatatggtgcagagccc

SEQ ID NO: 503938 - DNA, 25 bp, Homo sapien
atcttctcgagattgtcagcagtgc

SEQ ID NO: 503939 - DNA, 25 bp, Homo sapien
gaagtatgaattatcttctcgagat

SEQ ID NO: 503940 - DNA, 25 bp, Homo sapien
tctttgccccttgtgctcttgtgca

SEQ ID NO: 503941 - DNA, 25 bp, Homo sapien
ctcttgtgcagatccatgtttgtgg

SEQ ID NO: 503942 - DNA, 25 bp, Homo sapien
tccctgtatctactagtgtggccga

SEQ ID NO: 503943 - DNA, 25 bp, Homo sapien
cacccataatatgttggttgtggct

SEQ ID NO: 503944 - DNA, 25 bp, Homo sapien
tatctactagtgtggccgaggctat

SEQ ID NO: 503945 - DNA, 25 bp, Homo sapien
cccacccataatatgttggttgtgg

SEQ ID NO: 503946 - DNA, 25 bp, Homo sapien
gcattctgatctacactgaggacca

SEQ ID NO: 503947 - DNA, 25 bp, Homo sapien
gggcattctgatctacactgaggac

SEQ ID NO: 503948 - DNA, 25 bp, Homo sapien
tgatctacactgaggaccaagttgt

SEQ ID NO: 503949 - DNA, 25 bp, Homo sapien
tctgatctacactgaggaccaagtt

SEQ ID NO: 503950 - DNA, 25 bp, Homo sapien
gactggcattaccttcaatggccac

SEQ ID NO: 503951 - DNA, 25 bp, Homo sapien
ctggcattaccttcaatggccactt

SEQ ID NO: 503952 - DNA, 25 bp, Homo sapien
ggcattaccttcaatggccactttg

SEQ ID NO: 503953 - DNA, 25 bp, Homo sapien
cattaccttcaatggccactttgtc

SEQ ID NO: 503954 - DNA, 25 bp, Homo sapien
caccagctccatcaagagcatgaga

SEQ ID NO: 503955 - DNA, 25 bp, Homo sapien
ccccagaccaccagctccatcaaga

SEQ ID NO: 503956 - DNA, 25 bp, Homo sapien
ccatcaagagcatgagaggaagagt

SEQ ID NO: 503957 - DNA, 25 bp, Homo sapien
gagcatgagaggaagagtgaacccc

SEQ ID NO: 503958 - DNA, 25 bp, Homo sapien
actcaggctccccaaagtcagtttc

SEQ ID NO: 503959 - DNA, 25 bp, Homo sapien
ccactcaggctccccaaagtcagtt

SEQ ID NO: 503960 - DNA, 25 bp, Homo sapien
ggctccccaaagtcagtttccattc

SEQ ID NO: 503961 - DNA, 25 bp, Homo sapien
caaagtcagtttccattccagactc

SEQ ID NO: 503962 - DNA, 25 bp, Homo sapien
gaaacagcagaacgaagggcaacat

SEQ ID NO: 503963 - DNA, 25 bp, Homo sapien
caaaggaaaagaatccatgctagcc

SEQ ID NO: 503964 - DNA, 25 bp, Homo sapien
tccccaagacgaggcttctgcagag

SEQ ID NO: 503965 - DNA, 25 bp, Homo sapien
tagcctgccggcaaactcttcggga

SEQ ID NO: 503966 - DNA, 25 bp, Homo sapien
gctgggatgcaggctgccgcttgtg

SEQ ID NO: 503967 - DNA, 25 bp, Homo sapien
atccttggaggcatcagcagggctg

SEQ ID NO: 503968 - DNA, 25 bp, Homo sapien
tggctgggatgcaggctgccgcttg

SEQ ID NO: 503969 - DNA, 25 bp, Homo sapien
gggctggctgggatgcaggctgccg

SEQ ID NO: 503970 - DNA, 25 bp, Homo sapien
gagcaaacgcaaatgccctgtgttg

SEQ ID NO: 503971 - DNA, 25 bp, Homo sapien
ggatgtccagtcatgagaacttctg

SEQ ID NO: 503972 - DNA, 25 bp, Homo sapien
ccttcggagtgtggtgcaaagagct

SEQ ID NO: 503973 - DNA, 25 bp, Homo sapien
tctcagaagggcaacctggatcact

SEQ ID NO: 503974 - DNA, 25 bp, Homo sapien
gcaggcctttgagtcgctggaagct

SEQ ID NO: 503975 - DNA, 25 bp, Homo sapien
gcctttgagtcgctggaagctgttg

SEQ ID NO: 503976 - DNA, 25 bp, Homo sapien
ctttgagtcgctggaagctgttgcc

SEQ ID NO: 503977 - DNA, 25 bp, Homo sapien
aggcctttgagtcgctggaagctgt

SEQ ID NO: 503978 - DNA, 25 bp, Homo sapien
tggagacacatgacaacgttcctta

SEQ ID NO: 503979 - DNA, 25 bp, Homo sapien
cccctggagacacatgacaacgttc

SEQ ID NO: 503980 - DNA, 25 bp, Homo sapien
acatgacaacgttccttataagtgg

SEQ ID NO: 503981 - DNA, 25 bp, Homo sapien
tgacaacgttccttataagtgggct

SEQ ID NO: 503982 - DNA, 25 bp, Homo sapien
gtccttgggcagtacctctggctgg

SEQ ID NO: 503983 - DNA, 25 bp, Homo sapien
tttggagaacaagtccttgggcagt

SEQ ID NO: 503984 - DNA, 25 bp, Homo sapien
cactttcatgactggaagctttgga

SEQ ID NO: 503985 - DNA, 25 bp, Homo sapien
gagaacaagtccttgggcagtacct

SEQ ID NO: 503986 - DNA, 25 bp, Homo sapien
ctctgatgtcaggctcttgcctaaa

SEQ ID NO: 503987 - DNA, 25 bp, Homo sapien
tctctgatgtcaggctcttgcctaa

SEQ ID NO: 503988 - DNA, 25 bp, Homo sapien
ctctctgatgtcaggctcttgccta

SEQ ID NO: 503989 - DNA, 25 bp, Homo sapien
taagtggaactacagtataatctgg

SEQ ID NO: 503990 - DNA, 25 bp, Homo sapien
cagaagcctaaggtgtttcaaaaca

SEQ ID NO: 503991 - DNA, 25 bp, Homo sapien
ctccgaacacccagaagcctaaggt

SEQ ID NO: 503992 - DNA, 25 bp, Homo sapien
taatttcatccactagcaacacagc

SEQ ID NO: 503993 - DNA, 25 bp, Homo sapien
tgacatcaggcatgtttagggcggt

SEQ ID NO: 503994 - DNA, 25 bp, Homo sapien
catcaggcatgtttagggcggtaca

SEQ ID NO: 503995 - DNA, 25 bp, Homo sapien
caggcatgtttagggcggtacagct

SEQ ID NO: 503996 - DNA, 25 bp, Homo sapien
gatgacatcaggcatgtttagggcg

SEQ ID NO: 503997 - DNA, 25 bp, Homo sapien
cttccttcaacccatgaaacgaacg

SEQ ID NO: 503998 - DNA, 25 bp, Homo sapien
caacccatgaaacgaacgagggcat

SEQ ID NO: 503999 - DNA, 25 bp, Homo sapien
tccttcaacccatgaaacgaacgag

SEQ ID NO: 504000 - DNA, 25 bp, Homo sapien
ttcaacccatgaaacgaacgagggc

SEQ ID NO: 504001 - DNA, 25 bp, Homo sapien
ttctaacagattattacaggcggtc

SEQ ID NO: 504002 - DNA, 25 bp, Homo sapien
taaacgggcatagactcatttgcag

SEQ ID NO: 504003 - DNA, 25 bp, Homo sapien
aataacgaatgtactgcagctgctc

SEQ ID NO: 504004 - DNA, 25 bp, Homo sapien
aatgaagttcccttggcgttagcca

SEQ ID NO: 504005 - DNA, 25 bp, Homo sapien
ccatgcctggacagttttggggttt

SEQ ID NO: 504006 - DNA, 25 bp, Homo sapien
tagtatggctgatggaaattaggcc

SEQ ID NO: 504007 - DNA, 25 bp, Homo sapien
gaaatgacagagctattcctagttt

SEQ ID NO: 504008 - DNA, 25 bp, Homo sapien
caaattataaacctacagtagcaac

SEQ ID NO: 504009 - DNA, 25 bp, Homo sapien
caagattactaaggagttgaaacaa

SEQ ID NO: 504010 - DNA, 25 bp, Homo sapien
gaaaagtgattttgcaaaattaggc

SEQ ID NO: 504011 - DNA, 25 bp, Homo sapien
gtgaatgaaaagtgattttgcaaaa

SEQ ID NO: 504012 - DNA, 25 bp, Homo sapien
tgcccatgtacatacccctgaaagt

SEQ ID NO: 504013 - DNA, 25 bp, Homo sapien
gaagtcagacttcagactgtgcgtc

SEQ ID NO: 504014 - DNA, 25 bp, Homo sapien
gaatccacttctcaagagactggga

SEQ ID NO: 504015 - DNA, 25 bp, Homo sapien
agttaatgcaacacctcctgtcgct

SEQ ID NO: 504016 - DNA, 25 bp, Homo sapien
tggagtagtgcttctgtgaatccca

SEQ ID NO: 504017 - DNA, 25 bp, Homo sapien
gattaaggcatcattctgctctgga

SEQ ID NO: 504018 - DNA, 25 bp, Homo sapien
ggagtagtgcttctgtgaatcccag

SEQ ID NO: 504019 - DNA, 25 bp, Homo sapien
gagtagtgcttctgtgaatcccagg

SEQ ID NO: 504020 - DNA, 25 bp, Homo sapien
tttctgcccacattaagaagaaatg

SEQ ID NO: 504021 - DNA, 25 bp, Homo sapien
ggtggcatggacctggcttacaatc

SEQ ID NO: 504022 - DNA, 25 bp, Homo sapien
gggaccaagtactactccacagctc

SEQ ID NO: 504023 - DNA, 25 bp, Homo sapien
tgaggattctcaaccaccacaagca

SEQ ID NO: 504024 - DNA, 25 bp, Homo sapien
tccacccctagtgcctgtgatctga

SEQ ID NO: 504025 - DNA, 25 bp, Homo sapien
ctagtgcctgcgatctgactctgcc

SEQ ID NO: 504026 - DNA, 25 bp, Homo sapien
cctagtgcctgcgatctgactctgc

SEQ ID NO: 504027 - DNA, 25 bp, Homo sapien
tgtgatctgactctgcccgacgtga

SEQ ID NO: 504028 - DNA, 25 bp, Homo sapien
agtgcctgtgatctgactccgtcct

SEQ ID NO: 504029 - DNA, 25 bp, Homo sapien
tgactccgtcctgggtcttaggctc

SEQ ID NO: 504030 - DNA, 25 bp, Homo sapien
tgtgatctgactccgtcctgggtct

SEQ ID NO: 504031 - DNA, 25 bp, Homo sapien
gatctgactccgtcctgggtcttag

SEQ ID NO: 504032 - DNA, 25 bp, Homo sapien
gataagatgcctctagaaaaacaaa

SEQ ID NO: 504033 - DNA, 25 bp, Homo sapien
cctgttatacaggaacaggatgata

SEQ ID NO: 504034 - DNA, 25 bp, Homo sapien
ctctagctgacactaaagataagat

SEQ ID NO: 504035 - DNA, 25 bp, Homo sapien
caaactcctgttatacaggaacagg

SEQ ID NO: 504036 - DNA, 25 bp, Homo sapien
taaggtactgccttctgaaaaggcc

SEQ ID NO: 504037 - DNA, 25 bp, Homo sapien
gatttgggcagatgttacattctag

SEQ ID NO: 504038 - DNA, 25 bp, Homo sapien
tatactaatttaagtatctgaccca

SEQ ID NO: 504039 - DNA, 25 bp, Homo sapien
gccagtggtccacatactagtccta

SEQ ID NO: 504040 - DNA, 25 bp, Homo sapien
cttattcaaatggttagttatgaac

SEQ ID NO: 504041 - DNA, 25 bp, Homo sapien
ttattcaaatggttagttatgaaca

SEQ ID NO: 504042 - DNA, 25 bp, Homo sapien
tcaattttctattgccactgttaca

SEQ ID NO: 504043 - DNA, 25 bp, Homo sapien
gccactgttacatggttatttgtcc

SEQ ID NO: 504044 - DNA, 25 bp, Homo sapien
tctattgccactgttacatggttat

SEQ ID NO: 504045 - DNA, 25 bp, Homo sapien
ttgccactgttacatggttatttgt

SEQ ID NO: 504046 - DNA, 25 bp, Homo sapien
gatttttccacatgtattatatctg

SEQ ID NO: 504047 - DNA, 25 bp, Homo sapien
ttccacatgtattatatctggtgct

SEQ ID NO: 504048 - DNA, 25 bp, Homo sapien
gttacattattttgatttttccaca

SEQ ID NO: 504049 - DNA, 25 bp, Homo sapien
ttttgatttttccacatgtattata

SEQ ID NO: 504050 - DNA, 25 bp, Homo sapien
agcagtgtttcaaatgagaactatt

SEQ ID NO: 504051 - DNA, 25 bp, Homo sapien
caacaagcggttttttgattcacta

SEQ ID NO: 504052 - DNA, 25 bp, Homo sapien
tgtccaacaagcggttttttgattc

SEQ ID NO: 504053 - DNA, 25 bp, Homo sapien
acaagcggttttttgattcactaag

SEQ ID NO: 504054 - DNA, 25 bp, Homo sapien
tccaacaagcggttttttgattcac

SEQ ID NO: 504055 - DNA, 25 bp, Homo sapien
ttctgctttctacctctgcagttta

SEQ ID NO: 504056 - DNA, 25 bp, Homo sapien
agttttctgctttctacctctgcag

SEQ ID NO: 504057 - DNA, 25 bp, Homo sapien
gttttctgctttctacctctgcagt

SEQ ID NO: 504058 - DNA, 25 bp, Homo sapien
tgctttctacctctgcagtttagat

SEQ ID NO: 504059 - DNA, 25 bp, Homo sapien
gtgatttagcgtagacttatttttc

SEQ ID NO: 504060 - DNA, 25 bp, Homo sapien
aaaaatgattcagtgatttagcgta

SEQ ID NO: 504061 - DNA, 25 bp, Homo sapien
aatgattcagtgatttagcgtagac

SEQ ID NO: 504062 - DNA, 25 bp, Homo sapien
gattcagtgatttagcgtagactta

SEQ ID NO: 504063 - DNA, 25 bp, Homo sapien
cttctggcatactcattctggtttg

SEQ ID NO: 504064 - DNA, 25 bp, Homo sapien
ttctggcatactcattctggtttgt

SEQ ID NO: 504065 - DNA, 25 bp, Homo sapien
cattctggtttgtaacagaagcttg

SEQ ID NO: 504066 - DNA, 25 bp, Homo sapien
gaaaacgtgggtgcgcggaatgatt

SEQ ID NO: 504067 - DNA, 25 bp, Homo sapien
gtctccaatttttactgcatccaag

SEQ ID NO: 504068 - DNA, 25 bp, Homo sapien
tccaatttttactgcatccaagaga

SEQ ID NO: 504069 - DNA, 25 bp, Homo sapien
tttccatcaggtccgtatgaaaacg

SEQ ID NO: 504070 - DNA, 25 bp, Homo sapien
tatacatacatatataaactaatta

SEQ ID NO: 504071 - DNA, 25 bp, Homo sapien
tacatacatatataaactaattaat

SEQ ID NO: 504072 - DNA, 25 bp, Homo sapien
ctgttaaatatacatacatatataa

SEQ ID NO: 504073 - DNA, 25 bp, Homo sapien
tgaagaaagggatcctagaagagat

SEQ ID NO: 504074 - DNA, 25 bp, Homo sapien
ttataagctaaggataagaacccag

SEQ ID NO: 504075 - DNA, 25 bp, Homo sapien
ggcattgggagggattgctgatata

SEQ ID NO: 504076 - DNA, 25 bp, Homo sapien
taagctaaggataagaacccagggc

SEQ ID NO: 504077 - DNA, 25 bp, Homo sapien
tgtccaattacgtgaataccttact

SEQ ID NO: 504078 - DNA, 25 bp, Homo sapien
tacatgtcaatagctcagtgagcaa

SEQ ID NO: 504079 - DNA, 25 bp, Homo sapien
tgcagattgcaggtggattttaact

SEQ ID NO: 504080 - DNA, 25 bp, Homo sapien
catagcagtacttcttacatgtcaa

SEQ ID NO: 504081 - DNA, 25 bp, Homo sapien
ccagcagtggtagctgaaaagtgag

SEQ ID NO: 504082 - DNA, 25 bp, Homo sapien
aagtgagaggacgctgatgaagaac

SEQ ID NO: 504083 - DNA, 25 bp, Homo sapien
cagcagtggtagctgaaaagtgaga

SEQ ID NO: 504084 - DNA, 25 bp, Homo sapien
gccagcagtggtagctgaaaagtga

SEQ ID NO: 504085 - DNA, 25 bp, Homo sapien
aaaagtacgtggaattttgcacgtg

SEQ ID NO: 504086 - DNA, 25 bp, Homo sapien
cgtggaattttgcacgtgtatctgt

SEQ ID NO: 504087 - DNA, 25 bp, Homo sapien
ttttgcacgtgtatctgtcagttca

SEQ ID NO: 504088 - DNA, 25 bp, Homo sapien
tttgcacgtgtatctgtcagttcat

SEQ ID NO: 504089 - DNA, 25 bp, Homo sapien
tcagctgcttcaattcctacttttt

SEQ ID NO: 504090 - DNA, 25 bp, Homo sapien
cttttttcatctgtatgtctacaga

SEQ ID NO: 504091 - DNA, 25 bp, Homo sapien
cttcaattcctacttttttcatctg

SEQ ID NO: 504092 - DNA, 25 bp, Homo sapien
actaagatgttgctttctaatggcc

SEQ ID NO: 504093 - DNA, 25 bp, Homo sapien
tctgtagacttcctgcggcaaagct

SEQ ID NO: 504094 - DNA, 25 bp, Homo sapien
caagaacatgtagctgttcaagcac

SEQ ID NO: 504095 - DNA, 25 bp, Homo sapien
tacctttggacaactctctgtagac

SEQ ID NO: 504096 - DNA, 25 bp, Homo sapien
ttataaagtactctaaaactgttgc

SEQ ID NO: 504097 - DNA, 25 bp, Homo sapien
tactctaaaactgttgcagccacga

SEQ ID NO: 504098 - DNA, 25 bp, Homo sapien
aactgttgcagccacgaaaaggcaa

SEQ ID NO: 504099 - DNA, 25 bp, Homo sapien
tgcagccacgaaaaggcaatataat

SEQ ID NO: 504100 - DNA, 25 bp, Homo sapien
caaggacagtgatgatccatcttaa

SEQ ID NO: 504101 - DNA, 25 bp, Homo sapien
cagtgatgatccatcttaagaatac

SEQ ID NO: 504102 - DNA, 25 bp, Homo sapien
agtgatgatccatcttaagaataca

SEQ ID NO: 504103 - DNA, 25 bp, Homo sapien
ggacagtgatgatccatcttaagaa

SEQ ID NO: 504104 - DNA, 25 bp, Homo sapien
cgatcaggtttaatcagctgacatt

SEQ ID NO: 504105 - DNA, 25 bp, Homo sapien
agtgatgcgcccgatcaggtttaat

SEQ ID NO: 504106 - DNA, 25 bp, Homo sapien
gatgcgcccgatcaggtttaatcag

SEQ ID NO: 504107 - DNA, 25 bp, Homo sapien
tgagcagtgatgcgcccgatcaggt

SEQ ID NO: 504108 - DNA, 25 bp, Homo sapien
tcagccttttctaaagccgacttcc

SEQ ID NO: 504109 - DNA, 25 bp, Homo sapien
tcagggtgcttttagtgcacctgtt

SEQ ID NO: 504110 - DNA, 25 bp, Homo sapien
agggtgcttttagtgcacctgtttt

SEQ ID NO: 504111 - DNA, 25 bp, Homo sapien
ctcagggtgcttttagtgcacctgt

SEQ ID NO: 504112 - DNA, 25 bp, Homo sapien
tctcagggtgcttttagtgcacctg

SEQ ID NO: 504113 - DNA, 25 bp, Homo sapien
ttttgaagctgatgtggtatagata

SEQ ID NO: 504114 - DNA, 25 bp, Homo sapien
tttgaagctgatgtggtatagatag

SEQ ID NO: 504115 - DNA, 25 bp, Homo sapien
taatggtattagcttaacaacacgg

SEQ ID NO: 504116 - DNA, 25 bp, Homo sapien
tggcagagccaacagtaaaatacgg

SEQ ID NO: 504117 - DNA, 25 bp, Homo sapien
cacggtattctgctataaacaaggc

SEQ ID NO: 504118 - DNA, 25 bp, Homo sapien
catttctgacagattgggcccctct

SEQ ID NO: 504119 - DNA, 25 bp, Homo sapien
tatcagctattcacatgctgccgcc

SEQ ID NO: 504120 - DNA, 25 bp, Homo sapien
caatcggcctgttatatacgaggtc

SEQ ID NO: 504121 - DNA, 25 bp, Homo sapien
aactctgtaggattatagtcaggga

SEQ ID NO: 504122 - DNA, 25 bp, Homo sapien
tacgaggtctgattctaagtactgg

SEQ ID NO: 504123 - DNA, 25 bp, Homo sapien
agcgggagatgtgaaaattgtcatc

SEQ ID NO: 504124 - DNA, 25 bp, Homo sapien
gaacagatggaaagccacaaggtaa

SEQ ID NO: 504125 - DNA, 25 bp, Homo sapien
aattgtcatccaataggaccataca

SEQ ID NO: 504126 - DNA, 25 bp, Homo sapien
atggaaagccacaaggtaaacaacg

SEQ ID NO: 504127 - DNA, 25 bp, Homo sapien
cattttcttcatttccaaaaatagt

SEQ ID NO: 504128 - DNA, 25 bp, Homo sapien
taaggcatcttcctgcagtcagtgt

SEQ ID NO: 504129 - DNA, 25 bp, Homo sapien
caagctgtttcatatgtgccatgta

SEQ ID NO: 504130 - DNA, 25 bp, Homo sapien
gcctgaaaccctgtgaactgctatt

SEQ ID NO: 504131 - DNA, 25 bp, Homo sapien
caatggcctcgagtcctgttggttc

SEQ ID NO: 504132 - DNA, 25 bp, Homo sapien
ggatccagttcttgcaaatggatac

SEQ ID NO: 504133 - DNA, 25 bp, Homo sapien
tttatcagtatacttgtatctacta

SEQ ID NO: 504134 - DNA, 25 bp, Homo sapien
tgtatctactatggctatgggatcc

SEQ ID NO: 504135 - DNA, 25 bp, Homo sapien
gatccagttcttgcaaatggataca

SEQ ID NO: 504136 - DNA, 25 bp, Homo sapien
ccttgttgccatcaggtgggagtcc

SEQ ID NO: 504137 - DNA, 25 bp, Homo sapien
gaaaatctaggctcctgactagggc

SEQ ID NO: 504138 - DNA, 25 bp, Homo sapien
ggacacatcattactgcccagtggg

SEQ ID NO: 504139 - DNA, 25 bp, Homo sapien
cacacatatcttggctgggaagggt

SEQ ID NO: 504140 - DNA, 25 bp, Homo sapien
gagataatgacaataacactgccag

SEQ ID NO: 504141 - DNA, 25 bp, Homo sapien
tacaatcagccttctattgatgggc

SEQ ID NO: 504142 - DNA, 25 bp, Homo sapien
tgtgcgtgcacaccattttaaaagg

SEQ ID NO: 504143 - DNA, 25 bp, Homo sapien
ttctcaaggacacaagggatgaaga

SEQ ID NO: 504144 - DNA, 25 bp, Homo sapien
ctgcattaagcaagtctatctgtgc

SEQ ID NO: 504145 - DNA, 25 bp, Homo sapien
tatcataatatctgctctggtgctc

SEQ ID NO: 504146 - DNA, 25 bp, Homo sapien
attatcataatatctgctctggtgc

SEQ ID NO: 504147 - DNA, 25 bp, Homo sapien
taagcaagtctatctgtgctatttt

SEQ ID NO: 504148 - DNA, 25 bp, Homo sapien
actttgaaacccaaggactctgatg

SEQ ID NO: 504149 - DNA, 25 bp, Homo sapien
tctgatggatctaggcaaactacat

SEQ ID NO: 504150 - DNA, 25 bp, Homo sapien
cgcacccagcggctttattgaatat

SEQ ID NO: 504151 - DNA, 25 bp, Homo sapien
taaggctatcgatgccacagtgatt

SEQ ID NO: 504152 - DNA, 25 bp, Homo sapien
gttcttgtcgttttgagaaattgcc

SEQ ID NO: 504153 - DNA, 25 bp, Homo sapien
gctgaaggcttaggtgactgctaat

SEQ ID NO: 504154 - DNA, 25 bp, Homo sapien
gagtcaacagatgcggcaaacttcg

SEQ ID NO: 504155 - DNA, 25 bp, Homo sapien
gtttgagaggactgataccaatttc

SEQ ID NO: 504156 - DNA, 25 bp, Homo sapien
ccaaactgctcttgataggtactgt

SEQ ID NO: 504157 - DNA, 25 bp, Homo sapien
tgaaagttagtaggtatatccgtcc

SEQ ID NO: 504158 - DNA, 25 bp, Homo sapien
taaacccaagaaataaggatacatc

SEQ ID NO: 504159 - DNA, 25 bp, Homo sapien
aattggccggccatggtgttatgcg

SEQ ID NO: 504160 - DNA, 25 bp, Homo sapien
ttgcatgactagggcataaggttct

SEQ ID NO: 504161 - DNA, 25 bp, Homo sapien
catgactagggcataaggttcttct

SEQ ID NO: 504162 - DNA, 25 bp, Homo sapien
gacttggtttctaggttgtccagca

SEQ ID NO: 504163 - DNA, 25 bp, Homo sapien
agtctgacttggtttctaggttgtc

SEQ ID NO: 504164 - DNA, 25 bp, Homo sapien
ccaggacagattaactcactagtag

SEQ ID NO: 504165 - DNA, 25 bp, Homo sapien
gagaaggctaaggtaactgcagaat

SEQ ID NO: 504166 - DNA, 25 bp, Homo sapien
ggtcttctggccactgtatctttca

SEQ ID NO: 504167 - DNA, 25 bp, Homo sapien
gaaaattactacactctcgcatctg

SEQ ID NO: 504168 - DNA, 25 bp, Homo sapien
catgcaaactatgtctcgatcaagt

SEQ ID NO: 504169 - DNA, 25 bp, Homo sapien
ttatatgggatgttcagaaaaggca

SEQ ID NO: 504170 - DNA, 25 bp, Homo sapien
ggcatgagggatcttaatgtgcgac

SEQ ID NO: 504171 - DNA, 25 bp, Homo sapien
aaaacggattgttgtgatgactgca

SEQ ID NO: 504172 - DNA, 25 bp, Homo sapien
gtccttgaacaaacaacatagctct

SEQ ID NO: 504173 - DNA, 25 bp, Homo sapien
caaaggttagagtccactccacaaa

SEQ ID NO: 504174 - DNA, 25 bp, Homo sapien
cagactcaaaggttagagtccactc

SEQ ID NO: 504175 - DNA, 25 bp, Homo sapien
atataaaaggtatacctgtccttga

SEQ ID NO: 504176 - DNA, 25 bp, Homo sapien
gaagaggtacacatccactaacaag

SEQ ID NO: 504177 - DNA, 25 bp, Homo sapien
ggaaccagaattagcacttgcctca

SEQ ID NO: 504178 - DNA, 25 bp, Homo sapien
cactaacaagatgacctgaacaaca

SEQ ID NO: 504179 - DNA, 25 bp, Homo sapien
tctgataaaaccttgggaaccagaa

SEQ ID NO: 504180 - DNA, 25 bp, Homo sapien
gctgatgtggttcgttattcaaaga

SEQ ID NO: 504181 - DNA, 25 bp, Homo sapien
taaaatacccacatactcaaagcct

SEQ ID NO: 504182 - DNA, 25 bp, Homo sapien
taaggactaagagtagaacattctg

SEQ ID NO: 504183 - DNA, 25 bp, Homo sapien
tacagaacaccctagttgaggccag

SEQ ID NO: 504184 - DNA, 25 bp, Homo sapien
ccaatatcacaaatgtagcagtcac

SEQ ID NO: 504185 - DNA, 25 bp, Homo sapien
aaatgtagcagtcacccctaaacag

SEQ ID NO: 504186 - DNA, 25 bp, Homo sapien
cagtcacccctaaacagtgtttttg

SEQ ID NO: 504187 - DNA, 25 bp, Homo sapien
tatcacaaatgtagcagtcacccct

SEQ ID NO: 504188 - DNA, 25 bp, Homo sapien
gcaaaagccggctggattcagagta

SEQ ID NO: 504189 - DNA, 25 bp, Homo sapien
aataatcaggttatgtctcctccca

SEQ ID NO: 504190 - DNA, 25 bp, Homo sapien
tgaagtatactgcaatgctactcct

SEQ ID NO: 504191 - DNA, 25 bp, Homo sapien
tacaatgagtcgagtaccaccaaaa

SEQ ID NO: 504192 - DNA, 25 bp, Homo sapien
tctaagaagctcgactactcccgtt

SEQ ID NO: 504193 - DNA, 25 bp, Homo sapien
cgttctgcacgttccttcccagaag

SEQ ID NO: 504194 - DNA, 25 bp, Homo sapien
ggtaacaggcgtttcttctcgcgca

SEQ ID NO: 504195 - DNA, 25 bp, Homo sapien
acagccggctctacaggtaacaggc

SEQ ID NO: 504196 - DNA, 25 bp, Homo sapien
aagccgccgcaaggcttcaggagcc

SEQ ID NO: 504197 - DNA, 25 bp, Homo sapien
aaggccgcgccgcaggattgaacaa

SEQ ID NO: 504198 - DNA, 25 bp, Homo sapien
gcgcagaggcctatctcgcgcccta

SEQ ID NO: 504199 - DNA, 25 bp, Homo sapien
gtgcagcaacctcggcgcttccgag

SEQ ID NO: 504200 - DNA, 25 bp, Homo sapien
cggcacccagcccacgacgcgctgg

SEQ ID NO: 504201 - DNA, 25 bp, Homo sapien
gaccagacgaccacgaaggtgatga

SEQ ID NO: 504202 - DNA, 25 bp, Homo sapien
gagctccaccacgtacgcgtagtag

SEQ ID NO: 504203 - DNA, 25 bp, Homo sapien
acgacgcgctggcagcagcgccaca

SEQ ID NO: 504204 - DNA, 25 bp, Homo sapien
ttccgctggcggctgccgagccccg

SEQ ID NO: 504205 - DNA, 25 bp, Homo sapien
ctgccgagccccgcgtcccaccgtt

SEQ ID NO: 504206 - DNA, 25 bp, Homo sapien
cggctgccgagccccgcgtcccacc

SEQ ID NO: 504207 - DNA, 25 bp, Homo sapien
gttccgctggcggctgccgagcccc

SEQ ID NO: 504208 - DNA, 25 bp, Homo sapien
cggtgactcggacgctccaggcggc

SEQ ID NO: 504209 - DNA, 25 bp, Homo sapien
ggtgactcggacgctccaggcggct

SEQ ID NO: 504210 - DNA, 25 bp, Homo sapien
tgtgggagcaaaagtccgaggcgcc

SEQ ID NO: 504211 - DNA, 25 bp, Homo sapien
cgaggcgccgccgggactcctcccg

SEQ ID NO: 504212 - DNA, 25 bp, Homo sapien
ggcgcccagccaggccccgccccca

SEQ ID NO: 504213 - DNA, 25 bp, Homo sapien
gactcctcccgtcccggcgcccagc

SEQ ID NO: 504214 - DNA, 25 bp, Homo sapien
gaagggccacgtcttgctttaggaa

SEQ ID NO: 504215 - DNA, 25 bp, Homo sapien
gggaaaattgcaagtccgcactctt

SEQ ID NO: 504216 - DNA, 25 bp, Homo sapien
cagaagggccacgtcttgctttagg

SEQ ID NO: 504217 - DNA, 25 bp, Homo sapien
caagtccgcactctttagtgatgct

SEQ ID NO: 504218 - DNA, 25 bp, Homo sapien
ccaagcctgcgtttctctgtgaacc

SEQ ID NO: 504219 - DNA, 25 bp, Homo sapien
cttccttctagacggcctgccccaa

SEQ ID NO: 504220 - DNA, 25 bp, Homo sapien
cccaagcctgcgtttctctgtgaac

SEQ ID NO: 504221 - DNA, 25 bp, Homo sapien
atagcccttccttctagacggcctg

SEQ ID NO: 504222 - DNA, 25 bp, Homo sapien
tttgtaagatgaagcactgtccagc

SEQ ID NO: 504223 - DNA, 25 bp, Homo sapien
ttgtaagatgaagcactgtccagca

SEQ ID NO: 504224 - DNA, 25 bp, Homo sapien
tatttgtaagatgaagcactgtcca

SEQ ID NO: 504225 - DNA, 25 bp, Homo sapien
tttatttgtaagatgaagcactgtc

SEQ ID NO: 504226 - DNA, 25 bp, Homo sapien
ggccggaagactcgcccgcgatgcc

SEQ ID NO: 504227 - DNA, 25 bp, Homo sapien
ctcaacgatgtcattaacgaatggc

SEQ ID NO: 504228 - DNA, 25 bp, Homo sapien
cgatgtcattaacgaatggccttgg

SEQ ID NO: 504229 - DNA, 25 bp, Homo sapien
tgtcattaacgaatggccttggaag

SEQ ID NO: 504230 - DNA, 25 bp, Homo sapien
caacgatgtcattaacgaatggcct

SEQ ID NO: 504231 - DNA, 25 bp, Homo sapien
cagggagggagcagacttggctggc

SEQ ID NO: 504232 - DNA, 25 bp, Homo sapien
tcttgccaaccttctgcgccttggt

SEQ ID NO: 504233 - DNA, 25 bp, Homo sapien
cccttcttcagggagggagcagact

SEQ ID NO: 504234 - DNA, 25 bp, Homo sapien
tgcttcagcagagtagctctccttg

SEQ ID NO: 504235 - DNA, 25 bp, Homo sapien
tgaaataacactatactacttcaag

SEQ ID NO: 504236 - DNA, 25 bp, Homo sapien
tgtaggtatgcatcgctatgcccgg

SEQ ID NO: 504237 - DNA, 25 bp, Homo sapien
tatgcaggtactttatacaagagca

SEQ ID NO: 504238 - DNA, 25 bp, Homo sapien
tcttgagtaactagggctgtaggta

SEQ ID NO: 504239 - DNA, 25 bp, Homo sapien
gcctattaggaacatgaagatgtct

SEQ ID NO: 504240 - DNA, 25 bp, Homo sapien
aagatgtctggaattgatgctggcc

SEQ ID NO: 504241 - DNA, 25 bp, Homo sapien
caaatctaggccttctgacagaatc

SEQ ID NO: 504242 - DNA, 25 bp, Homo sapien
tctgcttccagatagaacattgaag

SEQ ID NO: 504243 - DNA, 25 bp, Homo sapien
cctttaatgctttctttcttcacac

SEQ ID NO: 504244 - DNA, 25 bp, Homo sapien
tactcctttaatgctttctttcttc

SEQ ID NO: 504245 - DNA, 25 bp, Homo sapien
tcctttaatgctttctttcttcaca

SEQ ID NO: 504246 - DNA, 25 bp, Homo sapien
tttaatgctttctttcttcacacac

SEQ ID NO: 504247 - DNA, 25 bp, Homo sapien
attcttgtatactctgatgttgtgg

SEQ ID NO: 504248 - DNA, 25 bp, Homo sapien
cttgtatactctgatgttgtggtac

SEQ ID NO: 504249 - DNA, 25 bp, Homo sapien
ttcttgtatactctgatgttgtggt

SEQ ID NO: 504250 - DNA, 25 bp, Homo sapien
tcttgtatactctgatgttgtggta

SEQ ID NO: 504251 - DNA, 25 bp, Homo sapien
ggagactcccaggtacactcaattg

SEQ ID NO: 504252 - DNA, 25 bp, Homo sapien
catgtagattctctttggaccctag

SEQ ID NO: 504253 - DNA, 25 bp, Homo sapien
gagtctcatgatgttatccacgctg

SEQ ID NO: 504254 - DNA, 25 bp, Homo sapien
tcctcatggtatgggtcaagaatct

SEQ ID NO: 504255 - DNA, 25 bp, Homo sapien
catgactaagacattcatcaccatc

SEQ ID NO: 504256 - DNA, 25 bp, Homo sapien
aagaaactcttcatgactaagacat

SEQ ID NO: 504257 - DNA, 25 bp, Homo sapien
tcctgttgctactttcacagctctc

SEQ ID NO: 504258 - DNA, 25 bp, Homo sapien
aatcaaagatcttaaagacagtgtc

SEQ ID NO: 504259 - DNA, 25 bp, Homo sapien
tcactgcaagacaaatgagctattg

SEQ ID NO: 504260 - DNA, 25 bp, Homo sapien
ggagtactggtattctaaatctaga

SEQ ID NO: 504261 - DNA, 25 bp, Homo sapien
taagccgacgaatgtcatgagagtc

SEQ ID NO: 504262 - DNA, 25 bp, Homo sapien
ctgaattaaaaggtcaatcaactat

SEQ ID NO: 504263 - DNA, 25 bp, Homo sapien
tctgacaggacgatgagctaaactg

SEQ ID NO: 504264 - DNA, 25 bp, Homo sapien
gtctgacaggacgatgagctaaact

SEQ ID NO: 504265 - DNA, 25 bp, Homo sapien
ctagtctgacaggacgatgagctaa

SEQ ID NO: 504266 - DNA, 25 bp, Homo sapien
gacaggacgatgagctaaactgaac

SEQ ID NO: 504267 - DNA, 25 bp, Homo sapien
agtcttccaagtgggttgtaaaatg

SEQ ID NO: 504268 - DNA, 25 bp, Homo sapien
tcttccaagtgggttgtaaaatggc

SEQ ID NO: 504269 - DNA, 25 bp, Homo sapien
aacgtgtatgaccttagcctctcta

SEQ ID NO: 504270 - DNA, 25 bp, Homo sapien
agaaactggccctgctggtgccttg

SEQ ID NO: 504271 - DNA, 25 bp, Homo sapien
taatgctgaaattccggttctgccc

SEQ ID NO: 504272 - DNA, 25 bp, Homo sapien
ggttctgccctttataacgtgtatg

SEQ ID NO: 504273 - DNA, 25 bp, Homo sapien
gaatttgcatgtcttacggagtctt

SEQ ID NO: 504274 - DNA, 25 bp, Homo sapien
catgacctcgaagtaggcactggat

SEQ ID NO: 504275 - DNA, 25 bp, Homo sapien
agtggctgcttctatcatgacctcg

SEQ ID NO: 504276 - DNA, 25 bp, Homo sapien
catgtacacacacgtctccttgttt

SEQ ID NO: 504277 - DNA, 25 bp, Homo sapien
agagactcctatcagcccacaatgg

SEQ ID NO: 504278 - DNA, 25 bp, Homo sapien
gattcctgcacgtacgaaagactga

SEQ ID NO: 504279 - DNA, 25 bp, Homo sapien
tatgtgattagtctggccaatagcc

SEQ ID NO: 504280 - DNA, 25 bp, Homo sapien
taccatcgagggtagcacagtcttg

SEQ ID NO: 504281 - DNA, 25 bp, Homo sapien
aaaaagtagccactctgcaaagtct

SEQ ID NO: 504282 - DNA, 25 bp, Homo sapien
aaaaaagtagccactctgcaaagtc

SEQ ID NO: 504283 - DNA, 25 bp, Homo sapien
tatagtagataaggctgccagacac

SEQ ID NO: 504284 - DNA, 25 bp, Homo sapien
gacattccagttcagtgggagaaaa

SEQ ID NO: 504285 - DNA, 25 bp, Homo sapien
tgaaactctggaacatgagctgaac

SEQ ID NO: 504286 - DNA, 25 bp, Homo sapien
ttttcctgacgagaagacttgaggc

SEQ ID NO: 504287 - DNA, 25 bp, Homo sapien
caggaggcacttggattttcatgca

SEQ ID NO: 504288 - DNA, 25 bp, Homo sapien
tagccatcaggtaaactgggattag

SEQ ID NO: 504289 - DNA, 25 bp, Homo sapien
catgcattcttcttcgttccttaaa

SEQ ID NO: 504290 - DNA, 25 bp, Homo sapien
gcttaaatgactcagtgtagccatc

SEQ ID NO: 504291 - DNA, 25 bp, Homo sapien
cctatcctttactctgctgccagag

SEQ ID NO: 504292 - DNA, 25 bp, Homo sapien
ctatcctttactctgctgccagagt

SEQ ID NO: 504293 - DNA, 25 bp, Homo sapien
ataatgaagttttctttgtcctctt

SEQ ID NO: 504294 - DNA, 25 bp, Homo sapien
tgtcctctttttccaaagaaacgca

SEQ ID NO: 504295 - DNA, 25 bp, Homo sapien
cttcgaaattctttataatgaagtt

SEQ ID NO: 504296 - DNA, 25 bp, Homo sapien
tctttataatgaagttttctttgtc

SEQ ID NO: 504297 - DNA, 25 bp, Homo sapien
ctgaagagttgtgttaatttcaggt

SEQ ID NO: 504298 - DNA, 25 bp, Homo sapien
tgaagagttgtgttaatttcaggtt

SEQ ID NO: 504299 - DNA, 25 bp, Homo sapien
aatttcaggttctttcactattgct

SEQ ID NO: 504300 - DNA, 25 bp, Homo sapien
tgttaatttcaggttctttcactat

SEQ ID NO: 504301 - DNA, 25 bp, Homo sapien
atcttgtttacttatgatcttctgc

SEQ ID NO: 504302 - DNA, 25 bp, Homo sapien
tcttgtttacttatgatcttctgca

SEQ ID NO: 504303 - DNA, 25 bp, Homo sapien
cttgtttacttatgatcttctgcag

SEQ ID NO: 504304 - DNA, 25 bp, Homo sapien
gatgtagacaaaatcccaaactatg

SEQ ID NO: 504305 - DNA, 25 bp, Homo sapien
tgtagacaaaatcccaaactatgga

SEQ ID NO: 504306 - DNA, 25 bp, Homo sapien
cagatgtagacaaaatcccaaacta

SEQ ID NO: 504307 - DNA, 25 bp, Homo sapien
tagacaaaatcccaaactatggatt

SEQ ID NO: 504308 - DNA, 25 bp, Homo sapien
tggctcttctatacctctacctgct

SEQ ID NO: 504309 - DNA, 25 bp, Homo sapien
gaacagaattctacaacaagtcacc

SEQ ID NO: 504310 - DNA, 25 bp, Homo sapien
gtgcttattcccctggaacctctta

SEQ ID NO: 504311 - DNA, 25 bp, Homo sapien
tgccaagttcaatatccaaacattt

SEQ ID NO: 504312 - DNA, 25 bp, Homo sapien
cttggataaacacgtaggagataac

SEQ ID NO: 504313 - DNA, 25 bp, Homo sapien
tgacaactcacgtaaaaggcaccta

SEQ ID NO: 504314 - DNA, 25 bp, Homo sapien
tttgcctgtcagtagtctgttgcca

SEQ ID NO: 504315 - DNA, 25 bp, Homo sapien
tgttgataggtgttttcatggctcc

SEQ ID NO: 504316 - DNA, 25 bp, Homo sapien
gaacagctcacacagacagttgcta

SEQ ID NO: 504317 - DNA, 25 bp, Homo sapien
tattttaggacatcttcacaaggct

SEQ ID NO: 504318 - DNA, 25 bp, Homo sapien
gataagctaagataaatccctgcct

SEQ ID NO: 504319 - DNA, 25 bp, Homo sapien
taaaaccctggcatgtatcccacat

SEQ ID NO: 504320 - DNA, 25 bp, Homo sapien
ggacttaattatcacccctatgagg

SEQ ID NO: 504321 - DNA, 25 bp, Homo sapien
caccctcgagagttcactgctttta

SEQ ID NO: 504322 - DNA, 25 bp, Homo sapien
tccttctcaggttcattcgttggct

SEQ ID NO: 504323 - DNA, 25 bp, Homo sapien
ggctctttggtactctgctcactgt

SEQ ID NO: 504324 - DNA, 25 bp, Homo sapien
ccttgactaagtaagagtggaattg

SEQ ID NO: 504325 - DNA, 25 bp, Homo sapien
tgcatattaatatacaggtcttggg

SEQ ID NO: 504326 - DNA, 25 bp, Homo sapien
ccaccagcaatgtaagaggttcgtt

SEQ ID NO: 504327 - DNA, 25 bp, Homo sapien
tacagtatgtactcgtccatgttgc

SEQ ID NO: 504328 - DNA, 25 bp, Homo sapien
cttaccatattatttgctgaaatca

SEQ ID NO: 504329 - DNA, 25 bp, Homo sapien
cacttactggtgtccttatggttgt

SEQ ID NO: 504330 - DNA, 25 bp, Homo sapien
ccttatggttgtattatagaaaatt

SEQ ID NO: 504331 - DNA, 25 bp, Homo sapien
gaatcttatgctctgttcacttact

SEQ ID NO: 504332 - DNA, 25 bp, Homo sapien
ctcattaccatctgtatccagcatt

SEQ ID NO: 504333 - DNA, 25 bp, Homo sapien
tttcaatcatctcattaccatctgt

SEQ ID NO: 504334 - DNA, 25 bp, Homo sapien
aatcatctcattaccatctgtatcc

SEQ ID NO: 504335 - DNA, 25 bp, Homo sapien
catctcattaccatctgtatccagc

SEQ ID NO: 504336 - DNA, 25 bp, Homo sapien
tctgtatcagtgtctcagtcttttc

SEQ ID NO: 504337 - DNA, 25 bp, Homo sapien
taacatggcacagcattatgaacta

SEQ ID NO: 504338 - DNA, 25 bp, Homo sapien
tgaccttcacactttgaagagtact

SEQ ID NO: 504339 - DNA, 25 bp, Homo sapien
aactacactatcgacttaatctggg

SEQ ID NO: 504340 - DNA, 25 bp, Homo sapien
gcaagaaaagatactcggtatatga

SEQ ID NO: 504341 - DNA, 25 bp, Homo sapien
aagatactcggtatatgaaattagc

SEQ ID NO: 504342 - DNA, 25 bp, Homo sapien
ttgtaagcaagaaaagatactcggt

SEQ ID NO: 504343 - DNA, 25 bp, Homo sapien
agatactcggtatatgaaattagcc

SEQ ID NO: 504344 - DNA, 25 bp, Homo sapien
caaatatttatctaagcccctgctt

SEQ ID NO: 504345 - DNA, 25 bp, Homo sapien
atactgcagcatatgtcagcatatc

SEQ ID NO: 504346 - DNA, 25 bp, Homo sapien
atatttatctaagcccctgctttca

SEQ ID NO: 504347 - DNA, 25 bp, Homo sapien
ctgcagcatatgtcagcatatcctt

SEQ ID NO: 504348 - DNA, 25 bp, Homo sapien
aattctgatgactgtatgtccttgg

SEQ ID NO: 504349 - DNA, 25 bp, Homo sapien
ccagctttcctgtctcttatgtctc

SEQ ID NO: 504350 - DNA, 25 bp, Homo sapien
gtggtcattggtcccataaaatttc

SEQ ID NO: 504351 - DNA, 25 bp, Homo sapien
taatatatacgttttctcccttgtc

SEQ ID NO: 504352 - DNA, 25 bp, Homo sapien
atgttagctgaaagatcaaagtatt

SEQ ID NO: 504353 - DNA, 25 bp, Homo sapien
tacaggtcctttatgcaagcagaac

SEQ ID NO: 504354 - DNA, 25 bp, Homo sapien
tgacacacgagaatattgacaggag

SEQ ID NO: 504355 - DNA, 25 bp, Homo sapien
cactctcaaggtgggttacaaataa

SEQ ID NO: 504356 - DNA, 25 bp, Homo sapien
tctctttagacacaggtacaggtcc

SEQ ID NO: 504357 - DNA, 25 bp, Homo sapien
cgtagagggcgaatgaagagaacac

SEQ ID NO: 504358 - DNA, 25 bp, Homo sapien
gactagcaggaggtatgaacacccc

SEQ ID NO: 504359 - DNA, 25 bp, Homo sapien
ggatgtgacaacaatctaacaggat

SEQ ID NO: 504360 - DNA, 25 bp, Homo sapien
aatcttgcccctatacgtagagggc

SEQ ID NO: 504361 - DNA, 25 bp, Homo sapien
gatccctgacagtgtatcctcgatg

SEQ ID NO: 504362 - DNA, 25 bp, Homo sapien
ctgtttggatccctgacagtgtatc

SEQ ID NO: 504363 - DNA, 25 bp, Homo sapien
ctttatcgccaaggtctctgaaaaa

SEQ ID NO: 504364 - DNA, 25 bp, Homo sapien
ctctgaaaaaagttgatccacagcc

SEQ ID NO: 504365 - DNA, 25 bp, Homo sapien
tttgtcagcttcttgactgaagttt

SEQ ID NO: 504366 - DNA, 25 bp, Homo sapien
tttttgtcagcttcttgactgaagt

SEQ ID NO: 504367 - DNA, 25 bp, Homo sapien
cttttttgtcagcttcttgactgaa

SEQ ID NO: 504368 - DNA, 25 bp, Homo sapien
tgtcagcttcttgactgaagtttta

SEQ ID NO: 504369 - DNA, 25 bp, Homo sapien
gctaagtgccaaggctagtagtttt

SEQ ID NO: 504370 - DNA, 25 bp, Homo sapien
ttctccaaatatgagctgcttaagc

SEQ ID NO: 504371 - DNA, 25 bp, Homo sapien
cacatgctatgtgtaagttctgaga

SEQ ID NO: 504372 - DNA, 25 bp, Homo sapien
tgttctaggaccagatggcaggtcc

SEQ ID NO: 504373 - DNA, 25 bp, Homo sapien
cgaatttacgtgtcatccttgcata

SEQ ID NO: 504374 - DNA, 25 bp, Homo sapien
ttttccaattttagtatacgtgctg

SEQ ID NO: 504375 - DNA, 25 bp, Homo sapien
gtatacgtgctgccaaagcaagcac

SEQ ID NO: 504376 - DNA, 25 bp, Homo sapien
ggggccatgctaatcttctctgtat

SEQ ID NO: 504377 - DNA, 25 bp, Homo sapien
ttccttattttgctgttcataatga

SEQ ID NO: 504378 - DNA, 25 bp, Homo sapien
tttttccttattttgctgttcataa

SEQ ID NO: 504379 - DNA, 25 bp, Homo sapien
tcatgggtcagtgggttggccctgt

SEQ ID NO: 504380 - DNA, 25 bp, Homo sapien
atgggtcagtgggttggccctgttt

SEQ ID NO: 504381 - DNA, 25 bp, Homo sapien
gatatctggttgcaatcacaagcag

SEQ ID NO: 504382 - DNA, 25 bp, Homo sapien
ttattttaatgaagactatcgcccc

SEQ ID NO: 504383 - DNA, 25 bp, Homo sapien
gctatttgtttagtgccaagctgga

SEQ ID NO: 504384 - DNA, 25 bp, Homo sapien
gcagttttgggtatgccttcagtca

SEQ ID NO: 504385 - DNA, 25 bp, Homo sapien
tcttggtgagtggttccaggttagc

SEQ ID NO: 504386 - DNA, 25 bp, Homo sapien
tagggaccaaatactcttctgaaga

SEQ ID NO: 504387 - DNA, 25 bp, Homo sapien
ttgcctcatgtgctttgatgccctg

SEQ ID NO: 504388 - DNA, 25 bp, Homo sapien
tcctataagtggcaattagatccag

SEQ ID NO: 504389 - DNA, 25 bp, Homo sapien
tcagccaggtccgttacactgatgg

SEQ ID NO: 504390 - DNA, 25 bp, Homo sapien
tggtttgttctaagaatttctctgc

SEQ ID NO: 504391 - DNA, 25 bp, Homo sapien
cactgatgggcccaacaaacacatt

SEQ ID NO: 504392 - DNA, 25 bp, Homo sapien
tacaccttttataactgactcacag

SEQ ID NO: 504393 - DNA, 25 bp, Homo sapien
caggaattcacaacgtccaagtgct

SEQ ID NO: 504394 - DNA, 25 bp, Homo sapien
gctgtaataaaagaacctaggctgg

SEQ ID NO: 504395 - DNA, 25 bp, Homo sapien
tagtaagctgactctatggatctgc

SEQ ID NO: 504396 - DNA, 25 bp, Homo sapien
agtttccagctcaagtgtgacctca

SEQ ID NO: 504397 - DNA, 25 bp, Homo sapien
gttccatttgctcaaacatcactga

SEQ ID NO: 504398 - DNA, 25 bp, Homo sapien
ccttcatgttcgagtgaagaaaact

SEQ ID NO: 504399 - DNA, 25 bp, Homo sapien
tataatattctccttcatgttcgag

SEQ ID NO: 504400 - DNA, 25 bp, Homo sapien
gaagaggaagtctcgtggtgtcata

SEQ ID NO: 504401 - DNA, 25 bp, Homo sapien
ctgcttacgaagagacggtttccca

SEQ ID NO: 504402 - DNA, 25 bp, Homo sapien
gaagagacggtttcccaatatatat

SEQ ID NO: 504403 - DNA, 25 bp, Homo sapien
gagacggtttcccaatatatattat

SEQ ID NO: 504404 - DNA, 25 bp, Homo sapien
tacgaagagacggtttcccaatata

SEQ ID NO: 504405 - DNA, 25 bp, Homo sapien
gggcgcactcttctgtagaagtaca

SEQ ID NO: 504406 - DNA, 25 bp, Homo sapien
cactcttctgtagaagtacattgcc

SEQ ID NO: 504407 - DNA, 25 bp, Homo sapien
cgcactcttctgtagaagtacattg

SEQ ID NO: 504408 - DNA, 25 bp, Homo sapien
ggcgcactcttctgtagaagtacat

SEQ ID NO: 504409 - DNA, 25 bp, Homo sapien
tcagcatttcaatacagaccccagt

SEQ ID NO: 504410 - DNA, 25 bp, Homo sapien
tccatccacacgttaaacaaaacaa

SEQ ID NO: 504411 - DNA, 25 bp, Homo sapien
tctgctttctctgaacatgaagaca

SEQ ID NO: 504412 - DNA, 25 bp, Homo sapien
actttgaactgcataggtggaggca

SEQ ID NO: 504413 - DNA, 25 bp, Homo sapien
gactctcaggtctgtttagacacaa

SEQ ID NO: 504414 - DNA, 25 bp, Homo sapien
ttagacacaattagaatctcgcggg

SEQ ID NO: 504415 - DNA, 25 bp, Homo sapien
tcgcggggaataccagatcaattta

SEQ ID NO: 504416 - DNA, 25 bp, Homo sapien
ccccttggatctttcgactctcagg

SEQ ID NO: 504417 - DNA, 25 bp, Homo sapien
caaaggtactgcaaggtctgacttc

SEQ ID NO: 504418 - DNA, 25 bp, Homo sapien
gacccctttacaggatggctagaaa

SEQ ID NO: 504419 - DNA, 25 bp, Homo sapien
tgcagaggctcataaaaacggcact

SEQ ID NO: 504420 - DNA, 25 bp, Homo sapien
catacatccgtaggttggtgcagag

SEQ ID NO: 504421 - DNA, 25 bp, Homo sapien
ccccacatttccttatatgctccaa

SEQ ID NO: 504422 - DNA, 25 bp, Homo sapien
cacatttccttatatgctccaaatt

SEQ ID NO: 504423 - DNA, 25 bp, Homo sapien
cccacatttccttatatgctccaaa

SEQ ID NO: 504424 - DNA, 25 bp, Homo sapien
catttccttatatgctccaaattct

SEQ ID NO: 504425 - DNA, 25 bp, Homo sapien
tttcgctagaaaggcataatgtaaa

SEQ ID NO: 504426 - DNA, 25 bp, Homo sapien
gtttttcgctagaaaggcataatgt

SEQ ID NO: 504427 - DNA, 25 bp, Homo sapien
ttgtatctgaatgttccttgagttt

SEQ ID NO: 504428 - DNA, 25 bp, Homo sapien
gagtttttcgctagaaaggcataat

SEQ ID NO: 504429 - DNA, 25 bp, Homo sapien
gaaggagcgagtcccaccagtcgca

SEQ ID NO: 504430 - DNA, 25 bp, Homo sapien
ggaggcagaatctccggtcaccagc

SEQ ID NO: 504431 - DNA, 25 bp, Homo sapien
taggagcctcgaattaagacacgcc

SEQ ID NO: 504432 - DNA, 25 bp, Homo sapien
aattagtgcggccagttttgtgggc

SEQ ID NO: 504433 - DNA, 25 bp, Homo sapien
ggctgtggtgccaggccgctcctgc

SEQ ID NO: 504434 - DNA, 25 bp, Homo sapien
gacagcgagcccccgtcgcagtttt

SEQ ID NO: 504435 - DNA, 25 bp, Homo sapien
cgcacagcctgtcggctgacagcga

SEQ ID NO: 504436 - DNA, 25 bp, Homo sapien
ccgcaacactgacgcggctgtggtg

SEQ ID NO: 504437 - DNA, 25 bp, Homo sapien
gcgccgccgcctaccgcttgggaac

SEQ ID NO: 504438 - DNA, 25 bp, Homo sapien
tttgcggaagcgcagctaggcggcg

SEQ ID NO: 504439 - DNA, 25 bp, Homo sapien
cgccgcctaccgcttgggaactctc

SEQ ID NO: 504440 - DNA, 25 bp, Homo sapien
gctaggcggcgcttctctcccggcg

SEQ ID NO: 504441 - DNA, 25 bp, Homo sapien
tactgacaatcaaaacttcgattcc

SEQ ID NO: 504442 - DNA, 25 bp, Homo sapien
atccacacgcttcttcaaattattg

SEQ ID NO: 504443 - DNA, 25 bp, Homo sapien
ttagccgctatccacacgcttcttc

SEQ ID NO: 504444 - DNA, 25 bp, Homo sapien
aatcaaaacttcgattccctctggg

SEQ ID NO: 504445 - DNA, 25 bp, Homo sapien
agtctgctggttagctgtctttagt

SEQ ID NO: 504446 - DNA, 25 bp, Homo sapien
gttgccctgagtttcttttgcactt

SEQ ID NO: 504447 - DNA, 25 bp, Homo sapien
tctccaattgactgggttgccctga

SEQ ID NO: 504448 - DNA, 25 bp, Homo sapien
gtgtgaacacgtggtgtcggcacca

SEQ ID NO: 504449 - DNA, 25 bp, Homo sapien
ttttgcacttccgagacttggatac

SEQ ID NO: 504450 - DNA, 25 bp, Homo sapien
tcattcgcctcatcacttcctctgg

SEQ ID NO: 504451 - DNA, 25 bp, Homo sapien
tccagttgtgaggacttcatggcaa

SEQ ID NO: 504452 - DNA, 25 bp, Homo sapien
gcaacctttgggtgttgagagtttc

SEQ ID NO: 504453 - DNA, 25 bp, Homo sapien
cacagctttgattcattcgcctcat

SEQ ID NO: 504454 - DNA, 25 bp, Homo sapien
gacactctgcatcttggttgtgatc

SEQ ID NO: 504455 - DNA, 25 bp, Homo sapien
cctcagttctgactctgtggctcat

SEQ ID NO: 504456 - DNA, 25 bp, Homo sapien
tttcctcagttctgactctgtggct

SEQ ID NO: 504457 - DNA, 25 bp, Homo sapien
gttttcctcagttctgactctgtgg

SEQ ID NO: 504458 - DNA, 25 bp, Homo sapien
tcctcagttctgactctgtggctca

SEQ ID NO: 504459 - DNA, 25 bp, Homo sapien
gtctagtaattgtgtgggctttctg

SEQ ID NO: 504460 - DNA, 25 bp, Homo sapien
aattgtgtgggctttctgatctgca

SEQ ID NO: 504461 - DNA, 25 bp, Homo sapien
taattgtgtgggctttctgatctgc

SEQ ID NO: 504462 - DNA, 25 bp, Homo sapien
tagtaattgtgtgggctttctgatc

SEQ ID NO: 504463 - DNA, 25 bp, Homo sapien
atgtagtcatttttgtttgtaattg

SEQ ID NO: 504464 - DNA, 25 bp, Homo sapien
gtagtcatttttgtttgtaattgaa

SEQ ID NO: 504465 - DNA, 25 bp, Homo sapien
tagtcatttttgtttgtaattgaaa

SEQ ID NO: 504466 - DNA, 25 bp, Homo sapien
ttatgtagtcatttttgtttgtaat

SEQ ID NO: 504467 - DNA, 25 bp, Homo sapien
tctcctgggagaactcgccgagcgc

SEQ ID NO: 504468 - DNA, 25 bp, Homo sapien
tcgtccggcttctcatcattgggct

SEQ ID NO: 504469 - DNA, 25 bp, Homo sapien
tcttctctgaacgataaagacgaca

SEQ ID NO: 504470 - DNA, 25 bp, Homo sapien
aattcgcgtactagccggacttgaa

SEQ ID NO: 504471 - DNA, 25 bp, Homo sapien
ggctgtgttgtaagaaggtttttca

SEQ ID NO: 504472 - DNA, 25 bp, Homo sapien
caccctagcagacgctgtcttatta

SEQ ID NO: 504473 - DNA, 25 bp, Homo sapien
tacctttctgtagtcctgttctagc

SEQ ID NO: 504474 - DNA, 25 bp, Homo sapien
cagaggcatcgcttctctgggctgt

SEQ ID NO: 504475 - DNA, 25 bp, Homo sapien
gaaaaaagaaccatgctttctctca

SEQ ID NO: 504476 - DNA, 25 bp, Homo sapien
ttggaatagcgagtgaaaaaagaac

SEQ ID NO: 504477 - DNA, 25 bp, Homo sapien
gtgaaaaaagaaccatgctttctct

SEQ ID NO: 504478 - DNA, 25 bp, Homo sapien
aaaaacaaagttggaatagcgagtg

SEQ ID NO: 504479 - DNA, 25 bp, Homo sapien
ctgcagagctagcctcttgctgatt

SEQ ID NO: 504480 - DNA, 25 bp, Homo sapien
tctgcagagctagcctcttgctgat

SEQ ID NO: 504481 - DNA, 25 bp, Homo sapien
catttatgagcaagcttggtggtct

SEQ ID NO: 504482 - DNA, 25 bp, Homo sapien
taatggagccttcatagtttctcag

SEQ ID NO: 504483 - DNA, 25 bp, Homo sapien
tagtgcatttttgctgctcaataaa

SEQ ID NO: 504484 - DNA, 25 bp, Homo sapien
ggtggtctctttgggcctctgccaa

SEQ ID NO: 504485 - DNA, 25 bp, Homo sapien
ctgatttacaatgggagaaccacca

SEQ ID NO: 504486 - DNA, 25 bp, Homo sapien
gatttacaatgggagaaccaccacc

SEQ ID NO: 504487 - DNA, 25 bp, Homo sapien
tgatttacaatgggagaaccaccac

SEQ ID NO: 504488 - DNA, 25 bp, Homo sapien
tcttttagatgcgtgactactgatg

SEQ ID NO: 504489 - DNA, 25 bp, Homo sapien
tttagatgcgtgactactgatgttt

SEQ ID NO: 504490 - DNA, 25 bp, Homo sapien
agatgcgtgactactgatgtttcac

SEQ ID NO: 504491 - DNA, 25 bp, Homo sapien
tagatgcgtgactactgatgtttca

SEQ ID NO: 504492 - DNA, 25 bp, Homo sapien
ctgatggtgaagtggcgaggaagca

SEQ ID NO: 504493 - DNA, 25 bp, Homo sapien
tcttgcagctggagttagggatgcg

SEQ ID NO: 504494 - DNA, 25 bp, Homo sapien
caaaaccaagcaagagaaatctgat

SEQ ID NO: 504495 - DNA, 25 bp, Homo sapien
gacactgtttctcttactacaataa

SEQ ID NO: 504496 - DNA, 25 bp, Homo sapien
gaaatgtccaatgtccacgtgctgc

SEQ ID NO: 504497 - DNA, 25 bp, Homo sapien
gaaacacgtaagcaagacgcaccga

SEQ ID NO: 504498 - DNA, 25 bp, Homo sapien
tgtaccaccgcggatgtgactgctg

SEQ ID NO: 504499 - DNA, 25 bp, Homo sapien
tgccgccgagcagttaacgttaaag

SEQ ID NO: 504500 - DNA, 25 bp, Homo sapien
agtttgcgcttctgtgtgtgtggcc

SEQ ID NO: 504501 - DNA, 25 bp, Homo sapien
gtgtgtggccgaagaatggaagaga

SEQ ID NO: 504502 - DNA, 25 bp, Homo sapien
gaaacatagtttgcgcttctgtgtg

SEQ ID NO: 504503 - DNA, 25 bp, Homo sapien
ctgaaacatagtttgcgcttctgtg

SEQ ID NO: 504504 - DNA, 25 bp, Homo sapien
ttaaacccagcccaatgccgctgcc

SEQ ID NO: 504505 - DNA, 25 bp, Homo sapien
cctgcgccactctgcgcgccggcgg

SEQ ID NO: 504506 - DNA, 25 bp, Homo sapien
cgctgcctgcgccactctgcgcgcc

SEQ ID NO: 504507 - DNA, 25 bp, Homo sapien
aaacccagcccaatgccgctgcctg

SEQ ID NO: 504508 - DNA, 25 bp, Homo sapien
actccttagacgctctcggtacagt

SEQ ID NO: 504509 - DNA, 25 bp, Homo sapien
gaggtcagagaaaggtgttgtcagg

SEQ ID NO: 504510 - DNA, 25 bp, Homo sapien
tagacgctctcggtacagtgttgcg

SEQ ID NO: 504511 - DNA, 25 bp, Homo sapien
agtggcatctccactccttagacgc

SEQ ID NO: 504512 - DNA, 25 bp, Homo sapien
ttcatccggttgcagtgagaagcgg

SEQ ID NO: 504513 - DNA, 25 bp, Homo sapien
ttaagtctttcatccggttgcagtg

SEQ ID NO: 504514 - DNA, 25 bp, Homo sapien
tgcggcaggtcccaatattagcaac

SEQ ID NO: 504515 - DNA, 25 bp, Homo sapien
caacctccgcagagcggtggtgcgt

SEQ ID NO: 504516 - DNA, 25 bp, Homo sapien
ggagttcgtcctcacactcagtttc

SEQ ID NO: 504517 - DNA, 25 bp, Homo sapien
tggggagttcgtcctcacactcagt

SEQ ID NO: 504518 - DNA, 25 bp, Homo sapien
cctctggggagttcgtcctcacact

SEQ ID NO: 504519 - DNA, 25 bp, Homo sapien
tctggggagttcgtcctcacactca

SEQ ID NO: 504520 - DNA, 25 bp, Homo sapien
acagcagaaggaaacgcgctggaaa

SEQ ID NO: 504521 - DNA, 25 bp, Homo sapien
aaaggatttttgccgcccccatgca

SEQ ID NO: 504522 - DNA, 25 bp, Homo sapien
aacagcagaaggaaacgcgctggaa

SEQ ID NO: 504523 - DNA, 25 bp, Homo sapien
cagaaggaaacgcgctggaaaaagg

SEQ ID NO: 504524 - DNA, 25 bp, Homo sapien
gatctgagatggttgatctggcagc

SEQ ID NO: 504525 - DNA, 25 bp, Homo sapien
gcagccctggttcgagcttctctgg

SEQ ID NO: 504526 - DNA, 25 bp, Homo sapien
atctgagatggttgatctggcagcc

SEQ ID NO: 504527 - DNA, 25 bp, Homo sapien
tggcagccctggttcgagcttctct

SEQ ID NO: 504528 - DNA, 25 bp, Homo sapien
gggttgctagatcttcctgacctta

SEQ ID NO: 504529 - DNA, 25 bp, Homo sapien
ttacaacagtggaattctttgcatg

SEQ ID NO: 504530 - DNA, 25 bp, Homo sapien
aatgactgtgactcctacgttcagt

SEQ ID NO: 504531 - DNA, 25 bp, Homo sapien
gactcctacgttcagttggtctgct

SEQ ID NO: 504532 - DNA, 25 bp, Homo sapien
tgggcaggaatagacttgtcaccac

SEQ ID NO: 504533 - DNA, 25 bp, Homo sapien
caggaatagacttgtcaccactgcc

SEQ ID NO: 504534 - DNA, 25 bp, Homo sapien
gcacacacacagtgcgtgggcagga

SEQ ID NO: 504535 - DNA, 25 bp, Homo sapien
ttgggctttttgagcacacacacag

SEQ ID NO: 504536 - DNA, 25 bp, Homo sapien
cattggatgcatagatgtggcctca

SEQ ID NO: 504537 - DNA, 25 bp, Homo sapien
tagtaggtgctcgatgaacgctcat

SEQ ID NO: 504538 - DNA, 25 bp, Homo sapien
atggctgctgtgtacttaggtctcc

SEQ ID NO: 504539 - DNA, 25 bp, Homo sapien
tgtggcctcacagtatctcgcttgt

SEQ ID NO: 504540 - DNA, 25 bp, Homo sapien
gttcagcgtcctggcccgagagatg

SEQ ID NO: 504541 - DNA, 25 bp, Homo sapien
gggctgtcgttcagcgtcctggccc

SEQ ID NO: 504542 - DNA, 25 bp, Homo sapien
tgtcgttcagcgtcctggcccgaga

SEQ ID NO: 504543 - DNA, 25 bp, Homo sapien
ctccggggctgtcgttcagcgtcct

SEQ ID NO: 504544 - DNA, 25 bp, Homo sapien
ttaggtgacagccaaaagtagtctt

SEQ ID NO: 504545 - DNA, 25 bp, Homo sapien
tcatgcattcctataaaacgctact

SEQ ID NO: 504546 - DNA, 25 bp, Homo sapien
gctgctgctaaaatgtgcacatatt

SEQ ID NO: 504547 - DNA, 25 bp, Homo sapien
tagtcttaaagtagcatgagacctt

SEQ ID NO: 504548 - DNA, 25 bp, Homo sapien
cccagcgtccctgaaatgcttgcat

SEQ ID NO: 504549 - DNA, 25 bp, Homo sapien
gtcccagcgtccctgaaatgcttgc

SEQ ID NO: 504550 - DNA, 25 bp, Homo sapien
tctgtcccagcgtccctgaaatgct

SEQ ID NO: 504551 - DNA, 25 bp, Homo sapien
tctctctgtcccagcgtccctgaaa

SEQ ID NO: 504552 - DNA, 25 bp, Homo sapien
ttttctccatcaccctggcagctct

SEQ ID NO: 504553 - DNA, 25 bp, Homo sapien
cagccagagcggctgcttgatgcgt

SEQ ID NO: 504554 - DNA, 25 bp, Homo sapien
tggtgcttctacagtggttttgcta

SEQ ID NO: 504555 - DNA, 25 bp, Homo sapien
cttgatgcgtagtgctggctttggt

SEQ ID NO: 504556 - DNA, 25 bp, Homo sapien
ctctcaggctctactgtgagtgttg

SEQ ID NO: 504557 - DNA, 25 bp, Homo sapien
tgctcgctggtgtttccactcctgc

SEQ ID NO: 504558 - DNA, 25 bp, Homo sapien
ctcaggctctactgtgagtgttgac

SEQ ID NO: 504559 - DNA, 25 bp, Homo sapien
tgtgagtgttgactgctcgctggtg

SEQ ID NO: 504560 - DNA, 25 bp, Homo sapien
aagtgagaagaagccttcggcaggc

SEQ ID NO: 504561 - DNA, 25 bp, Homo sapien
cagcctgtgacacggatgctctctc

SEQ ID NO: 504562 - DNA, 25 bp, Homo sapien
tcagcacgaacctaggtttagaaat

SEQ ID NO: 504563 - DNA, 25 bp, Homo sapien
ttcttcctatctgtggttaccctca

SEQ ID NO: 504564 - DNA, 25 bp, Homo sapien
tttttagcactgttccattcaatag

SEQ ID NO: 504565 - DNA, 25 bp, Homo sapien
tttctcaccactttttagcactgtt

SEQ ID NO: 504566 - DNA, 25 bp, Homo sapien
cactttttagcactgttccattcaa

SEQ ID NO: 504567 - DNA, 25 bp, Homo sapien
tcaccactttttagcactgttccat

SEQ ID NO: 504568 - DNA, 25 bp, Homo sapien
gcacagggaccccatgagcctgtct

SEQ ID NO: 504569 - DNA, 25 bp, Homo sapien
gggaccccatgagcctgtctgcaca

SEQ ID NO: 504570 - DNA, 25 bp, Homo sapien
gactggggcacaagtccttccatgc

SEQ ID NO: 504571 - DNA, 25 bp, Homo sapien
catctgaattcctatggactggggc

SEQ ID NO: 504572 - DNA, 25 bp, Homo sapien
gagcttcttagaacaggcagtgatg

SEQ ID NO: 504573 - DNA, 25 bp, Homo sapien
tctgcgcgtctccaggatttagccc

SEQ ID NO: 504574 - DNA, 25 bp, Homo sapien
catctcttgcttacatactgcctag

SEQ ID NO: 504575 - DNA, 25 bp, Homo sapien
gtctccttgggatcaggctgacagc

SEQ ID NO: 504576 - DNA, 25 bp, Homo sapien
ccctcttccataaagtccaaaattg

SEQ ID NO: 504577 - DNA, 25 bp, Homo sapien
tgcacgagtctgactccactctgct

SEQ ID NO: 504578 - DNA, 25 bp, Homo sapien
ctgtagccagaaggatgtctctatg

SEQ ID NO: 504579 - DNA, 25 bp, Homo sapien
cttccataaagtccaaaattgctgc

SEQ ID NO: 504580 - DNA, 25 bp, Homo sapien
tcaaggcaagcatggttatctccag

SEQ ID NO: 504581 - DNA, 25 bp, Homo sapien
gagaggctcagtaacttgcccggca

SEQ ID NO: 504582 - DNA, 25 bp, Homo sapien
gagtgtgttttagtgccttgggcca

SEQ ID NO: 504583 - DNA, 25 bp, Homo sapien
gccagagcgtcaaatcttgcctgca

SEQ ID NO: 504584 - DNA, 25 bp, Homo sapien
gagccactgcagatttgtccgatgt

SEQ ID NO: 504585 - DNA, 25 bp, Homo sapien
aggcctttgagcaggtgataccaat

SEQ ID NO: 504586 - DNA, 25 bp, Homo sapien
gatttgtccgatgttgactcctctg

SEQ ID NO: 504587 - DNA, 25 bp, Homo sapien
gtgataccaattccaaatccttctg

SEQ ID NO: 504588 - DNA, 25 bp, Homo sapien
cctgataggattttatggttgtctc

SEQ ID NO: 504589 - DNA, 25 bp, Homo sapien
ctgggcacttccatatgcgtgatcc

SEQ ID NO: 504590 - DNA, 25 bp, Homo sapien
tccatatgcgtgatcctgataggat

SEQ ID NO: 504591 - DNA, 25 bp, Homo sapien
ggcacttccatatgcgtgatcctga

SEQ ID NO: 504592 - DNA, 25 bp, Homo sapien
tgaccagggtgaagtagagaactga

SEQ ID NO: 504593 - DNA, 25 bp, Homo sapien
tccggagacgtagcaatgtgaccag

SEQ ID NO: 504594 - DNA, 25 bp, Homo sapien
gaggctcactcttcacgttgtatga

SEQ ID NO: 504595 - DNA, 25 bp, Homo sapien
tatgtcactcgatcccaggtggtcc

SEQ ID NO: 504596 - DNA, 25 bp, Homo sapien
gaggaattttccagcacctaatagt

SEQ ID NO: 504597 - DNA, 25 bp, Homo sapien
ttttccagcacctaatagtgatgga

SEQ ID NO: 504598 - DNA, 25 bp, Homo sapien
ggaattttccagcacctaatagtga

SEQ ID NO: 504599 - DNA, 25 bp, Homo sapien
cagcacctaatagtgatggatgctc

SEQ ID NO: 504600 - DNA, 25 bp, Homo sapien
gccccagtgctctcttgtgacctga

SEQ ID NO: 504601 - DNA, 25 bp, Homo sapien
ggtgtttaataagcacgcaggcttc

SEQ ID NO: 504602 - DNA, 25 bp, Homo sapien
gagaagctgatctccttcctttgag

SEQ ID NO: 504603 - DNA, 25 bp, Homo sapien
ggtgtgcgtggtgcccgtgctcagt

SEQ ID NO: 504604 - DNA, 25 bp, Homo sapien
tcgcagttggagcacgtcgttcact

SEQ ID NO: 504605 - DNA, 25 bp, Homo sapien
acgtcgttcactcagggactcaggt

SEQ ID NO: 504606 - DNA, 25 bp, Homo sapien
tccgagccacggcatgcagggcact

SEQ ID NO: 504607 - DNA, 25 bp, Homo sapien
atgtgtgtcaaggatcgcagttgga

SEQ ID NO: 504608 - DNA, 25 bp, Homo sapien
gacgatcattcctcagtcttgccga

SEQ ID NO: 504609 - DNA, 25 bp, Homo sapien
gttgtaacctacttgctgacgatca

SEQ ID NO: 504610 - DNA, 25 bp, Homo sapien
tcatgcaccgtgtctacatcagcaa

SEQ ID NO: 504611 - DNA, 25 bp, Homo sapien
tcttgccgaaaatgagttactcttg

SEQ ID NO: 504612 - DNA, 25 bp, Homo sapien
tcaggttccggctggcgaatacagg

SEQ ID NO: 504613 - DNA, 25 bp, Homo sapien
cagggatcgggcttgtgattacatc

SEQ ID NO: 504614 - DNA, 25 bp, Homo sapien
ctagcggtttggcggatcaggttcc

SEQ ID NO: 504615 - DNA, 25 bp, Homo sapien
aacaataggcatgtggttcctggac

SEQ ID NO: 504616 - DNA, 25 bp, Homo sapien
ccaaattcggcaattattaacaagt

SEQ ID NO: 504617 - DNA, 25 bp, Homo sapien
tgatttgacagttggagaccttcct

SEQ ID NO: 504618 - DNA, 25 bp, Homo sapien
taacaagttgaaacagaaaacgatg

SEQ ID NO: 504619 - DNA, 25 bp, Homo sapien
gaccttcctgttaacagccattata

SEQ ID NO: 504620 - DNA, 25 bp, Homo sapien
gcagtaatttcaacttgtatctggg

SEQ ID NO: 504621 - DNA, 25 bp, Homo sapien
acaaaacagatgctctattactatt

SEQ ID NO: 504622 - DNA, 25 bp, Homo sapien
tgtatctgggggtaaaaattccaga

SEQ ID NO: 504623 - DNA, 25 bp, Homo sapien
tctgctaaagacatgaacgttcatt

SEQ ID NO: 504624 - DNA, 25 bp, Homo sapien
taagaacagctatgacatcattctc

SEQ ID NO: 504625 - DNA, 25 bp, Homo sapien
gtcttgtcaacaaagctggtgcatg

SEQ ID NO: 504626 - DNA, 25 bp, Homo sapien
tcctgtgtgggggattaagaacagc

SEQ ID NO: 504627 - DNA, 25 bp, Homo sapien
caaagctggtgcatgacatgacaaa

SEQ ID NO: 504628 - DNA, 25 bp, Homo sapien
caagattggattcgcattgttgagg

SEQ ID NO: 504629 - DNA, 25 bp, Homo sapien
ttactccggctgcatgagcagctgt

SEQ ID NO: 504630 - DNA, 25 bp, Homo sapien
cttcggtgtacagtgacaagattgg

SEQ ID NO: 504631 - DNA, 25 bp, Homo sapien
cagctgttttcacgaaaaagggcaa

SEQ ID NO: 504632 - DNA, 25 bp, Homo sapien
catgggctaggaatccggaatctaa

SEQ ID NO: 504633 - DNA, 25 bp, Homo sapien
ctggagctggcatgggctaggaatc

SEQ ID NO: 504634 - DNA, 25 bp, Homo sapien
ctggcatgggctaggaatccggaat

SEQ ID NO: 504635 - DNA, 25 bp, Homo sapien
ggaatccggaatctaaaactgccac

SEQ ID NO: 504636 - DNA, 25 bp, Homo sapien
atattccgccagaatttccttgatg

SEQ ID NO: 504637 - DNA, 25 bp, Homo sapien
gccagaatttccttgatgcccgtgt

SEQ ID NO: 504638 - DNA, 25 bp, Homo sapien
tccgccagaatttccttgatgcccg

SEQ ID NO: 504639 - DNA, 25 bp, Homo sapien
tattccgccagaatttccttgatgc

SEQ ID NO: 504640 - DNA, 25 bp, Homo sapien
tgtgactaatcacagactgatctgg

SEQ ID NO: 504641 - DNA, 25 bp, Homo sapien
aatcacagactgatctggggtaggc

SEQ ID NO: 504642 - DNA, 25 bp, Homo sapien
ctctcctctgtgactaatcacagac

SEQ ID NO: 504643 - DNA, 25 bp, Homo sapien
tcctctgtgactaatcacagactga

SEQ ID NO: 504644 - DNA, 25 bp, Homo sapien
gccaaaccgtgacagcgagcatctg

SEQ ID NO: 504645 - DNA, 25 bp, Homo sapien
tttgccaaaccgtgacagcgagcat

SEQ ID NO: 504646 - DNA, 25 bp, Homo sapien
ctttgccaaaccgtgacagcgagca

SEQ ID NO: 504647 - DNA, 25 bp, Homo sapien
caaaccgtgacagcgagcatctggc

SEQ ID NO: 504648 - DNA, 25 bp, Homo sapien
ggtgcaggagaccggtcagggccat

SEQ ID NO: 504649 - DNA, 25 bp, Homo sapien
tgtggtgcaggagaccggtcagggc

SEQ ID NO: 504650 - DNA, 25 bp, Homo sapien
ctgtggtgcaggagaccggtcaggg

SEQ ID NO: 504651 - DNA, 25 bp, Homo sapien
gtggtgcaggagaccggtcagggcc

SEQ ID NO: 504652 - DNA, 25 bp, Homo sapien
ctgattcctgggtaagttgcaaggg

SEQ ID NO: 504653 - DNA, 25 bp, Homo sapien
tgcaagggggctatgtttgctgcat

SEQ ID NO: 504654 - DNA, 25 bp, Homo sapien
ccatctgattcctgggtaagttgca

SEQ ID NO: 504655 - DNA, 25 bp, Homo sapien
caagggggctatgtttgctgcatgt

SEQ ID NO: 504656 - DNA, 25 bp, Homo sapien
gaagagacctcctacgactattggg

SEQ ID NO: 504657 - DNA, 25 bp, Homo sapien
ccaaatcaggtagaagagacctcct

SEQ ID NO: 504658 - DNA, 25 bp, Homo sapien
acgactattggggtgcttccagcat

SEQ ID NO: 504659 - DNA, 25 bp, Homo sapien
tcaggtagaagagacctcctacgac

SEQ ID NO: 504660 - DNA, 25 bp, Homo sapien
ttaacctctttgaagagtgtcttgg

SEQ ID NO: 504661 - DNA, 25 bp, Homo sapien
aattaacctctttgaagagtgtctt

SEQ ID NO: 504662 - DNA, 25 bp, Homo sapien
attaacctctttgaagagtgtcttg

SEQ ID NO: 504663 - DNA, 25 bp, Homo sapien
taattaacctctttgaagagtgtct

SEQ ID NO: 504664 - DNA, 25 bp, Homo sapien
tggtttctgtaagtattgcccattc

SEQ ID NO: 504665 - DNA, 25 bp, Homo sapien
tagttcctgagcttctatgctccga

SEQ ID NO: 504666 - DNA, 25 bp, Homo sapien
cctcccaaggtgcttctggaaggcc

SEQ ID NO: 504667 - DNA, 25 bp, Homo sapien
taaatctatttaatatgcccgtatt

SEQ ID NO: 504668 - DNA, 25 bp, Homo sapien
ctatcctcccgttgttgaaggaatt

SEQ ID NO: 504669 - DNA, 25 bp, Homo sapien
tcctatcctcccgttgttgaaggaa

SEQ ID NO: 504670 - DNA, 25 bp, Homo sapien
ttcctatcctcccgttgttgaagga

SEQ ID NO: 504671 - DNA, 25 bp, Homo sapien
cctatcctcccgttgttgaaggaat

SEQ ID NO: 504672 - DNA, 25 bp, Homo sapien
tattcgtttagtacacctagatgtg

SEQ ID NO: 504673 - DNA, 25 bp, Homo sapien
gtattcgtttagtacacctagatgt

SEQ ID NO: 504674 - DNA, 25 bp, Homo sapien
aagtaaaatgtgtccctgcctcaga

SEQ ID NO: 504675 - DNA, 25 bp, Homo sapien
cagtggctgcccacgtgatagcagg

SEQ ID NO: 504676 - DNA, 25 bp, Homo sapien
gatggcacagatcttactccagacc

SEQ ID NO: 504677 - DNA, 25 bp, Homo sapien
tgagattttgaaacacaggcactgg

SEQ ID NO: 504678 - DNA, 25 bp, Homo sapien
ctggttttagccgttttagcaacat

SEQ ID NO: 504679 - DNA, 25 bp, Homo sapien
gaacgcagtgccaggatttaagatg

SEQ ID NO: 504680 - DNA, 25 bp, Homo sapien
ctggagtctgaactggacaatgact

SEQ ID NO: 504681 - DNA, 25 bp, Homo sapien
ttaaactggcagtcgattccctcca

SEQ ID NO: 504682 - DNA, 25 bp, Homo sapien
tctgatgaccatgatctgactctgg

SEQ ID NO: 504683 - DNA, 25 bp, Homo sapien
tgactctggtaaaggagagccagct

SEQ ID NO: 504684 - DNA, 25 bp, Homo sapien
cactatcttagtcaggccagtctca

SEQ ID NO: 504685 - DNA, 25 bp, Homo sapien
cgaagactccacattgcgaaaaagg

SEQ ID NO: 504686 - DNA, 25 bp, Homo sapien
tgtttctcggcaagggaaaaagtga

SEQ ID NO: 504687 - DNA, 25 bp, Homo sapien
taagcctagatcagcatatataaga

SEQ ID NO: 504688 - DNA, 25 bp, Homo sapien
taaaaagagcagacgtgtttctcgg

SEQ ID NO: 504689 - DNA, 25 bp, Homo sapien
aagagaactgcatgccaaatttgcc

SEQ ID NO: 504690 - DNA, 25 bp, Homo sapien
gacttggaaagtaagctcaggcagg

SEQ ID NO: 504691 - DNA, 25 bp, Homo sapien
tcaccgaatacagtttatatccaga

SEQ ID NO: 504692 - DNA, 25 bp, Homo sapien
tctgagagtggattgcatacttgga

SEQ ID NO: 504693 - DNA, 25 bp, Homo sapien
ctaaatcatcgttccttgttttaat

SEQ ID NO: 504694 - DNA, 25 bp, Homo sapien
gccttgaatctgtctacacactcag

SEQ ID NO: 504695 - DNA, 25 bp, Homo sapien
tggtgaccgacgtcgaccagggtta

SEQ ID NO: 504696 - DNA, 25 bp, Homo sapien
cagtggctgctcctaagtctctgtg

SEQ ID NO: 504697 - DNA, 25 bp, Homo sapien
accgacgtcgaccagggttagcaga

SEQ ID NO: 504698 - DNA, 25 bp, Homo sapien
tgtctgtagcactagcctctttttt

SEQ ID NO: 504699 - DNA, 25 bp, Homo sapien
tttgcaaaatgtcgtggaacattct

SEQ ID NO: 504700 - DNA, 25 bp, Homo sapien
caacttcaggcctatcctggcccag

SEQ ID NO: 504701 - DNA, 25 bp, Homo sapien
cttttttagcgatattgtttgcaaa

SEQ ID NO: 504702 - DNA, 25 bp, Homo sapien
ccatcctcggggcctgccagtagga

SEQ ID NO: 504703 - DNA, 25 bp, Homo sapien
catcctcggggcctgccagtaggat

SEQ ID NO: 504704 - DNA, 25 bp, Homo sapien
ttccatcctcggggcctgccagtag

SEQ ID NO: 504705 - DNA, 25 bp, Homo sapien
tcctcggggcctgccagtaggatga

SEQ ID NO: 504706 - DNA, 25 bp, Homo sapien
gtccagatcctctacaggcgactgg

SEQ ID NO: 504707 - DNA, 25 bp, Homo sapien
ggcgactggctccagaggagatcca

SEQ ID NO: 504708 - DNA, 25 bp, Homo sapien
tgcctcttgccgcaggctccgggag

SEQ ID NO: 504709 - DNA, 25 bp, Homo sapien
actgctcttgcataggcctgaaggg

SEQ ID NO: 504710 - DNA, 25 bp, Homo sapien
tcctcgggctttaggtccaggacca

SEQ ID NO: 504711 - DNA, 25 bp, Homo sapien
cctcgggctttaggtccaggaccat

SEQ ID NO: 504712 - DNA, 25 bp, Homo sapien
gtgtcctctcttcttcgacagccat

SEQ ID NO: 504713 - DNA, 25 bp, Homo sapien
tcatacccccagagcactctttttc

SEQ ID NO: 504714 - DNA, 25 bp, Homo sapien
ttctcatacccccagagcactcttt

SEQ ID NO: 504715 - DNA, 25 bp, Homo sapien
aaaactgtttctgctctcgtcctct

SEQ ID NO: 504716 - DNA, 25 bp, Homo sapien
tgtaatcatcaaaccctccagggtc

SEQ ID NO: 504717 - DNA, 25 bp, Homo sapien
ggtgtctttaattggatactttgct

SEQ ID NO: 504718 - DNA, 25 bp, Homo sapien
tggagctgcactctgagcagacata

SEQ ID NO: 504719 - DNA, 25 bp, Homo sapien
aaagcagcttggaatcatggtcaca

SEQ ID NO: 504720 - DNA, 25 bp, Homo sapien
tgcccgcaacgtaaaatggtgtctt

SEQ ID NO: 504721 - DNA, 25 bp, Homo sapien
tttgttgggtgttccgaatgaagtc

SEQ ID NO: 504722 - DNA, 25 bp, Homo sapien
tggaagggaagattcaataaacatc

SEQ ID NO: 504723 - DNA, 25 bp, Homo sapien
gtggaagggaagattcaataaacat

SEQ ID NO: 504724 - DNA, 25 bp, Homo sapien
gttggatggtcccaaccactgccat

SEQ ID NO: 504725 - DNA, 25 bp, Homo sapien
tctgaactgtatcccacccactagc

SEQ ID NO: 504726 - DNA, 25 bp, Homo sapien
ttctgctctgaactgtatcccaccc

SEQ ID NO: 504727 - DNA, 25 bp, Homo sapien
ttcctacaaatgctggaccttcctc

SEQ ID NO: 504728 - DNA, 25 bp, Homo sapien
ccacacaggcagggcgcaccccagc

SEQ ID NO: 504729 - DNA, 25 bp, Homo sapien
cagctgcgggtctccgataccagat

SEQ ID NO: 504730 - DNA, 25 bp, Homo sapien
ccagctgcgggtctccgataccaga

SEQ ID NO: 504731 - DNA, 25 bp, Homo sapien
agctgcgggtctccgataccagatg

SEQ ID NO: 504732 - DNA, 25 bp, Homo sapien
gagggccaatctaaaggcatagagg

SEQ ID NO: 504733 - DNA, 25 bp, Homo sapien
tcagggagatggatgagccagctag

SEQ ID NO: 504734 - DNA, 25 bp, Homo sapien
agctagaaataatttggagctggca

SEQ ID NO: 504735 - DNA, 25 bp, Homo sapien
ctggcaggagaagacgagccgaatt

SEQ ID NO: 504736 - DNA, 25 bp, Homo sapien
cccgtgcaagcagtatcatgtgttt

SEQ ID NO: 504737 - DNA, 25 bp, Homo sapien
ctcacattacccgtgcaagcagtat

SEQ ID NO: 504738 - DNA, 25 bp, Homo sapien
ccttggatgtcctcgtgcacgggat

SEQ ID NO: 504739 - DNA, 25 bp, Homo sapien
ctcgtgcacgggatgggtttctttc

SEQ ID NO: 504740 - DNA, 25 bp, Homo sapien
tctccggtggaactcttgggcaggc

SEQ ID NO: 504741 - DNA, 25 bp, Homo sapien
caaattgctggtttgtcttggtatc

SEQ ID NO: 504742 - DNA, 25 bp, Homo sapien
tgtagacggccagctttaattttag

SEQ ID NO: 504743 - DNA, 25 bp, Homo sapien
aaatccttgccgctccatggacggt

SEQ ID NO: 504744 - DNA, 25 bp, Homo sapien
tactgggagcataattaaagtggga

SEQ ID NO: 504745 - DNA, 25 bp, Homo sapien
tggttgtaacccacatgcatttaga

SEQ ID NO: 504746 - DNA, 25 bp, Homo sapien
tctgctcttagggttatactgggag

SEQ ID NO: 504747 - DNA, 25 bp, Homo sapien
tagaagcctgggctctaaatgtttt

SEQ ID NO: 504748 - DNA, 25 bp, Homo sapien
ggtgcaatgcacagccttacaagtc

SEQ ID NO: 504749 - DNA, 25 bp, Homo sapien
tgcctggtgcaatgcacagccttac

SEQ ID NO: 504750 - DNA, 25 bp, Homo sapien
acagccttacaagtcccgtttctca

SEQ ID NO: 504751 - DNA, 25 bp, Homo sapien
aatgcacagccttacaagtcccgtt

SEQ ID NO: 504752 - DNA, 25 bp, Homo sapien
ttcagggcaggcaatgcggtgcccc

SEQ ID NO: 504753 - DNA, 25 bp, Homo sapien
atcgacttttcagggcaggcaatgc

SEQ ID NO: 504754 - DNA, 25 bp, Homo sapien
cacagtgaagcatcgacttttcagg

SEQ ID NO: 504755 - DNA, 25 bp, Homo sapien
aagcatcgacttttcagggcaggca

SEQ ID NO: 504756 - DNA, 25 bp, Homo sapien
agatttgtcctgtgcagggaccacg

SEQ ID NO: 504757 - DNA, 25 bp, Homo sapien
gagagaccaggcagatttgtcctgt

SEQ ID NO: 504758 - DNA, 25 bp, Homo sapien
gagagatgttagagaccagagccag

SEQ ID NO: 504759 - DNA, 25 bp, Homo sapien
caggattttgagagatgttagagac

SEQ ID NO: 504760 - DNA, 25 bp, Homo sapien
agaaggcaggtcgccgtgtcacctg

SEQ ID NO: 504761 - DNA, 25 bp, Homo sapien
tgagcttttagaaggcaggtcgccg

SEQ ID NO: 504762 - DNA, 25 bp, Homo sapien
gagcttttagaaggcaggtcgccgt

SEQ ID NO: 504763 - DNA, 25 bp, Homo sapien
aggcaggtcgccgtgtcacctgctt

SEQ ID NO: 504764 - DNA, 25 bp, Homo sapien
gacagtaagatctacgggagtcagg

SEQ ID NO: 504765 - DNA, 25 bp, Homo sapien
aggcacctatgagcccttccgtcag

SEQ ID NO: 504766 - DNA, 25 bp, Homo sapien
gccagcccttctgtgggctgtgatg

SEQ ID NO: 504767 - DNA, 25 bp, Homo sapien
gctgtgatgtgctagcacccgggaa

SEQ ID NO: 504768 - DNA, 25 bp, Homo sapien
aactcccactggactagaagggctg

SEQ ID NO: 504769 - DNA, 25 bp, Homo sapien
tcccactggactagaagggctgcaa

SEQ ID NO: 504770 - DNA, 25 bp, Homo sapien
ggactacctgcctgtctgacgctcc

SEQ ID NO: 504771 - DNA, 25 bp, Homo sapien
ccactggactagaagggctgcaagg

SEQ ID NO: 504772 - DNA, 25 bp, Homo sapien
cactgcctgttaggtggctgatcag

SEQ ID NO: 504773 - DNA, 25 bp, Homo sapien
tctgctgtagggtctttccgttggc

SEQ ID NO: 504774 - DNA, 25 bp, Homo sapien
taggtcataaggacagggtccccag

SEQ ID NO: 504775 - DNA, 25 bp, Homo sapien
ccaggaactgcaaaggaagctgact

SEQ ID NO: 504776 - DNA, 25 bp, Homo sapien
tgttgtctcttgcacgtcatggagg

SEQ ID NO: 504777 - DNA, 25 bp, Homo sapien
caaagccagtctctagggttgtggg

SEQ ID NO: 504778 - DNA, 25 bp, Homo sapien
ttcagaccgtcagcgttggttttcc

SEQ ID NO: 504779 - DNA, 25 bp, Homo sapien
tatacgtggaagttttggaatcgca

SEQ ID NO: 504780 - DNA, 25 bp, Homo sapien
tgcctcctgggtctcgttaccaaaa

SEQ ID NO: 504781 - DNA, 25 bp, Homo sapien
tcctcttgcggctccacacacgtgt

SEQ ID NO: 504782 - DNA, 25 bp, Homo sapien
tcgaagtcattgtgggtggtcactg

SEQ ID NO: 504783 - DNA, 25 bp, Homo sapien
cacacacgtgtccttctcgaagtca

SEQ ID NO: 504784 - DNA, 25 bp, Homo sapien
tagtgctgtctttagagtgttacag

SEQ ID NO: 504785 - DNA, 25 bp, Homo sapien
ctatctgaatagtgctgtctttaga

SEQ ID NO: 504786 - DNA, 25 bp, Homo sapien
tagagtgttacagttaagcactgac

SEQ ID NO: 504787 - DNA, 25 bp, Homo sapien
tctttagagtgttacagttaagcac

SEQ ID NO: 504788 - DNA, 25 bp, Homo sapien
cagtacggtgctaggagtatttgag

SEQ ID NO: 504789 - DNA, 25 bp, Homo sapien
gaagctcggaatcttaagagggtct

SEQ ID NO: 504790 - DNA, 25 bp, Homo sapien
tttatcagggccagtatttgtctct

SEQ ID NO: 504791 - DNA, 25 bp, Homo sapien
ggtggcacggtttgcctgccatcag

SEQ ID NO: 504792 - DNA, 25 bp, Homo sapien
ggatgaaatttgatcattctgcttc

SEQ ID NO: 504793 - DNA, 25 bp, Homo sapien
tgtaatggccgattccatttcttct

SEQ ID NO: 504794 - DNA, 25 bp, Homo sapien
gaaatttgatcattctgcttcacat

SEQ ID NO: 504795 - DNA, 25 bp, Homo sapien
gatgaggattaatgtaatggccgat

SEQ ID NO: 504796 - DNA, 25 bp, Homo sapien
tctcagctgacgatgggctctgtgc

SEQ ID NO: 504797 - DNA, 25 bp, Homo sapien
gagctgcgggctgttctttcctgag

SEQ ID NO: 504798 - DNA, 25 bp, Homo sapien
gggcatccatttgctaacccagctt

SEQ ID NO: 504799 - DNA, 25 bp, Homo sapien
tagggcctccttgaaccacttcttc

SEQ ID NO: 504800 - DNA, 25 bp, Homo sapien
gaatgtggccctgccattctgggtg

SEQ ID NO: 504801 - DNA, 25 bp, Homo sapien
tgacacagcctgagagtctaagatg

SEQ ID NO: 504802 - DNA, 25 bp, Homo sapien
gggagagaatgtggccctgccattc

SEQ ID NO: 504803 - DNA, 25 bp, Homo sapien
tgggtgaacgcgatggtgccatttt

SEQ ID NO: 504804 - DNA, 25 bp, Homo sapien
ggccaccaaccagattttgtctctc

SEQ ID NO: 504805 - DNA, 25 bp, Homo sapien
caggccaccaaccagattttgtctc

SEQ ID NO: 504806 - DNA, 25 bp, Homo sapien
aggccaccaaccagattttgtctct

SEQ ID NO: 504807 - DNA, 25 bp, Homo sapien
ctgtaactgcctctcattgccctgg

SEQ ID NO: 504808 - DNA, 25 bp, Homo sapien
gtaactgcctctcattgccctggaa

SEQ ID NO: 504809 - DNA, 25 bp, Homo sapien
taactgcctctcattgccctggaag

SEQ ID NO: 504810 - DNA, 25 bp, Homo sapien
tgtaactgcctctcattgccctgga

SEQ ID NO: 504811 - DNA, 25 bp, Homo sapien
ggggcggtggagcacagccacagga

SEQ ID NO: 504812 - DNA, 25 bp, Homo sapien
gggcggtggagcacagccacaggaa

SEQ ID NO: 504813 - DNA, 25 bp, Homo sapien
ggagatggggcggtggagcacagcc

SEQ ID NO: 504814 - DNA, 25 bp, Homo sapien
gatggggcggtggagcacagccaca

SEQ ID NO: 504815 - DNA, 25 bp, Homo sapien
aggaatgccttggtggcccctcagg

SEQ ID NO: 504816 - DNA, 25 bp, Homo sapien
tgacccagaaccgggattattccaa

SEQ ID NO: 504817 - DNA, 25 bp, Homo sapien
tggtgcagccatgcaaattctgagt

SEQ ID NO: 504818 - DNA, 25 bp, Homo sapien
cttggtggcccctcaggcacttctt

SEQ ID NO: 504819 - DNA, 25 bp, Homo sapien
ggctgtggtcagaatctgtacaaga

SEQ ID NO: 504820 - DNA, 25 bp, Homo sapien
tgtggtcagaatctgtacaagactt

SEQ ID NO: 504821 - DNA, 25 bp, Homo sapien
ctgtggtcagaatctgtacaagact

SEQ ID NO: 504822 - DNA, 25 bp, Homo sapien
gctgtggtcagaatctgtacaagac

SEQ ID NO: 504823 - DNA, 25 bp, Homo sapien
agttctatagactccagtcagccag

SEQ ID NO: 504824 - DNA, 25 bp, Homo sapien
tcagttctatagactccagtcagcc

SEQ ID NO: 504825 - DNA, 25 bp, Homo sapien
cttcagttctatagactccagtcag

SEQ ID NO: 504826 - DNA, 25 bp, Homo sapien
gttctatagactccagtcagccagg

SEQ ID NO: 504827 - DNA, 25 bp, Homo sapien
gaggtgaaccaccattactgatgtt

SEQ ID NO: 504828 - DNA, 25 bp, Homo sapien
aaagcctgcccagtagaggtgaacc

SEQ ID NO: 504829 - DNA, 25 bp, Homo sapien
tgttactgatgcctatagaccgctc

SEQ ID NO: 504830 - DNA, 25 bp, Homo sapien
ttcctgaggcatgccggaggcatcc

SEQ ID NO: 504831 - DNA, 25 bp, Homo sapien
gaggctgcatgcctgccccgagcct

SEQ ID NO: 504832 - DNA, 25 bp, Homo sapien
ctccgccccatgaggctgcatgcct

SEQ ID NO: 504833 - DNA, 25 bp, Homo sapien
tgccccgagcctgagaagacagcct

SEQ ID NO: 504834 - DNA, 25 bp, Homo sapien
agaagacagccttggcctccaccat

SEQ ID NO: 504835 - DNA, 25 bp, Homo sapien
tcacccagcagttctgggactgcgt

SEQ ID NO: 504836 - DNA, 25 bp, Homo sapien
ttctgggactgcgtgaggctcctgt

SEQ ID NO: 504837 - DNA, 25 bp, Homo sapien
caggtgtcacccagcagttctggga

SEQ ID NO: 504838 - DNA, 25 bp, Homo sapien
tgggactgcgtgaggctcctgttct

SEQ ID NO: 504839 - DNA, 25 bp, Homo sapien
gctcagcttttacctcccctgggag

SEQ ID NO: 504840 - DNA, 25 bp, Homo sapien
gagctcagcttttacctcccctggg

SEQ ID NO: 504841 - DNA, 25 bp, Homo sapien
agctcagcttttacctcccctggga

SEQ ID NO: 504842 - DNA, 25 bp, Homo sapien
ctcagcttttacctcccctgggagg

SEQ ID NO: 504843 - DNA, 25 bp, Homo sapien
tggtgtccaagtgcgggtctccggg

SEQ ID NO: 504844 - DNA, 25 bp, Homo sapien
ctatggtgtccaagtgcgggtctcc

SEQ ID NO: 504845 - DNA, 25 bp, Homo sapien
ctgcagtgcagggtgcaagggagga

SEQ ID NO: 504846 - DNA, 25 bp, Homo sapien
gcagtgcagggtgcaagggaggaag

SEQ ID NO: 504847 - DNA, 25 bp, Homo sapien
gacttgaaacgtcttctctcctgac

SEQ ID NO: 504848 - DNA, 25 bp, Homo sapien
tgctagaggctctgtgcaaacctgc

SEQ ID NO: 504849 - DNA, 25 bp, Homo sapien
cattcgctgaatgcttagggtgagc

SEQ ID NO: 504850 - DNA, 25 bp, Homo sapien
taggactggcgttttctatactggg

SEQ ID NO: 504851 - DNA, 25 bp, Homo sapien
ctagataggaatgtatgatctgata

SEQ ID NO: 504852 - DNA, 25 bp, Homo sapien
tagataggaatgtatgatctgataa

SEQ ID NO: 504853 - DNA, 25 bp, Homo sapien
tgtgtaaaatattggacaaggtggg

SEQ ID NO: 504854 - DNA, 25 bp, Homo sapien
tgaaaatctgggctgtctggtgtct

SEQ ID NO: 504855 - DNA, 25 bp, Homo sapien
gacaaggtgggttgtctctgaaaat

SEQ ID NO: 504856 - DNA, 25 bp, Homo sapien
tgggttgtctctgaaaatctgggct

SEQ ID NO: 504857 - DNA, 25 bp, Homo sapien
ggaatccgagaaagtgaggcttgac

SEQ ID NO: 504858 - DNA, 25 bp, Homo sapien
gtggaggattcaaggaatccgagaa

SEQ ID NO: 504859 - DNA, 25 bp, Homo sapien
aaggaatccgagaaagtgaggcttg

SEQ ID NO: 504860 - DNA, 25 bp, Homo sapien
ggattcaaggaatccgagaaagtga

SEQ ID NO: 504861 - DNA, 25 bp, Homo sapien
ccctggggacaacgcccttcacaag

SEQ ID NO: 504862 - DNA, 25 bp, Homo sapien
tctcccctggggacaacgcccttca

SEQ ID NO: 504863 - DNA, 25 bp, Homo sapien
gggacaacgcccttcacaagctcag

SEQ ID NO: 504864 - DNA, 25 bp, Homo sapien
ctggggacaacgcccttcacaagct

SEQ ID NO: 504865 - DNA, 25 bp, Homo sapien
gcccacacagtgttggcttgtgcag

SEQ ID NO: 504866 - DNA, 25 bp, Homo sapien
tggcttgtgcagtggtttaaatgtg

SEQ ID NO: 504867 - DNA, 25 bp, Homo sapien
gacgtgtccgttgcccacacagtgt

SEQ ID NO: 504868 - DNA, 25 bp, Homo sapien
tctgcggacgtgtccgttgcccaca

SEQ ID NO: 504869 - DNA, 25 bp, Homo sapien
cactgggtgtgacagtgtccactgc

SEQ ID NO: 504870 - DNA, 25 bp, Homo sapien
ggcactgggtgtgacagtgtccact

SEQ ID NO: 504871 - DNA, 25 bp, Homo sapien
ccctctggcactgggtgtgacagtg

SEQ ID NO: 504872 - DNA, 25 bp, Homo sapien
tctggcactgggtgtgacagtgtcc

SEQ ID NO: 504873 - DNA, 25 bp, Homo sapien
tggttccagcggagatgaggcacat

SEQ ID NO: 504874 - DNA, 25 bp, Homo sapien
gttcgtcctccatgtcagcgacagg

SEQ ID NO: 504875 - DNA, 25 bp, Homo sapien
agctgagccgcgtttcctgttggtg

SEQ ID NO: 504876 - DNA, 25 bp, Homo sapien
aatggagctgtctcagggtaacggt

SEQ ID NO: 504877 - DNA, 25 bp, Homo sapien
taggtgaatcttgacagttcaatac

SEQ ID NO: 504878 - DNA, 25 bp, Homo sapien
cagaattgagggcatagcggaaaga

SEQ ID NO: 504879 - DNA, 25 bp, Homo sapien
agtgactgtagtcatgggaaggtca

SEQ ID NO: 504880 - DNA, 25 bp, Homo sapien
agggatctggagaatgccaagtgac

SEQ ID NO: 504881 - DNA, 25 bp, Homo sapien
ttttaagtgacccactcacaccagg

SEQ ID NO: 504882 - DNA, 25 bp, Homo sapien
tctcccaagctgatctctgtaacag

SEQ ID NO: 504883 - DNA, 25 bp, Homo sapien
ggacaaatgtgagtcctgcgcaggc

SEQ ID NO: 504884 - DNA, 25 bp, Homo sapien
cagtaaagtttggtggctgcacttg

SEQ ID NO: 504885 - DNA, 25 bp, Homo sapien
ccagcctgagcaccctgggccagca

SEQ ID NO: 504886 - DNA, 25 bp, Homo sapien
ctgcactttctccagcctgagcacc

SEQ ID NO: 504887 - DNA, 25 bp, Homo sapien
cagcctgagcaccctgggccagcat

SEQ ID NO: 504888 - DNA, 25 bp, Homo sapien
actttctccagcctgagcaccctgg

SEQ ID NO: 504889 - DNA, 25 bp, Homo sapien
cataagcttctttcaggtgcaggac

SEQ ID NO: 504890 - DNA, 25 bp, Homo sapien
gactgcatttgaacctgtacgtagg

SEQ ID NO: 504891 - DNA, 25 bp, Homo sapien
tgtaatgcaataactgacatctgtt

SEQ ID NO: 504892 - DNA, 25 bp, Homo sapien
ctcttatctgggtttgtaatgcaat

SEQ ID NO: 504893 - DNA, 25 bp, Homo sapien
ttctgcagctgtgtgggactctcgt

SEQ ID NO: 504894 - DNA, 25 bp, Homo sapien
tctttcctgaggatctaagtggacc

SEQ ID NO: 504895 - DNA, 25 bp, Homo sapien
ttcctgaggatctaagtggacccat

SEQ ID NO: 504896 - DNA, 25 bp, Homo sapien
cagctgtgtgggactctcgtttctt

SEQ ID NO: 504897 - DNA, 25 bp, Homo sapien
ttgacaaggtaaagcacacacttcc

SEQ ID NO: 504898 - DNA, 25 bp, Homo sapien
tttgacaaggtaaagcacacacttc

SEQ ID NO: 504899 - DNA, 25 bp, Homo sapien
ttttgacaaggtaaagcacacactt

SEQ ID NO: 504900 - DNA, 25 bp, Homo sapien
gagccctgacaagtgagagacggca

SEQ ID NO: 504901 - DNA, 25 bp, Homo sapien
gtccatgaagtgcaactcgagcctt

SEQ ID NO: 504902 - DNA, 25 bp, Homo sapien
cagagacttgtgtgaaggacctgca

SEQ ID NO: 504903 - DNA, 25 bp, Homo sapien
gtgagagacggcatctgtgcctact

SEQ ID NO: 504904 - DNA, 25 bp, Homo sapien
tgtctttatgcccagccttcgatgg

SEQ ID NO: 504905 - DNA, 25 bp, Homo sapien
gggatcttccctttgctcgcttctg

SEQ ID NO: 504906 - DNA, 25 bp, Homo sapien
gagagatgaaaagggctgtaaacag

SEQ ID NO: 504907 - DNA, 25 bp, Homo sapien
cattctacggtaatggacgggcagg

SEQ ID NO: 504908 - DNA, 25 bp, Homo sapien
gcagactctgactggggttgtctct

SEQ ID NO: 504909 - DNA, 25 bp, Homo sapien
ggacgtagcgtccagagatgtcatt

SEQ ID NO: 504910 - DNA, 25 bp, Homo sapien
ttgcagactctgactggggttgtct

SEQ ID NO: 504911 - DNA, 25 bp, Homo sapien
cgtagcgtccagagatgtcatttgc

SEQ ID NO: 504912 - DNA, 25 bp, Homo sapien
ctctcatttagtttcgggggaagct

SEQ ID NO: 504913 - DNA, 25 bp, Homo sapien
gggaagcttgacactatggctgtcc

SEQ ID NO: 504914 - DNA, 25 bp, Homo sapien
ggctgtccttagacttcctaccgca

SEQ ID NO: 504915 - DNA, 25 bp, Homo sapien
taccgcattcataacctgggagatt

SEQ ID NO: 504916 - DNA, 25 bp, Homo sapien
gcttcacagtacttggtagtccaag

SEQ ID NO: 504917 - DNA, 25 bp, Homo sapien
ggtagtccaagggacatcagcactg

SEQ ID NO: 504918 - DNA, 25 bp, Homo sapien
gacatcagcactgtgtcggtggaag

SEQ ID NO: 504919 - DNA, 25 bp, Homo sapien
tcagcactgtgtcggtggaagaaga

SEQ ID NO: 504920 - DNA, 25 bp, Homo sapien
aattacctggttatgcttcatccct

SEQ ID NO: 504921 - DNA, 25 bp, Homo sapien
tggttatgcttcatccctttgctag

SEQ ID NO: 504922 - DNA, 25 bp, Homo sapien
acctggttatgcttcatccctttgc

SEQ ID NO: 504923 - DNA, 25 bp, Homo sapien
tacctggttatgcttcatccctttg

SEQ ID NO: 504924 - DNA, 25 bp, Homo sapien
cttcctgagtgagctctggtgaggg

SEQ ID NO: 504925 - DNA, 25 bp, Homo sapien
ttcctgagtgagctctggtgagggc

SEQ ID NO: 504926 - DNA, 25 bp, Homo sapien
acttcctgagtgagctctggtgagg

SEQ ID NO: 504927 - DNA, 25 bp, Homo sapien
aacttcctgagtgagctctggtgag

SEQ ID NO: 504928 - DNA, 25 bp, Homo sapien
cgacttcatacagagctcagtgtag

SEQ ID NO: 504929 - DNA, 25 bp, Homo sapien
tagtaatgggactttgtggcctgca

SEQ ID NO: 504930 - DNA, 25 bp, Homo sapien
cagcttcttatgctcacccactgtg

SEQ ID NO: 504931 - DNA, 25 bp, Homo sapien
cctgcagttagtggtggaaaggaat

SEQ ID NO: 504932 - DNA, 25 bp, Homo sapien
ttacaccacgaaagaccacgtaatg

SEQ ID NO: 504933 - DNA, 25 bp, Homo sapien
tgctacacatgcgtggttcttcccc

SEQ ID NO: 504934 - DNA, 25 bp, Homo sapien
ttgtctgtggcatagcaggtactgg

SEQ ID NO: 504935 - DNA, 25 bp, Homo sapien
cccgggacgttgtctgtggcatagc

SEQ ID NO: 504936 - DNA, 25 bp, Homo sapien
caaagtgccgagacgttccctcttg

SEQ ID NO: 504937 - DNA, 25 bp, Homo sapien
gtaagcctggctacccctgccatgt

SEQ ID NO: 504938 - DNA, 25 bp, Homo sapien
gagacgttccctcttgtaagcctgg

SEQ ID NO: 504939 - DNA, 25 bp, Homo sapien
tctccttgggctaaacccaaagtgc

SEQ ID NO: 504940 - DNA, 25 bp, Homo sapien
cacatttctgtgtgcggggtgacct

SEQ ID NO: 504941 - DNA, 25 bp, Homo sapien
ggctcgtaagcctggctacccctgt

SEQ ID NO: 504942 - DNA, 25 bp, Homo sapien
ctggctacccctgtgccacgtccag

SEQ ID NO: 504943 - DNA, 25 bp, Homo sapien
tgacctgtttcatgaacctgtttca

SEQ ID NO: 504944 - DNA, 25 bp, Homo sapien
aagggcagtcgactgtcagctgtca

SEQ ID NO: 504945 - DNA, 25 bp, Homo sapien
tcatgcggtggggacagcctcggac

SEQ ID NO: 504946 - DNA, 25 bp, Homo sapien
cttcaagggcagtcgactgtcagct

SEQ ID NO: 504947 - DNA, 25 bp, Homo sapien
cttggcttcaagggcagtcgactgt

SEQ ID NO: 504948 - DNA, 25 bp, Homo sapien
aatttcccttttgctgggaatggcg

SEQ ID NO: 504949 - DNA, 25 bp, Homo sapien
tctctgaggtgatgaaatttccctt

SEQ ID NO: 504950 - DNA, 25 bp, Homo sapien
atcgtctccacggttcccggctgca

SEQ ID NO: 504951 - DNA, 25 bp, Homo sapien
cgtagattgagatgacatcgtctcc

SEQ ID NO: 504952 - DNA, 25 bp, Homo sapien
caccgtgtgggttgggttatgtgaa

SEQ ID NO: 504953 - DNA, 25 bp, Homo sapien
tggtcaccgtgtgggttgggttatg

SEQ ID NO: 504954 - DNA, 25 bp, Homo sapien
tatgtgaagattggcatgtcagggt

SEQ ID NO: 504955 - DNA, 25 bp, Homo sapien
tgggttatgtgaagattggcatgtc

SEQ ID NO: 504956 - DNA, 25 bp, Homo sapien
tagacgaggctacgtagctcatcag

SEQ ID NO: 504957 - DNA, 25 bp, Homo sapien
acgaggctacgtagctcatcagcta

SEQ ID NO: 504958 - DNA, 25 bp, Homo sapien
gacgaggctacgtagctcatcagct

SEQ ID NO: 504959 - DNA, 25 bp, Homo sapien
ctagacgaggctacgtagctcatca

SEQ ID NO: 504960 - DNA, 25 bp, Homo sapien
tcagagcctgcggtcatttgatggg

SEQ ID NO: 504961 - DNA, 25 bp, Homo sapien
ttgtgtccagcaacagaacgggctg

SEQ ID NO: 504962 - DNA, 25 bp, Homo sapien
tgtactctgcattggctcaaaggag

SEQ ID NO: 504963 - DNA, 25 bp, Homo sapien
gaacgggctgcatatgacactggca

SEQ ID NO: 504964 - DNA, 25 bp, Homo sapien
tctgcactttggtcgctggaggaca

SEQ ID NO: 504965 - DNA, 25 bp, Homo sapien
gggtctatggcacatccacacgcaa

SEQ ID NO: 504966 - DNA, 25 bp, Homo sapien
ggtgctgggaacacatccttgtctt

SEQ ID NO: 504967 - DNA, 25 bp, Homo sapien
tgggagaattgcctcgctggcttca

SEQ ID NO: 504968 - DNA, 25 bp, Homo sapien
cttagtgcctacgtgcaaggaggag

SEQ ID NO: 504969 - DNA, 25 bp, Homo sapien
caatgccagtgacaataagctttgc

SEQ ID NO: 504970 - DNA, 25 bp, Homo sapien
tgaggggaccacttaaatgcaacac

SEQ ID NO: 504971 - DNA, 25 bp, Homo sapien
gctttgcagacttagtgcctacgtg

SEQ ID NO: 504972 - DNA, 25 bp, Homo sapien
tttttgtaacctgagatcccacagc

SEQ ID NO: 504973 - DNA, 25 bp, Homo sapien
tctgtttttgtaacctgagatccca

SEQ ID NO: 504974 - DNA, 25 bp, Homo sapien
gagatcccacagcaagatcttccat

SEQ ID NO: 504975 - DNA, 25 bp, Homo sapien
tgactctctgtttttgtaacctgag

SEQ ID NO: 504976 - DNA, 25 bp, Homo sapien
ctggtatgactaacttctttccatt

SEQ ID NO: 504977 - DNA, 25 bp, Homo sapien
tgccctgaacctccataccttcctg

SEQ ID NO: 504978 - DNA, 25 bp, Homo sapien
atgtgctccacgtccttgcctggtg

SEQ ID NO: 504979 - DNA, 25 bp, Homo sapien
tggtgaatgggggaaggaatcatgc

SEQ ID NO: 504980 - DNA, 25 bp, Homo sapien
tgcagacccagctttctgctcgcag

SEQ ID NO: 504981 - DNA, 25 bp, Homo sapien
gaagtcacatggcacaggatgccgt

SEQ ID NO: 504982 - DNA, 25 bp, Homo sapien
cacaggctgcttggctctattctca

SEQ ID NO: 504983 - DNA, 25 bp, Homo sapien
aggatgccgtgaaactgccccagag

SEQ ID NO: 504984 - DNA, 25 bp, Homo sapien
tctattctcactgccctttgtttcc

SEQ ID NO: 504985 - DNA, 25 bp, Homo sapien
ttcatgggaagactccctaaggccc

SEQ ID NO: 504986 - DNA, 25 bp, Homo sapien
catgggaagactccctaaggcccag

SEQ ID NO: 504987 - DNA, 25 bp, Homo sapien
atgggaagactccctaaggcccaga

SEQ ID NO: 504988 - DNA, 25 bp, Homo sapien
tcatgggaagactccctaaggccca

SEQ ID NO: 504989 - DNA, 25 bp, Homo sapien
cacaagtgaccagaaacggttgaca

SEQ ID NO: 504990 - DNA, 25 bp, Homo sapien
cacacgttggtttggagttgcccct

SEQ ID NO: 504991 - DNA, 25 bp, Homo sapien
gactgcttagcaatccacaagtgac

SEQ ID NO: 504992 - DNA, 25 bp, Homo sapien
tggctgcagccttgtcacgtgaacg

SEQ ID NO: 504993 - DNA, 25 bp, Homo sapien
tttcttgttggggaacactccgatg

SEQ ID NO: 504994 - DNA, 25 bp, Homo sapien
gcccagcgctggtgatttcttgttg

SEQ ID NO: 504995 - DNA, 25 bp, Homo sapien
gaatgtcttcgcttcttgttcgtgt

SEQ ID NO: 504996 - DNA, 25 bp, Homo sapien
catgtgtttgggcaccgcgtgtgga

SEQ ID NO: 504997 - DNA, 25 bp, Homo sapien
ggaatactctgggttgaagcacttg

SEQ ID NO: 504998 - DNA, 25 bp, Homo sapien
agttgggcctcggtgaaacgccctg

SEQ ID NO: 504999 - DNA, 25 bp, Homo sapien
tgttttgatgacgtgtttcactggt

SEQ ID NO: 505000 - DNA, 25 bp, Homo sapien
catttgagccatcgacaggcacgag

SEQ ID NO: 505001 - DNA, 25 bp, Homo sapien
atgcttcccgttctctcttgtgccc

SEQ ID NO: 505002 - DNA, 25 bp, Homo sapien
ccagtgccacttctcccatgatgct

SEQ ID NO: 505003 - DNA, 25 bp, Homo sapien
acgactaaagtccaacgccagtgcc

SEQ ID NO: 505004 - DNA, 25 bp, Homo sapien
ggcagattttccatgacacgactaa

SEQ ID NO: 505005 - DNA, 25 bp, Homo sapien
agtcctcaccgcttcagaaagcttt

SEQ ID NO: 505006 - DNA, 25 bp, Homo sapien
aggagtccacagtcctcaccgcttc

SEQ ID NO: 505007 - DNA, 25 bp, Homo sapien
agaagctctagggcccacacaacac

SEQ ID NO: 505008 - DNA, 25 bp, Homo sapien
acactgacatgttgctgcctcttga

SEQ ID NO: 505009 - DNA, 25 bp, Homo sapien
tcagcatgaaggtttccagtgggtt

SEQ ID NO: 505010 - DNA, 25 bp, Homo sapien
gagtgagcaactgtcttcttcatag

SEQ ID NO: 505011 - DNA, 25 bp, Homo sapien
aacttacagaagtcctcagagtgtt

SEQ ID NO: 505012 - DNA, 25 bp, Homo sapien
aatactaagtctacttgatcgaaga

SEQ ID NO: 505013 - DNA, 25 bp, Homo sapien
acctttcgggaaatggctggcctca

SEQ ID NO: 505014 - DNA, 25 bp, Homo sapien
tcatcaggagggttgactaaacctg

SEQ ID NO: 505015 - DNA, 25 bp, Homo sapien
tgaccgtgtctcttgaacctttcgg

SEQ ID NO: 505016 - DNA, 25 bp, Homo sapien
tggttttagaatcaacagtcctagc

SEQ ID NO: 505017 - DNA, 25 bp, Homo sapien
caagaagagccacgtgggagtgcaa

SEQ ID NO: 505018 - DNA, 25 bp, Homo sapien
tcgcttctaaatgtgaacgctctgg

SEQ ID NO: 505019 - DNA, 25 bp, Homo sapien
catccagcacacgagggaaacaaga

SEQ ID NO: 505020 - DNA, 25 bp, Homo sapien
caattgccagccacgtcgcttctaa

SEQ ID NO: 505021 - DNA, 25 bp, Homo sapien
ccaggtgcctgtcctagcagaatcc

SEQ ID NO: 505022 - DNA, 25 bp, Homo sapien
gactgtgttgaaacaatgccagact

SEQ ID NO: 505023 - DNA, 25 bp, Homo sapien
gtcctagcagaatccaatatcacac

SEQ ID NO: 505024 - DNA, 25 bp, Homo sapien
tcatccacggtagactgtgttgaaa

SEQ ID NO: 505025 - DNA, 25 bp, Homo sapien
ctgctcacactttgatccactggct

SEQ ID NO: 505026 - DNA, 25 bp, Homo sapien
ctcacactttgatccactggctgga

SEQ ID NO: 505027 - DNA, 25 bp, Homo sapien
tgctcttctttgttcggaaaaccat

SEQ ID NO: 505028 - DNA, 25 bp, Homo sapien
cactttgatccactggctggaaagc

SEQ ID NO: 505029 - DNA, 25 bp, Homo sapien
gccgaggcggtcagtgaaattgcaa

SEQ ID NO: 505030 - DNA, 25 bp, Homo sapien
tgctcagtgcctcgagctggtgaac

SEQ ID NO: 505031 - DNA, 25 bp, Homo sapien
atatcttcaatggaacaactgcggg

SEQ ID NO: 505032 - DNA, 25 bp, Homo sapien
tttccccttgagtgaagccgaggcg

SEQ ID NO: 505033 - DNA, 25 bp, Homo sapien
ttctgaatgggacacccattgtata

SEQ ID NO: 505034 - DNA, 25 bp, Homo sapien
tctgaatgggacacccattgtatac

SEQ ID NO: 505035 - DNA, 25 bp, Homo sapien
cttctgaatgggacacccattgtat

SEQ ID NO: 505036 - DNA, 25 bp, Homo sapien
ctggttccacagtagacagcacaga

SEQ ID NO: 505037 - DNA, 25 bp, Homo sapien
cctaaaaccaccctggaagagtcag

SEQ ID NO: 505038 - DNA, 25 bp, Homo sapien
tcttcccaggagatgactggccttc

SEQ ID NO: 505039 - DNA, 25 bp, Homo sapien
cagaacacatctagattgggagaag

SEQ ID NO: 505040 - DNA, 25 bp, Homo sapien
tcatagggttccctgcaaggaatct

SEQ ID NO: 505041 - DNA, 25 bp, Homo sapien
cacaccggctgttttgactacttct

SEQ ID NO: 505042 - DNA, 25 bp, Homo sapien
catgcacaccggctgttttgactac

SEQ ID NO: 505043 - DNA, 25 bp, Homo sapien
tctggggggccgtgaccggcagaga

SEQ ID NO: 505044 - DNA, 25 bp, Homo sapien
ggccgtgaccggcagagatgcatgc

SEQ ID NO: 505045 - DNA, 25 bp, Homo sapien
tgcccctttacagttgcgaaagtgt

SEQ ID NO: 505046 - DNA, 25 bp, Homo sapien
cagttgcgaaagtgtctctgtgcaa

SEQ ID NO: 505047 - DNA, 25 bp, Homo sapien
tgctgcccctttacagttgcgaaag

SEQ ID NO: 505048 - DNA, 25 bp, Homo sapien
ctttacagttgcgaaagtgtctctg

SEQ ID NO: 505049 - DNA, 25 bp, Homo sapien
catccacaggagcttttgcattgaa

SEQ ID NO: 505050 - DNA, 25 bp, Homo sapien
ccatccacaggagcttttgcattga

SEQ ID NO: 505051 - DNA, 25 bp, Homo sapien
tccacaggagcttttgcattgaaga

SEQ ID NO: 505052 - DNA, 25 bp, Homo sapien
aggaacattattcatggcagcatgt

SEQ ID NO: 505053 - DNA, 25 bp, Homo sapien
tccttgggggtgaaaatacaggcca

SEQ ID NO: 505054 - DNA, 25 bp, Homo sapien
cagttccttgggggtgaaaatacag

SEQ ID NO: 505055 - DNA, 25 bp, Homo sapien
tgcacagaatgcatgaggaggtcat

SEQ ID NO: 505056 - DNA, 25 bp, Homo sapien
gacaaatcccgtttgcttgaaacac

SEQ ID NO: 505057 - DNA, 25 bp, Homo sapien
tctgagtgccagtattgcacagaat

SEQ ID NO: 505058 - DNA, 25 bp, Homo sapien
tcagtgcctcccagattatagcagc

SEQ ID NO: 505059 - DNA, 25 bp, Homo sapien
ctgagcttgaaggcaatgaaggtgt

SEQ ID NO: 505060 - DNA, 25 bp, Homo sapien
tgaaggtgtgctgactgttggccat

SEQ ID NO: 505061 - DNA, 25 bp, Homo sapien
atgaaggtgtgctgactgttggcca

SEQ ID NO: 505062 - DNA, 25 bp, Homo sapien
ctgctgagcttgaaggcaatgaagg

SEQ ID NO: 505063 - DNA, 25 bp, Homo sapien
tgtcttctcaacatgcaggaaccag

SEQ ID NO: 505064 - DNA, 25 bp, Homo sapien
tgacagttctgattctccatggaaa

SEQ ID NO: 505065 - DNA, 25 bp, Homo sapien
ttctcaacatgcaggaaccagggct

SEQ ID NO: 505066 - DNA, 25 bp, Homo sapien
tgtggttccaattcaccgtatcctg

SEQ ID NO: 505067 - DNA, 25 bp, Homo sapien
cgtgcatgtcttgcggaagctgtcc

SEQ ID NO: 505068 - DNA, 25 bp, Homo sapien
gggtgttcaccgtgcatgtcttgcg

SEQ ID NO: 505069 - DNA, 25 bp, Homo sapien
tcaccgtgcatgtcttgcggaagct

SEQ ID NO: 505070 - DNA, 25 bp, Homo sapien
atgtcttgcggaagctgtcccctct

SEQ ID NO: 505071 - DNA, 25 bp, Homo sapien
gacttaaaggaatgcgggcaaagga

SEQ ID NO: 505072 - DNA, 25 bp, Homo sapien
gccagtagggtgttgacttacctca

SEQ ID NO: 505073 - DNA, 25 bp, Homo sapien
gcaaaggatagtgggtcaaacccgc

SEQ ID NO: 505074 - DNA, 25 bp, Homo sapien
aattattagtgatagggccagtagg

SEQ ID NO: 505075 - DNA, 25 bp, Homo sapien
gaatgcccctgcttttccagtgtga

SEQ ID NO: 505076 - DNA, 25 bp, Homo sapien
cagtcctttgccacggccatattta

SEQ ID NO: 505077 - DNA, 25 bp, Homo sapien
tctcagactttatatggaatgcccc

SEQ ID NO: 505078 - DNA, 25 bp, Homo sapien
tggtccccactagtaatcatctcag

SEQ ID NO: 505079 - DNA, 25 bp, Homo sapien
tttcctcgatacgtctagaaatcct

SEQ ID NO: 505080 - DNA, 25 bp, Homo sapien
tcgatacgtctagaaatccttggca

SEQ ID NO: 505081 - DNA, 25 bp, Homo sapien
gaaatccttggcataatgggccaga

SEQ ID NO: 505082 - DNA, 25 bp, Homo sapien
ggcataatgggccagatgctctgtt

SEQ ID NO: 505083 - DNA, 25 bp, Homo sapien
gatcgaaggccatcaaccttggaga

SEQ ID NO: 505084 - DNA, 25 bp, Homo sapien
tggagactgctgagatcgaaggcca

SEQ ID NO: 505085 - DNA, 25 bp, Homo sapien
tctgtggctgtagcttgttactggc

SEQ ID NO: 505086 - DNA, 25 bp, Homo sapien
gttctgtggctgtagcttgttactg

SEQ ID NO: 505087 - DNA, 25 bp, Homo sapien
ggatgtacttaagccccatcaccgt

SEQ ID NO: 505088 - DNA, 25 bp, Homo sapien
ccatcaccgtgctctctgctactct

SEQ ID NO: 505089 - DNA, 25 bp, Homo sapien
tctgcgcaggatctgcggtgcagct

SEQ ID NO: 505090 - DNA, 25 bp, Homo sapien
tgctactctgcgcaggatctgcggt

SEQ ID NO: 505091 - DNA, 25 bp, Homo sapien
cgattttggactgcgccttctctgc

SEQ ID NO: 505092 - DNA, 25 bp, Homo sapien
cttgtcgattttggactgcgccttc

SEQ ID NO: 505093 - DNA, 25 bp, Homo sapien
ctctgctgctattatgagagctggc

SEQ ID NO: 505094 - DNA, 25 bp, Homo sapien
tgagagctggctttattctcagttc

SEQ ID NO: 505095 - DNA, 25 bp, Homo sapien
tgcagttctggctcctgaaatttgg

SEQ ID NO: 505096 - DNA, 25 bp, Homo sapien
gtgaataagtaaacagctgatgctg

SEQ ID NO: 505097 - DNA, 25 bp, Homo sapien
ctcttggtgacagcggacttgggct

SEQ ID NO: 505098 - DNA, 25 bp, Homo sapien
ccacaagtgcagttctggctcctga

SEQ ID NO: 505099 - DNA, 25 bp, Homo sapien
aagggagggatgatgccctggtggg

SEQ ID NO: 505100 - DNA, 25 bp, Homo sapien
gagggatgatgccctggtggggaag

SEQ ID NO: 505101 - DNA, 25 bp, Homo sapien
ggtaagggagggatgatgccctggt

SEQ ID NO: 505102 - DNA, 25 bp, Homo sapien
agggatgatgccctggtggggaagg

SEQ ID NO: 505103 - DNA, 25 bp, Homo sapien
ccacctcttcccctaggtcatcatc

SEQ ID NO: 505104 - DNA, 25 bp, Homo sapien
tgtaccaggtagagccacctcttcc

SEQ ID NO: 505105 - DNA, 25 bp, Homo sapien
cctcttcccctaggtcatcatccat

SEQ ID NO: 505106 - DNA, 25 bp, Homo sapien
ctgtaccaggtagagccacctcttc

SEQ ID NO: 505107 - DNA, 25 bp, Homo sapien
tcagacttagggacctaggccacgt

SEQ ID NO: 505108 - DNA, 25 bp, Homo sapien
tcatatatggtctgtgggctctgtg

SEQ ID NO: 505109 - DNA, 25 bp, Homo sapien
cactctggagggtgaatgcgttttc

SEQ ID NO: 505110 - DNA, 25 bp, Homo sapien
gcctaccttttttgagttcctgcag

SEQ ID NO: 505111 - DNA, 25 bp, Homo sapien
gcacacttggtgctcaaatatgaaa

SEQ ID NO: 505112 - DNA, 25 bp, Homo sapien
tattttcttctaacgctggctttcc

SEQ ID NO: 505113 - DNA, 25 bp, Homo sapien
taggtgtcccgctggtttatcttcc

SEQ ID NO: 505114 - DNA, 25 bp, Homo sapien
tactaaactgccacttaggtgtccc

SEQ ID NO: 505115 - DNA, 25 bp, Homo sapien
agtccactggcactgcgtctcctgg

SEQ ID NO: 505116 - DNA, 25 bp, Homo sapien
ttcttttaactcacatgcttgaaat

SEQ ID NO: 505117 - DNA, 25 bp, Homo sapien
ctgtgaaatccgagttgacaaggga

SEQ ID NO: 505118 - DNA, 25 bp, Homo sapien
tcaaagctatcacggagtccactgg

SEQ ID NO: 505119 - DNA, 25 bp, Homo sapien
tccttgtaatagtagcattccattg

SEQ ID NO: 505120 - DNA, 25 bp, Homo sapien
gcattccattgagggctatccaaaa

SEQ ID NO: 505121 - DNA, 25 bp, Homo sapien
cctatagaatcgaataatccttgta

SEQ ID NO: 505122 - DNA, 25 bp, Homo sapien
gctatccaaaaatcctttaggccta

SEQ ID NO: 505123 - DNA, 25 bp, Homo sapien
aggtgtcatggcagaacatctgctg

SEQ ID NO: 505124 - DNA, 25 bp, Homo sapien
ttctctcttactggcgctttttccc

SEQ ID NO: 505125 - DNA, 25 bp, Homo sapien
ttttcccacaagcttgggctttcca

SEQ ID NO: 505126 - DNA, 25 bp, Homo sapien
tttcccacaagcttgggctttccat

SEQ ID NO: 505127 - DNA, 25 bp, Homo sapien
tttgtgtctgaggatttagcaaagg

SEQ ID NO: 505128 - DNA, 25 bp, Homo sapien
ggcccctggtaatgtggccttagga

SEQ ID NO: 505129 - DNA, 25 bp, Homo sapien
ccctggtaatgtggccttaggatgc

SEQ ID NO: 505130 - DNA, 25 bp, Homo sapien
aaaggcctcagggtgagtttctgca

SEQ ID NO: 505131 - DNA, 25 bp, Homo sapien
tgtgagagtcgtttcagagccagtg

SEQ ID NO: 505132 - DNA, 25 bp, Homo sapien
gagccagtgcccctttaggtgagtg

SEQ ID NO: 505133 - DNA, 25 bp, Homo sapien
cagtgcccctttaggtgagtgcaca

SEQ ID NO: 505134 - DNA, 25 bp, Homo sapien
tgcaggatgatggagccgcacctgc

SEQ ID NO: 505135 - DNA, 25 bp, Homo sapien
ttctcctgaggcctagttctgcgtg

SEQ ID NO: 505136 - DNA, 25 bp, Homo sapien
aattaagatccagcacgacttttct

SEQ ID NO: 505137 - DNA, 25 bp, Homo sapien
tcctgaggcctagttctgcgtgcat

SEQ ID NO: 505138 - DNA, 25 bp, Homo sapien
gcacgacttttctcctgaggcctag

SEQ ID NO: 505139 - DNA, 25 bp, Homo sapien
ttgagaggtgcttctgggccgcctc

SEQ ID NO: 505140 - DNA, 25 bp, Homo sapien
tcagtgtcctccaggcacgatgcca

SEQ ID NO: 505141 - DNA, 25 bp, Homo sapien
ggccgcctctctaggatcttctgca

SEQ ID NO: 505142 - DNA, 25 bp, Homo sapien
cagaagccttaaagcactgcctggc

SEQ ID NO: 505143 - DNA, 25 bp, Homo sapien
atttctcccttggttcactcgtttg

SEQ ID NO: 505144 - DNA, 25 bp, Homo sapien
ttggttcactcgtttgtctgcttcc

SEQ ID NO: 505145 - DNA, 25 bp, Homo sapien
ggttcactcgtttgtctgcttccaa

SEQ ID NO: 505146 - DNA, 25 bp, Homo sapien
tcccttggttcactcgtttgtctgc

SEQ ID NO: 505147 - DNA, 25 bp, Homo sapien
caaacattgatactagggcacctcc

SEQ ID NO: 505148 - DNA, 25 bp, Homo sapien
tgtctggtgtatgcaagcttggccc

SEQ ID NO: 505149 - DNA, 25 bp, Homo sapien
gcacctcctgtgcaacactgtcaaa

SEQ ID NO: 505150 - DNA, 25 bp, Homo sapien
gggtccgttcctgaatgaggtctaa

SEQ ID NO: 505151 - DNA, 25 bp, Homo sapien
caggttatgcagaggacatgggctt

SEQ ID NO: 505152 - DNA, 25 bp, Homo sapien
tcttccctcgtctcaaaccacaggc

SEQ ID NO: 505153 - DNA, 25 bp, Homo sapien
tcatcactgatgccatcgagctcct

SEQ ID NO: 505154 - DNA, 25 bp, Homo sapien
cgagctcctcatgggtagacaggac

SEQ ID NO: 505155 - DNA, 25 bp, Homo sapien
cagagctgagatcaatttagcacca

SEQ ID NO: 505156 - DNA, 25 bp, Homo sapien
ctgagatcaatttagcaccatatgg

SEQ ID NO: 505157 - DNA, 25 bp, Homo sapien
aactcagagctgagatcaatttagc

SEQ ID NO: 505158 - DNA, 25 bp, Homo sapien
gttccactcttttcctcaatccaca

SEQ ID NO: 505159 - DNA, 25 bp, Homo sapien
aaattgttcgtttatgcttcttcac

SEQ ID NO: 505160 - DNA, 25 bp, Homo sapien
atcttctgtgtcgtaggaggtggcc

SEQ ID NO: 505161 - DNA, 25 bp, Homo sapien
ggatcttctgtgtcgtaggaggtgg

SEQ ID NO: 505162 - DNA, 25 bp, Homo sapien
tagaatggacgatgagtcaaaattg

SEQ ID NO: 505163 - DNA, 25 bp, Homo sapien
tggccagtgattgcatcagtaccag

SEQ ID NO: 505164 - DNA, 25 bp, Homo sapien
taccagggttctaggagccatgcag

SEQ ID NO: 505165 - DNA, 25 bp, Homo sapien
gcagagctggccgtagcatttggaa

SEQ ID NO: 505166 - DNA, 25 bp, Homo sapien
tttccatttgggccacttggccagt

SEQ ID NO: 505167 - DNA, 25 bp, Homo sapien
ccaggcatcaagtgcaaatccaaag

SEQ ID NO: 505168 - DNA, 25 bp, Homo sapien
tgcagagccagaagcgatgacgcat

SEQ ID NO: 505169 - DNA, 25 bp, Homo sapien
tcaagtgcaaatccaaaggctctgg

SEQ ID NO: 505170 - DNA, 25 bp, Homo sapien
ccaaggttgtgtttgacttctgcac

SEQ ID NO: 505171 - DNA, 25 bp, Homo sapien
ccaaattcggaaatatgcctcagga

SEQ ID NO: 505172 - DNA, 25 bp, Homo sapien
gccctcttaacaacggtctgatgga

SEQ ID NO: 505173 - DNA, 25 bp, Homo sapien
tagggtctcattcacaatatggagg

SEQ ID NO: 505174 - DNA, 25 bp, Homo sapien
gagagtctagccacgtgttctggcc

SEQ ID NO: 505175 - DNA, 25 bp, Homo sapien
tggagtcaagacctgcatgcatgac

SEQ ID NO: 505176 - DNA, 25 bp, Homo sapien
taatgcattcccaggtttcccgaca

SEQ ID NO: 505177 - DNA, 25 bp, Homo sapien
tggcacatttgtaggctgataacag

SEQ ID NO: 505178 - DNA, 25 bp, Homo sapien
cttcacaaaggtaatatgatggcac

SEQ ID NO: 505179 - DNA, 25 bp, Homo sapien
gccagcagagtttgaaggaggtcat

SEQ ID NO: 505180 - DNA, 25 bp, Homo sapien
catttacgtgaagatcctgggaatc

SEQ ID NO: 505181 - DNA, 25 bp, Homo sapien
tgggaatcttgaagtccacctccag

SEQ ID NO: 505182 - DNA, 25 bp, Homo sapien
ctttgtcccagcctaaccaagggca

SEQ ID NO: 505183 - DNA, 25 bp, Homo sapien
aagaaacatccctggtgtcacagag

SEQ ID NO: 505184 - DNA, 25 bp, Homo sapien
tgtgtccagttcaccttgtctgagt

SEQ ID NO: 505185 - DNA, 25 bp, Homo sapien
cagaaagagggctccctgtggagtt

SEQ ID NO: 505186 - DNA, 25 bp, Homo sapien
ccctgtggagttattggaagaaaca

SEQ ID NO: 505187 - DNA, 25 bp, Homo sapien
tgctacttcacactctgctacagca

SEQ ID NO: 505188 - DNA, 25 bp, Homo sapien
taattctcgttttgccagagaagaa

SEQ ID NO: 505189 - DNA, 25 bp, Homo sapien
tcgggaaggacaggtagagcccatc

SEQ ID NO: 505190 - DNA, 25 bp, Homo sapien
gtctccttcccatactagacttggg

SEQ ID NO: 505191 - DNA, 25 bp, Homo sapien
tgcctgactcaattttgttctcttc

SEQ ID NO: 505192 - DNA, 25 bp, Homo sapien
ttgcctgactcaattttgttctctt

SEQ ID NO: 505193 - DNA, 25 bp, Homo sapien
cagattgcctgactcaattttgttc

SEQ ID NO: 505194 - DNA, 25 bp, Homo sapien
gattgcctgactcaattttgttctc

SEQ ID NO: 505195 - DNA, 25 bp, Homo sapien
gccaggcctggacgttcaacggcca

SEQ ID NO: 505196 - DNA, 25 bp, Homo sapien
ggctccataaagatgcgtgatggca

SEQ ID NO: 505197 - DNA, 25 bp, Homo sapien
gaatgtaaggtctctgtggaagcct

SEQ ID NO: 505198 - DNA, 25 bp, Homo sapien
ggccatccggcttgctgagtacttg

SEQ ID NO: 505199 - DNA, 25 bp, Homo sapien
cttctaagtagtttcctgtataaat

SEQ ID NO: 505200 - DNA, 25 bp, Homo sapien
agaagggcattaagtttcaaaagag

SEQ ID NO: 505201 - DNA, 25 bp, Homo sapien
gagaagggcattaagtttcaaaaga

SEQ ID NO: 505202 - DNA, 25 bp, Homo sapien
agagaagggcattaagtttcaaaag

SEQ ID NO: 505203 - DNA, 25 bp, Homo sapien
gagcaggtaaggagatctcccactt

SEQ ID NO: 505204 - DNA, 25 bp, Homo sapien
gaagtgtgacatgaaacccaagggt

SEQ ID NO: 505205 - DNA, 25 bp, Homo sapien
tgttgctgggtcttcaattaacctc

SEQ ID NO: 505206 - DNA, 25 bp, Homo sapien
cctcaaagtttgtatccgtagaaga

SEQ ID NO: 505207 - DNA, 25 bp, Homo sapien
ataagttatcatgtaaagcggacat

SEQ ID NO: 505208 - DNA, 25 bp, Homo sapien
aataagttatcatgtaaagcggaca

SEQ ID NO: 505209 - DNA, 25 bp, Homo sapien
tgaataagttatcatgtaaagcgga

SEQ ID NO: 505210 - DNA, 25 bp, Homo sapien
gaataagttatcatgtaaagcggac

SEQ ID NO: 505211 - DNA, 25 bp, Homo sapien
atgcaaaattgctcaaacagcagtg

SEQ ID NO: 505212 - DNA, 25 bp, Homo sapien
tcagcaatggtgacttcgaagtcat

SEQ ID NO: 505213 - DNA, 25 bp, Homo sapien
tgttccattaacatgatataagtgc

SEQ ID NO: 505214 - DNA, 25 bp, Homo sapien
tgctctctgtaccttcagaatggga

SEQ ID NO: 505215 - DNA, 25 bp, Homo sapien
taaaggcctactagcaattttgctt

SEQ ID NO: 505216 - DNA, 25 bp, Homo sapien
taagttacacctgcatcgacctgct

SEQ ID NO: 505217 - DNA, 25 bp, Homo sapien
ggaggaaaatagatacctggcctct

SEQ ID NO: 505218 - DNA, 25 bp, Homo sapien
taatggtctgtctgctaagttacac

SEQ ID NO: 505219 - DNA, 25 bp, Homo sapien
ataacaaaaaccatagtgctgcatg

SEQ ID NO: 505220 - DNA, 25 bp, Homo sapien
accagaaaccagacccatttcccat

SEQ ID NO: 505221 - DNA, 25 bp, Homo sapien
acagaatccaaagaaagagttgaat

SEQ ID NO: 505222 - DNA, 25 bp, Homo sapien
ggacagaatccaaagaaagagttga

SEQ ID NO: 505223 - DNA, 25 bp, Homo sapien
agaatccaaagaaagagttgaatac

SEQ ID NO: 505224 - DNA, 25 bp, Homo sapien
tcaggacagaatccaaagaaagagt

SEQ ID NO: 505225 - DNA, 25 bp, Homo sapien
tacaaaaagagtgaccataaggacc

SEQ ID NO: 505226 - DNA, 25 bp, Homo sapien
ccagacttggatcagtatgactggg

SEQ ID NO: 505227 - DNA, 25 bp, Homo sapien
cactgtattgaaggccgatgtccaa

SEQ ID NO: 505228 - DNA, 25 bp, Homo sapien
gatgtccaattatcttcagccagac

SEQ ID NO: 505229 - DNA, 25 bp, Homo sapien
gagaatcaatgccaagcctccatgg

SEQ ID NO: 505230 - DNA, 25 bp, Homo sapien
tccatggatccacaaaaacctgtcc

SEQ ID NO: 505231 - DNA, 25 bp, Homo sapien
caggagtctgattatagtcaacaga

SEQ ID NO: 505232 - DNA, 25 bp, Homo sapien
tctgattatagtcaacagagaatca

SEQ ID NO: 505233 - DNA, 25 bp, Homo sapien
tctgcacaagataaatctttggctc

SEQ ID NO: 505234 - DNA, 25 bp, Homo sapien
tggctctctggagtgtttgatctga

SEQ ID NO: 505235 - DNA, 25 bp, Homo sapien
ggctctctggagtgtttgatctgac

SEQ ID NO: 505236 - DNA, 25 bp, Homo sapien
ttttctgcacaagataaatctttgg

SEQ ID NO: 505237 - DNA, 25 bp, Homo sapien
catataacccggagaacttgaaggt

SEQ ID NO: 505238 - DNA, 25 bp, Homo sapien
ccatataacccggagaacttgaagg

SEQ ID NO: 505239 - DNA, 25 bp, Homo sapien
gttgtaattcatacgtgcacactga

SEQ ID NO: 505240 - DNA, 25 bp, Homo sapien
gtggttgtaattcatacgtgcacac

SEQ ID NO: 505241 - DNA, 25 bp, Homo sapien
aagtggttgtaattcatacgtgcac

SEQ ID NO: 505242 - DNA, 25 bp, Homo sapien
caaagtggttgtaattcatacgtgc

SEQ ID NO: 505243 - DNA, 25 bp, Homo sapien
ggtttctgatctaagacgatctgac

SEQ ID NO: 505244 - DNA, 25 bp, Homo sapien
cagtagctcagtagcatctttgtgt

SEQ ID NO: 505245 - DNA, 25 bp, Homo sapien
taaaacagctcagtagctcagtagc

SEQ ID NO: 505246 - DNA, 25 bp, Homo sapien
tctaagacgatctgacgtgtgcttt

SEQ ID NO: 505247 - DNA, 25 bp, Homo sapien
ctgtctgttgaagtgggaaacagag

SEQ ID NO: 505248 - DNA, 25 bp, Homo sapien
gaaacagaggtgagctcatggggaa

SEQ ID NO: 505249 - DNA, 25 bp, Homo sapien
gggaaacagaggtgagctcatgggg

SEQ ID NO: 505250 - DNA, 25 bp, Homo sapien
agtgggaaacagaggtgagctcatg

SEQ ID NO: 505251 - DNA, 25 bp, Homo sapien
gcaagccaacaatccagcgagtcat

SEQ ID NO: 505252 - DNA, 25 bp, Homo sapien
agttggctagttggactggataacc

SEQ ID NO: 505253 - DNA, 25 bp, Homo sapien
caaagagatattcaaaaactcaaca

SEQ ID NO: 505254 - DNA, 25 bp, Homo sapien
gttttccccagcttgcaagccaaca

SEQ ID NO: 505255 - DNA, 25 bp, Homo sapien
tatttgtaaatcctgtgccaatggt

SEQ ID NO: 505256 - DNA, 25 bp, Homo sapien
cattatttgtaaatcctgtgccaat

SEQ ID NO: 505257 - DNA, 25 bp, Homo sapien
aatcctgtgccaatggttcatttgt

SEQ ID NO: 505258 - DNA, 25 bp, Homo sapien
tgtaaatcctgtgccaatggttcat

SEQ ID NO: 505259 - DNA, 25 bp, Homo sapien
gggattgagaataaaagtgtcataa

SEQ ID NO: 505260 - DNA, 25 bp, Homo sapien
cactcagacatgttgctgtagcaag

SEQ ID NO: 505261 - DNA, 25 bp, Homo sapien
cagataactcaaatggccactcaga

SEQ ID NO: 505262 - DNA, 25 bp, Homo sapien
aaatcaaacgtctgaggtttgggat

SEQ ID NO: 505263 - DNA, 25 bp, Homo sapien
gtttaacatcattagtcctcaggga

SEQ ID NO: 505264 - DNA, 25 bp, Homo sapien
aaacatgagcagaattgaccctgga

SEQ ID NO: 505265 - DNA, 25 bp, Homo sapien
cttacaagtcaacaacagacagata

SEQ ID NO: 505266 - DNA, 25 bp, Homo sapien
tgcaaattgccataggcacataaaa

SEQ ID NO: 505267 - DNA, 25 bp, Homo sapien
cataggcaaatgcttcataatttcc

SEQ ID NO: 505268 - DNA, 25 bp, Homo sapien
caaagcaaagggcggaaatagatga

SEQ ID NO: 505269 - DNA, 25 bp, Homo sapien
agcaaagggcggaaatagatgagat

SEQ ID NO: 505270 - DNA, 25 bp, Homo sapien
aaagcaaagggcggaaatagatgag

SEQ ID NO: 505271 - DNA, 25 bp, Homo sapien
aagcaaagggcggaaatagatgaga

SEQ ID NO: 505272 - DNA, 25 bp, Homo sapien
gatagacgccaaaatccttgacaac

SEQ ID NO: 505273 - DNA, 25 bp, Homo sapien
tttcagagatgccattgaaaggtcg

SEQ ID NO: 505274 - DNA, 25 bp, Homo sapien
tgaaaggtcgcatgaccacagccac

SEQ ID NO: 505275 - DNA, 25 bp, Homo sapien
gaagataagagaagatagacgccaa

SEQ ID NO: 505276 - DNA, 25 bp, Homo sapien
gctccacctccaccagtactctccc

SEQ ID NO: 505277 - DNA, 25 bp, Homo sapien
tgagagaaatcttgcgatgtagatt

SEQ ID NO: 505278 - DNA, 25 bp, Homo sapien
ctctctggtctcttgagagaaatct

SEQ ID NO: 505279 - DNA, 25 bp, Homo sapien
ctccaccagtactctcccttcatta

SEQ ID NO: 505280 - DNA, 25 bp, Homo sapien
gcttaaattcgattgtcccttgacc

SEQ ID NO: 505281 - DNA, 25 bp, Homo sapien
taaattcgattgtcccttgaccatt

SEQ ID NO: 505282 - DNA, 25 bp, Homo sapien
tcgattgtcccttgaccatttctca

SEQ ID NO: 505283 - DNA, 25 bp, Homo sapien
cagcttaaattcgattgtcccttga

SEQ ID NO: 505284 - DNA, 25 bp, Homo sapien
acaagctgccggctgccatgggagc

SEQ ID NO: 505285 - DNA, 25 bp, Homo sapien
gccggctgccatgggagctcagcca

SEQ ID NO: 505286 - DNA, 25 bp, Homo sapien
caacacaagctgccggctgccatgg

SEQ ID NO: 505287 - DNA, 25 bp, Homo sapien
acacaagctgccggctgccatggga

SEQ ID NO: 505288 - DNA, 25 bp, Homo sapien
tttcgggtgtagatggcctcctctt

SEQ ID NO: 505289 - DNA, 25 bp, Homo sapien
ccccagctggtttcgggtgtagatg

SEQ ID NO: 505290 - DNA, 25 bp, Homo sapien
ttgcaataacaggtctgcagacttc

SEQ ID NO: 505291 - DNA, 25 bp, Homo sapien
cacagcagtgggaacatatgcgaca

SEQ ID NO: 505292 - DNA, 25 bp, Homo sapien
tgagccaagcttcacaatacagcag

SEQ ID NO: 505293 - DNA, 25 bp, Homo sapien
gatttttccaattgaatgagccaag

SEQ ID NO: 505294 - DNA, 25 bp, Homo sapien
gagacaagattttacagctatgtca

SEQ ID NO: 505295 - DNA, 25 bp, Homo sapien
taaaacatatctgagtaaaaacaca

SEQ ID NO: 505296 - DNA, 25 bp, Homo sapien
gaactcaatttctgtggcatactca

SEQ ID NO: 505297 - DNA, 25 bp, Homo sapien
tcttaagttacatgcactcccagtg

SEQ ID NO: 505298 - DNA, 25 bp, Homo sapien
gcattaaacacgttcctaggttgga

SEQ ID NO: 505299 - DNA, 25 bp, Homo sapien
gagctccctcctggtcacaaggaac

SEQ ID NO: 505300 - DNA, 25 bp, Homo sapien
aagaagagtgtgaactctgaatatg

SEQ ID NO: 505301 - DNA, 25 bp, Homo sapien
tttgctatgggcaggagcaactgtg

SEQ ID NO: 505302 - DNA, 25 bp, Homo sapien
tcattttgctatgggcaggagcaac

SEQ ID NO: 505303 - DNA, 25 bp, Homo sapien
aggagcaactgtgtaagaagagtgt

SEQ ID NO: 505304 - DNA, 25 bp, Homo sapien
cggtgtgcacgcatctcagcacagt

SEQ ID NO: 505305 - DNA, 25 bp, Homo sapien
tcggtgtgcacgcatctcagcacag

SEQ ID NO: 505306 - DNA, 25 bp, Homo sapien
cctggaagacttctgtcccaggtct

SEQ ID NO: 505307 - DNA, 25 bp, Homo sapien
gacttctgtcccaggtctaaagaga

SEQ ID NO: 505308 - DNA, 25 bp, Homo sapien
aagtcagcaaaacacgtcaggttca

SEQ ID NO: 505309 - DNA, 25 bp, Homo sapien
aacacgtcaggttcagcattccaga

SEQ ID NO: 505310 - DNA, 25 bp, Homo sapien
gcaaaacacgtcaggttcagcattc

SEQ ID NO: 505311 - DNA, 25 bp, Homo sapien
tcagcaaaacacgtcaggttcagca

SEQ ID NO: 505312 - DNA, 25 bp, Homo sapien
caggcacatgacttgtgaacaaagg

SEQ ID NO: 505313 - DNA, 25 bp, Homo sapien
gcacaggcacatgacttgtgaacaa

SEQ ID NO: 505314 - DNA, 25 bp, Homo sapien
catgatagtaataagacagtacagg

SEQ ID NO: 505315 - DNA, 25 bp, Homo sapien
gtgcctgttcggcctgttcatgcac

SEQ ID NO: 505316 - DNA, 25 bp, Homo sapien
tagaagcctgttctcttcgaaaagg

SEQ ID NO: 505317 - DNA, 25 bp, Homo sapien
caatgtctacatgggcttagaagcc

SEQ ID NO: 505318 - DNA, 25 bp, Homo sapien
tgctgtatagtagcctgtacctcag

SEQ ID NO: 505319 - DNA, 25 bp, Homo sapien
cattattagacttcacagatggaca

SEQ ID NO: 505320 - DNA, 25 bp, Homo sapien
ctcagcccggacttggtactctgtc

SEQ ID NO: 505321 - DNA, 25 bp, Homo sapien
actctgtcatattgtctgcgggaca

SEQ ID NO: 505322 - DNA, 25 bp, Homo sapien
gcccggacttggtactctgtcatat

SEQ ID NO: 505323 - DNA, 25 bp, Homo sapien
cttggtactctgtcatattgtctgc

SEQ ID NO: 505324 - DNA, 25 bp, Homo sapien
gatccactgatacccattttccaag

SEQ ID NO: 505325 - DNA, 25 bp, Homo sapien
ccgtgccaggcatttgatccactga

SEQ ID NO: 505326 - DNA, 25 bp, Homo sapien
tgaggtgctgacagcaaagcccgtg

SEQ ID NO: 505327 - DNA, 25 bp, Homo sapien
tgctgtggccaactttcaaataagg

SEQ ID NO: 505328 - DNA, 25 bp, Homo sapien
gaagaatagggtctagaaacaggaa

SEQ ID NO: 505329 - DNA, 25 bp, Homo sapien
gaggcagaagaatagggtctagaaa

SEQ ID NO: 505330 - DNA, 25 bp, Homo sapien
caatcaaggaaccaaacttgaggca

SEQ ID NO: 505331 - DNA, 25 bp, Homo sapien
ggcaggtgttacaatcaaggaacca

SEQ ID NO: 505332 - DNA, 25 bp, Homo sapien
cggctatggggaaattagcctgagg

SEQ ID NO: 505333 - DNA, 25 bp, Homo sapien
tggtacaaatcaaagaatttaagtg

SEQ ID NO: 505334 - DNA, 25 bp, Homo sapien
aatcaaagaatttaagtggatgttt

SEQ ID NO: 505335 - DNA, 25 bp, Homo sapien
ccagggaagtcaccccacggctatg

SEQ ID NO: 505336 - DNA, 25 bp, Homo sapien
cgcaagttggtcacttgatcaccca

SEQ ID NO: 505337 - DNA, 25 bp, Homo sapien
tcttgcgcaagttggtcacttgatc

SEQ ID NO: 505338 - DNA, 25 bp, Homo sapien
caggatgtgcttgtcaaaaagatat

SEQ ID NO: 505339 - DNA, 25 bp, Homo sapien
cccaggatgtgcttgtcaaaaagat

SEQ ID NO: 505340 - DNA, 25 bp, Homo sapien
acactccgtcgcattcagcctgctc

SEQ ID NO: 505341 - DNA, 25 bp, Homo sapien
tgtaatgcacactccgtcgcattca

SEQ ID NO: 505342 - DNA, 25 bp, Homo sapien
tgcacactccgtcgcattcagcctg

SEQ ID NO: 505343 - DNA, 25 bp, Homo sapien
gtaatgcacactccgtcgcattcag

SEQ ID NO: 505344 - DNA, 25 bp, Homo sapien
gtgaagaaagtatttggcaaagttc

SEQ ID NO: 505345 - DNA, 25 bp, Homo sapien
ctccatcagtttctcagcatgttcc

SEQ ID NO: 505346 - DNA, 25 bp, Homo sapien
ccatcagtttctcagcatgttccct

SEQ ID NO: 505347 - DNA, 25 bp, Homo sapien
tagttggttctgcagctccatcagt

SEQ ID NO: 505348 - DNA, 25 bp, Homo sapien
gtaaacgtaggaggcgtagagctcc

SEQ ID NO: 505349 - DNA, 25 bp, Homo sapien
tctggcggtttatggcggcctctga

SEQ ID NO: 505350 - DNA, 25 bp, Homo sapien
tggacaggtaaacgtaggaggcgta

SEQ ID NO: 505351 - DNA, 25 bp, Homo sapien
ttgatctggcggtttatggcggcct

SEQ ID NO: 505352 - DNA, 25 bp, Homo sapien
ctatggacggccggcccgggtgcgg

SEQ ID NO: 505353 - DNA, 25 bp, Homo sapien
gctatggacggccggcccgggtgcg

SEQ ID NO: 505354 - DNA, 25 bp, Homo sapien
tgtccgagtcttcaggcatgccata

SEQ ID NO: 505355 - DNA, 25 bp, Homo sapien
gacgctgctcaccatatgtggagat

SEQ ID NO: 505356 - DNA, 25 bp, Homo sapien
tctgtcacattaacgtcaaactggt

SEQ ID NO: 505357 - DNA, 25 bp, Homo sapien
gatggccaggtctttagtgccaaag

SEQ ID NO: 505358 - DNA, 25 bp, Homo sapien
ctgctggaaatccttggactgctaa

SEQ ID NO: 505359 - DNA, 25 bp, Homo sapien
gacatgcagggctgtaccggcttga

SEQ ID NO: 505360 - DNA, 25 bp, Homo sapien
actgctaatagcgtgacaggcattc

SEQ ID NO: 505361 - DNA, 25 bp, Homo sapien
gaagattgccacctgtttaaattcc

SEQ ID NO: 505362 - DNA, 25 bp, Homo sapien
agggtggcactgaacatgattcact

SEQ ID NO: 505363 - DNA, 25 bp, Homo sapien
ttcactgcttctgctggaatatcag

SEQ ID NO: 505364 - DNA, 25 bp, Homo sapien
gctggaatatcaggtgggaggcctc

SEQ ID NO: 505365 - DNA, 25 bp, Homo sapien
actgaacatgattcactgcttctgc

SEQ ID NO: 505366 - DNA, 25 bp, Homo sapien
ggcatctacttggagaagtgctcat

SEQ ID NO: 505367 - DNA, 25 bp, Homo sapien
gacacaaggacagttcatcaacaat

SEQ ID NO: 505368 - DNA, 25 bp, Homo sapien
gaaaaacacggacaccttgacactg

SEQ ID NO: 505369 - DNA, 25 bp, Homo sapien
ggctcctgttctgcacaagtgccac

SEQ ID NO: 505370 - DNA, 25 bp, Homo sapien
gggtggcctgaagaatgcactcatg

SEQ ID NO: 505371 - DNA, 25 bp, Homo sapien
tggcactggatgtccatacccaggg

SEQ ID NO: 505372 - DNA, 25 bp, Homo sapien
tgtcagttgacaggccggatctgct

SEQ ID NO: 505373 - DNA, 25 bp, Homo sapien
ccttcccagatttggcttggcactg

SEQ ID NO: 505374 - DNA, 25 bp, Homo sapien
tgacatctttcttacggggaaccag

SEQ ID NO: 505375 - DNA, 25 bp, Homo sapien
ccctggagacgcctagggctcttct

SEQ ID NO: 505376 - DNA, 25 bp, Homo sapien
tcttacggggaaccagagtgctccc

SEQ ID NO: 505377 - DNA, 25 bp, Homo sapien
cctagggctcttcttcataatccaa

SEQ ID NO: 505378 - DNA, 25 bp, Homo sapien
cagttgtatatatctgccccagaag

SEQ ID NO: 505379 - DNA, 25 bp, Homo sapien
tgtcttctgaaggtccgggtctcct

SEQ ID NO: 505380 - DNA, 25 bp, Homo sapien
gggtctcctgctctgagttagctgt

SEQ ID NO: 505381 - DNA, 25 bp, Homo sapien
tactgcatagcgatcagtcactgtg

SEQ ID NO: 505382 - DNA, 25 bp, Homo sapien
caggacggagtaggaatgtgttaaa

SEQ ID NO: 505383 - DNA, 25 bp, Homo sapien
gcttggatttattctaccttgcagg

SEQ ID NO: 505384 - DNA, 25 bp, Homo sapien
cacagagtcgtttatcatgtatgga

SEQ ID NO: 505385 - DNA, 25 bp, Homo sapien
gtgttaaatcttccttgtgcttaga

SEQ ID NO: 505386 - DNA, 25 bp, Homo sapien
tggcaagagggactaaatattctgg

SEQ ID NO: 505387 - DNA, 25 bp, Homo sapien
ggcaagagggactaaatattctgga

SEQ ID NO: 505388 - DNA, 25 bp, Homo sapien
gatggcaagagggactaaatattct

SEQ ID NO: 505389 - DNA, 25 bp, Homo sapien
gcaagagggactaaatattctggac

SEQ ID NO: 505390 - DNA, 25 bp, Homo sapien
tgcaaaacggcgttctgaacaggga

SEQ ID NO: 505391 - DNA, 25 bp, Homo sapien
tctgaacagggaaggcatgcgtgct

SEQ ID NO: 505392 - DNA, 25 bp, Homo sapien
catatgggcgctcccgctgatgcaa

SEQ ID NO: 505393 - DNA, 25 bp, Homo sapien
gctcccgctgatgcaaaacggcgtt

SEQ ID NO: 505394 - DNA, 25 bp, Homo sapien
atccacgccagtctgtgacaaaaag

SEQ ID NO: 505395 - DNA, 25 bp, Homo sapien
cagatgcgcgttccgtgggtcgaat

SEQ ID NO: 505396 - DNA, 25 bp, Homo sapien
gcctccttcagatgcgcgttccgtg

SEQ ID NO: 505397 - DNA, 25 bp, Homo sapien
cgttccgtgggtcgaatccacgcca

SEQ ID NO: 505398 - DNA, 25 bp, Homo sapien
gagagaaactcaggcatccaggtgt

SEQ ID NO: 505399 - DNA, 25 bp, Homo sapien
ggtgactccgccaagcattctgcag

SEQ ID NO: 505400 - DNA, 25 bp, Homo sapien
gagtggctccttgggcaaatcgcag

SEQ ID NO: 505401 - DNA, 25 bp, Homo sapien
tggagtaatgactgggctccgcgcc

SEQ ID NO: 505402 - DNA, 25 bp, Homo sapien
tggtgtccgctatcggcgcggtggc

SEQ ID NO: 505403 - DNA, 25 bp, Homo sapien
ctgcctggtgtccgctatcggcgcg

SEQ ID NO: 505404 - DNA, 25 bp, Homo sapien
gcctggtgtccgctatcggcgcggt

SEQ ID NO: 505405 - DNA, 25 bp, Homo sapien
aagagcagatcctgcctggtgtccg

SEQ ID NO: 505406 - DNA, 25 bp, Homo sapien
gtctaaaatacttcgaagtacagaa

SEQ ID NO: 505407 - DNA, 25 bp, Homo sapien
tgtctaaaatacttcgaagtacaga

SEQ ID NO: 505408 - DNA, 25 bp, Homo sapien
cagttgggaaagtacatttccattt

SEQ ID NO: 505409 - DNA, 25 bp, Homo sapien
ccagttgggaaagtacatttccatt

SEQ ID NO: 505410 - DNA, 25 bp, Homo sapien
tccagttgggaaagtacatttccat

SEQ ID NO: 505411 - DNA, 25 bp, Homo sapien
caatagtaatgaacttgcataaaag

SEQ ID NO: 505412 - DNA, 25 bp, Homo sapien
aatagtaatgaacttgcataaaagt

SEQ ID NO: 505413 - DNA, 25 bp, Homo sapien
aaccaatagtaatgaacttgcataa

SEQ ID NO: 505414 - DNA, 25 bp, Homo sapien
ccaatagtaatgaacttgcataaaa

SEQ ID NO: 505415 - DNA, 25 bp, Homo sapien
ggttttgtatatcatagctatcgga

SEQ ID NO: 505416 - DNA, 25 bp, Homo sapien
tggttttgtatatcatagctatcgg

SEQ ID NO: 505417 - DNA, 25 bp, Homo sapien
gttttgtatatcatagctatcggaa

SEQ ID NO: 505418 - DNA, 25 bp, Homo sapien
ccaagaaacccaatctcttccatta

SEQ ID NO: 505419 - DNA, 25 bp, Homo sapien
gccaagcaccaagaaacccaatctc

SEQ ID NO: 505420 - DNA, 25 bp, Homo sapien
caagaaacccaatctcttccattaa

SEQ ID NO: 505421 - DNA, 25 bp, Homo sapien
aagcaccaagaaacccaatctcttc

SEQ ID NO: 505422 - DNA, 25 bp, Homo sapien
aaagctgtgccatctgagtgttgca

SEQ ID NO: 505423 - DNA, 25 bp, Homo sapien
tcagcagcataaaccgtatgctctc

SEQ ID NO: 505424 - DNA, 25 bp, Homo sapien
ataaaccgtatgctctcttgggccc

SEQ ID NO: 505425 - DNA, 25 bp, Homo sapien
caaagctgtgccatctgagtgttgc

SEQ ID NO: 505426 - DNA, 25 bp, Homo sapien
ggtagcggtagcgagagcaggaaaa

SEQ ID NO: 505427 - DNA, 25 bp, Homo sapien
agcggtagcggtagcgagagcagga

SEQ ID NO: 505428 - DNA, 25 bp, Homo sapien
agcggtagcgagagcaggaaaaaaa

SEQ ID NO: 505429 - DNA, 25 bp, Homo sapien
cagaagcggtagcggtagcgagagc

SEQ ID NO: 505430 - DNA, 25 bp, Homo sapien
agtagtcatcatcctttctgatgaa

SEQ ID NO: 505431 - DNA, 25 bp, Homo sapien
atacaagggcggagtagtcatcatc

SEQ ID NO: 505432 - DNA, 25 bp, Homo sapien
gagtagtcatcatcctttctgatga

SEQ ID NO: 505433 - DNA, 25 bp, Homo sapien
tgatacaagggcggagtagtcatca

SEQ ID NO: 505434 - DNA, 25 bp, Homo sapien
tagcaatagtcaatgtcaccggaag

SEQ ID NO: 505435 - DNA, 25 bp, Homo sapien
gattggagcacctacacttgggctg

SEQ ID NO: 505436 - DNA, 25 bp, Homo sapien
tcttgaaaacgagatggcgctccat

SEQ ID NO: 505437 - DNA, 25 bp, Homo sapien
catggcccagtcaagtcacagagtc

SEQ ID NO: 505438 - DNA, 25 bp, Homo sapien
tgtggtgccgctgtaaagataccca

SEQ ID NO: 505439 - DNA, 25 bp, Homo sapien
gtgccgctgtaaagatacccaaaat

SEQ ID NO: 505440 - DNA, 25 bp, Homo sapien
taggtaacaggcagagggtggaata

SEQ ID NO: 505441 - DNA, 25 bp, Homo sapien
ggtaccagtagagtgtggtgccgct

SEQ ID NO: 505442 - DNA, 25 bp, Homo sapien
agtaattgaatcatgcgggcgggtt

SEQ ID NO: 505443 - DNA, 25 bp, Homo sapien
tctccccagccatatgtaacagtga

SEQ ID NO: 505444 - DNA, 25 bp, Homo sapien
catgctctctgtcttgccaccatgt

SEQ ID NO: 505445 - DNA, 25 bp, Homo sapien
tatggtttggctatgcccttccccc

SEQ ID NO: 505446 - DNA, 25 bp, Homo sapien
ccatcaagtcacaggccagggtcat

SEQ ID NO: 505447 - DNA, 25 bp, Homo sapien
tctgagaagggcttacctggaggcc

SEQ ID NO: 505448 - DNA, 25 bp, Homo sapien
cacagaacatgtgtcaagatgccag

SEQ ID NO: 505449 - DNA, 25 bp, Homo sapien
caccaagagagagtataatgcccca

SEQ ID NO: 505450 - DNA, 25 bp, Homo sapien
agcacgaattttgccctgccccatt

SEQ ID NO: 505451 - DNA, 25 bp, Homo sapien
tgccctgccccatttccgacctagg

SEQ ID NO: 505452 - DNA, 25 bp, Homo sapien
gccctgccccatttccgacctaggc

SEQ ID NO: 505453 - DNA, 25 bp, Homo sapien
ctgatcagcacgaattttgccctgc

SEQ ID NO: 505454 - DNA, 25 bp, Homo sapien
tcctaggtaagcagctggattgcag

SEQ ID NO: 505455 - DNA, 25 bp, Homo sapien
tcttattgggttgaccagacttggt

SEQ ID NO: 505456 - DNA, 25 bp, Homo sapien
cgatagaagttttcagcctaagccg

SEQ ID NO: 505457 - DNA, 25 bp, Homo sapien
cttccaacagggacggtgagtgtga

SEQ ID NO: 505458 - DNA, 25 bp, Homo sapien
tgtaattccaactatttaggaggct

SEQ ID NO: 505459 - DNA, 25 bp, Homo sapien
attccaactatttaggaggctgaga

SEQ ID NO: 505460 - DNA, 25 bp, Homo sapien
ttgcctgtaattccaactatttagg

SEQ ID NO: 505461 - DNA, 25 bp, Homo sapien
gtgcttgcctgtaattccaactatt

SEQ ID NO: 505462 - DNA, 25 bp, Homo sapien
agtttgatcggaattagctgccagg

SEQ ID NO: 505463 - DNA, 25 bp, Homo sapien
tcactctttcatggctacagtttga

SEQ ID NO: 505464 - DNA, 25 bp, Homo sapien
ctttcatggctacagtttgatcgga

SEQ ID NO: 505465 - DNA, 25 bp, Homo sapien
catggctacagtttgatcggaatta

SEQ ID NO: 505466 - DNA, 25 bp, Homo sapien
ttggaagagggggcagcctccgagc

SEQ ID NO: 505467 - DNA, 25 bp, Homo sapien
ggaagagggggcagcctccgagctg

SEQ ID NO: 505468 - DNA, 25 bp, Homo sapien
cttggaagagggggcagcctccgag

SEQ ID NO: 505469 - DNA, 25 bp, Homo sapien
tggaagagggggcagcctccgagct

SEQ ID NO: 505470 - DNA, 25 bp, Homo sapien
tgcgcgctctctgtcttctcgggct

SEQ ID NO: 505471 - DNA, 25 bp, Homo sapien
tgctggagcccgtcacttatggtct

SEQ ID NO: 505472 - DNA, 25 bp, Homo sapien
gcggtttgcgtatcatgctggagcc

SEQ ID NO: 505473 - DNA, 25 bp, Homo sapien
tccgcgtcctggtcagacttcttgc

SEQ ID NO: 505474 - DNA, 25 bp, Homo sapien
tgtccttggctttctcgtcgttcac

SEQ ID NO: 505475 - DNA, 25 bp, Homo sapien
cttgccacgccctcatccttcttgt

SEQ ID NO: 505476 - DNA, 25 bp, Homo sapien
tcgtcgttcacattgtagcccttct

SEQ ID NO: 505477 - DNA, 25 bp, Homo sapien
tcttcttgctgagtttgcctgtcat

SEQ ID NO: 505478 - DNA, 25 bp, Homo sapien
ttggctctgggtgcctgtgcagccc

SEQ ID NO: 505479 - DNA, 25 bp, Homo sapien
ggagtttggctctgggtgcctgtgc

SEQ ID NO: 505480 - DNA, 25 bp, Homo sapien
ttggagtttggctctgggtgcctgt

SEQ ID NO: 505481 - DNA, 25 bp, Homo sapien
gtttggctctgggtgcctgtgcagc

SEQ ID NO: 505482 - DNA, 25 bp, Homo sapien
gcacaatttttaggcccacaaggag

SEQ ID NO: 505483 - DNA, 25 bp, Homo sapien
caaggagtcaagcacctcaaggaga

SEQ ID NO: 505484 - DNA, 25 bp, Homo sapien
cactaaatgttctagggtggtgaga

SEQ ID NO: 505485 - DNA, 25 bp, Homo sapien
gctgttacctacttaagaaagagag

SEQ ID NO: 505486 - DNA, 25 bp, Homo sapien
aactggatctggcgactgtgccggc

SEQ ID NO: 505487 - DNA, 25 bp, Homo sapien
ctccgcgttcggttcggcacttgga

SEQ ID NO: 505488 - DNA, 25 bp, Homo sapien
acttggaactggatctggcgactgt

SEQ ID NO: 505489 - DNA, 25 bp, Homo sapien
cgttcggttcggcacttggaactgg

SEQ ID NO: 505490 - DNA, 25 bp, Homo sapien
aggcgtctgcaggaaccgccatcac

SEQ ID NO: 505491 - DNA, 25 bp, Homo sapien
ggcgtctgcaggaaccgccatcacc

SEQ ID NO: 505492 - DNA, 25 bp, Homo sapien
ggacttttgccagtgagtagcccag

SEQ ID NO: 505493 - DNA, 25 bp, Homo sapien
ttgccagtgagtagcccagaagcaa

SEQ ID NO: 505494 - DNA, 25 bp, Homo sapien
ggatgtagatatgttagtttactca

SEQ ID NO: 505495 - DNA, 25 bp, Homo sapien
agttcaaatggttgtcctgatcctg

SEQ ID NO: 505496 - DNA, 25 bp, Homo sapien
tcagctttggattatgaaaccccgt

SEQ ID NO: 505497 - DNA, 25 bp, Homo sapien
tggtccggtgacatcattttgcact

SEQ ID NO: 505498 - DNA, 25 bp, Homo sapien
tttgcactgcatagcccattataca

SEQ ID NO: 505499 - DNA, 25 bp, Homo sapien
tttggaaagcatggtctacaattgc

SEQ ID NO: 505500 - DNA, 25 bp, Homo sapien
caggcgatgtcttagggacgggaga

SEQ ID NO: 505501 - DNA, 25 bp, Homo sapien
tggggagcggcccacgaccggccca

SEQ ID NO: 505502 - DNA, 25 bp, Homo sapien
aggggtgaggcccacggcggtcctg

SEQ ID NO: 505503 - DNA, 25 bp, Homo sapien
gaacaggaagtattggcgagaggga

SEQ ID NO: 505504 - DNA, 25 bp, Homo sapien
gtgtgggttcacagcggtcatccag

SEQ ID NO: 505505 - DNA, 25 bp, Homo sapien
ggttcacagcggtcatccagggaat

SEQ ID NO: 505506 - DNA, 25 bp, Homo sapien
catccagggaatggatggacatggt

SEQ ID NO: 505507 - DNA, 25 bp, Homo sapien
gagtttctgaagcacgggcatcacc

SEQ ID NO: 505508 - DNA, 25 bp, Homo sapien
aaatgccattgcaataattagttgg

SEQ ID NO: 505509 - DNA, 25 bp, Homo sapien
tgccattgcaataattagttggttt

SEQ ID NO: 505510 - DNA, 25 bp, Homo sapien
aatgccattgcaataattagttggt

SEQ ID NO: 505511 - DNA, 25 bp, Homo sapien
ttacttagagtaaaatgccattgca

SEQ ID NO: 505512 - DNA, 25 bp, Homo sapien
tcggaggatgcgaggaggattctcc

SEQ ID NO: 505513 - DNA, 25 bp, Homo sapien
ccacagtacacggagaggagcagaa

SEQ ID NO: 505514 - DNA, 25 bp, Homo sapien
actgggtcgccagatggagtccctg

SEQ ID NO: 505515 - DNA, 25 bp, Homo sapien
tggagtccctgtgccgatcccacag

SEQ ID NO: 505516 - DNA, 25 bp, Homo sapien
cgtctccggttaggtgagaaggtca

SEQ ID NO: 505517 - DNA, 25 bp, Homo sapien
gaaatgccttattcctgacagcctc

SEQ ID NO: 505518 - DNA, 25 bp, Homo sapien
gcccggagaaatgccttattcctga

SEQ ID NO: 505519 - DNA, 25 bp, Homo sapien
ctgattgcccggagaaatgccttat

SEQ ID NO: 505520 - DNA, 25 bp, Homo sapien
cacgtgtcgggacggtcggctgctt

SEQ ID NO: 505521 - DNA, 25 bp, Homo sapien
ttactacccgaatgacactgctggg

SEQ ID NO: 505522 - DNA, 25 bp, Homo sapien
tggggggaccgctctctggatgcca

SEQ ID NO: 505523 - DNA, 25 bp, Homo sapien
ttcccgcattactacccgaatgaca

SEQ ID NO: 505524 - DNA, 25 bp, Homo sapien
tcactctgtccctgggccagggtcc

SEQ ID NO: 505525 - DNA, 25 bp, Homo sapien
ctgaagctgcccctggggctgagga

SEQ ID NO: 505526 - DNA, 25 bp, Homo sapien
ctcactctgtccctgggccagggtc

SEQ ID NO: 505527 - DNA, 25 bp, Homo sapien
ctggggctgaggagcctcactctgt

SEQ ID NO: 505528 - DNA, 25 bp, Homo sapien
tgtccacctttgacagagcaagctc

SEQ ID NO: 505529 - DNA, 25 bp, Homo sapien
aaacagcacttgagtcgtgcacttg

SEQ ID NO: 505530 - DNA, 25 bp, Homo sapien
ttgtccggccacgtacagtccctga

SEQ ID NO: 505531 - DNA, 25 bp, Homo sapien
ttgaaattcaaagcgctgtccacct

SEQ ID NO: 505532 - DNA, 25 bp, Homo sapien
gtggagctgcgaggccactcatcaa

SEQ ID NO: 505533 - DNA, 25 bp, Homo sapien
ccagcgcctgctggaacgtggagct

SEQ ID NO: 505534 - DNA, 25 bp, Homo sapien
ctccagcgcctgctggaacgtggag

SEQ ID NO: 505535 - DNA, 25 bp, Homo sapien
gaacgtggagctgcgaggccactca

SEQ ID NO: 505536 - DNA, 25 bp, Homo sapien
ggtgtggtgttggtcaagaaagtgt

SEQ ID NO: 505537 - DNA, 25 bp, Homo sapien
tggtcaagaaagtgttcccggagca

SEQ ID NO: 505538 - DNA, 25 bp, Homo sapien
caagaaagtgttcccggagcaaagc

SEQ ID NO: 505539 - DNA, 25 bp, Homo sapien
gtggtgttggtcaagaaagtgttcc

SEQ ID NO: 505540 - DNA, 25 bp, Homo sapien
gatggttggtccagcatccactcca

SEQ ID NO: 505541 - DNA, 25 bp, Homo sapien
attctcctgcgtcttttgggctgga

SEQ ID NO: 505542 - DNA, 25 bp, Homo sapien
cactccacatttccctggtttcaag

SEQ ID NO: 505543 - DNA, 25 bp, Homo sapien
ggtggctttctctgcaacagggact

SEQ ID NO: 505544 - DNA, 25 bp, Homo sapien
catcccctggatgactccagtgagg

SEQ ID NO: 505545 - DNA, 25 bp, Homo sapien
atgactccagtgaggttggcaacgg

SEQ ID NO: 505546 - DNA, 25 bp, Homo sapien
tggcagttttctgggtaacccctga

SEQ ID NO: 505547 - DNA, 25 bp, Homo sapien
cagatgggctcgagatttttggcag

SEQ ID NO: 505548 - DNA, 25 bp, Homo sapien
tgttccagctctagcgagagctcca

SEQ ID NO: 505549 - DNA, 25 bp, Homo sapien
gctctagcgagagctccaggtccac

SEQ ID NO: 505550 - DNA, 25 bp, Homo sapien
tccccgctcaaacacccatggagat

SEQ ID NO: 505551 - DNA, 25 bp, Homo sapien
tgatgtccccgctcaaacacccatg

SEQ ID NO: 505552 - DNA, 25 bp, Homo sapien
cattgacgggcagcggtcagacaca

SEQ ID NO: 505553 - DNA, 25 bp, Homo sapien
ttgacgggcagcggtcagacacagc

SEQ ID NO: 505554 - DNA, 25 bp, Homo sapien
attgacgggcagcggtcagacacag

SEQ ID NO: 505555 - DNA, 25 bp, Homo sapien
ctgacaccgggactcgccgcagagg

SEQ ID NO: 505556 - DNA, 25 bp, Homo sapien
ggctctgagcgtcccctccgagcat

SEQ ID NO: 505557 - DNA, 25 bp, Homo sapien
actcgccgcagaggtgtctggacca

SEQ ID NO: 505558 - DNA, 25 bp, Homo sapien
cgtcccctccgagcatccctcggtg

SEQ ID NO: 505559 - DNA, 25 bp, Homo sapien
gctcagccatggaatatgagaccat

SEQ ID NO: 505560 - DNA, 25 bp, Homo sapien
ctcagccatggaatatgagaccatg

SEQ ID NO: 505561 - DNA, 25 bp, Homo sapien
cagctcagccatggaatatgagacc

SEQ ID NO: 505562 - DNA, 25 bp, Homo sapien
cagccatggaatatgagaccatggt

SEQ ID NO: 505563 - DNA, 25 bp, Homo sapien
cacgaggcccagtgatggtgatgaa

SEQ ID NO: 505564 - DNA, 25 bp, Homo sapien
ccccacgaggcccagtgatggtgat

SEQ ID NO: 505565 - DNA, 25 bp, Homo sapien
aagaccacggcgtctggtccccgca

SEQ ID NO: 505566 - DNA, 25 bp, Homo sapien
aggccccacgaggcccagtgatggt

SEQ ID NO: 505567 - DNA, 25 bp, Homo sapien
ggcctccgtggggacgccagtcaag

SEQ ID NO: 505568 - DNA, 25 bp, Homo sapien
gggacgccagtcaaggggaccatgc

SEQ ID NO: 505569 - DNA, 25 bp, Homo sapien
cagtcaaggggaccatgcgggaggg

SEQ ID NO: 505570 - DNA, 25 bp, Homo sapien
tcaaggggaccatgcgggaggggaa

SEQ ID NO: 505571 - DNA, 25 bp, Homo sapien
cccctcatgagtgtccgggccctcg

SEQ ID NO: 505572 - DNA, 25 bp, Homo sapien
cctcatgagtgtccgggccctcggg

SEQ ID NO: 505573 - DNA, 25 bp, Homo sapien
atggccccctcatgagtgtccgggc

SEQ ID NO: 505574 - DNA, 25 bp, Homo sapien
gccccctcatgagtgtccgggccct

SEQ ID NO: 505575 - DNA, 25 bp, Homo sapien
accgctggagggccccagcgaaggg

SEQ ID NO: 505576 - DNA, 25 bp, Homo sapien
gaccgctggagggccccagcgaagg

SEQ ID NO: 505577 - DNA, 25 bp, Homo sapien
ctgtcccctccaggggagaggactg

SEQ ID NO: 505578 - DNA, 25 bp, Homo sapien
ccctccaggggagaggactgcacag

SEQ ID NO: 505579 - DNA, 25 bp, Homo sapien
caggggagaggactgcacagggcat

SEQ ID NO: 505580 - DNA, 25 bp, Homo sapien
agaggactgcacagggcatgccaga

SEQ ID NO: 505581 - DNA, 25 bp, Homo sapien
gggctggaagtctgcctctggtgat

SEQ ID NO: 505582 - DNA, 25 bp, Homo sapien
cccagccgtggatgacgtcagaaga

SEQ ID NO: 505583 - DNA, 25 bp, Homo sapien
tccaagcaacagtcagggctgggtg

SEQ ID NO: 505584 - DNA, 25 bp, Homo sapien
ctgcgcagggaaaaggctgtgggtg

SEQ ID NO: 505585 - DNA, 25 bp, Homo sapien
gctgtttgctcaaacacgcctgggc

SEQ ID NO: 505586 - DNA, 25 bp, Homo sapien
aagctgtttgctcaaacacgcctgg

SEQ ID NO: 505587 - DNA, 25 bp, Homo sapien
tgtttgctcaaacacgcctgggccc

SEQ ID NO: 505588 - DNA, 25 bp, Homo sapien
ggaaagctgtttgctcaaacacgcc

SEQ ID NO: 505589 - DNA, 25 bp, Homo sapien
tgggtccaaccctgccttttctgca

SEQ ID NO: 505590 - DNA, 25 bp, Homo sapien
ttgggtccaaccctgccttttctgc

SEQ ID NO: 505591 - DNA, 25 bp, Homo sapien
gtccaaccctgccttttctgcaaag

SEQ ID NO: 505592 - DNA, 25 bp, Homo sapien
gggtccaaccctgccttttctgcaa

SEQ ID NO: 505593 - DNA, 25 bp, Homo sapien
tggctgcatatccagctgccatggc

SEQ ID NO: 505594 - DNA, 25 bp, Homo sapien
tgggtggctgcatatccagctgcca

SEQ ID NO: 505595 - DNA, 25 bp, Homo sapien
ggtggctgcatatccagctgccatg

SEQ ID NO: 505596 - DNA, 25 bp, Homo sapien
gctgcatatccagctgccatggctc

SEQ ID NO: 505597 - DNA, 25 bp, Homo sapien
ggttttgcggtggtcccacactgaa

SEQ ID NO: 505598 - DNA, 25 bp, Homo sapien
gacgccgttaattgagcttcctccg

SEQ ID NO: 505599 - DNA, 25 bp, Homo sapien
tgagcgatctcatttctaggatgat

SEQ ID NO: 505600 - DNA, 25 bp, Homo sapien
tccgagtgggacaagtgagcgatct

SEQ ID NO: 505601 - DNA, 25 bp, Homo sapien
tgacagggccacagccaaggcccat

SEQ ID NO: 505602 - DNA, 25 bp, Homo sapien
agggccacagccaaggcccatccct

SEQ ID NO: 505603 - DNA, 25 bp, Homo sapien
acagccaaggcccatcccttcatcc

SEQ ID NO: 505604 - DNA, 25 bp, Homo sapien
cccttcatcctggctggggcggaac

SEQ ID NO: 505605 - DNA, 25 bp, Homo sapien
ggctgctgtgtggactaccgtcctc

SEQ ID NO: 505606 - DNA, 25 bp, Homo sapien
tgtggactaccgtcctcgcacaagg

SEQ ID NO: 505607 - DNA, 25 bp, Homo sapien
aaggcagcaagtgctccatgtccgt

SEQ ID NO: 505608 - DNA, 25 bp, Homo sapien
cgtcctcgcacaaggcagcaagtgc

SEQ ID NO: 505609 - DNA, 25 bp, Homo sapien
gagaggacatttccagtaacggcgt

SEQ ID NO: 505610 - DNA, 25 bp, Homo sapien
cagtaacggcgtttcagaattcctc

SEQ ID NO: 505611 - DNA, 25 bp, Homo sapien
ctctgctccgaggaattctcaggcc

SEQ ID NO: 505612 - DNA, 25 bp, Homo sapien
caggccacgcaagggagaggacatt

SEQ ID NO: 505613 - DNA, 25 bp, Homo sapien
ctctgaggcagtggcctgacaggct

SEQ ID NO: 505614 - DNA, 25 bp, Homo sapien
ccgggagccccaggaccttaggcat

SEQ ID NO: 505615 - DNA, 25 bp, Homo sapien
cctgcagggagctgtccaatggagc

SEQ ID NO: 505616 - DNA, 25 bp, Homo sapien
gctggggcctctctgaggcagtggc

SEQ ID NO: 505617 - DNA, 25 bp, Homo sapien
ggactgatcattcaccatcgcctgc

SEQ ID NO: 505618 - DNA, 25 bp, Homo sapien
ggaaggagttccctgcagtgaaact

SEQ ID NO: 505619 - DNA, 25 bp, Homo sapien
cccctggggactgatcattcaccat

SEQ ID NO: 505620 - DNA, 25 bp, Homo sapien
ctctggttgccataaaactcttttg

SEQ ID NO: 505621 - DNA, 25 bp, Homo sapien
gcctacccctgtgtcacctttggga

SEQ ID NO: 505622 - DNA, 25 bp, Homo sapien
acccctgtgtcacctttgggatcag

SEQ ID NO: 505623 - DNA, 25 bp, Homo sapien
tcacctttgggatcagcctccaggc

SEQ ID NO: 505624 - DNA, 25 bp, Homo sapien
cctgtgtcacctttgggatcagcct

SEQ ID NO: 505625 - DNA, 25 bp, Homo sapien
tgccgccttccaaccagtctcctcc

SEQ ID NO: 505626 - DNA, 25 bp, Homo sapien
ctgccgccttccaaccagtctcctc

SEQ ID NO: 505627 - DNA, 25 bp, Homo sapien
gccgccttccaaccagtctcctccc

SEQ ID NO: 505628 - DNA, 25 bp, Homo sapien
cagcaacatctggattgtggccatg

SEQ ID NO: 505629 - DNA, 25 bp, Homo sapien
caacatctggattgtggccatgtag

SEQ ID NO: 505630 - DNA, 25 bp, Homo sapien
caggataacagcaacatctggattg

SEQ ID NO: 505631 - DNA, 25 bp, Homo sapien
taacagcaacatctggattgtggcc

SEQ ID NO: 505632 - DNA, 25 bp, Homo sapien
caccaggaattcctttgtaccctgg

SEQ ID NO: 505633 - DNA, 25 bp, Homo sapien
gaattcctttgtaccctggctcctc

SEQ ID NO: 505634 - DNA, 25 bp, Homo sapien
ggattccatggccacctttctcacc

SEQ ID NO: 505635 - DNA, 25 bp, Homo sapien
attcctttgtaccctggctcctcca

SEQ ID NO: 505636 - DNA, 25 bp, Homo sapien
agtcttcacctttcatgaaaacgac

SEQ ID NO: 505637 - DNA, 25 bp, Homo sapien
ttcacctttcatgaaaacgacttca

SEQ ID NO: 505638 - DNA, 25 bp, Homo sapien
atgaaaacgacttcataagggctgc

SEQ ID NO: 505639 - DNA, 25 bp, Homo sapien
ccaaacacagacctgtgaatggctt

SEQ ID NO: 505640 - DNA, 25 bp, Homo sapien
tctcacatttgctggccggctgggc

SEQ ID NO: 505641 - DNA, 25 bp, Homo sapien
cctcgagctgcggtggaaatccttg

SEQ ID NO: 505642 - DNA, 25 bp, Homo sapien
tgaccttggcctacacaaaaacaga

SEQ ID NO: 505643 - DNA, 25 bp, Homo sapien
aacagatgcagatcattctcacatt

SEQ ID NO: 505644 - DNA, 25 bp, Homo sapien
agagcatgcagcagggtgtcccaat

SEQ ID NO: 505645 - DNA, 25 bp, Homo sapien
tgcagcagggtgtcccaatccctga

SEQ ID NO: 505646 - DNA, 25 bp, Homo sapien
gcatgcagcagggtgtcccaatccc

SEQ ID NO: 505647 - DNA, 25 bp, Homo sapien
tgatggggggtgaagagcatgcagc

SEQ ID NO: 505648 - DNA, 25 bp, Homo sapien
acgttcttgatagctggagacagcc

SEQ ID NO: 505649 - DNA, 25 bp, Homo sapien
ccctggcgatgtgacataggtaaag

SEQ ID NO: 505650 - DNA, 25 bp, Homo sapien
tcagagagagacgttcttgatagct

SEQ ID NO: 505651 - DNA, 25 bp, Homo sapien
ctggagacagccctggcgatgtgac

SEQ ID NO: 505652 - DNA, 25 bp, Homo sapien
gcagatgagggctttttaatctaga

SEQ ID NO: 505653 - DNA, 25 bp, Homo sapien
gagcacctatgaacacactgatcaa

SEQ ID NO: 505654 - DNA, 25 bp, Homo sapien
gaactggaacaaatcctctctcaca

SEQ ID NO: 505655 - DNA, 25 bp, Homo sapien
gtgttgttgagacacaagtgttgtc

SEQ ID NO: 505656 - DNA, 25 bp, Homo sapien
gggaaaggtgtggagacagagagcc

SEQ ID NO: 505657 - DNA, 25 bp, Homo sapien
tagggaaaggtgtggagacagagag

SEQ ID NO: 505658 - DNA, 25 bp, Homo sapien
tgtagggaaaggtgtggagacagag

SEQ ID NO: 505659 - DNA, 25 bp, Homo sapien
ctgtagggaaaggtgtggagacaga

SEQ ID NO: 505660 - DNA, 25 bp, Homo sapien
tttaacttctgcattcatacaaaaa

SEQ ID NO: 505661 - DNA, 25 bp, Homo sapien
atgtcaaaccaacccgtgaaaatca

SEQ ID NO: 505662 - DNA, 25 bp, Homo sapien
taacttctgcattcatacaaaaaga

SEQ ID NO: 505663 - DNA, 25 bp, Homo sapien
ccaacccgtgaaaatcactgctatt

SEQ ID NO: 505664 - DNA, 25 bp, Homo sapien
ggatgttggaaggatagagtcttac

SEQ ID NO: 505665 - DNA, 25 bp, Homo sapien
gcagcctccacatactgactctctt

SEQ ID NO: 505666 - DNA, 25 bp, Homo sapien
tctcttgtgtggcacgtttgtgcat

SEQ ID NO: 505667 - DNA, 25 bp, Homo sapien
gcctccacatactgactctcttgtg

SEQ ID NO: 505668 - DNA, 25 bp, Homo sapien
gagaatgactggctgctatgtcctc

SEQ ID NO: 505669 - DNA, 25 bp, Homo sapien
actgaccgctcttccagtgttccag

SEQ ID NO: 505670 - DNA, 25 bp, Homo sapien
aagggagggctgtactgaccgctct

SEQ ID NO: 505671 - DNA, 25 bp, Homo sapien
tgcctccatggctagacttctcttt

SEQ ID NO: 505672 - DNA, 25 bp, Homo sapien
tctggattttatcagcagtggtgat

SEQ ID NO: 505673 - DNA, 25 bp, Homo sapien
aaagaactaaaagctcaggtggttg

SEQ ID NO: 505674 - DNA, 25 bp, Homo sapien
tagagcttgtgtaaatgtgaggtcc

SEQ ID NO: 505675 - DNA, 25 bp, Homo sapien
tatttctaatgtcagtgccatggtg

SEQ ID NO: 505676 - DNA, 25 bp, Homo sapien
ccatggtgacaacagcatcatagta

SEQ ID NO: 505677 - DNA, 25 bp, Homo sapien
cgtgcgtggctatgttttcagtata

SEQ ID NO: 505678 - DNA, 25 bp, Homo sapien
tttcagtatacataactgaaggaaa

SEQ ID NO: 505679 - DNA, 25 bp, Homo sapien
tgacacgtgcgtggctatgttttca

SEQ ID NO: 505680 - DNA, 25 bp, Homo sapien
tccttcctgacacgtgcgtggctat

SEQ ID NO: 505681 - DNA, 25 bp, Homo sapien
cgacacagtttgggtcaaatgaccc

SEQ ID NO: 505682 - DNA, 25 bp, Homo sapien
cacagtttgggtcaaatgacccatg

SEQ ID NO: 505683 - DNA, 25 bp, Homo sapien
gacacagtttgggtcaaatgaccca

SEQ ID NO: 505684 - DNA, 25 bp, Homo sapien
cagtttgggtcaaatgacccatgaa

SEQ ID NO: 505685 - DNA, 25 bp, Homo sapien
cacctcctcctatgcagggagtgga

SEQ ID NO: 505686 - DNA, 25 bp, Homo sapien
cagtgtaaggaccagcgtggcatct

SEQ ID NO: 505687 - DNA, 25 bp, Homo sapien
ggagtgcaggcgttgtcttccaaca

SEQ ID NO: 505688 - DNA, 25 bp, Homo sapien
tccaacaacatgaagcagtgtaagg

SEQ ID NO: 505689 - DNA, 25 bp, Homo sapien
gcccatgttgtcacctctaaagccg

SEQ ID NO: 505690 - DNA, 25 bp, Homo sapien
tgttgtcacctctaaagccggctcc

SEQ ID NO: 505691 - DNA, 25 bp, Homo sapien
gtcacctctaaagccggctcctgag

SEQ ID NO: 505692 - DNA, 25 bp, Homo sapien
catgttgtcacctctaaagccggct

SEQ ID NO: 505693 - DNA, 25 bp, Homo sapien
ctcagtgctgttgtgtaaagctgcc

SEQ ID NO: 505694 - DNA, 25 bp, Homo sapien
tcctcttagggacgaactccctgga

SEQ ID NO: 505695 - DNA, 25 bp, Homo sapien
cagtgctgttgtgtaaagctgcctc

SEQ ID NO: 505696 - DNA, 25 bp, Homo sapien
gaagcaggaaagcactcctccgcta

SEQ ID NO: 505697 - DNA, 25 bp, Homo sapien
gggtctagatagaacctgcagtctg

SEQ ID NO: 505698 - DNA, 25 bp, Homo sapien
taatgttgatactattctgatgccc

SEQ ID NO: 505699 - DNA, 25 bp, Homo sapien
tgctgactcattacccggattaaag

SEQ ID NO: 505700 - DNA, 25 bp, Homo sapien
caaatgtcagcaggtaagttactcc

SEQ ID NO: 505701 - DNA, 25 bp, Homo sapien
agagggagtttgaacgatgagctca

SEQ ID NO: 505702 - DNA, 25 bp, Homo sapien
ggatggtctggactcaaatgaactg

SEQ ID NO: 505703 - DNA, 25 bp, Homo sapien
gatgagctcatgatctcagtgctgg

SEQ ID NO: 505704 - DNA, 25 bp, Homo sapien
agacaagcccgagccccatttgtgg

SEQ ID NO: 505705 - DNA, 25 bp, Homo sapien
ttaaggtactttagcattctgcagc

SEQ ID NO: 505706 - DNA, 25 bp, Homo sapien
cattttgagaggtgagccgcataga

SEQ ID NO: 505707 - DNA, 25 bp, Homo sapien
ggtgaacacccactagaagcataca

SEQ ID NO: 505708 - DNA, 25 bp, Homo sapien
tgaggccggagtcataagcagcact

SEQ ID NO: 505709 - DNA, 25 bp, Homo sapien
aagagattcacaacagaattctcgt

SEQ ID NO: 505710 - DNA, 25 bp, Homo sapien
gattcacaacagaattctcgtatgt

SEQ ID NO: 505711 - DNA, 25 bp, Homo sapien
gagattcacaacagaattctcgtat

SEQ ID NO: 505712 - DNA, 25 bp, Homo sapien
gaagagattcacaacagaattctcg

SEQ ID NO: 505713 - DNA, 25 bp, Homo sapien
gaaaggctgactgagataccattcc

SEQ ID NO: 505714 - DNA, 25 bp, Homo sapien
atgccactctatcttgatgcctcat

SEQ ID NO: 505715 - DNA, 25 bp, Homo sapien
aaaggctgactgagataccattcca

SEQ ID NO: 505716 - DNA, 25 bp, Homo sapien
tcttcctgtctgtcgctgggcggct

SEQ ID NO: 505717 - DNA, 25 bp, Homo sapien
gaaagctcgaggaagcagtttctcc

SEQ ID NO: 505718 - DNA, 25 bp, Homo sapien
tcgctgggcggctctttagttctcc

SEQ ID NO: 505719 - DNA, 25 bp, Homo sapien
tagttctccggtggtgcctttccat

SEQ ID NO: 505720 - DNA, 25 bp, Homo sapien
aattgggactccgagccagggctac

SEQ ID NO: 505721 - DNA, 25 bp, Homo sapien
tccgagccagggctacttctggcgt

SEQ ID NO: 505722 - DNA, 25 bp, Homo sapien
cagggctacttctggcgttggccca

SEQ ID NO: 505723 - DNA, 25 bp, Homo sapien
tacttctggcgttggcccagctcca

SEQ ID NO: 505724 - DNA, 25 bp, Homo sapien
gccacgcaagcagcctccgaaagag

SEQ ID NO: 505725 - DNA, 25 bp, Homo sapien
aagcagcctccgaaagagcccagag

SEQ ID NO: 505726 - DNA, 25 bp, Homo sapien
agcccagagaagtgccaacacctaa

SEQ ID NO: 505727 - DNA, 25 bp, Homo sapien
gcaggccacgcaagcagcctccgaa

SEQ ID NO: 505728 - DNA, 25 bp, Homo sapien
aaacaaaggcgctgccaagtcccag

SEQ ID NO: 505729 - DNA, 25 bp, Homo sapien
aacaaaggcgctgccaagtcccaga

SEQ ID NO: 505730 - DNA, 25 bp, Homo sapien
tcccagaaaaccatcacaactccag

SEQ ID NO: 505731 - DNA, 25 bp, Homo sapien
cccagaaaaccatcacaactccagg

SEQ ID NO: 505732 - DNA, 25 bp, Homo sapien
tgcatccccactctcttggtggtgg

SEQ ID NO: 505733 - DNA, 25 bp, Homo sapien
ctggcttcccaatagtggggactgg

SEQ ID NO: 505734 - DNA, 25 bp, Homo sapien
cctctggcttcccaatagtggggac

SEQ ID NO: 505735 - DNA, 25 bp, Homo sapien
tccctctggcttcccaatagtgggg

SEQ ID NO: 505736 - DNA, 25 bp, Homo sapien
tcgcattcttcgacatccatcattg

SEQ ID NO: 505737 - DNA, 25 bp, Homo sapien
tcaatgtcgcattcttcgacatcca

SEQ ID NO: 505738 - DNA, 25 bp, Homo sapien
tgtcgcattcttcgacatccatcat

SEQ ID NO: 505739 - DNA, 25 bp, Homo sapien
gcattcttcgacatccatcattgcc

SEQ ID NO: 505740 - DNA, 25 bp, Homo sapien
tagtatagttagcaaaggagcaggt

SEQ ID NO: 505741 - DNA, 25 bp, Homo sapien
tagtgtgattgcattctggtatgaa

SEQ ID NO: 505742 - DNA, 25 bp, Homo sapien
gaatggtggcatagtatagttagca

SEQ ID NO: 505743 - DNA, 25 bp, Homo sapien
tgttttcaaggctagtgtgattgca

SEQ ID NO: 505744 - DNA, 25 bp, Homo sapien
ttatttgtgtcaccactgcatttgg

SEQ ID NO: 505745 - DNA, 25 bp, Homo sapien
caattatttgtgtcaccactgcatt

SEQ ID NO: 505746 - DNA, 25 bp, Homo sapien
attatttgtgtcaccactgcatttg

SEQ ID NO: 505747 - DNA, 25 bp, Homo sapien
aattatttgtgtcaccactgcattt

SEQ ID NO: 505748 - DNA, 25 bp, Homo sapien
tgtaaagattgtggtcccgcgctcc

SEQ ID NO: 505749 - DNA, 25 bp, Homo sapien
tcgcgtgggagcgagaaatgtccct

SEQ ID NO: 505750 - DNA, 25 bp, Homo sapien
tttctgacagtaaaggacgagggcc

SEQ ID NO: 505751 - DNA, 25 bp, Homo sapien
ccaagatgcgttcagcaggagtagt

SEQ ID NO: 505752 - DNA, 25 bp, Homo sapien
tcagggcaagcgaagaagaaagtgt

SEQ ID NO: 505753 - DNA, 25 bp, Homo sapien
tattgactggcataacggagaagca

SEQ ID NO: 505754 - DNA, 25 bp, Homo sapien
caagcactatccgattcagggcaag

SEQ ID NO: 505755 - DNA, 25 bp, Homo sapien
gctggtttgggcatgccttgatcca

SEQ ID NO: 505756 - DNA, 25 bp, Homo sapien
gccttcttcttctggtgtcttttcc

SEQ ID NO: 505757 - DNA, 25 bp, Homo sapien
tctcctcttcctgttgttgccttct

SEQ ID NO: 505758 - DNA, 25 bp, Homo sapien
ctcttcctgttgttgccttcttctt

SEQ ID NO: 505759 - DNA, 25 bp, Homo sapien
gcttctcctcttcctgttgttgcct

SEQ ID NO: 505760 - DNA, 25 bp, Homo sapien
aaaaggagattgtgtacaatggtca

SEQ ID NO: 505761 - DNA, 25 bp, Homo sapien
catcacaccaataccgcagaaaaag

SEQ ID NO: 505762 - DNA, 25 bp, Homo sapien
ccgcagaaaaaggagattgtgtaca

SEQ ID NO: 505763 - DNA, 25 bp, Homo sapien
atcacaccaataccgcagaaaaagg

SEQ ID NO: 505764 - DNA, 25 bp, Homo sapien
tatcctgaccccacactgcggggaa

SEQ ID NO: 505765 - DNA, 25 bp, Homo sapien
aagtcaggaagacctcgggaaaatg

SEQ ID NO: 505766 - DNA, 25 bp, Homo sapien
aatgcaccctcttatcctgacccca

SEQ ID NO: 505767 - DNA, 25 bp, Homo sapien
tggtcaggaacttgaacctgcttct

SEQ ID NO: 505768 - DNA, 25 bp, Homo sapien
taagaaggcgtaccagaaaggagcc

SEQ ID NO: 505769 - DNA, 25 bp, Homo sapien
ctaagaaggcgtaccagaaaggagc

SEQ ID NO: 505770 - DNA, 25 bp, Homo sapien
gcaaacatgaccacttctacgctca

SEQ ID NO: 505771 - DNA, 25 bp, Homo sapien
gctggcaaacatgaccacttctacg

SEQ ID NO: 505772 - DNA, 25 bp, Homo sapien
tggcaaacatgaccacttctacgct

SEQ ID NO: 505773 - DNA, 25 bp, Homo sapien
cagctggcaaacatgaccacttcta

SEQ ID NO: 505774 - DNA, 25 bp, Homo sapien
gggatggagcgccataatggtcatt

SEQ ID NO: 505775 - DNA, 25 bp, Homo sapien
cattggtttccagagggatatatcc

SEQ ID NO: 505776 - DNA, 25 bp, Homo sapien
ttgattttggatgtacagaactgca

SEQ ID NO: 505777 - DNA, 25 bp, Homo sapien
gaactgcattctgaagtatccccca

SEQ ID NO: 505778 - DNA, 25 bp, Homo sapien
cctgatgcagagccctgttctggcc

SEQ ID NO: 505779 - DNA, 25 bp, Homo sapien
caaggatgcatctaaccccacaggg

SEQ ID NO: 505780 - DNA, 25 bp, Homo sapien
tgttctggccacactaaagctgtca

SEQ ID NO: 505781 - DNA, 25 bp, Homo sapien
catcaaggatgcatctaaccccaca

SEQ ID NO: 505782 - DNA, 25 bp, Homo sapien
catgttggtagaaggtgttcttact

SEQ ID NO: 505783 - DNA, 25 bp, Homo sapien
tccatggtttaccatcataagccat

SEQ ID NO: 505784 - DNA, 25 bp, Homo sapien
gttggtagaaggtgttcttactcca

SEQ ID NO: 505785 - DNA, 25 bp, Homo sapien
tgttcttactccatggtttaccatc

SEQ ID NO: 505786 - DNA, 25 bp, Homo sapien
cacagcagaccagaaatccgtgggt

SEQ ID NO: 505787 - DNA, 25 bp, Homo sapien
tgggattgcctatacccacagcaga

SEQ ID NO: 505788 - DNA, 25 bp, Homo sapien
gatgcctgctgcgaggcaaggactt

SEQ ID NO: 505789 - DNA, 25 bp, Homo sapien
tcacaggcagcatggaaaattgccg

SEQ ID NO: 505790 - DNA, 25 bp, Homo sapien
agaggagccagaagcctgtgcttct

SEQ ID NO: 505791 - DNA, 25 bp, Homo sapien
agcctgtgcttctcctaactttcca

SEQ ID NO: 505792 - DNA, 25 bp, Homo sapien
gaggagccagaagcctgtgcttctc

SEQ ID NO: 505793 - DNA, 25 bp, Homo sapien
tcctaactttccagccacacacatc

SEQ ID NO: 505794 - DNA, 25 bp, Homo sapien
tcaattgctgaacgatctgctgtgc

SEQ ID NO: 505795 - DNA, 25 bp, Homo sapien
caaattacaacgaaatcaacccctg

SEQ ID NO: 505796 - DNA, 25 bp, Homo sapien
gctggtgatgtttgtagcacacatt

SEQ ID NO: 505797 - DNA, 25 bp, Homo sapien
tgtgctacagccacaccgtcttgga

SEQ ID NO: 505798 - DNA, 25 bp, Homo sapien
gcagcctaatcgaagagaagtaatc

SEQ ID NO: 505799 - DNA, 25 bp, Homo sapien
tgtctgctccacaagtaggtggcca

SEQ ID NO: 505800 - DNA, 25 bp, Homo sapien
cttttgtgttgatcctctcgtgcgg

SEQ ID NO: 505801 - DNA, 25 bp, Homo sapien
tctcgtgcggagatttctgcagcct

SEQ ID NO: 505802 - DNA, 25 bp, Homo sapien
tcctgaggaggagggagatgcccat

SEQ ID NO: 505803 - DNA, 25 bp, Homo sapien
agtcctgaggaggagggagatgccc

SEQ ID NO: 505804 - DNA, 25 bp, Homo sapien
gtcctgaggaggagggagatgccca

SEQ ID NO: 505805 - DNA, 25 bp, Homo sapien
cagtcctgaggaggagggagatgcc

SEQ ID NO: 505806 - DNA, 25 bp, Homo sapien
ggttgacgtgtgtcactcttctgtg

SEQ ID NO: 505807 - DNA, 25 bp, Homo sapien
ggtgggttgacgtgtgtcactcttc

SEQ ID NO: 505808 - DNA, 25 bp, Homo sapien
tgggttgacgtgtgtcactcttctg

SEQ ID NO: 505809 - DNA, 25 bp, Homo sapien
ggtgggtgggttgacgtgtgtcact

SEQ ID NO: 505810 - DNA, 25 bp, Homo sapien
tcaacatgttctgtaagcccttaat

SEQ ID NO: 505811 - DNA, 25 bp, Homo sapien
taactgcagcacctttagacaacaa

SEQ ID NO: 505812 - DNA, 25 bp, Homo sapien
gacaacaaaagattgcatcctgttc

SEQ ID NO: 505813 - DNA, 25 bp, Homo sapien
ctaacaactggtaataagaactgcc

SEQ ID NO: 505814 - DNA, 25 bp, Homo sapien
tattcgtgctacaacacattcaaga

SEQ ID NO: 505815 - DNA, 25 bp, Homo sapien
aattcctagctaattggcaatgaag

SEQ ID NO: 505816 - DNA, 25 bp, Homo sapien
gagaaaataacgcatccaagaggat

SEQ ID NO: 505817 - DNA, 25 bp, Homo sapien
caacaaattcatgatcagagccagc

SEQ ID NO: 505818 - DNA, 25 bp, Homo sapien
aaatctctaaacatgcgtccgggac

SEQ ID NO: 505819 - DNA, 25 bp, Homo sapien
tgaaaatgttcgtctggaggccctg

SEQ ID NO: 505820 - DNA, 25 bp, Homo sapien
tcatgaactaaatcaggatcgggcc

SEQ ID NO: 505821 - DNA, 25 bp, Homo sapien
gctgaatccagtgcaaagtggccat

SEQ ID NO: 505822 - DNA, 25 bp, Homo sapien
agttctggggataagtggcatctca

SEQ ID NO: 505823 - DNA, 25 bp, Homo sapien
tctgttttcatcaaatggataccat

SEQ ID NO: 505824 - DNA, 25 bp, Homo sapien
caaaccatcttaagccatgaaacag

SEQ ID NO: 505825 - DNA, 25 bp, Homo sapien
ttgaacaatcaattctctgccaggc

SEQ ID NO: 505826 - DNA, 25 bp, Homo sapien
ccttgataagacgtgcaaatcgttc

SEQ ID NO: 505827 - DNA, 25 bp, Homo sapien
gcaaatcgttctggatttagaagct

SEQ ID NO: 505828 - DNA, 25 bp, Homo sapien
tacttccttgataagacgtgcaaat

SEQ ID NO: 505829 - DNA, 25 bp, Homo sapien
taagacgtgcaaatcgttctggatt

SEQ ID NO: 505830 - DNA, 25 bp, Homo sapien
tataagaggaatcccgcctcaggct

SEQ ID NO: 505831 - DNA, 25 bp, Homo sapien
tagggacacccaacctgtatgaagg

SEQ ID NO: 505832 - DNA, 25 bp, Homo sapien
tatagcatgcaactaacacatcggt

SEQ ID NO: 505833 - DNA, 25 bp, Homo sapien
cacatcggtcatgctcaacggaaaa

SEQ ID NO: 505834 - DNA, 25 bp, Homo sapien
taagatacattgacaaagctttaag

SEQ ID NO: 505835 - DNA, 25 bp, Homo sapien
ctgatgtaaccagacagtaccaggg

SEQ ID NO: 505836 - DNA, 25 bp, Homo sapien
aattatgcactctacttatatcaag

SEQ ID NO: 505837 - DNA, 25 bp, Homo sapien
taaaacatgtaagatacattgacaa

SEQ ID NO: 505838 - DNA, 25 bp, Homo sapien
gcactgtaagaacaatcggctgact

SEQ ID NO: 505839 - DNA, 25 bp, Homo sapien
taggaccactagttgagtcaaaaat

SEQ ID NO: 505840 - DNA, 25 bp, Homo sapien
tcagtaaaatgacacacgaggcact

SEQ ID NO: 505841 - DNA, 25 bp, Homo sapien
caatgagagctaggctggccacctt

SEQ ID NO: 505842 - DNA, 25 bp, Homo sapien
cacagatcccagaatctacttccct

SEQ ID NO: 505843 - DNA, 25 bp, Homo sapien
caaaaacagaattcgaagagccaaa

SEQ ID NO: 505844 - DNA, 25 bp, Homo sapien
cgtcgtataatagaggtgcattcac

SEQ ID NO: 505845 - DNA, 25 bp, Homo sapien
gaatatccccagagttgttgttgtg

SEQ ID NO: 505846 - DNA, 25 bp, Homo sapien
gctacttaggtaaatgcaaaaacag

SEQ ID NO: 505847 - DNA, 25 bp, Homo sapien
ggtttgggcagcttcctttaaagca

SEQ ID NO: 505848 - DNA, 25 bp, Homo sapien
taaatcttccttcaagacttgggaa

SEQ ID NO: 505849 - DNA, 25 bp, Homo sapien
tgaggtttcaagttatccaaaataa

SEQ ID NO: 505850 - DNA, 25 bp, Homo sapien
ctttaaagcagccacaaggtgaggt

SEQ ID NO: 505851 - DNA, 25 bp, Homo sapien
ccattttgtaaagggagcagctcca

SEQ ID NO: 505852 - DNA, 25 bp, Homo sapien
gcctccggccaaagcttatagataa

SEQ ID NO: 505853 - DNA, 25 bp, Homo sapien
cctcacaggtgttgtgccagaggca

SEQ ID NO: 505854 - DNA, 25 bp, Homo sapien
aatagaggctctaacaccggttgcc

SEQ ID NO: 505855 - DNA, 25 bp, Homo sapien
aattcggccgctcatgtttcagtgc

SEQ ID NO: 505856 - DNA, 25 bp, Homo sapien
caacaaatggtgcaaactggtctga

SEQ ID NO: 505857 - DNA, 25 bp, Homo sapien
gctcctgcggttatcagtaaggcca

SEQ ID NO: 505858 - DNA, 25 bp, Homo sapien
gaaactcattccataaggctgccgg

SEQ ID NO: 505859 - DNA, 25 bp, Homo sapien
tgctatttcttgaatgccgtgccag

SEQ ID NO: 505860 - DNA, 25 bp, Homo sapien
gttgttgtacacatagagagctggc

SEQ ID NO: 505861 - DNA, 25 bp, Homo sapien
cgaccttcagaggatcatccttttt

SEQ ID NO: 505862 - DNA, 25 bp, Homo sapien
ggtgaaaaccgcgttgttgtacaca

SEQ ID NO: 505863 - DNA, 25 bp, Homo sapien
tcagatacccaaaaacataaggcaa

SEQ ID NO: 505864 - DNA, 25 bp, Homo sapien
gaaaatcagttactactctacgtga

SEQ ID NO: 505865 - DNA, 25 bp, Homo sapien
tacaaaatctcttattcgaagggaa

SEQ ID NO: 505866 - DNA, 25 bp, Homo sapien
tcaaaaaagataccagggtgttctg

SEQ ID NO: 505867 - DNA, 25 bp, Homo sapien
ctaaatatacctatgcataaactcg

SEQ ID NO: 505868 - DNA, 25 bp, Homo sapien
gactgcaatagtggggtcttggctc

SEQ ID NO: 505869 - DNA, 25 bp, Homo sapien
aatatacctatgcataaactcgcaa

SEQ ID NO: 505870 - DNA, 25 bp, Homo sapien
tacctatgcataaactcgcaaaata

SEQ ID NO: 505871 - DNA, 25 bp, Homo sapien
atcttttgaccaaagagtctctgtt

SEQ ID NO: 505872 - DNA, 25 bp, Homo sapien
ctctgttccgtattgagtttcatca

SEQ ID NO: 505873 - DNA, 25 bp, Homo sapien
caaagagtctctgttccgtattgag

SEQ ID NO: 505874 - DNA, 25 bp, Homo sapien
ttttgaccaaagagtctctgttccg

SEQ ID NO: 505875 - DNA, 25 bp, Homo sapien
ggtggcgttgtctgaccaaatcgac

SEQ ID NO: 505876 - DNA, 25 bp, Homo sapien
caagtggtggcgttgtctgaccaaa

SEQ ID NO: 505877 - DNA, 25 bp, Homo sapien
tcaacaagtggtggcgttgtctgac

SEQ ID NO: 505878 - DNA, 25 bp, Homo sapien
aaatcaacaagtggtggcgttgtct

SEQ ID NO: 505879 - DNA, 25 bp, Homo sapien
gacggactctccttctattgctcag

SEQ ID NO: 505880 - DNA, 25 bp, Homo sapien
ttcagacggactctccttctattgc

SEQ ID NO: 505881 - DNA, 25 bp, Homo sapien
cggactctccttctattgctcaggc

SEQ ID NO: 505882 - DNA, 25 bp, Homo sapien
ttttcagacggactctccttctatt

SEQ ID NO: 505883 - DNA, 25 bp, Homo sapien
cagcctatcccactcacacttcttt

SEQ ID NO: 505884 - DNA, 25 bp, Homo sapien
catgcccagcctatcccactcacac

SEQ ID NO: 505885 - DNA, 25 bp, Homo sapien
tgcccagcctatcccactcacactt

SEQ ID NO: 505886 - DNA, 25 bp, Homo sapien
gcctatcccactcacacttcttttt

SEQ ID NO: 505887 - DNA, 25 bp, Homo sapien
gatgcatttggagataagtacgtac

SEQ ID NO: 505888 - DNA, 25 bp, Homo sapien
catgggccctgtactgtatagaaga

SEQ ID NO: 505889 - DNA, 25 bp, Homo sapien
cacagtattgttattcatgggccct

SEQ ID NO: 505890 - DNA, 25 bp, Homo sapien
tgttaaaactcaatctcggctggga

SEQ ID NO: 505891 - DNA, 25 bp, Homo sapien
ttttggaagtcagatctccaatctt

SEQ ID NO: 505892 - DNA, 25 bp, Homo sapien
taagccttttgattgaaggtttaca

SEQ ID NO: 505893 - DNA, 25 bp, Homo sapien
tctccaatcttgatccagtcagata

SEQ ID NO: 505894 - DNA, 25 bp, Homo sapien
caatttttggaagtcagatctccaa

SEQ ID NO: 505895 - DNA, 25 bp, Homo sapien
caacggaggctttcagtgtgaccac

SEQ ID NO: 505896 - DNA, 25 bp, Homo sapien
taaatggcagggctagccacaacgg

SEQ ID NO: 505897 - DNA, 25 bp, Homo sapien
cagcggttgtagacttcactaggcc

SEQ ID NO: 505898 - DNA, 25 bp, Homo sapien
tcaagtagaaccagaggaggaacca

SEQ ID NO: 505899 - DNA, 25 bp, Homo sapien
cagtctccgcgaagatacgttcctt

SEQ ID NO: 505900 - DNA, 25 bp, Homo sapien
ttcacatcgcgcacggtccaggacg

SEQ ID NO: 505901 - DNA, 25 bp, Homo sapien
gaagatacgttccttcacatcgcgc

SEQ ID NO: 505902 - DNA, 25 bp, Homo sapien
accgggaagccagtctccgcgaaga

SEQ ID NO: 505903 - DNA, 25 bp, Homo sapien
cagcccgcgccgaggaggaaacgct

SEQ ID NO: 505904 - DNA, 25 bp, Homo sapien
acgccggcgcccgatcacggccggc

SEQ ID NO: 505905 - DNA, 25 bp, Homo sapien
gcatggcgcagtcccgtacgcagca

SEQ ID NO: 505906 - DNA, 25 bp, Homo sapien
ccgggagggcgggatccgcatggcg

SEQ ID NO: 505907 - DNA, 25 bp, Homo sapien
ccttcagattcaacctcagccccag

SEQ ID NO: 505908 - DNA, 25 bp, Homo sapien
tgtgtggcctgtgcatatgtgttcc

SEQ ID NO: 505909 - DNA, 25 bp, Homo sapien
cagcacatcacattcgctctcggag

SEQ ID NO: 505910 - DNA, 25 bp, Homo sapien
acatcacattcgctctcggagctct

SEQ ID NO: 505911 - DNA, 25 bp, Homo sapien
agtaaacgttaactgtgcacactgc

SEQ ID NO: 505912 - DNA, 25 bp, Homo sapien
cactgcttgtgggacagaccctctg

SEQ ID NO: 505913 - DNA, 25 bp, Homo sapien
tccccaattctgtggtgttgagtaa

SEQ ID NO: 505914 - DNA, 25 bp, Homo sapien
tgttgagtaaacgttaactgtgcac

SEQ ID NO: 505915 - DNA, 25 bp, Homo sapien
gccttggtagcgccctctgagcact

SEQ ID NO: 505916 - DNA, 25 bp, Homo sapien
ttcacaaccaatacctaatacctct

SEQ ID NO: 505917 - DNA, 25 bp, Homo sapien
caatacctaatacctcttccaagtt

SEQ ID NO: 505918 - DNA, 25 bp, Homo sapien
cggccttggtagcgccctctgagca

SEQ ID NO: 505919 - DNA, 25 bp, Homo sapien
ctgcatcgtaatgtccaaatgtttc

SEQ ID NO: 505920 - DNA, 25 bp, Homo sapien
gcatcgtaatgtccaaatgtttccc

SEQ ID NO: 505921 - DNA, 25 bp, Homo sapien
tgcatcgtaatgtccaaatgtttcc

SEQ ID NO: 505922 - DNA, 25 bp, Homo sapien
ttttgcacctttctcagcccattct

SEQ ID NO: 505923 - DNA, 25 bp, Homo sapien
gcacctttctcagcccattctgttt

SEQ ID NO: 505924 - DNA, 25 bp, Homo sapien
tgctttttttgcacctttctcagcc

SEQ ID NO: 505925 - DNA, 25 bp, Homo sapien
tgcagcatctggctcctccctccat

SEQ ID NO: 505926 - DNA, 25 bp, Homo sapien
ggcccacccttgatagccccattca

SEQ ID NO: 505927 - DNA, 25 bp, Homo sapien
aattttgatggcccacccttgatag

SEQ ID NO: 505928 - DNA, 25 bp, Homo sapien
ttcaaaattgtctctctccccccaa

SEQ ID NO: 505929 - DNA, 25 bp, Homo sapien
cccttgatagccccattcaaatgtc

SEQ ID NO: 505930 - DNA, 25 bp, Homo sapien
taatatgcgaccacttttatgcagc

SEQ ID NO: 505931 - DNA, 25 bp, Homo sapien
ggctgcatctacatatgccagaagt

SEQ ID NO: 505932 - DNA, 25 bp, Homo sapien
tctattcactctacaagggtttaaa

SEQ ID NO: 505933 - DNA, 25 bp, Homo sapien
tagtaaaggttcacacatagatcat

SEQ ID NO: 505934 - DNA, 25 bp, Homo sapien
gtggagttggcccataaggagtccc

SEQ ID NO: 505935 - DNA, 25 bp, Homo sapien
gagttggcccataaggagtccccac

SEQ ID NO: 505936 - DNA, 25 bp, Homo sapien
ctttggttgcaggtggagttggccc

SEQ ID NO: 505937 - DNA, 25 bp, Homo sapien
ggcccataaggagtccccacaggag

SEQ ID NO: 505938 - DNA, 25 bp, Homo sapien
tttgcactaacatattctgaggctc

SEQ ID NO: 505939 - DNA, 25 bp, Homo sapien
ctgccttttgcactaacatattctg

SEQ ID NO: 505940 - DNA, 25 bp, Homo sapien
gcactaacatattctgaggctccaa

SEQ ID NO: 505941 - DNA, 25 bp, Homo sapien
catattctgaggctccaacatcttc

SEQ ID NO: 505942 - DNA, 25 bp, Homo sapien
catttatagttagtgtcagcgtcaa

SEQ ID NO: 505943 - DNA, 25 bp, Homo sapien
taaagtcgtctcaatactcttgtcc

SEQ ID NO: 505944 - DNA, 25 bp, Homo sapien
taatttagcatcagtaatggtgtgg

SEQ ID NO: 505945 - DNA, 25 bp, Homo sapien
aacctgctggttttagatgcatcaa

SEQ ID NO: 505946 - DNA, 25 bp, Homo sapien
gaagaattccctgatctctatggca

SEQ ID NO: 505947 - DNA, 25 bp, Homo sapien
tagcctcaccagtataaacaaaatg

SEQ ID NO: 505948 - DNA, 25 bp, Homo sapien
tagttccactgtctaatgggtaaca

SEQ ID NO: 505949 - DNA, 25 bp, Homo sapien
ggtaaagagcaatacagtgagttct

SEQ ID NO: 505950 - DNA, 25 bp, Homo sapien
cagcgacccatggaagttctcagga

SEQ ID NO: 505951 - DNA, 25 bp, Homo sapien
ggaaaacgtcgcagaaattcttgga

SEQ ID NO: 505952 - DNA, 25 bp, Homo sapien
taaaacagtgtggattcgctaaagg

SEQ ID NO: 505953 - DNA, 25 bp, Homo sapien
tctccagtctgataatggttgcctg

SEQ ID NO: 505954 - DNA, 25 bp, Homo sapien
gaatctgtgcgtcttctatgcaaag

SEQ ID NO: 505955 - DNA, 25 bp, Homo sapien
cttatattgcaatttcgggtcccac

SEQ ID NO: 505956 - DNA, 25 bp, Homo sapien
caaagcctgtggtgggtcttgctct

SEQ ID NO: 505957 - DNA, 25 bp, Homo sapien
tttcttccattcgaatctgtgcgtc

SEQ ID NO: 505958 - DNA, 25 bp, Homo sapien
aggagcctaatgtccaccagagtcc

SEQ ID NO: 505959 - DNA, 25 bp, Homo sapien
gtccaccaggagcctaatgtccacc

SEQ ID NO: 505960 - DNA, 25 bp, Homo sapien
accaggagcctaatgtccaccagag

SEQ ID NO: 505961 - DNA, 25 bp, Homo sapien
caggagcctaatgtccaccagagtc

SEQ ID NO: 505962 - DNA, 25 bp, Homo sapien
ctaaagtgtgggtatccacctagga

SEQ ID NO: 505963 - DNA, 25 bp, Homo sapien
tatccacctaggacctggtgtgcac

SEQ ID NO: 505964 - DNA, 25 bp, Homo sapien
ctgggtgtgagcgtggtacctgata

SEQ ID NO: 505965 - DNA, 25 bp, Homo sapien
ggtgtgcacctagggcctttgtcca

SEQ ID NO: 505966 - DNA, 25 bp, Homo sapien
ggtggtcatttgaaacctggtgttc

SEQ ID NO: 505967 - DNA, 25 bp, Homo sapien
gtcatttgaaacctggtgttctcca

SEQ ID NO: 505968 - DNA, 25 bp, Homo sapien
tcatttgaaacctggtgttctccag

SEQ ID NO: 505969 - DNA, 25 bp, Homo sapien
tggtcatttgaaacctggtgttctc

SEQ ID NO: 505970 - DNA, 25 bp, Homo sapien
ctgaggtgtagatatccacctgggt

SEQ ID NO: 505971 - DNA, 25 bp, Homo sapien
gaggtgtagatatccacctgggtcc

SEQ ID NO: 505972 - DNA, 25 bp, Homo sapien
acctgggtcctggatgtccagctgg

SEQ ID NO: 505973 - DNA, 25 bp, Homo sapien
tccagctggggccagatgtccagct

SEQ ID NO: 505974 - DNA, 25 bp, Homo sapien
gtctgatatgcacccaggcctgttg

SEQ ID NO: 505975 - DNA, 25 bp, Homo sapien
atatgcacccaggcctgttgcctac

SEQ ID NO: 505976 - DNA, 25 bp, Homo sapien
tgatatgcacccaggcctgttgcct

SEQ ID NO: 505977 - DNA, 25 bp, Homo sapien
gggtctgatatgcacccaggcctgt

SEQ ID NO: 505978 - DNA, 25 bp, Homo sapien
gaacgtccgtctgagtcctcggtat

SEQ ID NO: 505979 - DNA, 25 bp, Homo sapien
tgtccacatgggaactgggcatcca

SEQ ID NO: 505980 - DNA, 25 bp, Homo sapien
gagcctggtgcctgatatacatctt

SEQ ID NO: 505981 - DNA, 25 bp, Homo sapien
tagtgtcttatgttccccttgagcc

SEQ ID NO: 505982 - DNA, 25 bp, Homo sapien
cctgtccactgtggccctggtattt

SEQ ID NO: 505983 - DNA, 25 bp, Homo sapien
gcttcctgtccactgtggccctggt

SEQ ID NO: 505984 - DNA, 25 bp, Homo sapien
gggcttcctgtccactgtggccctg

SEQ ID NO: 505985 - DNA, 25 bp, Homo sapien
tcctgtccactgtggccctggtatt

SEQ ID NO: 505986 - DNA, 25 bp, Homo sapien
cctggtgttcaacgggggcccatgt

SEQ ID NO: 505987 - DNA, 25 bp, Homo sapien
ggaacagacatgcaccgagatgcct

SEQ ID NO: 505988 - DNA, 25 bp, Homo sapien
ccgagatgcctgatatccatctggg

SEQ ID NO: 505989 - DNA, 25 bp, Homo sapien
gggcccatgtgtcaacttgggaaca

SEQ ID NO: 505990 - DNA, 25 bp, Homo sapien
cacctcgagctggatggtcctctgg

SEQ ID NO: 505991 - DNA, 25 bp, Homo sapien
atccacttggggcctatgtgtccac

SEQ ID NO: 505992 - DNA, 25 bp, Homo sapien
ctgacatacagatgcccgatgtcca

SEQ ID NO: 505993 - DNA, 25 bp, Homo sapien
catacagatgcccgatgtccatctg

SEQ ID NO: 505994 - DNA, 25 bp, Homo sapien
ctggtttccacccgggacctgaatg

SEQ ID NO: 505995 - DNA, 25 bp, Homo sapien
tacagatgcccgatgtccatctggg

SEQ ID NO: 505996 - DNA, 25 bp, Homo sapien
cacctggggcctggtattaacctgg

SEQ ID NO: 505997 - DNA, 25 bp, Homo sapien
tggggcctggtattaacctgggcat

SEQ ID NO: 505998 - DNA, 25 bp, Homo sapien
tgtccacctggggcctggtattaac

SEQ ID NO: 505999 - DNA, 25 bp, Homo sapien
ctgggaccttgtgtccacctggggc

SEQ ID NO: 506000 - DNA, 25 bp, Homo sapien
caggggcctggtgtccacctggggc

SEQ ID NO: 506001 - DNA, 25 bp, Homo sapien
accaggggcctggtgtccacctggg

SEQ ID NO: 506002 - DNA, 25 bp, Homo sapien
ccaccaggggcctggtgtccacctg

SEQ ID NO: 506003 - DNA, 25 bp, Homo sapien
caccaggggcctggtgtccacctgg

SEQ ID NO: 506004 - DNA, 25 bp, Homo sapien
acatccaggaattcacccttctgca

SEQ ID NO: 506005 - DNA, 25 bp, Homo sapien
caacatccaggaattcacccttctg

SEQ ID NO: 506006 - DNA, 25 bp, Homo sapien
aacatccaggaattcacccttctgc

SEQ ID NO: 506007 - DNA, 25 bp, Homo sapien
tcaacatccaggaattcacccttct

SEQ ID NO: 506008 - DNA, 25 bp, Homo sapien
catttggggagtagcaccacctgat

SEQ ID NO: 506009 - DNA, 25 bp, Homo sapien
gagtagcaccacctgatggaagaga

SEQ ID NO: 506010 - DNA, 25 bp, Homo sapien
gaacattcttcggtcttctcctcac

SEQ ID NO: 506011 - DNA, 25 bp, Homo sapien
aagagaacattcttcggtcttctcc

SEQ ID NO: 506012 - DNA, 25 bp, Homo sapien
cccaggctgtccaagatcagaatag

SEQ ID NO: 506013 - DNA, 25 bp, Homo sapien
tgcaaagagcaaattgccacccagg

SEQ ID NO: 506014 - DNA, 25 bp, Homo sapien
gttgtacaaagagaatcggccttcc

SEQ ID NO: 506015 - DNA, 25 bp, Homo sapien
tagtagtcctcatgtaggctcatgg

SEQ ID NO: 506016 - DNA, 25 bp, Homo sapien
gaacagtgtttcgtgcatagcaaga

SEQ ID NO: 506017 - DNA, 25 bp, Homo sapien
catgcttcaccatggtggttaggta

SEQ ID NO: 506018 - DNA, 25 bp, Homo sapien
ccttttgggaaatggtgcatgaacc

SEQ ID NO: 506019 - DNA, 25 bp, Homo sapien
tcattcagatgcactcagccaaaag

SEQ ID NO: 506020 - DNA, 25 bp, Homo sapien
gaccccacgctgtgttactgcaaca

SEQ ID NO: 506021 - DNA, 25 bp, Homo sapien
tcttgaccgcggcagatctctctag

SEQ ID NO: 506022 - DNA, 25 bp, Homo sapien
tgacaaagcggctagtccagcatct

SEQ ID NO: 506023 - DNA, 25 bp, Homo sapien
tactgcaacagctccattgtggcgg

SEQ ID NO: 506024 - DNA, 25 bp, Homo sapien
catcagggtctctcggcctttgttt

SEQ ID NO: 506025 - DNA, 25 bp, Homo sapien
gcatcagggtctctcggcctttgtt

SEQ ID NO: 506026 - DNA, 25 bp, Homo sapien
agttcccagcgtgactgtcccgcag

SEQ ID NO: 506027 - DNA, 25 bp, Homo sapien
atcagcagttcccagcgtgactgtc

SEQ ID NO: 506028 - DNA, 25 bp, Homo sapien
acaagacttagaatccaatacggac

SEQ ID NO: 506029 - DNA, 25 bp, Homo sapien
ttgtaactcagtgtccccataggag

SEQ ID NO: 506030 - DNA, 25 bp, Homo sapien
caatacggacttggttatgaggaga

SEQ ID NO: 506031 - DNA, 25 bp, Homo sapien
gagagagtacatccagaaaaaccct

SEQ ID NO: 506032 - DNA, 25 bp, Homo sapien
tcgggttctcgagttccttctctca

SEQ ID NO: 506033 - DNA, 25 bp, Homo sapien
ggttctcgagttccttctctcacac

SEQ ID NO: 506034 - DNA, 25 bp, Homo sapien
ctctctcgggttctcgagttccttc

SEQ ID NO: 506035 - DNA, 25 bp, Homo sapien
tctcgggttctcgagttccttctct

SEQ ID NO: 506036 - DNA, 25 bp, Homo sapien
cacaacagtgacagtgccatggctt

SEQ ID NO: 506037 - DNA, 25 bp, Homo sapien
gaaacaaattggtctctggagactc

SEQ ID NO: 506038 - DNA, 25 bp, Homo sapien
gaatatgacaccaatgcccaggagt

SEQ ID NO: 506039 - DNA, 25 bp, Homo sapien
cctgcaggctttcgccagtgtcgct

SEQ ID NO: 506040 - DNA, 25 bp, Homo sapien
cactcattgttttgcatccaaggag

SEQ ID NO: 506041 - DNA, 25 bp, Homo sapien
aggagtctggaaataagcgggaaca

SEQ ID NO: 506042 - DNA, 25 bp, Homo sapien
tcttcactcattgttttgcatccaa

SEQ ID NO: 506043 - DNA, 25 bp, Homo sapien
ggagtctggaaataagcgggaacac

SEQ ID NO: 506044 - DNA, 25 bp, Homo sapien
tttattcctccagttccgcctgcag

SEQ ID NO: 506045 - DNA, 25 bp, Homo sapien
ctgcagcaaccctgacgatcgagca

SEQ ID NO: 506046 - DNA, 25 bp, Homo sapien
gagcgagcggaagcgggcagcgtgc

SEQ ID NO: 506047 - DNA, 25 bp, Homo sapien
acccagcccgctaggctgcgcagct

SEQ ID NO: 506048 - DNA, 25 bp, Homo sapien
ctgacggctgccgcctgtgggcgcc

SEQ ID NO: 506049 - DNA, 25 bp, Homo sapien
ggctgacggctgccgcctgtgggcg

SEQ ID NO: 506050 - DNA, 25 bp, Homo sapien
gggctgacggctgccgcctgtgggc

SEQ ID NO: 506051 - DNA, 25 bp, Homo sapien
cgggctgacggctgccgcctgtggg

SEQ ID NO: 506052 - DNA, 25 bp, Homo sapien
ctgcagccgagcgggaggggcggac

SEQ ID NO: 506053 - DNA, 25 bp, Homo sapien
tacacggcgattcggtgctttccgg

SEQ ID NO: 506054 - DNA, 25 bp, Homo sapien
gatgcccatgctggtgacgccttgg

SEQ ID NO: 506055 - DNA, 25 bp, Homo sapien
tatacttggtgaccggtctacacgg

SEQ ID NO: 506056 - DNA, 25 bp, Homo sapien
ttcccgatagccaagcagaagtagg

SEQ ID NO: 506057 - DNA, 25 bp, Homo sapien
tgcagctgtgttaagcggttgccat

SEQ ID NO: 506058 - DNA, 25 bp, Homo sapien
caccgctcataacttgatgtggaca

SEQ ID NO: 506059 - DNA, 25 bp, Homo sapien
acaagagctcaactgggcatcgcca

SEQ ID NO: 506060 - DNA, 25 bp, Homo sapien
ggcaaggagactaagcaactgatct

SEQ ID NO: 506061 - DNA, 25 bp, Homo sapien
gtccaataaccttggtgacagccac

SEQ ID NO: 506062 - DNA, 25 bp, Homo sapien
gattcatgccgcagacaacacggtg

SEQ ID NO: 506063 - DNA, 25 bp, Homo sapien
gggttagtagacaaagccagtgaag

SEQ ID NO: 506064 - DNA, 25 bp, Homo sapien
gccacagcctggcaagattcatgcc

SEQ ID NO: 506065 - DNA, 25 bp, Homo sapien
agcttatgttcttcatgagtgacat

SEQ ID NO: 506066 - DNA, 25 bp, Homo sapien
tcttcatgagtgacatggcaaatcc

SEQ ID NO: 506067 - DNA, 25 bp, Homo sapien
gacatggcaaatccggttgacacac

SEQ ID NO: 506068 - DNA, 25 bp, Homo sapien
catgagtgacatggcaaatccggtt

SEQ ID NO: 506069 - DNA, 25 bp, Homo sapien
catggggaccctcgtctacaagcat

SEQ ID NO: 506070 - DNA, 25 bp, Homo sapien
gaaaacatggggaccctcgtctaca

SEQ ID NO: 506071 - DNA, 25 bp, Homo sapien
tttctggctttctctcagacctaag

SEQ ID NO: 506072 - DNA, 25 bp, Homo sapien
tctttctggctttctctcagaccta

SEQ ID NO: 506073 - DNA, 25 bp, Homo sapien
taatatcagtcattcgcctctaaga

SEQ ID NO: 506074 - DNA, 25 bp, Homo sapien
tcagaccctcgtgacctagaaggag

SEQ ID NO: 506075 - DNA, 25 bp, Homo sapien
gagaagtgactaaatcggaatcaga

SEQ ID NO: 506076 - DNA, 25 bp, Homo sapien
taaggcttagaaggtctagggacaa

SEQ ID NO: 506077 - DNA, 25 bp, Homo sapien
tctttgaaggtaggagcgctatctt

SEQ ID NO: 506078 - DNA, 25 bp, Homo sapien
ttgaaggtaggagcgctatcttcat

SEQ ID NO: 506079 - DNA, 25 bp, Homo sapien
gtttctttgaaggtaggagcgctat

SEQ ID NO: 506080 - DNA, 25 bp, Homo sapien
ccagtttctttgaaggtaggagcgc

SEQ ID NO: 506081 - DNA, 25 bp, Homo sapien
caaatcaggttaaaagatcccgcca

SEQ ID NO: 506082 - DNA, 25 bp, Homo sapien
agttctggaccttaaggatgctgcc

SEQ ID NO: 506083 - DNA, 25 bp, Homo sapien
tctaggagtacaaaagccgaatggt

SEQ ID NO: 506084 - DNA, 25 bp, Homo sapien
catctgtttggtgaggcacggccca

SEQ ID NO: 506085 - DNA, 25 bp, Homo sapien
catccttcctacgtaaccagttcat

SEQ ID NO: 506086 - DNA, 25 bp, Homo sapien
tagctacacagtatgtatttctgca

SEQ ID NO: 506087 - DNA, 25 bp, Homo sapien
tatcatacatattgtcatgcaactt

SEQ ID NO: 506088 - DNA, 25 bp, Homo sapien
ttttaatgggtttatatcatacata

SEQ ID NO: 506089 - DNA, 25 bp, Homo sapien
gctgtaacttggtgtcatgacaacg

SEQ ID NO: 506090 - DNA, 25 bp, Homo sapien
gatgagccaagtgtactgcaacatg

SEQ ID NO: 506091 - DNA, 25 bp, Homo sapien
tgcagaaccaggtcgctgaaaggca

SEQ ID NO: 506092 - DNA, 25 bp, Homo sapien
ggagtgctggatctcttatcaccac

SEQ ID NO: 506093 - DNA, 25 bp, Homo sapien
tctttctgtgatggcaaggccagtc

SEQ ID NO: 506094 - DNA, 25 bp, Homo sapien
aaaacgttgtccacctgggtgagct

SEQ ID NO: 506095 - DNA, 25 bp, Homo sapien
ctttctgtgatggcaaggccagtcc

SEQ ID NO: 506096 - DNA, 25 bp, Homo sapien
taaaacgttgtccacctgggtgagc

SEQ ID NO: 506097 - DNA, 25 bp, Homo sapien
ctggtgctacagctgtggtgcagac

SEQ ID NO: 506098 - DNA, 25 bp, Homo sapien
gcgattctcttaaccctttcagcaa

SEQ ID NO: 506099 - DNA, 25 bp, Homo sapien
tttcagcaaaactgcccagtgagtc

SEQ ID NO: 506100 - DNA, 25 bp, Homo sapien
gcagacgcccttccgctgcgagggt

SEQ ID NO: 506101 - DNA, 25 bp, Homo sapien
ctgaggagccgaggtctgcgacctc

SEQ ID NO: 506102 - DNA, 25 bp, Homo sapien
agcaagtccggctgacgcagtgtgc

SEQ ID NO: 506103 - DNA, 25 bp, Homo sapien
catgttcttggtggtctccggtccc

SEQ ID NO: 506104 - DNA, 25 bp, Homo sapien
tcatccgcttcagtagccgcggagt

SEQ ID NO: 506105 - DNA, 25 bp, Homo sapien
tggatccccgctgggtgggagccgg

SEQ ID NO: 506106 - DNA, 25 bp, Homo sapien
ggctgggaaggtaggtgcgtcgctg

SEQ ID NO: 506107 - DNA, 25 bp, Homo sapien
gaaggtaggtgcgtcgctgtccccg

SEQ ID NO: 506108 - DNA, 25 bp, Homo sapien
tcagccctcgccctggtggatcccc

SEQ ID NO: 506109 - DNA, 25 bp, Homo sapien
gacctggactcctatccgggatatt

SEQ ID NO: 506110 - DNA, 25 bp, Homo sapien
tgtgagcggcccagggtatattcct

SEQ ID NO: 506111 - DNA, 25 bp, Homo sapien
aatagatctgcttgtgaggctcacg

SEQ ID NO: 506112 - DNA, 25 bp, Homo sapien
ccttctgtgggaaagagttccttag

SEQ ID NO: 506113 - DNA, 25 bp, Homo sapien
tctttctaagtcagatgatccactt

SEQ ID NO: 506114 - DNA, 25 bp, Homo sapien
tctgcctccttggttgttgtcgttg

SEQ ID NO: 506115 - DNA, 25 bp, Homo sapien
ttcttgagctgtttgcccatggttc

SEQ ID NO: 506116 - DNA, 25 bp, Homo sapien
tgatagccgctcagcctgcagcgga

SEQ ID NO: 506117 - DNA, 25 bp, Homo sapien
gcagccagatgaggcttcgcttttt

SEQ ID NO: 506118 - DNA, 25 bp, Homo sapien
gccagatgaggcttcgctttttctt

SEQ ID NO: 506119 - DNA, 25 bp, Homo sapien
ggtgcagccagatgaggcttcgctt

SEQ ID NO: 506120 - DNA, 25 bp, Homo sapien
atggtgcagccagatgaggcttcgc

SEQ ID NO: 506121 - DNA, 25 bp, Homo sapien
ctttgaagagttccgagagttgggc

SEQ ID NO: 506122 - DNA, 25 bp, Homo sapien
tgtcctgattgttagaaattattat

SEQ ID NO: 506123 - DNA, 25 bp, Homo sapien
cagatttggatggcacttctacttt

SEQ ID NO: 506124 - DNA, 25 bp, Homo sapien
accaaggattttactggtgtcctga

SEQ ID NO: 506125 - DNA, 25 bp, Homo sapien
gacccatctgtttccggtcctccat

SEQ ID NO: 506126 - DNA, 25 bp, Homo sapien
ccaccagttcccgacccatctgttt

SEQ ID NO: 506127 - DNA, 25 bp, Homo sapien
ctctgagctacgctcgaccttgcca

SEQ ID NO: 506128 - DNA, 25 bp, Homo sapien
gctacgctcgaccttgccaccagtt

SEQ ID NO: 506129 - DNA, 25 bp, Homo sapien
tgcttccttccctgtaagccccaag

SEQ ID NO: 506130 - DNA, 25 bp, Homo sapien
ttccttccctgtaagccccaagcag

SEQ ID NO: 506131 - DNA, 25 bp, Homo sapien
caggcgcctctcgctagttcctttg

SEQ ID NO: 506132 - DNA, 25 bp, Homo sapien
gcgcctctcgctagttcctttgctt

SEQ ID NO: 506133 - DNA, 25 bp, Homo sapien
aaagcccatggtttgtggaagacag

SEQ ID NO: 506134 - DNA, 25 bp, Homo sapien
aggttcaaagcagggattccctcca

SEQ ID NO: 506135 - DNA, 25 bp, Homo sapien
ccagccatggtggagaggattagaa

SEQ ID NO: 506136 - DNA, 25 bp, Homo sapien
catttgatgccttttagtgtggagc

SEQ ID NO: 506137 - DNA, 25 bp, Homo sapien
ccttgactgagtgagttgacagcac

SEQ ID NO: 506138 - DNA, 25 bp, Homo sapien
aaagttgaatgccttgactgagtga

SEQ ID NO: 506139 - DNA, 25 bp, Homo sapien
atggaaaagttgaatgccttgactg

SEQ ID NO: 506140 - DNA, 25 bp, Homo sapien
gaatgccttgactgagtgagttgac

SEQ ID NO: 506141 - DNA, 25 bp, Homo sapien
gggccttctgagaacagtagcagtt

SEQ ID NO: 506142 - DNA, 25 bp, Homo sapien
ttcaaagtcgctgtgtgcctgagcc

SEQ ID NO: 506143 - DNA, 25 bp, Homo sapien
gcagttgattattacccagtcacca

SEQ ID NO: 506144 - DNA, 25 bp, Homo sapien
caccaataaatcgaatttctctggc

SEQ ID NO: 506145 - DNA, 25 bp, Homo sapien
ggataaatactaagctgctgtaaca

SEQ ID NO: 506146 - DNA, 25 bp, Homo sapien
tgccaggaacccttatagatgttaa

SEQ ID NO: 506147 - DNA, 25 bp, Homo sapien
taattggctaggataaatactaagc

SEQ ID NO: 506148 - DNA, 25 bp, Homo sapien
tgggagatgtaattggctaggataa

SEQ ID NO: 506149 - DNA, 25 bp, Homo sapien
tgctgaggatattctcccgataagg

SEQ ID NO: 506150 - DNA, 25 bp, Homo sapien
gcattgacgtcagtgccctttgtga

SEQ ID NO: 506151 - DNA, 25 bp, Homo sapien
tgttcagtggtttcacttgtcccct

SEQ ID NO: 506152 - DNA, 25 bp, Homo sapien
tgaggacacgtctaatggctacact

SEQ ID NO: 506153 - DNA, 25 bp, Homo sapien
agagaaatcttattcccaactattt

SEQ ID NO: 506154 - DNA, 25 bp, Homo sapien
gaaatcttattcccaactatttctg

SEQ ID NO: 506155 - DNA, 25 bp, Homo sapien
gagaaatcttattcccaactatttc

SEQ ID NO: 506156 - DNA, 25 bp, Homo sapien
gattgttataagagaaatcttattc

SEQ ID NO: 506157 - DNA, 25 bp, Homo sapien
gaaatttagcagatttaacttgtaa

SEQ ID NO: 506158 - DNA, 25 bp, Homo sapien
gttgctgttttaggaagcttaaaga

SEQ ID NO: 506159 - DNA, 25 bp, Homo sapien
gcagatttaacttgtaagacattat

SEQ ID NO: 506160 - DNA, 25 bp, Homo sapien
tgttgctgttttaggaagcttaaag

SEQ ID NO: 506161 - DNA, 25 bp, Homo sapien
cagtagaagcgtgtgctggaaccca

SEQ ID NO: 506162 - DNA, 25 bp, Homo sapien
tgttaggcttatggactgagcagtc

SEQ ID NO: 506163 - DNA, 25 bp, Homo sapien
ggactgagcagtctggaccttgcat

SEQ ID NO: 506164 - DNA, 25 bp, Homo sapien
ctggaacccaaagagtactcctttg

SEQ ID NO: 506165 - DNA, 25 bp, Homo sapien
cagaccagctgtaagctgaaacctc

SEQ ID NO: 506166 - DNA, 25 bp, Homo sapien
gactccaggccgactcatgatactc

SEQ ID NO: 506167 - DNA, 25 bp, Homo sapien
aaactgacggcatttgaagcctttc

SEQ ID NO: 506168 - DNA, 25 bp, Homo sapien
atctgaaccaaactgacggcatttg

SEQ ID NO: 506169 - DNA, 25 bp, Homo sapien
tcaagaactcttaggaacattgcct

SEQ ID NO: 506170 - DNA, 25 bp, Homo sapien
caagcggtcatgtcaacctagtgcc

SEQ ID NO: 506171 - DNA, 25 bp, Homo sapien
caatgatcctttggtagtcaagaac

SEQ ID NO: 506172 - DNA, 25 bp, Homo sapien
tactagcttgcctgtgtctggtaca

SEQ ID NO: 506173 - DNA, 25 bp, Homo sapien
gtgctgcagaagctcgttgacaaga

SEQ ID NO: 506174 - DNA, 25 bp, Homo sapien
tgaatgggcataaccactgtggctt

SEQ ID NO: 506175 - DNA, 25 bp, Homo sapien
ggtaatgcgtgtggctgaatgggca

SEQ ID NO: 506176 - DNA, 25 bp, Homo sapien
tcaggagggctgtgtcgggtaatgc

SEQ ID NO: 506177 - DNA, 25 bp, Homo sapien
tggcctttttatcctgggcctggga

SEQ ID NO: 506178 - DNA, 25 bp, Homo sapien
gcatcaagcaccttcgtggcctttt

SEQ ID NO: 506179 - DNA, 25 bp, Homo sapien
gcctgggatgcactctcatggtcct

SEQ ID NO: 506180 - DNA, 25 bp, Homo sapien
tgtggattgcatcaagcaccttcgt

SEQ ID NO: 506181 - DNA, 25 bp, Homo sapien
gatggcctgccagacacagagtggc

SEQ ID NO: 506182 - DNA, 25 bp, Homo sapien
ccagaggaggatgcttttcccaaca

SEQ ID NO: 506183 - DNA, 25 bp, Homo sapien
gacacgctcccctggagagcaggag

SEQ ID NO: 506184 - DNA, 25 bp, Homo sapien
caacactctgctgagatgcatgcct

SEQ ID NO: 506185 - DNA, 25 bp, Homo sapien
ctgaggctgtcctggacctgacatg

SEQ ID NO: 506186 - DNA, 25 bp, Homo sapien
actgactgagccctgtgtggagtac

SEQ ID NO: 506187 - DNA, 25 bp, Homo sapien
gttccatccagtgtcaggtccatgc

SEQ ID NO: 506188 - DNA, 25 bp, Homo sapien
aggtccatgcaaccggcactgactg

SEQ ID NO: 506189 - DNA, 25 bp, Homo sapien
ggatcgcaggccaagccttttggaa

SEQ ID NO: 506190 - DNA, 25 bp, Homo sapien
ctgggcctccatgcctacaggatcg

SEQ ID NO: 506191 - DNA, 25 bp, Homo sapien
aagacatgcgctaatgcttgcagga

SEQ ID NO: 506192 - DNA, 25 bp, Homo sapien
ttttcatttgattgttgtcgtggca

SEQ ID NO: 506193 - DNA, 25 bp, Homo sapien
gggctgtcggccgatattcccgtga

SEQ ID NO: 506194 - DNA, 25 bp, Homo sapien
tgctgtggcttcttcgagggctgtc

SEQ ID NO: 506195 - DNA, 25 bp, Homo sapien
attcatccgacaccagccatcttgg

SEQ ID NO: 506196 - DNA, 25 bp, Homo sapien
attcccgtgaagtccctgccagctg

SEQ ID NO: 506197 - DNA, 25 bp, Homo sapien
acaggaaagccagccggtcacttgt

SEQ ID NO: 506198 - DNA, 25 bp, Homo sapien
caaaagattcctgatgcccagctca

SEQ ID NO: 506199 - DNA, 25 bp, Homo sapien
taatcagaggaaccaaatgcttttc

SEQ ID NO: 506200 - DNA, 25 bp, Homo sapien
gactgaagaccccacggcattggta

SEQ ID NO: 506201 - DNA, 25 bp, Homo sapien
cttcggacagcagagaggtttagat

SEQ ID NO: 506202 - DNA, 25 bp, Homo sapien
tcatggactgaggaagcaagcgatc

SEQ ID NO: 506203 - DNA, 25 bp, Homo sapien
aagcggtgactaagagccgtggcca

SEQ ID NO: 506204 - DNA, 25 bp, Homo sapien
catagaggccgtaactgagggtgct

SEQ ID NO: 506205 - DNA, 25 bp, Homo sapien
tggcccagatacaggccagtggtga

SEQ ID NO: 506206 - DNA, 25 bp, Homo sapien
ctgcaagtttgcaaatcaaaaggct

SEQ ID NO: 506207 - DNA, 25 bp, Homo sapien
gactccctggatggatggcgcagct

SEQ ID NO: 506208 - DNA, 25 bp, Homo sapien
tcagctagtgtgtgatactccatgt

SEQ ID NO: 506209 - DNA, 25 bp, Homo sapien
ggaaagcatgaagggtcgatccccc

SEQ ID NO: 506210 - DNA, 25 bp, Homo sapien
cacaggccggccactgatgatgttt

SEQ ID NO: 506211 - DNA, 25 bp, Homo sapien
cgatttggatttctaagggtgagga

SEQ ID NO: 506212 - DNA, 25 bp, Homo sapien
gctttctggtcagtaccgatttgga

SEQ ID NO: 506213 - DNA, 25 bp, Homo sapien
accagttgcttgacactggtatgtc

SEQ ID NO: 506214 - DNA, 25 bp, Homo sapien
cagtatggtatgcaatactgtaaag

SEQ ID NO: 506215 - DNA, 25 bp, Homo sapien
catggtctgtttcctgattcaccag

SEQ ID NO: 506216 - DNA, 25 bp, Homo sapien
ggtatgcaatactgtaaagcaaatg

SEQ ID NO: 506217 - DNA, 25 bp, Homo sapien
agaaatggtcatcattcttaaaaga

SEQ ID NO: 506218 - DNA, 25 bp, Homo sapien
gagtctatttgcctaaacattcagg

SEQ ID NO: 506219 - DNA, 25 bp, Homo sapien
taagtgtaacctgtctgaagactgc

SEQ ID NO: 506220 - DNA, 25 bp, Homo sapien
tctaagcctactttagatagtggtc

SEQ ID NO: 506221 - DNA, 25 bp, Homo sapien
ccatgtagaagtgttgttgttacta

SEQ ID NO: 506222 - DNA, 25 bp, Homo sapien
gagtggttatactaaggaaatgccc

SEQ ID NO: 506223 - DNA, 25 bp, Homo sapien
tcagagatttccatgtgctcaaata

SEQ ID NO: 506224 - DNA, 25 bp, Homo sapien
tgcccataccctccatttaacaatg

SEQ ID NO: 506225 - DNA, 25 bp, Homo sapien
cagaattacagaagcgaacaatgaa

SEQ ID NO: 506226 - DNA, 25 bp, Homo sapien
ttacagaagcgaacaatgaaatcag

SEQ ID NO: 506227 - DNA, 25 bp, Homo sapien
tacagaagcgaacaatgaaatcaga

SEQ ID NO: 506228 - DNA, 25 bp, Homo sapien
aattacagaagcgaacaatgaaatc

SEQ ID NO: 506229 - DNA, 25 bp, Homo sapien
tccatgaggaaagtttcgaagtcca

SEQ ID NO: 506230 - DNA, 25 bp, Homo sapien
gaatccatgaggaaagtttcgaagt

SEQ ID NO: 506231 - DNA, 25 bp, Homo sapien
cagaatccatgaggaaagtttcgaa

SEQ ID NO: 506232 - DNA, 25 bp, Homo sapien
tgaggaaagtttcgaagtccagatc

SEQ ID NO: 506233 - DNA, 25 bp, Homo sapien
tcaacagaaggacacttctgaagca

SEQ ID NO: 506234 - DNA, 25 bp, Homo sapien
caacagaaggacacttctgaagcat

SEQ ID NO: 506235 - DNA, 25 bp, Homo sapien
tccacacactagaggaacactctgg

SEQ ID NO: 506236 - DNA, 25 bp, Homo sapien
tcagaactgcgttcaccaggaggca

SEQ ID NO: 506237 - DNA, 25 bp, Homo sapien
tatatgactatacccttagagactg

SEQ ID NO: 506238 - DNA, 25 bp, Homo sapien
tctggctgtataacctgaatgcaag

SEQ ID NO: 506239 - DNA, 25 bp, Homo sapien
ccagcttttcctgcgggctacgtga

SEQ ID NO: 506240 - DNA, 25 bp, Homo sapien
ttaaagccaggccagttacccgata

SEQ ID NO: 506241 - DNA, 25 bp, Homo sapien
ctggatacatggacaccccgaagta

SEQ ID NO: 506242 - DNA, 25 bp, Homo sapien
cagccattagaaagtgggtccaccc

SEQ ID NO: 506243 - DNA, 25 bp, Homo sapien
tacaagcagtcacgactgtgcccat

SEQ ID NO: 506244 - DNA, 25 bp, Homo sapien
tttacaagcagtcacgactgtgccc

SEQ ID NO: 506245 - DNA, 25 bp, Homo sapien
tctgtggagcacactttacaagcag

SEQ ID NO: 506246 - DNA, 25 bp, Homo sapien
acggcttccgttctgtggagcacac

SEQ ID NO: 506247 - DNA, 25 bp, Homo sapien
gacctgcggaaacctgttaagcctg

SEQ ID NO: 506248 - DNA, 25 bp, Homo sapien
tctgaaaactatgatccagtggacc

SEQ ID NO: 506249 - DNA, 25 bp, Homo sapien
gagatgtcgtttctctcaactggca

SEQ ID NO: 506250 - DNA, 25 bp, Homo sapien
gactctgctgcatgctcgcctttaa

SEQ ID NO: 506251 - DNA, 25 bp, Homo sapien
gctttgataagccagagttggttct

SEQ ID NO: 506252 - DNA, 25 bp, Homo sapien
gaatgcagaaaggtctatggctggc

SEQ ID NO: 506253 - DNA, 25 bp, Homo sapien
caaagaccaactctgtagacccagg

SEQ ID NO: 506254 - DNA, 25 bp, Homo sapien
gattgagtcttgagccgaatgcaga

SEQ ID NO: 506255 - DNA, 25 bp, Homo sapien
aaatgattctgtctttcctccgatt

SEQ ID NO: 506256 - DNA, 25 bp, Homo sapien
ttaatgcctgatttctactccccac

SEQ ID NO: 506257 - DNA, 25 bp, Homo sapien
cataaagtctgggtgatacacaagc

SEQ ID NO: 506258 - DNA, 25 bp, Homo sapien
tacacaagcaagctttaatgcctga

SEQ ID NO: 506259 - DNA, 25 bp, Homo sapien
gaaactgaatccgacaggcttggga

SEQ ID NO: 506260 - DNA, 25 bp, Homo sapien
cgtgacagtcataaccatgcaacca

SEQ ID NO: 506261 - DNA, 25 bp, Homo sapien
tctataacaactgaagcacggagct

SEQ ID NO: 506262 - DNA, 25 bp, Homo sapien
gagctgaattctcgcagtggccgaa

SEQ ID NO: 506263 - DNA, 25 bp, Homo sapien
atctccctgcgatagcgctccccgg

SEQ ID NO: 506264 - DNA, 25 bp, Homo sapien
cttcaaccatgagcatgggctccct

SEQ ID NO: 506265 - DNA, 25 bp, Homo sapien
aaccatgagcatgggctccctgcct

SEQ ID NO: 506266 - DNA, 25 bp, Homo sapien
tgggccagcatctccctgcgatagc

SEQ ID NO: 506267 - DNA, 25 bp, Homo sapien
ctgttacagactcctgcttgcacag

SEQ ID NO: 506268 - DNA, 25 bp, Homo sapien
gccatattcataaaagctgccacca

SEQ ID NO: 506269 - DNA, 25 bp, Homo sapien
ccatattcataaaagctgccaccat

SEQ ID NO: 506270 - DNA, 25 bp, Homo sapien
tgccatattcataaaagctgccacc

SEQ ID NO: 506271 - DNA, 25 bp, Homo sapien
taaattaaatcaggtgtgacatatt

SEQ ID NO: 506272 - DNA, 25 bp, Homo sapien
ttaaatcaggtgtgacatattccct

SEQ ID NO: 506273 - DNA, 25 bp, Homo sapien
attaaatcaggtgtgacatattccc

SEQ ID NO: 506274 - DNA, 25 bp, Homo sapien
aattaaatcaggtgtgacatattcc

SEQ ID NO: 506275 - DNA, 25 bp, Homo sapien
cttccaaaccatggaggcgaccgct

SEQ ID NO: 506276 - DNA, 25 bp, Homo sapien
taccccacgaggtggctgaatcgca

SEQ ID NO: 506277 - DNA, 25 bp, Homo sapien
cgaggtggctgaatcgcagctgcca

SEQ ID NO: 506278 - DNA, 25 bp, Homo sapien
agcaccataccccacgaggtggctg

SEQ ID NO: 506279 - DNA, 25 bp, Homo sapien
taagagtaatatctagcaccatacc

SEQ ID NO: 506280 - DNA, 25 bp, Homo sapien
tggtatcttggaagaggaggaaagg

SEQ ID NO: 506281 - DNA, 25 bp, Homo sapien
agaggaggaaaggtggatgccaggg

SEQ ID NO: 506282 - DNA, 25 bp, Homo sapien
gaagaggaggaaaggtggatgccag

SEQ ID NO: 506283 - DNA, 25 bp, Homo sapien
aggaggaaaggtggatgccagggtg

SEQ ID NO: 506284 - DNA, 25 bp, Homo sapien
gatacgagcacttgtactactgatg

SEQ ID NO: 506285 - DNA, 25 bp, Homo sapien
gaagccccggaatttgtagcataca

SEQ ID NO: 506286 - DNA, 25 bp, Homo sapien
tactgatgataagcgtctctcaggg

SEQ ID NO: 506287 - DNA, 25 bp, Homo sapien
tggtagcctttctcgtatgaagcag

SEQ ID NO: 506288 - DNA, 25 bp, Homo sapien
catgggattctttcacaatgacatt

SEQ ID NO: 506289 - DNA, 25 bp, Homo sapien
ctcgacagcaatctgctgaatgaat

SEQ ID NO: 506290 - DNA, 25 bp, Homo sapien
tggacagatggacaccatgggattc

SEQ ID NO: 506291 - DNA, 25 bp, Homo sapien
gtactggaagcacaacgggaactcg

SEQ ID NO: 506292 - DNA, 25 bp, Homo sapien
ctatataccaatgatgatgtgacac

SEQ ID NO: 506293 - DNA, 25 bp, Homo sapien
tatataccaatgatgatgtgacact

SEQ ID NO: 506294 - DNA, 25 bp, Homo sapien
tgactatataccaatgatgatgtga

SEQ ID NO: 506295 - DNA, 25 bp, Homo sapien
tataccaatgatgatgtgacactgt

SEQ ID NO: 506296 - DNA, 25 bp, Homo sapien
aacaaccatccaaaaaggcctctga

SEQ ID NO: 506297 - DNA, 25 bp, Homo sapien
ttttcttcgccggattcttttgagc

SEQ ID NO: 506298 - DNA, 25 bp, Homo sapien
cttcgccggattcttttgagcatct

SEQ ID NO: 506299 - DNA, 25 bp, Homo sapien
ctctgatatggaataatcctattca

SEQ ID NO: 506300 - DNA, 25 bp, Homo sapien
gctaagtgtgaacaggactctcgat

SEQ ID NO: 506301 - DNA, 25 bp, Homo sapien
aaaggtgaacaccagatgccagatg

SEQ ID NO: 506302 - DNA, 25 bp, Homo sapien
tctgcaaaaggaagctactcgccct

SEQ ID NO: 506303 - DNA, 25 bp, Homo sapien
tagacttgaaaagagcgatttgccc

SEQ ID NO: 506304 - DNA, 25 bp, Homo sapien
acagccaacaccagatcccacaacc

SEQ ID NO: 506305 - DNA, 25 bp, Homo sapien
acaccagatcccacaaccaccctga

SEQ ID NO: 506306 - DNA, 25 bp, Homo sapien
cggctgcacagccaacaccagatcc

SEQ ID NO: 506307 - DNA, 25 bp, Homo sapien
acaaccaccctgaccgtggccacac

SEQ ID NO: 506308 - DNA, 25 bp, Homo sapien
taactgcttcaattgggaagtgtga

SEQ ID NO: 506309 - DNA, 25 bp, Homo sapien
tctcataccatgcaaccctgctgaa

SEQ ID NO: 506310 - DNA, 25 bp, Homo sapien
gcagctgaggttttgatagagattg

SEQ ID NO: 506311 - DNA, 25 bp, Homo sapien
tgtgagccctctagctttgttcctt

SEQ ID NO: 506312 - DNA, 25 bp, Homo sapien
cagcacagagggtaactttagattt

SEQ ID NO: 506313 - DNA, 25 bp, Homo sapien
acagaaaatatatagtgcacagcac

SEQ ID NO: 506314 - DNA, 25 bp, Homo sapien
gatttttcaaactgtgcaccagtat

SEQ ID NO: 506315 - DNA, 25 bp, Homo sapien
caccagtatctactaatggtttgta

SEQ ID NO: 506316 - DNA, 25 bp, Homo sapien
caagtcccagtgatgtgcaagtctc

SEQ ID NO: 506317 - DNA, 25 bp, Homo sapien
gatgggtgatctcgtggcttattct

SEQ ID NO: 506318 - DNA, 25 bp, Homo sapien
ggcttattctgactttacccatggg

SEQ ID NO: 506319 - DNA, 25 bp, Homo sapien
tctaacatggtagcatcagaatgca

SEQ ID NO: 506320 - DNA, 25 bp, Homo sapien
ggtttgacggtacacatggttacac

SEQ ID NO: 506321 - DNA, 25 bp, Homo sapien
tagactagtttgagattgactccac

SEQ ID NO: 506322 - DNA, 25 bp, Homo sapien
taaattcaatcaggacagagtgttc

SEQ ID NO: 506323 - DNA, 25 bp, Homo sapien
tgtgcttctctaaactaactgtggc

SEQ ID NO: 506324 - DNA, 25 bp, Homo sapien
gcaactagctgtgcattatcatggg

SEQ ID NO: 506325 - DNA, 25 bp, Homo sapien
taatcacatatggtcatggaaggct

SEQ ID NO: 506326 - DNA, 25 bp, Homo sapien
tgtgcaagacaccaagataaactat

SEQ ID NO: 506327 - DNA, 25 bp, Homo sapien
gggcacgaatcaccataaccatgct

SEQ ID NO: 506328 - DNA, 25 bp, Homo sapien
aagccactatacagccaatgtaacc

SEQ ID NO: 506329 - DNA, 25 bp, Homo sapien
tcaagccactatacagccaatgtaa

SEQ ID NO: 506330 - DNA, 25 bp, Homo sapien
caagccactatacagccaatgtaac

SEQ ID NO: 506331 - DNA, 25 bp, Homo sapien
aggcatgtaccaccacgcgcagctg

SEQ ID NO: 506332 - DNA, 25 bp, Homo sapien
acaggcatgtaccaccacgcgcagc

SEQ ID NO: 506333 - DNA, 25 bp, Homo sapien
catgtaccaccacgcgcagctgatt

SEQ ID NO: 506334 - DNA, 25 bp, Homo sapien
gcatgtaccaccacgcgcagctgat

SEQ ID NO: 506335 - DNA, 25 bp, Homo sapien
ttttgtgtgcagtgtgatacagggc

SEQ ID NO: 506336 - DNA, 25 bp, Homo sapien
ccaccaacttgatgtcgggaatgtt

SEQ ID NO: 506337 - DNA, 25 bp, Homo sapien
ttctaagtaggaagagtaggctatc

SEQ ID NO: 506338 - DNA, 25 bp, Homo sapien
taatttgctgagtctgccgttgggc

SEQ ID NO: 506339 - DNA, 25 bp, Homo sapien
aaacagaagccaaatgctggactca

SEQ ID NO: 506340 - DNA, 25 bp, Homo sapien
aatacacaaaacagaagccaaatgc

SEQ ID NO: 506341 - DNA, 25 bp, Homo sapien
tcaatacacaaaacagaagccaaat

SEQ ID NO: 506342 - DNA, 25 bp, Homo sapien
cacaaaacagaagccaaatgctgga

SEQ ID NO: 506343 - DNA, 25 bp, Homo sapien
tatggtaggccatagaatttctctt

SEQ ID NO: 506344 - DNA, 25 bp, Homo sapien
ggaacatatggtaggccatagaatt

SEQ ID NO: 506345 - DNA, 25 bp, Homo sapien
ggtaggccatagaatttctcttgtg

SEQ ID NO: 506346 - DNA, 25 bp, Homo sapien
catatggtaggccatagaatttctc

SEQ ID NO: 506347 - DNA, 25 bp, Homo sapien
tagattcacaaagacgagacaccat

SEQ ID NO: 506348 - DNA, 25 bp, Homo sapien
ttagattcacaaagacgagacacca

SEQ ID NO: 506349 - DNA, 25 bp, Homo sapien
ctgtgcctaatttttgtatagtaga

SEQ ID NO: 506350 - DNA, 25 bp, Homo sapien
gggattgcaagcatgcaccactgtg

SEQ ID NO: 506351 - DNA, 25 bp, Homo sapien
tcaggagatccacctgcctgggctt

SEQ ID NO: 506352 - DNA, 25 bp, Homo sapien
aggagatccacctgcctgggcttcc

SEQ ID NO: 506353 - DNA, 25 bp, Homo sapien
gatgttgtccaactctcgtgcttgt

SEQ ID NO: 506354 - DNA, 25 bp, Homo sapien
tgagaaactcttcgagcactcttaa

SEQ ID NO: 506355 - DNA, 25 bp, Homo sapien
tccagttgagtgaagttacttggcc

SEQ ID NO: 506356 - DNA, 25 bp, Homo sapien
tgtgttgactgaacagaggccctgc

SEQ ID NO: 506357 - DNA, 25 bp, Homo sapien
ctgcagggtgtcctgccgctctggt

SEQ ID NO: 506358 - DNA, 25 bp, Homo sapien
ccgctctggtgcctgagccagttcc

SEQ ID NO: 506359 - DNA, 25 bp, Homo sapien
tccaatgccccatcagagtgtgcat

SEQ ID NO: 506360 - DNA, 25 bp, Homo sapien
ctgggaacttgcctgcagggtgtcc

SEQ ID NO: 506361 - DNA, 25 bp, Homo sapien
ctaaggaatgaaagttgatggagct

SEQ ID NO: 506362 - DNA, 25 bp, Homo sapien
aaggaatgaaagttgatggagctca

SEQ ID NO: 506363 - DNA, 25 bp, Homo sapien
taaggaatgaaagttgatggagctc

SEQ ID NO: 506364 - DNA, 25 bp, Homo sapien
aggaatgaaagttgatggagctcat

SEQ ID NO: 506365 - DNA, 25 bp, Homo sapien
ctgcctcctgtgcttacgaaatggg

SEQ ID NO: 506366 - DNA, 25 bp, Homo sapien
cctctttccgcagccctgcaccacg

SEQ ID NO: 506367 - DNA, 25 bp, Homo sapien
tttccgcagccctgcaccacgcgct

SEQ ID NO: 506368 - DNA, 25 bp, Homo sapien
tccgcagccctgcaccacgcgctct

SEQ ID NO: 506369 - DNA, 25 bp, Homo sapien
gcagccctgcaccacgcgctctcac

SEQ ID NO: 506370 - DNA, 25 bp, Homo sapien
gcggaaccctcggaagcaggatgcc

SEQ ID NO: 506371 - DNA, 25 bp, Homo sapien
ttcaccagccgtgtacttgtctgcg

SEQ ID NO: 506372 - DNA, 25 bp, Homo sapien
aacccctcctggcggcagtgatgct

SEQ ID NO: 506373 - DNA, 25 bp, Homo sapien
agactcctcaaactcgcagaaaccc

SEQ ID NO: 506374 - DNA, 25 bp, Homo sapien
ggcgaatgccgcttctctttttccc

SEQ ID NO: 506375 - DNA, 25 bp, Homo sapien
taccgctgagagctgactggcgaat

SEQ ID NO: 506376 - DNA, 25 bp, Homo sapien
gatgaataccgctgagagctgactg

SEQ ID NO: 506377 - DNA, 25 bp, Homo sapien
gagctgactggcgaatgccgcttct

SEQ ID NO: 506378 - DNA, 25 bp, Homo sapien
ggttaactactcgataatcatttgc

SEQ ID NO: 506379 - DNA, 25 bp, Homo sapien
gcaaaatcagtagggcacctggtcc

SEQ ID NO: 506380 - DNA, 25 bp, Homo sapien
aatgtctggcaaattggttaactac

SEQ ID NO: 506381 - DNA, 25 bp, Homo sapien
tcagaatagaaggaacctcagcaaa

SEQ ID NO: 506382 - DNA, 25 bp, Homo sapien
tgacgtgttggtaacgagtacgtcc

SEQ ID NO: 506383 - DNA, 25 bp, Homo sapien
cctttagtctgcctccacggatagt

SEQ ID NO: 506384 - DNA, 25 bp, Homo sapien
ctccacggatagtgaaatggcaatc

SEQ ID NO: 506385 - DNA, 25 bp, Homo sapien
cagtgacgtgttggtaacgagtacg

SEQ ID NO: 506386 - DNA, 25 bp, Homo sapien
gatctaaactagtgtaaagcaaggg

SEQ ID NO: 506387 - DNA, 25 bp, Homo sapien
cacttgaacgagatgggatctaaac

SEQ ID NO: 506388 - DNA, 25 bp, Homo sapien
ggcactacactgagactcacataca

SEQ ID NO: 506389 - DNA, 25 bp, Homo sapien
gatccggagccagaataacttactc

SEQ ID NO: 506390 - DNA, 25 bp, Homo sapien
acagtaaatgtaccccaacaatcct

SEQ ID NO: 506391 - DNA, 25 bp, Homo sapien
atcacagtaaatgtaccccaacaat

SEQ ID NO: 506392 - DNA, 25 bp, Homo sapien
ggaaatcctcctcatgagggccttt

SEQ ID NO: 506393 - DNA, 25 bp, Homo sapien
agtgctggctggacaattttaggag

SEQ ID NO: 506394 - DNA, 25 bp, Homo sapien
tacaccccacattatctcgagatag

SEQ ID NO: 506395 - DNA, 25 bp, Homo sapien
gaatgtcgtgatatacgcccaagca

SEQ ID NO: 506396 - DNA, 25 bp, Homo sapien
taatgaaatccccaacagtctgtta

SEQ ID NO: 506397 - DNA, 25 bp, Homo sapien
ttttcggacatcttcgctccacacc

SEQ ID NO: 506398 - DNA, 25 bp, Homo sapien
ggctgctctgcatataatgaaatcc

SEQ ID NO: 506399 - DNA, 25 bp, Homo sapien
cccaacagtctgttaagcaaaatat

SEQ ID NO: 506400 - DNA, 25 bp, Homo sapien
aaaacgggcaatataggctgggctc

SEQ ID NO: 506401 - DNA, 25 bp, Homo sapien
gggcaatataggctgggctcaatat

SEQ ID NO: 506402 - DNA, 25 bp, Homo sapien
gagaaaaacgggcaatataggctgg

SEQ ID NO: 506403 - DNA, 25 bp, Homo sapien
atataggctgggctcaatattatac

SEQ ID NO: 506404 - DNA, 25 bp, Homo sapien
ttcgttccataaaatgagtccccac

SEQ ID NO: 506405 - DNA, 25 bp, Homo sapien
tggttcgttcactcaagcatgctgt

SEQ ID NO: 506406 - DNA, 25 bp, Homo sapien
gattctagaactgcacaacacttcg

SEQ ID NO: 506407 - DNA, 25 bp, Homo sapien
aagagacgttcatgatccagtgccc

SEQ ID NO: 506408 - DNA, 25 bp, Homo sapien
ctctccacaccctcagtgactctca

SEQ ID NO: 506409 - DNA, 25 bp, Homo sapien
tgcctcagccatccagagcgagact

SEQ ID NO: 506410 - DNA, 25 bp, Homo sapien
tctccacaccctcagtgactctcac

SEQ ID NO: 506411 - DNA, 25 bp, Homo sapien
gagcgagactacatgcctctccaca

SEQ ID NO: 506412 - DNA, 25 bp, Homo sapien
tctgcatagatgctacacataagaa

SEQ ID NO: 506413 - DNA, 25 bp, Homo sapien
atctgcatagatgctacacataaga

SEQ ID NO: 506414 - DNA, 25 bp, Homo sapien
tttctgcacgaatcacaccactgta

SEQ ID NO: 506415 - DNA, 25 bp, Homo sapien
ctttctgcacgaatcacaccactgt

SEQ ID NO: 506416 - DNA, 25 bp, Homo sapien
tttcatccctcgtatcatctcaaaa

SEQ ID NO: 506417 - DNA, 25 bp, Homo sapien
catccctcgtatcatctcaaaatct

SEQ ID NO: 506418 - DNA, 25 bp, Homo sapien
ggaattttgaggattcagtttcatt

SEQ ID NO: 506419 - DNA, 25 bp, Homo sapien
tcattttcatccctcgtatcatctc

SEQ ID NO: 506420 - DNA, 25 bp, Homo sapien
tagtttttcaaggaactgcatgaca

SEQ ID NO: 506421 - DNA, 25 bp, Homo sapien
accaactttgccagaagatctctgc

SEQ ID NO: 506422 - DNA, 25 bp, Homo sapien
gtggaataccccaccaactttgcca

SEQ ID NO: 506423 - DNA, 25 bp, Homo sapien
aacatttcaattgaccagcattggg

SEQ ID NO: 506424 - DNA, 25 bp, Homo sapien
gatttttagctatcgttccttggag

SEQ ID NO: 506425 - DNA, 25 bp, Homo sapien
acgaatgtgttctggtaagagatgc

SEQ ID NO: 506426 - DNA, 25 bp, Homo sapien
ttatgatatgatccccagcagatgt

SEQ ID NO: 506427 - DNA, 25 bp, Homo sapien
cagcagatgtaaagttacgacgaat

SEQ ID NO: 506428 - DNA, 25 bp, Homo sapien
ggttcccataagaaatgtactactc

SEQ ID NO: 506429 - DNA, 25 bp, Homo sapien
gggactgataaaagcttcgcaatgt

SEQ ID NO: 506430 - DNA, 25 bp, Homo sapien
ccggagcacagccacgagtgtgagc

SEQ ID NO: 506431 - DNA, 25 bp, Homo sapien
caatgtggcgtgaggatgaagcctt

SEQ ID NO: 506432 - DNA, 25 bp, Homo sapien
tgtgagctctttgttacatgttaac

SEQ ID NO: 506433 - DNA, 25 bp, Homo sapien
ccataagcctcatgggctgctggga

SEQ ID NO: 506434 - DNA, 25 bp, Homo sapien
gggtcagaccaggaatcacatgctg

SEQ ID NO: 506435 - DNA, 25 bp, Homo sapien
tgtgagtttacagtagagcccataa

SEQ ID NO: 506436 - DNA, 25 bp, Homo sapien
aaggcacgtcctggctcagggtcag

SEQ ID NO: 506437 - DNA, 25 bp, Homo sapien
tctagatggattccactaatttcaa

SEQ ID NO: 506438 - DNA, 25 bp, Homo sapien
tgtctagatggattccactaatttc

SEQ ID NO: 506439 - DNA, 25 bp, Homo sapien
tctttgtctagatggattccactaa

SEQ ID NO: 506440 - DNA, 25 bp, Homo sapien
tttctttgtctagatggattccact

SEQ ID NO: 506441 - DNA, 25 bp, Homo sapien
ttctggatcaagggaatccacaagt

SEQ ID NO: 506442 - DNA, 25 bp, Homo sapien
tctggatcaagggaatccacaagtt

SEQ ID NO: 506443 - DNA, 25 bp, Homo sapien
ctggatcaagggaatccacaagttt

SEQ ID NO: 506444 - DNA, 25 bp, Homo sapien
cgtctaattcggcaggacacagcat

SEQ ID NO: 506445 - DNA, 25 bp, Homo sapien
agcccacgtctaattcggcaggaca

SEQ ID NO: 506446 - DNA, 25 bp, Homo sapien
catgcagagagcctcgagcaggcag

SEQ ID NO: 506447 - DNA, 25 bp, Homo sapien
tgagaccagcccacgtctaattcgg

SEQ ID NO: 506448 - DNA, 25 bp, Homo sapien
cagggtgagcgattttcacaaaatc

SEQ ID NO: 506449 - DNA, 25 bp, Homo sapien
tggctcagggtgagcgattttcaca

SEQ ID NO: 506450 - DNA, 25 bp, Homo sapien
ttctctaccatggtgccaatacttc

SEQ ID NO: 506451 - DNA, 25 bp, Homo sapien
ctctaccatggtgccaatacttcta

SEQ ID NO: 506452 - DNA, 25 bp, Homo sapien
gtactaatctcactggcaggtaata

SEQ ID NO: 506453 - DNA, 25 bp, Homo sapien
tgccttataacagtactaatctcac

SEQ ID NO: 506454 - DNA, 25 bp, Homo sapien
aatctacgggttgtgaatttataat

SEQ ID NO: 506455 - DNA, 25 bp, Homo sapien
aattactaatctacgggttgtgaat

SEQ ID NO: 506456 - DNA, 25 bp, Homo sapien
gatatagcgcagagaagttaaaatc

SEQ ID NO: 506457 - DNA, 25 bp, Homo sapien
gtttgatcctcccacagatacccga

SEQ ID NO: 506458 - DNA, 25 bp, Homo sapien
tttgtgacagccacgccaagtcacc

SEQ ID NO: 506459 - DNA, 25 bp, Homo sapien
cctcagtatcaatggacaatggttt

SEQ ID NO: 506460 - DNA, 25 bp, Homo sapien
ggaacatgcacggtccacaagcaat

SEQ ID NO: 506461 - DNA, 25 bp, Homo sapien
caaggctttttcttgtgcaatatga

SEQ ID NO: 506462 - DNA, 25 bp, Homo sapien
tgcataaggaatccgagagctcatc

SEQ ID NO: 506463 - DNA, 25 bp, Homo sapien
tcatcgaagatcagcacggtctggg

SEQ ID NO: 506464 - DNA, 25 bp, Homo sapien
tggcaggacgaattcaccgccactg

SEQ ID NO: 506465 - DNA, 25 bp, Homo sapien
cattactcgactgcaggcagccgtg

SEQ ID NO: 506466 - DNA, 25 bp, Homo sapien
tcttaaggcaggactgtagcgctgg

SEQ ID NO: 506467 - DNA, 25 bp, Homo sapien
cgacactctgggtaggagaccacta

SEQ ID NO: 506468 - DNA, 25 bp, Homo sapien
taaaaggtgggttcgctgctcgcct

SEQ ID NO: 506469 - DNA, 25 bp, Homo sapien
acaatctcgccctgattgttgctgg

SEQ ID NO: 506470 - DNA, 25 bp, Homo sapien
cacacaagacgccactgtaaaaggt

SEQ ID NO: 506471 - DNA, 25 bp, Homo sapien
ttgccctcatcgagagcgcacacaa

SEQ ID NO: 506472 - DNA, 25 bp, Homo sapien
ctcgccgaacaggtccaagcggctg

SEQ ID NO: 506473 - DNA, 25 bp, Homo sapien
cgccgaacaggtccaagcggctgcc

SEQ ID NO: 506474 - DNA, 25 bp, Homo sapien
tcgccgaacaggtccaagcggctgc

SEQ ID NO: 506475 - DNA, 25 bp, Homo sapien
ccaagccgcccagccttccgacgca

SEQ ID NO: 506476 - DNA, 25 bp, Homo sapien
ctggctcccaagccgcccagccttc

SEQ ID NO: 506477 - DNA, 25 bp, Homo sapien
aagccgcccagccttccgacgcaca

SEQ ID NO: 506478 - DNA, 25 bp, Homo sapien
ccgcccagccttccgacgcacagca

SEQ ID NO: 506479 - DNA, 25 bp, Homo sapien
gtcccttcctccaacgcagatccct

SEQ ID NO: 506480 - DNA, 25 bp, Homo sapien
ctgccctgctgctttcgctgggagc

SEQ ID NO: 506481 - DNA, 25 bp, Homo sapien
ctccaacgcagatccctgccctgct

SEQ ID NO: 506482 - DNA, 25 bp, Homo sapien
tgctttcgctgggagcgcgcgctcc

SEQ ID NO: 506483 - DNA, 25 bp, Homo sapien
tctgatggatggtctggcagattta

SEQ ID NO: 506484 - DNA, 25 bp, Homo sapien
gatggtctggcagatttataaactc

SEQ ID NO: 506485 - DNA, 25 bp, Homo sapien
tggatggtctggcagatttataaac

SEQ ID NO: 506486 - DNA, 25 bp, Homo sapien
gatggatggtctggcagatttataa

SEQ ID NO: 506487 - DNA, 25 bp, Homo sapien
tcactggctgctgaacagaaggaac

SEQ ID NO: 506488 - DNA, 25 bp, Homo sapien
tgaaagttgtgtcatcgtcctcatc

SEQ ID NO: 506489 - DNA, 25 bp, Homo sapien
ctgtgaaagttgtgtcatcgtcctc

SEQ ID NO: 506490 - DNA, 25 bp, Homo sapien
tgtgaaagttgtgtcatcgtcctca

SEQ ID NO: 506491 - DNA, 25 bp, Homo sapien
gtgaaagttgtgtcatcgtcctcat

SEQ ID NO: 506492 - DNA, 25 bp, Homo sapien
cgtaagcatctctggtgtgcagtat

SEQ ID NO: 506493 - DNA, 25 bp, Homo sapien
cctggtcctcagagctcacgtaagc

SEQ ID NO: 506494 - DNA, 25 bp, Homo sapien
atctcatccccgagcttcagctgca

SEQ ID NO: 506495 - DNA, 25 bp, Homo sapien
gcttcagctgcaggacaatgctgcc

SEQ ID NO: 506496 - DNA, 25 bp, Homo sapien
gtttttgaccaaagacacctgaaca

SEQ ID NO: 506497 - DNA, 25 bp, Homo sapien
ctccgtttttgaccaaagacacctg

SEQ ID NO: 506498 - DNA, 25 bp, Homo sapien
tccgtttttgaccaaagacacctga

SEQ ID NO: 506499 - DNA, 25 bp, Homo sapien
tttgaccaaagacacctgaacattc

SEQ ID NO: 506500 - DNA, 25 bp, Homo sapien
gactagagtctcaccgattttccct

SEQ ID NO: 506501 - DNA, 25 bp, Homo sapien
gaccaggctttccaatagggcccat

SEQ ID NO: 506502 - DNA, 25 bp, Homo sapien
cagcaatgtggcacgtgaatttccc

SEQ ID NO: 506503 - DNA, 25 bp, Homo sapien
tgaagtaatagaccccagcaatgtg

SEQ ID NO: 506504 - DNA, 25 bp, Homo sapien
cttttgcttcaacttttccatctgc

SEQ ID NO: 506505 - DNA, 25 bp, Homo sapien
gccttttgcttcaacttttccatct

SEQ ID NO: 506506 - DNA, 25 bp, Homo sapien
tttgcttcaacttttccatctgctc

SEQ ID NO: 506507 - DNA, 25 bp, Homo sapien
ctttgatgccttttgcttcaacttt

SEQ ID NO: 506508 - DNA, 25 bp, Homo sapien
ttctctccactcgtcccatccttcc

SEQ ID NO: 506509 - DNA, 25 bp, Homo sapien
cttctctccactcgtcccatccttc

SEQ ID NO: 506510 - DNA, 25 bp, Homo sapien
ttccattactcttgaggagagtgga

SEQ ID NO: 506511 - DNA, 25 bp, Homo sapien
cttccattactcttgaggagagtgg

SEQ ID NO: 506512 - DNA, 25 bp, Homo sapien
tccattactcttgaggagagtggaa

SEQ ID NO: 506513 - DNA, 25 bp, Homo sapien
ctccgtctcgtccatctcttccagg

SEQ ID NO: 506514 - DNA, 25 bp, Homo sapien
tttgtcacccttcgctccgtctcgt

SEQ ID NO: 506515 - DNA, 25 bp, Homo sapien
ttccaggcagaccattgtgaccggg

SEQ ID NO: 506516 - DNA, 25 bp, Homo sapien
tctcttccaggcagaccattgtgac

SEQ ID NO: 506517 - DNA, 25 bp, Homo sapien
tgagtttatgttccctgtgcagatt

SEQ ID NO: 506518 - DNA, 25 bp, Homo sapien
tgtgagtttatgttccctgtgcaga

SEQ ID NO: 506519 - DNA, 25 bp, Homo sapien
gtttatgttccctgtgcagatttca

SEQ ID NO: 506520 - DNA, 25 bp, Homo sapien
ctgtgagtttatgttccctgtgcag

SEQ ID NO: 506521 - DNA, 25 bp, Homo sapien
caagctggttattaccaggatgaca

SEQ ID NO: 506522 - DNA, 25 bp, Homo sapien
gggagcaagctggttattaccagga

SEQ ID NO: 506523 - DNA, 25 bp, Homo sapien
gctggttattaccaggatgacattg

SEQ ID NO: 506524 - DNA, 25 bp, Homo sapien
gttattaccaggatgacattgtcct

SEQ ID NO: 506525 - DNA, 25 bp, Homo sapien
gaacagatgtccatgttcgtagttg

SEQ ID NO: 506526 - DNA, 25 bp, Homo sapien
ctctctctattgtgcacttcataga

SEQ ID NO: 506527 - DNA, 25 bp, Homo sapien
tgcactctctctattgtgcacttca

SEQ ID NO: 506528 - DNA, 25 bp, Homo sapien
cactctctctattgtgcacttcata

SEQ ID NO: 506529 - DNA, 25 bp, Homo sapien
catgcactctctctattgtgcactt

SEQ ID NO: 506530 - DNA, 25 bp, Homo sapien
ctggacccgagggctgcaggctgga

SEQ ID NO: 506531 - DNA, 25 bp, Homo sapien
acccgagggctgcaggctggaccca

SEQ ID NO: 506532 - DNA, 25 bp, Homo sapien
ggacccgagggctgcaggctggacc

SEQ ID NO: 506533 - DNA, 25 bp, Homo sapien
gagggctgcaggctggacccagata

SEQ ID NO: 506534 - DNA, 25 bp, Homo sapien
taaaatcagccttcctgccatacaa

SEQ ID NO: 506535 - DNA, 25 bp, Homo sapien
cgcaaaccaagaatcaaggaccagc

SEQ ID NO: 506536 - DNA, 25 bp, Homo sapien
tcaaggaccagctaaataaaatcag

SEQ ID NO: 506537 - DNA, 25 bp, Homo sapien
gccatacaattccccagtggatatg

SEQ ID NO: 506538 - DNA, 25 bp, Homo sapien
agttagatggagctcttgaatggat

SEQ ID NO: 506539 - DNA, 25 bp, Homo sapien
ccagttagatggagctcttgaatgg

SEQ ID NO: 506540 - DNA, 25 bp, Homo sapien
cagttagatggagctcttgaatgga

SEQ ID NO: 506541 - DNA, 25 bp, Homo sapien
tagtgcagcttagatattcacaggt

SEQ ID NO: 506542 - DNA, 25 bp, Homo sapien
ttgtagtgcagcttagatattcaca

SEQ ID NO: 506543 - DNA, 25 bp, Homo sapien
gtgcagcttagatattcacaggtgc

SEQ ID NO: 506544 - DNA, 25 bp, Homo sapien
gcagcttagatattcacaggtgcaa

SEQ ID NO: 506545 - DNA, 25 bp, Homo sapien
atttttcccactggtatacataatt

SEQ ID NO: 506546 - DNA, 25 bp, Homo sapien
ttatttttcccactggtatacataa

SEQ ID NO: 506547 - DNA, 25 bp, Homo sapien
tatttttcccactggtatacataat

SEQ ID NO: 506548 - DNA, 25 bp, Homo sapien
aatttttatttgaaggctcactgac

SEQ ID NO: 506549 - DNA, 25 bp, Homo sapien
tgataagtgtagttatctgtgacct

SEQ ID NO: 506550 - DNA, 25 bp, Homo sapien
tttgtccagcaatgataagtgtagt

SEQ ID NO: 506551 - DNA, 25 bp, Homo sapien
catcatttggatagagctttgtcca

SEQ ID NO: 506552 - DNA, 25 bp, Homo sapien
tagagctttgtccagcaatgataag

SEQ ID NO: 506553 - DNA, 25 bp, Homo sapien
gaatggtgggctaaaactgtcgtct

SEQ ID NO: 506554 - DNA, 25 bp, Homo sapien
tcaggaggttacctacagggcctta

SEQ ID NO: 506555 - DNA, 25 bp, Homo sapien
aaaaaccatctatgtcgggctgggc

SEQ ID NO: 506556 - DNA, 25 bp, Homo sapien
gacccctgaggttgatttgagctcc

SEQ ID NO: 506557 - DNA, 25 bp, Homo sapien
ggaggtgggagcctatagtctcagc

SEQ ID NO: 506558 - DNA, 25 bp, Homo sapien
ctttcttcaggtacatatttaagat

SEQ ID NO: 506559 - DNA, 25 bp, Homo sapien
gtacatatttaagattctgtcctga

SEQ ID NO: 506560 - DNA, 25 bp, Homo sapien
cctgaaaagttaataacatggaatg

SEQ ID NO: 506561 - DNA, 25 bp, Homo sapien
tcctgaaaagttaataacatggaat

SEQ ID NO: 506562 - DNA, 25 bp, Homo sapien
aagtcatagtagtaatttaaggcca

SEQ ID NO: 506563 - DNA, 25 bp, Homo sapien
agtcgtcatcttcttaaagtcatag

SEQ ID NO: 506564 - DNA, 25 bp, Homo sapien
ctatggaactgtcaggcagcacgct

SEQ ID NO: 506565 - DNA, 25 bp, Homo sapien
gcagcacgctgaaactgaattcagg

SEQ ID NO: 506566 - DNA, 25 bp, Homo sapien
tatgattctgtaaggaaattgcctg

SEQ ID NO: 506567 - DNA, 25 bp, Homo sapien
catgttatctatgattctgtaagga

SEQ ID NO: 506568 - DNA, 25 bp, Homo sapien
aagttgtagcatatgatttttgagg

SEQ ID NO: 506569 - DNA, 25 bp, Homo sapien
atttttgaggagtgaactgatcatc

SEQ ID NO: 506570 - DNA, 25 bp, Homo sapien
cgtccatctataagctctctgtgag

SEQ ID NO: 506571 - DNA, 25 bp, Homo sapien
agttaatttgttccgccttctgcta

SEQ ID NO: 506572 - DNA, 25 bp, Homo sapien
cagagtggtcgtctacaggcctacc

SEQ ID NO: 506573 - DNA, 25 bp, Homo sapien
taaaaggaaactgggttggagagca

SEQ ID NO: 506574 - DNA, 25 bp, Homo sapien
ttagtcttgtttgagttttaagata

SEQ ID NO: 506575 - DNA, 25 bp, Homo sapien
ttaagataaagcctatttccagggc

SEQ ID NO: 506576 - DNA, 25 bp, Homo sapien
taagataaagcctatttccagggca

SEQ ID NO: 506577 - DNA, 25 bp, Homo sapien
tgtttgagttttaagataaagccta

SEQ ID NO: 506578 - DNA, 25 bp, Homo sapien
ttgtccagtgcttcagtatttgcat

SEQ ID NO: 506579 - DNA, 25 bp, Homo sapien
gtccagtgcttcagtatttgcatca

SEQ ID NO: 506580 - DNA, 25 bp, Homo sapien
agtgcttcagtatttgcatcatggg

SEQ ID NO: 506581 - DNA, 25 bp, Homo sapien
gcttcagtatttgcatcatgggaaa

SEQ ID NO: 506582 - DNA, 25 bp, Homo sapien
ctgtatcaaaggcacactcttttct

SEQ ID NO: 506583 - DNA, 25 bp, Homo sapien
ctttgtcacagatgtcaatttggca

SEQ ID NO: 506584 - DNA, 25 bp, Homo sapien
tttctttgtcacagatgtcaatttg

SEQ ID NO: 506585 - DNA, 25 bp, Homo sapien
gtcacagatgtcaatttggcattgt

SEQ ID NO: 506586 - DNA, 25 bp, Homo sapien
ggagagtgaccacttccacatggcc

SEQ ID NO: 506587 - DNA, 25 bp, Homo sapien
ccaggagagtgaccacttccacatg

SEQ ID NO: 506588 - DNA, 25 bp, Homo sapien
agagtgaccacttccacatggccgc

SEQ ID NO: 506589 - DNA, 25 bp, Homo sapien
agtgaccacttccacatggccgctg

SEQ ID NO: 506590 - DNA, 25 bp, Homo sapien
gacagccgcccttggattttccgct

SEQ ID NO: 506591 - DNA, 25 bp, Homo sapien
ttggattttccgctgttccgcgtcc

SEQ ID NO: 506592 - DNA, 25 bp, Homo sapien
cggtacccggaaccgtgcagacgtg

SEQ ID NO: 506593 - DNA, 25 bp, Homo sapien
cccttggattttccgctgttccgcg

SEQ ID NO: 506594 - DNA, 25 bp, Homo sapien
gctcccgaagccgaagaacttcttg

SEQ ID NO: 506595 - DNA, 25 bp, Homo sapien
ctatggagcccgggccatctcgccc

SEQ ID NO: 506596 - DNA, 25 bp, Homo sapien
cttggtggtggtgacttctcagacc

SEQ ID NO: 506597 - DNA, 25 bp, Homo sapien
ttctcagacccccaaccaccggctc

SEQ ID NO: 506598 - DNA, 25 bp, Homo sapien
agcccccacatccctgatccaaccc

SEQ ID NO: 506599 - DNA, 25 bp, Homo sapien
aaatccccgatccaatcctcaaatc

SEQ ID NO: 506600 - DNA, 25 bp, Homo sapien
aatcccctatccagcccccacatcc

SEQ ID NO: 506601 - DNA, 25 bp, Homo sapien
ccaatcctcaaatcccctatccagc

SEQ ID NO: 506602 - DNA, 25 bp, Homo sapien
agtctctgacctctccgacagagtg

SEQ ID NO: 506603 - DNA, 25 bp, Homo sapien
gagtgagcctcgaaagcccttgagt

SEQ ID NO: 506604 - DNA, 25 bp, Homo sapien
aaagcccttgagtgcgcgcctgcac

SEQ ID NO: 506605 - DNA, 25 bp, Homo sapien
tctccgacagagtgagcctcgaaag

SEQ ID NO: 506606 - DNA, 25 bp, Homo sapien
agctgtggctgcaaaccgtgtgtcc

SEQ ID NO: 506607 - DNA, 25 bp, Homo sapien
tcccctctcgccgaccaatgctggc

SEQ ID NO: 506608 - DNA, 25 bp, Homo sapien
tggctgcaaaccgtgtgtccagccc

SEQ ID NO: 506609 - DNA, 25 bp, Homo sapien
ctctcgccgaccaatgctggctcct

SEQ ID NO: 506610 - DNA, 25 bp, Homo sapien
tcaccagggtcttggggccttggga

SEQ ID NO: 506611 - DNA, 25 bp, Homo sapien
cttcaccagggtcttggggccttgg

SEQ ID NO: 506612 - DNA, 25 bp, Homo sapien
ccagggtcttggggccttgggacat

SEQ ID NO: 506613 - DNA, 25 bp, Homo sapien
ccttcaccagggtcttggggccttg

SEQ ID NO: 506614 - DNA, 25 bp, Homo sapien
gacagggcgttcactctgctagaag

SEQ ID NO: 506615 - DNA, 25 bp, Homo sapien
tctcacaggcatcaggtgcatggcc

SEQ ID NO: 506616 - DNA, 25 bp, Homo sapien
tgcatggcccaaggtcagtaccagt

SEQ ID NO: 506617 - DNA, 25 bp, Homo sapien
cttgtgctaaaaatggaaccccaga

SEQ ID NO: 506618 - DNA, 25 bp, Homo sapien
ccactgagggaagcgagcacatgga

SEQ ID NO: 506619 - DNA, 25 bp, Homo sapien
agccccactgccagacacttctgag

SEQ ID NO: 506620 - DNA, 25 bp, Homo sapien
agggaccactgagggaagcgagcac

SEQ ID NO: 506621 - DNA, 25 bp, Homo sapien
ggaccactgagggaagcgagcacat

SEQ ID NO: 506622 - DNA, 25 bp, Homo sapien
caccttccaggatgctcaggttggg

SEQ ID NO: 506623 - DNA, 25 bp, Homo sapien
catgggtacccgtttcacaggtagg

SEQ ID NO: 506624 - DNA, 25 bp, Homo sapien
tgtaggtgctacagtcgcagggcct

SEQ ID NO: 506625 - DNA, 25 bp, Homo sapien
cagcaatatgtgtgggcccacccat

SEQ ID NO: 506626 - DNA, 25 bp, Homo sapien
acaggaagcttccataggcagggcc

SEQ ID NO: 506627 - DNA, 25 bp, Homo sapien
caacagtggtatcaacagggacgtc

SEQ ID NO: 506628 - DNA, 25 bp, Homo sapien
gaatggccatgtccttgtctccaga

SEQ ID NO: 506629 - DNA, 25 bp, Homo sapien
tgtatgggcttgacctgaggctcac

SEQ ID NO: 506630 - DNA, 25 bp, Homo sapien
gatggctttgatctgagccccaaca

SEQ ID NO: 506631 - DNA, 25 bp, Homo sapien
gcaggtagggttggaaacaagccca

SEQ ID NO: 506632 - DNA, 25 bp, Homo sapien
ggcatcgtcctttctcttgcagagc

SEQ ID NO: 506633 - DNA, 25 bp, Homo sapien
gatgtgccgattcactgccctggca

SEQ ID NO: 506634 - DNA, 25 bp, Homo sapien
aagaagaaatgcctcggatgtgccg

SEQ ID NO: 506635 - DNA, 25 bp, Homo sapien
gctcaggcaagccgctggcccagat

SEQ ID NO: 506636 - DNA, 25 bp, Homo sapien
tcccctggatgtcacagcttttatg

SEQ ID NO: 506637 - DNA, 25 bp, Homo sapien
cctggatgtcacagcttttatgaga

SEQ ID NO: 506638 - DNA, 25 bp, Homo sapien
aggcaagccgctggcccagatccta

SEQ ID NO: 506639 - DNA, 25 bp, Homo sapien
tctgtggatgctgtgaccttgagtc

SEQ ID NO: 506640 - DNA, 25 bp, Homo sapien
caggtgactcaaccaggcgactggt

SEQ ID NO: 506641 - DNA, 25 bp, Homo sapien
tcctagtgctgatcccctaaatggg

SEQ ID NO: 506642 - DNA, 25 bp, Homo sapien
gaacctcactagagggatgtgcgct

SEQ ID NO: 506643 - DNA, 25 bp, Homo sapien
tgcagggtccagtgcgggagtcaga

SEQ ID NO: 506644 - DNA, 25 bp, Homo sapien
tcccacggtcctggaatcactgagt

SEQ ID NO: 506645 - DNA, 25 bp, Homo sapien
tgagtgccgtgggagtgcagggtcc

SEQ ID NO: 506646 - DNA, 25 bp, Homo sapien
tgttcttttagctcctggcacctca

SEQ ID NO: 506647 - DNA, 25 bp, Homo sapien
tgccacttctgtccacctagccttt

SEQ ID NO: 506648 - DNA, 25 bp, Homo sapien
ccacttctgtccacctagcctttgc

SEQ ID NO: 506649 - DNA, 25 bp, Homo sapien
cacttctgtccacctagcctttgcc

SEQ ID NO: 506650 - DNA, 25 bp, Homo sapien
gccacttctgtccacctagcctttg

SEQ ID NO: 506651 - DNA, 25 bp, Homo sapien
gccctggaagccgagctagccgcag

SEQ ID NO: 506652 - DNA, 25 bp, Homo sapien
gaagaacagcaaacaatagcacagc

SEQ ID NO: 506653 - DNA, 25 bp, Homo sapien
cgaagaacagcaaacaatagcacag

SEQ ID NO: 506654 - DNA, 25 bp, Homo sapien
gccgcagagggtgatgcggaactgc

SEQ ID NO: 506655 - DNA, 25 bp, Homo sapien
tcgccagggaaacgcggcattcgga

SEQ ID NO: 506656 - DNA, 25 bp, Homo sapien
gactgattcgctgcggtcctgggcc

SEQ ID NO: 506657 - DNA, 25 bp, Homo sapien
gcggcattcggacagccgtccagag

SEQ ID NO: 506658 - DNA, 25 bp, Homo sapien
gagccagagactgattcgctgcggt

SEQ ID NO: 506659 - DNA, 25 bp, Homo sapien
ggacagtttccagtcggcttctccg

SEQ ID NO: 506660 - DNA, 25 bp, Homo sapien
ttccagctcggagcgggatgctggg

SEQ ID NO: 506661 - DNA, 25 bp, Homo sapien
cttccagctcggagcgggatgctgg

SEQ ID NO: 506662 - DNA, 25 bp, Homo sapien
ccgggacagtttccagtcggcttct

SEQ ID NO: 506663 - DNA, 25 bp, Homo sapien
ggcaagtgggatttctctacatatt

SEQ ID NO: 506664 - DNA, 25 bp, Homo sapien
ctgaggacgtaggagggatgctgag

SEQ ID NO: 506665 - DNA, 25 bp, Homo sapien
ggacgtaggagggatgctgagacag

SEQ ID NO: 506666 - DNA, 25 bp, Homo sapien
caggcaagtgggatttctctacata

SEQ ID NO: 506667 - DNA, 25 bp, Homo sapien
cagcatttggccgaaatcctgtgcc

SEQ ID NO: 506668 - DNA, 25 bp, Homo sapien
ggtgaaagttgatgatcagcggctc

SEQ ID NO: 506669 - DNA, 25 bp, Homo sapien
aatcctgtgcccgtggaacattttt

SEQ ID NO: 506670 - DNA, 25 bp, Homo sapien
agttgatgatcagcggctccgggta

SEQ ID NO: 506671 - DNA, 25 bp, Homo sapien
cctggccgtgaaggtaagttgagca

SEQ ID NO: 506672 - DNA, 25 bp, Homo sapien
tgaaatggcaacaccgtgcagatgg

SEQ ID NO: 506673 - DNA, 25 bp, Homo sapien
tgcagatggcaaagcgtaggcctca

SEQ ID NO: 506674 - DNA, 25 bp, Homo sapien
gcaactttctgcctgcatggcatta

SEQ ID NO: 506675 - DNA, 25 bp, Homo sapien
cgtgagtggtggagctgtggtctgt

SEQ ID NO: 506676 - DNA, 25 bp, Homo sapien
tgaggccccggatgaaattctgcag

SEQ ID NO: 506677 - DNA, 25 bp, Homo sapien
tcgcatttccaaccccagtcatacc

SEQ ID NO: 506678 - DNA, 25 bp, Homo sapien
acttttaagtgtgaggccccggatg

SEQ ID NO: 506679 - DNA, 25 bp, Homo sapien
ttcggaatgcactgcttggacaaga

SEQ ID NO: 506680 - DNA, 25 bp, Homo sapien
cttgatcggtgctttcagaaacagg

SEQ ID NO: 506681 - DNA, 25 bp, Homo sapien
aacacggaaagtgttcggaatgcac

SEQ ID NO: 506682 - DNA, 25 bp, Homo sapien
cagaaacaggttcttgtgtagaaca

SEQ ID NO: 506683 - DNA, 25 bp, Homo sapien
tcaggcgtgggcatagtgaaatgcc

SEQ ID NO: 506684 - DNA, 25 bp, Homo sapien
tcccgtctgctaccgaagatggcaa

SEQ ID NO: 506685 - DNA, 25 bp, Homo sapien
gacgcaccctcctcaaattaaggaa

SEQ ID NO: 506686 - DNA, 25 bp, Homo sapien
tgtcacgacctttcttcctgagtag

SEQ ID NO: 506687 - DNA, 25 bp, Homo sapien
tcagtggataaaagatagcttgaat

SEQ ID NO: 506688 - DNA, 25 bp, Homo sapien
atagcttgaataatgtaaaaatcaa

SEQ ID NO: 506689 - DNA, 25 bp, Homo sapien
ggataaaagatagcttgaataatgt

SEQ ID NO: 506690 - DNA, 25 bp, Homo sapien
attttcagtggataaaagatagctt

SEQ ID NO: 506691 - DNA, 25 bp, Homo sapien
gggcacacaaacttaaggcagagat

SEQ ID NO: 506692 - DNA, 25 bp, Homo sapien
cagcatcactcaaattgccttcaag

SEQ ID NO: 506693 - DNA, 25 bp, Homo sapien
gatggattcggaatgcagcatcact

SEQ ID NO: 506694 - DNA, 25 bp, Homo sapien
gcccgtctaagaacctgtgctgtct

SEQ ID NO: 506695 - DNA, 25 bp, Homo sapien
caggatgccggggataatgtgtctc

SEQ ID NO: 506696 - DNA, 25 bp, Homo sapien
taatgtgtctcgtgggaaggctgca

SEQ ID NO: 506697 - DNA, 25 bp, Homo sapien
gggataatgtgtctcgtgggaaggc

SEQ ID NO: 506698 - DNA, 25 bp, Homo sapien
gataatgtgtctcgtgggaaggctg

SEQ ID NO: 506699 - DNA, 25 bp, Homo sapien
gcgttaaggagtggcggtggagagg

SEQ ID NO: 506700 - DNA, 25 bp, Homo sapien
tgcgttaaggagtggcggtggagag

SEQ ID NO: 506701 - DNA, 25 bp, Homo sapien
atgatggccgtggatatggagggaa

SEQ ID NO: 506702 - DNA, 25 bp, Homo sapien
aacagtgatttcagaagatgaggct

SEQ ID NO: 506703 - DNA, 25 bp, Homo sapien
ggagggaaatgtcacagtcgctctg

SEQ ID NO: 506704 - DNA, 25 bp, Homo sapien
gacaaacgaattcgagtaggaggga

SEQ ID NO: 506705 - DNA, 25 bp, Homo sapien
ggaggtagatgaaaacgttctgtcg

SEQ ID NO: 506706 - DNA, 25 bp, Homo sapien
cgtcttggagtgttcagagtcagaa

SEQ ID NO: 506707 - DNA, 25 bp, Homo sapien
gaggcctggtcaggggggtgagtgt

SEQ ID NO: 506708 - DNA, 25 bp, Homo sapien
tgagtgtgttggtctttgagtctcc

SEQ ID NO: 506709 - DNA, 25 bp, Homo sapien
cagatcggcctcagtggcctgaggc

SEQ ID NO: 506710 - DNA, 25 bp, Homo sapien
tccccatccctcctggttggactga

SEQ ID NO: 506711 - DNA, 25 bp, Homo sapien
cacgaattcaccagttcctggagtc

SEQ ID NO: 506712 - DNA, 25 bp, Homo sapien
tctccttggaataggactgccgcaa

SEQ ID NO: 506713 - DNA, 25 bp, Homo sapien
taggactgccgcaagcctcgtccgg

SEQ ID NO: 506714 - DNA, 25 bp, Homo sapien
gagcttcacgaattcaccagttcct

SEQ ID NO: 506715 - DNA, 25 bp, Homo sapien
atcaaactcattggtcatccctggg

SEQ ID NO: 506716 - DNA, 25 bp, Homo sapien
tgattgggccctattggaaccttcg

SEQ ID NO: 506717 - DNA, 25 bp, Homo sapien
ggacgtagaacccatccagctctgt

SEQ ID NO: 506718 - DNA, 25 bp, Homo sapien
tgtccttagaagtggctcaatgaaa

SEQ ID NO: 506719 - DNA, 25 bp, Homo sapien
tcctagggtagcatgtctctgtctt

SEQ ID NO: 506720 - DNA, 25 bp, Homo sapien
tggtctgtcctcaaggtcgttcagg

SEQ ID NO: 506721 - DNA, 25 bp, Homo sapien
tgaacagataccatttacggcagtg

SEQ ID NO: 506722 - DNA, 25 bp, Homo sapien
taaagagtcaggagtgaaatcccgg

SEQ ID NO: 506723 - DNA, 25 bp, Homo sapien
cagccggaggtgcctgctgtgttcc

SEQ ID NO: 506724 - DNA, 25 bp, Homo sapien
cccatgcttcgggataggagacatc

SEQ ID NO: 506725 - DNA, 25 bp, Homo sapien
tgctacacaattgctctgtttggac

SEQ ID NO: 506726 - DNA, 25 bp, Homo sapien
tggctgggctgcaagcagccggagg

SEQ ID NO: 506727 - DNA, 25 bp, Homo sapien
cctgtgccggttgcctggtggccct

SEQ ID NO: 506728 - DNA, 25 bp, Homo sapien
cctctgcagagtttaatacccttct

SEQ ID NO: 506729 - DNA, 25 bp, Homo sapien
cctctcctgattgccaagcattgca

SEQ ID NO: 506730 - DNA, 25 bp, Homo sapien
caagcattgcaagggcctgtgccgg

SEQ ID NO: 506731 - DNA, 25 bp, Homo sapien
tcttagtgccttcgtcatgggccac

SEQ ID NO: 506732 - DNA, 25 bp, Homo sapien
tgacgctgatgctccatagccggca

SEQ ID NO: 506733 - DNA, 25 bp, Homo sapien
ctctccaggtggacggtcttgttgg

SEQ ID NO: 506734 - DNA, 25 bp, Homo sapien
cttgtccagctggaatggccaggcc

SEQ ID NO: 506735 - DNA, 25 bp, Homo sapien
actgatggaatgacccacaggcccc

SEQ ID NO: 506736 - DNA, 25 bp, Homo sapien
tggctctcaggcctatcttctgcag

SEQ ID NO: 506737 - DNA, 25 bp, Homo sapien
ctgcagctcctgtccatgaaaatga

SEQ ID NO: 506738 - DNA, 25 bp, Homo sapien
gaaagcatagctctgggaccaagtg

SEQ ID NO: 506739 - DNA, 25 bp, Homo sapien
caaacagaatcaggaacaaggagca

SEQ ID NO: 506740 - DNA, 25 bp, Homo sapien
catggggcaattcacccaaggcctg

SEQ ID NO: 506741 - DNA, 25 bp, Homo sapien
ctgtggcctgagttggatctgcttc

SEQ ID NO: 506742 - DNA, 25 bp, Homo sapien
ggtgtcttggcaagcaaggcagggc

SEQ ID NO: 506743 - DNA, 25 bp, Homo sapien
ttgttggtggatctgagggccctgg

SEQ ID NO: 506744 - DNA, 25 bp, Homo sapien
tgactcctctgcaaccttggctttg

SEQ ID NO: 506745 - DNA, 25 bp, Homo sapien
cggattgtcctagaggaatgttccc

SEQ ID NO: 506746 - DNA, 25 bp, Homo sapien
taggaatggtttgccattccagcat

SEQ ID NO: 506747 - DNA, 25 bp, Homo sapien
gatggagacccctcggattgtccta

SEQ ID NO: 506748 - DNA, 25 bp, Homo sapien
ccaggggagtgggcatccaccctga

SEQ ID NO: 506749 - DNA, 25 bp, Homo sapien
caggggagtgggcatccaccctgag

SEQ ID NO: 506750 - DNA, 25 bp, Homo sapien
cccaggggagtgggcatccaccctg

SEQ ID NO: 506751 - DNA, 25 bp, Homo sapien
ctgtctcacgttccgcagctggtct

SEQ ID NO: 506752 - DNA, 25 bp, Homo sapien
cctgagaccgttctgggcaggtctg

SEQ ID NO: 506753 - DNA, 25 bp, Homo sapien
tttctgaggcagtgccggccggctt

SEQ ID NO: 506754 - DNA, 25 bp, Homo sapien
tcctttcatttctgaggcagtgccg

SEQ ID NO: 506755 - DNA, 25 bp, Homo sapien
cattgtgtctgaccatgggccccag

SEQ ID NO: 506756 - DNA, 25 bp, Homo sapien
cagccattgtgtctgaccatgggcc

SEQ ID NO: 506757 - DNA, 25 bp, Homo sapien
gccattgtgtctgaccatgggcccc

SEQ ID NO: 506758 - DNA, 25 bp, Homo sapien
ccattgtgtctgaccatgggcccca

SEQ ID NO: 506759 - DNA, 25 bp, Homo sapien
gtcaagaagccaggtgtgtaaccag

SEQ ID NO: 506760 - DNA, 25 bp, Homo sapien
tcaagaagccaggtgtgtaaccagc

SEQ ID NO: 506761 - DNA, 25 bp, Homo sapien
tgtcaagaagccaggtgtgtaacca

SEQ ID NO: 506762 - DNA, 25 bp, Homo sapien
ctgtcaagaagccaggtgtgtaacc

SEQ ID NO: 506763 - DNA, 25 bp, Homo sapien
atgcccactgcaacagtcagtgttg

SEQ ID NO: 506764 - DNA, 25 bp, Homo sapien
ggaatggcacgggcataggagcagt

SEQ ID NO: 506765 - DNA, 25 bp, Homo sapien
cctgagccccgtggctgcagacagt

SEQ ID NO: 506766 - DNA, 25 bp, Homo sapien
catctgtttggtttatgcgtctgca

SEQ ID NO: 506767 - DNA, 25 bp, Homo sapien
cacctaggccacaactctccctcat

SEQ ID NO: 506768 - DNA, 25 bp, Homo sapien
ggcacacctaggccacaactctccc

SEQ ID NO: 506769 - DNA, 25 bp, Homo sapien
acacctaggccacaactctccctca

SEQ ID NO: 506770 - DNA, 25 bp, Homo sapien
gcacacctaggccacaactctccct

SEQ ID NO: 506771 - DNA, 25 bp, Homo sapien
aaagccacactgtgtgagctttcca

SEQ ID NO: 506772 - DNA, 25 bp, Homo sapien
aagccacactgtgtgagctttccaa

SEQ ID NO: 506773 - DNA, 25 bp, Homo sapien
gtccttctgccctcggatgtcgcgg

SEQ ID NO: 506774 - DNA, 25 bp, Homo sapien
tccacagtgacttggagggtacgcg

SEQ ID NO: 506775 - DNA, 25 bp, Homo sapien
atgtcgcggctccttggctccacag

SEQ ID NO: 506776 - DNA, 25 bp, Homo sapien
aaagacacgcttctgtccttcgtcc

SEQ ID NO: 506777 - DNA, 25 bp, Homo sapien
tccatttggatccagatgtgacatc

SEQ ID NO: 506778 - DNA, 25 bp, Homo sapien
tatgatgcaggccacaaccacaatg

SEQ ID NO: 506779 - DNA, 25 bp, Homo sapien
gaattgggagcgtcctttggtgcct

SEQ ID NO: 506780 - DNA, 25 bp, Homo sapien
aaaggtgcccttctttgcccacagc

SEQ ID NO: 506781 - DNA, 25 bp, Homo sapien
cactctgggacgtgcattgtgcccc

SEQ ID NO: 506782 - DNA, 25 bp, Homo sapien
cccagggtgcagagaatccagggct

SEQ ID NO: 506783 - DNA, 25 bp, Homo sapien
catgagcctgacaaatcccagggtg

SEQ ID NO: 506784 - DNA, 25 bp, Homo sapien
tcagcactagggtggtggctctgca

SEQ ID NO: 506785 - DNA, 25 bp, Homo sapien
tgttctcccaatcctgcatgtgact

SEQ ID NO: 506786 - DNA, 25 bp, Homo sapien
aataggaattcttgggcctcgaggg

SEQ ID NO: 506787 - DNA, 25 bp, Homo sapien
gacaggctgagctctgatcttccct

SEQ ID NO: 506788 - DNA, 25 bp, Homo sapien
cactcctgtgtatggtgagggcctt

SEQ ID NO: 506789 - DNA, 25 bp, Homo sapien
tttggccaatcacaagcaccgtttg

SEQ ID NO: 506790 - DNA, 25 bp, Homo sapien
gcaatgtttggccaatcacaagcac

SEQ ID NO: 506791 - DNA, 25 bp, Homo sapien
caagcaccgtttggtgaggtgagca

SEQ ID NO: 506792 - DNA, 25 bp, Homo sapien
aggaagactgaagccgggcaatgtt

SEQ ID NO: 506793 - DNA, 25 bp, Homo sapien
aaaatggtcctggtgcactgagtcc

SEQ ID NO: 506794 - DNA, 25 bp, Homo sapien
gagtcacgggtcaggtgcagtcatt

SEQ ID NO: 506795 - DNA, 25 bp, Homo sapien
tctggccacatctcctaagaggcaa

SEQ ID NO: 506796 - DNA, 25 bp, Homo sapien
taaacagggctagccaagcagaaca

SEQ ID NO: 506797 - DNA, 25 bp, Homo sapien
cacgttggacatgctgtgcctgcag

SEQ ID NO: 506798 - DNA, 25 bp, Homo sapien
tgaagatgaatcttccccaggtcct

SEQ ID NO: 506799 - DNA, 25 bp, Homo sapien
ggacatgaacagcaggaagtgattt

SEQ ID NO: 506800 - DNA, 25 bp, Homo sapien
ttcaggtgaatgacccttgtctggg

SEQ ID NO: 506801 - DNA, 25 bp, Homo sapien
tggcttcttacaccagcatcctgtg

SEQ ID NO: 506802 - DNA, 25 bp, Homo sapien
cctgtgtttggacgcagggtttggc

SEQ ID NO: 506803 - DNA, 25 bp, Homo sapien
ggtttggcttcttacaccagcatcc

SEQ ID NO: 506804 - DNA, 25 bp, Homo sapien
tttggacgcagggtttggcttctta

SEQ ID NO: 506805 - DNA, 25 bp, Homo sapien
gattgagagaagtatcgggatttcc

SEQ ID NO: 506806 - DNA, 25 bp, Homo sapien
gcattctgtggtcatgatcctgcca

SEQ ID NO: 506807 - DNA, 25 bp, Homo sapien
tgcaaactgcatgcttgtggatggc

SEQ ID NO: 506808 - DNA, 25 bp, Homo sapien
catagcccttcttgaagattgagag

SEQ ID NO: 506809 - DNA, 25 bp, Homo sapien
ccagaacctggttttattcgcgtct

SEQ ID NO: 506810 - DNA, 25 bp, Homo sapien
cctggttttattcgcgtctgcctcc

SEQ ID NO: 506811 - DNA, 25 bp, Homo sapien
ttttattcgcgtctgcctcctcctt

SEQ ID NO: 506812 - DNA, 25 bp, Homo sapien
gaacctggttttattcgcgtctgcc

SEQ ID NO: 506813 - DNA, 25 bp, Homo sapien
tctggagcaaacgtgccctggatct

SEQ ID NO: 506814 - DNA, 25 bp, Homo sapien
tggagcaaacgtgccctggatctgc

SEQ ID NO: 506815 - DNA, 25 bp, Homo sapien
tgcctctggagcaaacgtgccctgg

SEQ ID NO: 506816 - DNA, 25 bp, Homo sapien
cctctggagcaaacgtgccctggat

SEQ ID NO: 506817 - DNA, 25 bp, Homo sapien
tcagggggatgtctaataatgcaca

SEQ ID NO: 506818 - DNA, 25 bp, Homo sapien
gtttacctgtcagggggatgtctaa

SEQ ID NO: 506819 - DNA, 25 bp, Homo sapien
taataatgcacatggaacataaaat

SEQ ID NO: 506820 - DNA, 25 bp, Homo sapien
gtctaataatgcacatggaacataa

SEQ ID NO: 506821 - DNA, 25 bp, Homo sapien
ttcaaagaaacatgactgttgtctg

SEQ ID NO: 506822 - DNA, 25 bp, Homo sapien
ctggaggtaaaatgagtgacagttt

SEQ ID NO: 506823 - DNA, 25 bp, Homo sapien
tcagctggaggtaaaatgagtgaca

SEQ ID NO: 506824 - DNA, 25 bp, Homo sapien
tagttcaaagaaacatgactgttgt

SEQ ID NO: 506825 - DNA, 25 bp, Homo sapien
gacgggaagcactgttctttctgcc

SEQ ID NO: 506826 - DNA, 25 bp, Homo sapien
tgttctttctgccgctggtcttgca

SEQ ID NO: 506827 - DNA, 25 bp, Homo sapien
ctgaaagcatttgccgccacgctgt

SEQ ID NO: 506828 - DNA, 25 bp, Homo sapien
aaaagtggacgggaagcactgttct

SEQ ID NO: 506829 - DNA, 25 bp, Homo sapien
catacactgtctacagtaagtcaca

SEQ ID NO: 506830 - DNA, 25 bp, Homo sapien
gtcacaaagtcaacccgtgtcccaa

SEQ ID NO: 506831 - DNA, 25 bp, Homo sapien
ttacttgactctcccgtgaggatgg

SEQ ID NO: 506832 - DNA, 25 bp, Homo sapien
gaggatggggatactcatacactgt

SEQ ID NO: 506833 - DNA, 25 bp, Homo sapien
aaagcgcaagcaagggctcctgggt

SEQ ID NO: 506834 - DNA, 25 bp, Homo sapien
aagggaatgatctgggtctggagac

SEQ ID NO: 506835 - DNA, 25 bp, Homo sapien
ggctccaggaaagcgcaagcaaggg

SEQ ID NO: 506836 - DNA, 25 bp, Homo sapien
gatgcggtcatcgacagctctgggt

SEQ ID NO: 506837 - DNA, 25 bp, Homo sapien
cttaacaaacaagttcaaggtgagg

SEQ ID NO: 506838 - DNA, 25 bp, Homo sapien
gagctggctctcgttccagggcaaa

SEQ ID NO: 506839 - DNA, 25 bp, Homo sapien
taagtactgacaattcggtgattgt

SEQ ID NO: 506840 - DNA, 25 bp, Homo sapien
ggtgagggccatgtgcactttacag

SEQ ID NO: 506841 - DNA, 25 bp, Homo sapien
ctttgcaccgaggcttaaacctccg

SEQ ID NO: 506842 - DNA, 25 bp, Homo sapien
cctgggagtaaatgccggctgcttt

SEQ ID NO: 506843 - DNA, 25 bp, Homo sapien
gggacccctaggctgcatccagtga

SEQ ID NO: 506844 - DNA, 25 bp, Homo sapien
gtagggggggggaagcctgatgctg

SEQ ID NO: 506845 - DNA, 25 bp, Homo sapien
ctgggacccctaggctgcatccagt

SEQ ID NO: 506846 - DNA, 25 bp, Homo sapien
cagcagagcccctttgcaagctttg

SEQ ID NO: 506847 - DNA, 25 bp, Homo sapien
ccatgacttgcttagaacagcagag

SEQ ID NO: 506848 - DNA, 25 bp, Homo sapien
ttgcggtgagggtcttatctcctgg

SEQ ID NO: 506849 - DNA, 25 bp, Homo sapien
tcttctaacttagcaaaagaatctg

SEQ ID NO: 506850 - DNA, 25 bp, Homo sapien
gcattgctatatactgtaactgttt

SEQ ID NO: 506851 - DNA, 25 bp, Homo sapien
tttgatcagccagcattgctatata

SEQ ID NO: 506852 - DNA, 25 bp, Homo sapien
gatcagccagcattgctatatactg

SEQ ID NO: 506853 - DNA, 25 bp, Homo sapien
gccagcattgctatatactgtaact

SEQ ID NO: 506854 - DNA, 25 bp, Homo sapien
cagaaagatggtgagtcagagcctg

SEQ ID NO: 506855 - DNA, 25 bp, Homo sapien
gtttgaaactattcaaactatcgat

SEQ ID NO: 506856 - DNA, 25 bp, Homo sapien
cttcagaaagatggtgagtcagagc

SEQ ID NO: 506857 - DNA, 25 bp, Homo sapien
gaaactattcaaactatcgatttga

SEQ ID NO: 506858 - DNA, 25 bp, Homo sapien
ttcatcatcaatgattgtggaatag

SEQ ID NO: 506859 - DNA, 25 bp, Homo sapien
cttcatcatcaatgattgtggaata

SEQ ID NO: 506860 - DNA, 25 bp, Homo sapien
tcgtctccatcttcaccagcctgct

SEQ ID NO: 506861 - DNA, 25 bp, Homo sapien
tcaccagcctgcttagccagaatct

SEQ ID NO: 506862 - DNA, 25 bp, Homo sapien
atatcatcttcatcactccccggtt

SEQ ID NO: 506863 - DNA, 25 bp, Homo sapien
gaatctccaaatattcttgcccatc

SEQ ID NO: 506864 - DNA, 25 bp, Homo sapien
gccctttgcactgcagagcgatgac

SEQ ID NO: 506865 - DNA, 25 bp, Homo sapien
ctggtcagtgccacgccctttgcac

SEQ ID NO: 506866 - DNA, 25 bp, Homo sapien
tggtcagtgccacgccctttgcact

SEQ ID NO: 506867 - DNA, 25 bp, Homo sapien
cacgccctttgcactgcagagcgat

SEQ ID NO: 506868 - DNA, 25 bp, Homo sapien
gacagaagtgtgtctgtatcaactg

SEQ ID NO: 506869 - DNA, 25 bp, Homo sapien
cttcaaatacaaggggaagtagctg

SEQ ID NO: 506870 - DNA, 25 bp, Homo sapien
caaatacaaggggaagtagctgcca

SEQ ID NO: 506871 - DNA, 25 bp, Homo sapien
aaatacaaggggaagtagctgccac

SEQ ID NO: 506872 - DNA, 25 bp, Homo sapien
atacaaggggaagtagctgccacat

SEQ ID NO: 506873 - DNA, 25 bp, Homo sapien
actctcgttgtcatgtcaaactgtg

SEQ ID NO: 506874 - DNA, 25 bp, Homo sapien
cagtaggaacgacctgtaagcagat

SEQ ID NO: 506875 - DNA, 25 bp, Homo sapien
aacagtaggaacgacctgtaagcag

SEQ ID NO: 506876 - DNA, 25 bp, Homo sapien
tggagactctcgttgtcatgtcaaa

SEQ ID NO: 506877 - DNA, 25 bp, Homo sapien
gaagcgtgtcaggtgtattcagaat

SEQ ID NO: 506878 - DNA, 25 bp, Homo sapien
gctacactaagaagcgtgtcaggtg

SEQ ID NO: 506879 - DNA, 25 bp, Homo sapien
cactaagaagcgtgtcaggtgtatt

SEQ ID NO: 506880 - DNA, 25 bp, Homo sapien
tcagctacactaagaagcgtgtcag

SEQ ID NO: 506881 - DNA, 25 bp, Homo sapien
aagcccttgctctcatgtagcctag

SEQ ID NO: 506882 - DNA, 25 bp, Homo sapien
tgtagcctagttcactgctgaagag

SEQ ID NO: 506883 - DNA, 25 bp, Homo sapien
tcacagaaatagtgaattacccagc

SEQ ID NO: 506884 - DNA, 25 bp, Homo sapien
cactttcgaacttcacttcacagaa

SEQ ID NO: 506885 - DNA, 25 bp, Homo sapien
gggtcagcatttggttctgtaagaa

SEQ ID NO: 506886 - DNA, 25 bp, Homo sapien
tttttcgagggtcagcatttggttc

SEQ ID NO: 506887 - DNA, 25 bp, Homo sapien
tggttctgtaagaatctggtaacaa

SEQ ID NO: 506888 - DNA, 25 bp, Homo sapien
tccatctttttttcgagggtcagca

SEQ ID NO: 506889 - DNA, 25 bp, Homo sapien
aacacatcaaacttcatgcatatat

SEQ ID NO: 506890 - DNA, 25 bp, Homo sapien
aggctgtaaacaaaagtgtctgggc

SEQ ID NO: 506891 - DNA, 25 bp, Homo sapien
gcatatatattcgtaagggtcttct

SEQ ID NO: 506892 - DNA, 25 bp, Homo sapien
cagcagtggtaggagaaatgaaatc

SEQ ID NO: 506893 - DNA, 25 bp, Homo sapien
ggataatgccttgtatatggggctt

SEQ ID NO: 506894 - DNA, 25 bp, Homo sapien
tggataatgccttgtatatggggct

SEQ ID NO: 506895 - DNA, 25 bp, Homo sapien
ttggataatgccttgtatatggggc

SEQ ID NO: 506896 - DNA, 25 bp, Homo sapien
gacagattgctcctcagtagatgtt

SEQ ID NO: 506897 - DNA, 25 bp, Homo sapien
gattgctcctcagtagatgttggac

SEQ ID NO: 506898 - DNA, 25 bp, Homo sapien
caattgtgtctattctggagtttcc

SEQ ID NO: 506899 - DNA, 25 bp, Homo sapien
tcatgtcccttaaaacccacgacaa

SEQ ID NO: 506900 - DNA, 25 bp, Homo sapien
tgttgtgcctgttgtccgtgtcccc

SEQ ID NO: 506901 - DNA, 25 bp, Homo sapien
tgtgcctgttgtccgtgtcccctgg

SEQ ID NO: 506902 - DNA, 25 bp, Homo sapien
gcctcagtccctgtatggtgagtgc

SEQ ID NO: 506903 - DNA, 25 bp, Homo sapien
tgcctcagtccctgtatggtgagtg

SEQ ID NO: 506904 - DNA, 25 bp, Homo sapien
acagaacctgcaaacacgctatttt

SEQ ID NO: 506905 - DNA, 25 bp, Homo sapien
catatgtaatgtaaggagccgggaa

SEQ ID NO: 506906 - DNA, 25 bp, Homo sapien
tttcctggacctaaataagtgccca

SEQ ID NO: 506907 - DNA, 25 bp, Homo sapien
gccgggaatctctgcaggttaaact

SEQ ID NO: 506908 - DNA, 25 bp, Homo sapien
agaatcctccaagggcatggaaatc

SEQ ID NO: 506909 - DNA, 25 bp, Homo sapien
gacctgggcactgaagcgccttatc

SEQ ID NO: 506910 - DNA, 25 bp, Homo sapien
ctgacctgggcactgaagcgcctta

SEQ ID NO: 506911 - DNA, 25 bp, Homo sapien
ttatcttgtttacctcagaatcctc

SEQ ID NO: 506912 - DNA, 25 bp, Homo sapien
tgatatgacagttgaggccagggaa

SEQ ID NO: 506913 - DNA, 25 bp, Homo sapien
ccacgtatttccagcgggcaggtgg

SEQ ID NO: 506914 - DNA, 25 bp, Homo sapien
ggaaggagccaacattagcaatgga

SEQ ID NO: 506915 - DNA, 25 bp, Homo sapien
aatggattcccacgtatttccagcg

SEQ ID NO: 506916 - DNA, 25 bp, Homo sapien
gcatattcctctgttatagagctta

SEQ ID NO: 506917 - DNA, 25 bp, Homo sapien
gcttatccagataacaatcactagg

SEQ ID NO: 506918 - DNA, 25 bp, Homo sapien
cagataacaatcactagggcagtcc

SEQ ID NO: 506919 - DNA, 25 bp, Homo sapien
cagctgagctctaatccttctctct

SEQ ID NO: 506920 - DNA, 25 bp, Homo sapien
ctgggggacgtcctgataccaccca

SEQ ID NO: 506921 - DNA, 25 bp, Homo sapien
gaaactgtctggctacttgatgcca

SEQ ID NO: 506922 - DNA, 25 bp, Homo sapien
ggggaaccacagaacatctaacagt

SEQ ID NO: 506923 - DNA, 25 bp, Homo sapien
acgtcctgataccacccacagggaa

SEQ ID NO: 506924 - DNA, 25 bp, Homo sapien
tgatgaccgtattgagtaactgggc

SEQ ID NO: 506925 - DNA, 25 bp, Homo sapien
ctgggccatgacagtgagtgtagtc

SEQ ID NO: 506926 - DNA, 25 bp, Homo sapien
gactactctgattaattggcctggt

SEQ ID NO: 506927 - DNA, 25 bp, Homo sapien
tgtctcgtactttaggcagaacagg

SEQ ID NO: 506928 - DNA, 25 bp, Homo sapien
ggcgggaaagctcccacccatgtgg

SEQ ID NO: 506929 - DNA, 25 bp, Homo sapien
tttggagctaaaagcttggatttga

SEQ ID NO: 506930 - DNA, 25 bp, Homo sapien
cccagagggagagcggcttgtacaa

SEQ ID NO: 506931 - DNA, 25 bp, Homo sapien
gtgtagtgcagcgtcctgaatttgg

SEQ ID NO: 506932 - DNA, 25 bp, Homo sapien
aaagaaacttgaactcggttgtgtg

SEQ ID NO: 506933 - DNA, 25 bp, Homo sapien
ctcggttgtgtgggtgctgaggcct

SEQ ID NO: 506934 - DNA, 25 bp, Homo sapien
aactcggttgtgtgggtgctgaggc

SEQ ID NO: 506935 - DNA, 25 bp, Homo sapien
actcggttgtgtgggtgctgaggcc

SEQ ID NO: 506936 - DNA, 25 bp, Homo sapien
tcagaaagagctcttgggcagcagg

SEQ ID NO: 506937 - DNA, 25 bp, Homo sapien
cagagatgggaaggcctgcatccag

SEQ ID NO: 506938 - DNA, 25 bp, Homo sapien
acagagatgggaaggcctgcatcca

SEQ ID NO: 506939 - DNA, 25 bp, Homo sapien
gagttgggggtgtttcagaaagagc

SEQ ID NO: 506940 - DNA, 25 bp, Homo sapien
gattaatttagctaacactagtgaa

SEQ ID NO: 506941 - DNA, 25 bp, Homo sapien
tttaccagctgcatagtctttaaca

SEQ ID NO: 506942 - DNA, 25 bp, Homo sapien
taacagtactaagcagtatagatgc

SEQ ID NO: 506943 - DNA, 25 bp, Homo sapien
cactagtgaattgatattgcccagg

SEQ ID NO: 506944 - DNA, 25 bp, Homo sapien
ggcagagacagctctttactgcaaa

SEQ ID NO: 506945 - DNA, 25 bp, Homo sapien
gccggccttgtctgcgaggctgtga

SEQ ID NO: 506946 - DNA, 25 bp, Homo sapien
acaacagaatgcagatgccggcctt

SEQ ID NO: 506947 - DNA, 25 bp, Homo sapien
ccggccttgtctgcgaggctgtgag

SEQ ID NO: 506948 - DNA, 25 bp, Homo sapien
agggagtgaacttctggcccaggca

SEQ ID NO: 506949 - DNA, 25 bp, Homo sapien
ggcagtggggcacggttgccccgga

SEQ ID NO: 506950 - DNA, 25 bp, Homo sapien
acggttgccccggagatgagactcc

SEQ ID NO: 506951 - DNA, 25 bp, Homo sapien
ctttcacagggagtgaacttctggc

SEQ ID NO: 506952 - DNA, 25 bp, Homo sapien
ggctccgccggcaccggaggtggct

SEQ ID NO: 506953 - DNA, 25 bp, Homo sapien
tcctccgagagtgcggcgacctcgg

SEQ ID NO: 506954 - DNA, 25 bp, Homo sapien
gtcgctagctccgagggcgcgcact

SEQ ID NO: 506955 - DNA, 25 bp, Homo sapien
agagtgtgcgttgcgctttctcccg

SEQ ID NO: 506956 - DNA, 25 bp, Homo sapien
aggccgtttccagccggaagcctgc

SEQ ID NO: 506957 - DNA, 25 bp, Homo sapien
tggtgttctcgcaaaaggccgtttc

SEQ ID NO: 506958 - DNA, 25 bp, Homo sapien
cctgcagggaggtcgccttgtaact

SEQ ID NO: 506959 - DNA, 25 bp, Homo sapien
tcgcttttgggaggacatgcacgtg

SEQ ID NO: 506960 - DNA, 25 bp, Homo sapien
tctgtggactgcagggaatgcattg

SEQ ID NO: 506961 - DNA, 25 bp, Homo sapien
cattggcggagttggtttggtccca

SEQ ID NO: 506962 - DNA, 25 bp, Homo sapien
ttgggacccggtgcccatcgtctgt

SEQ ID NO: 506963 - DNA, 25 bp, Homo sapien
gtgacttgggctgggccacccatct

SEQ ID NO: 506964 - DNA, 25 bp, Homo sapien
tttccccatgtttctcccacaggtg

SEQ ID NO: 506965 - DNA, 25 bp, Homo sapien
ttgtgctcccgtgcatatgcaggtt

SEQ ID NO: 506966 - DNA, 25 bp, Homo sapien
tccttatttgtgctcccgtgcatat

SEQ ID NO: 506967 - DNA, 25 bp, Homo sapien
tccttccttatttgtgctcccgtgc

SEQ ID NO: 506968 - DNA, 25 bp, Homo sapien
tgtcaccttgcagacggctttctct

SEQ ID NO: 506969 - DNA, 25 bp, Homo sapien
ttccagtccgccctctgtcaccttg

SEQ ID NO: 506970 - DNA, 25 bp, Homo sapien
tgctgcggttttccatgctccatca

SEQ ID NO: 506971 - DNA, 25 bp, Homo sapien
catccctgggttccttgtgttcttc

SEQ ID NO: 506972 - DNA, 25 bp, Homo sapien
ggagaaaaacctaatgccggctgtc

SEQ ID NO: 506973 - DNA, 25 bp, Homo sapien
aaaacctaatgccggctgtccctca

SEQ ID NO: 506974 - DNA, 25 bp, Homo sapien
tggagaaaaacctaatgccggctgt

SEQ ID NO: 506975 - DNA, 25 bp, Homo sapien
gggagcatagagtaggttgctgttt

SEQ ID NO: 506976 - DNA, 25 bp, Homo sapien
agcatagagtaggttgctgtttttc

SEQ ID NO: 506977 - DNA, 25 bp, Homo sapien
caaatgaaagagcagtaaaggggga

SEQ ID NO: 506978 - DNA, 25 bp, Homo sapien
taaagggggagcatagagtaggttg

SEQ ID NO: 506979 - DNA, 25 bp, Homo sapien
gggtattgttgaattgtgatgctca

SEQ ID NO: 506980 - DNA, 25 bp, Homo sapien
cctgcagggtattgttgaattgtga

SEQ ID NO: 506981 - DNA, 25 bp, Homo sapien
gcagggtattgttgaattgtgatgc

SEQ ID NO: 506982 - DNA, 25 bp, Homo sapien
aacctgcagggtattgttgaattgt

SEQ ID NO: 506983 - DNA, 25 bp, Homo sapien
taactccctgaggcagaaacggcac

SEQ ID NO: 506984 - DNA, 25 bp, Homo sapien
gtaactccctgaggcagaaacggca

SEQ ID NO: 506985 - DNA, 25 bp, Homo sapien
ctgtaactccctgaggcagaaacgg

SEQ ID NO: 506986 - DNA, 25 bp, Homo sapien
tgtaactccctgaggcagaaacggc

SEQ ID NO: 506987 - DNA, 25 bp, Homo sapien
gagctgtggcaacaccgcagaatgc

SEQ ID NO: 506988 - DNA, 25 bp, Homo sapien
caggatgtcagcttcggtggacaca

SEQ ID NO: 506989 - DNA, 25 bp, Homo sapien
aacatcgatagctcctgtgtgctga

SEQ ID NO: 506990 - DNA, 25 bp, Homo sapien
gggctcagaggagttcccagtccag

SEQ ID NO: 506991 - DNA, 25 bp, Homo sapien
actgaccggcattgagataaacagc

SEQ ID NO: 506992 - DNA, 25 bp, Homo sapien
cactgaccggcattgagataaacag

SEQ ID NO: 506993 - DNA, 25 bp, Homo sapien
tcactgaccggcattgagataaaca

SEQ ID NO: 506994 - DNA, 25 bp, Homo sapien
gaaatggctgtcgtgccatctgagc

SEQ ID NO: 506995 - DNA, 25 bp, Homo sapien
aacatcaaacgagtgagacgttcaa

SEQ ID NO: 506996 - DNA, 25 bp, Homo sapien
tagagctgggtggttttagatcccc

SEQ ID NO: 506997 - DNA, 25 bp, Homo sapien
tgagacgttcaacagccgctgactg

SEQ ID NO: 506998 - DNA, 25 bp, Homo sapien
tgcacctgctgtgcgggtcccagct

SEQ ID NO: 506999 - DNA, 25 bp, Homo sapien
ccagaaccatttggtcaccagcaga

SEQ ID NO: 507000 - DNA, 25 bp, Homo sapien
gagctcaacagaacctgcacctgct

SEQ ID NO: 507001 - DNA, 25 bp, Homo sapien
tattgtacccaaaactgctgagctc

SEQ ID NO: 507002 - DNA, 25 bp, Homo sapien
actgcatttgttgccagttcgggca

SEQ ID NO: 507003 - DNA, 25 bp, Homo sapien
tgtatcgagcattgtgttttgcttc

SEQ ID NO: 507004 - DNA, 25 bp, Homo sapien
tctttgaaaggcacgtgtatcgagc

SEQ ID NO: 507005 - DNA, 25 bp, Homo sapien
ttctgtagctccttgtgtgccacct

SEQ ID NO: 507006 - DNA, 25 bp, Homo sapien
tgacgtatttttgtgctgctgagta

SEQ ID NO: 507007 - DNA, 25 bp, Homo sapien
gacgtatttttgtgctgctgagtag

SEQ ID NO: 507008 - DNA, 25 bp, Homo sapien
cgtatttttgtgctgctgagtagat

SEQ ID NO: 507009 - DNA, 25 bp, Homo sapien
ctgtgacgtatttttgtgctgctga

SEQ ID NO: 507010 - DNA, 25 bp, Homo sapien
tgtatgtttgctggcgactgataat

SEQ ID NO: 507011 - DNA, 25 bp, Homo sapien
tgctggcgactgataatagtcttca

SEQ ID NO: 507012 - DNA, 25 bp, Homo sapien
gataatagtcttcaaaccaagaggg

SEQ ID NO: 507013 - DNA, 25 bp, Homo sapien
gactgataatagtcttcaaaccaag

SEQ ID NO: 507014 - DNA, 25 bp, Homo sapien
gacagagtttcctaaatcccagaaa

SEQ ID NO: 507015 - DNA, 25 bp, Homo sapien
aaactgatgacagagtttcctaaat

SEQ ID NO: 507016 - DNA, 25 bp, Homo sapien
ccagaaacgaataaaaataggacat

SEQ ID NO: 507017 - DNA, 25 bp, Homo sapien
gatgacagagtttcctaaatcccag

SEQ ID NO: 507018 - DNA, 25 bp, Homo sapien
cttgagagtcaagacctgaagtcct

SEQ ID NO: 507019 - DNA, 25 bp, Homo sapien
gtcttcctcagaatactgtttccag

SEQ ID NO: 507020 - DNA, 25 bp, Homo sapien
agcagttcccatggcctcacctatc

SEQ ID NO: 507021 - DNA, 25 bp, Homo sapien
cgctgaaacagcgtcttcctcagaa

SEQ ID NO: 507022 - DNA, 25 bp, Homo sapien
ttctcaaccattcaagttcatagcc

SEQ ID NO: 507023 - DNA, 25 bp, Homo sapien
cttctcaaccattcaagttcatagc

SEQ ID NO: 507024 - DNA, 25 bp, Homo sapien
tcaaccattcaagttcatagcccat

SEQ ID NO: 507025 - DNA, 25 bp, Homo sapien
tctcaaccattcaagttcatagccc

SEQ ID NO: 507026 - DNA, 25 bp, Homo sapien
ttgtttgcagagctaaacagccaca

SEQ ID NO: 507027 - DNA, 25 bp, Homo sapien
tttgtttgcagagctaaacagccac

SEQ ID NO: 507028 - DNA, 25 bp, Homo sapien
tgattctgcagggaacggcccgttc

SEQ ID NO: 507029 - DNA, 25 bp, Homo sapien
tgtggtgcccacagtcgtaaaggac

SEQ ID NO: 507030 - DNA, 25 bp, Homo sapien
caggttggatgccagtgttggcctc

SEQ ID NO: 507031 - DNA, 25 bp, Homo sapien
tgagcctctcctggaacgagtgtgt

SEQ ID NO: 507032 - DNA, 25 bp, Homo sapien
cactgacgatgatggcctctgctgc

SEQ ID NO: 507033 - DNA, 25 bp, Homo sapien
tatctcatccggtggcactgacgat

SEQ ID NO: 507034 - DNA, 25 bp, Homo sapien
tggtcagcaggccatgttgactctc

SEQ ID NO: 507035 - DNA, 25 bp, Homo sapien
cagcccacggccaggattatctcat

SEQ ID NO: 507036 - DNA, 25 bp, Homo sapien
gcctggtggcacatcacttctatct

SEQ ID NO: 507037 - DNA, 25 bp, Homo sapien
tctccagatccgcattcaggtgatc

SEQ ID NO: 507038 - DNA, 25 bp, Homo sapien
gcacatcacttctatctggccttga

SEQ ID NO: 507039 - DNA, 25 bp, Homo sapien
ttgccaatctctgactgagcctggt

SEQ ID NO: 507040 - DNA, 25 bp, Homo sapien
ttcattggtggcatcatgtcacatg

SEQ ID NO: 507041 - DNA, 25 bp, Homo sapien
catgtcacatgactgtcgtgcatgt

SEQ ID NO: 507042 - DNA, 25 bp, Homo sapien
tcattggtggcatcatgtcacatga

SEQ ID NO: 507043 - DNA, 25 bp, Homo sapien
atgtcacatgactgtcgtgcatgtc

SEQ ID NO: 507044 - DNA, 25 bp, Homo sapien
aggaagtcaagacgcagggcagtct

SEQ ID NO: 507045 - DNA, 25 bp, Homo sapien
cgggaacttcattgttactgctgca

SEQ ID NO: 507046 - DNA, 25 bp, Homo sapien
cattgttactgctgcaatcttgttt

SEQ ID NO: 507047 - DNA, 25 bp, Homo sapien
tttaccaccagaaaggtggtggaca

SEQ ID NO: 507048 - DNA, 25 bp, Homo sapien
acgatgccttccagcggagcacaca

SEQ ID NO: 507049 - DNA, 25 bp, Homo sapien
ctcgaggacacggacgatgccttcc

SEQ ID NO: 507050 - DNA, 25 bp, Homo sapien
acggacgatgccttccagcggagca

SEQ ID NO: 507051 - DNA, 25 bp, Homo sapien
gaggacacggacgatgccttccagc

SEQ ID NO: 507052 - DNA, 25 bp, Homo sapien
cctacagatgaatgattgcacagca

SEQ ID NO: 507053 - DNA, 25 bp, Homo sapien
caagtttgcagactcagaagccagg

SEQ ID NO: 507054 - DNA, 25 bp, Homo sapien
tgcttgccatagagaataatcccct

SEQ ID NO: 507055 - DNA, 25 bp, Homo sapien
tacagacagacctggttagtagaac

SEQ ID NO: 507056 - DNA, 25 bp, Homo sapien
ctgaggttcccgtggagagctcacc

SEQ ID NO: 507057 - DNA, 25 bp, Homo sapien
gtggagagctcaccagtttgagagg

SEQ ID NO: 507058 - DNA, 25 bp, Homo sapien
tgagaggtcttgactattgagaacc

SEQ ID NO: 507059 - DNA, 25 bp, Homo sapien
ccgtctgctcatttgcatatttgag

SEQ ID NO: 507060 - DNA, 25 bp, Homo sapien
cagttccaagtagaatcgcaaccaa

SEQ ID NO: 507061 - DNA, 25 bp, Homo sapien
ttgtttggactagggcagagctctg

SEQ ID NO: 507062 - DNA, 25 bp, Homo sapien
tttagaggacatggctatgcccagc

SEQ ID NO: 507063 - DNA, 25 bp, Homo sapien
agcccacgccggagtctgagttagg

SEQ ID NO: 507064 - DNA, 25 bp, Homo sapien
actttatctgggtatccagtgagcg

SEQ ID NO: 507065 - DNA, 25 bp, Homo sapien
gctagtgaggtatccagtgagcact

SEQ ID NO: 507066 - DNA, 25 bp, Homo sapien
tgtgatgggagactggccatggcac

SEQ ID NO: 507067 - DNA, 25 bp, Homo sapien
tgcccagaattgatgggatggctgg

SEQ ID NO: 507068 - DNA, 25 bp, Homo sapien
ggatggaagattcagctgtccgagc

SEQ ID NO: 507069 - DNA, 25 bp, Homo sapien
ttaggtgatatgtccaccacctggt

SEQ ID NO: 507070 - DNA, 25 bp, Homo sapien
tcagctgtccgagcttaggtgatat

SEQ ID NO: 507071 - DNA, 25 bp, Homo sapien
gcttaggtgatatgtccaccacctg

SEQ ID NO: 507072 - DNA, 25 bp, Homo sapien
tggtttccggccctgcatcttctgc

SEQ ID NO: 507073 - DNA, 25 bp, Homo sapien
gcttcagagcttgcgtcccatccag

SEQ ID NO: 507074 - DNA, 25 bp, Homo sapien
tccggccctgcatcttctgctgtgg

SEQ ID NO: 507075 - DNA, 25 bp, Homo sapien
gcctctccaaattagtcactgcttc

SEQ ID NO: 507076 - DNA, 25 bp, Homo sapien
cacgtggccgccaagtggagccatc

SEQ ID NO: 507077 - DNA, 25 bp, Homo sapien
ttttctgcacaggattgaggctggt

SEQ ID NO: 507078 - DNA, 25 bp, Homo sapien
tatgggggctcttcttgtgaacaga

SEQ ID NO: 507079 - DNA, 25 bp, Homo sapien
ctttcttactctggtagatgttttc

SEQ ID NO: 507080 - DNA, 25 bp, Homo sapien
caaagttctagtcagtgcccaggtc

SEQ ID NO: 507081 - DNA, 25 bp, Homo sapien
tgaagccgctgagagcacatattcg

SEQ ID NO: 507082 - DNA, 25 bp, Homo sapien
tccacgtgtgcttacagagaacagg

SEQ ID NO: 507083 - DNA, 25 bp, Homo sapien
tgaaatctgtactaggccctgaagg

SEQ ID NO: 507084 - DNA, 25 bp, Homo sapien
gctgtgtatgatggggcccgcccct

SEQ ID NO: 507085 - DNA, 25 bp, Homo sapien
ttgaagcaggccggggcgagtctca

SEQ ID NO: 507086 - DNA, 25 bp, Homo sapien
ttcctgagctgtgtatgatggggcc

SEQ ID NO: 507087 - DNA, 25 bp, Homo sapien
gccggggcgagtctcacagagtttg

SEQ ID NO: 507088 - DNA, 25 bp, Homo sapien
catctacccggctcatcagtttgtg

SEQ ID NO: 507089 - DNA, 25 bp, Homo sapien
ggcatttcagtcagacctgaactga

SEQ ID NO: 507090 - DNA, 25 bp, Homo sapien
tttgcccaacaggagtcggcctgct

SEQ ID NO: 507091 - DNA, 25 bp, Homo sapien
tttgtgctaggacatgccatgccct

SEQ ID NO: 507092 - DNA, 25 bp, Homo sapien
agctaccttgcccagacctaatttt

SEQ ID NO: 507093 - DNA, 25 bp, Homo sapien
gaagctcactctttgttaacagtca

SEQ ID NO: 507094 - DNA, 25 bp, Homo sapien
agcgggcccagcttaaacccacatt

SEQ ID NO: 507095 - DNA, 25 bp, Homo sapien
aaaaggccgtgtcttctgcttatgg

SEQ ID NO: 507096 - DNA, 25 bp, Homo sapien
tagccactaacccttggtcacacgg

SEQ ID NO: 507097 - DNA, 25 bp, Homo sapien
tggccgggaacgcatacaacgtcaa

SEQ ID NO: 507098 - DNA, 25 bp, Homo sapien
cccgcaatgtcactgtagccactaa

SEQ ID NO: 507099 - DNA, 25 bp, Homo sapien
tcacacggagtgtggagccagctgt

SEQ ID NO: 507100 - DNA, 25 bp, Homo sapien
caagattctggagtctggaaagcct

SEQ ID NO: 507101 - DNA, 25 bp, Homo sapien
tagcaagattctggagtctggaaag

SEQ ID NO: 507102 - DNA, 25 bp, Homo sapien
ctagaggggagatagcaagattctg

SEQ ID NO: 507103 - DNA, 25 bp, Homo sapien
attctggagtctggaaagccttcac

SEQ ID NO: 507104 - DNA, 25 bp, Homo sapien
tactgtgacatgttgccgattcagc

SEQ ID NO: 507105 - DNA, 25 bp, Homo sapien
ttgttgtactgtgacatgttgccga

SEQ ID NO: 507106 - DNA, 25 bp, Homo sapien
tgttgccgattcagctctttccttc

SEQ ID NO: 507107 - DNA, 25 bp, Homo sapien
tgtgcaaagaatggattgttgtact

SEQ ID NO: 507108 - DNA, 25 bp, Homo sapien
actgttgccactcctatatgcgcta

SEQ ID NO: 507109 - DNA, 25 bp, Homo sapien
tatatgcgctatactgagtgaatac

SEQ ID NO: 507110 - DNA, 25 bp, Homo sapien
cagtgcactgcggaaactgttgcca

SEQ ID NO: 507111 - DNA, 25 bp, Homo sapien
gcctgggtcagtgcactgcggaaac

SEQ ID NO: 507112 - DNA, 25 bp, Homo sapien
gactgtgtcacgctccacacggagt

SEQ ID NO: 507113 - DNA, 25 bp, Homo sapien
taacaagtgtagctactggaccttc

SEQ ID NO: 507114 - DNA, 25 bp, Homo sapien
gaaccaaggcgtagagaaatcatat

SEQ ID NO: 507115 - DNA, 25 bp, Homo sapien
cacagaagaatttgggccaaggcag

SEQ ID NO: 507116 - DNA, 25 bp, Homo sapien
gcacaccttagcaataactgtaggg

SEQ ID NO: 507117 - DNA, 25 bp, Homo sapien
tgaacagacattccaactttagatg

SEQ ID NO: 507118 - DNA, 25 bp, Homo sapien
gctagagttgtttgtatgtacagca

SEQ ID NO: 507119 - DNA, 25 bp, Homo sapien
gctcggcacgtcctgagacagaagt

SEQ ID NO: 507120 - DNA, 25 bp, Homo sapien
catgtctggcttgggttttattacc

SEQ ID NO: 507121 - DNA, 25 bp, Homo sapien
tctctcctgggtggatcctacttgg

SEQ ID NO: 507122 - DNA, 25 bp, Homo sapien
tgagggtcactccattaaagatctc

SEQ ID NO: 507123 - DNA, 25 bp, Homo sapien
aatggaaggctcaagtattctcatc

SEQ ID NO: 507124 - DNA, 25 bp, Homo sapien
aaccctgccgtagattaaaagcaat

SEQ ID NO: 507125 - DNA, 25 bp, Homo sapien
gatttctttgtctttggcctgcgga

SEQ ID NO: 507126 - DNA, 25 bp, Homo sapien
gtttcccactgtagatctgattttg

SEQ ID NO: 507127 - DNA, 25 bp, Homo sapien
cagtagtatgctggagcttccctgg

SEQ ID NO: 507128 - DNA, 25 bp, Homo sapien
gctactgcccactttttgtttactc

SEQ ID NO: 507129 - DNA, 25 bp, Homo sapien
gtttactcttaatatccacctgctt

SEQ ID NO: 507130 - DNA, 25 bp, Homo sapien
tgcttcccaaagtgatctgctcctc

SEQ ID NO: 507131 - DNA, 25 bp, Homo sapien
aaaggattcctatgaaggctgccaa

SEQ ID NO: 507132 - DNA, 25 bp, Homo sapien
ttccgtcgctggctctgaggcagag

SEQ ID NO: 507133 - DNA, 25 bp, Homo sapien
agcgagacgggtgtccccagcagga

SEQ ID NO: 507134 - DNA, 25 bp, Homo sapien
cagacgtgggagagcccggaatggg

SEQ ID NO: 507135 - DNA, 25 bp, Homo sapien
tggagtgtgcagacgtgggagagcc

SEQ ID NO: 507136 - DNA, 25 bp, Homo sapien
taaggcgggagagggagtcggcgcc

SEQ ID NO: 507137 - DNA, 25 bp, Homo sapien
gcacgggggcgagtaaggcgggaga

SEQ ID NO: 507138 - DNA, 25 bp, Homo sapien
agtaaggcgggagagggagtcggcg

SEQ ID NO: 507139 - DNA, 25 bp, Homo sapien
cgagtaaggcgggagagggagtcgg

SEQ ID NO: 507140 - DNA, 25 bp, Homo sapien
cccctgctctgtgcgtgggctcctg

SEQ ID NO: 507141 - DNA, 25 bp, Homo sapien
tgcccctgctctgtgcgtgggctcc

SEQ ID NO: 507142 - DNA, 25 bp, Homo sapien
tctgcccctgctctgtgcgtgggct

SEQ ID NO: 507143 - DNA, 25 bp, Homo sapien
cctgctctgtgcgtggcctcgccgc

SEQ ID NO: 507144 - DNA, 25 bp, Homo sapien
ctcctgctctttgcgtggcctcctg

SEQ ID NO: 507145 - DNA, 25 bp, Homo sapien
gctcctgctctttgcgtggcctcct

SEQ ID NO: 507146 - DNA, 25 bp, Homo sapien
tcctgctctttgcgtggcctcctgc

SEQ ID NO: 507147 - DNA, 25 bp, Homo sapien
gggctcctctgtcctctggaagcta

SEQ ID NO: 507148 - DNA, 25 bp, Homo sapien
ggctgggctcctctgtcctctggaa

SEQ ID NO: 507149 - DNA, 25 bp, Homo sapien
gctgggctcctctgtcctctggaag

SEQ ID NO: 507150 - DNA, 25 bp, Homo sapien
cgggaaaccgggctgggctcctctg

SEQ ID NO: 507151 - DNA, 25 bp, Homo sapien
tacacaaatgcctaaactcgtaagg

SEQ ID NO: 507152 - DNA, 25 bp, Homo sapien
acaaatgcctaaactcgtaaggcat

SEQ ID NO: 507153 - DNA, 25 bp, Homo sapien
acacaaatgcctaaactcgtaaggc

SEQ ID NO: 507154 - DNA, 25 bp, Homo sapien
ctacacaaatgcctaaactcgtaag

SEQ ID NO: 507155 - DNA, 25 bp, Homo sapien
gtcattctggttataatcagcttgc

SEQ ID NO: 507156 - DNA, 25 bp, Homo sapien
cagtgtcattctggttataatcagc

SEQ ID NO: 507157 - DNA, 25 bp, Homo sapien
acagtgtcattctggttataatcag

SEQ ID NO: 507158 - DNA, 25 bp, Homo sapien
tctggttataatcagcttgctcccc

SEQ ID NO: 507159 - DNA, 25 bp, Homo sapien
gtgtctttggtcaaaaatggagtaa

SEQ ID NO: 507160 - DNA, 25 bp, Homo sapien
tctccagaaatgttcaggtgtcttt

SEQ ID NO: 507161 - DNA, 25 bp, Homo sapien
aatggagtaaaaatactgcacacca

SEQ ID NO: 507162 - DNA, 25 bp, Homo sapien
ggagtaaaaatactgcacaccaaag

SEQ ID NO: 507163 - DNA, 25 bp, Homo sapien
cctcgtctgtgcgtttcttgtggga

SEQ ID NO: 507164 - DNA, 25 bp, Homo sapien
gaagaatccctcgtctgtgcgtttc

SEQ ID NO: 507165 - DNA, 25 bp, Homo sapien
tatctgaagaatccctcgtctgtgc

SEQ ID NO: 507166 - DNA, 25 bp, Homo sapien
cgtctgtgcgtttcttgtgggaaga

SEQ ID NO: 507167 - DNA, 25 bp, Homo sapien
ccgcttgaccaagccctcgaagaag

SEQ ID NO: 507168 - DNA, 25 bp, Homo sapien
gtccctggtcctgcgagaacttgag

SEQ ID NO: 507169 - DNA, 25 bp, Homo sapien
atagccttgatcctcggtgtggcct

SEQ ID NO: 507170 - DNA, 25 bp, Homo sapien
tacttctggcagacgatgggaaagc

SEQ ID NO: 507171 - DNA, 25 bp, Homo sapien
tgggcacggagccacttcctgtaga

SEQ ID NO: 507172 - DNA, 25 bp, Homo sapien
tggtgggcacggagccacttcctgt

SEQ ID NO: 507173 - DNA, 25 bp, Homo sapien
cacggagccacttcctgtagagacc

SEQ ID NO: 507174 - DNA, 25 bp, Homo sapien
ggcacggagccacttcctgtagaga

SEQ ID NO: 507175 - DNA, 25 bp, Homo sapien
catgcacacagtggcgaggacacca

SEQ ID NO: 507176 - DNA, 25 bp, Homo sapien
ttcattacacgtctatatatgcccc

SEQ ID NO: 507177 - DNA, 25 bp, Homo sapien
ggcacagatgaggaactgcgagaaa

SEQ ID NO: 507178 - DNA, 25 bp, Homo sapien
agggcccacccctgttgatccagga

SEQ ID NO: 507179 - DNA, 25 bp, Homo sapien
ctgtgacgggtgctgcatgcgctgc

SEQ ID NO: 507180 - DNA, 25 bp, Homo sapien
gagctgctgtgacgggtgctgcatg

SEQ ID NO: 507181 - DNA, 25 bp, Homo sapien
cgagctgctgtgacgggtgctgcat

SEQ ID NO: 507182 - DNA, 25 bp, Homo sapien
ctgctgtgacgggtgctgcatgcgc

SEQ ID NO: 507183 - DNA, 25 bp, Homo sapien
ccgcagcccaccaccgaatgcgctg

SEQ ID NO: 507184 - DNA, 25 bp, Homo sapien
tcctgatcctgatttagtactgaag

SEQ ID NO: 507185 - DNA, 25 bp, Homo sapien
tactgaagttcggtcctgtggacag

SEQ ID NO: 507186 - DNA, 25 bp, Homo sapien
cctggcacatcagattgactgagat

SEQ ID NO: 507187 - DNA, 25 bp, Homo sapien
tgtggacagcacacgaggctttctt

SEQ ID NO: 507188 - DNA, 25 bp, Homo sapien
taatttaaacaaacgcctgaacagc

SEQ ID NO: 507189 - DNA, 25 bp, Homo sapien
tgtgctcctgccataatttaaacaa

SEQ ID NO: 507190 - DNA, 25 bp, Homo sapien
cacagtgtgtagatccatgtaaaga

SEQ ID NO: 507191 - DNA, 25 bp, Homo sapien
tgtctagatactctggcatgcttgg

SEQ ID NO: 507192 - DNA, 25 bp, Homo sapien
aaggtgcggcggtgcaggagcaggc

SEQ ID NO: 507193 - DNA, 25 bp, Homo sapien
ggtgcggcggtgcaggagcaggcag

SEQ ID NO: 507194 - DNA, 25 bp, Homo sapien
ttagtagccgaggatgggccaagtt

SEQ ID NO: 507195 - DNA, 25 bp, Homo sapien
gaggaggagaaggtgcggcggtgca

SEQ ID NO: 507196 - DNA, 25 bp, Homo sapien
ccagctgcaccgcacttccagcttg

SEQ ID NO: 507197 - DNA, 25 bp, Homo sapien
tgtgttcccatagagacccccaggg

SEQ ID NO: 507198 - DNA, 25 bp, Homo sapien
cacagcagggagtgctttccacagc

SEQ ID NO: 507199 - DNA, 25 bp, Homo sapien
cgcacttccagcttgcctctggaaa

SEQ ID NO: 507200 - DNA, 25 bp, Homo sapien
gggaactggcttctctgctcgccta

SEQ ID NO: 507201 - DNA, 25 bp, Homo sapien
tgcctctttcgtggcagtccaggga

SEQ ID NO: 507202 - DNA, 25 bp, Homo sapien
tatttgtgggatcccggcagacctg

SEQ ID NO: 507203 - DNA, 25 bp, Homo sapien
cagctcgaagcgtgctgggaagcac

SEQ ID NO: 507204 - DNA, 25 bp, Homo sapien
cagacgcatctcagagtatttctgg

SEQ ID NO: 507205 - DNA, 25 bp, Homo sapien
tctggaaaagcagtgaccgagcctg

SEQ ID NO: 507206 - DNA, 25 bp, Homo sapien
cgagcctgtagaggtcatgaggcac

SEQ ID NO: 507207 - DNA, 25 bp, Homo sapien
cacagacgcatctcagagtatttct

SEQ ID NO: 507208 - DNA, 25 bp, Homo sapien
tgtccacctttgacagagcaagctc

SEQ ID NO: 507209 - DNA, 25 bp, Homo sapien
aaacagcacttgagtcgtgcacttg

SEQ ID NO: 507210 - DNA, 25 bp, Homo sapien
ttgtccggccacgtacagtccctga

SEQ ID NO: 507211 - DNA, 25 bp, Homo sapien
ttgaaattcaaagcgctgtccacct

SEQ ID NO: 507212 - DNA, 25 bp, Homo sapien
tctcctgcatctttcgggctgggtg

SEQ ID NO: 507213 - DNA, 25 bp, Homo sapien
gctggccccccgactggtggctttc

SEQ ID NO: 507214 - DNA, 25 bp, Homo sapien
gagcaaagcatgctaggctggcccc

SEQ ID NO: 507215 - DNA, 25 bp, Homo sapien
tcctgcatctttcgggctgggtggt

SEQ ID NO: 507216 - DNA, 25 bp, Homo sapien
tgatgtccccgctcaaacacccatg

SEQ ID NO: 507217 - DNA, 25 bp, Homo sapien
tgttccagctctagcgagagctcca

SEQ ID NO: 507218 - DNA, 25 bp, Homo sapien
tccccgctcaaacacccatggagat

SEQ ID NO: 507219 - DNA, 25 bp, Homo sapien
gctctagcgagagctccaggtccac

SEQ ID NO: 507220 - DNA, 25 bp, Homo sapien
gctggacacagccgtgggtcaacag

SEQ ID NO: 507221 - DNA, 25 bp, Homo sapien
cacacattgaagttaggggtactat

SEQ ID NO: 507222 - DNA, 25 bp, Homo sapien
ggtactattgacaggggcagcggct

SEQ ID NO: 507223 - DNA, 25 bp, Homo sapien
tgggtcaacagcgcttaaaaaggat

SEQ ID NO: 507224 - DNA, 25 bp, Homo sapien
tctggaccatactccagggggcggc

SEQ ID NO: 507225 - DNA, 25 bp, Homo sapien
ctggaccatactccagggggcggct

SEQ ID NO: 507226 - DNA, 25 bp, Homo sapien
ggaccatactccagggggcggctct

SEQ ID NO: 507227 - DNA, 25 bp, Homo sapien
tggaccatactccagggggcggctc

SEQ ID NO: 507228 - DNA, 25 bp, Homo sapien
ttggtcaatggatggtgctgaccca

SEQ ID NO: 507229 - DNA, 25 bp, Homo sapien
agtagatttggtcaatggatggtgc

SEQ ID NO: 507230 - DNA, 25 bp, Homo sapien
gtgggatgaaaggacacacgaagcc

SEQ ID NO: 507231 - DNA, 25 bp, Homo sapien
gaaaggacacacgaagccctcctct

SEQ ID NO: 507232 - DNA, 25 bp, Homo sapien
tcccctccagtggagagggctgcac

SEQ ID NO: 507233 - DNA, 25 bp, Homo sapien
tgtcccctccagtggagagggctgc

SEQ ID NO: 507234 - DNA, 25 bp, Homo sapien
acagggcatgccagagggggcctca

SEQ ID NO: 507235 - DNA, 25 bp, Homo sapien
gggctgcacagggcatgccagaggg

SEQ ID NO: 507236 - DNA, 25 bp, Homo sapien
ttgggtccaaccctgccttttctgc

SEQ ID NO: 507237 - DNA, 25 bp, Homo sapien
gtccaaccctgccttttctgcaaag

SEQ ID NO: 507238 - DNA, 25 bp, Homo sapien
gggtccaaccctgccttttctgcaa

SEQ ID NO: 507239 - DNA, 25 bp, Homo sapien
tgggtccaaccctgccttttctgca

SEQ ID NO: 507240 - DNA, 25 bp, Homo sapien
tggctgcatatccagctgccatggc

SEQ ID NO: 507241 - DNA, 25 bp, Homo sapien
tgggtggctgcatatccagctgcca

SEQ ID NO: 507242 - DNA, 25 bp, Homo sapien
gctgcatatccagctgccatggctc

SEQ ID NO: 507243 - DNA, 25 bp, Homo sapien
ggtggctgcatatccagctgccatg

SEQ ID NO: 507244 - DNA, 25 bp, Homo sapien
attccccttcagatgacacggactc

SEQ ID NO: 507245 - DNA, 25 bp, Homo sapien
tctaccccggctcacccggtgagcc

SEQ ID NO: 507246 - DNA, 25 bp, Homo sapien
tcagcccagcgttcagcttcacggt

SEQ ID NO: 507247 - DNA, 25 bp, Homo sapien
ttcacggttgtctctaccccggctc

SEQ ID NO: 507248 - DNA, 25 bp, Homo sapien
tttgagagcgcacagcagaactgct

SEQ ID NO: 507249 - DNA, 25 bp, Homo sapien
tggctgcagaattcccatccgtctc

SEQ ID NO: 507250 - DNA, 25 bp, Homo sapien
tgaccctagatgaggcgggctcctc

SEQ ID NO: 507251 - DNA, 25 bp, Homo sapien
aaacatctcttgactgccgcggtgg

SEQ ID NO: 507252 - DNA, 25 bp, Homo sapien
tggcctatcacaggcaaggtgacct

SEQ ID NO: 507253 - DNA, 25 bp, Homo sapien
cactggcctatcacaggcaaggtga

SEQ ID NO: 507254 - DNA, 25 bp, Homo sapien
ggcaaggtgaccttggccagctggc

SEQ ID NO: 507255 - DNA, 25 bp, Homo sapien
ctgggaccacactggcctatcacag

SEQ ID NO: 507256 - DNA, 25 bp, Homo sapien
gtttcattataagtatctattatca

SEQ ID NO: 507257 - DNA, 25 bp, Homo sapien
cattataagtatctattatcatttg

SEQ ID NO: 507258 - DNA, 25 bp, Homo sapien
ggcagatagatgggtactgtccttc

SEQ ID NO: 507259 - DNA, 25 bp, Homo sapien
gggcagatagatgggtactgtcctt

SEQ ID NO: 507260 - DNA, 25 bp, Homo sapien
gcagatagatgggtactgtccttca

SEQ ID NO: 507261 - DNA, 25 bp, Homo sapien
tgggcagatagatgggtactgtcct

SEQ ID NO: 507262 - DNA, 25 bp, Homo sapien
tttccttggcatcttacggaagttc

SEQ ID NO: 507263 - DNA, 25 bp, Homo sapien
gttccagccgctctacagttgttta

SEQ ID NO: 507264 - DNA, 25 bp, Homo sapien
tacggaagttcttctgcccgtctga

SEQ ID NO: 507265 - DNA, 25 bp, Homo sapien
tgcagcacagctcacgttccagccg

SEQ ID NO: 507266 - DNA, 25 bp, Homo sapien
gcatcaatgttatgtacatcctgaa

SEQ ID NO: 507267 - DNA, 25 bp, Homo sapien
tagttactaactgctgaaaacaaca

SEQ ID NO: 507268 - DNA, 25 bp, Homo sapien
tactgattggcctctacactttttg

SEQ ID NO: 507269 - DNA, 25 bp, Homo sapien
ctttttggttcacattccgctagca

SEQ ID NO: 507270 - DNA, 25 bp, Homo sapien
tgtatcaggacctaaacaaggtcta

SEQ ID NO: 507271 - DNA, 25 bp, Homo sapien
cacattccagacttcgctgactgca

SEQ ID NO: 507272 - DNA, 25 bp, Homo sapien
catgactactcccagtgagatttct

SEQ ID NO: 507273 - DNA, 25 bp, Homo sapien
tgcatttccatggtgtcaagtaaca

SEQ ID NO: 507274 - DNA, 25 bp, Homo sapien
acatggccctgagtccacttccagg

SEQ ID NO: 507275 - DNA, 25 bp, Homo sapien
tctatatatctcagagggatcctac

SEQ ID NO: 507276 - DNA, 25 bp, Homo sapien
gtctgtagggacaagagaatatgcc

SEQ ID NO: 507277 - DNA, 25 bp, Homo sapien
tttttagaccctgcaactccagcat

SEQ ID NO: 507278 - DNA, 25 bp, Homo sapien
cattgtggcaattaggtccaggaga

SEQ ID NO: 507279 - DNA, 25 bp, Homo sapien
catccttttctggtaagtcaatcct

SEQ ID NO: 507280 - DNA, 25 bp, Homo sapien
ctgttgttaagctcattcaatgacc

SEQ ID NO: 507281 - DNA, 25 bp, Homo sapien
catctgtgggtcagcatttatagcc

SEQ ID NO: 507282 - DNA, 25 bp, Homo sapien
gagattctgcgattcacccattcca

SEQ ID NO: 507283 - DNA, 25 bp, Homo sapien
cccagttctggtgtaagtttccaga

SEQ ID NO: 507284 - DNA, 25 bp, Homo sapien
tcccagttctggtgtaagtttccag

SEQ ID NO: 507285 - DNA, 25 bp, Homo sapien
ctggtgtaagtttccagaagccatc

SEQ ID NO: 507286 - DNA, 25 bp, Homo sapien
ctgggttgtcaactagcaatgagca

SEQ ID NO: 507287 - DNA, 25 bp, Homo sapien
tgtacgtgtacctctgcatctaaaa

SEQ ID NO: 507288 - DNA, 25 bp, Homo sapien
caatgagcattgaaccggtatttct

SEQ ID NO: 507289 - DNA, 25 bp, Homo sapien
gcaccacacggtatgcccatgtaat

SEQ ID NO: 507290 - DNA, 25 bp, Homo sapien
ttcagtataccacatcggattgtca

SEQ ID NO: 507291 - DNA, 25 bp, Homo sapien
attgtcaatcataggccctgtattg

SEQ ID NO: 507292 - DNA, 25 bp, Homo sapien
tcttagcaaatgcttcagtatacca

SEQ ID NO: 507293 - DNA, 25 bp, Homo sapien
cataggccctgtattgtacagtaga

SEQ ID NO: 507294 - DNA, 25 bp, Homo sapien
tacagactgatgatagacggttcct

SEQ ID NO: 507295 - DNA, 25 bp, Homo sapien
actatgaagccagccaaccacagat

SEQ ID NO: 507296 - DNA, 25 bp, Homo sapien
tgatagacggttccttgaccagctg

SEQ ID NO: 507297 - DNA, 25 bp, Homo sapien
ttgaggagccccgttctaaactatg

SEQ ID NO: 507298 - DNA, 25 bp, Homo sapien
tctgatagctcatcactttctgtgt

SEQ ID NO: 507299 - DNA, 25 bp, Homo sapien
gaaagcacaggatactgtcatcttt

SEQ ID NO: 507300 - DNA, 25 bp, Homo sapien
cagctgtcttgaagtacttctgata

SEQ ID NO: 507301 - DNA, 25 bp, Homo sapien
ccagaaagcacaggatactgtcatc

SEQ ID NO: 507302 - DNA, 25 bp, Homo sapien
tgaaccgaaactagctacctgacga

SEQ ID NO: 507303 - DNA, 25 bp, Homo sapien
tagtccgggactgactgcaaagagc

SEQ ID NO: 507304 - DNA, 25 bp, Homo sapien
tacctgacgatatgaggcaaaagac

SEQ ID NO: 507305 - DNA, 25 bp, Homo sapien
gaagtagatgtttcccatggactga

SEQ ID NO: 507306 - DNA, 25 bp, Homo sapien
acctaagccatcctcttcaaaatct

SEQ ID NO: 507307 - DNA, 25 bp, Homo sapien
acacctaagccatcctcttcaaaat

SEQ ID NO: 507308 - DNA, 25 bp, Homo sapien
gtagtacacctaagccatcctcttc

SEQ ID NO: 507309 - DNA, 25 bp, Homo sapien
gtacacctaagccatcctcttcaaa

SEQ ID NO: 507310 - DNA, 25 bp, Homo sapien
aattctggccactcagaggatgcta

SEQ ID NO: 507311 - DNA, 25 bp, Homo sapien
taattctggccactcagaggatgct

SEQ ID NO: 507312 - DNA, 25 bp, Homo sapien
tcgtttggataaacgtaattctggc

SEQ ID NO: 507313 - DNA, 25 bp, Homo sapien
tctggccactcagaggatgctaaaa

SEQ ID NO: 507314 - DNA, 25 bp, Homo sapien
taagggccacggtataaagcactat

SEQ ID NO: 507315 - DNA, 25 bp, Homo sapien
tgcccatgatagaagcacagccaga

SEQ ID NO: 507316 - DNA, 25 bp, Homo sapien
ggatgacaatctatttgcccatgat

SEQ ID NO: 507317 - DNA, 25 bp, Homo sapien
aatgactttagcttcctggatgaca

SEQ ID NO: 507318 - DNA, 25 bp, Homo sapien
ggttcctgacggcttcttggggctc

SEQ ID NO: 507319 - DNA, 25 bp, Homo sapien
tggttcctgacggcttcttggggct

SEQ ID NO: 507320 - DNA, 25 bp, Homo sapien
gttcctgacggcttcttggggctcc

SEQ ID NO: 507321 - DNA, 25 bp, Homo sapien
ctggttcctgacggcttcttggggc

SEQ ID NO: 507322 - DNA, 25 bp, Homo sapien
ccagctcatgtagggcaggaagtct

SEQ ID NO: 507323 - DNA, 25 bp, Homo sapien
gttcagaaacttttggaatatcagg

SEQ ID NO: 507324 - DNA, 25 bp, Homo sapien
gctcatgtagggcaggaagtctaca

SEQ ID NO: 507325 - DNA, 25 bp, Homo sapien
gggcaggaagtctacatcttctttg

SEQ ID NO: 507326 - DNA, 25 bp, Homo sapien
gagagagttttctttactgagttta

SEQ ID NO: 507327 - DNA, 25 bp, Homo sapien
tgagagagttttctttactgagttt

SEQ ID NO: 507328 - DNA, 25 bp, Homo sapien
atgagagagttttctttactgagtt

SEQ ID NO: 507329 - DNA, 25 bp, Homo sapien
tctgattagagctcgggctgccagc

SEQ ID NO: 507330 - DNA, 25 bp, Homo sapien
agctcgggctgccagcttgtggatc

SEQ ID NO: 507331 - DNA, 25 bp, Homo sapien
ctcgggctgccagcttgtggatcat

SEQ ID NO: 507332 - DNA, 25 bp, Homo sapien
tcataatctctgattagagctcggg

SEQ ID NO: 507333 - DNA, 25 bp, Homo sapien
caatgggttgatagtttaggttttg

SEQ ID NO: 507334 - DNA, 25 bp, Homo sapien
aaatcataactttcaaacaatgggt

SEQ ID NO: 507335 - DNA, 25 bp, Homo sapien
caaacaatgggttgatagtttaggt

SEQ ID NO: 507336 - DNA, 25 bp, Homo sapien
aactttcaaacaatgggttgatagt

SEQ ID NO: 507337 - DNA, 25 bp, Homo sapien
gctcagtagtcgacaccattgtacg

SEQ ID NO: 507338 - DNA, 25 bp, Homo sapien
tagtcgacaccattgtacgaaattc

SEQ ID NO: 507339 - DNA, 25 bp, Homo sapien
ttctcttgaattagtgcacacagag

SEQ ID NO: 507340 - DNA, 25 bp, Homo sapien
cagtagtcgacaccattgtacgaaa

SEQ ID NO: 507341 - DNA, 25 bp, Homo sapien
gacagagtggcaactcggagaacat

SEQ ID NO: 507342 - DNA, 25 bp, Homo sapien
gccatttgacggagacagagtggca

SEQ ID NO: 507343 - DNA, 25 bp, Homo sapien
tccatagacaaggagtcgatcattg

SEQ ID NO: 507344 - DNA, 25 bp, Homo sapien
gtgaggaatgaatccatagacaagg

SEQ ID NO: 507345 - DNA, 25 bp, Homo sapien
tccggcaccacactgggacaaaatc

SEQ ID NO: 507346 - DNA, 25 bp, Homo sapien
aaatattcaaatactccggcaccac

SEQ ID NO: 507347 - DNA, 25 bp, Homo sapien
ctgttttctccaactatgcttggat

SEQ ID NO: 507348 - DNA, 25 bp, Homo sapien
atactccggcaccacactgggacaa

SEQ ID NO: 507349 - DNA, 25 bp, Homo sapien
gcaaagagtgaataaagtctacctc

SEQ ID NO: 507350 - DNA, 25 bp, Homo sapien
ggcaaagagtgaataaagtctacct

SEQ ID NO: 507351 - DNA, 25 bp, Homo sapien
tggcaaagagtgaataaagtctacc

SEQ ID NO: 507352 - DNA, 25 bp, Homo sapien
ctggcaaagagtgaataaagtctac

SEQ ID NO: 507353 - DNA, 25 bp, Homo sapien
agcaggtgaagtcccatcaggaaca

SEQ ID NO: 507354 - DNA, 25 bp, Homo sapien
tgggctaggccttagattacagaga

SEQ ID NO: 507355 - DNA, 25 bp, Homo sapien
gatgttcgtcccagaataggccctc

SEQ ID NO: 507356 - DNA, 25 bp, Homo sapien
tgaataggtgccagtacctctgccc

SEQ ID NO: 507357 - DNA, 25 bp, Homo sapien
tgccaccagatagctggtgaccact

SEQ ID NO: 507358 - DNA, 25 bp, Homo sapien
ccaccagatagctggtgaccacttg

SEQ ID NO: 507359 - DNA, 25 bp, Homo sapien
aggatctgctccatgcactgccacc

SEQ ID NO: 507360 - DNA, 25 bp, Homo sapien
gcactgccaccagatagctggtgac

SEQ ID NO: 507361 - DNA, 25 bp, Homo sapien
cagtgaggaggtttacccaggccct

SEQ ID NO: 507362 - DNA, 25 bp, Homo sapien
tgctcaaggtcacggctaagctaat

SEQ ID NO: 507363 - DNA, 25 bp, Homo sapien
tccccgtgggtctggactatgtgac

SEQ ID NO: 507364 - DNA, 25 bp, Homo sapien
taagctaatgagtggccaacccagg

SEQ ID NO: 507365 - DNA, 25 bp, Homo sapien
gataccgcaggcgaataacctggtg

SEQ ID NO: 507366 - DNA, 25 bp, Homo sapien
taatgtcaggctctcatcctggagg

SEQ ID NO: 507367 - DNA, 25 bp, Homo sapien
gaggtgcccatcagacaccaggagg

SEQ ID NO: 507368 - DNA, 25 bp, Homo sapien
aggatgttccgtgaccctcgagcag

SEQ ID NO: 507369 - DNA, 25 bp, Homo sapien
cttgttggatgcagtcaccatttgc

SEQ ID NO: 507370 - DNA, 25 bp, Homo sapien
gcttgtgatatgcttaggatacgaa

SEQ ID NO: 507371 - DNA, 25 bp, Homo sapien
tggtattgcttgtgatatgcttagg

SEQ ID NO: 507372 - DNA, 25 bp, Homo sapien
gatatgcttaggatacgaaaatagc

SEQ ID NO: 507373 - DNA, 25 bp, Homo sapien
ggatacgaaaatagctccttgtaac

SEQ ID NO: 507374 - DNA, 25 bp, Homo sapien
cgggttgaaagacaagcatgcaagc

SEQ ID NO: 507375 - DNA, 25 bp, Homo sapien
taatcacttcgctctcactggctag

SEQ ID NO: 507376 - DNA, 25 bp, Homo sapien
caaggcgatttgcttggcttgcaag

SEQ ID NO: 507377 - DNA, 25 bp, Homo sapien
ccaaggacagcgcatgcaaggcgat

SEQ ID NO: 507378 - DNA, 25 bp, Homo sapien
gcagacaaaccgatgtggagagaaa

SEQ ID NO: 507379 - DNA, 25 bp, Homo sapien
agataggcagcagacaaaccgatgt

SEQ ID NO: 507380 - DNA, 25 bp, Homo sapien
tccatggtgctaatgacagctttgc

SEQ ID NO: 507381 - DNA, 25 bp, Homo sapien
tgctgtctaaggagctgccttccat

SEQ ID NO: 507382 - DNA, 25 bp, Homo sapien
ttcttggctcagtggtaaacatcat

SEQ ID NO: 507383 - DNA, 25 bp, Homo sapien
gaaacagctcaaatagtccaaatga

SEQ ID NO: 507384 - DNA, 25 bp, Homo sapien
gggcaagagctacacgtccaacttc

SEQ ID NO: 507385 - DNA, 25 bp, Homo sapien
caaccacgtgcatacattgctttga

SEQ ID NO: 507386 - DNA, 25 bp, Homo sapien
cagttcatgtgtatcactgaaaatg

SEQ ID NO: 507387 - DNA, 25 bp, Homo sapien
tgaaaatgaattcaatcacatacgg

SEQ ID NO: 507388 - DNA, 25 bp, Homo sapien
cttttgtttcagttcatgtgtatca

SEQ ID NO: 507389 - DNA, 25 bp, Homo sapien
aaatgaattcaatcacatacggcat

SEQ ID NO: 507390 - DNA, 25 bp, Homo sapien
ttttatacaaatcttctctactgta

SEQ ID NO: 507391 - DNA, 25 bp, Homo sapien
tcttttatacaaatcttctctactg

SEQ ID NO: 507392 - DNA, 25 bp, Homo sapien
ttatacaaatcttctctactgtatc

SEQ ID NO: 507393 - DNA, 25 bp, Homo sapien
cttttatacaaatcttctctactgt

SEQ ID NO: 507394 - DNA, 25 bp, Homo sapien
gcaagacagctggtttcactttcaa

SEQ ID NO: 507395 - DNA, 25 bp, Homo sapien
agaaagtttgctcatggaatgacag

SEQ ID NO: 507396 - DNA, 25 bp, Homo sapien
agtttgctcatggaatgacaggaac

SEQ ID NO: 507397 - DNA, 25 bp, Homo sapien
agctggtttcactttcaagcagtga

SEQ ID NO: 507398 - DNA, 25 bp, Homo sapien
tgtcctgttgccagggtgctacggt

SEQ ID NO: 507399 - DNA, 25 bp, Homo sapien
gacaccaacagtgcccaggatgctg

SEQ ID NO: 507400 - DNA, 25 bp, Homo sapien
ctacggtggcgggcatgaaaaagac

SEQ ID NO: 507401 - DNA, 25 bp, Homo sapien
agtgcccaggatgctgagttctgtg

SEQ ID NO: 507402 - DNA, 25 bp, Homo sapien
gctatataaggtggcaaccccatga

SEQ ID NO: 507403 - DNA, 25 bp, Homo sapien
tgataactatgcagagatcctctca

SEQ ID NO: 507404 - DNA, 25 bp, Homo sapien
tagtgctagcccttaaaagaaatgt

SEQ ID NO: 507405 - DNA, 25 bp, Homo sapien
tctagttgaccaccccatcatgaaa

SEQ ID NO: 507406 - DNA, 25 bp, Homo sapien
tagcctctagcatgaaattcgtatt

SEQ ID NO: 507407 - DNA, 25 bp, Homo sapien
ccctctcctgtatgcatgcggcatg

SEQ ID NO: 507408 - DNA, 25 bp, Homo sapien
atgcggcatgcacaccaagccatac

SEQ ID NO: 507409 - DNA, 25 bp, Homo sapien
catatcttgttctaactctctttcc

SEQ ID NO: 507410 - DNA, 25 bp, Homo sapien
ggcttctaggtactcttgctgggct

SEQ ID NO: 507411 - DNA, 25 bp, Homo sapien
gggtcacggcttctaggtactcttg

SEQ ID NO: 507412 - DNA, 25 bp, Homo sapien
cacggcttctaggtactcttgctgg

SEQ ID NO: 507413 - DNA, 25 bp, Homo sapien
ggtcacggcttctaggtactcttgc

SEQ ID NO: 507414 - DNA, 25 bp, Homo sapien
gagagcgggcacgatgcatcttctt

SEQ ID NO: 507415 - DNA, 25 bp, Homo sapien
ctgactttgaaagccgagagcgggc

SEQ ID NO: 507416 - DNA, 25 bp, Homo sapien
ggctcactgcgcaagaactgattct

SEQ ID NO: 507417 - DNA, 25 bp, Homo sapien
gaaatcactcttacggtgccaaggc

SEQ ID NO: 507418 - DNA, 25 bp, Homo sapien
gaaggcttcgaagccacacacagcg

SEQ ID NO: 507419 - DNA, 25 bp, Homo sapien
tgatgaaggcttcgaagccacacac

SEQ ID NO: 507420 - DNA, 25 bp, Homo sapien
aggcttcgaagccacacacagcggc

SEQ ID NO: 507421 - DNA, 25 bp, Homo sapien
tgaaggcttcgaagccacacacagc

SEQ ID NO: 507422 - DNA, 25 bp, Homo sapien
tgggctacagtgtctatgattctcc

SEQ ID NO: 507423 - DNA, 25 bp, Homo sapien
ctggaggccggccttggtgctgctg

SEQ ID NO: 507424 - DNA, 25 bp, Homo sapien
tggaggccggccttggtgctgctgg

SEQ ID NO: 507425 - DNA, 25 bp, Homo sapien
gtgctgctggaagttttggcatctg

SEQ ID NO: 507426 - DNA, 25 bp, Homo sapien
gttttggcatctggtaactggtaat

SEQ ID NO: 507427 - DNA, 25 bp, Homo sapien
tttgaaaactcaggtctgtattcct

SEQ ID NO: 507428 - DNA, 25 bp, Homo sapien
tctttgagcattcaagaccctcttt

SEQ ID NO: 507429 - DNA, 25 bp, Homo sapien
aaaactaaggcctttctttgagcat

SEQ ID NO: 507430 - DNA, 25 bp, Homo sapien
ctttctttgagcattcaagaccctc

SEQ ID NO: 507431 - DNA, 25 bp, Homo sapien
taaggcctttctttgagcattcaag

SEQ ID NO: 507432 - DNA, 25 bp, Homo sapien
catgcacactgtcgtagcctggtgg

SEQ ID NO: 507433 - DNA, 25 bp, Homo sapien
actgtcgtagcctggtggtgcttca

SEQ ID NO: 507434 - DNA, 25 bp, Homo sapien
gagggctacgtcacaaatgagcagg

SEQ ID NO: 507435 - DNA, 25 bp, Homo sapien
cacaaatgagcaggagtctggtgcc

SEQ ID NO: 507436 - DNA, 25 bp, Homo sapien
gtttccgacgtctgttctttgcaca

SEQ ID NO: 507437 - DNA, 25 bp, Homo sapien
acaccacgatcttccactactttgg

SEQ ID NO: 507438 - DNA, 25 bp, Homo sapien
ccacttccaaggtttccgacgtctg

SEQ ID NO: 507439 - DNA, 25 bp, Homo sapien
ccacgatcttccactactttgggta

SEQ ID NO: 507440 - DNA, 25 bp, Homo sapien
gaaccatgcaacaagggcctcacat

SEQ ID NO: 507441 - DNA, 25 bp, Homo sapien
ggagaaccatgcaacaagggcctca

SEQ ID NO: 507442 - DNA, 25 bp, Homo sapien
caggagaaccatgcaacaagggcct

SEQ ID NO: 507443 - DNA, 25 bp, Homo sapien
tacaggagaaccatgcaacaagggc

SEQ ID NO: 507444 - DNA, 25 bp, Homo sapien
ctgcaagacatccactgggctctta

SEQ ID NO: 507445 - DNA, 25 bp, Homo sapien
tcagtattctgttcaacatgctcaa

SEQ ID NO: 507446 - DNA, 25 bp, Homo sapien
aaagctcggtatttggccagggatg

SEQ ID NO: 507447 - DNA, 25 bp, Homo sapien
caattttgcacctcaaagctcggta

SEQ ID NO: 507448 - DNA, 25 bp, Homo sapien
agacattaaccatgtctcttattag

SEQ ID NO: 507449 - DNA, 25 bp, Homo sapien
ggcattgtgcctttgtgaggtatca

SEQ ID NO: 507450 - DNA, 25 bp, Homo sapien
tgaggtatcagtctgtaaaactctg

SEQ ID NO: 507451 - DNA, 25 bp, Homo sapien
gctttcttagccaatagtcccaggt

SEQ ID NO: 507452 - DNA, 25 bp, Homo sapien
tgcctttactagaaggagaatcccc

SEQ ID NO: 507453 - DNA, 25 bp, Homo sapien
cgttgaggctaatcctgttcactgg

SEQ ID NO: 507454 - DNA, 25 bp, Homo sapien
tactaaatcgctcacctcttggctc

SEQ ID NO: 507455 - DNA, 25 bp, Homo sapien
ttgaattcatgacttcctccaaaag

SEQ ID NO: 507456 - DNA, 25 bp, Homo sapien
tggctcagagtgcttgaattcatga

SEQ ID NO: 507457 - DNA, 25 bp, Homo sapien
cagatgctaattgggttgcttcagg

SEQ ID NO: 507458 - DNA, 25 bp, Homo sapien
tcagatgctaattgggttgcttcag

SEQ ID NO: 507459 - DNA, 25 bp, Homo sapien
ttttctttatagcaaactgtcttct

SEQ ID NO: 507460 - DNA, 25 bp, Homo sapien
cttcagaggttttctttatagcaaa

SEQ ID NO: 507461 - DNA, 25 bp, Homo sapien
ttcagaggttttctttatagcaaac

SEQ ID NO: 507462 - DNA, 25 bp, Homo sapien
tctttatagcaaactgtcttctagt

SEQ ID NO: 507463 - DNA, 25 bp, Homo sapien
ctgtgaattatggtgtatagcaaaa

SEQ ID NO: 507464 - DNA, 25 bp, Homo sapien
tgtgaattatggtgtatagcaaaag

SEQ ID NO: 507465 - DNA, 25 bp, Homo sapien
gtacagtcattatttacatatctag

SEQ ID NO: 507466 - DNA, 25 bp, Homo sapien
gtgaattatggtgtatagcaaaagt

SEQ ID NO: 507467 - DNA, 25 bp, Homo sapien
acaaagggaaaagctcctggagcct

SEQ ID NO: 507468 - DNA, 25 bp, Homo sapien
taattgggtatgtcccttgagggca

SEQ ID NO: 507469 - DNA, 25 bp, Homo sapien
gacaatgctacaagagctatgggct

SEQ ID NO: 507470 - DNA, 25 bp, Homo sapien
tgagggcatctggaacccgagacaa

SEQ ID NO: 507471 - DNA, 25 bp, Homo sapien
cctggagtcccgcgaacactgaagc

SEQ ID NO: 507472 - DNA, 25 bp, Homo sapien
ggagtcccgcgaacactgaagctcc

SEQ ID NO: 507473 - DNA, 25 bp, Homo sapien
tggagtcccgcgaacactgaagctc

SEQ ID NO: 507474 - DNA, 25 bp, Homo sapien
ctggagtcccgcgaacactgaagct

SEQ ID NO: 507475 - DNA, 25 bp, Homo sapien
tctccaaggtgttatattttgcaac

SEQ ID NO: 507476 - DNA, 25 bp, Homo sapien
tttctccaaggtgttatattttgca

SEQ ID NO: 507477 - DNA, 25 bp, Homo sapien
caaggtgttatattttgcaacttca

SEQ ID NO: 507478 - DNA, 25 bp, Homo sapien
ggtgttatattttgcaacttcaaaa

SEQ ID NO: 507479 - DNA, 25 bp, Homo sapien
aatttcaacattctgcataccaaac

SEQ ID NO: 507480 - DNA, 25 bp, Homo sapien
ttgaggaagatgaggaatttcaaca

SEQ ID NO: 507481 - DNA, 25 bp, Homo sapien
aagatgaggaatttcaacattctgc

SEQ ID NO: 507482 - DNA, 25 bp, Homo sapien
gaggaatttcaacattctgcatacc

SEQ ID NO: 507483 - DNA, 25 bp, Homo sapien
aaatcacttgagttagatatgcaaa

SEQ ID NO: 507484 - DNA, 25 bp, Homo sapien
taatgatcactatactagttgaaga

SEQ ID NO: 507485 - DNA, 25 bp, Homo sapien
tctttactctaaaggctgctcagga

SEQ ID NO: 507486 - DNA, 25 bp, Homo sapien
tactgtgcttgaggtttacacaaga

SEQ ID NO: 507487 - DNA, 25 bp, Homo sapien
ctgtccgggcatagaccttctgttt

SEQ ID NO: 507488 - DNA, 25 bp, Homo sapien
ccgggcatagaccttctgttttcac

SEQ ID NO: 507489 - DNA, 25 bp, Homo sapien
tccgggcatagaccttctgttttca

SEQ ID NO: 507490 - DNA, 25 bp, Homo sapien
tctgtggcactgtccgggcatagac

SEQ ID NO: 507491 - DNA, 25 bp, Homo sapien
cggcacatcacgagcgaaggagctg

SEQ ID NO: 507492 - DNA, 25 bp, Homo sapien
tcggcacatcacgagcgaaggagct

SEQ ID NO: 507493 - DNA, 25 bp, Homo sapien
agtcggcacatcacgagcgaaggag

SEQ ID NO: 507494 - DNA, 25 bp, Homo sapien
agagtcggcacatcacgagcgaagg

SEQ ID NO: 507495 - DNA, 25 bp, Homo sapien
cataccgtgtgcttactgtgagtta

SEQ ID NO: 507496 - DNA, 25 bp, Homo sapien
cattttgagtctgaccctactaggc

SEQ ID NO: 507497 - DNA, 25 bp, Homo sapien
gactattgtctaaggaggctccacc

SEQ ID NO: 507498 - DNA, 25 bp, Homo sapien
caaacccaagcgtgtactatggcac

SEQ ID NO: 507499 - DNA, 25 bp, Homo sapien
agaactgctcgccttctgatcagga

SEQ ID NO: 507500 - DNA, 25 bp, Homo sapien
gggcttataaggatcataattcttt

SEQ ID NO: 507501 - DNA, 25 bp, Homo sapien
tcaggaggtggtgtgatgtccaggg

SEQ ID NO: 507502 - DNA, 25 bp, Homo sapien
tgtccaggggcttataaggatcata

SEQ ID NO: 507503 - DNA, 25 bp, Homo sapien
taaaatctgggtttgcaatatgaac

SEQ ID NO: 507504 - DNA, 25 bp, Homo sapien
gcaatatgaacgtggttcttttgga

SEQ ID NO: 507505 - DNA, 25 bp, Homo sapien
tggtactgactcagaacatcagcat

SEQ ID NO: 507506 - DNA, 25 bp, Homo sapien
cattatctaagattatatgtgtgca

SEQ ID NO: 507507 - DNA, 25 bp, Homo sapien
tatgcgtagatacatggcagcgtgc

SEQ ID NO: 507508 - DNA, 25 bp, Homo sapien
tcctgctagagctacactatgcgta

SEQ ID NO: 507509 - DNA, 25 bp, Homo sapien
gtagctgggatgcacatttcacatg

SEQ ID NO: 507510 - DNA, 25 bp, Homo sapien
cttgctcctcgcgaatcctgctaga

SEQ ID NO: 507511 - DNA, 25 bp, Homo sapien
gaacacgcttcacagaacagatgag

SEQ ID NO: 507512 - DNA, 25 bp, Homo sapien
ggagagcaggcacgaattactcatc

SEQ ID NO: 507513 - DNA, 25 bp, Homo sapien
gagtcagctcatcaattcgtcaaca

SEQ ID NO: 507514 - DNA, 25 bp, Homo sapien
cagcctggcacctagagcctttgga

SEQ ID NO: 507515 - DNA, 25 bp, Homo sapien
gaatgcgcaatgttttatcacactg

SEQ ID NO: 507516 - DNA, 25 bp, Homo sapien
catgaccctgttccctgaatgcgca

SEQ ID NO: 507517 - DNA, 25 bp, Homo sapien
tgtaggattgtcctgcagttcaggg

SEQ ID NO: 507518 - DNA, 25 bp, Homo sapien
cagtctctcctgatgaacttcgagt

SEQ ID NO: 507519 - DNA, 25 bp, Homo sapien
aacagaagatacaatttgcaaagat

SEQ ID NO: 507520 - DNA, 25 bp, Homo sapien
aaacagaagatacaatttgcaaaga

SEQ ID NO: 507521 - DNA, 25 bp, Homo sapien
ttacagttctttaaggcggcgcatc

SEQ ID NO: 507522 - DNA, 25 bp, Homo sapien
aaaaacgaagctgcctggaccctcg

SEQ ID NO: 507523 - DNA, 25 bp, Homo sapien
gcagacctccgcgatttaaaggcag

SEQ ID NO: 507524 - DNA, 25 bp, Homo sapien
tccagagtttgtccggagttgttta

SEQ ID NO: 507525 - DNA, 25 bp, Homo sapien
gacagcctctatgtgataattgcac

SEQ ID NO: 507526 - DNA, 25 bp, Homo sapien
aatcctctgacctgtttaaaacgtg

SEQ ID NO: 507527 - DNA, 25 bp, Homo sapien
agtccaccttcagatgggtcctgga

SEQ ID NO: 507528 - DNA, 25 bp, Homo sapien
tctatgctagtcgtaatctctgaca

SEQ ID NO: 507529 - DNA, 25 bp, Homo sapien
aacaagaaacaacgcgtgctactgc

SEQ ID NO: 507530 - DNA, 25 bp, Homo sapien
gaaacaacgcgtgctactgcgaacc

SEQ ID NO: 507531 - DNA, 25 bp, Homo sapien
ggaaacaagaaacaacgcgtgctac

SEQ ID NO: 507532 - DNA, 25 bp, Homo sapien
acaacgcgtgctactgcgaaccgca

SEQ ID NO: 507533 - DNA, 25 bp, Homo sapien
tgactgtcggctccggtgggcgccc

SEQ ID NO: 507534 - DNA, 25 bp, Homo sapien
cacggggtgcggagacttggtgtga

SEQ ID NO: 507535 - DNA, 25 bp, Homo sapien
gagacttggtgtgactgtcggctcc

SEQ ID NO: 507536 - DNA, 25 bp, Homo sapien
acttggtgtgactgtcggctccggt

SEQ ID NO: 507537 - DNA, 25 bp, Homo sapien
acccggtttctcgtcaccagggctg

SEQ ID NO: 507538 - DNA, 25 bp, Homo sapien
gggcagagcggaacgaccgcaatat

SEQ ID NO: 507539 - DNA, 25 bp, Homo sapien
taggactacagggacctttgcagcc

SEQ ID NO: 507540 - DNA, 25 bp, Homo sapien
agccactggcgggaaagtagtacgc

SEQ ID NO: 507541 - DNA, 25 bp, Homo sapien
gagggttcagggctttcagtttcat

SEQ ID NO: 507542 - DNA, 25 bp, Homo sapien
cctagaggatccagctagctccgga

SEQ ID NO: 507543 - DNA, 25 bp, Homo sapien
ggtacttccgtaatctaggctctcc

SEQ ID NO: 507544 - DNA, 25 bp, Homo sapien
tcttccaagatcagccggagggttc

SEQ ID NO: 507545 - DNA, 25 bp, Homo sapien
cagcaaaccaaagccatacaaatta

SEQ ID NO: 507546 - DNA, 25 bp, Homo sapien
agcaaaccaaagccatacaaattaa

SEQ ID NO: 507547 - DNA, 25 bp, Homo sapien
aaccaaagccatacaaattaagcac

SEQ ID NO: 507548 - DNA, 25 bp, Homo sapien
caaaccaaagccatacaaattaagc

SEQ ID NO: 507549 - DNA, 25 bp, Homo sapien
ggagaccagaatgcaacagcagccc

SEQ ID NO: 507550 - DNA, 25 bp, Homo sapien
gagaccagaatgcaacagcagcccc

SEQ ID NO: 507551 - DNA, 25 bp, Homo sapien
caaatttgtgtcacgcgcagggaca

SEQ ID NO: 507552 - DNA, 25 bp, Homo sapien
ggctctgaattcgtacctgggaact

SEQ ID NO: 507553 - DNA, 25 bp, Homo sapien
caagctgtcgctggcatctagggct

SEQ ID NO: 507554 - DNA, 25 bp, Homo sapien
gcacttgcagggtggagctacccca

SEQ ID NO: 507555 - DNA, 25 bp, Homo sapien
aatggttccaattattaaacatgac

SEQ ID NO: 507556 - DNA, 25 bp, Homo sapien
ggtcatgacccacgccagggtgaag

SEQ ID NO: 507557 - DNA, 25 bp, Homo sapien
tcgtttgactcttcccaagtgtggg

SEQ ID NO: 507558 - DNA, 25 bp, Homo sapien
gcataatgacataattggctgtgga

SEQ ID NO: 507559 - DNA, 25 bp, Homo sapien
atcacgccccatcttccatcacacc

SEQ ID NO: 507560 - DNA, 25 bp, Homo sapien
gagggccataagaatgtcagtgcag

SEQ ID NO: 507561 - DNA, 25 bp, Homo sapien
aaggccccgacgtggctccacctga

SEQ ID NO: 507562 - DNA, 25 bp, Homo sapien
tggagtgagggccataagaatgtca

SEQ ID NO: 507563 - DNA, 25 bp, Homo sapien
agcatcagtgacaggtcctttgtcc

SEQ ID NO: 507564 - DNA, 25 bp, Homo sapien
gagtcaggaattcagcatcagtgac

SEQ ID NO: 507565 - DNA, 25 bp, Homo sapien
gaattcagcatcagtgacaggtcct

SEQ ID NO: 507566 - DNA, 25 bp, Homo sapien
agaagttgaagacaatgtccctatt

SEQ ID NO: 507567 - DNA, 25 bp, Homo sapien
tgcatacggtaagtcaaggtctgga

SEQ ID NO: 507568 - DNA, 25 bp, Homo sapien
catgcatacggtaagtcaaggtctg

SEQ ID NO: 507569 - DNA, 25 bp, Homo sapien
cacatgcatacggtaagtcaaggtc

SEQ ID NO: 507570 - DNA, 25 bp, Homo sapien
ggtcacatgcatacggtaagtcaag

SEQ ID NO: 507571 - DNA, 25 bp, Homo sapien
tgcagaagcgtcagtgctagagcag

SEQ ID NO: 507572 - DNA, 25 bp, Homo sapien
tgtccaacagccctaatgccagcct

SEQ ID NO: 507573 - DNA, 25 bp, Homo sapien
aatgattcctgtaggatcctttccc

SEQ ID NO: 507574 - DNA, 25 bp, Homo sapien
aatgccagcctcactgggaagcctt

SEQ ID NO: 507575 - DNA, 25 bp, Homo sapien
actagttccaagcatgcggacaggg

SEQ ID NO: 507576 - DNA, 25 bp, Homo sapien
tggaacatgcgcaaaagcaaatgct

SEQ ID NO: 507577 - DNA, 25 bp, Homo sapien
tcttctagcagaagtttcggtgcca

SEQ ID NO: 507578 - DNA, 25 bp, Homo sapien
gcagacattgatgggttgattgaga

SEQ ID NO: 507579 - DNA, 25 bp, Homo sapien
ccatcatccagccttccattcccat

SEQ ID NO: 507580 - DNA, 25 bp, Homo sapien
ctccatcatccagccttccattccc

SEQ ID NO: 507581 - DNA, 25 bp, Homo sapien
ctcgcccactctcccacttctgtgt

SEQ ID NO: 507582 - DNA, 25 bp, Homo sapien
tgtgtctccatcatccagccttcca

SEQ ID NO: 507583 - DNA, 25 bp, Homo sapien
taatactgggtctccaccgagttcc

SEQ ID NO: 507584 - DNA, 25 bp, Homo sapien
gagttcccaaagcaggccatctatg

SEQ ID NO: 507585 - DNA, 25 bp, Homo sapien
aagggtgagatgaaggtcctcccgg

SEQ ID NO: 507586 - DNA, 25 bp, Homo sapien
gggcttcctggcgtgtgtgtaatac

SEQ ID NO: 507587 - DNA, 25 bp, Homo sapien
taggtgatcccatcagctgcagatg

SEQ ID NO: 507588 - DNA, 25 bp, Homo sapien
caaagtggtcttctagagtgggcac

SEQ ID NO: 507589 - DNA, 25 bp, Homo sapien
caggactaagaattcatggcacaca

SEQ ID NO: 507590 - DNA, 25 bp, Homo sapien
tccatgtggctgagaccaaagaggc

SEQ ID NO: 507591 - DNA, 25 bp, Homo sapien
ggtttatgaaaatggagcagtctcc

SEQ ID NO: 507592 - DNA, 25 bp, Homo sapien
aagccggcttcagagcaaaccacaa

SEQ ID NO: 507593 - DNA, 25 bp, Homo sapien
ggccgttcatcactagcttcttcag

SEQ ID NO: 507594 - DNA, 25 bp, Homo sapien
tcactccaacgtgaggaagccggct

SEQ ID NO: 507595 - DNA, 25 bp, Homo sapien
tagagctcatcccttgcttgctgct

SEQ ID NO: 507596 - DNA, 25 bp, Homo sapien
ctagagctcatcccttgcttgctgc

SEQ ID NO: 507597 - DNA, 25 bp, Homo sapien
acgtcaatattctcatctaagggtg

SEQ ID NO: 507598 - DNA, 25 bp, Homo sapien
gactcctcttacgtcaatattctca

SEQ ID NO: 507599 - DNA, 25 bp, Homo sapien
catctaagggtgatgtcttatctcc

SEQ ID NO: 507600 - DNA, 25 bp, Homo sapien
gctggcttcggactcctcttacgtc

SEQ ID NO: 507601 - DNA, 25 bp, Homo sapien
ggaacactggccgagtcacagccag

SEQ ID NO: 507602 - DNA, 25 bp, Homo sapien
cctctcgtcgggagaggaacactgg

SEQ ID NO: 507603 - DNA, 25 bp, Homo sapien
cagccagtcgtgctgactggataca

SEQ ID NO: 507604 - DNA, 25 bp, Homo sapien
ccagtcggacgcaaagcaggaagtg

SEQ ID NO: 507605 - DNA, 25 bp, Homo sapien
tgactagaggcagcaaaggacacga

SEQ ID NO: 507606 - DNA, 25 bp, Homo sapien
ctcaaggcagagtcgggtatccaga

SEQ ID NO: 507607 - DNA, 25 bp, Homo sapien
ccttctttggtagaagtcaacactc

SEQ ID NO: 507608 - DNA, 25 bp, Homo sapien
caaaggacacgattctggagttagg

SEQ ID NO: 507609 - DNA, 25 bp, Homo sapien
tgagctaattcactactaccttcag

SEQ ID NO: 507610 - DNA, 25 bp, Homo sapien
atcagttgagctaattcactactac

SEQ ID NO: 507611 - DNA, 25 bp, Homo sapien
cagttgagctaattcactactacct

SEQ ID NO: 507612 - DNA, 25 bp, Homo sapien
gttgagctaattcactactaccttc

SEQ ID NO: 507613 - DNA, 25 bp, Homo sapien
ttttagcctggtgatggccatgtgc

SEQ ID NO: 507614 - DNA, 25 bp, Homo sapien
cccgtatagtgtctttgtgcaacct

SEQ ID NO: 507615 - DNA, 25 bp, Homo sapien
tggtgacgtgcacacgacggtcctg

SEQ ID NO: 507616 - DNA, 25 bp, Homo sapien
gctcctgttcagtataggtggcaca

SEQ ID NO: 507617 - DNA, 25 bp, Homo sapien
atttaattgaccctctgaagcctag

SEQ ID NO: 507618 - DNA, 25 bp, Homo sapien
taagttgtagacagaaaaaggcaat

SEQ ID NO: 507619 - DNA, 25 bp, Homo sapien
ccatttcagagggtgtttttggagg

SEQ ID NO: 507620 - DNA, 25 bp, Homo sapien
tataaaattgcagctctaaatgagc

SEQ ID NO: 507621 - DNA, 25 bp, Homo sapien
agtagtggttccacccaagagcaga

SEQ ID NO: 507622 - DNA, 25 bp, Homo sapien
ctgtcaccgtggctctggtcatcat

SEQ ID NO: 507623 - DNA, 25 bp, Homo sapien
catctgcaagctctggcgggaagta

SEQ ID NO: 507624 - DNA, 25 bp, Homo sapien
acgtgcttcgggacgcagagtccag

SEQ ID NO: 507625 - DNA, 25 bp, Homo sapien
cattggaatcgtaaccagggttggt

SEQ ID NO: 507626 - DNA, 25 bp, Homo sapien
tccatctgcattggaatcgtaacca

SEQ ID NO: 507627 - DNA, 25 bp, Homo sapien
tgaactgcatggaatgcacatccaa

SEQ ID NO: 507628 - DNA, 25 bp, Homo sapien
taaccagggttggtgaactgcatgg

SEQ ID NO: 507629 - DNA, 25 bp, Homo sapien
ggagaaggcctctgatgaatggatg

SEQ ID NO: 507630 - DNA, 25 bp, Homo sapien
gtcagtgagggctagtgttggagtc

SEQ ID NO: 507631 - DNA, 25 bp, Homo sapien
agaaggcctctgatgaatggatgga

SEQ ID NO: 507632 - DNA, 25 bp, Homo sapien
aagggtcagtgagggctagtgttgg

SEQ ID NO: 507633 - DNA, 25 bp, Homo sapien
tcagctcagggcagtcagagtcctc

SEQ ID NO: 507634 - DNA, 25 bp, Homo sapien
gatctctggaaagacgatgggcagc

SEQ ID NO: 507635 - DNA, 25 bp, Homo sapien
gaggtgtcccctaacttctggcaga

SEQ ID NO: 507636 - DNA, 25 bp, Homo sapien
gaaaagagtgtttcagacccgtcac

SEQ ID NO: 507637 - DNA, 25 bp, Homo sapien
tggcttgcatgtgtggggccttctc

SEQ ID NO: 507638 - DNA, 25 bp, Homo sapien
catggcttgcatgtgtggggccttc

SEQ ID NO: 507639 - DNA, 25 bp, Homo sapien
tgcatgtgtggggccttctctccat

SEQ ID NO: 507640 - DNA, 25 bp, Homo sapien
gcttgcatgtgtggggccttctctc

SEQ ID NO: 507641 - DNA, 25 bp, Homo sapien
gcaggttagataggaggagattggg

SEQ ID NO: 507642 - DNA, 25 bp, Homo sapien
gggcaggttagataggaggagattg

SEQ ID NO: 507643 - DNA, 25 bp, Homo sapien
cagtggggcaggttagataggagga

SEQ ID NO: 507644 - DNA, 25 bp, Homo sapien
agtcagtggggcaggttagatagga

SEQ ID NO: 507645 - DNA, 25 bp, Homo sapien
gacttgattccatcctggcagggca

SEQ ID NO: 507646 - DNA, 25 bp, Homo sapien
gatggaaaggtagagcctgccagct

SEQ ID NO: 507647 - DNA, 25 bp, Homo sapien
aagcggagccgtcctgactgggccc

SEQ ID NO: 507648 - DNA, 25 bp, Homo sapien
cccctggagagacttgattccatcc

SEQ ID NO: 507649 - DNA, 25 bp, Homo sapien
ccctcccaccagaatgagtgactca

SEQ ID NO: 507650 - DNA, 25 bp, Homo sapien
cctcccaccagaatgagtgactcac

SEQ ID NO: 507651 - DNA, 25 bp, Homo sapien
ctccctcccaccagaatgagtgact

SEQ ID NO: 507652 - DNA, 25 bp, Homo sapien
tccctcccaccagaatgagtgactc

SEQ ID NO: 507653 - DNA, 25 bp, Homo sapien
gggaaggaggtgcctgctgggccac

SEQ ID NO: 507654 - DNA, 25 bp, Homo sapien
ggcagcaggagccagaggccccagc

SEQ ID NO: 507655 - DNA, 25 bp, Homo sapien
ggagccagaggccccagccagccat

SEQ ID NO: 507656 - DNA, 25 bp, Homo sapien
agcaggagccagaggccccagccag

SEQ ID NO: 507657 - DNA, 25 bp, Homo sapien
gcaggagccagaggccccagccagc

SEQ ID NO: 507658 - DNA, 25 bp, Homo sapien
agcaggtccccctggtatcctggag

SEQ ID NO: 507659 - DNA, 25 bp, Homo sapien
tggtatcctggagccactgaggcct

SEQ ID NO: 507660 - DNA, 25 bp, Homo sapien
cctttctgaggctataggcaggtgg

SEQ ID NO: 507661 - DNA, 25 bp, Homo sapien
ggcccacagctgtcctttgggccaa

SEQ ID NO: 507662 - DNA, 25 bp, Homo sapien
gtgcccagtacgcagatgctgtgcc

SEQ ID NO: 507663 - DNA, 25 bp, Homo sapien
aaaacaggcaccagtataccctcct

SEQ ID NO: 507664 - DNA, 25 bp, Homo sapien
cttggtgggtgtcactggcaaaaca

SEQ ID NO: 507665 - DNA, 25 bp, Homo sapien
agcttcctgcccgtgcccagtacgc

SEQ ID NO: 507666 - DNA, 25 bp, Homo sapien
gcaagggagtcagctccatcagcag

SEQ ID NO: 507667 - DNA, 25 bp, Homo sapien
aagtgatcctcaacgtgtgcaaggg

SEQ ID NO: 507668 - DNA, 25 bp, Homo sapien
gacatcttatcaggcaactggtggg

SEQ ID NO: 507669 - DNA, 25 bp, Homo sapien
tagaccctcgacaccaggaagtgat

SEQ ID NO: 507670 - DNA, 25 bp, Homo sapien
tgtccctatggccagttcgagtaag

SEQ ID NO: 507671 - DNA, 25 bp, Homo sapien
gattgacctggagagcatgcatctc

SEQ ID NO: 507672 - DNA, 25 bp, Homo sapien
atggcgaccagaacaacgagggcga

SEQ ID NO: 507673 - DNA, 25 bp, Homo sapien
caagcactctcaaggtctggctcaa

SEQ ID NO: 507674 - DNA, 25 bp, Homo sapien
tgatgccaagttcacttggaccccg

SEQ ID NO: 507675 - DNA, 25 bp, Homo sapien
ggtcttgtggagatggatgctcctc

SEQ ID NO: 507676 - DNA, 25 bp, Homo sapien
ccccggctgagattagagaggcctg

SEQ ID NO: 507677 - DNA, 25 bp, Homo sapien
tcgccatggtgcgtgttggtcttgt

SEQ ID NO: 507678 - DNA, 25 bp, Homo sapien
ccggcgggcgttggcgaaggtggtg

SEQ ID NO: 507679 - DNA, 25 bp, Homo sapien
cggcgggcgttggcgaaggtggtgg

SEQ ID NO: 507680 - DNA, 25 bp, Homo sapien
cgttggcgaaggtggtggggactgt

SEQ ID NO: 507681 - DNA, 25 bp, Homo sapien
gtggtggggactgtcgtgaggatca

SEQ ID NO: 507682 - DNA, 25 bp, Homo sapien
ggcctcgtcccaaggctggatgcgc

SEQ ID NO: 507683 - DNA, 25 bp, Homo sapien
tcgtgctctcccagagagctgcgct

SEQ ID NO: 507684 - DNA, 25 bp, Homo sapien
tatggagagtgctccatccgccagg

SEQ ID NO: 507685 - DNA, 25 bp, Homo sapien
gcagtggcctcgagccctgggtctt

SEQ ID NO: 507686 - DNA, 25 bp, Homo sapien
ttcgcaggcctgtcatactcgtctt

SEQ ID NO: 507687 - DNA, 25 bp, Homo sapien
tcttttgacgctttcttcgcaggcc

SEQ ID NO: 507688 - DNA, 25 bp, Homo sapien
gactcttccatttcggtggtaggct

SEQ ID NO: 507689 - DNA, 25 bp, Homo sapien
ttcactctcgaaacagcagccttgg

SEQ ID NO: 507690 - DNA, 25 bp, Homo sapien
tctttgatgcttctggattgtcatt

SEQ ID NO: 507691 - DNA, 25 bp, Homo sapien
gcagtctcagggatatactgcttgg

SEQ ID NO: 507692 - DNA, 25 bp, Homo sapien
gaaggttcaagtaaagactctgaag

SEQ ID NO: 507693 - DNA, 25 bp, Homo sapien
tctagtttacggcatgaatcaacac

SEQ ID NO: 507694 - DNA, 25 bp, Homo sapien
gtttttctaccaggaatgtactctc

SEQ ID NO: 507695 - DNA, 25 bp, Homo sapien
cataatgtacagcaggcgtgaaggc

SEQ ID NO: 507696 - DNA, 25 bp, Homo sapien
tataggacagcatagtggagagcag

SEQ ID NO: 507697 - DNA, 25 bp, Homo sapien
gaagaatgccaactatacctaacga

SEQ ID NO: 507698 - DNA, 25 bp, Homo sapien
gggactgactcagtccatgaactgt

SEQ ID NO: 507699 - DNA, 25 bp, Homo sapien
ctgatggccagggacgttgggactg

SEQ ID NO: 507700 - DNA, 25 bp, Homo sapien
cagggacgttgggactgactcagtc

SEQ ID NO: 507701 - DNA, 25 bp, Homo sapien
gacgttgggactgactcagtccatg

SEQ ID NO: 507702 - DNA, 25 bp, Homo sapien
ctttgcacaaaggtggtatgcaatc

SEQ ID NO: 507703 - DNA, 25 bp, Homo sapien
caaaggtggtatgcaatcagaagac

SEQ ID NO: 507704 - DNA, 25 bp, Homo sapien
tgcacaaaggtggtatgcaatcaga

SEQ ID NO: 507705 - DNA, 25 bp, Homo sapien
ggtggtatgcaatcagaagacgtct

SEQ ID NO: 507706 - DNA, 25 bp, Homo sapien
gagccttgatgaagcactgcagagg

SEQ ID NO: 507707 - DNA, 25 bp, Homo sapien
gacacagatgatagtggagtcagcg

SEQ ID NO: 507708 - DNA, 25 bp, Homo sapien
taagaaggtagaggcgcttcctcct

SEQ ID NO: 507709 - DNA, 25 bp, Homo sapien
gggaatcagaatccgagagccttga

SEQ ID NO: 507710 - DNA, 25 bp, Homo sapien
tctacatgcgagagtatactaaagc

SEQ ID NO: 507711 - DNA, 25 bp, Homo sapien
tgtttctatgcagcgtctacatgcg

SEQ ID NO: 507712 - DNA, 25 bp, Homo sapien
ccaaatggagcatggaggcactgtg

SEQ ID NO: 507713 - DNA, 25 bp, Homo sapien
tccatggtaagtgtctcaagtagcc

SEQ ID NO: 507714 - DNA, 25 bp, Homo sapien
aatattttggctacagagacacgtg

SEQ ID NO: 507715 - DNA, 25 bp, Homo sapien
taacatcagggtagctgtggtccat

SEQ ID NO: 507716 - DNA, 25 bp, Homo sapien
tgtggtccatgggttaacactggct

SEQ ID NO: 507717 - DNA, 25 bp, Homo sapien
tgtacaagtccagtgctctacggct

SEQ ID NO: 507718 - DNA, 25 bp, Homo sapien
acagaatccacagtaaatgtacatt

SEQ ID NO: 507719 - DNA, 25 bp, Homo sapien
acttcgtttcttgatgaccgtttgc

SEQ ID NO: 507720 - DNA, 25 bp, Homo sapien
tgtccttaactcttatccgaccgga

SEQ ID NO: 507721 - DNA, 25 bp, Homo sapien
tgggtattcccgtctcttgaactgg

SEQ ID NO: 507722 - DNA, 25 bp, Homo sapien
tgggcagtatgtagttctctttggc

SEQ ID NO: 507723 - DNA, 25 bp, Homo sapien
aacaggtgtcacactgagtggtttt

SEQ ID NO: 507724 - DNA, 25 bp, Homo sapien
tgaacaggtgtcacactgagtggtt

SEQ ID NO: 507725 - DNA, 25 bp, Homo sapien
gatgaacaggtgtcacactgagtgg

SEQ ID NO: 507726 - DNA, 25 bp, Homo sapien
agatgaacaggtgtcacactgagtg

SEQ ID NO: 507727 - DNA, 25 bp, Homo sapien
tgacaattgtaccatctgggaaaat

SEQ ID NO: 507728 - DNA, 25 bp, Homo sapien
ctgacaattgtaccatctgggaaaa

SEQ ID NO: 507729 - DNA, 25 bp, Homo sapien
tttaacagtctggtcaggaaacgtg

SEQ ID NO: 507730 - DNA, 25 bp, Homo sapien
tctggtcaggaaacgtgatttcttt

SEQ ID NO: 507731 - DNA, 25 bp, Homo sapien
aagaatttaatgagagggtggagca

SEQ ID NO: 507732 - DNA, 25 bp, Homo sapien
gaagaatttaatgagagggtggagc

SEQ ID NO: 507733 - DNA, 25 bp, Homo sapien
tctgggcagctgcatagtagtagat

SEQ ID NO: 507734 - DNA, 25 bp, Homo sapien
gtctgggcagctgcatagtagtaga

SEQ ID NO: 507735 - DNA, 25 bp, Homo sapien
tccctccgggtatgtcgtgtgagtg

SEQ ID NO: 507736 - DNA, 25 bp, Homo sapien
cagtccctccgggtatgtcgtgtga

SEQ ID NO: 507737 - DNA, 25 bp, Homo sapien
tttctccagagatggttaaactatg

SEQ ID NO: 507738 - DNA, 25 bp, Homo sapien
gaggagaacacctctggaaacatac

SEQ ID NO: 507739 - DNA, 25 bp, Homo sapien
tgtaaagacacacagtcagtctgcc

SEQ ID NO: 507740 - DNA, 25 bp, Homo sapien
aactatggaggagaacacctctgga

SEQ ID NO: 507741 - DNA, 25 bp, Homo sapien
gaaagtgacagtgatggtcttccca

SEQ ID NO: 507742 - DNA, 25 bp, Homo sapien
taacacggcacccattcttataaac

SEQ ID NO: 507743 - DNA, 25 bp, Homo sapien
gcttcacgtcaccattaaagaaagt

SEQ ID NO: 507744 - DNA, 25 bp, Homo sapien
cctttcgagttccattgggaaacag

SEQ ID NO: 507745 - DNA, 25 bp, Homo sapien
gaagttcagtggttcaagtggctcc

SEQ ID NO: 507746 - DNA, 25 bp, Homo sapien
tctccctgtatgtcttggtcttcct

SEQ ID NO: 507747 - DNA, 25 bp, Homo sapien
gatttctccctgtatgtcttggtct

SEQ ID NO: 507748 - DNA, 25 bp, Homo sapien
cagtggttcaagtggctccctggga

SEQ ID NO: 507749 - DNA, 25 bp, Homo sapien
tatccaaattgcctaaatcacgagg

SEQ ID NO: 507750 - DNA, 25 bp, Homo sapien
aggaggtgcagacttggatcttcga

SEQ ID NO: 507751 - DNA, 25 bp, Homo sapien
ttgtcccttatccaaattgcctaaa

SEQ ID NO: 507752 - DNA, 25 bp, Homo sapien
cctaaatcacgaggaggtgcagact

SEQ ID NO: 507753 - DNA, 25 bp, Homo sapien
caatcacaaggtgtaaggtgcagat

SEQ ID NO: 507754 - DNA, 25 bp, Homo sapien
gataaaagaggcatctaagacctgt

SEQ ID NO: 507755 - DNA, 25 bp, Homo sapien
caacaaagtgaggtgaatctctctc

SEQ ID NO: 507756 - DNA, 25 bp, Homo sapien
tagttctccgacacaggtacttaag

SEQ ID NO: 507757 - DNA, 25 bp, Homo sapien
tggatgttacgggagaatggcctga

SEQ ID NO: 507758 - DNA, 25 bp, Homo sapien
tgctgggcgtgtgaggcggctgtgc

SEQ ID NO: 507759 - DNA, 25 bp, Homo sapien
ggcaggtggtcagccaacaagctgc

SEQ ID NO: 507760 - DNA, 25 bp, Homo sapien
acctccatgttaaaaagtgtaacag

SEQ ID NO: 507761 - DNA, 25 bp, Homo sapien
tcagagggatcagtctagggactac

SEQ ID NO: 507762 - DNA, 25 bp, Homo sapien
cactgatttataggtcccaaactgc

SEQ ID NO: 507763 - DNA, 25 bp, Homo sapien
caaactgccacacatcagcaatttc

SEQ ID NO: 507764 - DNA, 25 bp, Homo sapien
gattcaatgtaactaatagatccag

SEQ ID NO: 507765 - DNA, 25 bp, Homo sapien
aggattcaaacccactatatatcaa

SEQ ID NO: 507766 - DNA, 25 bp, Homo sapien
aaggttgtcaactaataaaaggcag

SEQ ID NO: 507767 - DNA, 25 bp, Homo sapien
tcccaggctgattatgaactaacat

SEQ ID NO: 507768 - DNA, 25 bp, Homo sapien
ccaactgggcaggataacgagaggt

SEQ ID NO: 507769 - DNA, 25 bp, Homo sapien
tatgaagagcatactctgctgacag

SEQ ID NO: 507770 - DNA, 25 bp, Homo sapien
aagtctggccagatcaagtgtttgc

SEQ ID NO: 507771 - DNA, 25 bp, Homo sapien
cacaggatcaagacacgctctgcag

SEQ ID NO: 507772 - DNA, 25 bp, Homo sapien
ggtacaaccatgttgcagagcaaag

SEQ ID NO: 507773 - DNA, 25 bp, Homo sapien
gcacaggagcttcaattacatttat

SEQ ID NO: 507774 - DNA, 25 bp, Homo sapien
acaggagcttcaattacatttatta

SEQ ID NO: 507775 - DNA, 25 bp, Homo sapien
caggagcttcaattacatttattaa

SEQ ID NO: 507776 - DNA, 25 bp, Homo sapien
cacaggagcttcaattacatttatt

SEQ ID NO: 507777 - DNA, 25 bp, Homo sapien
caaatgttcaaaaacatttattaag

SEQ ID NO: 507778 - DNA, 25 bp, Homo sapien
ttataaaaagatcatgcagcctctt

SEQ ID NO: 507779 - DNA, 25 bp, Homo sapien
ataaaaagatcatgcagcctcttac

SEQ ID NO: 507780 - DNA, 25 bp, Homo sapien
tgcattggaagataatttttcttgt

SEQ ID NO: 507781 - DNA, 25 bp, Homo sapien
gcattggaagataatttttcttgta

SEQ ID NO: 507782 - DNA, 25 bp, Homo sapien
cttgcattggaagataatttttctt

SEQ ID NO: 507783 - DNA, 25 bp, Homo sapien
cattggaagataatttttcttgtat

SEQ ID NO: 507784 - DNA, 25 bp, Homo sapien
gactgttttgaaatcgaacagatgt

SEQ ID NO: 507785 - DNA, 25 bp, Homo sapien
ctgttttgaaatcgaacagatgtgt

SEQ ID NO: 507786 - DNA, 25 bp, Homo sapien
tgttttgaaatcgaacagatgtgtt

SEQ ID NO: 507787 - DNA, 25 bp, Homo sapien
actgttttgaaatcgaacagatgtg

SEQ ID NO: 507788 - DNA, 25 bp, Homo sapien
gtatctggcttctgagacggctgtg

SEQ ID NO: 507789 - DNA, 25 bp, Homo sapien
ctctcttccaggcatccagtcggaa

SEQ ID NO: 507790 - DNA, 25 bp, Homo sapien
gcatccagtcggaatctttccatca

SEQ ID NO: 507791 - DNA, 25 bp, Homo sapien
tgtgtgtacttgaccatttggtttc

SEQ ID NO: 507792 - DNA, 25 bp, Homo sapien
ggtggcaactggaatctgagtggac

SEQ ID NO: 507793 - DNA, 25 bp, Homo sapien
ccagaggtggcaactggaatctgag

SEQ ID NO: 507794 - DNA, 25 bp, Homo sapien
cagaggtggcaactggaatctgagt

SEQ ID NO: 507795 - DNA, 25 bp, Homo sapien
gaggtggcaactggaatctgagtgg

SEQ ID NO: 507796 - DNA, 25 bp, Homo sapien
tcagtgccatagaatgaccggaggc

SEQ ID NO: 507797 - DNA, 25 bp, Homo sapien
agaatgattcgaggcctctggccca

SEQ ID NO: 507798 - DNA, 25 bp, Homo sapien
gcacagtgaatatgggcaaggcttt

SEQ ID NO: 507799 - DNA, 25 bp, Homo sapien
tctgtcagaacagcaaggaatggaa

SEQ ID NO: 507800 - DNA, 25 bp, Homo sapien
tcttgcagctgtagtatacttttca

SEQ ID NO: 507801 - DNA, 25 bp, Homo sapien
taaactcttctattcgagctaattc

SEQ ID NO: 507802 - DNA, 25 bp, Homo sapien
tgctttctgttgttcgaagtctgca

SEQ ID NO: 507803 - DNA, 25 bp, Homo sapien
tcttctattcgagctaattcttttg

SEQ ID NO: 507804 - DNA, 25 bp, Homo sapien
tgttgttcgaagtctgcaatttctt

SEQ ID NO: 507805 - DNA, 25 bp, Homo sapien
caatgcgaagtttagctaaagatgc

SEQ ID NO: 507806 - DNA, 25 bp, Homo sapien
gcgaagtttagctaaagatgcgttc

SEQ ID NO: 507807 - DNA, 25 bp, Homo sapien
ctcgttcaatgcgaagtttagctaa

SEQ ID NO: 507808 - DNA, 25 bp, Homo sapien
gtttagctaaagatgcgttctcagc

SEQ ID NO: 507809 - DNA, 25 bp, Homo sapien
ctctcaaaacctgggatcgagcatt

SEQ ID NO: 507810 - DNA, 25 bp, Homo sapien
aaaacctgggatcgagcattgtcac

SEQ ID NO: 507811 - DNA, 25 bp, Homo sapien
ctctctcaaaacctgggatcgagca

SEQ ID NO: 507812 - DNA, 25 bp, Homo sapien
ctcaaaacctgggatcgagcattgt

SEQ ID NO: 507813 - DNA, 25 bp, Homo sapien
ctctaggaaggggtacttgaaccag

SEQ ID NO: 507814 - DNA, 25 bp, Homo sapien
gcctcatatagacccataaaataaa

SEQ ID NO: 507815 - DNA, 25 bp, Homo sapien
tctgacagcatactgattaatgtta

SEQ ID NO: 507816 - DNA, 25 bp, Homo sapien
ttaatttgacttaattctattgagc

SEQ ID NO: 507817 - DNA, 25 bp, Homo sapien
ttttaagcattctgacagcatactg

SEQ ID NO: 507818 - DNA, 25 bp, Homo sapien
catcagctccgatgtaggaggactt

SEQ ID NO: 507819 - DNA, 25 bp, Homo sapien
tgtctgcggcgtcccataagtggat

SEQ ID NO: 507820 - DNA, 25 bp, Homo sapien
tcccctcttgactggtgcaatcttc

SEQ ID NO: 507821 - DNA, 25 bp, Homo sapien
cattattagggtagcatgtctgcgg

SEQ ID NO: 507822 - DNA, 25 bp, Homo sapien
tcacagacttgtgggctatcctctc

SEQ ID NO: 507823 - DNA, 25 bp, Homo sapien
tctcgagggctcagacactttatgt

SEQ ID NO: 507824 - DNA, 25 bp, Homo sapien
tatttggaacaccttcatcgtcacg

SEQ ID NO: 507825 - DNA, 25 bp, Homo sapien
cagacttagggatgaggatctcgag

SEQ ID NO: 507826 - DNA, 25 bp, Homo sapien
tgtttgggtgcgacttcacactcac

SEQ ID NO: 507827 - DNA, 25 bp, Homo sapien
caaatcctcactgcggttacaatga

SEQ ID NO: 507828 - DNA, 25 bp, Homo sapien
ccttctcacgtgcagtgtggtccaa

SEQ ID NO: 507829 - DNA, 25 bp, Homo sapien
tacaatgactaatgggatctgccgg

SEQ ID NO: 507830 - DNA, 25 bp, Homo sapien
ttttcggcttctgactgagggtgac

SEQ ID NO: 507831 - DNA, 25 bp, Homo sapien
tggtcctcggaagtgctctggttag

SEQ ID NO: 507832 - DNA, 25 bp, Homo sapien
gaagacatccggtgacctttgcaga

SEQ ID NO: 507833 - DNA, 25 bp, Homo sapien
taaggatagggttgtctgcacacag

SEQ ID NO: 507834 - DNA, 25 bp, Homo sapien
agtaatcttcaaaggtctgtttcct

SEQ ID NO: 507835 - DNA, 25 bp, Homo sapien
taagtaatcttcaaaggtctgtttc

SEQ ID NO: 507836 - DNA, 25 bp, Homo sapien
tcctttctccaatagcagctttaat

SEQ ID NO: 507837 - DNA, 25 bp, Homo sapien
ctttctccaatagcagctttaatgg

SEQ ID NO: 507838 - DNA, 25 bp, Homo sapien
cacttctgaggaatcatcatgtttt

SEQ ID NO: 507839 - DNA, 25 bp, Homo sapien
cactttctcccaacataagatactt

SEQ ID NO: 507840 - DNA, 25 bp, Homo sapien
ctttcttcaatattagccacttctg

SEQ ID NO: 507841 - DNA, 25 bp, Homo sapien
tagccacttctgaggaatcatcatg

SEQ ID NO: 507842 - DNA, 25 bp, Homo sapien
gcttcttgatactgtgcctcagaaa

SEQ ID NO: 507843 - DNA, 25 bp, Homo sapien
cttcttgatactgtgcctcagaaaa

SEQ ID NO: 507844 - DNA, 25 bp, Homo sapien
tgcttcttgatactgtgcctcagaa

SEQ ID NO: 507845 - DNA, 25 bp, Homo sapien
tcttgatactgtgcctcagaaaata

SEQ ID NO: 507846 - DNA, 25 bp, Homo sapien
tccgggtagacatatgatgggaagc

SEQ ID NO: 507847 - DNA, 25 bp, Homo sapien
ggtagacatatgatgggaagcagca

SEQ ID NO: 507848 - DNA, 25 bp, Homo sapien
tgatcatcaggcagtaaactcaaac

SEQ ID NO: 507849 - DNA, 25 bp, Homo sapien
gggtccgggtagacatatgatggga

SEQ ID NO: 507850 - DNA, 25 bp, Homo sapien
catttcacatttatcgggctagcct

SEQ ID NO: 507851 - DNA, 25 bp, Homo sapien
tcacaacacatgatacaggaacgat

SEQ ID NO: 507852 - DNA, 25 bp, Homo sapien
aacgtgtcaaacaactacaggtaag

SEQ ID NO: 507853 - DNA, 25 bp, Homo sapien
tactgaggccctgtgtaggcaaagc

SEQ ID NO: 507854 - DNA, 25 bp, Homo sapien
tgttcttccatgagtctctgtagtt

SEQ ID NO: 507855 - DNA, 25 bp, Homo sapien
tccatgagtctctgtagttgctcca

SEQ ID NO: 507856 - DNA, 25 bp, Homo sapien
gcctcttcaattgttcctgcttctt

SEQ ID NO: 507857 - DNA, 25 bp, Homo sapien
tgtagttgctccaactgttgcctct

SEQ ID NO: 507858 - DNA, 25 bp, Homo sapien
ggctgtatgggtttcagatttatct

SEQ ID NO: 507859 - DNA, 25 bp, Homo sapien
ctttgaattcactcgcaagatctgg

SEQ ID NO: 507860 - DNA, 25 bp, Homo sapien
ccaggagcactgtgacatgccgcta

SEQ ID NO: 507861 - DNA, 25 bp, Homo sapien
tcactcgcaagatctgggatgaagt

SEQ ID NO: 507862 - DNA, 25 bp, Homo sapien
taggaaatccacgatttaatatgac

SEQ ID NO: 507863 - DNA, 25 bp, Homo sapien
cccgagaaggattggtcatccactg

SEQ ID NO: 507864 - DNA, 25 bp, Homo sapien
tccactgggttaggaagttctgccc

SEQ ID NO: 507865 - DNA, 25 bp, Homo sapien
cgatttaatatgaccccagcccgag

SEQ ID NO: 507866 - DNA, 25 bp, Homo sapien
cttagtccaatgacactattatatt

SEQ ID NO: 507867 - DNA, 25 bp, Homo sapien
tgacactattatatttaaacaatgc

SEQ ID NO: 507868 - DNA, 25 bp, Homo sapien
aatgcaaaggctagaagagctattg

SEQ ID NO: 507869 - DNA, 25 bp, Homo sapien
acaatgcaaaggctagaagagctat

SEQ ID NO: 507870 - DNA, 25 bp, Homo sapien
tctataccttcaatttcatgaccgc

SEQ ID NO: 507871 - DNA, 25 bp, Homo sapien
taccttcaatttcatgaccgcgatt

SEQ ID NO: 507872 - DNA, 25 bp, Homo sapien
cttctataccttcaatttcatgacc

SEQ ID NO: 507873 - DNA, 25 bp, Homo sapien
tataccttcaatttcatgaccgcga

SEQ ID NO: 507874 - DNA, 25 bp, Homo sapien
caaagccactcttagaccgtgagaa

SEQ ID NO: 507875 - DNA, 25 bp, Homo sapien
gaatccacacgaagcttcaagagag

SEQ ID NO: 507876 - DNA, 25 bp, Homo sapien
tgacagccttgaaatctccagaaag

SEQ ID NO: 507877 - DNA, 25 bp, Homo sapien
gataaattctctgcacggtgaggga

SEQ ID NO: 507878 - DNA, 25 bp, Homo sapien
accctgctccagcggactgcggctg

SEQ ID NO: 507879 - DNA, 25 bp, Homo sapien
tgctccagcggactgcggctgccgc

SEQ ID NO: 507880 - DNA, 25 bp, Homo sapien
ggaactcaagttccgccacagccag

SEQ ID NO: 507881 - DNA, 25 bp, Homo sapien
aggaactcaagttccgccacagcca

SEQ ID NO: 507882 - DNA, 25 bp, Homo sapien
accccgaggtccgagcagagtcctg

SEQ ID NO: 507883 - DNA, 25 bp, Homo sapien
gagccaaccccgaggtccgagcaga

SEQ ID NO: 507884 - DNA, 25 bp, Homo sapien
gcgaatgaacgaagccactgaactg

SEQ ID NO: 507885 - DNA, 25 bp, Homo sapien
tgcgaagaacaaagcagcgcgaatg

SEQ ID NO: 507886 - DNA, 25 bp, Homo sapien
cgccgtccatctccggcgcagggcg

SEQ ID NO: 507887 - DNA, 25 bp, Homo sapien
cctccgctcttttcgcccacaaatt

SEQ ID NO: 507888 - DNA, 25 bp, Homo sapien
gacaaagagctcctccgctcttttc

SEQ ID NO: 507889 - DNA, 25 bp, Homo sapien
cgcagggcggcggacaaagagctcc

SEQ ID NO: 507890 - DNA, 25 bp, Homo sapien
agcatttacaaatgggccgccacaa

SEQ ID NO: 507891 - DNA, 25 bp, Homo sapien
gcagcacgaaccgacacctcaatct

SEQ ID NO: 507892 - DNA, 25 bp, Homo sapien
cctcaatctccgcagcatttacaaa

SEQ ID NO: 507893 - DNA, 25 bp, Homo sapien
acaatcgccgcctctgtcggagccc

SEQ ID NO: 507894 - DNA, 25 bp, Homo sapien
ccgttataactgaaacaaacgactg

SEQ ID NO: 507895 - DNA, 25 bp, Homo sapien
caaatgaagtgccatttataaccgt

SEQ ID NO: 507896 - DNA, 25 bp, Homo sapien
gaagtgccatttataaccgttataa

SEQ ID NO: 507897 - DNA, 25 bp, Homo sapien
gaaacaaacgactgctaaagacaaa

SEQ ID NO: 507898 - DNA, 25 bp, Homo sapien
gagggcactcctatgtcatggttaa

SEQ ID NO: 507899 - DNA, 25 bp, Homo sapien
ccatcataggagtcaagagggcact

SEQ ID NO: 507900 - DNA, 25 bp, Homo sapien
caaacagctttgtagtcttcagcac

SEQ ID NO: 507901 - DNA, 25 bp, Homo sapien
gagtccaggatttatcaggcagacc

SEQ ID NO: 507902 - DNA, 25 bp, Homo sapien
tgcttaaagctagcagagcctgggt

SEQ ID NO: 507903 - DNA, 25 bp, Homo sapien
catcatgcacaagggaaacgggtcc

SEQ ID NO: 507904 - DNA, 25 bp, Homo sapien
gcacgttagaccaagaactctggga

SEQ ID NO: 507905 - DNA, 25 bp, Homo sapien
gacaacttccttatgatcccatggg

SEQ ID NO: 507906 - DNA, 25 bp, Homo sapien
ctagaatgcctgaccaatgatgttg

SEQ ID NO: 507907 - DNA, 25 bp, Homo sapien
gatcctggaaacctaatgggtctgt

SEQ ID NO: 507908 - DNA, 25 bp, Homo sapien
ggtctgtacaacaaagggatgatca

SEQ ID NO: 507909 - DNA, 25 bp, Homo sapien
ttggacttacaacaaaagatcctgg

SEQ ID NO: 507910 - DNA, 25 bp, Homo sapien
tattcagtaccctaaaaatctggat

SEQ ID NO: 507911 - DNA, 25 bp, Homo sapien
ccttggtaataaattgtggagtcag

SEQ ID NO: 507912 - DNA, 25 bp, Homo sapien
tcgcctctcttgagtggcagataaa

SEQ ID NO: 507913 - DNA, 25 bp, Homo sapien
tcttagacaacactatagagtaggt

SEQ ID NO: 507914 - DNA, 25 bp, Homo sapien
tctcccaaagccgagctttggattt

SEQ ID NO: 507915 - DNA, 25 bp, Homo sapien
ccaaagccgagctttggatttatcc

SEQ ID NO: 507916 - DNA, 25 bp, Homo sapien
tttatcctcattggctaaatccctc

SEQ ID NO: 507917 - DNA, 25 bp, Homo sapien
gctttggatttatcctcattggcta

SEQ ID NO: 507918 - DNA, 25 bp, Homo sapien
tgaaaagacaaaccccgcctgaggc

SEQ ID NO: 507919 - DNA, 25 bp, Homo sapien
tcgggaaccgctatctccaaagggc

SEQ ID NO: 507920 - DNA, 25 bp, Homo sapien
tgcgctctccgagtgcgagttttcg

SEQ ID NO: 507921 - DNA, 25 bp, Homo sapien
ttttcgccaaactgataaagcacgc

SEQ ID NO: 507922 - DNA, 25 bp, Homo sapien
aactgacaagggacccggaacagcg

SEQ ID NO: 507923 - DNA, 25 bp, Homo sapien
agggaggctgttagacgtgactcct

SEQ ID NO: 507924 - DNA, 25 bp, Homo sapien
ctttgagggaggctgttagacgtga

SEQ ID NO: 507925 - DNA, 25 bp, Homo sapien
tgagggaggctgttagacgtgactc

SEQ ID NO: 507926 - DNA, 25 bp, Homo sapien
gaggctgttagacgtgactccttgt

SEQ ID NO: 507927 - DNA, 25 bp, Homo sapien
taaaacatcgcgcattcagggaaca

SEQ ID NO: 507928 - DNA, 25 bp, Homo sapien
caggatattactagagcacagccaa

SEQ ID NO: 507929 - DNA, 25 bp, Homo sapien
aagtgaagtacttacctcggcagca

SEQ ID NO: 507930 - DNA, 25 bp, Homo sapien
gcaaaaagcgcactgtcgtcactca

SEQ ID NO: 507931 - DNA, 25 bp, Homo sapien
cgctggggtgatatactggtaagcc

SEQ ID NO: 507932 - DNA, 25 bp, Homo sapien
agtgtgtcaacgctggggtgatata

SEQ ID NO: 507933 - DNA, 25 bp, Homo sapien
gggtgatatactggtaagccaggtt

SEQ ID NO: 507934 - DNA, 25 bp, Homo sapien
gtcaacgctggggtgatatactggt

SEQ ID NO: 507935 - DNA, 25 bp, Homo sapien
tgaattgaacttgtaggcctggcag

SEQ ID NO: 507936 - DNA, 25 bp, Homo sapien
tgaataccagaaatgcaatgtccct

SEQ ID NO: 507937 - DNA, 25 bp, Homo sapien
catttaaagactgcaggaagctaca

SEQ ID NO: 507938 - DNA, 25 bp, Homo sapien
tatgtagtgcagactcatcttcgca

SEQ ID NO: 507939 - DNA, 25 bp, Homo sapien
tcccttctcagtttgtcttctgtgt

SEQ ID NO: 507940 - DNA, 25 bp, Homo sapien
gagcacgctgccatatgtctacaca

SEQ ID NO: 507941 - DNA, 25 bp, Homo sapien
catgtgaaatgtgcatcccagctac

SEQ ID NO: 507942 - DNA, 25 bp, Homo sapien
gaattcgtgaggagcaagtgacagc

SEQ ID NO: 507943 - DNA, 25 bp, Homo sapien
tgaggcagctctacatgtaatcacg

SEQ ID NO: 507944 - DNA, 25 bp, Homo sapien
cagtgtagcaattagtgtcttcaaa

SEQ ID NO: 507945 - DNA, 25 bp, Homo sapien
aggttttattcagtgtagcaattag

SEQ ID NO: 507946 - DNA, 25 bp, Homo sapien
ataaagtaagtggaagcagaattac

SEQ ID NO: 507947 - DNA, 25 bp, Homo sapien
gcagaattactttaatcaactaaca

SEQ ID NO: 507948 - DNA, 25 bp, Homo sapien
aggagtccagtggaaagctggctca

SEQ ID NO: 507949 - DNA, 25 bp, Homo sapien
gcgtagcttcagtaaaagttttggc

SEQ ID NO: 507950 - DNA, 25 bp, Homo sapien
cgtagcttcagtaaaagttttggct

SEQ ID NO: 507951 - DNA, 25 bp, Homo sapien
tgcgtagcttcagtaaaagttttgg

SEQ ID NO: 507952 - DNA, 25 bp, Homo sapien
ttcttcacccgtcatgtggccaggg

SEQ ID NO: 507953 - DNA, 25 bp, Homo sapien
gagtgcatttcttcacccgtcatgt

SEQ ID NO: 507954 - DNA, 25 bp, Homo sapien
tttcttcacccgtcatgtggccagg

SEQ ID NO: 507955 - DNA, 25 bp, Homo sapien
tgcatttcttcacccgtcatgtggc

SEQ ID NO: 507956 - DNA, 25 bp, Homo sapien
tggaacaacgtagagcccagttcat

SEQ ID NO: 507957 - DNA, 25 bp, Homo sapien
ttcctttggaacaacgtagagccca

SEQ ID NO: 507958 - DNA, 25 bp, Homo sapien
cctttggaacaacgtagagcccagt

SEQ ID NO: 507959 - DNA, 25 bp, Homo sapien
ccatttcctttggaacaacgtagag

SEQ ID NO: 507960 - DNA, 25 bp, Homo sapien
tccagaagcgatgggcattaccttt

SEQ ID NO: 507961 - DNA, 25 bp, Homo sapien
ctggctgggataggcaggtgacgtg

SEQ ID NO: 507962 - DNA, 25 bp, Homo sapien
tgacgtggttcttcacttcaagcct

SEQ ID NO: 507963 - DNA, 25 bp, Homo sapien
tctccctccagaagcgatgggcatt

SEQ ID NO: 507964 - DNA, 25 bp, Homo sapien
tagaatgggaagttcatggtagtaa

SEQ ID NO: 507965 - DNA, 25 bp, Homo sapien
acaggactctcatagtacttgcggc

SEQ ID NO: 507966 - DNA, 25 bp, Homo sapien
ggactctcatagtacttgcggctcc

SEQ ID NO: 507967 - DNA, 25 bp, Homo sapien
ggagaggttggaaggctgattgccc

SEQ ID NO: 507968 - DNA, 25 bp, Homo sapien
caccaccaacgggtgggtatggtca

SEQ ID NO: 507969 - DNA, 25 bp, Homo sapien
aggagttcaagaccagcctggccaa

SEQ ID NO: 507970 - DNA, 25 bp, Homo sapien
tttggctgggcaaggttgctcaagc

SEQ ID NO: 507971 - DNA, 25 bp, Homo sapien
cgaggcaggtggaccacttgaggtc

SEQ ID NO: 507972 - DNA, 25 bp, Homo sapien
ctgtaatctcagcactttggaaggc

SEQ ID NO: 507973 - DNA, 25 bp, Homo sapien
gaagtgagcaaagattgtgccacta

SEQ ID NO: 507974 - DNA, 25 bp, Homo sapien
gagaattgctcgaacgcagaaggca

SEQ ID NO: 507975 - DNA, 25 bp, Homo sapien
cactccagcctgggtgacagagtga

SEQ ID NO: 507976 - DNA, 25 bp, Homo sapien
cctgggtgacagagtgagaatccac

SEQ ID NO: 507977 - DNA, 25 bp, Homo sapien
caccaatgtggggaggagagcacaa

SEQ ID NO: 507978 - DNA, 25 bp, Homo sapien
agccaccaatgtggggaggagagca

SEQ ID NO: 507979 - DNA, 25 bp, Homo sapien
ccaccaatgtggggaggagagcaca

SEQ ID NO: 507980 - DNA, 25 bp, Homo sapien
ggagccaccaatgtggggaggagag

SEQ ID NO: 507981 - DNA, 25 bp, Homo sapien
caccctgggcagtactaatactata

SEQ ID NO: 507982 - DNA, 25 bp, Homo sapien
ttcatgaccaccctgggcagtacta

SEQ ID NO: 507983 - DNA, 25 bp, Homo sapien
taatactataaaccagtctccaacc

SEQ ID NO: 507984 - DNA, 25 bp, Homo sapien
tctccaacctcaaggttggtgctct

SEQ ID NO: 507985 - DNA, 25 bp, Homo sapien
gagacctgatacttgttcttgtttc

SEQ ID NO: 507986 - DNA, 25 bp, Homo sapien
ggagacctgatacttgttcttgttt

SEQ ID NO: 507987 - DNA, 25 bp, Homo sapien
taaatacaagatggaaattgtgaag

SEQ ID NO: 507988 - DNA, 25 bp, Homo sapien
aagttcttcaaaatgatgtctgatg

SEQ ID NO: 507989 - DNA, 25 bp, Homo sapien
gaaagttctatttcaaagttcttca

SEQ ID NO: 507990 - DNA, 25 bp, Homo sapien
gatgttcctgcatactgtgttccaa

SEQ ID NO: 507991 - DNA, 25 bp, Homo sapien
tctccacggcaaattctggtggata

SEQ ID NO: 507992 - DNA, 25 bp, Homo sapien
aaaagtatctccacggcaaattctg

SEQ ID NO: 507993 - DNA, 25 bp, Homo sapien
ccaagctttttgtttatgtggatta

SEQ ID NO: 507994 - DNA, 25 bp, Homo sapien
tctggtggataaattttccaagctt

SEQ ID NO: 507995 - DNA, 25 bp, Homo sapien
gaaaagccacgcagttgggtaccca

SEQ ID NO: 507996 - DNA, 25 bp, Homo sapien
acgcagttgggtacccacgttagag

SEQ ID NO: 507997 - DNA, 25 bp, Homo sapien
ccacgcagttgggtacccacgttag

SEQ ID NO: 507998 - DNA, 25 bp, Homo sapien
aagccacgcagttgggtacccacgt

SEQ ID NO: 507999 - DNA, 25 bp, Homo sapien
tcagtaacacatgctgactctctta

SEQ ID NO: 508000 - DNA, 25 bp, Homo sapien
gaataaaagatgtgttgaaccagaa

SEQ ID NO: 508001 - DNA, 25 bp, Homo sapien
agaaaaatgaacaattgtcacagta

SEQ ID NO: 508002 - DNA, 25 bp, Homo sapien
aaatgaacaattgtcacagtactta

SEQ ID NO: 508003 - DNA, 25 bp, Homo sapien
aaaaatgaacaattgtcacagtact

SEQ ID NO: 508004 - DNA, 25 bp, Homo sapien
tcatatacattagttaatacaccgg

SEQ ID NO: 508005 - DNA, 25 bp, Homo sapien
cattagttaatacaccggctgtttc

SEQ ID NO: 508006 - DNA, 25 bp, Homo sapien
aatacaccggctgtttcaatgtcat

SEQ ID NO: 508007 - DNA, 25 bp, Homo sapien
ttaatacaccggctgtttcaatgtc

SEQ ID NO: 508008 - DNA, 25 bp, Homo sapien
aacaatttcctaatgaagtactgga

SEQ ID NO: 508009 - DNA, 25 bp, Homo sapien
caatttcctaatgaagtactggaaa

SEQ ID NO: 508010 - DNA, 25 bp, Homo sapien
acaatttcctaatgaagtactggaa

SEQ ID NO: 508011 - DNA, 25 bp, Homo sapien
tggttctgagaaataagcaggcttg

SEQ ID NO: 508012 - DNA, 25 bp, Homo sapien
ggcttgagggcacatgggtcctcct

SEQ ID NO: 508013 - DNA, 25 bp, Homo sapien
gcaaactctgaactagaggtggttc

SEQ ID NO: 508014 - DNA, 25 bp, Homo sapien
caaggcaaactctgaactagaggtg

SEQ ID NO: 508015 - DNA, 25 bp, Homo sapien
taaagagtatccgtcttggagggag

SEQ ID NO: 508016 - DNA, 25 bp, Homo sapien
ataaagagtatccgtcttggaggga

SEQ ID NO: 508017 - DNA, 25 bp, Homo sapien
agagtatccgtcttggagggagatt

SEQ ID NO: 508018 - DNA, 25 bp, Homo sapien
aaagagtatccgtcttggagggaga

SEQ ID NO: 508019 - DNA, 25 bp, Homo sapien
ctggatgccattatataactggaca

SEQ ID NO: 508020 - DNA, 25 bp, Homo sapien
agataggctcatgaaagtcctccac

SEQ ID NO: 508021 - DNA, 25 bp, Homo sapien
ttaaagaaaaactcatttacagcca

SEQ ID NO: 508022 - DNA, 25 bp, Homo sapien
catttacagccacatccaaatccat

SEQ ID NO: 508023 - DNA, 25 bp, Homo sapien
aaagaaaaactcatttacagccaca

SEQ ID NO: 508024 - DNA, 25 bp, Homo sapien
agaaaaactcatttacagccacatc

SEQ ID NO: 508025 - DNA, 25 bp, Homo sapien
gtttctagtccctgaaatttactgc

SEQ ID NO: 508026 - DNA, 25 bp, Homo sapien
tgtttgcctttctccaaaataatac

SEQ ID NO: 508027 - DNA, 25 bp, Homo sapien
aatttactgctgtgggttttatctg

SEQ ID NO: 508028 - DNA, 25 bp, Homo sapien
ctgagaaggagtttctagtccctga

SEQ ID NO: 508029 - DNA, 25 bp, Homo sapien
tgcaaaaaagggtacaatccaacca

SEQ ID NO: 508030 - DNA, 25 bp, Homo sapien
taatcatcttaacgtcctaccagcg

SEQ ID NO: 508031 - DNA, 25 bp, Homo sapien
aatcatcttaacgtcctaccagcga

SEQ ID NO: 508032 - DNA, 25 bp, Homo sapien
atcatcttaacgtcctaccagcgat

SEQ ID NO: 508033 - DNA, 25 bp, Homo sapien
aataatcatcttaacgtcctaccag

SEQ ID NO: 508034 - DNA, 25 bp, Homo sapien
ttttggaggcaataaggcaggcaca

SEQ ID NO: 508035 - DNA, 25 bp, Homo sapien
ggcaggcacaaaccatagttccggt

SEQ ID NO: 508036 - DNA, 25 bp, Homo sapien
aatattttggaggcaataaggcagg

SEQ ID NO: 508037 - DNA, 25 bp, Homo sapien
tattttggaggcaataaggcaggca

SEQ ID NO: 508038 - DNA, 25 bp, Homo sapien
ccactggagatccacgcaacccggg

SEQ ID NO: 508039 - DNA, 25 bp, Homo sapien
agatccacgcaacccgggcagagga

SEQ ID NO: 508040 - DNA, 25 bp, Homo sapien
actggagatccacgcaacccgggca

SEQ ID NO: 508041 - DNA, 25 bp, Homo sapien
tggagatccacgcaacccgggcaga

SEQ ID NO: 508042 - DNA, 25 bp, Homo sapien
agacacagggaaacgctgccggcat

SEQ ID NO: 508043 - DNA, 25 bp, Homo sapien
gagggagctcagattaatgtgtact

SEQ ID NO: 508044 - DNA, 25 bp, Homo sapien
tgtactcaggaaatcagcccattcc

SEQ ID NO: 508045 - DNA, 25 bp, Homo sapien
gctcagattaatgtgtactcaggaa

SEQ ID NO: 508046 - DNA, 25 bp, Homo sapien
gctgagggagctcagattaatgtgt

SEQ ID NO: 508047 - DNA, 25 bp, Homo sapien
tggatgcccccgagtgtttcggcaa

SEQ ID NO: 508048 - DNA, 25 bp, Homo sapien
agccttcatgtgacctggatgcccc

SEQ ID NO: 508049 - DNA, 25 bp, Homo sapien
ctgtgacagtgaccatagctagtaa

SEQ ID NO: 508050 - DNA, 25 bp, Homo sapien
ttcaagtttagtgtccccaggagat

SEQ ID NO: 508051 - DNA, 25 bp, Homo sapien
gccagtcacaggtcatcgggaccca

SEQ ID NO: 508052 - DNA, 25 bp, Homo sapien
tctgcgagggatttcgcagttcccc

SEQ ID NO: 508053 - DNA, 25 bp, Homo sapien
tgcacgtggttctgcgagggatttc

SEQ ID NO: 508054 - DNA, 25 bp, Homo sapien
gagtaacatcttcaatgacttcctc

SEQ ID NO: 508055 - DNA, 25 bp, Homo sapien
caccaagtaaggtgtgatgtgacca

SEQ ID NO: 508056 - DNA, 25 bp, Homo sapien
tacaccaagtaaggtgtgatgtgac

SEQ ID NO: 508057 - DNA, 25 bp, Homo sapien
cttacaccaagtaaggtgtgatgtg

SEQ ID NO: 508058 - DNA, 25 bp, Homo sapien
caagtaaggtgtgatgtgaccacac

SEQ ID NO: 508059 - DNA, 25 bp, Homo sapien
ttaagtcttttcatttttatcattc

SEQ ID NO: 508060 - DNA, 25 bp, Homo sapien
gtctctgtgcttgtgccttcaacac

SEQ ID NO: 508061 - DNA, 25 bp, Homo sapien
tttttaatttagctttctgtctctg

SEQ ID NO: 508062 - DNA, 25 bp, Homo sapien
ctgtctctgtgcttgtgccttcaac

SEQ ID NO: 508063 - DNA, 25 bp, Homo sapien
acatttagtacgcatggaaccacta

SEQ ID NO: 508064 - DNA, 25 bp, Homo sapien
gtacgcatggaaccactacaggccc

SEQ ID NO: 508065 - DNA, 25 bp, Homo sapien
tttagtacgcatggaaccactacag

SEQ ID NO: 508066 - DNA, 25 bp, Homo sapien
gcatggaaccactacaggccctgcg

SEQ ID NO: 508067 - DNA, 25 bp, Homo sapien
tcaaagtctgcctgggcacacgcta

SEQ ID NO: 508068 - DNA, 25 bp, Homo sapien
ctcaaagtctgcctgggcacacgct

SEQ ID NO: 508069 - DNA, 25 bp, Homo sapien
caaagtctgcctgggcacacgctac

SEQ ID NO: 508070 - DNA, 25 bp, Homo sapien
tacgatagtaggtcaaacgctggac

SEQ ID NO: 508071 - DNA, 25 bp, Homo sapien
tataaaagtacacaactccgttatc

SEQ ID NO: 508072 - DNA, 25 bp, Homo sapien
aaagtacacaactccgttatcaggg

SEQ ID NO: 508073 - DNA, 25 bp, Homo sapien
agcctacgatagtaggtcaaacgct

SEQ ID NO: 508074 - DNA, 25 bp, Homo sapien
agcgagcacgcgcaccttagccggc

SEQ ID NO: 508075 - DNA, 25 bp, Homo sapien
tagaaccagcgagcacgcgcacctt

SEQ ID NO: 508076 - DNA, 25 bp, Homo sapien
gttagaaccagcgagcacgcgcacc

SEQ ID NO: 508077 - DNA, 25 bp, Homo sapien
gaaccagcgagcacgcgcaccttag

SEQ ID NO: 508078 - DNA, 25 bp, Homo sapien
cctgggcccagagtgcgccgcccat

SEQ ID NO: 508079 - DNA, 25 bp, Homo sapien
ctgggatggcctcctgggcccagag

SEQ ID NO: 508080 - DNA, 25 bp, Homo sapien
ctcctgggcccagagtgcgccgccc

SEQ ID NO: 508081 - DNA, 25 bp, Homo sapien
gcctcctgggcccagagtgcgccgc

SEQ ID NO: 508082 - DNA, 25 bp, Homo sapien
gggtgcgcgcctcctacaccctggg

SEQ ID NO: 508083 - DNA, 25 bp, Homo sapien
tgcgcgcctcctacaccctgggccg

SEQ ID NO: 508084 - DNA, 25 bp, Homo sapien
ggtgcgcgcctcctacaccctgggc

SEQ ID NO: 508085 - DNA, 25 bp, Homo sapien
gcgcctcctacaccctgggccgaag

SEQ ID NO: 508086 - DNA, 25 bp, Homo sapien
cgacccctgctccatgtgctggtgg

SEQ ID NO: 508087 - DNA, 25 bp, Homo sapien
gcgcccatgggctgatgtggcttac

SEQ ID NO: 508088 - DNA, 25 bp, Homo sapien
tggtcggggattcccaatcctcggc

SEQ ID NO: 508089 - DNA, 25 bp, Homo sapien
agactgcctgacttgccgcggccgg

SEQ ID NO: 508090 - DNA, 25 bp, Homo sapien
ttatcggcctcgtggcgccactggg

SEQ ID NO: 508091 - DNA, 25 bp, Homo sapien
gctgagcgccggttatcggcctcgt

SEQ ID NO: 508092 - DNA, 25 bp, Homo sapien
caagtcgtgtgatgggcacatgtga

SEQ ID NO: 508093 - DNA, 25 bp, Homo sapien
tcgcccaagtcgtgtgatgggcaca

SEQ ID NO: 508094 - DNA, 25 bp, Homo sapien
gccactccgtggccactaggatagg

SEQ ID NO: 508095 - DNA, 25 bp, Homo sapien
ccactccgtggccactaggataggg

SEQ ID NO: 508096 - DNA, 25 bp, Homo sapien
cagttcccggagtcttcttggaaga

SEQ ID NO: 508097 - DNA, 25 bp, Homo sapien
agaggacggctgcaagcctcgtccg

SEQ ID NO: 508098 - DNA, 25 bp, Homo sapien
tcatgaattcgccagttcccggagt

SEQ ID NO: 508099 - DNA, 25 bp, Homo sapien
tcttcttggaagaggacggctgcaa

SEQ ID NO: 508100 - DNA, 25 bp, Homo sapien
gcacggatgtaggacccatccagcc

SEQ ID NO: 508101 - DNA, 25 bp, Homo sapien
cacggatgtaggacccatccagccc

SEQ ID NO: 508102 - DNA, 25 bp, Homo sapien
acggatgtaggacccatccagcccc

SEQ ID NO: 508103 - DNA, 25 bp, Homo sapien
ggatgtaggacccatccagccccat

SEQ ID NO: 508104 - DNA, 25 bp, Homo sapien
ccatacacagttgcacagtgttgta

SEQ ID NO: 508105 - DNA, 25 bp, Homo sapien
tacacagttgcacagtgttgtaaaa

SEQ ID NO: 508106 - DNA, 25 bp, Homo sapien
catacacagttgcacagtgttgtaa

SEQ ID NO: 508107 - DNA, 25 bp, Homo sapien
atacacagttgcacagtgttgtaaa

SEQ ID NO: 508108 - DNA, 25 bp, Homo sapien
ggagttccatcaggtgtcctggagc

SEQ ID NO: 508109 - DNA, 25 bp, Homo sapien
ccttgggagttccatcaggtgtcct

SEQ ID NO: 508110 - DNA, 25 bp, Homo sapien
gctgtgagcaacagaccctgcccca

SEQ ID NO: 508111 - DNA, 25 bp, Homo sapien
ttcccttgggagttccatcaggtgt

SEQ ID NO: 508112 - DNA, 25 bp, Homo sapien
caaaggaacgaattcagagtgggac

SEQ ID NO: 508113 - DNA, 25 bp, Homo sapien
ggacgggacagctatctgaggcctc

SEQ ID NO: 508114 - DNA, 25 bp, Homo sapien
caacacagaaatttgccgggacaca

SEQ ID NO: 508115 - DNA, 25 bp, Homo sapien
cccatggcggtgatgtactggatgc

SEQ ID NO: 508116 - DNA, 25 bp, Homo sapien
ccatgttttcaatccgaggaaactg

SEQ ID NO: 508117 - DNA, 25 bp, Homo sapien
gcaccaggagatccctccatgtttt

SEQ ID NO: 508118 - DNA, 25 bp, Homo sapien
tgcaccaggagatccctccatgttt

SEQ ID NO: 508119 - DNA, 25 bp, Homo sapien
ttcaatccgaggaaactgcaggcat

SEQ ID NO: 508120 - DNA, 25 bp, Homo sapien
tgagccatactcattggactggagg

SEQ ID NO: 508121 - DNA, 25 bp, Homo sapien
agaccctcggctgaaaagtgggaca

SEQ ID NO: 508122 - DNA, 25 bp, Homo sapien
caaccagagctaggatttcttgagc

SEQ ID NO: 508123 - DNA, 25 bp, Homo sapien
gcatacggaaagaagccacagcagg

SEQ ID NO: 508124 - DNA, 25 bp, Homo sapien
cttgttctgttccttaatttcaggg

SEQ ID NO: 508125 - DNA, 25 bp, Homo sapien
ttcctcatctttatacatttgtgtt

SEQ ID NO: 508126 - DNA, 25 bp, Homo sapien
ttttcctcatctttatacatttgtg

SEQ ID NO: 508127 - DNA, 25 bp, Homo sapien
ctgttccttaatttcaggggagtgt

SEQ ID NO: 508128 - DNA, 25 bp, Homo sapien
tgcacagccggccagttacacagat

SEQ ID NO: 508129 - DNA, 25 bp, Homo sapien
gtataccttgcagggacttgcactc

SEQ ID NO: 508130 - DNA, 25 bp, Homo sapien
cagatgtctggctcaaataaggaga

SEQ ID NO: 508131 - DNA, 25 bp, Homo sapien
gaaacagaccattcggtataccttg

SEQ ID NO: 508132 - DNA, 25 bp, Homo sapien
tggcaccgatccctgtatgcacagc

SEQ ID NO: 508133 - DNA, 25 bp, Homo sapien
ggcaccgatccctgtatgcacagct

SEQ ID NO: 508134 - DNA, 25 bp, Homo sapien
gcagtgcattctgaacgctttctct

SEQ ID NO: 508135 - DNA, 25 bp, Homo sapien
gtagctgttccacacaagaacctgt

SEQ ID NO: 508136 - DNA, 25 bp, Homo sapien
aataggcagcgttttttggctggga

SEQ ID NO: 508137 - DNA, 25 bp, Homo sapien
tctgaaagcacctatcaaggaaagc

SEQ ID NO: 508138 - DNA, 25 bp, Homo sapien
tggccaggacgcttgtgagacctac

SEQ ID NO: 508139 - DNA, 25 bp, Homo sapien
ccaggacgcttgtgagacctacgct

SEQ ID NO: 508140 - DNA, 25 bp, Homo sapien
acgcttgtgagacctacgcttcgcc

SEQ ID NO: 508141 - DNA, 25 bp, Homo sapien
tcgtggccaggacgcttgtgagacc

SEQ ID NO: 508142 - DNA, 25 bp, Homo sapien
catttcattttcatcaggcctgtgg

SEQ ID NO: 508143 - DNA, 25 bp, Homo sapien
tttcattttcatcaggcctgtggta

SEQ ID NO: 508144 - DNA, 25 bp, Homo sapien
ctgtgtggtgttgccatttcatttt

SEQ ID NO: 508145 - DNA, 25 bp, Homo sapien
gccatttcattttcatcaggcctgt

SEQ ID NO: 508146 - DNA, 25 bp, Homo sapien
taagaaggcggggtcgcttcccatc

SEQ ID NO: 508147 - DNA, 25 bp, Homo sapien
ggtcgcttcccatcgcctttgaatc

SEQ ID NO: 508148 - DNA, 25 bp, Homo sapien
cccttgctgtcgcatattcataaga

SEQ ID NO: 508149 - DNA, 25 bp, Homo sapien
tattcataagaaggcggggtcgctt

SEQ ID NO: 508150 - DNA, 25 bp, Homo sapien
caaatgcaagaacatggaagacaag

SEQ ID NO: 508151 - DNA, 25 bp, Homo sapien
tccctcgtagtaactcaccctgttg

SEQ ID NO: 508152 - DNA, 25 bp, Homo sapien
gacaagcagatgtctttataccaga

SEQ ID NO: 508153 - DNA, 25 bp, Homo sapien
agcaggacaccccttgaagaccgca

SEQ ID NO: 508154 - DNA, 25 bp, Homo sapien
tggtagcacttctcaatttgacctg

SEQ ID NO: 508155 - DNA, 25 bp, Homo sapien
gaaacatttccgatattagccataa

SEQ ID NO: 508156 - DNA, 25 bp, Homo sapien
tgggtgtgcactgagaaacatttcc

SEQ ID NO: 508157 - DNA, 25 bp, Homo sapien
gcacttctcaatttgacctggacct

SEQ ID NO: 508158 - DNA, 25 bp, Homo sapien
gatgtcgaagcaccagtttccagga

SEQ ID NO: 508159 - DNA, 25 bp, Homo sapien
gcagcggcacacgtttgtactttga

SEQ ID NO: 508160 - DNA, 25 bp, Homo sapien
gaattgaaagcatggctcccgcagt

SEQ ID NO: 508161 - DNA, 25 bp, Homo sapien
ctgcgaagacaactccaggagcgga

SEQ ID NO: 508162 - DNA, 25 bp, Homo sapien
tatgatggaaggtggtcgcagcaaa

SEQ ID NO: 508163 - DNA, 25 bp, Homo sapien
cactagtgcaaaggttatgatggaa

SEQ ID NO: 508164 - DNA, 25 bp, Homo sapien
cgtctccggaaagcgttttctccat

SEQ ID NO: 508165 - DNA, 25 bp, Homo sapien
tctccatttggtacaatcactagtg

SEQ ID NO: 508166 - DNA, 25 bp, Homo sapien
tatccgcccaggtgctcctagagta

SEQ ID NO: 508167 - DNA, 25 bp, Homo sapien
ttccacgagtcatgtcaacgcagcg

SEQ ID NO: 508168 - DNA, 25 bp, Homo sapien
gctgtgcgcacggttccacggtata

SEQ ID NO: 508169 - DNA, 25 bp, Homo sapien
ccacggtataaatatgctgcgggag

SEQ ID NO: 508170 - DNA, 25 bp, Homo sapien
cagatggagctgatatcatgggcca

SEQ ID NO: 508171 - DNA, 25 bp, Homo sapien
ggagctgatatcatgggccagaata

SEQ ID NO: 508172 - DNA, 25 bp, Homo sapien
cagaacactcccatgggaggaggtg

SEQ ID NO: 508173 - DNA, 25 bp, Homo sapien
tgttcctgagtcatagagaagctga

SEQ ID NO: 508174 - DNA, 25 bp, Homo sapien
ccatgcttatcacattgtgtgttct

SEQ ID NO: 508175 - DNA, 25 bp, Homo sapien
cagctggattgctgatccatgctta

SEQ ID NO: 508176 - DNA, 25 bp, Homo sapien
tccatgcttatcacattgtgtgttc

SEQ ID NO: 508177 - DNA, 25 bp, Homo sapien
tggattgctgatccatgcttatcac

SEQ ID NO: 508178 - DNA, 25 bp, Homo sapien
aacccgttagtgagatttgcaaagg

SEQ ID NO: 508179 - DNA, 25 bp, Homo sapien
caagatctggctgattggtaatatc

SEQ ID NO: 508180 - DNA, 25 bp, Homo sapien
tctgcacgatcaagttctggttcat

SEQ ID NO: 508181 - DNA, 25 bp, Homo sapien
cactggcaattttagagcaagatct

SEQ ID NO: 508182 - DNA, 25 bp, Homo sapien
cagtatattatagtaatggattagt

SEQ ID NO: 508183 - DNA, 25 bp, Homo sapien
aatggattagtatagcccagcgctg

SEQ ID NO: 508184 - DNA, 25 bp, Homo sapien
tagtaatggattagtatagcccagc

SEQ ID NO: 508185 - DNA, 25 bp, Homo sapien
ttagtatagcccagcgctgttgctt

SEQ ID NO: 508186 - DNA, 25 bp, Homo sapien
taacaagaatatcggagatgcccac

SEQ ID NO: 508187 - DNA, 25 bp, Homo sapien
gcagtttaacaagaatatcggagat

SEQ ID NO: 508188 - DNA, 25 bp, Homo sapien
gtttaacaagaatatcggagatgcc

SEQ ID NO: 508189 - DNA, 25 bp, Homo sapien
ttggtgcagtttaacaagaatatcg

SEQ ID NO: 508190 - DNA, 25 bp, Homo sapien
gacatcctttcaggaattgaacaaa

SEQ ID NO: 508191 - DNA, 25 bp, Homo sapien
tcctttcaggaattgaacaaaaggc

SEQ ID NO: 508192 - DNA, 25 bp, Homo sapien
tgaagcgaaccagagtacaaagccc

SEQ ID NO: 508193 - DNA, 25 bp, Homo sapien
gaaatgaagcgaaccagagtacaaa

SEQ ID NO: 508194 - DNA, 25 bp, Homo sapien
tcttcagcacatgaacttacatatg

SEQ ID NO: 508195 - DNA, 25 bp, Homo sapien
tcttgatcttcagcacatgaactta

SEQ ID NO: 508196 - DNA, 25 bp, Homo sapien
cagcacatgaacttacatatgtctc

SEQ ID NO: 508197 - DNA, 25 bp, Homo sapien
gatcttcagcacatgaacttacata

SEQ ID NO: 508198 - DNA, 25 bp, Homo sapien
tcattcacggcaattaggatgctgc

SEQ ID NO: 508199 - DNA, 25 bp, Homo sapien
gagctccggaatctgccaagtgcag

SEQ ID NO: 508200 - DNA, 25 bp, Homo sapien
gatttatcctcagcatccgtgaggg

SEQ ID NO: 508201 - DNA, 25 bp, Homo sapien
cgcatcctaattggagagctccgga

SEQ ID NO: 508202 - DNA, 25 bp, Homo sapien
ggactcagagaaaccaggatggcct

SEQ ID NO: 508203 - DNA, 25 bp, Homo sapien
ggatggcctcaagccgggttttctc

SEQ ID NO: 508204 - DNA, 25 bp, Homo sapien
taatgtacggcaatcagaaaagggc

SEQ ID NO: 508205 - DNA, 25 bp, Homo sapien
tggtcctctgaacggccatctcaaa

SEQ ID NO: 508206 - DNA, 25 bp, Homo sapien
gtcaccttggttgcccctcctaatg

SEQ ID NO: 508207 - DNA, 25 bp, Homo sapien
aatgctgcagggagtcccagtgttc

SEQ ID NO: 508208 - DNA, 25 bp, Homo sapien
cacctgcttgtccactaaataagga

SEQ ID NO: 508209 - DNA, 25 bp, Homo sapien
gctacacattgagccatggagatct

SEQ ID NO: 508210 - DNA, 25 bp, Homo sapien
tagacacaacataggacggacagct

SEQ ID NO: 508211 - DNA, 25 bp, Homo sapien
ggcacagagtttcagttacgcagga

SEQ ID NO: 508212 - DNA, 25 bp, Homo sapien
tataaataacgtgggcgaaacctga

SEQ ID NO: 508213 - DNA, 25 bp, Homo sapien
ccctgtcagggaagaagtatcgcca

SEQ ID NO: 508214 - DNA, 25 bp, Homo sapien
tgctagcgtcatgtgaagtgtcccg

SEQ ID NO: 508215 - DNA, 25 bp, Homo sapien
ttttgagcctaaatagtaccagcgg

SEQ ID NO: 508216 - DNA, 25 bp, Homo sapien
tgtgcagagctattaaaccaaccga

SEQ ID NO: 508217 - DNA, 25 bp, Homo sapien
tgagggcacttaggagacatgagct

SEQ ID NO: 508218 - DNA, 25 bp, Homo sapien
tccgtccgggtcagcatagagatca

SEQ ID NO: 508219 - DNA, 25 bp, Homo sapien
gactctgcggaccagcactttggaa

SEQ ID NO: 508220 - DNA, 25 bp, Homo sapien
agagatcatagagcgcgtccccgct

SEQ ID NO: 508221 - DNA, 25 bp, Homo sapien
tgcaccacgggatggctagatggaa

SEQ ID NO: 508222 - DNA, 25 bp, Homo sapien
cctctgggcctggcgtggtggagtc

SEQ ID NO: 508223 - DNA, 25 bp, Homo sapien
gctcgagctgtcttcctctgggcct

SEQ ID NO: 508224 - DNA, 25 bp, Homo sapien
ttcctctgggcctggcgtggtggag

SEQ ID NO: 508225 - DNA, 25 bp, Homo sapien
ctgctcgagctgtcttcctctgggc

SEQ ID NO: 508226 - DNA, 25 bp, Homo sapien
tcctcggtctgggagagcatgtccc

SEQ ID NO: 508227 - DNA, 25 bp, Homo sapien
tctttttagacagagccggcttgcc

SEQ ID NO: 508228 - DNA, 25 bp, Homo sapien
gacatgcttgtcacagctgggacct

SEQ ID NO: 508229 - DNA, 25 bp, Homo sapien
gatgggaatccggttgagcctcctg

SEQ ID NO: 508230 - DNA, 25 bp, Homo sapien
aagcttttcagtgaagtcacgtcag

SEQ ID NO: 508231 - DNA, 25 bp, Homo sapien
gcttttcagtgaagtcacgtcagaa

SEQ ID NO: 508232 - DNA, 25 bp, Homo sapien
ttcagtgaagtcacgtcagaaaaca

SEQ ID NO: 508233 - DNA, 25 bp, Homo sapien
gtgaagtcacgtcagaaaacatcaa

SEQ ID NO: 508234 - DNA, 25 bp, Homo sapien
ctgccgccttcggagtcgacaaggg

SEQ ID NO: 508235 - DNA, 25 bp, Homo sapien
ctgagggtggatcgacagaggcagg

SEQ ID NO: 508236 - DNA, 25 bp, Homo sapien
cctggaagcgtcctctgccgtgcgg

SEQ ID NO: 508237 - DNA, 25 bp, Homo sapien
cgcggcgtcctctccccgggcgccg

SEQ ID NO: 508238 - DNA, 25 bp, Homo sapien
cttcagcagcgagaagaagctgtgc

SEQ ID NO: 508239 - DNA, 25 bp, Homo sapien
cgagccgggtaggatcaagccgccc

SEQ ID NO: 508240 - DNA, 25 bp, Homo sapien
gccttggcccgcttgtctttcctgt

SEQ ID NO: 508241 - DNA, 25 bp, Homo sapien
tgtgccagcgcatgccgctgaacag

SEQ ID NO: 508242 - DNA, 25 bp, Homo sapien
cggcaagtccgtcgtgggtcctgct

SEQ ID NO: 508243 - DNA, 25 bp, Homo sapien
caagtccgtcgtgggtcctgctcct

SEQ ID NO: 508244 - DNA, 25 bp, Homo sapien
cacctcggcaagtccgtcgtgggtc

SEQ ID NO: 508245 - DNA, 25 bp, Homo sapien
cagcacctcggcaagtccgtcgtgg

SEQ ID NO: 508246 - DNA, 25 bp, Homo sapien
ccaaaaatgctgggcatggtgccac

SEQ ID NO: 508247 - DNA, 25 bp, Homo sapien
ttgaccccaaaaatgctgggcatgg

SEQ ID NO: 508248 - DNA, 25 bp, Homo sapien
tttttgaccccaaaaatgctgggca

SEQ ID NO: 508249 - DNA, 25 bp, Homo sapien
cccaaaaatgctgggcatggtgcca

SEQ ID NO: 508250 - DNA, 25 bp, Homo sapien
tcggcggcacagtcacaatgcaagt

SEQ ID NO: 508251 - DNA, 25 bp, Homo sapien
tcggcggccggcgtttcggcggcac

SEQ ID NO: 508252 - DNA, 25 bp, Homo sapien
tattaatcttccccgacggcggctc

SEQ ID NO: 508253 - DNA, 25 bp, Homo sapien
cttgaataatttgaaggcagcttta

SEQ ID NO: 508254 - DNA, 25 bp, Homo sapien
gccgcgctcgctgacagccccgccg

SEQ ID NO: 508255 - DNA, 25 bp, Homo sapien
ccgccgcgctcgctgacagccccgc

SEQ ID NO: 508256 - DNA, 25 bp, Homo sapien
agctccgccgcgctcgctgacagcc

SEQ ID NO: 508257 - DNA, 25 bp, Homo sapien
taagccgctttcgtcagcagtgggc

SEQ ID NO: 508258 - DNA, 25 bp, Homo sapien
cgggataagccgctttcgtcagcag

SEQ ID NO: 508259 - DNA, 25 bp, Homo sapien
tcagcagtgggctcgcgccaggcca

SEQ ID NO: 508260 - DNA, 25 bp, Homo sapien
gataagccgctttcgtcagcagtgg

SEQ ID NO: 508261 - DNA, 25 bp, Homo sapien
aaatcaacctgagccgcgctcgccg

SEQ ID NO: 508262 - DNA, 25 bp, Homo sapien
aatcaacctgagccgcgctcgccgc

SEQ ID NO: 508263 - DNA, 25 bp, Homo sapien
ccctcccgcaagggcttatataata

SEQ ID NO: 508264 - DNA, 25 bp, Homo sapien
tcttccctcccgcaagggcttatat

SEQ ID NO: 508265 - DNA, 25 bp, Homo sapien
ttccctcccgcaagggcttatataa

SEQ ID NO: 508266 - DNA, 25 bp, Homo sapien
tccctcccgcaagggcttatataat

SEQ ID NO: 508267 - DNA, 25 bp, Homo sapien
cacttccatccgacttggctcggcg

SEQ ID NO: 508268 - DNA, 25 bp, Homo sapien
ttccatccgacttggctcggcgctg

SEQ ID NO: 508269 - DNA, 25 bp, Homo sapien
tccgacttggctcggcgctgcatgg

SEQ ID NO: 508270 - DNA, 25 bp, Homo sapien
gcgctgcatggcgtttttgtggcag

SEQ ID NO: 508271 - DNA, 25 bp, Homo sapien
cagaaattcgagtcgtaattatgga

SEQ ID NO: 508272 - DNA, 25 bp, Homo sapien
ctgattgcagaaattcgagtcgtaa

SEQ ID NO: 508273 - DNA, 25 bp, Homo sapien
tcgagtcgtaattatggaattcaaa

SEQ ID NO: 508274 - DNA, 25 bp, Homo sapien
taattatggaattcaaattccctca

SEQ ID NO: 508275 - DNA, 25 bp, Homo sapien
gagcgcaaccatggatcacgaaatg

SEQ ID NO: 508276 - DNA, 25 bp, Homo sapien
gctcttcacgggagcgcaaccatgg

SEQ ID NO: 508277 - DNA, 25 bp, Homo sapien
ttcggattccttctctagactcgct

SEQ ID NO: 508278 - DNA, 25 bp, Homo sapien
tctctagactcgctcttcacgggag

SEQ ID NO: 508279 - DNA, 25 bp, Homo sapien
tgtgacaaaagtacacgccaccact

SEQ ID NO: 508280 - DNA, 25 bp, Homo sapien
tcagtctatcagcagcccagcaatg

SEQ ID NO: 508281 - DNA, 25 bp, Homo sapien
gagctgagcacacgctaggtccatg

SEQ ID NO: 508282 - DNA, 25 bp, Homo sapien
tagcattggtgcactaagcccagca

SEQ ID NO: 508283 - DNA, 25 bp, Homo sapien
gatacagctggttaaaatttagacc

SEQ ID NO: 508284 - DNA, 25 bp, Homo sapien
gcagcttctgttgttatgagataca

SEQ ID NO: 508285 - DNA, 25 bp, Homo sapien
aatccccatccacataagttggcgt

SEQ ID NO: 508286 - DNA, 25 bp, Homo sapien
aatgacgtatgttggccattgcagc

SEQ ID NO: 508287 - DNA, 25 bp, Homo sapien
taattgaccgcttgacatgatgaat

SEQ ID NO: 508288 - DNA, 25 bp, Homo sapien
ctggtacaggaagtaaggtgaggcc

SEQ ID NO: 508289 - DNA, 25 bp, Homo sapien
gaggctttcccggattctaattgac

SEQ ID NO: 508290 - DNA, 25 bp, Homo sapien
tattgatgagcatctctcctggtac

SEQ ID NO: 508291 - DNA, 25 bp, Homo sapien
caaagactgagccataccttatatt

SEQ ID NO: 508292 - DNA, 25 bp, Homo sapien
agagccaggttatgaatcatcacaa

SEQ ID NO: 508293 - DNA, 25 bp, Homo sapien
caatggtttgttggttagagccagg

SEQ ID NO: 508294 - DNA, 25 bp, Homo sapien
ccagacaggtaaggagagactctgt

SEQ ID NO: 508295 - DNA, 25 bp, Homo sapien
gccattccaaaacaataagacgtat

SEQ ID NO: 508296 - DNA, 25 bp, Homo sapien
gcaaacagcaagtggattttgctgg

SEQ ID NO: 508297 - DNA, 25 bp, Homo sapien
attttgctggaagacatgtgtgggc

SEQ ID NO: 508298 - DNA, 25 bp, Homo sapien
ggcttttttctctaggtagtgagct

SEQ ID NO: 508299 - DNA, 25 bp, Homo sapien
gatcacaggtgtacgccaacaaacc

SEQ ID NO: 508300 - DNA, 25 bp, Homo sapien
gggatcacaggtgtacgccaacaaa

SEQ ID NO: 508301 - DNA, 25 bp, Homo sapien
tgcctcgcctgtaactgggatcaca

SEQ ID NO: 508302 - DNA, 25 bp, Homo sapien
cctgcttctgcctcgcctgtaactg

SEQ ID NO: 508303 - DNA, 25 bp, Homo sapien
gctgctagctttaccttaaacttgc

SEQ ID NO: 508304 - DNA, 25 bp, Homo sapien
gtgagccaccgaggagcttcccttt

SEQ ID NO: 508305 - DNA, 25 bp, Homo sapien
catagcattgctgcttaaggaggct

SEQ ID NO: 508306 - DNA, 25 bp, Homo sapien
ttctcatatgtcatagcattgctgc

SEQ ID NO: 508307 - DNA, 25 bp, Homo sapien
taatatgcgatcgaaaagcccactg

SEQ ID NO: 508308 - DNA, 25 bp, Homo sapien
tgtggacgctccttgcagaaagcct

SEQ ID NO: 508309 - DNA, 25 bp, Homo sapien
tcaaggctgctaggagaaagagccc

SEQ ID NO: 508310 - DNA, 25 bp, Homo sapien
taatacctgagttgagactaccacc

SEQ ID NO: 508311 - DNA, 25 bp, Homo sapien
gccaggacccttggcacagacaaga

SEQ ID NO: 508312 - DNA, 25 bp, Homo sapien
ttgccagcagtgtgggacagtacca

SEQ ID NO: 508313 - DNA, 25 bp, Homo sapien
tccttgggctcagtcatgagtgggt

SEQ ID NO: 508314 - DNA, 25 bp, Homo sapien
tgggttcaaactgggcatgagcttc

SEQ ID NO: 508315 - DNA, 25 bp, Homo sapien
ggtagaacaagaggactactgttgc

SEQ ID NO: 508316 - DNA, 25 bp, Homo sapien
ccatgtagtggatagggtagaacaa

SEQ ID NO: 508317 - DNA, 25 bp, Homo sapien
gtagatcttggcgtacacatgtgac

SEQ ID NO: 508318 - DNA, 25 bp, Homo sapien
taagacgggtatcaaagttcccatg

SEQ ID NO: 508319 - DNA, 25 bp, Homo sapien
gatcccggaagaagcacgtccattt

SEQ ID NO: 508320 - DNA, 25 bp, Homo sapien
taagaagcttgactccgacatggaa

SEQ ID NO: 508321 - DNA, 25 bp, Homo sapien
gaaatatggtctaaccacgtgcctg

SEQ ID NO: 508322 - DNA, 25 bp, Homo sapien
cactgtgtggttgttgctatctgca

SEQ ID NO: 508323 - DNA, 25 bp, Homo sapien
actaccacctcaaagtggaagctgg

SEQ ID NO: 508324 - DNA, 25 bp, Homo sapien
aactaccacctcaaagtggaagctg

SEQ ID NO: 508325 - DNA, 25 bp, Homo sapien
taactaccacctcaaagtggaagct

SEQ ID NO: 508326 - DNA, 25 bp, Homo sapien
tgttggtagactgcctccgtgacat

SEQ ID NO: 508327 - DNA, 25 bp, Homo sapien
ttgtaaaaggcagatctcggtgttc

SEQ ID NO: 508328 - DNA, 25 bp, Homo sapien
ttctgacttctcctcgtcctgttgg

SEQ ID NO: 508329 - DNA, 25 bp, Homo sapien
actgcctccgtgacatgctggcagg

SEQ ID NO: 508330 - DNA, 25 bp, Homo sapien
ggcacaggagggtgggtgaggactc

SEQ ID NO: 508331 - DNA, 25 bp, Homo sapien
ggagggtgggtgaggactctgtggc

SEQ ID NO: 508332 - DNA, 25 bp, Homo sapien
tataagggcacagaaggcacaggag

SEQ ID NO: 508333 - DNA, 25 bp, Homo sapien
ctataagggcacagaaggcacagga

SEQ ID NO: 508334 - DNA, 25 bp, Homo sapien
aaggtgtgaatgctgattcgagctg

SEQ ID NO: 508335 - DNA, 25 bp, Homo sapien
cgtgcagcgtcctcaaaaggtgtga

SEQ ID NO: 508336 - DNA, 25 bp, Homo sapien
gtttaaggaaggctgtaaatgctaa

SEQ ID NO: 508337 - DNA, 25 bp, Homo sapien
tggagggtacgattcacaaaggagt

SEQ ID NO: 508338 - DNA, 25 bp, Homo sapien
tgttcatttctctccgattgaattt

SEQ ID NO: 508339 - DNA, 25 bp, Homo sapien
tccgattgaatttcaggtacatctg

SEQ ID NO: 508340 - DNA, 25 bp, Homo sapien
tggctgaacgtgaagggtgaacaga

SEQ ID NO: 508341 - DNA, 25 bp, Homo sapien
gccagcacgcacatggagatgcaca

SEQ ID NO: 508342 - DNA, 25 bp, Homo sapien
ctggaataattctctgagccttctc

SEQ ID NO: 508343 - DNA, 25 bp, Homo sapien
accagactggaataattctctgagc

SEQ ID NO: 508344 - DNA, 25 bp, Homo sapien
ggaaaaccagactggaataattctc

SEQ ID NO: 508345 - DNA, 25 bp, Homo sapien
gactggaataattctctgagccttc

SEQ ID NO: 508346 - DNA, 25 bp, Homo sapien
tatcatgaggtacaaataaagaggc

SEQ ID NO: 508347 - DNA, 25 bp, Homo sapien
gatcatacgcatgattcagactgca

SEQ ID NO: 508348 - DNA, 25 bp, Homo sapien
tcttaggctggaggacattttcgta

SEQ ID NO: 508349 - DNA, 25 bp, Homo sapien
tcttcagtcaggaatagcacacttc

SEQ ID NO: 508350 - DNA, 25 bp, Homo sapien
ttgagctctgagtccctaagactca

SEQ ID NO: 508351 - DNA, 25 bp, Homo sapien
gaataaggtgaataaggaccaactc

SEQ ID NO: 508352 - DNA, 25 bp, Homo sapien
tccctaagactcaggtgaataaggt

SEQ ID NO: 508353 - DNA, 25 bp, Homo sapien
tgaataaggaccaactcagggaaag

SEQ ID NO: 508354 - DNA, 25 bp, Homo sapien
ggagctgtacactcaaggtctgaaa

SEQ ID NO: 508355 - DNA, 25 bp, Homo sapien
gagactcattgtccaccgcagatgt

SEQ ID NO: 508356 - DNA, 25 bp, Homo sapien
tgttgtttaccacgaccttcacgag

SEQ ID NO: 508357 - DNA, 25 bp, Homo sapien
cagctgagcccgtgacaaagagatg

SEQ ID NO: 508358 - DNA, 25 bp, Homo sapien
tgattgcggtgacaggaacgaagct

SEQ ID NO: 508359 - DNA, 25 bp, Homo sapien
tcctgtgccctgacgtgccgaacaa

SEQ ID NO: 508360 - DNA, 25 bp, Homo sapien
aggtttgttcttgcctcctgtgccc

SEQ ID NO: 508361 - DNA, 25 bp, Homo sapien
gaagctgagttctccagtgtgagga

SEQ ID NO: 508362 - DNA, 25 bp, Homo sapien
tctgcagatgcggctgccaggaagc

SEQ ID NO: 508363 - DNA, 25 bp, Homo sapien
aatccgccagaacagtgcgagcgag

SEQ ID NO: 508364 - DNA, 25 bp, Homo sapien
taggagcctacagcatctgcagatg

SEQ ID NO: 508365 - DNA, 25 bp, Homo sapien
gaggtaaggtgaaaatccgccagaa

SEQ ID NO: 508366 - DNA, 25 bp, Homo sapien
cctgccagcacccctgatgcagatc

SEQ ID NO: 508367 - DNA, 25 bp, Homo sapien
gtggctgtcctcgggggcaacgtga

SEQ ID NO: 508368 - DNA, 25 bp, Homo sapien
cgggggcaacgtgaaaagtctcctg

SEQ ID NO: 508369 - DNA, 25 bp, Homo sapien
agcacccctgatgcagatccccctc

SEQ ID NO: 508370 - DNA, 25 bp, Homo sapien
tgcttccatcatccgagtctctgtc

SEQ ID NO: 508371 - DNA, 25 bp, Homo sapien
gcagccgcaagtgcggcaccggcat

SEQ ID NO: 508372 - DNA, 25 bp, Homo sapien
cctggtgcttccatcatccgagtct

SEQ ID NO: 508373 - DNA, 25 bp, Homo sapien
ggtctaaggcagcagccgcaagtgc

SEQ ID NO: 508374 - DNA, 25 bp, Homo sapien
tggacaacagcagctagatgcgtgg

SEQ ID NO: 508375 - DNA, 25 bp, Homo sapien
cccttttcacaagatagcgctgagg

SEQ ID NO: 508376 - DNA, 25 bp, Homo sapien
tctcactcaggtgttgtccaattat

SEQ ID NO: 508377 - DNA, 25 bp, Homo sapien
tgcccatgagtactccacagtctcc

SEQ ID NO: 508378 - DNA, 25 bp, Homo sapien
caaaacagatcttccaactgctgct

SEQ ID NO: 508379 - DNA, 25 bp, Homo sapien
cactgcaactctggaggcagccaaa

SEQ ID NO: 508380 - DNA, 25 bp, Homo sapien
acactgcaactctggaggcagccaa

SEQ ID NO: 508381 - DNA, 25 bp, Homo sapien
cactgagtccaccatgaagatagaa

SEQ ID NO: 508382 - DNA, 25 bp, Homo sapien
caatacactggtgttcattgtggat

SEQ ID NO: 508383 - DNA, 25 bp, Homo sapien
tcaaataggctgtaaagaagctcta

SEQ ID NO: 508384 - DNA, 25 bp, Homo sapien
tagaagacaacaatacactggtgtt

SEQ ID NO: 508385 - DNA, 25 bp, Homo sapien
gagaagaagacgtatgttccactgg

SEQ ID NO: 508386 - DNA, 25 bp, Homo sapien
aagaagacgtatgttccactggctc

SEQ ID NO: 508387 - DNA, 25 bp, Homo sapien
tgttccactggctcctgaggaccat

SEQ ID NO: 508388 - DNA, 25 bp, Homo sapien
tggagagaagaagacgtatgttcca

SEQ ID NO: 508389 - DNA, 25 bp, Homo sapien
gctttggatggtcaacaaaatttgg

SEQ ID NO: 508390 - DNA, 25 bp, Homo sapien
ttggatggtcaacaaaatttggatc

SEQ ID NO: 508391 - DNA, 25 bp, Homo sapien
ctttggatggtcaacaaaatttgga

SEQ ID NO: 508392 - DNA, 25 bp, Homo sapien
ggatggtcaacaaaatttggatcat

SEQ ID NO: 508393 - DNA, 25 bp, Homo sapien
cattttcgcactggcttgagggctg

SEQ ID NO: 508394 - DNA, 25 bp, Homo sapien
caccagacaaggcagcggggtccac

SEQ ID NO: 508395 - DNA, 25 bp, Homo sapien
acgacccagcggtgcttttctctct

SEQ ID NO: 508396 - DNA, 25 bp, Homo sapien
gtgcgactttgggaatgtcccctca

SEQ ID NO: 508397 - DNA, 25 bp, Homo sapien
gtcctcctcctaagtgatgactata

SEQ ID NO: 508398 - DNA, 25 bp, Homo sapien
cccgattggatacatctctgaactg

SEQ ID NO: 508399 - DNA, 25 bp, Homo sapien
gctgcctgatgacgcttaaccaacc

SEQ ID NO: 508400 - DNA, 25 bp, Homo sapien
caaagacgtttgagtcagaatgtcc

SEQ ID NO: 508401 - DNA, 25 bp, Homo sapien
caaaccattatcaccttgttacagt

SEQ ID NO: 508402 - DNA, 25 bp, Homo sapien
caaagtcacatcttaacgtggcggc

SEQ ID NO: 508403 - DNA, 25 bp, Homo sapien
gaaagacacccgttctgtgattcga

SEQ ID NO: 508404 - DNA, 25 bp, Homo sapien
ccatcagatccgtaagacctattca

SEQ ID NO: 508405 - DNA, 25 bp, Homo sapien
ttataatgtgtcagaggaggcaggc

SEQ ID NO: 508406 - DNA, 25 bp, Homo sapien
ccacaaattcaaggattcattggcc

SEQ ID NO: 508407 - DNA, 25 bp, Homo sapien
gaattcctaggagatcacaagcaga

SEQ ID NO: 508408 - DNA, 25 bp, Homo sapien
tgttcccttgggtgtcatgctcagt

SEQ ID NO: 508409 - DNA, 25 bp, Homo sapien
tcaactaacttcaattcagtgaggt

SEQ ID NO: 508410 - DNA, 25 bp, Homo sapien
gtcaactaacttcaattcagtgagg

SEQ ID NO: 508411 - DNA, 25 bp, Homo sapien
caactaacttcaattcagtgaggtt

SEQ ID NO: 508412 - DNA, 25 bp, Homo sapien
ctgtcaactaacttcaattcagtga

SEQ ID NO: 508413 - DNA, 25 bp, Homo sapien
gcaagtctacttgcctaggtgagaa

SEQ ID NO: 508414 - DNA, 25 bp, Homo sapien
taatccaacttagcatgtcaactgg

SEQ ID NO: 508415 - DNA, 25 bp, Homo sapien
tgtttgtactcaatggaccctgcct

SEQ ID NO: 508416 - DNA, 25 bp, Homo sapien
tctgctacccgaccaaataaattga

SEQ ID NO: 508417 - DNA, 25 bp, Homo sapien
tcagtgactggaacaccaaggcaca

SEQ ID NO: 508418 - DNA, 25 bp, Homo sapien
tactccaggaacagcaactcattga

SEQ ID NO: 508419 - DNA, 25 bp, Homo sapien
tatagaagtattgtagcatgcaccc

SEQ ID NO: 508420 - DNA, 25 bp, Homo sapien
ccccagcagtaatgagagcacaatt

SEQ ID NO: 508421 - DNA, 25 bp, Homo sapien
gaatgtcattccttgctggaaatgc

SEQ ID NO: 508422 - DNA, 25 bp, Homo sapien
tctctcacaagggtagttattatcc

SEQ ID NO: 508423 - DNA, 25 bp, Homo sapien
cgtcaattcactagtgtacagtgca

SEQ ID NO: 508424 - DNA, 25 bp, Homo sapien
ggttatgcttacagaccatcctcac

SEQ ID NO: 508425 - DNA, 25 bp, Homo sapien
gggctgctgccctctatagttcgaa

SEQ ID NO: 508426 - DNA, 25 bp, Homo sapien
catttacgggtagcagagtctgctc

SEQ ID NO: 508427 - DNA, 25 bp, Homo sapien
ataacgattatctgccgggctgctg

SEQ ID NO: 508428 - DNA, 25 bp, Homo sapien
tagttcgaagagcatcatttacggg

SEQ ID NO: 508429 - DNA, 25 bp, Homo sapien
ggtatattggcctatacattgtctg

SEQ ID NO: 508430 - DNA, 25 bp, Homo sapien
ccctttacaactcatacaaacatta

SEQ ID NO: 508431 - DNA, 25 bp, Homo sapien
aacatcagtttcttaagcagagtga

SEQ ID NO: 508432 - DNA, 25 bp, Homo sapien
caaacattatagatagtctttggta

SEQ ID NO: 508433 - DNA, 25 bp, Homo sapien
agactgcctaggatgcagtgttcga

SEQ ID NO: 508434 - DNA, 25 bp, Homo sapien
attatattaaatacagactgcctag

SEQ ID NO: 508435 - DNA, 25 bp, Homo sapien
gattctaggtctttaatatctttct

SEQ ID NO: 508436 - DNA, 25 bp, Homo sapien
cagtgttcgatcaaattgatggtac

SEQ ID NO: 508437 - DNA, 25 bp, Homo sapien
aatggccacagggaataagtcttct

SEQ ID NO: 508438 - DNA, 25 bp, Homo sapien
aaagatactgtatttggctccaaaa

SEQ ID NO: 508439 - DNA, 25 bp, Homo sapien
actgtagagaggatttaagtacttc

SEQ ID NO: 508440 - DNA, 25 bp, Homo sapien
tgtaaatctgtgagattcggaactg

SEQ ID NO: 508441 - DNA, 25 bp, Homo sapien
agaactgagtaaacactggtgagac

SEQ ID NO: 508442 - DNA, 25 bp, Homo sapien
gaaactgttcggtcaaatgccacac

SEQ ID NO: 508443 - DNA, 25 bp, Homo sapien
taaacactggtgagacttcctttgg

SEQ ID NO: 508444 - DNA, 25 bp, Homo sapien
gaatatgctcatggatctgaagaag

SEQ ID NO: 508445 - DNA, 25 bp, Homo sapien
taaagcactgttacattagcatgca

SEQ ID NO: 508446 - DNA, 25 bp, Homo sapien
aagcactgttacattagcatgcaaa

SEQ ID NO: 508447 - DNA, 25 bp, Homo sapien
tcctaaagcactgttacattagcat

SEQ ID NO: 508448 - DNA, 25 bp, Homo sapien
caggtattgttaatcttaaacatac

SEQ ID NO: 508449 - DNA, 25 bp, Homo sapien
tgaaaattaacaagcgtactagaat

SEQ ID NO: 508450 - DNA, 25 bp, Homo sapien
aaaattaacaagcgtactagaattg

SEQ ID NO: 508451 - DNA, 25 bp, Homo sapien
aattaacaagcgtactagaattgaa

SEQ ID NO: 508452 - DNA, 25 bp, Homo sapien
ttaacaagcgtactagaattgaaag

SEQ ID NO: 508453 - DNA, 25 bp, Homo sapien
tgtccaaaagagatccaatcctttt

SEQ ID NO: 508454 - DNA, 25 bp, Homo sapien
tttatgtccaaaagagatccaatcc

SEQ ID NO: 508455 - DNA, 25 bp, Homo sapien
gaaaatttatgtccaaaagagatcc

SEQ ID NO: 508456 - DNA, 25 bp, Homo sapien
agagatccaatccttttctattaaa

SEQ ID NO: 508457 - DNA, 25 bp, Homo sapien
aggaatccaataaaagagaacccag

SEQ ID NO: 508458 - DNA, 25 bp, Homo sapien
ctgtagtaggaatccaataaaagag

SEQ ID NO: 508459 - DNA, 25 bp, Homo sapien
acctgggaagtcctatcccaaccat

SEQ ID NO: 508460 - DNA, 25 bp, Homo sapien
caaccatcggaacaatgcaccaaca

SEQ ID NO: 508461 - DNA, 25 bp, Homo sapien
tgatatggcgaagccatcccgagct

SEQ ID NO: 508462 - DNA, 25 bp, Homo sapien
cgagctctccaaaccggagtagaaa

SEQ ID NO: 508463 - DNA, 25 bp, Homo sapien
gacagaaagccctttagtgccattg

SEQ ID NO: 508464 - DNA, 25 bp, Homo sapien
tttggccaagaagattgcagcatcc

SEQ ID NO: 508465 - DNA, 25 bp, Homo sapien
cttccaataatttctgaaggctgga

SEQ ID NO: 508466 - DNA, 25 bp, Homo sapien
ttccaataatttctgaaggctggac

SEQ ID NO: 508467 - DNA, 25 bp, Homo sapien
tccaacaaactgaaatctaatattg

SEQ ID NO: 508468 - DNA, 25 bp, Homo sapien
ctgctctgttggccattgcattcag

SEQ ID NO: 508469 - DNA, 25 bp, Homo sapien
ctgaaatctaatattggaatagttg

SEQ ID NO: 508470 - DNA, 25 bp, Homo sapien
gaaatctaatattggaatagttgtc

SEQ ID NO: 508471 - DNA, 25 bp, Homo sapien
accacttgcgttctatattgctcac

SEQ ID NO: 508472 - DNA, 25 bp, Homo sapien
aaaaccacttgcgttctatattgct

SEQ ID NO: 508473 - DNA, 25 bp, Homo sapien
gctgcctaaaaaccacttgcgttct

SEQ ID NO: 508474 - DNA, 25 bp, Homo sapien
tcacaaagctgcctaaaaaccactt

SEQ ID NO: 508475 - DNA, 25 bp, Homo sapien
tttgaagaaatcctcactataattc

SEQ ID NO: 508476 - DNA, 25 bp, Homo sapien
tgtccttttgtgtagcccaccagct

SEQ ID NO: 508477 - DNA, 25 bp, Homo sapien
caatgtccttttgtgtagcccacca

SEQ ID NO: 508478 - DNA, 25 bp, Homo sapien
gaagaaatcctcactataattctgc

SEQ ID NO: 508479 - DNA, 25 bp, Homo sapien
gaagcaaatgttcatcctccaggca

SEQ ID NO: 508480 - DNA, 25 bp, Homo sapien
ttttggcctggtatccatgacgtac

SEQ ID NO: 508481 - DNA, 25 bp, Homo sapien
catgacgtacatatagcgattgact

SEQ ID NO: 508482 - DNA, 25 bp, Homo sapien
gagtggctgactacatcgacaaatg

SEQ ID NO: 508483 - DNA, 25 bp, Homo sapien
ctccttatcttgatgatagtaggaa

SEQ ID NO: 508484 - DNA, 25 bp, Homo sapien
atcttcccttgctccggaacttgga

SEQ ID NO: 508485 - DNA, 25 bp, Homo sapien
cttgatgatagtaggaaagaactgg

SEQ ID NO: 508486 - DNA, 25 bp, Homo sapien
tgctccggaacttggaactaccaac

SEQ ID NO: 508487 - DNA, 25 bp, Homo sapien
ttgctatccggggaacataaagttc

SEQ ID NO: 508488 - DNA, 25 bp, Homo sapien
tatccggggaacataaagttctctg

SEQ ID NO: 508489 - DNA, 25 bp, Homo sapien
aattattggtttgcttgctatccgg

SEQ ID NO: 508490 - DNA, 25 bp, Homo sapien
attattggtttgcttgctatccggg

SEQ ID NO: 508491 - DNA, 25 bp, Homo sapien
ccagccttgtagtcgttctgaatca

SEQ ID NO: 508492 - DNA, 25 bp, Homo sapien
cttgtagtcccggttggcatcagac

SEQ ID NO: 508493 - DNA, 25 bp, Homo sapien
catcctcttatattcctcagcgaga

SEQ ID NO: 508494 - DNA, 25 bp, Homo sapien
cgagatcaatgagctgccagccttg

SEQ ID NO: 508495 - DNA, 25 bp, Homo sapien
gaagttcttgcactgtatcacaagg

SEQ ID NO: 508496 - DNA, 25 bp, Homo sapien
tgacagttgtagcaaagagttgtaa

SEQ ID NO: 508497 - DNA, 25 bp, Homo sapien
tttctctactgaggcaatatggtgg

SEQ ID NO: 508498 - DNA, 25 bp, Homo sapien
catccagaagtagtcaaagcaagtt

SEQ ID NO: 508499 - DNA, 25 bp, Homo sapien
cacctctcctgctttgcaaggtttg

SEQ ID NO: 508500 - DNA, 25 bp, Homo sapien
ccacctctcctgctttgcaaggttt

SEQ ID NO: 508501 - DNA, 25 bp, Homo sapien
tctcctgctttgcaaggtttggcac

SEQ ID NO: 508502 - DNA, 25 bp, Homo sapien
cctgctttgcaaggtttggcaccat

SEQ ID NO: 508503 - DNA, 25 bp, Homo sapien
cttgttgctggtactgaatcggtca

SEQ ID NO: 508504 - DNA, 25 bp, Homo sapien
gatgtgtagccgtaagatacagtgt

SEQ ID NO: 508505 - DNA, 25 bp, Homo sapien
aaataatagatgtgtagccgtaaga

SEQ ID NO: 508506 - DNA, 25 bp, Homo sapien
tactgaatcggtcaagtaattttac

SEQ ID NO: 508507 - DNA, 25 bp, Homo sapien
ccagtttcaggtttatactcaagag

SEQ ID NO: 508508 - DNA, 25 bp, Homo sapien
tgttcttagcaaccaggcatgccct

SEQ ID NO: 508509 - DNA, 25 bp, Homo sapien
gcatgccctcaaagggtttttgccc

SEQ ID NO: 508510 - DNA, 25 bp, Homo sapien
tttacagtggccttcaagactacag

SEQ ID NO: 508511 - DNA, 25 bp, Homo sapien
cggcagccggtctcacaggcgtacc

SEQ ID NO: 508512 - DNA, 25 bp, Homo sapien
cgcaaggagacgtcagccggcagcc

SEQ ID NO: 508513 - DNA, 25 bp, Homo sapien
ggtgagcgccgtctcctagaaacac

SEQ ID NO: 508514 - DNA, 25 bp, Homo sapien
ctacagaaacagggcggtgacagcg

SEQ ID NO: 508515 - DNA, 25 bp, Homo sapien
tgtgtggaccgagagcggcttgctg

SEQ ID NO: 508516 - DNA, 25 bp, Homo sapien
caggcagacagagcgtgtgtggacc

SEQ ID NO: 508517 - DNA, 25 bp, Homo sapien
aatttcatacgatgttagcaccagc

SEQ ID NO: 508518 - DNA, 25 bp, Homo sapien
tgcgtgagaatggatcccgagtaaa

SEQ ID NO: 508519 - DNA, 25 bp, Homo sapien
tgttctgaagtccatcgccatacca

SEQ ID NO: 508520 - DNA, 25 bp, Homo sapien
cctgtagagggatatcacataacga

SEQ ID NO: 508521 - DNA, 25 bp, Homo sapien
tatatcaccgaagctttaaaactca

SEQ ID NO: 508522 - DNA, 25 bp, Homo sapien
tgaccaccctatagccatcactgaa

SEQ ID NO: 508523 - DNA, 25 bp, Homo sapien
cccattatgacttctatgacgttta

SEQ ID NO: 508524 - DNA, 25 bp, Homo sapien
tgcctcctgttcgataactatgaag

SEQ ID NO: 508525 - DNA, 25 bp, Homo sapien
ggcaatgcccaagctcaacggaaga

SEQ ID NO: 508526 - DNA, 25 bp, Homo sapien
gtgccaaactaaagagccactgggc

SEQ ID NO: 508527 - DNA, 25 bp, Homo sapien
aagggcactaatctcgccatgggcg

SEQ ID NO: 508528 - DNA, 25 bp, Homo sapien
taatcatacggaggtcatcaagtgc

SEQ ID NO: 508529 - DNA, 25 bp, Homo sapien
tcctgtgcgtttcctaatccttcca

SEQ ID NO: 508530 - DNA, 25 bp, Homo sapien
tttgtagttcctccagcaccggttg

SEQ ID NO: 508531 - DNA, 25 bp, Homo sapien
gctcgcaacaactgcgaccaactgg

SEQ ID NO: 508532 - DNA, 25 bp, Homo sapien
tatttgtggacttgaccgcatccca

SEQ ID NO: 508533 - DNA, 25 bp, Homo sapien
ggacggttgcatggattattttcga

SEQ ID NO: 508534 - DNA, 25 bp, Homo sapien
catggattattttcgattgatttcc

SEQ ID NO: 508535 - DNA, 25 bp, Homo sapien
tcgtgggacggttgcatggattatt

SEQ ID NO: 508536 - DNA, 25 bp, Homo sapien
gattattttcgattgatttccgaac

SEQ ID NO: 508537 - DNA, 25 bp, Homo sapien
ggatggggcggcagccaacgaaagc

SEQ ID NO: 508538 - DNA, 25 bp, Homo sapien
tcaggaagcagacacgctccccttc

SEQ ID NO: 508539 - DNA, 25 bp, Homo sapien
agcagacacgctccccttccttctt

SEQ ID NO: 508540 - DNA, 25 bp, Homo sapien
ggcagccaacgaaagcccgaagccg

SEQ ID NO: 508541 - DNA, 25 bp, Homo sapien
caattttggcaggaggctagataga

SEQ ID NO: 508542 - DNA, 25 bp, Homo sapien
taaagtgcggattatgtcagtacag

SEQ ID NO: 508543 - DNA, 25 bp, Homo sapien
agggacctccccgattctgcgattc

SEQ ID NO: 508544 - DNA, 25 bp, Homo sapien
tgacattcatcaccctaaagtgcgg

SEQ ID NO: 508545 - DNA, 25 bp, Homo sapien
tcagccttgccttcgccgccgttgg

SEQ ID NO: 508546 - DNA, 25 bp, Homo sapien
gctggaagttcccgccaggtccgtg

SEQ ID NO: 508547 - DNA, 25 bp, Homo sapien
tccgtgccgggcgagagagatgctg

SEQ ID NO: 508548 - DNA, 25 bp, Homo sapien
ttgaggcgagagaagtgtcccagac

SEQ ID NO: 508549 - DNA, 25 bp, Homo sapien
gggaccagcacaggcggcgttttct

SEQ ID NO: 508550 - DNA, 25 bp, Homo sapien
tttcgccttgctgacggcgtcgagc

SEQ ID NO: 508551 - DNA, 25 bp, Homo sapien
taggtaaccgcactttctcgccttc

SEQ ID NO: 508552 - DNA, 25 bp, Homo sapien
tctccttcggaacgggagcgtctag

SEQ ID NO: 508553 - DNA, 25 bp, Homo sapien
ctctcgccgcggtacccgggcccag

SEQ ID NO: 508554 - DNA, 25 bp, Homo sapien
agagaagcacttaatctagccgccc

SEQ ID NO: 508555 - DNA, 25 bp, Homo sapien
gcccggcgtcgtaggcctctcgccg

SEQ ID NO: 508556 - DNA, 25 bp, Homo sapien
agtggagggcgggatgggttctgtg

SEQ ID NO: 508557 - DNA, 25 bp, Homo sapien
gtttccagaatccacgtatagttca

SEQ ID NO: 508558 - DNA, 25 bp, Homo sapien
gtgaggtttccagaatccacgtata

SEQ ID NO: 508559 - DNA, 25 bp, Homo sapien
tccagaatccacgtatagttcaggc

SEQ ID NO: 508560 - DNA, 25 bp, Homo sapien
cagaatccacgtatagttcaggcat

SEQ ID NO: 508561 - DNA, 25 bp, Homo sapien
gggactcatcttgagcgggactcat

SEQ ID NO: 508562 - DNA, 25 bp, Homo sapien
ggaacctctggggactcatcttgag

SEQ ID NO: 508563 - DNA, 25 bp, Homo sapien
atagtctgcaaggtccacttctgct

SEQ ID NO: 508564 - DNA, 25 bp, Homo sapien
cttctgctggaacctctggggactc

SEQ ID NO: 508565 - DNA, 25 bp, Homo sapien
tctgatcacattgtcagagagtagg

SEQ ID NO: 508566 - DNA, 25 bp, Homo sapien
ggaagtacttcaactccagcaacta

SEQ ID NO: 508567 - DNA, 25 bp, Homo sapien
gagtaggcttgggatattctttcct

SEQ ID NO: 508568 - DNA, 25 bp, Homo sapien
tggaaccgggctctttggatctaaa

SEQ ID NO: 508569 - DNA, 25 bp, Homo sapien
tcagggcaatccagaagcatagttt

SEQ ID NO: 508570 - DNA, 25 bp, Homo sapien
gatttcaaagcactgcactctggca

SEQ ID NO: 508571 - DNA, 25 bp, Homo sapien
caggttaagtcatgcaggtcattca

SEQ ID NO: 508572 - DNA, 25 bp, Homo sapien
tacttcctaaccatgcagccttgtg

SEQ ID NO: 508573 - DNA, 25 bp, Homo sapien
cattcaccgctgtttgtggagtagc

SEQ ID NO: 508574 - DNA, 25 bp, Homo sapien
taaggaagaatcatctgagctgaat

SEQ ID NO: 508575 - DNA, 25 bp, Homo sapien
gtagctgtcatataatgggcacatt

SEQ ID NO: 508576 - DNA, 25 bp, Homo sapien
taactcgaaaactgaatgattgcat

SEQ ID NO: 508577 - DNA, 25 bp, Homo sapien
tctgtcaaggtacacagcggtgcct

SEQ ID NO: 508578 - DNA, 25 bp, Homo sapien
tcccagtgtagcaaaatgtagttcc

SEQ ID NO: 508579 - DNA, 25 bp, Homo sapien
gaaaagtccagtttctgtcccagtg

SEQ ID NO: 508580 - DNA, 25 bp, Homo sapien
ggttagaagctattcgaaaagtcca

SEQ ID NO: 508581 - DNA, 25 bp, Homo sapien
aactagctctggttttggatgcagc

SEQ ID NO: 508582 - DNA, 25 bp, Homo sapien
agcactgtatctgttagacctctga

SEQ ID NO: 508583 - DNA, 25 bp, Homo sapien
aaccctcaggaagtcttagtgcagg

SEQ ID NO: 508584 - DNA, 25 bp, Homo sapien
catgcaaaggagtaagcagatttcc

SEQ ID NO: 508585 - DNA, 25 bp, Homo sapien
ggctttggcagctcaagtacatctg

SEQ ID NO: 508586 - DNA, 25 bp, Homo sapien
gctttggcagctcaagtacatctgg

SEQ ID NO: 508587 - DNA, 25 bp, Homo sapien
aaggctttggcagctcaagtacatc

SEQ ID NO: 508588 - DNA, 25 bp, Homo sapien
aggctttggcagctcaagtacatct

SEQ ID NO: 508589 - DNA, 25 bp, Homo sapien
gctggtttgacttttggggtgtcca

SEQ ID NO: 508590 - DNA, 25 bp, Homo sapien
atcagctggtttgacttttggggtg

SEQ ID NO: 508591 - DNA, 25 bp, Homo sapien
ttgacttttggggtgtccaatcctg

SEQ ID NO: 508592 - DNA, 25 bp, Homo sapien
tgacttttggggtgtccaatcctgc

SEQ ID NO: 508593 - DNA, 25 bp, Homo sapien
ctccttcagttgaagaaacctccag

SEQ ID NO: 508594 - DNA, 25 bp, Homo sapien
acaggaggacaactccttcagttga

SEQ ID NO: 508595 - DNA, 25 bp, Homo sapien
gacaactccttcagttgaagaaacc

SEQ ID NO: 508596 - DNA, 25 bp, Homo sapien
ggaggacaactccttcagttgaaga

SEQ ID NO: 508597 - DNA, 25 bp, Homo sapien
tggttactggcgtaaatacttggcc

SEQ ID NO: 508598 - DNA, 25 bp, Homo sapien
aaatacatatttacgccaggcgtgg

SEQ ID NO: 508599 - DNA, 25 bp, Homo sapien
gaatgatgagcttagaggtaccagg

SEQ ID NO: 508600 - DNA, 25 bp, Homo sapien
tactgcagggcatcttgtgaatatg

SEQ ID NO: 508601 - DNA, 25 bp, Homo sapien
ttatctgcatatagcagtggttggc

SEQ ID NO: 508602 - DNA, 25 bp, Homo sapien
gccactggaaatttgtaacagatta

SEQ ID NO: 508603 - DNA, 25 bp, Homo sapien
tccccagatccagaacatgggaagt

SEQ ID NO: 508604 - DNA, 25 bp, Homo sapien
tgcgcattgatgcattgaaataagg

SEQ ID NO: 508605 - DNA, 25 bp, Homo sapien
atcacctgagcagtaggcgctgacc

SEQ ID NO: 508606 - DNA, 25 bp, Homo sapien
ccctcttaagttcccatagtccatt

SEQ ID NO: 508607 - DNA, 25 bp, Homo sapien
taagttcccatagtccattgtatca

SEQ ID NO: 508608 - DNA, 25 bp, Homo sapien
cgctgacccagtttgtagcctttta

SEQ ID NO: 508609 - DNA, 25 bp, Homo sapien
ttggtatccctgctttctttgtcta

SEQ ID NO: 508610 - DNA, 25 bp, Homo sapien
tggtatccctgctttctttgtctac

SEQ ID NO: 508611 - DNA, 25 bp, Homo sapien
cctacagttatcttcacaaacaggg

SEQ ID NO: 508612 - DNA, 25 bp, Homo sapien
gccgatactcattggtgctctttat

SEQ ID NO: 508613 - DNA, 25 bp, Homo sapien
ttttcgtaacatacaaagcccctca

SEQ ID NO: 508614 - DNA, 25 bp, Homo sapien
tcatcagagctcctacagttatctt

SEQ ID NO: 508615 - DNA, 25 bp, Homo sapien
ttcccgaacactatgctctttcaca

SEQ ID NO: 508616 - DNA, 25 bp, Homo sapien
cagtccctcctgacactttcccaca

SEQ ID NO: 508617 - DNA, 25 bp, Homo sapien
tacttttaccagtccctcctgacac

SEQ ID NO: 508618 - DNA, 25 bp, Homo sapien
accaagaccattcccgaacactatg

SEQ ID NO: 508619 - DNA, 25 bp, Homo sapien
tgttgtagcacatatgagtagtact

SEQ ID NO: 508620 - DNA, 25 bp, Homo sapien
ttgtagcacatatgagtagtacttc

SEQ ID NO: 508621 - DNA, 25 bp, Homo sapien
gtagcacatatgagtagtacttcat

SEQ ID NO: 508622 - DNA, 25 bp, Homo sapien
ccatgttgtagcacatatgagtagt

SEQ ID NO: 508623 - DNA, 25 bp, Homo sapien
gggacataggcaatatataagataa

SEQ ID NO: 508624 - DNA, 25 bp, Homo sapien
gggacattcaactagaacatatatt

SEQ ID NO: 508625 - DNA, 25 bp, Homo sapien
aatccagccctctagttgggggaca

SEQ ID NO: 508626 - DNA, 25 bp, Homo sapien
gagtcaagatcacactcctacactt

SEQ ID NO: 508627 - DNA, 25 bp, Homo sapien
atatctcttagctcccctccaacct

SEQ ID NO: 508628 - DNA, 25 bp, Homo sapien
agctgcaggcctgagattccatctg

SEQ ID NO: 508629 - DNA, 25 bp, Homo sapien
tcagctcctcagcactgaggaagaa

SEQ ID NO: 508630 - DNA, 25 bp, Homo sapien
gagaagctgcaggcctgagattcca

SEQ ID NO: 508631 - DNA, 25 bp, Homo sapien
tgtcgtctgcgcggaaggcgagccc

SEQ ID NO: 508632 - DNA, 25 bp, Homo sapien
gtctgcgcggaaggcgagccccact

SEQ ID NO: 508633 - DNA, 25 bp, Homo sapien
gcacagggtctcaaagctgtcgtct

SEQ ID NO: 508634 - DNA, 25 bp, Homo sapien
caaagctgtcgtctgcgcggaaggc

SEQ ID NO: 508635 - DNA, 25 bp, Homo sapien
gtgtcttgccatcatccaagagttg

SEQ ID NO: 508636 - DNA, 25 bp, Homo sapien
tgtcttgccatcatccaagagttgg

SEQ ID NO: 508637 - DNA, 25 bp, Homo sapien
ctggcagcagcttgaggatggcctc

SEQ ID NO: 508638 - DNA, 25 bp, Homo sapien
agcacagccactgctcatctggcag

SEQ ID NO: 508639 - DNA, 25 bp, Homo sapien
ctagcacagccactgctcatctggc

SEQ ID NO: 508640 - DNA, 25 bp, Homo sapien
gcagcagcttgaggatggcctcaac

SEQ ID NO: 508641 - DNA, 25 bp, Homo sapien
gccggatggtgaggaacacttccat

SEQ ID NO: 508642 - DNA, 25 bp, Homo sapien
ctctcccctcgatgaggtcgcgcgg

SEQ ID NO: 508643 - DNA, 25 bp, Homo sapien
cgcggccgcgcttgttactgatttc

SEQ ID NO: 508644 - DNA, 25 bp, Homo sapien
tggcgccggatggtgaggaacactt

SEQ ID NO: 508645 - DNA, 25 bp, Homo sapien
ggctctaagaattgaggcaaactct

SEQ ID NO: 508646 - DNA, 25 bp, Homo sapien
ggtcgtggctctaagaattgaggca

SEQ ID NO: 508647 - DNA, 25 bp, Homo sapien
tgaacgcgtagggtcgtggctctaa

SEQ ID NO: 508648 - DNA, 25 bp, Homo sapien
ctgtcttgtgaacgcgtagggtcgt

SEQ ID NO: 508649 - DNA, 25 bp, Homo sapien
caggactgcggcaagtttgcaggta

SEQ ID NO: 508650 - DNA, 25 bp, Homo sapien
gactgcggcaagtttgcaggtagat

SEQ ID NO: 508651 - DNA, 25 bp, Homo sapien
cgtttcaggactgcggcaagtttgc

SEQ ID NO: 508652 - DNA, 25 bp, Homo sapien
tttcaggactgcggcaagtttgcag

SEQ ID NO: 508653 - DNA, 25 bp, Homo sapien
gaaggtagagggtgtacagtttgga

SEQ ID NO: 508654 - DNA, 25 bp, Homo sapien
tagagggtgtacagtttggagctgg

SEQ ID NO: 508655 - DNA, 25 bp, Homo sapien
ggcacataaaaataagcgacttttg

SEQ ID NO: 508656 - DNA, 25 bp, Homo sapien
cacataaaaataagcgacttttgta

SEQ ID NO: 508657 - DNA, 25 bp, Homo sapien
caaaactgcgagtgaagcacctcct

SEQ ID NO: 508658 - DNA, 25 bp, Homo sapien
cagggtgaatagctacagggttcca

SEQ ID NO: 508659 - DNA, 25 bp, Homo sapien
tgttccatatacagggtgaatagct

SEQ ID NO: 508660 - DNA, 25 bp, Homo sapien
gagttggttagtatgagtttctgct

SEQ ID NO: 508661 - DNA, 25 bp, Homo sapien
gctctgcccacctgatactgcgcca

SEQ ID NO: 508662 - DNA, 25 bp, Homo sapien
gcacttggctgtctccggccctgct

SEQ ID NO: 508663 - DNA, 25 bp, Homo sapien
tgatactgcgccactgatggcaggc

SEQ ID NO: 508664 - DNA, 25 bp, Homo sapien
acagcacttggctgtctccggccct

SEQ ID NO: 508665 - DNA, 25 bp, Homo sapien
atctctagagatactgtgtaagcca

SEQ ID NO: 508666 - DNA, 25 bp, Homo sapien
gtaatcttttgccaaatcatcagca

SEQ ID NO: 508667 - DNA, 25 bp, Homo sapien
tcacacattgcagggaagcatttgg

SEQ ID NO: 508668 - DNA, 25 bp, Homo sapien
ttgcattcagaagtaagtgttcctg

SEQ ID NO: 508669 - DNA, 25 bp, Homo sapien
tattcaactcgattgaactcttcta

SEQ ID NO: 508670 - DNA, 25 bp, Homo sapien
actcgattgaactcttctactgtct

SEQ ID NO: 508671 - DNA, 25 bp, Homo sapien
tcaactcgattgaactcttctactg

SEQ ID NO: 508672 - DNA, 25 bp, Homo sapien
ttattcaactcgattgaactcttct

SEQ ID NO: 508673 - DNA, 25 bp, Homo sapien
atgtatggatgctgacgtttttgcc

SEQ ID NO: 508674 - DNA, 25 bp, Homo sapien
tgctgacgtttttgcccttccagga

SEQ ID NO: 508675 - DNA, 25 bp, Homo sapien
ggaggccatacagaggccgtacaga

SEQ ID NO: 508676 - DNA, 25 bp, Homo sapien
aggccgtacagaaggaaggccacag

SEQ ID NO: 508677 - DNA, 25 bp, Homo sapien
cttcactgggaaaccctgagaattt

SEQ ID NO: 508678 - DNA, 25 bp, Homo sapien
gacgggctgcttgcaatatgggtcc

SEQ ID NO: 508679 - DNA, 25 bp, Homo sapien
gctgcttgcaatatgggtccatttc

SEQ ID NO: 508680 - DNA, 25 bp, Homo sapien
ccaggacgggctgcttgcaatatgg

SEQ ID NO: 508681 - DNA, 25 bp, Homo sapien
aggtagcgtcccctctccattggct

SEQ ID NO: 508682 - DNA, 25 bp, Homo sapien
caaggtagcgtcccctctccattgg

SEQ ID NO: 508683 - DNA, 25 bp, Homo sapien
tggctccagcctgttaccgctgctt

SEQ ID NO: 508684 - DNA, 25 bp, Homo sapien
agcctgttaccgctgcttccagatt

SEQ ID NO: 508685 - DNA, 25 bp, Homo sapien
tttcctttgttcttgctatcaaaac

SEQ ID NO: 508686 - DNA, 25 bp, Homo sapien
cattttcctttgttcttgctatcaa

SEQ ID NO: 508687 - DNA, 25 bp, Homo sapien
attttcctttgttcttgctatcaaa

SEQ ID NO: 508688 - DNA, 25 bp, Homo sapien
ttttcctttgttcttgctatcaaaa

SEQ ID NO: 508689 - DNA, 25 bp, Homo sapien
cgtataaccaatcctgttatgttca

SEQ ID NO: 508690 - DNA, 25 bp, Homo sapien
tataaccaatcctgttatgttcatc

SEQ ID NO: 508691 - DNA, 25 bp, Homo sapien
aaccaatcctgttatgttcatccag

SEQ ID NO: 508692 - DNA, 25 bp, Homo sapien
cttcgtataaccaatcctgttatgt

SEQ ID NO: 508693 - DNA, 25 bp, Homo sapien
taagctcctggtagcacctggcgtt

SEQ ID NO: 508694 - DNA, 25 bp, Homo sapien
tagcacctggcgttctcttcggaaa

SEQ ID NO: 508695 - DNA, 25 bp, Homo sapien
tgcagcctcgtctcctttatccctg

SEQ ID NO: 508696 - DNA, 25 bp, Homo sapien
tcttcggaaattacttgcagcctcg

SEQ ID NO: 508697 - DNA, 25 bp, Homo sapien
gggctgtcctatcagtctctgctcc

SEQ ID NO: 508698 - DNA, 25 bp, Homo sapien
ccttgggctgtcctatcagtctctg

SEQ ID NO: 508699 - DNA, 25 bp, Homo sapien
ctggctgtccgtccaggcctgccgt

SEQ ID NO: 508700 - DNA, 25 bp, Homo sapien
gctgtccgtccaggcctgccgtcat

SEQ ID NO: 508701 - DNA, 25 bp, Homo sapien
ggagctctggacctgatacgagact

SEQ ID NO: 508702 - DNA, 25 bp, Homo sapien
gactccttgattgtggccctccttg

SEQ ID NO: 508703 - DNA, 25 bp, Homo sapien
cagtgtatgtagagtcgagtgtgcc

SEQ ID NO: 508704 - DNA, 25 bp, Homo sapien
tgctgctagtgcgttggcagtgtat

SEQ ID NO: 508705 - DNA, 25 bp, Homo sapien
cttcagagaagtgtcgtgcagggaa

SEQ ID NO: 508706 - DNA, 25 bp, Homo sapien
tgtaattttgtacaagtttccacta

SEQ ID NO: 508707 - DNA, 25 bp, Homo sapien
tgatttgtatctgttataacacatc

SEQ ID NO: 508708 - DNA, 25 bp, Homo sapien
tacaagtttccactactagatcatt

SEQ ID NO: 508709 - DNA, 25 bp, Homo sapien
taatggtaatatcagtagggcacag

SEQ ID NO: 508710 - DNA, 25 bp, Homo sapien
tccccagctggaagtactcgtcttt

SEQ ID NO: 508711 - DNA, 25 bp, Homo sapien
tagggcacagtccacacttatacaa

SEQ ID NO: 508712 - DNA, 25 bp, Homo sapien
tcactgcacgggatgttcttctcca

SEQ ID NO: 508713 - DNA, 25 bp, Homo sapien
ttgcacaacagtgtccaagccgggt

SEQ ID NO: 508714 - DNA, 25 bp, Homo sapien
acaacagtgtccaagccgggtctga

SEQ ID NO: 508715 - DNA, 25 bp, Homo sapien
tattgcacaacagtgtccaagccgg

SEQ ID NO: 508716 - DNA, 25 bp, Homo sapien
aacagtgtccaagccgggtctgact

SEQ ID NO: 508717 - DNA, 25 bp, Homo sapien
tgcgtaaggagcacagttacagact

SEQ ID NO: 508718 - DNA, 25 bp, Homo sapien
gactgactgacgtgggacggcctgt

SEQ ID NO: 508719 - DNA, 25 bp, Homo sapien
tgtgtgactggcgttgggaggaaga

SEQ ID NO: 508720 - DNA, 25 bp, Homo sapien
gaagacgagggtggcctgtgtgact

SEQ ID NO: 508721 - DNA, 25 bp, Homo sapien
gtccatcattgtccttgcttcctcg

SEQ ID NO: 508722 - DNA, 25 bp, Homo sapien
ttcttattgccacgcacacattcca

SEQ ID NO: 508723 - DNA, 25 bp, Homo sapien
tgcttcctcgccagtgacttccaca

SEQ ID NO: 508724 - DNA, 25 bp, Homo sapien
cacattccaagtgagtgaaacgatg

SEQ ID NO: 508725 - DNA, 25 bp, Homo sapien
tctctggtgggcattctctaccatc

SEQ ID NO: 508726 - DNA, 25 bp, Homo sapien
ctgtcctcttattgctggtctctgg

SEQ ID NO: 508727 - DNA, 25 bp, Homo sapien
tctggtgggcattctctaccatctc

SEQ ID NO: 508728 - DNA, 25 bp, Homo sapien
ggtgggcattctctaccatctctct

SEQ ID NO: 508729 - DNA, 25 bp, Homo sapien
ctggaagaagggattcttgctctct

SEQ ID NO: 508730 - DNA, 25 bp, Homo sapien
gagatgagggatcctgtctgagtga

SEQ ID NO: 508731 - DNA, 25 bp, Homo sapien
tagacgaccaagcagtgtcccatgg

SEQ ID NO: 508732 - DNA, 25 bp, Homo sapien
tggccttccctgattgaagtccggg

SEQ ID NO: 508733 - DNA, 25 bp, Homo sapien
taaaatgaaagctcgagcgctggtc

SEQ ID NO: 508734 - DNA, 25 bp, Homo sapien
gaagcccatttttagcgtccagagg

SEQ ID NO: 508735 - DNA, 25 bp, Homo sapien
aaatcttgagctaggctggcttgcc

SEQ ID NO: 508736 - DNA, 25 bp, Homo sapien
tctaggtctaggctggaacgtctca

SEQ ID NO: 508737 - DNA, 25 bp, Homo sapien
tctcaacaaattccgcgacaaccag

SEQ ID NO: 508738 - DNA, 25 bp, Homo sapien
tcaaccaaccgcatctcaacaaatt

SEQ ID NO: 508739 - DNA, 25 bp, Homo sapien
caaccagatcaggtaggagaaggcg

SEQ ID NO: 508740 - DNA, 25 bp, Homo sapien
gctcgcgcggaaggcggtggagtca

SEQ ID NO: 508741 - DNA, 25 bp, Homo sapien
ttgctctgcgcttgcctttctggga

SEQ ID NO: 508742 - DNA, 25 bp, Homo sapien
atagcagttgctctgcgcttgcctt

SEQ ID NO: 508743 - DNA, 25 bp, Homo sapien
agcagttgctctgcgcttgcctttc

SEQ ID NO: 508744 - DNA, 25 bp, Homo sapien
agttgctctgcgcttgcctttctgg

SEQ ID NO: 508745 - DNA, 25 bp, Homo sapien
gcagcgaggggcggcatgctgtcat

SEQ ID NO: 508746 - DNA, 25 bp, Homo sapien
ggcagcgaggggcggcatgctgtca

SEQ ID NO: 508747 - DNA, 25 bp, Homo sapien
gttatcacctttacacccctggaca

SEQ ID NO: 508748 - DNA, 25 bp, Homo sapien
ggaatcctgcagacgaaaatattgg

SEQ ID NO: 508749 - DNA, 25 bp, Homo sapien
tgtactttctgaacgtgaatggcac

SEQ ID NO: 508750 - DNA, 25 bp, Homo sapien
tcttattttcgatgtaccagcagca

SEQ ID NO: 508751 - DNA, 25 bp, Homo sapien
aaatggcctgtgtaagaggctgaga

SEQ ID NO: 508752 - DNA, 25 bp, Homo sapien
gccagagtgtgccattgccttggaa

SEQ ID NO: 508753 - DNA, 25 bp, Homo sapien
ggggtttgaatgagtccaagaagca

SEQ ID NO: 508754 - DNA, 25 bp, Homo sapien
tctggaagggttgatgaggactggg

SEQ ID NO: 508755 - DNA, 25 bp, Homo sapien
aagctgcttggttcgaatatatttc

SEQ ID NO: 508756 - DNA, 25 bp, Homo sapien
agctgcttggttcgaatatatttca

SEQ ID NO: 508757 - DNA, 25 bp, Homo sapien
gctgcttggttcgaatatatttcat

SEQ ID NO: 508758 - DNA, 25 bp, Homo sapien
cagacggtgcggttgccaggtggag

SEQ ID NO: 508759 - DNA, 25 bp, Homo sapien
cgcggccgggtaggggtgctcctca

SEQ ID NO: 508760 - DNA, 25 bp, Homo sapien
tcgcggccgggtaggggtgctcctc

SEQ ID NO: 508761 - DNA, 25 bp, Homo sapien
tctcagacggtgcggttgccaggtg

SEQ ID NO: 508762 - DNA, 25 bp, Homo sapien
tcccagaagatgggcggccaggaga

SEQ ID NO: 508763 - DNA, 25 bp, Homo sapien
cgtcccagaagatgggcggccagga

SEQ ID NO: 508764 - DNA, 25 bp, Homo sapien
acgtcccagaagatgggcggccagg

SEQ ID NO: 508765 - DNA, 25 bp, Homo sapien
ccaggagagacgctcctcacttccc

SEQ ID NO: 508766 - DNA, 25 bp, Homo sapien
tccgggcttggttagtctgtcttct

SEQ ID NO: 508767 - DNA, 25 bp, Homo sapien
tctcctgtaagaatcagtgagttct

SEQ ID NO: 508768 - DNA, 25 bp, Homo sapien
tctgttggtaaaatccttctcctgt

SEQ ID NO: 508769 - DNA, 25 bp, Homo sapien
tggtgcatatcaggctaaatttgcc

SEQ ID NO: 508770 - DNA, 25 bp, Homo sapien
cagatctcataggctgaattaggtc

SEQ ID NO: 508771 - DNA, 25 bp, Homo sapien
tcacagggtacaaagtgttgtgcag

SEQ ID NO: 508772 - DNA, 25 bp, Homo sapien
aataacagccctttgacacgtgtgg

SEQ ID NO: 508773 - DNA, 25 bp, Homo sapien
tgtgcagactggtgcatgtggctcc

SEQ ID NO: 508774 - DNA, 25 bp, Homo sapien
tttataaacacgagggagggtctga

SEQ ID NO: 508775 - DNA, 25 bp, Homo sapien
gctgaggtaactggaccagaacagg

SEQ ID NO: 508776 - DNA, 25 bp, Homo sapien
ttataaacacgagggagggtctgag

SEQ ID NO: 508777 - DNA, 25 bp, Homo sapien
ggttaggagtgcgtgtttataaaca

SEQ ID NO: 508778 - DNA, 25 bp, Homo sapien
tcctcccattaagctgggggccttg

SEQ ID NO: 508779 - DNA, 25 bp, Homo sapien
gcttcctcccattaagctgggggcc

SEQ ID NO: 508780 - DNA, 25 bp, Homo sapien
agcttcctcccattaagctgggggc

SEQ ID NO: 508781 - DNA, 25 bp, Homo sapien
ctcccattaagctgggggccttgca

SEQ ID NO: 508782 - DNA, 25 bp, Homo sapien
tgacataaagaagccatgatcacat

SEQ ID NO: 508783 - DNA, 25 bp, Homo sapien
ctgtcaggtgaactgagtctatggc

SEQ ID NO: 508784 - DNA, 25 bp, Homo sapien
tgaactgagtctatggcttgggctg

SEQ ID NO: 508785 - DNA, 25 bp, Homo sapien
acataaagaagccatgatcacattg

SEQ ID NO: 508786 - DNA, 25 bp, Homo sapien
aatgagttgtcagaaaatctgcctg

SEQ ID NO: 508787 - DNA, 25 bp, Homo sapien
ggagacagcatctcaaaatgagttg

SEQ ID NO: 508788 - DNA, 25 bp, Homo sapien
tacttccggttaacagctgtttcag

SEQ ID NO: 508789 - DNA, 25 bp, Homo sapien
gagggaccgaagctacaattgggaa

SEQ ID NO: 508790 - DNA, 25 bp, Homo sapien
tagagtttttaaagcgcactctgcc

SEQ ID NO: 508791 - DNA, 25 bp, Homo sapien
cagttcctggattgtgtctcttgtc

SEQ ID NO: 508792 - DNA, 25 bp, Homo sapien
cttttggctctgctgagattctttc

SEQ ID NO: 508793 - DNA, 25 bp, Homo sapien
tggctcttattggtgcataggaaag

SEQ ID NO: 508794 - DNA, 25 bp, Homo sapien
ccttgcggtaacatgggacataact

SEQ ID NO: 508795 - DNA, 25 bp, Homo sapien
gagaagcagaggtatcatccaagag

SEQ ID NO: 508796 - DNA, 25 bp, Homo sapien
ccaaaaccaggtagccagaaggagc

SEQ ID NO: 508797 - DNA, 25 bp, Homo sapien
cagaaggagccagttgatcaagcag

SEQ ID NO: 508798 - DNA, 25 bp, Homo sapien
cactgcaacctatacttcccagttc

SEQ ID NO: 508799 - DNA, 25 bp, Homo sapien
gcaacctatacttcccagttcaagt

SEQ ID NO: 508800 - DNA, 25 bp, Homo sapien
tatatattagtagagatgatgtttc

SEQ ID NO: 508801 - DNA, 25 bp, Homo sapien
atatattagtagagatgatgtttca

SEQ ID NO: 508802 - DNA, 25 bp, Homo sapien
tacctagagtcacaacttgattgtt

SEQ ID NO: 508803 - DNA, 25 bp, Homo sapien
catttgcacagtttagtctaaaggc

SEQ ID NO: 508804 - DNA, 25 bp, Homo sapien
ttgttgtccaactcacactgggcca

SEQ ID NO: 508805 - DNA, 25 bp, Homo sapien
tgcagtccagctatgtgctcatttg

SEQ ID NO: 508806 - DNA, 25 bp, Homo sapien
gatttgcattgcatgacccgtaata

SEQ ID NO: 508807 - DNA, 25 bp, Homo sapien
tatagtgtcagctttgttctttgga

SEQ ID NO: 508808 - DNA, 25 bp, Homo sapien
ctctatagtgtcagctttgttcttt

SEQ ID NO: 508809 - DNA, 25 bp, Homo sapien
catgacccgtaataccaggtggagg

SEQ ID NO: 508810 - DNA, 25 bp, Homo sapien
aaacgaagacttgggactgactgcc

SEQ ID NO: 508811 - DNA, 25 bp, Homo sapien
taactgacaagagtgatgggtcccc

SEQ ID NO: 508812 - DNA, 25 bp, Homo sapien
tagaacccaggctgagagagcactg

SEQ ID NO: 508813 - DNA, 25 bp, Homo sapien
gagtgacggcgttggactagaaccc

SEQ ID NO: 508814 - DNA, 25 bp, Homo sapien
tatggctatgatcttcactgccagt

SEQ ID NO: 508815 - DNA, 25 bp, Homo sapien
tgtgctcccattttcgtcctatggc

SEQ ID NO: 508816 - DNA, 25 bp, Homo sapien
cattttcgtcctatggctatgatct

SEQ ID NO: 508817 - DNA, 25 bp, Homo sapien
ccaaatgtgagcctgtgctcccatt

SEQ ID NO: 508818 - DNA, 25 bp, Homo sapien
catctaggaaatccctcgtggccct

SEQ ID NO: 508819 - DNA, 25 bp, Homo sapien
tgctccatggcatctaggaaatccc

SEQ ID NO: 508820 - DNA, 25 bp, Homo sapien
tgcaaatcggtagaaatgcatccag

SEQ ID NO: 508821 - DNA, 25 bp, Homo sapien
gctcctacccgtgcagatttcagtg

SEQ ID NO: 508822 - DNA, 25 bp, Homo sapien
catgtgataatggacattacaccaa

SEQ ID NO: 508823 - DNA, 25 bp, Homo sapien
caagatgcttttaaggctggtagta

SEQ ID NO: 508824 - DNA, 25 bp, Homo sapien
gctttaattccatgtgataatggac

SEQ ID NO: 508825 - DNA, 25 bp, Homo sapien
ggcagtttaacttgattagatactt

SEQ ID NO: 508826 - DNA, 25 bp, Homo sapien
atcgatggccacaccctgaagtacg

SEQ ID NO: 508827 - DNA, 25 bp, Homo sapien
tgacgtggccctgatcatcgatggc

SEQ ID NO: 508828 - DNA, 25 bp, Homo sapien
gcaaagcggtcatatgctgcaggta

SEQ ID NO: 508829 - DNA, 25 bp, Homo sapien
gaagtacgcgctctccttcgaagtc

SEQ ID NO: 508830 - DNA, 25 bp, Homo sapien
ctccacatctccccgtgtgccttcc

SEQ ID NO: 508831 - DNA, 25 bp, Homo sapien
tatcgtattcccactccacatctcc

SEQ ID NO: 508832 - DNA, 25 bp, Homo sapien
ctctggtcctatcgtattcccactc

SEQ ID NO: 508833 - DNA, 25 bp, Homo sapien
ggtcctatcgtattcccactccaca

SEQ ID NO: 508834 - DNA, 25 bp, Homo sapien
gtttgtttgcagaagctcagatgca

SEQ ID NO: 508835 - DNA, 25 bp, Homo sapien
tccactgagtaccttcacactagtg

SEQ ID NO: 508836 - DNA, 25 bp, Homo sapien
tttcctaatggttctgaaacctgat

SEQ ID NO: 508837 - DNA, 25 bp, Homo sapien
gatttacatggcacaagttcccctc

SEQ ID NO: 508838 - DNA, 25 bp, Homo sapien
catttttgacaatactgcttgccaa

SEQ ID NO: 508839 - DNA, 25 bp, Homo sapien
tcatgaatgattacttcatcagtgc

SEQ ID NO: 508840 - DNA, 25 bp, Homo sapien
cacactgtggcctaaaattctgaag

SEQ ID NO: 508841 - DNA, 25 bp, Homo sapien
tgaaacagggtgatacgaggtcaca

SEQ ID NO: 508842 - DNA, 25 bp, Homo sapien
gtgctacagctttcatgtagacgtt

SEQ ID NO: 508843 - DNA, 25 bp, Homo sapien
ctttgcattgattagaactaggtag

SEQ ID NO: 508844 - DNA, 25 bp, Homo sapien
tgcagaagttgggactgtactgaaa

SEQ ID NO: 508845 - DNA, 25 bp, Homo sapien
tctgttgtaattggttggctctttg

SEQ ID NO: 508846 - DNA, 25 bp, Homo sapien
tagtgatagatgaaacttagaggcg

SEQ ID NO: 508847 - DNA, 25 bp, Homo sapien
gtgaaacctcagaaccatgtgcatt

SEQ ID NO: 508848 - DNA, 25 bp, Homo sapien
actctgggacgtttgctgatgatgg

SEQ ID NO: 508849 - DNA, 25 bp, Homo sapien
aggtcgtccactcatctcacacgtg

SEQ ID NO: 508850 - DNA, 25 bp, Homo sapien
acacgtggcctcttcccttacacag

SEQ ID NO: 508851 - DNA, 25 bp, Homo sapien
tgtcctctgtgagcacgtgtctgta

SEQ ID NO: 508852 - DNA, 25 bp, Homo sapien
tctctgaaggccattggtaacctgg

SEQ ID NO: 508853 - DNA, 25 bp, Homo sapien
ggtaacctggaggaatattctccca

SEQ ID NO: 508854 - DNA, 25 bp, Homo sapien
ttaaacaagcgctctgaagaagctg

SEQ ID NO: 508855 - DNA, 25 bp, Homo sapien
taggaattgaccattgctccattaa

SEQ ID NO: 508856 - DNA, 25 bp, Homo sapien
ttttcaggccctaggttcagtctgt

SEQ ID NO: 508857 - DNA, 25 bp, Homo sapien
cattgctccattaaagtggaccaaa

SEQ ID NO: 508858 - DNA, 25 bp, Homo sapien
tctgtgctgactctgaacctctgag

SEQ ID NO: 508859 - DNA, 25 bp, Homo sapien
ggtacatgcatgcacgtgatgtaga

SEQ ID NO: 508860 - DNA, 25 bp, Homo sapien
tcagcctcatttttcgttgtcttga

SEQ ID NO: 508861 - DNA, 25 bp, Homo sapien
tctccatcaggggtacatgcatgca

SEQ ID NO: 508862 - DNA, 25 bp, Homo sapien
gtagtacctggtgtctttaatatca

SEQ ID NO: 508863 - DNA, 25 bp, Homo sapien
tttagctacaccaagctccatccac

SEQ ID NO: 508864 - DNA, 25 bp, Homo sapien
tgttttagctacaccaagctccatc

SEQ ID NO: 508865 - DNA, 25 bp, Homo sapien
gttttagctacaccaagctccatcc

SEQ ID NO: 508866 - DNA, 25 bp, Homo sapien
ttttagctacaccaagctccatcca

SEQ ID NO: 508867 - DNA, 25 bp, Homo sapien
cagatggaccatatttctcagaagg

SEQ ID NO: 508868 - DNA, 25 bp, Homo sapien
aatcctgttgttgtctagaatgctc

SEQ ID NO: 508869 - DNA, 25 bp, Homo sapien
gaaggtaaaatcctgttgttgtcta

SEQ ID NO: 508870 - DNA, 25 bp, Homo sapien
ctatgtttcatggtcgtggccagat

SEQ ID NO: 508871 - DNA, 25 bp, Homo sapien
gaggacacgggaattcgtgacgtat

SEQ ID NO: 508872 - DNA, 25 bp, Homo sapien
gaattcgtgacgtatcactaccatg

SEQ ID NO: 508873 - DNA, 25 bp, Homo sapien
gacacgggaattcgtgacgtatcac

SEQ ID NO: 508874 - DNA, 25 bp, Homo sapien
gacgtatcactaccatgatggaaaa

SEQ ID NO: 508875 - DNA, 25 bp, Homo sapien
agtcctctaccagggatcctgaaag

SEQ ID NO: 508876 - DNA, 25 bp, Homo sapien
aacccgccgaggttggacgatggca

SEQ ID NO: 508877 - DNA, 25 bp, Homo sapien
tagaagaacaggtcatcccttttcc

SEQ ID NO: 508878 - DNA, 25 bp, Homo sapien
taagtgtcggctgttagctgagagc

SEQ ID NO: 508879 - DNA, 25 bp, Homo sapien
catcctgcagggatctggctctctg

SEQ ID NO: 508880 - DNA, 25 bp, Homo sapien
tctgggctttgactgtattcattta

SEQ ID NO: 508881 - DNA, 25 bp, Homo sapien
caagtctgaggccatcctgcaggga

SEQ ID NO: 508882 - DNA, 25 bp, Homo sapien
gctctctgggctttgactgtattca

SEQ ID NO: 508883 - DNA, 25 bp, Homo sapien
tctgtcctcccggtggctcggccct

SEQ ID NO: 508884 - DNA, 25 bp, Homo sapien
cctgctgcctccgtgtattcagatt

SEQ ID NO: 508885 - DNA, 25 bp, Homo sapien
ggctcggccctcttctaccccagtc

SEQ ID NO: 508886 - DNA, 25 bp, Homo sapien
tattcagattacatctggatgatct

SEQ ID NO: 508887 - DNA, 25 bp, Homo sapien
tctctgaaagtagatgtatgcctta

SEQ ID NO: 508888 - DNA, 25 bp, Homo sapien
gagactcctccagtcaatgagaaag

SEQ ID NO: 508889 - DNA, 25 bp, Homo sapien
agtccggcaaagacacatcgtattt

SEQ ID NO: 508890 - DNA, 25 bp, Homo sapien
ataaaggaacaactgctgcagtccc

SEQ ID NO: 508891 - DNA, 25 bp, Homo sapien
gcttgcaggttaagagggtcaaatg

SEQ ID NO: 508892 - DNA, 25 bp, Homo sapien
tgtgtggattcagacacctccaagg

SEQ ID NO: 508893 - DNA, 25 bp, Homo sapien
ttgccctggccctgtgtagcttgca

SEQ ID NO: 508894 - DNA, 25 bp, Homo sapien
tgctgcaaagtcactagcacatttc

SEQ ID NO: 508895 - DNA, 25 bp, Homo sapien
tgcttatagtatgagtggattttag

SEQ ID NO: 508896 - DNA, 25 bp, Homo sapien
ctgcttatagtatgagtggatttta

SEQ ID NO: 508897 - DNA, 25 bp, Homo sapien
gcttatagtatgagtggattttagc

SEQ ID NO: 508898 - DNA, 25 bp, Homo sapien
ctgggcaggtggttaacagatttcc

SEQ ID NO: 508899 - DNA, 25 bp, Homo sapien
tcttcaaatgaccattttacaccta

SEQ ID NO: 508900 - DNA, 25 bp, Homo sapien
aaggttatgccaagtgaaggtttct

SEQ ID NO: 508901 - DNA, 25 bp, Homo sapien
tcatcgtttctgaaggttatgccaa

SEQ ID NO: 508902 - DNA, 25 bp, Homo sapien
gcaggcactgtgtgtcttacagcca

SEQ ID NO: 508903 - DNA, 25 bp, Homo sapien
gacaggtaagtactcctgattggga

SEQ ID NO: 508904 - DNA, 25 bp, Homo sapien
tacagccacgatgagcttcaggaga

SEQ ID NO: 508905 - DNA, 25 bp, Homo sapien
cattgctccagatatgagaggacag

SEQ ID NO: 508906 - DNA, 25 bp, Homo sapien
ccatatctaggccagtgtgcacact

SEQ ID NO: 508907 - DNA, 25 bp, Homo sapien
gatgatgtttgcaccgatgttcccg

SEQ ID NO: 508908 - DNA, 25 bp, Homo sapien
gatacatactttagggccaggcctg

SEQ ID NO: 508909 - DNA, 25 bp, Homo sapien
gatgttcccgcccacatttgcagga

SEQ ID NO: 508910 - DNA, 25 bp, Homo sapien
taatagcccaggtcgtctgagacct

SEQ ID NO: 508911 - DNA, 25 bp, Homo sapien
tgctgagcaggacggacctgtccta

SEQ ID NO: 508912 - DNA, 25 bp, Homo sapien
tcctataggagtgggcttgcatgtc

SEQ ID NO: 508913 - DNA, 25 bp, Homo sapien
gcatgtcctctagtgcatctttgct

SEQ ID NO: 508914 - DNA, 25 bp, Homo sapien
tctgtattttgactcagtgctttgt

SEQ ID NO: 508915 - DNA, 25 bp, Homo sapien
gtattttgactcagtgctttgttca

SEQ ID NO: 508916 - DNA, 25 bp, Homo sapien
tgcagtctgccactctgtattttga

SEQ ID NO: 508917 - DNA, 25 bp, Homo sapien
gccactctgtattttgactcagtgc

SEQ ID NO: 508918 - DNA, 25 bp, Homo sapien
ttgaggcgtaggatttcagtggcaa

SEQ ID NO: 508919 - DNA, 25 bp, Homo sapien
aggcgtaggatttcagtggcaagta

SEQ ID NO: 508920 - DNA, 25 bp, Homo sapien
tcagttgaggcgtaggatttcagtg

SEQ ID NO: 508921 - DNA, 25 bp, Homo sapien
cgtaggatttcagtggcaagtaaag

SEQ ID NO: 508922 - DNA, 25 bp, Homo sapien
gacagcatgttctgtagcgtgaaga

SEQ ID NO: 508923 - DNA, 25 bp, Homo sapien
acagcatgttctgtagcgtgaagaa

SEQ ID NO: 508924 - DNA, 25 bp, Homo sapien
ctgtgtcgtttgtgtgtcccagcat

SEQ ID NO: 508925 - DNA, 25 bp, Homo sapien
caggcacaggagcttaaaaccatca

SEQ ID NO: 508926 - DNA, 25 bp, Homo sapien
aatgcaggggccattggacgtaaaa

SEQ ID NO: 508927 - DNA, 25 bp, Homo sapien
gacgtaaaaacctgactcggcattg

SEQ ID NO: 508928 - DNA, 25 bp, Homo sapien
cctgactcggcattgggtggatgtt

SEQ ID NO: 508929 - DNA, 25 bp, Homo sapien
gccattggacgtaaaaacctgactc

SEQ ID NO: 508930 - DNA, 25 bp, Homo sapien
tcagtgttactcccttgtaccgaca

SEQ ID NO: 508931 - DNA, 25 bp, Homo sapien
cagtgttactcccttgtaccgacat

SEQ ID NO: 508932 - DNA, 25 bp, Homo sapien
ctaggccaccctcagtgttactccc

SEQ ID NO: 508933 - DNA, 25 bp, Homo sapien
tgtctaggccaccctcagtgttact

SEQ ID NO: 508934 - DNA, 25 bp, Homo sapien
tgtgcgctggatgccgacagcacga

SEQ ID NO: 508935 - DNA, 25 bp, Homo sapien
gtgccatctgatagctgttccatag

SEQ ID NO: 508936 - DNA, 25 bp, Homo sapien
tctccagagggagcgccagagatta

SEQ ID NO: 508937 - DNA, 25 bp, Homo sapien
tccatagcgtataggaaaacagctg

SEQ ID NO: 508938 - DNA, 25 bp, Homo sapien
taacatggatatcaccaccatttga

SEQ ID NO: 508939 - DNA, 25 bp, Homo sapien
ggtcgtggaagttgatggcactgcc

SEQ ID NO: 508940 - DNA, 25 bp, Homo sapien
ggatatcaccaccatttgagtgact

SEQ ID NO: 508941 - DNA, 25 bp, Homo sapien
agtgacttttgaggtcgtggaagtt

SEQ ID NO: 508942 - DNA, 25 bp, Homo sapien
ccatgcgttgtctaaggctgcctca

SEQ ID NO: 508943 - DNA, 25 bp, Homo sapien
taagggaggcctaaaatgcgggaca

SEQ ID NO: 508944 - DNA, 25 bp, Homo sapien
cgaatgcaggtgacacatggaagca

SEQ ID NO: 508945 - DNA, 25 bp, Homo sapien
aagtgtccaaggcacctgctagagt

SEQ ID NO: 508946 - DNA, 25 bp, Homo sapien
tatccatatcctacaccattggagt

SEQ ID NO: 508947 - DNA, 25 bp, Homo sapien
tgtgtgtcatatccatatcctacac

SEQ ID NO: 508948 - DNA, 25 bp, Homo sapien
tatcctacaccattggagttcctca

SEQ ID NO: 508949 - DNA, 25 bp, Homo sapien
tacaccattggagttcctcattctc

SEQ ID NO: 508950 - DNA, 25 bp, Homo sapien
tcccagaaggacagggcgttggttc

SEQ ID NO: 508951 - DNA, 25 bp, Homo sapien
catctgggtttctctggaagtgcag

SEQ ID NO: 508952 - DNA, 25 bp, Homo sapien
aaaacaagagcagtagccgtcctgc

SEQ ID NO: 508953 - DNA, 25 bp, Homo sapien
tgagtttctgttcacacctccggcc

SEQ ID NO: 508954 - DNA, 25 bp, Homo sapien
tattgactgagccactcaacaacca

SEQ ID NO: 508955 - DNA, 25 bp, Homo sapien
gatggggatacgttgatctttaagg

SEQ ID NO: 508956 - DNA, 25 bp, Homo sapien
tcaactgtaaaacagcgttgatgac

SEQ ID NO: 508957 - DNA, 25 bp, Homo sapien
caacaaccatttcgtaatatctatg

SEQ ID NO: 508958 - DNA, 25 bp, Homo sapien
aaggctaggcccttgtgcttttagc

SEQ ID NO: 508959 - DNA, 25 bp, Homo sapien
taacaggcctgttgaagattttctt

SEQ ID NO: 508960 - DNA, 25 bp, Homo sapien
tttcttgtcctaactctatgtctac

SEQ ID NO: 508961 - DNA, 25 bp, Homo sapien
ttttagctgccaaacaccgtatact

SEQ ID NO: 508962 - DNA, 25 bp, Homo sapien
agcagttactccaaaccataatccc

SEQ ID NO: 508963 - DNA, 25 bp, Homo sapien
gctcaactacagcagttactccaaa

SEQ ID NO: 508964 - DNA, 25 bp, Homo sapien
atcttctgctcaactacagcagtta

SEQ ID NO: 508965 - DNA, 25 bp, Homo sapien
tgtcttcaaatccacattctcaatg

SEQ ID NO: 508966 - DNA, 25 bp, Homo sapien
gttcagctgcgtgcattttcacagg

SEQ ID NO: 508967 - DNA, 25 bp, Homo sapien
cagcccgctgcagaatcttgtcgat

SEQ ID NO: 508968 - DNA, 25 bp, Homo sapien
caggcgagtcaacctttagcctcac

SEQ ID NO: 508969 - DNA, 25 bp, Homo sapien
caggttgctgtcttgcaggcgagtc

SEQ ID NO: 508970 - DNA, 25 bp, Homo sapien
cagggagttggtttcccgtaggcag

SEQ ID NO: 508971 - DNA, 25 bp, Homo sapien
tgtttccagtcagtgggcagggagt

SEQ ID NO: 508972 - DNA, 25 bp, Homo sapien
tcacactatggaattgcaacaattt

SEQ ID NO: 508973 - DNA, 25 bp, Homo sapien
gcaacaatttgcagagatgacagaa

SEQ ID NO: 508974 - DNA, 25 bp, Homo sapien
aacacccacatttggtatcactgca

SEQ ID NO: 508975 - DNA, 25 bp, Homo sapien
ttttacattgccgaagatggctttg

SEQ ID NO: 508976 - DNA, 25 bp, Homo sapien
aagcagaacacccacatttggtatc

SEQ ID NO: 508977 - DNA, 25 bp, Homo sapien
tgttttggcttcaattcagtgcttt

SEQ ID NO: 508978 - DNA, 25 bp, Homo sapien
catcttctccccgtcagttggaaag

SEQ ID NO: 508979 - DNA, 25 bp, Homo sapien
cccgtcagttggaaagtggccccag

SEQ ID NO: 508980 - DNA, 25 bp, Homo sapien
gagaaaacaactggtaagttctaca

SEQ ID NO: 508981 - DNA, 25 bp, Homo sapien
tggtaagttctacaaacccacatct

SEQ ID NO: 508982 - DNA, 25 bp, Homo sapien
gggaagtcaccggacgtccagcacg

SEQ ID NO: 508983 - DNA, 25 bp, Homo sapien
ctgaggatgctgaagagacaaatat

SEQ ID NO: 508984 - DNA, 25 bp, Homo sapien
ccatcgtaaatgtgcgtgaccatgt

SEQ ID NO: 508985 - DNA, 25 bp, Homo sapien
gatgggatgcccgttgccatagtga

SEQ ID NO: 508986 - DNA, 25 bp, Homo sapien
gagggtggcggtgctaaagcactga

SEQ ID NO: 508987 - DNA, 25 bp, Homo sapien
aaaggtggcccacatgagggtggcg

SEQ ID NO: 508988 - DNA, 25 bp, Homo sapien
tggcggtgctaaagcactgaaagtc

SEQ ID NO: 508989 - DNA, 25 bp, Homo sapien
ggaaaggtggcccacatgagggtgg

SEQ ID NO: 508990 - DNA, 25 bp, Homo sapien
ctgtgctctgttgctccacggttct

SEQ ID NO: 508991 - DNA, 25 bp, Homo sapien
tgttgctccacggttctctccagct

SEQ ID NO: 508992 - DNA, 25 bp, Homo sapien
actcccaaaatgctttaaatgactg

SEQ ID NO: 508993 - DNA, 25 bp, Homo sapien
aactcccaaaatgctttaaatgact

SEQ ID NO: 508994 - DNA, 25 bp, Homo sapien
gctccttgcacaacgtggggctttt

SEQ ID NO: 508995 - DNA, 25 bp, Homo sapien
tccttgcacaacgtggggcttttct

SEQ ID NO: 508996 - DNA, 25 bp, Homo sapien
tgctccttgcacaacgtggggcttt

SEQ ID NO: 508997 - DNA, 25 bp, Homo sapien
ttgctccttgcacaacgtggggctt

SEQ ID NO: 508998 - DNA, 25 bp, Homo sapien
ctccagtctcttgggattagccaga

SEQ ID NO: 508999 - DNA, 25 bp, Homo sapien
tctcttgggattagccagagaagaa

SEQ ID NO: 509000 - DNA, 25 bp, Homo sapien
agtctcttgggattagccagagaag

SEQ ID NO: 509001 - DNA, 25 bp, Homo sapien
ccagtctcttgggattagccagaga

SEQ ID NO: 509002 - DNA, 25 bp, Homo sapien
cttgggaggcttaattaaaactgca

SEQ ID NO: 509003 - DNA, 25 bp, Homo sapien
aatatgcttgtgagccttgggaggc

SEQ ID NO: 509004 - DNA, 25 bp, Homo sapien
ggagccaaagtaagcacacaaagga

SEQ ID NO: 509005 - DNA, 25 bp, Homo sapien
taggcttcccgttaccagtgcattg

SEQ ID NO: 509006 - DNA, 25 bp, Homo sapien
cacgttggtcagcactggacacaga

SEQ ID NO: 509007 - DNA, 25 bp, Homo sapien
ggcctgagtgtctgcggaagtcatt

SEQ ID NO: 509008 - DNA, 25 bp, Homo sapien
tcatctgacggccagtccttgctga

SEQ ID NO: 509009 - DNA, 25 bp, Homo sapien
ttcattgtggagacgcagacaggcc

SEQ ID NO: 509010 - DNA, 25 bp, Homo sapien
cacaggaccaggacggaggagtccg

SEQ ID NO: 509011 - DNA, 25 bp, Homo sapien
acaggaccaggacggaggagtccgc

SEQ ID NO: 509012 - DNA, 25 bp, Homo sapien
tctctcacttcaggcacaggaccag

SEQ ID NO: 509013 - DNA, 25 bp, Homo sapien
aggaccaggacggaggagtccgcag

SEQ ID NO: 509014 - DNA, 25 bp, Homo sapien
cagtcctcgagtggcgctggcagtt

SEQ ID NO: 509015 - DNA, 25 bp, Homo sapien
atgccgaacttgactccgccttctg

SEQ ID NO: 509016 - DNA, 25 bp, Homo sapien
tggactcctctgctcttcatgccga

SEQ ID NO: 509017 - DNA, 25 bp, Homo sapien
tcagtcctcgggagcgtgaagggct

SEQ ID NO: 509018 - DNA, 25 bp, Homo sapien
gggtcttccaggtcgaattagcatt

SEQ ID NO: 509019 - DNA, 25 bp, Homo sapien
gaatgcccaaaagagtgactgacag

SEQ ID NO: 509020 - DNA, 25 bp, Homo sapien
tgactgacagggacttttcggtaaa

SEQ ID NO: 509021 - DNA, 25 bp, Homo sapien
ctcatattcagggtatgttcgtgca

SEQ ID NO: 509022 - DNA, 25 bp, Homo sapien
ggggtagcccttctcctgacagcag

SEQ ID NO: 509023 - DNA, 25 bp, Homo sapien
atagcacagctcaacccttccacct

SEQ ID NO: 509024 - DNA, 25 bp, Homo sapien
gcaacctattcccagtataatctgg

SEQ ID NO: 509025 - DNA, 25 bp, Homo sapien
ctgggacttctatagcacagctcaa

SEQ ID NO: 509026 - DNA, 25 bp, Homo sapien
agaagagccccagcaaggattgagg

SEQ ID NO: 509027 - DNA, 25 bp, Homo sapien
aagagccccagcaaggattgaggct

SEQ ID NO: 509028 - DNA, 25 bp, Homo sapien
gaagagccccagcaaggattgaggc

SEQ ID NO: 509029 - DNA, 25 bp, Homo sapien
ggaaataaaagtcgcgtatctcagg

SEQ ID NO: 509030 - DNA, 25 bp, Homo sapien
ttggaaataaaagtcgcgtatctca

SEQ ID NO: 509031 - DNA, 25 bp, Homo sapien
ctcaggggcgatatactgtttctct

SEQ ID NO: 509032 - DNA, 25 bp, Homo sapien
aaagtcgcgtatctcaggggcgata

SEQ ID NO: 509033 - DNA, 25 bp, Homo sapien
gtacctgactgtgaataaacagtgg

SEQ ID NO: 509034 - DNA, 25 bp, Homo sapien
aaggggcagttggatctgtacctga

SEQ ID NO: 509035 - DNA, 25 bp, Homo sapien
tgtgaataaacagtggaggtaactc

SEQ ID NO: 509036 - DNA, 25 bp, Homo sapien
gtggaggtaactcgctgcctccaga

SEQ ID NO: 509037 - DNA, 25 bp, Homo sapien
ctggtgttgctgggccaaccagcat

SEQ ID NO: 509038 - DNA, 25 bp, Homo sapien
cactggtgttgctgggccaaccagc

SEQ ID NO: 509039 - DNA, 25 bp, Homo sapien
actggtgttgctgggccaaccagca

SEQ ID NO: 509040 - DNA, 25 bp, Homo sapien
cttgaggactcaactctctggctgc

SEQ ID NO: 509041 - DNA, 25 bp, Homo sapien
ggactcaactctctggctgcaggtg

SEQ ID NO: 509042 - DNA, 25 bp, Homo sapien
tgaggactcaactctctggctgcag

SEQ ID NO: 509043 - DNA, 25 bp, Homo sapien
gaggactcaactctctggctgcagg

SEQ ID NO: 509044 - DNA, 25 bp, Homo sapien
ggagagagagttgagttttgccaaa

SEQ ID NO: 509045 - DNA, 25 bp, Homo sapien
ggaaggagcaggctgatccaatccc

SEQ ID NO: 509046 - DNA, 25 bp, Homo sapien
gagagagagttgagttttgccaaaa

SEQ ID NO: 509047 - DNA, 25 bp, Homo sapien
ggagcaggctgatccaatccctttc

SEQ ID NO: 509048 - DNA, 25 bp, Homo sapien
catctaggggtgacaccttcaagtt

SEQ ID NO: 509049 - DNA, 25 bp, Homo sapien
caaccaccatgacagatcctctatg

SEQ ID NO: 509050 - DNA, 25 bp, Homo sapien
tcctctatgagatgttatcacagaa

SEQ ID NO: 509051 - DNA, 25 bp, Homo sapien
taattttgaagcttgggccagtggt

SEQ ID NO: 509052 - DNA, 25 bp, Homo sapien
taagacaacatcctgttcggaaggg

SEQ ID NO: 509053 - DNA, 25 bp, Homo sapien
caagtagcgatgacatgggtcctgg

SEQ ID NO: 509054 - DNA, 25 bp, Homo sapien
ggtgactccaacagctctctttagg

SEQ ID NO: 509055 - DNA, 25 bp, Homo sapien
tactcctcagtgaagcagtgttggt

SEQ ID NO: 509056 - DNA, 25 bp, Homo sapien
tcacgctaaagagggagggaggaaa

SEQ ID NO: 509057 - DNA, 25 bp, Homo sapien
ctttgagtgactgggctgctcggcc

SEQ ID NO: 509058 - DNA, 25 bp, Homo sapien
tgcagcactcaggatacttccgggc

SEQ ID NO: 509059 - DNA, 25 bp, Homo sapien
caagaaatgctgtagaggtagaccc

SEQ ID NO: 509060 - DNA, 25 bp, Homo sapien
tcgtgaaccccacccagtctttgag

SEQ ID NO: 509061 - DNA, 25 bp, Homo sapien
gctgttaaccgcacaggaaactctg

SEQ ID NO: 509062 - DNA, 25 bp, Homo sapien
gtatctctctagctgttaaccgcac

SEQ ID NO: 509063 - DNA, 25 bp, Homo sapien
gctgatttgtgtatctctctagctg

SEQ ID NO: 509064 - DNA, 25 bp, Homo sapien
tctagctgttaaccgcacaggaaac

SEQ ID NO: 509065 - DNA, 25 bp, Homo sapien
agtgctttccctgggtgtagcttac

SEQ ID NO: 509066 - DNA, 25 bp, Homo sapien
ccaggaaggcagtggattatcttcc

SEQ ID NO: 509067 - DNA, 25 bp, Homo sapien
cattgtcaagggtaaacagacccgg

SEQ ID NO: 509068 - DNA, 25 bp, Homo sapien
attctccattgtcaagggtaaacag

SEQ ID NO: 509069 - DNA, 25 bp, Homo sapien
cgcctcgtctcccttcggttttgtg

SEQ ID NO: 509070 - DNA, 25 bp, Homo sapien
gtgaaggtagctgtgtggctggtct

SEQ ID NO: 509071 - DNA, 25 bp, Homo sapien
gtgactttggtgaaggtagctgtgt

SEQ ID NO: 509072 - DNA, 25 bp, Homo sapien
tcttaaaccttctggcgagccgtcg

SEQ ID NO: 509073 - DNA, 25 bp, Homo sapien
gaattcaggagggaaacctgactct

SEQ ID NO: 509074 - DNA, 25 bp, Homo sapien
caggagggaaacctgactcttgctc

SEQ ID NO: 509075 - DNA, 25 bp, Homo sapien
ctgactcttgctctgcggcttccat

SEQ ID NO: 509076 - DNA, 25 bp, Homo sapien
gactcttgctctgcggcttccattt

SEQ ID NO: 509077 - DNA, 25 bp, Homo sapien
gtgaagctgcgtgcaaaatccaagg

SEQ ID NO: 509078 - DNA, 25 bp, Homo sapien
cttctagcatggtctgatgaaaagg

SEQ ID NO: 509079 - DNA, 25 bp, Homo sapien
gaattgtagttgcatgttgttgtct

SEQ ID NO: 509080 - DNA, 25 bp, Homo sapien
gatgaaaagggtcacagtctgctgt

SEQ ID NO: 509081 - DNA, 25 bp, Homo sapien
gcacagtgcttttcacatgacgcag

SEQ ID NO: 509082 - DNA, 25 bp, Homo sapien
catgttcccaatttatgcacagtgc

SEQ ID NO: 509083 - DNA, 25 bp, Homo sapien
aaaactgaagactcgcctgtgacaa

SEQ ID NO: 509084 - DNA, 25 bp, Homo sapien
tgacgcagaagattgcagacacgaa

SEQ ID NO: 509085 - DNA, 25 bp, Homo sapien
gtaaatcttttcactgactgtgagg

SEQ ID NO: 509086 - DNA, 25 bp, Homo sapien
aactcatagcccaaatgtttgttgg

SEQ ID NO: 509087 - DNA, 25 bp, Homo sapien
gatgatctagagataggccaagtaa

SEQ ID NO: 509088 - DNA, 25 bp, Homo sapien
gcagcctcccatcattggttgccgt

SEQ ID NO: 509089 - DNA, 25 bp, Homo sapien
aacaagcaacaatgcagccagtcat

SEQ ID NO: 509090 - DNA, 25 bp, Homo sapien
gaggcttttcaataagagctgttct

SEQ ID NO: 509091 - DNA, 25 bp, Homo sapien
acaagcaacaatgcagccagtcatc

SEQ ID NO: 509092 - DNA, 25 bp, Homo sapien
aggtgaggcttttcaataagagctg

SEQ ID NO: 509093 - DNA, 25 bp, Homo sapien
gggaaggtttagcagctgttccacc

SEQ ID NO: 509094 - DNA, 25 bp, Homo sapien
ggaaggtttagcagctgttccacct

SEQ ID NO: 509095 - DNA, 25 bp, Homo sapien
tgggaaggtttagcagctgttccac

SEQ ID NO: 509096 - DNA, 25 bp, Homo sapien
agaaagggtttgccagaaatactgg

SEQ ID NO: 509097 - DNA, 25 bp, Homo sapien
tctgtccatgtgctgatcagtttta

SEQ ID NO: 509098 - DNA, 25 bp, Homo sapien
cattgtctgtccatgtgctgatcag

SEQ ID NO: 509099 - DNA, 25 bp, Homo sapien
tgtctgtccatgtgctgatcagttt

SEQ ID NO: 509100 - DNA, 25 bp, Homo sapien
ggcattgtctgtccatgtgctgatc

SEQ ID NO: 509101 - DNA, 25 bp, Homo sapien
tgaaacacttgcatgtccaggtcca

SEQ ID NO: 509102 - DNA, 25 bp, Homo sapien
gaaacacttgcatgtccaggtccag

SEQ ID NO: 509103 - DNA, 25 bp, Homo sapien
ctgaaacacttgcatgtccaggtcc

SEQ ID NO: 509104 - DNA, 25 bp, Homo sapien
cctgcagcatcacgtggctcagatg

SEQ ID NO: 509105 - DNA, 25 bp, Homo sapien
tcttcgctgtgagtgcgaagacgct

SEQ ID NO: 509106 - DNA, 25 bp, Homo sapien
gtgcgaagacgctgggcaccagcac

SEQ ID NO: 509107 - DNA, 25 bp, Homo sapien
tgcagcatcacgtggctcagatggc

SEQ ID NO: 509108 - DNA, 25 bp, Homo sapien
tctttccttcctcctcacttccacc

SEQ ID NO: 509109 - DNA, 25 bp, Homo sapien
tttccttcctcctcacttccaccta

SEQ ID NO: 509110 - DNA, 25 bp, Homo sapien
ttctttccttcctcctcacttccac

SEQ ID NO: 509111 - DNA, 25 bp, Homo sapien
ttccttcctcctcacttccacctac

SEQ ID NO: 509112 - DNA, 25 bp, Homo sapien
aacaccttctctaggatttgtcagc

SEQ ID NO: 509113 - DNA, 25 bp, Homo sapien
acctttcatagcaatagttcccagc

SEQ ID NO: 509114 - DNA, 25 bp, Homo sapien
ggacttgtatgagcttgggtttcac

SEQ ID NO: 509115 - DNA, 25 bp, Homo sapien
tatctctgggtgaagtaatgtctac

SEQ ID NO: 509116 - DNA, 25 bp, Homo sapien
gaaaacaagcgagtggagaaagaca

SEQ ID NO: 509117 - DNA, 25 bp, Homo sapien
catggacaagtagcagcaagcaagg

SEQ ID NO: 509118 - DNA, 25 bp, Homo sapien
tcacatggacaagtagcagcaagca

SEQ ID NO: 509119 - DNA, 25 bp, Homo sapien
atgaaaacaagcgagtggagaaaga

SEQ ID NO: 509120 - DNA, 25 bp, Homo sapien
tcagatacagatgcgaaaaattcct

SEQ ID NO: 509121 - DNA, 25 bp, Homo sapien
agatacagatgcgaaaaattccttc

SEQ ID NO: 509122 - DNA, 25 bp, Homo sapien
cagatacagatgcgaaaaattcctt

SEQ ID NO: 509123 - DNA, 25 bp, Homo sapien
actggactaggttgcatacgctggc

SEQ ID NO: 509124 - DNA, 25 bp, Homo sapien
tgtataatatttagccagggccaac

SEQ ID NO: 509125 - DNA, 25 bp, Homo sapien
aaattggtttctaggaggagcagct

SEQ ID NO: 509126 - DNA, 25 bp, Homo sapien
taaactggcagaatccactcaggcc

SEQ ID NO: 509127 - DNA, 25 bp, Homo sapien
ccagtcctgtgttgagtctctcttc

SEQ ID NO: 509128 - DNA, 25 bp, Homo sapien
ctgctgtgtacagacagcccagtcc

SEQ ID NO: 509129 - DNA, 25 bp, Homo sapien
ccttggtctactgctgtgtacagac

SEQ ID NO: 509130 - DNA, 25 bp, Homo sapien
tctactgctgtgtacagacagccca

SEQ ID NO: 509131 - DNA, 25 bp, Homo sapien
tatcaggtcgagtcaaaacatggca

SEQ ID NO: 509132 - DNA, 25 bp, Homo sapien
tgcaaaacactgctataggataagg

SEQ ID NO: 509133 - DNA, 25 bp, Homo sapien
tgcccagggtcatcgtctcaaagta

SEQ ID NO: 509134 - DNA, 25 bp, Homo sapien
gaaatggtggctaagcagagcctga

SEQ ID NO: 509135 - DNA, 25 bp, Homo sapien
tcccaagttgtccatcagtacattc

SEQ ID NO: 509136 - DNA, 25 bp, Homo sapien
ccaagttgtccatcagtacattccc

SEQ ID NO: 509137 - DNA, 25 bp, Homo sapien
aagttgtccatcagtacattcccct

SEQ ID NO: 509138 - DNA, 25 bp, Homo sapien
gttgtccatcagtacattccccttc

SEQ ID NO: 509139 - DNA, 25 bp, Homo sapien
tcatttaatgcccagtctgtaacta

SEQ ID NO: 509140 - DNA, 25 bp, Homo sapien
gcccagtctgtaactaatgttctgt

SEQ ID NO: 509141 - DNA, 25 bp, Homo sapien
ctcttaatttgttggctatgagtga

SEQ ID NO: 509142 - DNA, 25 bp, Homo sapien
ctatgagtgatttgtgaatctggga

SEQ ID NO: 509143 - DNA, 25 bp, Homo sapien
gccgcaccccgtgtataatccagtg

SEQ ID NO: 509144 - DNA, 25 bp, Homo sapien
gctctcaagattagcccataggcag

SEQ ID NO: 509145 - DNA, 25 bp, Homo sapien
gacaatctcgggctctagttgcctt

SEQ ID NO: 509146 - DNA, 25 bp, Homo sapien
caggctggcgcattttcaagtgaca

SEQ ID NO: 509147 - DNA, 25 bp, Homo sapien
tagaagaccataccatacagcgatt

SEQ ID NO: 509148 - DNA, 25 bp, Homo sapien
tcaagggcacttcggactcaagcat

SEQ ID NO: 509149 - DNA, 25 bp, Homo sapien
tgtgcggacttccacctcgagaatc

SEQ ID NO: 509150 - DNA, 25 bp, Homo sapien
taaataccaccgacatgtgcggact

SEQ ID NO: 509151 - DNA, 25 bp, Homo sapien
ctgcaggccgtccatgaaaggtggc

SEQ ID NO: 509152 - DNA, 25 bp, Homo sapien
caccgctgggtacatcttctgttca

SEQ ID NO: 509153 - DNA, 25 bp, Homo sapien
gggggactgaatctgcctgtagcca

SEQ ID NO: 509154 - DNA, 25 bp, Homo sapien
agagtcgtgctgcaccgtgtacccc

SEQ ID NO: 509155 - DNA, 25 bp, Homo sapien
tgataaaggcgacaaacacggagcc

SEQ ID NO: 509156 - DNA, 25 bp, Homo sapien
ccagggaccccaagatgataaaggc

SEQ ID NO: 509157 - DNA, 25 bp, Homo sapien
ccaacaatgaggaacggcacgtaga

SEQ ID NO: 509158 - DNA, 25 bp, Homo sapien
cacaatctgggtggcctgctgacag

SEQ ID NO: 509159 - DNA, 25 bp, Homo sapien
gatctactctaggaacacagtacca

SEQ ID NO: 509160 - DNA, 25 bp, Homo sapien
ggacagaaacacaacattatgatct

SEQ ID NO: 509161 - DNA, 25 bp, Homo sapien
caacattatgatctactctaggaac

SEQ ID NO: 509162 - DNA, 25 bp, Homo sapien
ctaggaacacagtaccaatcgccaa

SEQ ID NO: 509163 - DNA, 25 bp, Homo sapien
gcagcagatggtggcgtcgccgccg

SEQ ID NO: 509164 - DNA, 25 bp, Homo sapien
tgctggcggtcattgtcgcagccgc

SEQ ID NO: 509165 - DNA, 25 bp, Homo sapien
gcagcagtagcgcaacgcgcagctg

SEQ ID NO: 509166 - DNA, 25 bp, Homo sapien
actggaagccgatgcgccagacgcc

SEQ ID NO: 509167 - DNA, 25 bp, Homo sapien
aggatgaggagacggacgagcggcg

SEQ ID NO: 509168 - DNA, 25 bp, Homo sapien
gaagcggcgttccaggatgaggaga

SEQ ID NO: 509169 - DNA, 25 bp, Homo sapien
cggacgagcggcgagcgccccacat

SEQ ID NO: 509170 - DNA, 25 bp, Homo sapien
gagcgaagcggcgttccaggatgag

SEQ ID NO: 509171 - DNA, 25 bp, Homo sapien
tccgagaagtcgtggccccggcgac

SEQ ID NO: 509172 - DNA, 25 bp, Homo sapien
gacggtctccgagaagtcgtggccc

SEQ ID NO: 509173 - DNA, 25 bp, Homo sapien
ccagagagcgcaggacggtctccga

SEQ ID NO: 509174 - DNA, 25 bp, Homo sapien
gacagcgcgtctccagagagcgcag

SEQ ID NO: 509175 - DNA, 25 bp, Homo sapien
taagccatccccgtcctcagccggt

SEQ ID NO: 509176 - DNA, 25 bp, Homo sapien
cttatgagttgcactcgctgatgga

SEQ ID NO: 509177 - DNA, 25 bp, Homo sapien
taggtccaggagctcctaagccatc

SEQ ID NO: 509178 - DNA, 25 bp, Homo sapien
tgccgcgacgcccaggaggcgacga

SEQ ID NO: 509179 - DNA, 25 bp, Homo sapien
aagcctctggaggtttcactggcaa

SEQ ID NO: 509180 - DNA, 25 bp, Homo sapien
tggaggtttcactggcaaccggacc

SEQ ID NO: 509181 - DNA, 25 bp, Homo sapien
cctctggaggtttcactggcaaccg

SEQ ID NO: 509182 - DNA, 25 bp, Homo sapien
tctggaggtttcactggcaaccgga

SEQ ID NO: 509183 - DNA, 25 bp, Homo sapien
gcgccgccgcggacctggagccagg

SEQ ID NO: 509184 - DNA, 25 bp, Homo sapien
cagggctctgcgcagggtttaagcc

SEQ ID NO: 509185 - DNA, 25 bp, Homo sapien
gccgccgcggacctggagccagggc

SEQ ID NO: 509186 - DNA, 25 bp, Homo sapien
cgccgccgcggacctggagccaggg

SEQ ID NO: 509187 - DNA, 25 bp, Homo sapien
gcgcgcgaatcagggcccgtctccc

SEQ ID NO: 509188 - DNA, 25 bp, Homo sapien
tcagggtcccgcgcgcgaatcaggg

SEQ ID NO: 509189 - DNA, 25 bp, Homo sapien
cccgcgcgcgaatcagggcccgtct

SEQ ID NO: 509190 - DNA, 25 bp, Homo sapien
gtcccgcgcgcgaatcagggcccgt

SEQ ID NO: 509191 - DNA, 25 bp, Homo sapien
atcttcccagcacgtcgccgaggga

SEQ ID NO: 509192 - DNA, 25 bp, Homo sapien
cgatggaagcctcccacggaagttt

SEQ ID NO: 509193 - DNA, 25 bp, Homo sapien
tgccccgaacttggtccgcatggct

SEQ ID NO: 509194 - DNA, 25 bp, Homo sapien
tgaccccgggaacgtccaggacgca

SEQ ID NO: 509195 - DNA, 25 bp, Homo sapien
ggagaagccgagcgcagcagccgcc

SEQ ID NO: 509196 - DNA, 25 bp, Homo sapien
tacgggagaagccgagcgcagcagc

SEQ ID NO: 509197 - DNA, 25 bp, Homo sapien
ctacgggagaagccgagcgcagcag

SEQ ID NO: 509198 - DNA, 25 bp, Homo sapien
gaagccgagcgcagcagccgcccac

SEQ ID NO: 509199 - DNA, 25 bp, Homo sapien
gcagatcataaaatcgccactcaga

SEQ ID NO: 509200 - DNA, 25 bp, Homo sapien
caccgatgtttgtggcagggttcac

SEQ ID NO: 509201 - DNA, 25 bp, Homo sapien
caacattcggttcgattctgcaaac

SEQ ID NO: 509202 - DNA, 25 bp, Homo sapien
tctgcaaacttctcaagggattatg

SEQ ID NO: 509203 - DNA, 25 bp, Homo sapien
gctgtgtttggtggactggaggcct

SEQ ID NO: 509204 - DNA, 25 bp, Homo sapien
tgtttggtggactggaggcctccac

SEQ ID NO: 509205 - DNA, 25 bp, Homo sapien
ctagggctgtgtttggtggactgga

SEQ ID NO: 509206 - DNA, 25 bp, Homo sapien
gcctagggctgtgtttggtggactg

SEQ ID NO: 509207 - DNA, 25 bp, Homo sapien
gagttcagcaaagatgtcacacatt

SEQ ID NO: 509208 - DNA, 25 bp, Homo sapien
cacaaggtggaacggagagagttca

SEQ ID NO: 509209 - DNA, 25 bp, Homo sapien
ggtgatttatcggattccagcagga

SEQ ID NO: 509210 - DNA, 25 bp, Homo sapien
cattcggccacggtgtggatgatct

SEQ ID NO: 509211 - DNA, 25 bp, Homo sapien
gctctgtgctgggtactgggactca

SEQ ID NO: 509212 - DNA, 25 bp, Homo sapien
agtgtactgtgctctgtgctgggta

SEQ ID NO: 509213 - DNA, 25 bp, Homo sapien
ctgtgctgggtactgggactcatca

SEQ ID NO: 509214 - DNA, 25 bp, Homo sapien
gtgtactgtgctctgtgctgggtac

SEQ ID NO: 509215 - DNA, 25 bp, Homo sapien
cttttggattagtaagagattttct

SEQ ID NO: 509216 - DNA, 25 bp, Homo sapien
ggctcctcagtcttacttacttgac

SEQ ID NO: 509217 - DNA, 25 bp, Homo sapien
tgttgcacaggctcctcagtcttac

SEQ ID NO: 509218 - DNA, 25 bp, Homo sapien
gcacaggctcctcagtcttacttac

SEQ ID NO: 509219 - DNA, 25 bp, Homo sapien
caggctcctcagtcttacttacttg

SEQ ID NO: 509220 - DNA, 25 bp, Homo sapien
tcaacataacaatagccgtgagcct

SEQ ID NO: 509221 - DNA, 25 bp, Homo sapien
caacataacaatagccgtgagccta

SEQ ID NO: 509222 - DNA, 25 bp, Homo sapien
aacataacaatagccgtgagcctac

SEQ ID NO: 509223 - DNA, 25 bp, Homo sapien
atcaacataacaatagccgtgagcc

SEQ ID NO: 509224 - DNA, 25 bp, Homo sapien
gatggccggatttggtctggaggga

SEQ ID NO: 509225 - DNA, 25 bp, Homo sapien
ttgcgcaccaagacgcatgcgcaca

SEQ ID NO: 509226 - DNA, 25 bp, Homo sapien
aagacgcatgcgcacagtgggcttt

SEQ ID NO: 509227 - DNA, 25 bp, Homo sapien
gcaggatggccggatttggtctgga

SEQ ID NO: 509228 - DNA, 25 bp, Homo sapien
gtgttctggtagtgaaaacaaagcc

SEQ ID NO: 509229 - DNA, 25 bp, Homo sapien
aggatggtgttctggtagtgaaaac

SEQ ID NO: 509230 - DNA, 25 bp, Homo sapien
ttttttgctcctttcgctaaagctg

SEQ ID NO: 509231 - DNA, 25 bp, Homo sapien
agtgtctatggtgacagaggatggt

SEQ ID NO: 509232 - DNA, 25 bp, Homo sapien
tctcttgggaataacagagtggcac

SEQ ID NO: 509233 - DNA, 25 bp, Homo sapien
atctctcttgggaataacagagtgg

SEQ ID NO: 509234 - DNA, 25 bp, Homo sapien
tcttgggaataacagagtggcacac

SEQ ID NO: 509235 - DNA, 25 bp, Homo sapien
ttgggaataacagagtggcacacag

SEQ ID NO: 509236 - DNA, 25 bp, Homo sapien
cgttcagtgaaattgctggcaactt

SEQ ID NO: 509237 - DNA, 25 bp, Homo sapien
gaaattgctggcaacttacacggaa

SEQ ID NO: 509238 - DNA, 25 bp, Homo sapien
gtgaaattgctggcaacttacacgg

SEQ ID NO: 509239 - DNA, 25 bp, Homo sapien
aaattgctggcaacttacacggaat

SEQ ID NO: 509240 - DNA, 25 bp, Homo sapien
tgcacttctcaaggatggcctcagc

SEQ ID NO: 509241 - DNA, 25 bp, Homo sapien
gaaatttctttcaagagatctgggt

SEQ ID NO: 509242 - DNA, 25 bp, Homo sapien
ccaccaggctgttcatggacgtggg

SEQ ID NO: 509243 - DNA, 25 bp, Homo sapien
gcttggaggttagagaggtgcttag

SEQ ID NO: 509244 - DNA, 25 bp, Homo sapien
tgggagcgttccaggactccacaga

SEQ ID NO: 509245 - DNA, 25 bp, Homo sapien
ggagtcagcttcagggacggagagt

SEQ ID NO: 509246 - DNA, 25 bp, Homo sapien
tcaggagtcagcttcagggacggag

SEQ ID NO: 509247 - DNA, 25 bp, Homo sapien
gacggagagtgggagcgttccagga

SEQ ID NO: 509248 - DNA, 25 bp, Homo sapien
gcattgttcagagcaccacgtggag

SEQ ID NO: 509249 - DNA, 25 bp, Homo sapien
ttgttcagagcaccacgtggagaca

SEQ ID NO: 509250 - DNA, 25 bp, Homo sapien
tcagagcaccacgtggagacaaaat

SEQ ID NO: 509251 - DNA, 25 bp, Homo sapien
gagcaccacgtggagacaaaatagc

SEQ ID NO: 509252 - DNA, 25 bp, Homo sapien
ggatctgcaaggaggtcagacctca

SEQ ID NO: 509253 - DNA, 25 bp, Homo sapien
gaaaaagatagtcatggcaatcagg

SEQ ID NO: 509254 - DNA, 25 bp, Homo sapien
caggacatcatagctgcgagcctgg

SEQ ID NO: 509255 - DNA, 25 bp, Homo sapien
cactggctcgttgtgagcgttgaaa

SEQ ID NO: 509256 - DNA, 25 bp, Homo sapien
tcagtcctgataccttgaactttgc

SEQ ID NO: 509257 - DNA, 25 bp, Homo sapien
ccttgtctataaaaggtcttctggt

SEQ ID NO: 509258 - DNA, 25 bp, Homo sapien
catgaatggccaccttgatgccttg

SEQ ID NO: 509259 - DNA, 25 bp, Homo sapien
gattgcatgaatggccaccttgatg

SEQ ID NO: 509260 - DNA, 25 bp, Homo sapien
ggaatcaaagatatcatttctcttg

SEQ ID NO: 509261 - DNA, 25 bp, Homo sapien
tagggaatcaaagatatcatttctc

SEQ ID NO: 509262 - DNA, 25 bp, Homo sapien
tgtagggaatcaaagatatcatttc

SEQ ID NO: 509263 - DNA, 25 bp, Homo sapien
ttgtagggaatcaaagatatcattt

SEQ ID NO: 509264 - DNA, 25 bp, Homo sapien
tgggaagaggacctctagcttctcc

SEQ ID NO: 509265 - DNA, 25 bp, Homo sapien
tttaaggtccatgttgacacaatcc

SEQ ID NO: 509266 - DNA, 25 bp, Homo sapien
ccaattttaaggtccatgttgacac

SEQ ID NO: 509267 - DNA, 25 bp, Homo sapien
tgcctttccaattttaaggtccatg

SEQ ID NO: 509268 - DNA, 25 bp, Homo sapien
ctttccaattttaaggtccatgttg

SEQ ID NO: 509269 - DNA, 25 bp, Homo sapien
agggtagctcgacaggcctgcaggt

SEQ ID NO: 509270 - DNA, 25 bp, Homo sapien
tgtgcagggtagctcgacaggcctg

SEQ ID NO: 509271 - DNA, 25 bp, Homo sapien
ggtagctcgacaggcctgcaggtag

SEQ ID NO: 509272 - DNA, 25 bp, Homo sapien
tgcagggtagctcgacaggcctgca

SEQ ID NO: 509273 - DNA, 25 bp, Homo sapien
tggggtcgttaaattcacaggatgc

SEQ ID NO: 509274 - DNA, 25 bp, Homo sapien
agagagaactctggtattatatgtc

SEQ ID NO: 509275 - DNA, 25 bp, Homo sapien
agagaactctggtattatatgtcaa

SEQ ID NO: 509276 - DNA, 25 bp, Homo sapien
agaactctggtattatatgtcaata

SEQ ID NO: 509277 - DNA, 25 bp, Homo sapien
gagagaactctggtattatatgtca

SEQ ID NO: 509278 - DNA, 25 bp, Homo sapien
gatacacttcttatatgtcataata

SEQ ID NO: 509279 - DNA, 25 bp, Homo sapien
aatgatacacttcttatatgtcata

SEQ ID NO: 509280 - DNA, 25 bp, Homo sapien
gcaatgatacacttcttatatgtca

SEQ ID NO: 509281 - DNA, 25 bp, Homo sapien
tgcaatgatacacttcttatatgtc

SEQ ID NO: 509282 - DNA, 25 bp, Homo sapien
cacttacctaaagaggctagggtca

SEQ ID NO: 509283 - DNA, 25 bp, Homo sapien
ctaggcagcgtgaatgaagtgatcc

SEQ ID NO: 509284 - DNA, 25 bp, Homo sapien
catctagcataaggcctcaaggttc

SEQ ID NO: 509285 - DNA, 25 bp, Homo sapien
gctagggtcacttgactaggcagcg

SEQ ID NO: 509286 - DNA, 25 bp, Homo sapien
tcttcattgagattgaatgttctgg

SEQ ID NO: 509287 - DNA, 25 bp, Homo sapien
cattgagattgaatgttctggccat

SEQ ID NO: 509288 - DNA, 25 bp, Homo sapien
gcccaagttcttcattgagattgaa

SEQ ID NO: 509289 - DNA, 25 bp, Homo sapien
ctgcccaagttcttcattgagattg

SEQ ID NO: 509290 - DNA, 25 bp, Homo sapien
ggcacagatattattgattttataa

SEQ ID NO: 509291 - DNA, 25 bp, Homo sapien
tgattttataatgcatatcttcatc

SEQ ID NO: 509292 - DNA, 25 bp, Homo sapien
tattgattttataatgcatatcttc

SEQ ID NO: 509293 - DNA, 25 bp, Homo sapien
tattattgattttataatgcatatc

SEQ ID NO: 509294 - DNA, 25 bp, Homo sapien
tagtgaccagcatagggatgaggtt

SEQ ID NO: 509295 - DNA, 25 bp, Homo sapien
catagtgaccagcatagggatgagg

SEQ ID NO: 509296 - DNA, 25 bp, Homo sapien
ccatagtgaccagcatagggatgag

SEQ ID NO: 509297 - DNA, 25 bp, Homo sapien
gtgaccagcatagggatgaggttct

SEQ ID NO: 509298 - DNA, 25 bp, Homo sapien
ccctcagggaacttagcgtgaagct

SEQ ID NO: 509299 - DNA, 25 bp, Homo sapien
tatgacgaattccagagtggcactg

SEQ ID NO: 509300 - DNA, 25 bp, Homo sapien
cagccatgtaataaggagtatggga

SEQ ID NO: 509301 - DNA, 25 bp, Homo sapien
acttagcgtgaagcttgggaaagtc

SEQ ID NO: 509302 - DNA, 25 bp, Homo sapien
gcacagggacaacagcacaaagtag

SEQ ID NO: 509303 - DNA, 25 bp, Homo sapien
gggacaacagcacaaagtagggggc

SEQ ID NO: 509304 - DNA, 25 bp, Homo sapien
ctgagcacagggacaacagcacaaa

SEQ ID NO: 509305 - DNA, 25 bp, Homo sapien
acagggacaacagcacaaagtaggg

SEQ ID NO: 509306 - DNA, 25 bp, Homo sapien
tgtcctgaggggtgatcaaaagaaa

SEQ ID NO: 509307 - DNA, 25 bp, Homo sapien
tgatcaaaagaaagatagcaataga

SEQ ID NO: 509308 - DNA, 25 bp, Homo sapien
aaacaagacttagttgagattctct

SEQ ID NO: 509309 - DNA, 25 bp, Homo sapien
gggtgatcaaaagaaagatagcaat

SEQ ID NO: 509310 - DNA, 25 bp, Homo sapien
tccaagctgtgtacctctaaacaag

SEQ ID NO: 509311 - DNA, 25 bp, Homo sapien
gtacctctaaacaagacctgatcag

SEQ ID NO: 509312 - DNA, 25 bp, Homo sapien
gctacaccaatgatccactgagtat

SEQ ID NO: 509313 - DNA, 25 bp, Homo sapien
tccagtctaaacagctacaccaatg

SEQ ID NO: 509314 - DNA, 25 bp, Homo sapien
catagatgcttcagggtatttcaaa

SEQ ID NO: 509315 - DNA, 25 bp, Homo sapien
caataaattacaattccatagatgc

SEQ ID NO: 509316 - DNA, 25 bp, Homo sapien
ttacaattccatagatgcttcaggg

SEQ ID NO: 509317 - DNA, 25 bp, Homo sapien
caaatgttgtcatattctatgttcc

SEQ ID NO: 509318 - DNA, 25 bp, Homo sapien
gatagacttaacaactggttttctg

SEQ ID NO: 509319 - DNA, 25 bp, Homo sapien
gctccaggttccagcgaagctattg

SEQ ID NO: 509320 - DNA, 25 bp, Homo sapien
ggtgcttcacagtctatttttccag

SEQ ID NO: 509321 - DNA, 25 bp, Homo sapien
aatgaagatgaggtgcttcacagtc

SEQ ID NO: 509322 - DNA, 25 bp, Homo sapien
caaccaccccttgcaatctagccat

SEQ ID NO: 509323 - DNA, 25 bp, Homo sapien
agttcatttgcaaccaccccttgca

SEQ ID NO: 509324 - DNA, 25 bp, Homo sapien
tgcaaccaccccttgcaatctagcc

SEQ ID NO: 509325 - DNA, 25 bp, Homo sapien
tttgcaaccaccccttgcaatctag

SEQ ID NO: 509326 - DNA, 25 bp, Homo sapien
attagctgttgctatataacacatc

SEQ ID NO: 509327 - DNA, 25 bp, Homo sapien
gattagctgttgctatataacacat

SEQ ID NO: 509328 - DNA, 25 bp, Homo sapien
catgagcctgtaatgaacctgacct

SEQ ID NO: 509329 - DNA, 25 bp, Homo sapien
tttgactgatacgtaactattggca

SEQ ID NO: 509330 - DNA, 25 bp, Homo sapien
tttcactttttgactgatacgtaac

SEQ ID NO: 509331 - DNA, 25 bp, Homo sapien
gtaatgaacctgaccttatttcact

SEQ ID NO: 509332 - DNA, 25 bp, Homo sapien
aatatttatggagatttatcaaaga

SEQ ID NO: 509333 - DNA, 25 bp, Homo sapien
ggaaatatttatggagatttatcaa

SEQ ID NO: 509334 - DNA, 25 bp, Homo sapien
tttatggagatttatcaaagaacta

SEQ ID NO: 509335 - DNA, 25 bp, Homo sapien
aataaaactaccattcaacccagca

SEQ ID NO: 509336 - DNA, 25 bp, Homo sapien
ttggcccaattgtgtatataccact

SEQ ID NO: 509337 - DNA, 25 bp, Homo sapien
ttttaactattttgtctgccatatg

SEQ ID NO: 509338 - DNA, 25 bp, Homo sapien
ttaactattttgtctgccatatgtg

SEQ ID NO: 509339 - DNA, 25 bp, Homo sapien
aactattttgtctgccatatgtggt

SEQ ID NO: 509340 - DNA, 25 bp, Homo sapien
tgttttttaactattttgtctgcca

SEQ ID NO: 509341 - DNA, 25 bp, Homo sapien
aaaatcatcaaaggtaagagagtta

SEQ ID NO: 509342 - DNA, 25 bp, Homo sapien
tcaatgcctgaaatcgtaagaaaaa

SEQ ID NO: 509343 - DNA, 25 bp, Homo sapien
ttctataacctcttcaatgcctgaa

SEQ ID NO: 509344 - DNA, 25 bp, Homo sapien
gcctgaaatcgtaagaaaaatcatc

SEQ ID NO: 509345 - DNA, 25 bp, Homo sapien
ctgcaggtacaaaaatcgagggaga

SEQ ID NO: 509346 - DNA, 25 bp, Homo sapien
aagcactggcagctttggtaaactg

SEQ ID NO: 509347 - DNA, 25 bp, Homo sapien
caggtacaaaaatcgagggagaaat

SEQ ID NO: 509348 - DNA, 25 bp, Homo sapien
cagctttggtaaactgcaggtacaa

SEQ ID NO: 509349 - DNA, 25 bp, Homo sapien
ggaaggcccgtgtccctgattctgc

SEQ ID NO: 509350 - DNA, 25 bp, Homo sapien
ctgctggacgggcaataggtctgaa

SEQ ID NO: 509351 - DNA, 25 bp, Homo sapien
aagggatgccatccaactgttgctc

SEQ ID NO: 509352 - DNA, 25 bp, Homo sapien
tctgaaaggcaagccagagcctgca

SEQ ID NO: 509353 - DNA, 25 bp, Homo sapien
aacaaccttgtcagtaggggaatag

SEQ ID NO: 509354 - DNA, 25 bp, Homo sapien
accttgtcagtaggggaatagacag

SEQ ID NO: 509355 - DNA, 25 bp, Homo sapien
gtcagtaggggaatagacagaaagc

SEQ ID NO: 509356 - DNA, 25 bp, Homo sapien
tcagtaggggaatagacagaaagcc

SEQ ID NO: 509357 - DNA, 25 bp, Homo sapien
gcatagttcatagccagctcatcct

SEQ ID NO: 509358 - DNA, 25 bp, Homo sapien
atgcccaagggcaaatgagtagatc

SEQ ID NO: 509359 - DNA, 25 bp, Homo sapien
tttctaaatgcccaagggcaaatga

SEQ ID NO: 509360 - DNA, 25 bp, Homo sapien
cttttggctcttttaagccttgcat

SEQ ID NO: 509361 - DNA, 25 bp, Homo sapien
ctgtctttggcgtcctggttaccat

SEQ ID NO: 509362 - DNA, 25 bp, Homo sapien
cacttcctaaggtaaagcttgtcct

SEQ ID NO: 509363 - DNA, 25 bp, Homo sapien
gattgcacttcctaaggtaaagctt

SEQ ID NO: 509364 - DNA, 25 bp, Homo sapien
aagcttgtcctacctgtctttggcg

SEQ ID NO: 509365 - DNA, 25 bp, Homo sapien
cagatcctgcaaagcgtccagtcac

SEQ ID NO: 509366 - DNA, 25 bp, Homo sapien
tggcaataggccacacatggactat

SEQ ID NO: 509367 - DNA, 25 bp, Homo sapien
gaaatgctccaaatatctgggtggc

SEQ ID NO: 509368 - DNA, 25 bp, Homo sapien
ccaatgtgttgtcagtccagggccc

SEQ ID NO: 509369 - DNA, 25 bp, Homo sapien
cagtcagcggagacgcttcggagca

SEQ ID NO: 509370 - DNA, 25 bp, Homo sapien
aacgcgctcgttgggccgcagagca

SEQ ID NO: 509371 - DNA, 25 bp, Homo sapien
gtaagaccgcgtttctctgcaaggc

SEQ ID NO: 509372 - DNA, 25 bp, Homo sapien
agtcgcgctaccgactggcagtcag

SEQ ID NO: 509373 - DNA, 25 bp, Homo sapien
ttcgctgtgctgaccgtcgatcccg

SEQ ID NO: 509374 - DNA, 25 bp, Homo sapien
gtagcgcgttccttcgctgtgctga

SEQ ID NO: 509375 - DNA, 25 bp, Homo sapien
cttcggccacaggtagcgcgttcct

SEQ ID NO: 509376 - DNA, 25 bp, Homo sapien
cacaggtagcgcgttccttcgctgt

SEQ ID NO: 509377 - DNA, 25 bp, Homo sapien
tagagccttgcttggcctgaggtcc

SEQ ID NO: 509378 - DNA, 25 bp, Homo sapien
gcctctgctcctggctgcgacgtgg

SEQ ID NO: 509379 - DNA, 25 bp, Homo sapien
gcctgaagacggcttgtaccgccac

SEQ ID NO: 509380 - DNA, 25 bp, Homo sapien
tcctgtttctgccatcagtggggcc

SEQ ID NO: 509381 - DNA, 25 bp, Homo sapien
gccagtggattcatgggttcatcat

SEQ ID NO: 509382 - DNA, 25 bp, Homo sapien
ctcaaaggatgcaatggccagtgga

SEQ ID NO: 509383 - DNA, 25 bp, Homo sapien
catcatcagtatcaacattgtgatc

SEQ ID NO: 509384 - DNA, 25 bp, Homo sapien
gatgcaatggccagtggattcatgg

SEQ ID NO: 509385 - DNA, 25 bp, Homo sapien
ttggtttcatcctttgagagccagt

SEQ ID NO: 509386 - DNA, 25 bp, Homo sapien
tgactgatactcagtgtcccagctg

SEQ ID NO: 509387 - DNA, 25 bp, Homo sapien
catcctttgagagccagttgactga

SEQ ID NO: 509388 - DNA, 25 bp, Homo sapien
aagctgcaaggactaacttcttatt

SEQ ID NO: 509389 - DNA, 25 bp, Homo sapien
gtgccatatgcagtattagcccaaa

SEQ ID NO: 509390 - DNA, 25 bp, Homo sapien
gatttttagcctccaagtgaactta

SEQ ID NO: 509391 - DNA, 25 bp, Homo sapien
cagtatttgagtagatcccatcacc

SEQ ID NO: 509392 - DNA, 25 bp, Homo sapien
tagattgtcagagacgcttcagtaa

SEQ ID NO: 509393 - DNA, 25 bp, Homo sapien
ccattgtttgctatgttagacccta

SEQ ID NO: 509394 - DNA, 25 bp, Homo sapien
tatgttagaccctaaaacaggctgc

SEQ ID NO: 509395 - DNA, 25 bp, Homo sapien
tgctatgttagaccctaaaacaggc

SEQ ID NO: 509396 - DNA, 25 bp, Homo sapien
ttgtttgctatgttagaccctaaaa

SEQ ID NO: 509397 - DNA, 25 bp, Homo sapien
cagttacatagtcactaatacaaac

SEQ ID NO: 509398 - DNA, 25 bp, Homo sapien
tgtttccagttacatagtcactaat

SEQ ID NO: 509399 - DNA, 25 bp, Homo sapien
gtttccagttacatagtcactaata

SEQ ID NO: 509400 - DNA, 25 bp, Homo sapien
ttccagttacatagtcactaataca

SEQ ID NO: 509401 - DNA, 25 bp, Homo sapien
tggttaaaccacgtattcgatcatc

SEQ ID NO: 509402 - DNA, 25 bp, Homo sapien
tgagcaaggcgaagaatgggtagtg

SEQ ID NO: 509403 - DNA, 25 bp, Homo sapien
ccacgtattcgatcatcatcatcac

SEQ ID NO: 509404 - DNA, 25 bp, Homo sapien
ccagtttcaactaaattgtttggat

SEQ ID NO: 509405 - DNA, 25 bp, Homo sapien
tcaccatgcatttcagtgctgtctc

SEQ ID NO: 509406 - DNA, 25 bp, Homo sapien
tgggcctgcctgtcttgagaggaac

SEQ ID NO: 509407 - DNA, 25 bp, Homo sapien
gaggctgggtggtctcgttttcacc

SEQ ID NO: 509408 - DNA, 25 bp, Homo sapien
tcactgtttcgagtatgaggctggg

SEQ ID NO: 509409 - DNA, 25 bp, Homo sapien
cagttctgagtgcatgtctggtaaa

SEQ ID NO: 509410 - DNA, 25 bp, Homo sapien
tgaagttctgactcagaatcggcct

SEQ ID NO: 509411 - DNA, 25 bp, Homo sapien
gaatcggcctccattagagaactca

SEQ ID NO: 509412 - DNA, 25 bp, Homo sapien
tctaaacgagaaatggttcggcgaa

SEQ ID NO: 509413 - DNA, 25 bp, Homo sapien
ctattggaagtagatcgtaatctta

SEQ ID NO: 509414 - DNA, 25 bp, Homo sapien
tcctcactgtaacattacttctagc

SEQ ID NO: 509415 - DNA, 25 bp, Homo sapien
taatcttattggctctaatctttgg

SEQ ID NO: 509416 - DNA, 25 bp, Homo sapien
aacatgtgctgctccaaaccgttgc

SEQ ID NO: 509417 - DNA, 25 bp, Homo sapien
gtggaatgtctgtataatcttctcc

SEQ ID NO: 509418 - DNA, 25 bp, Homo sapien
tgaagcgttagctcgaggaatgcca

SEQ ID NO: 509419 - DNA, 25 bp, Homo sapien
attagtgcgtgaagcgttagctcga

SEQ ID NO: 509420 - DNA, 25 bp, Homo sapien
aagtggaatgtctgtataatcttct

SEQ ID NO: 509421 - DNA, 25 bp, Homo sapien
caaccattctagaagagaatcttca

SEQ ID NO: 509422 - DNA, 25 bp, Homo sapien
agctctccaagtttggttcccattt

SEQ ID NO: 509423 - DNA, 25 bp, Homo sapien
gagttgcatttcctgtgcgccgaaa

SEQ ID NO: 509424 - DNA, 25 bp, Homo sapien
cattttgtccacttcgagttgcatt

SEQ ID NO: 509425 - DNA, 25 bp, Homo sapien
aattcgttccatctctcaagtcagg

SEQ ID NO: 509426 - DNA, 25 bp, Homo sapien
cttgacgccatctaaccgctgttgc

SEQ ID NO: 509427 - DNA, 25 bp, Homo sapien
gctagttgttccttgacgccatcta

SEQ ID NO: 509428 - DNA, 25 bp, Homo sapien
tctgtaattcgttccatctctcaag

SEQ ID NO: 509429 - DNA, 25 bp, Homo sapien
ttgtataatagtgctccatgtcccc

SEQ ID NO: 509430 - DNA, 25 bp, Homo sapien
tcattatatgggtcatcaatataca

SEQ ID NO: 509431 - DNA, 25 bp, Homo sapien
caaataggaccatatatgtaaatac

SEQ ID NO: 509432 - DNA, 25 bp, Homo sapien
attataataccccaaatgagttcaa

SEQ ID NO: 509433 - DNA, 25 bp, Homo sapien
ctgccaccatctgatctcgatctag

SEQ ID NO: 509434 - DNA, 25 bp, Homo sapien
catcattgagttcattaataaactg

SEQ ID NO: 509435 - DNA, 25 bp, Homo sapien
taataaactgataataggcctcttc

SEQ ID NO: 509436 - DNA, 25 bp, Homo sapien
tatggtcttgaggtaaggtttcttc

SEQ ID NO: 509437 - DNA, 25 bp, Homo sapien
gcttttaacatatgccatggtatcc

SEQ ID NO: 509438 - DNA, 25 bp, Homo sapien
ttcctttcaacacgcttttaacata

SEQ ID NO: 509439 - DNA, 25 bp, Homo sapien
acatatgccatggtatccatccttc

SEQ ID NO: 509440 - DNA, 25 bp, Homo sapien
aacacgcttttaacatatgccatgg

SEQ ID NO: 509441 - DNA, 25 bp, Homo sapien
ggattttgttagacacatctagaaa

SEQ ID NO: 509442 - DNA, 25 bp, Homo sapien
aattagatccccatacaattaggtc

SEQ ID NO: 509443 - DNA, 25 bp, Homo sapien
tccccatacaattaggtcacgaaaa

SEQ ID NO: 509444 - DNA, 25 bp, Homo sapien
gacacatctagaaaattagatcccc

SEQ ID NO: 509445 - DNA, 25 bp, Homo sapien
tgggtttacgcctcctctctcaaag

SEQ ID NO: 509446 - DNA, 25 bp, Homo sapien
cattcggatgttaccagggttaggc

SEQ ID NO: 509447 - DNA, 25 bp, Homo sapien
taaagtgggctcaagaggcccaacc

SEQ ID NO: 509448 - DNA, 25 bp, Homo sapien
gggacgatccccactacgataaata

SEQ ID NO: 509449 - DNA, 25 bp, Homo sapien
tcccaaccgagcctcaagtaacgct

SEQ ID NO: 509450 - DNA, 25 bp, Homo sapien
cgagcctcaagtaacgcttccctta

SEQ ID NO: 509451 - DNA, 25 bp, Homo sapien
ctcaagtaacgcttcccttagagac

SEQ ID NO: 509452 - DNA, 25 bp, Homo sapien
agcctcaagtaacgcttcccttaga

SEQ ID NO: 509453 - DNA, 25 bp, Homo sapien
aggtgatagacggtgcatcccaacc

SEQ ID NO: 509454 - DNA, 25 bp, Homo sapien
aagcaggtgatagacggtgcatccc

SEQ ID NO: 509455 - DNA, 25 bp, Homo sapien
gcaggtgatagacggtgcatcccaa

SEQ ID NO: 509456 - DNA, 25 bp, Homo sapien
gtgatagacggtgcatcccaaccaa

SEQ ID NO: 509457 - DNA, 25 bp, Homo sapien
gtagtggtgggacccagatctttcc

SEQ ID NO: 509458 - DNA, 25 bp, Homo sapien
ccagcggagcgcaataagaaggcag

SEQ ID NO: 509459 - DNA, 25 bp, Homo sapien
gttaaccaatcggagaagagatggg

SEQ ID NO: 509460 - DNA, 25 bp, Homo sapien
atggcctgctttccccggcgtctcc

SEQ ID NO: 509461 - DNA, 25 bp, Homo sapien
agagaagccggaagcccgtgctgca

SEQ ID NO: 509462 - DNA, 25 bp, Homo sapien
ttgggaggcgggataggcttgccgc

SEQ ID NO: 509463 - DNA, 25 bp, Homo sapien
tgtgggcggccgttctctcgggtgc

SEQ ID NO: 509464 - DNA, 25 bp, Homo sapien
tcctgtccggagaacgtgtgctgtg

SEQ ID NO: 509465 - DNA, 25 bp, Homo sapien
gggagctagggtgcctggcgtcccg

SEQ ID NO: 509466 - DNA, 25 bp, Homo sapien
aaaactgcgtccgtcgggagctagg

SEQ ID NO: 509467 - DNA, 25 bp, Homo sapien
ggatactcgggaggaagaacggcag

SEQ ID NO: 509468 - DNA, 25 bp, Homo sapien
gagctcgcccgtgcaactgaaaact

SEQ ID NO: 509469 - DNA, 25 bp, Homo sapien
tagttaagatgctgagtaggtctct

SEQ ID NO: 509470 - DNA, 25 bp, Homo sapien
ttcctgacatccctaccatctgatg

SEQ ID NO: 509471 - DNA, 25 bp, Homo sapien
tcaccgttagttaagatgctgagta

SEQ ID NO: 509472 - DNA, 25 bp, Homo sapien
tctgtctaacctggtatagtcccct

SEQ ID NO: 509473 - DNA, 25 bp, Homo sapien
acatagttgccaacggtgccttgcc

SEQ ID NO: 509474 - DNA, 25 bp, Homo sapien
atggacacgtggctcagatctggcc

SEQ ID NO: 509475 - DNA, 25 bp, Homo sapien
acacatagttgccaacggtgccttg

SEQ ID NO: 509476 - DNA, 25 bp, Homo sapien
cgagacacatagttgccaacggtgc

SEQ ID NO: 509477 - DNA, 25 bp, Homo sapien
ctgcatgagggaggagggcagcagg

SEQ ID NO: 509478 - DNA, 25 bp, Homo sapien
gagggaggagggcagcaggcttgtg

SEQ ID NO: 509479 - DNA, 25 bp, Homo sapien
atgagggaggagggcagcaggcttg

SEQ ID NO: 509480 - DNA, 25 bp, Homo sapien
gcatgagggaggagggcagcaggct

SEQ ID NO: 509481 - DNA, 25 bp, Homo sapien
tcttaacaggcaagtgaattgttca

SEQ ID NO: 509482 - DNA, 25 bp, Homo sapien
tgagcatcccagtttagtcacctgc

SEQ ID NO: 509483 - DNA, 25 bp, Homo sapien
gaaacgaagtagctttacttgagca

SEQ ID NO: 509484 - DNA, 25 bp, Homo sapien
taaacctatgactggtaatgcttcc

SEQ ID NO: 509485 - DNA, 25 bp, Homo sapien
agccaagactccctttaagtaaatg

SEQ ID NO: 509486 - DNA, 25 bp, Homo sapien
atgagtctcctaatgttttattatg

SEQ ID NO: 509487 - DNA, 25 bp, Homo sapien
cgctcccagccaagactccctttaa

SEQ ID NO: 509488 - DNA, 25 bp, Homo sapien
tctcctaatgttttattatgtgact

SEQ ID NO: 509489 - DNA, 25 bp, Homo sapien
agcacgtcacccctcccagtagctg

SEQ ID NO: 509490 - DNA, 25 bp, Homo sapien
tgtgcttataatttatttggtaact

SEQ ID NO: 509491 - DNA, 25 bp, Homo sapien
tatggggcacacgagaaattttctt

SEQ ID NO: 509492 - DNA, 25 bp, Homo sapien
tactgaatgtctcttatatgattgg

SEQ ID NO: 509493 - DNA, 25 bp, Homo sapien
gaatttccatgccagatcttggagg

SEQ ID NO: 509494 - DNA, 25 bp, Homo sapien
tactttataaggaagacggtgctgt

SEQ ID NO: 509495 - DNA, 25 bp, Homo sapien
gaggtaatatcactcgtggctccag

SEQ ID NO: 509496 - DNA, 25 bp, Homo sapien
gaaagatggtatgtacggtgagaca

SEQ ID NO: 509497 - DNA, 25 bp, Homo sapien
tcagtggtaagtgcatgtgaaggcc

SEQ ID NO: 509498 - DNA, 25 bp, Homo sapien
taagtcaaactggagtacactcttt

SEQ ID NO: 509499 - DNA, 25 bp, Homo sapien
cgtgtttgttatgttagcctaggcc

SEQ ID NO: 509500 - DNA, 25 bp, Homo sapien
cctaggacattgctttacaccactg

SEQ ID NO: 509501 - DNA, 25 bp, Homo sapien
taattagttattagtagcatataaa

SEQ ID NO: 509502 - DNA, 25 bp, Homo sapien
aataattagttattagtagcatata

SEQ ID NO: 509503 - DNA, 25 bp, Homo sapien
aattagttattagtagcatataaat

SEQ ID NO: 509504 - DNA, 25 bp, Homo sapien
acaggtgattcacaggagtggcaga

SEQ ID NO: 509505 - DNA, 25 bp, Homo sapien
gttatgctatttagatgctctatag

SEQ ID NO: 509506 - DNA, 25 bp, Homo sapien
gatgctctatagaacactgaattaa

SEQ ID NO: 509507 - DNA, 25 bp, Homo sapien
gccggttggacgatttttgactatc

SEQ ID NO: 509508 - DNA, 25 bp, Homo sapien
catgctcagccggttggacgatttt

SEQ ID NO: 509509 - DNA, 25 bp, Homo sapien
taatagtgcagagtggataacccta

SEQ ID NO: 509510 - DNA, 25 bp, Homo sapien
cttaaggtctaagtcagtgaagtgc

SEQ ID NO: 509511 - DNA, 25 bp, Homo sapien
ttagcaaataagatccgggtgaact

SEQ ID NO: 509512 - DNA, 25 bp, Homo sapien
tgtcacaggactacccctaagaaat

SEQ ID NO: 509513 - DNA, 25 bp, Homo sapien
tgccggttgtcaaatcccttaccca

SEQ ID NO: 509514 - DNA, 25 bp, Homo sapien
cagcgtttttgccggttgtcaaatc

SEQ ID NO: 509515 - DNA, 25 bp, Homo sapien
tcagcgtttttgccggttgtcaaat

SEQ ID NO: 509516 - DNA, 25 bp, Homo sapien
cactgttgtgtgagtagtaattctc

SEQ ID NO: 509517 - DNA, 25 bp, Homo sapien
gatggcatccttagaaggaagcaga

SEQ ID NO: 509518 - DNA, 25 bp, Homo sapien
tttgcacactaaggtgatggcatcc

SEQ ID NO: 509519 - DNA, 25 bp, Homo sapien
tccggatgggaagagtgcatctctc

SEQ ID NO: 509520 - DNA, 25 bp, Homo sapien
tggggtagtggcttccaagttgtac

SEQ ID NO: 509521 - DNA, 25 bp, Homo sapien
ctggtatgggccatgagaatgtact

SEQ ID NO: 509522 - DNA, 25 bp, Homo sapien
ttggggtagtggcttccaagttgta

SEQ ID NO: 509523 - DNA, 25 bp, Homo sapien
atgtccagtagccaagttccaccac

SEQ ID NO: 509524 - DNA, 25 bp, Homo sapien
tagggtgcccttacttcagcaaagg

SEQ ID NO: 509525 - DNA, 25 bp, Homo sapien
tgttcgcacgttgtttagggtgccc

SEQ ID NO: 509526 - DNA, 25 bp, Homo sapien
ttccttaaaaaggtgcggcatccaa

SEQ ID NO: 509527 - DNA, 25 bp, Homo sapien
tacttgacatggttcagactgacca

SEQ ID NO: 509528 - DNA, 25 bp, Homo sapien
tcagaacgcttccaaagggggacac

SEQ ID NO: 509529 - DNA, 25 bp, Homo sapien
ccacgggagacagtcacaaggggac

SEQ ID NO: 509530 - DNA, 25 bp, Homo sapien
cagaacgcttccaaagggggacaca

SEQ ID NO: 509531 - DNA, 25 bp, Homo sapien
cagtcacaaggggacagtgctcaca

SEQ ID NO: 509532 - DNA, 25 bp, Homo sapien
tccataggacagatgaccaccctgg

SEQ ID NO: 509533 - DNA, 25 bp, Homo sapien
gaactggtttccctaatgagtggct

SEQ ID NO: 509534 - DNA, 25 bp, Homo sapien
ggaagcaccagatgtcttaaggcag

SEQ ID NO: 509535 - DNA, 25 bp, Homo sapien
taagggacaagtacagccagtgaac

SEQ ID NO: 509536 - DNA, 25 bp, Homo sapien
tatgtggattaagggggcactttcc

SEQ ID NO: 509537 - DNA, 25 bp, Homo sapien
ctatgtggattaagggggcactttc

SEQ ID NO: 509538 - DNA, 25 bp, Homo sapien
actttccctgagagttggccagagc

SEQ ID NO: 509539 - DNA, 25 bp, Homo sapien
ggcactttccctgagagttggccag

SEQ ID NO: 509540 - DNA, 25 bp, Homo sapien
gctccatgtgaatctctaccactca

SEQ ID NO: 509541 - DNA, 25 bp, Homo sapien
gacttgctccatgtgaatctctacc

SEQ ID NO: 509542 - DNA, 25 bp, Homo sapien
caacaccacttcctgacttgctcca

SEQ ID NO: 509543 - DNA, 25 bp, Homo sapien
ccacttcctgacttgctccatgtga

SEQ ID NO: 509544 - DNA, 25 bp, Homo sapien
tgcaaagtccatttgcggccacagg

SEQ ID NO: 509545 - DNA, 25 bp, Homo sapien
gtccatttgcggccacagggtccac

SEQ ID NO: 509546 - DNA, 25 bp, Homo sapien
aagtccatttgcggccacagggtcc

SEQ ID NO: 509547 - DNA, 25 bp, Homo sapien
caaagtccatttgcggccacagggt

SEQ ID NO: 509548 - DNA, 25 bp, Homo sapien
gggactgtaatctctccccctgttc

SEQ ID NO: 509549 - DNA, 25 bp, Homo sapien
tcttgctttggggactgtaatctct

SEQ ID NO: 509550 - DNA, 25 bp, Homo sapien
tctctccccctgttcattgatgata

SEQ ID NO: 509551 - DNA, 25 bp, Homo sapien
taatctctccccctgttcattgatg

SEQ ID NO: 509552 - DNA, 25 bp, Homo sapien
tggttttagtaatatcgtgagtcat

SEQ ID NO: 509553 - DNA, 25 bp, Homo sapien
gtggttttagtaatatcgtgagtca

SEQ ID NO: 509554 - DNA, 25 bp, Homo sapien
cctaatgtgccctcttgtcctgtct

SEQ ID NO: 509555 - DNA, 25 bp, Homo sapien
ggtggttttagtaatatcgtgagtc

SEQ ID NO: 509556 - DNA, 25 bp, Homo sapien
catgcattagagaaggaataatctc

SEQ ID NO: 509557 - DNA, 25 bp, Homo sapien
tacatctacaatgcactcatttttg

SEQ ID NO: 509558 - DNA, 25 bp, Homo sapien
agaacatgcattagagaaggaataa

SEQ ID NO: 509559 - DNA, 25 bp, Homo sapien
ttatacttcagagtgtaaccaaaac

SEQ ID NO: 509560 - DNA, 25 bp, Homo sapien
tccattctttaaactctcagaacgc

SEQ ID NO: 509561 - DNA, 25 bp, Homo sapien
tgtattgtgacacatcagcttcttc

SEQ ID NO: 509562 - DNA, 25 bp, Homo sapien
ctctcagaacgctgatgtgtattgt

SEQ ID NO: 509563 - DNA, 25 bp, Homo sapien
agcttcttccttgcatcgcagtcat

SEQ ID NO: 509564 - DNA, 25 bp, Homo sapien
tggccgaaggcagcaacaggatggc

SEQ ID NO: 509565 - DNA, 25 bp, Homo sapien
ggtggccgaaggcagcaacaggatg

SEQ ID NO: 509566 - DNA, 25 bp, Homo sapien
ggccgaaggcagcaacaggatggct

SEQ ID NO: 509567 - DNA, 25 bp, Homo sapien
gccgaaggcagcaacaggatggctg

SEQ ID NO: 509568 - DNA, 25 bp, Homo sapien
ggaagtgacgtggtcccaagtgctt

SEQ ID NO: 509569 - DNA, 25 bp, Homo sapien
ggacttgaagagaacacattggaga

SEQ ID NO: 509570 - DNA, 25 bp, Homo sapien
tgggatggagaccagtgggccaact

SEQ ID NO: 509571 - DNA, 25 bp, Homo sapien
gtggccgaccgcagctgctgtccat

SEQ ID NO: 509572 - DNA, 25 bp, Homo sapien
tcacacagatccctgcaggagaccc

SEQ ID NO: 509573 - DNA, 25 bp, Homo sapien
agatccctgcaggagacccgtgcct

SEQ ID NO: 509574 - DNA, 25 bp, Homo sapien
acagatccctgcaggagacccgtgc

SEQ ID NO: 509575 - DNA, 25 bp, Homo sapien
acacagatccctgcaggagacccgt

SEQ ID NO: 509576 - DNA, 25 bp, Homo sapien
gggctgtactgtcaaaaccaaatcc

SEQ ID NO: 509577 - DNA, 25 bp, Homo sapien
gctgtgtgaatattcaggggctgta

SEQ ID NO: 509578 - DNA, 25 bp, Homo sapien
cacaacattgctgggatgcatccag

SEQ ID NO: 509579 - DNA, 25 bp, Homo sapien
gtgaccataacctcacccctagctg

SEQ ID NO: 509580 - DNA, 25 bp, Homo sapien
gagctcctggtgtttattgtccaag

SEQ ID NO: 509581 - DNA, 25 bp, Homo sapien
gaagacacgatgtttggccttggcc

SEQ ID NO: 509582 - DNA, 25 bp, Homo sapien
ttaaccaagaggattgagcttcggg

SEQ ID NO: 509583 - DNA, 25 bp, Homo sapien
aagtgggaagtactgacctgagtcg

SEQ ID NO: 509584 - DNA, 25 bp, Homo sapien
tttgcagctgctgtaccctcctcct

SEQ ID NO: 509585 - DNA, 25 bp, Homo sapien
tgcagctgctgtaccctcctcctac

SEQ ID NO: 509586 - DNA, 25 bp, Homo sapien
ttttgcagctgctgtaccctcctcc

SEQ ID NO: 509587 - DNA, 25 bp, Homo sapien
ttgcagctgctgtaccctcctccta

SEQ ID NO: 509588 - DNA, 25 bp, Homo sapien
gccccactggcccagttcccgactc

SEQ ID NO: 509589 - DNA, 25 bp, Homo sapien
actgcagcaggtcagagtgggtctg

SEQ ID NO: 509590 - DNA, 25 bp, Homo sapien
gctgactgcagcaggtcagagtggg

SEQ ID NO: 509591 - DNA, 25 bp, Homo sapien
cccagttcccgactccctgaaggct

SEQ ID NO: 509592 - DNA, 25 bp, Homo sapien
ctcatcacaggtccccattgagctg

SEQ ID NO: 509593 - DNA, 25 bp, Homo sapien
atgatggcggtgacctgctccacaa

SEQ ID NO: 509594 - DNA, 25 bp, Homo sapien
tccccattgagctgtggacttcagc

SEQ ID NO: 509595 - DNA, 25 bp, Homo sapien
atggcggtgacctgctccacaaagc

SEQ ID NO: 509596 - DNA, 25 bp, Homo sapien
cacagtatggatgatcacacgtggg

SEQ ID NO: 509597 - DNA, 25 bp, Homo sapien
tcattgggtgaataccatgtaccag

SEQ ID NO: 509598 - DNA, 25 bp, Homo sapien
tgagccccgtgaacaggtgtgcgtc

SEQ ID NO: 509599 - DNA, 25 bp, Homo sapien
acccatactgggagtgagagcctct

SEQ ID NO: 509600 - DNA, 25 bp, Homo sapien
gtttatgaatgaggagcaggcgttc

SEQ ID NO: 509601 - DNA, 25 bp, Homo sapien
ctggtttatgaatgaggagcaggcg

SEQ ID NO: 509602 - DNA, 25 bp, Homo sapien
ggtttatgaatgaggagcaggcgtt

SEQ ID NO: 509603 - DNA, 25 bp, Homo sapien
ttatgaatgaggagcaggcgttcag

SEQ ID NO: 509604 - DNA, 25 bp, Homo sapien
ggtgagtcccgatctgcctctggac

SEQ ID NO: 509605 - DNA, 25 bp, Homo sapien
gcccgtggtcacaggtgagtcccga

SEQ ID NO: 509606 - DNA, 25 bp, Homo sapien
cgtggtcacaggtgagtcccgatct

SEQ ID NO: 509607 - DNA, 25 bp, Homo sapien
gtcacaggtgagtcccgatctgcct

SEQ ID NO: 509608 - DNA, 25 bp, Homo sapien
gcagaaacccacatgtgatcatcca

SEQ ID NO: 509609 - DNA, 25 bp, Homo sapien
tgtttgtgccccaaaacgaggagtg

SEQ ID NO: 509610 - DNA, 25 bp, Homo sapien
tgtgcagaaacccacatgtgatcat

SEQ ID NO: 509611 - DNA, 25 bp, Homo sapien
caaaacgaggagtgtgcagaaaccc

SEQ ID NO: 509612 - DNA, 25 bp, Homo sapien
cgtggaacggtgagcatccttggcc

SEQ ID NO: 509613 - DNA, 25 bp, Homo sapien
cttcgtggaacggtgagcatccttg

SEQ ID NO: 509614 - DNA, 25 bp, Homo sapien
agcttcgtggaacggtgagcatcct

SEQ ID NO: 509615 - DNA, 25 bp, Homo sapien
gcaagcttcgtggaacggtgagcat

SEQ ID NO: 509616 - DNA, 25 bp, Homo sapien
aaagtcagacaaggctggccaggcc

SEQ ID NO: 509617 - DNA, 25 bp, Homo sapien
tcagatccttggttggagctacaaa

SEQ ID NO: 509618 - DNA, 25 bp, Homo sapien
gcaagggtctgtctacacgatggcc

SEQ ID NO: 509619 - DNA, 25 bp, Homo sapien
ccttagctgggcaggaatgtgtttc

SEQ ID NO: 509620 - DNA, 25 bp, Homo sapien
ctcctctggcaagggtgtcacactt

SEQ ID NO: 509621 - DNA, 25 bp, Homo sapien
cagtggcctcccaatcgccttttct

SEQ ID NO: 509622 - DNA, 25 bp, Homo sapien
cttaagcgaattcaactgtaggtgc

SEQ ID NO: 509623 - DNA, 25 bp, Homo sapien
tcaattggtcccattacatccacat

SEQ ID NO: 509624 - DNA, 25 bp, Homo sapien
cggcatcaggttcaatttcatgtga

SEQ ID NO: 509625 - DNA, 25 bp, Homo sapien
tcctggagattgttatgttaatttc

SEQ ID NO: 509626 - DNA, 25 bp, Homo sapien
caattgatctggaccggagggcttt

SEQ ID NO: 509627 - DNA, 25 bp, Homo sapien
tagaaaccgcttcatcggcatcagg

SEQ ID NO: 509628 - DNA, 25 bp, Homo sapien
gttcattccctcccttcctgtcctg

SEQ ID NO: 509629 - DNA, 25 bp, Homo sapien
attccctcccttcctgtcctgctgt

SEQ ID NO: 509630 - DNA, 25 bp, Homo sapien
tcattccctcccttcctgtcctgct

SEQ ID NO: 509631 - DNA, 25 bp, Homo sapien
tccctcccttcctgtcctgctgtac

SEQ ID NO: 509632 - DNA, 25 bp, Homo sapien
ccttgagcctacacattgcttcttg

SEQ ID NO: 509633 - DNA, 25 bp, Homo sapien
cacctcccttgagcctacacattgc

SEQ ID NO: 509634 - DNA, 25 bp, Homo sapien
gagggaccacctcccttgagcctac

SEQ ID NO: 509635 - DNA, 25 bp, Homo sapien
cttggcgccttccatgagggaccac

SEQ ID NO: 509636 - DNA, 25 bp, Homo sapien
tcaggtcctcgggagataagaaagc

SEQ ID NO: 509637 - DNA, 25 bp, Homo sapien
tggacctcaggtcctcgggagataa

SEQ ID NO: 509638 - DNA, 25 bp, Homo sapien
tcctcgggagataagaaagcccatc

SEQ ID NO: 509639 - DNA, 25 bp, Homo sapien
tcgggagataagaaagcccatctgc

SEQ ID NO: 509640 - DNA, 25 bp, Homo sapien
ttctttccgtagtaatggtctgagc

SEQ ID NO: 509641 - DNA, 25 bp, Homo sapien
ccgtagtaatggtctgagctgctgg

SEQ ID NO: 509642 - DNA, 25 bp, Homo sapien
tctttctttccgtagtaatggtctg

SEQ ID NO: 509643 - DNA, 25 bp, Homo sapien
tttccgtagtaatggtctgagctgc

SEQ ID NO: 509644 - DNA, 25 bp, Homo sapien
tcaaagtagacagaggattggcgag

SEQ ID NO: 509645 - DNA, 25 bp, Homo sapien
gaagaagtccctgatacaccctggg

SEQ ID NO: 509646 - DNA, 25 bp, Homo sapien
gagcatttggaacagcgcctggcac

SEQ ID NO: 509647 - DNA, 25 bp, Homo sapien
tatagctgttttaccgagcaggaac

SEQ ID NO: 509648 - DNA, 25 bp, Homo sapien
ctttccacgaaccgcctgctcttgg

SEQ ID NO: 509649 - DNA, 25 bp, Homo sapien
accccgaatcctggccttctctgca

SEQ ID NO: 509650 - DNA, 25 bp, Homo sapien
acgaaccgcctgctcttggccccaa

SEQ ID NO: 509651 - DNA, 25 bp, Homo sapien
gggacctgaagaggcaccccgaatc

SEQ ID NO: 509652 - DNA, 25 bp, Homo sapien
tgtgatcttctttagccgagagcag

SEQ ID NO: 509653 - DNA, 25 bp, Homo sapien
gatcttctttagccgagagcaggga

SEQ ID NO: 509654 - DNA, 25 bp, Homo sapien
tgatcttctttagccgagagcaggg

SEQ ID NO: 509655 - DNA, 25 bp, Homo sapien
gtgatcttctttagccgagagcagg

SEQ ID NO: 509656 - DNA, 25 bp, Homo sapien
gatttcctgagtaggaccttgcagc

SEQ ID NO: 509657 - DNA, 25 bp, Homo sapien
cctgtctgaggactgtctcaggcat

SEQ ID NO: 509658 - DNA, 25 bp, Homo sapien
tcaggcattcccaaacccgagcaaa

SEQ ID NO: 509659 - DNA, 25 bp, Homo sapien
gagatttcctgagtaggaccttgca

SEQ ID NO: 509660 - DNA, 25 bp, Homo sapien
tgcatatgagctcatgcatttcctt

SEQ ID NO: 509661 - DNA, 25 bp, Homo sapien
atccatctatccagccgctcaccca

SEQ ID NO: 509662 - DNA, 25 bp, Homo sapien
gcatttcctttgtccgcaatgacct

SEQ ID NO: 509663 - DNA, 25 bp, Homo sapien
tcctttgtccgcaatgaccttggct

SEQ ID NO: 509664 - DNA, 25 bp, Homo sapien
cctggctgggaatgtaggagcaagc

SEQ ID NO: 509665 - DNA, 25 bp, Homo sapien
aaggagaggcagatccctggacttc

SEQ ID NO: 509666 - DNA, 25 bp, Homo sapien
gctcctgccagggtcagcacacgag

SEQ ID NO: 509667 - DNA, 25 bp, Homo sapien
gaaggagaggcagatccctggactt

SEQ ID NO: 509668 - DNA, 25 bp, Homo sapien
aatggagcttccgaaagagctaggt

SEQ ID NO: 509669 - DNA, 25 bp, Homo sapien
tgtagactcgctggtctactctcca

SEQ ID NO: 509670 - DNA, 25 bp, Homo sapien
gttcttgtaaccaggttgataaggc

SEQ ID NO: 509671 - DNA, 25 bp, Homo sapien
caggtgctttgattgttctgaaaca

SEQ ID NO: 509672 - DNA, 25 bp, Homo sapien
ctgaagagcaactcgaggtcacact

SEQ ID NO: 509673 - DNA, 25 bp, Homo sapien
gagcaactcgaggtcacacttgcat

SEQ ID NO: 509674 - DNA, 25 bp, Homo sapien
gaggtcacacttgcataatctcctg

SEQ ID NO: 509675 - DNA, 25 bp, Homo sapien
actcgaggtcacacttgcataatct

SEQ ID NO: 509676 - DNA, 25 bp, Homo sapien
tgtggcctggcggttcccaccatac

SEQ ID NO: 509677 - DNA, 25 bp, Homo sapien
gcggttcccaccatactgtggacat

SEQ ID NO: 509678 - DNA, 25 bp, Homo sapien
gaaagctacacgtgctctgcctgtt

SEQ ID NO: 509679 - DNA, 25 bp, Homo sapien
agaaagctacacgtgctctgcctgt

SEQ ID NO: 509680 - DNA, 25 bp, Homo sapien
gcttttcaaggacagatctccccag

SEQ ID NO: 509681 - DNA, 25 bp, Homo sapien
tttcaaggacagatctccccagatc

SEQ ID NO: 509682 - DNA, 25 bp, Homo sapien
aagctcatgcttttcaaggacagat

SEQ ID NO: 509683 - DNA, 25 bp, Homo sapien
tcatgcttttcaaggacagatctcc

SEQ ID NO: 509684 - DNA, 25 bp, Homo sapien
cctctataaccagttggtgttttga

SEQ ID NO: 509685 - DNA, 25 bp, Homo sapien
tcctctataaccagttggtgttttg

SEQ ID NO: 509686 - DNA, 25 bp, Homo sapien
ctctataaccagttggtgttttgaa

SEQ ID NO: 509687 - DNA, 25 bp, Homo sapien
gaagtggccactgaacagggtgtca

SEQ ID NO: 509688 - DNA, 25 bp, Homo sapien
tcagaactgggtaatgtggagtgga

SEQ ID NO: 509689 - DNA, 25 bp, Homo sapien
cctggagagcattgaaggaagaagt

SEQ ID NO: 509690 - DNA, 25 bp, Homo sapien
cagtgcctggagagcattgaaggaa

SEQ ID NO: 509691 - DNA, 25 bp, Homo sapien
taattttttattcgtgaccctctgc

SEQ ID NO: 509692 - DNA, 25 bp, Homo sapien
cctcagtttgtaagacattgtcaga

SEQ ID NO: 509693 - DNA, 25 bp, Homo sapien
tcttggtttgaagcctggatgcttt

SEQ ID NO: 509694 - DNA, 25 bp, Homo sapien
catcgcgctaatttccatcctgtta

SEQ ID NO: 509695 - DNA, 25 bp, Homo sapien
cgacttggccgaagcatgggcttcc

SEQ ID NO: 509696 - DNA, 25 bp, Homo sapien
tgggcttccctcagcgtactgcttg

SEQ ID NO: 509697 - DNA, 25 bp, Homo sapien
ctttagcattactgaggaattcatt

SEQ ID NO: 509698 - DNA, 25 bp, Homo sapien
tcattttggtccaaaccgacttggc

SEQ ID NO: 509699 - DNA, 25 bp, Homo sapien
tggacgattgtattactgccctgtt

SEQ ID NO: 509700 - DNA, 25 bp, Homo sapien
taccgtctcctttctggacgattgt

SEQ ID NO: 509701 - DNA, 25 bp, Homo sapien
tcctgtatcactttccccgtgtaca

SEQ ID NO: 509702 - DNA, 25 bp, Homo sapien
ctgccctgttgtagctcctgtatca

SEQ ID NO: 509703 - DNA, 25 bp, Homo sapien
tcttccttctccttcttgggtatct

SEQ ID NO: 509704 - DNA, 25 bp, Homo sapien
ttccttctccttcttgggtatcttg

SEQ ID NO: 509705 - DNA, 25 bp, Homo sapien
ccttctccttcttgggtatcttgac

SEQ ID NO: 509706 - DNA, 25 bp, Homo sapien
ttcttccttctccttcttgggtatc

SEQ ID NO: 509707 - DNA, 25 bp, Homo sapien
ttggagctccacattgtctgtcttc

SEQ ID NO: 509708 - DNA, 25 bp, Homo sapien
tgtcttcctcattcactcctctgtg

SEQ ID NO: 509709 - DNA, 25 bp, Homo sapien
tctttgtctagaatactgtccctca

SEQ ID NO: 509710 - DNA, 25 bp, Homo sapien
tgctctctggcagacttctttgtct

SEQ ID NO: 509711 - DNA, 25 bp, Homo sapien
gcatctagggacttcacaggtgcct

SEQ ID NO: 509712 - DNA, 25 bp, Homo sapien
gctctgcatctagggacttcacagg

SEQ ID NO: 509713 - DNA, 25 bp, Homo sapien
tagggacttcacaggtgcctgacgt

SEQ ID NO: 509714 - DNA, 25 bp, Homo sapien
gacttcacaggtgcctgacgtgaca

SEQ ID NO: 509715 - DNA, 25 bp, Homo sapien
gaggtaagagtaactgctgttggta

SEQ ID NO: 509716 - DNA, 25 bp, Homo sapien
gaagaggaaggcgataagggcccat

SEQ ID NO: 509717 - DNA, 25 bp, Homo sapien
gaggaaggcgataagggcccatggg

SEQ ID NO: 509718 - DNA, 25 bp, Homo sapien
tgttggtacctctgttaaatttgtc

SEQ ID NO: 509719 - DNA, 25 bp, Homo sapien
tgtagcaatggggtatcgaagctca

SEQ ID NO: 509720 - DNA, 25 bp, Homo sapien
taaaaggtgcggaaccgttgtagca

SEQ ID NO: 509721 - DNA, 25 bp, Homo sapien
gggtatcgaagctcaggtagtcaac

SEQ ID NO: 509722 - DNA, 25 bp, Homo sapien
aaaggtgcggaaccgttgtagcaat

SEQ ID NO: 509723 - DNA, 25 bp, Homo sapien
tggatgtcgtggataagtaagatta

SEQ ID NO: 509724 - DNA, 25 bp, Homo sapien
aattttattatcattgaccttgtaa

SEQ ID NO: 509725 - DNA, 25 bp, Homo sapien
ttttggatgtcgtggataagtaaga

SEQ ID NO: 509726 - DNA, 25 bp, Homo sapien
tattgattttggatgtcgtggataa

SEQ ID NO: 509727 - DNA, 25 bp, Homo sapien
catattggctgtcataacgctgcat

SEQ ID NO: 509728 - DNA, 25 bp, Homo sapien
ctgcactcatattggctgtcataac

SEQ ID NO: 509729 - DNA, 25 bp, Homo sapien
cactcatattggctgtcataacgct

SEQ ID NO: 509730 - DNA, 25 bp, Homo sapien
ctcatattggctgtcataacgctgc

SEQ ID NO: 509731 - DNA, 25 bp, Homo sapien
ccaattctttgttatctgaatcttt

SEQ ID NO: 509732 - DNA, 25 bp, Homo sapien
tttaaccaattctttgttatctgaa

SEQ ID NO: 509733 - DNA, 25 bp, Homo sapien
taaccaattctttgttatctgaatc

SEQ ID NO: 509734 - DNA, 25 bp, Homo sapien
aatttaaccaattctttgttatctg

SEQ ID NO: 509735 - DNA, 25 bp, Homo sapien
cagactgttgttgtaggtggcacac

SEQ ID NO: 509736 - DNA, 25 bp, Homo sapien
tgcttgccacgccatctgcttgttt

SEQ ID NO: 509737 - DNA, 25 bp, Homo sapien
gttcagactgttgttgtaggtggca

SEQ ID NO: 509738 - DNA, 25 bp, Homo sapien
ttctgcttgccacgccatctgcttg

SEQ ID NO: 509739 - DNA, 25 bp, Homo sapien
tgtatccccacccatgatacgttgt

SEQ ID NO: 509740 - DNA, 25 bp, Homo sapien
ccacccatgatacgttgttcttcac

SEQ ID NO: 509741 - DNA, 25 bp, Homo sapien
cccatgatacgttgttcttcacttt

SEQ ID NO: 509742 - DNA, 25 bp, Homo sapien
ttcacttttactccgagatttcttc

SEQ ID NO: 509743 - DNA, 25 bp, Homo sapien
aggttaccagcacatagaagagaga

SEQ ID NO: 509744 - DNA, 25 bp, Homo sapien
gcaatcagagcaaaggttaccagca

SEQ ID NO: 509745 - DNA, 25 bp, Homo sapien
ctggcatgcagcaatcagagcaaag

SEQ ID NO: 509746 - DNA, 25 bp, Homo sapien
gagcaaaggttaccagcacatagaa

SEQ ID NO: 509747 - DNA, 25 bp, Homo sapien
agtttcctctgccagtacggagatt

SEQ ID NO: 509748 - DNA, 25 bp, Homo sapien
gccagtacggagattcctcttttca

SEQ ID NO: 509749 - DNA, 25 bp, Homo sapien
tcctctgccagtacggagattcctc

SEQ ID NO: 509750 - DNA, 25 bp, Homo sapien
tctgccagtacggagattcctcttt

SEQ ID NO: 509751 - DNA, 25 bp, Homo sapien
cattggatcctgtcgatgggcccac

SEQ ID NO: 509752 - DNA, 25 bp, Homo sapien
tgttcctgctaagtgtgtgccccat

SEQ ID NO: 509753 - DNA, 25 bp, Homo sapien
tggtggcatccagaacttgcagttc

SEQ ID NO: 509754 - DNA, 25 bp, Homo sapien
catgagtccaaagtaccgtggtggc

SEQ ID NO: 509755 - DNA, 25 bp, Homo sapien
gcaggctggcggattttgcctgctt

SEQ ID NO: 509756 - DNA, 25 bp, Homo sapien
atgatgcaggctggcggattttgcc

SEQ ID NO: 509757 - DNA, 25 bp, Homo sapien
gtggacttatcgatgatgcaggctg

SEQ ID NO: 509758 - DNA, 25 bp, Homo sapien
ctgggtggacttatcgatgatgcag

SEQ ID NO: 509759 - DNA, 25 bp, Homo sapien
cccaattgagggacttgcaggtagg

SEQ ID NO: 509760 - DNA, 25 bp, Homo sapien
tgcaggtaggttgtttagactcaac

SEQ ID NO: 509761 - DNA, 25 bp, Homo sapien
gcagcatattccagctcagccaagt

SEQ ID NO: 509762 - DNA, 25 bp, Homo sapien
caagtgcaagcccagagagtcccaa

SEQ ID NO: 509763 - DNA, 25 bp, Homo sapien
taaaggaatcaagaggcgtacttaa

SEQ ID NO: 509764 - DNA, 25 bp, Homo sapien
tcaagggtaatcactgacccagcat

SEQ ID NO: 509765 - DNA, 25 bp, Homo sapien
caaaactgagttagtgttagagacg

SEQ ID NO: 509766 - DNA, 25 bp, Homo sapien
gatttggatgggtcatagttcttcc

SEQ ID NO: 509767 - DNA, 25 bp, Homo sapien
gcttacttgcttgggttggtaaatg

SEQ ID NO: 509768 - DNA, 25 bp, Homo sapien
aggtgggcttacttgcttgggttgg

SEQ ID NO: 509769 - DNA, 25 bp, Homo sapien
ctactcctgagccttttgtagggag

SEQ ID NO: 509770 - DNA, 25 bp, Homo sapien
ctcctgagccttttgtagggaggga

SEQ ID NO: 509771 - DNA, 25 bp, Homo sapien
gcttttgatacacacctgggcactg

SEQ ID NO: 509772 - DNA, 25 bp, Homo sapien
cctggccatgcatgccaagtcagga

SEQ ID NO: 509773 - DNA, 25 bp, Homo sapien
tggtgcccaggaaaattaccgtgtg

SEQ ID NO: 509774 - DNA, 25 bp, Homo sapien
cagttagtttggaagaccctcggct

SEQ ID NO: 509775 - DNA, 25 bp, Homo sapien
agcgtcccagagagtagccactagc

SEQ ID NO: 509776 - DNA, 25 bp, Homo sapien
tgctgttgctgcctagtagatgtcc

SEQ ID NO: 509777 - DNA, 25 bp, Homo sapien
gatagaaatgctccagcctgcagcg

SEQ ID NO: 509778 - DNA, 25 bp, Homo sapien
gaacactgtttccaaggctctggat

SEQ ID NO: 509779 - DNA, 25 bp, Homo sapien
ctcgagtggctacctgttgggcttg

SEQ ID NO: 509780 - DNA, 25 bp, Homo sapien
taaaatgcatctgagcaagtcagcc

SEQ ID NO: 509781 - DNA, 25 bp, Homo sapien
tacagagcctgtccattgggtgcag

SEQ ID NO: 509782 - DNA, 25 bp, Homo sapien
cctcagtgtgtgtgtctcgagtggc

SEQ ID NO: 509783 - DNA, 25 bp, Homo sapien
tctcatagcgtagacctagggaagg

SEQ ID NO: 509784 - DNA, 25 bp, Homo sapien
tgtcagccccagaccgtaagcttgg

SEQ ID NO: 509785 - DNA, 25 bp, Homo sapien
aaaaagggcctactacattggcgct

SEQ ID NO: 509786 - DNA, 25 bp, Homo sapien
aagattgcccagtccccgatggctg

SEQ ID NO: 509787 - DNA, 25 bp, Homo sapien
gagtgagattagtctacaattttcc

SEQ ID NO: 509788 - DNA, 25 bp, Homo sapien
cagatgttcatgtgacttttctccc

SEQ ID NO: 509789 - DNA, 25 bp, Homo sapien
tatttcgggaacaaagctttgtcag

SEQ ID NO: 509790 - DNA, 25 bp, Homo sapien
gctgaactcaagagtgaggccatct

SEQ ID NO: 509791 - DNA, 25 bp, Homo sapien
gtgcagcattgtggctctgttgctc

SEQ ID NO: 509792 - DNA, 25 bp, Homo sapien
caagcatgagaggagtccctttcag

SEQ ID NO: 509793 - DNA, 25 bp, Homo sapien
cagttaatgcgatgggcttcccggt

SEQ ID NO: 509794 - DNA, 25 bp, Homo sapien
ggtactgagcagtcgtcgcaggtca

SEQ ID NO: 509795 - DNA, 25 bp, Homo sapien
ttcccggtgggatctggtactgagc

SEQ ID NO: 509796 - DNA, 25 bp, Homo sapien
gcttggcactggaattcagtgttcc

SEQ ID NO: 509797 - DNA, 25 bp, Homo sapien
tcgacgtactttactttcaagtcaa

SEQ ID NO: 509798 - DNA, 25 bp, Homo sapien
tcaagtcaacttcatagtctagggc

SEQ ID NO: 509799 - DNA, 25 bp, Homo sapien
gggaaaacctgcagtatcgacgtac

SEQ ID NO: 509800 - DNA, 25 bp, Homo sapien
gcctgtgaattgagtcggcatttcc

SEQ ID NO: 509801 - DNA, 25 bp, Homo sapien
tcccttcatgagattccaggaactg

SEQ ID NO: 509802 - DNA, 25 bp, Homo sapien
ttgagtcggcatttccaagttactg

SEQ ID NO: 509803 - DNA, 25 bp, Homo sapien
aagttactgtgaggtattgcagagg

SEQ ID NO: 509804 - DNA, 25 bp, Homo sapien
ccctcctgctggctcagatcttcct

SEQ ID NO: 509805 - DNA, 25 bp, Homo sapien
ctcctgctggctcagatcttcctct

SEQ ID NO: 509806 - DNA, 25 bp, Homo sapien
tcctgctggctcagatcttcctctg

SEQ ID NO: 509807 - DNA, 25 bp, Homo sapien
ctgctggctcagatcttcctctgac

SEQ ID NO: 509808 - DNA, 25 bp, Homo sapien
ggtttgtcagcgatgcccttcaggg

SEQ ID NO: 509809 - DNA, 25 bp, Homo sapien
caccctgggaggtccccgctagtag

SEQ ID NO: 509810 - DNA, 25 bp, Homo sapien
tccccgctagtaggtggatccacat

SEQ ID NO: 509811 - DNA, 25 bp, Homo sapien
cacagagggtttgtcagcgatgccc

SEQ ID NO: 509812 - DNA, 25 bp, Homo sapien
caagtcgcactctttgtactggatg

SEQ ID NO: 509813 - DNA, 25 bp, Homo sapien
tcgcataggaggaccagggcgcatt

SEQ ID NO: 509814 - DNA, 25 bp, Homo sapien
tttgtgtgccggctgactctcctcc

SEQ ID NO: 509815 - DNA, 25 bp, Homo sapien
cattggtggcggtgggagtaggcac

SEQ ID NO: 509816 - DNA, 25 bp, Homo sapien
tgttgcagaagagcgctctgagcca

SEQ ID NO: 509817 - DNA, 25 bp, Homo sapien
tgtaggatgttgcagaagagcgctc

SEQ ID NO: 509818 - DNA, 25 bp, Homo sapien
actggtcaggtcagacttccaggaa

SEQ ID NO: 509819 - DNA, 25 bp, Homo sapien
tattcaaagacgttccctgaatgcc

SEQ ID NO: 509820 - DNA, 25 bp, Homo sapien
ccaattctgtcacaaaagatactct

SEQ ID NO: 509821 - DNA, 25 bp, Homo sapien
caattctgtcacaaaagatactctt

SEQ ID NO: 509822 - DNA, 25 bp, Homo sapien
ctccaattctgtcacaaaagatact

SEQ ID NO: 509823 - DNA, 25 bp, Homo sapien
tccaattctgtcacaaaagatactc

SEQ ID NO: 509824 - DNA, 25 bp, Homo sapien
gcctttctcaacattcagcgcagcc

SEQ ID NO: 509825 - DNA, 25 bp, Homo sapien
tgaaaagcgcatcgccaagatcagc

SEQ ID NO: 509826 - DNA, 25 bp, Homo sapien
gagtttgggatagtgcctgaaaagc

SEQ ID NO: 509827 - DNA, 25 bp, Homo sapien
ggtctgatcctgtgagtacccacga

SEQ ID NO: 509828 - DNA, 25 bp, Homo sapien
tgttttcactaatgcacaaatccat

SEQ ID NO: 509829 - DNA, 25 bp, Homo sapien
acagtcttgttttcactaatgcaca

SEQ ID NO: 509830 - DNA, 25 bp, Homo sapien
agtcttgttttcactaatgcacaaa

SEQ ID NO: 509831 - DNA, 25 bp, Homo sapien
tcttgttttcactaatgcacaaatc

SEQ ID NO: 509832 - DNA, 25 bp, Homo sapien
aaactccttaagattaggaacagag

SEQ ID NO: 509833 - DNA, 25 bp, Homo sapien
ataaactccttaagattaggaacag

SEQ ID NO: 509834 - DNA, 25 bp, Homo sapien
taaactccttaagattaggaacaga

SEQ ID NO: 509835 - DNA, 25 bp, Homo sapien
ctttggtgaggaagcattctcatga

SEQ ID NO: 509836 - DNA, 25 bp, Homo sapien
catgaaagccacttgaccctgaggg

SEQ ID NO: 509837 - DNA, 25 bp, Homo sapien
tgttctaggtaaagctgaaccatgc

SEQ ID NO: 509838 - DNA, 25 bp, Homo sapien
cgaaatcctcgtcccagaaaattgt

SEQ ID NO: 509839 - DNA, 25 bp, Homo sapien
aaactctgtgatgtgcggtggggcg

SEQ ID NO: 509840 - DNA, 25 bp, Homo sapien
gtggggcgatttgccggcagccggc

SEQ ID NO: 509841 - DNA, 25 bp, Homo sapien
tgcggtggggcgatttgccggcagc

SEQ ID NO: 509842 - DNA, 25 bp, Homo sapien
aactctgtgatgtgcggtggggcga

SEQ ID NO: 509843 - DNA, 25 bp, Homo sapien
tcgcctcgggcctgtttagaaccca

SEQ ID NO: 509844 - DNA, 25 bp, Homo sapien
gggcctgtttagaacccagagctgg

SEQ ID NO: 509845 - DNA, 25 bp, Homo sapien
gcctcgggcctgtttagaacccaga

SEQ ID NO: 509846 - DNA, 25 bp, Homo sapien
tcgggcctgtttagaacccagagct

SEQ ID NO: 509847 - DNA, 25 bp, Homo sapien
aagggagctcctggtacagactgct

SEQ ID NO: 509848 - DNA, 25 bp, Homo sapien
ctgtctcacgcagaagagccggcgg

SEQ ID NO: 509849 - DNA, 25 bp, Homo sapien
agccggcggggccacaagggagctc

SEQ ID NO: 509850 - DNA, 25 bp, Homo sapien
gccacaagggagctcctggtacaga

SEQ ID NO: 509851 - DNA, 25 bp, Homo sapien
ccaggtgacagaggcttaatcacaa

SEQ ID NO: 509852 - DNA, 25 bp, Homo sapien
tatctccaggaactcgcttggtgga

SEQ ID NO: 509853 - DNA, 25 bp, Homo sapien
taatcacaagaatgcggacaagccg

SEQ ID NO: 509854 - DNA, 25 bp, Homo sapien
aagcaagtctgcctagcacactggg

SEQ ID NO: 509855 - DNA, 25 bp, Homo sapien
cttgttcaagccatgtcactccatc

SEQ ID NO: 509856 - DNA, 25 bp, Homo sapien
ttcaagccatgtcactccatcaagg

SEQ ID NO: 509857 - DNA, 25 bp, Homo sapien
ccatcaaggtctgcaggtcgaggga

SEQ ID NO: 509858 - DNA, 25 bp, Homo sapien
caagccatgtcactccatcaaggtc

SEQ ID NO: 509859 - DNA, 25 bp, Homo sapien
tctgggcacggtttgtttgtgttcc

SEQ ID NO: 509860 - DNA, 25 bp, Homo sapien
tttgtgttccgttctctggagtgcg

SEQ ID NO: 509861 - DNA, 25 bp, Homo sapien
cagcttgaaataggctgcccacagc

SEQ ID NO: 509862 - DNA, 25 bp, Homo sapien
gacacaaggcccattgggcacgtct

SEQ ID NO: 509863 - DNA, 25 bp, Homo sapien
ttttatcctgacctatgcttgccaa

SEQ ID NO: 509864 - DNA, 25 bp, Homo sapien
gaatcacggaagtgtttttatcctg

SEQ ID NO: 509865 - DNA, 25 bp, Homo sapien
tgtcctcggtctggaatcacggaag

SEQ ID NO: 509866 - DNA, 25 bp, Homo sapien
ctgtatcgtagaaactgtcctcggt

SEQ ID NO: 509867 - DNA, 25 bp, Homo sapien
taccaggcatacaatcaatatagaa

SEQ ID NO: 509868 - DNA, 25 bp, Homo sapien
tcaaaatcacaacatagtagtcact

SEQ ID NO: 509869 - DNA, 25 bp, Homo sapien
taaaaagccgaagaagtctccatga

SEQ ID NO: 509870 - DNA, 25 bp, Homo sapien
tgaacctggctccttactgtaggct

SEQ ID NO: 509871 - DNA, 25 bp, Homo sapien
tcagccctggtatccactgagggat

SEQ ID NO: 509872 - DNA, 25 bp, Homo sapien
tatccttgtgctttgtggcctcggg

SEQ ID NO: 509873 - DNA, 25 bp, Homo sapien
tacaaatcagtttcctcagccctgg

SEQ ID NO: 509874 - DNA, 25 bp, Homo sapien
tatctgctacctcaggactgttgga

SEQ ID NO: 509875 - DNA, 25 bp, Homo sapien
gctacattagaagatgctctggaga

SEQ ID NO: 509876 - DNA, 25 bp, Homo sapien
caaatgattccccaatgaccctgaa

SEQ ID NO: 509877 - DNA, 25 bp, Homo sapien
agcatgcaggctcccagaatggtct

SEQ ID NO: 509878 - DNA, 25 bp, Homo sapien
gaatgggctcaattaatgtgctgcc

SEQ ID NO: 509879 - DNA, 25 bp, Homo sapien
tcctgtggcttgagagggaatccaa

SEQ ID NO: 509880 - DNA, 25 bp, Homo sapien
cacagtcgaccatgcagaaggagtt

SEQ ID NO: 509881 - DNA, 25 bp, Homo sapien
caagtggtctagctaacacagtcga

SEQ ID NO: 509882 - DNA, 25 bp, Homo sapien
ccaatgcaaggaattcaagggaagc

SEQ ID NO: 509883 - DNA, 25 bp, Homo sapien
tttccgggtggtcacatagtgcgac

SEQ ID NO: 509884 - DNA, 25 bp, Homo sapien
gaatagagggtgaaaggcatccagc

SEQ ID NO: 509885 - DNA, 25 bp, Homo sapien
aatgaggccgatcgtgaccagcttg

SEQ ID NO: 509886 - DNA, 25 bp, Homo sapien
ggttcccgaggtacacaagacaatg

SEQ ID NO: 509887 - DNA, 25 bp, Homo sapien
gactcgcggcggtctgtttgcaaca

SEQ ID NO: 509888 - DNA, 25 bp, Homo sapien
gaacaactgtttgacatctgggctg

SEQ ID NO: 509889 - DNA, 25 bp, Homo sapien
tacagcagggtgacaatccaagatc

SEQ ID NO: 509890 - DNA, 25 bp, Homo sapien
caaatgccacaagcttcgggaatga

SEQ ID NO: 509891 - DNA, 25 bp, Homo sapien
cgagggggctcctccggtgcttccg

SEQ ID NO: 509892 - DNA, 25 bp, Homo sapien
tccggtgcttccgaagcgcgtgggc

SEQ ID NO: 509893 - DNA, 25 bp, Homo sapien
cttccgaagcgcgtgggctactcgt

SEQ ID NO: 509894 - DNA, 25 bp, Homo sapien
cgcgtgggctactcgtgtcgcatgt

SEQ ID NO: 509895 - DNA, 25 bp, Homo sapien
ccaagatgatcctccagtttaaaga

SEQ ID NO: 509896 - DNA, 25 bp, Homo sapien
gcccaggggctcttgtatgaatgga

SEQ ID NO: 509897 - DNA, 25 bp, Homo sapien
aaagtgtgatagtcttgtcttgccc

SEQ ID NO: 509898 - DNA, 25 bp, Homo sapien
tcttgccctgtcagaggtgaaggtt

SEQ ID NO: 509899 - DNA, 25 bp, Homo sapien
cagcctgccttcccctggtgctcac

SEQ ID NO: 509900 - DNA, 25 bp, Homo sapien
ggagcctcaatcacccttgactttc

SEQ ID NO: 509901 - DNA, 25 bp, Homo sapien
tcagctccctggttgaggccctcat

SEQ ID NO: 509902 - DNA, 25 bp, Homo sapien
tcttctctaccccagcccaacagat

SEQ ID NO: 509903 - DNA, 25 bp, Homo sapien
cagcccaacagattcggagcctcaa

SEQ ID NO: 509904 - DNA, 25 bp, Homo sapien
ctggagttctttcctgttgatgtca

SEQ ID NO: 509905 - DNA, 25 bp, Homo sapien
cattgcaaatattctcaaaggcctt

SEQ ID NO: 509906 - DNA, 25 bp, Homo sapien
cagattcatcgaggtcatgggcaaa

SEQ ID NO: 509907 - DNA, 25 bp, Homo sapien
cattcagggatgctcgggtaaggct

SEQ ID NO: 509908 - DNA, 25 bp, Homo sapien
gatgacagctgaaagccggctggac

SEQ ID NO: 509909 - DNA, 25 bp, Homo sapien
gaatatcagacgcatcagagcacca

SEQ ID NO: 509910 - DNA, 25 bp, Homo sapien
tgcattcacgaggtgccctccagaa

SEQ ID NO: 509911 - DNA, 25 bp, Homo sapien
acagcaattcgtgcctgttccagct

SEQ ID NO: 509912 - DNA, 25 bp, Homo sapien
agctcctgagtccaagtcacttcgt

SEQ ID NO: 509913 - DNA, 25 bp, Homo sapien
gtcacttcgtgtcttccctgaacca

SEQ ID NO: 509914 - DNA, 25 bp, Homo sapien
caccggcctctgtgtgcgaggactg

SEQ ID NO: 509915 - DNA, 25 bp, Homo sapien
tcatcgctcatcagaggacatggac

SEQ ID NO: 509916 - DNA, 25 bp, Homo sapien
ctctccaggaaattacatgcacagg

SEQ ID NO: 509917 - DNA, 25 bp, Homo sapien
gacatggactgagcaccggcctctg

SEQ ID NO: 509918 - DNA, 25 bp, Homo sapien
gaagctggcaacaatggcatctcct

SEQ ID NO: 509919 - DNA, 25 bp, Homo sapien
ttctgaagaagctggcaacaatggc

SEQ ID NO: 509920 - DNA, 25 bp, Homo sapien
ggtggcaacaatggcatctccttct

SEQ ID NO: 509921 - DNA, 25 bp, Homo sapien
ctgtctgaaggtggcaacaatggca

SEQ ID NO: 509922 - DNA, 25 bp, Homo sapien
gatccatctgatttgatgccctgag

SEQ ID NO: 509923 - DNA, 25 bp, Homo sapien
gaaggagtctccctgaattggcaaa

SEQ ID NO: 509924 - DNA, 25 bp, Homo sapien
cactggtacagtgagaaggagtctc

SEQ ID NO: 509925 - DNA, 25 bp, Homo sapien
tccagcagattccatgagcagcgtc

SEQ ID NO: 509926 - DNA, 25 bp, Homo sapien
gcacagggttgacctggtgggcatg

SEQ ID NO: 509927 - DNA, 25 bp, Homo sapien
gcatgggcaagagccggagtaggca

SEQ ID NO: 509928 - DNA, 25 bp, Homo sapien
taggcagtggcagtttgggctgtga

SEQ ID NO: 509929 - DNA, 25 bp, Homo sapien
cacagggttgacctggtgggcatgg

SEQ ID NO: 509930 - DNA, 25 bp, Homo sapien
catagccttttactcagtttttggt

SEQ ID NO: 509931 - DNA, 25 bp, Homo sapien
ggcatttctaccctatcagtgcttt

SEQ ID NO: 509932 - DNA, 25 bp, Homo sapien
attttctatgcatttaatcctgctt

SEQ ID NO: 509933 - DNA, 25 bp, Homo sapien
aatccatagccttttactcagtttt

SEQ ID NO: 509934 - DNA, 25 bp, Homo sapien
cctgaaccagtagattccgaaaaca

SEQ ID NO: 509935 - DNA, 25 bp, Homo sapien
tcctgaaccagtagattccgaaaac

SEQ ID NO: 509936 - DNA, 25 bp, Homo sapien
ctgaaccagtagattccgaaaacat

SEQ ID NO: 509937 - DNA, 25 bp, Homo sapien
caattatctggtagaatcccaagtg

SEQ ID NO: 509938 - DNA, 25 bp, Homo sapien
ccaagtgactgtgtggactttctga

SEQ ID NO: 509939 - DNA, 25 bp, Homo sapien
gaaaaacctctagagacagataccc

SEQ ID NO: 509940 - DNA, 25 bp, Homo sapien
tgaaaatgatgagcacaccaggagc

SEQ ID NO: 509941 - DNA, 25 bp, Homo sapien
cgatgcctggtacttcatctctgaa

SEQ ID NO: 509942 - DNA, 25 bp, Homo sapien
tctgaatggtcctgggtcccaaagc

SEQ ID NO: 509943 - DNA, 25 bp, Homo sapien
ttcatctctgaatggtcctgggtcc

SEQ ID NO: 509944 - DNA, 25 bp, Homo sapien
tcctcctgctcgatgcctggtactt

SEQ ID NO: 509945 - DNA, 25 bp, Homo sapien
tccttgtggggatgctcgggcctct

SEQ ID NO: 509946 - DNA, 25 bp, Homo sapien
tcatctgtgatctaatccttgtggg

SEQ ID NO: 509947 - DNA, 25 bp, Homo sapien
cctggcgaatttccttgaagccaca

SEQ ID NO: 509948 - DNA, 25 bp, Homo sapien
ggcgaatttccttgaagccacactt

SEQ ID NO: 509949 - DNA, 25 bp, Homo sapien
cattcgttgtaactgatttcagcac

SEQ ID NO: 509950 - DNA, 25 bp, Homo sapien
acacctctcaggtgaattgcaatct

SEQ ID NO: 509951 - DNA, 25 bp, Homo sapien
ttgtgatttcattcgttgtaactga

SEQ ID NO: 509952 - DNA, 25 bp, Homo sapien
tctcaggtgaattgcaatctttact

SEQ ID NO: 509953 - DNA, 25 bp, Homo sapien
ggctgcttcctggggttttgtgttc

SEQ ID NO: 509954 - DNA, 25 bp, Homo sapien
cttatccttgtattctccaagctgc

SEQ ID NO: 509955 - DNA, 25 bp, Homo sapien
attcttatccttgtattctccaagc

SEQ ID NO: 509956 - DNA, 25 bp, Homo sapien
tgcttcctggggttttgtgttctct

SEQ ID NO: 509957 - DNA, 25 bp, Homo sapien
gatacaggcaggatatgagctatgg

SEQ ID NO: 509958 - DNA, 25 bp, Homo sapien
ttagcagcggttcatggtagaggct

SEQ ID NO: 509959 - DNA, 25 bp, Homo sapien
tagaccctcggcaactagatggatg

SEQ ID NO: 509960 - DNA, 25 bp, Homo sapien
tagatggatgccaaatgccagaacc

SEQ ID NO: 509961 - DNA, 25 bp, Homo sapien
ctgagaccacaggtgcatacagcca

SEQ ID NO: 509962 - DNA, 25 bp, Homo sapien
agctgagaccacaggtgcatacagc

SEQ ID NO: 509963 - DNA, 25 bp, Homo sapien
agaccacaggtgcatacagccacca

SEQ ID NO: 509964 - DNA, 25 bp, Homo sapien
tgagaccacaggtgcatacagccac

SEQ ID NO: 509965 - DNA, 25 bp, Homo sapien
ctgtggccttcttgagagttctctc

SEQ ID NO: 509966 - DNA, 25 bp, Homo sapien
ttcttgagagttctctccctggctg

SEQ ID NO: 509967 - DNA, 25 bp, Homo sapien
tggccttcttgagagttctctccct

SEQ ID NO: 509968 - DNA, 25 bp, Homo sapien
gccttcttgagagttctctccctgg

SEQ ID NO: 509969 - DNA, 25 bp, Homo sapien
tctgcccgccgggagggtgttctca

SEQ ID NO: 509970 - DNA, 25 bp, Homo sapien
agaggttctgcccgccgggagggtg

SEQ ID NO: 509971 - DNA, 25 bp, Homo sapien
ttctgcccgccgggagggtgttctc

SEQ ID NO: 509972 - DNA, 25 bp, Homo sapien
tgcccgccgggagggtgttctcacc

SEQ ID NO: 509973 - DNA, 25 bp, Homo sapien
tttcacagacatcggcagggtggac

SEQ ID NO: 509974 - DNA, 25 bp, Homo sapien
tcactttagctggaaactggcatca

SEQ ID NO: 509975 - DNA, 25 bp, Homo sapien
gcttctagaggtaatagccccagga

SEQ ID NO: 509976 - DNA, 25 bp, Homo sapien
tttaaacgtccttgctgggaggcag

SEQ ID NO: 509977 - DNA, 25 bp, Homo sapien
aaggatgctgatagtgtgatgtgat

SEQ ID NO: 509978 - DNA, 25 bp, Homo sapien
agggaaggatgctgatagtgtgatg

SEQ ID NO: 509979 - DNA, 25 bp, Homo sapien
accctcataagactcagttcctggc

SEQ ID NO: 509980 - DNA, 25 bp, Homo sapien
atgctgaggctcacaaccaccctca

SEQ ID NO: 509981 - DNA, 25 bp, Homo sapien
tcttgagccagtcccatttccagga

SEQ ID NO: 509982 - DNA, 25 bp, Homo sapien
tcatcttctctcagacagaattcct

SEQ ID NO: 509983 - DNA, 25 bp, Homo sapien
ccacccaatggagggctgaagtttt

SEQ ID NO: 509984 - DNA, 25 bp, Homo sapien
cagtgccaccatattgtcctgccac

SEQ ID NO: 509985 - DNA, 25 bp, Homo sapien
ggatttttcgctggcctccggcttc

SEQ ID NO: 509986 - DNA, 25 bp, Homo sapien
gaaactgacattgcttcccagctca

SEQ ID NO: 509987 - DNA, 25 bp, Homo sapien
ccggcgtagtgggttgtaacttctg

SEQ ID NO: 509988 - DNA, 25 bp, Homo sapien
tgggttgtaacttctgccagatgaa

SEQ ID NO: 509989 - DNA, 25 bp, Homo sapien
cagtgctgagttttgactaaaggaa

SEQ ID NO: 509990 - DNA, 25 bp, Homo sapien
cttggcccagatgaaccgtcacttt

SEQ ID NO: 509991 - DNA, 25 bp, Homo sapien
gcatatttgcctggagcctgtcagt

SEQ ID NO: 509992 - DNA, 25 bp, Homo sapien
tattttatcctctgttgtcatggag

SEQ ID NO: 509993 - DNA, 25 bp, Homo sapien
ctgtggctccctgatactaaaggaa

SEQ ID NO: 509994 - DNA, 25 bp, Homo sapien
aattgttaatgaggtctcagattcc

SEQ ID NO: 509995 - DNA, 25 bp, Homo sapien
tctcagattccaaagggctgtggct

SEQ ID NO: 509996 - DNA, 25 bp, Homo sapien
gcatttgactgattttggtgaagaa

SEQ ID NO: 509997 - DNA, 25 bp, Homo sapien
ggaagaaacgcactgctgagctcaa

SEQ ID NO: 509998 - DNA, 25 bp, Homo sapien
ttgtgatgcggctgctcctgatgct

SEQ ID NO: 509999 - DNA, 25 bp, Homo sapien
gctcaaagttgctgatcatttccca

SEQ ID NO: 510000 - DNA, 25 bp, Homo sapien
cacgctggtgttaatgttgtgatgc

SEQ ID NO: 510001 - DNA, 25 bp, Homo sapien
gggcactggacccaatgcttggtca

SEQ ID NO: 510002 - DNA, 25 bp, Homo sapien
caccctccttagaaagcttatcatg

SEQ ID NO: 510003 - DNA, 25 bp, Homo sapien
agatgatgggagaaccttagatgcc

SEQ ID NO: 510004 - DNA, 25 bp, Homo sapien
ccttagatgcccatgagtgggcact

SEQ ID NO: 510005 - DNA, 25 bp, Homo sapien
gtgtcctgctggtctactccccaga

SEQ ID NO: 510006 - DNA, 25 bp, Homo sapien
gaggctgaacgatgccacactgtgt

SEQ ID NO: 510007 - DNA, 25 bp, Homo sapien
caatgctattgctctctggaggctg

SEQ ID NO: 510008 - DNA, 25 bp, Homo sapien
tgtgtcctgtgaggtaacttgtcct

SEQ ID NO: 510009 - DNA, 25 bp, Homo sapien
agtgccgaccatgccggccactgtg

SEQ ID NO: 510010 - DNA, 25 bp, Homo sapien
tctaaatgcattggccccccgagtg

SEQ ID NO: 510011 - DNA, 25 bp, Homo sapien
cccatggtgacagaaggggtgtcct

SEQ ID NO: 510012 - DNA, 25 bp, Homo sapien
agctgctgtctaaatgcattggccc

SEQ ID NO: 510013 - DNA, 25 bp, Homo sapien
gggaagacatgctttgtccccctct

SEQ ID NO: 510014 - DNA, 25 bp, Homo sapien
ggaagacatgctttgtccccctctg

SEQ ID NO: 510015 - DNA, 25 bp, Homo sapien
ggctctagggctgccacagttcctt

SEQ ID NO: 510016 - DNA, 25 bp, Homo sapien
agttccttgagcctcactgtcttcc

SEQ ID NO: 510017 - DNA, 25 bp, Homo sapien
actattaatatcactctgactccca

SEQ ID NO: 510018 - DNA, 25 bp, Homo sapien
gttgctttcactattaatatcactc

SEQ ID NO: 510019 - DNA, 25 bp, Homo sapien
ttccggcagctgtaaaagggctctc

SEQ ID NO: 510020 - DNA, 25 bp, Homo sapien
ctgttccggcagctgtaaaagggct

SEQ ID NO: 510021 - DNA, 25 bp, Homo sapien
gccacctgcaattctgagtgctctc

SEQ ID NO: 510022 - DNA, 25 bp, Homo sapien
gcaattctgagtgctctcatacact

SEQ ID NO: 510023 - DNA, 25 bp, Homo sapien
cctgcaattctgagtgctctcatac

SEQ ID NO: 510024 - DNA, 25 bp, Homo sapien
tcatacactcttcccgtatggccat

SEQ ID NO: 510025 - DNA, 25 bp, Homo sapien
cagccatcgcctgggaaaggcttga

SEQ ID NO: 510026 - DNA, 25 bp, Homo sapien
atccccatctgagtgggtgcacagg

SEQ ID NO: 510027 - DNA, 25 bp, Homo sapien
caacaaactgtggataaatgaatgc

SEQ ID NO: 510028 - DNA, 25 bp, Homo sapien
agaaaggcgggaccatgatgactat

SEQ ID NO: 510029 - DNA, 25 bp, Homo sapien
cagtttctatagtcaaggccagcca

SEQ ID NO: 510030 - DNA, 25 bp, Homo sapien
tttctatagtcaaggccagccaaag

SEQ ID NO: 510031 - DNA, 25 bp, Homo sapien
caagttccagtttctatagtcaagg

SEQ ID NO: 510032 - DNA, 25 bp, Homo sapien
gttccagtttctatagtcaaggcca

SEQ ID NO: 510033 - DNA, 25 bp, Homo sapien
tggtgctccggaggccattggcttc

SEQ ID NO: 510034 - DNA, 25 bp, Homo sapien
cataaataatgggttgctggtcaac

SEQ ID NO: 510035 - DNA, 25 bp, Homo sapien
tatctgagtaaacccgttgttgaag

SEQ ID NO: 510036 - DNA, 25 bp, Homo sapien
tgttgaagccagatagggccttcgg

SEQ ID NO: 510037 - DNA, 25 bp, Homo sapien
gcaacaagcagaatgtccatgcttc

SEQ ID NO: 510038 - DNA, 25 bp, Homo sapien
gaaatggatcggcaacaagcagaat

SEQ ID NO: 510039 - DNA, 25 bp, Homo sapien
catgcaggggaaatggatcggcaac

SEQ ID NO: 510040 - DNA, 25 bp, Homo sapien
gatctggttgtcagcaccgccatgc

SEQ ID NO: 510041 - DNA, 25 bp, Homo sapien
tttggttttgccattgacagaggct

SEQ ID NO: 510042 - DNA, 25 bp, Homo sapien
tgccattgacagaggctcggatcaa

SEQ ID NO: 510043 - DNA, 25 bp, Homo sapien
gttttgccattgacagaggctcgga

SEQ ID NO: 510044 - DNA, 25 bp, Homo sapien
tttgccattgacagaggctcggatc

SEQ ID NO: 510045 - DNA, 25 bp, Homo sapien
tggtcaaaggcggacaagggccctg

SEQ ID NO: 510046 - DNA, 25 bp, Homo sapien
gtcaaaggcggacaagggccctgta

SEQ ID NO: 510047 - DNA, 25 bp, Homo sapien
ggccctgtagatcctcgtgtgtgaa

SEQ ID NO: 510048 - DNA, 25 bp, Homo sapien
aaaggcggacaagggccctgtagat

SEQ ID NO: 510049 - DNA, 25 bp, Homo sapien
accaggtggtcccagcatgcagact

SEQ ID NO: 510050 - DNA, 25 bp, Homo sapien
gggcaccaggtggtcccagcatgca

SEQ ID NO: 510051 - DNA, 25 bp, Homo sapien
catgcagactcccaccctggctgtg

SEQ ID NO: 510052 - DNA, 25 bp, Homo sapien
ctgtccctgttcctgcccctgggca

SEQ ID NO: 510053 - DNA, 25 bp, Homo sapien
agcgtttacggaacgagggtgtgct

SEQ ID NO: 510054 - DNA, 25 bp, Homo sapien
gaacgagggtgtgctttcaccttcc

SEQ ID NO: 510055 - DNA, 25 bp, Homo sapien
ctctaaagctttccaagcctgatcc

SEQ ID NO: 510056 - DNA, 25 bp, Homo sapien
taaagctttccaagcctgatccagt

SEQ ID NO: 510057 - DNA, 25 bp, Homo sapien
taatacaaagtgtgaatggccttct

SEQ ID NO: 510058 - DNA, 25 bp, Homo sapien
taacacagcttggtatgcacacgtc

SEQ ID NO: 510059 - DNA, 25 bp, Homo sapien
gggaaatcttgaaccgtaacacagc

SEQ ID NO: 510060 - DNA, 25 bp, Homo sapien
tggtttcgccttccctggtctgatg

SEQ ID NO: 510061 - DNA, 25 bp, Homo sapien
tcaggtggcagagcaatccatggag

SEQ ID NO: 510062 - DNA, 25 bp, Homo sapien
caagcaaagtcaaagtggttaaggc

SEQ ID NO: 510063 - DNA, 25 bp, Homo sapien
tccatggaggcttcagactgatgcc

SEQ ID NO: 510064 - DNA, 25 bp, Homo sapien
ccagtgacagctgactgcaagcaaa

SEQ ID NO: 510065 - DNA, 25 bp, Homo sapien
tccacgcagcacggtcgctgggaag

SEQ ID NO: 510066 - DNA, 25 bp, Homo sapien
gtccacgcagcacggtcgctgggaa

SEQ ID NO: 510067 - DNA, 25 bp, Homo sapien
cacgcagcacggtcgctgggaaggc

SEQ ID NO: 510068 - DNA, 25 bp, Homo sapien
cactggtgggaaagaccgccccgct

SEQ ID NO: 510069 - DNA, 25 bp, Homo sapien
acaaagccaactcggaagcaacgca

SEQ ID NO: 510070 - DNA, 25 bp, Homo sapien
ccctggaagtgcctgtctgacgtca

SEQ ID NO: 510071 - DNA, 25 bp, Homo sapien
ccttttctgcacttgaccccagcca

SEQ ID NO: 510072 - DNA, 25 bp, Homo sapien
ccatggcctttagctgggggctaat

SEQ ID NO: 510073 - DNA, 25 bp, Homo sapien
gacatgtgcaggagactcccgggtc

SEQ ID NO: 510074 - DNA, 25 bp, Homo sapien
gccatgagaaggcagccgggctggc

SEQ ID NO: 510075 - DNA, 25 bp, Homo sapien
gggaggacatgtgcaggagactccc

SEQ ID NO: 510076 - DNA, 25 bp, Homo sapien
catgtggccatgagaaggcagccgg

SEQ ID NO: 510077 - DNA, 25 bp, Homo sapien
gattgcttcgagcttggggtcatcc

SEQ ID NO: 510078 - DNA, 25 bp, Homo sapien
ttcccagcaacacagatgtgatgag

SEQ ID NO: 510079 - DNA, 25 bp, Homo sapien
gtcatccccgtattttgaaaagagc

SEQ ID NO: 510080 - DNA, 25 bp, Homo sapien
caacacagatgtgatgagggattgc

SEQ ID NO: 510081 - DNA, 25 bp, Homo sapien
caagcggagcctatcagtgcacaat

SEQ ID NO: 510082 - DNA, 25 bp, Homo sapien
gccctgcccgggtaatgattaactg

SEQ ID NO: 510083 - DNA, 25 bp, Homo sapien
gtgcacaatccaaacaccagccaag

SEQ ID NO: 510084 - DNA, 25 bp, Homo sapien
catctctgaggttttctgctgtggc

SEQ ID NO: 510085 - DNA, 25 bp, Homo sapien
ataaagtgcagttgcctgacaccgg

SEQ ID NO: 510086 - DNA, 25 bp, Homo sapien
ctgctaccgccttctgccagtggaa

SEQ ID NO: 510087 - DNA, 25 bp, Homo sapien
gctaccaatgtggtggagccccgag

SEQ ID NO: 510088 - DNA, 25 bp, Homo sapien
ctctgcagagggcacgtcatggcca

SEQ ID NO: 510089 - DNA, 25 bp, Homo sapien
cagccaggcgacacccagcagtccc

SEQ ID NO: 510090 - DNA, 25 bp, Homo sapien
agccaggcgacacccagcagtccct

SEQ ID NO: 510091 - DNA, 25 bp, Homo sapien
ggaaggcagcatgccgagggatgct

SEQ ID NO: 510092 - DNA, 25 bp, Homo sapien
cctgcgtgtttggtgctccctctct

SEQ ID NO: 510093 - DNA, 25 bp, Homo sapien
ctctgttgctctcagctgctccagc

SEQ ID NO: 510094 - DNA, 25 bp, Homo sapien
gctgctgccggccatccccagtgtc

SEQ ID NO: 510095 - DNA, 25 bp, Homo sapien
ttccaggagggagtccacacaggcc

SEQ ID NO: 510096 - DNA, 25 bp, Homo sapien
aggagggagtccacacaggccacct

SEQ ID NO: 510097 - DNA, 25 bp, Homo sapien
ccaggagggagtccacacaggccac

SEQ ID NO: 510098 - DNA, 25 bp, Homo sapien
ctttccaggagggagtccacacagg

SEQ ID NO: 510099 - DNA, 25 bp, Homo sapien
tgtgcttctgggattcgtagccctt

SEQ ID NO: 510100 - DNA, 25 bp, Homo sapien
ctgtgcttctgggattcgtagccct

SEQ ID NO: 510101 - DNA, 25 bp, Homo sapien
gactctggggccggcaggtggtcat

SEQ ID NO: 510102 - DNA, 25 bp, Homo sapien
ggactctggggccggcaggtggtca

SEQ ID NO: 510103 - DNA, 25 bp, Homo sapien
tgcacccgggagcttgtgctccagt

SEQ ID NO: 510104 - DNA, 25 bp, Homo sapien
gagcctccataggatagtggcccca

SEQ ID NO: 510105 - DNA, 25 bp, Homo sapien
ctggattatcgttgcctttgggctc

SEQ ID NO: 510106 - DNA, 25 bp, Homo sapien
gagtaagtgacccagatctctgagg

SEQ ID NO: 510107 - DNA, 25 bp, Homo sapien
taaacaagacctcaagcagacgaac

SEQ ID NO: 510108 - DNA, 25 bp, Homo sapien
ttacgtaaacaagacctcaagcaga

SEQ ID NO: 510109 - DNA, 25 bp, Homo sapien
cctcaagcagacgaacgagggtctc

SEQ ID NO: 510110 - DNA, 25 bp, Homo sapien
agcagacgaacgagggtctccttcc

SEQ ID NO: 510111 - DNA, 25 bp, Homo sapien
tagcaaggacctagctccggaaaag

SEQ ID NO: 510112 - DNA, 25 bp, Homo sapien
tgtccagttgaccaagatccctctg

SEQ ID NO: 510113 - DNA, 25 bp, Homo sapien
tcaaggacagggcacaggatgagtc

SEQ ID NO: 510114 - DNA, 25 bp, Homo sapien
tccggaaaagtgctctgaacgcagc

SEQ ID NO: 510115 - DNA, 25 bp, Homo sapien
tatgaaatgggtaccctgcccgtaa

SEQ ID NO: 510116 - DNA, 25 bp, Homo sapien
gtaagagcctgatgacacacgggac

SEQ ID NO: 510117 - DNA, 25 bp, Homo sapien
gtttcaaggaccaggaggcacgagt

SEQ ID NO: 510118 - DNA, 25 bp, Homo sapien
caaggatggactgatgtttcaagga

SEQ ID NO: 510119 - DNA, 25 bp, Homo sapien
ccctggctaaagctgtccctgcagg

SEQ ID NO: 510120 - DNA, 25 bp, Homo sapien
tagaccaggggcgatgtttgcccac

SEQ ID NO: 510121 - DNA, 25 bp, Homo sapien
tgcaggcctgttcagtcgccaacct

SEQ ID NO: 510122 - DNA, 25 bp, Homo sapien
cacttagaccaggggcgatgtttgc

SEQ ID NO: 510123 - DNA, 25 bp, Homo sapien
ccacctcggtggcaaaatatttaat

SEQ ID NO: 510124 - DNA, 25 bp, Homo sapien
gtttctgtcgagttcctcaggctct

SEQ ID NO: 510125 - DNA, 25 bp, Homo sapien
tagcatcacccgtatctgtaggtgg

SEQ ID NO: 510126 - DNA, 25 bp, Homo sapien
catcatccccatggtttctgtcgag

SEQ ID NO: 510127 - DNA, 25 bp, Homo sapien
tgttcacctccacggcggtgagatt

SEQ ID NO: 510128 - DNA, 25 bp, Homo sapien
catggaggttcatgaaccgggcgtc

SEQ ID NO: 510129 - DNA, 25 bp, Homo sapien
tgaaccgggcgtccttgttcacctc

SEQ ID NO: 510130 - DNA, 25 bp, Homo sapien
gtccttgttcacctccacggcggtg

SEQ ID NO: 510131 - DNA, 25 bp, Homo sapien
ccctgggactgtgacacaaggtcct

SEQ ID NO: 510132 - DNA, 25 bp, Homo sapien
attccctgggactgtgacacaaggt

SEQ ID NO: 510133 - DNA, 25 bp, Homo sapien
ttccctgggactgtgacacaaggtc

SEQ ID NO: 510134 - DNA, 25 bp, Homo sapien
tccctgggactgtgacacaaggtcc

SEQ ID NO: 510135 - DNA, 25 bp, Homo sapien
cacacgtggcggtgaacttggtctt

SEQ ID NO: 510136 - DNA, 25 bp, Homo sapien
aatcaccccagcacacgtggcggtg

SEQ ID NO: 510137 - DNA, 25 bp, Homo sapien
agcagcagagtgtgacccagtcggg

SEQ ID NO: 510138 - DNA, 25 bp, Homo sapien
ggtcttcctgacaaagagaggcagc

SEQ ID NO: 510139 - DNA, 25 bp, Homo sapien
gctggagctacgtctgccagaccca

SEQ ID NO: 510140 - DNA, 25 bp, Homo sapien
actcgttagaccaacacctgctgga

SEQ ID NO: 510141 - DNA, 25 bp, Homo sapien
cctcctagacccacgtctactggag

SEQ ID NO: 510142 - DNA, 25 bp, Homo sapien
tactggagccaaactcgttagacca

SEQ ID NO: 510143 - DNA, 25 bp, Homo sapien
ctgtctgaactttgaatgtttgtga

SEQ ID NO: 510144 - DNA, 25 bp, Homo sapien
cacttctaaacccaagctttcccag

SEQ ID NO: 510145 - DNA, 25 bp, Homo sapien
ggatgcctgcccgatcaatctcaga

SEQ ID NO: 510146 - DNA, 25 bp, Homo sapien
cccaggtcctttgacatgggaggtg

SEQ ID NO: 510147 - DNA, 25 bp, Homo sapien
tggtgaagccaatagatcaggagac

SEQ ID NO: 510148 - DNA, 25 bp, Homo sapien
cagggaatacgtgggccaagagcct

SEQ ID NO: 510149 - DNA, 25 bp, Homo sapien
aagatagctgtgacagatcccggcg

SEQ ID NO: 510150 - DNA, 25 bp, Homo sapien
cctggaatgggaaagctcacactag

SEQ ID NO: 510151 - DNA, 25 bp, Homo sapien
caggtttcactgaagatctcagtgc

SEQ ID NO: 510152 - DNA, 25 bp, Homo sapien
agtgctcccggcagcaacggcccat

SEQ ID NO: 510153 - DNA, 25 bp, Homo sapien
caaccaggtttcactgaagatctca

SEQ ID NO: 510154 - DNA, 25 bp, Homo sapien
gcaacggcccatgcttttccaggct

SEQ ID NO: 510155 - DNA, 25 bp, Homo sapien
atcagtgcctccgatgcctggagcc

SEQ ID NO: 510156 - DNA, 25 bp, Homo sapien
cttcccgccacatcagtgcctccga

SEQ ID NO: 510157 - DNA, 25 bp, Homo sapien
gccacggcagcaaggagcaggttgg

SEQ ID NO: 510158 - DNA, 25 bp, Homo sapien
caaggagcaggttggcaaagcgaca

SEQ ID NO: 510159 - DNA, 25 bp, Homo sapien
atctgcaatgatggcatccacctca

SEQ ID NO: 510160 - DNA, 25 bp, Homo sapien
ttaacaatctcagaaaggctctgca

SEQ ID NO: 510161 - DNA, 25 bp, Homo sapien
tgtggattctcatccaaaaacaatc

SEQ ID NO: 510162 - DNA, 25 bp, Homo sapien
ttctcatccaaaaacaatcccacgt

SEQ ID NO: 510163 - DNA, 25 bp, Homo sapien
tcttggtaggcatccgaaccagtcc

SEQ ID NO: 510164 - DNA, 25 bp, Homo sapien
ggtaggcatccgaaccagtcctttc

SEQ ID NO: 510165 - DNA, 25 bp, Homo sapien
taggcatccgaaccagtcctttcac

SEQ ID NO: 510166 - DNA, 25 bp, Homo sapien
tggtaggcatccgaaccagtccttt

SEQ ID NO: 510167 - DNA, 25 bp, Homo sapien
ctccatgggtgattttctgggtctt

SEQ ID NO: 510168 - DNA, 25 bp, Homo sapien
catgggtgattttctgggtctttaa

SEQ ID NO: 510169 - DNA, 25 bp, Homo sapien
tccatgggtgattttctgggtcttt

SEQ ID NO: 510170 - DNA, 25 bp, Homo sapien
ccatgggtgattttctgggtcttta

SEQ ID NO: 510171 - DNA, 25 bp, Homo sapien
gaaatccggattgggaagcctgctc

SEQ ID NO: 510172 - DNA, 25 bp, Homo sapien
catcttcctaaactttcatccgtag

SEQ ID NO: 510173 - DNA, 25 bp, Homo sapien
tatctaaatccagcctccgattcca

SEQ ID NO: 510174 - DNA, 25 bp, Homo sapien
tgttgggatcagtactacatcttcc

SEQ ID NO: 510175 - DNA, 25 bp, Homo sapien
ggctggccaagcgagctcctgattc

SEQ ID NO: 510176 - DNA, 25 bp, Homo sapien
tcctgaggtacaaagaatctacggc

SEQ ID NO: 510177 - DNA, 25 bp, Homo sapien
gacacgcttcgtgtggaaccctgtg

SEQ ID NO: 510178 - DNA, 25 bp, Homo sapien
aagtggatgaccctgtgactgagtc

SEQ ID NO: 510179 - DNA, 25 bp, Homo sapien
ctcataaaaacacagctggacattt

SEQ ID NO: 510180 - DNA, 25 bp, Homo sapien
ttttggtgctcttggggttctcctc

SEQ ID NO: 510181 - DNA, 25 bp, Homo sapien
ggtgctcttggggttctcctccact

SEQ ID NO: 510182 - DNA, 25 bp, Homo sapien
tcataaaaacacagctggacatttt

SEQ ID NO: 510183 - DNA, 25 bp, Homo sapien
aaaaaattttgctggagcactacat

SEQ ID NO: 510184 - DNA, 25 bp, Homo sapien
aaaattttgctggagcactacattc

SEQ ID NO: 510185 - DNA, 25 bp, Homo sapien
taaaaaaattttgctggagcactac

SEQ ID NO: 510186 - DNA, 25 bp, Homo sapien
aaattttgctggagcactacattca

SEQ ID NO: 510187 - DNA, 25 bp, Homo sapien
tgtgtcataactgggtaaaactgca

SEQ ID NO: 510188 - DNA, 25 bp, Homo sapien
agatgaaggactgaaggaaggtttc

SEQ ID NO: 510189 - DNA, 25 bp, Homo sapien
tccagccaatgacaggtgcacatgg

SEQ ID NO: 510190 - DNA, 25 bp, Homo sapien
tggatgatggcaccgtgcagggtga

SEQ ID NO: 510191 - DNA, 25 bp, Homo sapien
tcctgtttgcctgaaacatctgcat

SEQ ID NO: 510192 - DNA, 25 bp, Homo sapien
ctcctgtttgcctgaaacatctgca

SEQ ID NO: 510193 - DNA, 25 bp, Homo sapien
taatgtgtagaaatccagatactgc

SEQ ID NO: 510194 - DNA, 25 bp, Homo sapien
cagatactgcgatgcccctactttg

SEQ ID NO: 510195 - DNA, 25 bp, Homo sapien
tattgggaaaataagtcagatgctt

SEQ ID NO: 510196 - DNA, 25 bp, Homo sapien
tagcatccagtaaaagtccacccac

SEQ ID NO: 510197 - DNA, 25 bp, Homo sapien
tgaggatgtcactgtctcacagatg

SEQ ID NO: 510198 - DNA, 25 bp, Homo sapien
taaggatagccacggttaggagcct

SEQ ID NO: 510199 - DNA, 25 bp, Homo sapien
tagcaggctatcacccaaaagcgat

SEQ ID NO: 510200 - DNA, 25 bp, Homo sapien
tgttaacaggcacaggtaccgctaa

SEQ ID NO: 510201 - DNA, 25 bp, Homo sapien
tatactgatggttagaggccccaag

SEQ ID NO: 510202 - DNA, 25 bp, Homo sapien
aaccaacatacaacctcacgatgct

SEQ ID NO: 510203 - DNA, 25 bp, Homo sapien
aacctcacgatgctttcttcatggg

SEQ ID NO: 510204 - DNA, 25 bp, Homo sapien
gaacaagtatgtgattaccaggaac

SEQ ID NO: 510205 - DNA, 25 bp, Homo sapien
acactagaacttgctttaatatgaa

SEQ ID NO: 510206 - DNA, 25 bp, Homo sapien
ctttaatatgaaatttaacttggct

SEQ ID NO: 510207 - DNA, 25 bp, Homo sapien
tacactagaacttgctttaatatga

SEQ ID NO: 510208 - DNA, 25 bp, Homo sapien
ttgctttaatatgaaatttaacttg

SEQ ID NO: 510209 - DNA, 25 bp, Homo sapien
caggctgctagggttatgatgaaca

SEQ ID NO: 510210 - DNA, 25 bp, Homo sapien
taagcagcccaattaagtgactctg

SEQ ID NO: 510211 - DNA, 25 bp, Homo sapien
gattggtataccaccactgcaccag

SEQ ID NO: 510212 - DNA, 25 bp, Homo sapien
ttgtacaaaacacctctagccaggg

SEQ ID NO: 510213 - DNA, 25 bp, Homo sapien
tatttagccagagatatcagttcct

SEQ ID NO: 510214 - DNA, 25 bp, Homo sapien
gtttttacatcaggaaggcaactgc

SEQ ID NO: 510215 - DNA, 25 bp, Homo sapien
tatcgtgtgcaaagtgtgctactgc

SEQ ID NO: 510216 - DNA, 25 bp, Homo sapien
tcaactaccatgatcggaagggctt

SEQ ID NO: 510217 - DNA, 25 bp, Homo sapien
gactgatagaaaaggatgtaaccag

SEQ ID NO: 510218 - DNA, 25 bp, Homo sapien
gaaaaggatgtaaccagactcagag

SEQ ID NO: 510219 - DNA, 25 bp, Homo sapien
ggatgtaaccagactcagagttctt

SEQ ID NO: 510220 - DNA, 25 bp, Homo sapien
tcccgagactgatagaaaaggatgt

SEQ ID NO: 510221 - DNA, 25 bp, Homo sapien
ttgagacggagttcactcttattgc

SEQ ID NO: 510222 - DNA, 25 bp, Homo sapien
tgagacggagttcactcttattgcc

SEQ ID NO: 510223 - DNA, 25 bp, Homo sapien
aatgtcgtcatcaaacaacaaccaa

SEQ ID NO: 510224 - DNA, 25 bp, Homo sapien
atgtcgtcatcaaacaacaaccaaa

SEQ ID NO: 510225 - DNA, 25 bp, Homo sapien
caatgtcgtcatcaaacaacaacca

SEQ ID NO: 510226 - DNA, 25 bp, Homo sapien
taagacagggctagcaatgcacgtc

SEQ ID NO: 510227 - DNA, 25 bp, Homo sapien
tgatataaaagtagagccacaggag

SEQ ID NO: 510228 - DNA, 25 bp, Homo sapien
taactatgactatgattgcccctgc

SEQ ID NO: 510229 - DNA, 25 bp, Homo sapien
gaagggctgaacttccacctaagga

SEQ ID NO: 510230 - DNA, 25 bp, Homo sapien
tgagtcaggcatctcagctcagtat

SEQ ID NO: 510231 - DNA, 25 bp, Homo sapien
gatttaagtagagtaggactgtcac

SEQ ID NO: 510232 - DNA, 25 bp, Homo sapien
cagtagctaagcgatttacatctcc

SEQ ID NO: 510233 - DNA, 25 bp, Homo sapien
tgaagaggctaatcggtgtgagaaa

SEQ ID NO: 510234 - DNA, 25 bp, Homo sapien
gattggtggcatcacctgaagtgtt

SEQ ID NO: 510235 - DNA, 25 bp, Homo sapien
ctggattggtggcatcacctgaagt

SEQ ID NO: 510236 - DNA, 25 bp, Homo sapien
tggtggcatcacctgaagtgttaaa

SEQ ID NO: 510237 - DNA, 25 bp, Homo sapien
ttccacagtgaaccacaacagcaac

SEQ ID NO: 510238 - DNA, 25 bp, Homo sapien
ggcacacacggaataaagggagagt

SEQ ID NO: 510239 - DNA, 25 bp, Homo sapien
gggtcaggcacacacggaataaagg

SEQ ID NO: 510240 - DNA, 25 bp, Homo sapien
cctggtaagaacaggactggtccca

SEQ ID NO: 510241 - DNA, 25 bp, Homo sapien
ttcttcaatacctggtaagaacagg

SEQ ID NO: 510242 - DNA, 25 bp, Homo sapien
ctgacgctgctatcaactaaggtta

SEQ ID NO: 510243 - DNA, 25 bp, Homo sapien
cattctttgatcttccataagaagc

SEQ ID NO: 510244 - DNA, 25 bp, Homo sapien
agcaattcagtcagatcgtcaggat

SEQ ID NO: 510245 - DNA, 25 bp, Homo sapien
cagtcagatcgtcaggatcctcttc

SEQ ID NO: 510246 - DNA, 25 bp, Homo sapien
ggaaatcacttcagggtacacagtt

SEQ ID NO: 510247 - DNA, 25 bp, Homo sapien
gaaagcctcaaagccaaatatttta

SEQ ID NO: 510248 - DNA, 25 bp, Homo sapien
catgctaagagaatgtacaacatcc

SEQ ID NO: 510249 - DNA, 25 bp, Homo sapien
taatcgctagacataggaaatcact

SEQ ID NO: 510250 - DNA, 25 bp, Homo sapien
gcgacactcttcacagtaatacttg

SEQ ID NO: 510251 - DNA, 25 bp, Homo sapien
tgctgcgacactcttcacagtaata

SEQ ID NO: 510252 - DNA, 25 bp, Homo sapien
gcttcctgtttgctgcgacactctt

SEQ ID NO: 510253 - DNA, 25 bp, Homo sapien
tgtttgctgcgacactcttcacagt

SEQ ID NO: 510254 - DNA, 25 bp, Homo sapien
ttgatgtattttgttccacgtcaac

SEQ ID NO: 510255 - DNA, 25 bp, Homo sapien
aattgatgtattttgttccacgtca

SEQ ID NO: 510256 - DNA, 25 bp, Homo sapien
atgtattttgttccacgtcaacaga

SEQ ID NO: 510257 - DNA, 25 bp, Homo sapien
cttaagcagtgagtaattgatgtat

SEQ ID NO: 510258 - DNA, 25 bp, Homo sapien
ccatcctgaaggtacgtgtgcaaca

SEQ ID NO: 510259 - DNA, 25 bp, Homo sapien
cgatggaagatacagcaacactaca

SEQ ID NO: 510260 - DNA, 25 bp, Homo sapien
taagatgccattccactgtacgatg

SEQ ID NO: 510261 - DNA, 25 bp, Homo sapien
aacaggagatacgtctgactcagca

SEQ ID NO: 510262 - DNA, 25 bp, Homo sapien
taggctagccagatcaggccggaat

SEQ ID NO: 510263 - DNA, 25 bp, Homo sapien
tcacctgggtgcatgagttactacg

SEQ ID NO: 510264 - DNA, 25 bp, Homo sapien
tggtgccaagcggtcatcaagtagg

SEQ ID NO: 510265 - DNA, 25 bp, Homo sapien
caaggatgctctagatcacctgggt

SEQ ID NO: 510266 - DNA, 25 bp, Homo sapien
tgaactagtagccaaaattataccc

SEQ ID NO: 510267 - DNA, 25 bp, Homo sapien
gaaaaacaagtcacggactgggaga

SEQ ID NO: 510268 - DNA, 25 bp, Homo sapien
aatatttgccaaagacccacctgat

SEQ ID NO: 510269 - DNA, 25 bp, Homo sapien
ggacaaaagatctggacacatcact

SEQ ID NO: 510270 - DNA, 25 bp, Homo sapien
gtttcattagttaatgttccctgaa

SEQ ID NO: 510271 - DNA, 25 bp, Homo sapien
cattagttaatgttccctgaaaaat

SEQ ID NO: 510272 - DNA, 25 bp, Homo sapien
ttcattagttaatgttccctgaaaa

SEQ ID NO: 510273 - DNA, 25 bp, Homo sapien
ggtttcattagttaatgttccctga

SEQ ID NO: 510274 - DNA, 25 bp, Homo sapien
ggtctggtgtgctgttattattttc

SEQ ID NO: 510275 - DNA, 25 bp, Homo sapien
atattaccattaggtaaacgaccat

SEQ ID NO: 510276 - DNA, 25 bp, Homo sapien
tatcaatattaccattaggtaaacg

SEQ ID NO: 510277 - DNA, 25 bp, Homo sapien
gcatcttgttgcatgtagttgtcaa

SEQ ID NO: 510278 - DNA, 25 bp, Homo sapien
aatacatgacaagggactgggaaat

SEQ ID NO: 510279 - DNA, 25 bp, Homo sapien
cataaatgaagacaagtgacgaaca

SEQ ID NO: 510280 - DNA, 25 bp, Homo sapien
tgcagggaagtaaatttgtgtacac

SEQ ID NO: 510281 - DNA, 25 bp, Homo sapien
taaagttgttactacctcagccacc

SEQ ID NO: 510282 - DNA, 25 bp, Homo sapien
tccgggtcacaaatctggaaccacc

SEQ ID NO: 510283 - DNA, 25 bp, Homo sapien
acccatttccgggtcacaaatctgg

SEQ ID NO: 510284 - DNA, 25 bp, Homo sapien
catttccgggtcacaaatctggaac

SEQ ID NO: 510285 - DNA, 25 bp, Homo sapien
gggtcacaaatctggaaccacccac

SEQ ID NO: 510286 - DNA, 25 bp, Homo sapien
tctccacggcacatgaaacgctgct

SEQ ID NO: 510287 - DNA, 25 bp, Homo sapien
cctcacttgagggagaccaagactt

SEQ ID NO: 510288 - DNA, 25 bp, Homo sapien
gcttgtccatgcaggttccttaaga

SEQ ID NO: 510289 - DNA, 25 bp, Homo sapien
tcatccctaggactgacaaccgtgc

SEQ ID NO: 510290 - DNA, 25 bp, Homo sapien
ccaaacagtccagttgagggtcaac

SEQ ID NO: 510291 - DNA, 25 bp, Homo sapien
gcagccaaagggtcttctcaaacaa

SEQ ID NO: 510292 - DNA, 25 bp, Homo sapien
gagggtcaactctagctaacacaat

SEQ ID NO: 510293 - DNA, 25 bp, Homo sapien
tagtagatcacccacaggcagtacc

SEQ ID NO: 510294 - DNA, 25 bp, Homo sapien
gaagagatctgctaagcatgtaaga

SEQ ID NO: 510295 - DNA, 25 bp, Homo sapien
ggaagagatctgctaagcatgtaag

SEQ ID NO: 510296 - DNA, 25 bp, Homo sapien
tggaagagatctgctaagcatgtaa

SEQ ID NO: 510297 - DNA, 25 bp, Homo sapien
gcactcaggcatgcaaaatgctccc

SEQ ID NO: 510298 - DNA, 25 bp, Homo sapien
gacctcaggcactcaggcatgcaaa

SEQ ID NO: 510299 - DNA, 25 bp, Homo sapien
tcagtctgtggagtaactgggacct

SEQ ID NO: 510300 - DNA, 25 bp, Homo sapien
tgtggagtaactgggacctcaggca

SEQ ID NO: 510301 - DNA, 25 bp, Homo sapien
tactccaatggacgtcagttcctca

SEQ ID NO: 510302 - DNA, 25 bp, Homo sapien
taagatgttctaagggaatgccctc

SEQ ID NO: 510303 - DNA, 25 bp, Homo sapien
gagtacctcacccagaagtcatctt

SEQ ID NO: 510304 - DNA, 25 bp, Homo sapien
tccagcagagtagaccagacattga

SEQ ID NO: 510305 - DNA, 25 bp, Homo sapien
aaagcacagggaatcacacacatca

SEQ ID NO: 510306 - DNA, 25 bp, Homo sapien
taagtgagaggagtaatgagtagcc

SEQ ID NO: 510307 - DNA, 25 bp, Homo sapien
tatgcatagtgcacagagacattcc

SEQ ID NO: 510308 - DNA, 25 bp, Homo sapien
taaagacaaagcgtcctctgatggt

SEQ ID NO: 510309 - DNA, 25 bp, Homo sapien
aaactgttctggaccaatctctttc

SEQ ID NO: 510310 - DNA, 25 bp, Homo sapien
ttgaccggaaactgttctggaccaa

SEQ ID NO: 510311 - DNA, 25 bp, Homo sapien
aactgttctggaccaatctctttct

SEQ ID NO: 510312 - DNA, 25 bp, Homo sapien
gaccggaaactgttctggaccaatc

SEQ ID NO: 510313 - DNA, 25 bp, Homo sapien
aaagtgacctgtagctctttccgtg

SEQ ID NO: 510314 - DNA, 25 bp, Homo sapien
acaataagaaagtgacctgtagctc

SEQ ID NO: 510315 - DNA, 25 bp, Homo sapien
gtgacctgtagctctttccgtgtca

SEQ ID NO: 510316 - DNA, 25 bp, Homo sapien
taagaaagtgacctgtagctctttc

SEQ ID NO: 510317 - DNA, 25 bp, Homo sapien
gtaaacacttactgccagaagctag

SEQ ID NO: 510318 - DNA, 25 bp, Homo sapien
tgtaaacacttactgccagaagcta

SEQ ID NO: 510319 - DNA, 25 bp, Homo sapien
atgtaaacacttactgccagaagct

SEQ ID NO: 510320 - DNA, 25 bp, Homo sapien
gctgaagttggagccgagactgcac

SEQ ID NO: 510321 - DNA, 25 bp, Homo sapien
gagaaaaagctattggtcaactgcc

SEQ ID NO: 510322 - DNA, 25 bp, Homo sapien
gaagacattggtggtctccacttga

SEQ ID NO: 510323 - DNA, 25 bp, Homo sapien
tgtttactcgcagtctaatcaagcc

SEQ ID NO: 510324 - DNA, 25 bp, Homo sapien
tatagaagtgtaaggtatttcccag

SEQ ID NO: 510325 - DNA, 25 bp, Homo sapien
gggtaatagggccaaatcctgtctc

SEQ ID NO: 510326 - DNA, 25 bp, Homo sapien
ggaggtcgaaacaggcagatccttt

SEQ ID NO: 510327 - DNA, 25 bp, Homo sapien
gcaggtctcctcaactatagaagtg

SEQ ID NO: 510328 - DNA, 25 bp, Homo sapien
aaaatcttgagagtactagccctta

SEQ ID NO: 510329 - DNA, 25 bp, Homo sapien
ttacacatcacattacacactgact

SEQ ID NO: 510330 - DNA, 25 bp, Homo sapien
cactcacaacaataccagttacagg

SEQ ID NO: 510331 - DNA, 25 bp, Homo sapien
caaaagtctgtaactctataccaca

SEQ ID NO: 510332 - DNA, 25 bp, Homo sapien
catttaaagcttagtgtcctggccg

SEQ ID NO: 510333 - DNA, 25 bp, Homo sapien
tgacaagagtggaaacgtcacttcc

SEQ ID NO: 510334 - DNA, 25 bp, Homo sapien
tcggtacattagagttacagatcct

SEQ ID NO: 510335 - DNA, 25 bp, Homo sapien
gctgtgctatcatccattaatcggt

SEQ ID NO: 510336 - DNA, 25 bp, Homo sapien
gactggtagtgtgctaacagtacct

SEQ ID NO: 510337 - DNA, 25 bp, Homo sapien
tctcctgctgagactggtagtgtgc

SEQ ID NO: 510338 - DNA, 25 bp, Homo sapien
tgtgctaacagtacctgaagtaaaa

SEQ ID NO: 510339 - DNA, 25 bp, Homo sapien
aagtattggtagctaattttcctga

SEQ ID NO: 510340 - DNA, 25 bp, Homo sapien
ccagcgacctccataactttagaat

SEQ ID NO: 510341 - DNA, 25 bp, Homo sapien
cctgaggcggaacatattaaaaaat

SEQ ID NO: 510342 - DNA, 25 bp, Homo sapien
taaatgcactctaatatccctaaaa

SEQ ID NO: 510343 - DNA, 25 bp, Homo sapien
tcagaatcctgtgcctaagaatttg

SEQ ID NO: 510344 - DNA, 25 bp, Homo sapien
cacaaagcgtcatctttcaaggccg

SEQ ID NO: 510345 - DNA, 25 bp, Homo sapien
gtgtgtagcgttcccctccacaaag

SEQ ID NO: 510346 - DNA, 25 bp, Homo sapien
atcagaagttaactacaggccaggt

SEQ ID NO: 510347 - DNA, 25 bp, Homo sapien
aacccaggtagaccaatactgtaga

SEQ ID NO: 510348 - DNA, 25 bp, Homo sapien
catgggccaggtactagtcaacaac

SEQ ID NO: 510349 - DNA, 25 bp, Homo sapien
catgacacagtgattaccatgggcc

SEQ ID NO: 510350 - DNA, 25 bp, Homo sapien
ttaaagggcagtaacagccaacatg

SEQ ID NO: 510351 - DNA, 25 bp, Homo sapien
atgaatactttttaccacagggagg

SEQ ID NO: 510352 - DNA, 25 bp, Homo sapien
aagaaaagacagccagtttcacctg

SEQ ID NO: 510353 - DNA, 25 bp, Homo sapien
gaaaagacagccagtttcacctgtg

SEQ ID NO: 510354 - DNA, 25 bp, Homo sapien
aaagacagccagtttcacctgtgcc

SEQ ID NO: 510355 - DNA, 25 bp, Homo sapien
tgaccacacatacccttacctggat

SEQ ID NO: 510356 - DNA, 25 bp, Homo sapien
cattaccaccatgttctaatggatc

SEQ ID NO: 510357 - DNA, 25 bp, Homo sapien
catgttctaatggatctaatctcat

SEQ ID NO: 510358 - DNA, 25 bp, Homo sapien
tttaccagctttggcctcattacca

SEQ ID NO: 510359 - DNA, 25 bp, Homo sapien
ctttggcctcattaccaccatgttc

SEQ ID NO: 510360 - DNA, 25 bp, Homo sapien
tcctgcaccaacaacttctccgttg

SEQ ID NO: 510361 - DNA, 25 bp, Homo sapien
ccaacaacttctccgttgtctggtc

SEQ ID NO: 510362 - DNA, 25 bp, Homo sapien
ctcccaacaacgccttcctaaccat

SEQ ID NO: 510363 - DNA, 25 bp, Homo sapien
tgcaccaacaacttctccgttgtct

SEQ ID NO: 510364 - DNA, 25 bp, Homo sapien
gaaagaacaatcatccagttgggaa

SEQ ID NO: 510365 - DNA, 25 bp, Homo sapien
ggagtcttcaatgattcatccttca

SEQ ID NO: 510366 - DNA, 25 bp, Homo sapien
tttgtactgttcctcagcgtgtagt

SEQ ID NO: 510367 - DNA, 25 bp, Homo sapien
tactgtcgattttatgtccacctga

SEQ ID NO: 510368 - DNA, 25 bp, Homo sapien
tggaggcgaatttggagactgtcat

SEQ ID NO: 510369 - DNA, 25 bp, Homo sapien
agatggaggcgaatttggagactgt

SEQ ID NO: 510370 - DNA, 25 bp, Homo sapien
ggtacagatggaggcgaatttggag

SEQ ID NO: 510371 - DNA, 25 bp, Homo sapien
catggtacagatggaggcgaatttg

SEQ ID NO: 510372 - DNA, 25 bp, Homo sapien
atcttccacccaatcacagcggcgg

SEQ ID NO: 510373 - DNA, 25 bp, Homo sapien
cgagccgccgcggacccaaccaccg

SEQ ID NO: 510374 - DNA, 25 bp, Homo sapien
ggcgctcaggcactcccggcctcgg

SEQ ID NO: 510375 - DNA, 25 bp, Homo sapien
gacccaaccaccgagcccgctgggc

SEQ ID NO: 510376 - DNA, 25 bp, Homo sapien
cgctcaggcactcccggcctcgggc

SEQ ID NO: 510377 - DNA, 25 bp, Homo sapien
agggcaggaccgaaggcgggcgcca

SEQ ID NO: 510378 - DNA, 25 bp, Homo sapien
caggaccgaaggcgggcgccacctc

SEQ ID NO: 510379 - DNA, 25 bp, Homo sapien
ggcaggaccgaaggcgggcgccacc

SEQ ID NO: 510380 - DNA, 25 bp, Homo sapien
agagggcaggaccgaaggcgggcgc

SEQ ID NO: 510381 - DNA, 25 bp, Homo sapien
ccagcactatcaaaaggaagaggtt

SEQ ID NO: 510382 - DNA, 25 bp, Homo sapien
tgggccccagtctatcacgtgatca

SEQ ID NO: 510383 - DNA, 25 bp, Homo sapien
gccttgggttgttcttccagcacta

SEQ ID NO: 510384 - DNA, 25 bp, Homo sapien
taaaggacaagcatctatttgcctg

SEQ ID NO: 510385 - DNA, 25 bp, Homo sapien
gctttctgccacaaaccttgaggat

SEQ ID NO: 510386 - DNA, 25 bp, Homo sapien
caaatgacagatttacgagaatttt

SEQ ID NO: 510387 - DNA, 25 bp, Homo sapien
aaccttgaggatacacaaatgacag

SEQ ID NO: 510388 - DNA, 25 bp, Homo sapien
ccttgaggatacacaaatgacagat

SEQ ID NO: 510389 - DNA, 25 bp, Homo sapien
ggtaacaagtaaatgcacatgtgtc

SEQ ID NO: 510390 - DNA, 25 bp, Homo sapien
acatgtgtctctccaaagctccaac

SEQ ID NO: 510391 - DNA, 25 bp, Homo sapien
caggtaacaagtaaatgcacatgtg

SEQ ID NO: 510392 - DNA, 25 bp, Homo sapien
tgtctctccaaagctccaaccaggg

SEQ ID NO: 510393 - DNA, 25 bp, Homo sapien
gctggtaaacagcaaggagttttgc

SEQ ID NO: 510394 - DNA, 25 bp, Homo sapien
gccgcagactggcacgcaattcccc

SEQ ID NO: 510395 - DNA, 25 bp, Homo sapien
agactggcacgcaattcccccagag

SEQ ID NO: 510396 - DNA, 25 bp, Homo sapien
aggagttttgcatcttaaggattct

SEQ ID NO: 510397 - DNA, 25 bp, Homo sapien
cattatacaatggtgaagaccccta

SEQ ID NO: 510398 - DNA, 25 bp, Homo sapien
tgttcttaacaggacacttcagtca

SEQ ID NO: 510399 - DNA, 25 bp, Homo sapien
taaaaggaatgcacggttgttcacc

SEQ ID NO: 510400 - DNA, 25 bp, Homo sapien
tcagtcaaaatagcttgtgattcct

SEQ ID NO: 510401 - DNA, 25 bp, Homo sapien
tttggcttagtgactcagcttttgg

SEQ ID NO: 510402 - DNA, 25 bp, Homo sapien
cataaaacttggcttccgatcccgc

SEQ ID NO: 510403 - DNA, 25 bp, Homo sapien
agtttcctgtatctgtgctctgtca

SEQ ID NO: 510404 - DNA, 25 bp, Homo sapien
ttttggattggccacttggctgggc

SEQ ID NO: 510405 - DNA, 25 bp, Homo sapien
ggagagccaacaccaccagtcagtc

SEQ ID NO: 510406 - DNA, 25 bp, Homo sapien
ttgtcaccaccgatgaggacggaga

SEQ ID NO: 510407 - DNA, 25 bp, Homo sapien
ccaccagtcagtcacccaagctgga

SEQ ID NO: 510408 - DNA, 25 bp, Homo sapien
cgatgaggacggagagccaacacca

SEQ ID NO: 510409 - DNA, 25 bp, Homo sapien
aatttaaataatctgcctgcttcca

SEQ ID NO: 510410 - DNA, 25 bp, Homo sapien
tgtgttaacttgaagggtgtcgctc

SEQ ID NO: 510411 - DNA, 25 bp, Homo sapien
tctcttgttccatggcaccaccgta

SEQ ID NO: 510412 - DNA, 25 bp, Homo sapien
gtactgcagcagagttcttccttct

SEQ ID NO: 510413 - DNA, 25 bp, Homo sapien
ggccagacctgacctgtaatcttta

SEQ ID NO: 510414 - DNA, 25 bp, Homo sapien
tgtgagtcttcactcagatctctgg

SEQ ID NO: 510415 - DNA, 25 bp, Homo sapien
tccctgactgggatactgaccctgt

SEQ ID NO: 510416 - DNA, 25 bp, Homo sapien
tccctcactaaacctagagttctgg

SEQ ID NO: 510417 - DNA, 25 bp, Homo sapien
ttttgttgcattgttgccaatattg

SEQ ID NO: 510418 - DNA, 25 bp, Homo sapien
actcccgctggagagtagagtgtgt

SEQ ID NO: 510419 - DNA, 25 bp, Homo sapien
tcccgctggagagtagagtgtgtcc

SEQ ID NO: 510420 - DNA, 25 bp, Homo sapien
gcattgttgccaatattgtgtatta

SEQ ID NO: 510421 - DNA, 25 bp, Homo sapien
caaggtaccatattttcaggtggca

SEQ ID NO: 510422 - DNA, 25 bp, Homo sapien
cacatcagtgtgtatgagatcaggc

SEQ ID NO: 510423 - DNA, 25 bp, Homo sapien
gacctccttctactgtttcctcaaa

SEQ ID NO: 510424 - DNA, 25 bp, Homo sapien
ggacaaaaggtctaatctaatgtca

SEQ ID NO: 510425 - DNA, 25 bp, Homo sapien
aggaacacatggtggtccaggctcc

SEQ ID NO: 510426 - DNA, 25 bp, Homo sapien
gctttattaatggatcttcatggta

SEQ ID NO: 510427 - DNA, 25 bp, Homo sapien
tcaacacatacccatggccttatgg

SEQ ID NO: 510428 - DNA, 25 bp, Homo sapien
accagccagaaatgatgaggtgttg

SEQ ID NO: 510429 - DNA, 25 bp, Homo sapien
tcagcaacttgggaaagagtaaact

SEQ ID NO: 510430 - DNA, 25 bp, Homo sapien
agaggtgtgtggactatgcacagaa

SEQ ID NO: 510431 - DNA, 25 bp, Homo sapien
taccatgtaaatgtcccccacagca

SEQ ID NO: 510432 - DNA, 25 bp, Homo sapien
gattcatcagattagtcagcaactt

SEQ ID NO: 510433 - DNA, 25 bp, Homo sapien
agatgccatcagtgctggtttcttc

SEQ ID NO: 510434 - DNA, 25 bp, Homo sapien
ccaagatcagatgccatcagtgctg

SEQ ID NO: 510435 - DNA, 25 bp, Homo sapien
agatcagatgccatcagtgctggtt

SEQ ID NO: 510436 - DNA, 25 bp, Homo sapien
gtccaagatcagatgccatcagtgc

SEQ ID NO: 510437 - DNA, 25 bp, Homo sapien
actgtccgcaacttcccaactcagc

SEQ ID NO: 510438 - DNA, 25 bp, Homo sapien
tggttactgtccgcaacttcccaac

SEQ ID NO: 510439 - DNA, 25 bp, Homo sapien
gttactgtccgcaacttcccaactc

SEQ ID NO: 510440 - DNA, 25 bp, Homo sapien
ctggttactgtccgcaacttcccaa

SEQ ID NO: 510441 - DNA, 25 bp, Homo sapien
tacacagaatctataagggacttaa

SEQ ID NO: 510442 - DNA, 25 bp, Homo sapien
cctatttcatttgacaaccagaaac

SEQ ID NO: 510443 - DNA, 25 bp, Homo sapien
acataaccaagtgctagttccccac

SEQ ID NO: 510444 - DNA, 25 bp, Homo sapien
tcaccagacagaagtctaattgctc

SEQ ID NO: 510445 - DNA, 25 bp, Homo sapien
gaagtctaattgctcccctatttca

SEQ ID NO: 510446 - DNA, 25 bp, Homo sapien
tgatttctgagcagtttcattagaa

SEQ ID NO: 510447 - DNA, 25 bp, Homo sapien
atttctgagcagtttcattagaaat

SEQ ID NO: 510448 - DNA, 25 bp, Homo sapien
ctggttgatttctgagcagtttcat

SEQ ID NO: 510449 - DNA, 25 bp, Homo sapien
gttgatttctgagcagtttcattag

SEQ ID NO: 510450 - DNA, 25 bp, Homo sapien
gcataatcacaggataaattaaagt

SEQ ID NO: 510451 - DNA, 25 bp, Homo sapien
aatcagcataatcacaggataaatt

SEQ ID NO: 510452 - DNA, 25 bp, Homo sapien
gtaaaaatccaatacttcagttcaa

SEQ ID NO: 510453 - DNA, 25 bp, Homo sapien
gaatatcagtgaagcaaaatcagca

SEQ ID NO: 510454 - DNA, 25 bp, Homo sapien
gggcagtgctcctaagctttttggt

SEQ ID NO: 510455 - DNA, 25 bp, Homo sapien
ttcaggaacttccagtgacaacccc

SEQ ID NO: 510456 - DNA, 25 bp, Homo sapien
aatctattgccatatgccgtttggc

SEQ ID NO: 510457 - DNA, 25 bp, Homo sapien
gccgtttggctgaagtacaggaata

SEQ ID NO: 510458 - DNA, 25 bp, Homo sapien
tactgatatggtttgcctccgcgtt

SEQ ID NO: 510459 - DNA, 25 bp, Homo sapien
cattggagctaatgacacaaaccta

SEQ ID NO: 510460 - DNA, 25 bp, Homo sapien
cacattgaccattagtgaatcagga

SEQ ID NO: 510461 - DNA, 25 bp, Homo sapien
gaagttagacatacacctactgata

SEQ ID NO: 510462 - DNA, 25 bp, Homo sapien
ggttgactggaagggatgtctaccc

SEQ ID NO: 510463 - DNA, 25 bp, Homo sapien
gagagtgcaattctggtccccttag

SEQ ID NO: 510464 - DNA, 25 bp, Homo sapien
tcctaagaatatgcacatgggacag

SEQ ID NO: 510465 - DNA, 25 bp, Homo sapien
caatgtcccaatgtccactccgtaa

SEQ ID NO: 510466 - DNA, 25 bp, Homo sapien
gaggatatttatttaagatggtggt

SEQ ID NO: 510467 - DNA, 25 bp, Homo sapien
cagaggatatttatttaagatggtg

SEQ ID NO: 510468 - DNA, 25 bp, Homo sapien
acagaggatatttatttaagatggt

SEQ ID NO: 510469 - DNA, 25 bp, Homo sapien
cacagaggatatttatttaagatgg

SEQ ID NO: 510470 - DNA, 25 bp, Homo sapien
tagcagaccgcttgttttgtaaatg

SEQ ID NO: 510471 - DNA, 25 bp, Homo sapien
gcagataaatgtggcactcctcggg

SEQ ID NO: 510472 - DNA, 25 bp, Homo sapien
gaaccttactataggaagcagataa

SEQ ID NO: 510473 - DNA, 25 bp, Homo sapien
tgtaaatgaaccttactataggaag

SEQ ID NO: 510474 - DNA, 25 bp, Homo sapien
cctttccttaatgtggaagtagaag

SEQ ID NO: 510475 - DNA, 25 bp, Homo sapien
gctggaaaatcaccgctttgtaacc

SEQ ID NO: 510476 - DNA, 25 bp, Homo sapien
gaggaacacaattggtttagaggga

SEQ ID NO: 510477 - DNA, 25 bp, Homo sapien
catttagacatgtaaatgaacgaat

SEQ ID NO: 510478 - DNA, 25 bp, Homo sapien
ttggagtcctccagtaatgtgtaag

SEQ ID NO: 510479 - DNA, 25 bp, Homo sapien
tcagaatactagtgctaagaactcc

SEQ ID NO: 510480 - DNA, 25 bp, Homo sapien
cactccagaattctatcgagggctg

SEQ ID NO: 510481 - DNA, 25 bp, Homo sapien
taatctaaataggacagtccggcaa

SEQ ID NO: 510482 - DNA, 25 bp, Homo sapien
ttagtgtccaagactgattttaccc

SEQ ID NO: 510483 - DNA, 25 bp, Homo sapien
gtttagtgtccaagactgattttac

SEQ ID NO: 510484 - DNA, 25 bp, Homo sapien
tttagtgtccaagactgattttacc

SEQ ID NO: 510485 - DNA, 25 bp, Homo sapien
ttgtcttctacgatggaatgctctt

SEQ ID NO: 510486 - DNA, 25 bp, Homo sapien
catgctacattgtcttctacgatgg

SEQ ID NO: 510487 - DNA, 25 bp, Homo sapien
cgtcacatgctacattgtcttctac

SEQ ID NO: 510488 - DNA, 25 bp, Homo sapien
attgtcttctacgatggaatgctct

SEQ ID NO: 510489 - DNA, 25 bp, Homo sapien
caactactaatagcacttcccgcac

SEQ ID NO: 510490 - DNA, 25 bp, Homo sapien
gcgtcctcttgatcgcccttgaagg

SEQ ID NO: 510491 - DNA, 25 bp, Homo sapien
gcagttttccctgcggagacgcgga

SEQ ID NO: 510492 - DNA, 25 bp, Homo sapien
gacgcaaaggatggcgtaagcacgc

SEQ ID NO: 510493 - DNA, 25 bp, Homo sapien
atacaaggcagcttccggcgaaggc

SEQ ID NO: 510494 - DNA, 25 bp, Homo sapien
gttaaaccatgttctgccagacggg

SEQ ID NO: 510495 - DNA, 25 bp, Homo sapien
agcgtgcgccgggtcgggtctgggc

SEQ ID NO: 510496 - DNA, 25 bp, Homo sapien
gctgagaaccggactgcgatgttgc

SEQ ID NO: 510497 - DNA, 25 bp, Homo sapien
gtccattggcatgggcgggttaaac

SEQ ID NO: 510498 - DNA, 25 bp, Homo sapien
tttattccaaatcttgcgatgatgt

SEQ ID NO: 510499 - DNA, 25 bp, Homo sapien
agtgtggcttttttattccaaatct

SEQ ID NO: 510500 - DNA, 25 bp, Homo sapien
caaatcttgcgatgatgttgggtga

SEQ ID NO: 510501 - DNA, 25 bp, Homo sapien
tgtgggggccgcgtggcctgatgcc

SEQ ID NO: 510502 - DNA, 25 bp, Homo sapien
tagttaatgcataagacgatttccg

SEQ ID NO: 510503 - DNA, 25 bp, Homo sapien
taatgcataagacgatttccgactg

SEQ ID NO: 510504 - DNA, 25 bp, Homo sapien
tgcccttagttaatgcataagacga

SEQ ID NO: 510505 - DNA, 25 bp, Homo sapien
cataagacgatttccgactgttttt

SEQ ID NO: 510506 - DNA, 25 bp, Homo sapien
tggtaggagtaatggccaggaatgg

SEQ ID NO: 510507 - DNA, 25 bp, Homo sapien
gtaggagtaatggccaggaatggca

SEQ ID NO: 510508 - DNA, 25 bp, Homo sapien
taggagtaatggccaggaatggcat

SEQ ID NO: 510509 - DNA, 25 bp, Homo sapien
ggtaggagtaatggccaggaatggc

SEQ ID NO: 510510 - DNA, 25 bp, Homo sapien
atatgttctctaggccttttagaaa

SEQ ID NO: 510511 - DNA, 25 bp, Homo sapien
tatatgttctctaggccttttagaa

SEQ ID NO: 510512 - DNA, 25 bp, Homo sapien
ttctctaggccttttagaaaacatg

SEQ ID NO: 510513 - DNA, 25 bp, Homo sapien
tcctttggccacatatatgcgaatc

SEQ ID NO: 510514 - DNA, 25 bp, Homo sapien
cctttggccacatatatgcgaatct

SEQ ID NO: 510515 - DNA, 25 bp, Homo sapien
ggccacatatatgcgaatctataag

SEQ ID NO: 510516 - DNA, 25 bp, Homo sapien
tttggccacatatatgcgaatctat

SEQ ID NO: 510517 - DNA, 25 bp, Homo sapien
aatggcatgatctcacctcaacctc

SEQ ID NO: 510518 - DNA, 25 bp, Homo sapien
gcatgcaccatgattcctggctaat

SEQ ID NO: 510519 - DNA, 25 bp, Homo sapien
cctcgggtgatctgctggactcagc

SEQ ID NO: 510520 - DNA, 25 bp, Homo sapien
acaggcgtgcaccatgatacctggc

SEQ ID NO: 510521 - DNA, 25 bp, Homo sapien
ggcattgttgtaaacaaacaagtta

SEQ ID NO: 510522 - DNA, 25 bp, Homo sapien
ggaatgccccacaagtgttaccatg

SEQ ID NO: 510523 - DNA, 25 bp, Homo sapien
gttggcattgttgtaaacaaacaag

SEQ ID NO: 510524 - DNA, 25 bp, Homo sapien
atgccccacaagtgttaccatggca

SEQ ID NO: 510525 - DNA, 25 bp, Homo sapien
gtacctgggttcaactaaagcgcca

SEQ ID NO: 510526 - DNA, 25 bp, Homo sapien
agccgagatagcttcctgaaacgtg

SEQ ID NO: 510527 - DNA, 25 bp, Homo sapien
tacctgggttcaactaaagcgccag

SEQ ID NO: 510528 - DNA, 25 bp, Homo sapien
ctgaaacgtgtgaaggaaaatgatc

SEQ ID NO: 510529 - DNA, 25 bp, Homo sapien
atgaattcatggcataataggtgtt

SEQ ID NO: 510530 - DNA, 25 bp, Homo sapien
ttcatggcataataggtgttaaaaa

SEQ ID NO: 510531 - DNA, 25 bp, Homo sapien
ctggaacctattccctatgaattca

SEQ ID NO: 510532 - DNA, 25 bp, Homo sapien
gaacctattccctatgaattcatgg

SEQ ID NO: 510533 - DNA, 25 bp, Homo sapien
aaagagttggtattgacagggctct

SEQ ID NO: 510534 - DNA, 25 bp, Homo sapien
tacctactctactgtggaatgaagg

SEQ ID NO: 510535 - DNA, 25 bp, Homo sapien
gtttcactgattatcctggtctatg

SEQ ID NO: 510536 - DNA, 25 bp, Homo sapien
acagtataggaggaacagtaagacc

SEQ ID NO: 510537 - DNA, 25 bp, Homo sapien
aagcgcacagcctcggcgatagtca

SEQ ID NO: 510538 - DNA, 25 bp, Homo sapien
ctagaggccactcgcgcgctctgga

SEQ ID NO: 510539 - DNA, 25 bp, Homo sapien
cgaggagactcgcagaatgcctgac

SEQ ID NO: 510540 - DNA, 25 bp, Homo sapien
gacggtggccgtatctccagggtct

SEQ ID NO: 510541 - DNA, 25 bp, Homo sapien
gtccgggcactttctgctcgcaccc

SEQ ID NO: 510542 - DNA, 25 bp, Homo sapien
tccgggcactttctgctcgcaccca

SEQ ID NO: 510543 - DNA, 25 bp, Homo sapien
ccgggcactttctgctcgcacccat

SEQ ID NO: 510544 - DNA, 25 bp, Homo sapien
gaactctgattggtgtctcgcagtg

SEQ ID NO: 510545 - DNA, 25 bp, Homo sapien
tgctaaaacgttacaagccatgagt

SEQ ID NO: 510546 - DNA, 25 bp, Homo sapien
cggcaggaggtctttaaatgggaca

SEQ ID NO: 510547 - DNA, 25 bp, Homo sapien
gagagggattttaataacggcagga

SEQ ID NO: 510548 - DNA, 25 bp, Homo sapien
gaactgagatcaaacatcccatggg

SEQ ID NO: 510549 - DNA, 25 bp, Homo sapien
ggaactgagatcaaacatcccatgg

SEQ ID NO: 510550 - DNA, 25 bp, Homo sapien
catggccaggtgaccttgagtcacc

SEQ ID NO: 510551 - DNA, 25 bp, Homo sapien
aagctgcgtccagactgcctcagta

SEQ ID NO: 510552 - DNA, 25 bp, Homo sapien
tgctgggtgagttgatccagccaag

SEQ ID NO: 510553 - DNA, 25 bp, Homo sapien
tttgaaagccattctaggatgggca

SEQ ID NO: 510554 - DNA, 25 bp, Homo sapien
tctacggcagcccttggtggttcat

SEQ ID NO: 510555 - DNA, 25 bp, Homo sapien
ctctacggcagcccttggtggttca

SEQ ID NO: 510556 - DNA, 25 bp, Homo sapien
ctttcttttgtctaggaggcagcag

SEQ ID NO: 510557 - DNA, 25 bp, Homo sapien
tgctttcttttgtctaggaggcagc

SEQ ID NO: 510558 - DNA, 25 bp, Homo sapien
ttctcccacacatgcaggtaagctg

SEQ ID NO: 510559 - DNA, 25 bp, Homo sapien
tgatgctccgctctggggattcttg

SEQ ID NO: 510560 - DNA, 25 bp, Homo sapien
ggcactgatgctccgctctggggat

SEQ ID NO: 510561 - DNA, 25 bp, Homo sapien
tgggcactgatgctccgctctgggg

SEQ ID NO: 510562 - DNA, 25 bp, Homo sapien
cctttacagttcttgagtgccttga

SEQ ID NO: 510563 - DNA, 25 bp, Homo sapien
cagttcttgagtgccttgaaagtgc

SEQ ID NO: 510564 - DNA, 25 bp, Homo sapien
ttgagtgccttgaaagtgccgaatc

SEQ ID NO: 510565 - DNA, 25 bp, Homo sapien
tacaagcttccctttacagttcttg

SEQ ID NO: 510566 - DNA, 25 bp, Homo sapien
tcaaacagcttgtaatcgtcactgc

SEQ ID NO: 510567 - DNA, 25 bp, Homo sapien
gaaggaagaaccatctgcctccctc

SEQ ID NO: 510568 - DNA, 25 bp, Homo sapien
gcttgtaatcgtcactgcttccttc

SEQ ID NO: 510569 - DNA, 25 bp, Homo sapien
atcctttcatcggaaggaagaacca

SEQ ID NO: 510570 - DNA, 25 bp, Homo sapien
catgcccatgattgtgctaagcttc

SEQ ID NO: 510571 - DNA, 25 bp, Homo sapien
gaagctatgccggatcatgcccatg

SEQ ID NO: 510572 - DNA, 25 bp, Homo sapien
tcaggggcacaggaagctgtaccct

SEQ ID NO: 510573 - DNA, 25 bp, Homo sapien
ctgctctgcagtgctcaagaagcta

SEQ ID NO: 510574 - DNA, 25 bp, Homo sapien
gcttgtctcatcactccaacatagg

SEQ ID NO: 510575 - DNA, 25 bp, Homo sapien
acgtgcacacgctttgccacttcca

SEQ ID NO: 510576 - DNA, 25 bp, Homo sapien
gttctctgatccactgtctccgctg

SEQ ID NO: 510577 - DNA, 25 bp, Homo sapien
cccagctgattcagtgttctctgat

SEQ ID NO: 510578 - DNA, 25 bp, Homo sapien
tagaccagtgtctaatcctcccact

SEQ ID NO: 510579 - DNA, 25 bp, Homo sapien
ccgcttgtattagtttccagctcaa

SEQ ID NO: 510580 - DNA, 25 bp, Homo sapien
tccagctcaaacattgtgctctcca

SEQ ID NO: 510581 - DNA, 25 bp, Homo sapien
catgtacccaaaggtaaccgcttgt

SEQ ID NO: 510582 - DNA, 25 bp, Homo sapien
gccactccaggaggttttgatgcag

SEQ ID NO: 510583 - DNA, 25 bp, Homo sapien
gactcactcacattgagactgggaa

SEQ ID NO: 510584 - DNA, 25 bp, Homo sapien
gagtgagagaaccagcagcgtttcc

SEQ ID NO: 510585 - DNA, 25 bp, Homo sapien
catctccagaacaggcttcgaggaa

SEQ ID NO: 510586 - DNA, 25 bp, Homo sapien
ggcgatcactgttgagacggccgtc

SEQ ID NO: 510587 - DNA, 25 bp, Homo sapien
tccagtccagtccagtacggtccag

SEQ ID NO: 510588 - DNA, 25 bp, Homo sapien
gcctggtccgacaggcctctgagct

SEQ ID NO: 510589 - DNA, 25 bp, Homo sapien
tcactgttgagacggccgtcattgt

SEQ ID NO: 510590 - DNA, 25 bp, Homo sapien
cctttgtattcaaggtttcttctga

SEQ ID NO: 510591 - DNA, 25 bp, Homo sapien
tttttgctgagtgagtaactgaccc

SEQ ID NO: 510592 - DNA, 25 bp, Homo sapien
aagaagggagccaagatctgtgaac

SEQ ID NO: 510593 - DNA, 25 bp, Homo sapien
tgaaccctgcctgatgtgcggagtg

SEQ ID NO: 510594 - DNA, 25 bp, Homo sapien
tagcatgccgtggactgcagagtga

SEQ ID NO: 510595 - DNA, 25 bp, Homo sapien
ggacactgatgctggttcccattca

SEQ ID NO: 510596 - DNA, 25 bp, Homo sapien
tgtctctatggaaggtagcatgccg

SEQ ID NO: 510597 - DNA, 25 bp, Homo sapien
cacagggctttctcctatcctggga

SEQ ID NO: 510598 - DNA, 25 bp, Homo sapien
ggagacaccagcaggagtgtaggag

SEQ ID NO: 510599 - DNA, 25 bp, Homo sapien
ccagcaggagtgtaggagtgtgact

SEQ ID NO: 510600 - DNA, 25 bp, Homo sapien
gccgtgttcttgatagttctaacat

SEQ ID NO: 510601 - DNA, 25 bp, Homo sapien
gctgtctgttgggtgccgtgttctt

SEQ ID NO: 510602 - DNA, 25 bp, Homo sapien
taattagccttcagaaaacgatgac

SEQ ID NO: 510603 - DNA, 25 bp, Homo sapien
caagcattccatgacccaatttgtc

SEQ ID NO: 510604 - DNA, 25 bp, Homo sapien
gacacaaggtcccacttcaagcatt

SEQ ID NO: 510605 - DNA, 25 bp, Homo sapien
tcatcctgctatatcgaggccagtc

SEQ ID NO: 510606 - DNA, 25 bp, Homo sapien
caaggatggtcctacagcttaccta

SEQ ID NO: 510607 - DNA, 25 bp, Homo sapien
acaggagggcacgaagagagtttca

SEQ ID NO: 510608 - DNA, 25 bp, Homo sapien
tgctcaaagttatagcccagagtgc

SEQ ID NO: 510609 - DNA, 25 bp, Homo sapien
taagcacattctggcaaacctcagg

SEQ ID NO: 510610 - DNA, 25 bp, Homo sapien
cctgccccagagtctttacggagag

SEQ ID NO: 510611 - DNA, 25 bp, Homo sapien
gtctttacggagaggcttccaggtc

SEQ ID NO: 510612 - DNA, 25 bp, Homo sapien
tcacttctcaggtgccgcgtaagcc

SEQ ID NO: 510613 - DNA, 25 bp, Homo sapien
cacaggagccgtgggtcctccctga

SEQ ID NO: 510614 - DNA, 25 bp, Homo sapien
gaatcgcatcgcatttgtcatgagc

SEQ ID NO: 510615 - DNA, 25 bp, Homo sapien
tctgttgctagatgcctcacatgag

SEQ ID NO: 510616 - DNA, 25 bp, Homo sapien
aatcacatagtgtttgccgtgagcg

SEQ ID NO: 510617 - DNA, 25 bp, Homo sapien
tttgcatagcatttgtcacgagccg

SEQ ID NO: 510618 - DNA, 25 bp, Homo sapien
acttcggcccatggaaacgtcctgg

SEQ ID NO: 510619 - DNA, 25 bp, Homo sapien
agagcaacccttacatccctggact

SEQ ID NO: 510620 - DNA, 25 bp, Homo sapien
tcttgggtctccacagacagagtca

SEQ ID NO: 510621 - DNA, 25 bp, Homo sapien
taccaaaggtgtcaaatggctgcag

SEQ ID NO: 510622 - DNA, 25 bp, Homo sapien
tacttcacagatgtagcagagactt

SEQ ID NO: 510623 - DNA, 25 bp, Homo sapien
acttcacagatgtagcagagacttt

SEQ ID NO: 510624 - DNA, 25 bp, Homo sapien
tctacttcacagatgtagcagagac

SEQ ID NO: 510625 - DNA, 25 bp, Homo sapien
ctctacttcacagatgtagcagaga

SEQ ID NO: 510626 - DNA, 25 bp, Homo sapien
cattctggtgccaagaggtgtcact

SEQ ID NO: 510627 - DNA, 25 bp, Homo sapien
tctgccggtgagcaatagaagcgtc

SEQ ID NO: 510628 - DNA, 25 bp, Homo sapien
gaatgcccagcaaagtcctgacttg

SEQ ID NO: 510629 - DNA, 25 bp, Homo sapien
caaaggtgacctatgagctgccaca

SEQ ID NO: 510630 - DNA, 25 bp, Homo sapien
gcctcccatttgatttgacggtttc

SEQ ID NO: 510631 - DNA, 25 bp, Homo sapien
tgtgagcctcccatttgatttgacg

SEQ ID NO: 510632 - DNA, 25 bp, Homo sapien
gagcctcccatttgatttgacggtt

SEQ ID NO: 510633 - DNA, 25 bp, Homo sapien
tcccatttgatttgacggtttccat

SEQ ID NO: 510634 - DNA, 25 bp, Homo sapien
ttgaatgcccgggatttgccacgct

SEQ ID NO: 510635 - DNA, 25 bp, Homo sapien
gaagcagtttcaatgcagtggagtt

SEQ ID NO: 510636 - DNA, 25 bp, Homo sapien
gctgtgcccggcagtcaggttgaca

SEQ ID NO: 510637 - DNA, 25 bp, Homo sapien
tggccccagtgtagtggcggtccac

SEQ ID NO: 510638 - DNA, 25 bp, Homo sapien
ctggttaggagtcaggctggcttct

SEQ ID NO: 510639 - DNA, 25 bp, Homo sapien
gttttcctgcaccgttgttcccatc

SEQ ID NO: 510640 - DNA, 25 bp, Homo sapien
cagaaggttggagtgactctggaat

SEQ ID NO: 510641 - DNA, 25 bp, Homo sapien
tggaatctggttgccctcaggcggc

SEQ ID NO: 510642 - DNA, 25 bp, Homo sapien
tggtctttgtcctgtcctggtcttc

SEQ ID NO: 510643 - DNA, 25 bp, Homo sapien
tcctggtctttgtcctgtcctggtc

SEQ ID NO: 510644 - DNA, 25 bp, Homo sapien
gtctttgtcctgtcctggtcttcag

SEQ ID NO: 510645 - DNA, 25 bp, Homo sapien
ctttgtcctgtcctggtcttcaggg

SEQ ID NO: 510646 - DNA, 25 bp, Homo sapien
ggtggtgcctctatccaaagccatg

SEQ ID NO: 510647 - DNA, 25 bp, Homo sapien
tgagtgcgagtgagccccaaacaaa

SEQ ID NO: 510648 - DNA, 25 bp, Homo sapien
ttcctgctttcaggtgccccaggat

SEQ ID NO: 510649 - DNA, 25 bp, Homo sapien
ctgcagcggccagtgtctagcagag

SEQ ID NO: 510650 - DNA, 25 bp, Homo sapien
cccggcccctataaggcagtgtggt

SEQ ID NO: 510651 - DNA, 25 bp, Homo sapien
gggacgtgctgtagcctgaccccag

SEQ ID NO: 510652 - DNA, 25 bp, Homo sapien
gaacattgggattcctacctgtcct

SEQ ID NO: 510653 - DNA, 25 bp, Homo sapien
tgtggtaggtgaacccccagaggac

SEQ ID NO: 510654 - DNA, 25 bp, Homo sapien
agtgattgatgcaaattctctactc

SEQ ID NO: 510655 - DNA, 25 bp, Homo sapien
tgtctctttcagtgattgatgcaaa

SEQ ID NO: 510656 - DNA, 25 bp, Homo sapien
actggtgtaagaggcacgggcccct

SEQ ID NO: 510657 - DNA, 25 bp, Homo sapien
tttactggtgtaagaggcacgggcc

SEQ ID NO: 510658 - DNA, 25 bp, Homo sapien
tgcactgtgaggttcaataggtggc

SEQ ID NO: 510659 - DNA, 25 bp, Homo sapien
gtgcactgtgaggttcaataggtgg

SEQ ID NO: 510660 - DNA, 25 bp, Homo sapien
cactgtgaggttcaataggtggcag

SEQ ID NO: 510661 - DNA, 25 bp, Homo sapien
gcactgtgaggttcaataggtggca

SEQ ID NO: 510662 - DNA, 25 bp, Homo sapien
cagtcactttctcttcattacagca

SEQ ID NO: 510663 - DNA, 25 bp, Homo sapien
gctggcagatgagggccaaatctca

SEQ ID NO: 510664 - DNA, 25 bp, Homo sapien
gggtgctggcagatgagggccaaat

SEQ ID NO: 510665 - DNA, 25 bp, Homo sapien
catatgtgcttagtggggtgctggc

SEQ ID NO: 510666 - DNA, 25 bp, Homo sapien
cagttttatactctatcagacttga

SEQ ID NO: 510667 - DNA, 25 bp, Homo sapien
tttatactctatcagacttgaacac

SEQ ID NO: 510668 - DNA, 25 bp, Homo sapien
tatactctatcagacttgaacacat

SEQ ID NO: 510669 - DNA, 25 bp, Homo sapien
cctcagttttatactctatcagact

SEQ ID NO: 510670 - DNA, 25 bp, Homo sapien
taatgcccatttcctgtcgcctctg

SEQ ID NO: 510671 - DNA, 25 bp, Homo sapien
tgaggactgcgccaggtgctaatgc

SEQ ID NO: 510672 - DNA, 25 bp, Homo sapien
taagtcttatgcgattggtaactgg

SEQ ID NO: 510673 - DNA, 25 bp, Homo sapien
aactggttgcaccaccagtgtgcaa

SEQ ID NO: 510674 - DNA, 25 bp, Homo sapien
tgcgtccactgttacttctctcctt

SEQ ID NO: 510675 - DNA, 25 bp, Homo sapien
ctgcagctgagaagcaaatccgcaa

SEQ ID NO: 510676 - DNA, 25 bp, Homo sapien
gctccacagacctgcgtccactgtt

SEQ ID NO: 510677 - DNA, 25 bp, Homo sapien
gacctgcgtccactgttacttctct

SEQ ID NO: 510678 - DNA, 25 bp, Homo sapien
ctcgtctcctcttgctcttccctgc

SEQ ID NO: 510679 - DNA, 25 bp, Homo sapien
ttccctgcttcccagagcactttct

SEQ ID NO: 510680 - DNA, 25 bp, Homo sapien
ccctgcttcccagagcactttcttc

SEQ ID NO: 510681 - DNA, 25 bp, Homo sapien
ttcttcctccctgttctcttttctc

SEQ ID NO: 510682 - DNA, 25 bp, Homo sapien
cacaaaggctatcagtgtcgatgtt

SEQ ID NO: 510683 - DNA, 25 bp, Homo sapien
taaagcagttgtgtcaaggcaccat

SEQ ID NO: 510684 - DNA, 25 bp, Homo sapien
catctgggcacaaagacacgagtct

SEQ ID NO: 510685 - DNA, 25 bp, Homo sapien
actggtggatctcaaaaggttgccg

SEQ ID NO: 510686 - DNA, 25 bp, Homo sapien
ctaactatgaactatcggttgagat

SEQ ID NO: 510687 - DNA, 25 bp, Homo sapien
aactaactatgaactatcggttgag

SEQ ID NO: 510688 - DNA, 25 bp, Homo sapien
taactaactatgaactatcggttga

SEQ ID NO: 510689 - DNA, 25 bp, Homo sapien
aactatgaactatcggttgagataa

SEQ ID NO: 510690 - DNA, 25 bp, Homo sapien
tctggaaattgtgggtctgcttcac

SEQ ID NO: 510691 - DNA, 25 bp, Homo sapien
cttcaccgtgtgctgtaaagagctt

SEQ ID NO: 510692 - DNA, 25 bp, Homo sapien
tatatcactccactcgaggctgcct

SEQ ID NO: 510693 - DNA, 25 bp, Homo sapien
ttctccagatcgaaacagcattggc

SEQ ID NO: 510694 - DNA, 25 bp, Homo sapien
cctccgcgtctgctgggcaaagatc

SEQ ID NO: 510695 - DNA, 25 bp, Homo sapien
caggagctaaaacatgggcaaggcc

SEQ ID NO: 510696 - DNA, 25 bp, Homo sapien
ttacacgtgagaccatgagacagca

SEQ ID NO: 510697 - DNA, 25 bp, Homo sapien
tgaggttgggcaggcgcctccgcgt

SEQ ID NO: 510698 - DNA, 25 bp, Homo sapien
gacaggtgtggaggagcaggaaaca

SEQ ID NO: 510699 - DNA, 25 bp, Homo sapien
caggtgtggaggagcaggaaacaca

SEQ ID NO: 510700 - DNA, 25 bp, Homo sapien
aggtgtggaggagcaggaaacacat

SEQ ID NO: 510701 - DNA, 25 bp, Homo sapien
ctggacaggtgtggaggagcaggaa

SEQ ID NO: 510702 - DNA, 25 bp, Homo sapien
aagactggcggtgcgtgtgtatcac

SEQ ID NO: 510703 - DNA, 25 bp, Homo sapien
aagtttgtatgaagactggcggtgc

SEQ ID NO: 510704 - DNA, 25 bp, Homo sapien
ggctgaagtttgtatgaagactggc

SEQ ID NO: 510705 - DNA, 25 bp, Homo sapien
tatttgagggctgaagtttgtatga

SEQ ID NO: 510706 - DNA, 25 bp, Homo sapien
taatccatgcactgaaattctgtcc

SEQ ID NO: 510707 - DNA, 25 bp, Homo sapien
caatgtgctcaatggctcagatgca

SEQ ID NO: 510708 - DNA, 25 bp, Homo sapien
cacaggtgacactagtgcttggagc

SEQ ID NO: 510709 - DNA, 25 bp, Homo sapien
aatgatggatgcttccaggagaggc

SEQ ID NO: 510710 - DNA, 25 bp, Homo sapien
ttctgtggcagtcgctgagggaggc

SEQ ID NO: 510711 - DNA, 25 bp, Homo sapien
tgtcaccgctaccataagcaaatgt

SEQ ID NO: 510712 - DNA, 25 bp, Homo sapien
gcgaagtcacgggtaagacaaccac

SEQ ID NO: 510713 - DNA, 25 bp, Homo sapien
gcccttacatgcaggtttactccat

SEQ ID NO: 510714 - DNA, 25 bp, Homo sapien
ggaattctgaacctgaggtctgaag

SEQ ID NO: 510715 - DNA, 25 bp, Homo sapien
agtccatgaaactgcatgacatttg

SEQ ID NO: 510716 - DNA, 25 bp, Homo sapien
tgtgtatattgtggggagacggccc

SEQ ID NO: 510717 - DNA, 25 bp, Homo sapien
tcacttccggagcaggaattctgaa

SEQ ID NO: 510718 - DNA, 25 bp, Homo sapien
tcgaggttgaccttcatgactccca

SEQ ID NO: 510719 - DNA, 25 bp, Homo sapien
cagaccaaagctgtttgggcctggg

SEQ ID NO: 510720 - DNA, 25 bp, Homo sapien
gagcttgaacccctattgggccaaa

SEQ ID NO: 510721 - DNA, 25 bp, Homo sapien
tgagcaggcacaccatagttctgtt

SEQ ID NO: 510722 - DNA, 25 bp, Homo sapien
agtggagagacaggcagaggtaagg

SEQ ID NO: 510723 - DNA, 25 bp, Homo sapien
gcctgggcctgagaggacatgaaac

SEQ ID NO: 510724 - DNA, 25 bp, Homo sapien
gacaggcagaggtaaggagaggcct

SEQ ID NO: 510725 - DNA, 25 bp, Homo sapien
gagagacaggcagaggtaaggagag

SEQ ID NO: 510726 - DNA, 25 bp, Homo sapien
gatctcagagatttaccgtgcaccc

SEQ ID NO: 510727 - DNA, 25 bp, Homo sapien
ccagaactggcgcaagagaaaccat

SEQ ID NO: 510728 - DNA, 25 bp, Homo sapien
ggaagaacgattgtccaaggagaca

SEQ ID NO: 510729 - DNA, 25 bp, Homo sapien
tataatacatcagcgcacagggcta

SEQ ID NO: 510730 - DNA, 25 bp, Homo sapien
tggtcgccgagtcggtgtcgtcctt

SEQ ID NO: 510731 - DNA, 25 bp, Homo sapien
tgaccatcgccgacgcgttcattgc

SEQ ID NO: 510732 - DNA, 25 bp, Homo sapien
ggtgtcgtccttgaccatcgccgac

SEQ ID NO: 510733 - DNA, 25 bp, Homo sapien
gcgttcattgcagccggcgagagct

SEQ ID NO: 510734 - DNA, 25 bp, Homo sapien
tcctcgtctgcccttttcgttggat

SEQ ID NO: 510735 - DNA, 25 bp, Homo sapien
ggaaggccgaccgcttcttccttga

SEQ ID NO: 510736 - DNA, 25 bp, Homo sapien
agcactggaaggccgaccgcttctt

SEQ ID NO: 510737 - DNA, 25 bp, Homo sapien
gcccttttcgttggatcctcttctg

SEQ ID NO: 510738 - DNA, 25 bp, Homo sapien
tagccaccggcatgactcataacat

SEQ ID NO: 510739 - DNA, 25 bp, Homo sapien
ctcttgcccgttctagcctctaaat

SEQ ID NO: 510740 - DNA, 25 bp, Homo sapien
cagctccctcttgcggtcttacata

SEQ ID NO: 510741 - DNA, 25 bp, Homo sapien
cggtcttacatagccaccggcatga

SEQ ID NO: 510742 - DNA, 25 bp, Homo sapien
caaagataaggcagctccctggact

SEQ ID NO: 510743 - DNA, 25 bp, Homo sapien
gttgccagatcctgtaactgaccca

SEQ ID NO: 510744 - DNA, 25 bp, Homo sapien
catcccttgcaacaggtgggttgcc

SEQ ID NO: 510745 - DNA, 25 bp, Homo sapien
tcgctgtctgtccagtgacccatag

SEQ ID NO: 510746 - DNA, 25 bp, Homo sapien
tataacttcttacagttgtgcagcc

SEQ ID NO: 510747 - DNA, 25 bp, Homo sapien
caatggctgtgatcaaaaattcaac

SEQ ID NO: 510748 - DNA, 25 bp, Homo sapien
tagtgtattgggagactattccaac

SEQ ID NO: 510749 - DNA, 25 bp, Homo sapien
cctataatcgtagcttgaggccagg

SEQ ID NO: 510750 - DNA, 25 bp, Homo sapien
ttatgcttttcctgtagaacaaaac

SEQ ID NO: 510751 - DNA, 25 bp, Homo sapien
tctgcaattagggttttttgaggaa

SEQ ID NO: 510752 - DNA, 25 bp, Homo sapien
tgcttttcctgtagaacaaaacaag

SEQ ID NO: 510753 - DNA, 25 bp, Homo sapien
aagtagttgggtttatctgcaatta

SEQ ID NO: 510754 - DNA, 25 bp, Homo sapien
ctgcaaaagggccagcggctctctg

SEQ ID NO: 510755 - DNA, 25 bp, Homo sapien
tttcccttgacttgcacaggctgcc

SEQ ID NO: 510756 - DNA, 25 bp, Homo sapien
tgcctgtccttgcttgtgggtctgc

SEQ ID NO: 510757 - DNA, 25 bp, Homo sapien
tggagttgctgcagtgaccttgcct

SEQ ID NO: 510758 - DNA, 25 bp, Homo sapien
caattagcatgctgaaggcggtggc

SEQ ID NO: 510759 - DNA, 25 bp, Homo sapien
gaagtttgcctattccgtgatcacg

SEQ ID NO: 510760 - DNA, 25 bp, Homo sapien
tacaagatggccagactagaggaag

SEQ ID NO: 510761 - DNA, 25 bp, Homo sapien
tttctagttgggtggaactcagccc

SEQ ID NO: 510762 - DNA, 25 bp, Homo sapien
cccagaaagggatgtatgtcgctgt

SEQ ID NO: 510763 - DNA, 25 bp, Homo sapien
tccttccatgaggaaagccgccctt

SEQ ID NO: 510764 - DNA, 25 bp, Homo sapien
aaagccgcccttttgtgtgtgaaca

SEQ ID NO: 510765 - DNA, 25 bp, Homo sapien
tatgtcgctgtccaagagaaggctg

SEQ ID NO: 510766 - DNA, 25 bp, Homo sapien
ggctgtggcaaaacatttgcaatga

SEQ ID NO: 510767 - DNA, 25 bp, Homo sapien
gctggctgtggcaaaacatttgcaa

SEQ ID NO: 510768 - DNA, 25 bp, Homo sapien
ctgtggcaaaacatttgcaatgaaa

SEQ ID NO: 510769 - DNA, 25 bp, Homo sapien
ctggctgtggcaaaacatttgcaat

SEQ ID NO: 510770 - DNA, 25 bp, Homo sapien
cacaacatggttttcatattaatat

SEQ ID NO: 510771 - DNA, 25 bp, Homo sapien
tactcatggtcctatagtctatgct

SEQ ID NO: 510772 - DNA, 25 bp, Homo sapien
tatagtctatgctttcacaacatgg

SEQ ID NO: 510773 - DNA, 25 bp, Homo sapien
taagcactcaccctcatactcatgg

SEQ ID NO: 510774 - DNA, 25 bp, Homo sapien
gtacatgatcctgacaagaagaaaa

SEQ ID NO: 510775 - DNA, 25 bp, Homo sapien
aaagtctcactaggcatgctgttgt

SEQ ID NO: 510776 - DNA, 25 bp, Homo sapien
ctcactaggcatgctgttgtacatg

SEQ ID NO: 510777 - DNA, 25 bp, Homo sapien
tacatgatcctgacaagaagaaaat

SEQ ID NO: 510778 - DNA, 25 bp, Homo sapien
gagtttggcctctcatctcagtgga

SEQ ID NO: 510779 - DNA, 25 bp, Homo sapien
tgtttaaaggactgcagaccaagga

SEQ ID NO: 510780 - DNA, 25 bp, Homo sapien
gacaagatgctctcgacagttgcag

SEQ ID NO: 510781 - DNA, 25 bp, Homo sapien
cggagagtcacccaactgtgtggaa

SEQ ID NO: 510782 - DNA, 25 bp, Homo sapien
cagagcatgcttttctttattaaaa

SEQ ID NO: 510783 - DNA, 25 bp, Homo sapien
ctctttcctgggtctcttgagtttc

SEQ ID NO: 510784 - DNA, 25 bp, Homo sapien
tactgatgcagaacatttgattcct

SEQ ID NO: 510785 - DNA, 25 bp, Homo sapien
catggtctttgttcaaagtgtctct

SEQ ID NO: 510786 - DNA, 25 bp, Homo sapien
tgattccttatcatttccatggtct

SEQ ID NO: 510787 - DNA, 25 bp, Homo sapien
agcacgaagaacacacattaaagct

SEQ ID NO: 510788 - DNA, 25 bp, Homo sapien
aagcacgaagaacacacattaaagc

SEQ ID NO: 510789 - DNA, 25 bp, Homo sapien
aaagcacgaagaacacacattaaag

SEQ ID NO: 510790 - DNA, 25 bp, Homo sapien
tgattagctaatcagttcatacgta

SEQ ID NO: 510791 - DNA, 25 bp, Homo sapien
catacgtatctggttaagttgactg

SEQ ID NO: 510792 - DNA, 25 bp, Homo sapien
gaattgctgctgtcggttaagtgat

SEQ ID NO: 510793 - DNA, 25 bp, Homo sapien
aaaactggcacccttgaattgctgc

SEQ ID NO: 510794 - DNA, 25 bp, Homo sapien
cacaagcagtggcttgtaccttctt

SEQ ID NO: 510795 - DNA, 25 bp, Homo sapien
gatcagaagacccaaagcacaagca

SEQ ID NO: 510796 - DNA, 25 bp, Homo sapien
aagcacaagcagtggcttgtacctt

SEQ ID NO: 510797 - DNA, 25 bp, Homo sapien
tttttagatcagaagacccaaagca

SEQ ID NO: 510798 - DNA, 25 bp, Homo sapien
ttatggtaatctggactaggtgttt

SEQ ID NO: 510799 - DNA, 25 bp, Homo sapien
catttcattttctgacacgtctaca

SEQ ID NO: 510800 - DNA, 25 bp, Homo sapien
tttcattttctgacacgtctacatt

SEQ ID NO: 510801 - DNA, 25 bp, Homo sapien
atggtaatctggactaggtgttttt

SEQ ID NO: 510802 - DNA, 25 bp, Homo sapien
gacaatcttctcatctggctttcag

SEQ ID NO: 510803 - DNA, 25 bp, Homo sapien
gaaacagatagggtgcaaggactac

SEQ ID NO: 510804 - DNA, 25 bp, Homo sapien
tgcccatcataaaatcctaggttgc

SEQ ID NO: 510805 - DNA, 25 bp, Homo sapien
tactgactagtccactgtgaaccct

SEQ ID NO: 510806 - DNA, 25 bp, Homo sapien
acaacctcacgatgcagtgctggga

SEQ ID NO: 510807 - DNA, 25 bp, Homo sapien
gacaagtgcctcgtcaagtgactgg

SEQ ID NO: 510808 - DNA, 25 bp, Homo sapien
aaaactgagccgcagataacatgtg

SEQ ID NO: 510809 - DNA, 25 bp, Homo sapien
tgacgtcattatcctccctggttgg

SEQ ID NO: 510810 - DNA, 25 bp, Homo sapien
gagggcagggaacttgaatgtaccc

SEQ ID NO: 510811 - DNA, 25 bp, Homo sapien
tactcagcttgctgcggcattggga

SEQ ID NO: 510812 - DNA, 25 bp, Homo sapien
tcttaaaggattcagggagccaaca

SEQ ID NO: 510813 - DNA, 25 bp, Homo sapien
tcacaggcaccttgacaaatgctag

SEQ ID NO: 510814 - DNA, 25 bp, Homo sapien
tgttcctttgaaccagtcgcaggtc

SEQ ID NO: 510815 - DNA, 25 bp, Homo sapien
tgatactctgcaggttctgtgctgg

SEQ ID NO: 510816 - DNA, 25 bp, Homo sapien
tcgcaggtctcgctcatccataagt

SEQ ID NO: 510817 - DNA, 25 bp, Homo sapien
cataagtctaatcacatttgctcgg

SEQ ID NO: 510818 - DNA, 25 bp, Homo sapien
cattgcccttctcatcaaataagtg

SEQ ID NO: 510819 - DNA, 25 bp, Homo sapien
gcccttctcatcaaataagtgaata

SEQ ID NO: 510820 - DNA, 25 bp, Homo sapien
gtttcccaaatcattgcccttctca

SEQ ID NO: 510821 - DNA, 25 bp, Homo sapien
aataagtgaataactcgctgactaa

SEQ ID NO: 510822 - DNA, 25 bp, Homo sapien
cagcggtactaaaggcttttgcatg

SEQ ID NO: 510823 - DNA, 25 bp, Homo sapien
tgctggtgctgtcttttgcaggatg

SEQ ID NO: 510824 - DNA, 25 bp, Homo sapien
tttccttcattctgggtgtcttcag

SEQ ID NO: 510825 - DNA, 25 bp, Homo sapien
tgggtgtcttcagcggtactaaagg

SEQ ID NO: 510826 - DNA, 25 bp, Homo sapien
taaagcggactagcaggtgactctg

SEQ ID NO: 510827 - DNA, 25 bp, Homo sapien
tgtccccaagacaagtggctattag

SEQ ID NO: 510828 - DNA, 25 bp, Homo sapien
ggaagtctacactgataaagcggac

SEQ ID NO: 510829 - DNA, 25 bp, Homo sapien
tgactctggccagactaactcatgg

SEQ ID NO: 510830 - DNA, 25 bp, Homo sapien
catcctcattgtcttcacatcaagt

SEQ ID NO: 510831 - DNA, 25 bp, Homo sapien
tcctcattgtcttcacatcaagtag

SEQ ID NO: 510832 - DNA, 25 bp, Homo sapien
cctcattgtcttcacatcaagtagg

SEQ ID NO: 510833 - DNA, 25 bp, Homo sapien
ttcatcctcattgtcttcacatcaa

SEQ ID NO: 510834 - DNA, 25 bp, Homo sapien
ttgtagtgccaactccaaaagcgag

SEQ ID NO: 510835 - DNA, 25 bp, Homo sapien
tttcagatgcccgtcagtaatggtg

SEQ ID NO: 510836 - DNA, 25 bp, Homo sapien
ttattactgctagggcacacagagc

SEQ ID NO: 510837 - DNA, 25 bp, Homo sapien
tctcttgagttccacacctgtaggg

SEQ ID NO: 510838 - DNA, 25 bp, Homo sapien
atccccagttgatgaggagaagctc

SEQ ID NO: 510839 - DNA, 25 bp, Homo sapien
tccccagttgatgaggagaagctct

SEQ ID NO: 510840 - DNA, 25 bp, Homo sapien
ttttttaggaagaactgtaatcatc

SEQ ID NO: 510841 - DNA, 25 bp, Homo sapien
ggaagccatgttctctgatgaaaat

SEQ ID NO: 510842 - DNA, 25 bp, Homo sapien
agttgaataaaaataggaagccatg

SEQ ID NO: 510843 - DNA, 25 bp, Homo sapien
taggaagccatgttctctgatgaaa

SEQ ID NO: 510844 - DNA, 25 bp, Homo sapien
taaaaataggaagccatgttctctg

SEQ ID NO: 510845 - DNA, 25 bp, Homo sapien
ttaaagatctacaccttcgccaggc

SEQ ID NO: 510846 - DNA, 25 bp, Homo sapien
agatctacaccttcgccaggccaaa

SEQ ID NO: 510847 - DNA, 25 bp, Homo sapien
aaagatctacaccttcgccaggcca

SEQ ID NO: 510848 - DNA, 25 bp, Homo sapien
gatctacaccttcgccaggccaaaa

SEQ ID NO: 510849 - DNA, 25 bp, Homo sapien
tgaaatacagtactctcgtccttgg

SEQ ID NO: 510850 - DNA, 25 bp, Homo sapien
tgattaccttccaaactaagccagt

SEQ ID NO: 510851 - DNA, 25 bp, Homo sapien
tctttatgcctaggccacactggcc

SEQ ID NO: 510852 - DNA, 25 bp, Homo sapien
ttaggaaacgccagatccttagcgc

SEQ ID NO: 510853 - DNA, 25 bp, Homo sapien
cagtaagagaacttcgtttacttgg

SEQ ID NO: 510854 - DNA, 25 bp, Homo sapien
tctcagtaagagaacttcgtttact

SEQ ID NO: 510855 - DNA, 25 bp, Homo sapien
gacttctcagtaagagaacttcgtt

SEQ ID NO: 510856 - DNA, 25 bp, Homo sapien
tgagacttctcagtaagagaacttc

SEQ ID NO: 510857 - DNA, 25 bp, Homo sapien
aagaacaacgcatttgtccagcatg

SEQ ID NO: 510858 - DNA, 25 bp, Homo sapien
ttgtccagcatgtcctgcgcaggcg

SEQ ID NO: 510859 - DNA, 25 bp, Homo sapien
aggcagcaagaacaacgcatttgtc

SEQ ID NO: 510860 - DNA, 25 bp, Homo sapien
aatcccagtcacttcgcgaccttcc

SEQ ID NO: 510861 - DNA, 25 bp, Homo sapien
gccaggcagtaagccgcaagagcac

SEQ ID NO: 510862 - DNA, 25 bp, Homo sapien
aagccgcaagagcacttccgggagc

SEQ ID NO: 510863 - DNA, 25 bp, Homo sapien
ttgttggtaagtcggcggcgacgcc

SEQ ID NO: 510864 - DNA, 25 bp, Homo sapien
ggcagtaagccgcaagagcacttcc

SEQ ID NO: 510865 - DNA, 25 bp, Homo sapien
gcgcacaaacgagggcgcgcatgtc

SEQ ID NO: 510866 - DNA, 25 bp, Homo sapien
tagagacgggacgtagcgacgtact

SEQ ID NO: 510867 - DNA, 25 bp, Homo sapien
ggagcgccagggctagagacgggac

SEQ ID NO: 510868 - DNA, 25 bp, Homo sapien
ctgcagaacgggaccggcggagcgc

SEQ ID NO: 510869 - DNA, 25 bp, Homo sapien
taacatccctcggaagttcgtgcag

SEQ ID NO: 510870 - DNA, 25 bp, Homo sapien
gtgcagcggcctcgctgaaaatggc

SEQ ID NO: 510871 - DNA, 25 bp, Homo sapien
gaaaatggctttacagcccggcaga

SEQ ID NO: 510872 - DNA, 25 bp, Homo sapien
ggctggcggcaactctaggtctaac

SEQ ID NO: 510873 - DNA, 25 bp, Homo sapien
tgtagcggacgcaagtacagcggat

SEQ ID NO: 510874 - DNA, 25 bp, Homo sapien
ggatctgcggcgagtccccttcgct

SEQ ID NO: 510875 - DNA, 25 bp, Homo sapien
gggcaagcgattgacatactgtagc

SEQ ID NO: 510876 - DNA, 25 bp, Homo sapien
agtccccttcgctctccgtagtggg

SEQ ID NO: 510877 - DNA, 25 bp, Homo sapien
cggacccgtggagcctgctcgaaag

SEQ ID NO: 510878 - DNA, 25 bp, Homo sapien
actgcgagtccacagtcgtgaagcc

SEQ ID NO: 510879 - DNA, 25 bp, Homo sapien
caagggcagactgcgagtccacagt

SEQ ID NO: 510880 - DNA, 25 bp, Homo sapien
agccacctaatctggcttcatacct

SEQ ID NO: 510881 - DNA, 25 bp, Homo sapien
caggtattgcccaaagagtcttcca

SEQ ID NO: 510882 - DNA, 25 bp, Homo sapien
gcccaaagagtcttccagctttcca

SEQ ID NO: 510883 - DNA, 25 bp, Homo sapien
ctggcctgatacaggtattgcccaa

SEQ ID NO: 510884 - DNA, 25 bp, Homo sapien
gtattgcccaaagagtcttccagct

SEQ ID NO: 510885 - DNA, 25 bp, Homo sapien
cttgccttgatccaaatcagccccc

SEQ ID NO: 510886 - DNA, 25 bp, Homo sapien
ttgatccaaatcagcccccacgcca

SEQ ID NO: 510887 - DNA, 25 bp, Homo sapien
cactgccaggataactttgtcttag

SEQ ID NO: 510888 - DNA, 25 bp, Homo sapien
tttgtcttagtaaagcttcatgcat

SEQ ID NO: 510889 - DNA, 25 bp, Homo sapien
tcccttagcccagcgggatgcttct

SEQ ID NO: 510890 - DNA, 25 bp, Homo sapien
ttagcccagcgggatgcttctctcc

SEQ ID NO: 510891 - DNA, 25 bp, Homo sapien
aagccttcccttagcccagcgggat

SEQ ID NO: 510892 - DNA, 25 bp, Homo sapien
cttcccttagcccagcgggatgctt

SEQ ID NO: 510893 - DNA, 25 bp, Homo sapien
taaatgtaggcctgatgccatccat

SEQ ID NO: 510894 - DNA, 25 bp, Homo sapien
tgctgccagagatcttatctggtga

SEQ ID NO: 510895 - DNA, 25 bp, Homo sapien
gacattgccaacttcctaaatgtag

SEQ ID NO: 510896 - DNA, 25 bp, Homo sapien
gccacggtgtggcagtgctgccaga

SEQ ID NO: 510897 - DNA, 25 bp, Homo sapien
cttggcagtttatttaccagaaggc

SEQ ID NO: 510898 - DNA, 25 bp, Homo sapien
gcagtttatttaccagaaggctgga

SEQ ID NO: 510899 - DNA, 25 bp, Homo sapien
aaggctggaagcagtgtcagagcct

SEQ ID NO: 510900 - DNA, 25 bp, Homo sapien
tggcagtttatttaccagaaggctg

SEQ ID NO: 510901 - DNA, 25 bp, Homo sapien
tccacattatcttgtgcataatcac

SEQ ID NO: 510902 - DNA, 25 bp, Homo sapien
tttcaatttagagcccaagcttttc

SEQ ID NO: 510903 - DNA, 25 bp, Homo sapien
tgtctttcaatttagagcccaagct

SEQ ID NO: 510904 - DNA, 25 bp, Homo sapien
cttccacattatcttgtgcataatc

SEQ ID NO: 510905 - DNA, 25 bp, Homo sapien
gacagtccaataggtgaaagcacaa

SEQ ID NO: 510906 - DNA, 25 bp, Homo sapien
cagacttttggttagaagacagtcc

SEQ ID NO: 510907 - DNA, 25 bp, Homo sapien
tcagagagaatgctcagcagaggcc

SEQ ID NO: 510908 - DNA, 25 bp, Homo sapien
gaggccttctcctctaaacgtgaat

SEQ ID NO: 510909 - DNA, 25 bp, Homo sapien
tttggtagagaaatttagtagagtc

SEQ ID NO: 510910 - DNA, 25 bp, Homo sapien
tggtagagaaatttagtagagtcta

SEQ ID NO: 510911 - DNA, 25 bp, Homo sapien
ggtagagaaatttagtagagtctaa

SEQ ID NO: 510912 - DNA, 25 bp, Homo sapien
ttggtagagaaatttagtagagtct

SEQ ID NO: 510913 - DNA, 25 bp, Homo sapien
tactgcctcaccgtcatggaccagc

SEQ ID NO: 510914 - DNA, 25 bp, Homo sapien
aaacatccagggagagcgtggccgc

SEQ ID NO: 510915 - DNA, 25 bp, Homo sapien
agcctcggatactccccagcgaaaa

SEQ ID NO: 510916 - DNA, 25 bp, Homo sapien
tcaccgtcatggaccagcctcggat

SEQ ID NO: 510917 - DNA, 25 bp, Homo sapien
tcctttctcaccgttgtctgctgtc

SEQ ID NO: 510918 - DNA, 25 bp, Homo sapien
aggctcctttctcaccgttgtctgc

SEQ ID NO: 510919 - DNA, 25 bp, Homo sapien
ctttctcaccgttgtctgctgtcct

SEQ ID NO: 510920 - DNA, 25 bp, Homo sapien
gctcctttctcaccgttgtctgctg

SEQ ID NO: 510921 - DNA, 25 bp, Homo sapien
gatatggggcaatggctggcccaaa

SEQ ID NO: 510922 - DNA, 25 bp, Homo sapien
tgccaactggatatggggcaatggc

SEQ ID NO: 510923 - DNA, 25 bp, Homo sapien
ctggatatggggcaatggctggccc

SEQ ID NO: 510924 - DNA, 25 bp, Homo sapien
gccaactggatatggggcaatggct

SEQ ID NO: 510925 - DNA, 25 bp, Homo sapien
ttggctgccgcaaaggtggaaggga

SEQ ID NO: 510926 - DNA, 25 bp, Homo sapien
tcaatttctcggtcacacctgtaac

SEQ ID NO: 510927 - DNA, 25 bp, Homo sapien
cagatgctgattggaaagttctgcc

SEQ ID NO: 510928 - DNA, 25 bp, Homo sapien
acctgtaacccatttgcagatgctg

SEQ ID NO: 510929 - DNA, 25 bp, Homo sapien
gttcttttgtgctcaagcccatgct

SEQ ID NO: 510930 - DNA, 25 bp, Homo sapien
ttcttttgtgctcaagcccatgctg

SEQ ID NO: 510931 - DNA, 25 bp, Homo sapien
tgtcctgaggctctttgtcactcct

SEQ ID NO: 510932 - DNA, 25 bp, Homo sapien
tcctctttgttgcttccgaaatgag

SEQ ID NO: 510933 - DNA, 25 bp, Homo sapien
cccagggaaggtgaatgccttccac

SEQ ID NO: 510934 - DNA, 25 bp, Homo sapien
gcttccgaaatgagaagacctctcc

SEQ ID NO: 510935 - DNA, 25 bp, Homo sapien
gcgttgatatcagaatatgactctg

SEQ ID NO: 510936 - DNA, 25 bp, Homo sapien
tgtcaccatcacgtaccttataaat

SEQ ID NO: 510937 - DNA, 25 bp, Homo sapien
tcccgcccacctcgtcttcgtatga

SEQ ID NO: 510938 - DNA, 25 bp, Homo sapien
cgtaccttataaatctgcgttgata

SEQ ID NO: 510939 - DNA, 25 bp, Homo sapien
gttatgagaaagtaaggaccattga

SEQ ID NO: 510940 - DNA, 25 bp, Homo sapien
taaggaccattgatggtcagtgtcc

SEQ ID NO: 510941 - DNA, 25 bp, Homo sapien
gaaagtaaggaccattgatggtcag

SEQ ID NO: 510942 - DNA, 25 bp, Homo sapien
cagaccaagttcaggggcactggct

SEQ ID NO: 510943 - DNA, 25 bp, Homo sapien
caacaggcagtctgcgagtgttgtc

SEQ ID NO: 510944 - DNA, 25 bp, Homo sapien
aacaggcagtctgcgagtgttgtcc

SEQ ID NO: 510945 - DNA, 25 bp, Homo sapien
gagctggaaggcgacgtggccaaca

SEQ ID NO: 510946 - DNA, 25 bp, Homo sapien
ggcgacgtggccaacagcctgctgt

SEQ ID NO: 510947 - DNA, 25 bp, Homo sapien
attcaccgtggtgcacctgtttttc

SEQ ID NO: 510948 - DNA, 25 bp, Homo sapien
caagctcaatcgaggtcacattcac

SEQ ID NO: 510949 - DNA, 25 bp, Homo sapien
gaagaacaagctcaatcgaggtcac

SEQ ID NO: 510950 - DNA, 25 bp, Homo sapien
tcgaggtcacattcaccgtggtgca

SEQ ID NO: 510951 - DNA, 25 bp, Homo sapien
atcggttcgggcagcaccagaagcc

SEQ ID NO: 510952 - DNA, 25 bp, Homo sapien
actcttgcagccagtaatcggttcg

SEQ ID NO: 510953 - DNA, 25 bp, Homo sapien
taaaagccagtgtgatttttgcaga

SEQ ID NO: 510954 - DNA, 25 bp, Homo sapien
gtgatttttgcagaatgagactctt

SEQ ID NO: 510955 - DNA, 25 bp, Homo sapien
gcttgagttttgtatcccttgagaa

SEQ ID NO: 510956 - DNA, 25 bp, Homo sapien
cctctgggttttttggcgatctaat

SEQ ID NO: 510957 - DNA, 25 bp, Homo sapien
tggcgatctaatgtgtgtgcttgag

SEQ ID NO: 510958 - DNA, 25 bp, Homo sapien
tgccagaattccttacatcctctgg

SEQ ID NO: 510959 - DNA, 25 bp, Homo sapien
tatctgagttagagaaagccgactg

SEQ ID NO: 510960 - DNA, 25 bp, Homo sapien
tctgagttagagaaagccgactgct

SEQ ID NO: 510961 - DNA, 25 bp, Homo sapien
gatatctgagttagagaaagccgac

SEQ ID NO: 510962 - DNA, 25 bp, Homo sapien
ttgatatctgagttagagaaagccg

SEQ ID NO: 510963 - DNA, 25 bp, Homo sapien
ccgctgccgcaggagtcacccccat

SEQ ID NO: 510964 - DNA, 25 bp, Homo sapien
ctgtgcagcggatttcattatagtc

SEQ ID NO: 510965 - DNA, 25 bp, Homo sapien
tctaagctgctcgaaatagtggtat

SEQ ID NO: 510966 - DNA, 25 bp, Homo sapien
tcattatagtcaacagcctctaagc

SEQ ID NO: 510967 - DNA, 25 bp, Homo sapien
caacagcctctaagctgctcgaaat

SEQ ID NO: 510968 - DNA, 25 bp, Homo sapien
tgtcccatagcctcaatgctatgtt

SEQ ID NO: 510969 - DNA, 25 bp, Homo sapien
acttgtccatctacaccatcattga

SEQ ID NO: 510970 - DNA, 25 bp, Homo sapien
gagcagatcccattgctctctgtcc

SEQ ID NO: 510971 - DNA, 25 bp, Homo sapien
tcttcacctgtgatcctgatactga

SEQ ID NO: 510972 - DNA, 25 bp, Homo sapien
agaatagacaaacagaagcctgagt

SEQ ID NO: 510973 - DNA, 25 bp, Homo sapien
atagacaaacagaagcctgagtttt

SEQ ID NO: 510974 - DNA, 25 bp, Homo sapien
tgccagaagaatagacaaacagaag

SEQ ID NO: 510975 - DNA, 25 bp, Homo sapien
cattgccagaagaatagacaaacag

SEQ ID NO: 510976 - DNA, 25 bp, Homo sapien
caagaacggttaagttagagacatc

SEQ ID NO: 510977 - DNA, 25 bp, Homo sapien
tcccttctttagattgcctgaaagc

SEQ ID NO: 510978 - DNA, 25 bp, Homo sapien
tcagtttaagggtgaattcaacaag

SEQ ID NO: 510979 - DNA, 25 bp, Homo sapien
cctgaaagctgaccaagaacggtta

SEQ ID NO: 510980 - DNA, 25 bp, Homo sapien
ccagactgcttggaaacgggtaata

SEQ ID NO: 510981 - DNA, 25 bp, Homo sapien
tgaaaatgttgttgcgtcccaagct

SEQ ID NO: 510982 - DNA, 25 bp, Homo sapien
cagacctcagggtggttggagtcac

SEQ ID NO: 510983 - DNA, 25 bp, Homo sapien
tacaataacactaactggacaggag

SEQ ID NO: 510984 - DNA, 25 bp, Homo sapien
gagaatttctcaaaccacggaggca

SEQ ID NO: 510985 - DNA, 25 bp, Homo sapien
ggttttggccctgtgtataccagca

SEQ ID NO: 510986 - DNA, 25 bp, Homo sapien
tgatggatggctactccccaagaaa

SEQ ID NO: 510987 - DNA, 25 bp, Homo sapien
tcaaaatactcattatgccaccagg

SEQ ID NO: 510988 - DNA, 25 bp, Homo sapien
ttatgacagtggcagtacacgctgt

SEQ ID NO: 510989 - DNA, 25 bp, Homo sapien
cggttgacagcccatttacggccac

SEQ ID NO: 510990 - DNA, 25 bp, Homo sapien
ctatacaaggctgccaggccaacaa

SEQ ID NO: 510991 - DNA, 25 bp, Homo sapien
ggccaacaaataacggtcagagtga

SEQ ID NO: 510992 - DNA, 25 bp, Homo sapien
catgggaactagtgcagagtggctc

SEQ ID NO: 510993 - DNA, 25 bp, Homo sapien
caggagttcccaagacaatagtttt

SEQ ID NO: 510994 - DNA, 25 bp, Homo sapien
taatcttccatcataataagcagga

SEQ ID NO: 510995 - DNA, 25 bp, Homo sapien
tcatatccaccaacgatactaaagc

SEQ ID NO: 510996 - DNA, 25 bp, Homo sapien
aaaaggctgattggtgtggttctct

SEQ ID NO: 510997 - DNA, 25 bp, Homo sapien
cgtaaaactatatcgtggcagctat

SEQ ID NO: 510998 - DNA, 25 bp, Homo sapien
cttcgtaaaactatatcgtggcagc

SEQ ID NO: 510999 - DNA, 25 bp, Homo sapien
taaaactatatcgtggcagctatga

SEQ ID NO: 511000 - DNA, 25 bp, Homo sapien
aaactatatcgtggcagctatgaag

SEQ ID NO: 511001 - DNA, 25 bp, Homo sapien
gacctcaagtgctttaagggcaaca

SEQ ID NO: 511002 - DNA, 25 bp, Homo sapien
tgagtcgcctcctcaacaatctgga

SEQ ID NO: 511003 - DNA, 25 bp, Homo sapien
gcatcatactcattttcgctgaaag

SEQ ID NO: 511004 - DNA, 25 bp, Homo sapien
tcgctgaaagtactcggctgctcct

SEQ ID NO: 511005 - DNA, 25 bp, Homo sapien
ggtcaaatcaatgccgttgatattt

SEQ ID NO: 511006 - DNA, 25 bp, Homo sapien
aatcaatgccgttgatatttagcaa

SEQ ID NO: 511007 - DNA, 25 bp, Homo sapien
tgccgttgatatttagcaacacatc

SEQ ID NO: 511008 - DNA, 25 bp, Homo sapien
caatgccgttgatatttagcaacac

SEQ ID NO: 511009 - DNA, 25 bp, Homo sapien
tgccatctcgtgcaaggcagccatg

SEQ ID NO: 511010 - DNA, 25 bp, Homo sapien
ccagcaacggtcatgccaagggatt

SEQ ID NO: 511011 - DNA, 25 bp, Homo sapien
ggcacactggtcacaaagatgggca

SEQ ID NO: 511012 - DNA, 25 bp, Homo sapien
tcttggcatgtaacacactgagtaa

SEQ ID NO: 511013 - DNA, 25 bp, Homo sapien
cttatgtgagcttggtctgctataa

SEQ ID NO: 511014 - DNA, 25 bp, Homo sapien
tgctgctgctatgatttcctgcttc

SEQ ID NO: 511015 - DNA, 25 bp, Homo sapien
gcttctctaatggtgttaccaggct

SEQ ID NO: 511016 - DNA, 25 bp, Homo sapien
tctgctataatacggtggtggtgtg

SEQ ID NO: 511017 - DNA, 25 bp, Homo sapien
cagagtcccgtttatgaagagccac

SEQ ID NO: 511018 - DNA, 25 bp, Homo sapien
cagaatggttgtgtgctcggttgcc

SEQ ID NO: 511019 - DNA, 25 bp, Homo sapien
tacttcaggtcgtgcccattgatgg

SEQ ID NO: 511020 - DNA, 25 bp, Homo sapien
taatgccaagctgttcaccagagtc

SEQ ID NO: 511021 - DNA, 25 bp, Homo sapien
tcccgatagacctcctggatgacaa

SEQ ID NO: 511022 - DNA, 25 bp, Homo sapien
caaaggtgtttcgttgccacccaca

SEQ ID NO: 511023 - DNA, 25 bp, Homo sapien
tccttctggtaaactaagtggctgt

SEQ ID NO: 511024 - DNA, 25 bp, Homo sapien
agaagtctcccgtctctggcaatga

SEQ ID NO: 511025 - DNA, 25 bp, Homo sapien
tgtcaagtgccgctccacaggcact

SEQ ID NO: 511026 - DNA, 25 bp, Homo sapien
tcctcaaaggcagggttgtcaaggc

SEQ ID NO: 511027 - DNA, 25 bp, Homo sapien
aaagagacgctgatgtcaagtgccg

SEQ ID NO: 511028 - DNA, 25 bp, Homo sapien
tgcgcctgtccccaaacagtctgct

SEQ ID NO: 511029 - DNA, 25 bp, Homo sapien
ctgcaggatctagtagagtgggccc

SEQ ID NO: 511030 - DNA, 25 bp, Homo sapien
caactctccgatgagaagctccagg

SEQ ID NO: 511031 - DNA, 25 bp, Homo sapien
tccagggcaactctccgatgagaag

SEQ ID NO: 511032 - DNA, 25 bp, Homo sapien
tctgcttgagttctactagttttcc

SEQ ID NO: 511033 - DNA, 25 bp, Homo sapien
tcatgctgggaaggctacctgtagc

SEQ ID NO: 511034 - DNA, 25 bp, Homo sapien
cccatcaaggtgtcagaaatgtgaa

SEQ ID NO: 511035 - DNA, 25 bp, Homo sapien
ctagatcatatgaggccatgcagcc

SEQ ID NO: 511036 - DNA, 25 bp, Homo sapien
tatgactgcttccaacagagaaggg

SEQ ID NO: 511037 - DNA, 25 bp, Homo sapien
tgagatgtgcctccagatcacaacg

SEQ ID NO: 511038 - DNA, 25 bp, Homo sapien
tagcagaatgtatgtccacagggtg

SEQ ID NO: 511039 - DNA, 25 bp, Homo sapien
gtccagtgctgttggccacattcaa

SEQ ID NO: 511040 - DNA, 25 bp, Homo sapien
gaaggcaaatatggcagactaggtc

SEQ ID NO: 511041 - DNA, 25 bp, Homo sapien
gacagtgatgtatctgactaaagtc

SEQ ID NO: 511042 - DNA, 25 bp, Homo sapien
tccacttcacgcttggtttccttta

SEQ ID NO: 511043 - DNA, 25 bp, Homo sapien
tgtatcctcatgtgttagacttcca

SEQ ID NO: 511044 - DNA, 25 bp, Homo sapien
tatctgactaaagtcaaggtgtgtt

SEQ ID NO: 511045 - DNA, 25 bp, Homo sapien
taccactgaaggttagacaggaagc

SEQ ID NO: 511046 - DNA, 25 bp, Homo sapien
taagaataccctacctctcaagtcc

SEQ ID NO: 511047 - DNA, 25 bp, Homo sapien
tcactggccctaacctaagagatcc

SEQ ID NO: 511048 - DNA, 25 bp, Homo sapien
tgtggttcccttaactcatcggtac

SEQ ID NO: 511049 - DNA, 25 bp, Homo sapien
gatagcagattttgccccagagcca

SEQ ID NO: 511050 - DNA, 25 bp, Homo sapien
tagatggctttagtactaacccaga

SEQ ID NO: 511051 - DNA, 25 bp, Homo sapien
gctattctgtgatcaacctatgcaa

SEQ ID NO: 511052 - DNA, 25 bp, Homo sapien
caaaagaatcgggtggatactgcta

SEQ ID NO: 511053 - DNA, 25 bp, Homo sapien
tatcttttccatgtacagctgaccc

SEQ ID NO: 511054 - DNA, 25 bp, Homo sapien
tatgctaagacgaagccaacactga

SEQ ID NO: 511055 - DNA, 25 bp, Homo sapien
gaacaagtaggtggcttcagtgcag

SEQ ID NO: 511056 - DNA, 25 bp, Homo sapien
tcagtgcagggtattaaacacacgt

SEQ ID NO: 511057 - DNA, 25 bp, Homo sapien
gagtatcacctaaatgggaacatag

SEQ ID NO: 511058 - DNA, 25 bp, Homo sapien
aattatctctacaggcaaccgctgg

SEQ ID NO: 511059 - DNA, 25 bp, Homo sapien
tgcatacaactatggaacgcaaatc

SEQ ID NO: 511060 - DNA, 25 bp, Homo sapien
caaccgctggtctgatattctttcc

SEQ ID NO: 511061 - DNA, 25 bp, Homo sapien
ctagaaatgggagcaagagcaaacc

SEQ ID NO: 511062 - DNA, 25 bp, Homo sapien
ggatttagtggaagtcctttgacac

SEQ ID NO: 511063 - DNA, 25 bp, Homo sapien
gaaatctatggctcaaagggttgaa

SEQ ID NO: 511064 - DNA, 25 bp, Homo sapien
gattagaagagtgcccaacaactag

SEQ ID NO: 511065 - DNA, 25 bp, Homo sapien
cattgctatagtctcaccatgtaga

SEQ ID NO: 511066 - DNA, 25 bp, Homo sapien
tgaaactattctttactcgtaactg

SEQ ID NO: 511067 - DNA, 25 bp, Homo sapien
ggacctgcagtcatgaaaaggctaa

SEQ ID NO: 511068 - DNA, 25 bp, Homo sapien
tattcagttatcttaggacctgcag

SEQ ID NO: 511069 - DNA, 25 bp, Homo sapien
caggcgtgcatcaccatgcccacct

SEQ ID NO: 511070 - DNA, 25 bp, Homo sapien
aggcgtgcatcaccatgcccaccta

SEQ ID NO: 511071 - DNA, 25 bp, Homo sapien
ccgggccgcgcacgggctcctggcg

SEQ ID NO: 511072 - DNA, 25 bp, Homo sapien
tgggaaagcgcggctgcccgggccg

SEQ ID NO: 511073 - DNA, 25 bp, Homo sapien
gggaaagcgcggctgcccgggccgc

SEQ ID NO: 511074 - DNA, 25 bp, Homo sapien
ggctgcccgggccgcgcacgggctc

SEQ ID NO: 511075 - DNA, 25 bp, Homo sapien
cccgctgagggagcggagagcctgc

SEQ ID NO: 511076 - DNA, 25 bp, Homo sapien
gccgccgcggatttcctggcaaaaa

SEQ ID NO: 511077 - DNA, 25 bp, Homo sapien
caaaaagcaaactccggccaagact

SEQ ID NO: 511078 - DNA, 25 bp, Homo sapien
aagacttcacttctcaaccgcccct

SEQ ID NO: 511079 - DNA, 25 bp, Homo sapien
agcctgggcggcgaaaggttgccga

SEQ ID NO: 511080 - DNA, 25 bp, Homo sapien
ctgagggagcacagcgaaggccggg

SEQ ID NO: 511081 - DNA, 25 bp, Homo sapien
tgagggcgggttccgcaggtgagga

SEQ ID NO: 511082 - DNA, 25 bp, Homo sapien
ggctgggcgcctgggaacaaaggtg

SEQ ID NO: 511083 - DNA, 25 bp, Homo sapien
aaaggcgtgattctagctgttgacc

SEQ ID NO: 511084 - DNA, 25 bp, Homo sapien
ttctcttcctgatggtgcagaaccc

SEQ ID NO: 511085 - DNA, 25 bp, Homo sapien
gcagtatacaaggagaactgtcctg

SEQ ID NO: 511086 - DNA, 25 bp, Homo sapien
gctgttgaccccttgcagctgttgg

SEQ ID NO: 511087 - DNA, 25 bp, Homo sapien
tctggcttatagaagacacctgggt

SEQ ID NO: 511088 - DNA, 25 bp, Homo sapien
ccttgaacgctccttacagagcaag

SEQ ID NO: 511089 - DNA, 25 bp, Homo sapien
aatgatgtctatctggagagctggc

SEQ ID NO: 511090 - DNA, 25 bp, Homo sapien
tggcaagaaacaaccaagccccttg

SEQ ID NO: 511091 - DNA, 25 bp, Homo sapien
tgctgacaagcttttcacctgcggt

SEQ ID NO: 511092 - DNA, 25 bp, Homo sapien
tacatccatgagagtgcaaagacac

SEQ ID NO: 511093 - DNA, 25 bp, Homo sapien
agtgcactgcatggaaacttgcttc

SEQ ID NO: 511094 - DNA, 25 bp, Homo sapien
taattggccatctggttggactgca

SEQ ID NO: 511095 - DNA, 25 bp, Homo sapien
aaaaatgacctagcaactcttgagg

SEQ ID NO: 511096 - DNA, 25 bp, Homo sapien
tgagagtgactttgacattaggtcc

SEQ ID NO: 511097 - DNA, 25 bp, Homo sapien
cagccaggacaagtacgaaaagcgg

SEQ ID NO: 511098 - DNA, 25 bp, Homo sapien
caagtgcaaaggaggatgtcttggc

SEQ ID NO: 511099 - DNA, 25 bp, Homo sapien
cctccaaggtctgggaatttatcga

SEQ ID NO: 511100 - DNA, 25 bp, Homo sapien
agcctgctagggagtgacaagccca

SEQ ID NO: 511101 - DNA, 25 bp, Homo sapien
tagaaactagaatagacctctccgc

SEQ ID NO: 511102 - DNA, 25 bp, Homo sapien
caaagtgtctgagcatatgcctggc

SEQ ID NO: 511103 - DNA, 25 bp, Homo sapien
tgcaggtgtgcgccaacatgtgcag

SEQ ID NO: 511104 - DNA, 25 bp, Homo sapien
gtgtgcgccaacatgtgcagctcat

SEQ ID NO: 511105 - DNA, 25 bp, Homo sapien
gattgcaggtgtgcgccaacatgtg

SEQ ID NO: 511106 - DNA, 25 bp, Homo sapien
aggtgtgcgccaacatgtgcagctc

SEQ ID NO: 511107 - DNA, 25 bp, Homo sapien
catataggcctaggcttacgtgttg

SEQ ID NO: 511108 - DNA, 25 bp, Homo sapien
cctgaagggagtaccccagaacaag

SEQ ID NO: 511109 - DNA, 25 bp, Homo sapien
agtgacgtggatgatcctgctccca

SEQ ID NO: 511110 - DNA, 25 bp, Homo sapien
tgacggctccgtgtgtgttattacc

SEQ ID NO: 511111 - DNA, 25 bp, Homo sapien
tctatgatgtacacacagtggtgaa

SEQ ID NO: 511112 - DNA, 25 bp, Homo sapien
gtaagctacaccatctagctgtatg

SEQ ID NO: 511113 - DNA, 25 bp, Homo sapien
gctacaccatctagctgtatgtaag

SEQ ID NO: 511114 - DNA, 25 bp, Homo sapien
gatacacgaatgcttgccattgtat

SEQ ID NO: 511115 - DNA, 25 bp, Homo sapien
cctaacattcataactgataattgc

SEQ ID NO: 511116 - DNA, 25 bp, Homo sapien
cttgtacaaagtgttcctaacattc

SEQ ID NO: 511117 - DNA, 25 bp, Homo sapien
aaatgaaagcatttggtcacggtaa

SEQ ID NO: 511118 - DNA, 25 bp, Homo sapien
agcatttggtcacggtaaaacttgt

SEQ ID NO: 511119 - DNA, 25 bp, Homo sapien
ttcaccgcccagctagcaatgtgga

SEQ ID NO: 511120 - DNA, 25 bp, Homo sapien
gataaaagcacgactgtttcggctc

SEQ ID NO: 511121 - DNA, 25 bp, Homo sapien
tttcggctccacatgggaaactggc

SEQ ID NO: 511122 - DNA, 25 bp, Homo sapien
gaagatgccattcagatgcccctcg

SEQ ID NO: 511123 - DNA, 25 bp, Homo sapien
ctgtcaggtggtgcctgatcttcag

SEQ ID NO: 511124 - DNA, 25 bp, Homo sapien
gtcaggtggtgcctgatcttcagga

SEQ ID NO: 511125 - DNA, 25 bp, Homo sapien
caggtggtgcctgatcttcaggatc

SEQ ID NO: 511126 - DNA, 25 bp, Homo sapien
tcaggtggtgcctgatcttcaggat

SEQ ID NO: 511127 - DNA, 25 bp, Homo sapien
ttctcgtttgacttctgtgcttttt

SEQ ID NO: 511128 - DNA, 25 bp, Homo sapien
tcgtttgacttctgtgcttttttgg

SEQ ID NO: 511129 - DNA, 25 bp, Homo sapien
cattctcgtttgacttctgtgcttt

SEQ ID NO: 511130 - DNA, 25 bp, Homo sapien
ccattctcgtttgacttctgtgctt

SEQ ID NO: 511131 - DNA, 25 bp, Homo sapien
tcatcagcagcaacttttttctgtg

SEQ ID NO: 511132 - DNA, 25 bp, Homo sapien
cttcatcagcagcaacttttttctg

SEQ ID NO: 511133 - DNA, 25 bp, Homo sapien
atcagcagcaacttttttctgtgaa

SEQ ID NO: 511134 - DNA, 25 bp, Homo sapien
agcagcaacttttttctgtgaaatc

SEQ ID NO: 511135 - DNA, 25 bp, Homo sapien
cacttcagtcgtaaaagcacaggtg

SEQ ID NO: 511136 - DNA, 25 bp, Homo sapien
accacacttcagtcgtaaaagcaca

SEQ ID NO: 511137 - DNA, 25 bp, Homo sapien
cacacttcagtcgtaaaagcacagg

SEQ ID NO: 511138 - DNA, 25 bp, Homo sapien
tgaaccacacttcagtcgtaaaagc

SEQ ID NO: 511139 - DNA, 25 bp, Homo sapien
ctatgcaaacattttcaaagttgcc

SEQ ID NO: 511140 - DNA, 25 bp, Homo sapien
caaacattttcaaagttgccggtgt

SEQ ID NO: 511141 - DNA, 25 bp, Homo sapien
tgcaaacattttcaaagttgccggt

SEQ ID NO: 511142 - DNA, 25 bp, Homo sapien
tatgcaaacattttcaaagttgccg

SEQ ID NO: 511143 - DNA, 25 bp, Homo sapien
atgtgcaatttatccctcacaccag

SEQ ID NO: 511144 - DNA, 25 bp, Homo sapien
tgtgcaatttatccctcacaccagc

SEQ ID NO: 511145 - DNA, 25 bp, Homo sapien
gcaatttatccctcacaccagcccc

SEQ ID NO: 511146 - DNA, 25 bp, Homo sapien
tgcaatttatccctcacaccagccc

SEQ ID NO: 511147 - DNA, 25 bp, Homo sapien
tccagataatctttggtcagccttt

SEQ ID NO: 511148 - DNA, 25 bp, Homo sapien
gaagacgatcctcagttgtactaac

SEQ ID NO: 511149 - DNA, 25 bp, Homo sapien
tgtactaacattgggctgcctcttg

SEQ ID NO: 511150 - DNA, 25 bp, Homo sapien
gatcctcagttgtactaacattggg

SEQ ID NO: 511151 - DNA, 25 bp, Homo sapien
gaagaatgtgaagacgatcctcagt

SEQ ID NO: 511152 - DNA, 25 bp, Homo sapien
tactttgaccatggacttgatttag

SEQ ID NO: 511153 - DNA, 25 bp, Homo sapien
gtttactttgaccatggacttgatt

SEQ ID NO: 511154 - DNA, 25 bp, Homo sapien
ttgaccatggacttgatttagaaag

SEQ ID NO: 511155 - DNA, 25 bp, Homo sapien
cttcagctgggtgtttactttgacc

SEQ ID NO: 511156 - DNA, 25 bp, Homo sapien
caggctggggatagctcagaccata

SEQ ID NO: 511157 - DNA, 25 bp, Homo sapien
tctgacgatatggtagccaaggcag

SEQ ID NO: 511158 - DNA, 25 bp, Homo sapien
gaggaacttcataggccccttgagg

SEQ ID NO: 511159 - DNA, 25 bp, Homo sapien
gaacagggacgatatgtggtggcca

SEQ ID NO: 511160 - DNA, 25 bp, Homo sapien
ctgtgaaagtcagatttggaagagg

SEQ ID NO: 511161 - DNA, 25 bp, Homo sapien
gaaagtcagatttggaagaggaagt

SEQ ID NO: 511162 - DNA, 25 bp, Homo sapien
aagtcagatttggaagaggaagtcc

SEQ ID NO: 511163 - DNA, 25 bp, Homo sapien
cagatttggaagaggaagtccacat

SEQ ID NO: 511164 - DNA, 25 bp, Homo sapien
cactaaaagaagttaagtgttcctg

SEQ ID NO: 511165 - DNA, 25 bp, Homo sapien
gcctgtagtattgatcactaaaaga

SEQ ID NO: 511166 - DNA, 25 bp, Homo sapien
cgggaaggtagattagattggcaga

SEQ ID NO: 511167 - DNA, 25 bp, Homo sapien
tggcagaaaaagactgcctgtagta

SEQ ID NO: 511168 - DNA, 25 bp, Homo sapien
tgggtttggcagttgtacatgcttg

SEQ ID NO: 511169 - DNA, 25 bp, Homo sapien
tggcagttgtacatgcttgggaatg

SEQ ID NO: 511170 - DNA, 25 bp, Homo sapien
gcagttgtacatgcttgggaatgat

SEQ ID NO: 511171 - DNA, 25 bp, Homo sapien
gtttggcagttgtacatgcttggga

SEQ ID NO: 511172 - DNA, 25 bp, Homo sapien
tcgccagtgtgtcagaagtatagtc

SEQ ID NO: 511173 - DNA, 25 bp, Homo sapien
tccacactgtgagctggtcttccct

SEQ ID NO: 511174 - DNA, 25 bp, Homo sapien
caatgcgttcctgaggcttcgccag

SEQ ID NO: 511175 - DNA, 25 bp, Homo sapien
ggcaagtctgcatcaggaaaaagaa

SEQ ID NO: 511176 - DNA, 25 bp, Homo sapien
gcagcctgctcctgaataggccaca

SEQ ID NO: 511177 - DNA, 25 bp, Homo sapien
cagtagagggcttgattgcacagga

SEQ ID NO: 511178 - DNA, 25 bp, Homo sapien
cacaagccatgatctccagtagagg

SEQ ID NO: 511179 - DNA, 25 bp, Homo sapien
caggaaatcaagctcccgggctgtg

SEQ ID NO: 511180 - DNA, 25 bp, Homo sapien
agtagcatgaactcgccacaaaaag

SEQ ID NO: 511181 - DNA, 25 bp, Homo sapien
cagagtccagtaaaactgacactac

SEQ ID NO: 511182 - DNA, 25 bp, Homo sapien
tttgcaagagttgaaactcagaggg

SEQ ID NO: 511183 - DNA, 25 bp, Homo sapien
aaagtcgcagtgctcaaaggcgtcc

SEQ ID NO: 511184 - DNA, 25 bp, Homo sapien
gatgtgctcaagttgtatatgagaa

SEQ ID NO: 511185 - DNA, 25 bp, Homo sapien
tgatgtgctcaagttgtatatgaga

SEQ ID NO: 511186 - DNA, 25 bp, Homo sapien
ctgatgtgctcaagttgtatatgag

SEQ ID NO: 511187 - DNA, 25 bp, Homo sapien
tgtgctcaagttgtatatgagaaag

SEQ ID NO: 511188 - DNA, 25 bp, Homo sapien
tgccaccaaggccagatctagggat

SEQ ID NO: 511189 - DNA, 25 bp, Homo sapien
acttaaggcccgtagatgttgcctc

SEQ ID NO: 511190 - DNA, 25 bp, Homo sapien
caagaattcaagcagtctccctggt

SEQ ID NO: 511191 - DNA, 25 bp, Homo sapien
ggtctctcatgcagttcaatccccg

SEQ ID NO: 511192 - DNA, 25 bp, Homo sapien
ccaaatactttgttggagttgttga

SEQ ID NO: 511193 - DNA, 25 bp, Homo sapien
accaaatactttgttggagttgttg

SEQ ID NO: 511194 - DNA, 25 bp, Homo sapien
tactttgttggagttgttgatctga

SEQ ID NO: 511195 - DNA, 25 bp, Homo sapien
aaatactttgttggagttgttgatc

SEQ ID NO: 511196 - DNA, 25 bp, Homo sapien
gtaacattcactgaggcagacatgt

SEQ ID NO: 511197 - DNA, 25 bp, Homo sapien
aacattcactgaggcagacatgtat

SEQ ID NO: 511198 - DNA, 25 bp, Homo sapien
attcactgaggcagacatgtatttt

SEQ ID NO: 511199 - DNA, 25 bp, Homo sapien
cattcactgaggcagacatgtattt

SEQ ID NO: 511200 - DNA, 25 bp, Homo sapien
cagccttctagggcctttgtggacc

SEQ ID NO: 511201 - DNA, 25 bp, Homo sapien
gcctttgtggaccatctgggtcaat

SEQ ID NO: 511202 - DNA, 25 bp, Homo sapien
agggatgggcagacaagtgcaggcc

SEQ ID NO: 511203 - DNA, 25 bp, Homo sapien
gggcagacaagtgcaggccctctga

SEQ ID NO: 511204 - DNA, 25 bp, Homo sapien
gttgtaactccaccgcggctgcatt

SEQ ID NO: 511205 - DNA, 25 bp, Homo sapien
cccctcatctcattaagttgtaact

SEQ ID NO: 511206 - DNA, 25 bp, Homo sapien
ctgattagcatgacagaggctggga

SEQ ID NO: 511207 - DNA, 25 bp, Homo sapien
agatgaggcctgacccggtgcactt

SEQ ID NO: 511208 - DNA, 25 bp, Homo sapien
tggctttgcaccagggcctgtttgc

SEQ ID NO: 511209 - DNA, 25 bp, Homo sapien
agtttcccgtatctgcctccattaa

SEQ ID NO: 511210 - DNA, 25 bp, Homo sapien
tataacgcatttaaagggcagtttc

SEQ ID NO: 511211 - DNA, 25 bp, Homo sapien
gaacatatagcatcacggtagcctt

SEQ ID NO: 511212 - DNA, 25 bp, Homo sapien
ccacctgagtcattgccaactttgc

SEQ ID NO: 511213 - DNA, 25 bp, Homo sapien
tattcttgtaagtctcaggcccagc

SEQ ID NO: 511214 - DNA, 25 bp, Homo sapien
ccacctggttgagagtattgcccaa

SEQ ID NO: 511215 - DNA, 25 bp, Homo sapien
cacatggcatctggagttgtctttg

SEQ ID NO: 511216 - DNA, 25 bp, Homo sapien
tcagcattggttctccctacgttta

SEQ ID NO: 511217 - DNA, 25 bp, Homo sapien
cacaagtagccttgcaaacagtaac

SEQ ID NO: 511218 - DNA, 25 bp, Homo sapien
gagcactgacagtcattcacttttt

SEQ ID NO: 511219 - DNA, 25 bp, Homo sapien
caaacacaagtagccttgcaaacag

SEQ ID NO: 511220 - DNA, 25 bp, Homo sapien
atgcaaacacaagtagccttgcaaa

SEQ ID NO: 511221 - DNA, 25 bp, Homo sapien
gcaggcgttgtccaggtggcaaccc

SEQ ID NO: 511222 - DNA, 25 bp, Homo sapien
gcaaccccggaggtgaccattctaa

SEQ ID NO: 511223 - DNA, 25 bp, Homo sapien
cagccccagagtagtggcaggcgtt

SEQ ID NO: 511224 - DNA, 25 bp, Homo sapien
taaccacagattggctctgcctggt

SEQ ID NO: 511225 - DNA, 25 bp, Homo sapien
cgaggaagctgggataggcacagag

SEQ ID NO: 511226 - DNA, 25 bp, Homo sapien
tctgcaccaggagggagatgtaacc

SEQ ID NO: 511227 - DNA, 25 bp, Homo sapien
gtaagatcggcgacatgctccctgg

SEQ ID NO: 511228 - DNA, 25 bp, Homo sapien
atgggagtaagatcggcgacatgct

SEQ ID NO: 511229 - DNA, 25 bp, Homo sapien
tgttcgtgcagaaagacagcctacg

SEQ ID NO: 511230 - DNA, 25 bp, Homo sapien
gatacgggaactgtgatggctgctt

SEQ ID NO: 511231 - DNA, 25 bp, Homo sapien
gcagaggtaatgtgaacagtcccag

SEQ ID NO: 511232 - DNA, 25 bp, Homo sapien
gcattgaaggacagcacacagttgc

SEQ ID NO: 511233 - DNA, 25 bp, Homo sapien
caatgtctggcataaacctagactg

SEQ ID NO: 511234 - DNA, 25 bp, Homo sapien
cataaacctagactggaaaaaggca

SEQ ID NO: 511235 - DNA, 25 bp, Homo sapien
gcactcagcccagatatcactttaa

SEQ ID NO: 511236 - DNA, 25 bp, Homo sapien
aagggaaaataacagacacaatgtc

SEQ ID NO: 511237 - DNA, 25 bp, Homo sapien
ttctctagcgccagcgcccctgctt

SEQ ID NO: 511238 - DNA, 25 bp, Homo sapien
tccaggaactttacgcaagataggc

SEQ ID NO: 511239 - DNA, 25 bp, Homo sapien
aagtgaacgggacgagtggctttgc

SEQ ID NO: 511240 - DNA, 25 bp, Homo sapien
gccgctgcgattctctagcgccagc

SEQ ID NO: 511241 - DNA, 25 bp, Homo sapien
gaatagttcttaaccccaatgccca

SEQ ID NO: 511242 - DNA, 25 bp, Homo sapien
gcctcatggaatacagcacctgtgg

SEQ ID NO: 511243 - DNA, 25 bp, Homo sapien
cgctggcactgggatcaatggacat

SEQ ID NO: 511244 - DNA, 25 bp, Homo sapien
aatggacatcctatgcctgggctgg

SEQ ID NO: 511245 - DNA, 25 bp, Homo sapien
cagcagggtcacgatggaagtggcc

SEQ ID NO: 511246 - DNA, 25 bp, Homo sapien
cacgatggaagtggccctcagtgcc

SEQ ID NO: 511247 - DNA, 25 bp, Homo sapien
ggtcacgatggaagtggccctcagt

SEQ ID NO: 511248 - DNA, 25 bp, Homo sapien
agggtcacgatggaagtggccctca

SEQ ID NO: 511249 - DNA, 25 bp, Homo sapien
gctggctccagacgggaaaactgtt

SEQ ID NO: 511250 - DNA, 25 bp, Homo sapien
tgaaagttccccttcttagctcaag

SEQ ID NO: 511251 - DNA, 25 bp, Homo sapien
ttagctcaaggcattctgcacaccc

SEQ ID NO: 511252 - DNA, 25 bp, Homo sapien
aaagaaacgtgcctctgagcttcag

SEQ ID NO: 511253 - DNA, 25 bp, Homo sapien
caaggcgttcgctgaataggagtcc

SEQ ID NO: 511254 - DNA, 25 bp, Homo sapien
ttgaaactgtgaagtcgcagcgccc

SEQ ID NO: 511255 - DNA, 25 bp, Homo sapien
cgctgaataggagtccggctttgaa

SEQ ID NO: 511256 - DNA, 25 bp, Homo sapien
taggagtccggctttgaaactgtga

SEQ ID NO: 511257 - DNA, 25 bp, Homo sapien
gccgggagaacctcgcacaggcatc

SEQ ID NO: 511258 - DNA, 25 bp, Homo sapien
aggagctccggaggctcccccaaag

SEQ ID NO: 511259 - DNA, 25 bp, Homo sapien
ccaaagccgggagaacctcgcacag

SEQ ID NO: 511260 - DNA, 25 bp, Homo sapien
gaacctcgcacaggcatccaagagc

SEQ ID NO: 511261 - DNA, 25 bp, Homo sapien
tacaggttacaagaggtttgtgaac

SEQ ID NO: 511262 - DNA, 25 bp, Homo sapien
cagtggtggcaaggcctagctgcta

SEQ ID NO: 511263 - DNA, 25 bp, Homo sapien
cctagctgctacaaacaagtcatgt

SEQ ID NO: 511264 - DNA, 25 bp, Homo sapien
agccaagcacagtggtggcaaggcc

SEQ ID NO: 511265 - DNA, 25 bp, Homo sapien
tgcagaatgttgaaagtaaggctct

SEQ ID NO: 511266 - DNA, 25 bp, Homo sapien
tgttgaaagtaaggctctccctatg

SEQ ID NO: 511267 - DNA, 25 bp, Homo sapien
gaatgttgaaagtaaggctctccct

SEQ ID NO: 511268 - DNA, 25 bp, Homo sapien
aaagtaaggctctccctatgacgcc

SEQ ID NO: 511269 - DNA, 25 bp, Homo sapien
tcctctgagcagagcgaaaggctgc

SEQ ID NO: 511270 - DNA, 25 bp, Homo sapien
tccgaagaaggcaggtgtaaaaagc

SEQ ID NO: 511271 - DNA, 25 bp, Homo sapien
aatacgggccgtcttctctgaagga

SEQ ID NO: 511272 - DNA, 25 bp, Homo sapien
tgggaaacagcaatatgcccttctg

SEQ ID NO: 511273 - DNA, 25 bp, Homo sapien
gcgcccgggtgaagtccgctggccg

SEQ ID NO: 511274 - DNA, 25 bp, Homo sapien
ccgggtgaagtccgctggccgggag

SEQ ID NO: 511275 - DNA, 25 bp, Homo sapien
gggtgaagtccgctggccgggagca

SEQ ID NO: 511276 - DNA, 25 bp, Homo sapien
ccccgcgcccgggtgaagtccgctg

SEQ ID NO: 511277 - DNA, 25 bp, Homo sapien
cccaccagagtttacctggaaatgg

SEQ ID NO: 511278 - DNA, 25 bp, Homo sapien
aatgtgaagtgttgggcacaaaagc

SEQ ID NO: 511279 - DNA, 25 bp, Homo sapien
cccaggttttactcatagtaggtgc

SEQ ID NO: 511280 - DNA, 25 bp, Homo sapien
ccccaagaacaggaattggctctta

SEQ ID NO: 511281 - DNA, 25 bp, Homo sapien
tcatgaatcttcttcgtttctgttc

SEQ ID NO: 511282 - DNA, 25 bp, Homo sapien
gagaaaagccctcgacttctctcca

SEQ ID NO: 511283 - DNA, 25 bp, Homo sapien
ctgttccagtgctttagctgcaggg

SEQ ID NO: 511284 - DNA, 25 bp, Homo sapien
ctgtgcactataggccacggctgat

SEQ ID NO: 511285 - DNA, 25 bp, Homo sapien
tccatctgggccagtgaccggatgt

SEQ ID NO: 511286 - DNA, 25 bp, Homo sapien
tgtcgtaaacacttatcagtaggga

SEQ ID NO: 511287 - DNA, 25 bp, Homo sapien
gcatttccatgcagtgtcggcacca

SEQ ID NO: 511288 - DNA, 25 bp, Homo sapien
cttcatgggtgtgtagcagcagctt

SEQ ID NO: 511289 - DNA, 25 bp, Homo sapien
gatgtataaggactttccatgcagc

SEQ ID NO: 511290 - DNA, 25 bp, Homo sapien
gaagagttctgggagtcccttctgg

SEQ ID NO: 511291 - DNA, 25 bp, Homo sapien
gagcagctccctgagaggcctgtat

SEQ ID NO: 511292 - DNA, 25 bp, Homo sapien
cctgagaggcctgtatggtggaaga

SEQ ID NO: 511293 - DNA, 25 bp, Homo sapien
gaggcctgtatggtggaagagttct

SEQ ID NO: 511294 - DNA, 25 bp, Homo sapien
tactggcagctagacataggaaagt

SEQ ID NO: 511295 - DNA, 25 bp, Homo sapien
gagttctagaacataccaccatggc

SEQ ID NO: 511296 - DNA, 25 bp, Homo sapien
gccaggagcatttgcagggacttct

SEQ ID NO: 511297 - DNA, 25 bp, Homo sapien
tccaggtcatgtgcaaacacttgtg

SEQ ID NO: 511298 - DNA, 25 bp, Homo sapien
tccagccccgtgatgcagaaaggta

SEQ ID NO: 511299 - DNA, 25 bp, Homo sapien
ccagccccgtgatgcagaaaggtaa

SEQ ID NO: 511300 - DNA, 25 bp, Homo sapien
agccccgtgatgcagaaaggtaata

SEQ ID NO: 511301 - DNA, 25 bp, Homo sapien
tttccagccccgtgatgcagaaagg

SEQ ID NO: 511302 - DNA, 25 bp, Homo sapien
cagtcagcgttccatagggtgaagg

SEQ ID NO: 511303 - DNA, 25 bp, Homo sapien
ttattatacctaagagcagtcagcg

SEQ ID NO: 511304 - DNA, 25 bp, Homo sapien
ggtgaagggcgagcggatgacgtct

SEQ ID NO: 511305 - DNA, 25 bp, Homo sapien
ccaaggcggccagatgtcgccacgg

SEQ ID NO: 511306 - DNA, 25 bp, Homo sapien
gagttctgatagtcactctcacctc

SEQ ID NO: 511307 - DNA, 25 bp, Homo sapien
tccagtcacaatcctttccaaaggg

SEQ ID NO: 511308 - DNA, 25 bp, Homo sapien
cctgcagagttctgatagtcactct

SEQ ID NO: 511309 - DNA, 25 bp, Homo sapien
ccacctgcagagttctgatagtcac

SEQ ID NO: 511310 - DNA, 25 bp, Homo sapien
agcaggtcaggaacggcaggtagcc

SEQ ID NO: 511311 - DNA, 25 bp, Homo sapien
caggaacggcaggtagcctttccgg

SEQ ID NO: 511312 - DNA, 25 bp, Homo sapien
tttccgggcataccacggacctgct

SEQ ID NO: 511313 - DNA, 25 bp, Homo sapien
caatttctaacacaaccgagcaggt

SEQ ID NO: 511314 - DNA, 25 bp, Homo sapien
tcttctgccttgtcagactagcctg

SEQ ID NO: 511315 - DNA, 25 bp, Homo sapien
tatccgaggctaccgaaccagtttc

SEQ ID NO: 511316 - DNA, 25 bp, Homo sapien
gccttgtcagactagcctgatgctc

SEQ ID NO: 511317 - DNA, 25 bp, Homo sapien
cctgatgctcttgatatccgaggct

SEQ ID NO: 511318 - DNA, 25 bp, Homo sapien
gagacaggcccttataaccatcgac

SEQ ID NO: 511319 - DNA, 25 bp, Homo sapien
gacagccttgatagagcaaccctct

SEQ ID NO: 511320 - DNA, 25 bp, Homo sapien
gcacctgcatctttcgtttggaaga

SEQ ID NO: 511321 - DNA, 25 bp, Homo sapien
tctagattggaactttgaggctgct

SEQ ID NO: 511322 - DNA, 25 bp, Homo sapien
tcttgtttcctctcctgaatccaca

SEQ ID NO: 511323 - DNA, 25 bp, Homo sapien
ttccagtcatctgcattccctcttg

SEQ ID NO: 511324 - DNA, 25 bp, Homo sapien
cagtcatctgcattccctcttgttt

SEQ ID NO: 511325 - DNA, 25 bp, Homo sapien
cttgtttcctctcctgaatccacag

SEQ ID NO: 511326 - DNA, 25 bp, Homo sapien
aggccttgtgccttggtccagagac

SEQ ID NO: 511327 - DNA, 25 bp, Homo sapien
gaactccactaagaggaaagtagaa

SEQ ID NO: 511328 - DNA, 25 bp, Homo sapien
gaaaaatagagcagagagtgagcca

SEQ ID NO: 511329 - DNA, 25 bp, Homo sapien
gtgagccagcgtcagcaggtactgc

SEQ ID NO: 511330 - DNA, 25 bp, Homo sapien
ctttgattggagcaccctggtgagg

SEQ ID NO: 511331 - DNA, 25 bp, Homo sapien
tttgattggagcaccctggtgaggc

SEQ ID NO: 511332 - DNA, 25 bp, Homo sapien
gctttgattggagcaccctggtgag

SEQ ID NO: 511333 - DNA, 25 bp, Homo sapien
tctgtaggagcacgctggtagcata

SEQ ID NO: 511334 - DNA, 25 bp, Homo sapien
ctgtaggagcacgctggtagcatac

SEQ ID NO: 511335 - DNA, 25 bp, Homo sapien
ctgtctgtaggagcacgctggtagc

SEQ ID NO: 511336 - DNA, 25 bp, Homo sapien
tgtctgtaggagcacgctggtagca

SEQ ID NO: 511337 - DNA, 25 bp, Homo sapien
taatcaggccagaaaatggatccag

SEQ ID NO: 511338 - DNA, 25 bp, Homo sapien
tataactggctccaagtaatcaggc

SEQ ID NO: 511339 - DNA, 25 bp, Homo sapien
cagatgtctggctcgtgatcggttc

SEQ ID NO: 511340 - DNA, 25 bp, Homo sapien
cctcaatggctagggtcctaggagc

SEQ ID NO: 511341 - DNA, 25 bp, Homo sapien
agagtctatcctttggactgagaag

SEQ ID NO: 511342 - DNA, 25 bp, Homo sapien
gtctatcctttggactgagaaggtt

SEQ ID NO: 511343 - DNA, 25 bp, Homo sapien
gaatgggctaacgatctggtcagac

SEQ ID NO: 511344 - DNA, 25 bp, Homo sapien
ctgaaagtgtgaatgggctaacgat

SEQ ID NO: 511345 - DNA, 25 bp, Homo sapien
attttctgctccattcccatttgct

SEQ ID NO: 511346 - DNA, 25 bp, Homo sapien
tggctctgaatctgaaccgggtaat

SEQ ID NO: 511347 - DNA, 25 bp, Homo sapien
tatcttccaataatcataactgcct

SEQ ID NO: 511348 - DNA, 25 bp, Homo sapien
ggattatgagtgtctctttcttggc

SEQ ID NO: 511349 - DNA, 25 bp, Homo sapien
tatccaacatataagtcccctgtgt

SEQ ID NO: 511350 - DNA, 25 bp, Homo sapien
aagttccagggagtgcacagtagca

SEQ ID NO: 511351 - DNA, 25 bp, Homo sapien
gagatgaaaagtacaagctgggcac

SEQ ID NO: 511352 - DNA, 25 bp, Homo sapien
agactggttccaggtgatagacgga

SEQ ID NO: 511353 - DNA, 25 bp, Homo sapien
ttttcaacctgcgactgctcggatt

SEQ ID NO: 511354 - DNA, 25 bp, Homo sapien
gggatatggagagtcagccgtacct

SEQ ID NO: 511355 - DNA, 25 bp, Homo sapien
caacctgcgactgctcggattttgg

SEQ ID NO: 511356 - DNA, 25 bp, Homo sapien
tatggagagtcagccgtacctttgc

SEQ ID NO: 511357 - DNA, 25 bp, Homo sapien
tcagctcatggtgatagtctgtcat

SEQ ID NO: 511358 - DNA, 25 bp, Homo sapien
ctttccaggtctacccatctggaaa

SEQ ID NO: 511359 - DNA, 25 bp, Homo sapien
catcagctcatggtgatagtctgtc

SEQ ID NO: 511360 - DNA, 25 bp, Homo sapien
tggaaatatctttagacatcagctc

SEQ ID NO: 511361 - DNA, 25 bp, Homo sapien
ctcggtatcgctgccgggcctgttg

SEQ ID NO: 511362 - DNA, 25 bp, Homo sapien
taaatggctcgggaaggtgctcgcc

SEQ ID NO: 511363 - DNA, 25 bp, Homo sapien
tatccataagagctgctgttaaatg

SEQ ID NO: 511364 - DNA, 25 bp, Homo sapien
gaaggtgctcgcctaatggctcggt

SEQ ID NO: 511365 - DNA, 25 bp, Homo sapien
caacgtcagagcctggcagctagga

SEQ ID NO: 511366 - DNA, 25 bp, Homo sapien
ccaaccgaaagcaattgaagctgtc

SEQ ID NO: 511367 - DNA, 25 bp, Homo sapien
gagcaatctgagaagcgaattcgtt

SEQ ID NO: 511368 - DNA, 25 bp, Homo sapien
aatttttcaggagatgggcgctccc

SEQ ID NO: 511369 - DNA, 25 bp, Homo sapien
ggacctgtttagagaagccggctct

SEQ ID NO: 511370 - DNA, 25 bp, Homo sapien
caaagatcccgtgaaattgatgcca

SEQ ID NO: 511371 - DNA, 25 bp, Homo sapien
tctctcaggcgcatgtgccagttgg

SEQ ID NO: 511372 - DNA, 25 bp, Homo sapien
gaagctgggccgagtaccttaatct

SEQ ID NO: 511373 - DNA, 25 bp, Homo sapien
tcactactgcacatcttataacttg

SEQ ID NO: 511374 - DNA, 25 bp, Homo sapien
aacatcttgcaaggcagggcgagca

SEQ ID NO: 511375 - DNA, 25 bp, Homo sapien
tcttataacttgcacccctttcttc

SEQ ID NO: 511376 - DNA, 25 bp, Homo sapien
tgaggaagagaacatcttgcaaggc

SEQ ID NO: 511377 - DNA, 25 bp, Homo sapien
aacactgcctagtttcaggatgccc

SEQ ID NO: 511378 - DNA, 25 bp, Homo sapien
tggaggcgcagaaacttgtcctcgg

SEQ ID NO: 511379 - DNA, 25 bp, Homo sapien
ttcgctctgcgaattgggccagccg

SEQ ID NO: 511380 - DNA, 25 bp, Homo sapien
gcagctccgccgaccagttagttgg

SEQ ID NO: 511381 - DNA, 25 bp, Homo sapien
ttgggcccgggatcagagctttgct

SEQ ID NO: 511382 - DNA, 25 bp, Homo sapien
cagggttgggcccgggatcagagct

SEQ ID NO: 511383 - DNA, 25 bp, Homo sapien
tgggcccgggatcagagctttgctt

SEQ ID NO: 511384 - DNA, 25 bp, Homo sapien
ggttgggcccgggatcagagctttg

SEQ ID NO: 511385 - DNA, 25 bp, Homo sapien
gcagctggaccgatacctcctggat

SEQ ID NO: 511386 - DNA, 25 bp, Homo sapien
tcggaactgcatgcctgtgcacggt

SEQ ID NO: 511387 - DNA, 25 bp, Homo sapien
ccagtggatgcgaatcgtgggccct

SEQ ID NO: 511388 - DNA, 25 bp, Homo sapien
cagtacctgacttctccgggagctg

SEQ ID NO: 511389 - DNA, 25 bp, Homo sapien
tgagtcccgcgattcgggaaatccg

SEQ ID NO: 511390 - DNA, 25 bp, Homo sapien
gttcctggctctgtcgaagctgctg

SEQ ID NO: 511391 - DNA, 25 bp, Homo sapien
ggaaatccggcacttgtttctcacc

SEQ ID NO: 511392 - DNA, 25 bp, Homo sapien
catctctcggatcgtgttcctggct

SEQ ID NO: 511393 - DNA, 25 bp, Homo sapien
ggggactcgtagtgtcggatcgcat

SEQ ID NO: 511394 - DNA, 25 bp, Homo sapien
tatctgggagagcacgcttgtgccg

SEQ ID NO: 511395 - DNA, 25 bp, Homo sapien
cctctgtttcctgccggcgtagggg

SEQ ID NO: 511396 - DNA, 25 bp, Homo sapien
gccgaggggcctgagctatgggact

SEQ ID NO: 511397 - DNA, 25 bp, Homo sapien
tatctgagagttggtgatgatttcg

SEQ ID NO: 511398 - DNA, 25 bp, Homo sapien
tactggggcgtgaacgcattcagca

SEQ ID NO: 511399 - DNA, 25 bp, Homo sapien
gatgatttcgggtcatgcatattgt

SEQ ID NO: 511400 - DNA, 25 bp, Homo sapien
cataaataacttgctcttcgctcca

SEQ ID NO: 511401 - DNA, 25 bp, Homo sapien
tttttacaagacaaatcacatcttc

SEQ ID NO: 511402 - DNA, 25 bp, Homo sapien
tcccacttgatggtcaataccgtca

SEQ ID NO: 511403 - DNA, 25 bp, Homo sapien
cccacttgatggtcaataccgtcat

SEQ ID NO: 511404 - DNA, 25 bp, Homo sapien
agtttttacaagacaaatcacatct

SEQ ID NO: 511405 - DNA, 25 bp, Homo sapien
ttgaaatcgacatattacatggaat

SEQ ID NO: 511406 - DNA, 25 bp, Homo sapien
aatactgctgatttgaaatcgacat

SEQ ID NO: 511407 - DNA, 25 bp, Homo sapien
aagtcccacacttctaaatctgtct

SEQ ID NO: 511408 - DNA, 25 bp, Homo sapien
cagaagtcccacacttctaaatctg

SEQ ID NO: 511409 - DNA, 25 bp, Homo sapien
gactggaagggcctaccagcttata

SEQ ID NO: 511410 - DNA, 25 bp, Homo sapien
atacttcctatgtttgcctgcctgc

SEQ ID NO: 511411 - DNA, 25 bp, Homo sapien
cttagtgcctctgactggaagggcc

SEQ ID NO: 511412 - DNA, 25 bp, Homo sapien
taaaatgtactgagtggagagccgc

SEQ ID NO: 511413 - DNA, 25 bp, Homo sapien
tccaggtggcaggccgcgccttctg

SEQ ID NO: 511414 - DNA, 25 bp, Homo sapien
tctttgtcggagatgggacggaacc

SEQ ID NO: 511415 - DNA, 25 bp, Homo sapien
gcttcggggcgcaaccgggctctgg

SEQ ID NO: 511416 - DNA, 25 bp, Homo sapien
ctctgggggagaccgcgtttgtcca

SEQ ID NO: 511417 - DNA, 25 bp, Homo sapien
aaaatcaaatcccttgggcctggtg

SEQ ID NO: 511418 - DNA, 25 bp, Homo sapien
cagcgctcccgttccgccttttgaa

SEQ ID NO: 511419 - DNA, 25 bp, Homo sapien
aaatcaaatcccttgggcctggtgc

SEQ ID NO: 511420 - DNA, 25 bp, Homo sapien
aatcaaatcccttgggcctggtgcc

SEQ ID NO: 511421 - DNA, 25 bp, Homo sapien
cgcgccgtagttgcgcgcacctttt

SEQ ID NO: 511422 - DNA, 25 bp, Homo sapien
cttcgacgacgggtcgaaggccagt

SEQ ID NO: 511423 - DNA, 25 bp, Homo sapien
gcgcaccttttgaaaagcttggcgt

SEQ ID NO: 511424 - DNA, 25 bp, Homo sapien
ttcttcaccgagtggcttcggcgct

SEQ ID NO: 511425 - DNA, 25 bp, Homo sapien
ctctcgggagacgccgcgaatctct

SEQ ID NO: 511426 - DNA, 25 bp, Homo sapien
gagacgccgcgaatctctccaggga

SEQ ID NO: 511427 - DNA, 25 bp, Homo sapien
ccagcaaggaccggcagcaggccga

SEQ ID NO: 511428 - DNA, 25 bp, Homo sapien
caaggaccggcagcaggccgagacc

SEQ ID NO: 511429 - DNA, 25 bp, Homo sapien
tgggcgagagcagcgggacacgagc

SEQ ID NO: 511430 - DNA, 25 bp, Homo sapien
gagagcagcgggacacgagcccccg

SEQ ID NO: 511431 - DNA, 25 bp, Homo sapien
gagcagcgggacacgagcccccggg

SEQ ID NO: 511432 - DNA, 25 bp, Homo sapien
gcgagagcagcgggacacgagcccc

SEQ ID NO: 511433 - DNA, 25 bp, Homo sapien
tgtattaacgcatgtcaagactctc

SEQ ID NO: 511434 - DNA, 25 bp, Homo sapien
tcactaacagcgatctaaaagcgta

SEQ ID NO: 511435 - DNA, 25 bp, Homo sapien
tttctgtagacttgtgatcacgccc

SEQ ID NO: 511436 - DNA, 25 bp, Homo sapien
gatcacgcccaggaactgtcatttt

SEQ ID NO: 511437 - DNA, 25 bp, Homo sapien
caatcctggagctgtatacgccacc

SEQ ID NO: 511438 - DNA, 25 bp, Homo sapien
tccactgtccaaacagggtttattg

SEQ ID NO: 511439 - DNA, 25 bp, Homo sapien
tattgacaggcgtttcacggcaacg

SEQ ID NO: 511440 - DNA, 25 bp, Homo sapien
aacgcatagcaaccccggcggctag

SEQ ID NO: 511441 - DNA, 25 bp, Homo sapien
tccgtgggcgcgctgattaggctct

SEQ ID NO: 511442 - DNA, 25 bp, Homo sapien
aactgcccttaaggcgcctccgtgg

SEQ ID NO: 511443 - DNA, 25 bp, Homo sapien
gaagatcgaaacgaagggctaagcc

SEQ ID NO: 511444 - DNA, 25 bp, Homo sapien
tcttgctgtttcccggctctgctca

SEQ ID NO: 511445 - DNA, 25 bp, Homo sapien
cagaaagggctcacggaaatgccca

SEQ ID NO: 511446 - DNA, 25 bp, Homo sapien
tcggcggcctccaggatcaaaaatt

SEQ ID NO: 511447 - DNA, 25 bp, Homo sapien
tgcccagtgatttacagaagactaa

SEQ ID NO: 511448 - DNA, 25 bp, Homo sapien
tggatcggccagataacaagaaact

SEQ ID NO: 511449 - DNA, 25 bp, Homo sapien
ccccaccccccataatttctgactg

SEQ ID NO: 511450 - DNA, 25 bp, Homo sapien
ccccataatttctgactgctgggaa

SEQ ID NO: 511451 - DNA, 25 bp, Homo sapien
accccccataatttctgactgctgg

SEQ ID NO: 511452 - DNA, 25 bp, Homo sapien
ataatttctgactgctgggaagcac

SEQ ID NO: 511453 - DNA, 25 bp, Homo sapien
tgaggctgtccagataatctccact

SEQ ID NO: 511454 - DNA, 25 bp, Homo sapien
gccacgcattccaaggctgggctca

SEQ ID NO: 511455 - DNA, 25 bp, Homo sapien
ggtaaaatgaggctgtccagataat

SEQ ID NO: 511456 - DNA, 25 bp, Homo sapien
gcttctgatgctctggggtaaaatg

SEQ ID NO: 511457 - DNA, 25 bp, Homo sapien
ggttggctctggcatttatagcact

SEQ ID NO: 511458 - DNA, 25 bp, Homo sapien
aaatagttgcagacaaaatctgaag

SEQ ID NO: 511459 - DNA, 25 bp, Homo sapien
gccccaagattgtgaaaatgacagg

SEQ ID NO: 511460 - DNA, 25 bp, Homo sapien
ctggcttggatgttacacagaccaa

SEQ ID NO: 511461 - DNA, 25 bp, Homo sapien
caggctctctaaacaagtccctgtt

SEQ ID NO: 511462 - DNA, 25 bp, Homo sapien
tctggtgacaggctctctaaacaag

SEQ ID NO: 511463 - DNA, 25 bp, Homo sapien
taccacaccctgtgcatacaccagc

SEQ ID NO: 511464 - DNA, 25 bp, Homo sapien
cctcataccacaccctgtgcataca

SEQ ID NO: 511465 - DNA, 25 bp, Homo sapien
tgaggagtctagcagagtccacgct

SEQ ID NO: 511466 - DNA, 25 bp, Homo sapien
gcagtgtaaaccttgcctgcccgga

SEQ ID NO: 511467 - DNA, 25 bp, Homo sapien
tgcagcctgcagatctaggaagaga

SEQ ID NO: 511468 - DNA, 25 bp, Homo sapien
cctggaattgctctgccgctgcaga

SEQ ID NO: 511469 - DNA, 25 bp, Homo sapien
tgcagggaagacaccggactcaagg

SEQ ID NO: 511470 - DNA, 25 bp, Homo sapien
ctctgggacacttctcagaggacct

SEQ ID NO: 511471 - DNA, 25 bp, Homo sapien
ggaagacaccggactcaagggctct

SEQ ID NO: 511472 - DNA, 25 bp, Homo sapien
ggctctgggacacttctcagaggac

SEQ ID NO: 511473 - DNA, 25 bp, Homo sapien
cggcggaggcggctgtggtggctgc

SEQ ID NO: 511474 - DNA, 25 bp, Homo sapien
tggcggcggaggcggctgtggtggc

SEQ ID NO: 511475 - DNA, 25 bp, Homo sapien
gcggcggaggcggctgtggtggctg

SEQ ID NO: 511476 - DNA, 25 bp, Homo sapien
ggtggcggcggaggcggctgtggtg

SEQ ID NO: 511477 - DNA, 25 bp, Homo sapien
cctctcctttgctctgcggttctga

SEQ ID NO: 511478 - DNA, 25 bp, Homo sapien
agcccaaccctggatccattcttag

SEQ ID NO: 511479 - DNA, 25 bp, Homo sapien
ccctggatccattcttaggcccaat

SEQ ID NO: 511480 - DNA, 25 bp, Homo sapien
cagcctcatggggaagagtcttcct

SEQ ID NO: 511481 - DNA, 25 bp, Homo sapien
catggggaagagtcttcctccttcc

SEQ ID NO: 511482 - DNA, 25 bp, Homo sapien
cctccggatggtgatgtagcgactg

SEQ ID NO: 511483 - DNA, 25 bp, Homo sapien
agccgctggtggtccgtgtacacca

SEQ ID NO: 511484 - DNA, 25 bp, Homo sapien
ccagcgtggcggctagctcggcttt

SEQ ID NO: 511485 - DNA, 25 bp, Homo sapien
cgtgtacaccactcgatatttgtct

SEQ ID NO: 511486 - DNA, 25 bp, Homo sapien
ctgtggaggaaggagaagtgagggc

SEQ ID NO: 511487 - DNA, 25 bp, Homo sapien
tgtggaggaaggagaagtgagggct

SEQ ID NO: 511488 - DNA, 25 bp, Homo sapien
tggaggaaggagaagtgagggctga

SEQ ID NO: 511489 - DNA, 25 bp, Homo sapien
gaggaaggagaagtgagggctgaga

SEQ ID NO: 511490 - DNA, 25 bp, Homo sapien
caggcccatcaggtggaattctgag

SEQ ID NO: 511491 - DNA, 25 bp, Homo sapien
gcccatcaggtggaattctgagctg

SEQ ID NO: 511492 - DNA, 25 bp, Homo sapien
ccatcaggtggaattctgagctggg

SEQ ID NO: 511493 - DNA, 25 bp, Homo sapien
ggcccatcaggtggaattctgagct

SEQ ID NO: 511494 - DNA, 25 bp, Homo sapien
tgaacaggttcaatcgcccagtgcc

SEQ ID NO: 511495 - DNA, 25 bp, Homo sapien
tcctgggaagatacaggcctgatca

SEQ ID NO: 511496 - DNA, 25 bp, Homo sapien
tccacaatgttggagcaggcccgag

SEQ ID NO: 511497 - DNA, 25 bp, Homo sapien
gcctggaggtgtttaatgccccgca

SEQ ID NO: 511498 - DNA, 25 bp, Homo sapien
gactcgcctggaagtgtctcggagc

SEQ ID NO: 511499 - DNA, 25 bp, Homo sapien
ttcagtgtcccggacgtgccgggca

SEQ ID NO: 511500 - DNA, 25 bp, Homo sapien
atgaccagaccctgagcgctcttcg

SEQ ID NO: 511501 - DNA, 25 bp, Homo sapien
ttgctcgggtgctgccccttcagtg

SEQ ID NO: 511502 - DNA, 25 bp, Homo sapien
tgcgaaagtcaccaccctctttccg

SEQ ID NO: 511503 - DNA, 25 bp, Homo sapien
tgacagatgacgctccgcagaggag

SEQ ID NO: 511504 - DNA, 25 bp, Homo sapien
gacagatgacgctccgcagaggagc

SEQ ID NO: 511505 - DNA, 25 bp, Homo sapien
ttgacagatgacgctccgcagagga

SEQ ID NO: 511506 - DNA, 25 bp, Homo sapien
cttgacagatgacgctccgcagagg

SEQ ID NO: 511507 - DNA, 25 bp, Homo sapien
gcaggacttcacagcggcctctcat

SEQ ID NO: 511508 - DNA, 25 bp, Homo sapien
tgctgaccccgcggcctgggctctg

SEQ ID NO: 511509 - DNA, 25 bp, Homo sapien
tgcggccttgccacctcggcgcagg

SEQ ID NO: 511510 - DNA, 25 bp, Homo sapien
atcacaagggcacccggcgccgact

SEQ ID NO: 511511 - DNA, 25 bp, Homo sapien
caaaggtcttccttagggcgtgcgc

SEQ ID NO: 511512 - DNA, 25 bp, Homo sapien
ctctcccgggacacgcaaaggtctt

SEQ ID NO: 511513 - DNA, 25 bp, Homo sapien
ccctgctaggagaaaggcgcctcct

SEQ ID NO: 511514 - DNA, 25 bp, Homo sapien
gagcccctgctaggagaaaggcgcc

SEQ ID NO: 511515 - DNA, 25 bp, Homo sapien
tgcaaagtgcccataaccagcgtgc

SEQ ID NO: 511516 - DNA, 25 bp, Homo sapien
catgtgcacagtgacgcagaaaccg

SEQ ID NO: 511517 - DNA, 25 bp, Homo sapien
caggactctccctagcatgtgcaca

SEQ ID NO: 511518 - DNA, 25 bp, Homo sapien
gttgtaattggctataaacttctgc

SEQ ID NO: 511519 - DNA, 25 bp, Homo sapien
caaggaatgcatgccgcagcaagtg

SEQ ID NO: 511520 - DNA, 25 bp, Homo sapien
cagcaagtgccggaggacgcgattc

SEQ ID NO: 511521 - DNA, 25 bp, Homo sapien
gccacgcaaggaatgcatgccgcag

SEQ ID NO: 511522 - DNA, 25 bp, Homo sapien
gaggacgcgattctgccggcgtcca

SEQ ID NO: 511523 - DNA, 25 bp, Homo sapien
tgtcccggggttgcgaatgaggagc

SEQ ID NO: 511524 - DNA, 25 bp, Homo sapien
cgaaggtgtcccggggttgcgaatg

SEQ ID NO: 511525 - DNA, 25 bp, Homo sapien
gccgacattccccggagcttcccga

SEQ ID NO: 511526 - DNA, 25 bp, Homo sapien
cattccccggagcttcccgaaggtg

SEQ ID NO: 511527 - DNA, 25 bp, Homo sapien
ctcgcacaggttccgccgctggccg

SEQ ID NO: 511528 - DNA, 25 bp, Homo sapien
atccactcgcacaggttccgccgct

SEQ ID NO: 511529 - DNA, 25 bp, Homo sapien
gggactgctgcgccggcttccgcat

SEQ ID NO: 511530 - DNA, 25 bp, Homo sapien
ggcttccgcatccactcgcacaggt

SEQ ID NO: 511531 - DNA, 25 bp, Homo sapien
gggagccaccgttgaggccgtgagc

SEQ ID NO: 511532 - DNA, 25 bp, Homo sapien
ggtggtgcggatggtagtctgcggg

SEQ ID NO: 511533 - DNA, 25 bp, Homo sapien
gggttgagcgtttgcagcagcccag

SEQ ID NO: 511534 - DNA, 25 bp, Homo sapien
cctccgggcgcgtagccattccagt

SEQ ID NO: 511535 - DNA, 25 bp, Homo sapien
tacatgctcacgtccttgtccagga

SEQ ID NO: 511536 - DNA, 25 bp, Homo sapien
cgcacggagctagggtacatgctca

SEQ ID NO: 511537 - DNA, 25 bp, Homo sapien
agctgcggccgccacgtggtaaccg

SEQ ID NO: 511538 - DNA, 25 bp, Homo sapien
ggactgcgcgctgtccaagttcgct

SEQ ID NO: 511539 - DNA, 25 bp, Homo sapien
gggagcagacctcaccatgctgcct

SEQ ID NO: 511540 - DNA, 25 bp, Homo sapien
atgctgcctggggaccgacgctgga

SEQ ID NO: 511541 - DNA, 25 bp, Homo sapien
tccgggagcagacctcaccatgctg

SEQ ID NO: 511542 - DNA, 25 bp, Homo sapien
gggtccgggagcagacctcaccatg

SEQ ID NO: 511543 - DNA, 25 bp, Homo sapien
tgctccgctggctcctcgcggctct

SEQ ID NO: 511544 - DNA, 25 bp, Homo sapien
ctctattagtaatgacacagacacc

SEQ ID NO: 511545 - DNA, 25 bp, Homo sapien
gccggcggccttccgtgattaacga

SEQ ID NO: 511546 - DNA, 25 bp, Homo sapien
gattaacgagtgtttacaagactct

SEQ ID NO: 511547 - DNA, 25 bp, Homo sapien
ccaaggagctgtgcactcaagaggt

SEQ ID NO: 511548 - DNA, 25 bp, Homo sapien
aaagcgatcagaactagcctagggc

SEQ ID NO: 511549 - DNA, 25 bp, Homo sapien
tttgacagcgctgccagattcggga

SEQ ID NO: 511550 - DNA, 25 bp, Homo sapien
attcgggaatgaggatcactgcggc

SEQ ID NO: 511551 - DNA, 25 bp, Homo sapien
gatgtcctcggacaagcttcttaga

SEQ ID NO: 511552 - DNA, 25 bp, Homo sapien
ggaacaatcgctttattagggacag

SEQ ID NO: 511553 - DNA, 25 bp, Homo sapien
gaggctccagcctatgtcttcggaa

SEQ ID NO: 511554 - DNA, 25 bp, Homo sapien
aaaatgggtctccttagcaatggca

SEQ ID NO: 511555 - DNA, 25 bp, Homo sapien
tctccagcttctaagtgcaggcctg

SEQ ID NO: 511556 - DNA, 25 bp, Homo sapien
gcctctccagcttctaagtgcaggc

SEQ ID NO: 511557 - DNA, 25 bp, Homo sapien
cctctggagattcgctctgctcagg

SEQ ID NO: 511558 - DNA, 25 bp, Homo sapien
tggcctctggagattcgctctgctc

SEQ ID NO: 511559 - DNA, 25 bp, Homo sapien
caggtgcttggcgtctttcttagga

SEQ ID NO: 511560 - DNA, 25 bp, Homo sapien
gcaaacttgtttgggaagcttgggc

SEQ ID NO: 511561 - DNA, 25 bp, Homo sapien
ccttttggcctgcactgagaagccc

SEQ ID NO: 511562 - DNA, 25 bp, Homo sapien
ttggcctagggctgaaactgcaacc

SEQ ID NO: 511563 - DNA, 25 bp, Homo sapien
gcgctcgcccttgcggctgcttatg

SEQ ID NO: 511564 - DNA, 25 bp, Homo sapien
cccttcccgcaggaataaaatcatt

SEQ ID NO: 511565 - DNA, 25 bp, Homo sapien
taaaatcattttccggacaagcttg

SEQ ID NO: 511566 - DNA, 25 bp, Homo sapien
tatgctcaggtgtttcggaagaggc

SEQ ID NO: 511567 - DNA, 25 bp, Homo sapien
aggcgcaggctgccgatcttcttca

SEQ ID NO: 511568 - DNA, 25 bp, Homo sapien
ggcgcaggctgccgatcttcttcac

SEQ ID NO: 511569 - DNA, 25 bp, Homo sapien
caggcgcaggctgccgatcttcttc

SEQ ID NO: 511570 - DNA, 25 bp, Homo sapien
cggtactgcgcgttgagctcggcca

SEQ ID NO: 511571 - DNA, 25 bp, Homo sapien
cagagcagtgcgcagctcctgcgcg

SEQ ID NO: 511572 - DNA, 25 bp, Homo sapien
tgttcccgctgcgactcggccgtga

SEQ ID NO: 511573 - DNA, 25 bp, Homo sapien
ggtggcagcgcaggatgccctcctg

SEQ ID NO: 511574 - DNA, 25 bp, Homo sapien
cattcggtcgggaccaggatccagg

SEQ ID NO: 511575 - DNA, 25 bp, Homo sapien
ctcggtccccactacattcggtcgg

SEQ ID NO: 511576 - DNA, 25 bp, Homo sapien
ttggcgcgcccctctaacaagtcct

SEQ ID NO: 511577 - DNA, 25 bp, Homo sapien
tggaccttgcgcttctcggtcccca

SEQ ID NO: 511578 - DNA, 25 bp, Homo sapien
tctccgactgtagatcccagaggcc

SEQ ID NO: 511579 - DNA, 25 bp, Homo sapien
gacttattccccttctccgactgta

SEQ ID NO: 511580 - DNA, 25 bp, Homo sapien
gagaacagcgtttacttgaaggaaa

SEQ ID NO: 511581 - DNA, 25 bp, Homo sapien
gccccagagaacagcgtttacttga

SEQ ID NO: 511582 - DNA, 25 bp, Homo sapien
acaggcgttttcagggcacggctgc

SEQ ID NO: 511583 - DNA, 25 bp, Homo sapien
tggaccctctactccaaatcacagg

SEQ ID NO: 511584 - DNA, 25 bp, Homo sapien
tactccaaatcacaggcgttttcag

SEQ ID NO: 511585 - DNA, 25 bp, Homo sapien
caggcgttttcagggcacggctgcc

SEQ ID NO: 511586 - DNA, 25 bp, Homo sapien
tcaggtgttcggagtttcagagcag

SEQ ID NO: 511587 - DNA, 25 bp, Homo sapien
ttgggcggctggaccttccgcgcct

SEQ ID NO: 511588 - DNA, 25 bp, Homo sapien
gggaaagtgcgagtcttgggcggct

SEQ ID NO: 511589 - DNA, 25 bp, Homo sapien
cctcttcaggtgttcggagtttcag

SEQ ID NO: 511590 - DNA, 25 bp, Homo sapien
cttcttgcccttggtgccctcgcat

SEQ ID NO: 511591 - DNA, 25 bp, Homo sapien
gcggcggcgtcccgccaacgtggcg

SEQ ID NO: 511592 - DNA, 25 bp, Homo sapien
ccttcttgcccttggtgccctcgca

SEQ ID NO: 511593 - DNA, 25 bp, Homo sapien
gcggcgtcccgccaacgtggcgtac

SEQ ID NO: 511594 - DNA, 25 bp, Homo sapien
gctgagaggctgtggtcccttcact

SEQ ID NO: 511595 - DNA, 25 bp, Homo sapien
cagacattgagagggtgggctccgg

SEQ ID NO: 511596 - DNA, 25 bp, Homo sapien
gctgtggtcccttcactcatcaggc

SEQ ID NO: 511597 - DNA, 25 bp, Homo sapien
aagctccagtgatgacccccaagcc

SEQ ID NO: 511598 - DNA, 25 bp, Homo sapien
cagtccaaactggccctttgtggta

SEQ ID NO: 511599 - DNA, 25 bp, Homo sapien
tcctcggccatccagtccaaactgg

SEQ ID NO: 511600 - DNA, 25 bp, Homo sapien
ctttgtggtacaaaagtcagccgat

SEQ ID NO: 511601 - DNA, 25 bp, Homo sapien
cctccagagggatgccttcagattc

SEQ ID NO: 511602 - DNA, 25 bp, Homo sapien
aaacacatccacgaattctccaagg

SEQ ID NO: 511603 - DNA, 25 bp, Homo sapien
gcaatcagaggacatctctcagtgg

SEQ ID NO: 511604 - DNA, 25 bp, Homo sapien
agaatggccgctgggaccaaacagc

SEQ ID NO: 511605 - DNA, 25 bp, Homo sapien
ctgtgcaagggcatcaataaaggca

SEQ ID NO: 511606 - DNA, 25 bp, Homo sapien
ctggagacagcgggacgtccagctc

SEQ ID NO: 511607 - DNA, 25 bp, Homo sapien
ggagacagcgggacgtccagctccc

SEQ ID NO: 511608 - DNA, 25 bp, Homo sapien
agacagcgggacgtccagctcccct

SEQ ID NO: 511609 - DNA, 25 bp, Homo sapien
tggagacagcgggacgtccagctcc

SEQ ID NO: 511610 - DNA, 25 bp, Homo sapien
gttcaccgctccctgggcaatctgg

SEQ ID NO: 511611 - DNA, 25 bp, Homo sapien
tggctccggtcttcctggaggacat

SEQ ID NO: 511612 - DNA, 25 bp, Homo sapien
catcagattgatgccgaacttggtg

SEQ ID NO: 511613 - DNA, 25 bp, Homo sapien
taggttctgcctaggttgtccaagc

SEQ ID NO: 511614 - DNA, 25 bp, Homo sapien
ctcatgggctcggaaactggcgaag

SEQ ID NO: 511615 - DNA, 25 bp, Homo sapien
catgggctcggaaactggcgaagac

SEQ ID NO: 511616 - DNA, 25 bp, Homo sapien
cactcatgggctcggaaactggcga

SEQ ID NO: 511617 - DNA, 25 bp, Homo sapien
tcactcatgggctcggaaactggcg

SEQ ID NO: 511618 - DNA, 25 bp, Homo sapien
tacacaattcactcaagccagcctg

SEQ ID NO: 511619 - DNA, 25 bp, Homo sapien
caagagtaaacgcagacagcttcta

SEQ ID NO: 511620 - DNA, 25 bp, Homo sapien
gcagaaatcttaggctgtgacaacc

SEQ ID NO: 511621 - DNA, 25 bp, Homo sapien
gaaggccgccaaagtgtctaggtga

SEQ ID NO: 511622 - DNA, 25 bp, Homo sapien
gaaacacggccatccacattctgat

SEQ ID NO: 511623 - DNA, 25 bp, Homo sapien
ctgaaaggtcgcctgttttggtagg

SEQ ID NO: 511624 - DNA, 25 bp, Homo sapien
gcggagagagtagccccaaatccat

SEQ ID NO: 511625 - DNA, 25 bp, Homo sapien
taggtgtgaggacattccgaaacac

SEQ ID NO: 511626 - DNA, 25 bp, Homo sapien
ttaatcttatgttgatttcaccatg

SEQ ID NO: 511627 - DNA, 25 bp, Homo sapien
atcttatgttgatttcaccatgtgg

SEQ ID NO: 511628 - DNA, 25 bp, Homo sapien
ctttataaagtcctggctgctacat

SEQ ID NO: 511629 - DNA, 25 bp, Homo sapien
ttataaagtcctggctgctacatac

SEQ ID NO: 511630 - DNA, 25 bp, Homo sapien
gctttataaagtcctggctgctaca

SEQ ID NO: 511631 - DNA, 25 bp, Homo sapien
tttataaagtcctggctgctacata

SEQ ID NO: 511632 - DNA, 25 bp, Homo sapien
agcccagcaggattgcattataatg

SEQ ID NO: 511633 - DNA, 25 bp, Homo sapien
gccagctgacatcctaaaaacgaag

SEQ ID NO: 511634 - DNA, 25 bp, Homo sapien
cgaagtcaaattagggaaggatggc

SEQ ID NO: 511635 - DNA, 25 bp, Homo sapien
ggaaggatggccgtttccttgagtc

SEQ ID NO: 511636 - DNA, 25 bp, Homo sapien
gcatcaaccggaatgccagggtaag

SEQ ID NO: 511637 - DNA, 25 bp, Homo sapien
aaatccattttgaatcagtttgtag

SEQ ID NO: 511638 - DNA, 25 bp, Homo sapien
caaccggaatgccagggtaaggatt

SEQ ID NO: 511639 - DNA, 25 bp, Homo sapien
tctgtagcataaaatggctgatcca

SEQ ID NO: 511640 - DNA, 25 bp, Homo sapien
ttcaaacaggctttcgggggccatc

SEQ ID NO: 511641 - DNA, 25 bp, Homo sapien
aatggtgtagatgccttcaaacagg

SEQ ID NO: 511642 - DNA, 25 bp, Homo sapien
aatattccatatgaccagacatcac

SEQ ID NO: 511643 - DNA, 25 bp, Homo sapien
gatttcccacagtaatattccatat

SEQ ID NO: 511644 - DNA, 25 bp, Homo sapien
acccagaggagataagatggtgaat

SEQ ID NO: 511645 - DNA, 25 bp, Homo sapien
tggtgaattttccacatacagacat

SEQ ID NO: 511646 - DNA, 25 bp, Homo sapien
ctgtggaaaacccagaggagataag

SEQ ID NO: 511647 - DNA, 25 bp, Homo sapien
aagatggtgaattttccacatacag

SEQ ID NO: 511648 - DNA, 25 bp, Homo sapien
gacacaacacaaaatagccgtataa

SEQ ID NO: 511649 - DNA, 25 bp, Homo sapien
taacgacacaacacaaaatagccgt

SEQ ID NO: 511650 - DNA, 25 bp, Homo sapien
catgataacgacacaacacaaaata

SEQ ID NO: 511651 - DNA, 25 bp, Homo sapien
gataacgacacaacacaaaatagcc

SEQ ID NO: 511652 - DNA, 25 bp, Homo sapien
tatctcgagccaatccaaagtcaca

SEQ ID NO: 511653 - DNA, 25 bp, Homo sapien
tcccgtgggtgacaagcacgttcct

SEQ ID NO: 511654 - DNA, 25 bp, Homo sapien
acatagttggaatcactcatgatat

SEQ ID NO: 511655 - DNA, 25 bp, Homo sapien
ctggcggccaggtctctgtgaacac

SEQ ID NO: 511656 - DNA, 25 bp, Homo sapien
aaatgtaagcacattcaagtcctcc

SEQ ID NO: 511657 - DNA, 25 bp, Homo sapien
ggcaacttgatatgcaaagcaaaga

SEQ ID NO: 511658 - DNA, 25 bp, Homo sapien
cctttggcaacttgatatgcaaagc

SEQ ID NO: 511659 - DNA, 25 bp, Homo sapien
ttttggttttcatattcaatttcat

SEQ ID NO: 511660 - DNA, 25 bp, Homo sapien
tttttggttttcatattcaatttca

SEQ ID NO: 511661 - DNA, 25 bp, Homo sapien
cagccttttttggttttcatattca

SEQ ID NO: 511662 - DNA, 25 bp, Homo sapien
agtgaaatgaattcccatgaagccc

SEQ ID NO: 511663 - DNA, 25 bp, Homo sapien
catgaagccctgagatttgatccga

SEQ ID NO: 511664 - DNA, 25 bp, Homo sapien
ccgagtccgggtgtatctgaacttc

SEQ ID NO: 511665 - DNA, 25 bp, Homo sapien
tctgaacttctcttgaaccaggcat

SEQ ID NO: 511666 - DNA, 25 bp, Homo sapien
cattctttggtttctgaactcagcc

SEQ ID NO: 511667 - DNA, 25 bp, Homo sapien
atctcattctttggtttctgaactc

SEQ ID NO: 511668 - DNA, 25 bp, Homo sapien
tctttggtttctgaactcagcccac

SEQ ID NO: 511669 - DNA, 25 bp, Homo sapien
atcgatctcattctttggtttctga

SEQ ID NO: 511670 - DNA, 25 bp, Homo sapien
agtcccgtaagcgtttcaccatcct

SEQ ID NO: 511671 - DNA, 25 bp, Homo sapien
cacataatacagatcttcccgagag

SEQ ID NO: 511672 - DNA, 25 bp, Homo sapien
cagatcttcccgagagtcccgtaag

SEQ ID NO: 511673 - DNA, 25 bp, Homo sapien
tttccctcacataatacagatcttc

SEQ ID NO: 511674 - DNA, 25 bp, Homo sapien
tgtccaagtcctgtgaaatttttct

SEQ ID NO: 511675 - DNA, 25 bp, Homo sapien
ttggatgtgattggaaagtggggta

SEQ ID NO: 511676 - DNA, 25 bp, Homo sapien
ggatgtgattggaaagtggggtaaa

SEQ ID NO: 511677 - DNA, 25 bp, Homo sapien
gtccaagtcctgtgaaatttttctc

SEQ ID NO: 511678 - DNA, 25 bp, Homo sapien
cttagatagttgagaagatcaccat

SEQ ID NO: 511679 - DNA, 25 bp, Homo sapien
gatagttgagaagatcaccatagca

SEQ ID NO: 511680 - DNA, 25 bp, Homo sapien
tagatagttgagaagatcaccatag

SEQ ID NO: 511681 - DNA, 25 bp, Homo sapien
agatagttgagaagatcaccatagc

SEQ ID NO: 511682 - DNA, 25 bp, Homo sapien
aggttcacaatattctcgtggcttc

SEQ ID NO: 511683 - DNA, 25 bp, Homo sapien
tgacagtgtgcacgcccccagcagg

SEQ ID NO: 511684 - DNA, 25 bp, Homo sapien
ccccagcaggttcacaatattctcg

SEQ ID NO: 511685 - DNA, 25 bp, Homo sapien
ttgagttctgacatgagtgcctctc

SEQ ID NO: 511686 - DNA, 25 bp, Homo sapien
gagactcctgttttgctaattccat

SEQ ID NO: 511687 - DNA, 25 bp, Homo sapien
ccaaaagcacctgatcctagtacct

SEQ ID NO: 511688 - DNA, 25 bp, Homo sapien
ctaattccataagctgttgcgttca

SEQ ID NO: 511689 - DNA, 25 bp, Homo sapien
tttcagcattttgacggcaacctgg

SEQ ID NO: 511690 - DNA, 25 bp, Homo sapien
ggtgagtacgtgcattttaaagatt

SEQ ID NO: 511691 - DNA, 25 bp, Homo sapien
caaatggtgagtacgtgcattttaa

SEQ ID NO: 511692 - DNA, 25 bp, Homo sapien
gacaaatggtgagtacgtgcatttt

SEQ ID NO: 511693 - DNA, 25 bp, Homo sapien
agacaaatggtgagtacgtgcattt

SEQ ID NO: 511694 - DNA, 25 bp, Homo sapien
tcacctgtaccatctgtagctggct

SEQ ID NO: 511695 - DNA, 25 bp, Homo sapien
tactcattatctgaggagccggtca

SEQ ID NO: 511696 - DNA, 25 bp, Homo sapien
tcatattctctgaaatcaacgtaga

SEQ ID NO: 511697 - DNA, 25 bp, Homo sapien
tggaaactcccatttgagatcatat

SEQ ID NO: 511698 - DNA, 25 bp, Homo sapien
ttgtacttgtgacaaattagcaggg

SEQ ID NO: 511699 - DNA, 25 bp, Homo sapien
tgttgcatagaatgagatgttgtct

SEQ ID NO: 511700 - DNA, 25 bp, Homo sapien
aattagcagggttaaaacgacaatg

SEQ ID NO: 511701 - DNA, 25 bp, Homo sapien
gaatgagatgttgtcttggatgaaa

SEQ ID NO: 511702 - DNA, 25 bp, Homo sapien
agagtttaaaaggatcgtctcacaa

SEQ ID NO: 511703 - DNA, 25 bp, Homo sapien
aaaggatcgtctcacaagatgtgcc

SEQ ID NO: 511704 - DNA, 25 bp, Homo sapien
cacaagatgtgccaagggaattgta

SEQ ID NO: 511705 - DNA, 25 bp, Homo sapien
aagatgtgccaagggaattgtatgc

SEQ ID NO: 511706 - DNA, 25 bp, Homo sapien
tggcttcactcatgtttagagtact

SEQ ID NO: 511707 - DNA, 25 bp, Homo sapien
cacttttctgttagcctttctattc

SEQ ID NO: 511708 - DNA, 25 bp, Homo sapien
ttagagtactgctcgacacccactg

SEQ ID NO: 511709 - DNA, 25 bp, Homo sapien
ctgttagcctttctattccagactc

SEQ ID NO: 511710 - DNA, 25 bp, Homo sapien
aatgggtatccatccgagaaacagg

SEQ ID NO: 511711 - DNA, 25 bp, Homo sapien
caggtccaagatggtaatgggtatc

SEQ ID NO: 511712 - DNA, 25 bp, Homo sapien
gcctgacttgccgatgcttctgcga

SEQ ID NO: 511713 - DNA, 25 bp, Homo sapien
gcttctgcgagcacttgaggtttcc

SEQ ID NO: 511714 - DNA, 25 bp, Homo sapien
tggtaaattgggcatcatcattttc

SEQ ID NO: 511715 - DNA, 25 bp, Homo sapien
cttatattcagcgtgaacattttgg

SEQ ID NO: 511716 - DNA, 25 bp, Homo sapien
tggtgcttatgattgcaaaacttgg

SEQ ID NO: 511717 - DNA, 25 bp, Homo sapien
tcctggctggtgcttatgattgcaa

SEQ ID NO: 511718 - DNA, 25 bp, Homo sapien
gaagaaagacgtgagcttctaagag

SEQ ID NO: 511719 - DNA, 25 bp, Homo sapien
gaaagacgtgagcttctaagagaga

SEQ ID NO: 511720 - DNA, 25 bp, Homo sapien
agaaagacgtgagcttctaagagag

SEQ ID NO: 511721 - DNA, 25 bp, Homo sapien
aagaaagacgtgagcttctaagaga

SEQ ID NO: 511722 - DNA, 25 bp, Homo sapien
cacttgaattggtagcatttataaa

SEQ ID NO: 511723 - DNA, 25 bp, Homo sapien
tccacgtacatctgatttgtgggta

SEQ ID NO: 511724 - DNA, 25 bp, Homo sapien
tgattttcgagagaaggtccacgta

SEQ ID NO: 511725 - DNA, 25 bp, Homo sapien
tattggtcaatttcataatcttcac

SEQ ID NO: 511726 - DNA, 25 bp, Homo sapien
taggtactcatctcaaagtagttgc

SEQ ID NO: 511727 - DNA, 25 bp, Homo sapien
taaccaaagctgattgactgggatg

SEQ ID NO: 511728 - DNA, 25 bp, Homo sapien
caagtgtagtatccggtgtcgtttc

SEQ ID NO: 511729 - DNA, 25 bp, Homo sapien
ttcttgccactgatgatacaaaagc

SEQ ID NO: 511730 - DNA, 25 bp, Homo sapien
ttctaattcccaggtgagcccgaat

SEQ ID NO: 511731 - DNA, 25 bp, Homo sapien
tgcaccttatccataagggttcccc

SEQ ID NO: 511732 - DNA, 25 bp, Homo sapien
ccgaatccatggttcacatgaacag

SEQ ID NO: 511733 - DNA, 25 bp, Homo sapien
ctcctcgagtgctttgttttctaat

SEQ ID NO: 511734 - DNA, 25 bp, Homo sapien
ccttatgtccgtcccaaataattca

SEQ ID NO: 511735 - DNA, 25 bp, Homo sapien
cagcaccttatgtccgtcccaaata

SEQ ID NO: 511736 - DNA, 25 bp, Homo sapien
ctggcacagcaccttatgtccgtcc

SEQ ID NO: 511737 - DNA, 25 bp, Homo sapien
tatgtccgtcccaaataattcatga

SEQ ID NO: 511738 - DNA, 25 bp, Homo sapien
cccagggagccaacaatcctggaac

SEQ ID NO: 511739 - DNA, 25 bp, Homo sapien
ggagccaacaatcctggaacgtaga

SEQ ID NO: 511740 - DNA, 25 bp, Homo sapien
tgtgaagcccacattggccattctg

SEQ ID NO: 511741 - DNA, 25 bp, Homo sapien
aacaatcctggaacgtagagggact

SEQ ID NO: 511742 - DNA, 25 bp, Homo sapien
gatcggctctggaacgctctcagat

SEQ ID NO: 511743 - DNA, 25 bp, Homo sapien
acccattccacgatcggctctggaa

SEQ ID NO: 511744 - DNA, 25 bp, Homo sapien
ccctgtgaatcgcaaagcacccatt

SEQ ID NO: 511745 - DNA, 25 bp, Homo sapien
tcagatatgcagaccagggcgtcct

SEQ ID NO: 511746 - DNA, 25 bp, Homo sapien
cttcttaatgtgtaaagcagggtat

SEQ ID NO: 511747 - DNA, 25 bp, Homo sapien
tcttcttaatgtgtaaagcagggta

SEQ ID NO: 511748 - DNA, 25 bp, Homo sapien
ctaaagcatcataagttattaacat

SEQ ID NO: 511749 - DNA, 25 bp, Homo sapien
aagccagaaagcacacgcaggtggt

SEQ ID NO: 511750 - DNA, 25 bp, Homo sapien
cttcttggtcatggaaggcgaagca

SEQ ID NO: 511751 - DNA, 25 bp, Homo sapien
tgcctcccttggtcagaacatctgg

SEQ ID NO: 511752 - DNA, 25 bp, Homo sapien
cagcaagttcagtgtgcatagcacg

SEQ ID NO: 511753 - DNA, 25 bp, Homo sapien
caatattgtgtaattggtagcttca

SEQ ID NO: 511754 - DNA, 25 bp, Homo sapien
tgtaattggtagcttcactctgaat

SEQ ID NO: 511755 - DNA, 25 bp, Homo sapien
tattgtgtaattggtagcttcactc

SEQ ID NO: 511756 - DNA, 25 bp, Homo sapien
ctgtaaacaatattgtgtaattggt

SEQ ID NO: 511757 - DNA, 25 bp, Homo sapien
agcttctaggatcgaaaactcccat

SEQ ID NO: 511758 - DNA, 25 bp, Homo sapien
gagcttctaggatcgaaaactccca

SEQ ID NO: 511759 - DNA, 25 bp, Homo sapien
tgagcttctaggatcgaaaactccc

SEQ ID NO: 511760 - DNA, 25 bp, Homo sapien
tcaaaatgtggctggcaattcaggg

SEQ ID NO: 511761 - DNA, 25 bp, Homo sapien
cacttgcagtgtgatggaagcagat

SEQ ID NO: 511762 - DNA, 25 bp, Homo sapien
ggcagcttcgtacactgtccctgag

SEQ ID NO: 511763 - DNA, 25 bp, Homo sapien
gaagcagatacatccacttccacag

SEQ ID NO: 511764 - DNA, 25 bp, Homo sapien
ggcagtccgggaatagcttgagcca

SEQ ID NO: 511765 - DNA, 25 bp, Homo sapien
cgctggcagtccgggaatagcttga

SEQ ID NO: 511766 - DNA, 25 bp, Homo sapien
ctggcagtccgggaatagcttgagc

SEQ ID NO: 511767 - DNA, 25 bp, Homo sapien
tggcagtccgggaatagcttgagcc

SEQ ID NO: 511768 - DNA, 25 bp, Homo sapien
gccacgttcttcaccacctggcaga

SEQ ID NO: 511769 - DNA, 25 bp, Homo sapien
gttcttgaaggccaggccacgttct

SEQ ID NO: 511770 - DNA, 25 bp, Homo sapien
caggagccaagggatgttcttgaag

SEQ ID NO: 511771 - DNA, 25 bp, Homo sapien
gttcttcaccacctggcagagctga

SEQ ID NO: 511772 - DNA, 25 bp, Homo sapien
catgggatatgatgatgacttcccc

SEQ ID NO: 511773 - DNA, 25 bp, Homo sapien
cacacttgatcacaggcagatcttg

SEQ ID NO: 511774 - DNA, 25 bp, Homo sapien
gcagatcttgatttgtaatagtccc

SEQ ID NO: 511775 - DNA, 25 bp, Homo sapien
ccactgatgaatcattgttcttatg

SEQ ID NO: 511776 - DNA, 25 bp, Homo sapien
gctcaggcaatccttacaccttgtc

SEQ ID NO: 511777 - DNA, 25 bp, Homo sapien
agctcaggcaatccttacaccttgt

SEQ ID NO: 511778 - DNA, 25 bp, Homo sapien
ccgccgtcgcgcgccaacgccggca

SEQ ID NO: 511779 - DNA, 25 bp, Homo sapien
cgccgtcgcgcgccaacgccggcat

SEQ ID NO: 511780 - DNA, 25 bp, Homo sapien
gcagcggcagctggccgccgtcgcg

SEQ ID NO: 511781 - DNA, 25 bp, Homo sapien
gcccagccctgcgatgccgcctgga

SEQ ID NO: 511782 - DNA, 25 bp, Homo sapien
cagccctgcgatgccgcctggagcg

SEQ ID NO: 511783 - DNA, 25 bp, Homo sapien
cggcccagccctgcgatgccgcctg

SEQ ID NO: 511784 - DNA, 25 bp, Homo sapien
ccagccctgcgatgccgcctggagc

SEQ ID NO: 511785 - DNA, 25 bp, Homo sapien
ttaagactcaggctgctatcactaa

SEQ ID NO: 511786 - DNA, 25 bp, Homo sapien
tgagccacatgcttgtccttaaggg

SEQ ID NO: 511787 - DNA, 25 bp, Homo sapien
tcaggctgctatcactaatataata

SEQ ID NO: 511788 - DNA, 25 bp, Homo sapien
caccaggtgacaccagggttgctgt

SEQ ID NO: 511789 - DNA, 25 bp, Homo sapien
tccaattgtcctcaagaaaaagttc

SEQ ID NO: 511790 - DNA, 25 bp, Homo sapien
tccttccaaagcagtgaggttagag

SEQ ID NO: 511791 - DNA, 25 bp, Homo sapien
gtgccctgccatgttgacttttaaa

SEQ ID NO: 511792 - DNA, 25 bp, Homo sapien
tgcaggttggcataaaatggcgcct

SEQ ID NO: 511793 - DNA, 25 bp, Homo sapien
gaagtaggtactattcttaatccag

SEQ ID NO: 511794 - DNA, 25 bp, Homo sapien
caggtgtacagacaaggcacagaga

SEQ ID NO: 511795 - DNA, 25 bp, Homo sapien
agcaattaactgagaggaacacagc

SEQ ID NO: 511796 - DNA, 25 bp, Homo sapien
gaaatgaagcaattaactgagagga

SEQ ID NO: 511797 - DNA, 25 bp, Homo sapien
tctaagcagtgttgtcccaggtggc

SEQ ID NO: 511798 - DNA, 25 bp, Homo sapien
taaacaactcggaggaaccagagcg

SEQ ID NO: 511799 - DNA, 25 bp, Homo sapien
tctgaactcacttaaggcggcatgt

SEQ ID NO: 511800 - DNA, 25 bp, Homo sapien
tattcttcaggtagagccagggctc

SEQ ID NO: 511801 - DNA, 25 bp, Homo sapien
gaattgtgattgtccaaatggagga

SEQ ID NO: 511802 - DNA, 25 bp, Homo sapien
gagagcagtgccatggataacttga

SEQ ID NO: 511803 - DNA, 25 bp, Homo sapien
tttttgagggcatacattgaagact

SEQ ID NO: 511804 - DNA, 25 bp, Homo sapien
taatgtgtagcgtgtggcaaagctg

SEQ ID NO: 511805 - DNA, 25 bp, Homo sapien
gatacctctgcaggtaactcactgt

SEQ ID NO: 511806 - DNA, 25 bp, Homo sapien
ggcactgactagagaatgtaattta

SEQ ID NO: 511807 - DNA, 25 bp, Homo sapien
taaatgacgtagtatatgtgttctc

SEQ ID NO: 511808 - DNA, 25 bp, Homo sapien
gcgcacggcgactttgcggttttta

SEQ ID NO: 511809 - DNA, 25 bp, Homo sapien
tgcagaggtgtagccactcgacctc

SEQ ID NO: 511810 - DNA, 25 bp, Homo sapien
gtagccactcgacctctccacgact

SEQ ID NO: 511811 - DNA, 25 bp, Homo sapien
tagccactcgacctctccacgactg

SEQ ID NO: 511812 - DNA, 25 bp, Homo sapien
gaggtgtagccactcgacctctcca

SEQ ID NO: 511813 - DNA, 25 bp, Homo sapien
gatctcggcttactatagtgtctgc

SEQ ID NO: 511814 - DNA, 25 bp, Homo sapien
tcggcttactatagtgtctgcctcc

SEQ ID NO: 511815 - DNA, 25 bp, Homo sapien
tctcggcttactatagtgtctgcct

SEQ ID NO: 511816 - DNA, 25 bp, Homo sapien
atctcggcttactatagtgtctgcc

SEQ ID NO: 511817 - DNA, 25 bp, Homo sapien
aatcaacggcattcctcttacttgc

SEQ ID NO: 511818 - DNA, 25 bp, Homo sapien
tgacaaaatcaacggcattcctctt

SEQ ID NO: 511819 - DNA, 25 bp, Homo sapien
acacgcggcccctaactgacaaaat

SEQ ID NO: 511820 - DNA, 25 bp, Homo sapien
ccctaactgacaaaatcaacggcat

SEQ ID NO: 511821 - DNA, 25 bp, Homo sapien
ctaattcatagtgacagaaagtctc

SEQ ID NO: 511822 - DNA, 25 bp, Homo sapien
aacaacttgaccgaaattctgtcgc

SEQ ID NO: 511823 - DNA, 25 bp, Homo sapien
tatatgtgtatgacccatttatgtg

SEQ ID NO: 511824 - DNA, 25 bp, Homo sapien
tattgatttgggtaatggtttccag

SEQ ID NO: 511825 - DNA, 25 bp, Homo sapien
tttgggttagatccacatggcctct

SEQ ID NO: 511826 - DNA, 25 bp, Homo sapien
tgtgcaggctgtgatctctatcaaa

SEQ ID NO: 511827 - DNA, 25 bp, Homo sapien
caaccataggcaggtatggtggcac

SEQ ID NO: 511828 - DNA, 25 bp, Homo sapien
ctaggcaacacagcatgacctggtc

SEQ ID NO: 511829 - DNA, 25 bp, Homo sapien
cttgtgctttacttgtcctatcttt

SEQ ID NO: 511830 - DNA, 25 bp, Homo sapien
taacttttctcattcgatatggtgt

SEQ ID NO: 511831 - DNA, 25 bp, Homo sapien
gaccattgcatgttagacctttatt

SEQ ID NO: 511832 - DNA, 25 bp, Homo sapien
catctgttgaactgaccattgcatg

SEQ ID NO: 511833 - DNA, 25 bp, Homo sapien
aagatcagcagggtgtagggactca

SEQ ID NO: 511834 - DNA, 25 bp, Homo sapien
tagggactcatgcttgcaatctcag

SEQ ID NO: 511835 - DNA, 25 bp, Homo sapien
tatgtgctgcttaccagaaatttta

SEQ ID NO: 511836 - DNA, 25 bp, Homo sapien
tccaagccataagtacatatttgct

SEQ ID NO: 511837 - DNA, 25 bp, Homo sapien
ttccatcaagccacacaatgaacag

SEQ ID NO: 511838 - DNA, 25 bp, Homo sapien
tagaatccacctttgtggtagaggg

SEQ ID NO: 511839 - DNA, 25 bp, Homo sapien
cattcaacataagtgatggtagaga

SEQ ID NO: 511840 - DNA, 25 bp, Homo sapien
cacttaatgagttgatagaatccac

SEQ ID NO: 511841 - DNA, 25 bp, Homo sapien
aaaacatgattgttttaattctgcc

SEQ ID NO: 511842 - DNA, 25 bp, Homo sapien
cagaagaacttctgtaactttgaat

SEQ ID NO: 511843 - DNA, 25 bp, Homo sapien
ttcatatattccatccagaagaact

SEQ ID NO: 511844 - DNA, 25 bp, Homo sapien
ctttgacagcttagtaaacaaaaca

SEQ ID NO: 511845 - DNA, 25 bp, Homo sapien
tacttagtgcctaggtagttggctc

SEQ ID NO: 511846 - DNA, 25 bp, Homo sapien
taatgtaagtatctagaaacccgtg

SEQ ID NO: 511847 - DNA, 25 bp, Homo sapien
catttttagagccagtaccatcatc

SEQ ID NO: 511848 - DNA, 25 bp, Homo sapien
tgttatgagtcgtgtagttaccttg

SEQ ID NO: 511849 - DNA, 25 bp, Homo sapien
tagtttattcacatgggtatagcta

SEQ ID NO: 511850 - DNA, 25 bp, Homo sapien
tatatgccaaatgcaggatactttg

SEQ ID NO: 511851 - DNA, 25 bp, Homo sapien
cacatgggtatagctattcatttat

SEQ ID NO: 511852 - DNA, 25 bp, Homo sapien
tttgaatgaggtgaacaaaattccc

SEQ ID NO: 511853 - DNA, 25 bp, Homo sapien
tatttaagaatgaacttgacttgca

SEQ ID NO: 511854 - DNA, 25 bp, Homo sapien
catctagcactattgtaaagaaggg

SEQ ID NO: 511855 - DNA, 25 bp, Homo sapien
ggaaatgggtaagtgcagtcctact

SEQ ID NO: 511856 - DNA, 25 bp, Homo sapien
ggctgttacagttttccagaggaat

SEQ ID NO: 511857 - DNA, 25 bp, Homo sapien
tcttcaaagtcgaaagactcattta

SEQ ID NO: 511858 - DNA, 25 bp, Homo sapien
tgcttttcttcaaagtcgaaagact

SEQ ID NO: 511859 - DNA, 25 bp, Homo sapien
catggaattcaagtccacttgcttt

SEQ ID NO: 511860 - DNA, 25 bp, Homo sapien
aagtcgaaagactcatttagtgtct

SEQ ID NO: 511861 - DNA, 25 bp, Homo sapien
tacctagtagtccaaaagctgttta

SEQ ID NO: 511862 - DNA, 25 bp, Homo sapien
gtgtaaggtgtaagtccatctcccc

SEQ ID NO: 511863 - DNA, 25 bp, Homo sapien
tgttgagtcatcgtaaccaagatca

SEQ ID NO: 511864 - DNA, 25 bp, Homo sapien
ccttgtccccaagactacctagtag

SEQ ID NO: 511865 - DNA, 25 bp, Homo sapien
tgttcatgattatctcttgttcact

SEQ ID NO: 511866 - DNA, 25 bp, Homo sapien
agatgttcatgattatctcttgttc

SEQ ID NO: 511867 - DNA, 25 bp, Homo sapien
ttcatgattatctcttgttcactat

SEQ ID NO: 511868 - DNA, 25 bp, Homo sapien
gatgttcatgattatctcttgttca

SEQ ID NO: 511869 - DNA, 25 bp, Homo sapien
tggagggataacgatctgctgtgcc

SEQ ID NO: 511870 - DNA, 25 bp, Homo sapien
tcagcagtggtctggtatcaagagc

SEQ ID NO: 511871 - DNA, 25 bp, Homo sapien
ggtgctcaccatgcaactgaagaaa

SEQ ID NO: 511872 - DNA, 25 bp, Homo sapien
aaagctttgaagactagagacacgc

SEQ ID NO: 511873 - DNA, 25 bp, Homo sapien
taaatgctagtttgcttcagcccct

SEQ ID NO: 511874 - DNA, 25 bp, Homo sapien
cctgtgcaaggcaagtttacatcac

SEQ ID NO: 511875 - DNA, 25 bp, Homo sapien
gatttggatgtcaacaacttcccta

SEQ ID NO: 511876 - DNA, 25 bp, Homo sapien
tgcatataaaaggtagacagctgat

SEQ ID NO: 511877 - DNA, 25 bp, Homo sapien
gagaaagcataaggggtctgccatg

SEQ ID NO: 511878 - DNA, 25 bp, Homo sapien
atgtgtatgtctggtggtaaagtat

SEQ ID NO: 511879 - DNA, 25 bp, Homo sapien
aaagcataaggggtctgccatgtgt

SEQ ID NO: 511880 - DNA, 25 bp, Homo sapien
agcataaggggtctgccatgtgtat

SEQ ID NO: 511881 - DNA, 25 bp, Homo sapien
taacatctcggtgtcacttcttgga

SEQ ID NO: 511882 - DNA, 25 bp, Homo sapien
gctcgttctttgttagtgccaacca

SEQ ID NO: 511883 - DNA, 25 bp, Homo sapien
gatggactcatgtatgctacaaacc

SEQ ID NO: 511884 - DNA, 25 bp, Homo sapien
gttacaccactgtcggccaaagatg

SEQ ID NO: 511885 - DNA, 25 bp, Homo sapien
cacaggtggtttgcgtatgtaaaga

SEQ ID NO: 511886 - DNA, 25 bp, Homo sapien
taaaattgccagctgtcacaggtgg

SEQ ID NO: 511887 - DNA, 25 bp, Homo sapien
ccagtaggctcactagggaatgtgc

SEQ ID NO: 511888 - DNA, 25 bp, Homo sapien
gctagtgagtcttccacaaaagccg

SEQ ID NO: 511889 - DNA, 25 bp, Homo sapien
cccaggcaagtttcaaagcagttga

SEQ ID NO: 511890 - DNA, 25 bp, Homo sapien
gcttagcgatccaaggcccacttga

SEQ ID NO: 511891 - DNA, 25 bp, Homo sapien
gcatcaaacagagccagcttagcga

SEQ ID NO: 511892 - DNA, 25 bp, Homo sapien
tttagaccctgaagagtaggcgccc

SEQ ID NO: 511893 - DNA, 25 bp, Homo sapien
atcagccctcgttttgatatggaga

SEQ ID NO: 511894 - DNA, 25 bp, Homo sapien
tgatatggagaaaactcctctcctc

SEQ ID NO: 511895 - DNA, 25 bp, Homo sapien
actcctctcctcaggactgcatttt

SEQ ID NO: 511896 - DNA, 25 bp, Homo sapien
tttgatatggagaaaactcctctcc

SEQ ID NO: 511897 - DNA, 25 bp, Homo sapien
tcttaggcctgctagaggactcccg

SEQ ID NO: 511898 - DNA, 25 bp, Homo sapien
cctggctgggccctcaaatgtagaa

SEQ ID NO: 511899 - DNA, 25 bp, Homo sapien
gaaatggcattgctgagccccgtcc

SEQ ID NO: 511900 - DNA, 25 bp, Homo sapien
tcaatcaaactggtcctgcgtgccc

SEQ ID NO: 511901 - DNA, 25 bp, Homo sapien
tgggtggggtggagtacaggaccac

SEQ ID NO: 511902 - DNA, 25 bp, Homo sapien
ggtggagtacaggaccaccgagttg

SEQ ID NO: 511903 - DNA, 25 bp, Homo sapien
tggagtacaggaccaccgagttgta

SEQ ID NO: 511904 - DNA, 25 bp, Homo sapien
gagtacaggaccaccgagttgtagt

SEQ ID NO: 511905 - DNA, 25 bp, Homo sapien
agcagcacgcgattttcctttccag

SEQ ID NO: 511906 - DNA, 25 bp, Homo sapien
tggtcgtaggtgaacctgcgcttgc

SEQ ID NO: 511907 - DNA, 25 bp, Homo sapien
cggggagcagcacgcgattttcctt

SEQ ID NO: 511908 - DNA, 25 bp, Homo sapien
ctttccagctcagcgtggtcgtagg

SEQ ID NO: 511909 - DNA, 25 bp, Homo sapien
aaactgggcctgctgacatcagaca

SEQ ID NO: 511910 - DNA, 25 bp, Homo sapien
cttacttttactggttactctcaag

SEQ ID NO: 511911 - DNA, 25 bp, Homo sapien
agctggaatggcagaaactgggcct

SEQ ID NO: 511912 - DNA, 25 bp, Homo sapien
tcagacagccccgactccttacttt

SEQ ID NO: 511913 - DNA, 25 bp, Homo sapien
gaagcgctgctcttgccctttaata

SEQ ID NO: 511914 - DNA, 25 bp, Homo sapien
gaagcttgttttagaccggtctgga

SEQ ID NO: 511915 - DNA, 25 bp, Homo sapien
tatcaccagcaaggctcaagggtgg

SEQ ID NO: 511916 - DNA, 25 bp, Homo sapien
gaaacgttttagtcacggtgctgct

SEQ ID NO: 511917 - DNA, 25 bp, Homo sapien
tcaatcttgagcgaggccttgggtt

SEQ ID NO: 511918 - DNA, 25 bp, Homo sapien
ttgctgtcagtccaggtgaagcgct

SEQ ID NO: 511919 - DNA, 25 bp, Homo sapien
ccaggtgaagcgcttcagcatggga

SEQ ID NO: 511920 - DNA, 25 bp, Homo sapien
gccaacagagtgctgctgtcgccct

SEQ ID NO: 511921 - DNA, 25 bp, Homo sapien
catgaacttgaaagcatttacgtat

SEQ ID NO: 511922 - DNA, 25 bp, Homo sapien
tcatgaacttgaaagcatttacgta

SEQ ID NO: 511923 - DNA, 25 bp, Homo sapien
attaaacttcggagctgaaatactt

SEQ ID NO: 511924 - DNA, 25 bp, Homo sapien
ttgaagcaaatcacctagtttttcc

SEQ ID NO: 511925 - DNA, 25 bp, Homo sapien
ttgcttgaagcaaatcacctagttt

SEQ ID NO: 511926 - DNA, 25 bp, Homo sapien
gcttgaagcaaatcacctagttttt

SEQ ID NO: 511927 - DNA, 25 bp, Homo sapien
gaagcaaatcacctagtttttccac

SEQ ID NO: 511928 - DNA, 25 bp, Homo sapien
agtgatcatcctatgcattgcctta

SEQ ID NO: 511929 - DNA, 25 bp, Homo sapien
ggagagcagtgatcatcctatgcat

SEQ ID NO: 511930 - DNA, 25 bp, Homo sapien
gagcagtgatcatcctatgcattgc

SEQ ID NO: 511931 - DNA, 25 bp, Homo sapien
gcagtgatcatcctatgcattgcct

SEQ ID NO: 511932 - DNA, 25 bp, Homo sapien
atggatacccaggttctttgttgtg

SEQ ID NO: 511933 - DNA, 25 bp, Homo sapien
tggatacccaggttctttgttgtgc

SEQ ID NO: 511934 - DNA, 25 bp, Homo sapien
ggatacccaggttctttgttgtgcc

SEQ ID NO: 511935 - DNA, 25 bp, Homo sapien
tgttcctaattcatcagccgtggtc

SEQ ID NO: 511936 - DNA, 25 bp, Homo sapien
tctcagctgacagacggcacattgc

SEQ ID NO: 511937 - DNA, 25 bp, Homo sapien
tgagtggccatatcagagaagcatt

SEQ ID NO: 511938 - DNA, 25 bp, Homo sapien
gattacaatagctgccctgaccacc

SEQ ID NO: 511939 - DNA, 25 bp, Homo sapien
tctcctgtccacctcgtccagttcc

SEQ ID NO: 511940 - DNA, 25 bp, Homo sapien
cctcgtccagttccccatcctgggt

SEQ ID NO: 511941 - DNA, 25 bp, Homo sapien
ctcccgcttccctacgctcaggcag

SEQ ID NO: 511942 - DNA, 25 bp, Homo sapien
ttccctacgctcaggcagagctccc

SEQ ID NO: 511943 - DNA, 25 bp, Homo sapien
gcaaaagtcctcatccatttgtact

SEQ ID NO: 511944 - DNA, 25 bp, Homo sapien
aaaagtcctcatccatttgtactcc

SEQ ID NO: 511945 - DNA, 25 bp, Homo sapien
aaagtcctcatccatttgtactcct

SEQ ID NO: 511946 - DNA, 25 bp, Homo sapien
tgcaaaagtcctcatccatttgtac

SEQ ID NO: 511947 - DNA, 25 bp, Homo sapien
aattcccagggattacaacagatct

SEQ ID NO: 511948 - DNA, 25 bp, Homo sapien
ctgcgggagacaatgtggaaaacac

SEQ ID NO: 511949 - DNA, 25 bp, Homo sapien
cacagggcctgttatggcttaaggg

SEQ ID NO: 511950 - DNA, 25 bp, Homo sapien
tccttgctaaggacacccgcttggt

SEQ ID NO: 511951 - DNA, 25 bp, Homo sapien
cagcaatactccgtaagaccacacg

SEQ ID NO: 511952 - DNA, 25 bp, Homo sapien
taagaccacacgtcgctcttggtgc

SEQ ID NO: 511953 - DNA, 25 bp, Homo sapien
tttgtcaaagatagattcaggagcc

SEQ ID NO: 511954 - DNA, 25 bp, Homo sapien
gatagattcaggagccatccatttc

SEQ ID NO: 511955 - DNA, 25 bp, Homo sapien
ggcctataaatcatttccgagagca

SEQ ID NO: 511956 - DNA, 25 bp, Homo sapien
gagcagctctggtttcctaacatag

SEQ ID NO: 511957 - DNA, 25 bp, Homo sapien
catagagaacaccatagtatgcagt

SEQ ID NO: 511958 - DNA, 25 bp, Homo sapien
tcccagataacatacggcctataaa

SEQ ID NO: 511959 - DNA, 25 bp, Homo sapien
gtcaaataaacatcaaactgactta

SEQ ID NO: 511960 - DNA, 25 bp, Homo sapien
atgagtcaaataaacatcaaactga

SEQ ID NO: 511961 - DNA, 25 bp, Homo sapien
gagtcaaataaacatcaaactgact

SEQ ID NO: 511962 - DNA, 25 bp, Homo sapien
tcaaataaacatcaaactgacttac

SEQ ID NO: 511963 - DNA, 25 bp, Homo sapien
tcttataaatatcccgggcaaggcc

SEQ ID NO: 511964 - DNA, 25 bp, Homo sapien
gataaaagaatgtttctcgctgcca

SEQ ID NO: 511965 - DNA, 25 bp, Homo sapien
ttttctcacataatcggggttctta

SEQ ID NO: 511966 - DNA, 25 bp, Homo sapien
cttcaccacgttgttctcagataaa

SEQ ID NO: 511967 - DNA, 25 bp, Homo sapien
tgcctctggccacttgaaaactgta

SEQ ID NO: 511968 - DNA, 25 bp, Homo sapien
tcagatcttccatagtgatgggctc

SEQ ID NO: 511969 - DNA, 25 bp, Homo sapien
aaaactgtaagaaatcagatcttcc

SEQ ID NO: 511970 - DNA, 25 bp, Homo sapien
tggaagacaggaactccatgcctct

SEQ ID NO: 511971 - DNA, 25 bp, Homo sapien
tttcttaggctccatgtgtagtgct

SEQ ID NO: 511972 - DNA, 25 bp, Homo sapien
tcttaggctccatgtgtagtgctgc

SEQ ID NO: 511973 - DNA, 25 bp, Homo sapien
cggagctcgcaaagctttcgctgct

SEQ ID NO: 511974 - DNA, 25 bp, Homo sapien
tttatcttcctgaaagccggagctc

SEQ ID NO: 511975 - DNA, 25 bp, Homo sapien
gtattcaacaatcaccatcagaggc

SEQ ID NO: 511976 - DNA, 25 bp, Homo sapien
tttgcagtattcaacaatcaccatc

SEQ ID NO: 511977 - DNA, 25 bp, Homo sapien
aaataagtcacgtttgctcttgagg

SEQ ID NO: 511978 - DNA, 25 bp, Homo sapien
tgaggtagttggagagatttccata

SEQ ID NO: 511979 - DNA, 25 bp, Homo sapien
cgaccccggtctgaaggaagcaaga

SEQ ID NO: 511980 - DNA, 25 bp, Homo sapien
ccgaccccggtctgaaggaagcaag

SEQ ID NO: 511981 - DNA, 25 bp, Homo sapien
gaccccggtctgaaggaagcaagag

SEQ ID NO: 511982 - DNA, 25 bp, Homo sapien
ctccttcagacccatcctgagagaa

SEQ ID NO: 511983 - DNA, 25 bp, Homo sapien
ttcagacccatcctgagagaaaagt

SEQ ID NO: 511984 - DNA, 25 bp, Homo sapien
gacccatcctgagagaaaagtgccc

SEQ ID NO: 511985 - DNA, 25 bp, Homo sapien
tcctgagagaaaagtgccctctgct

SEQ ID NO: 511986 - DNA, 25 bp, Homo sapien
gagctttgtactcgctggccgtggc

SEQ ID NO: 511987 - DNA, 25 bp, Homo sapien
aggctcccagcaggttaaccacgtt

SEQ ID NO: 511988 - DNA, 25 bp, Homo sapien
tcagatggtggccaatgtgggtcaa

SEQ ID NO: 511989 - DNA, 25 bp, Homo sapien
aagatttttagctcagtcatcagag

SEQ ID NO: 511990 - DNA, 25 bp, Homo sapien
gatgcttgaaccacttttccaaaag

SEQ ID NO: 511991 - DNA, 25 bp, Homo sapien
gccaaatgctgatgcttgaaccact

SEQ ID NO: 511992 - DNA, 25 bp, Homo sapien
tccggcacgtaggtgatttcttaat

SEQ ID NO: 511993 - DNA, 25 bp, Homo sapien
tttcacagccacagtccggcacgta

SEQ ID NO: 511994 - DNA, 25 bp, Homo sapien
caatgcaaggatattggaatctcct

SEQ ID NO: 511995 - DNA, 25 bp, Homo sapien
tagctcggaagtgtgctaggtcatt

SEQ ID NO: 511996 - DNA, 25 bp, Homo sapien
tgcaaggatattggaatctcctcca

SEQ ID NO: 511997 - DNA, 25 bp, Homo sapien
taggtcattgccatacaatgcaagg

SEQ ID NO: 511998 - DNA, 25 bp, Homo sapien
ggcagcatgggttgggccgtctctg

SEQ ID NO: 511999 - DNA, 25 bp, Homo sapien
catgggttgggccgtctctggcatt

SEQ ID NO: 512000 - DNA, 25 bp, Homo sapien
agcatgggttgggccgtctctggca

SEQ ID NO: 512001 - DNA, 25 bp, Homo sapien
gcagcatgggttgggccgtctctgg

SEQ ID NO: 512002 - DNA, 25 bp, Homo sapien
ggtcttacaagaggcagcaccagcc

SEQ ID NO: 512003 - DNA, 25 bp, Homo sapien
cttacaagaggcagcaccagcccag

SEQ ID NO: 512004 - DNA, 25 bp, Homo sapien
ctggtcttacaagaggcagcaccag

SEQ ID NO: 512005 - DNA, 25 bp, Homo sapien
tcttacaagaggcagcaccagccca

SEQ ID NO: 512006 - DNA, 25 bp, Homo sapien
acgcgccactacagctggctcattt

SEQ ID NO: 512007 - DNA, 25 bp, Homo sapien
acccagcctattctaacttctataa

SEQ ID NO: 512008 - DNA, 25 bp, Homo sapien
acacccagcctattctaacttctat

SEQ ID NO: 512009 - DNA, 25 bp, Homo sapien
cagcctattctaacttctataataa

SEQ ID NO: 512010 - DNA, 25 bp, Homo sapien
tcagagacactcaaatggacatcag

SEQ ID NO: 512011 - DNA, 25 bp, Homo sapien
taatcaatcagaggagtgtacctcg

SEQ ID NO: 512012 - DNA, 25 bp, Homo sapien
taatggtagcaacacctttgaccca

SEQ ID NO: 512013 - DNA, 25 bp, Homo sapien
gggctgctgatagtaaccaacaagt

SEQ ID NO: 512014 - DNA, 25 bp, Homo sapien
caaatagaacatgctcctgaggcca

SEQ ID NO: 512015 - DNA, 25 bp, Homo sapien
gaggccagtccttcctcagtgtaag

SEQ ID NO: 512016 - DNA, 25 bp, Homo sapien
agcagaatcatttcaaggcccaaga

SEQ ID NO: 512017 - DNA, 25 bp, Homo sapien
tccccaagccaaatagaacatgctc

SEQ ID NO: 512018 - DNA, 25 bp, Homo sapien
gagagggacgatactgttgaatttg

SEQ ID NO: 512019 - DNA, 25 bp, Homo sapien
acaacaggctctccacaccgagagg

SEQ ID NO: 512020 - DNA, 25 bp, Homo sapien
agtatcatttgcatgtaaggagagg

SEQ ID NO: 512021 - DNA, 25 bp, Homo sapien
ttcttagttccaactactaatgact

SEQ ID NO: 512022 - DNA, 25 bp, Homo sapien
attgaggttccaattgttttgtagc

SEQ ID NO: 512023 - DNA, 25 bp, Homo sapien
gagtgagtggaaaactttcagaagc

SEQ ID NO: 512024 - DNA, 25 bp, Homo sapien
tcagaagccacaatccaaacatttt

SEQ ID NO: 512025 - DNA, 25 bp, Homo sapien
aacattttgggtaggagtaattgag

SEQ ID NO: 512026 - DNA, 25 bp, Homo sapien
tagggctttctactcggtctggaca

SEQ ID NO: 512027 - DNA, 25 bp, Homo sapien
taagcgtgcgtgtacttgtaatgcc

SEQ ID NO: 512028 - DNA, 25 bp, Homo sapien
taggctgcgggaaagcacatttgcc

SEQ ID NO: 512029 - DNA, 25 bp, Homo sapien
tttgtgacgtctgagctggaggaac

SEQ ID NO: 512030 - DNA, 25 bp, Homo sapien
gataggtagtcagtctttatttcag

SEQ ID NO: 512031 - DNA, 25 bp, Homo sapien
ggaacttcatctgggtccattataa

SEQ ID NO: 512032 - DNA, 25 bp, Homo sapien
cactgctcatccaaaggaacttcat

SEQ ID NO: 512033 - DNA, 25 bp, Homo sapien
gctggcatcataagggagccgctca

SEQ ID NO: 512034 - DNA, 25 bp, Homo sapien
gtgcatgttagagtgatcagctcca

SEQ ID NO: 512035 - DNA, 25 bp, Homo sapien
tcgcagccacacaggtgcatgttag

SEQ ID NO: 512036 - DNA, 25 bp, Homo sapien
tccagattagacttgtccgaggttc

SEQ ID NO: 512037 - DNA, 25 bp, Homo sapien
ggataaagagggttaataggagcca

SEQ ID NO: 512038 - DNA, 25 bp, Homo sapien
atgaactcacatagaaaaggctttc

SEQ ID NO: 512039 - DNA, 25 bp, Homo sapien
cagaaattttgctgtcaagtttgca

SEQ ID NO: 512040 - DNA, 25 bp, Homo sapien
ataatgaactcacatagaaaaggct

SEQ ID NO: 512041 - DNA, 25 bp, Homo sapien
gcaaactttgtaattccagaaacag

SEQ ID NO: 512042 - DNA, 25 bp, Homo sapien
tcctgatagcaatagtagctctctg

SEQ ID NO: 512043 - DNA, 25 bp, Homo sapien
tgtatcttgcctgacgtctctgcag

SEQ ID NO: 512044 - DNA, 25 bp, Homo sapien
gcacagagcattccacgtcaagtac

SEQ ID NO: 512045 - DNA, 25 bp, Homo sapien
tctgcagctgcgcagtgtcctgagc

SEQ ID NO: 512046 - DNA, 25 bp, Homo sapien
gaatgtttcatagctaccagggtgg

SEQ ID NO: 512047 - DNA, 25 bp, Homo sapien
tgagggtccatatgcatctaacagg

SEQ ID NO: 512048 - DNA, 25 bp, Homo sapien
tgagttccagggctactgagcgcta

SEQ ID NO: 512049 - DNA, 25 bp, Homo sapien
cagtgactgaagacccatggccata

SEQ ID NO: 512050 - DNA, 25 bp, Homo sapien
ggccaaacgactgactctaatccaa

SEQ ID NO: 512051 - DNA, 25 bp, Homo sapien
cctggagcagtgaaagaataacagc

SEQ ID NO: 512052 - DNA, 25 bp, Homo sapien
agaagaaactcacagatgtcgtaaa

SEQ ID NO: 512053 - DNA, 25 bp, Homo sapien
ctaatccaatctggaaggccccacg

SEQ ID NO: 512054 - DNA, 25 bp, Homo sapien
tgtggcagggcgtaataacacagtc

SEQ ID NO: 512055 - DNA, 25 bp, Homo sapien
ttctgggaacgacttctcccgcaga

SEQ ID NO: 512056 - DNA, 25 bp, Homo sapien
gattttgggctctcgaggatggcca

SEQ ID NO: 512057 - DNA, 25 bp, Homo sapien
cagacactgtgttcggattttgggc

SEQ ID NO: 512058 - DNA, 25 bp, Homo sapien
gttggtggctttgcagtgatagaca

SEQ ID NO: 512059 - DNA, 25 bp, Homo sapien
gcagtgatagacaccttcatcctct

SEQ ID NO: 512060 - DNA, 25 bp, Homo sapien
ctctttcaataaacagcgtgctgct

SEQ ID NO: 512061 - DNA, 25 bp, Homo sapien
ctgcttcctggtcctaaaataattc

SEQ ID NO: 512062 - DNA, 25 bp, Homo sapien
ttgtcttggctctccaactaaagga

SEQ ID NO: 512063 - DNA, 25 bp, Homo sapien
cgatggtgacgttgatgtatacagt

SEQ ID NO: 512064 - DNA, 25 bp, Homo sapien
gcccggccatttgttattgttatga

SEQ ID NO: 512065 - DNA, 25 bp, Homo sapien
tgacgatgacgatggtgacgttgat

SEQ ID NO: 512066 - DNA, 25 bp, Homo sapien
gcagtgtccgaactaagaaccagaa

SEQ ID NO: 512067 - DNA, 25 bp, Homo sapien
gcctggctagattggcagcctttaa

SEQ ID NO: 512068 - DNA, 25 bp, Homo sapien
cagcctttaattgattagctaagag

SEQ ID NO: 512069 - DNA, 25 bp, Homo sapien
cccaggaaagctagaggcaagatgt

SEQ ID NO: 512070 - DNA, 25 bp, Homo sapien
ttgaattgggcatagtggtgacccc

SEQ ID NO: 512071 - DNA, 25 bp, Homo sapien
tggtgaccccagttgcattgctgtg

SEQ ID NO: 512072 - DNA, 25 bp, Homo sapien
tcagcagcaatttagagtcgtggac

SEQ ID NO: 512073 - DNA, 25 bp, Homo sapien
taggtcctgattaaactgtctgaag

SEQ ID NO: 512074 - DNA, 25 bp, Homo sapien
gcttgaagaagcgtatttcaggtaa

SEQ ID NO: 512075 - DNA, 25 bp, Homo sapien
tagaccaattgacacgataatagcg

SEQ ID NO: 512076 - DNA, 25 bp, Homo sapien
gataatagcgaataaggcaggacac

SEQ ID NO: 512077 - DNA, 25 bp, Homo sapien
tacatgcatcacttaattactctag

SEQ ID NO: 512078 - DNA, 25 bp, Homo sapien
ctggtgaatggctgtgccccactga

SEQ ID NO: 512079 - DNA, 25 bp, Homo sapien
actgcctttcttctggtgaatggct

SEQ ID NO: 512080 - DNA, 25 bp, Homo sapien
gtgaatggctgtgccccactgacag

SEQ ID NO: 512081 - DNA, 25 bp, Homo sapien
ctgcctttcttctggtgaatggctg

SEQ ID NO: 512082 - DNA, 25 bp, Homo sapien
tccagctgaatagattctgcaggat

SEQ ID NO: 512083 - DNA, 25 bp, Homo sapien
tattcctcactggacattgctatca

SEQ ID NO: 512084 - DNA, 25 bp, Homo sapien
gaactggcccaaatattcctcactg

SEQ ID NO: 512085 - DNA, 25 bp, Homo sapien
ttaggaatatggtctgcataggaac

SEQ ID NO: 512086 - DNA, 25 bp, Homo sapien
tcagcatgaaccagatcccagtgtt

SEQ ID NO: 512087 - DNA, 25 bp, Homo sapien
aaggggggctgatgaaagatgagaa

SEQ ID NO: 512088 - DNA, 25 bp, Homo sapien
aagcaggtgacgggactgttaaggg

SEQ ID NO: 512089 - DNA, 25 bp, Homo sapien
gaaaggggggctgatgaaagatgag

SEQ ID NO: 512090 - DNA, 25 bp, Homo sapien
gcaggtgacgggactgttaagggaa

SEQ ID NO: 512091 - DNA, 25 bp, Homo sapien
gggacaccattagcatgacagtcta

SEQ ID NO: 512092 - DNA, 25 bp, Homo sapien
tgtgatcactgaggtttcgcaggag

SEQ ID NO: 512093 - DNA, 25 bp, Homo sapien
gtttcgcaggaggtatggtgcttcc

SEQ ID NO: 512094 - DNA, 25 bp, Homo sapien
taaaccaagtgatctgaggctcggg

SEQ ID NO: 512095 - DNA, 25 bp, Homo sapien
agtttttgcactatataatagtaca

SEQ ID NO: 512096 - DNA, 25 bp, Homo sapien
tgaactttgaaagctttattggttc

SEQ ID NO: 512097 - DNA, 25 bp, Homo sapien
cttcccaaatgcaagcaaccaaaga

SEQ ID NO: 512098 - DNA, 25 bp, Homo sapien
gcaagcaaccaaagaattaattcaa

SEQ ID NO: 512099 - DNA, 25 bp, Homo sapien
aaaggctgcagaacgtacatgggac

SEQ ID NO: 512100 - DNA, 25 bp, Homo sapien
tatcagtagccaaagatagctgccc

SEQ ID NO: 512101 - DNA, 25 bp, Homo sapien
actgcccatcggtcttgtaaaaagg

SEQ ID NO: 512102 - DNA, 25 bp, Homo sapien
gacacgatttggactccctgacagg

SEQ ID NO: 512103 - DNA, 25 bp, Homo sapien
cagtgaacaactaatactctatgga

SEQ ID NO: 512104 - DNA, 25 bp, Homo sapien
gactctccggaaggattaattacac

SEQ ID NO: 512105 - DNA, 25 bp, Homo sapien
gaaatggtaggttctgcatgtccaa

SEQ ID NO: 512106 - DNA, 25 bp, Homo sapien
gccaggccaaagagccataggtaaa

SEQ ID NO: 512107 - DNA, 25 bp, Homo sapien
ataaaaccaggcagaagtccgacag

SEQ ID NO: 512108 - DNA, 25 bp, Homo sapien
caaatccaaacgtgcaccaagtcgg

SEQ ID NO: 512109 - DNA, 25 bp, Homo sapien
tcctccgagcctgaaagttagcaac

SEQ ID NO: 512110 - DNA, 25 bp, Homo sapien
cataattacctggatcgcatgagag

SEQ ID NO: 512111 - DNA, 25 bp, Homo sapien
tggagatccgagagaaaacagcctt

SEQ ID NO: 512112 - DNA, 25 bp, Homo sapien
taaatttggagatccgagagaaaac

SEQ ID NO: 512113 - DNA, 25 bp, Homo sapien
tttgtgtggtacaatcattccttgt

SEQ ID NO: 512114 - DNA, 25 bp, Homo sapien
ttgtgtggtacaatcattccttgtg

SEQ ID NO: 512115 - DNA, 25 bp, Homo sapien
ccaagtaacgtctctgtataagaac

SEQ ID NO: 512116 - DNA, 25 bp, Homo sapien
aggtcctctccttccgtcggcattt

SEQ ID NO: 512117 - DNA, 25 bp, Homo sapien
ctgtgcaagacagtttcaggtcctc

SEQ ID NO: 512118 - DNA, 25 bp, Homo sapien
aagattaagagtgatggagtgctcc

SEQ ID NO: 512119 - DNA, 25 bp, Homo sapien
gaatagttattaggatggcattttc

SEQ ID NO: 512120 - DNA, 25 bp, Homo sapien
cagcaggtgggaatcaactaagttc

SEQ ID NO: 512121 - DNA, 25 bp, Homo sapien
tctcctgattcacgtgaagttgctc

SEQ ID NO: 512122 - DNA, 25 bp, Homo sapien
gaattgttcgtgcacaaattatctc

SEQ ID NO: 512123 - DNA, 25 bp, Homo sapien
tctattcagacctgagagagcaaag

SEQ ID NO: 512124 - DNA, 25 bp, Homo sapien
gggatggttctattcagacctgaga

SEQ ID NO: 512125 - DNA, 25 bp, Homo sapien
ttatggggatggttctattcagacc

SEQ ID NO: 512126 - DNA, 25 bp, Homo sapien
caggacttcttttatggggatggtt

SEQ ID NO: 512127 - DNA, 25 bp, Homo sapien
tgtcacgtctgaagaaatgccaaag

SEQ ID NO: 512128 - DNA, 25 bp, Homo sapien
ctttattataaagtgtcacgtctga

SEQ ID NO: 512129 - DNA, 25 bp, Homo sapien
taaagtgtcacgtctgaagaaatgc

SEQ ID NO: 512130 - DNA, 25 bp, Homo sapien
cgtctgaagaaatgccaaagtattc

SEQ ID NO: 512131 - DNA, 25 bp, Homo sapien
gagatccgatgaggtagaattctat

SEQ ID NO: 512132 - DNA, 25 bp, Homo sapien
agatccgatgaggtagaattctatt

SEQ ID NO: 512133 - DNA, 25 bp, Homo sapien
gatccgatgaggtagaattctattc

SEQ ID NO: 512134 - DNA, 25 bp, Homo sapien
ctgagagcaaggatgaaggcactca

SEQ ID NO: 512135 - DNA, 25 bp, Homo sapien
tgaaggcactcaaagtttgacaatt

SEQ ID NO: 512136 - DNA, 25 bp, Homo sapien
gatgaaggcactcaaagtttgacaa

SEQ ID NO: 512137 - DNA, 25 bp, Homo sapien
caaggatgaaggcactcaaagtttg

SEQ ID NO: 512138 - DNA, 25 bp, Homo sapien
acagtcccaactttattggaagcta

SEQ ID NO: 512139 - DNA, 25 bp, Homo sapien
gctatgcaaatgtagattccagaaa

SEQ ID NO: 512140 - DNA, 25 bp, Homo sapien
cccacagtcccaactttattggaag

SEQ ID NO: 512141 - DNA, 25 bp, Homo sapien
aagctatgcaaatgtagattccaga

SEQ ID NO: 512142 - DNA, 25 bp, Homo sapien
gatgccagttataacaggagccttc

SEQ ID NO: 512143 - DNA, 25 bp, Homo sapien
gaaagtgtacgaaagagagctcagg

SEQ ID NO: 512144 - DNA, 25 bp, Homo sapien
caaggaaagcgcatatgaaggcaaa

SEQ ID NO: 512145 - DNA, 25 bp, Homo sapien
ccaaggtggtggacatactctacaa

SEQ ID NO: 512146 - DNA, 25 bp, Homo sapien
gctttgaaattgcagaggctgtgca

SEQ ID NO: 512147 - DNA, 25 bp, Homo sapien
cgtttagagtcacggaaggaaatgg

SEQ ID NO: 512148 - DNA, 25 bp, Homo sapien
gaagagaagcttgtaggtggcaaca

SEQ ID NO: 512149 - DNA, 25 bp, Homo sapien
catgaaagaactgttagctggtgga

SEQ ID NO: 512150 - DNA, 25 bp, Homo sapien
aatggaagtagttggaagagaagct

SEQ ID NO: 512151 - DNA, 25 bp, Homo sapien
caggcctgggcagaatttatgctca

SEQ ID NO: 512152 - DNA, 25 bp, Homo sapien
tatgtatgccttacaatgcaccagg

SEQ ID NO: 512153 - DNA, 25 bp, Homo sapien
ccaggcagcatgcaaggcactttac

SEQ ID NO: 512154 - DNA, 25 bp, Homo sapien
caccagattgcttctcgccttgaga

SEQ ID NO: 512155 - DNA, 25 bp, Homo sapien
tattaggcctgatgcggcggctcag

SEQ ID NO: 512156 - DNA, 25 bp, Homo sapien
cacagttagggcatgcaatatcaac

SEQ ID NO: 512157 - DNA, 25 bp, Homo sapien
agaatttgagttgtgcgtttgaaat

SEQ ID NO: 512158 - DNA, 25 bp, Homo sapien
taatcatttattctataaggtatgc

SEQ ID NO: 512159 - DNA, 25 bp, Homo sapien
cattgctgggcaggctaccatgtga

SEQ ID NO: 512160 - DNA, 25 bp, Homo sapien
gggatcaccgcagtctaagctggga

SEQ ID NO: 512161 - DNA, 25 bp, Homo sapien
cactgatctgtggagtagcattgct

SEQ ID NO: 512162 - DNA, 25 bp, Homo sapien
catgtgacggtggataaagggatca

SEQ ID NO: 512163 - DNA, 25 bp, Homo sapien
gatgacataagcatacccacactca

SEQ ID NO: 512164 - DNA, 25 bp, Homo sapien
cagtggcttacttggctataagggc

SEQ ID NO: 512165 - DNA, 25 bp, Homo sapien
caaagtgtacggctgaatagatgac

SEQ ID NO: 512166 - DNA, 25 bp, Homo sapien
taaatcatacatgaggaacgatgcc

SEQ ID NO: 512167 - DNA, 25 bp, Homo sapien
caatccccgttaggtactggaatca

SEQ ID NO: 512168 - DNA, 25 bp, Homo sapien
cctaggctgcactccggagatttgg

SEQ ID NO: 512169 - DNA, 25 bp, Homo sapien
ggaagattttacgagccctaggctg

SEQ ID NO: 512170 - DNA, 25 bp, Homo sapien
tagcttttgcttactgggatcccac

SEQ ID NO: 512171 - DNA, 25 bp, Homo sapien
attgccatgcgctgagtgatgctct

SEQ ID NO: 512172 - DNA, 25 bp, Homo sapien
tattattgccatgcgctgagtgatg

SEQ ID NO: 512173 - DNA, 25 bp, Homo sapien
tctattattgccatgcgctgagtga

SEQ ID NO: 512174 - DNA, 25 bp, Homo sapien
ttattgccatgcgctgagtgatgct

SEQ ID NO: 512175 - DNA, 25 bp, Homo sapien
tgctgtcagcatccaggataaagga

SEQ ID NO: 512176 - DNA, 25 bp, Homo sapien
ttgctgtcagcatccaggataaagg

SEQ ID NO: 512177 - DNA, 25 bp, Homo sapien
ctgtcagcatccaggataaaggact

SEQ ID NO: 512178 - DNA, 25 bp, Homo sapien
gttgctgtcagcatccaggataaag

SEQ ID NO: 512179 - DNA, 25 bp, Homo sapien
ttcattattggaacaaaagtcacac

SEQ ID NO: 512180 - DNA, 25 bp, Homo sapien
cttcattattggaacaaaagtcaca

SEQ ID NO: 512181 - DNA, 25 bp, Homo sapien
tgaaaaaagccccacactagtgtgt

SEQ ID NO: 512182 - DNA, 25 bp, Homo sapien
ccatacatccttttcgttgtaaatg

SEQ ID NO: 512183 - DNA, 25 bp, Homo sapien
tttacagcatggttcagtcaatggg

SEQ ID NO: 512184 - DNA, 25 bp, Homo sapien
taagtcctcagataacaaagtcaca

SEQ ID NO: 512185 - DNA, 25 bp, Homo sapien
tttcgcacaggaagtccacagcacc

SEQ ID NO: 512186 - DNA, 25 bp, Homo sapien
caagaggaaagcagcgttcgctcct

SEQ ID NO: 512187 - DNA, 25 bp, Homo sapien
tcgctcctgatttcgcacaggaagt

SEQ ID NO: 512188 - DNA, 25 bp, Homo sapien
ggaagccgaacaacaagaggaaagc

SEQ ID NO: 512189 - DNA, 25 bp, Homo sapien
caatggcagggaggtatttataacc

SEQ ID NO: 512190 - DNA, 25 bp, Homo sapien
tttgcatacagcatgccaagtacaa

SEQ ID NO: 512191 - DNA, 25 bp, Homo sapien
agtacaatggcagggaggtatttat

SEQ ID NO: 512192 - DNA, 25 bp, Homo sapien
ccatttgcatacagcatgccaagta

SEQ ID NO: 512193 - DNA, 25 bp, Homo sapien
aaacctaccatcttgacagtattga

SEQ ID NO: 512194 - DNA, 25 bp, Homo sapien
ctgtgcacttgaccccaacaccata

SEQ ID NO: 512195 - DNA, 25 bp, Homo sapien
tgctggcagaatttgtactcagttc

SEQ ID NO: 512196 - DNA, 25 bp, Homo sapien
tctggatcatttcagaacctgtgca

SEQ ID NO: 512197 - DNA, 25 bp, Homo sapien
gacttgtgtgaactctgcttatctg

SEQ ID NO: 512198 - DNA, 25 bp, Homo sapien
tttaatgagattgtactgcacgtgc

SEQ ID NO: 512199 - DNA, 25 bp, Homo sapien
gttctacaaagtctcaagacagata

SEQ ID NO: 512200 - DNA, 25 bp, Homo sapien
ggatagaggagtaatgaaaagcaaa

SEQ ID NO: 512201 - DNA, 25 bp, Homo sapien
aagacccattcaggccacacaattg

SEQ ID NO: 512202 - DNA, 25 bp, Homo sapien
gagggtctccttggtattcaagcac

SEQ ID NO: 512203 - DNA, 25 bp, Homo sapien
gggaacagatgagcgcaaagaccca

SEQ ID NO: 512204 - DNA, 25 bp, Homo sapien
acaattgtccagtcagctacccgag

SEQ ID NO: 512205 - DNA, 25 bp, Homo sapien
tgagtttaaaagtaatcatcctttc

SEQ ID NO: 512206 - DNA, 25 bp, Homo sapien
ttattcctaatgttttataagaaca

SEQ ID NO: 512207 - DNA, 25 bp, Homo sapien
tattcctaatgttttataagaacaa

SEQ ID NO: 512208 - DNA, 25 bp, Homo sapien
gtatgagtttaaaagtaatcatcct

SEQ ID NO: 512209 - DNA, 25 bp, Homo sapien
tcccaggaattccatagctcaccag

SEQ ID NO: 512210 - DNA, 25 bp, Homo sapien
ggcataatgataatccttgggcagt

SEQ ID NO: 512211 - DNA, 25 bp, Homo sapien
tacaccctaagcaaaacgagttgga

SEQ ID NO: 512212 - DNA, 25 bp, Homo sapien
gaataacaatcctcctgaacactct

SEQ ID NO: 512213 - DNA, 25 bp, Homo sapien
aattccaggtgtcaaaaagtatttg

SEQ ID NO: 512214 - DNA, 25 bp, Homo sapien
gagagcctttgcctcaaatatacag

SEQ ID NO: 512215 - DNA, 25 bp, Homo sapien
gaaattgttagccagtgatagggta

SEQ ID NO: 512216 - DNA, 25 bp, Homo sapien
tcccatctgcgtccattaaaaaatc

SEQ ID NO: 512217 - DNA, 25 bp, Homo sapien
agagccgggtctggaaacgatgaca

SEQ ID NO: 512218 - DNA, 25 bp, Homo sapien
ctgcccagtgggtagagagccgggt

SEQ ID NO: 512219 - DNA, 25 bp, Homo sapien
ccatatgcggtacaagtcaggattt

SEQ ID NO: 512220 - DNA, 25 bp, Homo sapien
tgacacggccttttcgtaaatctgg

SEQ ID NO: 512221 - DNA, 25 bp, Homo sapien
cacgagattgttaagatgggaactt

SEQ ID NO: 512222 - DNA, 25 bp, Homo sapien
gcagttctaatgactttctcctggg

SEQ ID NO: 512223 - DNA, 25 bp, Homo sapien
taatttgttgcctaccagaaccaga

SEQ ID NO: 512224 - DNA, 25 bp, Homo sapien
tgataaaagatcatgccgcctatgg

SEQ ID NO: 512225 - DNA, 25 bp, Homo sapien
cattgacaattagagtggcagtgag

SEQ ID NO: 512226 - DNA, 25 bp, Homo sapien
tgctcagcaagattgtataattccc

SEQ ID NO: 512227 - DNA, 25 bp, Homo sapien
tttctcagtcgcaggtaacccatct

SEQ ID NO: 512228 - DNA, 25 bp, Homo sapien
gagtagccacgagtcaaatagcgag

SEQ ID NO: 512229 - DNA, 25 bp, Homo sapien
ccaccacccaagaatctacagagtt

SEQ ID NO: 512230 - DNA, 25 bp, Homo sapien
ctccaccacccaagaatctacagag

SEQ ID NO: 512231 - DNA, 25 bp, Homo sapien
tccaccacccaagaatctacagagt

SEQ ID NO: 512232 - DNA, 25 bp, Homo sapien
cacctgctgttttcgatgtttcaca

SEQ ID NO: 512233 - DNA, 25 bp, Homo sapien
gctacggtttcaagcacctgctgtt

SEQ ID NO: 512234 - DNA, 25 bp, Homo sapien
caacttccggcgagggaaatgcctt

SEQ ID NO: 512235 - DNA, 25 bp, Homo sapien
catagagagccggtaagaccgcttg

SEQ ID NO: 512236 - DNA, 25 bp, Homo sapien
ttaacagatttgaatgatggtccac

SEQ ID NO: 512237 - DNA, 25 bp, Homo sapien
gctttggtcaattcgtcgccttacg

SEQ ID NO: 512238 - DNA, 25 bp, Homo sapien
taagaacactgtagaatatgttggc

SEQ ID NO: 512239 - DNA, 25 bp, Homo sapien
gatggtccactccttacacgacaag

SEQ ID NO: 512240 - DNA, 25 bp, Homo sapien
tcaagggagtggtagcagtacaatt

SEQ ID NO: 512241 - DNA, 25 bp, Homo sapien
tcatcagggtaactccaggtcattt

SEQ ID NO: 512242 - DNA, 25 bp, Homo sapien
cctctaagtaatttgactgggcgtg

SEQ ID NO: 512243 - DNA, 25 bp, Homo sapien
tacaattgaggacaagagtatggcc

SEQ ID NO: 512244 - DNA, 25 bp, Homo sapien
ttgtcgatgtgtgagatagtttgtc

SEQ ID NO: 512245 - DNA, 25 bp, Homo sapien
tatgcgttttccatcagggatcaaa

SEQ ID NO: 512246 - DNA, 25 bp, Homo sapien
tatacaaatgcccattgactgttgc

SEQ ID NO: 512247 - DNA, 25 bp, Homo sapien
tgactgttgcttcacaggtcagaag

SEQ ID NO: 512248 - DNA, 25 bp, Homo sapien
caactgaggagttcaactcctctgg

SEQ ID NO: 512249 - DNA, 25 bp, Homo sapien
aactcctctggcgtttccagctctg

SEQ ID NO: 512250 - DNA, 25 bp, Homo sapien
cctgacactctggaaaccagggtgt

SEQ ID NO: 512251 - DNA, 25 bp, Homo sapien
ctctgctgtataatgactttctatt

SEQ ID NO: 512252 - DNA, 25 bp, Homo sapien
cacaaatgtagtggaggccaaaacc

SEQ ID NO: 512253 - DNA, 25 bp, Homo sapien
aaatgtagtggaggccaaaacctgt

SEQ ID NO: 512254 - DNA, 25 bp, Homo sapien
caaatgtagtggaggccaaaacctg

SEQ ID NO: 512255 - DNA, 25 bp, Homo sapien
atgtagtggaggccaaaacctgtct

SEQ ID NO: 512256 - DNA, 25 bp, Homo sapien
taacagtgatgttaggtgacgtaac

SEQ ID NO: 512257 - DNA, 25 bp, Homo sapien
tcccttccttcagtcatgtgtataa

SEQ ID NO: 512258 - DNA, 25 bp, Homo sapien
taacccggcagggaatgacgagctc

SEQ ID NO: 512259 - DNA, 25 bp, Homo sapien
gatgttaggtgacgtaacccggcag

SEQ ID NO: 512260 - DNA, 25 bp, Homo sapien
ttgacatcctcaggcaacgatctct

SEQ ID NO: 512261 - DNA, 25 bp, Homo sapien
gatctcttcgggagtcattgtgttc

SEQ ID NO: 512262 - DNA, 25 bp, Homo sapien
gtcccgcatttgttccagccttata

SEQ ID NO: 512263 - DNA, 25 bp, Homo sapien
ccttgccctcgggaatctattgaca

SEQ ID NO: 512264 - DNA, 25 bp, Homo sapien
ttacaacacggtccacagaaccagc

SEQ ID NO: 512265 - DNA, 25 bp, Homo sapien
cagtgttcccattgattctgttaca

SEQ ID NO: 512266 - DNA, 25 bp, Homo sapien
gattctgttacaacacggtccacag

SEQ ID NO: 512267 - DNA, 25 bp, Homo sapien
tccaccctagcccacattagggact

SEQ ID NO: 512268 - DNA, 25 bp, Homo sapien
gaggagaggaaatggattgtattca

SEQ ID NO: 512269 - DNA, 25 bp, Homo sapien
aggagaggaaatggattgtattcat

SEQ ID NO: 512270 - DNA, 25 bp, Homo sapien
tagaggagaggaaatggattgtatt

SEQ ID NO: 512271 - DNA, 25 bp, Homo sapien
ctagaggagaggaaatggattgtat

SEQ ID NO: 512272 - DNA, 25 bp, Homo sapien
tactgcatagtgttggagaaattct

SEQ ID NO: 512273 - DNA, 25 bp, Homo sapien
tctggctacgttctcttgaaggccc

SEQ ID NO: 512274 - DNA, 25 bp, Homo sapien
gtaagtgcctcatggtactgcatag

SEQ ID NO: 512275 - DNA, 25 bp, Homo sapien
tgaaaaagggctgaacaccaaggca

SEQ ID NO: 512276 - DNA, 25 bp, Homo sapien
tatctcataagggacttaaatctgg

SEQ ID NO: 512277 - DNA, 25 bp, Homo sapien
tgaactgacatttacccaaagaaga

SEQ ID NO: 512278 - DNA, 25 bp, Homo sapien
tgaaacttgcatgcttcaaagaaca

SEQ ID NO: 512279 - DNA, 25 bp, Homo sapien
aaatgggaaaaggatctgaactgac

SEQ ID NO: 512280 - DNA, 25 bp, Homo sapien
tgcacacggacagtccctggactcc

SEQ ID NO: 512281 - DNA, 25 bp, Homo sapien
cactgtgcacacggacagtccctgg

SEQ ID NO: 512282 - DNA, 25 bp, Homo sapien
tgtgcacacggacagtccctggact

SEQ ID NO: 512283 - DNA, 25 bp, Homo sapien
ctgtgcacacggacagtccctggac

SEQ ID NO: 512284 - DNA, 25 bp, Homo sapien
tcacactaagctggctggcggtttc

SEQ ID NO: 512285 - DNA, 25 bp, Homo sapien
atctcagtgagagtggaatgctggc

SEQ ID NO: 512286 - DNA, 25 bp, Homo sapien
gtgctctctgggttttcacactaag

SEQ ID NO: 512287 - DNA, 25 bp, Homo sapien
tctgagtaagtgagttgaagatctc

SEQ ID NO: 512288 - DNA, 25 bp, Homo sapien
tccgagaggacagccccgatgcatt

SEQ ID NO: 512289 - DNA, 25 bp, Homo sapien
cagccccgatgcattccatcagcat

SEQ ID NO: 512290 - DNA, 25 bp, Homo sapien
ggacagtgggttttccgagaggaca

SEQ ID NO: 512291 - DNA, 25 bp, Homo sapien
gttttccgagaggacagccccgatg

SEQ ID NO: 512292 - DNA, 25 bp, Homo sapien
tatcatggtaagcaggacgaactca

SEQ ID NO: 512293 - DNA, 25 bp, Homo sapien
cagtcctgtccgtagagcttgtgag

SEQ ID NO: 512294 - DNA, 25 bp, Homo sapien
gaaaggtcagtaggagcaccatccc

SEQ ID NO: 512295 - DNA, 25 bp, Homo sapien
gttttgcaagccaaatacaggcctt

SEQ ID NO: 512296 - DNA, 25 bp, Homo sapien
actctgttgatgtccctgctggttc

SEQ ID NO: 512297 - DNA, 25 bp, Homo sapien
gctcggcgatgaagcctgcagattg

SEQ ID NO: 512298 - DNA, 25 bp, Homo sapien
catggagatgtttattggacttgcc

SEQ ID NO: 512299 - DNA, 25 bp, Homo sapien
cgtgaacaccttctttcggtctggg

SEQ ID NO: 512300 - DNA, 25 bp, Homo sapien
caagtcagactgataaacctatagg

SEQ ID NO: 512301 - DNA, 25 bp, Homo sapien
tctccacagatgtcggaaagaacac

SEQ ID NO: 512302 - DNA, 25 bp, Homo sapien
catggaccgtgccatcacagggctt

SEQ ID NO: 512303 - DNA, 25 bp, Homo sapien
cacagggcttagattaacaatggat

SEQ ID NO: 512304 - DNA, 25 bp, Homo sapien
tggagcacatagtgactaactgggc

SEQ ID NO: 512305 - DNA, 25 bp, Homo sapien
cctttccaatggatcagggtagatt

SEQ ID NO: 512306 - DNA, 25 bp, Homo sapien
gttaaaattgacatccacgaaagtg

SEQ ID NO: 512307 - DNA, 25 bp, Homo sapien
tgtctacaactaggatggaatctct

SEQ ID NO: 512308 - DNA, 25 bp, Homo sapien
ccacaggcagatttagttatgctca

SEQ ID NO: 512309 - DNA, 25 bp, Homo sapien
tttcaggcaaagaccatttatgggc

SEQ ID NO: 512310 - DNA, 25 bp, Homo sapien
ctagatatttgcagctgtagaagcc

SEQ ID NO: 512311 - DNA, 25 bp, Homo sapien
gtgttcaaggttaaagtactgcaga

SEQ ID NO: 512312 - DNA, 25 bp, Homo sapien
cctgcttgcatgatgtgctgggtgc

SEQ ID NO: 512313 - DNA, 25 bp, Homo sapien
tgcattggagatgcagtgtctggcc

SEQ ID NO: 512314 - DNA, 25 bp, Homo sapien
agtgtctggcctgcttgcatgatgt

SEQ ID NO: 512315 - DNA, 25 bp, Homo sapien
ctcagttcaggatcttttaattttg

SEQ ID NO: 512316 - DNA, 25 bp, Homo sapien
aactttttccagtgtgggtcatcta

SEQ ID NO: 512317 - DNA, 25 bp, Homo sapien
gggtcatctagtcctataggcctgt

SEQ ID NO: 512318 - DNA, 25 bp, Homo sapien
gatatttttggccaatcatttccct

SEQ ID NO: 512319 - DNA, 25 bp, Homo sapien
gaatttcatgcaatcattagttgag

SEQ ID NO: 512320 - DNA, 25 bp, Homo sapien
tggaactggaaagcctacgagccac

SEQ ID NO: 512321 - DNA, 25 bp, Homo sapien
gaccttggcatcacttaattggctg

SEQ ID NO: 512322 - DNA, 25 bp, Homo sapien
caggattagcgttccttaggcggga

SEQ ID NO: 512323 - DNA, 25 bp, Homo sapien
caggctcctcgtgagtggaactgga

SEQ ID NO: 512324 - DNA, 25 bp, Homo sapien
tgtgtatgtacgtacccataaacac

SEQ ID NO: 512325 - DNA, 25 bp, Homo sapien
tagacacttgcccatcttattagtg

SEQ ID NO: 512326 - DNA, 25 bp, Homo sapien
aacatttgttttagcatctactgca

SEQ ID NO: 512327 - DNA, 25 bp, Homo sapien
catgtccatgtacctatctgagtaa

SEQ ID NO: 512328 - DNA, 25 bp, Homo sapien
gatgcttattcttatagggctctga

SEQ ID NO: 512329 - DNA, 25 bp, Homo sapien
gagactacactaccagctatgctga

SEQ ID NO: 512330 - DNA, 25 bp, Homo sapien
caattgcaaatttccggacgctacc

SEQ ID NO: 512331 - DNA, 25 bp, Homo sapien
gaatgcctagattaaagtaaccaca

SEQ ID NO: 512332 - DNA, 25 bp, Homo sapien
gacttcttgcaggtctatgttaaag

SEQ ID NO: 512333 - DNA, 25 bp, Homo sapien
aaagtgtccttctccgagtaacagg

SEQ ID NO: 512334 - DNA, 25 bp, Homo sapien
gataaaactcctcaataggtggcag

SEQ ID NO: 512335 - DNA, 25 bp, Homo sapien
ccatttgaccaaacgttccagcttt

SEQ ID NO: 512336 - DNA, 25 bp, Homo sapien
tccctgggggacagttaatgtcctc

SEQ ID NO: 512337 - DNA, 25 bp, Homo sapien
tgtcctcccctatccaattcatgta

SEQ ID NO: 512338 - DNA, 25 bp, Homo sapien
acagttaatgtcctcccctatccaa

SEQ ID NO: 512339 - DNA, 25 bp, Homo sapien
tatccaattcatgtagcatctgcct

SEQ ID NO: 512340 - DNA, 25 bp, Homo sapien
tgcagaggagcccacgttggattcc

SEQ ID NO: 512341 - DNA, 25 bp, Homo sapien
ttttctagaataaagtgctgtcctc

SEQ ID NO: 512342 - DNA, 25 bp, Homo sapien
ggcagtcccagctttttcctcggac

SEQ ID NO: 512343 - DNA, 25 bp, Homo sapien
acctgcctgatatgagcttttctag

SEQ ID NO: 512344 - DNA, 25 bp, Homo sapien
taaagccatatctaggagagcagtt

SEQ ID NO: 512345 - DNA, 25 bp, Homo sapien
gagcagtttggaagcccacataaaa

SEQ ID NO: 512346 - DNA, 25 bp, Homo sapien
catctgaactggtttaaagccatat

SEQ ID NO: 512347 - DNA, 25 bp, Homo sapien
agagcagtttggaagcccacataaa

SEQ ID NO: 512348 - DNA, 25 bp, Homo sapien
caccttgtcgtatgtctagtgatga

SEQ ID NO: 512349 - DNA, 25 bp, Homo sapien
aagcaaattcttggccctatcccag

SEQ ID NO: 512350 - DNA, 25 bp, Homo sapien
gactcattgattcaatgccctggca

SEQ ID NO: 512351 - DNA, 25 bp, Homo sapien
ccagccagctagttttgcaagccca

SEQ ID NO: 512352 - DNA, 25 bp, Homo sapien
tccctccgtaattttagattcatgt

SEQ ID NO: 512353 - DNA, 25 bp, Homo sapien
tcgagtgaggtatttaaattctcta

SEQ ID NO: 512354 - DNA, 25 bp, Homo sapien
gattcatgtaatttagctagattta

SEQ ID NO: 512355 - DNA, 25 bp, Homo sapien
tctttacataatagtcgagtgaggt

SEQ ID NO: 512356 - DNA, 25 bp, Homo sapien
gctttgacccctcaatggcggcggt

SEQ ID NO: 512357 - DNA, 25 bp, Homo sapien
gaaaggcgctccgaaatctggctct

SEQ ID NO: 512358 - DNA, 25 bp, Homo sapien
tccacgatgcttaaaagaaaggcgc

SEQ ID NO: 512359 - DNA, 25 bp, Homo sapien
ggcggcggtctaactgctggtaaaa

SEQ ID NO: 512360 - DNA, 25 bp, Homo sapien
tacactctcgtgacgcgaggtcgcg

SEQ ID NO: 512361 - DNA, 25 bp, Homo sapien
aggtcgcggccagtgcccaatatca

SEQ ID NO: 512362 - DNA, 25 bp, Homo sapien
gtgcgtgctgctcctagtgcccagg

SEQ ID NO: 512363 - DNA, 25 bp, Homo sapien
aatatcaccaaagtcccggcctcag

SEQ ID NO: 512364 - DNA, 25 bp, Homo sapien
gcgatcctgtcgcaaacggacagcc

SEQ ID NO: 512365 - DNA, 25 bp, Homo sapien
ggataagggatcagcgatcctgtcg

SEQ ID NO: 512366 - DNA, 25 bp, Homo sapien
gggatcagcgatcctgtcgcaaacg

SEQ ID NO: 512367 - DNA, 25 bp, Homo sapien
tcagcgatcctgtcgcaaacggaca

SEQ ID NO: 512368 - DNA, 25 bp, Homo sapien
caggttctcgccgtagccagcttct

SEQ ID NO: 512369 - DNA, 25 bp, Homo sapien
gtagccagcttctccgggctacagc

SEQ ID NO: 512370 - DNA, 25 bp, Homo sapien
caagcgtgcccgctgcaactagtgt

SEQ ID NO: 512371 - DNA, 25 bp, Homo sapien
tctgagcgctgatgctcgcgggtcc

SEQ ID NO: 512372 - DNA, 25 bp, Homo sapien
ccgccccatcgcagcccgcctcagg

SEQ ID NO: 512373 - DNA, 25 bp, Homo sapien
cggccgccccatcgcagcccgcctc

SEQ ID NO: 512374 - DNA, 25 bp, Homo sapien
ctccggccgccccatcgcagcccgc

SEQ ID NO: 512375 - DNA, 25 bp, Homo sapien
gccgccccatcgcagcccgcctcag

SEQ ID NO: 512376 - DNA, 25 bp, Homo sapien
agcaggaccccggtgtcccagtagc

SEQ ID NO: 512377 - DNA, 25 bp, Homo sapien
aggaccccggtgtcccagtagctga

SEQ ID NO: 512378 - DNA, 25 bp, Homo sapien
acagcaggaccccggtgtcccagta

SEQ ID NO: 512379 - DNA, 25 bp, Homo sapien
agcgcgcacagcaggaccccggtgt

SEQ ID NO: 512380 - DNA, 25 bp, Homo sapien
cgacccggccgccagagtccgtcct

SEQ ID NO: 512381 - DNA, 25 bp, Homo sapien
cgcgacgcggcctgctcgcccggtg

SEQ ID NO: 512382 - DNA, 25 bp, Homo sapien
cgcgctccccgcggccaacgacccg

SEQ ID NO: 512383 - DNA, 25 bp, Homo sapien
tgagcgcgacgcggcctgctcgccc

SEQ ID NO: 512384 - DNA, 25 bp, Homo sapien
agccaggagacaaccacttccccgg

SEQ ID NO: 512385 - DNA, 25 bp, Homo sapien
aggagtgtccgcctggcgcgctccg

SEQ ID NO: 512386 - DNA, 25 bp, Homo sapien
ctgagcgcccgtctcgcggctccag

SEQ ID NO: 512387 - DNA, 25 bp, Homo sapien
ccgggtaatcctcgccgccaggcgc

SEQ ID NO: 512388 - DNA, 25 bp, Homo sapien
cctgagccactaactgtccctggat

SEQ ID NO: 512389 - DNA, 25 bp, Homo sapien
ggaaatgcacgtctgggcacctgga

SEQ ID NO: 512390 - DNA, 25 bp, Homo sapien
agaggccccggccactccacacagg

SEQ ID NO: 512391 - DNA, 25 bp, Homo sapien
tgagccactaactgtccctggatcc

SEQ ID NO: 512392 - DNA, 25 bp, Homo sapien
agggcagatttgctggcgacttctg

SEQ ID NO: 512393 - DNA, 25 bp, Homo sapien
tgctggcgacttctgtggaagacca

SEQ ID NO: 512394 - DNA, 25 bp, Homo sapien
ttctgtggaagaccagccctttcct

SEQ ID NO: 512395 - DNA, 25 bp, Homo sapien
gatttgctggcgacttctgtggaag

SEQ ID NO: 512396 - DNA, 25 bp, Homo sapien
gccctgatggttaaagccagcctct

SEQ ID NO: 512397 - DNA, 25 bp, Homo sapien
tggaagccctcagatgcccattcgt

SEQ ID NO: 512398 - DNA, 25 bp, Homo sapien
ttaggcatcgtttgagaccccgccg

SEQ ID NO: 512399 - DNA, 25 bp, Homo sapien
tctgacttcaagtgtgccctgatgg

SEQ ID NO: 512400 - DNA, 25 bp, Homo sapien
ttccctgagcttccatcagcatccc

SEQ ID NO: 512401 - DNA, 25 bp, Homo sapien
catcttggtgaagacctctctgtcc

SEQ ID NO: 512402 - DNA, 25 bp, Homo sapien
gtttcacacctgtggacaactgctt

SEQ ID NO: 512403 - DNA, 25 bp, Homo sapien
catggtgccttatggggtttcacac

SEQ ID NO: 512404 - DNA, 25 bp, Homo sapien
tcaaccggctagctctattggtccg

SEQ ID NO: 512405 - DNA, 25 bp, Homo sapien
taactaaagtggtcaaccggctagc

SEQ ID NO: 512406 - DNA, 25 bp, Homo sapien
tattggtccgtgaagatggcagaca

SEQ ID NO: 512407 - DNA, 25 bp, Homo sapien
ggctagctctattggtccgtgaaga

SEQ ID NO: 512408 - DNA, 25 bp, Homo sapien
aacctgcaaggcgatcgcaaacaaa

SEQ ID NO: 512409 - DNA, 25 bp, Homo sapien
ggaatctagccttgcagacccaaac

SEQ ID NO: 512410 - DNA, 25 bp, Homo sapien
ggccatcgcaaacatccctaggtat

SEQ ID NO: 512411 - DNA, 25 bp, Homo sapien
cagcttgcttaaactgtgagcagga

SEQ ID NO: 512412 - DNA, 25 bp, Homo sapien
gggtgtgtggacagatggagacagg

SEQ ID NO: 512413 - DNA, 25 bp, Homo sapien
ctggcagcgataaagtgaattggaa

SEQ ID NO: 512414 - DNA, 25 bp, Homo sapien
aattggaaatgccagtagggtgtgt

SEQ ID NO: 512415 - DNA, 25 bp, Homo sapien
tctgtgctggcagcgataaagtgaa

SEQ ID NO: 512416 - DNA, 25 bp, Homo sapien
gaaatgctgtttcctgcatcgtaca

SEQ ID NO: 512417 - DNA, 25 bp, Homo sapien
ttttccagcgccgacaggaaatgct

SEQ ID NO: 512418 - DNA, 25 bp, Homo sapien
cgctggtgccaacaagactgacaca

SEQ ID NO: 512419 - DNA, 25 bp, Homo sapien
ttgtcccgcgaacaatgtggcgatg

SEQ ID NO: 512420 - DNA, 25 bp, Homo sapien
caaattgtacagagatgaactggac

SEQ ID NO: 512421 - DNA, 25 bp, Homo sapien
taagcactctgttcctctcgaaggt

SEQ ID NO: 512422 - DNA, 25 bp, Homo sapien
gatcccttgtgacttagaggtggta

SEQ ID NO: 512423 - DNA, 25 bp, Homo sapien
tgaactggacacgagtaagcactct

SEQ ID NO: 512424 - DNA, 25 bp, Homo sapien
agaacctgaagctcggatttggtga

SEQ ID NO: 512425 - DNA, 25 bp, Homo sapien
gagaacctgaagctcggatttggtg

SEQ ID NO: 512426 - DNA, 25 bp, Homo sapien
gaacctgaagctcggatttggtgac

SEQ ID NO: 512427 - DNA, 25 bp, Homo sapien
gagctttcttgatcaaatcgcctaa

SEQ ID NO: 512428 - DNA, 25 bp, Homo sapien
cctagggttggcagatttcgattaa

SEQ ID NO: 512429 - DNA, 25 bp, Homo sapien
gggccgaaacagctctaagcacctc

SEQ ID NO: 512430 - DNA, 25 bp, Homo sapien
tgggttacccgtctcatgtgggcct

SEQ ID NO: 512431 - DNA, 25 bp, Homo sapien
ccccaccacagatccaagtttgagc

SEQ ID NO: 512432 - DNA, 25 bp, Homo sapien
gaaagacttctgtgtcctccctgaa

SEQ ID NO: 512433 - DNA, 25 bp, Homo sapien
cagatccaagtttgagcaagaaaga

SEQ ID NO: 512434 - DNA, 25 bp, Homo sapien
gcaagaaagacttctgtgtcctccc

SEQ ID NO: 512435 - DNA, 25 bp, Homo sapien
accttgcttttactctgacaaaact

SEQ ID NO: 512436 - DNA, 25 bp, Homo sapien
gacaaaactagagctttctctcaaa

SEQ ID NO: 512437 - DNA, 25 bp, Homo sapien
aaatcctctgaacaccaaggaggca

SEQ ID NO: 512438 - DNA, 25 bp, Homo sapien
atcccccgagctgggctgaaccttg

SEQ ID NO: 512439 - DNA, 25 bp, Homo sapien
ttctgcacgtctgtacataacttct

SEQ ID NO: 512440 - DNA, 25 bp, Homo sapien
gatgtccctggaactactaattacc

SEQ ID NO: 512441 - DNA, 25 bp, Homo sapien
taacttcttcactccaattgaaacg

SEQ ID NO: 512442 - DNA, 25 bp, Homo sapien
gaaacgctcattcaatggctgcttg

SEQ ID NO: 512443 - DNA, 25 bp, Homo sapien
ctggaaaggaagagcagagccttgc

SEQ ID NO: 512444 - DNA, 25 bp, Homo sapien
cctggaaaggaagagcagagccttg

SEQ ID NO: 512445 - DNA, 25 bp, Homo sapien
tggaaaggaagagcagagccttgct

SEQ ID NO: 512446 - DNA, 25 bp, Homo sapien
cgaaactgaaaaggcttccttctca

SEQ ID NO: 512447 - DNA, 25 bp, Homo sapien
gagtccatccaaatctacgctaaag

SEQ ID NO: 512448 - DNA, 25 bp, Homo sapien
gaagccctcgacatgatacgaaact

SEQ ID NO: 512449 - DNA, 25 bp, Homo sapien
aagatggcttctactgtcagcacag

SEQ ID NO: 512450 - DNA, 25 bp, Homo sapien
gatttcacctaagaccagagaaggg

SEQ ID NO: 512451 - DNA, 25 bp, Homo sapien
tcctgcggctttgccatgatgtggg

SEQ ID NO: 512452 - DNA, 25 bp, Homo sapien
gagacactcggcaggtagatcttgc

SEQ ID NO: 512453 - DNA, 25 bp, Homo sapien
gaggccatttgtcaaacagcacaag

SEQ ID NO: 512454 - DNA, 25 bp, Homo sapien
catagggtaccctcagtggtcagtt

SEQ ID NO: 512455 - DNA, 25 bp, Homo sapien
tgtttccaaggcaaggccagtcaag

SEQ ID NO: 512456 - DNA, 25 bp, Homo sapien
cagaatgctgctcttgattagctgg

SEQ ID NO: 512457 - DNA, 25 bp, Homo sapien
tctccttggcttgcgcagccgtggg

SEQ ID NO: 512458 - DNA, 25 bp, Homo sapien
tagtttactggggacggcacatggt

SEQ ID NO: 512459 - DNA, 25 bp, Homo sapien
ttagggcccagacttagagtgaggt

SEQ ID NO: 512460 - DNA, 25 bp, Homo sapien
aaggggaccagcagttgaggcctcc

SEQ ID NO: 512461 - DNA, 25 bp, Homo sapien
gagagacctggtgccttctcatttt

SEQ ID NO: 512462 - DNA, 25 bp, Homo sapien
gagctgctggagagatattcccctg

SEQ ID NO: 512463 - DNA, 25 bp, Homo sapien
tcacacaaactgcaactgagctgct

SEQ ID NO: 512464 - DNA, 25 bp, Homo sapien
tctctgttccgctcagacagatctt

SEQ ID NO: 512465 - DNA, 25 bp, Homo sapien
tttctgcaaaccagcaattgccttc

SEQ ID NO: 512466 - DNA, 25 bp, Homo sapien
ccctaatactctgccccatcccagg

SEQ ID NO: 512467 - DNA, 25 bp, Homo sapien
ttcatcccctaatactctgccccat

SEQ ID NO: 512468 - DNA, 25 bp, Homo sapien
atcccctaatactctgccccatccc

SEQ ID NO: 512469 - DNA, 25 bp, Homo sapien
tcatcccctaatactctgccccatc

SEQ ID NO: 512470 - DNA, 25 bp, Homo sapien
tgctgtggtccacgaagatcagagt

SEQ ID NO: 512471 - DNA, 25 bp, Homo sapien
tggtgccacatcctgcactaatggc

SEQ ID NO: 512472 - DNA, 25 bp, Homo sapien
caatcagctctgaattggtgccaca

SEQ ID NO: 512473 - DNA, 25 bp, Homo sapien
tcaagcccacaaagttcatgctgtg

SEQ ID NO: 512474 - DNA, 25 bp, Homo sapien
tcattgtcgcttgccctggtgtgtt

SEQ ID NO: 512475 - DNA, 25 bp, Homo sapien
ttctatcctgataaagatatctgtg

SEQ ID NO: 512476 - DNA, 25 bp, Homo sapien
ctttgaggaattaatgcgcatgtat

SEQ ID NO: 512477 - DNA, 25 bp, Homo sapien
gatgtgtttcagtgcgcttcccctc

SEQ ID NO: 512478 - DNA, 25 bp, Homo sapien
ggaatctcttcagcaagaaaggtga

SEQ ID NO: 512479 - DNA, 25 bp, Homo sapien
tcaaatacaccttccttgtggcttg

SEQ ID NO: 512480 - DNA, 25 bp, Homo sapien
cttgcaccaagtgaattgtctgctc

SEQ ID NO: 512481 - DNA, 25 bp, Homo sapien
tgtgaccccaccctgactaagtatg

SEQ ID NO: 512482 - DNA, 25 bp, Homo sapien
gaaaggtaaatagcatgaggcccat

SEQ ID NO: 512483 - DNA, 25 bp, Homo sapien
cgctacttcatacgtgcctggcaat

SEQ ID NO: 512484 - DNA, 25 bp, Homo sapien
gcattgaaggtcgaaaacctctgat

SEQ ID NO: 512485 - DNA, 25 bp, Homo sapien
ggagcacagagagtaccatacaaag

SEQ ID NO: 512486 - DNA, 25 bp, Homo sapien
gatgtgattgtatgggcaagaccca

SEQ ID NO: 512487 - DNA, 25 bp, Homo sapien
caagctttgcagtcgggttggccct

SEQ ID NO: 512488 - DNA, 25 bp, Homo sapien
tgtaaaagacccgatatgtaaccgc

SEQ ID NO: 512489 - DNA, 25 bp, Homo sapien
tctgacatgtcctgaggaacgcccg

SEQ ID NO: 512490 - DNA, 25 bp, Homo sapien
ttaatcaggagcatctacgtaggag

SEQ ID NO: 512491 - DNA, 25 bp, Homo sapien
gcatctacgtaggagaaagttccca

SEQ ID NO: 512492 - DNA, 25 bp, Homo sapien
gcaggatgccgaagtggaaggcgca

SEQ ID NO: 512493 - DNA, 25 bp, Homo sapien
tcaggagcatctacgtaggagaaag

SEQ ID NO: 512494 - DNA, 25 bp, Homo sapien
ctctgtcctggtgagctttgccagt

SEQ ID NO: 512495 - DNA, 25 bp, Homo sapien
caagcctgcagcctcggtaatccat

SEQ ID NO: 512496 - DNA, 25 bp, Homo sapien
ttgccagtccccatcgcttccgcaa

SEQ ID NO: 512497 - DNA, 25 bp, Homo sapien
ctgtcctggtgagctttgccagtcc

SEQ ID NO: 512498 - DNA, 25 bp, Homo sapien
cagcagggattgagggcagcacact

SEQ ID NO: 512499 - DNA, 25 bp, Homo sapien
ttgcccccacattgtcagccctgac

SEQ ID NO: 512500 - DNA, 25 bp, Homo sapien
cacagaacagaaacagccttgcccc

SEQ ID NO: 512501 - DNA, 25 bp, Homo sapien
gctctttgaagacaacagcaaccac

SEQ ID NO: 512502 - DNA, 25 bp, Homo sapien
acagagcccactccgctgccctgca

SEQ ID NO: 512503 - DNA, 25 bp, Homo sapien
tttagtggcaaggacctaagcccca

SEQ ID NO: 512504 - DNA, 25 bp, Homo sapien
gcaaggacctaagccccaaggagga

SEQ ID NO: 512505 - DNA, 25 bp, Homo sapien
aggagcggggaaacggccacagagc

SEQ ID NO: 512506 - DNA, 25 bp, Homo sapien
cttcacagctgtgaggctctgttct

SEQ ID NO: 512507 - DNA, 25 bp, Homo sapien
gaggctctgttctcttctgaggcca

SEQ ID NO: 512508 - DNA, 25 bp, Homo sapien
tcacagctgtgaggctctgttctct

SEQ ID NO: 512509 - DNA, 25 bp, Homo sapien
gtgaggctctgttctcttctgaggc

SEQ ID NO: 512510 - DNA, 25 bp, Homo sapien
tgtgcaaacgcatcgtctacacagc

SEQ ID NO: 512511 - DNA, 25 bp, Homo sapien
gcaaacgcatcgtctacacagcagc

SEQ ID NO: 512512 - DNA, 25 bp, Homo sapien
cctgtgtgcaaacgcatcgtctaca

SEQ ID NO: 512513 - DNA, 25 bp, Homo sapien
cttagcctgtgtgcaaacgcatcgt

SEQ ID NO: 512514 - DNA, 25 bp, Homo sapien
tttgaattttgttgaattcacatac

SEQ ID NO: 512515 - DNA, 25 bp, Homo sapien
tgtttgaattttgttgaattcacat

SEQ ID NO: 512516 - DNA, 25 bp, Homo sapien
aaccactgtttgaattttgttgaat

SEQ ID NO: 512517 - DNA, 25 bp, Homo sapien
ccactgtttgaattttgttgaattc

SEQ ID NO: 512518 - DNA, 25 bp, Homo sapien
gctgggtcctcgtcataaatgtggg

SEQ ID NO: 512519 - DNA, 25 bp, Homo sapien
ctgccatgataggagttgtaacgtc

SEQ ID NO: 512520 - DNA, 25 bp, Homo sapien
tattgctgaactgcggtagaactgt

SEQ ID NO: 512521 - DNA, 25 bp, Homo sapien
caaatcttttggcactgggtctaaa

SEQ ID NO: 512522 - DNA, 25 bp, Homo sapien
tgcaggagcatttcaaaaccaccag

SEQ ID NO: 512523 - DNA, 25 bp, Homo sapien
gcttcttatcaccacccactgtctg

SEQ ID NO: 512524 - DNA, 25 bp, Homo sapien
tcaaaaccaccagggcaggtgactc

SEQ ID NO: 512525 - DNA, 25 bp, Homo sapien
cctggaacttccagaaagaatggct

SEQ ID NO: 512526 - DNA, 25 bp, Homo sapien
gaagacacgactccatgaattgtca

SEQ ID NO: 512527 - DNA, 25 bp, Homo sapien
tactgaggtaatgccccgctaggct

SEQ ID NO: 512528 - DNA, 25 bp, Homo sapien
tcctcacgacagaaacgcttactga

SEQ ID NO: 512529 - DNA, 25 bp, Homo sapien
tctttcacctgtttgaagacacgac

SEQ ID NO: 512530 - DNA, 25 bp, Homo sapien
actcctttaagccagatctcccaat

SEQ ID NO: 512531 - DNA, 25 bp, Homo sapien
ctttaagccagatctcccaattcat

SEQ ID NO: 512532 - DNA, 25 bp, Homo sapien
atctgcaactcctttaagccagatc

SEQ ID NO: 512533 - DNA, 25 bp, Homo sapien
tcctttaagccagatctcccaattc

SEQ ID NO: 512534 - DNA, 25 bp, Homo sapien
taactcaaagagtctgctacaaatt

SEQ ID NO: 512535 - DNA, 25 bp, Homo sapien
ttcaataattctctacatgggtaac

SEQ ID NO: 512536 - DNA, 25 bp, Homo sapien
taaaaattttgcaggattgctagac

SEQ ID NO: 512537 - DNA, 25 bp, Homo sapien
aatcaacaggcaaaagtcgattgca

SEQ ID NO: 512538 - DNA, 25 bp, Homo sapien
cttggcattgtgacttgaagggccc

SEQ ID NO: 512539 - DNA, 25 bp, Homo sapien
cttcaatgtcggatatgggcacttc

SEQ ID NO: 512540 - DNA, 25 bp, Homo sapien
ggagaacataggcatcccggatgct

SEQ ID NO: 512541 - DNA, 25 bp, Homo sapien
gagtctcggtgtatcctctaggctg

SEQ ID NO: 512542 - DNA, 25 bp, Homo sapien
tatatattaggctttgtgaggctct

SEQ ID NO: 512543 - DNA, 25 bp, Homo sapien
ctggcaaatgatgggagaaggctat

SEQ ID NO: 512544 - DNA, 25 bp, Homo sapien
attactccatgctcccacatgtggg

SEQ ID NO: 512545 - DNA, 25 bp, Homo sapien
ggctctgcacatgatacttttggca

SEQ ID NO: 512546 - DNA, 25 bp, Homo sapien
caggtacagggaattgctcttttct

SEQ ID NO: 512547 - DNA, 25 bp, Homo sapien
atctcaggtacagggaattgctctt

SEQ ID NO: 512548 - DNA, 25 bp, Homo sapien
tttaaatatctgtttgcatgtctat

SEQ ID NO: 512549 - DNA, 25 bp, Homo sapien
ttctttatagctccagaatctagta

SEQ ID NO: 512550 - DNA, 25 bp, Homo sapien
cagccctcggaaacggaagtgagcg

SEQ ID NO: 512551 - DNA, 25 bp, Homo sapien
gattgcaagcgtgggagcctcggcc

SEQ ID NO: 512552 - DNA, 25 bp, Homo sapien
cttcctcgccaggacggacgcactt

SEQ ID NO: 512553 - DNA, 25 bp, Homo sapien
cacttccggcggatgtgggggccag

SEQ ID NO: 512554 - DNA, 25 bp, Homo sapien
gcaacgttctgtggggtggcgctgg

SEQ ID NO: 512555 - DNA, 25 bp, Homo sapien
agccgtgaaagtgcaacgttctgtg

SEQ ID NO: 512556 - DNA, 25 bp, Homo sapien
tccttgacgggtaacctctgggagc

SEQ ID NO: 512557 - DNA, 25 bp, Homo sapien
ccgtgaaagtgcaacgttctgtggg

SEQ ID NO: 512558 - DNA, 25 bp, Homo sapien
gtaacgcagctttgctctacaaact

SEQ ID NO: 512559 - DNA, 25 bp, Homo sapien
gtaaacagcccacaactataggtcg

SEQ ID NO: 512560 - DNA, 25 bp, Homo sapien
actataggtcgcatttgtgtaacgc

SEQ ID NO: 512561 - DNA, 25 bp, Homo sapien
gcatttgtgtaacgcagctttgctc

SEQ ID NO: 512562 - DNA, 25 bp, Homo sapien
ctgcctttttaatgtacgtctccaa

SEQ ID NO: 512563 - DNA, 25 bp, Homo sapien
taatgtacgtctccaaagggtgatc

SEQ ID NO: 512564 - DNA, 25 bp, Homo sapien
tctccaaagggtgatccacttctcc

SEQ ID NO: 512565 - DNA, 25 bp, Homo sapien
tacgtctccaaagggtgatccactt

SEQ ID NO: 512566 - DNA, 25 bp, Homo sapien
tctctagttttgacctctttaagtc

SEQ ID NO: 512567 - DNA, 25 bp, Homo sapien
tttagaatccatgagtcaagtcgat

SEQ ID NO: 512568 - DNA, 25 bp, Homo sapien
tagctcagacaaatctttgtaacag

SEQ ID NO: 512569 - DNA, 25 bp, Homo sapien
tctttgtaacagtctgtttgcatat

SEQ ID NO: 512570 - DNA, 25 bp, Homo sapien
ttacattcactatccttaggagcca

SEQ ID NO: 512571 - DNA, 25 bp, Homo sapien
catgggagagccacacttgatggtg

SEQ ID NO: 512572 - DNA, 25 bp, Homo sapien
tagtcatctttgtactgtaatttga

SEQ ID NO: 512573 - DNA, 25 bp, Homo sapien
ggtttactgtaatagtgtgctgttc

SEQ ID NO: 512574 - DNA, 25 bp, Homo sapien
tcatggaaaccgagggctgcatctt

SEQ ID NO: 512575 - DNA, 25 bp, Homo sapien
atttggaagttacttctggagccag

SEQ ID NO: 512576 - DNA, 25 bp, Homo sapien
gatttggaagttacttctggagcca

SEQ ID NO: 512577 - DNA, 25 bp, Homo sapien
aaaatgctgggatcgaagtgcacac

SEQ ID NO: 512578 - DNA, 25 bp, Homo sapien
ttttagagaccaaggtggacctcag

SEQ ID NO: 512579 - DNA, 25 bp, Homo sapien
ttcctatgagtgaccgtgttgacgg

SEQ ID NO: 512580 - DNA, 25 bp, Homo sapien
tcaaggcgatgattgtcaggtagca

SEQ ID NO: 512581 - DNA, 25 bp, Homo sapien
tataagctccgactatcaatagcag

SEQ ID NO: 512582 - DNA, 25 bp, Homo sapien
tatcatgcctgtcaccgatgaaaca

SEQ ID NO: 512583 - DNA, 25 bp, Homo sapien
caaagcactgattgtggaattcatg

SEQ ID NO: 512584 - DNA, 25 bp, Homo sapien
tcatgtatagtcttcagaagtcaca

SEQ ID NO: 512585 - DNA, 25 bp, Homo sapien
aagtgctcaaagtgcgtggtaccac

SEQ ID NO: 512586 - DNA, 25 bp, Homo sapien
aaattggttctcagtgaagcactga

SEQ ID NO: 512587 - DNA, 25 bp, Homo sapien
tcttctaagtctaaaagtgaggcgt

SEQ ID NO: 512588 - DNA, 25 bp, Homo sapien
tattgcatgatacgcacaaagtgct

SEQ ID NO: 512589 - DNA, 25 bp, Homo sapien
tcatggtatatgatatgtgcattca

SEQ ID NO: 512590 - DNA, 25 bp, Homo sapien
tcagaagtcatggtatatgatatgt

SEQ ID NO: 512591 - DNA, 25 bp, Homo sapien
tggtatatgatatgtgcattcatag

SEQ ID NO: 512592 - DNA, 25 bp, Homo sapien
gaagtcatggtatatgatatgtgca

SEQ ID NO: 512593 - DNA, 25 bp, Homo sapien
ttgtataagaagttcatagcttccc

SEQ ID NO: 512594 - DNA, 25 bp, Homo sapien
ataagaagttcatagcttccctcat

SEQ ID NO: 512595 - DNA, 25 bp, Homo sapien
tgtataagaagttcatagcttccct

SEQ ID NO: 512596 - DNA, 25 bp, Homo sapien
tataagaagttcatagcttccctca

SEQ ID NO: 512597 - DNA, 25 bp, Homo sapien
gagaactcaatagtcagcacatcct

SEQ ID NO: 512598 - DNA, 25 bp, Homo sapien
gatattgtactctgggaaatcatag

SEQ ID NO: 512599 - DNA, 25 bp, Homo sapien
taagtctccccaaattattgacaga

SEQ ID NO: 512600 - DNA, 25 bp, Homo sapien
tacaagaatccatgtgaaagtcaat

SEQ ID NO: 512601 - DNA, 25 bp, Homo sapien
ggagcatgccaatcttcactgtgtc

SEQ ID NO: 512602 - DNA, 25 bp, Homo sapien
gggagcatgccaatcttcactgtgt

SEQ ID NO: 512603 - DNA, 25 bp, Homo sapien
gagcatgccaatcttcactgtgtca

SEQ ID NO: 512604 - DNA, 25 bp, Homo sapien
agggagcatgccaatcttcactgtg

SEQ ID NO: 512605 - DNA, 25 bp, Homo sapien
ccaagtgtttctaagaaagcaatac

SEQ ID NO: 512606 - DNA, 25 bp, Homo sapien
ggaagtagtaacagaccagcagaca

SEQ ID NO: 512607 - DNA, 25 bp, Homo sapien
gcaacagtggctgagtaaattccat

SEQ ID NO: 512608 - DNA, 25 bp, Homo sapien
gaaactgcagtgactcctccaagtg

SEQ ID NO: 512609 - DNA, 25 bp, Homo sapien
aaagcacaggatggctcctaacaag

SEQ ID NO: 512610 - DNA, 25 bp, Homo sapien
tgtccacagggcaaagctaaaaaga

SEQ ID NO: 512611 - DNA, 25 bp, Homo sapien
caaatagctgagttccagtgtccac

SEQ ID NO: 512612 - DNA, 25 bp, Homo sapien
catgctaatctgtgacacctgaaag

SEQ ID NO: 512613 - DNA, 25 bp, Homo sapien
caaagttggtcaagggtaggccact

SEQ ID NO: 512614 - DNA, 25 bp, Homo sapien
caagggtaggccactcagcattgtt

SEQ ID NO: 512615 - DNA, 25 bp, Homo sapien
tggtcacacttgctatacaccaaag

SEQ ID NO: 512616 - DNA, 25 bp, Homo sapien
cacttgctatacaccaaagttggtc

SEQ ID NO: 512617 - DNA, 25 bp, Homo sapien
tgactttgtgtaccctgctctgtgc

SEQ ID NO: 512618 - DNA, 25 bp, Homo sapien
gacttggactttcttgctggcccga

SEQ ID NO: 512619 - DNA, 25 bp, Homo sapien
taagtacattcacagcaccgggcta

SEQ ID NO: 512620 - DNA, 25 bp, Homo sapien
ggaggacaagcccatatgcctgata

SEQ ID NO: 512621 - DNA, 25 bp, Homo sapien
gaattccacgtaggaacagggtagc

SEQ ID NO: 512622 - DNA, 25 bp, Homo sapien
taatgaatgatctaggagacccgca

SEQ ID NO: 512623 - DNA, 25 bp, Homo sapien
gagggagctctctaaagtacaaggc

SEQ ID NO: 512624 - DNA, 25 bp, Homo sapien
tttagaaggagtcgccccttggctc

SEQ ID NO: 512625 - DNA, 25 bp, Homo sapien
cagtcgaacgaaccacttttgacaa

SEQ ID NO: 512626 - DNA, 25 bp, Homo sapien
cttgttcagtcgaacgaaccacttt

SEQ ID NO: 512627 - DNA, 25 bp, Homo sapien
tcgaacgaaccacttttgacaacat

SEQ ID NO: 512628 - DNA, 25 bp, Homo sapien
tgttcagtcgaacgaaccacttttg

SEQ ID NO: 512629 - DNA, 25 bp, Homo sapien
aacagagaatggcacaatagtgaaa

SEQ ID NO: 512630 - DNA, 25 bp, Homo sapien
aatagtgaaaaggaacggcaccctg

SEQ ID NO: 512631 - DNA, 25 bp, Homo sapien
caatagtgaaaaggaacggcaccct

SEQ ID NO: 512632 - DNA, 25 bp, Homo sapien
agaacagagaatggcacaatagtga

SEQ ID NO: 512633 - DNA, 25 bp, Homo sapien
gcttttggcttattgactcctggca

SEQ ID NO: 512634 - DNA, 25 bp, Homo sapien
tagattaacttacctgaccttggca

SEQ ID NO: 512635 - DNA, 25 bp, Homo sapien
tagggattgtgccaagcgagtgctt

SEQ ID NO: 512636 - DNA, 25 bp, Homo sapien
gaccttggcagctcttagggagaca

SEQ ID NO: 512637 - DNA, 25 bp, Homo sapien
cagtgttgtactggcaaacgcggtc

SEQ ID NO: 512638 - DNA, 25 bp, Homo sapien
ttgtactggcaaacgcggtcatagc

SEQ ID NO: 512639 - DNA, 25 bp, Homo sapien
aaaacatcatcagtgttgtactggc

SEQ ID NO: 512640 - DNA, 25 bp, Homo sapien
aacgcggtcatagccattcctgtca

SEQ ID NO: 512641 - DNA, 25 bp, Homo sapien
cccaatgaaggccatatgaatatct

SEQ ID NO: 512642 - DNA, 25 bp, Homo sapien
atgaaggccatatgaatatcttcca

SEQ ID NO: 512643 - DNA, 25 bp, Homo sapien
caatgaaggccatatgaatatcttc

SEQ ID NO: 512644 - DNA, 25 bp, Homo sapien
ccaatgaaggccatatgaatatctt

SEQ ID NO: 512645 - DNA, 25 bp, Homo sapien
acccaaagctgatccataacctata

SEQ ID NO: 512646 - DNA, 25 bp, Homo sapien
ggtgaatccaattcataaaggataa

SEQ ID NO: 512647 - DNA, 25 bp, Homo sapien
ttccagcagagtggtgaatccaatt

SEQ ID NO: 512648 - DNA, 25 bp, Homo sapien
aattggggcaatgccaattaccaca

SEQ ID NO: 512649 - DNA, 25 bp, Homo sapien
aaagtaacaaacagagcaaaaatcg

SEQ ID NO: 512650 - DNA, 25 bp, Homo sapien
taacaaacagagcaaaaatcgtctc

SEQ ID NO: 512651 - DNA, 25 bp, Homo sapien
agtaacaaacagagcaaaaatcgtc

SEQ ID NO: 512652 - DNA, 25 bp, Homo sapien
acaaacagagcaaaaatcgtctctt

SEQ ID NO: 512653 - DNA, 25 bp, Homo sapien
tctttcactggatctccgagaaaaa

SEQ ID NO: 512654 - DNA, 25 bp, Homo sapien
gatcaaattaacagcaagagacaca

SEQ ID NO: 512655 - DNA, 25 bp, Homo sapien
ttgaagccttcactacatgacatag

SEQ ID NO: 512656 - DNA, 25 bp, Homo sapien
tagtaacattctgagatgaacactc

SEQ ID NO: 512657 - DNA, 25 bp, Homo sapien
tgtggtataattgccacaaaatgca

SEQ ID NO: 512658 - DNA, 25 bp, Homo sapien
gatgacagtcctgttagtccagtaa

SEQ ID NO: 512659 - DNA, 25 bp, Homo sapien
gatcaactatataggcaaagcaagc

SEQ ID NO: 512660 - DNA, 25 bp, Homo sapien
gcaccaatgaaggtagatgcaatca

SEQ ID NO: 512661 - DNA, 25 bp, Homo sapien
gcaccaacggaagacaaaatcatag

SEQ ID NO: 512662 - DNA, 25 bp, Homo sapien
gaattttcgtccgtagtgatcacta

SEQ ID NO: 512663 - DNA, 25 bp, Homo sapien
caaacgctggttgcaagagcaccaa

SEQ ID NO: 512664 - DNA, 25 bp, Homo sapien
caaagcaaacagagccaaacgctgg

SEQ ID NO: 512665 - DNA, 25 bp, Homo sapien
ctcagtccaagagggcaagagcagc

SEQ ID NO: 512666 - DNA, 25 bp, Homo sapien
taaggagcaaacagagagtaggcca

SEQ ID NO: 512667 - DNA, 25 bp, Homo sapien
tcctacaggtcagccaaaagaaagc

SEQ ID NO: 512668 - DNA, 25 bp, Homo sapien
gagataccttgtggatgggactcac

SEQ ID NO: 512669 - DNA, 25 bp, Homo sapien
ggccactttctagagtccctgaaag

SEQ ID NO: 512670 - DNA, 25 bp, Homo sapien
tggctcacaatcttcagtgatgggc

SEQ ID NO: 512671 - DNA, 25 bp, Homo sapien
aaggctgatttgataccaccaccaa

SEQ ID NO: 512672 - DNA, 25 bp, Homo sapien
tcaacacgtgagagccaaggctgat

SEQ ID NO: 512673 - DNA, 25 bp, Homo sapien
tcaaagcccggtatacattcccatt

SEQ ID NO: 512674 - DNA, 25 bp, Homo sapien
aatgaggtgagttcccagtaaaggc

SEQ ID NO: 512675 - DNA, 25 bp, Homo sapien
tggatgatgagttcacggtcctctt

SEQ ID NO: 512676 - DNA, 25 bp, Homo sapien
ttgatggccgccctagagagaccaa

SEQ ID NO: 512677 - DNA, 25 bp, Homo sapien
cacactcagaaatattgctatcaga

SEQ ID NO: 512678 - DNA, 25 bp, Homo sapien
cagtggaccggtcaaagtcatagca

SEQ ID NO: 512679 - DNA, 25 bp, Homo sapien
aacatattgcgttgtcagtggaccg

SEQ ID NO: 512680 - DNA, 25 bp, Homo sapien
tgaaaaagtgtagttgccagtttct

SEQ ID NO: 512681 - DNA, 25 bp, Homo sapien
tcatctgtctcatcccagaggctag

SEQ ID NO: 512682 - DNA, 25 bp, Homo sapien
ggttagccaatgatcacagtacagt

SEQ ID NO: 512683 - DNA, 25 bp, Homo sapien
taaaaagcagctcccaatcgaaagg

SEQ ID NO: 512684 - DNA, 25 bp, Homo sapien
taggacattgtaggactcaagccgc

SEQ ID NO: 512685 - DNA, 25 bp, Homo sapien
tcccgagtgacacctgcagggttct

SEQ ID NO: 512686 - DNA, 25 bp, Homo sapien
tgtaaagcaaacctcggcaagcgca

SEQ ID NO: 512687 - DNA, 25 bp, Homo sapien
ggagtctcaagcgtattgtaaagca

SEQ ID NO: 512688 - DNA, 25 bp, Homo sapien
tctgcgcagtggacaatcggccaat

SEQ ID NO: 512689 - DNA, 25 bp, Homo sapien
tattactcccaaggaccttgtttca

SEQ ID NO: 512690 - DNA, 25 bp, Homo sapien
cacaattagagtttaacatgagtct

SEQ ID NO: 512691 - DNA, 25 bp, Homo sapien
aaaccagagttcactgatctcacat

SEQ ID NO: 512692 - DNA, 25 bp, Homo sapien
tcccaaggaccttgtttcagattat

SEQ ID NO: 512693 - DNA, 25 bp, Homo sapien
ggtgtgaatcatagttgtataattc

SEQ ID NO: 512694 - DNA, 25 bp, Homo sapien
aagcatagtggaccaaattgtctta

SEQ ID NO: 512695 - DNA, 25 bp, Homo sapien
catataaacgaagcatagtggacca

SEQ ID NO: 512696 - DNA, 25 bp, Homo sapien
ttttcaggggtgtgaatcatagttg

SEQ ID NO: 512697 - DNA, 25 bp, Homo sapien
gattaaagtccaggcgttctaccca

SEQ ID NO: 512698 - DNA, 25 bp, Homo sapien
taaagtccaggcgttctacccatga

SEQ ID NO: 512699 - DNA, 25 bp, Homo sapien
ccaggcgttctacccatgagtcttt

SEQ ID NO: 512700 - DNA, 25 bp, Homo sapien
gtctttgattgacagtgggagaaac

SEQ ID NO: 512701 - DNA, 25 bp, Homo sapien
tttcttttatacagcgatcaagtaa

SEQ ID NO: 512702 - DNA, 25 bp, Homo sapien
agcatccctgctacttcatcatcag

SEQ ID NO: 512703 - DNA, 25 bp, Homo sapien
taagcatccctgctacttcatcatc

SEQ ID NO: 512704 - DNA, 25 bp, Homo sapien
gatcaagtaaatttagatccttgag

SEQ ID NO: 512705 - DNA, 25 bp, Homo sapien
ttcttgagactgtctgcgtttctgg

SEQ ID NO: 512706 - DNA, 25 bp, Homo sapien
caaaggcagccaacctggtaagagc

SEQ ID NO: 512707 - DNA, 25 bp, Homo sapien
tgcatggctgaaacctccatccaaa

SEQ ID NO: 512708 - DNA, 25 bp, Homo sapien
tatgtagcatctagtaaagtttgga

SEQ ID NO: 512709 - DNA, 25 bp, Homo sapien
ctgttaaaattatgagctcagaaag

SEQ ID NO: 512710 - DNA, 25 bp, Homo sapien
cactttctccccaactctgaaagta

SEQ ID NO: 512711 - DNA, 25 bp, Homo sapien
tcagaaagagcttcaaacacatttt

SEQ ID NO: 512712 - DNA, 25 bp, Homo sapien
tttctccccaactctgaaagtactc

SEQ ID NO: 512713 - DNA, 25 bp, Homo sapien
atgctgtttaaagtgggctttgtta

SEQ ID NO: 512714 - DNA, 25 bp, Homo sapien
tgctgtttaaagtgggctttgttaa

SEQ ID NO: 512715 - DNA, 25 bp, Homo sapien
ggattaggcacatcgtatgcaactc

SEQ ID NO: 512716 - DNA, 25 bp, Homo sapien
ttaggcacatcgtatgcaactccct

SEQ ID NO: 512717 - DNA, 25 bp, Homo sapien
gattaggcacatcgtatgcaactcc

SEQ ID NO: 512718 - DNA, 25 bp, Homo sapien
tggattaggcacatcgtatgcaact

SEQ ID NO: 512719 - DNA, 25 bp, Homo sapien
tctcatatgcatttctagaaattca

SEQ ID NO: 512720 - DNA, 25 bp, Homo sapien
atatgcatttctagaaattcaactg

SEQ ID NO: 512721 - DNA, 25 bp, Homo sapien
ttctcatatgcatttctagaaattc

SEQ ID NO: 512722 - DNA, 25 bp, Homo sapien
tgcatttctagaaattcaactggac

SEQ ID NO: 512723 - DNA, 25 bp, Homo sapien
gcagcatggacaagaggttgcctcc

SEQ ID NO: 512724 - DNA, 25 bp, Homo sapien
tatggcatgcccagggaatggaact

SEQ ID NO: 512725 - DNA, 25 bp, Homo sapien
cggccagacggaacaggtagaccag

SEQ ID NO: 512726 - DNA, 25 bp, Homo sapien
atggaggacttttcgcccctgcggg

SEQ ID NO: 512727 - DNA, 25 bp, Homo sapien
aagcccagcaacatcatccccgccg

SEQ ID NO: 512728 - DNA, 25 bp, Homo sapien
cccaccccgcctgcagcaagcccag

SEQ ID NO: 512729 - DNA, 25 bp, Homo sapien
ccagcaccgacccaccccgcctgca

SEQ ID NO: 512730 - DNA, 25 bp, Homo sapien
ccagcaacatcatccccgccgctgc

SEQ ID NO: 512731 - DNA, 25 bp, Homo sapien
caggtggggttctggacattattag

SEQ ID NO: 512732 - DNA, 25 bp, Homo sapien
ctcctgcaggtggggttctggacat

SEQ ID NO: 512733 - DNA, 25 bp, Homo sapien
gcaggtggggttctggacattatta

SEQ ID NO: 512734 - DNA, 25 bp, Homo sapien
cctgcaggtggggttctggacatta

SEQ ID NO: 512735 - DNA, 25 bp, Homo sapien
cattctcaggcattagggaagcaat

SEQ ID NO: 512736 - DNA, 25 bp, Homo sapien
tccatgagggccacttccccggcca

SEQ ID NO: 512737 - DNA, 25 bp, Homo sapien
cggccacagcgcctactgtgagatg

SEQ ID NO: 512738 - DNA, 25 bp, Homo sapien
ccacagcgcctactgtgagatgagt

SEQ ID NO: 512739 - DNA, 25 bp, Homo sapien
tacttgggcatttggcgctaatttt

SEQ ID NO: 512740 - DNA, 25 bp, Homo sapien
acttgggcatttggcgctaatttta

SEQ ID NO: 512741 - DNA, 25 bp, Homo sapien
tctgtagtcattggccactcactgc

SEQ ID NO: 512742 - DNA, 25 bp, Homo sapien
tcaggatccagttgcaagttcttaa

SEQ ID NO: 512743 - DNA, 25 bp, Homo sapien
gtcattggccactcactgccagttc

SEQ ID NO: 512744 - DNA, 25 bp, Homo sapien
acttcaggatccagttgcaagttct

SEQ ID NO: 512745 - DNA, 25 bp, Homo sapien
ggatcaggccattctagccaacggt

SEQ ID NO: 512746 - DNA, 25 bp, Homo sapien
tgttcggtgccttaactggatgccc

SEQ ID NO: 512747 - DNA, 25 bp, Homo sapien
cattcgagatagactacccggttcc

SEQ ID NO: 512748 - DNA, 25 bp, Homo sapien
ggatggtgcttcgagtacgcctcca

SEQ ID NO: 512749 - DNA, 25 bp, Homo sapien
gagccagccggccatcttctgcagt

SEQ ID NO: 512750 - DNA, 25 bp, Homo sapien
agccagccggccatcttctgcagtg

SEQ ID NO: 512751 - DNA, 25 bp, Homo sapien
cagagccagccggccatcttctgca

SEQ ID NO: 512752 - DNA, 25 bp, Homo sapien
cccagagccagccggccatcttctg

SEQ ID NO: 512753 - DNA, 25 bp, Homo sapien
tggtgtgtaggaaggcccaagacac

SEQ ID NO: 512754 - DNA, 25 bp, Homo sapien
agacaccgagacattgctgcaccta

SEQ ID NO: 512755 - DNA, 25 bp, Homo sapien
tcagaggtgcatggtctcccctggg

SEQ ID NO: 512756 - DNA, 25 bp, Homo sapien
tgggcggctccttggtgtgtaggaa

SEQ ID NO: 512757 - DNA, 25 bp, Homo sapien
gagctcccgcggtggctctgcgact

SEQ ID NO: 512758 - DNA, 25 bp, Homo sapien
agctcccgcggtggctctgcgactg

SEQ ID NO: 512759 - DNA, 25 bp, Homo sapien
tcccgcggtggctctgcgactgggc

SEQ ID NO: 512760 - DNA, 25 bp, Homo sapien
cgcggtggctctgcgactgggctgt

SEQ ID NO: 512761 - DNA, 25 bp, Homo sapien
ttctcctggaagacactgttgctgg

SEQ ID NO: 512762 - DNA, 25 bp, Homo sapien
gaagacactgttgctggagagtgga

SEQ ID NO: 512763 - DNA, 25 bp, Homo sapien
gctggagagtggaggcttcttctga

SEQ ID NO: 512764 - DNA, 25 bp, Homo sapien
gaggcttcttctgagcggcccaggc

SEQ ID NO: 512765 - DNA, 25 bp, Homo sapien
tgacgcttgtataggctcccctctg

SEQ ID NO: 512766 - DNA, 25 bp, Homo sapien
ccgagcttcccatggacgtagacaa

SEQ ID NO: 512767 - DNA, 25 bp, Homo sapien
tcaaaccagagtggctcgtcgaatt

SEQ ID NO: 512768 - DNA, 25 bp, Homo sapien
cgggtgcgggcatagtcccaatcga

SEQ ID NO: 512769 - DNA, 25 bp, Homo sapien
gagaagtgagtaatcatgtacagag

SEQ ID NO: 512770 - DNA, 25 bp, Homo sapien
tcagaaactggaggctagaagatag

SEQ ID NO: 512771 - DNA, 25 bp, Homo sapien
cagaggatcttcaataagattaaca

SEQ ID NO: 512772 - DNA, 25 bp, Homo sapien
tgatgtattgaaaatgctgaaagac

SEQ ID NO: 512773 - DNA, 25 bp, Homo sapien
tctgggaaagagttggtagtggtca

SEQ ID NO: 512774 - DNA, 25 bp, Homo sapien
atctgggaaagagttggtagtggtc

SEQ ID NO: 512775 - DNA, 25 bp, Homo sapien
ctatctgggaaagagttggtagtgg

SEQ ID NO: 512776 - DNA, 25 bp, Homo sapien
tatctgggaaagagttggtagtggt

SEQ ID NO: 512777 - DNA, 25 bp, Homo sapien
tcatgctggcactgtgtcgtctttg

SEQ ID NO: 512778 - DNA, 25 bp, Homo sapien
cactgtgtcgtctttggaaattaac

SEQ ID NO: 512779 - DNA, 25 bp, Homo sapien
tggaaattaactgggtaagcatgcc

SEQ ID NO: 512780 - DNA, 25 bp, Homo sapien
ccagtaggcaaacgaaatggctttg

SEQ ID NO: 512781 - DNA, 25 bp, Homo sapien
cagtctgctcgttggtataaggtcc

SEQ ID NO: 512782 - DNA, 25 bp, Homo sapien
tcgaaacgatgaatgggacaaatgc

SEQ ID NO: 512783 - DNA, 25 bp, Homo sapien
gaaacctcaggtgcttcgaaacgat

SEQ ID NO: 512784 - DNA, 25 bp, Homo sapien
tcatggttggtggaacaggccgtaa

SEQ ID NO: 512785 - DNA, 25 bp, Homo sapien
cagaattcagttgcctgtttaccat

SEQ ID NO: 512786 - DNA, 25 bp, Homo sapien
attcagaattcagttgcctgtttac

SEQ ID NO: 512787 - DNA, 25 bp, Homo sapien
tttgcattcagaattcagttgcctg

SEQ ID NO: 512788 - DNA, 25 bp, Homo sapien
cttgatttttgcattcagaattcag

SEQ ID NO: 512789 - DNA, 25 bp, Homo sapien
tcatctttatccagagaaagttata

SEQ ID NO: 512790 - DNA, 25 bp, Homo sapien
ttatccagagaaagttataacagag

SEQ ID NO: 512791 - DNA, 25 bp, Homo sapien
catcttttgtttcgaaacattccag

SEQ ID NO: 512792 - DNA, 25 bp, Homo sapien
ccagtaatgtgcaggagagctttgg

SEQ ID NO: 512793 - DNA, 25 bp, Homo sapien
attaaaatccagacgcttttctgtt

SEQ ID NO: 512794 - DNA, 25 bp, Homo sapien
cctcccactcggttacaatttgttg

SEQ ID NO: 512795 - DNA, 25 bp, Homo sapien
tccttgtgtttcctaagcagttggc

SEQ ID NO: 512796 - DNA, 25 bp, Homo sapien
aagctggtctacaggctttgtcccc

SEQ ID NO: 512797 - DNA, 25 bp, Homo sapien
gcattgctgagccttttctgcacag

SEQ ID NO: 512798 - DNA, 25 bp, Homo sapien
ggctgactgttgcagctcctgttct

SEQ ID NO: 512799 - DNA, 25 bp, Homo sapien
cagggcagtgattgcattgctgagc

SEQ ID NO: 512800 - DNA, 25 bp, Homo sapien
gaaatactgtacaaggatccagggc

SEQ ID NO: 512801 - DNA, 25 bp, Homo sapien
cccaagccatcctaaagatggctgc

SEQ ID NO: 512802 - DNA, 25 bp, Homo sapien
ccaagccatcctaaagatggctgca

SEQ ID NO: 512803 - DNA, 25 bp, Homo sapien
atccccaagccatcctaaagatggc

SEQ ID NO: 512804 - DNA, 25 bp, Homo sapien
tccccaagccatcctaaagatggct

SEQ ID NO: 512805 - DNA, 25 bp, Homo sapien
cctaggttgggccacattcctgaac

SEQ ID NO: 512806 - DNA, 25 bp, Homo sapien
tgtccatgaaagttatcaccctctt

SEQ ID NO: 512807 - DNA, 25 bp, Homo sapien
ttggatcggtcagacccacccatgg

SEQ ID NO: 512808 - DNA, 25 bp, Homo sapien
tgaatatggaattacccttggatcg

SEQ ID NO: 512809 - DNA, 25 bp, Homo sapien
gatgctttgttaaatgaatccataa

SEQ ID NO: 512810 - DNA, 25 bp, Homo sapien
catgctgatccatagtaatatggga

SEQ ID NO: 512811 - DNA, 25 bp, Homo sapien
ccataagaagatactcagaagcttt

SEQ ID NO: 512812 - DNA, 25 bp, Homo sapien
tgatgatgatgctttgttaaatgaa

SEQ ID NO: 512813 - DNA, 25 bp, Homo sapien
ttaggattaggtgaactgtgatgag

SEQ ID NO: 512814 - DNA, 25 bp, Homo sapien
ttggagcgctaggaggccagtgtct

SEQ ID NO: 512815 - DNA, 25 bp, Homo sapien
aagctgcttcagcacttcagatgca

SEQ ID NO: 512816 - DNA, 25 bp, Homo sapien
tccttgattttgaagcgcctgtagg

SEQ ID NO: 512817 - DNA, 25 bp, Homo sapien
tgtgcactgagcatgggtgtgtctc

SEQ ID NO: 512818 - DNA, 25 bp, Homo sapien
tctctgtgtcgttgggcttgcatct

SEQ ID NO: 512819 - DNA, 25 bp, Homo sapien
tctttttcaaggattccacgtgttc

SEQ ID NO: 512820 - DNA, 25 bp, Homo sapien
ttatagagtggtgctttatgacgca

SEQ ID NO: 512821 - DNA, 25 bp, Homo sapien
aattagtgctcgtaaatgctatgag

SEQ ID NO: 512822 - DNA, 25 bp, Homo sapien
tagtgctcgtaaatgctatgagcac

SEQ ID NO: 512823 - DNA, 25 bp, Homo sapien
ctaattagtgctcgtaaatgctatg

SEQ ID NO: 512824 - DNA, 25 bp, Homo sapien
attagtgctcgtaaatgctatgagc

SEQ ID NO: 512825 - DNA, 25 bp, Homo sapien
atgtcttctcagatgcaaaagttgc

SEQ ID NO: 512826 - DNA, 25 bp, Homo sapien
gaaccagtggatccagccagtatcc

SEQ ID NO: 512827 - DNA, 25 bp, Homo sapien
gatgcaaaagttgcaggtggaacca

SEQ ID NO: 512828 - DNA, 25 bp, Homo sapien
caggtggaaccagtggatccagcca

SEQ ID NO: 512829 - DNA, 25 bp, Homo sapien
tacacacatcgccttctgcttggaa

SEQ ID NO: 512830 - DNA, 25 bp, Homo sapien
caaattcgtcttgtcaggcaagatg

SEQ ID NO: 512831 - DNA, 25 bp, Homo sapien
ggaaaagggtacacacatcgccttc

SEQ ID NO: 512832 - DNA, 25 bp, Homo sapien
tgttccattagtaagactgattccg

SEQ ID NO: 512833 - DNA, 25 bp, Homo sapien
aactgagcaccttccccagaagctg

SEQ ID NO: 512834 - DNA, 25 bp, Homo sapien
tgagcaccttccccagaagctgcat

SEQ ID NO: 512835 - DNA, 25 bp, Homo sapien
tccaaaggtaaactgagcaccttcc

SEQ ID NO: 512836 - DNA, 25 bp, Homo sapien
ttccaaaggtaaactgagcaccttc

SEQ ID NO: 512837 - DNA, 25 bp, Homo sapien
agatggtgccgaatgctcagttgcc

SEQ ID NO: 512838 - DNA, 25 bp, Homo sapien
tgtcccctgaggctttgaaacccaa

SEQ ID NO: 512839 - DNA, 25 bp, Homo sapien
tctgtcctgtctggcagcgttggag

SEQ ID NO: 512840 - DNA, 25 bp, Homo sapien
caagaattgattgggttgtcttctg

SEQ ID NO: 512841 - DNA, 25 bp, Homo sapien
ggtcctgcatgcctcggaatgagga

SEQ ID NO: 512842 - DNA, 25 bp, Homo sapien
atgcctcggaatgaggatgcttccc

SEQ ID NO: 512843 - DNA, 25 bp, Homo sapien
tgcatgcctcggaatgaggatgctt

SEQ ID NO: 512844 - DNA, 25 bp, Homo sapien
ccacactttcccatttatccagagg

SEQ ID NO: 512845 - DNA, 25 bp, Homo sapien
ctatccccagcaccgggtaggagtc

SEQ ID NO: 512846 - DNA, 25 bp, Homo sapien
taggagtctcccttaaggttctcgc

SEQ ID NO: 512847 - DNA, 25 bp, Homo sapien
ggttggcttcccacctttgtatgaa

SEQ ID NO: 512848 - DNA, 25 bp, Homo sapien
catcagttcaatagggcggcagcaa

SEQ ID NO: 512849 - DNA, 25 bp, Homo sapien
gatggctggcctttctcgattgcac

SEQ ID NO: 512850 - DNA, 25 bp, Homo sapien
tgatggctggcctttctcgattgca

SEQ ID NO: 512851 - DNA, 25 bp, Homo sapien
gtgatggctggcctttctcgattgc

SEQ ID NO: 512852 - DNA, 25 bp, Homo sapien
tggctggcctttctcgattgcacat

SEQ ID NO: 512853 - DNA, 25 bp, Homo sapien
tcttgccaccttaattccagcaggg

SEQ ID NO: 512854 - DNA, 25 bp, Homo sapien
tgtgtgagtaagttcaaataagttc

SEQ ID NO: 512855 - DNA, 25 bp, Homo sapien
gcaatgtgtgagtaagttcaaataa

SEQ ID NO: 512856 - DNA, 25 bp, Homo sapien
ataagttcttgccaccttaattcca

SEQ ID NO: 512857 - DNA, 25 bp, Homo sapien
tatgagcgtatctggttccgtttca

SEQ ID NO: 512858 - DNA, 25 bp, Homo sapien
accattgtgtcaccccgaggctcaa

SEQ ID NO: 512859 - DNA, 25 bp, Homo sapien
aggctcaagtgggtatgagcgtatc

SEQ ID NO: 512860 - DNA, 25 bp, Homo sapien
ttcaggatgagtgcggcccaccatt

SEQ ID NO: 512861 - DNA, 25 bp, Homo sapien
actcgcagctgtttgggcgctctct

SEQ ID NO: 512862 - DNA, 25 bp, Homo sapien
gctgtttgggcgctctcttgctttg

SEQ ID NO: 512863 - DNA, 25 bp, Homo sapien
cacaggcactcgcagctgtttgggc

SEQ ID NO: 512864 - DNA, 25 bp, Homo sapien
ctctcttgctttgctctggattctc

SEQ ID NO: 512865 - DNA, 25 bp, Homo sapien
tgttcagtgggcttgacaacagatt

SEQ ID NO: 512866 - DNA, 25 bp, Homo sapien
gtgggcttgacaacagattccactt

SEQ ID NO: 512867 - DNA, 25 bp, Homo sapien
tctatgttcagtgggcttgacaaca

SEQ ID NO: 512868 - DNA, 25 bp, Homo sapien
tcagtgggcttgacaacagattcca

SEQ ID NO: 512869 - DNA, 25 bp, Homo sapien
gaattaacggcttccagtgctgcat

SEQ ID NO: 512870 - DNA, 25 bp, Homo sapien
tacgatagagttgtttggaagcccc

SEQ ID NO: 512871 - DNA, 25 bp, Homo sapien
tctctgtcatggagtgaaggtcagc

SEQ ID NO: 512872 - DNA, 25 bp, Homo sapien
tgcatcacagcttgcagcgcactct

SEQ ID NO: 512873 - DNA, 25 bp, Homo sapien
gccagtgtgattctgtctctgtacc

SEQ ID NO: 512874 - DNA, 25 bp, Homo sapien
tcctccctttctaggctcagctggc

SEQ ID NO: 512875 - DNA, 25 bp, Homo sapien
ggaacttgtgcaatcctggagccca

SEQ ID NO: 512876 - DNA, 25 bp, Homo sapien
caagggtttcttaggatcagccagt

SEQ ID NO: 512877 - DNA, 25 bp, Homo sapien
tctcttctctgtagttcccacagtg

SEQ ID NO: 512878 - DNA, 25 bp, Homo sapien
tctaggaactacagtctgctccttt

SEQ ID NO: 512879 - DNA, 25 bp, Homo sapien
catgggctgaagcatttggaaacca

SEQ ID NO: 512880 - DNA, 25 bp, Homo sapien
ctccccagggaatcatggagcctgc

SEQ ID NO: 512881 - DNA, 25 bp, Homo sapien
tgtcctaattcaagtcctggtctgg

SEQ ID NO: 512882 - DNA, 25 bp, Homo sapien
ttcaagcatgttagtgggattcctc

SEQ ID NO: 512883 - DNA, 25 bp, Homo sapien
gattcctctggaacacttcgtgtcc

SEQ ID NO: 512884 - DNA, 25 bp, Homo sapien
aagtaaccagctcaagtgcatccag

SEQ ID NO: 512885 - DNA, 25 bp, Homo sapien
aaagaaagggtgaggagctccctca

SEQ ID NO: 512886 - DNA, 25 bp, Homo sapien
aagaaagggtgaggagctccctcat

SEQ ID NO: 512887 - DNA, 25 bp, Homo sapien
caggggaaagaaagggtgaggagct

SEQ ID NO: 512888 - DNA, 25 bp, Homo sapien
gaaagaaagggtgaggagctccctc

SEQ ID NO: 512889 - DNA, 25 bp, Homo sapien
acttctgtgtcttgtaaggctctgc

SEQ ID NO: 512890 - DNA, 25 bp, Homo sapien
aaagtacttctgtgtcttgtaaggc

SEQ ID NO: 512891 - DNA, 25 bp, Homo sapien
tagtctgcgccaaagtacttctgtg

SEQ ID NO: 512892 - DNA, 25 bp, Homo sapien
ctaggacatagtctgcgccaaagta

SEQ ID NO: 512893 - DNA, 25 bp, Homo sapien
caacaaaactccttcttacatctct

SEQ ID NO: 512894 - DNA, 25 bp, Homo sapien
ctgcaaaagtttagttgtgggcaca

SEQ ID NO: 512895 - DNA, 25 bp, Homo sapien
gcactctgcaccagatgctgttagg

SEQ ID NO: 512896 - DNA, 25 bp, Homo sapien
aagtttagttgtgggcacagagcac

SEQ ID NO: 512897 - DNA, 25 bp, Homo sapien
ggtagctgcccatgacaacagtgca

SEQ ID NO: 512898 - DNA, 25 bp, Homo sapien
atgacaacagtgcagtggtagggac

SEQ ID NO: 512899 - DNA, 25 bp, Homo sapien
ccatgacaacagtgcagtggtaggg

SEQ ID NO: 512900 - DNA, 25 bp, Homo sapien
caggagccagctcaggtagctgccc

SEQ ID NO: 512901 - DNA, 25 bp, Homo sapien
aggccggcgcgtcacggaatcaggg

SEQ ID NO: 512902 - DNA, 25 bp, Homo sapien
tggccatagggtcccgcaagggcta

SEQ ID NO: 512903 - DNA, 25 bp, Homo sapien
agaaactgtgcaaagcatcgcgcgc

SEQ ID NO: 512904 - DNA, 25 bp, Homo sapien
cacggaatcagggacgtcacagggc

SEQ ID NO: 512905 - DNA, 25 bp, Homo sapien
aaaatgaacacaatacacttggata

SEQ ID NO: 512906 - DNA, 25 bp, Homo sapien
aatgaacacaatacacttggatact

SEQ ID NO: 512907 - DNA, 25 bp, Homo sapien
aaatgaacacaatacacttggatac

SEQ ID NO: 512908 - DNA, 25 bp, Homo sapien
tctcccttggcatccacctcggtca

SEQ ID NO: 512909 - DNA, 25 bp, Homo sapien
tggcatccacctcggtcacaaccat

SEQ ID NO: 512910 - DNA, 25 bp, Homo sapien
cctcggtcacaaccatcagcgtcat

SEQ ID NO: 512911 - DNA, 25 bp, Homo sapien
atccacctcggtcacaaccatcagc

SEQ ID NO: 512912 - DNA, 25 bp, Homo sapien
tattttcacataggattcatttaag

SEQ ID NO: 512913 - DNA, 25 bp, Homo sapien
aatgtggtatcagaatcggtccttt

SEQ ID NO: 512914 - DNA, 25 bp, Homo sapien
cacataggattcatttaaggaatac

SEQ ID NO: 512915 - DNA, 25 bp, Homo sapien
ctcatggaaacagccaatgtggtat

SEQ ID NO: 512916 - DNA, 25 bp, Homo sapien
gcggtgctgttggtgcattcagaaa

SEQ ID NO: 512917 - DNA, 25 bp, Homo sapien
ccacttcatcgtggcgctgtttgtc

SEQ ID NO: 512918 - DNA, 25 bp, Homo sapien
attcctggtgcagcctgccacttca

SEQ ID NO: 512919 - DNA, 25 bp, Homo sapien
gaactctaggagatctttggtaggg

SEQ ID NO: 512920 - DNA, 25 bp, Homo sapien
tggcagtgctttctaatccacaagc

SEQ ID NO: 512921 - DNA, 25 bp, Homo sapien
ctttgaccccgtttcaattgctgca

SEQ ID NO: 512922 - DNA, 25 bp, Homo sapien
ctctgttaaaactgtggcagtgctt

SEQ ID NO: 512923 - DNA, 25 bp, Homo sapien
ccctttgaccccgtttcaattgctg

SEQ ID NO: 512924 - DNA, 25 bp, Homo sapien
ctgtaggcacctgcattgcatattc

SEQ ID NO: 512925 - DNA, 25 bp, Homo sapien
tactgtaggcacctgcattgcatat

SEQ ID NO: 512926 - DNA, 25 bp, Homo sapien
ttaaattactgtaggcacctgcatt

SEQ ID NO: 512927 - DNA, 25 bp, Homo sapien
aattactgtaggcacctgcattgca

SEQ ID NO: 512928 - DNA, 25 bp, Homo sapien
ctccacatcttttagtggcttccat

SEQ ID NO: 512929 - DNA, 25 bp, Homo sapien
tgtgcatgaggacagagggccacca

SEQ ID NO: 512930 - DNA, 25 bp, Homo sapien
tgccctcctccacatcttttagtgg

SEQ ID NO: 512931 - DNA, 25 bp, Homo sapien
caccagcagcttcaagagctgccct

SEQ ID NO: 512932 - DNA, 25 bp, Homo sapien
cagagtgctttatagccaagagctt

SEQ ID NO: 512933 - DNA, 25 bp, Homo sapien
ttgtcaatcattgctgtcatggagc

SEQ ID NO: 512934 - DNA, 25 bp, Homo sapien
caaggttagggtttgtcttggtcat

SEQ ID NO: 512935 - DNA, 25 bp, Homo sapien
gagaggatttggtcatgccttggat

SEQ ID NO: 512936 - DNA, 25 bp, Homo sapien
gctggaatgatgttacccctgagac

SEQ ID NO: 512937 - DNA, 25 bp, Homo sapien
tggctggaatgatgttacccctgag

SEQ ID NO: 512938 - DNA, 25 bp, Homo sapien
ggctggaatgatgttacccctgaga

SEQ ID NO: 512939 - DNA, 25 bp, Homo sapien
ctggaatgatgttacccctgagaca

SEQ ID NO: 512940 - DNA, 25 bp, Homo sapien
cttcacatggccatggcaatggtgg

SEQ ID NO: 512941 - DNA, 25 bp, Homo sapien
gctgccttcacatggccatggcaat

SEQ ID NO: 512942 - DNA, 25 bp, Homo sapien
ccttcacatggccatggcaatggtg

SEQ ID NO: 512943 - DNA, 25 bp, Homo sapien
tgccttcacatggccatggcaatgg

SEQ ID NO: 512944 - DNA, 25 bp, Homo sapien
gagggctgctacagatgtcatttaa

SEQ ID NO: 512945 - DNA, 25 bp, Homo sapien
cagtcgtggttgtcagcgttgagaa

SEQ ID NO: 512946 - DNA, 25 bp, Homo sapien
ttcacggatgagaaactgcgctgag

SEQ ID NO: 512947 - DNA, 25 bp, Homo sapien
taacttttcttcatcaacatagaga

SEQ ID NO: 512948 - DNA, 25 bp, Homo sapien
gctgacaaaaatcggtgtcgatgtg

SEQ ID NO: 512949 - DNA, 25 bp, Homo sapien
tgctgacaaaaatcggtgtcgatgt

SEQ ID NO: 512950 - DNA, 25 bp, Homo sapien
ctgctgacaaaaatcggtgtcgatg

SEQ ID NO: 512951 - DNA, 25 bp, Homo sapien
tgacaaaaatcggtgtcgatgtgca

SEQ ID NO: 512952 - DNA, 25 bp, Homo sapien
tggactctctccgatagcgctaagc

SEQ ID NO: 512953 - DNA, 25 bp, Homo sapien
atgaaactggactctctccgatagc

SEQ ID NO: 512954 - DNA, 25 bp, Homo sapien
aactggactctctccgatagcgcta

SEQ ID NO: 512955 - DNA, 25 bp, Homo sapien
gactctctccgatagcgctaagcat

SEQ ID NO: 512956 - DNA, 25 bp, Homo sapien
tgcaatagccattagacaacgggtg

SEQ ID NO: 512957 - DNA, 25 bp, Homo sapien
aagcagcctgtgtagatatctgtca

SEQ ID NO: 512958 - DNA, 25 bp, Homo sapien
tctgaagcgttcataggcagtaaca

SEQ ID NO: 512959 - DNA, 25 bp, Homo sapien
cttatacgtgggctaaaaattgctt

SEQ ID NO: 512960 - DNA, 25 bp, Homo sapien
aagcagttgtgcagtcagacaggca

SEQ ID NO: 512961 - DNA, 25 bp, Homo sapien
tttgccgtgtttgtgaaggagagcc

SEQ ID NO: 512962 - DNA, 25 bp, Homo sapien
gattctgacatcgtggcaactgggt

SEQ ID NO: 512963 - DNA, 25 bp, Homo sapien
ggcaataatgaaagcagaccccaga

SEQ ID NO: 512964 - DNA, 25 bp, Homo sapien
ctgaagtgcaaagatgggctgggga

SEQ ID NO: 512965 - DNA, 25 bp, Homo sapien
cacatcttggctatttcgaataagg

SEQ ID NO: 512966 - DNA, 25 bp, Homo sapien
tactacaggtccagaaaaatgtgca

SEQ ID NO: 512967 - DNA, 25 bp, Homo sapien
tggcaaccaccatgctactatgtct

SEQ ID NO: 512968 - DNA, 25 bp, Homo sapien
ctactcatagagtggaacatacagt

SEQ ID NO: 512969 - DNA, 25 bp, Homo sapien
tgggccggggttgccaagccttcca

SEQ ID NO: 512970 - DNA, 25 bp, Homo sapien
gccaagccttccaaagccgctgctt

SEQ ID NO: 512971 - DNA, 25 bp, Homo sapien
tatgagctaaatgattttcatggtc

SEQ ID NO: 512972 - DNA, 25 bp, Homo sapien
ttctgtaattcttatatgagctaaa

SEQ ID NO: 512973 - DNA, 25 bp, Homo sapien
ggaccacgtgtacacagcttcgtga

SEQ ID NO: 512974 - DNA, 25 bp, Homo sapien
gtctgcagccgggaccacgtgtaca

SEQ ID NO: 512975 - DNA, 25 bp, Homo sapien
ttccgaagtctgcagccgggaccac

SEQ ID NO: 512976 - DNA, 25 bp, Homo sapien
cttcgtgaccattggcctcagaaca

SEQ ID NO: 512977 - DNA, 25 bp, Homo sapien
ccatagggtccctcatgggccaggc

SEQ ID NO: 512978 - DNA, 25 bp, Homo sapien
tggccatagggtccctcatgggcca

SEQ ID NO: 512979 - DNA, 25 bp, Homo sapien
cagtgcctcgccaaatcggggacat

SEQ ID NO: 512980 - DNA, 25 bp, Homo sapien
ccagtgcctcgccaaatcggggaca

SEQ ID NO: 512981 - DNA, 25 bp, Homo sapien
taagctgcaccaagtgacctgagcc

SEQ ID NO: 512982 - DNA, 25 bp, Homo sapien
aagctgcaccaagtgacctgagccc

SEQ ID NO: 512983 - DNA, 25 bp, Homo sapien
agctgcaccaagtgacctgagccct

SEQ ID NO: 512984 - DNA, 25 bp, Homo sapien
ttaagctgcaccaagtgacctgagc

SEQ ID NO: 512985 - DNA, 25 bp, Homo sapien
ctgtgttccacctttggtcactgac

SEQ ID NO: 512986 - DNA, 25 bp, Homo sapien
tgtgttccacctttggtcactgact

SEQ ID NO: 512987 - DNA, 25 bp, Homo sapien
cctctagctttcgtgtaatttctgc

SEQ ID NO: 512988 - DNA, 25 bp, Homo sapien
ttgacctctagctttcgtgtaattt

SEQ ID NO: 512989 - DNA, 25 bp, Homo sapien
tcttccatgcaggaacaggtgctat

SEQ ID NO: 512990 - DNA, 25 bp, Homo sapien
tgacagtgataccaataccatggct

SEQ ID NO: 512991 - DNA, 25 bp, Homo sapien
ggctaatggttcagttctgggcctc

SEQ ID NO: 512992 - DNA, 25 bp, Homo sapien
gagtgaggccacttgatagattctg

SEQ ID NO: 512993 - DNA, 25 bp, Homo sapien
gaaatgagggagatgcaatagctgc

SEQ ID NO: 512994 - DNA, 25 bp, Homo sapien
aaacaacaacccagaaactgataag

SEQ ID NO: 512995 - DNA, 25 bp, Homo sapien
aacaacaacccagaaactgataagc

SEQ ID NO: 512996 - DNA, 25 bp, Homo sapien
gtttcctgaagcccctctgtagacc

SEQ ID NO: 512997 - DNA, 25 bp, Homo sapien
cagaaaaatacttctttgtgcatgt

SEQ ID NO: 512998 - DNA, 25 bp, Homo sapien
tacttctttgtgcatgtggtttctg

SEQ ID NO: 512999 - DNA, 25 bp, Homo sapien
tttctggtttcctgaagcccctctg

SEQ ID NO: 513000 - DNA, 25 bp, Homo sapien
cttcaggttttgattgcaagtcctt

SEQ ID NO: 513001 - DNA, 25 bp, Homo sapien
aactgctgaagtcaatgtcagagaa

SEQ ID NO: 513002 - DNA, 25 bp, Homo sapien
ctagggtgaagaactgctgaagtca

SEQ ID NO: 513003 - DNA, 25 bp, Homo sapien
tcaatgtcagagaaaacctcttcag

SEQ ID NO: 513004 - DNA, 25 bp, Homo sapien
gatgctgtagaaaccatctgcaagt

SEQ ID NO: 513005 - DNA, 25 bp, Homo sapien
caaaagtcaagtatgttgactccca

SEQ ID NO: 513006 - DNA, 25 bp, Homo sapien
cagtgtgaaatcgaatatctgatcc

SEQ ID NO: 513007 - DNA, 25 bp, Homo sapien
gctgttgtaatgatgatggaaagac

SEQ ID NO: 513008 - DNA, 25 bp, Homo sapien
tgaatcacagttgtaataccgacac

SEQ ID NO: 513009 - DNA, 25 bp, Homo sapien
gaatcacagttgtaataccgacaca

SEQ ID NO: 513010 - DNA, 25 bp, Homo sapien
aatcacagttgtaataccgacacat

SEQ ID NO: 513011 - DNA, 25 bp, Homo sapien
ggctacagcataacttatccacagg

SEQ ID NO: 513012 - DNA, 25 bp, Homo sapien
tgtttggatggtaccagcaccctgg

SEQ ID NO: 513013 - DNA, 25 bp, Homo sapien
ccacaggtaatttccagtgtagaga

SEQ ID NO: 513014 - DNA, 25 bp, Homo sapien
tgtagagaacccttagccaggttgg

SEQ ID NO: 513015 - DNA, 25 bp, Homo sapien
catggctgaatttgcatccgagatc

SEQ ID NO: 513016 - DNA, 25 bp, Homo sapien
catttcatcactcttgcatggctga

SEQ ID NO: 513017 - DNA, 25 bp, Homo sapien
catctttggaaataatgcaagcatt

SEQ ID NO: 513018 - DNA, 25 bp, Homo sapien
tcttggagcatttcacaggagctac

SEQ ID NO: 513019 - DNA, 25 bp, Homo sapien
catttgcttgaattgttcatctggt

SEQ ID NO: 513020 - DNA, 25 bp, Homo sapien
tgccacttgcacaaatcatttgctt

SEQ ID NO: 513021 - DNA, 25 bp, Homo sapien
gatatttccataaggcttgctatag

SEQ ID NO: 513022 - DNA, 25 bp, Homo sapien
ctcataaaatatggtgccatcttgg

SEQ ID NO: 513023 - DNA, 25 bp, Homo sapien
ttagtgccggcaaatccctgagggc

SEQ ID NO: 513024 - DNA, 25 bp, Homo sapien
aggcacaaatgggaactccccctct

SEQ ID NO: 513025 - DNA, 25 bp, Homo sapien
tggaggtggagaggcacaaatggga

SEQ ID NO: 513026 - DNA, 25 bp, Homo sapien
agccaagcacagtttagtgccggca

SEQ ID NO: 513027 - DNA, 25 bp, Homo sapien
gcatctggtggcatctgattgctat

SEQ ID NO: 513028 - DNA, 25 bp, Homo sapien
gagcatgagcacacgctccctgtgt

SEQ ID NO: 513029 - DNA, 25 bp, Homo sapien
ccctgtgtatggaagctcgtgtggc

SEQ ID NO: 513030 - DNA, 25 bp, Homo sapien
ttgctattgaagctggcacggccct

SEQ ID NO: 513031 - DNA, 25 bp, Homo sapien
tgctgttaagatatgctcactttct

SEQ ID NO: 513032 - DNA, 25 bp, Homo sapien
ttcttggtgctgttaagatatgctc

SEQ ID NO: 513033 - DNA, 25 bp, Homo sapien
ttcgcatatccccttgggctgagct

SEQ ID NO: 513034 - DNA, 25 bp, Homo sapien
tggtgctgttaagatatgctcactt

SEQ ID NO: 513035 - DNA, 25 bp, Homo sapien
acacagtcacatgaaatatgaactt

SEQ ID NO: 513036 - DNA, 25 bp, Homo sapien
tctggggattataggccagacccct

SEQ ID NO: 513037 - DNA, 25 bp, Homo sapien
ttctggggattataggccagacccc

SEQ ID NO: 513038 - DNA, 25 bp, Homo sapien
ctggggattataggccagacccctc

SEQ ID NO: 513039 - DNA, 25 bp, Homo sapien
cctccttacataggagcttggtcat

SEQ ID NO: 513040 - DNA, 25 bp, Homo sapien
taaggaggaactgagtatcaccctc

SEQ ID NO: 513041 - DNA, 25 bp, Homo sapien
ggaactgagtatcaccctccttaca

SEQ ID NO: 513042 - DNA, 25 bp, Homo sapien
ccctccttacataggagcttggtca

SEQ ID NO: 513043 - DNA, 25 bp, Homo sapien
cggcagtaggattggttggcaagtg

SEQ ID NO: 513044 - DNA, 25 bp, Homo sapien
atgacggcagtaggattggttggca

SEQ ID NO: 513045 - DNA, 25 bp, Homo sapien
cagtaggattggttggcaagtgcaa

SEQ ID NO: 513046 - DNA, 25 bp, Homo sapien
gacggcagtaggattggttggcaag

SEQ ID NO: 513047 - DNA, 25 bp, Homo sapien
agttataattaacacgctgtctgcc

SEQ ID NO: 513048 - DNA, 25 bp, Homo sapien
caggagtttacttccagcgccaaaa

SEQ ID NO: 513049 - DNA, 25 bp, Homo sapien
agtgtgacagcaccccgcaggagtt

SEQ ID NO: 513050 - DNA, 25 bp, Homo sapien
ttcaacctttgggaatgaagaacag

SEQ ID NO: 513051 - DNA, 25 bp, Homo sapien
tttgtgccttggagaggctccatgg

SEQ ID NO: 513052 - DNA, 25 bp, Homo sapien
ctggtaagactttgtgccttggaga

SEQ ID NO: 513053 - DNA, 25 bp, Homo sapien
aagactttgtgccttggagaggctc

SEQ ID NO: 513054 - DNA, 25 bp, Homo sapien
gaggctccatggtggagtgcccttt

SEQ ID NO: 513055 - DNA, 25 bp, Homo sapien
gcagggcactccataatgcctgtcc

SEQ ID NO: 513056 - DNA, 25 bp, Homo sapien
aaaatggttaactcgcattctgccc

SEQ ID NO: 513057 - DNA, 25 bp, Homo sapien
cacttgacttgggagatggattctg

SEQ ID NO: 513058 - DNA, 25 bp, Homo sapien
tcactagtgagaatgtgagaacagc

SEQ ID NO: 513059 - DNA, 25 bp, Homo sapien
tgaactactaaccttgtaatccacc

SEQ ID NO: 513060 - DNA, 25 bp, Homo sapien
gcacccaccactgcacccgggtaat

SEQ ID NO: 513061 - DNA, 25 bp, Homo sapien
ggcacccaccactgcacccgggtaa

SEQ ID NO: 513062 - DNA, 25 bp, Homo sapien
tcttgaactactaaccttgtaatcc

SEQ ID NO: 513063 - DNA, 25 bp, Homo sapien
ttacactggagtgattatcatcact

SEQ ID NO: 513064 - DNA, 25 bp, Homo sapien
tgcaatcctcgtgttccctgtgtgg

SEQ ID NO: 513065 - DNA, 25 bp, Homo sapien
gcgttgtggccacctttgcttttcc

SEQ ID NO: 513066 - DNA, 25 bp, Homo sapien
tcttcttgctttgctccgtctgcgt

SEQ ID NO: 513067 - DNA, 25 bp, Homo sapien
caagttccacgaaggcttagctgca

SEQ ID NO: 513068 - DNA, 25 bp, Homo sapien
taaaaggctctctaggtcacctctg

SEQ ID NO: 513069 - DNA, 25 bp, Homo sapien
caaacgtgacgtgaaggtgagcact

SEQ ID NO: 513070 - DNA, 25 bp, Homo sapien
tgctggacacaatatgaggagcgtc

SEQ ID NO: 513071 - DNA, 25 bp, Homo sapien
tcatcttcgtaagctcaggagggtg

SEQ ID NO: 513072 - DNA, 25 bp, Homo sapien
catcttcgtaagctcaggagggtgt

SEQ ID NO: 513073 - DNA, 25 bp, Homo sapien
cccaaggtggctcttcaactgggct

SEQ ID NO: 513074 - DNA, 25 bp, Homo sapien
ccaaggtggctcttcaactgggctg

SEQ ID NO: 513075 - DNA, 25 bp, Homo sapien
gacgtagacgactttgcagccatcc

SEQ ID NO: 513076 - DNA, 25 bp, Homo sapien
cctcagaaaagtccggcccagtgat

SEQ ID NO: 513077 - DNA, 25 bp, Homo sapien
cagcaatgcagtagtcgggacgttc

SEQ ID NO: 513078 - DNA, 25 bp, Homo sapien
tctctctctggatacgggcatagtc

SEQ ID NO: 513079 - DNA, 25 bp, Homo sapien
tttgtgctgtagaaggtcaccagct

SEQ ID NO: 513080 - DNA, 25 bp, Homo sapien
ttccattttcaagggccgtgtcctc

SEQ ID NO: 513081 - DNA, 25 bp, Homo sapien
ctttgcacgcaacgcctagcctttg

SEQ ID NO: 513082 - DNA, 25 bp, Homo sapien
tacaatcctctggatagggactgga

SEQ ID NO: 513083 - DNA, 25 bp, Homo sapien
caggatacccaaagcagaggactgc

SEQ ID NO: 513084 - DNA, 25 bp, Homo sapien
taataagaagccgttgtcacatgtg

SEQ ID NO: 513085 - DNA, 25 bp, Homo sapien
aagagggccatctgcggctttgatg

SEQ ID NO: 513086 - DNA, 25 bp, Homo sapien
gactgcggcagctcgaaatgggttt

SEQ ID NO: 513087 - DNA, 25 bp, Homo sapien
cagttggttaaacctggtctgtagt

SEQ ID NO: 513088 - DNA, 25 bp, Homo sapien
cgtgcctttaagatattctgggata

SEQ ID NO: 513089 - DNA, 25 bp, Homo sapien
cctggtgggcagttggttaaacctg

SEQ ID NO: 513090 - DNA, 25 bp, Homo sapien
ggtctgtagtaaaagtgcgtgcctt

SEQ ID NO: 513091 - DNA, 25 bp, Homo sapien
aaggatcacataggacctcagcagg

SEQ ID NO: 513092 - DNA, 25 bp, Homo sapien
gaaggtgaagagtctaatttgccta

SEQ ID NO: 513093 - DNA, 25 bp, Homo sapien
gaggaacgtggcttgtgaaatgggc

SEQ ID NO: 513094 - DNA, 25 bp, Homo sapien
gcaggaccactctgtggaaggtgaa

SEQ ID NO: 513095 - DNA, 25 bp, Homo sapien
gctgagagctgaacaatccgttggg

SEQ ID NO: 513096 - DNA, 25 bp, Homo sapien
ccctgcggttggagaaggcctctaa

SEQ ID NO: 513097 - DNA, 25 bp, Homo sapien
cagaggtaacatgatgcggattgca

SEQ ID NO: 513098 - DNA, 25 bp, Homo sapien
tctaaagaagtgaccactgagctga

SEQ ID NO: 513099 - DNA, 25 bp, Homo sapien
taatgcccagaaggagaagtcaaat

SEQ ID NO: 513100 - DNA, 25 bp, Homo sapien
cccagggcattgcagtgcctgacgg

SEQ ID NO: 513101 - DNA, 25 bp, Homo sapien
gaagtcaaataggtctgattcttta

SEQ ID NO: 513102 - DNA, 25 bp, Homo sapien
gggaattccactggagtaaggagct

SEQ ID NO: 513103 - DNA, 25 bp, Homo sapien
catgccctgtctggacggctcttgc

SEQ ID NO: 513104 - DNA, 25 bp, Homo sapien
tcatgccctgtctggacggctcttg

SEQ ID NO: 513105 - DNA, 25 bp, Homo sapien
atgccctgtctggacggctcttgcc

SEQ ID NO: 513106 - DNA, 25 bp, Homo sapien
gagcacatcttgtcgctcccgctcc

SEQ ID NO: 513107 - DNA, 25 bp, Homo sapien
tgagcacatcttgtcgctcccgctc

SEQ ID NO: 513108 - DNA, 25 bp, Homo sapien
acttctagggtgctaataagccagt

SEQ ID NO: 513109 - DNA, 25 bp, Homo sapien
cttctagggtgctaataagccagta

SEQ ID NO: 513110 - DNA, 25 bp, Homo sapien
tacttctagggtgctaataagccag

SEQ ID NO: 513111 - DNA, 25 bp, Homo sapien
aatacttctagggtgctaataagcc

SEQ ID NO: 513112 - DNA, 25 bp, Homo sapien
tttcagcccaggtttgagctcaagg

SEQ ID NO: 513113 - DNA, 25 bp, Homo sapien
ttcagcccaggtttgagctcaaggt

SEQ ID NO: 513114 - DNA, 25 bp, Homo sapien
ctttcagcccaggtttgagctcaag

SEQ ID NO: 513115 - DNA, 25 bp, Homo sapien
gctttcagcccaggtttgagctcaa

SEQ ID NO: 513116 - DNA, 25 bp, Homo sapien
caccttgaatgaaggaggtcccctt

SEQ ID NO: 513117 - DNA, 25 bp, Homo sapien
gctgctgcaagccttataactgcct

SEQ ID NO: 513118 - DNA, 25 bp, Homo sapien
cagcctgccgggatgggccattgct

SEQ ID NO: 513119 - DNA, 25 bp, Homo sapien
tcggcttaggagttgcccgctgaca

SEQ ID NO: 513120 - DNA, 25 bp, Homo sapien
ggctccctttactcgttccaatgtg

SEQ ID NO: 513121 - DNA, 25 bp, Homo sapien
ctttgttggtgaacaggaggctccc

SEQ ID NO: 513122 - DNA, 25 bp, Homo sapien
ttgttggtgaacaggaggctccctt

SEQ ID NO: 513123 - DNA, 25 bp, Homo sapien
gaggctccctttactcgttccaatg

SEQ ID NO: 513124 - DNA, 25 bp, Homo sapien
taccctgtcgtgaaatactctgtga

SEQ ID NO: 513125 - DNA, 25 bp, Homo sapien
gcactgatctatctgggtcccctct

SEQ ID NO: 513126 - DNA, 25 bp, Homo sapien
tcttataaaacgaggtgctgtctgc

SEQ ID NO: 513127 - DNA, 25 bp, Homo sapien
tctgcaagatgcagatgttccatgg

SEQ ID NO: 513128 - DNA, 25 bp, Homo sapien
agcccaggggttgacgccagatgta

SEQ ID NO: 513129 - DNA, 25 bp, Homo sapien
gaaagctgaggtccatgggagccat

SEQ ID NO: 513130 - DNA, 25 bp, Homo sapien
ggttgacgccagatgtaggcttctt

SEQ ID NO: 513131 - DNA, 25 bp, Homo sapien
tccaacagtcggctaggaaaggcag

SEQ ID NO: 513132 - DNA, 25 bp, Homo sapien
gattggctgccctcccgtgcatgca

SEQ ID NO: 513133 - DNA, 25 bp, Homo sapien
tgggagccatcctcctcgatgactc

SEQ ID NO: 513134 - DNA, 25 bp, Homo sapien
catgggagccatcctcctcgatgac

SEQ ID NO: 513135 - DNA, 25 bp, Homo sapien
gccatgggtcccatgtgattggctg

SEQ ID NO: 513136 - DNA, 25 bp, Homo sapien
cacactggaagataatctccaatag

SEQ ID NO: 513137 - DNA, 25 bp, Homo sapien
ccttcccatttgtgacatctctggt

SEQ ID NO: 513138 - DNA, 25 bp, Homo sapien
gccctctaccagagacttgacttgt

SEQ ID NO: 513139 - DNA, 25 bp, Homo sapien
ctctggtggtatcacgactgtatct

SEQ ID NO: 513140 - DNA, 25 bp, Homo sapien
ttgtgacagcctctgttctcggtgt

SEQ ID NO: 513141 - DNA, 25 bp, Homo sapien
tgctggacaaagctgcctcctgtgc

SEQ ID NO: 513142 - DNA, 25 bp, Homo sapien
gtccccagtactgctggacaaagct

SEQ ID NO: 513143 - DNA, 25 bp, Homo sapien
tgtgcctgtacccctttcagagctt

SEQ ID NO: 513144 - DNA, 25 bp, Homo sapien
gaatttgttagagcggccacaggag

SEQ ID NO: 513145 - DNA, 25 bp, Homo sapien
cacaggagactcctagagaggtcac

SEQ ID NO: 513146 - DNA, 25 bp, Homo sapien
tttcccagtgaagtaggctccaagg

SEQ ID NO: 513147 - DNA, 25 bp, Homo sapien
ttgagcctagtgagaccagttcagg

SEQ ID NO: 513148 - DNA, 25 bp, Homo sapien
catgtagtgtattatatgaaccggt

SEQ ID NO: 513149 - DNA, 25 bp, Homo sapien
tggatggcccccatgtagtgtatta

SEQ ID NO: 513150 - DNA, 25 bp, Homo sapien
cagggagctattatctggcctttcc

SEQ ID NO: 513151 - DNA, 25 bp, Homo sapien
gaaccggtgccgtggagatctgaaa

SEQ ID NO: 513152 - DNA, 25 bp, Homo sapien
agaaatgggctctctgcaaaaccat

SEQ ID NO: 513153 - DNA, 25 bp, Homo sapien
gaagaaatgggctctctgcaaaacc

SEQ ID NO: 513154 - DNA, 25 bp, Homo sapien
aatgggctctctgcaaaaccatttc

SEQ ID NO: 513155 - DNA, 25 bp, Homo sapien
caaaaccatttcctattaaagccat

SEQ ID NO: 513156 - DNA, 25 bp, Homo sapien
gaggatagcaactgtccttgcccac

SEQ ID NO: 513157 - DNA, 25 bp, Homo sapien
aatgaggatagcaactgtccttgcc

SEQ ID NO: 513158 - DNA, 25 bp, Homo sapien
tacaaaaatgaggatagcaactgtc

SEQ ID NO: 513159 - DNA, 25 bp, Homo sapien
ctatctgaacacagatacaaaaatg

SEQ ID NO: 513160 - DNA, 25 bp, Homo sapien
cctagtaggcttactgtgggtaacg

SEQ ID NO: 513161 - DNA, 25 bp, Homo sapien
tcccttttggtcaccaggcccgaga

SEQ ID NO: 513162 - DNA, 25 bp, Homo sapien
gaagcactcgcagatgccacctgtg

SEQ ID NO: 513163 - DNA, 25 bp, Homo sapien
tttcacagcgccagctcccttttgg

SEQ ID NO: 513164 - DNA, 25 bp, Homo sapien
cgggtttggacaaagacatttgcca

SEQ ID NO: 513165 - DNA, 25 bp, Homo sapien
tcctgtgacctaacgggtttggaca

SEQ ID NO: 513166 - DNA, 25 bp, Homo sapien
ttgcggatgttcctgtgacctaacg

SEQ ID NO: 513167 - DNA, 25 bp, Homo sapien
tggacaaagacatttgccaccaggg

SEQ ID NO: 513168 - DNA, 25 bp, Homo sapien
ggcagctggattagttatatttcac

SEQ ID NO: 513169 - DNA, 25 bp, Homo sapien
gattctttatctcccacccataatg

SEQ ID NO: 513170 - DNA, 25 bp, Homo sapien
acccataatgctgccattcctgtca

SEQ ID NO: 513171 - DNA, 25 bp, Homo sapien
tatatttcacctggagtccatcgag

SEQ ID NO: 513172 - DNA, 25 bp, Homo sapien
catctgcaagggcactgaccgtctt

SEQ ID NO: 513173 - DNA, 25 bp, Homo sapien
cttttcatgttcttggccgtttgtg

SEQ ID NO: 513174 - DNA, 25 bp, Homo sapien
ggccgtttgtgtcgcctctcagtga

SEQ ID NO: 513175 - DNA, 25 bp, Homo sapien
tcatctttatcagccttgcaggtga

SEQ ID NO: 513176 - DNA, 25 bp, Homo sapien
ctgtgctctgaagcttggtgcattc

SEQ ID NO: 513177 - DNA, 25 bp, Homo sapien
gtgctctgaagcttggtgcattcca

SEQ ID NO: 513178 - DNA, 25 bp, Homo sapien
tgctctgaagcttggtgcattccat

SEQ ID NO: 513179 - DNA, 25 bp, Homo sapien
tgtgctctgaagcttggtgcattcc

SEQ ID NO: 513180 - DNA, 25 bp, Homo sapien
catgcagcggaaaccacattctctc

SEQ ID NO: 513181 - DNA, 25 bp, Homo sapien
tgggggcccttgtctctcagcacca

SEQ ID NO: 513182 - DNA, 25 bp, Homo sapien
ggagatggcgcctctgtcaacacct

SEQ ID NO: 513183 - DNA, 25 bp, Homo sapien
taatcaaatagaaagagatccctgg

SEQ ID NO: 513184 - DNA, 25 bp, Homo sapien
tactgccgtgttgacagacacctcc

SEQ ID NO: 513185 - DNA, 25 bp, Homo sapien
gttttccatagaacgaggactactg

SEQ ID NO: 513186 - DNA, 25 bp, Homo sapien
gtctgagagggtggtcttccaaccc

SEQ ID NO: 513187 - DNA, 25 bp, Homo sapien
cagctgcgggaatggagtcgtgtca

SEQ ID NO: 513188 - DNA, 25 bp, Homo sapien
ggaggaggacagcccagtggtggtc

SEQ ID NO: 513189 - DNA, 25 bp, Homo sapien
ccagtggtggtctaaggggcctcac

SEQ ID NO: 513190 - DNA, 25 bp, Homo sapien
ggacagcccagtggtggtctaaggg

SEQ ID NO: 513191 - DNA, 25 bp, Homo sapien
gaggacagcccagtggtggtctaag

SEQ ID NO: 513192 - DNA, 25 bp, Homo sapien
ttggtgatcttcaatgcatagaaag

SEQ ID NO: 513193 - DNA, 25 bp, Homo sapien
ccataatggtcgagcacttttatct

SEQ ID NO: 513194 - DNA, 25 bp, Homo sapien
tcagccagcccgagtttgccatagg

SEQ ID NO: 513195 - DNA, 25 bp, Homo sapien
tttgccataggccataatggtcgag

SEQ ID NO: 513196 - DNA, 25 bp, Homo sapien
aggctgggaattcttattggctgct

SEQ ID NO: 513197 - DNA, 25 bp, Homo sapien
ggctgggaattcttattggctgctt

SEQ ID NO: 513198 - DNA, 25 bp, Homo sapien
caggctgggaattcttattggctgc

SEQ ID NO: 513199 - DNA, 25 bp, Homo sapien
gggaattcttattggctgcttcata

SEQ ID NO: 513200 - DNA, 25 bp, Homo sapien
taggagaagacgttatatggattaa

SEQ ID NO: 513201 - DNA, 25 bp, Homo sapien
agaaccataggagaagacgttatat

SEQ ID NO: 513202 - DNA, 25 bp, Homo sapien
ggagaagacgttatatggattaata

SEQ ID NO: 513203 - DNA, 25 bp, Homo sapien
ccataggagaagacgttatatggat

SEQ ID NO: 513204 - DNA, 25 bp, Homo sapien
tgccactgggaaacagaccacctcg

SEQ ID NO: 513205 - DNA, 25 bp, Homo sapien
ttcttttcctttgccgtcatcgctc

SEQ ID NO: 513206 - DNA, 25 bp, Homo sapien
tgggaaacagaccacctcgtaggga

SEQ ID NO: 513207 - DNA, 25 bp, Homo sapien
agaccacctcgtagggaggacgctt

SEQ ID NO: 513208 - DNA, 25 bp, Homo sapien
gttgtggcagtgacctccccgtgat

SEQ ID NO: 513209 - DNA, 25 bp, Homo sapien
gacctccccgtgattccgagggctg

SEQ ID NO: 513210 - DNA, 25 bp, Homo sapien
aaagaggtacctcaggcagtgatcc

SEQ ID NO: 513211 - DNA, 25 bp, Homo sapien
gagccacactcaggactctaaagag

SEQ ID NO: 513212 - DNA, 25 bp, Homo sapien
ggtggaagatctcaccgccagccat

SEQ ID NO: 513213 - DNA, 25 bp, Homo sapien
caagcagctctctgtctaaccagta

SEQ ID NO: 513214 - DNA, 25 bp, Homo sapien
cttttccactcacggaattccactt

SEQ ID NO: 513215 - DNA, 25 bp, Homo sapien
cagtaactgcgactctcctccaggt

SEQ ID NO: 513216 - DNA, 25 bp, Homo sapien
agcctggctggtaagcccggctggc

SEQ ID NO: 513217 - DNA, 25 bp, Homo sapien
ccaaggtgtccgtgtagacacagca

SEQ ID NO: 513218 - DNA, 25 bp, Homo sapien
tatagttctccgagtgcagccaaga

SEQ ID NO: 513219 - DNA, 25 bp, Homo sapien
gaagcaaatcccagggacgtatagt

SEQ ID NO: 513220 - DNA, 25 bp, Homo sapien
tcctttcggagcttccgggcagcat

SEQ ID NO: 513221 - DNA, 25 bp, Homo sapien
tcctttcagtcgctggcctttgctc

SEQ ID NO: 513222 - DNA, 25 bp, Homo sapien
gcatacccactccagctctccgctt

SEQ ID NO: 513223 - DNA, 25 bp, Homo sapien
cttccctcctttcagtcgctggcct

SEQ ID NO: 513224 - DNA, 25 bp, Homo sapien
gggatgatgggtattggccagagag

SEQ ID NO: 513225 - DNA, 25 bp, Homo sapien
gtgggatgatgggtattggccagag

SEQ ID NO: 513226 - DNA, 25 bp, Homo sapien
atgatgggtattggccagagaggct

SEQ ID NO: 513227 - DNA, 25 bp, Homo sapien
ctgtgggatgatgggtattggccag

SEQ ID NO: 513228 - DNA, 25 bp, Homo sapien
caggaatatgttgagaaggaaaccc

SEQ ID NO: 513229 - DNA, 25 bp, Homo sapien
ggaatatgttgagaaggaaacccag

SEQ ID NO: 513230 - DNA, 25 bp, Homo sapien
ctccaggaatatgttgagaaggaaa

SEQ ID NO: 513231 - DNA, 25 bp, Homo sapien
ccaggaatatgttgagaaggaaacc

SEQ ID NO: 513232 - DNA, 25 bp, Homo sapien
agctggccctgtgcgcatgctcagt

SEQ ID NO: 513233 - DNA, 25 bp, Homo sapien
tctgatccccgtgtaagactgccct

SEQ ID NO: 513234 - DNA, 25 bp, Homo sapien
gactgccctggtgtcggcacttagg

SEQ ID NO: 513235 - DNA, 25 bp, Homo sapien
tgctcagtagctgcgaatgcatcct

SEQ ID NO: 513236 - DNA, 25 bp, Homo sapien
acctgtctcttcgtggcatttggga

SEQ ID NO: 513237 - DNA, 25 bp, Homo sapien
gcagccctggccgtgattagttgaa

SEQ ID NO: 513238 - DNA, 25 bp, Homo sapien
acgttcggatgctgcagcctctgca

SEQ ID NO: 513239 - DNA, 25 bp, Homo sapien
aattcggatttctctccacgtggcg

SEQ ID NO: 513240 - DNA, 25 bp, Homo sapien
gaccctgctggacacactaataaat

SEQ ID NO: 513241 - DNA, 25 bp, Homo sapien
taagcttggccaaggtactccatct

SEQ ID NO: 513242 - DNA, 25 bp, Homo sapien
gaaaggtggtggacgacaactacac

SEQ ID NO: 513243 - DNA, 25 bp, Homo sapien
catttgtagaatgacccaggagggc

SEQ ID NO: 513244 - DNA, 25 bp, Homo sapien
cgtgatgacacatggagtgtagctt

SEQ ID NO: 513245 - DNA, 25 bp, Homo sapien
tcataagcgtgatgacacatggagt

SEQ ID NO: 513246 - DNA, 25 bp, Homo sapien
gcaccactggatcaacagtaatcaa

SEQ ID NO: 513247 - DNA, 25 bp, Homo sapien
cttcttgcaccactggatcaacagt

SEQ ID NO: 513248 - DNA, 25 bp, Homo sapien
gactcgtattggatcctggccactg

SEQ ID NO: 513249 - DNA, 25 bp, Homo sapien
atctgaacaaaggtgagcgggccat

SEQ ID NO: 513250 - DNA, 25 bp, Homo sapien
tagcattgagtcctgcgtcgcgcaa

SEQ ID NO: 513251 - DNA, 25 bp, Homo sapien
catggtgtgggttcttggctgccaa

SEQ ID NO: 513252 - DNA, 25 bp, Homo sapien
tgtcatggtgtcagagcaaagccct

SEQ ID NO: 513253 - DNA, 25 bp, Homo sapien
tgagaaccttacaggagccaccaga

SEQ ID NO: 513254 - DNA, 25 bp, Homo sapien
tctcagctataggacagccgcaggg

SEQ ID NO: 513255 - DNA, 25 bp, Homo sapien
tgaacggtggcgactcacaggaaac

SEQ ID NO: 513256 - DNA, 25 bp, Homo sapien
gtgccacaggccatagccaaagtag

SEQ ID NO: 513257 - DNA, 25 bp, Homo sapien
cactggtccaagttgccgtcaggag

SEQ ID NO: 513258 - DNA, 25 bp, Homo sapien
ccacaggccatagccaaagtagatg

SEQ ID NO: 513259 - DNA, 25 bp, Homo sapien
gagtccttgcttggtcggcatccag

SEQ ID NO: 513260 - DNA, 25 bp, Homo sapien
aactgagcgtcagactgcaggagac

SEQ ID NO: 513261 - DNA, 25 bp, Homo sapien
gaggccatcgggtccttcagcttag

SEQ ID NO: 513262 - DNA, 25 bp, Homo sapien
gagccccaggaatggacttcacata

SEQ ID NO: 513263 - DNA, 25 bp, Homo sapien
tggcaaagccctacgttcctctgga

SEQ ID NO: 513264 - DNA, 25 bp, Homo sapien
catctgcccgtagcatgcaaactca

SEQ ID NO: 513265 - DNA, 25 bp, Homo sapien
gccagcagacagtgggccgcaaagt

SEQ ID NO: 513266 - DNA, 25 bp, Homo sapien
cagtgggccgcaaagtatttcctgg

SEQ ID NO: 513267 - DNA, 25 bp, Homo sapien
tagcatgcaaactcagggctgcgag

SEQ ID NO: 513268 - DNA, 25 bp, Homo sapien
tgcctgggcctagtgcccgtaccaa

SEQ ID NO: 513269 - DNA, 25 bp, Homo sapien
agaagacgcaatcacagaggagccc

SEQ ID NO: 513270 - DNA, 25 bp, Homo sapien
gcctagtgcccgtaccaatttggtg

SEQ ID NO: 513271 - DNA, 25 bp, Homo sapien
acagagaagacgcaatcacagagga

SEQ ID NO: 513272 - DNA, 25 bp, Homo sapien
tcagcattatcttcgagaaagctgc

SEQ ID NO: 513273 - DNA, 25 bp, Homo sapien
ttatcttcgagaaagctgctgactg

SEQ ID NO: 513274 - DNA, 25 bp, Homo sapien
gctgctgactggatgtgcgtcattc

SEQ ID NO: 513275 - DNA, 25 bp, Homo sapien
ggatgtgcgtcattctgttatgaaa

SEQ ID NO: 513276 - DNA, 25 bp, Homo sapien
tgagatagacgttcacgaagatgct

SEQ ID NO: 513277 - DNA, 25 bp, Homo sapien
agcaaaccggacccaggtgccctgg

SEQ ID NO: 513278 - DNA, 25 bp, Homo sapien
cagctgcatcatgagatagacgttc

SEQ ID NO: 513279 - DNA, 25 bp, Homo sapien
acgttcacgaagatgctcaggatgg

SEQ ID NO: 513280 - DNA, 25 bp, Homo sapien
caggaggtggcttcaatccatggca

SEQ ID NO: 513281 - DNA, 25 bp, Homo sapien
gcgccggttccaatagttcagtaaa

SEQ ID NO: 513282 - DNA, 25 bp, Homo sapien
atccatggcagtggcgccggttcca

SEQ ID NO: 513283 - DNA, 25 bp, Homo sapien
ctgaagagacaggaggtggcttcaa

SEQ ID NO: 513284 - DNA, 25 bp, Homo sapien
catcttacctgaagctggctagcaa

SEQ ID NO: 513285 - DNA, 25 bp, Homo sapien
caggaaggtgtcagcctgcccttga

SEQ ID NO: 513286 - DNA, 25 bp, Homo sapien
tgactactcagggaaacgtccaggg

SEQ ID NO: 513287 - DNA, 25 bp, Homo sapien
tggctagcaaaaaccttcctcggga

SEQ ID NO: 513288 - DNA, 25 bp, Homo sapien
cttggtcttgctctcgggctgcctc

SEQ ID NO: 513289 - DNA, 25 bp, Homo sapien
agggcagaccctgcgagcagaaaga

SEQ ID NO: 513290 - DNA, 25 bp, Homo sapien
cacagcgcccctttggtgagagcct

SEQ ID NO: 513291 - DNA, 25 bp, Homo sapien
ccaagcacggtcacaatgcagaagg

SEQ ID NO: 513292 - DNA, 25 bp, Homo sapien
taactcgtcggaagtactggccatc

SEQ ID NO: 513293 - DNA, 25 bp, Homo sapien
cagctgggaatcattggtgcttgcc

SEQ ID NO: 513294 - DNA, 25 bp, Homo sapien
cacaattagcccagagattttggaa

SEQ ID NO: 513295 - DNA, 25 bp, Homo sapien
tggtataccaggttaggctgctctg

SEQ ID NO: 513296 - DNA, 25 bp, Homo sapien
aagaaaggcattgcgtgaccgccac

SEQ ID NO: 513297 - DNA, 25 bp, Homo sapien
gaaaggcattgcgtgaccgccacat

SEQ ID NO: 513298 - DNA, 25 bp, Homo sapien
ggaagaaaggcattgcgtgaccgcc

SEQ ID NO: 513299 - DNA, 25 bp, Homo sapien
tgggaagaaaggcattgcgtgaccg

SEQ ID NO: 513300 - DNA, 25 bp, Homo sapien
ccaactcaagttctcaataagcctc

SEQ ID NO: 513301 - DNA, 25 bp, Homo sapien
gcaaaatgacgtgcaccaactcaag

SEQ ID NO: 513302 - DNA, 25 bp, Homo sapien
gacgtgcaccaactcaagttctcaa

SEQ ID NO: 513303 - DNA, 25 bp, Homo sapien
cttcaagcaaaatgacgtgcaccaa

SEQ ID NO: 513304 - DNA, 25 bp, Homo sapien
gtggcagcggccctcagatgctaaa

SEQ ID NO: 513305 - DNA, 25 bp, Homo sapien
gcagcggccctcagatgctaaagat

SEQ ID NO: 513306 - DNA, 25 bp, Homo sapien
gctaaagatactaggccacttccca

SEQ ID NO: 513307 - DNA, 25 bp, Homo sapien
cagatgctaaagatactaggccact

SEQ ID NO: 513308 - DNA, 25 bp, Homo sapien
accaacgagtaagccaggagagtgc

SEQ ID NO: 513309 - DNA, 25 bp, Homo sapien
ccaccaacgagtaagccaggagagt

SEQ ID NO: 513310 - DNA, 25 bp, Homo sapien
caccaacgagtaagccaggagagtg

SEQ ID NO: 513311 - DNA, 25 bp, Homo sapien
gccaccaacgagtaagccaggagag

SEQ ID NO: 513312 - DNA, 25 bp, Homo sapien
tcaggtcaaagaggaaggccatcac

SEQ ID NO: 513313 - DNA, 25 bp, Homo sapien
ctgcatgcaatgacaaccaggacca

SEQ ID NO: 513314 - DNA, 25 bp, Homo sapien
tggagggccatctgcatgcaatgac

SEQ ID NO: 513315 - DNA, 25 bp, Homo sapien
ctgtggagggccatctgcatgcaat

SEQ ID NO: 513316 - DNA, 25 bp, Homo sapien
atctgcatgcaatgacaaccaggac

SEQ ID NO: 513317 - DNA, 25 bp, Homo sapien
taaatagcagtccatcctcagccat

SEQ ID NO: 513318 - DNA, 25 bp, Homo sapien
tcctatcattgacgttggctaagaa

SEQ ID NO: 513319 - DNA, 25 bp, Homo sapien
tcagccatggcatagataacccgag

SEQ ID NO: 513320 - DNA, 25 bp, Homo sapien
aacggcacccgaggctaatgtggcg

SEQ ID NO: 513321 - DNA, 25 bp, Homo sapien
gggagaggcaaaccgcgtgagtgaa

SEQ ID NO: 513322 - DNA, 25 bp, Homo sapien
tggggagaggcaaaccgcgtgagtg

SEQ ID NO: 513323 - DNA, 25 bp, Homo sapien
gatggggagaggcaaaccgcgtgag

SEQ ID NO: 513324 - DNA, 25 bp, Homo sapien
tagatggggagaggcaaaccgcgtg

SEQ ID NO: 513325 - DNA, 25 bp, Homo sapien
ccacgtgcttaaaggcgtcgggcag

SEQ ID NO: 513326 - DNA, 25 bp, Homo sapien
cagccgacaccccaaagtaggcgat

SEQ ID NO: 513327 - DNA, 25 bp, Homo sapien
acggccactgcgtacttggcacctt

SEQ ID NO: 513328 - DNA, 25 bp, Homo sapien
tgaagcagatcaagagggacgccac

SEQ ID NO: 513329 - DNA, 25 bp, Homo sapien
gaaggcatagaagcaagtcgctgcc

SEQ ID NO: 513330 - DNA, 25 bp, Homo sapien
gcagtcaaagcccacgaaggcatag

SEQ ID NO: 513331 - DNA, 25 bp, Homo sapien
cagagaacccgaagggcatgaatcc

SEQ ID NO: 513332 - DNA, 25 bp, Homo sapien
gcatgaatccaccaacaccgggctt

SEQ ID NO: 513333 - DNA, 25 bp, Homo sapien
agagtatcgccccttccagaagcat

SEQ ID NO: 513334 - DNA, 25 bp, Homo sapien
cctgctgttcgtggcccagggtcac

SEQ ID NO: 513335 - DNA, 25 bp, Homo sapien
gtcacaagggtgcagagtatcgccc

SEQ ID NO: 513336 - DNA, 25 bp, Homo sapien
tgctaactccgtgtgtgcaggcctc

SEQ ID NO: 513337 - DNA, 25 bp, Homo sapien
acagagacggcctgatgtgttccca

SEQ ID NO: 513338 - DNA, 25 bp, Homo sapien
ctgatgtgttcccaaaatcctcctc

SEQ ID NO: 513339 - DNA, 25 bp, Homo sapien
ttgttcaaacagagacggcctgatg

SEQ ID NO: 513340 - DNA, 25 bp, Homo sapien
gacggcctgatgtgttcccaaaatc

SEQ ID NO: 513341 - DNA, 25 bp, Homo sapien
gactctttcacaccaagagttaaaa

SEQ ID NO: 513342 - DNA, 25 bp, Homo sapien
gaccaggacgttaatacaagtgaat

SEQ ID NO: 513343 - DNA, 25 bp, Homo sapien
agcccaggaccaggacgttaataca

SEQ ID NO: 513344 - DNA, 25 bp, Homo sapien
tattttgttgaccatggccgactct

SEQ ID NO: 513345 - DNA, 25 bp, Homo sapien
gggttggtaccactcgaacacagcc

SEQ ID NO: 513346 - DNA, 25 bp, Homo sapien
tagctgaactctctgctgggcaaga

SEQ ID NO: 513347 - DNA, 25 bp, Homo sapien
gaggtcattcgggtacttccatagc

SEQ ID NO: 513348 - DNA, 25 bp, Homo sapien
gccatggacgcctctcatcgtttta

SEQ ID NO: 513349 - DNA, 25 bp, Homo sapien
gcatgtttctgccagctggaccaga

SEQ ID NO: 513350 - DNA, 25 bp, Homo sapien
ctgatgcatgtttctgccagctgga

SEQ ID NO: 513351 - DNA, 25 bp, Homo sapien
tctgccagctggaccagaaatactg

SEQ ID NO: 513352 - DNA, 25 bp, Homo sapien
ggaccagaaatactgctgagaccag

SEQ ID NO: 513353 - DNA, 25 bp, Homo sapien
attatgatcactgcgaatatgtcgg

SEQ ID NO: 513354 - DNA, 25 bp, Homo sapien
caggccctcgctacgcttgaagtac

SEQ ID NO: 513355 - DNA, 25 bp, Homo sapien
tccccgatgggtctgcctatcagct

SEQ ID NO: 513356 - DNA, 25 bp, Homo sapien
tgtgtgtccgtgagaactccccgat

SEQ ID NO: 513357 - DNA, 25 bp, Homo sapien
tctatcagtgatgcatttactctag

SEQ ID NO: 513358 - DNA, 25 bp, Homo sapien
taattctgtgcctctcgtgttaaca

SEQ ID NO: 513359 - DNA, 25 bp, Homo sapien
gaaactaaatacctctaaatgaatc

SEQ ID NO: 513360 - DNA, 25 bp, Homo sapien
ttaacaagaatgacctccctgtggg

SEQ ID NO: 513361 - DNA, 25 bp, Homo sapien
gtggtagagggcacgagctccggac

SEQ ID NO: 513362 - DNA, 25 bp, Homo sapien
tggtagagggcacgagctccggacc

SEQ ID NO: 513363 - DNA, 25 bp, Homo sapien
gtagagggcacgagctccggacccc

SEQ ID NO: 513364 - DNA, 25 bp, Homo sapien
agagggcacgagctccggacccctg

SEQ ID NO: 513365 - DNA, 25 bp, Homo sapien
gagcaccaaactcgccatagcacag

SEQ ID NO: 513366 - DNA, 25 bp, Homo sapien
ctctccaacggtgacatagctgtag

SEQ ID NO: 513367 - DNA, 25 bp, Homo sapien
aatgttgagcaggactttgcacccc

SEQ ID NO: 513368 - DNA, 25 bp, Homo sapien
gctgtagaggtaagctgagcccgtc

SEQ ID NO: 513369 - DNA, 25 bp, Homo sapien
ggaaatcttgcaagcccaagggtct

SEQ ID NO: 513370 - DNA, 25 bp, Homo sapien
aaagcaagctgttatacgacactcg

SEQ ID NO: 513371 - DNA, 25 bp, Homo sapien
tcagaaaagcacgtttcccacagga

SEQ ID NO: 513372 - DNA, 25 bp, Homo sapien
tcatcttgggatctttaagaagcca

SEQ ID NO: 513373 - DNA, 25 bp, Homo sapien
tgtgcaaagcgtcactaaagactac

SEQ ID NO: 513374 - DNA, 25 bp, Homo sapien
tacaggcagagaatacctttcactg

SEQ ID NO: 513375 - DNA, 25 bp, Homo sapien
ttctgcattgcagaaggcatgttca

SEQ ID NO: 513376 - DNA, 25 bp, Homo sapien
aaaaaagactacgtgggctcattcg

SEQ ID NO: 513377 - DNA, 25 bp, Homo sapien
ggacagcctcgatcttgcagcaaag

SEQ ID NO: 513378 - DNA, 25 bp, Homo sapien
gcaaagatgtctcaggagggataca

SEQ ID NO: 513379 - DNA, 25 bp, Homo sapien
tctcaggagggatacaaggaaggtt

SEQ ID NO: 513380 - DNA, 25 bp, Homo sapien
ggaatatgacgggaagcctcaccac

SEQ ID NO: 513381 - DNA, 25 bp, Homo sapien
caaagaggaagatagaaaagcgtca

SEQ ID NO: 513382 - DNA, 25 bp, Homo sapien
tcaaagaggaagatagaaaagcgtc

SEQ ID NO: 513383 - DNA, 25 bp, Homo sapien
agaggaagatagaaaagcgtcacac

SEQ ID NO: 513384 - DNA, 25 bp, Homo sapien
aagaggaagatagaaaagcgtcaca

SEQ ID NO: 513385 - DNA, 25 bp, Homo sapien
cggcaatttccacaaatctagggca

SEQ ID NO: 513386 - DNA, 25 bp, Homo sapien
gctcctgacactggtattgaccagc

SEQ ID NO: 513387 - DNA, 25 bp, Homo sapien
tagtcgtaggcatgcaaaagctctg

SEQ ID NO: 513388 - DNA, 25 bp, Homo sapien
accttagctggtgtcttctgaaaac

SEQ ID NO: 513389 - DNA, 25 bp, Homo sapien
cacagtaacgcttgctccagtcata

SEQ ID NO: 513390 - DNA, 25 bp, Homo sapien
ttaggcatgaattcagcagcctgcc

SEQ ID NO: 513391 - DNA, 25 bp, Homo sapien
ggttgcccagtgaaatgaacacagc

SEQ ID NO: 513392 - DNA, 25 bp, Homo sapien
gaaccactgcttgtaaggttgccca

SEQ ID NO: 513393 - DNA, 25 bp, Homo sapien
tttatactcaggatccctttctgcc

SEQ ID NO: 513394 - DNA, 25 bp, Homo sapien
ctttatactcaggatccctttctgc

SEQ ID NO: 513395 - DNA, 25 bp, Homo sapien
atttttttgtatttcagtatagacg

SEQ ID NO: 513396 - DNA, 25 bp, Homo sapien
attaccggcatgagccaccgtgcgt

SEQ ID NO: 513397 - DNA, 25 bp, Homo sapien
ggattaccggcatgagccaccgtgc

SEQ ID NO: 513398 - DNA, 25 bp, Homo sapien
tgggattaccggcatgagccaccgt

SEQ ID NO: 513399 - DNA, 25 bp, Homo sapien
ttcatttgctgagcggccttgttcc

SEQ ID NO: 513400 - DNA, 25 bp, Homo sapien
gacaacagatgcaccatctctagtg

SEQ ID NO: 513401 - DNA, 25 bp, Homo sapien
tggtccacttggtctgttcatttgc

SEQ ID NO: 513402 - DNA, 25 bp, Homo sapien
ggatgtctgggccatcccgatggtc

SEQ ID NO: 513403 - DNA, 25 bp, Homo sapien
gaaccacgttcttctggagctcgag

SEQ ID NO: 513404 - DNA, 25 bp, Homo sapien
tgtcaccagctgtggaaagtcctgt

SEQ ID NO: 513405 - DNA, 25 bp, Homo sapien
caaccttagtcgtctctggccgagt

SEQ ID NO: 513406 - DNA, 25 bp, Homo sapien
ggcctgtggcatttgagactctgag

SEQ ID NO: 513407 - DNA, 25 bp, Homo sapien
aggtgccgagtgtccaccgtctgtc

SEQ ID NO: 513408 - DNA, 25 bp, Homo sapien
ggcaaacgttgtgaggcccaagaaa

SEQ ID NO: 513409 - DNA, 25 bp, Homo sapien
agagcccagccgtggttcaaaagcc

SEQ ID NO: 513410 - DNA, 25 bp, Homo sapien
tctggcacaatctgtcctgaactat

SEQ ID NO: 513411 - DNA, 25 bp, Homo sapien
gaaatgtttggtccacgactgctca

SEQ ID NO: 513412 - DNA, 25 bp, Homo sapien
gctccatgtttctgggctaacacag

SEQ ID NO: 513413 - DNA, 25 bp, Homo sapien
tgctccttctggtcgaaccggtgcc

SEQ ID NO: 513414 - DNA, 25 bp, Homo sapien
gaccacaagcatgctggtaccaagt

SEQ ID NO: 513415 - DNA, 25 bp, Homo sapien
ggttgttcccactcaacatccactt

SEQ ID NO: 513416 - DNA, 25 bp, Homo sapien
agctctttggcggatccataatcat

SEQ ID NO: 513417 - DNA, 25 bp, Homo sapien
tggtcaccaaactgctcagagctct

SEQ ID NO: 513418 - DNA, 25 bp, Homo sapien
ttgttcctactagatctgatcgtgg

SEQ ID NO: 513419 - DNA, 25 bp, Homo sapien
ttagccttctaagggagtttatgaa

SEQ ID NO: 513420 - DNA, 25 bp, Homo sapien
tctaatgaactgtttagccttctaa

SEQ ID NO: 513421 - DNA, 25 bp, Homo sapien
gacatgtttctatgctatttaacag

SEQ ID NO: 513422 - DNA, 25 bp, Homo sapien
tgaattaatgaaccaggcaacagag

SEQ ID NO: 513423 - DNA, 25 bp, Homo sapien
aatgtgcatttcaggagatccccag

SEQ ID NO: 513424 - DNA, 25 bp, Homo sapien
actgctcttggtacaggaggcacaa

SEQ ID NO: 513425 - DNA, 25 bp, Homo sapien
ggtctaatgggcagatcaggtctcc

SEQ ID NO: 513426 - DNA, 25 bp, Homo sapien
taacgtaaacggactctgggacagc

SEQ ID NO: 513427 - DNA, 25 bp, Homo sapien
aagtccatccaaccttttcaagaag

SEQ ID NO: 513428 - DNA, 25 bp, Homo sapien
caagaacaaggacagacatttgcac

SEQ ID NO: 513429 - DNA, 25 bp, Homo sapien
gttaggcagagtcaattcccttgat

SEQ ID NO: 513430 - DNA, 25 bp, Homo sapien
taccgttcgatattaacccataaga

SEQ ID NO: 513431 - DNA, 25 bp, Homo sapien
attttcctccacagggatgaatatt

SEQ ID NO: 513432 - DNA, 25 bp, Homo sapien
tcctccacagggatgaatattcaca

SEQ ID NO: 513433 - DNA, 25 bp, Homo sapien
ttcctccacagggatgaatattcac

SEQ ID NO: 513434 - DNA, 25 bp, Homo sapien
ccccactattttcctccacagggat

SEQ ID NO: 513435 - DNA, 25 bp, Homo sapien
atgcgccaccaacaccaggctaact

SEQ ID NO: 513436 - DNA, 25 bp, Homo sapien
tttttcgtagacatgagtttcacca

SEQ ID NO: 513437 - DNA, 25 bp, Homo sapien
gccaccaacaccaggctaacttttg

SEQ ID NO: 513438 - DNA, 25 bp, Homo sapien
tgtatttttcgtagacatgagtttc

SEQ ID NO: 513439 - DNA, 25 bp, Homo sapien
aggaggtggaggctaatacaagctg

SEQ ID NO: 513440 - DNA, 25 bp, Homo sapien
gtggaggctaatacaagctgtgact

SEQ ID NO: 513441 - DNA, 25 bp, Homo sapien
aggctaatacaagctgtgactgcac

SEQ ID NO: 513442 - DNA, 25 bp, Homo sapien
gaggtggaggctaatacaagctgtg

SEQ ID NO: 513443 - DNA, 25 bp, Homo sapien
tgggtctgccaacactgcacatctg

SEQ ID NO: 513444 - DNA, 25 bp, Homo sapien
caggctctcccaatatacagatgga

SEQ ID NO: 513445 - DNA, 25 bp, Homo sapien
gcagaactcactgtgcaggacacgg

SEQ ID NO: 513446 - DNA, 25 bp, Homo sapien
caaatctcgaccagtgggccaggta

SEQ ID NO: 513447 - DNA, 25 bp, Homo sapien
tactctgttccctcacgggaagaga

SEQ ID NO: 513448 - DNA, 25 bp, Homo sapien
ccacccgaggcctgggaaacctgag

SEQ ID NO: 513449 - DNA, 25 bp, Homo sapien
cacgggaagagaggtctaaaccctg

SEQ ID NO: 513450 - DNA, 25 bp, Homo sapien
aggacctttgaaccccatgtatgga

SEQ ID NO: 513451 - DNA, 25 bp, Homo sapien
caggcggcccactagaaggcggcag

SEQ ID NO: 513452 - DNA, 25 bp, Homo sapien
ggttttagaatgactctgacctgcc

SEQ ID NO: 513453 - DNA, 25 bp, Homo sapien
tctactacgcagaaaggaacaccct

SEQ ID NO: 513454 - DNA, 25 bp, Homo sapien
gaatacggtgtcttgctaaaggcgg

SEQ ID NO: 513455 - DNA, 25 bp, Homo sapien
gagacttcctcaaagcaatcttggg

SEQ ID NO: 513456 - DNA, 25 bp, Homo sapien
acagactgtcggacgcgctcaagga

SEQ ID NO: 513457 - DNA, 25 bp, Homo sapien
accaacggacgctcggccggcgaga

SEQ ID NO: 513458 - DNA, 25 bp, Homo sapien
gcaggatcgcgaacagacagactgt

SEQ ID NO: 513459 - DNA, 25 bp, Homo sapien
gaggctgcggttagcgggagcccgc

SEQ ID NO: 513460 - DNA, 25 bp, Homo sapien
cttaagccggtctgaaaagcgcaat

SEQ ID NO: 513461 - DNA, 25 bp, Homo sapien
gcgccgtttcttaagccggtctgaa

SEQ ID NO: 513462 - DNA, 25 bp, Homo sapien
cgcacggtgcgcacacacactggcc

SEQ ID NO: 513463 - DNA, 25 bp, Homo sapien
cgcgcacggtgcgcacacacactgg

SEQ ID NO: 513464 - DNA, 25 bp, Homo sapien
tcctcctgaaactaacaggaacctc

SEQ ID NO: 513465 - DNA, 25 bp, Homo sapien
ctctggtttcctcctgaaactaaca

SEQ ID NO: 513466 - DNA, 25 bp, Homo sapien
gaaactaacaggaacctcaccaaga

SEQ ID NO: 513467 - DNA, 25 bp, Homo sapien
tggtttcctcctgaaactaacagga

SEQ ID NO: 513468 - DNA, 25 bp, Homo sapien
gaccttcttatctccatgaggactg

SEQ ID NO: 513469 - DNA, 25 bp, Homo sapien
cagaggtctcctccgctccaggagc

SEQ ID NO: 513470 - DNA, 25 bp, Homo sapien
aagggatctgtaaaccagaggtctc

SEQ ID NO: 513471 - DNA, 25 bp, Homo sapien
tgaggactgtgaactcggagtggga

SEQ ID NO: 513472 - DNA, 25 bp, Homo sapien
aacccattgtctccggagcaatggc

SEQ ID NO: 513473 - DNA, 25 bp, Homo sapien
tgaggctagaaagggcaaccaaccc

SEQ ID NO: 513474 - DNA, 25 bp, Homo sapien
gaattgaccaatgtgtgaggctaga

SEQ ID NO: 513475 - DNA, 25 bp, Homo sapien
tgcagtgttgagagaattgaccaat

SEQ ID NO: 513476 - DNA, 25 bp, Homo sapien
gcaagggctctaggggggacagatt

SEQ ID NO: 513477 - DNA, 25 bp, Homo sapien
ttgtgaccaccagcaagggctctag

SEQ ID NO: 513478 - DNA, 25 bp, Homo sapien
cttgtgaccaccagcaagggctcta

SEQ ID NO: 513479 - DNA, 25 bp, Homo sapien
ctaacagtccttgaagccaaactga

SEQ ID NO: 513480 - DNA, 25 bp, Homo sapien
ttgaagccaaactgagtttctgaat

SEQ ID NO: 513481 - DNA, 25 bp, Homo sapien
acagtccttgaagccaaactgagtt

SEQ ID NO: 513482 - DNA, 25 bp, Homo sapien
gtccttgaagccaaactgagtttct

SEQ ID NO: 513483 - DNA, 25 bp, Homo sapien
ttactcttgctagttcaatttcttt

SEQ ID NO: 513484 - DNA, 25 bp, Homo sapien
tgattactcttgctagttcaatttc

SEQ ID NO: 513485 - DNA, 25 bp, Homo sapien
ggatttgattactcttgctagttca

SEQ ID NO: 513486 - DNA, 25 bp, Homo sapien
ctaaaggatttgattactcttgcta

SEQ ID NO: 513487 - DNA, 25 bp, Homo sapien
gcatttgcctttagtgaaactttcc

SEQ ID NO: 513488 - DNA, 25 bp, Homo sapien
tttagtgaaactttcctgcagggtg

SEQ ID NO: 513489 - DNA, 25 bp, Homo sapien
tgtcaggatacagtcgcatttgcct

SEQ ID NO: 513490 - DNA, 25 bp, Homo sapien
tttagttgacctactgtcaggatac

SEQ ID NO: 513491 - DNA, 25 bp, Homo sapien
ccctctgcggacagttattatataa

SEQ ID NO: 513492 - DNA, 25 bp, Homo sapien
actgcgggatctggcttaaaagttt

SEQ ID NO: 513493 - DNA, 25 bp, Homo sapien
aaaagtttcgccctgccgactgcct

SEQ ID NO: 513494 - DNA, 25 bp, Homo sapien
tgtgctgtagctcgcagcgatgacc

SEQ ID NO: 513495 - DNA, 25 bp, Homo sapien
tatctattcctggttgccagacact

SEQ ID NO: 513496 - DNA, 25 bp, Homo sapien
ccagacactcactgaagcatgggct

SEQ ID NO: 513497 - DNA, 25 bp, Homo sapien
tgaggctgagcctgtctgtgcagag

SEQ ID NO: 513498 - DNA, 25 bp, Homo sapien
aggctgagcctgtctgtgcagagct

SEQ ID NO: 513499 - DNA, 25 bp, Homo sapien
ttgtttgtctggctctcccattgac

SEQ ID NO: 513500 - DNA, 25 bp, Homo sapien
ggtggtagttgccaggcttcgtctt

SEQ ID NO: 513501 - DNA, 25 bp, Homo sapien
cattgactcctaactgccctctttt

SEQ ID NO: 513502 - DNA, 25 bp, Homo sapien
ccagccctgggtggtagttgccagg

SEQ ID NO: 513503 - DNA, 25 bp, Homo sapien
cttgtccgtacctagctctatccgg

SEQ ID NO: 513504 - DNA, 25 bp, Homo sapien
ggtgcaagttcctggaaattgtcct

SEQ ID NO: 513505 - DNA, 25 bp, Homo sapien
ggtggtgtgaagaggtgcaagttcc

SEQ ID NO: 513506 - DNA, 25 bp, Homo sapien
acctgcttgggccttgtccgtacct

SEQ ID NO: 513507 - DNA, 25 bp, Homo sapien
cctttcttgctccaacaaggtcata

SEQ ID NO: 513508 - DNA, 25 bp, Homo sapien
caatgactgtgggaaactcacgctc

SEQ ID NO: 513509 - DNA, 25 bp, Homo sapien
ctggccctgcagatccccgcatgtg

SEQ ID NO: 513510 - DNA, 25 bp, Homo sapien
gctccaacaaggtcataaaaataca

SEQ ID NO: 513511 - DNA, 25 bp, Homo sapien
ggcaaatgagcctgagaagcaattc

SEQ ID NO: 513512 - DNA, 25 bp, Homo sapien
cggcaaatgagcctgagaagcaatt

SEQ ID NO: 513513 - DNA, 25 bp, Homo sapien
gcaaatgagcctgagaagcaattca

SEQ ID NO: 513514 - DNA, 25 bp, Homo sapien
caggtatgaagagtccaatgaaagt

SEQ ID NO: 513515 - DNA, 25 bp, Homo sapien
aaagtccaggggatcgaggagaggg

SEQ ID NO: 513516 - DNA, 25 bp, Homo sapien
tggttcccaggtatgaagagtccaa

SEQ ID NO: 513517 - DNA, 25 bp, Homo sapien
ttcccaggtatgaagagtccaatga

SEQ ID NO: 513518 - DNA, 25 bp, Homo sapien
gccagatggagcactctacacgcat

SEQ ID NO: 513519 - DNA, 25 bp, Homo sapien
ccagatggagcactctacacgcatc

SEQ ID NO: 513520 - DNA, 25 bp, Homo sapien
cttgaccgaagtcaccccagaggag

SEQ ID NO: 513521 - DNA, 25 bp, Homo sapien
gaagagcccctggtcaaacctgagg

SEQ ID NO: 513522 - DNA, 25 bp, Homo sapien
agagcccctggtcaaacctgaggac

SEQ ID NO: 513523 - DNA, 25 bp, Homo sapien
agtctcaccttgaccgaagtcaccc

SEQ ID NO: 513524 - DNA, 25 bp, Homo sapien
ttaccacgagtaatgcgagaaggca

SEQ ID NO: 513525 - DNA, 25 bp, Homo sapien
gagtgcttgaagttctttgtcctca

SEQ ID NO: 513526 - DNA, 25 bp, Homo sapien
gcagtaatcgttcctgcctgctgtc

SEQ ID NO: 513527 - DNA, 25 bp, Homo sapien
tccttgcacccagaggtaccagatt

SEQ ID NO: 513528 - DNA, 25 bp, Homo sapien
agtgcttctctgagtcgtgttctct

SEQ ID NO: 513529 - DNA, 25 bp, Homo sapien
tgcttctctgagtcgtgttctctca

SEQ ID NO: 513530 - DNA, 25 bp, Homo sapien
gtgcttctctgagtcgtgttctctc

SEQ ID NO: 513531 - DNA, 25 bp, Homo sapien
gcttctctgagtcgtgttctctcac

SEQ ID NO: 513532 - DNA, 25 bp, Homo sapien
cctcgtagagattaattcctcccag

SEQ ID NO: 513533 - DNA, 25 bp, Homo sapien
gctgacctctactttcctcgtagag

SEQ ID NO: 513534 - DNA, 25 bp, Homo sapien
tgaattcagtatgttggagatggca

SEQ ID NO: 513535 - DNA, 25 bp, Homo sapien
tggcaggtttcacacgctgacctct

SEQ ID NO: 513536 - DNA, 25 bp, Homo sapien
tcttgattccatctagctgggctag

SEQ ID NO: 513537 - DNA, 25 bp, Homo sapien
tgtcttgattccatctagctgggct

SEQ ID NO: 513538 - DNA, 25 bp, Homo sapien
ttccatctagctgggctagttcatc

SEQ ID NO: 513539 - DNA, 25 bp, Homo sapien
tgattccatctagctgggctagttc

SEQ ID NO: 513540 - DNA, 25 bp, Homo sapien
aggaagaggaccgacgatgcaatga

SEQ ID NO: 513541 - DNA, 25 bp, Homo sapien
tgatgaggctcatctggatgtattt

SEQ ID NO: 513542 - DNA, 25 bp, Homo sapien
tttgcagtcaaactctatacccaag

SEQ ID NO: 513543 - DNA, 25 bp, Homo sapien
accgacgatgcaatgatgaggctca

SEQ ID NO: 513544 - DNA, 25 bp, Homo sapien
tgtgtgcttcggtgtggcctcttgc

SEQ ID NO: 513545 - DNA, 25 bp, Homo sapien
cttgcccttcttctattaaccatga

SEQ ID NO: 513546 - DNA, 25 bp, Homo sapien
tgtcctgtggctgatggatacacaa

SEQ ID NO: 513547 - DNA, 25 bp, Homo sapien
ttgggctatgccatttggtgtcctg

SEQ ID NO: 513548 - DNA, 25 bp, Homo sapien
tcactaaaagctctgctcttaaaaa

SEQ ID NO: 513549 - DNA, 25 bp, Homo sapien
gagtcactaaaagctctgctcttaa

SEQ ID NO: 513550 - DNA, 25 bp, Homo sapien
ctctgccttttgagtcactaaaagc

SEQ ID NO: 513551 - DNA, 25 bp, Homo sapien
ttttgagtcactaaaagctctgctc

SEQ ID NO: 513552 - DNA, 25 bp, Homo sapien
ttcaccactggtctttagcgaatga

SEQ ID NO: 513553 - DNA, 25 bp, Homo sapien
gcaatattctggtggtttgatgcca

SEQ ID NO: 513554 - DNA, 25 bp, Homo sapien
tctccctgattctgtaagctgctgg

SEQ ID NO: 513555 - DNA, 25 bp, Homo sapien
ctgctggaggactgacatgtagttc

SEQ ID NO: 513556 - DNA, 25 bp, Homo sapien
aactggctggtgatatgagaatcca

SEQ ID NO: 513557 - DNA, 25 bp, Homo sapien
gagtttaactggctggtgatatgag

SEQ ID NO: 513558 - DNA, 25 bp, Homo sapien
ttcatctgccaaggggagtttaact

SEQ ID NO: 513559 - DNA, 25 bp, Homo sapien
gggaaaagatgttcatctgccaagg

SEQ ID NO: 513560 - DNA, 25 bp, Homo sapien
tcctctacagcttcaatgtgctggc

SEQ ID NO: 513561 - DNA, 25 bp, Homo sapien
gctctgcaagggcaggttttttcct

SEQ ID NO: 513562 - DNA, 25 bp, Homo sapien
tagctcccttctgggtccaaatgtg

SEQ ID NO: 513563 - DNA, 25 bp, Homo sapien
acatgtgcgcctgaacttaaaagct

SEQ ID NO: 513564 - DNA, 25 bp, Homo sapien
aaccacctcctgtgtaaaagcctca

SEQ ID NO: 513565 - DNA, 25 bp, Homo sapien
aaagcctcatagaagccactgcctt

SEQ ID NO: 513566 - DNA, 25 bp, Homo sapien
cctcctgtgtaaaagcctcatagaa

SEQ ID NO: 513567 - DNA, 25 bp, Homo sapien
tcagaagtcaaccacctcctgtgta

SEQ ID NO: 513568 - DNA, 25 bp, Homo sapien
gaagccattttaaagaagagaaata

SEQ ID NO: 513569 - DNA, 25 bp, Homo sapien
agaagccattttaaagaagagaaat

SEQ ID NO: 513570 - DNA, 25 bp, Homo sapien
tgagacaccagcgttaggcagggac

SEQ ID NO: 513571 - DNA, 25 bp, Homo sapien
gcagagggatcttcaaaagtagcct

SEQ ID NO: 513572 - DNA, 25 bp, Homo sapien
tgaggaatcgtattttaaccaccag

SEQ ID NO: 513573 - DNA, 25 bp, Homo sapien
gggacataggctcatcattcaggct

SEQ ID NO: 513574 - DNA, 25 bp, Homo sapien
taatgaaagccgatgagtgactgaa

SEQ ID NO: 513575 - DNA, 25 bp, Homo sapien
ttaaggctaggagacgcactctcac

SEQ ID NO: 513576 - DNA, 25 bp, Homo sapien
tattgttctgtatactacgcgccaa

SEQ ID NO: 513577 - DNA, 25 bp, Homo sapien
cacggctgactttggtagaattcac

SEQ ID NO: 513578 - DNA, 25 bp, Homo sapien
tacaggcagactgttctgaacggtt

SEQ ID NO: 513579 - DNA, 25 bp, Homo sapien
cggtttctgaagcaatgtcgggtct

SEQ ID NO: 513580 - DNA, 25 bp, Homo sapien
tcagttccatgtgtttacaggcaga

SEQ ID NO: 513581 - DNA, 25 bp, Homo sapien
gcaaaatggtttctgctacgaaaga

SEQ ID NO: 513582 - DNA, 25 bp, Homo sapien
caggattacacaacaattactctct

SEQ ID NO: 513583 - DNA, 25 bp, Homo sapien
tacacaacaattactctctccagtc

SEQ ID NO: 513584 - DNA, 25 bp, Homo sapien
ttacaggattacacaacaattactc

SEQ ID NO: 513585 - DNA, 25 bp, Homo sapien
tccagtcttctcacgattcctctga

SEQ ID NO: 513586 - DNA, 25 bp, Homo sapien
tctggccaccaaatgcatcactgtt

SEQ ID NO: 513587 - DNA, 25 bp, Homo sapien
tctcatttaaagttggccagccatt

SEQ ID NO: 513588 - DNA, 25 bp, Homo sapien
tgttcaaatgaagcacgatggccca

SEQ ID NO: 513589 - DNA, 25 bp, Homo sapien
ttcactaaatagttgggaaagcctg

SEQ ID NO: 513590 - DNA, 25 bp, Homo sapien
tagaataacttcctaggcctgactt

SEQ ID NO: 513591 - DNA, 25 bp, Homo sapien
cgtccttgataaataagtcgtagaa

SEQ ID NO: 513592 - DNA, 25 bp, Homo sapien
tcgtagaatatttggactgctgacc

SEQ ID NO: 513593 - DNA, 25 bp, Homo sapien
tcctaatgtgacatttccatgtaga

SEQ ID NO: 513594 - DNA, 25 bp, Homo sapien
tccatgtagaaatcgtccttgataa

SEQ ID NO: 513595 - DNA, 25 bp, Homo sapien
gggttttagtactcacgtgtgcatt

SEQ ID NO: 513596 - DNA, 25 bp, Homo sapien
gactttataacccaagtgcagcctt

SEQ ID NO: 513597 - DNA, 25 bp, Homo sapien
ttatgactgtactggtgccaagcag

SEQ ID NO: 513598 - DNA, 25 bp, Homo sapien
taggcatgacaaactcaacagtatt

SEQ ID NO: 513599 - DNA, 25 bp, Homo sapien
catgacataaggatcaagatgacac

SEQ ID NO: 513600 - DNA, 25 bp, Homo sapien
ggttgagaaacactaatctaattga

SEQ ID NO: 513601 - DNA, 25 bp, Homo sapien
cttcctctagaaaagctccgtatat

SEQ ID NO: 513602 - DNA, 25 bp, Homo sapien
aagtcagcaactagagatctacaag

SEQ ID NO: 513603 - DNA, 25 bp, Homo sapien
tttaccatttgggaatgagactgct

SEQ ID NO: 513604 - DNA, 25 bp, Homo sapien
gaagagcaagataaggaagggtaca

SEQ ID NO: 513605 - DNA, 25 bp, Homo sapien
tgaagagcaagataaggaagggtac

SEQ ID NO: 513606 - DNA, 25 bp, Homo sapien
aagagcaagataaggaagggtacaa

SEQ ID NO: 513607 - DNA, 25 bp, Homo sapien
ccattggccaattgtcatatacatg

SEQ ID NO: 513608 - DNA, 25 bp, Homo sapien
gcagaatcgttaggagaaaacagga

SEQ ID NO: 513609 - DNA, 25 bp, Homo sapien
catgctttgcaatgtcagaagcaga

SEQ ID NO: 513610 - DNA, 25 bp, Homo sapien
cttaccaaaatgaggcgcaaattta

SEQ ID NO: 513611 - DNA, 25 bp, Homo sapien
gcaggtctcgtcactaaacagaaaa

SEQ ID NO: 513612 - DNA, 25 bp, Homo sapien
tttaaatttaatcactccaacaatg

SEQ ID NO: 513613 - DNA, 25 bp, Homo sapien
caacaatgttcagaattgaactttt

SEQ ID NO: 513614 - DNA, 25 bp, Homo sapien
ataaaaatgttgacactgcaggtct

SEQ ID NO: 513615 - DNA, 25 bp, Homo sapien
gccccaactgcatgaccatatattt

SEQ ID NO: 513616 - DNA, 25 bp, Homo sapien
ttttagccccaactgcatgaccata

SEQ ID NO: 513617 - DNA, 25 bp, Homo sapien
tagccccaactgcatgaccatatat

SEQ ID NO: 513618 - DNA, 25 bp, Homo sapien
tcttttagccccaactgcatgacca

SEQ ID NO: 513619 - DNA, 25 bp, Homo sapien
tattgttcggttcttataattagaa

SEQ ID NO: 513620 - DNA, 25 bp, Homo sapien
tgttcggttcttataattagaaagc

SEQ ID NO: 513621 - DNA, 25 bp, Homo sapien
ctattgttcggttcttataattaga

SEQ ID NO: 513622 - DNA, 25 bp, Homo sapien
ctgccggtctgctaaatcgttggag

SEQ ID NO: 513623 - DNA, 25 bp, Homo sapien
ccggtctgctaaatcgttggagcaa

SEQ ID NO: 513624 - DNA, 25 bp, Homo sapien
gtctgctaaatcgttggagcaacat

SEQ ID NO: 513625 - DNA, 25 bp, Homo sapien
tgccggtctgctaaatcgttggagc

SEQ ID NO: 513626 - DNA, 25 bp, Homo sapien
taaaactgagcctgcctgctagctt

SEQ ID NO: 513627 - DNA, 25 bp, Homo sapien
ttgtgaagttatattgcacagccaa

SEQ ID NO: 513628 - DNA, 25 bp, Homo sapien
gctagcttacagacgttctcaagga

SEQ ID NO: 513629 - DNA, 25 bp, Homo sapien
catacaaggtctttcagcagttaca

SEQ ID NO: 513630 - DNA, 25 bp, Homo sapien
ttaaagaatgacctaggcgggctgc

SEQ ID NO: 513631 - DNA, 25 bp, Homo sapien
cctgcattggccagtagaaaacgaa

SEQ ID NO: 513632 - DNA, 25 bp, Homo sapien
caagcactgtaataggcccaagatg

SEQ ID NO: 513633 - DNA, 25 bp, Homo sapien
tttctagaaaactgaccctgcattg

SEQ ID NO: 513634 - DNA, 25 bp, Homo sapien
tatctttgggagctacctcaacttg

SEQ ID NO: 513635 - DNA, 25 bp, Homo sapien
gctacctcaacttgagaacagctga

SEQ ID NO: 513636 - DNA, 25 bp, Homo sapien
gaactcatacaggtctatcttagct

SEQ ID NO: 513637 - DNA, 25 bp, Homo sapien
ggaactgaactcatacaggtctatc

SEQ ID NO: 513638 - DNA, 25 bp, Homo sapien
tcaattgctaaaagatagcagcatc

SEQ ID NO: 513639 - DNA, 25 bp, Homo sapien
gaactctaagaatactgtctcagac

SEQ ID NO: 513640 - DNA, 25 bp, Homo sapien
cataatacgcctatcacaagtgtgc

SEQ ID NO: 513641 - DNA, 25 bp, Homo sapien
tgtgcttgcacttcaccttagtggc

SEQ ID NO: 513642 - DNA, 25 bp, Homo sapien
ccacatcaaggctatccatatcaga

SEQ ID NO: 513643 - DNA, 25 bp, Homo sapien
atcaaggctatccatatcagaaatc

SEQ ID NO: 513644 - DNA, 25 bp, Homo sapien
acatcaaggctatccatatcagaaa

SEQ ID NO: 513645 - DNA, 25 bp, Homo sapien
cacatcaaggctatccatatcagaa

SEQ ID NO: 513646 - DNA, 25 bp, Homo sapien
cataaacacttctctttaggaacca

SEQ ID NO: 513647 - DNA, 25 bp, Homo sapien
caagaaaggacaaattgggacaaga

SEQ ID NO: 513648 - DNA, 25 bp, Homo sapien
gaaccactggtcaagtacattgaga

SEQ ID NO: 513649 - DNA, 25 bp, Homo sapien
ggaggataactgagtggcaaccaca

SEQ ID NO: 513650 - DNA, 25 bp, Homo sapien
cattccggagcttgctgttcagttt

SEQ ID NO: 513651 - DNA, 25 bp, Homo sapien
gtagtcattccggagcttgctgttc

SEQ ID NO: 513652 - DNA, 25 bp, Homo sapien
ccagtagtcattccggagcttgctg

SEQ ID NO: 513653 - DNA, 25 bp, Homo sapien
acccagtagtcattccggagcttgc

SEQ ID NO: 513654 - DNA, 25 bp, Homo sapien
tggctggtacctgttgttgctttcc

SEQ ID NO: 513655 - DNA, 25 bp, Homo sapien
tgttagctggttagtttgctcatta

SEQ ID NO: 513656 - DNA, 25 bp, Homo sapien
gatgttagctggttagtttgctcat

SEQ ID NO: 513657 - DNA, 25 bp, Homo sapien
gcagtggctggtacctgttgttgct

SEQ ID NO: 513658 - DNA, 25 bp, Homo sapien
taatttaccttctctgtagacttag

SEQ ID NO: 513659 - DNA, 25 bp, Homo sapien
agagacggggcctaatttctataat

SEQ ID NO: 513660 - DNA, 25 bp, Homo sapien
atttaccttctctgtagacttagcc

SEQ ID NO: 513661 - DNA, 25 bp, Homo sapien
tctataatttaccttctctgtagac

SEQ ID NO: 513662 - DNA, 25 bp, Homo sapien
gctgcaaaacagtcaacctaacttg

SEQ ID NO: 513663 - DNA, 25 bp, Homo sapien
tttactgacacttggcaggatctgg

SEQ ID NO: 513664 - DNA, 25 bp, Homo sapien
tcaacctaacttgtttcaccacaga

SEQ ID NO: 513665 - DNA, 25 bp, Homo sapien
ttggcaggatctggcatacgctctt

SEQ ID NO: 513666 - DNA, 25 bp, Homo sapien
gtcatctagtgcagtggctcctaca

SEQ ID NO: 513667 - DNA, 25 bp, Homo sapien
taagagctgtcataagtcatacctg

SEQ ID NO: 513668 - DNA, 25 bp, Homo sapien
tactattaacatattaggtgagcat

SEQ ID NO: 513669 - DNA, 25 bp, Homo sapien
tccaataaatggtccaaagtcaatt

SEQ ID NO: 513670 - DNA, 25 bp, Homo sapien
tatttcattccaacgtctgtgagag

SEQ ID NO: 513671 - DNA, 25 bp, Homo sapien
gaacaatcaaacctgtgctgtacgt

SEQ ID NO: 513672 - DNA, 25 bp, Homo sapien
tgatgccacgcacattccagctttt

SEQ ID NO: 513673 - DNA, 25 bp, Homo sapien
gacctaaaggaagtagcggcactgt

SEQ ID NO: 513674 - DNA, 25 bp, Homo sapien
tattctctcgtagggacacccgtcc

SEQ ID NO: 513675 - DNA, 25 bp, Homo sapien
gatgtgcatccctgttcttgaaaaa

SEQ ID NO: 513676 - DNA, 25 bp, Homo sapien
tatcaagttcgtccctactgcaatg

SEQ ID NO: 513677 - DNA, 25 bp, Homo sapien
gccatccgtattcagacatttcaaa

SEQ ID NO: 513678 - DNA, 25 bp, Homo sapien
gattcacacttgctcccgagtcaag

SEQ ID NO: 513679 - DNA, 25 bp, Homo sapien
ttttggagccaaagtgccggtcagg

SEQ ID NO: 513680 - DNA, 25 bp, Homo sapien
gaagaggaacaatccccaggagctg

SEQ ID NO: 513681 - DNA, 25 bp, Homo sapien
tcaggccgaggttctggttcgaaga

SEQ ID NO: 513682 - DNA, 25 bp, Homo sapien
aaatgccccagcgtggatgtacaca

SEQ ID NO: 513683 - DNA, 25 bp, Homo sapien
tgagtggcggccgagcggtggccgg

SEQ ID NO: 513684 - DNA, 25 bp, Homo sapien
tacacagataactatgtagctacac

SEQ ID NO: 513685 - DNA, 25 bp, Homo sapien
catcgacgcgtgagccttgagtggc

SEQ ID NO: 513686 - DNA, 25 bp, Homo sapien
gcgccgcgggggcgaagagccgggc

SEQ ID NO: 513687 - DNA, 25 bp, Homo sapien
tcgcgccgcgggggcgaagagccgg

SEQ ID NO: 513688 - DNA, 25 bp, Homo sapien
aactcgcgccgcgggggcgaagagc

SEQ ID NO: 513689 - DNA, 25 bp, Homo sapien
tcaactcgcgccgcgggggcgaaga

SEQ ID NO: 513690 - DNA, 25 bp, Homo sapien
ttaactagttggaagccaaagcgaa

SEQ ID NO: 513691 - DNA, 25 bp, Homo sapien
ctagttggaagccaaagcgaaagac

SEQ ID NO: 513692 - DNA, 25 bp, Homo sapien
gggccggccgggacactccacagcc

SEQ ID NO: 513693 - DNA, 25 bp, Homo sapien
agttggaagccaaagcgaaagaccg

SEQ ID NO: 513694 - DNA, 25 bp, Homo sapien
tccggacagcagctggggtcggggc

SEQ ID NO: 513695 - DNA, 25 bp, Homo sapien
ctccggacagcagctggggtcgggg

SEQ ID NO: 513696 - DNA, 25 bp, Homo sapien
cttcacttttcagtcccacacgccg

SEQ ID NO: 513697 - DNA, 25 bp, Homo sapien
tcctcagcccgggaatggtttcctc

SEQ ID NO: 513698 - DNA, 25 bp, Homo sapien
tgcctgagtgcgactaagggaaacg

SEQ ID NO: 513699 - DNA, 25 bp, Homo sapien
tcctgtcatcgcctctcaaaccaac

SEQ ID NO: 513700 - DNA, 25 bp, Homo sapien
ccaataaggtcacataagttcaaca

SEQ ID NO: 513701 - DNA, 25 bp, Homo sapien
taggtctcctcaacattacattttg

SEQ ID NO: 513702 - DNA, 25 bp, Homo sapien
gagtgatttcatctaggtctcctca

SEQ ID NO: 513703 - DNA, 25 bp, Homo sapien
ggaacaaggatctcattaagcagtg

SEQ ID NO: 513704 - DNA, 25 bp, Homo sapien
aaataatgccattgttgagacacca

SEQ ID NO: 513705 - DNA, 25 bp, Homo sapien
agtactttagaaagggcagtctcaa

SEQ ID NO: 513706 - DNA, 25 bp, Homo sapien
tctgaggtcaacatctgaatcccta

SEQ ID NO: 513707 - DNA, 25 bp, Homo sapien
gaaaacctatatgccttgcagtgat

SEQ ID NO: 513708 - DNA, 25 bp, Homo sapien
ggtagttatgaggatgagttcatgc

SEQ ID NO: 513709 - DNA, 25 bp, Homo sapien
gaaatgtcactactcattctctcat

SEQ ID NO: 513710 - DNA, 25 bp, Homo sapien
catgcatgggaaataaatcactttg

SEQ ID NO: 513711 - DNA, 25 bp, Homo sapien
tgatatgaaatgtcactactcattc

SEQ ID NO: 513712 - DNA, 25 bp, Homo sapien
acccatggccacagtcgtgagtggt

SEQ ID NO: 513713 - DNA, 25 bp, Homo sapien
caggaggtcaccatcttttttgttt

SEQ ID NO: 513714 - DNA, 25 bp, Homo sapien
caagcgattctaggtgggaccacag

SEQ ID NO: 513715 - DNA, 25 bp, Homo sapien
gcaacttggtgtttccctgctccca

SEQ ID NO: 513716 - DNA, 25 bp, Homo sapien
gttcaagcgattctaggtgggacca

SEQ ID NO: 513717 - DNA, 25 bp, Homo sapien
acgcccggccgaggtcaccatctta

SEQ ID NO: 513718 - DNA, 25 bp, Homo sapien
ttagtacggacatccgatcggcaca

SEQ ID NO: 513719 - DNA, 25 bp, Homo sapien
tacggacatccgatcggcacagcca

SEQ ID NO: 513720 - DNA, 25 bp, Homo sapien
cggccgaggtcaccatcttaatgcc

SEQ ID NO: 513721 - DNA, 25 bp, Homo sapien
tcagctgaagaaactaggaaggctc

SEQ ID NO: 513722 - DNA, 25 bp, Homo sapien
taccactactttacaagattccttg

SEQ ID NO: 513723 - DNA, 25 bp, Homo sapien
ctaggaaggctctggacctgtgctt

SEQ ID NO: 513724 - DNA, 25 bp, Homo sapien
ggactctcctaacatccgcctgttg

SEQ ID NO: 513725 - DNA, 25 bp, Homo sapien
attgtcacaattccatccttgatct

SEQ ID NO: 513726 - DNA, 25 bp, Homo sapien
gtcacaattccatccttgatcttat

SEQ ID NO: 513727 - DNA, 25 bp, Homo sapien
tgtatatctcctgctgttattttct

SEQ ID NO: 513728 - DNA, 25 bp, Homo sapien
catgaaatgttcgtctgtatatctc

SEQ ID NO: 513729 - DNA, 25 bp, Homo sapien
caacaaacttgatagcagccagctg

SEQ ID NO: 513730 - DNA, 25 bp, Homo sapien
aacaccaacaaacttgatagcagcc

SEQ ID NO: 513731 - DNA, 25 bp, Homo sapien
caaacttgatagcagccagctgctg

SEQ ID NO: 513732 - DNA, 25 bp, Homo sapien
accaacaaacttgatagcagccagc

SEQ ID NO: 513733 - DNA, 25 bp, Homo sapien
ttcagtctgcttaatcagaagtcct

SEQ ID NO: 513734 - DNA, 25 bp, Homo sapien
cttcagtctgcttaatcagaagtcc

SEQ ID NO: 513735 - DNA, 25 bp, Homo sapien
tctgggcaagccgactgggatggta

SEQ ID NO: 513736 - DNA, 25 bp, Homo sapien
ctgggatggtaagagtggtgtcaat

SEQ ID NO: 513737 - DNA, 25 bp, Homo sapien
agagaggcaattttcagtgtgagag

SEQ ID NO: 513738 - DNA, 25 bp, Homo sapien
tagagaggcaattttcagtgtgaga

SEQ ID NO: 513739 - DNA, 25 bp, Homo sapien
ctagagaggcaattttcagtgtgag

SEQ ID NO: 513740 - DNA, 25 bp, Homo sapien
aaccctgcttcaaccacctcgccca

SEQ ID NO: 513741 - DNA, 25 bp, Homo sapien
tgctgcaaccctgcttcaaccacct

SEQ ID NO: 513742 - DNA, 25 bp, Homo sapien
tgcaaccctgcttcaaccacctcgc

SEQ ID NO: 513743 - DNA, 25 bp, Homo sapien
accctgcttcaaccacctcgcccag

SEQ ID NO: 513744 - DNA, 25 bp, Homo sapien
agatttgaattgttaactccagcaa

SEQ ID NO: 513745 - DNA, 25 bp, Homo sapien
caaagatgtactgggtgatgctcat

SEQ ID NO: 513746 - DNA, 25 bp, Homo sapien
catgttgtgcacaatgctagtctga

SEQ ID NO: 513747 - DNA, 25 bp, Homo sapien
tacttcaaaacattgcagcaatttg

SEQ ID NO: 513748 - DNA, 25 bp, Homo sapien
cgtctgggtgctatgtagaatacaa

SEQ ID NO: 513749 - DNA, 25 bp, Homo sapien
tacaatcaaacattaacggaaggga

SEQ ID NO: 513750 - DNA, 25 bp, Homo sapien
ggcacttgaatccaaaaacgtctgg

SEQ ID NO: 513751 - DNA, 25 bp, Homo sapien
tcaaagttgtcgtttccctgaatcc

SEQ ID NO: 513752 - DNA, 25 bp, Homo sapien
agaggccatgccttgggcaagaggc

SEQ ID NO: 513753 - DNA, 25 bp, Homo sapien
gcccagggcaggtgttgttgaactt

SEQ ID NO: 513754 - DNA, 25 bp, Homo sapien
agagggtgtccatacggtgttctgc

SEQ ID NO: 513755 - DNA, 25 bp, Homo sapien
catttgtttattatgcctgatctgt

SEQ ID NO: 513756 - DNA, 25 bp, Homo sapien
gaatggattggtggagctcttttcc

SEQ ID NO: 513757 - DNA, 25 bp, Homo sapien
cttgtccaaagggaattgcaccaat

SEQ ID NO: 513758 - DNA, 25 bp, Homo sapien
gaattgcaccaattacaagggcatg

SEQ ID NO: 513759 - DNA, 25 bp, Homo sapien
gaacatggaatagtccccacgaacc

SEQ ID NO: 513760 - DNA, 25 bp, Homo sapien
tgtagaaggtgaggacgagccaaaa

SEQ ID NO: 513761 - DNA, 25 bp, Homo sapien
gaaggtgaggacgagccaaaaacaa

SEQ ID NO: 513762 - DNA, 25 bp, Homo sapien
agaaggtgaggacgagccaaaaaca

SEQ ID NO: 513763 - DNA, 25 bp, Homo sapien
tagaaggtgaggacgagccaaaaac

SEQ ID NO: 513764 - DNA, 25 bp, Homo sapien
gcaccacgagcgtgtttattttcat

SEQ ID NO: 513765 - DNA, 25 bp, Homo sapien
actgcaagatatgacaaagctttca

SEQ ID NO: 513766 - DNA, 25 bp, Homo sapien
aagctttcatatcaaggacagagac

SEQ ID NO: 513767 - DNA, 25 bp, Homo sapien
ttatttatagcaccacgagcgtgtt

SEQ ID NO: 513768 - DNA, 25 bp, Homo sapien
gcgttagcctttgtttttagctcaa

SEQ ID NO: 513769 - DNA, 25 bp, Homo sapien
ttagcctttgtttttagctcaacta

SEQ ID NO: 513770 - DNA, 25 bp, Homo sapien
tagcctttgtttttagctcaactaa

SEQ ID NO: 513771 - DNA, 25 bp, Homo sapien
tggcgttagcctttgtttttagctc

SEQ ID NO: 513772 - DNA, 25 bp, Homo sapien
gctgtggatcttgaattcgctttac

SEQ ID NO: 513773 - DNA, 25 bp, Homo sapien
ctagctgtggatcttgaattcgctt

SEQ ID NO: 513774 - DNA, 25 bp, Homo sapien
ccgactagctgtggatcttgaattc

SEQ ID NO: 513775 - DNA, 25 bp, Homo sapien
gactagctgtggatcttgaattcgc

SEQ ID NO: 513776 - DNA, 25 bp, Homo sapien
tgaaagttaacccactcagtttcca

SEQ ID NO: 513777 - DNA, 25 bp, Homo sapien
tctggatgtagggtgacgtttttag

SEQ ID NO: 513778 - DNA, 25 bp, Homo sapien
tctggtggcccaaagaatcacagga

SEQ ID NO: 513779 - DNA, 25 bp, Homo sapien
tagtttttgattagctgacatattc

SEQ ID NO: 513780 - DNA, 25 bp, Homo sapien
gattctagtcccaggtctgacagag

SEQ ID NO: 513781 - DNA, 25 bp, Homo sapien
gtgaccgtggtgaagaaaacaactc

SEQ ID NO: 513782 - DNA, 25 bp, Homo sapien
tatccagaagtgtgcttcagcagca

SEQ ID NO: 513783 - DNA, 25 bp, Homo sapien
taactgacaagggtgcaatctgtcc

SEQ ID NO: 513784 - DNA, 25 bp, Homo sapien
aagctgttgttcactagactctaag

SEQ ID NO: 513785 - DNA, 25 bp, Homo sapien
tcccctttaagctgttgttcactag

SEQ ID NO: 513786 - DNA, 25 bp, Homo sapien
ctgtattcccctttaagctgttgtt

SEQ ID NO: 513787 - DNA, 25 bp, Homo sapien
ctttaagctgttgttcactagactc

SEQ ID NO: 513788 - DNA, 25 bp, Homo sapien
ctacatatgcactcaaacatctcag

SEQ ID NO: 513789 - DNA, 25 bp, Homo sapien
gcctaaaagatacaagctattgcaa

SEQ ID NO: 513790 - DNA, 25 bp, Homo sapien
tccactacatatgcactcaaacatc

SEQ ID NO: 513791 - DNA, 25 bp, Homo sapien
ttacagagatcaactggctcagcag

SEQ ID NO: 513792 - DNA, 25 bp, Homo sapien
caaggactgatttatagcgtgacat

SEQ ID NO: 513793 - DNA, 25 bp, Homo sapien
tgagctctatttttagacatgtagg

SEQ ID NO: 513794 - DNA, 25 bp, Homo sapien
catgtaggtcattatttcaaggact

SEQ ID NO: 513795 - DNA, 25 bp, Homo sapien
tcaaggactgatttatagcgtgaca

SEQ ID NO: 513796 - DNA, 25 bp, Homo sapien
acagagatgatgatgctgttatcag

SEQ ID NO: 513797 - DNA, 25 bp, Homo sapien
agatgatgatgctgttatcagcagc

SEQ ID NO: 513798 - DNA, 25 bp, Homo sapien
agagatgatgatgctgttatcagca

SEQ ID NO: 513799 - DNA, 25 bp, Homo sapien
ctacagagatgatgatgctgttatc

SEQ ID NO: 513800 - DNA, 25 bp, Homo sapien
ggacagaagcactgtgagtcccaac

SEQ ID NO: 513801 - DNA, 25 bp, Homo sapien
cttgtttagtgcctgaggggcagaa

SEQ ID NO: 513802 - DNA, 25 bp, Homo sapien
agcactgtgagtcccaaccccaagt

SEQ ID NO: 513803 - DNA, 25 bp, Homo sapien
accttctttgtctatcacagctctg

SEQ ID NO: 513804 - DNA, 25 bp, Homo sapien
ccaccacttgcctttgagaactgag

SEQ ID NO: 513805 - DNA, 25 bp, Homo sapien
cagcctccaaaacaggatgtgtgtc

SEQ ID NO: 513806 - DNA, 25 bp, Homo sapien
tgatttcttcctggtgttctgccac

SEQ ID NO: 513807 - DNA, 25 bp, Homo sapien
aactgagtccacagcatctcttttt

SEQ ID NO: 513808 - DNA, 25 bp, Homo sapien
tgatccccggtcagagtcatctgtc

SEQ ID NO: 513809 - DNA, 25 bp, Homo sapien
aatgcccacctcatagagatacatg

SEQ ID NO: 513810 - DNA, 25 bp, Homo sapien
taaggctcaggtcaatgcttgagaa

SEQ ID NO: 513811 - DNA, 25 bp, Homo sapien
tgcttgagaagtgtaagctctgcca

SEQ ID NO: 513812 - DNA, 25 bp, Homo sapien
ggccctggtcagtccggtgggcagc

SEQ ID NO: 513813 - DNA, 25 bp, Homo sapien
ggagcagttgactggcccccatttg

SEQ ID NO: 513814 - DNA, 25 bp, Homo sapien
cctggtcagtccggtgggcagccct

SEQ ID NO: 513815 - DNA, 25 bp, Homo sapien
ctggagcagttgactggcccccatt

SEQ ID NO: 513816 - DNA, 25 bp, Homo sapien
gtgggtaggaaggtcccagtgatct

SEQ ID NO: 513817 - DNA, 25 bp, Homo sapien
tgggtaggaaggtcccagtgatctt

SEQ ID NO: 513818 - DNA, 25 bp, Homo sapien
caaatcttgctggagatgtcagacc

SEQ ID NO: 513819 - DNA, 25 bp, Homo sapien
gaggcaggtttgctccatccacagt

SEQ ID NO: 513820 - DNA, 25 bp, Homo sapien
cagcctggatgccttggcataatga

SEQ ID NO: 513821 - DNA, 25 bp, Homo sapien
ttgctggagatgtcagaccacatgg

SEQ ID NO: 513822 - DNA, 25 bp, Homo sapien
cttggctggctgaccgggagtccca

SEQ ID NO: 513823 - DNA, 25 bp, Homo sapien
ccatgcttggatccctctgggctgc

SEQ ID NO: 513824 - DNA, 25 bp, Homo sapien
tcccagaggtgccttgcaacaggaa

SEQ ID NO: 513825 - DNA, 25 bp, Homo sapien
caacatcctggttcgttactgccca

SEQ ID NO: 513826 - DNA, 25 bp, Homo sapien
ggacagtttattatggccaggccat

SEQ ID NO: 513827 - DNA, 25 bp, Homo sapien
tcaggcaaggacataaggctggcca

SEQ ID NO: 513828 - DNA, 25 bp, Homo sapien
tacaggttcatcaggtcttagtcag

SEQ ID NO: 513829 - DNA, 25 bp, Homo sapien
gaaacgcaactctcttcggtgatgc

SEQ ID NO: 513830 - DNA, 25 bp, Homo sapien
gttgtaagactctgttttgaatgtg

SEQ ID NO: 513831 - DNA, 25 bp, Homo sapien
caccggccaacaggagccgaaggag

SEQ ID NO: 513832 - DNA, 25 bp, Homo sapien
aatgtggctgagttgtaagactctg

SEQ ID NO: 513833 - DNA, 25 bp, Homo sapien
tgggagttggaaagagcaaagatat

SEQ ID NO: 513834 - DNA, 25 bp, Homo sapien
tgagtgctgctacgggctcagtgct

SEQ ID NO: 513835 - DNA, 25 bp, Homo sapien
ggaagcgagttctccaatacacaga

SEQ ID NO: 513836 - DNA, 25 bp, Homo sapien
gctttcttaaacactgcagggctca

SEQ ID NO: 513837 - DNA, 25 bp, Homo sapien
gagttcttacaacctgggcttgagg

SEQ ID NO: 513838 - DNA, 25 bp, Homo sapien
gaggcacaggtgttaagcaaccact

SEQ ID NO: 513839 - DNA, 25 bp, Homo sapien
gagcagttacaaagtggcagcagac

SEQ ID NO: 513840 - DNA, 25 bp, Homo sapien
tggaccggcagtggacagacaatat

SEQ ID NO: 513841 - DNA, 25 bp, Homo sapien
catgacctccggtacagctttccag

SEQ ID NO: 513842 - DNA, 25 bp, Homo sapien
aattttccactttctctcgacctgt

SEQ ID NO: 513843 - DNA, 25 bp, Homo sapien
aaataaccctggtgaggcattattg

SEQ ID NO: 513844 - DNA, 25 bp, Homo sapien
gaatagaacatcttctgccgttagt

SEQ ID NO: 513845 - DNA, 25 bp, Homo sapien
tattgcatgactcctcttccaagga

SEQ ID NO: 513846 - DNA, 25 bp, Homo sapien
ggtgctcaactgattcacgattctc

SEQ ID NO: 513847 - DNA, 25 bp, Homo sapien
gaaggtgctcaactgattcacgatt

SEQ ID NO: 513848 - DNA, 25 bp, Homo sapien
actgattcacgattctcaaccacaa

SEQ ID NO: 513849 - DNA, 25 bp, Homo sapien
attctcaaccacaagggacaagcac

SEQ ID NO: 513850 - DNA, 25 bp, Homo sapien
tgagttcctctggtgggcccagagt

SEQ ID NO: 513851 - DNA, 25 bp, Homo sapien
cactgagttcctctggtgggcccag

SEQ ID NO: 513852 - DNA, 25 bp, Homo sapien
actgagttcctctggtgggcccaga

SEQ ID NO: 513853 - DNA, 25 bp, Homo sapien
agttcctctggtgggcccagagtca

SEQ ID NO: 513854 - DNA, 25 bp, Homo sapien
aggctcttctctgatgggggttaga

SEQ ID NO: 513855 - DNA, 25 bp, Homo sapien
tgggggttagagtccccatcctgtg

SEQ ID NO: 513856 - DNA, 25 bp, Homo sapien
gtccccatcctgtgtctactctcca

SEQ ID NO: 513857 - DNA, 25 bp, Homo sapien
tctctgatgggggttagagtcccca

SEQ ID NO: 513858 - DNA, 25 bp, Homo sapien
aaagtgtgttgcacctcccttctca

SEQ ID NO: 513859 - DNA, 25 bp, Homo sapien
tttagccatgagatgtgcctgagtc

SEQ ID NO: 513860 - DNA, 25 bp, Homo sapien
cagcaaataagtggccaaggctggc

SEQ ID NO: 513861 - DNA, 25 bp, Homo sapien
gaggtcaagcaaatcatccaaggcc

SEQ ID NO: 513862 - DNA, 25 bp, Homo sapien
ccctgcatccttggtgtctgaagcc

SEQ ID NO: 513863 - DNA, 25 bp, Homo sapien
tcccctgcatccttggtgtctgaag

SEQ ID NO: 513864 - DNA, 25 bp, Homo sapien
tgcatccttggtgtctgaagccaaa

SEQ ID NO: 513865 - DNA, 25 bp, Homo sapien
cctgcatccttggtgtctgaagcca

SEQ ID NO: 513866 - DNA, 25 bp, Homo sapien
tttgctcttgatggagccctggagc

SEQ ID NO: 513867 - DNA, 25 bp, Homo sapien
ttgctcttgatggagccctggagcc

SEQ ID NO: 513868 - DNA, 25 bp, Homo sapien
ctttgctcttgatggagccctggag

SEQ ID NO: 513869 - DNA, 25 bp, Homo sapien
ggcaggaagaattgaagctgccact

SEQ ID NO: 513870 - DNA, 25 bp, Homo sapien
agaattgaagctgccactttcctgg

SEQ ID NO: 513871 - DNA, 25 bp, Homo sapien
ttgaagcttttctgagccctaacac

SEQ ID NO: 513872 - DNA, 25 bp, Homo sapien
cctaacacttgactcagggttagtc

SEQ ID NO: 513873 - DNA, 25 bp, Homo sapien
aggccaagggcagttgttctcaaca

SEQ ID NO: 513874 - DNA, 25 bp, Homo sapien
taaatcctatttgacggattcaggc

SEQ ID NO: 513875 - DNA, 25 bp, Homo sapien
ttggcagagccaggtggtctcagcc

SEQ ID NO: 513876 - DNA, 25 bp, Homo sapien
aagccagggagcagcaccgatgcac

SEQ ID NO: 513877 - DNA, 25 bp, Homo sapien
gcacagctcgcctcgcccacaacgt

SEQ ID NO: 513878 - DNA, 25 bp, Homo sapien
gatgccctctaaaagaggcgtcttc

SEQ ID NO: 513879 - DNA, 25 bp, Homo sapien
cttcgggcacagctcgcctcgccca

SEQ ID NO: 513880 - DNA, 25 bp, Homo sapien
cagatgccctctaaaagaggcgtct

SEQ ID NO: 513881 - DNA, 25 bp, Homo sapien
taattggaccactccctgtgctttg

SEQ ID NO: 513882 - DNA, 25 bp, Homo sapien
gagaagccgtctgggtgtctcccct

SEQ ID NO: 513883 - DNA, 25 bp, Homo sapien
gcagaaccgcgtaaggagaagccgt

SEQ ID NO: 513884 - DNA, 25 bp, Homo sapien
aaccagagccgagcagcacagagat

SEQ ID NO: 513885 - DNA, 25 bp, Homo sapien
tgttgtcttggcagttgtggatggc

SEQ ID NO: 513886 - DNA, 25 bp, Homo sapien
ctgttgtcttggcagttgtggatgg

SEQ ID NO: 513887 - DNA, 25 bp, Homo sapien
tgtcttggcagttgtggatggccat

SEQ ID NO: 513888 - DNA, 25 bp, Homo sapien
ttgtcttggcagttgtggatggcca

SEQ ID NO: 513889 - DNA, 25 bp, Homo sapien
ttatttgttcacagccaaagacaga

SEQ ID NO: 513890 - DNA, 25 bp, Homo sapien
gagcccatacaacgggagcacttat

SEQ ID NO: 513891 - DNA, 25 bp, Homo sapien
cccaagaacatgctgagcccataca

SEQ ID NO: 513892 - DNA, 25 bp, Homo sapien
gacagaatgtgaagctcaagttcaa

SEQ ID NO: 513893 - DNA, 25 bp, Homo sapien
aaaaatctacttctgaggctaaatg

SEQ ID NO: 513894 - DNA, 25 bp, Homo sapien
caccacaatgctccaagttccacta

SEQ ID NO: 513895 - DNA, 25 bp, Homo sapien
ccacaatgctccaagttccactagt

SEQ ID NO: 513896 - DNA, 25 bp, Homo sapien
aaaaaatctacttctgaggctaaat

SEQ ID NO: 513897 - DNA, 25 bp, Homo sapien
cctttatggctccacgaggtgcacg

SEQ ID NO: 513898 - DNA, 25 bp, Homo sapien
tatcggaccctttgcagattggccc

SEQ ID NO: 513899 - DNA, 25 bp, Homo sapien
gaatctcccattgttgtcacccggt

SEQ ID NO: 513900 - DNA, 25 bp, Homo sapien
tcttcggcaggtgttaggacatgac

SEQ ID NO: 513901 - DNA, 25 bp, Homo sapien
gtgggcaagaactcattgtaacctg

SEQ ID NO: 513902 - DNA, 25 bp, Homo sapien
ttgcagcgttctgaataatagcagg

SEQ ID NO: 513903 - DNA, 25 bp, Homo sapien
gcaatgctccgtttggtaaataaag

SEQ ID NO: 513904 - DNA, 25 bp, Homo sapien
tgttgtccatggcaacaaggctgcg

SEQ ID NO: 513905 - DNA, 25 bp, Homo sapien
agactgagcaggcagctttccaaag

SEQ ID NO: 513906 - DNA, 25 bp, Homo sapien
gactgagcaggcagctttccaaagg

SEQ ID NO: 513907 - DNA, 25 bp, Homo sapien
ctgagcaggcagctttccaaagggc

SEQ ID NO: 513908 - DNA, 25 bp, Homo sapien
actgagcaggcagctttccaaaggg

SEQ ID NO: 513909 - DNA, 25 bp, Homo sapien
gatgattctttcctcctaacgccct

SEQ ID NO: 513910 - DNA, 25 bp, Homo sapien
aactcgccccagactttccaaatgg

SEQ ID NO: 513911 - DNA, 25 bp, Homo sapien
ctaacgccctgcacaagtggctgca

SEQ ID NO: 513912 - DNA, 25 bp, Homo sapien
ggttcctaggaacatccctctgtct

SEQ ID NO: 513913 - DNA, 25 bp, Homo sapien
cctagtaagctttagttgtggccaa

SEQ ID NO: 513914 - DNA, 25 bp, Homo sapien
tcactatctatccaggaagggcaag

SEQ ID NO: 513915 - DNA, 25 bp, Homo sapien
gaatcacccagaaatatgtcccctc

SEQ ID NO: 513916 - DNA, 25 bp, Homo sapien
gcaaagcaccgacatgataagtcag

SEQ ID NO: 513917 - DNA, 25 bp, Homo sapien
aagcagaattaattaggtcatccct

SEQ ID NO: 513918 - DNA, 25 bp, Homo sapien
taattaggtcatccctgcgatgcac

SEQ ID NO: 513919 - DNA, 25 bp, Homo sapien
tcatccctgcgatgcacctcatatt

SEQ ID NO: 513920 - DNA, 25 bp, Homo sapien
ttacatgcaagcttgagagttctcc

SEQ ID NO: 513921 - DNA, 25 bp, Homo sapien
gcttcccatcgggacttggaacacc

SEQ ID NO: 513922 - DNA, 25 bp, Homo sapien
gctctgcttcccatcgggacttgga

SEQ ID NO: 513923 - DNA, 25 bp, Homo sapien
cttcccatcgggacttggaacacct

SEQ ID NO: 513924 - DNA, 25 bp, Homo sapien
tgcttcccatcgggacttggaacac

SEQ ID NO: 513925 - DNA, 25 bp, Homo sapien
tgaagtcacaggaaccctggctaca

SEQ ID NO: 513926 - DNA, 25 bp, Homo sapien
aagtcacaggaaccctggctacaag

SEQ ID NO: 513927 - DNA, 25 bp, Homo sapien
tcacaggaaccctggctacaaggcc

SEQ ID NO: 513928 - DNA, 25 bp, Homo sapien
ctgaagtcacaggaaccctggctac

SEQ ID NO: 513929 - DNA, 25 bp, Homo sapien
tcatcatgccggtgcataggtcgca

SEQ ID NO: 513930 - DNA, 25 bp, Homo sapien
cagtggtgcgtgtagtgagtcatca

SEQ ID NO: 513931 - DNA, 25 bp, Homo sapien
ttcaaagcagtctctcccctaggga

SEQ ID NO: 513932 - DNA, 25 bp, Homo sapien
tcatggtgatgaaactctagctcct

SEQ ID NO: 513933 - DNA, 25 bp, Homo sapien
tcttcagagatagtggtcctgtcca

SEQ ID NO: 513934 - DNA, 25 bp, Homo sapien
caaagagggtatgagctaagtgtca

SEQ ID NO: 513935 - DNA, 25 bp, Homo sapien
ctaagtgtcataaactggagggaac

SEQ ID NO: 513936 - DNA, 25 bp, Homo sapien
tttataacccgttgcaggagagaag

SEQ ID NO: 513937 - DNA, 25 bp, Homo sapien
tgccgtcaagatgttaaaatttctc

SEQ ID NO: 513938 - DNA, 25 bp, Homo sapien
tattaaatgaggtaacgatacaacc

SEQ ID NO: 513939 - DNA, 25 bp, Homo sapien
taaatgaggtaacgatacaacccga

SEQ ID NO: 513940 - DNA, 25 bp, Homo sapien
ttccaaaaagttgccgtcaagatgt

SEQ ID NO: 513941 - DNA, 25 bp, Homo sapien
tttgggagcaaaggagaacacagag

SEQ ID NO: 513942 - DNA, 25 bp, Homo sapien
cagtgtgcttggcaccagagtcgtc

SEQ ID NO: 513943 - DNA, 25 bp, Homo sapien
ttggtgacaccaaactgaagcagtt

SEQ ID NO: 513944 - DNA, 25 bp, Homo sapien
gggacattgaccagccaggctatga

SEQ ID NO: 513945 - DNA, 25 bp, Homo sapien
gaaacaattccgtatgccaagcata

SEQ ID NO: 513946 - DNA, 25 bp, Homo sapien
tgtgctctacactgtcttcatcaag

SEQ ID NO: 513947 - DNA, 25 bp, Homo sapien
aaatgctgctttgtaattgctaaag

SEQ ID NO: 513948 - DNA, 25 bp, Homo sapien
aaggatacgccatagtttgagtttt

SEQ ID NO: 513949 - DNA, 25 bp, Homo sapien
caaatttccctgtcaattgcatcat

SEQ ID NO: 513950 - DNA, 25 bp, Homo sapien
ccattgggcttgtaagaatttctaa

SEQ ID NO: 513951 - DNA, 25 bp, Homo sapien
ctaaaatgttgtacaccacggaaat

SEQ ID NO: 513952 - DNA, 25 bp, Homo sapien
gggtttgtgaaactatcaaccagga

SEQ ID NO: 513953 - DNA, 25 bp, Homo sapien
agttccttcggattgtcaacactct

SEQ ID NO: 513954 - DNA, 25 bp, Homo sapien
tagttccttcggattgtcaacactc

SEQ ID NO: 513955 - DNA, 25 bp, Homo sapien
ttagttccttcggattgtcaacact

SEQ ID NO: 513956 - DNA, 25 bp, Homo sapien
gaagtgatgagccatgcgaataccc

SEQ ID NO: 513957 - DNA, 25 bp, Homo sapien
gatgagccatgcgaatacccttcag

SEQ ID NO: 513958 - DNA, 25 bp, Homo sapien
catgcgaatacccttcaggtgggct

SEQ ID NO: 513959 - DNA, 25 bp, Homo sapien
ttcattgggaagtgatgagccatgc

SEQ ID NO: 513960 - DNA, 25 bp, Homo sapien
agtatttgatatatggcctgttatc

SEQ ID NO: 513961 - DNA, 25 bp, Homo sapien
aagtcagaattaattccaggccaca

SEQ ID NO: 513962 - DNA, 25 bp, Homo sapien
tatggcctgttatcttcatacacag

SEQ ID NO: 513963 - DNA, 25 bp, Homo sapien
cagccaatggtgttgtattaacaat

SEQ ID NO: 513964 - DNA, 25 bp, Homo sapien
ggcgcaggtgtgctagcagggccat

SEQ ID NO: 513965 - DNA, 25 bp, Homo sapien
gcagaggcatggctgaattctaaca

SEQ ID NO: 513966 - DNA, 25 bp, Homo sapien
tggtaggacaggccgccttttcttc

SEQ ID NO: 513967 - DNA, 25 bp, Homo sapien
caggggtgtgagctggcaagggatg

SEQ ID NO: 513968 - DNA, 25 bp, Homo sapien
gacaaaagacctaactcaagctgca

SEQ ID NO: 513969 - DNA, 25 bp, Homo sapien
ccaaggcagcagacaagggtttatc

SEQ ID NO: 513970 - DNA, 25 bp, Homo sapien
caatcatcagatgtagcccaaggca

SEQ ID NO: 513971 - DNA, 25 bp, Homo sapien
catactcagcttgtctcagtggagg

SEQ ID NO: 513972 - DNA, 25 bp, Homo sapien
cattgcacaacataactcagagact

SEQ ID NO: 513973 - DNA, 25 bp, Homo sapien
cataactccacctttcagatgacac

SEQ ID NO: 513974 - DNA, 25 bp, Homo sapien
tcaatgcacaaagtaggaagtagga

SEQ ID NO: 513975 - DNA, 25 bp, Homo sapien
gccactgttatcagcttcttgtaga

SEQ ID NO: 513976 - DNA, 25 bp, Homo sapien
tgctgggcctcctagattcagatcc

SEQ ID NO: 513977 - DNA, 25 bp, Homo sapien
tgtgctaaagctcccaaggatatga

SEQ ID NO: 513978 - DNA, 25 bp, Homo sapien
agagctttcatgagacgttccgaga

SEQ ID NO: 513979 - DNA, 25 bp, Homo sapien
gaatacacagtgaacatggccctag

SEQ ID NO: 513980 - DNA, 25 bp, Homo sapien
tattgcccggcaatgcaacacgtgt

SEQ ID NO: 513981 - DNA, 25 bp, Homo sapien
caacacgtgtaagtggctgcgggac

SEQ ID NO: 513982 - DNA, 25 bp, Homo sapien
tgtcagaccatgagccttggcagtg

SEQ ID NO: 513983 - DNA, 25 bp, Homo sapien
gaagcccagccatagaatagcaagt

SEQ ID NO: 513984 - DNA, 25 bp, Homo sapien
tgttagcaaagccagtacccgttac

SEQ ID NO: 513985 - DNA, 25 bp, Homo sapien
tacccgttacgggtggcagtatcac

SEQ ID NO: 513986 - DNA, 25 bp, Homo sapien
tctccccgacgtctcgtcaggatgt

SEQ ID NO: 513987 - DNA, 25 bp, Homo sapien
tcaccaggagcacgctgttgagcag

SEQ ID NO: 513988 - DNA, 25 bp, Homo sapien
gacaaacaagacgaggtccactcca

SEQ ID NO: 513989 - DNA, 25 bp, Homo sapien
tatacggtaaattccaaccaacatc

SEQ ID NO: 513990 - DNA, 25 bp, Homo sapien
ggaagctgcaagagtatacggtaaa

SEQ ID NO: 513991 - DNA, 25 bp, Homo sapien
gcctcgcagaagtgagtggtaataa

SEQ ID NO: 513992 - DNA, 25 bp, Homo sapien
agatgagacccttgctcccttgcca

SEQ ID NO: 513993 - DNA, 25 bp, Homo sapien
ctgctaagacagatgagacccttgc

SEQ ID NO: 513994 - DNA, 25 bp, Homo sapien
gggccaatctcaagctactgctaag

SEQ ID NO: 513995 - DNA, 25 bp, Homo sapien
caatctcaagctactgctaagacag

SEQ ID NO: 513996 - DNA, 25 bp, Homo sapien
gatcctgggtctgcacacgcgcaaa

SEQ ID NO: 513997 - DNA, 25 bp, Homo sapien
acacgcgcaaacagcagctggactt

SEQ ID NO: 513998 - DNA, 25 bp, Homo sapien
aaacagcagctggacttcggcagct

SEQ ID NO: 513999 - DNA, 25 bp, Homo sapien
tgctttgtctcagaggatcctgggt

SEQ ID NO: 514000 - DNA, 25 bp, Homo sapien
tggcggacaccggttccccagcgct

SEQ ID NO: 514001 - DNA, 25 bp, Homo sapien
ccgcgcagccgtcgcagccaggtgc

SEQ ID NO: 514002 - DNA, 25 bp, Homo sapien
caccggttccccagcgctgggcttt

SEQ ID NO: 514003 - DNA, 25 bp, Homo sapien
agccaggtgctggcccggagcgctg

SEQ ID NO: 514004 - DNA, 25 bp, Homo sapien
ttgtaaaaccgggagaggcagagaa

SEQ ID NO: 514005 - DNA, 25 bp, Homo sapien
attgacagatcctttgtagaccaaa

SEQ ID NO: 514006 - DNA, 25 bp, Homo sapien
tttgtagaccaaatcagcaaggttg

SEQ ID NO: 514007 - DNA, 25 bp, Homo sapien
ctcttgtaaaaccgggagaggcaga

SEQ ID NO: 514008 - DNA, 25 bp, Homo sapien
tgtatggcttggcagaacgtctgtg

SEQ ID NO: 514009 - DNA, 25 bp, Homo sapien
gtatgtcttcccaactaggccctga

SEQ ID NO: 514010 - DNA, 25 bp, Homo sapien
tgataatggcaacactaactagctg

SEQ ID NO: 514011 - DNA, 25 bp, Homo sapien
tattagcaaaccaccactgtgttga

SEQ ID NO: 514012 - DNA, 25 bp, Homo sapien
cccagagagttggtggcgctgccgt

SEQ ID NO: 514013 - DNA, 25 bp, Homo sapien
ctgtcctggaggaccagccatttga

SEQ ID NO: 514014 - DNA, 25 bp, Homo sapien
ggttcttggtttagactctcttctc

SEQ ID NO: 514015 - DNA, 25 bp, Homo sapien
aggtcccggggatcactcctcctag

SEQ ID NO: 514016 - DNA, 25 bp, Homo sapien
ttccacttcttcccttcctcggcca

SEQ ID NO: 514017 - DNA, 25 bp, Homo sapien
gattccacttcttcccttcctcggc

SEQ ID NO: 514018 - DNA, 25 bp, Homo sapien
tccacttcttcccttcctcggccac

SEQ ID NO: 514019 - DNA, 25 bp, Homo sapien
cctgtcctgacgccccgtctagcca

SEQ ID NO: 514020 - DNA, 25 bp, Homo sapien
cccgtctagccaccgggccagagct

SEQ ID NO: 514021 - DNA, 25 bp, Homo sapien
acgccccgtctagccaccgggccag

SEQ ID NO: 514022 - DNA, 25 bp, Homo sapien
tcctgacgccccgtctagccaccgg

SEQ ID NO: 514023 - DNA, 25 bp, Homo sapien
tcctttaagggaagcaattgcccag

SEQ ID NO: 514024 - DNA, 25 bp, Homo sapien
ttgggccccgctgatgcatcaaagt

SEQ ID NO: 514025 - DNA, 25 bp, Homo sapien
gctaaatcctaagccgagcgctggt

SEQ ID NO: 514026 - DNA, 25 bp, Homo sapien
tgtcctgaggctactccaagggagt

SEQ ID NO: 514027 - DNA, 25 bp, Homo sapien
tctgaagtcttgatcaggactgagg

SEQ ID NO: 514028 - DNA, 25 bp, Homo sapien
cctgtgtggctgacaagctgatgct

SEQ ID NO: 514029 - DNA, 25 bp, Homo sapien
gtggctgacaagctgatgctggcct

SEQ ID NO: 514030 - DNA, 25 bp, Homo sapien
tcacctgtgtggctgacaagctgat

SEQ ID NO: 514031 - DNA, 25 bp, Homo sapien
caatctggcgtgtcttctaggctca

SEQ ID NO: 514032 - DNA, 25 bp, Homo sapien
gaggaaacgttctactgcaagccga

SEQ ID NO: 514033 - DNA, 25 bp, Homo sapien
cattcacaaataagagcccctgcgg

SEQ ID NO: 514034 - DNA, 25 bp, Homo sapien
taacaagtcttaagccaggccctga

SEQ ID NO: 514035 - DNA, 25 bp, Homo sapien
tgttgtcaaaaacactgagcctctt

SEQ ID NO: 514036 - DNA, 25 bp, Homo sapien
caagaactgacatcaagaaagacgc

SEQ ID NO: 514037 - DNA, 25 bp, Homo sapien
ccaaatgaagaggtgcaataggttc

SEQ ID NO: 514038 - DNA, 25 bp, Homo sapien
gaaatgcttacttcctctactctac

SEQ ID NO: 514039 - DNA, 25 bp, Homo sapien
gggtttgttgctcccactggtggca

SEQ ID NO: 514040 - DNA, 25 bp, Homo sapien
ggaaagccatcccttactagtgagg

SEQ ID NO: 514041 - DNA, 25 bp, Homo sapien
tgactataggtcaaaatgaaccaca

SEQ ID NO: 514042 - DNA, 25 bp, Homo sapien
tggtggcaagaagtgcacccgtgac

SEQ ID NO: 514043 - DNA, 25 bp, Homo sapien
gtgatcctgcgagacactgtgtcca

SEQ ID NO: 514044 - DNA, 25 bp, Homo sapien
tactgggagacaaacactgaaacaa

SEQ ID NO: 514045 - DNA, 25 bp, Homo sapien
tccctgctgccgtaccatcatatga

SEQ ID NO: 514046 - DNA, 25 bp, Homo sapien
taatgagattagcaaagtagcagca

SEQ ID NO: 514047 - DNA, 25 bp, Homo sapien
gctcccaggaagtttaagttgccaa

SEQ ID NO: 514048 - DNA, 25 bp, Homo sapien
tagtgacggctcctaaaacttcagg

SEQ ID NO: 514049 - DNA, 25 bp, Homo sapien
tacagagtcgttagagaaactgcca

SEQ ID NO: 514050 - DNA, 25 bp, Homo sapien
caatactgaaggaaccgaagtccac

SEQ ID NO: 514051 - DNA, 25 bp, Homo sapien
tgttttgcgttagccacagagagtg

SEQ ID NO: 514052 - DNA, 25 bp, Homo sapien
aaagttctcaacctagacaaggaca

SEQ ID NO: 514053 - DNA, 25 bp, Homo sapien
gcataaattgcctaatgagacacat

SEQ ID NO: 514054 - DNA, 25 bp, Homo sapien
taacgccaggatcatttacttgtga

SEQ ID NO: 514055 - DNA, 25 bp, Homo sapien
gataggtccctcatgttgacagagc

SEQ ID NO: 514056 - DNA, 25 bp, Homo sapien
taaaatatcacactgcgcccttgct

SEQ ID NO: 514057 - DNA, 25 bp, Homo sapien
gagggagactagcaaactctcgcca

SEQ ID NO: 514058 - DNA, 25 bp, Homo sapien
cgtggaataccagcacaaagccggg

SEQ ID NO: 514059 - DNA, 25 bp, Homo sapien
gacttaagccattgatacgccgtct

SEQ ID NO: 514060 - DNA, 25 bp, Homo sapien
gaaagtgcacggatttcttctggac

SEQ ID NO: 514061 - DNA, 25 bp, Homo sapien
ctgcagcagagacagacttagcaat

SEQ ID NO: 514062 - DNA, 25 bp, Homo sapien
ttgatacgccgtctcattgccatta

SEQ ID NO: 514063 - DNA, 25 bp, Homo sapien
tgtcagcaccagaatagccctcaat

SEQ ID NO: 514064 - DNA, 25 bp, Homo sapien
tatcaggatctaattcgacctcacg

SEQ ID NO: 514065 - DNA, 25 bp, Homo sapien
tatcttccagttgaatatcaggatc

SEQ ID NO: 514066 - DNA, 25 bp, Homo sapien
caatcttctcggctatatcttccag

SEQ ID NO: 514067 - DNA, 25 bp, Homo sapien
gtcagactacccaatagccagcgtg

SEQ ID NO: 514068 - DNA, 25 bp, Homo sapien
agtggccggaccctggtgcttgctt

SEQ ID NO: 514069 - DNA, 25 bp, Homo sapien
taagaacagctgactatccacaggg

SEQ ID NO: 514070 - DNA, 25 bp, Homo sapien
tcaggtcctacatcatactgtgcac

SEQ ID NO: 514071 - DNA, 25 bp, Homo sapien
tgttgggagaggtatatatatcctt

SEQ ID NO: 514072 - DNA, 25 bp, Homo sapien
ttgggagaggtatatatatcctttt

SEQ ID NO: 514073 - DNA, 25 bp, Homo sapien
gaggtatatatatccttttttctaa

SEQ ID NO: 514074 - DNA, 25 bp, Homo sapien
ctgttgggagaggtatatatatcct

SEQ ID NO: 514075 - DNA, 25 bp, Homo sapien
cttcatcaatgtcccacgggaaatt

SEQ ID NO: 514076 - DNA, 25 bp, Homo sapien
cacgggaaattagtagcagccaata

SEQ ID NO: 514077 - DNA, 25 bp, Homo sapien
aatgtcccacgggaaattagtagca

SEQ ID NO: 514078 - DNA, 25 bp, Homo sapien
tagcagccaataccataaccatttt

SEQ ID NO: 514079 - DNA, 25 bp, Homo sapien
cagaggttcctcttcgactgcagat

SEQ ID NO: 514080 - DNA, 25 bp, Homo sapien
tctcatcaatgaagatcgtggtagg

SEQ ID NO: 514081 - DNA, 25 bp, Homo sapien
gcgacttgcctcatgttcatcagag

SEQ ID NO: 514082 - DNA, 25 bp, Homo sapien
agttcagacttgaccctgcgacttg

SEQ ID NO: 514083 - DNA, 25 bp, Homo sapien
tagcatagttttaccagtgcctggg

SEQ ID NO: 514084 - DNA, 25 bp, Homo sapien
tgtcagtgtagaagacgaaacgttg

SEQ ID NO: 514085 - DNA, 25 bp, Homo sapien
gacgaactaacttctcagattcacc

SEQ ID NO: 514086 - DNA, 25 bp, Homo sapien
catctcaaacaacagacgaactaac

SEQ ID NO: 514087 - DNA, 25 bp, Homo sapien
ccacggtacccagccaagaagtagt

SEQ ID NO: 514088 - DNA, 25 bp, Homo sapien
aatactacaaaagcacagcaaggac

SEQ ID NO: 514089 - DNA, 25 bp, Homo sapien
taaatactacaaaagcacagcaagg

SEQ ID NO: 514090 - DNA, 25 bp, Homo sapien
aacacagctaaagacctctttttag

SEQ ID NO: 514091 - DNA, 25 bp, Homo sapien
ccatggccttctaatccctttgaaa

SEQ ID NO: 514092 - DNA, 25 bp, Homo sapien
acattggaagaacaacagcttccct

SEQ ID NO: 514093 - DNA, 25 bp, Homo sapien
ttgaaaaagtcaggcatccacattg

SEQ ID NO: 514094 - DNA, 25 bp, Homo sapien
ttcttccagatctgctatgtcatcc

SEQ ID NO: 514095 - DNA, 25 bp, Homo sapien
cacttgcaccatcttgcatattctt

SEQ ID NO: 514096 - DNA, 25 bp, Homo sapien
tccaccagatccttatcataaccag

SEQ ID NO: 514097 - DNA, 25 bp, Homo sapien
tcataaccagcaccatcaaattttg

SEQ ID NO: 514098 - DNA, 25 bp, Homo sapien
cctggatacaatgtctctttcaagg

SEQ ID NO: 514099 - DNA, 25 bp, Homo sapien
aatttatggcattagaaatcagaac

SEQ ID NO: 514100 - DNA, 25 bp, Homo sapien
ggtatatgctcactagaaattcatg

SEQ ID NO: 514101 - DNA, 25 bp, Homo sapien
cttctgaggtgccaaatgttcgatt

SEQ ID NO: 514102 - DNA, 25 bp, Homo sapien
gcaactgaaacttcccctctgtagg

SEQ ID NO: 514103 - DNA, 25 bp, Homo sapien
cttgctctatagtccttgtccctac

SEQ ID NO: 514104 - DNA, 25 bp, Homo sapien
ttgtagaaggcttttcactctttga

SEQ ID NO: 514105 - DNA, 25 bp, Homo sapien
gaggtcttacttctcgattgggacg

SEQ ID NO: 514106 - DNA, 25 bp, Homo sapien
tttcactctttgatataggatgtgc

SEQ ID NO: 514107 - DNA, 25 bp, Homo sapien
atgtgctcggcctacaggtccccgg

SEQ ID NO: 514108 - DNA, 25 bp, Homo sapien
caaagacaataaaatgagaccaaca

SEQ ID NO: 514109 - DNA, 25 bp, Homo sapien
cctgagtcagatttatgggtatggc

SEQ ID NO: 514110 - DNA, 25 bp, Homo sapien
cacacagaatttgcatcaagtttgc

SEQ ID NO: 514111 - DNA, 25 bp, Homo sapien
gcggcttcacctgctatttaaatag

SEQ ID NO: 514112 - DNA, 25 bp, Homo sapien
cagctggatgccaggctgcttgccc

SEQ ID NO: 514113 - DNA, 25 bp, Homo sapien
ctcccagctggatgccaggctgctt

SEQ ID NO: 514114 - DNA, 25 bp, Homo sapien
ccatccctcccagctggatgccagg

SEQ ID NO: 514115 - DNA, 25 bp, Homo sapien
atccctcccagctggatgccaggct

SEQ ID NO: 514116 - DNA, 25 bp, Homo sapien
tattttatcagcccttgcatacatt

SEQ ID NO: 514117 - DNA, 25 bp, Homo sapien
agtctaaatttgcaatctgaatatt

SEQ ID NO: 514118 - DNA, 25 bp, Homo sapien
tttaagtctaaatttgcaatctgaa

SEQ ID NO: 514119 - DNA, 25 bp, Homo sapien
tttattttatcagcccttgcataca

SEQ ID NO: 514120 - DNA, 25 bp, Homo sapien
ttaacttgttcatattcctccaata

SEQ ID NO: 514121 - DNA, 25 bp, Homo sapien
ggaaatctggaggcttgtcaatttt

SEQ ID NO: 514122 - DNA, 25 bp, Homo sapien
aacagcaggatctctaaatggttca

SEQ ID NO: 514123 - DNA, 25 bp, Homo sapien
aaactttctaaagtgctgacaatac

SEQ ID NO: 514124 - DNA, 25 bp, Homo sapien
taccattgatgagtcgtaatttcca

SEQ ID NO: 514125 - DNA, 25 bp, Homo sapien
cattatcacaaatctcagccaaatt

SEQ ID NO: 514126 - DNA, 25 bp, Homo sapien
tgcatcaccccctggtaatatacca

SEQ ID NO: 514127 - DNA, 25 bp, Homo sapien
catttgcctttgatagctggatctc

SEQ ID NO: 514128 - DNA, 25 bp, Homo sapien
cctccacctgaatatcccataggaa

SEQ ID NO: 514129 - DNA, 25 bp, Homo sapien
acttatctatatgcaaacttctaac

SEQ ID NO: 514130 - DNA, 25 bp, Homo sapien
ggaacctctaacaaatgctcaaaac

SEQ ID NO: 514131 - DNA, 25 bp, Homo sapien
tgctcaaaactcaactaatatcttt

SEQ ID NO: 514132 - DNA, 25 bp, Homo sapien
gaaggtttcgtaaatctgtgtcagc

SEQ ID NO: 514133 - DNA, 25 bp, Homo sapien
taccagcaagtctttgagtcaactc

SEQ ID NO: 514134 - DNA, 25 bp, Homo sapien
tgagaaattctgaataacactggaa

SEQ ID NO: 514135 - DNA, 25 bp, Homo sapien
caactctaaggactcaagtgtactc

SEQ ID NO: 514136 - DNA, 25 bp, Homo sapien
caggtctcacatccaatgtgtgaca

SEQ ID NO: 514137 - DNA, 25 bp, Homo sapien
gtctcacatccaatgtgtgacatac

SEQ ID NO: 514138 - DNA, 25 bp, Homo sapien
taaaacacggtttctcaggtctcac

SEQ ID NO: 514139 - DNA, 25 bp, Homo sapien
ttaaaacacggtttctcaggtctca

SEQ ID NO: 514140 - DNA, 25 bp, Homo sapien
acggttctgcaccgaaaggcagcaa

SEQ ID NO: 514141 - DNA, 25 bp, Homo sapien
cggttctgcaccgaaaggcagcaac

SEQ ID NO: 514142 - DNA, 25 bp, Homo sapien
atacggttctgcaccgaaaggcagc

SEQ ID NO: 514143 - DNA, 25 bp, Homo sapien
tacggttctgcaccgaaaggcagca

SEQ ID NO: 514144 - DNA, 25 bp, Homo sapien
tcagaggcgccgaagacccgaggcc

SEQ ID NO: 514145 - DNA, 25 bp, Homo sapien
ctgagcgctgcaactggggcgggcc

SEQ ID NO: 514146 - DNA, 25 bp, Homo sapien
gctacagggcgggaagcccgaggct

SEQ ID NO: 514147 - DNA, 25 bp, Homo sapien
gggcgggcccagctacagggcggga

SEQ ID NO: 514148 - DNA, 25 bp, Homo sapien
gccccctcaagacaaagagagattt

SEQ ID NO: 514149 - DNA, 25 bp, Homo sapien
agccccctcaagacaaagagagatt

SEQ ID NO: 514150 - DNA, 25 bp, Homo sapien
acagagcccaggtccgcgaccactc

SEQ ID NO: 514151 - DNA, 25 bp, Homo sapien
caggtccgcgaccactcaacagccc

SEQ ID NO: 514152 - DNA, 25 bp, Homo sapien
tagctcgcgacgtgcgtgaaaaggc

SEQ ID NO: 514153 - DNA, 25 bp, Homo sapien
cgggcacattcagcgatgcggtcca

SEQ ID NO: 514154 - DNA, 25 bp, Homo sapien
cgccgagtccgttagctcgcgacgt

SEQ ID NO: 514155 - DNA, 25 bp, Homo sapien
cagaaggcgcaggtccgggcacatt

SEQ ID NO: 514156 - DNA, 25 bp, Homo sapien
acgtgtggccgactgagctctggtc

SEQ ID NO: 514157 - DNA, 25 bp, Homo sapien
tctccagtcaaaccgaattgaagtc

SEQ ID NO: 514158 - DNA, 25 bp, Homo sapien
gtcgtgcttgatgagcctgcctcca

SEQ ID NO: 514159 - DNA, 25 bp, Homo sapien
tgtgtggatcctacgccacctctgt

SEQ ID NO: 514160 - DNA, 25 bp, Homo sapien
tcaaggattgcaccgtcacttctgg

SEQ ID NO: 514161 - DNA, 25 bp, Homo sapien
agccaactctttagaaggtttggag

SEQ ID NO: 514162 - DNA, 25 bp, Homo sapien
tactcctgctgacacataatttcga

SEQ ID NO: 514163 - DNA, 25 bp, Homo sapien
tcacttctggctctcagttcttgct

SEQ ID NO: 514164 - DNA, 25 bp, Homo sapien
tttttaatcaagtaccccacatgac

SEQ ID NO: 514165 - DNA, 25 bp, Homo sapien
ttcaggtcctccaaaatagtcccag

SEQ ID NO: 514166 - DNA, 25 bp, Homo sapien
gggtggttaaggacacatacagcca

SEQ ID NO: 514167 - DNA, 25 bp, Homo sapien
tatgacatgttgtggacttgaaggg

SEQ ID NO: 514168 - DNA, 25 bp, Homo sapien
tgtgaacccagaatgcactcagtgt

SEQ ID NO: 514169 - DNA, 25 bp, Homo sapien
tctctccttcagacgcttttttgac

SEQ ID NO: 514170 - DNA, 25 bp, Homo sapien
accctcggaagcctggtctgctcag

SEQ ID NO: 514171 - DNA, 25 bp, Homo sapien
aaaattcaggaatgcagtagaggag

SEQ ID NO: 514172 - DNA, 25 bp, Homo sapien
gtttctcgtatgaatgagttgcagt

SEQ ID NO: 514173 - DNA, 25 bp, Homo sapien
gcctacatttcgtgtgtttctcgta

SEQ ID NO: 514174 - DNA, 25 bp, Homo sapien
cctctggcccctaattacaattctg

SEQ ID NO: 514175 - DNA, 25 bp, Homo sapien
cacaggcataaatcttgacatggtc

SEQ ID NO: 514176 - DNA, 25 bp, Homo sapien
ctgccctcacgctttgcacctgtga

SEQ ID NO: 514177 - DNA, 25 bp, Homo sapien
cttacagctgccctcacgctttgca

SEQ ID NO: 514178 - DNA, 25 bp, Homo sapien
atgtggactctccttcttcgggtgc

SEQ ID NO: 514179 - DNA, 25 bp, Homo sapien
tgtggactctccttcttcgggtgcc

SEQ ID NO: 514180 - DNA, 25 bp, Homo sapien
gagatgatggctttagttagactgg

SEQ ID NO: 514181 - DNA, 25 bp, Homo sapien
gggcaagctgtttatcccttgggtg

SEQ ID NO: 514182 - DNA, 25 bp, Homo sapien
atgagattttatggcgggcaagctg

SEQ ID NO: 514183 - DNA, 25 bp, Homo sapien
cacctggcaggactaatgagatttt

SEQ ID NO: 514184 - DNA, 25 bp, Homo sapien
catagagatataggttgtaagtaag

SEQ ID NO: 514185 - DNA, 25 bp, Homo sapien
tgactgatacaattctgcaaataca

SEQ ID NO: 514186 - DNA, 25 bp, Homo sapien
taagtgaatgcatgcacccatggct

SEQ ID NO: 514187 - DNA, 25 bp, Homo sapien
aataaatgaaccgtgtgactgatac

SEQ ID NO: 514188 - DNA, 25 bp, Homo sapien
aggcaaaggtggtggtgatccagtg

SEQ ID NO: 514189 - DNA, 25 bp, Homo sapien
ggcaaaggtggtggtgatccagtgg

SEQ ID NO: 514190 - DNA, 25 bp, Homo sapien
gcaaaggtggtggtgatccagtggc

SEQ ID NO: 514191 - DNA, 25 bp, Homo sapien
tccagtctggtaacaggaaggcagg

SEQ ID NO: 514192 - DNA, 25 bp, Homo sapien
ttggcacgagcagtccatctctagg

SEQ ID NO: 514193 - DNA, 25 bp, Homo sapien
ggcagggtgccaatggagggctcca

SEQ ID NO: 514194 - DNA, 25 bp, Homo sapien
gccccatggattggcacgagcagtc

SEQ ID NO: 514195 - DNA, 25 bp, Homo sapien
ttaaagcagaaaccacggtatacag

SEQ ID NO: 514196 - DNA, 25 bp, Homo sapien
tggcccaggggcatcaataatgata

SEQ ID NO: 514197 - DNA, 25 bp, Homo sapien
agaagactccggcagtgtttaagaa

SEQ ID NO: 514198 - DNA, 25 bp, Homo sapien
gaatctgaggtagaaacaattaaag

SEQ ID NO: 514199 - DNA, 25 bp, Homo sapien
gctctttctcgggggactggagtca

SEQ ID NO: 514200 - DNA, 25 bp, Homo sapien
ctttctcgggggactggagtcatca

SEQ ID NO: 514201 - DNA, 25 bp, Homo sapien
ttccttccttcccaggccagtcctc

SEQ ID NO: 514202 - DNA, 25 bp, Homo sapien
gccagaaggctctttctcgggggac

SEQ ID NO: 514203 - DNA, 25 bp, Homo sapien
gagcaggccctgatgcaagaggaac

SEQ ID NO: 514204 - DNA, 25 bp, Homo sapien
cccagtagacccctgataagctgca

SEQ ID NO: 514205 - DNA, 25 bp, Homo sapien
tactttgccaactcttaatccagga

SEQ ID NO: 514206 - DNA, 25 bp, Homo sapien
ggaacaggactcatttgcactcaac

SEQ ID NO: 514207 - DNA, 25 bp, Homo sapien
taaagtgagcccagcatgcatcagg

SEQ ID NO: 514208 - DNA, 25 bp, Homo sapien
atcaggaggctaggtgggtcaccac

SEQ ID NO: 514209 - DNA, 25 bp, Homo sapien
tctaagagggtctacaaagcctgca

SEQ ID NO: 514210 - DNA, 25 bp, Homo sapien
gaaaagccatctcgatatgacaagg

SEQ ID NO: 514211 - DNA, 25 bp, Homo sapien
cttatgagtctcctagcactggaca

SEQ ID NO: 514212 - DNA, 25 bp, Homo sapien
tctctgcatcaggtggtccggagtc

SEQ ID NO: 514213 - DNA, 25 bp, Homo sapien
ggccgtttctctccaacttatgagt

SEQ ID NO: 514214 - DNA, 25 bp, Homo sapien
ttctataaatcaggccgtttctctc

SEQ ID NO: 514215 - DNA, 25 bp, Homo sapien
gggcgagtccttgtcacacatttct

SEQ ID NO: 514216 - DNA, 25 bp, Homo sapien
acaccaaacgtgctgtaactgagga

SEQ ID NO: 514217 - DNA, 25 bp, Homo sapien
ttcttggaggtcaggtcaatccacc

SEQ ID NO: 514218 - DNA, 25 bp, Homo sapien
tgtgagcccaaaattatgctggcag

SEQ ID NO: 514219 - DNA, 25 bp, Homo sapien
tgaggcattcattctgacagtgtgt

SEQ ID NO: 514220 - DNA, 25 bp, Homo sapien
gagaaaggaagctggcggttgggca

SEQ ID NO: 514221 - DNA, 25 bp, Homo sapien
ttttcacttagacatctgttagtgg

SEQ ID NO: 514222 - DNA, 25 bp, Homo sapien
gtgtgttccagctgcacggcgatgg

SEQ ID NO: 514223 - DNA, 25 bp, Homo sapien
ctgggtggtaagcagcccaggccct

SEQ ID NO: 514224 - DNA, 25 bp, Homo sapien
tgcagccacaccttgtgctcacata

SEQ ID NO: 514225 - DNA, 25 bp, Homo sapien
tccacactgggtggtaagcagccca

SEQ ID NO: 514226 - DNA, 25 bp, Homo sapien
cacatagaaatgcttccacactggg

SEQ ID NO: 514227 - DNA, 25 bp, Homo sapien
gaattttgtaaccagggctgccagt

SEQ ID NO: 514228 - DNA, 25 bp, Homo sapien
agctgccactctgagcatctagacc

SEQ ID NO: 514229 - DNA, 25 bp, Homo sapien
ctgccagtggccctctttacctctt

SEQ ID NO: 514230 - DNA, 25 bp, Homo sapien
ctgatacccgaattttgtaaccagg

SEQ ID NO: 514231 - DNA, 25 bp, Homo sapien
ggctgcagtaagggtactgcactcc

SEQ ID NO: 514232 - DNA, 25 bp, Homo sapien
aaggctgcagtaagggtactgcact

SEQ ID NO: 514233 - DNA, 25 bp, Homo sapien
tctctcatggtacatgggcctcagt

SEQ ID NO: 514234 - DNA, 25 bp, Homo sapien
catctctcatggtacatgggcctca

SEQ ID NO: 514235 - DNA, 25 bp, Homo sapien
agtgcactgagtacaccctcatttt

SEQ ID NO: 514236 - DNA, 25 bp, Homo sapien
gtgcactgagtacaccctcattttg

SEQ ID NO: 514237 - DNA, 25 bp, Homo sapien
cggaagcattgatgtaaagaactgt

SEQ ID NO: 514238 - DNA, 25 bp, Homo sapien
gacggaagcattgatgtaaagaact

SEQ ID NO: 514239 - DNA, 25 bp, Homo sapien
gaagcattgatgtaaagaactgtgt

SEQ ID NO: 514240 - DNA, 25 bp, Homo sapien
cattgatgtaaagaactgtgtttgt

SEQ ID NO: 514241 - DNA, 25 bp, Homo sapien
atcacttgagcacggggaggtcgag

SEQ ID NO: 514242 - DNA, 25 bp, Homo sapien
cctaggtgacagagcaagactctgt

SEQ ID NO: 514243 - DNA, 25 bp, Homo sapien
gctgcagtgagctgtgatggcacca

SEQ ID NO: 514244 - DNA, 25 bp, Homo sapien
ctgcactccagcctaggtgacagag

SEQ ID NO: 514245 - DNA, 25 bp, Homo sapien
cagaaaggaatcaagaccaggctac

SEQ ID NO: 514246 - DNA, 25 bp, Homo sapien
taaattgtcagaggtagaatgctgg

SEQ ID NO: 514247 - DNA, 25 bp, Homo sapien
tatttcatcagtccccggtcaaacg

SEQ ID NO: 514248 - DNA, 25 bp, Homo sapien
cactcaagtggtatgtggacgactt

SEQ ID NO: 514249 - DNA, 25 bp, Homo sapien
gacagtagcacacagaacccagttt

SEQ ID NO: 514250 - DNA, 25 bp, Homo sapien
taaaatcagcatcccggagatccct

SEQ ID NO: 514251 - DNA, 25 bp, Homo sapien
cactccaagcagtcaaaagtctctg

SEQ ID NO: 514252 - DNA, 25 bp, Homo sapien
aaagtctctgaaagtgtgttgccca

SEQ ID NO: 514253 - DNA, 25 bp, Homo sapien
tgcaaaaggcccaatctcagactcc

SEQ ID NO: 514254 - DNA, 25 bp, Homo sapien
gccagtgcctggatgcaaaaggccc

SEQ ID NO: 514255 - DNA, 25 bp, Homo sapien
cctggatgcaaaaggcccaatctca

SEQ ID NO: 514256 - DNA, 25 bp, Homo sapien
aaggcccaatctcagactccatgtg

SEQ ID NO: 514257 - DNA, 25 bp, Homo sapien
gcattttgccctaaaactgctttcc

SEQ ID NO: 514258 - DNA, 25 bp, Homo sapien
gattctctctcaggcatttagcgac

SEQ ID NO: 514259 - DNA, 25 bp, Homo sapien
agcattttgatatctccagagtctc

SEQ ID NO: 514260 - DNA, 25 bp, Homo sapien
gctgcttttactggtcacgattctc

SEQ ID NO: 514261 - DNA, 25 bp, Homo sapien
cctgctgctgagctggattgatagt

SEQ ID NO: 514262 - DNA, 25 bp, Homo sapien
agagcccagactcgcatcagcttaa

SEQ ID NO: 514263 - DNA, 25 bp, Homo sapien
gactcgcatcagcttaacaatctgc

SEQ ID NO: 514264 - DNA, 25 bp, Homo sapien
gcccagactcgcatcagcttaacaa

SEQ ID NO: 514265 - DNA, 25 bp, Homo sapien
gcagagcccagactcgcatcagctt

SEQ ID NO: 514266 - DNA, 25 bp, Homo sapien
caaagcgcttttgcttgcatgatcg

SEQ ID NO: 514267 - DNA, 25 bp, Homo sapien
gggaaagatgtttccatcactcaga

SEQ ID NO: 514268 - DNA, 25 bp, Homo sapien
gagtgatccgcttatcgaggctttt

SEQ ID NO: 514269 - DNA, 25 bp, Homo sapien
taagcatgggtataagcactacttc

SEQ ID NO: 514270 - DNA, 25 bp, Homo sapien
cagacggtcacttaagggaaattgg

SEQ ID NO: 514271 - DNA, 25 bp, Homo sapien
acctctatgtgcagacggtcactta

SEQ ID NO: 514272 - DNA, 25 bp, Homo sapien
tccagcctcaatagcacctctatgt

SEQ ID NO: 514273 - DNA, 25 bp, Homo sapien
tatgtgcagacggtcacttaaggga

SEQ ID NO: 514274 - DNA, 25 bp, Homo sapien
cgtaatctgacaatggagaactttg

SEQ ID NO: 514275 - DNA, 25 bp, Homo sapien
tggggtagttgcaggcaacaccctc

SEQ ID NO: 514276 - DNA, 25 bp, Homo sapien
cttaaactgccaccgcagggatctg

SEQ ID NO: 514277 - DNA, 25 bp, Homo sapien
tttcatgcccatcaggcagcgtaat

SEQ ID NO: 514278 - DNA, 25 bp, Homo sapien
gaagaggctccagctgaaaacacca

SEQ ID NO: 514279 - DNA, 25 bp, Homo sapien
cgtaaatatcgagaggctgccacgc

SEQ ID NO: 514280 - DNA, 25 bp, Homo sapien
gcgctagggtccgtaaatatcgaga

SEQ ID NO: 514281 - DNA, 25 bp, Homo sapien
attgaagccaggagtgagcgctagg

SEQ ID NO: 514282 - DNA, 25 bp, Homo sapien
catttctttggcaggagctttggct

SEQ ID NO: 514283 - DNA, 25 bp, Homo sapien
ttccattttcatcaacgtgactgtg

SEQ ID NO: 514284 - DNA, 25 bp, Homo sapien
cactctctcatcatgtgcctttgct

SEQ ID NO: 514285 - DNA, 25 bp, Homo sapien
caacgtgactgtgttgggtcaggct

SEQ ID NO: 514286 - DNA, 25 bp, Homo sapien
aggcataggccatcactcccagcta

SEQ ID NO: 514287 - DNA, 25 bp, Homo sapien
cctcctcttaccaggttcaagcagt

SEQ ID NO: 514288 - DNA, 25 bp, Homo sapien
tacaggcataggccatcactcccag

SEQ ID NO: 514289 - DNA, 25 bp, Homo sapien
ggcataggccatcactcccagctaa

SEQ ID NO: 514290 - DNA, 25 bp, Homo sapien
ggaggttataatgagccgaaatagc

SEQ ID NO: 514291 - DNA, 25 bp, Homo sapien
gaggttataatgagccgaaatagcg

SEQ ID NO: 514292 - DNA, 25 bp, Homo sapien
cctttaatgatgtttcactaacgtt

SEQ ID NO: 514293 - DNA, 25 bp, Homo sapien
cactaacgtttgaatgctccccttt

SEQ ID NO: 514294 - DNA, 25 bp, Homo sapien
caatgaacaggacctttaatgatgt

SEQ ID NO: 514295 - DNA, 25 bp, Homo sapien
ctggaccctcaatgaacaggacctt

SEQ ID NO: 514296 - DNA, 25 bp, Homo sapien
tgccccattcgcctgcaaagccagt

SEQ ID NO: 514297 - DNA, 25 bp, Homo sapien
aaatgcaccaatccctgaaagaggc

SEQ ID NO: 514298 - DNA, 25 bp, Homo sapien
cagttgccttgagctgatgcaccat

SEQ ID NO: 514299 - DNA, 25 bp, Homo sapien
gccacaccagttgccttgagctgat

SEQ ID NO: 514300 - DNA, 25 bp, Homo sapien
ttcagctgcaaaaggtcgtctggca

SEQ ID NO: 514301 - DNA, 25 bp, Homo sapien
tgttcatacagagacagcgaccgca

SEQ ID NO: 514302 - DNA, 25 bp, Homo sapien
gaagcatgttggtctcctggcagtt

SEQ ID NO: 514303 - DNA, 25 bp, Homo sapien
gggccatgtgacataaccgccaggt

SEQ ID NO: 514304 - DNA, 25 bp, Homo sapien
ggttgcaggttaaccagacatgcag

SEQ ID NO: 514305 - DNA, 25 bp, Homo sapien
tgctttgtgtggttgcaggttaacc

SEQ ID NO: 514306 - DNA, 25 bp, Homo sapien
acatgcagctaggagttcacctaaa

SEQ ID NO: 514307 - DNA, 25 bp, Homo sapien
taccccagctgctttgtgtggttgc

SEQ ID NO: 514308 - DNA, 25 bp, Homo sapien
agtgttcagggatagttacttcatt

SEQ ID NO: 514309 - DNA, 25 bp, Homo sapien
ctgagtattgatcccagtgttcagg

SEQ ID NO: 514310 - DNA, 25 bp, Homo sapien
cagtgttcagggatagttacttcat

SEQ ID NO: 514311 - DNA, 25 bp, Homo sapien
ttttaaaatatgctgtagaggccgg

SEQ ID NO: 514312 - DNA, 25 bp, Homo sapien
ttaaaatatgctgtagaggccgggc

SEQ ID NO: 514313 - DNA, 25 bp, Homo sapien
gccttttaaaatatgctgtagaggc

SEQ ID NO: 514314 - DNA, 25 bp, Homo sapien
taaaatatgctgtagaggccgggcg

SEQ ID NO: 514315 - DNA, 25 bp, Homo sapien
agttaacggcaaataaatggcccag

SEQ ID NO: 514316 - DNA, 25 bp, Homo sapien
ttggcaatgtggctaagtcaggcag

SEQ ID NO: 514317 - DNA, 25 bp, Homo sapien
ccagtgggctgtgtaagttaacggc

SEQ ID NO: 514318 - DNA, 25 bp, Homo sapien
tgtcctggtgacagtccggtgcagc

SEQ ID NO: 514319 - DNA, 25 bp, Homo sapien
cacggccagttggttagaacgtgta

SEQ ID NO: 514320 - DNA, 25 bp, Homo sapien
tggttagaacgtgtagggagtgtac

SEQ ID NO: 514321 - DNA, 25 bp, Homo sapien
ccagttggttagaacgtgtagggag

SEQ ID NO: 514322 - DNA, 25 bp, Homo sapien
acggccagttggttagaacgtgtag

SEQ ID NO: 514323 - DNA, 25 bp, Homo sapien
tctcccagccgtggaatcccctcac

SEQ ID NO: 514324 - DNA, 25 bp, Homo sapien
ctctcccagccgtggaatcccctca

SEQ ID NO: 514325 - DNA, 25 bp, Homo sapien
acttgatccaaagcccttcctctga

SEQ ID NO: 514326 - DNA, 25 bp, Homo sapien
tcaaagactttcatggccgagtgtg

SEQ ID NO: 514327 - DNA, 25 bp, Homo sapien
tggtctgaccacacttgatccaaag

SEQ ID NO: 514328 - DNA, 25 bp, Homo sapien
tcagctccacgtcacaacctcgtga

SEQ ID NO: 514329 - DNA, 25 bp, Homo sapien
cacacactgtgagatccttgagggc

SEQ ID NO: 514330 - DNA, 25 bp, Homo sapien
tgagatccttgagggcacgttgtct

SEQ ID NO: 514331 - DNA, 25 bp, Homo sapien
caccacacactgtgagatccttgag

SEQ ID NO: 514332 - DNA, 25 bp, Homo sapien
ccttgagggcacgttgtctctttca

SEQ ID NO: 514333 - DNA, 25 bp, Homo sapien
cacactgcgcctgaagagcgtttga

SEQ ID NO: 514334 - DNA, 25 bp, Homo sapien
tcaacgcttgatggtttggcaggcg

SEQ ID NO: 514335 - DNA, 25 bp, Homo sapien
gaaggcgctggagcatcaacgcttg

SEQ ID NO: 514336 - DNA, 25 bp, Homo sapien
cagcatcaggagagtgtcatacagc

SEQ ID NO: 514337 - DNA, 25 bp, Homo sapien
ggtggaggtgcttcggaccttctcc

SEQ ID NO: 514338 - DNA, 25 bp, Homo sapien
ggcactatgtctagtcaatctctaa

SEQ ID NO: 514339 - DNA, 25 bp, Homo sapien
ggtagatgctctagtgcatggtata

SEQ ID NO: 514340 - DNA, 25 bp, Homo sapien
acagaggtggaggtgcttcggacct

SEQ ID NO: 514341 - DNA, 25 bp, Homo sapien
cacagcttcctggttcagcagcttt

SEQ ID NO: 514342 - DNA, 25 bp, Homo sapien
cttcctggttcagcagctttccggc

SEQ ID NO: 514343 - DNA, 25 bp, Homo sapien
cagcacagcttcctggttcagcagc

SEQ ID NO: 514344 - DNA, 25 bp, Homo sapien
cagcatcagcacagcttcctggttc

SEQ ID NO: 514345 - DNA, 25 bp, Homo sapien
tacagcagctacctgactaagccag

SEQ ID NO: 514346 - DNA, 25 bp, Homo sapien
caggcaatgtggtttttgagttcac

SEQ ID NO: 514347 - DNA, 25 bp, Homo sapien
acctggacctagacccactctgtag

SEQ ID NO: 514348 - DNA, 25 bp, Homo sapien
gtggttctgagactgtacctggacc

SEQ ID NO: 514349 - DNA, 25 bp, Homo sapien
gcctcagccagtaggtttggctaga

SEQ ID NO: 514350 - DNA, 25 bp, Homo sapien
aaacggccccagagctcaatcctat

SEQ ID NO: 514351 - DNA, 25 bp, Homo sapien
cagcggcctggctgacgcttcttgt

SEQ ID NO: 514352 - DNA, 25 bp, Homo sapien
caggaatgacgtggacttgtaaacg

SEQ ID NO: 514353 - DNA, 25 bp, Homo sapien
aggaaagggaagtaaatcgccgcag

SEQ ID NO: 514354 - DNA, 25 bp, Homo sapien
gattacgggatcatatagtctaggc

SEQ ID NO: 514355 - DNA, 25 bp, Homo sapien
taccatctgcttatgccctcggaat

SEQ ID NO: 514356 - DNA, 25 bp, Homo sapien
gtctaggctgcaactataccatctg

SEQ ID NO: 514357 - DNA, 25 bp, Homo sapien
gccaggcggcagcaagattcttcat

SEQ ID NO: 514358 - DNA, 25 bp, Homo sapien
taaaagcaggttacgtcctgaaaga

SEQ ID NO: 514359 - DNA, 25 bp, Homo sapien
gttcagaagctcctccacgtaaaag

SEQ ID NO: 514360 - DNA, 25 bp, Homo sapien
aataacgaagtagctgccaggcggc

SEQ ID NO: 514361 - DNA, 25 bp, Homo sapien
tttgttgacaatcatggacgttctc

SEQ ID NO: 514362 - DNA, 25 bp, Homo sapien
gacctttctcgggaaagcacagctt

SEQ ID NO: 514363 - DNA, 25 bp, Homo sapien
cccagtccttggtggtgactgacct

SEQ ID NO: 514364 - DNA, 25 bp, Homo sapien
caatcatggacgttctcaaggagat

SEQ ID NO: 514365 - DNA, 25 bp, Homo sapien
tgccacccgggtttgagcaattatc

SEQ ID NO: 514366 - DNA, 25 bp, Homo sapien
gccacccgggtttgagcaattatct

SEQ ID NO: 514367 - DNA, 25 bp, Homo sapien
tctgccacccgggtttgagcaatta

SEQ ID NO: 514368 - DNA, 25 bp, Homo sapien
cacccgggtttgagcaattatcttg

SEQ ID NO: 514369 - DNA, 25 bp, Homo sapien
tggaaaaggcggctacgctgggcaa

SEQ ID NO: 514370 - DNA, 25 bp, Homo sapien
aggtttggaaaaggcggctacgctg

SEQ ID NO: 514371 - DNA, 25 bp, Homo sapien
tttggaaaaggcggctacgctgggc

SEQ ID NO: 514372 - DNA, 25 bp, Homo sapien
aaaaggcggctacgctgggcaagtt

SEQ ID NO: 514373 - DNA, 25 bp, Homo sapien
taatgattgccagtcggcttctgcg

SEQ ID NO: 514374 - DNA, 25 bp, Homo sapien
cagaggctccagttgtttcgtaagg

SEQ ID NO: 514375 - DNA, 25 bp, Homo sapien
tctgtgcaacgtgattccccaggcg

SEQ ID NO: 514376 - DNA, 25 bp, Homo sapien
tattgcagtaaaagcctgtgggact

SEQ ID NO: 514377 - DNA, 25 bp, Homo sapien
tctccggagtgtcctctgagactgg

SEQ ID NO: 514378 - DNA, 25 bp, Homo sapien
gagtctccggagtgtcctctgagac

SEQ ID NO: 514379 - DNA, 25 bp, Homo sapien
cagagtctccggagtgtcctctgag

SEQ ID NO: 514380 - DNA, 25 bp, Homo sapien
ctgccagagtctccggagtgtcctc

SEQ ID NO: 514381 - DNA, 25 bp, Homo sapien
gctgaatgaagaaccggcttgcaaa

SEQ ID NO: 514382 - DNA, 25 bp, Homo sapien
tgtgagttcaccaaatggaggcgcg

SEQ ID NO: 514383 - DNA, 25 bp, Homo sapien
tgcaaaggagaagcgcgtgcagtcc

SEQ ID NO: 514384 - DNA, 25 bp, Homo sapien
ggtcctcacctttgaaacgccggca

SEQ ID NO: 514385 - DNA, 25 bp, Homo sapien
ggacacagctagatcctcatgtctg

SEQ ID NO: 514386 - DNA, 25 bp, Homo sapien
tgctcaactgcagtctgtttgcgac

SEQ ID NO: 514387 - DNA, 25 bp, Homo sapien
ggtgtttacagctcttggccatact

SEQ ID NO: 514388 - DNA, 25 bp, Homo sapien
tttgaggacctcagagtagacactg

SEQ ID NO: 514389 - DNA, 25 bp, Homo sapien
tcctggagaactgtccggtcattca

SEQ ID NO: 514390 - DNA, 25 bp, Homo sapien
cctggagaactgtccggtcattcat

SEQ ID NO: 514391 - DNA, 25 bp, Homo sapien
tgtggcccttcctttgtagaagctg

SEQ ID NO: 514392 - DNA, 25 bp, Homo sapien
gtaggaattccttagcagccgcctt

SEQ ID NO: 514393 - DNA, 25 bp, Homo sapien
cagggcccactccacaatataagga

SEQ ID NO: 514394 - DNA, 25 bp, Homo sapien
actagggatagttggccatgctgga

SEQ ID NO: 514395 - DNA, 25 bp, Homo sapien
ggtctgtctgccagtaattagtgct

SEQ ID NO: 514396 - DNA, 25 bp, Homo sapien
ctaatttattgacttggcaagggct

SEQ ID NO: 514397 - DNA, 25 bp, Homo sapien
gaaatcaactttccagcagagtacc

SEQ ID NO: 514398 - DNA, 25 bp, Homo sapien
caagtaatccagtccctcatagcac

SEQ ID NO: 514399 - DNA, 25 bp, Homo sapien
cacagtctgggagcctagaatcagc

SEQ ID NO: 514400 - DNA, 25 bp, Homo sapien
tctgatgtggatattgtcggaaagc

SEQ ID NO: 514401 - DNA, 25 bp, Homo sapien
cagccagcgtatgtcagaagaaaca

SEQ ID NO: 514402 - DNA, 25 bp, Homo sapien
tcggaaagcgtgtgcattgtacagc

SEQ ID NO: 514403 - DNA, 25 bp, Homo sapien
gatcattaagcaaacagatgtcaga

SEQ ID NO: 514404 - DNA, 25 bp, Homo sapien
agggtgtaggcagagatcattaagc

SEQ ID NO: 514405 - DNA, 25 bp, Homo sapien
agctccttacctggttcagctacca

SEQ ID NO: 514406 - DNA, 25 bp, Homo sapien
ggacagaaagctccttacctggttc

SEQ ID NO: 514407 - DNA, 25 bp, Homo sapien
ttaatgtccattttgcctgccccat

SEQ ID NO: 514408 - DNA, 25 bp, Homo sapien
cttaatgtccattttgcctgcccca

SEQ ID NO: 514409 - DNA, 25 bp, Homo sapien
ttgtcctcaaacccactgtcacttt

SEQ ID NO: 514410 - DNA, 25 bp, Homo sapien
cttgtcctcaaacccactgtcactt

SEQ ID NO: 514411 - DNA, 25 bp, Homo sapien
tcccagtttctgcggcgttgagcgg

SEQ ID NO: 514412 - DNA, 25 bp, Homo sapien
agggtcccagtttctgcggcgttga

SEQ ID NO: 514413 - DNA, 25 bp, Homo sapien
ggtcccagtttctgcggcgttgagc

SEQ ID NO: 514414 - DNA, 25 bp, Homo sapien
tgagcgggtccggtactcctttcca

SEQ ID NO: 514415 - DNA, 25 bp, Homo sapien
tccctggagggcgtgcgtaaaatgc

SEQ ID NO: 514416 - DNA, 25 bp, Homo sapien
gaaaaactgggagcggagtcaggct

SEQ ID NO: 514417 - DNA, 25 bp, Homo sapien
gcagcggagcggtgaggagattacc

SEQ ID NO: 514418 - DNA, 25 bp, Homo sapien
ccagctgcagctgtcggtgctattt

SEQ ID NO: 514419 - DNA, 25 bp, Homo sapien
gagtcccctactagcaggctgccta

SEQ ID NO: 514420 - DNA, 25 bp, Homo sapien
gcctactcatcaatcaagtagttgt

SEQ ID NO: 514421 - DNA, 25 bp, Homo sapien
gcaggctgcctactcatcaatcaag

SEQ ID NO: 514422 - DNA, 25 bp, Homo sapien
gagtgaaggagtcccctactagcag

SEQ ID NO: 514423 - DNA, 25 bp, Homo sapien
catcctccctgggtttatgtatttt

SEQ ID NO: 514424 - DNA, 25 bp, Homo sapien
tggatctatttgagggtaaagaaat

SEQ ID NO: 514425 - DNA, 25 bp, Homo sapien
gaaattcatcctccctgggtttatg

SEQ ID NO: 514426 - DNA, 25 bp, Homo sapien
gaattggatctatttgagggtaaag

SEQ ID NO: 514427 - DNA, 25 bp, Homo sapien
cctttggtttgaatgcaacatgcct

SEQ ID NO: 514428 - DNA, 25 bp, Homo sapien
tgcctagagatagggaactggaatc

SEQ ID NO: 514429 - DNA, 25 bp, Homo sapien
gaactggaatccaacaccgttgcct

SEQ ID NO: 514430 - DNA, 25 bp, Homo sapien
tgcctacagatctttggagactaaa

SEQ ID NO: 514431 - DNA, 25 bp, Homo sapien
tgggctggagcaagcctcccaactt

SEQ ID NO: 514432 - DNA, 25 bp, Homo sapien
cccactactcaagaggccgaggagg

SEQ ID NO: 514433 - DNA, 25 bp, Homo sapien
gctggagcaagcctcccaacttggc

SEQ ID NO: 514434 - DNA, 25 bp, Homo sapien
gtcccactactcaagaggccgagga

SEQ ID NO: 514435 - DNA, 25 bp, Homo sapien
agtggattacttatttagttactgc

SEQ ID NO: 514436 - DNA, 25 bp, Homo sapien
ggattacttatttagttactgcagt

SEQ ID NO: 514437 - DNA, 25 bp, Homo sapien
acagtggattacttatttagttact

SEQ ID NO: 514438 - DNA, 25 bp, Homo sapien
cctcattttcacacagtggattact

SEQ ID NO: 514439 - DNA, 25 bp, Homo sapien
tgtattatggagcaccatactgtgg

SEQ ID NO: 514440 - DNA, 25 bp, Homo sapien
tactgtggaatgtcacgtacatgac

SEQ ID NO: 514441 - DNA, 25 bp, Homo sapien
gatgttcagcgcagtactgttaaac

SEQ ID NO: 514442 - DNA, 25 bp, Homo sapien
ctgaagacccacacatgcctgagag

SEQ ID NO: 514443 - DNA, 25 bp, Homo sapien
gtgatgtcaagcaaggcagtaccca

SEQ ID NO: 514444 - DNA, 25 bp, Homo sapien
gaaagctatcagaccctttcaggag

SEQ ID NO: 514445 - DNA, 25 bp, Homo sapien
tctaagacttaagctgtgtacggtg

SEQ ID NO: 514446 - DNA, 25 bp, Homo sapien
gaaccaccatcttttgctggataga

SEQ ID NO: 514447 - DNA, 25 bp, Homo sapien
cctgttgaatggcagtttgtgttac

SEQ ID NO: 514448 - DNA, 25 bp, Homo sapien
caatggttacaattccttaggtagt

SEQ ID NO: 514449 - DNA, 25 bp, Homo sapien
cctacaatgtctgagcaatggttac

SEQ ID NO: 514450 - DNA, 25 bp, Homo sapien
gcccggcctctcctgtagttttcaa

SEQ ID NO: 514451 - DNA, 25 bp, Homo sapien
ttacccctcgggtacacaggacaca

SEQ ID NO: 514452 - DNA, 25 bp, Homo sapien
acaacactgtgatgggacgatcatc

SEQ ID NO: 514453 - DNA, 25 bp, Homo sapien
tgatgttcgacacaattgcagccta

SEQ ID NO: 514454 - DNA, 25 bp, Homo sapien
gatctgtggtcaagaataaacccta

SEQ ID NO: 514455 - DNA, 25 bp, Homo sapien
gactcagatgttcagtattcctcct

SEQ ID NO: 514456 - DNA, 25 bp, Homo sapien
gaaagtctcgtttcctgagcagtcc

SEQ ID NO: 514457 - DNA, 25 bp, Homo sapien
taatctcgaaaaccacaaaattgcc

SEQ ID NO: 514458 - DNA, 25 bp, Homo sapien
gggaaaagacatctatagccagcat

SEQ ID NO: 514459 - DNA, 25 bp, Homo sapien
tattagctaactatatgaaaggata

SEQ ID NO: 514460 - DNA, 25 bp, Homo sapien
tgaaaggataaacactgtaataatt

SEQ ID NO: 514461 - DNA, 25 bp, Homo sapien
caaaagctttttattagctaactat

SEQ ID NO: 514462 - DNA, 25 bp, Homo sapien
aaagactagcttcccctcaagaaga

SEQ ID NO: 514463 - DNA, 25 bp, Homo sapien
tcagaatgtcaacaaaacagctgca

SEQ ID NO: 514464 - DNA, 25 bp, Homo sapien
ttcagaatgtcaacaaaacagctgc

SEQ ID NO: 514465 - DNA, 25 bp, Homo sapien
cattcagaatgtcaacaaaacagct

SEQ ID NO: 514466 - DNA, 25 bp, Homo sapien
attcagaatgtcaacaaaacagctg

SEQ ID NO: 514467 - DNA, 25 bp, Homo sapien
ctcatcttcctcctcttccttcttt

SEQ ID NO: 514468 - DNA, 25 bp, Homo sapien
catcttcctcctcttccttcttttt

SEQ ID NO: 514469 - DNA, 25 bp, Homo sapien
ctcctcatcctcttcatcttcctca

SEQ ID NO: 514470 - DNA, 25 bp, Homo sapien
cctcatcctcttcatcttcctcatc

SEQ ID NO: 514471 - DNA, 25 bp, Homo sapien
ttcctttagctcgatatgcagcaat

SEQ ID NO: 514472 - DNA, 25 bp, Homo sapien
cttgcttttttcagccttgacaact

SEQ ID NO: 514473 - DNA, 25 bp, Homo sapien
tcagccttgacaactcccttttttg

SEQ ID NO: 514474 - DNA, 25 bp, Homo sapien
gccttgacaactcccttttttgctg

SEQ ID NO: 514475 - DNA, 25 bp, Homo sapien
gaacatggcagaactttatgaaaga

SEQ ID NO: 514476 - DNA, 25 bp, Homo sapien
ccaaagcaaagggaggataaaacag

SEQ ID NO: 514477 - DNA, 25 bp, Homo sapien
aaagaaatcaagattctagttatac

SEQ ID NO: 514478 - DNA, 25 bp, Homo sapien
agaaatagaacatggcagaacttta

SEQ ID NO: 514479 - DNA, 25 bp, Homo sapien
aaatatcacgtatctgtagatccac

SEQ ID NO: 514480 - DNA, 25 bp, Homo sapien
aatatcacgtatctgtagatccaca

SEQ ID NO: 514481 - DNA, 25 bp, Homo sapien
caaaatatcacgtatctgtagatcc

SEQ ID NO: 514482 - DNA, 25 bp, Homo sapien
aaaatatcacgtatctgtagatcca

SEQ ID NO: 514483 - DNA, 25 bp, Homo sapien
caccttctgaatgcaaaaaagcact

SEQ ID NO: 514484 - DNA, 25 bp, Homo sapien
tccttagtaggaaatgtggtcttaa

SEQ ID NO: 514485 - DNA, 25 bp, Homo sapien
cattgaggtgcaattatgtaccaca

SEQ ID NO: 514486 - DNA, 25 bp, Homo sapien
cagagcagcagacttgtaatttaac

SEQ ID NO: 514487 - DNA, 25 bp, Homo sapien
aatgtttcaggatatgactaagaaa

SEQ ID NO: 514488 - DNA, 25 bp, Homo sapien
aaggaaaagaacataaatgtttcag

SEQ ID NO: 514489 - DNA, 25 bp, Homo sapien
gaacataaatgtttcaggatatgac

SEQ ID NO: 514490 - DNA, 25 bp, Homo sapien
gaaaagaacataaatgtttcaggat

SEQ ID NO: 514491 - DNA, 25 bp, Homo sapien
tgtatgccaagccatttgaaaatgc

SEQ ID NO: 514492 - DNA, 25 bp, Homo sapien
ccatttgaaaatgctcatttttgac

SEQ ID NO: 514493 - DNA, 25 bp, Homo sapien
agcctgtttttgtactgtatgccaa

SEQ ID NO: 514494 - DNA, 25 bp, Homo sapien
gaagtgactaccaacattttcatga

SEQ ID NO: 514495 - DNA, 25 bp, Homo sapien
ggatgaggacttatatcaacaccat

SEQ ID NO: 514496 - DNA, 25 bp, Homo sapien
gtctgagtctgattacattttagtc

SEQ ID NO: 514497 - DNA, 25 bp, Homo sapien
actaagtacaatcatacatctggcg

SEQ ID NO: 514498 - DNA, 25 bp, Homo sapien
cattttaccaagcaaacccacactt

SEQ ID NO: 514499 - DNA, 25 bp, Homo sapien
ttcatatttttccttcagcttcgca

SEQ ID NO: 514500 - DNA, 25 bp, Homo sapien
atatttttccttcagcttcgcagcc

SEQ ID NO: 514501 - DNA, 25 bp, Homo sapien
ttttcatatttttccttcagcttcg

SEQ ID NO: 514502 - DNA, 25 bp, Homo sapien
catatttttccttcagcttcgcagc

SEQ ID NO: 514503 - DNA, 25 bp, Homo sapien
agagcagaagaggaagaaggccgaa

SEQ ID NO: 514504 - DNA, 25 bp, Homo sapien
gcgatactcagagcagaagaggaag

SEQ ID NO: 514505 - DNA, 25 bp, Homo sapien
atttttgggcgatactcagagcaga

SEQ ID NO: 514506 - DNA, 25 bp, Homo sapien
tgggcgatactcagagcagaagagg

SEQ ID NO: 514507 - DNA, 25 bp, Homo sapien
tgtctcccctttgggagggatatag

SEQ ID NO: 514508 - DNA, 25 bp, Homo sapien
gatccttgaacttcttttttgtctc

SEQ ID NO: 514509 - DNA, 25 bp, Homo sapien
gaggcctcttgggtgcattgggatc

SEQ ID NO: 514510 - DNA, 25 bp, Homo sapien
ttgtctcccctttgggagggatata

SEQ ID NO: 514511 - DNA, 25 bp, Homo sapien
cttgtccgcttttgccatatcttca

SEQ ID NO: 514512 - DNA, 25 bp, Homo sapien
attttcctttctctttagcagacat

SEQ ID NO: 514513 - DNA, 25 bp, Homo sapien
catatcttcaaattttcctttctct

SEQ ID NO: 514514 - DNA, 25 bp, Homo sapien
ttcctttctctttagcagacatggt

SEQ ID NO: 514515 - DNA, 25 bp, Homo sapien
gtaaattatcctcaaaaccaatgtc

SEQ ID NO: 514516 - DNA, 25 bp, Homo sapien
cactacgagaatgccaactaggctt

SEQ ID NO: 514517 - DNA, 25 bp, Homo sapien
ttttttgcatcctcaattggaaact

SEQ ID NO: 514518 - DNA, 25 bp, Homo sapien
tcttttgctatgtaatagcgtccca

SEQ ID NO: 514519 - DNA, 25 bp, Homo sapien
tcttcttatgctcctcccgacaagt

SEQ ID NO: 514520 - DNA, 25 bp, Homo sapien
atatgatgacattttgcctctcggc

SEQ ID NO: 514521 - DNA, 25 bp, Homo sapien
gcatatgatgacattttgcctctcg

SEQ ID NO: 514522 - DNA, 25 bp, Homo sapien
atctgggtgcttcttcttatgctcc

SEQ ID NO: 514523 - DNA, 25 bp, Homo sapien
cgagtcgactcttcctaattatggg

SEQ ID NO: 514524 - DNA, 25 bp, Homo sapien
agtattccctatctatccgcccgag

SEQ ID NO: 514525 - DNA, 25 bp, Homo sapien
ttcagggcgatctcaaaaagtctag

SEQ ID NO: 514526 - DNA, 25 bp, Homo sapien
taaacaagggcctaagcgagtcgac

SEQ ID NO: 514527 - DNA, 25 bp, Homo sapien
gtggcggtgccaccgcgaggcagcc

SEQ ID NO: 514528 - DNA, 25 bp, Homo sapien
ctctttgcataaaactttgctccaa

SEQ ID NO: 514529 - DNA, 25 bp, Homo sapien
gggtggcggtgccaccgcgaggcag

SEQ ID NO: 514530 - DNA, 25 bp, Homo sapien
tcaaaaaacaccctctttgcataaa

SEQ ID NO: 514531 - DNA, 25 bp, Homo sapien
ccgagtaaacaaggatgagggacaa

SEQ ID NO: 514532 - DNA, 25 bp, Homo sapien
ttctgttctgactaaacacgtccgg

SEQ ID NO: 514533 - DNA, 25 bp, Homo sapien
cgtttcctatcggtttggccctgag

SEQ ID NO: 514534 - DNA, 25 bp, Homo sapien
ggtctgaagtttctccgagtaaaca

SEQ ID NO: 514535 - DNA, 25 bp, Homo sapien
cattttgtcaggctcggcgcaggga

SEQ ID NO: 514536 - DNA, 25 bp, Homo sapien
cccgctcgaaatgggggctggctcc

SEQ ID NO: 514537 - DNA, 25 bp, Homo sapien
gcgcagggagaagccccgctcgaaa

SEQ ID NO: 514538 - DNA, 25 bp, Homo sapien
gccgccgcccccattttgtcaggct

SEQ ID NO: 514539 - DNA, 25 bp, Homo sapien
gcccgagtcagccatgttccagcga

SEQ ID NO: 514540 - DNA, 25 bp, Homo sapien
cgggcccgagtcagccatgttccag

SEQ ID NO: 514541 - DNA, 25 bp, Homo sapien
agcgccgggcccgagtcagccatgt

SEQ ID NO: 514542 - DNA, 25 bp, Homo sapien
gtcagccatgttccagcgagcgcag

SEQ ID NO: 514543 - DNA, 25 bp, Homo sapien
tgaccagagcccgtttgctattggc

SEQ ID NO: 514544 - DNA, 25 bp, Homo sapien
cagccagcgcggctcctattggcta

SEQ ID NO: 514545 - DNA, 25 bp, Homo sapien
gatacctcccattgtcctgaccaga

SEQ ID NO: 514546 - DNA, 25 bp, Homo sapien
catcaaggattgaaacagcgcgcaa

SEQ ID NO: 514547 - DNA, 25 bp, Homo sapien
cagcagctgctacgggaaagcagag

SEQ ID NO: 514548 - DNA, 25 bp, Homo sapien
tgtgtgcatgtgtctaacccaagcc

SEQ ID NO: 514549 - DNA, 25 bp, Homo sapien
ccaaagccgttgagataagaggccc

SEQ ID NO: 514550 - DNA, 25 bp, Homo sapien
tcctcaggcaaaagagacacccaca

SEQ ID NO: 514551 - DNA, 25 bp, Homo sapien
catgatccagccagccgggtttaaa

SEQ ID NO: 514552 - DNA, 25 bp, Homo sapien
gacactatgggatcatgtcccctga

SEQ ID NO: 514553 - DNA, 25 bp, Homo sapien
cataagccgtcacgtcaggctcgct

SEQ ID NO: 514554 - DNA, 25 bp, Homo sapien
ccttcaaaagtgagggcgacactat

SEQ ID NO: 514555 - DNA, 25 bp, Homo sapien
gcattcaccatctgctaggatcata

SEQ ID NO: 514556 - DNA, 25 bp, Homo sapien
ggcaggacacctgaaggtactcttt

SEQ ID NO: 514557 - DNA, 25 bp, Homo sapien
ctcaggccgcaagcgtctatggtgg

SEQ ID NO: 514558 - DNA, 25 bp, Homo sapien
gagatcaagatggtaaagaccaagc

SEQ ID NO: 514559 - DNA, 25 bp, Homo sapien
caagactgtccgagctcaaagaact

SEQ ID NO: 514560 - DNA, 25 bp, Homo sapien
tgataccgtagtgtctgtaattcca

SEQ ID NO: 514561 - DNA, 25 bp, Homo sapien
tgggagcacccatggaaaaaatcac

SEQ ID NO: 514562 - DNA, 25 bp, Homo sapien
taataaaggtattgcagggctgggt

SEQ ID NO: 514563 - DNA, 25 bp, Homo sapien
gaagtattagtgtcaattcacagca

SEQ ID NO: 514564 - DNA, 25 bp, Homo sapien
tacaaaccagcagtgttcctacaaa

SEQ ID NO: 514565 - DNA, 25 bp, Homo sapien
tgagagaacgaaggagagctacaaa

SEQ ID NO: 514566 - DNA, 25 bp, Homo sapien
taattacgtttatcacatgactggc

SEQ ID NO: 514567 - DNA, 25 bp, Homo sapien
gagatctgctgacattctttctagc

SEQ ID NO: 514568 - DNA, 25 bp, Homo sapien
gaagggcatattctcctcagttgtg

SEQ ID NO: 514569 - DNA, 25 bp, Homo sapien
tgggtggaagcatttgagatctgct

SEQ ID NO: 514570 - DNA, 25 bp, Homo sapien
tctagcttctggactgaagggcata

SEQ ID NO: 514571 - DNA, 25 bp, Homo sapien
tccttccatctcacacgaagaccgg

SEQ ID NO: 514572 - DNA, 25 bp, Homo sapien
cttgttgtttctggccaacgtgtcc

SEQ ID NO: 514573 - DNA, 25 bp, Homo sapien
cgaagaccggtccttgttgtttctg

SEQ ID NO: 514574 - DNA, 25 bp, Homo sapien
tgtttctggccaacgtgtccacctc

SEQ ID NO: 514575 - DNA, 25 bp, Homo sapien
ggtaaatgtgctctaaggggcctct

SEQ ID NO: 514576 - DNA, 25 bp, Homo sapien
gacagtccatgcaccttttgagcca

SEQ ID NO: 514577 - DNA, 25 bp, Homo sapien
tgagtgcacgattgtaaaaccacat

SEQ ID NO: 514578 - DNA, 25 bp, Homo sapien
ctcctgcatccttcaatactgagtg

SEQ ID NO: 514579 - DNA, 25 bp, Homo sapien
ctgcagcactgattgtagtattcat

SEQ ID NO: 514580 - DNA, 25 bp, Homo sapien
tatgttaccgagtttggactcaaac

SEQ ID NO: 514581 - DNA, 25 bp, Homo sapien
aaactctaggtgacctttctaatca

SEQ ID NO: 514582 - DNA, 25 bp, Homo sapien
caatcacctttttataaacgactgc

SEQ ID NO: 514583 - DNA, 25 bp, Homo sapien
ctgggaccgcaggtagatgccatca

SEQ ID NO: 514584 - DNA, 25 bp, Homo sapien
ataaagaactgctggacacatatac

SEQ ID NO: 514585 - DNA, 25 bp, Homo sapien
taaagaactgctggacacatataca

SEQ ID NO: 514586 - DNA, 25 bp, Homo sapien
ggtcacattgtatttcaccacaggc

SEQ ID NO: 514587 - DNA, 25 bp, Homo sapien
taaccatctgcagtttatacacttg

SEQ ID NO: 514588 - DNA, 25 bp, Homo sapien
tatttcttaattggaaccttgcctg

SEQ ID NO: 514589 - DNA, 25 bp, Homo sapien
tgtaggccagacagaacaaatcggc

SEQ ID NO: 514590 - DNA, 25 bp, Homo sapien
tatgaatgacatatgattgcctgtg

SEQ ID NO: 514591 - DNA, 25 bp, Homo sapien
tcagatgtcggtggtccacagtggc

SEQ ID NO: 514592 - DNA, 25 bp, Homo sapien
gcctgtgtctatgccaccacttccc

SEQ ID NO: 514593 - DNA, 25 bp, Homo sapien
gtctatgccaccacttcccctgaga

SEQ ID NO: 514594 - DNA, 25 bp, Homo sapien
acagagccccagagtagtgctaatg

SEQ ID NO: 514595 - DNA, 25 bp, Homo sapien
gccccagagtagtgctaatgtgctg

SEQ ID NO: 514596 - DNA, 25 bp, Homo sapien
tctgagggtcctgaaaaggattggt

SEQ ID NO: 514597 - DNA, 25 bp, Homo sapien
tggagtcttcatgaaaggaatgagg

SEQ ID NO: 514598 - DNA, 25 bp, Homo sapien
ggctctaacttgatcccagagtatg

SEQ ID NO: 514599 - DNA, 25 bp, Homo sapien
gtggcgattgcaatcaacttattaa

SEQ ID NO: 514600 - DNA, 25 bp, Homo sapien
gatcttcttgatttcacgttgagtc

SEQ ID NO: 514601 - DNA, 25 bp, Homo sapien
cctggaaaaggctctaacttgatcc

SEQ ID NO: 514602 - DNA, 25 bp, Homo sapien
tgctgcttctgcattagagtgatgg

SEQ ID NO: 514603 - DNA, 25 bp, Homo sapien
tcagctatagggtcattgattccat

SEQ ID NO: 514604 - DNA, 25 bp, Homo sapien
gggatcatccagatctgtaggcttc

SEQ ID NO: 514605 - DNA, 25 bp, Homo sapien
gaggcatggttgaagtctgctttag

SEQ ID NO: 514606 - DNA, 25 bp, Homo sapien
tccacgtctaatgtggtgagagtct

SEQ ID NO: 514607 - DNA, 25 bp, Homo sapien
ctgtagggacgctcctcttttctct

SEQ ID NO: 514608 - DNA, 25 bp, Homo sapien
catattctgtgtgtagaaccctcgg

SEQ ID NO: 514609 - DNA, 25 bp, Homo sapien
tgctgtgtcatgaacctggatgtgc

SEQ ID NO: 514610 - DNA, 25 bp, Homo sapien
gctggccacactctacgtctaagag

SEQ ID NO: 514611 - DNA, 25 bp, Homo sapien
gctaattagacgtgttccatcagag

SEQ ID NO: 514612 - DNA, 25 bp, Homo sapien
gtataaccagagtgcccaaagttct

SEQ ID NO: 514613 - DNA, 25 bp, Homo sapien
tggtaaatggttgctcagctacatc

SEQ ID NO: 514614 - DNA, 25 bp, Homo sapien
tcaatgcccaccatgggtgtatttg

SEQ ID NO: 514615 - DNA, 25 bp, Homo sapien
tgggtactctcttggccccgtgttg

SEQ ID NO: 514616 - DNA, 25 bp, Homo sapien
cttgccatatgcctgaagctcagct

SEQ ID NO: 514617 - DNA, 25 bp, Homo sapien
ttgccatatgcctgaagctcagctt

SEQ ID NO: 514618 - DNA, 25 bp, Homo sapien
ccatatgcctgaagctcagcttgct

SEQ ID NO: 514619 - DNA, 25 bp, Homo sapien
tgccatatgcctgaagctcagcttg

SEQ ID NO: 514620 - DNA, 25 bp, Homo sapien
tagcttctgaactttccatgcctcc

SEQ ID NO: 514621 - DNA, 25 bp, Homo sapien
tttagcttctgaactttccatgcct

SEQ ID NO: 514622 - DNA, 25 bp, Homo sapien
cttgtttgttttagcttctgaactt

SEQ ID NO: 514623 - DNA, 25 bp, Homo sapien
ttgttttagcttctgaactttccat

SEQ ID NO: 514624 - DNA, 25 bp, Homo sapien
tggtgttgagcgcatccagagtagt

SEQ ID NO: 514625 - DNA, 25 bp, Homo sapien
tgttgagcgcatccagagtagtgcg

SEQ ID NO: 514626 - DNA, 25 bp, Homo sapien
atccagagtagtgcggccccgcctg

SEQ ID NO: 514627 - DNA, 25 bp, Homo sapien
gcgcatccagagtagtgcggccccg

SEQ ID NO: 514628 - DNA, 25 bp, Homo sapien
ctgttttccaatgccggccaatctc

SEQ ID NO: 514629 - DNA, 25 bp, Homo sapien
tgacatccgctcattccgggcgcta

SEQ ID NO: 514630 - DNA, 25 bp, Homo sapien
tgtactccctgacacagggtgctgc

SEQ ID NO: 514631 - DNA, 25 bp, Homo sapien
aagctgcctgcttctatcactccag

SEQ ID NO: 514632 - DNA, 25 bp, Homo sapien
gcagagtcaatgagcgactgcttca

SEQ ID NO: 514633 - DNA, 25 bp, Homo sapien
actgtgatgcaggacggccccagtg

SEQ ID NO: 514634 - DNA, 25 bp, Homo sapien
gactgcttcatgagtgcccttggga

SEQ ID NO: 514635 - DNA, 25 bp, Homo sapien
tcttctggacacacaacgttggacc

SEQ ID NO: 514636 - DNA, 25 bp, Homo sapien
ctttaatcattcagctatgtgggtt

SEQ ID NO: 514637 - DNA, 25 bp, Homo sapien
tgactttaatcattcagctatgtgg

SEQ ID NO: 514638 - DNA, 25 bp, Homo sapien
caaagcacatttggcacagatggga

SEQ ID NO: 514639 - DNA, 25 bp, Homo sapien
taatcattcagctatgtgggttttc

SEQ ID NO: 514640 - DNA, 25 bp, Homo sapien
cagggatgctaaaagattctgggcc

SEQ ID NO: 514641 - DNA, 25 bp, Homo sapien
ggagaacttacatgtcacccacctg

SEQ ID NO: 514642 - DNA, 25 bp, Homo sapien
tgatttcaactagggcagggatgct

SEQ ID NO: 514643 - DNA, 25 bp, Homo sapien
gggcagcacctgaactagctttgtt

SEQ ID NO: 514644 - DNA, 25 bp, Homo sapien
gttgtccaagctatagttcagtgga

SEQ ID NO: 514645 - DNA, 25 bp, Homo sapien
actgagcccggccaacctcacgttt

SEQ ID NO: 514646 - DNA, 25 bp, Homo sapien
tgtccaagctatagttcagtggaac

SEQ ID NO: 514647 - DNA, 25 bp, Homo sapien
cggccaacctcacgttttatacttg

SEQ ID NO: 514648 - DNA, 25 bp, Homo sapien
caggagctatgacatccttttagga

SEQ ID NO: 514649 - DNA, 25 bp, Homo sapien
tactagtgctgtcatgactatcagg

SEQ ID NO: 514650 - DNA, 25 bp, Homo sapien
gctgtcatgactatcaggagctatg

SEQ ID NO: 514651 - DNA, 25 bp, Homo sapien
aaacaaaggttaatactagtgctgt

SEQ ID NO: 514652 - DNA, 25 bp, Homo sapien
gaaaacctgattctggaattagggc

SEQ ID NO: 514653 - DNA, 25 bp, Homo sapien
aattagggcagccaatagacggcag

SEQ ID NO: 514654 - DNA, 25 bp, Homo sapien
aagcaccacggtgggagccaggtac

SEQ ID NO: 514655 - DNA, 25 bp, Homo sapien
ccaacaacagaagggctctaagcag

SEQ ID NO: 514656 - DNA, 25 bp, Homo sapien
gagtcgccagaaaggaatttgtggc

SEQ ID NO: 514657 - DNA, 25 bp, Homo sapien
catctccctggttaatgatggagtc

SEQ ID NO: 514658 - DNA, 25 bp, Homo sapien
gaagacaaagcggatcatcaagata

SEQ ID NO: 514659 - DNA, 25 bp, Homo sapien
tgaatgtggagatataatcaggtaa

SEQ ID NO: 514660 - DNA, 25 bp, Homo sapien
gattataaaagtgctcggacaggcc

SEQ ID NO: 514661 - DNA, 25 bp, Homo sapien
tagttctgcattaagcaacacaggc

SEQ ID NO: 514662 - DNA, 25 bp, Homo sapien
tatccctgtgttaaatgcaccagtc

SEQ ID NO: 514663 - DNA, 25 bp, Homo sapien
tcttagtgtaaacaagcctagttcc

SEQ ID NO: 514664 - DNA, 25 bp, Homo sapien
ctcaactttatgggcttaggtgatc

SEQ ID NO: 514665 - DNA, 25 bp, Homo sapien
taggtcttcaatgggctccacctca

SEQ ID NO: 514666 - DNA, 25 bp, Homo sapien
gcagcctgctatatggtaaatgtca

SEQ ID NO: 514667 - DNA, 25 bp, Homo sapien
ccttagcaaggtgcataggtcttca

SEQ ID NO: 514668 - DNA, 25 bp, Homo sapien
taaacagccgacagaatggtcatcc

SEQ ID NO: 514669 - DNA, 25 bp, Homo sapien
agtattagaagttagaccagcaggt

SEQ ID NO: 514670 - DNA, 25 bp, Homo sapien
taagaacagaaccacaagtattaga

SEQ ID NO: 514671 - DNA, 25 bp, Homo sapien
cagcaggtggtaaagctgatcatct

SEQ ID NO: 514672 - DNA, 25 bp, Homo sapien
ggagtgtacaagtattctatattgt

SEQ ID NO: 514673 - DNA, 25 bp, Homo sapien
agtccatttccccttgtgaacaagt

SEQ ID NO: 514674 - DNA, 25 bp, Homo sapien
tgtgaacaagtgctcagctatgcat

SEQ ID NO: 514675 - DNA, 25 bp, Homo sapien
tctttagtaaccatgcttctatacc

SEQ ID NO: 514676 - DNA, 25 bp, Homo sapien
ccatgcttctatacctggttctcct

SEQ ID NO: 514677 - DNA, 25 bp, Homo sapien
gaagggccatagctgtttaaatcaa

SEQ ID NO: 514678 - DNA, 25 bp, Homo sapien
tcagcattggctcccaaatataacc

SEQ ID NO: 514679 - DNA, 25 bp, Homo sapien
catcagtacatcctgtcagcattgg

SEQ ID NO: 514680 - DNA, 25 bp, Homo sapien
ctaatataaccccacgtaacgacag

SEQ ID NO: 514681 - DNA, 25 bp, Homo sapien
tcttgaatttctgttatctaggtgc

SEQ ID NO: 514682 - DNA, 25 bp, Homo sapien
cagaggttctcttatgctttacaat

SEQ ID NO: 514683 - DNA, 25 bp, Homo sapien
tcctactgtgggtagcgcaataact

SEQ ID NO: 514684 - DNA, 25 bp, Homo sapien
gcttatttagaatgtcctatcagag

SEQ ID NO: 514685 - DNA, 25 bp, Homo sapien
ctttgcagatagatgtgactcttac

SEQ ID NO: 514686 - DNA, 25 bp, Homo sapien
tgtccatatgtacctaaggcttatc

SEQ ID NO: 514687 - DNA, 25 bp, Homo sapien
ggattgcctttactactgttcccat

SEQ ID NO: 514688 - DNA, 25 bp, Homo sapien
gaatccctgggacacttcatatagt

SEQ ID NO: 514689 - DNA, 25 bp, Homo sapien
gatttcccactttgggcggaaagca

SEQ ID NO: 514690 - DNA, 25 bp, Homo sapien
tccagtgcagttacagaccaccccc

SEQ ID NO: 514691 - DNA, 25 bp, Homo sapien
aagcagcatttaggtattccccctc

SEQ ID NO: 514692 - DNA, 25 bp, Homo sapien
cactttgggcggaaagcagcattta

SEQ ID NO: 514693 - DNA, 25 bp, Homo sapien
cggcctcgccaacatacgttctttt

SEQ ID NO: 514694 - DNA, 25 bp, Homo sapien
tgcattcccaccaacggcgtgtaag

SEQ ID NO: 514695 - DNA, 25 bp, Homo sapien
tctgagcgcaggtgtctttctggca

SEQ ID NO: 514696 - DNA, 25 bp, Homo sapien
tgctagctcagataagtatttctat

SEQ ID NO: 514697 - DNA, 25 bp, Homo sapien
agcaccacggcctcagacatgtcac

SEQ ID NO: 514698 - DNA, 25 bp, Homo sapien
cagcaccacggcctcagacatgtca

SEQ ID NO: 514699 - DNA, 25 bp, Homo sapien
tggcaccaagtgaatgtatcaggta

SEQ ID NO: 514700 - DNA, 25 bp, Homo sapien
caacaggataaggtgatttaggaac

SEQ ID NO: 514701 - DNA, 25 bp, Homo sapien
aaattgagacgagatccgagcccag

SEQ ID NO: 514702 - DNA, 25 bp, Homo sapien
gcccagaggcactccgatgtttaaa

SEQ ID NO: 514703 - DNA, 25 bp, Homo sapien
gatggcctccaatgaatccttcacc

SEQ ID NO: 514704 - DNA, 25 bp, Homo sapien
cagtaggtcacttccgaggttaggt

SEQ ID NO: 514705 - DNA, 25 bp, Homo sapien
gactgcaaccacataagaggctccg

SEQ ID NO: 514706 - DNA, 25 bp, Homo sapien
tacctattgagtactgttgagggca

SEQ ID NO: 514707 - DNA, 25 bp, Homo sapien
catggaatcatgcatgaaacccaag

SEQ ID NO: 514708 - DNA, 25 bp, Homo sapien
gacagcaagaacaacccgtcctgtt

SEQ ID NO: 514709 - DNA, 25 bp, Homo sapien
tgccatgaggcttaagacagcaaga

SEQ ID NO: 514710 - DNA, 25 bp, Homo sapien
gaaaggccgtgatcattggtaagcg

SEQ ID NO: 514711 - DNA, 25 bp, Homo sapien
ggctcctcaaatagggtggacagct

SEQ ID NO: 514712 - DNA, 25 bp, Homo sapien
tacagatctcacaacctactatggg

SEQ ID NO: 514713 - DNA, 25 bp, Homo sapien
ctcgagctaagactccaaggatgag

SEQ ID NO: 514714 - DNA, 25 bp, Homo sapien
gcttgacacaagacactcgagctaa

SEQ ID NO: 514715 - DNA, 25 bp, Homo sapien
ccgtaccattggctagggcacaaat

SEQ ID NO: 514716 - DNA, 25 bp, Homo sapien
taagtcaaagtagacaggacccagc

SEQ ID NO: 514717 - DNA, 25 bp, Homo sapien
tatgcttactttagagtcaacaggg

SEQ ID NO: 514718 - DNA, 25 bp, Homo sapien
caacagggtgttgactccactatac

SEQ ID NO: 514719 - DNA, 25 bp, Homo sapien
tggtagcactggttgcttcctaggc

SEQ ID NO: 514720 - DNA, 25 bp, Homo sapien
tataccagaaactggtagcactggt

SEQ ID NO: 514721 - DNA, 25 bp, Homo sapien
aatataccagaaactggtagcactg

SEQ ID NO: 514722 - DNA, 25 bp, Homo sapien
agcactggttgcttcctaggcagaa

SEQ ID NO: 514723 - DNA, 25 bp, Homo sapien
aatcccactggaaggtactgcactc

SEQ ID NO: 514724 - DNA, 25 bp, Homo sapien
tatacacatgcatagcacaagcgtg

SEQ ID NO: 514725 - DNA, 25 bp, Homo sapien
cgagctgacatcgtgagtggctaaa

SEQ ID NO: 514726 - DNA, 25 bp, Homo sapien
cactgctgacaagcgatggacgcaa

SEQ ID NO: 514727 - DNA, 25 bp, Homo sapien
tggagaaaccccaacaaactgctgg

SEQ ID NO: 514728 - DNA, 25 bp, Homo sapien
ggcagaaatagcatacgcggtcacg

SEQ ID NO: 514729 - DNA, 25 bp, Homo sapien
tgttgactagtcagaacgggtcgtg

SEQ ID NO: 514730 - DNA, 25 bp, Homo sapien
ccaagatttagaatgcacaggcaga

SEQ ID NO: 514731 - DNA, 25 bp, Homo sapien
gaatcctggtagaaaagcccctggc

SEQ ID NO: 514732 - DNA, 25 bp, Homo sapien
caagcaggtctctttcgtcagcgta

SEQ ID NO: 514733 - DNA, 25 bp, Homo sapien
tcagctccaccgaggctttgggaga

SEQ ID NO: 514734 - DNA, 25 bp, Homo sapien
tgtgatgaccctttgtgaacatgca

SEQ ID NO: 514735 - DNA, 25 bp, Homo sapien
ggccgctggcgccacctccgccact

SEQ ID NO: 514736 - DNA, 25 bp, Homo sapien
gccgcagtcgcaactgcgtctgcgg

SEQ ID NO: 514737 - DNA, 25 bp, Homo sapien
agtcgcaactgcgtctgcggccaca

SEQ ID NO: 514738 - DNA, 25 bp, Homo sapien
tcctcgtcgccgcagtcgcaactgc

SEQ ID NO: 514739 - DNA, 25 bp, Homo sapien
gcaactgcgtctgcggccacagggc

SEQ ID NO: 514740 - DNA, 25 bp, Homo sapien
tcctgttcgtctctgattcaagaca

SEQ ID NO: 514741 - DNA, 25 bp, Homo sapien
tcttagtttgggtgttgaaactcac

SEQ ID NO: 514742 - DNA, 25 bp, Homo sapien
agacagttgggtttggtacctgaca

SEQ ID NO: 514743 - DNA, 25 bp, Homo sapien
tgaaactcacctcctttggtcctgt

SEQ ID NO: 514744 - DNA, 25 bp, Homo sapien
tttcggttaacagccgaacgcgcta

SEQ ID NO: 514745 - DNA, 25 bp, Homo sapien
gaacgcgctaaccgattgcgccaca

SEQ ID NO: 514746 - DNA, 25 bp, Homo sapien
tccctgggtgggctcgaaccaccaa

SEQ ID NO: 514747 - DNA, 25 bp, Homo sapien
cgcgctaaccgattgcgccacagag

SEQ ID NO: 514748 - DNA, 25 bp, Homo sapien
ggatcacgtggaagctccacaagct

SEQ ID NO: 514749 - DNA, 25 bp, Homo sapien
tcaagaaagaacttgctgctcagcg

SEQ ID NO: 514750 - DNA, 25 bp, Homo sapien
tccccagcagaaggatcacgtggaa

SEQ ID NO: 514751 - DNA, 25 bp, Homo sapien
ctcagcgttgaagaatgcagttggc

SEQ ID NO: 514752 - DNA, 25 bp, Homo sapien
gacatatcctgccataacagagggc

SEQ ID NO: 514753 - DNA, 25 bp, Homo sapien
acatatcctgccataacagagggca

SEQ ID NO: 514754 - DNA, 25 bp, Homo sapien
gggagttccgattggcagtttgttc

SEQ ID NO: 514755 - DNA, 25 bp, Homo sapien
tttgcataaggggatgtgtcttttg

SEQ ID NO: 514756 - DNA, 25 bp, Homo sapien
gttccgattggcagtttgttctcag

SEQ ID NO: 514757 - DNA, 25 bp, Homo sapien
gaggaggggagttccgattggcagt

SEQ ID NO: 514758 - DNA, 25 bp, Homo sapien
ctgtctctgcatgggcgagtgtcca

SEQ ID NO: 514759 - DNA, 25 bp, Homo sapien
gagcaggcagtttgaaagccccact

SEQ ID NO: 514760 - DNA, 25 bp, Homo sapien
ggctctttcctgcagcggcggagat

SEQ ID NO: 514761 - DNA, 25 bp, Homo sapien
cttcctgtctctgcatgggcgagtg

SEQ ID NO: 514762 - DNA, 25 bp, Homo sapien
ccttgtctgcaaatcggctgcccac

SEQ ID NO: 514763 - DNA, 25 bp, Homo sapien
ttgtctgcaaatcggctgcccacca

SEQ ID NO: 514764 - DNA, 25 bp, Homo sapien
tgtctgcaaatcggctgcccaccat

SEQ ID NO: 514765 - DNA, 25 bp, Homo sapien
cttgtctgcaaatcggctgcccacc

SEQ ID NO: 514766 - DNA, 25 bp, Homo sapien
gaagcattatggcagatgtttgagc

SEQ ID NO: 514767 - DNA, 25 bp, Homo sapien
cactcaaagcaggaggaagcattat

SEQ ID NO: 514768 - DNA, 25 bp, Homo sapien
cattatggcagatgtttgagcccca

SEQ ID NO: 514769 - DNA, 25 bp, Homo sapien
cagagatgtccatgagcacagcata

SEQ ID NO: 514770 - DNA, 25 bp, Homo sapien
atttgcttcacgacagagcaaagga

SEQ ID NO: 514771 - DNA, 25 bp, Homo sapien
ttatttgcttcacgacagagcaaag

SEQ ID NO: 514772 - DNA, 25 bp, Homo sapien
catttcttgcctgcagtacttgtaa

SEQ ID NO: 514773 - DNA, 25 bp, Homo sapien
gatattgtatcatttcttgcctgca

SEQ ID NO: 514774 - DNA, 25 bp, Homo sapien
tgtatcatttcttgcctgcagtact

SEQ ID NO: 514775 - DNA, 25 bp, Homo sapien
tccagtaaggatattgtatcatttc

SEQ ID NO: 514776 - DNA, 25 bp, Homo sapien
tttgtttcgtcttgagtagcatgtc

SEQ ID NO: 514777 - DNA, 25 bp, Homo sapien
tgagtcatttgtttcgtcttgagta

SEQ ID NO: 514778 - DNA, 25 bp, Homo sapien
gtttcgtcttgagtagcatgtcatc

SEQ ID NO: 514779 - DNA, 25 bp, Homo sapien
gtcatttgtttcgtcttgagtagca

SEQ ID NO: 514780 - DNA, 25 bp, Homo sapien
gaaacacaagcatcttctatccagg

SEQ ID NO: 514781 - DNA, 25 bp, Homo sapien
gctggtaccaccatattggctgctg

SEQ ID NO: 514782 - DNA, 25 bp, Homo sapien
caagctgggaggctttacacaacag

SEQ ID NO: 514783 - DNA, 25 bp, Homo sapien
ccgtaactagtctcacaagctggga

SEQ ID NO: 514784 - DNA, 25 bp, Homo sapien
gcaaaggttgggcaaaagagactct

SEQ ID NO: 514785 - DNA, 25 bp, Homo sapien
tctgtgtgagttcgagcaaagcctg

SEQ ID NO: 514786 - DNA, 25 bp, Homo sapien
gaggtagatcaagtggagtgacaca

SEQ ID NO: 514787 - DNA, 25 bp, Homo sapien
ggaaagaggaagtgtccacactgtc

SEQ ID NO: 514788 - DNA, 25 bp, Homo sapien
ttcctgagaaaggcagttgggcagg

SEQ ID NO: 514789 - DNA, 25 bp, Homo sapien
gttgggcaggaaaaagctgtatctc

SEQ ID NO: 514790 - DNA, 25 bp, Homo sapien
tgggcaggaaaaagctgtatctctg

SEQ ID NO: 514791 - DNA, 25 bp, Homo sapien
ggcaggaaaaagctgtatctctgtc

SEQ ID NO: 514792 - DNA, 25 bp, Homo sapien
tctgagggtgaaggatcaggagagg

SEQ ID NO: 514793 - DNA, 25 bp, Homo sapien
agggtttcccagtctgagggtgaag

SEQ ID NO: 514794 - DNA, 25 bp, Homo sapien
gtctgagggtgaaggatcaggagag

SEQ ID NO: 514795 - DNA, 25 bp, Homo sapien
tgagagggtttcccagtctgagggt

SEQ ID NO: 514796 - DNA, 25 bp, Homo sapien
tggggggcatcattcattctttcct

SEQ ID NO: 514797 - DNA, 25 bp, Homo sapien
gatcccgtcattgcccagggcagat

SEQ ID NO: 514798 - DNA, 25 bp, Homo sapien
gcagatgctccattttggggggcat

SEQ ID NO: 514799 - DNA, 25 bp, Homo sapien
gagaaccagagggatcccgtcattg

SEQ ID NO: 514800 - DNA, 25 bp, Homo sapien
tggtgaggcgcagataacctgatct

SEQ ID NO: 514801 - DNA, 25 bp, Homo sapien
tgaccatcagaggaccacgaagatt

SEQ ID NO: 514802 - DNA, 25 bp, Homo sapien
cacgaagattccattggtgaggcgc

SEQ ID NO: 514803 - DNA, 25 bp, Homo sapien
cagataacctgatctctctgggttc

SEQ ID NO: 514804 - DNA, 25 bp, Homo sapien
tcactcttcaattccaagaagcgca

SEQ ID NO: 514805 - DNA, 25 bp, Homo sapien
ttagttgggctcttctccccgacca

SEQ ID NO: 514806 - DNA, 25 bp, Homo sapien
tcctctgtctgcattgctcactctt

SEQ ID NO: 514807 - DNA, 25 bp, Homo sapien
ctcttcaattccaagaagcgcaggg

SEQ ID NO: 514808 - DNA, 25 bp, Homo sapien
taataagcttccagtgtggtggccc

SEQ ID NO: 514809 - DNA, 25 bp, Homo sapien
cagagcgcgtgtgataatgcattgc

SEQ ID NO: 514810 - DNA, 25 bp, Homo sapien
gggatctattttgggaccgctgtca

SEQ ID NO: 514811 - DNA, 25 bp, Homo sapien
taaggctaaatgtgactcagaatcc

SEQ ID NO: 514812 - DNA, 25 bp, Homo sapien
tgctgcgtttgctggactgatgtac

SEQ ID NO: 514813 - DNA, 25 bp, Homo sapien
tcatttctccacttagttcctgctg

SEQ ID NO: 514814 - DNA, 25 bp, Homo sapien
gatgtacttgtttgtgaggcaaaag

SEQ ID NO: 514815 - DNA, 25 bp, Homo sapien
ctacgaaactgacacaggtgttttc

SEQ ID NO: 514816 - DNA, 25 bp, Homo sapien
ctcgtattttgttcacattaagaac

SEQ ID NO: 514817 - DNA, 25 bp, Homo sapien
aaaatgatgtcatgtcagctccgcc

SEQ ID NO: 514818 - DNA, 25 bp, Homo sapien
tgaccgtggccccaaatttgctatt

SEQ ID NO: 514819 - DNA, 25 bp, Homo sapien
gctgtaaatctattggccatctggg

SEQ ID NO: 514820 - DNA, 25 bp, Homo sapien
tgcttttccgggaacaaaatgatgt

SEQ ID NO: 514821 - DNA, 25 bp, Homo sapien
aggtcatgctgtccaagctgactgt

SEQ ID NO: 514822 - DNA, 25 bp, Homo sapien
gctgtccaagctgactgtggggctt

SEQ ID NO: 514823 - DNA, 25 bp, Homo sapien
tcatgctgtccaagctgactgtggg

SEQ ID NO: 514824 - DNA, 25 bp, Homo sapien
gcccatcagaggcactacttggggc

SEQ ID NO: 514825 - DNA, 25 bp, Homo sapien
gaaatgctgagcacggagcttcgtc

SEQ ID NO: 514826 - DNA, 25 bp, Homo sapien
taaatgagagtggacaggtaggcaa

SEQ ID NO: 514827 - DNA, 25 bp, Homo sapien
gactgttccacttcacatcagtgaa

SEQ ID NO: 514828 - DNA, 25 bp, Homo sapien
tgagggttgcctgtgtacttttcta

SEQ ID NO: 514829 - DNA, 25 bp, Homo sapien
gcagctccttgatgccctagttgtg

SEQ ID NO: 514830 - DNA, 25 bp, Homo sapien
tcccatttgacagtgacgccaaagc

SEQ ID NO: 514831 - DNA, 25 bp, Homo sapien
aagcaaggatgtgatgagcaggtcc

SEQ ID NO: 514832 - DNA, 25 bp, Homo sapien
tcctgtgctgagagtgttcccattt

SEQ ID NO: 514833 - DNA, 25 bp, Homo sapien
gtttccatgcacacttcagggcctt

SEQ ID NO: 514834 - DNA, 25 bp, Homo sapien
cttcagggccttagcaaatataata

SEQ ID NO: 514835 - DNA, 25 bp, Homo sapien
catgcacacttcagggccttagcaa

SEQ ID NO: 514836 - DNA, 25 bp, Homo sapien
acttcagggccttagcaaatataat

SEQ ID NO: 514837 - DNA, 25 bp, Homo sapien
gcgctatttgtgatggaggtcccca

SEQ ID NO: 514838 - DNA, 25 bp, Homo sapien
aaggtaggccagcaggattcttgga

SEQ ID NO: 514839 - DNA, 25 bp, Homo sapien
gagctaacaagtgccaatgtggcca

SEQ ID NO: 514840 - DNA, 25 bp, Homo sapien
agtaaatattggactcaggctcccc

SEQ ID NO: 514841 - DNA, 25 bp, Homo sapien
caggctgtcaatgtacctttgacca

SEQ ID NO: 514842 - DNA, 25 bp, Homo sapien
cctttgaccaaattgcagcttgcat

SEQ ID NO: 514843 - DNA, 25 bp, Homo sapien
tagtgtagggcttaaatgcagtctc

SEQ ID NO: 514844 - DNA, 25 bp, Homo sapien
tgtggtttcgcagaaccccagctca

SEQ ID NO: 514845 - DNA, 25 bp, Homo sapien
gctggctaaggcttgggaggtaccc

SEQ ID NO: 514846 - DNA, 25 bp, Homo sapien
gagactttcaaagccagctggctaa

SEQ ID NO: 514847 - DNA, 25 bp, Homo sapien
caaaaggacagcttgtcgttgagtg

SEQ ID NO: 514848 - DNA, 25 bp, Homo sapien
tgagtgaagtgaaccgcctttaaca

SEQ ID NO: 514849 - DNA, 25 bp, Homo sapien
ggcagtggccgtgtcatgtgtaggg

SEQ ID NO: 514850 - DNA, 25 bp, Homo sapien
cctggcagtggccgtgtcatgtgta

SEQ ID NO: 514851 - DNA, 25 bp, Homo sapien
tcatgtgtagggtgtcccatgagtg

SEQ ID NO: 514852 - DNA, 25 bp, Homo sapien
tgtcatgtgtagggtgtcccatgag

SEQ ID NO: 514853 - DNA, 25 bp, Homo sapien
cctctttcctcgagtgaaggccgac

SEQ ID NO: 514854 - DNA, 25 bp, Homo sapien
aagcctctttcctcgagtgaaggcc

SEQ ID NO: 514855 - DNA, 25 bp, Homo sapien
taagcctctttcctcgagtgaaggc

SEQ ID NO: 514856 - DNA, 25 bp, Homo sapien
gcctctttcctcgagtgaaggccga

SEQ ID NO: 514857 - DNA, 25 bp, Homo sapien
cagcgtttcttacagccacgtggca

SEQ ID NO: 514858 - DNA, 25 bp, Homo sapien
gggagagtctacatttcgaatgagc

SEQ ID NO: 514859 - DNA, 25 bp, Homo sapien
cactccccggcattagacattctgg

SEQ ID NO: 514860 - DNA, 25 bp, Homo sapien
tgtctccttggactgcagcagcgtt

SEQ ID NO: 514861 - DNA, 25 bp, Homo sapien
cctgtgggccgtgagtttggctcta

SEQ ID NO: 514862 - DNA, 25 bp, Homo sapien
tccttcctgtgggccgtgagtttgg

SEQ ID NO: 514863 - DNA, 25 bp, Homo sapien
gccgtgagtttggctctaggagtta

SEQ ID NO: 514864 - DNA, 25 bp, Homo sapien
ccgtgagtttggctctaggagttaa

SEQ ID NO: 514865 - DNA, 25 bp, Homo sapien
tcaggtgatgaacctcttttgagag

SEQ ID NO: 514866 - DNA, 25 bp, Homo sapien
catcccacgggccttcacagggagt

SEQ ID NO: 514867 - DNA, 25 bp, Homo sapien
caggatttgcacatgtccagtgtta

SEQ ID NO: 514868 - DNA, 25 bp, Homo sapien
gagaggatgctgataactgtaagca

SEQ ID NO: 514869 - DNA, 25 bp, Homo sapien
gttgagggcacactgtcatcccgcc

SEQ ID NO: 514870 - DNA, 25 bp, Homo sapien
ctgtcatcccgccaagctgtctgga

SEQ ID NO: 514871 - DNA, 25 bp, Homo sapien
ccttggaagcgttggatgtgtggga

SEQ ID NO: 514872 - DNA, 25 bp, Homo sapien
cagcgcctgaaatcaatgatgccct

SEQ ID NO: 514873 - DNA, 25 bp, Homo sapien
tggcttgttggtgacgggcaggagc

SEQ ID NO: 514874 - DNA, 25 bp, Homo sapien
gcaagttgctgccaggaaccttcac

SEQ ID NO: 514875 - DNA, 25 bp, Homo sapien
tccacaacaagccaagtcagcaagt

SEQ ID NO: 514876 - DNA, 25 bp, Homo sapien
caagtcagcaagttgctgccaggaa

SEQ ID NO: 514877 - DNA, 25 bp, Homo sapien
tctcccaactcatcagaataatcca

SEQ ID NO: 514878 - DNA, 25 bp, Homo sapien
cccaactcatcagaataatccaaaa

SEQ ID NO: 514879 - DNA, 25 bp, Homo sapien
tgtctctcccaactcatcagaataa

SEQ ID NO: 514880 - DNA, 25 bp, Homo sapien
tttgatgtctctcccaactcatcag

SEQ ID NO: 514881 - DNA, 25 bp, Homo sapien
gagccctctggtgcttcatctaagt

SEQ ID NO: 514882 - DNA, 25 bp, Homo sapien
ttaataaaatgtattcggtgtcaac

SEQ ID NO: 514883 - DNA, 25 bp, Homo sapien
gcatgcgacaccatataatagagcc

SEQ ID NO: 514884 - DNA, 25 bp, Homo sapien
gaagttgcggtaattattttgaagc

SEQ ID NO: 514885 - DNA, 25 bp, Homo sapien
ctgttagttccccagcttgaaaaca

SEQ ID NO: 514886 - DNA, 25 bp, Homo sapien
tgttagttccccagcttgaaaacaa

SEQ ID NO: 514887 - DNA, 25 bp, Homo sapien
ttccccagcttgaaaacaattctac

SEQ ID NO: 514888 - DNA, 25 bp, Homo sapien
tagttccccagcttgaaaacaattc

SEQ ID NO: 514889 - DNA, 25 bp, Homo sapien
tggcagccagcgattcacctccagg

SEQ ID NO: 514890 - DNA, 25 bp, Homo sapien
agtggcagccagcgattcacctcca

SEQ ID NO: 514891 - DNA, 25 bp, Homo sapien
ccgcgcagcgccagtggcagccagc

SEQ ID NO: 514892 - DNA, 25 bp, Homo sapien
tcccgcgcagcgccagtggcagcca

SEQ ID NO: 514893 - DNA, 25 bp, Homo sapien
tgagggcatgggacttcactctgac

SEQ ID NO: 514894 - DNA, 25 bp, Homo sapien
atctctgagcagtccctacggggta

SEQ ID NO: 514895 - DNA, 25 bp, Homo sapien
tcctaatccttcttagtcccagaga

SEQ ID NO: 514896 - DNA, 25 bp, Homo sapien
catcacgtctggttctaagatctcc

SEQ ID NO: 514897 - DNA, 25 bp, Homo sapien
tgggctaggttataccgtggtaaca

SEQ ID NO: 514898 - DNA, 25 bp, Homo sapien
aaataactacctgaatcctggcatc

SEQ ID NO: 514899 - DNA, 25 bp, Homo sapien
cctggcatctaaacgaaaaaagctg

SEQ ID NO: 514900 - DNA, 25 bp, Homo sapien
tgttaggatgggctaggttataccg

SEQ ID NO: 514901 - DNA, 25 bp, Homo sapien
gggttctccatacgctctgaccgaa

SEQ ID NO: 514902 - DNA, 25 bp, Homo sapien
cctcagacagatcatgagaatcatc

SEQ ID NO: 514903 - DNA, 25 bp, Homo sapien
tatttctcaactcctcgtgccggat

SEQ ID NO: 514904 - DNA, 25 bp, Homo sapien
tcgtgccggattctgggcttcccgc

SEQ ID NO: 514905 - DNA, 25 bp, Homo sapien
taccatctaaataacaatagttcac

SEQ ID NO: 514906 - DNA, 25 bp, Homo sapien
agaaaataccatctaaataacaata

SEQ ID NO: 514907 - DNA, 25 bp, Homo sapien
ctctctaaagaaaataccatctaaa

SEQ ID NO: 514908 - DNA, 25 bp, Homo sapien
aaataccatctaaataacaatagtt

SEQ ID NO: 514909 - DNA, 25 bp, Homo sapien
gaagtcaacacttcaagacaggcct

SEQ ID NO: 514910 - DNA, 25 bp, Homo sapien
attgtgggtcacacatacactggga

SEQ ID NO: 514911 - DNA, 25 bp, Homo sapien
gacaaaaagctgtgacgtgacccca

SEQ ID NO: 514912 - DNA, 25 bp, Homo sapien
tctaaccagggtatcacttttaagc

SEQ ID NO: 514913 - DNA, 25 bp, Homo sapien
gagttttggcccacagcccaatagc

SEQ ID NO: 514914 - DNA, 25 bp, Homo sapien
cctgggtattgagccatcagtggtc

SEQ ID NO: 514915 - DNA, 25 bp, Homo sapien
cactgtcccagtcctgggtattgag

SEQ ID NO: 514916 - DNA, 25 bp, Homo sapien
gcccaatagcccgagaagacatttg

SEQ ID NO: 514917 - DNA, 25 bp, Homo sapien
tcagtgtgggccacgctggggtggg

SEQ ID NO: 514918 - DNA, 25 bp, Homo sapien
ggccacgctggggtgggggacatac

SEQ ID NO: 514919 - DNA, 25 bp, Homo sapien
tgggccacgctggggtgggggacat

SEQ ID NO: 514920 - DNA, 25 bp, Homo sapien
agtgtgggccacgctggggtggggg

SEQ ID NO: 514921 - DNA, 25 bp, Homo sapien
agggcttcctgtaatccaactggca

SEQ ID NO: 514922 - DNA, 25 bp, Homo sapien
taatccaactggcatgggtggcagg

SEQ ID NO: 514923 - DNA, 25 bp, Homo sapien
gcatgggtggcagggtcacgggatc

SEQ ID NO: 514924 - DNA, 25 bp, Homo sapien
catcagggcttcctgtaatccaact

SEQ ID NO: 514925 - DNA, 25 bp, Homo sapien
ttggaacgaagatgatatggaggct

SEQ ID NO: 514926 - DNA, 25 bp, Homo sapien
ctgttggaacgaagatgatatggag

SEQ ID NO: 514927 - DNA, 25 bp, Homo sapien
gctgtgcatagtgggcacccatgga

SEQ ID NO: 514928 - DNA, 25 bp, Homo sapien
tgcttaggagtgagctgcccttgag

SEQ ID NO: 514929 - DNA, 25 bp, Homo sapien
tccaggctccccgacaccattgtcc

SEQ ID NO: 514930 - DNA, 25 bp, Homo sapien
aggctccccgacaccattgtccggc

SEQ ID NO: 514931 - DNA, 25 bp, Homo sapien
gcgtccctgtccccgcagcacacag

SEQ ID NO: 514932 - DNA, 25 bp, Homo sapien
tctccaggctccccgacaccattgt

SEQ ID NO: 514933 - DNA, 25 bp, Homo sapien
cgtaaacctgcaagggtctgggtgc

SEQ ID NO: 514934 - DNA, 25 bp, Homo sapien
tggtgccaaatggagaccctctggg

SEQ ID NO: 514935 - DNA, 25 bp, Homo sapien
cctgggccattggagaaaaccctgt

SEQ ID NO: 514936 - DNA, 25 bp, Homo sapien
gcgcagccaggcaataacaacatta

SEQ ID NO: 514937 - DNA, 25 bp, Homo sapien
tccagggtccgtgcgcctctctgag

SEQ ID NO: 514938 - DNA, 25 bp, Homo sapien
tcttgcatcctcgtgggtatggggg

SEQ ID NO: 514939 - DNA, 25 bp, Homo sapien
ttccagggtccgtgcgcctctctga

SEQ ID NO: 514940 - DNA, 25 bp, Homo sapien
cacaaacagccaatgcgctgggcct

SEQ ID NO: 514941 - DNA, 25 bp, Homo sapien
acacaggtagatgaacttccgcggc

SEQ ID NO: 514942 - DNA, 25 bp, Homo sapien
gtagatgaacttccgcggctcctcc

SEQ ID NO: 514943 - DNA, 25 bp, Homo sapien
caaggcatcaactctgctaaagaac

SEQ ID NO: 514944 - DNA, 25 bp, Homo sapien
taaccacctgcacctcagaataagc

SEQ ID NO: 514945 - DNA, 25 bp, Homo sapien
cacctgcacctcagaataagcagac

SEQ ID NO: 514946 - DNA, 25 bp, Homo sapien
cataaccacctgcacctcagaataa

SEQ ID NO: 514947 - DNA, 25 bp, Homo sapien
gcacctcagaataagcagacagagc

SEQ ID NO: 514948 - DNA, 25 bp, Homo sapien
tgggcatgcgctcagtgtttctttg

SEQ ID NO: 514949 - DNA, 25 bp, Homo sapien
tgtgggggtttcttatcttcttgta

SEQ ID NO: 514950 - DNA, 25 bp, Homo sapien
ttcttgtagaggcttgaggtatgaa

SEQ ID NO: 514951 - DNA, 25 bp, Homo sapien
tagaggcttgaggtatgaaacctgc

SEQ ID NO: 514952 - DNA, 25 bp, Homo sapien
gatctattggctcccagtgttcttg

SEQ ID NO: 514953 - DNA, 25 bp, Homo sapien
acacttaggtccatatgaatgtccc

SEQ ID NO: 514954 - DNA, 25 bp, Homo sapien
ccaaatggatctattggctcccagt

SEQ ID NO: 514955 - DNA, 25 bp, Homo sapien
ttcttgacacttaggtccatatgaa

SEQ ID NO: 514956 - DNA, 25 bp, Homo sapien
tgaaagtaggatgtgagtctgggaa

SEQ ID NO: 514957 - DNA, 25 bp, Homo sapien
atgattctggaagttgaaagtagga

SEQ ID NO: 514958 - DNA, 25 bp, Homo sapien
agttgaaagtaggatgtgagtctgg

SEQ ID NO: 514959 - DNA, 25 bp, Homo sapien
tgattctggaagttgaaagtaggat

SEQ ID NO: 514960 - DNA, 25 bp, Homo sapien
tgactcccgttgcatttcttttgag

SEQ ID NO: 514961 - DNA, 25 bp, Homo sapien
cattatcagatacgttaggaatttc

SEQ ID NO: 514962 - DNA, 25 bp, Homo sapien
caagcatgggatagacccccttggc

SEQ ID NO: 514963 - DNA, 25 bp, Homo sapien
tgtccagggtcaacccaagcatggg

SEQ ID NO: 514964 - DNA, 25 bp, Homo sapien
agcctgagtcctggttgctcagcgg

SEQ ID NO: 514965 - DNA, 25 bp, Homo sapien
tattccccagaccaagcctgagtcc

SEQ ID NO: 514966 - DNA, 25 bp, Homo sapien
cctggttgctcagcggggctgccca

SEQ ID NO: 514967 - DNA, 25 bp, Homo sapien
tactcttaggtctattccccagacc

SEQ ID NO: 514968 - DNA, 25 bp, Homo sapien
cagatcttggtcctgagttaggacc

SEQ ID NO: 514969 - DNA, 25 bp, Homo sapien
cttagacccgtctggtttctccaga

SEQ ID NO: 514970 - DNA, 25 bp, Homo sapien
ccttagacccgtctggtttctccag

SEQ ID NO: 514971 - DNA, 25 bp, Homo sapien
gatcttggtcctgagttaggaccac

SEQ ID NO: 514972 - DNA, 25 bp, Homo sapien
cactgggcaccaaactagacccaaa

SEQ ID NO: 514973 - DNA, 25 bp, Homo sapien
tttcactgggcaccaaactagaccc

SEQ ID NO: 514974 - DNA, 25 bp, Homo sapien
cctctcatggaatccatccactctt

SEQ ID NO: 514975 - DNA, 25 bp, Homo sapien
tagacccaaaactcagcacctttgc

SEQ ID NO: 514976 - DNA, 25 bp, Homo sapien
gagggtttggctaaacaatcagtcc

SEQ ID NO: 514977 - DNA, 25 bp, Homo sapien
caatcagtccactgagatgctggcc

SEQ ID NO: 514978 - DNA, 25 bp, Homo sapien
acaatcagtccactgagatgctggc

SEQ ID NO: 514979 - DNA, 25 bp, Homo sapien
gggtttggctaaacaatcagtccac

SEQ ID NO: 514980 - DNA, 25 bp, Homo sapien
tgtggaggagctcgcctgcctctga

SEQ ID NO: 514981 - DNA, 25 bp, Homo sapien
tctgaccacagagccatgcaggacc

SEQ ID NO: 514982 - DNA, 25 bp, Homo sapien
ggtgaatgcagctatggttatggtc

SEQ ID NO: 514983 - DNA, 25 bp, Homo sapien
ttttctctcgaggttcctcagtggc

SEQ ID NO: 514984 - DNA, 25 bp, Homo sapien
gctaaaggttgagcagcgatctcca

SEQ ID NO: 514985 - DNA, 25 bp, Homo sapien
gatgaatcgggagtggatgtagcta

SEQ ID NO: 514986 - DNA, 25 bp, Homo sapien
gatgtagctaaaggttgagcagcga

SEQ ID NO: 514987 - DNA, 25 bp, Homo sapien
ctgttctccagacaagtggatgaat

SEQ ID NO: 514988 - DNA, 25 bp, Homo sapien
ttggagattctcccccgatgtctgc

SEQ ID NO: 514989 - DNA, 25 bp, Homo sapien
gattggagattctcccccgatgtct

SEQ ID NO: 514990 - DNA, 25 bp, Homo sapien
attggagattctcccccgatgtctg

SEQ ID NO: 514991 - DNA, 25 bp, Homo sapien
tgtgttcatggatctactggactca

SEQ ID NO: 514992 - DNA, 25 bp, Homo sapien
tgagttcaagacctagactttgggc

SEQ ID NO: 514993 - DNA, 25 bp, Homo sapien
tattggtgtccatctcccgatacaa

SEQ ID NO: 514994 - DNA, 25 bp, Homo sapien
tggaaaaacctaaatgcggtcattg

SEQ ID NO: 514995 - DNA, 25 bp, Homo sapien
ctttctacgggaaaagccaagtgag

SEQ ID NO: 514996 - DNA, 25 bp, Homo sapien
gggcacttctgcagttgttacccag

SEQ ID NO: 514997 - DNA, 25 bp, Homo sapien
cagtgggtcccacatgttattgtca

SEQ ID NO: 514998 - DNA, 25 bp, Homo sapien
ggcttgcagtctcaatgtgccttcc

SEQ ID NO: 514999 - DNA, 25 bp, Homo sapien
tttgcaggaaggaatgcatctgggc

SEQ ID NO: 515000 - DNA, 25 bp, Homo sapien
atatgccggaggacttcagcgagga

SEQ ID NO: 515001 - DNA, 25 bp, Homo sapien
tccactgtagggtggagcaagccct

SEQ ID NO: 515002 - DNA, 25 bp, Homo sapien
gctgtggagaagacgtacttgagct

SEQ ID NO: 515003 - DNA, 25 bp, Homo sapien
ggcacggagcttcttatcggaggct

SEQ ID NO: 515004 - DNA, 25 bp, Homo sapien
tcaggcattctgtgggtggagacag

SEQ ID NO: 515005 - DNA, 25 bp, Homo sapien
tcaggagttctgttggttggagtca

SEQ ID NO: 515006 - DNA, 25 bp, Homo sapien
ggagtctgtggttctggcacggcga

SEQ ID NO: 515007 - DNA, 25 bp, Homo sapien
tggagaaggtgcgaaggccaacctc

SEQ ID NO: 515008 - DNA, 25 bp, Homo sapien
ggcatgtcggcccggtgctccttga

SEQ ID NO: 515009 - DNA, 25 bp, Homo sapien
ctgtttaaggcccacgacatggcta

SEQ ID NO: 515010 - DNA, 25 bp, Homo sapien
ggcctgggcatgtcggcccggtgct

SEQ ID NO: 515011 - DNA, 25 bp, Homo sapien
tcccgtgagtcattcctggaacctt

SEQ ID NO: 515012 - DNA, 25 bp, Homo sapien
taagggctgcagactaagttcatct

SEQ ID NO: 515013 - DNA, 25 bp, Homo sapien
ccatttcaaaggcttcgccagcgaa

SEQ ID NO: 515014 - DNA, 25 bp, Homo sapien
gctcccgtgctgcttccatttcaaa

SEQ ID NO: 515015 - DNA, 25 bp, Homo sapien
aagcaggacgtgcagcttcctgagg

SEQ ID NO: 515016 - DNA, 25 bp, Homo sapien
ttcgttatcccctcaggttgaagca

SEQ ID NO: 515017 - DNA, 25 bp, Homo sapien
aaacttgaattctgctgacttcgtt

SEQ ID NO: 515018 - DNA, 25 bp, Homo sapien
caggttgaagcaggacgtgcagctt

SEQ ID NO: 515019 - DNA, 25 bp, Homo sapien
tgttatatttttatgtgttgtatca

SEQ ID NO: 515020 - DNA, 25 bp, Homo sapien
gttatatttttatgtgttgtatcat

SEQ ID NO: 515021 - DNA, 25 bp, Homo sapien
tttttatgtgttgtatcatttttca

SEQ ID NO: 515022 - DNA, 25 bp, Homo sapien
gacttctctccctcacgttgtggca

SEQ ID NO: 515023 - DNA, 25 bp, Homo sapien
cttcaaaggcttcgggcatagcgac

SEQ ID NO: 515024 - DNA, 25 bp, Homo sapien
tcttgttcagtcgtcaccagtcagc

SEQ ID NO: 515025 - DNA, 25 bp, Homo sapien
taaacggagcccagacagtggtctg

SEQ ID NO: 515026 - DNA, 25 bp, Homo sapien
tgtactccagctgagctgatacagt

SEQ ID NO: 515027 - DNA, 25 bp, Homo sapien
ccagctgagctgatacagtgagacc

SEQ ID NO: 515028 - DNA, 25 bp, Homo sapien
tactccagctgagctgatacagtga

SEQ ID NO: 515029 - DNA, 25 bp, Homo sapien
ctccagctgagctgatacagtgaga

SEQ ID NO: 515030 - DNA, 25 bp, Homo sapien
tgtgtctgaaaacctagtgctgaag

SEQ ID NO: 515031 - DNA, 25 bp, Homo sapien
gatgtaagagatacagtgcagcact

SEQ ID NO: 515032 - DNA, 25 bp, Homo sapien
gcagcagtatgtgtttgggccacca

SEQ ID NO: 515033 - DNA, 25 bp, Homo sapien
tgcagcactttagttgaagcagagg

SEQ ID NO: 515034 - DNA, 25 bp, Homo sapien
gggtaaaagatccatgtctggagaa

SEQ ID NO: 515035 - DNA, 25 bp, Homo sapien
gggtaatgatcccatgggtaaaaga

SEQ ID NO: 515036 - DNA, 25 bp, Homo sapien
gatggggtaatgatcccatgggtaa

SEQ ID NO: 515037 - DNA, 25 bp, Homo sapien
gtaatgatcccatgggtaaaagatc

SEQ ID NO: 515038 - DNA, 25 bp, Homo sapien
ccccagggggatgactaagccttgc

SEQ ID NO: 515039 - DNA, 25 bp, Homo sapien
cgctggtgttgagtagtggacccca

SEQ ID NO: 515040 - DNA, 25 bp, Homo sapien
tgcgagcagactcgagcatgccaag

SEQ ID NO: 515041 - DNA, 25 bp, Homo sapien
ctccggcagtgtccgccaggcaggg

SEQ ID NO: 515042 - DNA, 25 bp, Homo sapien
gaggcgggcgtccagagggcggata

SEQ ID NO: 515043 - DNA, 25 bp, Homo sapien
acgatgataactctgccccgagcct

SEQ ID NO: 515044 - DNA, 25 bp, Homo sapien
ttatgagacgatgataactctgccc

SEQ ID NO: 515045 - DNA, 25 bp, Homo sapien
cgggcgtccagagggcggataaaag

SEQ ID NO: 515046 - DNA, 25 bp, Homo sapien
tcgcgcgcggctgacgcaggcaggg

SEQ ID NO: 515047 - DNA, 25 bp, Homo sapien
gtgaggaccgacgacgcgggcatgg

SEQ ID NO: 515048 - DNA, 25 bp, Homo sapien
gggctgtaggcaccggacggaagca

SEQ ID NO: 515049 - DNA, 25 bp, Homo sapien
ggcaccggacggaagcaggcggtgt

SEQ ID NO: 515050 - DNA, 25 bp, Homo sapien
tcgtctggggagcttcgcagcctgt

SEQ ID NO: 515051 - DNA, 25 bp, Homo sapien
agcctgtggacctgcgactgcgagc

SEQ ID NO: 515052 - DNA, 25 bp, Homo sapien
ctgcgactgcgagctggccctgctg

SEQ ID NO: 515053 - DNA, 25 bp, Homo sapien
gggagcttcgcagcctgtggacctg

SEQ ID NO: 515054 - DNA, 25 bp, Homo sapien
tcggtgacggcctcgtgcgcctcga

SEQ ID NO: 515055 - DNA, 25 bp, Homo sapien
ctcgtgcgcctcgacgggcagctct

SEQ ID NO: 515056 - DNA, 25 bp, Homo sapien
tcgtgcgcctcgacgggcagctcta

SEQ ID NO: 515057 - DNA, 25 bp, Homo sapien
gtcttcggtgacggcctcgtgcgcc

SEQ ID NO: 515058 - DNA, 25 bp, Homo sapien
tctgcctcttgcactgacattttgc

SEQ ID NO: 515059 - DNA, 25 bp, Homo sapien
cagcagctacatcaagaggtgggtg

SEQ ID NO: 515060 - DNA, 25 bp, Homo sapien
acccggctgcggtctctgggagcct

SEQ ID NO: 515061 - DNA, 25 bp, Homo sapien
ctgcttctatcacccggagcctgca

SEQ ID NO: 515062 - DNA, 25 bp, Homo sapien
cttgaagccgcccagaagggcatca

SEQ ID NO: 515063 - DNA, 25 bp, Homo sapien
gcagggggcatgcaccattctgagc

SEQ ID NO: 515064 - DNA, 25 bp, Homo sapien
ggctttggagcatgggtggcggtga

SEQ ID NO: 515065 - DNA, 25 bp, Homo sapien
gagcagggggcatgcaccattctga

SEQ ID NO: 515066 - DNA, 25 bp, Homo sapien
gtgaggagaccgagtggagaagcat

SEQ ID NO: 515067 - DNA, 25 bp, Homo sapien
ggcctggagtgcaaagacctgttat

SEQ ID NO: 515068 - DNA, 25 bp, Homo sapien
gacacagcgcctttgctactgggaa

SEQ ID NO: 515069 - DNA, 25 bp, Homo sapien
gaaataagtgcgaaacctgagggcc

SEQ ID NO: 515070 - DNA, 25 bp, Homo sapien
tcttcttggcagaccggcaggatgt

SEQ ID NO: 515071 - DNA, 25 bp, Homo sapien
atttcagatttcctcgaggccaggc

SEQ ID NO: 515072 - DNA, 25 bp, Homo sapien
atcatcttcagagccggattgcccc

SEQ ID NO: 515073 - DNA, 25 bp, Homo sapien
agcttgtatttttgacccttaatgg

SEQ ID NO: 515074 - DNA, 25 bp, Homo sapien
cccttaatgggttggagcctagagt

SEQ ID NO: 515075 - DNA, 25 bp, Homo sapien
tgaaggaagacccataccaaagcca

SEQ ID NO: 515076 - DNA, 25 bp, Homo sapien
gaggggtgaaggaagacccatacca

SEQ ID NO: 515077 - DNA, 25 bp, Homo sapien
gaaggaagacccataccaaagccat

SEQ ID NO: 515078 - DNA, 25 bp, Homo sapien
ggtgaaggaagacccataccaaagc

SEQ ID NO: 515079 - DNA, 25 bp, Homo sapien
gccatccattcccttgtaacacccc

SEQ ID NO: 515080 - DNA, 25 bp, Homo sapien
ctggccatccattcccttgtaacac

SEQ ID NO: 515081 - DNA, 25 bp, Homo sapien
tccattcccttgtaacaccccagcg

SEQ ID NO: 515082 - DNA, 25 bp, Homo sapien
tcccatcgtcctctcctctactcct

SEQ ID NO: 515083 - DNA, 25 bp, Homo sapien
cttctctggaacactgcagccccat

SEQ ID NO: 515084 - DNA, 25 bp, Homo sapien
gcagggcagaaatcagcttgtgaca

SEQ ID NO: 515085 - DNA, 25 bp, Homo sapien
gagcagggcagaaatcagcttgtga

SEQ ID NO: 515086 - DNA, 25 bp, Homo sapien
gtgtggactgatgagcagggcagaa

SEQ ID NO: 515087 - DNA, 25 bp, Homo sapien
cagggcagaaatcagcttgtgacaa

SEQ ID NO: 515088 - DNA, 25 bp, Homo sapien
accagggatcagggaaggatttgct

SEQ ID NO: 515089 - DNA, 25 bp, Homo sapien
aattattgttagaactcatcatgtt

SEQ ID NO: 515090 - DNA, 25 bp, Homo sapien
gagaccagggatcagggaaggattt

SEQ ID NO: 515091 - DNA, 25 bp, Homo sapien
aaggagaccagggatcagggaagga

SEQ ID NO: 515092 - DNA, 25 bp, Homo sapien
gacagaaagatcctttggctctcta

SEQ ID NO: 515093 - DNA, 25 bp, Homo sapien
tgacagaaagatcctttggctctct

SEQ ID NO: 515094 - DNA, 25 bp, Homo sapien
ctctatttggttcctaccgcaccat

SEQ ID NO: 515095 - DNA, 25 bp, Homo sapien
tggttcctaccgcaccatttcacag

SEQ ID NO: 515096 - DNA, 25 bp, Homo sapien
ggttgccagccaactccaaaatgta

SEQ ID NO: 515097 - DNA, 25 bp, Homo sapien
caggtaaggttatccagcaaaaggg

SEQ ID NO: 515098 - DNA, 25 bp, Homo sapien
taataactgtgttgtaacctggaga

SEQ ID NO: 515099 - DNA, 25 bp, Homo sapien
tgaggtcttgtattagaatagcccc

SEQ ID NO: 515100 - DNA, 25 bp, Homo sapien
ggttagcaggtgattggtggaagca

SEQ ID NO: 515101 - DNA, 25 bp, Homo sapien
gcaagcttgctgtgcgcaaactgca

SEQ ID NO: 515102 - DNA, 25 bp, Homo sapien
atttggccatattgattccggctga

SEQ ID NO: 515103 - DNA, 25 bp, Homo sapien
caaatttggagggagttggtatgaa

SEQ ID NO: 515104 - DNA, 25 bp, Homo sapien
tgaaaactcttacaaggggatgaaa

SEQ ID NO: 515105 - DNA, 25 bp, Homo sapien
gggatgaaagacacagcttcctcta

SEQ ID NO: 515106 - DNA, 25 bp, Homo sapien
attggtgtctttgactctttgaaac

SEQ ID NO: 515107 - DNA, 25 bp, Homo sapien
tcagtagttcccaagatatgaagat

SEQ ID NO: 515108 - DNA, 25 bp, Homo sapien
ttctgaccgcgtggaactatcacag

SEQ ID NO: 515109 - DNA, 25 bp, Homo sapien
tgccaggaacgtggcctggtgagga

SEQ ID NO: 515110 - DNA, 25 bp, Homo sapien
aaacactatggttggtgccaggaac

SEQ ID NO: 515111 - DNA, 25 bp, Homo sapien
cactcctgtttccacgcgtgcattt

SEQ ID NO: 515112 - DNA, 25 bp, Homo sapien
cggaaagctcactgcaagaactgta

SEQ ID NO: 515113 - DNA, 25 bp, Homo sapien
aacccgatccttgtctccatggcga

SEQ ID NO: 515114 - DNA, 25 bp, Homo sapien
tgcgcacatttgcttaagctgaaag

SEQ ID NO: 515115 - DNA, 25 bp, Homo sapien
tacaagacagtggtccggaaagctc

SEQ ID NO: 515116 - DNA, 25 bp, Homo sapien
ctctgaagagaacaggtcctgcctg

SEQ ID NO: 515117 - DNA, 25 bp, Homo sapien
gaatgacagggccttcatgacgctg

SEQ ID NO: 515118 - DNA, 25 bp, Homo sapien
tatgctcaactgaggaaaagacggg

SEQ ID NO: 515119 - DNA, 25 bp, Homo sapien
taaacactcgaggaagtgcctggct

SEQ ID NO: 515120 - DNA, 25 bp, Homo sapien
tctttctttgggctaaaccattcca

SEQ ID NO: 515121 - DNA, 25 bp, Homo sapien
cctttctgcagatgccatacctaat

SEQ ID NO: 515122 - DNA, 25 bp, Homo sapien
ccatacctaatcttaaatgggccag

SEQ ID NO: 515123 - DNA, 25 bp, Homo sapien
ctttctttgggctaaaccattccag

SEQ ID NO: 515124 - DNA, 25 bp, Homo sapien
tctccgatcactgccacttccagca

SEQ ID NO: 515125 - DNA, 25 bp, Homo sapien
tctggtcattctccgatcactgcca

SEQ ID NO: 515126 - DNA, 25 bp, Homo sapien
ggtcattctccgatcactgccactt

SEQ ID NO: 515127 - DNA, 25 bp, Homo sapien
attctccgatcactgccacttccag

SEQ ID NO: 515128 - DNA, 25 bp, Homo sapien
ccaagctctgctgtagaatggccca

SEQ ID NO: 515129 - DNA, 25 bp, Homo sapien
tcatcaatgccagctttattagaag

SEQ ID NO: 515130 - DNA, 25 bp, Homo sapien
ggcaggtgcctgaaggctcatgccc

SEQ ID NO: 515131 - DNA, 25 bp, Homo sapien
ggattttcactcctctttccaagct

SEQ ID NO: 515132 - DNA, 25 bp, Homo sapien
gaaaccagaacagtggctgtcttga

SEQ ID NO: 515133 - DNA, 25 bp, Homo sapien
tgggttacagtaatgcatgtgtcac

SEQ ID NO: 515134 - DNA, 25 bp, Homo sapien
tatttgaaggtctacaactgggaaa

SEQ ID NO: 515135 - DNA, 25 bp, Homo sapien
tatcatcctgtggtcgtgggttaca

SEQ ID NO: 515136 - DNA, 25 bp, Homo sapien
tattgatcgctttattcgtactcac

SEQ ID NO: 515137 - DNA, 25 bp, Homo sapien
gatagacaaattattgatcgcttta

SEQ ID NO: 515138 - DNA, 25 bp, Homo sapien
caaattattgatcgctttattcgta

SEQ ID NO: 515139 - DNA, 25 bp, Homo sapien
cgctttattcgtactcactgtgaca

SEQ ID NO: 515140 - DNA, 25 bp, Homo sapien
ccctggggcagacaacatacggatg

SEQ ID NO: 515141 - DNA, 25 bp, Homo sapien
gacaacatacggatgagtattgcca

SEQ ID NO: 515142 - DNA, 25 bp, Homo sapien
gggcagacaacatacggatgagtat

SEQ ID NO: 515143 - DNA, 25 bp, Homo sapien
acggatgagtattgccatctgtctg

SEQ ID NO: 515144 - DNA, 25 bp, Homo sapien
gattggagtgtctacccttgaaacc

SEQ ID NO: 515145 - DNA, 25 bp, Homo sapien
ccgggccaggtaccatctgaatgtg

SEQ ID NO: 515146 - DNA, 25 bp, Homo sapien
cagccccagagaatggagacctgag

SEQ ID NO: 515147 - DNA, 25 bp, Homo sapien
gatgtttccagagttgcccgtggtc

SEQ ID NO: 515148 - DNA, 25 bp, Homo sapien
catttcaaacattttgacttccggg

SEQ ID NO: 515149 - DNA, 25 bp, Homo sapien
ccttgcttggcagaataatttgttt

SEQ ID NO: 515150 - DNA, 25 bp, Homo sapien
gtggtgactaagctaaaacatgctc

SEQ ID NO: 515151 - DNA, 25 bp, Homo sapien
tctttttgtttccatgttagcagga

SEQ ID NO: 515152 - DNA, 25 bp, Homo sapien
cacctactcgaaggcagagttctgt

SEQ ID NO: 515153 - DNA, 25 bp, Homo sapien
caacacctactcgaaggcagagttc

SEQ ID NO: 515154 - DNA, 25 bp, Homo sapien
cccaacacctactcgaaggcagagt

SEQ ID NO: 515155 - DNA, 25 bp, Homo sapien
gcagagttctgtcagccagggaaag

SEQ ID NO: 515156 - DNA, 25 bp, Homo sapien
tgttggatgtgaaaacaagagccag

SEQ ID NO: 515157 - DNA, 25 bp, Homo sapien
tgtgcaggaatgacccatgatggtt

SEQ ID NO: 515158 - DNA, 25 bp, Homo sapien
ccaataagaactgggcccggtggat

SEQ ID NO: 515159 - DNA, 25 bp, Homo sapien
caaacattgggagcaggtagggaca

SEQ ID NO: 515160 - DNA, 25 bp, Homo sapien
gcatagcctcgacctgtaacagagg

SEQ ID NO: 515161 - DNA, 25 bp, Homo sapien
gaggcttcgacctccgtgtacacat

SEQ ID NO: 515162 - DNA, 25 bp, Homo sapien
aggcttcgacctccgtgtacacatc

SEQ ID NO: 515163 - DNA, 25 bp, Homo sapien
actgaaccagcatagcctcgacctg

SEQ ID NO: 515164 - DNA, 25 bp, Homo sapien
gacagcggacaacaggaggacactg

SEQ ID NO: 515165 - DNA, 25 bp, Homo sapien
agtagatctgggatctagaaggatc

SEQ ID NO: 515166 - DNA, 25 bp, Homo sapien
gatcacggagaatggcaaaagttag

SEQ ID NO: 515167 - DNA, 25 bp, Homo sapien
ggtcacagtgacagcggacaacagg

SEQ ID NO: 515168 - DNA, 25 bp, Homo sapien
tctccttttctcatagcctcttccc

SEQ ID NO: 515169 - DNA, 25 bp, Homo sapien
ttgatgactccagcagaatcaatta

SEQ ID NO: 515170 - DNA, 25 bp, Homo sapien
gactccagcagaatcaattatctta

SEQ ID NO: 515171 - DNA, 25 bp, Homo sapien
tgctgcaggtccactgcacttccat

SEQ ID NO: 515172 - DNA, 25 bp, Homo sapien
ctccttcacttccaatctctccatg

SEQ ID NO: 515173 - DNA, 25 bp, Homo sapien
cctgggctgctgcaaaggatctcct

SEQ ID NO: 515174 - DNA, 25 bp, Homo sapien
ggatctccttcacttccaatctctc

SEQ ID NO: 515175 - DNA, 25 bp, Homo sapien
ctgggctgctgcaaaggatctcctt

SEQ ID NO: 515176 - DNA, 25 bp, Homo sapien
gctgtgctgctccagttggcctgcc

SEQ ID NO: 515177 - DNA, 25 bp, Homo sapien
tgaacaccttaatgccaagctgtgc

SEQ ID NO: 515178 - DNA, 25 bp, Homo sapien
tgtatttcgacaaggctgaacacct

SEQ ID NO: 515179 - DNA, 25 bp, Homo sapien
catcagtgggcagcgtgtctgtaag

SEQ ID NO: 515180 - DNA, 25 bp, Homo sapien
tcacaggaagtgctgctggtgattc

SEQ ID NO: 515181 - DNA, 25 bp, Homo sapien
cacaggaagtgctgctggtgattca

SEQ ID NO: 515182 - DNA, 25 bp, Homo sapien
gaagtgctgctggtgattcatcagg

SEQ ID NO: 515183 - DNA, 25 bp, Homo sapien
caggaagtgctgctggtgattcatc

SEQ ID NO: 515184 - DNA, 25 bp, Homo sapien
tggagggcgaagaatcgtggctggc

SEQ ID NO: 515185 - DNA, 25 bp, Homo sapien
ctgctgctccgtgtggagggcgaag

SEQ ID NO: 515186 - DNA, 25 bp, Homo sapien
tgagtcagaagtaaacggaagctgc

SEQ ID NO: 515187 - DNA, 25 bp, Homo sapien
gtcagaagtaaacggaagctgctgc

SEQ ID NO: 515188 - DNA, 25 bp, Homo sapien
acgttccggtaacaacactcgaatg

SEQ ID NO: 515189 - DNA, 25 bp, Homo sapien
gcagagctgcttactaaacgcttag

SEQ ID NO: 515190 - DNA, 25 bp, Homo sapien
gctgcttactaaacgcttagaacgt

SEQ ID NO: 515191 - DNA, 25 bp, Homo sapien
caacactcgaatggctgttgaacac

SEQ ID NO: 515192 - DNA, 25 bp, Homo sapien
ggatatcatctctagcaaagtcctc

SEQ ID NO: 515193 - DNA, 25 bp, Homo sapien
acgccctagcctctacagccactaa

SEQ ID NO: 515194 - DNA, 25 bp, Homo sapien
ctacgccctagcctctacagccact

SEQ ID NO: 515195 - DNA, 25 bp, Homo sapien
ttcaggatatcatctctagcaaagt

SEQ ID NO: 515196 - DNA, 25 bp, Homo sapien
cattcagctgagaagacggctttcc

SEQ ID NO: 515197 - DNA, 25 bp, Homo sapien
tgttccaagctggccgtcattcagc

SEQ ID NO: 515198 - DNA, 25 bp, Homo sapien
gagaaagagcccctgttccaagctg

SEQ ID NO: 515199 - DNA, 25 bp, Homo sapien
ccatctcttcgggtaggtgtgtgaa

SEQ ID NO: 515200 - DNA, 25 bp, Homo sapien
ggcatgagccaccgcacccggcccc

SEQ ID NO: 515201 - DNA, 25 bp, Homo sapien
atgagccaccgcacccggcccctac

SEQ ID NO: 515202 - DNA, 25 bp, Homo sapien
caaacaatcctcctggcttgggctc

SEQ ID NO: 515203 - DNA, 25 bp, Homo sapien
ccaaagtgctgtgattataggcatg

SEQ ID NO: 515204 - DNA, 25 bp, Homo sapien
acagcccagcctgccgaatctgcct

SEQ ID NO: 515205 - DNA, 25 bp, Homo sapien
tctgcctcctcatgggcggtggagt

SEQ ID NO: 515206 - DNA, 25 bp, Homo sapien
ctttgcaacgagaatgtgtgcttcc

SEQ ID NO: 515207 - DNA, 25 bp, Homo sapien
gagcctgcgtgtgcttaccttcctc

SEQ ID NO: 515208 - DNA, 25 bp, Homo sapien
tcagatctaatccccttgctttcaa

SEQ ID NO: 515209 - DNA, 25 bp, Homo sapien
gatctaatccccttgctttcaaaaa

SEQ ID NO: 515210 - DNA, 25 bp, Homo sapien
cagatctaatccccttgctttcaaa

SEQ ID NO: 515211 - DNA, 25 bp, Homo sapien
agatctaatccccttgctttcaaaa

SEQ ID NO: 515212 - DNA, 25 bp, Homo sapien
tgcagcttggctttagctccgtcct

SEQ ID NO: 515213 - DNA, 25 bp, Homo sapien
ccttgaggtgcgaatgaagtgattc

SEQ ID NO: 515214 - DNA, 25 bp, Homo sapien
taagacactagttcctgcaccagct

SEQ ID NO: 515215 - DNA, 25 bp, Homo sapien
cagagtgtccttaggacagggctca

SEQ ID NO: 515216 - DNA, 25 bp, Homo sapien
tttcagcattgcgacaggcatccca

SEQ ID NO: 515217 - DNA, 25 bp, Homo sapien
gtgttgggtcctcggatggctccca

SEQ ID NO: 515218 - DNA, 25 bp, Homo sapien
cactgagagctccattactgtatgt

SEQ ID NO: 515219 - DNA, 25 bp, Homo sapien
tctgctaataactcccagtgcagct

SEQ ID NO: 515220 - DNA, 25 bp, Homo sapien
caaagcaaaatccactgcaagtcat

SEQ ID NO: 515221 - DNA, 25 bp, Homo sapien
ttgaaatcaaagcaaaatccactgc

SEQ ID NO: 515222 - DNA, 25 bp, Homo sapien
gaaatcaaagcaaaatccactgcaa

SEQ ID NO: 515223 - DNA, 25 bp, Homo sapien
aatcaaagcaaaatccactgcaagt

SEQ ID NO: 515224 - DNA, 25 bp, Homo sapien
aacagggttctgttttgtgacaaca

SEQ ID NO: 515225 - DNA, 25 bp, Homo sapien
gaacagggttctgttttgtgacaac

SEQ ID NO: 515226 - DNA, 25 bp, Homo sapien
caacagatccgtgggttcccatcat

SEQ ID NO: 515227 - DNA, 25 bp, Homo sapien
tttgtgacaacagatccgtgggttc

SEQ ID NO: 515228 - DNA, 25 bp, Homo sapien
tgctctaggtttccatggtgattac

SEQ ID NO: 515229 - DNA, 25 bp, Homo sapien
tccatggtgattacttaaacttttc

SEQ ID NO: 515230 - DNA, 25 bp, Homo sapien
gatctgactcgccttgaatctgctc

SEQ ID NO: 515231 - DNA, 25 bp, Homo sapien
atctgactcgccttgaatctgctct

SEQ ID NO: 515232 - DNA, 25 bp, Homo sapien
gatgggactgttgctagcatgttct

SEQ ID NO: 515233 - DNA, 25 bp, Homo sapien
ccaaatggtagggaacatagatgcc

SEQ ID NO: 515234 - DNA, 25 bp, Homo sapien
atttcagtttcactactagcgccag

SEQ ID NO: 515235 - DNA, 25 bp, Homo sapien
tctgctccttggtacaccttggcct

SEQ ID NO: 515236 - DNA, 25 bp, Homo sapien
aagtttagaatgtgcggccgctgcc

SEQ ID NO: 515237 - DNA, 25 bp, Homo sapien
gagaagtttagaatgtgcggccgct

SEQ ID NO: 515238 - DNA, 25 bp, Homo sapien
cgaggccgtgaaacagccttcctgt

SEQ ID NO: 515239 - DNA, 25 bp, Homo sapien
tttccgacgtgctcgccgaggccgt

SEQ ID NO: 515240 - DNA, 25 bp, Homo sapien
gcctcaatctctagtgccaatgctt

SEQ ID NO: 515241 - DNA, 25 bp, Homo sapien
ttcatagcaaacacagcctcaatct

SEQ ID NO: 515242 - DNA, 25 bp, Homo sapien
caagctgctgtttgttctacatgat

SEQ ID NO: 515243 - DNA, 25 bp, Homo sapien
gggtcttcactcaagatggcaaaat

SEQ ID NO: 515244 - DNA, 25 bp, Homo sapien
gaacagcatgttctggggatgttct

SEQ ID NO: 515245 - DNA, 25 bp, Homo sapien
agcatgttctggggatgttctgtcc

SEQ ID NO: 515246 - DNA, 25 bp, Homo sapien
acagcatgttctggggatgttctgt

SEQ ID NO: 515247 - DNA, 25 bp, Homo sapien
cttagaactgaacagcatgttctgg

SEQ ID NO: 515248 - DNA, 25 bp, Homo sapien
aatgctctgaagtctcgtaatatta

SEQ ID NO: 515249 - DNA, 25 bp, Homo sapien
acccatgatgttttaatgctctgaa

SEQ ID NO: 515250 - DNA, 25 bp, Homo sapien
cctgggctctgatgttacatgaaag

SEQ ID NO: 515251 - DNA, 25 bp, Homo sapien
tattacttcagtcactttctgaatc

SEQ ID NO: 515252 - DNA, 25 bp, Homo sapien
catctgcctggtccttacatcctag

SEQ ID NO: 515253 - DNA, 25 bp, Homo sapien
agctgccattaactggtctgtcagt

SEQ ID NO: 515254 - DNA, 25 bp, Homo sapien
taaccctttgtcgaggctggtcgtg

SEQ ID NO: 515255 - DNA, 25 bp, Homo sapien
cagttgtctcaccttcggtttcttc

SEQ ID NO: 515256 - DNA, 25 bp, Homo sapien
aaagcactgagtgcgagggatccac

SEQ ID NO: 515257 - DNA, 25 bp, Homo sapien
acagggtccagtaatctaccttggg

SEQ ID NO: 515258 - DNA, 25 bp, Homo sapien
gattcatgattgaggtccaagctga

SEQ ID NO: 515259 - DNA, 25 bp, Homo sapien
tcagaaacctctgctatagcaggat

SEQ ID NO: 515260 - DNA, 25 bp, Homo sapien
gggcatcttaggtgatcatggataa

SEQ ID NO: 515261 - DNA, 25 bp, Homo sapien
gataagtccccgaggggtgctctgt

SEQ ID NO: 515262 - DNA, 25 bp, Homo sapien
ttttcaacagtctcacaatgcactt

SEQ ID NO: 515263 - DNA, 25 bp, Homo sapien
cactttttcagctacattcaggcag

SEQ ID NO: 515264 - DNA, 25 bp, Homo sapien
tgtccatcaaagccaggccagccca

SEQ ID NO: 515265 - DNA, 25 bp, Homo sapien
gtccatcaaagccaggccagcccac

SEQ ID NO: 515266 - DNA, 25 bp, Homo sapien
ctgtccatcaaagccaggccagccc

SEQ ID NO: 515267 - DNA, 25 bp, Homo sapien
gccaacatgcccctaataagcccct

SEQ ID NO: 515268 - DNA, 25 bp, Homo sapien
tgcccctaataagcccctcaggctt

SEQ ID NO: 515269 - DNA, 25 bp, Homo sapien
gttctgctctcgcttttactcctct

SEQ ID NO: 515270 - DNA, 25 bp, Homo sapien
cttttactcctctgctttctatgcc

SEQ ID NO: 515271 - DNA, 25 bp, Homo sapien
tcttctttgatgttaccccattgac

SEQ ID NO: 515272 - DNA, 25 bp, Homo sapien
taccccattgactagagaggccagt

SEQ ID NO: 515273 - DNA, 25 bp, Homo sapien
cacctaattgaaagagagctgtgag

SEQ ID NO: 515274 - DNA, 25 bp, Homo sapien
agtgttgctggtggcacctaattga

SEQ ID NO: 515275 - DNA, 25 bp, Homo sapien
taaataaagccaccggtgatgttct

SEQ ID NO: 515276 - DNA, 25 bp, Homo sapien
ttgagctctccttgccggcgaggga

SEQ ID NO: 515277 - DNA, 25 bp, Homo sapien
gggtagctggttgcttgagctctcc

SEQ ID NO: 515278 - DNA, 25 bp, Homo sapien
tctctgaggcatccatcgcttctgc

SEQ ID NO: 515279 - DNA, 25 bp, Homo sapien
gaatacagcatttcactagccatta

SEQ ID NO: 515280 - DNA, 25 bp, Homo sapien
gattgaatacagcatttcactagcc

SEQ ID NO: 515281 - DNA, 25 bp, Homo sapien
ttgaatacagcatttcactagccat

SEQ ID NO: 515282 - DNA, 25 bp, Homo sapien
ttgattgaatacagcatttcactag

SEQ ID NO: 515283 - DNA, 25 bp, Homo sapien
cagcatctcggtgacagcaggagat

SEQ ID NO: 515284 - DNA, 25 bp, Homo sapien
tttgtctgtaatgagccctgtgtgt

SEQ ID NO: 515285 - DNA, 25 bp, Homo sapien
caaggctttgtgcatgtctatgaca

SEQ ID NO: 515286 - DNA, 25 bp, Homo sapien
tttcctacctggctaaccagcaagg

SEQ ID NO: 515287 - DNA, 25 bp, Homo sapien
tagcaaccaataatttgccacacca

SEQ ID NO: 515288 - DNA, 25 bp, Homo sapien
cgttaactctcccatcatatttaga

SEQ ID NO: 515289 - DNA, 25 bp, Homo sapien
gtcctgcaggaatggttacacagca

SEQ ID NO: 515290 - DNA, 25 bp, Homo sapien
agcagctagcatcatggtgcgttaa

SEQ ID NO: 515291 - DNA, 25 bp, Homo sapien
tgacatcatgagtaccattcttttc

SEQ ID NO: 515292 - DNA, 25 bp, Homo sapien
ggtgacatcatgagtaccattcttt

SEQ ID NO: 515293 - DNA, 25 bp, Homo sapien
ttcaagttcaagaatttgtaaaaga

SEQ ID NO: 515294 - DNA, 25 bp, Homo sapien
caagttcaagaatttgtaaaagagt

SEQ ID NO: 515295 - DNA, 25 bp, Homo sapien
ggtaaaatgaattagtctgctcagg

SEQ ID NO: 515296 - DNA, 25 bp, Homo sapien
catcctcccttgactgcactgtgtg

SEQ ID NO: 515297 - DNA, 25 bp, Homo sapien
tgggccaaagatgtagcctccattg

SEQ ID NO: 515298 - DNA, 25 bp, Homo sapien
caaccttagttaaaggagcactgac

SEQ ID NO: 515299 - DNA, 25 bp, Homo sapien
ccttccaggcattagtgttcagagg

SEQ ID NO: 515300 - DNA, 25 bp, Homo sapien
agcagaagtataccggccactttca

SEQ ID NO: 515301 - DNA, 25 bp, Homo sapien
cttccaggcattagtgttcagaggg

SEQ ID NO: 515302 - DNA, 25 bp, Homo sapien
ctgctggagcagaagtataccggcc

SEQ ID NO: 515303 - DNA, 25 bp, Homo sapien
gagcaatggattccctagaaataaa

SEQ ID NO: 515304 - DNA, 25 bp, Homo sapien
gctgcagcgatcctttgagcaatgg

SEQ ID NO: 515305 - DNA, 25 bp, Homo sapien
gatcctttgagcaatggattcccta

SEQ ID NO: 515306 - DNA, 25 bp, Homo sapien
cagtgtctgctgcagcgatcctttg

SEQ ID NO: 515307 - DNA, 25 bp, Homo sapien
acaatcggcacattgctgtggaatc

SEQ ID NO: 515308 - DNA, 25 bp, Homo sapien
gaatcaagcatgtccttgcaaactg

SEQ ID NO: 515309 - DNA, 25 bp, Homo sapien
caaatgatggtgctggtgttaacga

SEQ ID NO: 515310 - DNA, 25 bp, Homo sapien
gaacagactcgcagaggctgggtca

SEQ ID NO: 515311 - DNA, 25 bp, Homo sapien
ggttccagatacctccaggtgcagc

SEQ ID NO: 515312 - DNA, 25 bp, Homo sapien
caggtgcagcttccaattggtctga

SEQ ID NO: 515313 - DNA, 25 bp, Homo sapien
agcagggttccagatacctccaggt

SEQ ID NO: 515314 - DNA, 25 bp, Homo sapien
agggttccagatacctccaggtgca

SEQ ID NO: 515315 - DNA, 25 bp, Homo sapien
ttttgacataagtggatacaagtaa

SEQ ID NO: 515316 - DNA, 25 bp, Homo sapien
ggttgatgggccacatttaataatg

SEQ ID NO: 515317 - DNA, 25 bp, Homo sapien
tacaagtaatgcctaaaaacaacta

SEQ ID NO: 515318 - DNA, 25 bp, Homo sapien
gttgatgggccacatttaataatgc

SEQ ID NO: 515319 - DNA, 25 bp, Homo sapien
gcctgtggttcaggagaaggtccct

SEQ ID NO: 515320 - DNA, 25 bp, Homo sapien
catttttgatggacaactggacctg

SEQ ID NO: 515321 - DNA, 25 bp, Homo sapien
tgagaagtgtcacagtaactggtca

SEQ ID NO: 515322 - DNA, 25 bp, Homo sapien
tttaaaagtgttgagctgatcatcg

SEQ ID NO: 515323 - DNA, 25 bp, Homo sapien
gaagcacctatcagacgtacaaatg

SEQ ID NO: 515324 - DNA, 25 bp, Homo sapien
taaactgttgcaccctagtgaggag

SEQ ID NO: 515325 - DNA, 25 bp, Homo sapien
ggaaagttggccctcatcaagatca

SEQ ID NO: 515326 - DNA, 25 bp, Homo sapien
caaatgacgagctacctggtctaga

SEQ ID NO: 515327 - DNA, 25 bp, Homo sapien
aattcatattctccctcatctcatt

SEQ ID NO: 515328 - DNA, 25 bp, Homo sapien
gacactaacttcatttctgctagaa

SEQ ID NO: 515329 - DNA, 25 bp, Homo sapien
ctatttttctgtcaggagaaaaaca

SEQ ID NO: 515330 - DNA, 25 bp, Homo sapien
tcttctgggtggcaagattttaagt

SEQ ID NO: 515331 - DNA, 25 bp, Homo sapien
tgctgctaacacatttgactagctt

SEQ ID NO: 515332 - DNA, 25 bp, Homo sapien
tagaaagcccttatgaagtcagact

SEQ ID NO: 515333 - DNA, 25 bp, Homo sapien
tcagttacaacaggatcgacatttc

SEQ ID NO: 515334 - DNA, 25 bp, Homo sapien
caagaaaactaccttggcaggaaca

SEQ ID NO: 515335 - DNA, 25 bp, Homo sapien
tgcaaatggtgagactgcacagaaa

SEQ ID NO: 515336 - DNA, 25 bp, Homo sapien
cctcttgaacaagcagtacagtttt

SEQ ID NO: 515337 - DNA, 25 bp, Homo sapien
agattttaatcacagccctcttgaa

SEQ ID NO: 515338 - DNA, 25 bp, Homo sapien
catcctcagtgatgcaaatggtgag

SEQ ID NO: 515339 - DNA, 25 bp, Homo sapien
ttagtatgaattcacaattccacag

SEQ ID NO: 515340 - DNA, 25 bp, Homo sapien
tagtatgaattcacaattccacagg

SEQ ID NO: 515341 - DNA, 25 bp, Homo sapien
ttcccttttaggatcataaagacta

SEQ ID NO: 515342 - DNA, 25 bp, Homo sapien
aaatagtttcagtatgttatgtaga

SEQ ID NO: 515343 - DNA, 25 bp, Homo sapien
ttttaggatcataaagactacagac

SEQ ID NO: 515344 - DNA, 25 bp, Homo sapien
tagtttcagtatgttatgtagagtc

SEQ ID NO: 515345 - DNA, 25 bp, Homo sapien
ttttattaattgaaggaataggcca

SEQ ID NO: 515346 - DNA, 25 bp, Homo sapien
tattttattaattgaaggaataggc

SEQ ID NO: 515347 - DNA, 25 bp, Homo sapien
attgaaggaataggccaatttaagg

SEQ ID NO: 515348 - DNA, 25 bp, Homo sapien
ttaattgaaggaataggccaattta

SEQ ID NO: 515349 - DNA, 25 bp, Homo sapien
taacagaatttttctcattagggta

SEQ ID NO: 515350 - DNA, 25 bp, Homo sapien
tagtccaagtccatattaacagaat

SEQ ID NO: 515351 - DNA, 25 bp, Homo sapien
ctagtccaagtccatattaacagaa

SEQ ID NO: 515352 - DNA, 25 bp, Homo sapien
tttttctcattagggtaacattcac

SEQ ID NO: 515353 - DNA, 25 bp, Homo sapien
tcggttgtgttacaacgggttcaca

SEQ ID NO: 515354 - DNA, 25 bp, Homo sapien
caacgggttcacatgtgttgttcaa

SEQ ID NO: 515355 - DNA, 25 bp, Homo sapien
caatatttgggccatttggagttct

SEQ ID NO: 515356 - DNA, 25 bp, Homo sapien
cattctgatgtggaggttcagcacc

SEQ ID NO: 515357 - DNA, 25 bp, Homo sapien
tctctgatagatgacacaggcttgt

SEQ ID NO: 515358 - DNA, 25 bp, Homo sapien
aagggcagagactacactttgcaca

SEQ ID NO: 515359 - DNA, 25 bp, Homo sapien
caaggactggtacatgacaggtgct

SEQ ID NO: 515360 - DNA, 25 bp, Homo sapien
ttacaagatgagttccataagggca

SEQ ID NO: 515361 - DNA, 25 bp, Homo sapien
ttgagtccgtaagtgaacccagcag

SEQ ID NO: 515362 - DNA, 25 bp, Homo sapien
gtaaacacgagacagtaacactcac

SEQ ID NO: 515363 - DNA, 25 bp, Homo sapien
tgttgaaggttcaaatgattgcaac

SEQ ID NO: 515364 - DNA, 25 bp, Homo sapien
tacaggaaaaatggctatgttgaag

SEQ ID NO: 515365 - DNA, 25 bp, Homo sapien
atttcctgagcacgtacaactggat

SEQ ID NO: 515366 - DNA, 25 bp, Homo sapien
gagcattcatgacattattcatcca

SEQ ID NO: 515367 - DNA, 25 bp, Homo sapien
cctgatcaagactctttttagcctg

SEQ ID NO: 515368 - DNA, 25 bp, Homo sapien
cacgtacaactggatcctgatcaag

SEQ ID NO: 515369 - DNA, 25 bp, Homo sapien
gctatcttggcataatgctgcagcc

SEQ ID NO: 515370 - DNA, 25 bp, Homo sapien
ctgctatcttggcataatgctgcag

SEQ ID NO: 515371 - DNA, 25 bp, Homo sapien
ttggcataatgctgcagcctctgtc

SEQ ID NO: 515372 - DNA, 25 bp, Homo sapien
tcttggcataatgctgcagcctctg

SEQ ID NO: 515373 - DNA, 25 bp, Homo sapien
cgaactttaactggagtgccaattt

SEQ ID NO: 515374 - DNA, 25 bp, Homo sapien
ctgaaaccgaactttaactggagtg

SEQ ID NO: 515375 - DNA, 25 bp, Homo sapien
accgaactttaactggagtgccaat

SEQ ID NO: 515376 - DNA, 25 bp, Homo sapien
tgaaaccgaactttaactggagtgc

SEQ ID NO: 515377 - DNA, 25 bp, Homo sapien
ttccaacttgtcaacatatgcttgt

SEQ ID NO: 515378 - DNA, 25 bp, Homo sapien
cagtttctgtgaggagtctcaaaaa

SEQ ID NO: 515379 - DNA, 25 bp, Homo sapien
cttccaacttgtcaacatatgcttg

SEQ ID NO: 515380 - DNA, 25 bp, Homo sapien
agtttctgtgaggagtctcaaaaaa

SEQ ID NO: 515381 - DNA, 25 bp, Homo sapien
ctcgtacttcagaatttttcacaac

SEQ ID NO: 515382 - DNA, 25 bp, Homo sapien
caatattagtggcactcgtacttca

SEQ ID NO: 515383 - DNA, 25 bp, Homo sapien
ggcactcgtacttcagaatttttca

SEQ ID NO: 515384 - DNA, 25 bp, Homo sapien
tagtggcactcgtacttcagaattt

SEQ ID NO: 515385 - DNA, 25 bp, Homo sapien
cagtgtcaccgcatttgacgttttt

SEQ ID NO: 515386 - DNA, 25 bp, Homo sapien
cataattgagtaaaagcttaagcct

SEQ ID NO: 515387 - DNA, 25 bp, Homo sapien
taaacacttcatatgagactatctg

SEQ ID NO: 515388 - DNA, 25 bp, Homo sapien
tagaccctatgacagtaatgccata

SEQ ID NO: 515389 - DNA, 25 bp, Homo sapien
cctcaactgcatttttagcatcatt

SEQ ID NO: 515390 - DNA, 25 bp, Homo sapien
ttcctcaactgcatttttagcatca

SEQ ID NO: 515391 - DNA, 25 bp, Homo sapien
tcctcaactgcatttttagcatcat

SEQ ID NO: 515392 - DNA, 25 bp, Homo sapien
attcctcaactgcatttttagcatc

SEQ ID NO: 515393 - DNA, 25 bp, Homo sapien
cagccaatcatgttatatcaagcag

SEQ ID NO: 515394 - DNA, 25 bp, Homo sapien
aatgtataacagtcacaccactctg

SEQ ID NO: 515395 - DNA, 25 bp, Homo sapien
gccgtgaaattccaactgtactgtg

SEQ ID NO: 515396 - DNA, 25 bp, Homo sapien
tcctaaatacgatgttcccacctca

SEQ ID NO: 515397 - DNA, 25 bp, Homo sapien
gcttcaataggcagctcaacattca

SEQ ID NO: 515398 - DNA, 25 bp, Homo sapien
agttggcttcaataggcagctcaac

SEQ ID NO: 515399 - DNA, 25 bp, Homo sapien
taactgccagaccaagttggcttca

SEQ ID NO: 515400 - DNA, 25 bp, Homo sapien
gaaggtctttccctaactgccagac

SEQ ID NO: 515401 - DNA, 25 bp, Homo sapien
tcagggctgctattaaatatgccat

SEQ ID NO: 515402 - DNA, 25 bp, Homo sapien
cataaagttggaaggatctacagga

SEQ ID NO: 515403 - DNA, 25 bp, Homo sapien
gactctagaacctgtcacctaagga

SEQ ID NO: 515404 - DNA, 25 bp, Homo sapien
taagcttcgaccagtacaaaacacg

SEQ ID NO: 515405 - DNA, 25 bp, Homo sapien
gactgtgaggtttgttgagcatcag

SEQ ID NO: 515406 - DNA, 25 bp, Homo sapien
ttctgaggtaagttcaggtgaaggg

SEQ ID NO: 515407 - DNA, 25 bp, Homo sapien
cactgttgtcttgctggacattttt

SEQ ID NO: 515408 - DNA, 25 bp, Homo sapien
tgttgagcatcagtttgtacctggg

SEQ ID NO: 515409 - DNA, 25 bp, Homo sapien
gaatcaagaactctcccttaggaag

SEQ ID NO: 515410 - DNA, 25 bp, Homo sapien
ggaaatagattactccaggcctctt

SEQ ID NO: 515411 - DNA, 25 bp, Homo sapien
taggaagctcatctaagttagtaca

SEQ ID NO: 515412 - DNA, 25 bp, Homo sapien
gaaatgaaagcccaggcacaaagga

SEQ ID NO: 515413 - DNA, 25 bp, Homo sapien
ctccaccatagatgccgtagagatg

SEQ ID NO: 515414 - DNA, 25 bp, Homo sapien
tgccgtagagatggtgaaaatgcca

SEQ ID NO: 515415 - DNA, 25 bp, Homo sapien
ctcgcactttgacttttactctaga

SEQ ID NO: 515416 - DNA, 25 bp, Homo sapien
actttctccaccatagatgccgtag

SEQ ID NO: 515417 - DNA, 25 bp, Homo sapien
caatgagtgagaagctaagtcttta

SEQ ID NO: 515418 - DNA, 25 bp, Homo sapien
tgtacaatgagtgagaagctaagtc

SEQ ID NO: 515419 - DNA, 25 bp, Homo sapien
aaagtttgtacaatgagtgagaagc

SEQ ID NO: 515420 - DNA, 25 bp, Homo sapien
tgagaagctaagtctttaactaaaa

SEQ ID NO: 515421 - DNA, 25 bp, Homo sapien
tccttggggatcagaatagaaagct

SEQ ID NO: 515422 - DNA, 25 bp, Homo sapien
tctcagaaaggtgagaactttggag

SEQ ID NO: 515423 - DNA, 25 bp, Homo sapien
gaaaggagcagcatggtttcgacta

SEQ ID NO: 515424 - DNA, 25 bp, Homo sapien
gcatggtttcgactaaagacttcat

SEQ ID NO: 515425 - DNA, 25 bp, Homo sapien
taaatgccggggaaagtattgcaca

SEQ ID NO: 515426 - DNA, 25 bp, Homo sapien
gaactgcatctgtgacggaaaattc

SEQ ID NO: 515427 - DNA, 25 bp, Homo sapien
tctgaatcatggttccagatcagag

SEQ ID NO: 515428 - DNA, 25 bp, Homo sapien
tcagagatattggaaaaggaactgc

SEQ ID NO: 515429 - DNA, 25 bp, Homo sapien
aactaacttcatgcttctgggctgc

SEQ ID NO: 515430 - DNA, 25 bp, Homo sapien
gccttatctccctacagctttacgg

SEQ ID NO: 515431 - DNA, 25 bp, Homo sapien
tatcccaccatgacgacatccagtg

SEQ ID NO: 515432 - DNA, 25 bp, Homo sapien
gattaccactgtaattccctgtgtg

SEQ ID NO: 515433 - DNA, 25 bp, Homo sapien
caagcaaaagcagagttgagaaagt

SEQ ID NO: 515434 - DNA, 25 bp, Homo sapien
aagcaaaagcagagttgagaaagta

SEQ ID NO: 515435 - DNA, 25 bp, Homo sapien
agcaaaagcagagttgagaaagtac

SEQ ID NO: 515436 - DNA, 25 bp, Homo sapien
cagaagttcagcacagagttcttca

SEQ ID NO: 515437 - DNA, 25 bp, Homo sapien
ggaattcgtgtagcgcctccaacaa

SEQ ID NO: 515438 - DNA, 25 bp, Homo sapien
gagatgagtttgttccaacagtgaa

SEQ ID NO: 515439 - DNA, 25 bp, Homo sapien
gagtgttgtgctaatatcttttcca

SEQ ID NO: 515440 - DNA, 25 bp, Homo sapien
ggagtgctcgtattttggattttgc

SEQ ID NO: 515441 - DNA, 25 bp, Homo sapien
gaaggtctgtgctgttagagctcat

SEQ ID NO: 515442 - DNA, 25 bp, Homo sapien
cctgatacagacgtaggagtgctcg

SEQ ID NO: 515443 - DNA, 25 bp, Homo sapien
agcattcgatattcagtggaaggtc

SEQ ID NO: 515444 - DNA, 25 bp, Homo sapien
gaacacttaagagtatgctaagaca

SEQ ID NO: 515445 - DNA, 25 bp, Homo sapien
gcttaaagtcacaacacttaacgtg

SEQ ID NO: 515446 - DNA, 25 bp, Homo sapien
gcctagtaaagaggctcagtagctt

SEQ ID NO: 515447 - DNA, 25 bp, Homo sapien
ttatggagctcaaccttagcaaccg

SEQ ID NO: 515448 - DNA, 25 bp, Homo sapien
tatcaacaaaaaccactatccgagg

SEQ ID NO: 515449 - DNA, 25 bp, Homo sapien
ccatatcaacaaaaaccactatccg

SEQ ID NO: 515450 - DNA, 25 bp, Homo sapien
atcaacaaaaaccactatccgaggt

SEQ ID NO: 515451 - DNA, 25 bp, Homo sapien
atatcaacaaaaaccactatccgag

SEQ ID NO: 515452 - DNA, 25 bp, Homo sapien
cctgcttataaattccgtaattcaa

SEQ ID NO: 515453 - DNA, 25 bp, Homo sapien
ttataaattccgtaattcaaagcaa

SEQ ID NO: 515454 - DNA, 25 bp, Homo sapien
cttataaattccgtaattcaaagca

SEQ ID NO: 515455 - DNA, 25 bp, Homo sapien
tgcttataaattccgtaattcaaag

SEQ ID NO: 515456 - DNA, 25 bp, Homo sapien
taaccacgtatcacagacagtatca

SEQ ID NO: 515457 - DNA, 25 bp, Homo sapien
taaaattacacatgcaggaagcttg

SEQ ID NO: 515458 - DNA, 25 bp, Homo sapien
ccaaggtagttttgaagcccagaat

SEQ ID NO: 515459 - DNA, 25 bp, Homo sapien
tgtgctagacaaaacatatggcgtg

SEQ ID NO: 515460 - DNA, 25 bp, Homo sapien
tgtgcagcatctaacacagatcgcc

SEQ ID NO: 515461 - DNA, 25 bp, Homo sapien
aacagtttaggccaacaatctgtgc

SEQ ID NO: 515462 - DNA, 25 bp, Homo sapien
cagctgtcatgtcattcataagtct

SEQ ID NO: 515463 - DNA, 25 bp, Homo sapien
acagatcgcctctcagcatctgtaa

SEQ ID NO: 515464 - DNA, 25 bp, Homo sapien
tcacaaaacagaaatagggctttag

SEQ ID NO: 515465 - DNA, 25 bp, Homo sapien
ttgaaaaggctgtcccaaaattaca

SEQ ID NO: 515466 - DNA, 25 bp, Homo sapien
ctaagtaggtgcctcgccaagtcac

SEQ ID NO: 515467 - DNA, 25 bp, Homo sapien
ttcacaacagtccagctaagtaggt

SEQ ID NO: 515468 - DNA, 25 bp, Homo sapien
caacatggctgttatctgctccaca

SEQ ID NO: 515469 - DNA, 25 bp, Homo sapien
tctgctccacactaaatagatgttc

SEQ ID NO: 515470 - DNA, 25 bp, Homo sapien
cagtttccttcagcttagtcaacaa

SEQ ID NO: 515471 - DNA, 25 bp, Homo sapien
aatagatgttcttcacccatgtaca

SEQ ID NO: 515472 - DNA, 25 bp, Homo sapien
ttctaaggttgctcaattatattac

SEQ ID NO: 515473 - DNA, 25 bp, Homo sapien
tgaaatcttttgaagttagacaccg

SEQ ID NO: 515474 - DNA, 25 bp, Homo sapien
gggtcattgaatgctcggccatgaa

SEQ ID NO: 515475 - DNA, 25 bp, Homo sapien
caatggaaccaaatcgtaactcaag

SEQ ID NO: 515476 - DNA, 25 bp, Homo sapien
gacaccgtattgtttgcatgagtga

SEQ ID NO: 515477 - DNA, 25 bp, Homo sapien
caagaggcaaaatagtgtgacgaca

SEQ ID NO: 515478 - DNA, 25 bp, Homo sapien
gtgcacataagttgccctgaggccc

SEQ ID NO: 515479 - DNA, 25 bp, Homo sapien
gccagaaagtaagcagcaagaggga

SEQ ID NO: 515480 - DNA, 25 bp, Homo sapien
tcaaaccaatcctatgagtgcacat

SEQ ID NO: 515481 - DNA, 25 bp, Homo sapien
tacataaacttaggcacactttacc

SEQ ID NO: 515482 - DNA, 25 bp, Homo sapien
gattagaaagttaaagtcgatctta

SEQ ID NO: 515483 - DNA, 25 bp, Homo sapien
aaaatacataaacttaggcacactt

SEQ ID NO: 515484 - DNA, 25 bp, Homo sapien
gaaaggaaagagtgtcatcatctga

SEQ ID NO: 515485 - DNA, 25 bp, Homo sapien
ggctgcaactccgattgttctattt

SEQ ID NO: 515486 - DNA, 25 bp, Homo sapien
ttttttgatccaaatgatatgactg

SEQ ID NO: 515487 - DNA, 25 bp, Homo sapien
tattttttgatccaaatgatatgac

SEQ ID NO: 515488 - DNA, 25 bp, Homo sapien
gatttttggctgcaactccgattgt

SEQ ID NO: 515489 - DNA, 25 bp, Homo sapien
tgatcccgggcattaaggccaacaa

SEQ ID NO: 515490 - DNA, 25 bp, Homo sapien
caatgttagcaacgaagagactggg

SEQ ID NO: 515491 - DNA, 25 bp, Homo sapien
tacatctttcgacaatgatcccggg

SEQ ID NO: 515492 - DNA, 25 bp, Homo sapien
tggtcgctaacaacaatccgcctgc

SEQ ID NO: 515493 - DNA, 25 bp, Homo sapien
tgcggaagaaaaaggccggcagccc

SEQ ID NO: 515494 - DNA, 25 bp, Homo sapien
catttcgagattcacaatgcggaag

SEQ ID NO: 515495 - DNA, 25 bp, Homo sapien
tccgcggtgcgcaaagatatgcgcg

SEQ ID NO: 515496 - DNA, 25 bp, Homo sapien
tggacaagcagcgacacaagctctg

SEQ ID NO: 515497 - DNA, 25 bp, Homo sapien
atgtagcagctctgcgagcccacgt

SEQ ID NO: 515498 - DNA, 25 bp, Homo sapien
ccgggctaccgcgatgtagcagctc

SEQ ID NO: 515499 - DNA, 25 bp, Homo sapien
gcaccggtcgctgaactcattggcg

SEQ ID NO: 515500 - DNA, 25 bp, Homo sapien
gggtgcaccggtcgctgaactcatt

SEQ ID NO: 515501 - DNA, 25 bp, Homo sapien
tcgggtctcggtctgcgtcctccgg

SEQ ID NO: 515502 - DNA, 25 bp, Homo sapien
gggtctggccgttcctctgacactc

SEQ ID NO: 515503 - DNA, 25 bp, Homo sapien
gacagccgcggcctgtcaggagcct

SEQ ID NO: 515504 - DNA, 25 bp, Homo sapien
ctctgacactcagaaggacacacag

SEQ ID NO: 515505 - DNA, 25 bp, Homo sapien
ccttatgtatcgcactgatcagaac

SEQ ID NO: 515506 - DNA, 25 bp, Homo sapien
gcaggtcgctccgcacctcgggttg

SEQ ID NO: 515507 - DNA, 25 bp, Homo sapien
cggcgctgaactaccgacccaaaag

SEQ ID NO: 515508 - DNA, 25 bp, Homo sapien
tttccagaatctgcggcatttactc

SEQ ID NO: 515509 - DNA, 25 bp, Homo sapien
cccctccacgtgccacttccgcttc

SEQ ID NO: 515510 - DNA, 25 bp, Homo sapien
cctccacgtgccacttccgcttcct

SEQ ID NO: 515511 - DNA, 25 bp, Homo sapien
ccctccacgtgccacttccgcttcc

SEQ ID NO: 515512 - DNA, 25 bp, Homo sapien
gattctacccaatgggcagccggtc

SEQ ID NO: 515513 - DNA, 25 bp, Homo sapien
aagattctacccaatgggcagccgg

SEQ ID NO: 515514 - DNA, 25 bp, Homo sapien
ctggaaagattctacccaatgggca

SEQ ID NO: 515515 - DNA, 25 bp, Homo sapien
ggaaagattctacccaatgggcagc

SEQ ID NO: 515516 - DNA, 25 bp, Homo sapien
ccctagccacaggcgttttgctgcc

SEQ ID NO: 515517 - DNA, 25 bp, Homo sapien
tggctcaaacctgcctccgcccact

SEQ ID NO: 515518 - DNA, 25 bp, Homo sapien
gccctagccacaggcgttttgctgc

SEQ ID NO: 515519 - DNA, 25 bp, Homo sapien
cgcccactcccgccctagccacagg

SEQ ID NO: 515520 - DNA, 25 bp, Homo sapien
gaatgactccaaaactcggaatagt

SEQ ID NO: 515521 - DNA, 25 bp, Homo sapien
aaaacaggcaacgaagaatgactcc

SEQ ID NO: 515522 - DNA, 25 bp, Homo sapien
ggtggtgtccgatccttaacgctaa

SEQ ID NO: 515523 - DNA, 25 bp, Homo sapien
cacaatttactaccgggaggtggtg

SEQ ID NO: 515524 - DNA, 25 bp, Homo sapien
tggattaccccgacaactggtgcgt

SEQ ID NO: 515525 - DNA, 25 bp, Homo sapien
tcttctgggactcgcgagagaggct

SEQ ID NO: 515526 - DNA, 25 bp, Homo sapien
aagtgtgcgccttgcatgctgggat

SEQ ID NO: 515527 - DNA, 25 bp, Homo sapien
cgggttccctggcaataagcgtcat

SEQ ID NO: 515528 - DNA, 25 bp, Homo sapien
ctgtgacagccatactggaagaaaa

SEQ ID NO: 515529 - DNA, 25 bp, Homo sapien
tgtcatccaggtagtccaggacctc

SEQ ID NO: 515530 - DNA, 25 bp, Homo sapien
gcagtatgcagatattactggcaca

SEQ ID NO: 515531 - DNA, 25 bp, Homo sapien
atggctccccaggtcatggacttga

SEQ ID NO: 515532 - DNA, 25 bp, Homo sapien
ggacctccgagttggcatggctccc

SEQ ID NO: 515533 - DNA, 25 bp, Homo sapien
cagtgtgaattcgaaggaggtgctt

SEQ ID NO: 515534 - DNA, 25 bp, Homo sapien
tagcagtgtgaattcgaaggaggtg

SEQ ID NO: 515535 - DNA, 25 bp, Homo sapien
tgtgaattcgaaggaggtgctttga

SEQ ID NO: 515536 - DNA, 25 bp, Homo sapien
attcgaaggaggtgctttgacccct

SEQ ID NO: 515537 - DNA, 25 bp, Homo sapien
tctgtcgctgggctgcaggggtgtt

SEQ ID NO: 515538 - DNA, 25 bp, Homo sapien
cgctgggctgcaggggtgtttgttt

SEQ ID NO: 515539 - DNA, 25 bp, Homo sapien
gtttgtttctgtccctctgctacca

SEQ ID NO: 515540 - DNA, 25 bp, Homo sapien
gcaggggtgtttgtttctgtccctc

SEQ ID NO: 515541 - DNA, 25 bp, Homo sapien
tctacctgtttcatcaggattaagt

SEQ ID NO: 515542 - DNA, 25 bp, Homo sapien
gattaagttaggtgtcacttgatcc

SEQ ID NO: 515543 - DNA, 25 bp, Homo sapien
tggctttggttcagtgcattcaggg

SEQ ID NO: 515544 - DNA, 25 bp, Homo sapien
ttcttccagatctacctgtttcatc

SEQ ID NO: 515545 - DNA, 25 bp, Homo sapien
tccagtaaggataaagcaccatgcc

SEQ ID NO: 515546 - DNA, 25 bp, Homo sapien
caagctgtgacattagcgcaggccg

SEQ ID NO: 515547 - DNA, 25 bp, Homo sapien
tgttattaaggacccacatgatgtg

SEQ ID NO: 515548 - DNA, 25 bp, Homo sapien
catgatgtgggagaacagaacaagc

SEQ ID NO: 515549 - DNA, 25 bp, Homo sapien
gcggtccatgggagaagtctccctt

SEQ ID NO: 515550 - DNA, 25 bp, Homo sapien
tggtgtcagggggtatgcggtccat

SEQ ID NO: 515551 - DNA, 25 bp, Homo sapien
tatgcggtccatgggagaagtctcc

SEQ ID NO: 515552 - DNA, 25 bp, Homo sapien
gggtatgcggtccatgggagaagtc

SEQ ID NO: 515553 - DNA, 25 bp, Homo sapien
caagaagggaacaatatgctcttct

SEQ ID NO: 515554 - DNA, 25 bp, Homo sapien
ctccagtttcatgatggataagcct

SEQ ID NO: 515555 - DNA, 25 bp, Homo sapien
tttcatgatggataagcctgggttc

SEQ ID NO: 515556 - DNA, 25 bp, Homo sapien
acaagaagggaacaatatgctcttc

SEQ ID NO: 515557 - DNA, 25 bp, Homo sapien
tcaggtgcatctctagcaggctggt

SEQ ID NO: 515558 - DNA, 25 bp, Homo sapien
gaggcctaacgtgtttctctgggag

SEQ ID NO: 515559 - DNA, 25 bp, Homo sapien
ctttgtgggcaggacatactcgggt

SEQ ID NO: 515560 - DNA, 25 bp, Homo sapien
tcctgttcgccgttgtaaaaagctg

SEQ ID NO: 515561 - DNA, 25 bp, Homo sapien
tgtgtgggctgtgatgctgtcctgg

SEQ ID NO: 515562 - DNA, 25 bp, Homo sapien
gtgtgggctgtgatgctgtcctggg

SEQ ID NO: 515563 - DNA, 25 bp, Homo sapien
ccaactgtgaagcatgaaggttgca

SEQ ID NO: 515564 - DNA, 25 bp, Homo sapien
caatttgcccaccatgaacattcgt

SEQ ID NO: 515565 - DNA, 25 bp, Homo sapien
gaccccaactgtgaagcatgaaggt

SEQ ID NO: 515566 - DNA, 25 bp, Homo sapien
tgaacattcgtaaaagttgcttggt

SEQ ID NO: 515567 - DNA, 25 bp, Homo sapien
gatccttaaatactgagctttacag

SEQ ID NO: 515568 - DNA, 25 bp, Homo sapien
tgaatactggatttctaaaggctag

SEQ ID NO: 515569 - DNA, 25 bp, Homo sapien
tggacggagtaatgcttttcaaagt

SEQ ID NO: 515570 - DNA, 25 bp, Homo sapien
tatatgagctataaaatggacggag

SEQ ID NO: 515571 - DNA, 25 bp, Homo sapien
gaaatagtagcatgattaggcatca

SEQ ID NO: 515572 - DNA, 25 bp, Homo sapien
catttagattgacgacagttgttgc

SEQ ID NO: 515573 - DNA, 25 bp, Homo sapien
tgtctttattccagacagctcttgg

SEQ ID NO: 515574 - DNA, 25 bp, Homo sapien
aacttgctttgagactgggcacggt

SEQ ID NO: 515575 - DNA, 25 bp, Homo sapien
ggttgcatggattcagccaaaatac

SEQ ID NO: 515576 - DNA, 25 bp, Homo sapien
tcttgagctctatttgggtgtgtgg

SEQ ID NO: 515577 - DNA, 25 bp, Homo sapien
tgtgtgggtggtgcagagtgtagag

SEQ ID NO: 515578 - DNA, 25 bp, Homo sapien
gtaggtcttgagctctatttgggtg

SEQ ID NO: 515579 - DNA, 25 bp, Homo sapien
ttgatgtagatgtcaaacactgggc

SEQ ID NO: 515580 - DNA, 25 bp, Homo sapien
gaataaaaggcaagcttctgggttc

SEQ ID NO: 515581 - DNA, 25 bp, Homo sapien
ctgggcaacagtgatcgttagatta

SEQ ID NO: 515582 - DNA, 25 bp, Homo sapien
gaatcagatgtaatgagctcatggg

SEQ ID NO: 515583 - DNA, 25 bp, Homo sapien
cccatcttgaagctgtcggtatacg

SEQ ID NO: 515584 - DNA, 25 bp, Homo sapien
tatatagccacgattgattaaacca

SEQ ID NO: 515585 - DNA, 25 bp, Homo sapien
aggaactccacatgttcagatattc

SEQ ID NO: 515586 - DNA, 25 bp, Homo sapien
tacgttagcctacaaaaagatagca

SEQ ID NO: 515587 - DNA, 25 bp, Homo sapien
tccaagggatgtatcagggatgatc

SEQ ID NO: 515588 - DNA, 25 bp, Homo sapien
ggatttctagatcgcttcaagccta

SEQ ID NO: 515589 - DNA, 25 bp, Homo sapien
aactaccagacctcacgtgttgcag

SEQ ID NO: 515590 - DNA, 25 bp, Homo sapien
gatgatcagctgatgagaggctcca

SEQ ID NO: 515591 - DNA, 25 bp, Homo sapien
cagtgaagccttccatgacggtctt

SEQ ID NO: 515592 - DNA, 25 bp, Homo sapien
agccttccatgacggtcttatctga

SEQ ID NO: 515593 - DNA, 25 bp, Homo sapien
cagtgaagctgtcatattgcttcat

SEQ ID NO: 515594 - DNA, 25 bp, Homo sapien
catgacggtcttatctgaagttgtc

SEQ ID NO: 515595 - DNA, 25 bp, Homo sapien
acagaccttgcagggcatgacatgg

SEQ ID NO: 515596 - DNA, 25 bp, Homo sapien
tgaaccatccctcatacctcttcct

SEQ ID NO: 515597 - DNA, 25 bp, Homo sapien
ccttgcagggcatgacatggagagt

SEQ ID NO: 515598 - DNA, 25 bp, Homo sapien
catgaaccatccctcatacctcttc

SEQ ID NO: 515599 - DNA, 25 bp, Homo sapien
ttactgctggtgccccagcctgacg

SEQ ID NO: 515600 - DNA, 25 bp, Homo sapien
tactgctggtgccccagcctgacgg

SEQ ID NO: 515601 - DNA, 25 bp, Homo sapien
actgctggtgccccagcctgacggc

SEQ ID NO: 515602 - DNA, 25 bp, Homo sapien
cattagattgagtgataaattggtc

SEQ ID NO: 515603 - DNA, 25 bp, Homo sapien
gatagccattagattgagtgataaa

SEQ ID NO: 515604 - DNA, 25 bp, Homo sapien
ctgccaggagcctaggatagccatt

SEQ ID NO: 515605 - DNA, 25 bp, Homo sapien
ctaggatagccattagattgagtga

SEQ ID NO: 515606 - DNA, 25 bp, Homo sapien
catgaagggacctttctctggactc

SEQ ID NO: 515607 - DNA, 25 bp, Homo sapien
gactcatctctagggatagcctgac

SEQ ID NO: 515608 - DNA, 25 bp, Homo sapien
caacctggcagaaacattacgtcaa

SEQ ID NO: 515609 - DNA, 25 bp, Homo sapien
ttcaagcagcaaacctaacaggcat

SEQ ID NO: 515610 - DNA, 25 bp, Homo sapien
gatatgtgctctccttcaatgtcca

SEQ ID NO: 515611 - DNA, 25 bp, Homo sapien
gactctgtcataggctcttgctgca

SEQ ID NO: 515612 - DNA, 25 bp, Homo sapien
tatccagtggatcctgacttcagga

SEQ ID NO: 515613 - DNA, 25 bp, Homo sapien
gcgtctgtccagaacatagatagga

SEQ ID NO: 515614 - DNA, 25 bp, Homo sapien
atgacaacattgcactccgagactg

SEQ ID NO: 515615 - DNA, 25 bp, Homo sapien
ggcagagcttcccatgaatccaaca

SEQ ID NO: 515616 - DNA, 25 bp, Homo sapien
gaatccaaccaggaaaatattgcag

SEQ ID NO: 515617 - DNA, 25 bp, Homo sapien
ggcagagcttcccatgaatccaacc

SEQ ID NO: 515618 - DNA, 25 bp, Homo sapien
gatcataaaagagtaagatgtcaga

SEQ ID NO: 515619 - DNA, 25 bp, Homo sapien
caggttcccgaagagcccacttggt

SEQ ID NO: 515620 - DNA, 25 bp, Homo sapien
cccgaagagcccacttggtatcttt

SEQ ID NO: 515621 - DNA, 25 bp, Homo sapien
ttagatcataaaagagtaagatgtc

SEQ ID NO: 515622 - DNA, 25 bp, Homo sapien
agatagataaatcacggctcataaa

SEQ ID NO: 515623 - DNA, 25 bp, Homo sapien
tggttataccaatctacattttcac

SEQ ID NO: 515624 - DNA, 25 bp, Homo sapien
aaatgtatcaccttatttccagtga

SEQ ID NO: 515625 - DNA, 25 bp, Homo sapien
gataatggttatcctaacagatgta

SEQ ID NO: 515626 - DNA, 25 bp, Homo sapien
gatctctaatgacctttttccggaa

SEQ ID NO: 515627 - DNA, 25 bp, Homo sapien
tagcctctcgactttgagggtaaag

SEQ ID NO: 515628 - DNA, 25 bp, Homo sapien
ccaaatcactaggttctcaggtccc

SEQ ID NO: 515629 - DNA, 25 bp, Homo sapien
gacctgtgtcatctctagcctctcg

SEQ ID NO: 515630 - DNA, 25 bp, Homo sapien
ggcacataagtgtcttaagacctcc

SEQ ID NO: 515631 - DNA, 25 bp, Homo sapien
caatgcactgcattcacaacggtga

SEQ ID NO: 515632 - DNA, 25 bp, Homo sapien
ggtatttgcatggtacaacttttcc

SEQ ID NO: 515633 - DNA, 25 bp, Homo sapien
aaaagtcgagattatatatacagtc

SEQ ID NO: 515634 - DNA, 25 bp, Homo sapien
ggatggaataccacgacccagaatg

SEQ ID NO: 515635 - DNA, 25 bp, Homo sapien
cgacccagaatgagcagggaccagg

SEQ ID NO: 515636 - DNA, 25 bp, Homo sapien
caaagccacgggatggaataccacg

SEQ ID NO: 515637 - DNA, 25 bp, Homo sapien
caaagatggtgccaaagccacggga

SEQ ID NO: 515638 - DNA, 25 bp, Homo sapien
caacagtcattcattcttgtcatac

SEQ ID NO: 515639 - DNA, 25 bp, Homo sapien
tcaacagtcattcattcttgtcata

SEQ ID NO: 515640 - DNA, 25 bp, Homo sapien
gcacctgtggcaccgttgcttgtgt

SEQ ID NO: 515641 - DNA, 25 bp, Homo sapien
tatgatggtgcttatgatgctcttc

SEQ ID NO: 515642 - DNA, 25 bp, Homo sapien
taatatcacaggtcttgcaccactc

SEQ ID NO: 515643 - DNA, 25 bp, Homo sapien
accgttgcttgtgtgccctttgtgg

SEQ ID NO: 515644 - DNA, 25 bp, Homo sapien
ctgtggctgtggcattgatattgtt

SEQ ID NO: 515645 - DNA, 25 bp, Homo sapien
ctgtggcattgatattgttcgtggg

SEQ ID NO: 515646 - DNA, 25 bp, Homo sapien
gggctccatcaacaaggtaacttga

SEQ ID NO: 515647 - DNA, 25 bp, Homo sapien
tgttcgtggggctccatcaacaagg

SEQ ID NO: 515648 - DNA, 25 bp, Homo sapien
gcagctttcacgggacagccatttc

SEQ ID NO: 515649 - DNA, 25 bp, Homo sapien
cagctttcacgggacagccatttcc

SEQ ID NO: 515650 - DNA, 25 bp, Homo sapien
gctgaggcaaatcaggtcactctct

SEQ ID NO: 515651 - DNA, 25 bp, Homo sapien
ctgaggcaaatcaggtcactctctg

SEQ ID NO: 515652 - DNA, 25 bp, Homo sapien
ctgtttccaaggtggatattttcat

SEQ ID NO: 515653 - DNA, 25 bp, Homo sapien
tttgctgtttccaaggtggatattt

SEQ ID NO: 515654 - DNA, 25 bp, Homo sapien
gaaggggcatcttcaaggcaggaga

SEQ ID NO: 515655 - DNA, 25 bp, Homo sapien
gggaaggggcatcttcaaggcagga

SEQ ID NO: 515656 - DNA, 25 bp, Homo sapien
ttttcaggcatttgaagggatgggt

SEQ ID NO: 515657 - DNA, 25 bp, Homo sapien
aaattttcaggcatttgaagggatg

SEQ ID NO: 515658 - DNA, 25 bp, Homo sapien
ttctcagaaattttcaggcatttga

SEQ ID NO: 515659 - DNA, 25 bp, Homo sapien
attctcagaaattttcaggcatttg

SEQ ID NO: 515660 - DNA, 25 bp, Homo sapien
tggtaactttttagctgccttcctg

SEQ ID NO: 515661 - DNA, 25 bp, Homo sapien
ctggtaactttttagctgccttcct

SEQ ID NO: 515662 - DNA, 25 bp, Homo sapien
taactttttagctgccttcctggcc

SEQ ID NO: 515663 - DNA, 25 bp, Homo sapien
gtaactttttagctgccttcctggc

SEQ ID NO: 515664 - DNA, 25 bp, Homo sapien
ttcttgtgacaggaattcagacctg

SEQ ID NO: 515665 - DNA, 25 bp, Homo sapien
aaaagctgttcggtttcttgtgaca

SEQ ID NO: 515666 - DNA, 25 bp, Homo sapien
ttcggtttcttgtgacaggaattca

SEQ ID NO: 515667 - DNA, 25 bp, Homo sapien
gctgttcggtttcttgtgacaggaa

SEQ ID NO: 515668 - DNA, 25 bp, Homo sapien
aatgattaaccaaccgccctggcac

SEQ ID NO: 515669 - DNA, 25 bp, Homo sapien
gcaggaagttctttggaccaatgat

SEQ ID NO: 515670 - DNA, 25 bp, Homo sapien
ggaagatccctgcaagctgcaggaa

SEQ ID NO: 515671 - DNA, 25 bp, Homo sapien
ctggcaccttcctggcaatgttgta

SEQ ID NO: 515672 - DNA, 25 bp, Homo sapien
agagagactgtagatgtttaaattc

SEQ ID NO: 515673 - DNA, 25 bp, Homo sapien
cagagagactgtagatgtttaaatt

SEQ ID NO: 515674 - DNA, 25 bp, Homo sapien
tggaggatccagggtgggacacaca

SEQ ID NO: 515675 - DNA, 25 bp, Homo sapien
ctctgggtacctttctgggagcaca

SEQ ID NO: 515676 - DNA, 25 bp, Homo sapien
ctctggaggatccagggtgggacac

SEQ ID NO: 515677 - DNA, 25 bp, Homo sapien
ttcctctgggtacctttctgggagc

SEQ ID NO: 515678 - DNA, 25 bp, Homo sapien
ggtcacgcagaggtgcaagatcaga

SEQ ID NO: 515679 - DNA, 25 bp, Homo sapien
aggtgcaagatcagaggctcccctc

SEQ ID NO: 515680 - DNA, 25 bp, Homo sapien
cgcagaggtgcaagatcagaggctc

SEQ ID NO: 515681 - DNA, 25 bp, Homo sapien
cagaggtgcaagatcagaggctccc

SEQ ID NO: 515682 - DNA, 25 bp, Homo sapien
tgcaaacgtcttcctcagcacgtca

SEQ ID NO: 515683 - DNA, 25 bp, Homo sapien
tcagcacgtcatgccttggcaggca

SEQ ID NO: 515684 - DNA, 25 bp, Homo sapien
gaactctccgagaaccttatcctca

SEQ ID NO: 515685 - DNA, 25 bp, Homo sapien
atgtacagcaggaactctccgagaa

SEQ ID NO: 515686 - DNA, 25 bp, Homo sapien
cctgctgatgggcccgccagcaaat

SEQ ID NO: 515687 - DNA, 25 bp, Homo sapien
ctgctgatgggcccgccagcaaatt

SEQ ID NO: 515688 - DNA, 25 bp, Homo sapien
atgggcccgccagcaaattccatgg

SEQ ID NO: 515689 - DNA, 25 bp, Homo sapien
atctcctccttgaatgaaactagga

SEQ ID NO: 515690 - DNA, 25 bp, Homo sapien
atgaaactaggaatgggtttccaag

SEQ ID NO: 515691 - DNA, 25 bp, Homo sapien
ttatggaaggcttccccaagcttct

SEQ ID NO: 515692 - DNA, 25 bp, Homo sapien
ccagtgaagatgttttcctgtctgc

SEQ ID NO: 515693 - DNA, 25 bp, Homo sapien
tctttgtcagtgcacaccagtgaag

SEQ ID NO: 515694 - DNA, 25 bp, Homo sapien
tattatggaaggcttccccaagctt

SEQ ID NO: 515695 - DNA, 25 bp, Homo sapien
aaccacagcatctctttattgacac

SEQ ID NO: 515696 - DNA, 25 bp, Homo sapien
accacagcatctctttattgacacc

SEQ ID NO: 515697 - DNA, 25 bp, Homo sapien
ttattgacaccatgatttttcttct

SEQ ID NO: 515698 - DNA, 25 bp, Homo sapien
ttggtttcctttgccagatggtcct

SEQ ID NO: 515699 - DNA, 25 bp, Homo sapien
ggtttcctttgccagatggtcctac

SEQ ID NO: 515700 - DNA, 25 bp, Homo sapien
caagaagcagcttggtttcctttgc

SEQ ID NO: 515701 - DNA, 25 bp, Homo sapien
gcagcttggtttcctttgccagatg

SEQ ID NO: 515702 - DNA, 25 bp, Homo sapien
gaactgcagagatagaagtagaagg

SEQ ID NO: 515703 - DNA, 25 bp, Homo sapien
tatgactaaagagtcctctggaatg

SEQ ID NO: 515704 - DNA, 25 bp, Homo sapien
agagtcctctggaatggccacaact

SEQ ID NO: 515705 - DNA, 25 bp, Homo sapien
tggccatcacagcttctcaagtcag

SEQ ID NO: 515706 - DNA, 25 bp, Homo sapien
ttctttacaatcttcagatctatca

SEQ ID NO: 515707 - DNA, 25 bp, Homo sapien
tcagatctatcattgctggactgtt

SEQ ID NO: 515708 - DNA, 25 bp, Homo sapien
attctttacaatcttcagatctatc

SEQ ID NO: 515709 - DNA, 25 bp, Homo sapien
cagatctatcattgctggactgttc

SEQ ID NO: 515710 - DNA, 25 bp, Homo sapien
gcgtgttctcaagccctgctgagga

SEQ ID NO: 515711 - DNA, 25 bp, Homo sapien
tcttgcatgacagggagatcggcct

SEQ ID NO: 515712 - DNA, 25 bp, Homo sapien
cagtaatttcagacgctctccagag

SEQ ID NO: 515713 - DNA, 25 bp, Homo sapien
tgtcaacctggcatacatcttgtag

SEQ ID NO: 515714 - DNA, 25 bp, Homo sapien
tgggacatctgccttccaccctgat

SEQ ID NO: 515715 - DNA, 25 bp, Homo sapien
cagtttctttgactcaactaggctt

SEQ ID NO: 515716 - DNA, 25 bp, Homo sapien
tctttgactcaactaggctttttgg

SEQ ID NO: 515717 - DNA, 25 bp, Homo sapien
ccaccctgatgctcagtttctttga

SEQ ID NO: 515718 - DNA, 25 bp, Homo sapien
cagcttgattctggcagctagctct

SEQ ID NO: 515719 - DNA, 25 bp, Homo sapien
agcttgattctggcagctagctctg

SEQ ID NO: 515720 - DNA, 25 bp, Homo sapien
actggaccatctgtagcatcatcag

SEQ ID NO: 515721 - DNA, 25 bp, Homo sapien
atttattgacatccctatgacatgc

SEQ ID NO: 515722 - DNA, 25 bp, Homo sapien
gaccatctgtagcatcatcagaaag

SEQ ID NO: 515723 - DNA, 25 bp, Homo sapien
ctgtgtgtgttgctttgtcctcagc

SEQ ID NO: 515724 - DNA, 25 bp, Homo sapien
tagggattggctggatagatgtgtg

SEQ ID NO: 515725 - DNA, 25 bp, Homo sapien
tttcataaagacaacccaaggattc

SEQ ID NO: 515726 - DNA, 25 bp, Homo sapien
cataaacacatgtttgttgtaggga

SEQ ID NO: 515727 - DNA, 25 bp, Homo sapien
tctacttggcctagatatggatcca

SEQ ID NO: 515728 - DNA, 25 bp, Homo sapien
tcttccccatcgaaaagatttgatg

SEQ ID NO: 515729 - DNA, 25 bp, Homo sapien
tgataatgctgccttaagggcatct

SEQ ID NO: 515730 - DNA, 25 bp, Homo sapien
tctcttggttggtaaaacagattcg

SEQ ID NO: 515731 - DNA, 25 bp, Homo sapien
tggttggtaaaacagattcgttcta

SEQ ID NO: 515732 - DNA, 25 bp, Homo sapien
caacaatcaaaaacgctgggaggag

SEQ ID NO: 515733 - DNA, 25 bp, Homo sapien
gcaataagtgatggctaaggcagca

SEQ ID NO: 515734 - DNA, 25 bp, Homo sapien
tgatcaccaggttaactgaccagaa

SEQ ID NO: 515735 - DNA, 25 bp, Homo sapien
aaaccgttagcctagcagccatgga

SEQ ID NO: 515736 - DNA, 25 bp, Homo sapien
cctttgtctgttttggcttttgttg

SEQ ID NO: 515737 - DNA, 25 bp, Homo sapien
tgtttcagcaaaatgggatccccag

SEQ ID NO: 515738 - DNA, 25 bp, Homo sapien
gatgtagtcctatgtcatgtactcc

SEQ ID NO: 515739 - DNA, 25 bp, Homo sapien
tatgctgccgctactactactggta

SEQ ID NO: 515740 - DNA, 25 bp, Homo sapien
gacaggcattggatggatgtagtcc

SEQ ID NO: 515741 - DNA, 25 bp, Homo sapien
ggctcctgattgtcagcacctggct

SEQ ID NO: 515742 - DNA, 25 bp, Homo sapien
ggaatacagcacaaggctcctgatt

SEQ ID NO: 515743 - DNA, 25 bp, Homo sapien
tacagcacaaggctcctgattgtca

SEQ ID NO: 515744 - DNA, 25 bp, Homo sapien
cacaaggctcctgattgtcagcacc

SEQ ID NO: 515745 - DNA, 25 bp, Homo sapien
gttgctcagtggatggctctaaaag

SEQ ID NO: 515746 - DNA, 25 bp, Homo sapien
tcagttggttgctcagtggatggct

SEQ ID NO: 515747 - DNA, 25 bp, Homo sapien
tggttgctcagtggatggctctaaa

SEQ ID NO: 515748 - DNA, 25 bp, Homo sapien
gttggttgctcagtggatggctcta

SEQ ID NO: 515749 - DNA, 25 bp, Homo sapien
tttgagcttttggttcatatggttt

SEQ ID NO: 515750 - DNA, 25 bp, Homo sapien
agaactggcttagattatctatgta

SEQ ID NO: 515751 - DNA, 25 bp, Homo sapien
ggcttagattatctatgtaggtggg

SEQ ID NO: 515752 - DNA, 25 bp, Homo sapien
aactggcttagattatctatgtagg

SEQ ID NO: 515753 - DNA, 25 bp, Homo sapien
tatctatgtaggtggggtcccttgg

SEQ ID NO: 515754 - DNA, 25 bp, Homo sapien
ggtctgccacaactccagttgcctg

SEQ ID NO: 515755 - DNA, 25 bp, Homo sapien
aacaggtggtctgccacaactccag

SEQ ID NO: 515756 - DNA, 25 bp, Homo sapien
ctcataaacagtgacctgtaacttc

SEQ ID NO: 515757 - DNA, 25 bp, Homo sapien
acagtgacctgtaacttcaaatctg

SEQ ID NO: 515758 - DNA, 25 bp, Homo sapien
tggcttgtgaagaccaccgggctcc

SEQ ID NO: 515759 - DNA, 25 bp, Homo sapien
ttgtgaagaccaccgggctcctcca

SEQ ID NO: 515760 - DNA, 25 bp, Homo sapien
cctaagtaggttctgctgtagctgc

SEQ ID NO: 515761 - DNA, 25 bp, Homo sapien
ggctcctccacaatgattagataag

SEQ ID NO: 515762 - DNA, 25 bp, Homo sapien
aatggatgctccacgctgacatatg

SEQ ID NO: 515763 - DNA, 25 bp, Homo sapien
caagatggtaaatggatgctccacg

SEQ ID NO: 515764 - DNA, 25 bp, Homo sapien
ggtaaatggatgctccacgctgaca

SEQ ID NO: 515765 - DNA, 25 bp, Homo sapien
ctgaacaagatggtaaatggatgct

SEQ ID NO: 515766 - DNA, 25 bp, Homo sapien
ctgacattagtcccagaaacatcac

SEQ ID NO: 515767 - DNA, 25 bp, Homo sapien
acttctggccaaccacactcgaagt

SEQ ID NO: 515768 - DNA, 25 bp, Homo sapien
tcacctctggacaggggaaatcaaa

SEQ ID NO: 515769 - DNA, 25 bp, Homo sapien
tggccaaccacactcgaagtcaact

SEQ ID NO: 515770 - DNA, 25 bp, Homo sapien
acactcgaagtcaactctttctcca

SEQ ID NO: 515771 - DNA, 25 bp, Homo sapien
ggctctgcgtgcacatcagctgatg

SEQ ID NO: 515772 - DNA, 25 bp, Homo sapien
aaggctctgcgtgcacatcagctga

SEQ ID NO: 515773 - DNA, 25 bp, Homo sapien
tcaaggctctgcgtgcacatcagct

SEQ ID NO: 515774 - DNA, 25 bp, Homo sapien
gctctgcgtgcacatcagctgatgt

SEQ ID NO: 515775 - DNA, 25 bp, Homo sapien
gcccaaagaatcagatcagaatcat

SEQ ID NO: 515776 - DNA, 25 bp, Homo sapien
tctagattccctggaacttccaatt

SEQ ID NO: 515777 - DNA, 25 bp, Homo sapien
gaatcattcagataagttttagaaa

SEQ ID NO: 515778 - DNA, 25 bp, Homo sapien
gctggtttaacatctagattccctg

SEQ ID NO: 515779 - DNA, 25 bp, Homo sapien
ctttggttgtgagtcgcccctactt

SEQ ID NO: 515780 - DNA, 25 bp, Homo sapien
ttgtgagtcgcccctactttccttc

SEQ ID NO: 515781 - DNA, 25 bp, Homo sapien
tgagtcgcccctactttccttcatt

SEQ ID NO: 515782 - DNA, 25 bp, Homo sapien
ttggttgtgagtcgcccctactttc

SEQ ID NO: 515783 - DNA, 25 bp, Homo sapien
cttcactcaacagaaggctgtagcc

SEQ ID NO: 515784 - DNA, 25 bp, Homo sapien
gacttcactcaacagaaggctgtag

SEQ ID NO: 515785 - DNA, 25 bp, Homo sapien
agcctgagtctctgtttgtggagcc

SEQ ID NO: 515786 - DNA, 25 bp, Homo sapien
agtgacttcactcaacagaaggctg

SEQ ID NO: 515787 - DNA, 25 bp, Homo sapien
atcagcaaatatgcattaagggttt

SEQ ID NO: 515788 - DNA, 25 bp, Homo sapien
caatcagcaaatatgcattaagggt

SEQ ID NO: 515789 - DNA, 25 bp, Homo sapien
tcaatcagcaaatatgcattaaggg

SEQ ID NO: 515790 - DNA, 25 bp, Homo sapien
cagcaaatatgcattaagggtttca

SEQ ID NO: 515791 - DNA, 25 bp, Homo sapien
tgttgcatcaaatccaaacaaagct

SEQ ID NO: 515792 - DNA, 25 bp, Homo sapien
ttgttgcatcaaatccaaacaaagc

SEQ ID NO: 515793 - DNA, 25 bp, Homo sapien
tcatcccgaagactgacctgcttgc

SEQ ID NO: 515794 - DNA, 25 bp, Homo sapien
acctgcttgcgggctgaatgaagcc

SEQ ID NO: 515795 - DNA, 25 bp, Homo sapien
cgaagactgacctgcttgcgggctg

SEQ ID NO: 515796 - DNA, 25 bp, Homo sapien
tatgtttcaggccagtcatcccgaa

SEQ ID NO: 515797 - DNA, 25 bp, Homo sapien
ctcagatgctctcccggcctgtctt

SEQ ID NO: 515798 - DNA, 25 bp, Homo sapien
catgtctcgccctcctacccccatc

SEQ ID NO: 515799 - DNA, 25 bp, Homo sapien
tcagatgctctcccggcctgtcttt

SEQ ID NO: 515800 - DNA, 25 bp, Homo sapien
cagatgctctcccggcctgtctttt

SEQ ID NO: 515801 - DNA, 25 bp, Homo sapien
tgagttcccatatcctccaactctg

SEQ ID NO: 515802 - DNA, 25 bp, Homo sapien
caactctgcctttgtcctggctaca

SEQ ID NO: 515803 - DNA, 25 bp, Homo sapien
tgcctttgtcctggctacatcccat

SEQ ID NO: 515804 - DNA, 25 bp, Homo sapien
agctctcttgctctctgagttccca

SEQ ID NO: 515805 - DNA, 25 bp, Homo sapien
ggttctattcgtacatgttcagtct

SEQ ID NO: 515806 - DNA, 25 bp, Homo sapien
tgtccacacttgttagatgcaactc

SEQ ID NO: 515807 - DNA, 25 bp, Homo sapien
gatgcaactcaatcttttttctagg

SEQ ID NO: 515808 - DNA, 25 bp, Homo sapien
tgtcttcaggaagatgccactctgg

SEQ ID NO: 515809 - DNA, 25 bp, Homo sapien
caagcaggagggttaaaattagact

SEQ ID NO: 515810 - DNA, 25 bp, Homo sapien
actgtgttctatgccaatatctccc

SEQ ID NO: 515811 - DNA, 25 bp, Homo sapien
gacttctcaggccacgtccttcctt

SEQ ID NO: 515812 - DNA, 25 bp, Homo sapien
ttaactcataactgtgttctatgcc

SEQ ID NO: 515813 - DNA, 25 bp, Homo sapien
tattgaggcctgtgtcgtagcatac

SEQ ID NO: 515814 - DNA, 25 bp, Homo sapien
tcctcatgggctggacagtcctcct

SEQ ID NO: 515815 - DNA, 25 bp, Homo sapien
ggaacaactctctgaccaccatacc

SEQ ID NO: 515816 - DNA, 25 bp, Homo sapien
cctggttctctcttagtctattgag

SEQ ID NO: 515817 - DNA, 25 bp, Homo sapien
tcttctgcaacaaccaggattgtca

SEQ ID NO: 515818 - DNA, 25 bp, Homo sapien
acatacaccttcacggtcttctgca

SEQ ID NO: 515819 - DNA, 25 bp, Homo sapien
tacaccttcacggtcttctgcaaca

SEQ ID NO: 515820 - DNA, 25 bp, Homo sapien
ttcacggtcttctgcaacaaccagg

SEQ ID NO: 515821 - DNA, 25 bp, Homo sapien
catgaaaatgctgatggtagcgctg

SEQ ID NO: 515822 - DNA, 25 bp, Homo sapien
tgaaaatgctgatggtagcgctgct

SEQ ID NO: 515823 - DNA, 25 bp, Homo sapien
ccatgaaaatgctgatggtagcgct

SEQ ID NO: 515824 - DNA, 25 bp, Homo sapien
aaaatgctgatggtagcgctgctgg

SEQ ID NO: 515825 - DNA, 25 bp, Homo sapien
ggtgaagcaaatcccaatgctgaga

SEQ ID NO: 515826 - DNA, 25 bp, Homo sapien
gaaaaccaacattatcctgaagtcc

SEQ ID NO: 515827 - DNA, 25 bp, Homo sapien
aagcacattcaaatcagacagtggg

SEQ ID NO: 515828 - DNA, 25 bp, Homo sapien
gaatgagggttaggctcacggaaaa

SEQ ID NO: 515829 - DNA, 25 bp, Homo sapien
tcttcacctggacttgccatctcag

SEQ ID NO: 515830 - DNA, 25 bp, Homo sapien
ttcttcacctggacttgccatctca

SEQ ID NO: 515831 - DNA, 25 bp, Homo sapien
gcttcttcacctggacttgccatct

SEQ ID NO: 515832 - DNA, 25 bp, Homo sapien
cttcacctggacttgccatctcagt

SEQ ID NO: 515833 - DNA, 25 bp, Homo sapien
cccttaaggtttgaatctgcagaga

SEQ ID NO: 515834 - DNA, 25 bp, Homo sapien
catgctttaaaagagctagagttta

SEQ ID NO: 515835 - DNA, 25 bp, Homo sapien
aacaccactgggcttatataaaaga

SEQ ID NO: 515836 - DNA, 25 bp, Homo sapien
gatgtgcatatgattacagtaatcc

SEQ ID NO: 515837 - DNA, 25 bp, Homo sapien
tgttccattcaaaaaaccgccttgc

SEQ ID NO: 515838 - DNA, 25 bp, Homo sapien
gaggtggctgttgcaaatcgtttct

SEQ ID NO: 515839 - DNA, 25 bp, Homo sapien
tagtgttctctgatgccatctgctg

SEQ ID NO: 515840 - DNA, 25 bp, Homo sapien
cagaagtaaggaattgttttggaag

SEQ ID NO: 515841 - DNA, 25 bp, Homo sapien
gagcaaacggcagtcttttatttgg

SEQ ID NO: 515842 - DNA, 25 bp, Homo sapien
gcaaacggcagtcttttatttggca

SEQ ID NO: 515843 - DNA, 25 bp, Homo sapien
ctgagcaaacggcagtcttttattt

SEQ ID NO: 515844 - DNA, 25 bp, Homo sapien
aacggcagtcttttatttggcagaa

SEQ ID NO: 515845 - DNA, 25 bp, Homo sapien
agctcatttactgggtgtgttggca

SEQ ID NO: 515846 - DNA, 25 bp, Homo sapien
gcataaaaatcaatataggcaagaa

SEQ ID NO: 515847 - DNA, 25 bp, Homo sapien
cagctcatttactgggtgtgttggc

SEQ ID NO: 515848 - DNA, 25 bp, Homo sapien
aatataggcaagaatccccttcctc

SEQ ID NO: 515849 - DNA, 25 bp, Homo sapien
tgcagcgttcacactggcacactcg

SEQ ID NO: 515850 - DNA, 25 bp, Homo sapien
actggcacactcgttctcttgtacc

SEQ ID NO: 515851 - DNA, 25 bp, Homo sapien
gcaacaacacatcccctgcagcgtt

SEQ ID NO: 515852 - DNA, 25 bp, Homo sapien
ttgtaccaactgtcagagaatttct

SEQ ID NO: 515853 - DNA, 25 bp, Homo sapien
gaaactctgagattgccctctcctt

SEQ ID NO: 515854 - DNA, 25 bp, Homo sapien
cacggcagaaactctgagattgccc

SEQ ID NO: 515855 - DNA, 25 bp, Homo sapien
tcacggcagaaactctgagattgcc

SEQ ID NO: 515856 - DNA, 25 bp, Homo sapien
ggcagaaactctgagattgccctct

SEQ ID NO: 515857 - DNA, 25 bp, Homo sapien
accttgtaacttttcgcacatctcc

SEQ ID NO: 515858 - DNA, 25 bp, Homo sapien
tatccacgttgatggaaattgtatt

SEQ ID NO: 515859 - DNA, 25 bp, Homo sapien
cacatctcctttgcattgtgtagga

SEQ ID NO: 515860 - DNA, 25 bp, Homo sapien
gcattgtgtaggagcttatccacgt

SEQ ID NO: 515861 - DNA, 25 bp, Homo sapien
taaagtctcagttgccagatccaat

SEQ ID NO: 515862 - DNA, 25 bp, Homo sapien
cattagtcgccacctatatctgtgg

SEQ ID NO: 515863 - DNA, 25 bp, Homo sapien
ctcggtgagaccataggatgtatct

SEQ ID NO: 515864 - DNA, 25 bp, Homo sapien
tgatatttttgtcctctcggtgaga

SEQ ID NO: 515865 - DNA, 25 bp, Homo sapien
tgagtgccgaagactgttgattagc

SEQ ID NO: 515866 - DNA, 25 bp, Homo sapien
ttccacccaacaaagtgtcccaggc

SEQ ID NO: 515867 - DNA, 25 bp, Homo sapien
tcagccaggattgagtgccgaagac

SEQ ID NO: 515868 - DNA, 25 bp, Homo sapien
cactgacccagcaagggagcgacgc

SEQ ID NO: 515869 - DNA, 25 bp, Homo sapien
agacgacaagactgagcagactggg

SEQ ID NO: 515870 - DNA, 25 bp, Homo sapien
gggaaagtcctggtaaattgcagac

SEQ ID NO: 515871 - DNA, 25 bp, Homo sapien
cctggtaaattgcagacaacaatct

SEQ ID NO: 515872 - DNA, 25 bp, Homo sapien
tcagacgacaagactgagcagactg

SEQ ID NO: 515873 - DNA, 25 bp, Homo sapien
atagtagagaggcaagattccacag

SEQ ID NO: 515874 - DNA, 25 bp, Homo sapien
agagatagtagagaggcaagattcc

SEQ ID NO: 515875 - DNA, 25 bp, Homo sapien
agatagtagagaggcaagattccac

SEQ ID NO: 515876 - DNA, 25 bp, Homo sapien
gagatagtagagaggcaagattcca

SEQ ID NO: 515877 - DNA, 25 bp, Homo sapien
ctggggtggacagtagaaccaggga

SEQ ID NO: 515878 - DNA, 25 bp, Homo sapien
tggggtggacagtagaaccagggac

SEQ ID NO: 515879 - DNA, 25 bp, Homo sapien
ggatgctccgtctgcattccaggta

SEQ ID NO: 515880 - DNA, 25 bp, Homo sapien
agaaatttttgaaacggatgctccg

SEQ ID NO: 515881 - DNA, 25 bp, Homo sapien
tgcaacctggagttccccaagaaat

SEQ ID NO: 515882 - DNA, 25 bp, Homo sapien
gaacatcttttagtgttccctgcaa

SEQ ID NO: 515883 - DNA, 25 bp, Homo sapien
cttcctgtgcccgtagaacgcagag

SEQ ID NO: 515884 - DNA, 25 bp, Homo sapien
cagagctggaaagctctaggataaa

SEQ ID NO: 515885 - DNA, 25 bp, Homo sapien
gcccgtagaacgcagagctggaaag

SEQ ID NO: 515886 - DNA, 25 bp, Homo sapien
tgtgcccgtagaacgcagagctgga

SEQ ID NO: 515887 - DNA, 25 bp, Homo sapien
ggagtaaagcccctccggtcatctg

SEQ ID NO: 515888 - DNA, 25 bp, Homo sapien
tgagctcagatcatgggtcgaccca

SEQ ID NO: 515889 - DNA, 25 bp, Homo sapien
aatgttggcacatataagggaggga

SEQ ID NO: 515890 - DNA, 25 bp, Homo sapien
ggtcgacccagatgcatggtcatgt

SEQ ID NO: 515891 - DNA, 25 bp, Homo sapien
ccctgctatgccatctttgtcacta

SEQ ID NO: 515892 - DNA, 25 bp, Homo sapien
ttgtcactacttccttcagccactt

SEQ ID NO: 515893 - DNA, 25 bp, Homo sapien
ccttcagccactttggattctgctt

SEQ ID NO: 515894 - DNA, 25 bp, Homo sapien
tgcttccctttctctaacttccaga

SEQ ID NO: 515895 - DNA, 25 bp, Homo sapien
ggtagtgccatctttgagccctttg

SEQ ID NO: 515896 - DNA, 25 bp, Homo sapien
gactggtagtgccatctttgagccc

SEQ ID NO: 515897 - DNA, 25 bp, Homo sapien
catgcattccagactggtagtgcca

SEQ ID NO: 515898 - DNA, 25 bp, Homo sapien
aagccagtcatgcattccagactgg

SEQ ID NO: 515899 - DNA, 25 bp, Homo sapien
ctttctttcctatactcagaaatgc

SEQ ID NO: 515900 - DNA, 25 bp, Homo sapien
tttctttcctatactcagaaatgct

SEQ ID NO: 515901 - DNA, 25 bp, Homo sapien
cactttctttcctatactcagaaat

SEQ ID NO: 515902 - DNA, 25 bp, Homo sapien
tttttctgtctaagagcactttctt

SEQ ID NO: 515903 - DNA, 25 bp, Homo sapien
cctcattcatgcgatgagactgtag

SEQ ID NO: 515904 - DNA, 25 bp, Homo sapien
tcattcatgcgatgagactgtagcc

SEQ ID NO: 515905 - DNA, 25 bp, Homo sapien
ctcattcatgcgatgagactgtagc

SEQ ID NO: 515906 - DNA, 25 bp, Homo sapien
tcctcattcatgcgatgagactgta

SEQ ID NO: 515907 - DNA, 25 bp, Homo sapien
gcaaatgctactgggtagttttcct

SEQ ID NO: 515908 - DNA, 25 bp, Homo sapien
acaattgcaaatgctactgggtagt

SEQ ID NO: 515909 - DNA, 25 bp, Homo sapien
gattacataaattgtcaatttctca

SEQ ID NO: 515910 - DNA, 25 bp, Homo sapien
tggattacataaattgtcaatttct

SEQ ID NO: 515911 - DNA, 25 bp, Homo sapien
taataagcgtaatgccaactccagc

SEQ ID NO: 515912 - DNA, 25 bp, Homo sapien
gacacattagtcgtttcccaaaatg

SEQ ID NO: 515913 - DNA, 25 bp, Homo sapien
ccagctccccagagtgaggtaaaca

SEQ ID NO: 515914 - DNA, 25 bp, Homo sapien
tctttaatgaggcattcctctccag

SEQ ID NO: 515915 - DNA, 25 bp, Homo sapien
ggaatggcctaaagtcctgtctgac

SEQ ID NO: 515916 - DNA, 25 bp, Homo sapien
gagcagttggaatggcctaaagtcc

SEQ ID NO: 515917 - DNA, 25 bp, Homo sapien
catcactaacatgaagaggtagaca

SEQ ID NO: 515918 - DNA, 25 bp, Homo sapien
ctcatcactaacatgaagaggtaga

SEQ ID NO: 515919 - DNA, 25 bp, Homo sapien
taactcctatccattctttgacatc

SEQ ID NO: 515920 - DNA, 25 bp, Homo sapien
tccacactttagcttccaacattgc

SEQ ID NO: 515921 - DNA, 25 bp, Homo sapien
tgccacttccaggacgttctgttca

SEQ ID NO: 515922 - DNA, 25 bp, Homo sapien
tccagatcctggttagtgttttcca

SEQ ID NO: 515923 - DNA, 25 bp, Homo sapien
cttgaattccatgcgtatattacct

SEQ ID NO: 515924 - DNA, 25 bp, Homo sapien
ctcttgaattccatgcgtatattac

SEQ ID NO: 515925 - DNA, 25 bp, Homo sapien
tgaattccatgcgtatattaccttt

SEQ ID NO: 515926 - DNA, 25 bp, Homo sapien
aattccatgcgtatattacctttaa

SEQ ID NO: 515927 - DNA, 25 bp, Homo sapien
ggcaacgtgaactcaggcacagact

SEQ ID NO: 515928 - DNA, 25 bp, Homo sapien
tggcaacgtgaactcaggcacagac

SEQ ID NO: 515929 - DNA, 25 bp, Homo sapien
caacgtgaactcaggcacagactga

SEQ ID NO: 515930 - DNA, 25 bp, Homo sapien
aggtggcaacgtgaactcaggcaca

SEQ ID NO: 515931 - DNA, 25 bp, Homo sapien
taaaagtggtccatatgcgttggtt

SEQ ID NO: 515932 - DNA, 25 bp, Homo sapien
tgcgttggttacgtagcatgaagac

SEQ ID NO: 515933 - DNA, 25 bp, Homo sapien
tggttacgtagcatgaagacctatt

SEQ ID NO: 515934 - DNA, 25 bp, Homo sapien
gtccatatgcgttggttacgtagca

SEQ ID NO: 515935 - DNA, 25 bp, Homo sapien
agcgttgaccacgtgtttttgtggc

SEQ ID NO: 515936 - DNA, 25 bp, Homo sapien
tgtggctggctagtactccccagca

SEQ ID NO: 515937 - DNA, 25 bp, Homo sapien
aagcaaataggccagactctgaaat

SEQ ID NO: 515938 - DNA, 25 bp, Homo sapien
gaaatcttgtatactacgtaggcac

SEQ ID NO: 515939 - DNA, 25 bp, Homo sapien
gcctaaaatcttcttggcggaccat

SEQ ID NO: 515940 - DNA, 25 bp, Homo sapien
ggcctaaaatcttcttggcggacca

SEQ ID NO: 515941 - DNA, 25 bp, Homo sapien
tgccaccaccgacatagccccaccc

SEQ ID NO: 515942 - DNA, 25 bp, Homo sapien
cttctctgccaccaccgacatagcc

SEQ ID NO: 515943 - DNA, 25 bp, Homo sapien
tctgccaccaccgacatagccccac

SEQ ID NO: 515944 - DNA, 25 bp, Homo sapien
tctctgccaccaccgacatagcccc

SEQ ID NO: 515945 - DNA, 25 bp, Homo sapien
tatgtgtagtggattctactggatg

SEQ ID NO: 515946 - DNA, 25 bp, Homo sapien
agcctctgtatgtgtagtggattct

SEQ ID NO: 515947 - DNA, 25 bp, Homo sapien
tcaccttcttgccttgatttctgca

SEQ ID NO: 515948 - DNA, 25 bp, Homo sapien
tcttgccttgatttctgcaaataaa

SEQ ID NO: 515949 - DNA, 25 bp, Homo sapien
tcgatcatatagagcatatctgctc

SEQ ID NO: 515950 - DNA, 25 bp, Homo sapien
tcctcgatcatatagagcatatctg

SEQ ID NO: 515951 - DNA, 25 bp, Homo sapien
cttcttcctcgatcatatagagcat

SEQ ID NO: 515952 - DNA, 25 bp, Homo sapien
tctttccagccttactcccaagccc

SEQ ID NO: 515953 - DNA, 25 bp, Homo sapien
gtctggccacatttggagttaccat

SEQ ID NO: 515954 - DNA, 25 bp, Homo sapien
ctctcttctgacttttgccacaatt

SEQ ID NO: 515955 - DNA, 25 bp, Homo sapien
tccttatgtctggccacatttggag

SEQ ID NO: 515956 - DNA, 25 bp, Homo sapien
tatgtctggccacatttggagttac

SEQ ID NO: 515957 - DNA, 25 bp, Homo sapien
accatggctagtgttcctcactggg

SEQ ID NO: 515958 - DNA, 25 bp, Homo sapien
gagctccaatgtgagggaatacatg

SEQ ID NO: 515959 - DNA, 25 bp, Homo sapien
gagtgcagaactaccgctggtgcta

SEQ ID NO: 515960 - DNA, 25 bp, Homo sapien
aaaagacaacccttgccatagagag

SEQ ID NO: 515961 - DNA, 25 bp, Homo sapien
attttgcttcctgacagatattttc

SEQ ID NO: 515962 - DNA, 25 bp, Homo sapien
ctattttgcttcctgacagatattt

SEQ ID NO: 515963 - DNA, 25 bp, Homo sapien
tttgcttcctgacagatattttccc

SEQ ID NO: 515964 - DNA, 25 bp, Homo sapien
gcttcctgacagatattttcccagt

SEQ ID NO: 515965 - DNA, 25 bp, Homo sapien
tctgacacgattacatgggaggcat

SEQ ID NO: 515966 - DNA, 25 bp, Homo sapien
ctcagccccaggtggactgtcacag

SEQ ID NO: 515967 - DNA, 25 bp, Homo sapien
ggtgatgccctatataatttcccct

SEQ ID NO: 515968 - DNA, 25 bp, Homo sapien
gatagtaggatgtgtgtacctctca

SEQ ID NO: 515969 - DNA, 25 bp, Homo sapien
cacagtcttcagctcttggagctca

SEQ ID NO: 515970 - DNA, 25 bp, Homo sapien
acagtcttcagctcttggagctcat

SEQ ID NO: 515971 - DNA, 25 bp, Homo sapien
ccacagtcttcagctcttggagctc

SEQ ID NO: 515972 - DNA, 25 bp, Homo sapien
gctttaatggccaattctgtacttg

SEQ ID NO: 515973 - DNA, 25 bp, Homo sapien
tggctttaatggccaattctgtact

SEQ ID NO: 515974 - DNA, 25 bp, Homo sapien
tgctgccctggctctactggtctcc

SEQ ID NO: 515975 - DNA, 25 bp, Homo sapien
tttaatggccaattctgtacttgct

SEQ ID NO: 515976 - DNA, 25 bp, Homo sapien
ctgtctgctgctggttgccgctgaa

SEQ ID NO: 515977 - DNA, 25 bp, Homo sapien
tgtctgctgctggttgccgctgaat

SEQ ID NO: 515978 - DNA, 25 bp, Homo sapien
ctgctgctggttgccgctgaatctg

SEQ ID NO: 515979 - DNA, 25 bp, Homo sapien
ctgaatctgtcaagctgatttctcc

SEQ ID NO: 515980 - DNA, 25 bp, Homo sapien
cctcccctctatatacctggtgctc

SEQ ID NO: 515981 - DNA, 25 bp, Homo sapien
tcccctctatatacctggtgctcac

SEQ ID NO: 515982 - DNA, 25 bp, Homo sapien
ttccctcccctctatatacctggtg

SEQ ID NO: 515983 - DNA, 25 bp, Homo sapien
tcttccctcccctctatatacctgg

SEQ ID NO: 515984 - DNA, 25 bp, Homo sapien
gttttgtcgcttgactttgtatcat

SEQ ID NO: 515985 - DNA, 25 bp, Homo sapien
ggttctctgcttgtactctgtcttc

SEQ ID NO: 515986 - DNA, 25 bp, Homo sapien
ccccttggatgcatattgttggagg

SEQ ID NO: 515987 - DNA, 25 bp, Homo sapien
ttttcataatcactccaggtccctg

SEQ ID NO: 515988 - DNA, 25 bp, Homo sapien
gaggttcctaagttcataccaagta

SEQ ID NO: 515989 - DNA, 25 bp, Homo sapien
gactcaggcaaaccaccagcacatt

SEQ ID NO: 515990 - DNA, 25 bp, Homo sapien
tggcatttggataagactcaggcaa

SEQ ID NO: 515991 - DNA, 25 bp, Homo sapien
ttatccaaaggccagagtggcattt

SEQ ID NO: 515992 - DNA, 25 bp, Homo sapien
aaggccagagtggcatttggataag

SEQ ID NO: 515993 - DNA, 25 bp, Homo sapien
tgtctgattcttacactgatgggag

SEQ ID NO: 515994 - DNA, 25 bp, Homo sapien
ttacactgatgggagccctgagaat

SEQ ID NO: 515995 - DNA, 25 bp, Homo sapien
gattcttacactgatgggagccctg

SEQ ID NO: 515996 - DNA, 25 bp, Homo sapien
agccctgagaatctaacattagcat

SEQ ID NO: 515997 - DNA, 25 bp, Homo sapien
acaaggcactagtttacagacgagg

SEQ ID NO: 515998 - DNA, 25 bp, Homo sapien
tagacctgtcaaaacaccttggatg

SEQ ID NO: 515999 - DNA, 25 bp, Homo sapien
tcctttcactagcatgcaggcccgg

SEQ ID NO: 516000 - DNA, 25 bp, Homo sapien
taacagttgtcatctgcctaggcac

SEQ ID NO: 516001 - DNA, 25 bp, Homo sapien
ctacagagatgtaaggaacacaaag

SEQ ID NO: 516002 - DNA, 25 bp, Homo sapien
atctccactctaggtcagacatcct

SEQ ID NO: 516003 - DNA, 25 bp, Homo sapien
tgccaaattggagagtggagttcag

SEQ ID NO: 516004 - DNA, 25 bp, Homo sapien
cactctaggtcagacatccttgtag

SEQ ID NO: 516005 - DNA, 25 bp, Homo sapien
tccactctaggtcagacatccttgt

SEQ ID NO: 516006 - DNA, 25 bp, Homo sapien
tgtccccttagagtgcacacgttcg

SEQ ID NO: 516007 - DNA, 25 bp, Homo sapien
ttagagtgcacacgttcgggctccg

SEQ ID NO: 516008 - DNA, 25 bp, Homo sapien
taagcagtgtgtactgtccccttag

SEQ ID NO: 516009 - DNA, 25 bp, Homo sapien
tccgatgccccttgaaaagactgca

SEQ ID NO: 516010 - DNA, 25 bp, Homo sapien
ttactgcaacgaggctgacggatgg

SEQ ID NO: 516011 - DNA, 25 bp, Homo sapien
gacaagcgtcctcttgttgagtctc

SEQ ID NO: 516012 - DNA, 25 bp, Homo sapien
aaaacgtcgctgcaaccagatgcaa

SEQ ID NO: 516013 - DNA, 25 bp, Homo sapien
ttgagtctctttactgcaacgaggc

SEQ ID NO: 516014 - DNA, 25 bp, Homo sapien
agcgtgctgcagttgtgtttatttc

SEQ ID NO: 516015 - DNA, 25 bp, Homo sapien
cccgggccgctcacgggaagccttg

SEQ ID NO: 516016 - DNA, 25 bp, Homo sapien
cgcagcgtgctgcagttgtgtttat

SEQ ID NO: 516017 - DNA, 25 bp, Homo sapien
gcagccagagcacacccgggccgct

SEQ ID NO: 516018 - DNA, 25 bp, Homo sapien
agccccgaaatgaaagcagcgcggc

SEQ ID NO: 516019 - DNA, 25 bp, Homo sapien
cagccggcgtttctggtgatgacag

SEQ ID NO: 516020 - DNA, 25 bp, Homo sapien
ccggcgtttctggtgatgacagccc

SEQ ID NO: 516021 - DNA, 25 bp, Homo sapien
ggagatcagcgtccagcaaataaga

SEQ ID NO: 516022 - DNA, 25 bp, Homo sapien
gagccggaggtggatccgcagagct

SEQ ID NO: 516023 - DNA, 25 bp, Homo sapien
tctgctccgccgtgtcctttagatg

SEQ ID NO: 516024 - DNA, 25 bp, Homo sapien
aggagcggccgagcatctctctctg

SEQ ID NO: 516025 - DNA, 25 bp, Homo sapien
tttagatgagcactcccggccggag

SEQ ID NO: 516026 - DNA, 25 bp, Homo sapien
cgcgctgacatcacaacctgtgaca

SEQ ID NO: 516027 - DNA, 25 bp, Homo sapien
cccgcgctgacatcacaacctgtga

SEQ ID NO: 516028 - DNA, 25 bp, Homo sapien
acatcacaacctgtgacaggcgcat

SEQ ID NO: 516029 - DNA, 25 bp, Homo sapien
cgctgacatcacaacctgtgacagg

SEQ ID NO: 516030 - DNA, 25 bp, Homo sapien
ctggatgttgcataaggctggagac

SEQ ID NO: 516031 - DNA, 25 bp, Homo sapien
caggattcgggcttctttgagatca

SEQ ID NO: 516032 - DNA, 25 bp, Homo sapien
tttgtatgccgcagacatggccagc

SEQ ID NO: 516033 - DNA, 25 bp, Homo sapien
cacatatgtttgtgagccgcggaag

SEQ ID NO: 516034 - DNA, 25 bp, Homo sapien
cagccttaaggtattcagggatgtg

SEQ ID NO: 516035 - DNA, 25 bp, Homo sapien
cttcagccttaaggtattcagggat

SEQ ID NO: 516036 - DNA, 25 bp, Homo sapien
ccttaaggtattcagggatgtgcat

SEQ ID NO: 516037 - DNA, 25 bp, Homo sapien
gccttaaggtattcagggatgtgca

SEQ ID NO: 516038 - DNA, 25 bp, Homo sapien
cacggggtcacttctgctaacgtag

SEQ ID NO: 516039 - DNA, 25 bp, Homo sapien
taaggccacggggtcacttctgcta

SEQ ID NO: 516040 - DNA, 25 bp, Homo sapien
cacttctgctaacgtagtttacagc

SEQ ID NO: 516041 - DNA, 25 bp, Homo sapien
cctctctaaggccacggggtcactt

SEQ ID NO: 516042 - DNA, 25 bp, Homo sapien
tccaggttgagggtgcaagacaacc

SEQ ID NO: 516043 - DNA, 25 bp, Homo sapien
cctgtctcgcttctgttttacttga

SEQ ID NO: 516044 - DNA, 25 bp, Homo sapien
gcaagacaacctgtctcgcttctgt

SEQ ID NO: 516045 - DNA, 25 bp, Homo sapien
atgatttggtggtggccctgaggcc

SEQ ID NO: 516046 - DNA, 25 bp, Homo sapien
aagcttctgactgctatcccagttg

SEQ ID NO: 516047 - DNA, 25 bp, Homo sapien
ccagcctttggacatagtttgtgta

SEQ ID NO: 516048 - DNA, 25 bp, Homo sapien
gctcatttcccaccaaaacatctga

SEQ ID NO: 516049 - DNA, 25 bp, Homo sapien
ttttgccaccctgatagacttgctg

SEQ ID NO: 516050 - DNA, 25 bp, Homo sapien
ctgtggctaagaatcaaccgtcttt

SEQ ID NO: 516051 - DNA, 25 bp, Homo sapien
tccctctgtggctaagaatcaaccg

SEQ ID NO: 516052 - DNA, 25 bp, Homo sapien
gtccctctgtggctaagaatcaacc

SEQ ID NO: 516053 - DNA, 25 bp, Homo sapien
cctctgtggctaagaatcaaccgtc

SEQ ID NO: 516054 - DNA, 25 bp, Homo sapien
ttgtctgtaagcatgtaagctgttg

SEQ ID NO: 516055 - DNA, 25 bp, Homo sapien
tccttaagggtgtatggtttctcgc

SEQ ID NO: 516056 - DNA, 25 bp, Homo sapien
tatggtttctcgctgactcttggct

SEQ ID NO: 516057 - DNA, 25 bp, Homo sapien
ggcttcaaatacagattctctgctg

SEQ ID NO: 516058 - DNA, 25 bp, Homo sapien
tgtttgtattcatggccaagagccc

SEQ ID NO: 516059 - DNA, 25 bp, Homo sapien
gggcagcgtgtgtatttgctatgca

SEQ ID NO: 516060 - DNA, 25 bp, Homo sapien
ttgaatcacaggaacacaaccccag

SEQ ID NO: 516061 - DNA, 25 bp, Homo sapien
gctatgcatggactgtttatggcaa

SEQ ID NO: 516062 - DNA, 25 bp, Homo sapien
cagcccgttagatccagggggcagc

SEQ ID NO: 516063 - DNA, 25 bp, Homo sapien
ttaaacattgcagtaggcctaaaag

SEQ ID NO: 516064 - DNA, 25 bp, Homo sapien
taaacattgcagtaggcctaaaagc

SEQ ID NO: 516065 - DNA, 25 bp, Homo sapien
tttaaacattgcagtaggcctaaaa

SEQ ID NO: 516066 - DNA, 25 bp, Homo sapien
tgtgagactgtcatattcagccaac

SEQ ID NO: 516067 - DNA, 25 bp, Homo sapien
taaattgtgacagcagtcaaagccc

SEQ ID NO: 516068 - DNA, 25 bp, Homo sapien
ctttctgtgagacttaaggtcatca

SEQ ID NO: 516069 - DNA, 25 bp, Homo sapien
gacttaaggtcatcataatgaacat

SEQ ID NO: 516070 - DNA, 25 bp, Homo sapien
tataagaaagtgatggaacctggtg

SEQ ID NO: 516071 - DNA, 25 bp, Homo sapien
taattacgcagatgagaatagcccc

SEQ ID NO: 516072 - DNA, 25 bp, Homo sapien
aacctggtgcatctgaactccctga

SEQ ID NO: 516073 - DNA, 25 bp, Homo sapien
tctctgatgccctgaagccactatt

SEQ ID NO: 516074 - DNA, 25 bp, Homo sapien
ggctccaaaacaggagccctctgct

SEQ ID NO: 516075 - DNA, 25 bp, Homo sapien
caggctccaaaacaggagccctctg

SEQ ID NO: 516076 - DNA, 25 bp, Homo sapien
ccaggctccaaaacaggagccctct

SEQ ID NO: 516077 - DNA, 25 bp, Homo sapien
tcccaggctccaaaacaggagccct

SEQ ID NO: 516078 - DNA, 25 bp, Homo sapien
tttaatagttcaactcaaccaggtg

SEQ ID NO: 516079 - DNA, 25 bp, Homo sapien
cttctacatataaaccgtttaatag

SEQ ID NO: 516080 - DNA, 25 bp, Homo sapien
tagcagtaactcaccttctacatat

SEQ ID NO: 516081 - DNA, 25 bp, Homo sapien
taaatagcagtaactcaccttctac

SEQ ID NO: 516082 - DNA, 25 bp, Homo sapien
taaaaggagctgctatgaagtacct

SEQ ID NO: 516083 - DNA, 25 bp, Homo sapien
aatgaagctggccactgaaaactgt

SEQ ID NO: 516084 - DNA, 25 bp, Homo sapien
gccctggatctctttgcaccaaaaa

SEQ ID NO: 516085 - DNA, 25 bp, Homo sapien
taagatggtcaaaagctgacagcct

SEQ ID NO: 516086 - DNA, 25 bp, Homo sapien
tattctgttcagaactttctttaga

SEQ ID NO: 516087 - DNA, 25 bp, Homo sapien
tgatattctgttcagaactttcttt

SEQ ID NO: 516088 - DNA, 25 bp, Homo sapien
ttaattgatattctgttcagaactt

SEQ ID NO: 516089 - DNA, 25 bp, Homo sapien
taattgatattctgttcagaacttt

SEQ ID NO: 516090 - DNA, 25 bp, Homo sapien
gatctaccagtcaaatcttgtcggc

SEQ ID NO: 516091 - DNA, 25 bp, Homo sapien
gcagagcccagcaataactttagat

SEQ ID NO: 516092 - DNA, 25 bp, Homo sapien
gaaaatgtgccgatgttactgtgaa

SEQ ID NO: 516093 - DNA, 25 bp, Homo sapien
cttccccagggatacaaagaagtag

SEQ ID NO: 516094 - DNA, 25 bp, Homo sapien
catatttaaagctgtaaatattgcc

SEQ ID NO: 516095 - DNA, 25 bp, Homo sapien
cacatatttaaagctgtaaatattg

SEQ ID NO: 516096 - DNA, 25 bp, Homo sapien
tatttaaagctgtaaatattgccac

SEQ ID NO: 516097 - DNA, 25 bp, Homo sapien
tcacatcacatatttaaagctgtaa

SEQ ID NO: 516098 - DNA, 25 bp, Homo sapien
tctttgcagcgaccacacagttcct

SEQ ID NO: 516099 - DNA, 25 bp, Homo sapien
accacacagttcctgtcgatgaggc

SEQ ID NO: 516100 - DNA, 25 bp, Homo sapien
gaggcctccttagatcaatgtgtct

SEQ ID NO: 516101 - DNA, 25 bp, Homo sapien
gaatctcttgtctttgcagcgacca

SEQ ID NO: 516102 - DNA, 25 bp, Homo sapien
caggaacaatgagactttgagcagg

SEQ ID NO: 516103 - DNA, 25 bp, Homo sapien
tgaggacaggaacaatgagactttg

SEQ ID NO: 516104 - DNA, 25 bp, Homo sapien
ggacaggaacaatgagactttgagc

SEQ ID NO: 516105 - DNA, 25 bp, Homo sapien
tttgaggacaggaacaatgagactt

SEQ ID NO: 516106 - DNA, 25 bp, Homo sapien
tgcttctactcgataagggttaaaa

SEQ ID NO: 516107 - DNA, 25 bp, Homo sapien
ttggattgcttctactcgataaggg

SEQ ID NO: 516108 - DNA, 25 bp, Homo sapien
tggcatttacaacagagttgtttga

SEQ ID NO: 516109 - DNA, 25 bp, Homo sapien
taaaactcttttggcatttacaaca

SEQ ID NO: 516110 - DNA, 25 bp, Homo sapien
ggaaatagccatattttggttccaa

SEQ ID NO: 516111 - DNA, 25 bp, Homo sapien
tccagaaatgcaccacacgtaagca

SEQ ID NO: 516112 - DNA, 25 bp, Homo sapien
gtggaaatagccatattttggttcc

SEQ ID NO: 516113 - DNA, 25 bp, Homo sapien
cttgttcgttccagaaatgcaccac

SEQ ID NO: 516114 - DNA, 25 bp, Homo sapien
tccttcaccaagtacatggaagaag

SEQ ID NO: 516115 - DNA, 25 bp, Homo sapien
gatgaggctggtcgaggactaagaa

SEQ ID NO: 516116 - DNA, 25 bp, Homo sapien
tattgcccccatagatggaaaagga

SEQ ID NO: 516117 - DNA, 25 bp, Homo sapien
aaacatacaggccacgtgatataca

SEQ ID NO: 516118 - DNA, 25 bp, Homo sapien
agctgctgagggtgcgaggccccag

SEQ ID NO: 516119 - DNA, 25 bp, Homo sapien
tggaagttgggcctccggagcggct

SEQ ID NO: 516120 - DNA, 25 bp, Homo sapien
tgctcttcgtctcctgagggcacgg

SEQ ID NO: 516121 - DNA, 25 bp, Homo sapien
cctgacctccgtgatggtggctgcg

SEQ ID NO: 516122 - DNA, 25 bp, Homo sapien
cagccttgtccacccgcgggctcac

SEQ ID NO: 516123 - DNA, 25 bp, Homo sapien
acagccttgtccacccgcgggctca

SEQ ID NO: 516124 - DNA, 25 bp, Homo sapien
acctccttggtgttgggcttgcaca

SEQ ID NO: 516125 - DNA, 25 bp, Homo sapien
tcatctgggagagaatggccttaag

SEQ ID NO: 516126 - DNA, 25 bp, Homo sapien
taagctgcgccctcttgtaagggtc

SEQ ID NO: 516127 - DNA, 25 bp, Homo sapien
tcttgtaagggtcaatgcagtagtc

SEQ ID NO: 516128 - DNA, 25 bp, Homo sapien
cccataaccctggtacaagccatag

SEQ ID NO: 516129 - DNA, 25 bp, Homo sapien
agggaacacggacaaagcgctccat

SEQ ID NO: 516130 - DNA, 25 bp, Homo sapien
agccatagggaacacggacaaagcg

SEQ ID NO: 516131 - DNA, 25 bp, Homo sapien
ttttgcctccagtcgggctgtttgt

SEQ ID NO: 516132 - DNA, 25 bp, Homo sapien
tatgaatgatgcaaacagcgaacac

SEQ ID NO: 516133 - DNA, 25 bp, Homo sapien
cagaagccatgggagttgaaaaaca

SEQ ID NO: 516134 - DNA, 25 bp, Homo sapien
tgagaccctattgcccataaagagc

SEQ ID NO: 516135 - DNA, 25 bp, Homo sapien
gaaaagttatgtaacccagagccac

SEQ ID NO: 516136 - DNA, 25 bp, Homo sapien
cattacctttacgattcctatttat

SEQ ID NO: 516137 - DNA, 25 bp, Homo sapien
acagaaaaactggtatattgttgag

SEQ ID NO: 516138 - DNA, 25 bp, Homo sapien
gtgatacagaaaaactggtatattg

SEQ ID NO: 516139 - DNA, 25 bp, Homo sapien
tcattacctttacgattcctattta

SEQ ID NO: 516140 - DNA, 25 bp, Homo sapien
ccaaaaaaagatccaatgacaaatc

SEQ ID NO: 516141 - DNA, 25 bp, Homo sapien
tgaaccaaaaaaagatccaatgaca

SEQ ID NO: 516142 - DNA, 25 bp, Homo sapien
tattgttgaaccaaaaaaagatcca

SEQ ID NO: 516143 - DNA, 25 bp, Homo sapien
tgttgaaccaaaaaaagatccaatg

SEQ ID NO: 516144 - DNA, 25 bp, Homo sapien
ccataaaagcaccattatataagac

SEQ ID NO: 516145 - DNA, 25 bp, Homo sapien
tagaaagaagctgttggccaacaag

SEQ ID NO: 516146 - DNA, 25 bp, Homo sapien
catacgtcctctgtggtcttgtcta

SEQ ID NO: 516147 - DNA, 25 bp, Homo sapien
caagaaatagagcatacgtcctctg

SEQ ID NO: 516148 - DNA, 25 bp, Homo sapien
tgagcatggcttttatatatccctg

SEQ ID NO: 516149 - DNA, 25 bp, Homo sapien
tatccctgtatgacctatatcctgg

SEQ ID NO: 516150 - DNA, 25 bp, Homo sapien
aggacttgattgtcttaatgccaca

SEQ ID NO: 516151 - DNA, 25 bp, Homo sapien
gaagacattccagagttgtgaggac

SEQ ID NO: 516152 - DNA, 25 bp, Homo sapien
gagctgccgactaattacacatgtt

SEQ ID NO: 516153 - DNA, 25 bp, Homo sapien
agctgccgactaattacacatgtta

SEQ ID NO: 516154 - DNA, 25 bp, Homo sapien
tgagctgccgactaattacacatgt

SEQ ID NO: 516155 - DNA, 25 bp, Homo sapien
tatcataagagtcgcacatctcaca

SEQ ID NO: 516156 - DNA, 25 bp, Homo sapien
tgatttccctcagtagctcctgtag

SEQ ID NO: 516157 - DNA, 25 bp, Homo sapien
tttacactggaattggagctctgac

SEQ ID NO: 516158 - DNA, 25 bp, Homo sapien
tagatcacttcagagcaaatggtac

SEQ ID NO: 516159 - DNA, 25 bp, Homo sapien
gaaactctgtgtaggaattccagta

SEQ ID NO: 516160 - DNA, 25 bp, Homo sapien
gcacactgtgaaaagtaacatcgtg

SEQ ID NO: 516161 - DNA, 25 bp, Homo sapien
cagtatctggcattgttggaaggca

SEQ ID NO: 516162 - DNA, 25 bp, Homo sapien
gacaaccgccccttctgtgatagga

SEQ ID NO: 516163 - DNA, 25 bp, Homo sapien
tctttcattcggtggattttttctc

SEQ ID NO: 516164 - DNA, 25 bp, Homo sapien
tctcttgagacaccatgaatgtttc

SEQ ID NO: 516165 - DNA, 25 bp, Homo sapien
ctcttgagacaccatgaatgtttct

SEQ ID NO: 516166 - DNA, 25 bp, Homo sapien
tctcaggacctagctctggcaaaag

SEQ ID NO: 516167 - DNA, 25 bp, Homo sapien
gaactcggattttaatagccacctg

SEQ ID NO: 516168 - DNA, 25 bp, Homo sapien
ggagtagtccacagatccactttga

SEQ ID NO: 516169 - DNA, 25 bp, Homo sapien
gttaaggcaggataccacaatgagt

SEQ ID NO: 516170 - DNA, 25 bp, Homo sapien
tccaagccaagatttagcatttagc

SEQ ID NO: 516171 - DNA, 25 bp, Homo sapien
gcaaaaacaccattgacatgtgcag

SEQ ID NO: 516172 - DNA, 25 bp, Homo sapien
agtaaattcttacctcactggctat

SEQ ID NO: 516173 - DNA, 25 bp, Homo sapien
gatcataaatgaatcgcagactgct

SEQ ID NO: 516174 - DNA, 25 bp, Homo sapien
ctgaaaactaccatgtccatttcca

SEQ ID NO: 516175 - DNA, 25 bp, Homo sapien
gattcttttgttcggtctgaaatac

SEQ ID NO: 516176 - DNA, 25 bp, Homo sapien
aactaccatgtccatttccagcctg

SEQ ID NO: 516177 - DNA, 25 bp, Homo sapien
tttccagcctgaaaagattcttttg

SEQ ID NO: 516178 - DNA, 25 bp, Homo sapien
ctgaaaatagcaggatacataatga

SEQ ID NO: 516179 - DNA, 25 bp, Homo sapien
gaaaatagcaggatacataatgagg

SEQ ID NO: 516180 - DNA, 25 bp, Homo sapien
aaaatagcaggatacataatgagga

SEQ ID NO: 516181 - DNA, 25 bp, Homo sapien
aatagcaggatacataatgaggaac

SEQ ID NO: 516182 - DNA, 25 bp, Homo sapien
ggttctcggaatataacttcatagt

SEQ ID NO: 516183 - DNA, 25 bp, Homo sapien
cgttgaatttccagcgagtgtcagg

SEQ ID NO: 516184 - DNA, 25 bp, Homo sapien
ccagcgagtgtcaggttctcggaat

SEQ ID NO: 516185 - DNA, 25 bp, Homo sapien
gctaactcttgaacgttgaatttcc

SEQ ID NO: 516186 - DNA, 25 bp, Homo sapien
aaagtacataaaacattgaagacat

SEQ ID NO: 516187 - DNA, 25 bp, Homo sapien
tttcaaaagtacataaaacattgaa

SEQ ID NO: 516188 - DNA, 25 bp, Homo sapien
tcaaaagtacataaaacattgaaga

SEQ ID NO: 516189 - DNA, 25 bp, Homo sapien
caaaagtacataaaacattgaagac

SEQ ID NO: 516190 - DNA, 25 bp, Homo sapien
gttttaccagtaatccaatgcctta

SEQ ID NO: 516191 - DNA, 25 bp, Homo sapien
caataaatgcagttgtttcattccc

SEQ ID NO: 516192 - DNA, 25 bp, Homo sapien
tacttagccactctcataattctcc

SEQ ID NO: 516193 - DNA, 25 bp, Homo sapien
tgctcaattttatctagtatgtagg

SEQ ID NO: 516194 - DNA, 25 bp, Homo sapien
taagtatgccagttagccccagatg

SEQ ID NO: 516195 - DNA, 25 bp, Homo sapien
gatcattagagaaaagcacacctgt

SEQ ID NO: 516196 - DNA, 25 bp, Homo sapien
ctaaaatcgtgagcccagtctggac

SEQ ID NO: 516197 - DNA, 25 bp, Homo sapien
tcacttcacaattaaccaggtaggg

SEQ ID NO: 516198 - DNA, 25 bp, Homo sapien
tctgtctttagactaaaatattctg

SEQ ID NO: 516199 - DNA, 25 bp, Homo sapien
ttgccctggaactcccagggagcaa

SEQ ID NO: 516200 - DNA, 25 bp, Homo sapien
ttctgttgccctggaactcccaggg

SEQ ID NO: 516201 - DNA, 25 bp, Homo sapien
tagactaaaatattctgttgccctg

SEQ ID NO: 516202 - DNA, 25 bp, Homo sapien
tacgagcgccatctaattcagtatt

SEQ ID NO: 516203 - DNA, 25 bp, Homo sapien
gaacatttcggtgggtgcttctctg

SEQ ID NO: 516204 - DNA, 25 bp, Homo sapien
gtgacctgtagctccactacgagcg

SEQ ID NO: 516205 - DNA, 25 bp, Homo sapien
agaggcagaaccgtcctgttgtgac

SEQ ID NO: 516206 - DNA, 25 bp, Homo sapien
aagaccatttgccaaggactatttt

SEQ ID NO: 516207 - DNA, 25 bp, Homo sapien
gccattgaacagcagagaaacacta

SEQ ID NO: 516208 - DNA, 25 bp, Homo sapien
tctcagcaaacttcagccattgaac

SEQ ID NO: 516209 - DNA, 25 bp, Homo sapien
ttgccgtaggaaagtaattaagaca

SEQ ID NO: 516210 - DNA, 25 bp, Homo sapien
aactgaaaattcagaatgatacttc

SEQ ID NO: 516211 - DNA, 25 bp, Homo sapien
aaaattcagaatgatacttcttcct

SEQ ID NO: 516212 - DNA, 25 bp, Homo sapien
tgaaaattcagaatgatacttcttc

SEQ ID NO: 516213 - DNA, 25 bp, Homo sapien
ccataactgaaaattcagaatgata

SEQ ID NO: 516214 - DNA, 25 bp, Homo sapien
ataatgggggatatgccattcctca

SEQ ID NO: 516215 - DNA, 25 bp, Homo sapien
cccaggcgtggaggttggtattatc

SEQ ID NO: 516216 - DNA, 25 bp, Homo sapien
gcgtggaggttggtattatcaataa

SEQ ID NO: 516217 - DNA, 25 bp, Homo sapien
atttcccaggcgtggaggttggtat

SEQ ID NO: 516218 - DNA, 25 bp, Homo sapien
gctacaatctatgtgcacatcaggg

SEQ ID NO: 516219 - DNA, 25 bp, Homo sapien
aaggtgagcgtaatctctattcgtc

SEQ ID NO: 516220 - DNA, 25 bp, Homo sapien
tctggaatctaaggaggttatgctc

SEQ ID NO: 516221 - DNA, 25 bp, Homo sapien
gaacaacatgcaacaatcagaggga

SEQ ID NO: 516222 - DNA, 25 bp, Homo sapien
tcatccgtgctgaaaatcagggccc

SEQ ID NO: 516223 - DNA, 25 bp, Homo sapien
aggaagtcaggattgaactcatagg

SEQ ID NO: 516224 - DNA, 25 bp, Homo sapien
aatcatccgtgctgaaaatcagggc

SEQ ID NO: 516225 - DNA, 25 bp, Homo sapien
aaatcatccgtgctgaaaatcaggg

SEQ ID NO: 516226 - DNA, 25 bp, Homo sapien
taatgatgacccgagccaaatggga

SEQ ID NO: 516227 - DNA, 25 bp, Homo sapien
ttctgtagcggcaagaactgactca

SEQ ID NO: 516228 - DNA, 25 bp, Homo sapien
taattctgagaccaccaggtttgga

SEQ ID NO: 516229 - DNA, 25 bp, Homo sapien
gatgcacgtgctctactttatcagg

SEQ ID NO: 516230 - DNA, 25 bp, Homo sapien
gctcgtactatcttttggcagaagg

SEQ ID NO: 516231 - DNA, 25 bp, Homo sapien
gaatacgcttattcagttctgcaca

SEQ ID NO: 516232 - DNA, 25 bp, Homo sapien
gacgtgtctgagcttcctttccgca

SEQ ID NO: 516233 - DNA, 25 bp, Homo sapien
ggatgtcatgctccgcaagaactgg

SEQ ID NO: 516234 - DNA, 25 bp, Homo sapien
aaatgcgggccagtagataatacac

SEQ ID NO: 516235 - DNA, 25 bp, Homo sapien
agtaataaacacatcggagcgcgca

SEQ ID NO: 516236 - DNA, 25 bp, Homo sapien
aatgccaggtgaagcgttaaggtac

SEQ ID NO: 516237 - DNA, 25 bp, Homo sapien
gagcgcgcatgtcaagtagtccttg

SEQ ID NO: 516238 - DNA, 25 bp, Homo sapien
gtttgacttggtccctgagggatga

SEQ ID NO: 516239 - DNA, 25 bp, Homo sapien
cagcaaagcgctgagagaaagggtc

SEQ ID NO: 516240 - DNA, 25 bp, Homo sapien
caaaggagtgatgcaagtttgactt

SEQ ID NO: 516241 - DNA, 25 bp, Homo sapien
tggcccagcaaagcgctgagagaaa

SEQ ID NO: 516242 - DNA, 25 bp, Homo sapien
caaagatcatcggagacatgcggag

SEQ ID NO: 516243 - DNA, 25 bp, Homo sapien
ccagaaaccatgtcagaggagcaaa

SEQ ID NO: 516244 - DNA, 25 bp, Homo sapien
tgtgggcgcgggaatgaacttcttt

SEQ ID NO: 516245 - DNA, 25 bp, Homo sapien
gataaggtggatagttctcagacgc

SEQ ID NO: 516246 - DNA, 25 bp, Homo sapien
ttagagtaaaagctaaatggctcag

SEQ ID NO: 516247 - DNA, 25 bp, Homo sapien
gtaaaagctaaatggctcaggatca

SEQ ID NO: 516248 - DNA, 25 bp, Homo sapien
agtaaaagctaaatggctcaggatc

SEQ ID NO: 516249 - DNA, 25 bp, Homo sapien
cttagagtaaaagctaaatggctca

SEQ ID NO: 516250 - DNA, 25 bp, Homo sapien
tcagcttcagaagtgatgagggtta

SEQ ID NO: 516251 - DNA, 25 bp, Homo sapien
ccccagttctatctttatggtggtc

SEQ ID NO: 516252 - DNA, 25 bp, Homo sapien
tcagaagtgatgagggttaagcccc

SEQ ID NO: 516253 - DNA, 25 bp, Homo sapien
gatgagggttaagccccagttctat

SEQ ID NO: 516254 - DNA, 25 bp, Homo sapien
tgtgcccggcctaaccaagcatttt

SEQ ID NO: 516255 - DNA, 25 bp, Homo sapien
tgattcctctcatggttggctaaga

SEQ ID NO: 516256 - DNA, 25 bp, Homo sapien
gaactgcactttcacgtcctttggt

SEQ ID NO: 516257 - DNA, 25 bp, Homo sapien
tcaggtctattcactcagggcacat

SEQ ID NO: 516258 - DNA, 25 bp, Homo sapien
ggcacataaggtccacaagggcagg

SEQ ID NO: 516259 - DNA, 25 bp, Homo sapien
tcactgatgattcccaagtacctag

SEQ ID NO: 516260 - DNA, 25 bp, Homo sapien
tgttcactgatgattcccaagtacc

SEQ ID NO: 516261 - DNA, 25 bp, Homo sapien
ctctggcacataaggtccacaaggg

SEQ ID NO: 516262 - DNA, 25 bp, Homo sapien
tagacctgggagataagcactgcta

SEQ ID NO: 516263 - DNA, 25 bp, Homo sapien
tacgtaatgctcaaatagacctggg

SEQ ID NO: 516264 - DNA, 25 bp, Homo sapien
tagggccaacgagtggtacaactgg

SEQ ID NO: 516265 - DNA, 25 bp, Homo sapien
gggatatatacctccggtggcatac

SEQ ID NO: 516266 - DNA, 25 bp, Homo sapien
ctctgatagaatacatgttccatga

SEQ ID NO: 516267 - DNA, 25 bp, Homo sapien
tctctgatagaatacatgttccatg

SEQ ID NO: 516268 - DNA, 25 bp, Homo sapien
tttctctgatagaatacatgttcca

SEQ ID NO: 516269 - DNA, 25 bp, Homo sapien
ttctctgatagaatacatgttccat

SEQ ID NO: 516270 - DNA, 25 bp, Homo sapien
tgttcatgaggtccaaagccaggct

SEQ ID NO: 516271 - DNA, 25 bp, Homo sapien
gctatagatgacatgggcagcctcc

SEQ ID NO: 516272 - DNA, 25 bp, Homo sapien
ttctcgtttgtcagtgtggtcccac

SEQ ID NO: 516273 - DNA, 25 bp, Homo sapien
aagtgtccccaagccacagtggcta

SEQ ID NO: 516274 - DNA, 25 bp, Homo sapien
cagataacagaagagtaactgtaca

SEQ ID NO: 516275 - DNA, 25 bp, Homo sapien
tacagataacagaagagtaactgta

SEQ ID NO: 516276 - DNA, 25 bp, Homo sapien
tgtcatagatcagttacagataaca

SEQ ID NO: 516277 - DNA, 25 bp, Homo sapien
catagatcagttacagataacagaa

SEQ ID NO: 516278 - DNA, 25 bp, Homo sapien
caacaaatggtagcatgaaagtccc

SEQ ID NO: 516279 - DNA, 25 bp, Homo sapien
ggttcatccagagactgagtggcca

SEQ ID NO: 516280 - DNA, 25 bp, Homo sapien
ataagccagtgtccaaaaagggccg

SEQ ID NO: 516281 - DNA, 25 bp, Homo sapien
tacgtcagtggtaccaatgccaaga

SEQ ID NO: 516282 - DNA, 25 bp, Homo sapien
tacgacagatcaaaaccaaactcat

SEQ ID NO: 516283 - DNA, 25 bp, Homo sapien
taacttagcccgcttataaggctct

SEQ ID NO: 516284 - DNA, 25 bp, Homo sapien
tagcccgcttataaggctcttgttt

SEQ ID NO: 516285 - DNA, 25 bp, Homo sapien
tgttttttcattatacgacagatca

SEQ ID NO: 516286 - DNA, 25 bp, Homo sapien
gagaacacatccctttgaccctgat

SEQ ID NO: 516287 - DNA, 25 bp, Homo sapien
tgaaagtattcttcccctattcttc

SEQ ID NO: 516288 - DNA, 25 bp, Homo sapien
actccaggggagttcctatacatct

SEQ ID NO: 516289 - DNA, 25 bp, Homo sapien
acttcctctcgggtcataatccaca

SEQ ID NO: 516290 - DNA, 25 bp, Homo sapien
aaaggatgttttagtggtatgccca

SEQ ID NO: 516291 - DNA, 25 bp, Homo sapien
ttcacttcaatcaagcccgggagca

SEQ ID NO: 516292 - DNA, 25 bp, Homo sapien
tgtcagcgggcatcctttgagccta

SEQ ID NO: 516293 - DNA, 25 bp, Homo sapien
caatatcggattgccccagttcagc

SEQ ID NO: 516294 - DNA, 25 bp, Homo sapien
tattagttctttaatcaaatgagaa

SEQ ID NO: 516295 - DNA, 25 bp, Homo sapien
atgaacccacatttgtaaaaagcga

SEQ ID NO: 516296 - DNA, 25 bp, Homo sapien
catttgtaaaaagcgatttcctcca

SEQ ID NO: 516297 - DNA, 25 bp, Homo sapien
ccacatttgtaaaaagcgatttcct

SEQ ID NO: 516298 - DNA, 25 bp, Homo sapien
tatctcagctgaccaacaacggagc

SEQ ID NO: 516299 - DNA, 25 bp, Homo sapien
cacatgtaaggaacataaggcccgg

SEQ ID NO: 516300 - DNA, 25 bp, Homo sapien
cctcagaggcaaacagaacagatat

SEQ ID NO: 516301 - DNA, 25 bp, Homo sapien
ggcccggaaaaactagatgactgac

SEQ ID NO: 516302 - DNA, 25 bp, Homo sapien
taaggtcactatctcggcaccatcg

SEQ ID NO: 516303 - DNA, 25 bp, Homo sapien
tatctctccagtgagacgggaagcc

SEQ ID NO: 516304 - DNA, 25 bp, Homo sapien
ccaaaagcttctactccgcgagtca

SEQ ID NO: 516305 - DNA, 25 bp, Homo sapien
catccggtgtcttctgcttagccaa

SEQ ID NO: 516306 - DNA, 25 bp, Homo sapien
tgcttggcagggtaagacatggctc

SEQ ID NO: 516307 - DNA, 25 bp, Homo sapien
tcgaagttgctggaacatcaagcgc

SEQ ID NO: 516308 - DNA, 25 bp, Homo sapien
aatttgggcgcccatggcgaggctc

SEQ ID NO: 516309 - DNA, 25 bp, Homo sapien
tactacgtgccagacaatgtgcttg

SEQ ID NO: 516310 - DNA, 25 bp, Homo sapien
cagattttcaaagcgggctgccagc

SEQ ID NO: 516311 - DNA, 25 bp, Homo sapien
ccccgacttcgccagattttcaaag

SEQ ID NO: 516312 - DNA, 25 bp, Homo sapien
agcaaacgcaggctccccgacttcg

SEQ ID NO: 516313 - DNA, 25 bp, Homo sapien
gcaggctccccgacttcgccagatt

SEQ ID NO: 516314 - DNA, 25 bp, Homo sapien
gattacagcgcctgttgacgcactg

SEQ ID NO: 516315 - DNA, 25 bp, Homo sapien
ggacccctcgtttatgcgctcggat

SEQ ID NO: 516316 - DNA, 25 bp, Homo sapien
cctgttgacgcactgtagcggccgc

SEQ ID NO: 516317 - DNA, 25 bp, Homo sapien
tatgcgctcggattacagcgcctgt

SEQ ID NO: 516318 - DNA, 25 bp, Homo sapien
tggccagtgtagttttcccggagcc

SEQ ID NO: 516319 - DNA, 25 bp, Homo sapien
gaggtagaggtgtttcctaaagctg

SEQ ID NO: 516320 - DNA, 25 bp, Homo sapien
tcctaaagctgtggcggcgaggagg

SEQ ID NO: 516321 - DNA, 25 bp, Homo sapien
agcccgggaggcctcgcaggaggta

SEQ ID NO: 516322 - DNA, 25 bp, Homo sapien
cctcccaaaagattgaaggaaactg

SEQ ID NO: 516323 - DNA, 25 bp, Homo sapien
tgttgtttttgtgactctccggcca

SEQ ID NO: 516324 - DNA, 25 bp, Homo sapien
tgaagtcacggtcttggccaaagct

SEQ ID NO: 516325 - DNA, 25 bp, Homo sapien
gtttttgtgactctccggccatgtg

SEQ ID NO: 516326 - DNA, 25 bp, Homo sapien
ttttgtgactctccggccatgtgat

SEQ ID NO: 516327 - DNA, 25 bp, Homo sapien
gaaagtggcagagtctaccgaaacc

SEQ ID NO: 516328 - DNA, 25 bp, Homo sapien
tcaagagcgtgacagagtgatcctg

SEQ ID NO: 516329 - DNA, 25 bp, Homo sapien
tccaacagttcaccctcaagagcgt

SEQ ID NO: 516330 - DNA, 25 bp, Homo sapien
ttggagaactctttcagatccccgg

SEQ ID NO: 516331 - DNA, 25 bp, Homo sapien
ggctaaccttttaatcctaatgcag

SEQ ID NO: 516332 - DNA, 25 bp, Homo sapien
ataaggtactcaagttttctgtgcc

SEQ ID NO: 516333 - DNA, 25 bp, Homo sapien
tatcaaacaaagtatggcatacatc

SEQ ID NO: 516334 - DNA, 25 bp, Homo sapien
ttccagagatggatgctagtgatgg

SEQ ID NO: 516335 - DNA, 25 bp, Homo sapien
caagaatggttgaacagattatcca

SEQ ID NO: 516336 - DNA, 25 bp, Homo sapien
aagaatggttgaacagattatccaa

SEQ ID NO: 516337 - DNA, 25 bp, Homo sapien
agaatggttgaacagattatccaaa

SEQ ID NO: 516338 - DNA, 25 bp, Homo sapien
tcaagaatggttgaacagattatcc

SEQ ID NO: 516339 - DNA, 25 bp, Homo sapien
ggtatccaacgggtacgtctctgga

SEQ ID NO: 516340 - DNA, 25 bp, Homo sapien
tctctggaaagaatcccttgggttg

SEQ ID NO: 516341 - DNA, 25 bp, Homo sapien
gcactctgacttttctccgtgatca

SEQ ID NO: 516342 - DNA, 25 bp, Homo sapien
cttcagcagtaccatgaagacagca

SEQ ID NO: 516343 - DNA, 25 bp, Homo sapien
ctaggttaggtgaagtactggcttt

SEQ ID NO: 516344 - DNA, 25 bp, Homo sapien
aggtgaagtactggcttttccagat

SEQ ID NO: 516345 - DNA, 25 bp, Homo sapien
gttaggtgaagtactggcttttcca

SEQ ID NO: 516346 - DNA, 25 bp, Homo sapien
tgaagtactggcttttccagatttt

SEQ ID NO: 516347 - DNA, 25 bp, Homo sapien
cttccaagccagtcctcctccagct

SEQ ID NO: 516348 - DNA, 25 bp, Homo sapien
ttccaagccagtcctcctccagcta

SEQ ID NO: 516349 - DNA, 25 bp, Homo sapien
tccaagccagtcctcctccagctac

SEQ ID NO: 516350 - DNA, 25 bp, Homo sapien
ttgcaagtagatcatctttagtgtc

SEQ ID NO: 516351 - DNA, 25 bp, Homo sapien
tccattgcaagtagatcatctttag

SEQ ID NO: 516352 - DNA, 25 bp, Homo sapien
cacatagtcatcaggcaacaaggat

SEQ ID NO: 516353 - DNA, 25 bp, Homo sapien
caaggggaaccacatagtcatcagg

SEQ ID NO: 516354 - DNA, 25 bp, Homo sapien
cagaagcttaggagccaagttaaaa

SEQ ID NO: 516355 - DNA, 25 bp, Homo sapien
aaaaactcaggatgacaagctttga

SEQ ID NO: 516356 - DNA, 25 bp, Homo sapien
ctggaacatcagaagcttaggagcc

SEQ ID NO: 516357 - DNA, 25 bp, Homo sapien
ttgagacgaaatgggtccccaagga

SEQ ID NO: 516358 - DNA, 25 bp, Homo sapien
gataatggtagctcaagggaacggt

SEQ ID NO: 516359 - DNA, 25 bp, Homo sapien
tttccgcagaaaggtcctgggtgtc

SEQ ID NO: 516360 - DNA, 25 bp, Homo sapien
gatgggtcctgatctcccggtgtaa

SEQ ID NO: 516361 - DNA, 25 bp, Homo sapien
tgcaggccagctaccaaaatagggc

SEQ ID NO: 516362 - DNA, 25 bp, Homo sapien
tccagtgaaagtcctagttgcagtc

SEQ ID NO: 516363 - DNA, 25 bp, Homo sapien
gtgaaagtcctagttgcagtccaag

SEQ ID NO: 516364 - DNA, 25 bp, Homo sapien
ctgattccagtgaaagtcctagttg

SEQ ID NO: 516365 - DNA, 25 bp, Homo sapien
ccaaggtgcaatgtcagttatgaaa

SEQ ID NO: 516366 - DNA, 25 bp, Homo sapien
tgtctttactcaaatgtgaaccatc

SEQ ID NO: 516367 - DNA, 25 bp, Homo sapien
cctgcagactagtatgtcattctga

SEQ ID NO: 516368 - DNA, 25 bp, Homo sapien
cctgtctttactcaaatgtgaacca

SEQ ID NO: 516369 - DNA, 25 bp, Homo sapien
agcaagattctgtccgtatttaaaa

SEQ ID NO: 516370 - DNA, 25 bp, Homo sapien
agtagaagacgctagccatggtggc

SEQ ID NO: 516371 - DNA, 25 bp, Homo sapien
acttcgaaaaagtagaagacgctag

SEQ ID NO: 516372 - DNA, 25 bp, Homo sapien
gagcagaataaacttcgaaaaagta

SEQ ID NO: 516373 - DNA, 25 bp, Homo sapien
taagataagatagtcagaggttcag

SEQ ID NO: 516374 - DNA, 25 bp, Homo sapien
aaatcgaggtttcagcagggatagg

SEQ ID NO: 516375 - DNA, 25 bp, Homo sapien
aggtcttactggattaaaatcgagg

SEQ ID NO: 516376 - DNA, 25 bp, Homo sapien
tctgaaaggtatatgagagaatcca

SEQ ID NO: 516377 - DNA, 25 bp, Homo sapien
tacttagcggcctatcacagtggct

SEQ ID NO: 516378 - DNA, 25 bp, Homo sapien
taggaatgccttcacttaggagtga

SEQ ID NO: 516379 - DNA, 25 bp, Homo sapien
cacaaaatgtcacggtcaattatac

SEQ ID NO: 516380 - DNA, 25 bp, Homo sapien
gaatgtaggtagaaggcatatacag

SEQ ID NO: 516381 - DNA, 25 bp, Homo sapien
aaggattggctagcacgaatgtgcc

SEQ ID NO: 516382 - DNA, 25 bp, Homo sapien
gacattccagttgatcagtgccacg

SEQ ID NO: 516383 - DNA, 25 bp, Homo sapien
tatggtggcttactgaaacagctcc

SEQ ID NO: 516384 - DNA, 25 bp, Homo sapien
tatgacgtctacataatgcacaggg

SEQ ID NO: 516385 - DNA, 25 bp, Homo sapien
gaacccagaagggtcagctgacctc

SEQ ID NO: 516386 - DNA, 25 bp, Homo sapien
ggtaagggagcaggccaataacaat

SEQ ID NO: 516387 - DNA, 25 bp, Homo sapien
acttagggctttttgtgggcacaag

SEQ ID NO: 516388 - DNA, 25 bp, Homo sapien
tgtctgcagctcttcgttagaaagg

SEQ ID NO: 516389 - DNA, 25 bp, Homo sapien
cagcggattattggcatagttgttt

SEQ ID NO: 516390 - DNA, 25 bp, Homo sapien
tcagcggattattggcatagttgtt

SEQ ID NO: 516391 - DNA, 25 bp, Homo sapien
gtgatcaatgtgtcagtctcccttt

SEQ ID NO: 516392 - DNA, 25 bp, Homo sapien
cttggtcatgtccttgattccagct

SEQ ID NO: 516393 - DNA, 25 bp, Homo sapien
ccagctcccaagtcattgtctgaca

SEQ ID NO: 516394 - DNA, 25 bp, Homo sapien
ctctcaagagatcaaaggttgagaa

SEQ ID NO: 516395 - DNA, 25 bp, Homo sapien
ttcatcatcttgtaccagaacctca

SEQ ID NO: 516396 - DNA, 25 bp, Homo sapien
tggtgttcatcatcttgtaccagaa

SEQ ID NO: 516397 - DNA, 25 bp, Homo sapien
tcatcatcttgtaccagaacctcat

SEQ ID NO: 516398 - DNA, 25 bp, Homo sapien
tgttcatcatcttgtaccagaacct

SEQ ID NO: 516399 - DNA, 25 bp, Homo sapien
tgtaatttacggtcagacaccttct

SEQ ID NO: 516400 - DNA, 25 bp, Homo sapien
actgcaggtgtaatttacggtcaga

SEQ ID NO: 516401 - DNA, 25 bp, Homo sapien
ggtcagacaccttcttccatcctag

SEQ ID NO: 516402 - DNA, 25 bp, Homo sapien
tttacggtcagacaccttcttccat

SEQ ID NO: 516403 - DNA, 25 bp, Homo sapien
acatttgatatttcttcagtcacac

SEQ ID NO: 516404 - DNA, 25 bp, Homo sapien
aaacatttgatatttcttcagtcac

SEQ ID NO: 516405 - DNA, 25 bp, Homo sapien
ctgagttgctgtcttactaggaaac

SEQ ID NO: 516406 - DNA, 25 bp, Homo sapien
gagttgctgtcttactaggaaacat

SEQ ID NO: 516407 - DNA, 25 bp, Homo sapien
aataacatttagattgtgcttcaca

SEQ ID NO: 516408 - DNA, 25 bp, Homo sapien
tatagttaatagaactcagaaaggt

SEQ ID NO: 516409 - DNA, 25 bp, Homo sapien
ttctccaagactgtatagttaatag

SEQ ID NO: 516410 - DNA, 25 bp, Homo sapien
gaactcatagagtgtgatttctcca

SEQ ID NO: 516411 - DNA, 25 bp, Homo sapien
caaggactgtttataggcaagagga

SEQ ID NO: 516412 - DNA, 25 bp, Homo sapien
gccttgggaactagacgcaaatatt

SEQ ID NO: 516413 - DNA, 25 bp, Homo sapien
tgaccctgtcatattctagccttgg

SEQ ID NO: 516414 - DNA, 25 bp, Homo sapien
tagctggcctacgaataaatgaaca

SEQ ID NO: 516415 - DNA, 25 bp, Homo sapien
gcactctttctcctcctcctcctac

SEQ ID NO: 516416 - DNA, 25 bp, Homo sapien
cctgggcaaagcactctttctcctc

SEQ ID NO: 516417 - DNA, 25 bp, Homo sapien
cactctttctcctcctcctcctact

SEQ ID NO: 516418 - DNA, 25 bp, Homo sapien
actctttctcctcctcctcctactt

SEQ ID NO: 516419 - DNA, 25 bp, Homo sapien
gagttctcaacatgttggacacagg

SEQ ID NO: 516420 - DNA, 25 bp, Homo sapien
caaaagtgcatggtatcaaaagtac

SEQ ID NO: 516421 - DNA, 25 bp, Homo sapien
gcgcactattaagacagcccgattt

SEQ ID NO: 516422 - DNA, 25 bp, Homo sapien
aattccattagtaacaggcgcacta

SEQ ID NO: 516423 - DNA, 25 bp, Homo sapien
gaattaagtgttgactctcagcggt

SEQ ID NO: 516424 - DNA, 25 bp, Homo sapien
acatgtccaagaattaagtgttgac

SEQ ID NO: 516425 - DNA, 25 bp, Homo sapien
gtgtatcattatgttgcacatgtcc

SEQ ID NO: 516426 - DNA, 25 bp, Homo sapien
gactctcagcggtataaaaataaaa

SEQ ID NO: 516427 - DNA, 25 bp, Homo sapien
ggtactgtgagttggatgagtcccc

SEQ ID NO: 516428 - DNA, 25 bp, Homo sapien
tgtggcaactgacaaggattcagac

SEQ ID NO: 516429 - DNA, 25 bp, Homo sapien
aactgcctgaggcatataactgcct

SEQ ID NO: 516430 - DNA, 25 bp, Homo sapien
tttctgggtagccagtgtggcaact

SEQ ID NO: 516431 - DNA, 25 bp, Homo sapien
cccaggttctctaaagtcgttggct

SEQ ID NO: 516432 - DNA, 25 bp, Homo sapien
tagcttccaattagctccagcgaat

SEQ ID NO: 516433 - DNA, 25 bp, Homo sapien
cagacttctccctaaaactggcaga

SEQ ID NO: 516434 - DNA, 25 bp, Homo sapien
cagcgaatacaatctctctgggact

SEQ ID NO: 516435 - DNA, 25 bp, Homo sapien
acagcttactccagggtacttcagc

SEQ ID NO: 516436 - DNA, 25 bp, Homo sapien
taccccttctgacatatctgatgac

SEQ ID NO: 516437 - DNA, 25 bp, Homo sapien
caaagatacttgttgactgtgccaa

SEQ ID NO: 516438 - DNA, 25 bp, Homo sapien
ggtcagctggctgatatgccatcaa

SEQ ID NO: 516439 - DNA, 25 bp, Homo sapien
ggtggcctcccagttgatacaatgt

SEQ ID NO: 516440 - DNA, 25 bp, Homo sapien
taaatgacactcttggtaacctgcc

SEQ ID NO: 516441 - DNA, 25 bp, Homo sapien
catgacaaaatgttcggtggcctcc

SEQ ID NO: 516442 - DNA, 25 bp, Homo sapien
cagattttccacaatacagagaggg

SEQ ID NO: 516443 - DNA, 25 bp, Homo sapien
caatttacatctatcatattcttca

SEQ ID NO: 516444 - DNA, 25 bp, Homo sapien
ttcacactgttcttgcatggactcc

SEQ ID NO: 516445 - DNA, 25 bp, Homo sapien
tcttgcatggactccaatctctgct

SEQ ID NO: 516446 - DNA, 25 bp, Homo sapien
tcaaagtcaatctcatgaactctca

SEQ ID NO: 516447 - DNA, 25 bp, Homo sapien
ccaacagtctatgcaacataggtga

SEQ ID NO: 516448 - DNA, 25 bp, Homo sapien
cataattagatcataccaacagtct

SEQ ID NO: 516449 - DNA, 25 bp, Homo sapien
gcaattccagactaatccatctatg

SEQ ID NO: 516450 - DNA, 25 bp, Homo sapien
catctatgccaatgaggaatatatc

SEQ ID NO: 516451 - DNA, 25 bp, Homo sapien
caagatggctgattggatccacaag

SEQ ID NO: 516452 - DNA, 25 bp, Homo sapien
tcatttagatcaggtacaggcatac

SEQ ID NO: 516453 - DNA, 25 bp, Homo sapien
tggatcctaagcaggtctgaaacgt

SEQ ID NO: 516454 - DNA, 25 bp, Homo sapien
ggtcctgtggtagcaatagtagccc

SEQ ID NO: 516455 - DNA, 25 bp, Homo sapien
gatcacaggttcaattggaggagct

SEQ ID NO: 516456 - DNA, 25 bp, Homo sapien
tcaaagaaaatgttcaccggagcac

SEQ ID NO: 516457 - DNA, 25 bp, Homo sapien
taaacaaacgagagaggatggacac

SEQ ID NO: 516458 - DNA, 25 bp, Homo sapien
tatttgggacctcatcaagcttgct

SEQ ID NO: 516459 - DNA, 25 bp, Homo sapien
acaaagcaaacttaagtaactgtct

SEQ ID NO: 516460 - DNA, 25 bp, Homo sapien
tacaaagcaaacttaagtaactgtc

SEQ ID NO: 516461 - DNA, 25 bp, Homo sapien
taaagcaaatacccaacagtaagaa

SEQ ID NO: 516462 - DNA, 25 bp, Homo sapien
aaagcaaatacccaacagtaagaat

SEQ ID NO: 516463 - DNA, 25 bp, Homo sapien
aatcattcagttaagggcaaccagc

SEQ ID NO: 516464 - DNA, 25 bp, Homo sapien
gcattgcaccatataaggaaccact

SEQ ID NO: 516465 - DNA, 25 bp, Homo sapien
aagatattatctcccgctttgccag

SEQ ID NO: 516466 - DNA, 25 bp, Homo sapien
tactgtttgttgcagcggcattgca

SEQ ID NO: 516467 - DNA, 25 bp, Homo sapien
cacgtacacaagaaaagactatgaa

SEQ ID NO: 516468 - DNA, 25 bp, Homo sapien
tttcaatggactctactaaaacaca

SEQ ID NO: 516469 - DNA, 25 bp, Homo sapien
tacatgtaccatctgaaaacagtta

SEQ ID NO: 516470 - DNA, 25 bp, Homo sapien
ttatgaggttacaggaggatagctg

SEQ ID NO: 516471 - DNA, 25 bp, Homo sapien
tctggccaaggcactagaacacaca

SEQ ID NO: 516472 - DNA, 25 bp, Homo sapien
gaaaattcacgaagacacagctggt

SEQ ID NO: 516473 - DNA, 25 bp, Homo sapien
taaagactagcaagcctatctggcc

SEQ ID NO: 516474 - DNA, 25 bp, Homo sapien
tacagtatacatacagggaagccaa

SEQ ID NO: 516475 - DNA, 25 bp, Homo sapien
ttatagatttttaaacaccaagcaa

SEQ ID NO: 516476 - DNA, 25 bp, Homo sapien
attttagtatttccactgcatattc

SEQ ID NO: 516477 - DNA, 25 bp, Homo sapien
tatagatttttaaacaccaagcaat

SEQ ID NO: 516478 - DNA, 25 bp, Homo sapien
atagatttttaaacaccaagcaatg

SEQ ID NO: 516479 - DNA, 25 bp, Homo sapien
aaaattatccaggtatggtggcgag

SEQ ID NO: 516480 - DNA, 25 bp, Homo sapien
aaaaattatccaggtatggtggcga

SEQ ID NO: 516481 - DNA, 25 bp, Homo sapien
ttatccaggtatggtggcgagtgcc

SEQ ID NO: 516482 - DNA, 25 bp, Homo sapien
aattatccaggtatggtggcgagtg

SEQ ID NO: 516483 - DNA, 25 bp, Homo sapien
gcaacagtagttggctaacattata

SEQ ID NO: 516484 - DNA, 25 bp, Homo sapien
gacaagtctataataaaatctggaa

SEQ ID NO: 516485 - DNA, 25 bp, Homo sapien
taattggtaatgacgaatgatctct

SEQ ID NO: 516486 - DNA, 25 bp, Homo sapien
gctttccagcctcagtaagatttat

SEQ ID NO: 516487 - DNA, 25 bp, Homo sapien
aagacagcattgtaattagctgggt

SEQ ID NO: 516488 - DNA, 25 bp, Homo sapien
tgttaacagcactgaatagtacaaa

SEQ ID NO: 516489 - DNA, 25 bp, Homo sapien
ttatttcactaaaggcaatgtaaca

SEQ ID NO: 516490 - DNA, 25 bp, Homo sapien
tactatgggattcaagatgtgctgg

SEQ ID NO: 516491 - DNA, 25 bp, Homo sapien
cagccaagagtattacaacaagaga

SEQ ID NO: 516492 - DNA, 25 bp, Homo sapien
taaggtaccctataccaagtcagta

SEQ ID NO: 516493 - DNA, 25 bp, Homo sapien
ttactcaggtgcttccataacagcc

SEQ ID NO: 516494 - DNA, 25 bp, Homo sapien
tagtacaaatcctcttatgaccatg

SEQ ID NO: 516495 - DNA, 25 bp, Homo sapien
ctgggaatttaaacaacttgctggg

SEQ ID NO: 516496 - DNA, 25 bp, Homo sapien
tgaaactacttaaactccaagacag

SEQ ID NO: 516497 - DNA, 25 bp, Homo sapien
caggctcactaactctttttcaagt

SEQ ID NO: 516498 - DNA, 25 bp, Homo sapien
cttaaactccaagacaggctcacta

SEQ ID NO: 516499 - DNA, 25 bp, Homo sapien
gacacagacacgattatgtgagcca

SEQ ID NO: 516500 - DNA, 25 bp, Homo sapien
acagacacgattatgtgagccaaga

SEQ ID NO: 516501 - DNA, 25 bp, Homo sapien
tatttgtgacacagacacgattatg

SEQ ID NO: 516502 - DNA, 25 bp, Homo sapien
tgtgacacagacacgattatgtgag

SEQ ID NO: 516503 - DNA, 25 bp, Homo sapien
gtgtgcttttgtgtgatggttccac

SEQ ID NO: 516504 - DNA, 25 bp, Homo sapien
acatttgatattcataacgatccaa

SEQ ID NO: 516505 - DNA, 25 bp, Homo sapien
tacaatagaaatggacatttgatat

SEQ ID NO: 516506 - DNA, 25 bp, Homo sapien
tttgatattcataacgatccaacat

SEQ ID NO: 516507 - DNA, 25 bp, Homo sapien
caatagaaatggacatttgatattc

SEQ ID NO: 516508 - DNA, 25 bp, Homo sapien
gcaatcttctttcgagacacaccat

SEQ ID NO: 516509 - DNA, 25 bp, Homo sapien
ctgagcaatcttctttcgagacaca

SEQ ID NO: 516510 - DNA, 25 bp, Homo sapien
ctttcgagacacaccatgtttattc

SEQ ID NO: 516511 - DNA, 25 bp, Homo sapien
tcttctttcgagacacaccatgttt

SEQ ID NO: 516512 - DNA, 25 bp, Homo sapien
ggacttctaggacttgcaaaaattg

SEQ ID NO: 516513 - DNA, 25 bp, Homo sapien
tagaactacctattcactgagcctg

SEQ ID NO: 516514 - DNA, 25 bp, Homo sapien
aaatctttgttgcagaatgtacagg

SEQ ID NO: 516515 - DNA, 25 bp, Homo sapien
tgagcctgctgactatatccccttg

SEQ ID NO: 516516 - DNA, 25 bp, Homo sapien
gagatgctggcaatgctcccatgac

SEQ ID NO: 516517 - DNA, 25 bp, Homo sapien
catgggtgatagctaaacgtgtgtt

SEQ ID NO: 516518 - DNA, 25 bp, Homo sapien
gaataaaaggtaactgtgactggga

SEQ ID NO: 516519 - DNA, 25 bp, Homo sapien
ttatgattacccaggcaaaacaatg

SEQ ID NO: 516520 - DNA, 25 bp, Homo sapien
gtcccacccattggagaggctgagg

SEQ ID NO: 516521 - DNA, 25 bp, Homo sapien
cacctatagtcccacccattggaga

SEQ ID NO: 516522 - DNA, 25 bp, Homo sapien
ggaaacacagtgatatgaagggaaa

SEQ ID NO: 516523 - DNA, 25 bp, Homo sapien
ggaataacagtcaggaaacacagtg

SEQ ID NO: 516524 - DNA, 25 bp, Homo sapien
aaaggtcctcacattttaccctcag

SEQ ID NO: 516525 - DNA, 25 bp, Homo sapien
cagtttcctgaacctacatttgtat

SEQ ID NO: 516526 - DNA, 25 bp, Homo sapien
agtgggagcaacatgaaagcacaaa

SEQ ID NO: 516527 - DNA, 25 bp, Homo sapien
agttgatgggacctaaaatgagaag

SEQ ID NO: 516528 - DNA, 25 bp, Homo sapien
cttcaggatcaaatttccaccaagt

SEQ ID NO: 516529 - DNA, 25 bp, Homo sapien
tcttcaggatcaaatttccaccaag

SEQ ID NO: 516530 - DNA, 25 bp, Homo sapien
ttcttcaggatcaaatttccaccaa

SEQ ID NO: 516531 - DNA, 25 bp, Homo sapien
ccttaaggaaagtcaaaacaatatg

SEQ ID NO: 516532 - DNA, 25 bp, Homo sapien
gatccaaccagccaaaattttagaa

SEQ ID NO: 516533 - DNA, 25 bp, Homo sapien
aaattaacaagatgaacatgttcct

SEQ ID NO: 516534 - DNA, 25 bp, Homo sapien
cttgctcgaccaagaaaaatgacgc

SEQ ID NO: 516535 - DNA, 25 bp, Homo sapien
tattataactggagatcttccctga

SEQ ID NO: 516536 - DNA, 25 bp, Homo sapien
cttccctgatcgatagcttgttttg

SEQ ID NO: 516537 - DNA, 25 bp, Homo sapien
cacttccacatatggcttcatttcc

SEQ ID NO: 516538 - DNA, 25 bp, Homo sapien
tagtgttatctattataactggaga

SEQ ID NO: 516539 - DNA, 25 bp, Homo sapien
aaagaactccactagattgaaaggg

SEQ ID NO: 516540 - DNA, 25 bp, Homo sapien
taggactaactttcacttatgggaa

SEQ ID NO: 516541 - DNA, 25 bp, Homo sapien
gatattaaaattggtcgcctgtagg

SEQ ID NO: 516542 - DNA, 25 bp, Homo sapien
tattttgacacggaaggatggaggt

SEQ ID NO: 516543 - DNA, 25 bp, Homo sapien
tgtagaatggaacttttctgaacta

SEQ ID NO: 516544 - DNA, 25 bp, Homo sapien
caaattgtgagttgctgtagaatgg

SEQ ID NO: 516545 - DNA, 25 bp, Homo sapien
ctatggtcctcaaattgtgagttgc

SEQ ID NO: 516546 - DNA, 25 bp, Homo sapien
tatttcttagaactatggtcctcaa

SEQ ID NO: 516547 - DNA, 25 bp, Homo sapien
ggtgctagcaccaagacactatcat

SEQ ID NO: 516548 - DNA, 25 bp, Homo sapien
tccaaggagttgtgttccagaaaag

SEQ ID NO: 516549 - DNA, 25 bp, Homo sapien
gggtcataaataggtgccatcatct

SEQ ID NO: 516550 - DNA, 25 bp, Homo sapien
tagggcaaccctagttggcagcttt

SEQ ID NO: 516551 - DNA, 25 bp, Homo sapien
gagattttttcgaacaacagaggag

SEQ ID NO: 516552 - DNA, 25 bp, Homo sapien
gaggagattcaattacacactgggt

SEQ ID NO: 516553 - DNA, 25 bp, Homo sapien
gttacatgatctgaaggaactggca

SEQ ID NO: 516554 - DNA, 25 bp, Homo sapien
cattttgaggacttcgtttggatcc

SEQ ID NO: 516555 - DNA, 25 bp, Homo sapien
gcttttcacaaaaaccctgatcagg

SEQ ID NO: 516556 - DNA, 25 bp, Homo sapien
aaacggcttgcctacagtcattcag

SEQ ID NO: 516557 - DNA, 25 bp, Homo sapien
caggtagggcaagtataattatcac

SEQ ID NO: 516558 - DNA, 25 bp, Homo sapien
gaaattgacccatgtccgctaaaaa

SEQ ID NO: 516559 - DNA, 25 bp, Homo sapien
cagtcatgggcatcaccaagttgat

SEQ ID NO: 516560 - DNA, 25 bp, Homo sapien
gttccagtcatgggcatcaccaagt

SEQ ID NO: 516561 - DNA, 25 bp, Homo sapien
ccagtcatgggcatcaccaagttga

SEQ ID NO: 516562 - DNA, 25 bp, Homo sapien
tccagtcatgggcatcaccaagttg

SEQ ID NO: 516563 - DNA, 25 bp, Homo sapien
ccatcttgatggtgaaaatagtcat

SEQ ID NO: 516564 - DNA, 25 bp, Homo sapien
gctgaacacaatgccatcacgattc

SEQ ID NO: 516565 - DNA, 25 bp, Homo sapien
acccatcttgatggtgaaaatagtc

SEQ ID NO: 516566 - DNA, 25 bp, Homo sapien
ctgtacccatcttgatggtgaaaat

SEQ ID NO: 516567 - DNA, 25 bp, Homo sapien
atcataaaggtgccatttacaaaat

SEQ ID NO: 516568 - DNA, 25 bp, Homo sapien
aaatcataaaggtgccatttacaaa

SEQ ID NO: 516569 - DNA, 25 bp, Homo sapien
aaaagaaatcataaaggtgccattt

SEQ ID NO: 516570 - DNA, 25 bp, Homo sapien
aagaaatcataaaggtgccatttac

SEQ ID NO: 516571 - DNA, 25 bp, Homo sapien
gtatatcacgaacagaccagcacaa

SEQ ID NO: 516572 - DNA, 25 bp, Homo sapien
tacttacctgaaagtatatcacgaa

SEQ ID NO: 516573 - DNA, 25 bp, Homo sapien
cacacaggaaaggttattaaatgga

SEQ ID NO: 516574 - DNA, 25 bp, Homo sapien
gcacaagagctgaataatcttacaa

SEQ ID NO: 516575 - DNA, 25 bp, Homo sapien
tccaggaccacacttgctgctcaag

SEQ ID NO: 516576 - DNA, 25 bp, Homo sapien
gaatcaacaaatatggagggccagt

SEQ ID NO: 516577 - DNA, 25 bp, Homo sapien
tatatgatcctctagtgaaagtcgg

SEQ ID NO: 516578 - DNA, 25 bp, Homo sapien
ctcaatctagtgcaacaggtaacct

SEQ ID NO: 516579 - DNA, 25 bp, Homo sapien
caaagtgtgtgcagacgtgtgttcc

SEQ ID NO: 516580 - DNA, 25 bp, Homo sapien
cacacctgggcttatgggatgttcc

SEQ ID NO: 516581 - DNA, 25 bp, Homo sapien
tctaaaggttagctgcacacctggg

SEQ ID NO: 516582 - DNA, 25 bp, Homo sapien
gggccaatccagttatccaggacag

SEQ ID NO: 516583 - DNA, 25 bp, Homo sapien
tcaagtggtcctaactagcagactc

SEQ ID NO: 516584 - DNA, 25 bp, Homo sapien
ctcaaaagggtaggccaggacagtt

SEQ ID NO: 516585 - DNA, 25 bp, Homo sapien
tgcagccggcgacaaatatcattta

SEQ ID NO: 516586 - DNA, 25 bp, Homo sapien
tatcccaaatctagaagacagccca

SEQ ID NO: 516587 - DNA, 25 bp, Homo sapien
ccaggcagacctcttaaaagaataa

SEQ ID NO: 516588 - DNA, 25 bp, Homo sapien
tatctgagagtcatcttgggcttgg

SEQ ID NO: 516589 - DNA, 25 bp, Homo sapien
gaaactgctggttcacaaacctgtc

SEQ ID NO: 516590 - DNA, 25 bp, Homo sapien
tctgcggatactaatggaggacgtg

SEQ ID NO: 516591 - DNA, 25 bp, Homo sapien
catcaatgatggtcacagggaccca

SEQ ID NO: 516592 - DNA, 25 bp, Homo sapien
gacttcaattttttacagcgtggct

SEQ ID NO: 516593 - DNA, 25 bp, Homo sapien
tttttacagcgtggctcactcgtta

SEQ ID NO: 516594 - DNA, 25 bp, Homo sapien
attttttacagcgtggctcactcgt

SEQ ID NO: 516595 - DNA, 25 bp, Homo sapien
cttcaattttttacagcgtggctca

SEQ ID NO: 516596 - DNA, 25 bp, Homo sapien
tcttctctaggtcccaagaatttac

SEQ ID NO: 516597 - DNA, 25 bp, Homo sapien
ttcttctctaggtcccaagaattta

SEQ ID NO: 516598 - DNA, 25 bp, Homo sapien
tctctgaggcgcaaaagttcacaca

SEQ ID NO: 516599 - DNA, 25 bp, Homo sapien
cgaactacagaatgatgcaagcagg

SEQ ID NO: 516600 - DNA, 25 bp, Homo sapien
aactgcggagaacgccaaaaggcct

SEQ ID NO: 516601 - DNA, 25 bp, Homo sapien
gaaatgtgtcagaaaagtcccgaag

SEQ ID NO: 516602 - DNA, 25 bp, Homo sapien
cttactctacccctacgcattgacc

SEQ ID NO: 516603 - DNA, 25 bp, Homo sapien
tctacccctacgcattgacctttac

SEQ ID NO: 516604 - DNA, 25 bp, Homo sapien
actctacccctacgcattgaccttt

SEQ ID NO: 516605 - DNA, 25 bp, Homo sapien
tactctacccctacgcattgacctt

SEQ ID NO: 516606 - DNA, 25 bp, Homo sapien
cacctctcagaatcgcggtaacaaa

SEQ ID NO: 516607 - DNA, 25 bp, Homo sapien
cggagacagcactaaagccgaggtc

SEQ ID NO: 516608 - DNA, 25 bp, Homo sapien
aaggtgaaagaaaagcggagacagc

SEQ ID NO: 516609 - DNA, 25 bp, Homo sapien
tctggagggactaaaagcccacctc

SEQ ID NO: 516610 - DNA, 25 bp, Homo sapien
ctccgtaaacctcacggcacggaga

SEQ ID NO: 516611 - DNA, 25 bp, Homo sapien
agatggcggtcacctctcggttacc

SEQ ID NO: 516612 - DNA, 25 bp, Homo sapien
caggcattgtgggaattgaagtccg

SEQ ID NO: 516613 - DNA, 25 bp, Homo sapien
aaaactaggcgtttgcgccaggcat

SEQ ID NO: 516614 - DNA, 25 bp, Homo sapien
gctttctagaagacaaccagctgac

SEQ ID NO: 516615 - DNA, 25 bp, Homo sapien
tagagctttctagaagacaaccagc

SEQ ID NO: 516616 - DNA, 25 bp, Homo sapien
gagctttctagaagacaaccagctg

SEQ ID NO: 516617 - DNA, 25 bp, Homo sapien
ttagagctttctagaagacaaccag

SEQ ID NO: 516618 - DNA, 25 bp, Homo sapien
cgtttctacgaaagaccacctgacg

SEQ ID NO: 516619 - DNA, 25 bp, Homo sapien
caacggaactccacagttggtacca

SEQ ID NO: 516620 - DNA, 25 bp, Homo sapien
caaatttgcattccggtcgtttcta

SEQ ID NO: 516621 - DNA, 25 bp, Homo sapien
gacgtaattttaggctcatgctttt

SEQ ID NO: 516622 - DNA, 25 bp, Homo sapien
tcaaaagacaagcttatgacggttt

SEQ ID NO: 516623 - DNA, 25 bp, Homo sapien
gacaccacaaattgggctggcttcc

SEQ ID NO: 516624 - DNA, 25 bp, Homo sapien
gcttcctgaacgtgcaccccatttt

SEQ ID NO: 516625 - DNA, 25 bp, Homo sapien
cagagaaccgtgctccaaagggtaa

SEQ ID NO: 516626 - DNA, 25 bp, Homo sapien
ccttcatttaatggaattggcctca

SEQ ID NO: 516627 - DNA, 25 bp, Homo sapien
ttccttcatttaatggaattggcct

SEQ ID NO: 516628 - DNA, 25 bp, Homo sapien
tccttcatttaatggaattggcctc

SEQ ID NO: 516629 - DNA, 25 bp, Homo sapien
cttccttcatttaatggaattggcc

SEQ ID NO: 516630 - DNA, 25 bp, Homo sapien
ggcattccgagacgactaggtcaga

SEQ ID NO: 516631 - DNA, 25 bp, Homo sapien
agtagtggacgccttgacagctgcc

SEQ ID NO: 516632 - DNA, 25 bp, Homo sapien
ctaggaagccgcaagagtagtggac

SEQ ID NO: 516633 - DNA, 25 bp, Homo sapien
tagggctacgtaacaatcggtgtgg

SEQ ID NO: 516634 - DNA, 25 bp, Homo sapien
cgccgaagagcgcttggcgccattt

SEQ ID NO: 516635 - DNA, 25 bp, Homo sapien
ttcgattggagcagccgccgaagag

SEQ ID NO: 516636 - DNA, 25 bp, Homo sapien
tgtccgcggcggttcgattggagca

SEQ ID NO: 516637 - DNA, 25 bp, Homo sapien
gcttggcgccattttgaagcggaga

SEQ ID NO: 516638 - DNA, 25 bp, Homo sapien
gcggcgctccatttttcagcggccg

SEQ ID NO: 516639 - DNA, 25 bp, Homo sapien
tctctggctgcggcgctccattttt

SEQ ID NO: 516640 - DNA, 25 bp, Homo sapien
gtgagcggagtagcgagtcggcaac

SEQ ID NO: 516641 - DNA, 25 bp, Homo sapien
gagccccggagtgagcggagtagcg

SEQ ID NO: 516642 - DNA, 25 bp, Homo sapien
tggtctgagagaagtgggactttaa

SEQ ID NO: 516643 - DNA, 25 bp, Homo sapien
aagagctaagatggtctgagagaag

SEQ ID NO: 516644 - DNA, 25 bp, Homo sapien
ctaagagctaagatggtctgagaga

SEQ ID NO: 516645 - DNA, 25 bp, Homo sapien
taagatggtctgagagaagtgggac

SEQ ID NO: 516646 - DNA, 25 bp, Homo sapien
ttcaactatcatttcatttttattc

SEQ ID NO: 516647 - DNA, 25 bp, Homo sapien
cttcaactatcatttcatttttatt

SEQ ID NO: 516648 - DNA, 25 bp, Homo sapien
tcaactatcatttcatttttattca

SEQ ID NO: 516649 - DNA, 25 bp, Homo sapien
caactatcatttcatttttattcat

SEQ ID NO: 516650 - DNA, 25 bp, Homo sapien
gtttgaaatgcattgtcctaggttt

SEQ ID NO: 516651 - DNA, 25 bp, Homo sapien
aagtttgaaatgcattgtcctaggt

SEQ ID NO: 516652 - DNA, 25 bp, Homo sapien
aaagtttgaaatgcattgtcctagg

SEQ ID NO: 516653 - DNA, 25 bp, Homo sapien
aaaaagtttgaaatgcattgtccta

SEQ ID NO: 516654 - DNA, 25 bp, Homo sapien
caatatgggtggtacttttatgccc

SEQ ID NO: 516655 - DNA, 25 bp, Homo sapien
aatagttgtactctcatttgtcctg

SEQ ID NO: 516656 - DNA, 25 bp, Homo sapien
gtatacagtatggtacattgggtcc

SEQ ID NO: 516657 - DNA, 25 bp, Homo sapien
tatgcaatgcctcctggattttact

SEQ ID NO: 516658 - DNA, 25 bp, Homo sapien
gcctttttgattagtgccattgtag

SEQ ID NO: 516659 - DNA, 25 bp, Homo sapien
tgtagtcgcctaattaagctaaaat

SEQ ID NO: 516660 - DNA, 25 bp, Homo sapien
tcagtttgctccgattttttagtat

SEQ ID NO: 516661 - DNA, 25 bp, Homo sapien
aaaatatctttgtgccttgagtttc

SEQ ID NO: 516662 - DNA, 25 bp, Homo sapien
caacaatagcaacgataatagcagc

SEQ ID NO: 516663 - DNA, 25 bp, Homo sapien
aaaaggaaatggtgtctatgtacag

SEQ ID NO: 516664 - DNA, 25 bp, Homo sapien
ggaaagctagatcacaaaaaaggaa

SEQ ID NO: 516665 - DNA, 25 bp, Homo sapien
gacaaatagcctataaccaatacat

SEQ ID NO: 516666 - DNA, 25 bp, Homo sapien
gaaaccgaggccaggctcactagct

SEQ ID NO: 516667 - DNA, 25 bp, Homo sapien
tgactgaaaagcataatagaagact

SEQ ID NO: 516668 - DNA, 25 bp, Homo sapien
ctgggcaagtgacgcatgtctgtag

SEQ ID NO: 516669 - DNA, 25 bp, Homo sapien
aatttaaccgtaatgtgtatcacct

SEQ ID NO: 516670 - DNA, 25 bp, Homo sapien
tactttgtctcagtacgttgtccac

SEQ ID NO: 516671 - DNA, 25 bp, Homo sapien
gaaatcattcttagcccttttggac

SEQ ID NO: 516672 - DNA, 25 bp, Homo sapien
taggttcgttatactgttctctcaa

SEQ ID NO: 516673 - DNA, 25 bp, Homo sapien
cactttctagtggacttaatcgtct

SEQ ID NO: 516674 - DNA, 25 bp, Homo sapien
tcagcccaactgtcattcaagagta

SEQ ID NO: 516675 - DNA, 25 bp, Homo sapien
tgcactgcccatgattctgactggt

SEQ ID NO: 516676 - DNA, 25 bp, Homo sapien
gaagaatttgccagtcctacttgaa

SEQ ID NO: 516677 - DNA, 25 bp, Homo sapien
tctgactggttgatgcctgatgcct

SEQ ID NO: 516678 - DNA, 25 bp, Homo sapien
gaaataatctgtattacagcgtgaa

SEQ ID NO: 516679 - DNA, 25 bp, Homo sapien
catatgctaaatccttaattcagtc

SEQ ID NO: 516680 - DNA, 25 bp, Homo sapien
tacagtttgtttattccagcgtcag

SEQ ID NO: 516681 - DNA, 25 bp, Homo sapien
ccagcgtcagtactacatggtttta

SEQ ID NO: 516682 - DNA, 25 bp, Homo sapien
caactgcacgtattttacaacctgg

SEQ ID NO: 516683 - DNA, 25 bp, Homo sapien
tacaacctggtgtttgagcccctct

SEQ ID NO: 516684 - DNA, 25 bp, Homo sapien
cattagctctcaccaagactgttgg

SEQ ID NO: 516685 - DNA, 25 bp, Homo sapien
cctcatttcatgtagctgaacagct

SEQ ID NO: 516686 - DNA, 25 bp, Homo sapien
gatgtctaactaaccatgagcaatc

SEQ ID NO: 516687 - DNA, 25 bp, Homo sapien
gagtttgatgtctaactaaccatga

SEQ ID NO: 516688 - DNA, 25 bp, Homo sapien
gtttgatgtctaactaaccatgagc

SEQ ID NO: 516689 - DNA, 25 bp, Homo sapien
tttgatgtctaactaaccatgagca

SEQ ID NO: 516690 - DNA, 25 bp, Homo sapien
tacctagtgtttactcctgggcacc

SEQ ID NO: 516691 - DNA, 25 bp, Homo sapien
tctgataggaggacaaccatgcaaa

SEQ ID NO: 516692 - DNA, 25 bp, Homo sapien
tctaaatatgtgatgccagggcaga

SEQ ID NO: 516693 - DNA, 25 bp, Homo sapien
tgctaaaagggaacggcgatgaaca

SEQ ID NO: 516694 - DNA, 25 bp, Homo sapien
tgaaccaaaacatataggttactac

SEQ ID NO: 516695 - DNA, 25 bp, Homo sapien
tgttttttcatggttaacaccagag

SEQ ID NO: 516696 - DNA, 25 bp, Homo sapien
tagtggaacattttcatatgataca

SEQ ID NO: 516697 - DNA, 25 bp, Homo sapien
aatttatcacattgaatagtggaac

SEQ ID NO: 516698 - DNA, 25 bp, Homo sapien
ggacagtcacgcatatctggcagat

SEQ ID NO: 516699 - DNA, 25 bp, Homo sapien
ccttggtgaatatggagaggaacaa

SEQ ID NO: 516700 - DNA, 25 bp, Homo sapien
ggatcagctggcttcaagctttcag

SEQ ID NO: 516701 - DNA, 25 bp, Homo sapien
gaactccctcttgtgagatcaccat

SEQ ID NO: 516702 - DNA, 25 bp, Homo sapien
tcactccctctgtcctgtgtgctgt

SEQ ID NO: 516703 - DNA, 25 bp, Homo sapien
tgcgtcacggacactttaatacact

SEQ ID NO: 516704 - DNA, 25 bp, Homo sapien
cctgtgtgctgtccgtagcctttgg

SEQ ID NO: 516705 - DNA, 25 bp, Homo sapien
ctcgaagatcgtaggaaggaaaagt

SEQ ID NO: 516706 - DNA, 25 bp, Homo sapien
ccccgcttgacttgtagagagtgga

SEQ ID NO: 516707 - DNA, 25 bp, Homo sapien
gcttgacttgtagagagtggaacat

SEQ ID NO: 516708 - DNA, 25 bp, Homo sapien
cggtgcctctaactcctgaacacca

SEQ ID NO: 516709 - DNA, 25 bp, Homo sapien
tccttcccccgcttgacttgtagag

SEQ ID NO: 516710 - DNA, 25 bp, Homo sapien
ctgagatcaagggtcaatagggcca

SEQ ID NO: 516711 - DNA, 25 bp, Homo sapien
cagcacacatttattgccgtacagt

SEQ ID NO: 516712 - DNA, 25 bp, Homo sapien
aatagggccatacttgctctacagg

SEQ ID NO: 516713 - DNA, 25 bp, Homo sapien
tgctccctcttttaaggtcctcaag

SEQ ID NO: 516714 - DNA, 25 bp, Homo sapien
cggatcatggggtcaggaattcgag

SEQ ID NO: 516715 - DNA, 25 bp, Homo sapien
agctgggcatcgtggcgagcgcctg

SEQ ID NO: 516716 - DNA, 25 bp, Homo sapien
aattagctgggcatcgtggcgagcg

SEQ ID NO: 516717 - DNA, 25 bp, Homo sapien
tgggcatcgtggcgagcgcctgtaa

SEQ ID NO: 516718 - DNA, 25 bp, Homo sapien
tgtctttgaacaagctgaacggtct

SEQ ID NO: 516719 - DNA, 25 bp, Homo sapien
caaaatgccgtaaagttgcaacttc

SEQ ID NO: 516720 - DNA, 25 bp, Homo sapien
tcatccttcgggcagggcgcttttg

SEQ ID NO: 516721 - DNA, 25 bp, Homo sapien
gaacggtctacactggatcctgaga

SEQ ID NO: 516722 - DNA, 25 bp, Homo sapien
ggaaatgcatgattgagaaacagcc

SEQ ID NO: 516723 - DNA, 25 bp, Homo sapien
tcatatgccgtgcacagtgagacag

SEQ ID NO: 516724 - DNA, 25 bp, Homo sapien
agaaacagcccgttgtcctcttcag

SEQ ID NO: 516725 - DNA, 25 bp, Homo sapien
cagaggcgcttgtgaaacgtttgct

SEQ ID NO: 516726 - DNA, 25 bp, Homo sapien
gatgctgaaattttagggtcccatt

SEQ ID NO: 516727 - DNA, 25 bp, Homo sapien
ggtgctaacagactgtgagtgggat

SEQ ID NO: 516728 - DNA, 25 bp, Homo sapien
tttcccacagacgtttgccttgctc

SEQ ID NO: 516729 - DNA, 25 bp, Homo sapien
ccatttcccacagacgtttgccttg

SEQ ID NO: 516730 - DNA, 25 bp, Homo sapien
gagtggggagctctctgcatcgctg

SEQ ID NO: 516731 - DNA, 25 bp, Homo sapien
tctctgcatcgctggtgtagggaaa

SEQ ID NO: 516732 - DNA, 25 bp, Homo sapien
agcaggttttagaacagcaggagtg

SEQ ID NO: 516733 - DNA, 25 bp, Homo sapien
gagcaggttttagaacagcaggagt

SEQ ID NO: 516734 - DNA, 25 bp, Homo sapien
tatgcctgctgggtgacctgcagat

SEQ ID NO: 516735 - DNA, 25 bp, Homo sapien
tgcctgctgggtgacctgcagattc

SEQ ID NO: 516736 - DNA, 25 bp, Homo sapien
cagattcctgagaagctgagttcca

SEQ ID NO: 516737 - DNA, 25 bp, Homo sapien
cctgctgggtgacctgcagattcct

SEQ ID NO: 516738 - DNA, 25 bp, Homo sapien
aggtggcctttgcagccacatgcct

SEQ ID NO: 516739 - DNA, 25 bp, Homo sapien
tgctgggtctgaatgctgtgaataa

SEQ ID NO: 516740 - DNA, 25 bp, Homo sapien
tgctgtgaataaggtggcctttgca

SEQ ID NO: 516741 - DNA, 25 bp, Homo sapien
ggcctttgcagccacatgccttgca

SEQ ID NO: 516742 - DNA, 25 bp, Homo sapien
tcacctctccatcttgattctcttc

SEQ ID NO: 516743 - DNA, 25 bp, Homo sapien
caaagctcctgtccctcctttcata

SEQ ID NO: 516744 - DNA, 25 bp, Homo sapien
tttcatactcacctctccatcttga

SEQ ID NO: 516745 - DNA, 25 bp, Homo sapien
cacaacatctctgttcttccaaagc

SEQ ID NO: 516746 - DNA, 25 bp, Homo sapien
cagtttgtaaaagcctcaaggccag

SEQ ID NO: 516747 - DNA, 25 bp, Homo sapien
caagagctggagagatacgcaggca

SEQ ID NO: 516748 - DNA, 25 bp, Homo sapien
tgacatcgtgaacacctaggcagcc

SEQ ID NO: 516749 - DNA, 25 bp, Homo sapien
atcaaattcggctgggctgagacgc

SEQ ID NO: 516750 - DNA, 25 bp, Homo sapien
tgaccttcagggatagccttaaaag

SEQ ID NO: 516751 - DNA, 25 bp, Homo sapien
gtagcacgcggcatccaagaacatc

SEQ ID NO: 516752 - DNA, 25 bp, Homo sapien
gctgcggttttacctggtcttatga

SEQ ID NO: 516753 - DNA, 25 bp, Homo sapien
gaacggtttcatttggagagctttc

SEQ ID NO: 516754 - DNA, 25 bp, Homo sapien
ctcatctgtatttctacatcttggg

SEQ ID NO: 516755 - DNA, 25 bp, Homo sapien
tgtgctggtcctaggagtgtctgcc

SEQ ID NO: 516756 - DNA, 25 bp, Homo sapien
cacgaaggcctttgccaggtggaaa

SEQ ID NO: 516757 - DNA, 25 bp, Homo sapien
tgggtcctgctcattctccttgtgc

SEQ ID NO: 516758 - DNA, 25 bp, Homo sapien
aaggaacctttcagtatcactttct

SEQ ID NO: 516759 - DNA, 25 bp, Homo sapien
caaacaagatgccaaaggaaccttt

SEQ ID NO: 516760 - DNA, 25 bp, Homo sapien
gccaaaggaacctttcagtatcact

SEQ ID NO: 516761 - DNA, 25 bp, Homo sapien
aagatgccaaaggaacctttcagta

SEQ ID NO: 516762 - DNA, 25 bp, Homo sapien
aggcaggggtgacttcagatctgct

SEQ ID NO: 516763 - DNA, 25 bp, Homo sapien
gggtgacttcagatctgctgtatgc

SEQ ID NO: 516764 - DNA, 25 bp, Homo sapien
caggggtgacttcagatctgctgta

SEQ ID NO: 516765 - DNA, 25 bp, Homo sapien
tgacttcagatctgctgtatgccat

SEQ ID NO: 516766 - DNA, 25 bp, Homo sapien
cagttctttgggctgtaagggcttt

SEQ ID NO: 516767 - DNA, 25 bp, Homo sapien
ggacaattataacttccactcttct

SEQ ID NO: 516768 - DNA, 25 bp, Homo sapien
ttctttgggctgtaagggctttctg

SEQ ID NO: 516769 - DNA, 25 bp, Homo sapien
agaatattggacaattataacttcc

SEQ ID NO: 516770 - DNA, 25 bp, Homo sapien
gtgtagaccactcaggcccgttaga

SEQ ID NO: 516771 - DNA, 25 bp, Homo sapien
gggaagtggtcagtgtagaccactc

SEQ ID NO: 516772 - DNA, 25 bp, Homo sapien
tggtcagtgtagaccactcaggccc

SEQ ID NO: 516773 - DNA, 25 bp, Homo sapien
cagtgtagaccactcaggcccgtta

SEQ ID NO: 516774 - DNA, 25 bp, Homo sapien
gagcttcaaagttaccactgcaggt

SEQ ID NO: 516775 - DNA, 25 bp, Homo sapien
atatattagagcttgcctgttggcc

SEQ ID NO: 516776 - DNA, 25 bp, Homo sapien
tgccactgccaggatagagcttcaa

SEQ ID NO: 516777 - DNA, 25 bp, Homo sapien
tatacagggaatcatgtgcttgcaa

SEQ ID NO: 516778 - DNA, 25 bp, Homo sapien
gctctcaccttttgagatgacgtca

SEQ ID NO: 516779 - DNA, 25 bp, Homo sapien
ccttttgagatgacgtcaatcccat

SEQ ID NO: 516780 - DNA, 25 bp, Homo sapien
cctgctctcaccttttgagatgacg

SEQ ID NO: 516781 - DNA, 25 bp, Homo sapien
ctcaccttttgagatgacgtcaatc

SEQ ID NO: 516782 - DNA, 25 bp, Homo sapien
catcataccatggaattattacatt

SEQ ID NO: 516783 - DNA, 25 bp, Homo sapien
cagcagcaacccatcataccatgga

SEQ ID NO: 516784 - DNA, 25 bp, Homo sapien
gaattattacatttgggacctgggc

SEQ ID NO: 516785 - DNA, 25 bp, Homo sapien
aattattacatttgggacctgggca

SEQ ID NO: 516786 - DNA, 25 bp, Homo sapien
tcagccatcgtgatgatgtccctgg

SEQ ID NO: 516787 - DNA, 25 bp, Homo sapien
ccaaagggattgtctctcaaggctc

SEQ ID NO: 516788 - DNA, 25 bp, Homo sapien
catccacagcgctggaattggccaa

SEQ ID NO: 516789 - DNA, 25 bp, Homo sapien
cagtccaggaagctgtcgagtgtcc

SEQ ID NO: 516790 - DNA, 25 bp, Homo sapien
cctctgaattgaggcctgattcaca

SEQ ID NO: 516791 - DNA, 25 bp, Homo sapien
tctcttgccccctctgaattgaggc

SEQ ID NO: 516792 - DNA, 25 bp, Homo sapien
tgccccctctgaattgaggcctgat

SEQ ID NO: 516793 - DNA, 25 bp, Homo sapien
cccctctgaattgaggcctgattca

SEQ ID NO: 516794 - DNA, 25 bp, Homo sapien
cttttgcaaactgagagggtgaggc

SEQ ID NO: 516795 - DNA, 25 bp, Homo sapien
cgcccattccctgcgagctctgctt

SEQ ID NO: 516796 - DNA, 25 bp, Homo sapien
tgaggcaagcggctttgcagtagtc

SEQ ID NO: 516797 - DNA, 25 bp, Homo sapien
gcggctttgcagtagtcttcccaaa

SEQ ID NO: 516798 - DNA, 25 bp, Homo sapien
tctagggtacttccatgagagtgct

SEQ ID NO: 516799 - DNA, 25 bp, Homo sapien
tggtatcctgggcaggtttaaacca

SEQ ID NO: 516800 - DNA, 25 bp, Homo sapien
gagaaacatgctggctaatgccttg

SEQ ID NO: 516801 - DNA, 25 bp, Homo sapien
tacaaaaaacgatttgcatgcgagg

SEQ ID NO: 516802 - DNA, 25 bp, Homo sapien
cctggatggagctttcatagaggag

SEQ ID NO: 516803 - DNA, 25 bp, Homo sapien
atggagctttcatagaggaggagca

SEQ ID NO: 516804 - DNA, 25 bp, Homo sapien
ctttcatagaggaggagcagatgga

SEQ ID NO: 516805 - DNA, 25 bp, Homo sapien
ggccctggatggagctttcatagag

SEQ ID NO: 516806 - DNA, 25 bp, Homo sapien
aaccacttccttataagctgtcgta

SEQ ID NO: 516807 - DNA, 25 bp, Homo sapien
gctgtcgtaacttcaggcttctatg

SEQ ID NO: 516808 - DNA, 25 bp, Homo sapien
cgtcataatcgataaccacttcctt

SEQ ID NO: 516809 - DNA, 25 bp, Homo sapien
tttctccatccgtcataatcgataa

SEQ ID NO: 516810 - DNA, 25 bp, Homo sapien
caactcaagcaacggtgcatctcca

SEQ ID NO: 516811 - DNA, 25 bp, Homo sapien
caagcaacggtgcatctccacctgg

SEQ ID NO: 516812 - DNA, 25 bp, Homo sapien
tctccacctggtattgtggtgtggc

SEQ ID NO: 516813 - DNA, 25 bp, Homo sapien
gcatctccacctggtattgtggtgt

SEQ ID NO: 516814 - DNA, 25 bp, Homo sapien
gaatctcagtatagcagtgcaaggt

SEQ ID NO: 516815 - DNA, 25 bp, Homo sapien
agtcttgcgggtagttaacttctgc

SEQ ID NO: 516816 - DNA, 25 bp, Homo sapien
tcagttctctggagggagtcttgcg

SEQ ID NO: 516817 - DNA, 25 bp, Homo sapien
ttttgtctccgtactctgggtgaag

SEQ ID NO: 516818 - DNA, 25 bp, Homo sapien
tctggtctgtggatcaggtgccgca

SEQ ID NO: 516819 - DNA, 25 bp, Homo sapien
tggtgtttcagtcccaaggccacaa

SEQ ID NO: 516820 - DNA, 25 bp, Homo sapien
tcatttggagggcattacagggcaa

SEQ ID NO: 516821 - DNA, 25 bp, Homo sapien
tacagggcaaaccatgcgcagttga

SEQ ID NO: 516822 - DNA, 25 bp, Homo sapien
cagcactggcttcttaccttggccg

SEQ ID NO: 516823 - DNA, 25 bp, Homo sapien
tggctggcggctggtagcagcactg

SEQ ID NO: 516824 - DNA, 25 bp, Homo sapien
tggccgtggccctaagttcccacat

SEQ ID NO: 516825 - DNA, 25 bp, Homo sapien
gtcagatgtcccatggccgagggct

SEQ ID NO: 516826 - DNA, 25 bp, Homo sapien
aagagccattgcggatgtttctccc

SEQ ID NO: 516827 - DNA, 25 bp, Homo sapien
cattgcggatgtttctccctttatg

SEQ ID NO: 516828 - DNA, 25 bp, Homo sapien
agccattgcggatgtttctcccttt

SEQ ID NO: 516829 - DNA, 25 bp, Homo sapien
tcaagagccattgcggatgtttctc

SEQ ID NO: 516830 - DNA, 25 bp, Homo sapien
tggctttaggactaaaagtgaagac

SEQ ID NO: 516831 - DNA, 25 bp, Homo sapien
gaccctggtgtgctggcttgtctca

SEQ ID NO: 516832 - DNA, 25 bp, Homo sapien
gactaaaagtgaagaccctggtgtg

SEQ ID NO: 516833 - DNA, 25 bp, Homo sapien
ttagaggatgattggctttaggact

SEQ ID NO: 516834 - DNA, 25 bp, Homo sapien
gtgccttgtaaccacggcctgcatg

SEQ ID NO: 516835 - DNA, 25 bp, Homo sapien
tatcagatacagacggtaggctgtg

SEQ ID NO: 516836 - DNA, 25 bp, Homo sapien
tgcatgccacccaatattatcagat

SEQ ID NO: 516837 - DNA, 25 bp, Homo sapien
cccaatattatcagatacagacggt

SEQ ID NO: 516838 - DNA, 25 bp, Homo sapien
tttgacttaggagtgtcctgagggc

SEQ ID NO: 516839 - DNA, 25 bp, Homo sapien
tttgacctccataaacacaggaagc

SEQ ID NO: 516840 - DNA, 25 bp, Homo sapien
taagagggcccttatctctttgcat

SEQ ID NO: 516841 - DNA, 25 bp, Homo sapien
tgcatttgatagcagggaaggaacc

SEQ ID NO: 516842 - DNA, 25 bp, Homo sapien
tcatttcccactattaactcaaaca

SEQ ID NO: 516843 - DNA, 25 bp, Homo sapien
agccacccctgcatggactctgatc

SEQ ID NO: 516844 - DNA, 25 bp, Homo sapien
catggactctgatccagcccgacag

SEQ ID NO: 516845 - DNA, 25 bp, Homo sapien
ctgcatggactctgatccagcccga

SEQ ID NO: 516846 - DNA, 25 bp, Homo sapien
tggactctgatccagcccgacagca

SEQ ID NO: 516847 - DNA, 25 bp, Homo sapien
acagagagtccacgtgacacccatg

SEQ ID NO: 516848 - DNA, 25 bp, Homo sapien
catgctagcatgatccagaaaggca

SEQ ID NO: 516849 - DNA, 25 bp, Homo sapien
caaggtttccctattgttgctgaga

SEQ ID NO: 516850 - DNA, 25 bp, Homo sapien
gatgagttgttgcttcacaggtgga

SEQ ID NO: 516851 - DNA, 25 bp, Homo sapien
ctgccttggaaagttccctcaaggc

SEQ ID NO: 516852 - DNA, 25 bp, Homo sapien
tgagtgatcactcccctaatagctt

SEQ ID NO: 516853 - DNA, 25 bp, Homo sapien
gatcactcccctaatagctttgcca

SEQ ID NO: 516854 - DNA, 25 bp, Homo sapien
tcctggggtttcatgtgtgtattcc

SEQ ID NO: 516855 - DNA, 25 bp, Homo sapien
tacctggccaagtggatgcttctgt

SEQ ID NO: 516856 - DNA, 25 bp, Homo sapien
tagacatgggatagtccacaggaca

SEQ ID NO: 516857 - DNA, 25 bp, Homo sapien
caaaatagtcgttctcctctggttc

SEQ ID NO: 516858 - DNA, 25 bp, Homo sapien
gttctgaggtctgattacctggcca

SEQ ID NO: 516859 - DNA, 25 bp, Homo sapien
ctgtattcagcactgaggcttctga

SEQ ID NO: 516860 - DNA, 25 bp, Homo sapien
tgagtggatcggcctcttgctggct

SEQ ID NO: 516861 - DNA, 25 bp, Homo sapien
accacacagatcacaaccagggact

SEQ ID NO: 516862 - DNA, 25 bp, Homo sapien
ttctgagaggctctctgtatccctg

SEQ ID NO: 516863 - DNA, 25 bp, Homo sapien
taggctagatcttgctttgcctgcc

SEQ ID NO: 516864 - DNA, 25 bp, Homo sapien
ctccaattttgagccacatcttgct

SEQ ID NO: 516865 - DNA, 25 bp, Homo sapien
tctggtttggggctagatcttgctt

SEQ ID NO: 516866 - DNA, 25 bp, Homo sapien
tctagttttaggctagatcttgctt

SEQ ID NO: 516867 - DNA, 25 bp, Homo sapien
cagggtggagtgcttagtgtctata

SEQ ID NO: 516868 - DNA, 25 bp, Homo sapien
acaggctgtgccttgagtgggtaat

SEQ ID NO: 516869 - DNA, 25 bp, Homo sapien
ggaaacagtttcatagtcaatgtca

SEQ ID NO: 516870 - DNA, 25 bp, Homo sapien
catagtcaatgtcacaggctgtgcc

SEQ ID NO: 516871 - DNA, 25 bp, Homo sapien
tagcgttggctttcatgccactgac

SEQ ID NO: 516872 - DNA, 25 bp, Homo sapien
tctggtaattgaggatcattttgca

SEQ ID NO: 516873 - DNA, 25 bp, Homo sapien
tctttgtaccttctgacccatccat

SEQ ID NO: 516874 - DNA, 25 bp, Homo sapien
cctccttcacatagagttgcattag

SEQ ID NO: 516875 - DNA, 25 bp, Homo sapien
tacataaggactcatagtggctgct

SEQ ID NO: 516876 - DNA, 25 bp, Homo sapien
tggagagtacagttgcgagttaagc

SEQ ID NO: 516877 - DNA, 25 bp, Homo sapien
gttgctacctcacaatcagatagtg

SEQ ID NO: 516878 - DNA, 25 bp, Homo sapien
gccagggctggaataaccactgcat

SEQ ID NO: 516879 - DNA, 25 bp, Homo sapien
ggcagcaatttatccaccgacaggg

SEQ ID NO: 516880 - DNA, 25 bp, Homo sapien
tggcgccggagacgtatctgccgct

SEQ ID NO: 516881 - DNA, 25 bp, Homo sapien
gctgctgcggttgccccatttgcaa

SEQ ID NO: 516882 - DNA, 25 bp, Homo sapien
gaaagaggttccaatccacaaggct

SEQ ID NO: 516883 - DNA, 25 bp, Homo sapien
tgtgcttacttggtggagagaccca

SEQ ID NO: 516884 - DNA, 25 bp, Homo sapien
gaggtccaataggttcacctgggta

SEQ ID NO: 516885 - DNA, 25 bp, Homo sapien
ccatgtactgtacaattggccagga

SEQ ID NO: 516886 - DNA, 25 bp, Homo sapien
catccctgagctatgcaagcacttg

SEQ ID NO: 516887 - DNA, 25 bp, Homo sapien
ttgtgtccccctttgagagccagaa

SEQ ID NO: 516888 - DNA, 25 bp, Homo sapien
ttgagagccagaaactgttaaccta

SEQ ID NO: 516889 - DNA, 25 bp, Homo sapien
agtagttgtgtccccctttgagagc

SEQ ID NO: 516890 - DNA, 25 bp, Homo sapien
tgagagccagaaactgttaacctat

SEQ ID NO: 516891 - DNA, 25 bp, Homo sapien
tagaggtacagggaccagaggcaaa

SEQ ID NO: 516892 - DNA, 25 bp, Homo sapien
aggtacagggaccagaggcaaaact

SEQ ID NO: 516893 - DNA, 25 bp, Homo sapien
gaggtacagggaccagaggcaaaac

SEQ ID NO: 516894 - DNA, 25 bp, Homo sapien
cttagaggtacagggaccagaggca

SEQ ID NO: 516895 - DNA, 25 bp, Homo sapien
gcaggcccagcacaacatgtgctca

SEQ ID NO: 516896 - DNA, 25 bp, Homo sapien
caggcccagcacaacatgtgctcat

SEQ ID NO: 516897 - DNA, 25 bp, Homo sapien
gctttgcaatgcaatgaccaccacc

SEQ ID NO: 516898 - DNA, 25 bp, Homo sapien
ctttgcaatgcaatgaccaccacct

SEQ ID NO: 516899 - DNA, 25 bp, Homo sapien
tttgcaatgcaatgaccaccacctt

SEQ ID NO: 516900 - DNA, 25 bp, Homo sapien
gtttgtggaagtcactatttatcaa

SEQ ID NO: 516901 - DNA, 25 bp, Homo sapien
tttgtggaagtcactatttatcaat

SEQ ID NO: 516902 - DNA, 25 bp, Homo sapien
aatgtcatcaggaaagtcgtatgat

SEQ ID NO: 516903 - DNA, 25 bp, Homo sapien
caggaaagtcgtatgatactttgaa

SEQ ID NO: 516904 - DNA, 25 bp, Homo sapien
agtcgtatgatactttgaaggtgtt

SEQ ID NO: 516905 - DNA, 25 bp, Homo sapien
tcatcaggaaagtcgtatgatactt

SEQ ID NO: 516906 - DNA, 25 bp, Homo sapien
tgtggggatagaggtcacaataatg

SEQ ID NO: 516907 - DNA, 25 bp, Homo sapien
ggggatagaggtcacaataatgaac

SEQ ID NO: 516908 - DNA, 25 bp, Homo sapien
ctgtggggatagaggtcacaataat

SEQ ID NO: 516909 - DNA, 25 bp, Homo sapien
tggggatagaggtcacaataatgaa

SEQ ID NO: 516910 - DNA, 25 bp, Homo sapien
ggcttctcacaagtgaagcttctgg

SEQ ID NO: 516911 - DNA, 25 bp, Homo sapien
ggaacaaggccatcccgttcttcta

SEQ ID NO: 516912 - DNA, 25 bp, Homo sapien
aaacttatgtactttcgagactggc

SEQ ID NO: 516913 - DNA, 25 bp, Homo sapien
tctgcatctagacactttccctggg

SEQ ID NO: 516914 - DNA, 25 bp, Homo sapien
ccaggtctttgtgcgagttttactc

SEQ ID NO: 516915 - DNA, 25 bp, Homo sapien
taggcactgggactactgcattttg

SEQ ID NO: 516916 - DNA, 25 bp, Homo sapien
tcaccacgaatacactatgaacatg

SEQ ID NO: 516917 - DNA, 25 bp, Homo sapien
ggtccattacttccttgcgcacaaa

SEQ ID NO: 516918 - DNA, 25 bp, Homo sapien
ttcagttggatgttgtctttgaggg

SEQ ID NO: 516919 - DNA, 25 bp, Homo sapien
ttgatcctttcttcagttggatgtt

SEQ ID NO: 516920 - DNA, 25 bp, Homo sapien
cttgatcctttcttcagttggatgt

SEQ ID NO: 516921 - DNA, 25 bp, Homo sapien
gcccgtagttgtagctcagtgaaat

SEQ ID NO: 516922 - DNA, 25 bp, Homo sapien
tatgtccgtagaaggtgatgtctgt

SEQ ID NO: 516923 - DNA, 25 bp, Homo sapien
acagctcgtcgttgccttgcccgta

SEQ ID NO: 516924 - DNA, 25 bp, Homo sapien
tatttgggtgcatgtgaatcagtgc

SEQ ID NO: 516925 - DNA, 25 bp, Homo sapien
tccttttcttcaatgcatcaataac

SEQ ID NO: 516926 - DNA, 25 bp, Homo sapien
ggaggaaaagttgatcagattgttg

SEQ ID NO: 516927 - DNA, 25 bp, Homo sapien
tcaatgcatcaataacttcaccttc

SEQ ID NO: 516928 - DNA, 25 bp, Homo sapien
aatggaggaaaagttgatcagattg

SEQ ID NO: 516929 - DNA, 25 bp, Homo sapien
ctctaggatttcggccagtccctaa

SEQ ID NO: 516930 - DNA, 25 bp, Homo sapien
tgtcccacctggcagtccctctagg

SEQ ID NO: 516931 - DNA, 25 bp, Homo sapien
tccctttcagcgcacggcgaagttc

SEQ ID NO: 516932 - DNA, 25 bp, Homo sapien
agggggaatccctttcagcgcacgg

SEQ ID NO: 516933 - DNA, 25 bp, Homo sapien
tgtgccggaccctgtagagagtcca

SEQ ID NO: 516934 - DNA, 25 bp, Homo sapien
tagggctcttttcgtgagggtccag

SEQ ID NO: 516935 - DNA, 25 bp, Homo sapien
ccattgtcctgctgatgggtgcaga

SEQ ID NO: 516936 - DNA, 25 bp, Homo sapien
ggtgtcccaagttcttccatagaga

SEQ ID NO: 516937 - DNA, 25 bp, Homo sapien
ggcatgtaaaagagctaactcctca

SEQ ID NO: 516938 - DNA, 25 bp, Homo sapien
tgcacgcttaataatgaggtcatta

SEQ ID NO: 516939 - DNA, 25 bp, Homo sapien
cagacatttcggaaaataagggaag

SEQ ID NO: 516940 - DNA, 25 bp, Homo sapien
gaaatgttatagtgccctatttggc

SEQ ID NO: 516941 - DNA, 25 bp, Homo sapien
gaaatgggcataggtgatcgtaaaa

SEQ ID NO: 516942 - DNA, 25 bp, Homo sapien
tgaataatgcgaatagtgcctgaat

SEQ ID NO: 516943 - DNA, 25 bp, Homo sapien
tcagctgccataataatgcctagtg

SEQ ID NO: 516944 - DNA, 25 bp, Homo sapien
tgaaaaataggaaccacaccaatgc

SEQ ID NO: 516945 - DNA, 25 bp, Homo sapien
tctagaaagggctaattaggtctca

SEQ ID NO: 516946 - DNA, 25 bp, Homo sapien
gaactttcacgctgaaacatgctag

SEQ ID NO: 516947 - DNA, 25 bp, Homo sapien
gacagggaagtctctctattacact

SEQ ID NO: 516948 - DNA, 25 bp, Homo sapien
aatgtcataacaggcattgccaacc

SEQ ID NO: 516949 - DNA, 25 bp, Homo sapien
ttgggtaacgcaatccttggtgaac

SEQ ID NO: 516950 - DNA, 25 bp, Homo sapien
tcaataccttgggtatctaccccag

SEQ ID NO: 516951 - DNA, 25 bp, Homo sapien
tgaaatgggagtgtctatcttagca

SEQ ID NO: 516952 - DNA, 25 bp, Homo sapien
ggctcaaaatgaccttacagttggg

SEQ ID NO: 516953 - DNA, 25 bp, Homo sapien
gtctttctccagaattggagctggt

SEQ ID NO: 516954 - DNA, 25 bp, Homo sapien
cctcttgtctttctccagaattgga

SEQ ID NO: 516955 - DNA, 25 bp, Homo sapien
aaagtaccggtatgttttatgagtg

SEQ ID NO: 516956 - DNA, 25 bp, Homo sapien
agtaccggtatgttttatgagtgtt

SEQ ID NO: 516957 - DNA, 25 bp, Homo sapien
cattgaagctgtgttcatttagcac

SEQ ID NO: 516958 - DNA, 25 bp, Homo sapien
gcattacggtattcactcaaagtgt

SEQ ID NO: 516959 - DNA, 25 bp, Homo sapien
aaaggcattagggattcttccacaa

SEQ ID NO: 516960 - DNA, 25 bp, Homo sapien
tgtgtctgtttagagatgtgctccc

SEQ ID NO: 516961 - DNA, 25 bp, Homo sapien
gaagggtcatgtcagcaaggctgcc

SEQ ID NO: 516962 - DNA, 25 bp, Homo sapien
ggacagttctcagaggacgcatgtg

SEQ ID NO: 516963 - DNA, 25 bp, Homo sapien
tgctttctgactgcccgggaagatg

SEQ ID NO: 516964 - DNA, 25 bp, Homo sapien
gacgcatgtgtctaagttgctgaac

SEQ ID NO: 516965 - DNA, 25 bp, Homo sapien
agatgtagccgtcctttatcagcaa

SEQ ID NO: 516966 - DNA, 25 bp, Homo sapien
tccacctggatggttcacagtcacc

SEQ ID NO: 516967 - DNA, 25 bp, Homo sapien
cacaagcattgtgtgatcagagctc

SEQ ID NO: 516968 - DNA, 25 bp, Homo sapien
cagacctatatatatgcccagatgc

SEQ ID NO: 516969 - DNA, 25 bp, Homo sapien
tttccaagctagaagatccagagtc

SEQ ID NO: 516970 - DNA, 25 bp, Homo sapien
ccaaatatcaaaagacacaggtgga

SEQ ID NO: 516971 - DNA, 25 bp, Homo sapien
tgcgttcgtatcagaatgtgacact

SEQ ID NO: 516972 - DNA, 25 bp, Homo sapien
gcaacattccagtgtcacaaggtca

SEQ ID NO: 516973 - DNA, 25 bp, Homo sapien
caaggtcaggtgtttattcactgct

SEQ ID NO: 516974 - DNA, 25 bp, Homo sapien
tagcctgcggctgctagaatgacca

SEQ ID NO: 516975 - DNA, 25 bp, Homo sapien
tatgatccatactctcaggacatct

SEQ ID NO: 516976 - DNA, 25 bp, Homo sapien
tgcggctgctagaatgaccatcaca

SEQ ID NO: 516977 - DNA, 25 bp, Homo sapien
aggacatctgtagcctgcggctgct

SEQ ID NO: 516978 - DNA, 25 bp, Homo sapien
agcagagttgggacaacttttgtag

SEQ ID NO: 516979 - DNA, 25 bp, Homo sapien
cagagttgggacaacttttgtaggg

SEQ ID NO: 516980 - DNA, 25 bp, Homo sapien
gcagagttgggacaacttttgtagg

SEQ ID NO: 516981 - DNA, 25 bp, Homo sapien
gagcagagttgggacaacttttgta

SEQ ID NO: 516982 - DNA, 25 bp, Homo sapien
tgatgattgatatcaacaattgagg

SEQ ID NO: 516983 - DNA, 25 bp, Homo sapien
gatatcaacaattgaggtaaaaata

SEQ ID NO: 516984 - DNA, 25 bp, Homo sapien
tgattgatatcaacaattgaggtaa

SEQ ID NO: 516985 - DNA, 25 bp, Homo sapien
tttacaattgatgattgatatcaac

SEQ ID NO: 516986 - DNA, 25 bp, Homo sapien
aaatgcataggtagcttggactggc

SEQ ID NO: 516987 - DNA, 25 bp, Homo sapien
aaatctggacaagcacctctctggg

SEQ ID NO: 516988 - DNA, 25 bp, Homo sapien
aaaagcacattcgatccattagcag

SEQ ID NO: 516989 - DNA, 25 bp, Homo sapien
tctctgggcgatacaaagccactca

SEQ ID NO: 516990 - DNA, 25 bp, Homo sapien
ctgaagctgtaacgatctaggattt

SEQ ID NO: 516991 - DNA, 25 bp, Homo sapien
gagtatcctacacataacaaaatat

SEQ ID NO: 516992 - DNA, 25 bp, Homo sapien
tccctgaagctgtaacgatctagga

SEQ ID NO: 516993 - DNA, 25 bp, Homo sapien
gaagctgtaacgatctaggatttga

SEQ ID NO: 516994 - DNA, 25 bp, Homo sapien
gactccggtggtccatatctcactg

SEQ ID NO: 516995 - DNA, 25 bp, Homo sapien
tataaaaacttgagacaacacaggg

SEQ ID NO: 516996 - DNA, 25 bp, Homo sapien
tcatctttggttaggcatcagggca

SEQ ID NO: 516997 - DNA, 25 bp, Homo sapien
taactgtgaccaaataggccactgg

SEQ ID NO: 516998 - DNA, 25 bp, Homo sapien
tattagtagggatgtagccatctcc

SEQ ID NO: 516999 - DNA, 25 bp, Homo sapien
tttaggcattaaccgcgtccttcag

SEQ ID NO: 517000 - DNA, 25 bp, Homo sapien
ttaggcaatgcacaaggaatagtcc

SEQ ID NO: 517001 - DNA, 25 bp, Homo sapien
tctccaggaaggctaagaaagttct

SEQ ID NO: 517002 - DNA, 25 bp, Homo sapien
tggaaagagtttctaatcctggcaa

SEQ ID NO: 517003 - DNA, 25 bp, Homo sapien
gaggggctggaaagagtttctaatc

SEQ ID NO: 517004 - DNA, 25 bp, Homo sapien
gggctggaaagagtttctaatcctg

SEQ ID NO: 517005 - DNA, 25 bp, Homo sapien
gctggaaagagtttctaatcctggc

SEQ ID NO: 517006 - DNA, 25 bp, Homo sapien
gatgtgctgtacaagctgagactcc

SEQ ID NO: 517007 - DNA, 25 bp, Homo sapien
tctgagcctgccattaagggagtca

SEQ ID NO: 517008 - DNA, 25 bp, Homo sapien
gggaggcatacatatccacctatga

SEQ ID NO: 517009 - DNA, 25 bp, Homo sapien
cacctatgaaagcacactaatggca

SEQ ID NO: 517010 - DNA, 25 bp, Homo sapien
gagccacacggttctatcaagtact

SEQ ID NO: 517011 - DNA, 25 bp, Homo sapien
tgtgagtcagtcttgacttgccaga

SEQ ID NO: 517012 - DNA, 25 bp, Homo sapien
ttcctttgggcaaatcagttttcca

SEQ ID NO: 517013 - DNA, 25 bp, Homo sapien
tctatcaagtactgcgagtccatca

SEQ ID NO: 517014 - DNA, 25 bp, Homo sapien
tcctgcccattctcgaagaggtggt

SEQ ID NO: 517015 - DNA, 25 bp, Homo sapien
tggtaagattatgcacagagggctc

SEQ ID NO: 517016 - DNA, 25 bp, Homo sapien
aaagatatacacagcccaggaggaa

SEQ ID NO: 517017 - DNA, 25 bp, Homo sapien
actgtgaggccagaaatggtcttgc

SEQ ID NO: 517018 - DNA, 25 bp, Homo sapien
ctgtttgcctgtctagagtttccac

SEQ ID NO: 517019 - DNA, 25 bp, Homo sapien
tggaaggatggggagccatgctgtt

SEQ ID NO: 517020 - DNA, 25 bp, Homo sapien
tgtttgcctgtctagagtttccaca

SEQ ID NO: 517021 - DNA, 25 bp, Homo sapien
atggggagccatgctgttcagcaca

SEQ ID NO: 517022 - DNA, 25 bp, Homo sapien
cacagcttcagcgggttcccgtcgc

SEQ ID NO: 517023 - DNA, 25 bp, Homo sapien
ggcgctctctcagcacgcggttcag

SEQ ID NO: 517024 - DNA, 25 bp, Homo sapien
gcttcagcgggttcccgtcgcccac

SEQ ID NO: 517025 - DNA, 25 bp, Homo sapien
tggcgctctctcagcacgcggttca

SEQ ID NO: 517026 - DNA, 25 bp, Homo sapien
tcaggtaagtgtggaaagttgcccc

SEQ ID NO: 517027 - DNA, 25 bp, Homo sapien
gagcacgtgacccatcctttgaact

SEQ ID NO: 517028 - DNA, 25 bp, Homo sapien
catacgagttacgagactgggccac

SEQ ID NO: 517029 - DNA, 25 bp, Homo sapien
gatctgtattgtccgtgctggagca

SEQ ID NO: 517030 - DNA, 25 bp, Homo sapien
ctgctgccagattctcgttgaggtc

SEQ ID NO: 517031 - DNA, 25 bp, Homo sapien
ctgccagattctcgttgaggtcctt

SEQ ID NO: 517032 - DNA, 25 bp, Homo sapien
aaaagtctgtcgcattccatgatca

SEQ ID NO: 517033 - DNA, 25 bp, Homo sapien
atcatgtgcgctagcccctgagctg

SEQ ID NO: 517034 - DNA, 25 bp, Homo sapien
cttccaccaagttgacgacgtcgtt

SEQ ID NO: 517035 - DNA, 25 bp, Homo sapien
gacgacgtcgttcaggaaacacaag

SEQ ID NO: 517036 - DNA, 25 bp, Homo sapien
aagagcgtctgcaggacctccctgt

SEQ ID NO: 517037 - DNA, 25 bp, Homo sapien
cactgccaggttcatgggcgtcatc

SEQ ID NO: 517038 - DNA, 25 bp, Homo sapien
tgcaattgaactttggatcccacgc

SEQ ID NO: 517039 - DNA, 25 bp, Homo sapien
tcagtaattgctgaggcctcgcagc

SEQ ID NO: 517040 - DNA, 25 bp, Homo sapien
cgtgtgaacacgcacccagagtcat

SEQ ID NO: 517041 - DNA, 25 bp, Homo sapien
tgtaagctccacattcctcgtgtga

SEQ ID NO: 517042 - DNA, 25 bp, Homo sapien
ggcttgtggatttccatatcaaact

SEQ ID NO: 517043 - DNA, 25 bp, Homo sapien
cccacgagaacaccaatctcattat

SEQ ID NO: 517044 - DNA, 25 bp, Homo sapien
ccaatgaagatactttgtgctaaaa

SEQ ID NO: 517045 - DNA, 25 bp, Homo sapien
ttacttccgtagaggagagcaggat

SEQ ID NO: 517046 - DNA, 25 bp, Homo sapien
tgatagatatggagaaaggtctcac

SEQ ID NO: 517047 - DNA, 25 bp, Homo sapien
actgatagatatggagaaaggtctc

SEQ ID NO: 517048 - DNA, 25 bp, Homo sapien
ctgatagatatggagaaaggtctca

SEQ ID NO: 517049 - DNA, 25 bp, Homo sapien
tcatttggcgaagggcatggattcg

SEQ ID NO: 517050 - DNA, 25 bp, Homo sapien
gaactgtttcaccatatccgccaca

SEQ ID NO: 517051 - DNA, 25 bp, Homo sapien
catagttgacgttctcagggaagtt

SEQ ID NO: 517052 - DNA, 25 bp, Homo sapien
catcataagcagactggtcttcata

SEQ ID NO: 517053 - DNA, 25 bp, Homo sapien
tggctcatgggttggcccacttctg

SEQ ID NO: 517054 - DNA, 25 bp, Homo sapien
gggcaccctggcttatagtgaaata

SEQ ID NO: 517055 - DNA, 25 bp, Homo sapien
tgcctatagggagttgatttgcttc

SEQ ID NO: 517056 - DNA, 25 bp, Homo sapien
aaggtagaaccttcctgagtggctg

SEQ ID NO: 517057 - DNA, 25 bp, Homo sapien
gggcttctagtggttgctgtggaaa

SEQ ID NO: 517058 - DNA, 25 bp, Homo sapien
catttaagccattttgggatggggc

SEQ ID NO: 517059 - DNA, 25 bp, Homo sapien
ttctagtggttgctgtggaaagcca

SEQ ID NO: 517060 - DNA, 25 bp, Homo sapien
tgggatggggcttctagtggttgct

SEQ ID NO: 517061 - DNA, 25 bp, Homo sapien
gactatgagaggaacgccaaagaca

SEQ ID NO: 517062 - DNA, 25 bp, Homo sapien
gttgctgcgtagatatctcagtgct

SEQ ID NO: 517063 - DNA, 25 bp, Homo sapien
tgtagtcgggaactttcatcctctt

SEQ ID NO: 517064 - DNA, 25 bp, Homo sapien
ggctgtcccgttctttggacgtgga

SEQ ID NO: 517065 - DNA, 25 bp, Homo sapien
accaggtcatgcaagcctcctgggt

SEQ ID NO: 517066 - DNA, 25 bp, Homo sapien
aaccaggtcatgcaagcctcctggg

SEQ ID NO: 517067 - DNA, 25 bp, Homo sapien
cagaaaccaggtcatgcaagcctcc

SEQ ID NO: 517068 - DNA, 25 bp, Homo sapien
gaaaccaggtcatgcaagcctcctg

SEQ ID NO: 517069 - DNA, 25 bp, Homo sapien
catgtccagccgtgcttgttggaca

SEQ ID NO: 517070 - DNA, 25 bp, Homo sapien
gcttgttggacatggagtgcttctc

SEQ ID NO: 517071 - DNA, 25 bp, Homo sapien
cagtgagaagcgctggagcaggctc

SEQ ID NO: 517072 - DNA, 25 bp, Homo sapien
ccgtctggctgctgatgtggggcga

SEQ ID NO: 517073 - DNA, 25 bp, Homo sapien
gctggtgcgacagctggaaactgtt

SEQ ID NO: 517074 - DNA, 25 bp, Homo sapien
ggccggggctggtgcgacagctgga

SEQ ID NO: 517075 - DNA, 25 bp, Homo sapien
gggctggtgcgacagctggaaactg

SEQ ID NO: 517076 - DNA, 25 bp, Homo sapien
ggtgcgacagctggaaactgttcca

SEQ ID NO: 517077 - DNA, 25 bp, Homo sapien
cagtcatcgactacctcttggagcc

SEQ ID NO: 517078 - DNA, 25 bp, Homo sapien
gcagaatgtcatccaagtgagggaa

SEQ ID NO: 517079 - DNA, 25 bp, Homo sapien
tggagcccattgacatgctgcagaa

SEQ ID NO: 517080 - DNA, 25 bp, Homo sapien
caaaagatctcctgtgctggcatac

SEQ ID NO: 517081 - DNA, 25 bp, Homo sapien
aattcatgcatacggctttggtccc

SEQ ID NO: 517082 - DNA, 25 bp, Homo sapien
tcatagatactgactcggctggctc

SEQ ID NO: 517083 - DNA, 25 bp, Homo sapien
cagggagatgctaccggtcctccaa

SEQ ID NO: 517084 - DNA, 25 bp, Homo sapien
gatccttgggaatatgcaccaccaa

SEQ ID NO: 517085 - DNA, 25 bp, Homo sapien
gatgcactgcatagccttaaaggac

SEQ ID NO: 517086 - DNA, 25 bp, Homo sapien
gtggcggcgaattctggagatctcc

SEQ ID NO: 517087 - DNA, 25 bp, Homo sapien
cttgccagagcatgggagccctttt

SEQ ID NO: 517088 - DNA, 25 bp, Homo sapien
tctggagatctccatttggtatttg

SEQ ID NO: 517089 - DNA, 25 bp, Homo sapien
cacctgcgactggttctttggaaag

SEQ ID NO: 517090 - DNA, 25 bp, Homo sapien
gggcatccagcatgaccgggttgtc

SEQ ID NO: 517091 - DNA, 25 bp, Homo sapien
ggttgtctgtacagcactggcccgg

SEQ ID NO: 517092 - DNA, 25 bp, Homo sapien
ttcgctgtgaatggagcagacctca

SEQ ID NO: 517093 - DNA, 25 bp, Homo sapien
gcagagcaccaaggaaaatgctcat

SEQ ID NO: 517094 - DNA, 25 bp, Homo sapien
tgcagagcaccaaggaaaatgctca

SEQ ID NO: 517095 - DNA, 25 bp, Homo sapien
ctgcagagcaccaaggaaaatgctc

SEQ ID NO: 517096 - DNA, 25 bp, Homo sapien
cagagagccttattaaaattataag

SEQ ID NO: 517097 - DNA, 25 bp, Homo sapien
tggtcattatttcagagagccttat

SEQ ID NO: 517098 - DNA, 25 bp, Homo sapien
gctttccacctttggtcattatttc

SEQ ID NO: 517099 - DNA, 25 bp, Homo sapien
atggtttctgtgttgctttccacct

SEQ ID NO: 517100 - DNA, 25 bp, Homo sapien
ctaaaaatgagaacattcttcactg

SEQ ID NO: 517101 - DNA, 25 bp, Homo sapien
tctaaaaatgagaacattcttcact

SEQ ID NO: 517102 - DNA, 25 bp, Homo sapien
taaaaatgagaacattcttcactga

SEQ ID NO: 517103 - DNA, 25 bp, Homo sapien
aaaatgagaacattcttcactgaaa

SEQ ID NO: 517104 - DNA, 25 bp, Homo sapien
gacagatgccaaccagacattccat

SEQ ID NO: 517105 - DNA, 25 bp, Homo sapien
gccatatctttacactggaaacagg

SEQ ID NO: 517106 - DNA, 25 bp, Homo sapien
aacaggaacccacacgaatccacag

SEQ ID NO: 517107 - DNA, 25 bp, Homo sapien
cagacattccataaagaagggcttt

SEQ ID NO: 517108 - DNA, 25 bp, Homo sapien
gacgttaactggagctacgtggccg

SEQ ID NO: 517109 - DNA, 25 bp, Homo sapien
ggcaacgcatccatagtcacataga

SEQ ID NO: 517110 - DNA, 25 bp, Homo sapien
aatgctcttggctgggttgttagtc

SEQ ID NO: 517111 - DNA, 25 bp, Homo sapien
tgttagtcttccagtgaggcgtgca

SEQ ID NO: 517112 - DNA, 25 bp, Homo sapien
tgtgtcagcccaccaaaatctacag

SEQ ID NO: 517113 - DNA, 25 bp, Homo sapien
agggtagcggtgttgtcatttctcc

SEQ ID NO: 517114 - DNA, 25 bp, Homo sapien
tgtctctgaatatctctgaaaggtg

SEQ ID NO: 517115 - DNA, 25 bp, Homo sapien
tacaggattaaacacaattgccatg

SEQ ID NO: 517116 - DNA, 25 bp, Homo sapien
ctttttcctttggaagttcacatca

SEQ ID NO: 517117 - DNA, 25 bp, Homo sapien
cctttggaagttcacatcaagtttc

SEQ ID NO: 517118 - DNA, 25 bp, Homo sapien
tttcctttggaagttcacatcaagt

SEQ ID NO: 517119 - DNA, 25 bp, Homo sapien
tcctttggaagttcacatcaagttt

SEQ ID NO: 517120 - DNA, 25 bp, Homo sapien
gaggcacacttgttcaacgtattta

SEQ ID NO: 517121 - DNA, 25 bp, Homo sapien
acacttgttcaacgtatttagtcgt

SEQ ID NO: 517122 - DNA, 25 bp, Homo sapien
cacacttgttcaacgtatttagtcg

SEQ ID NO: 517123 - DNA, 25 bp, Homo sapien
ggcacacttgttcaacgtatttagt

SEQ ID NO: 517124 - DNA, 25 bp, Homo sapien
aatgtgatgattactttcactaatg

SEQ ID NO: 517125 - DNA, 25 bp, Homo sapien
aaatctctccagtttgataatcctc

SEQ ID NO: 517126 - DNA, 25 bp, Homo sapien
tgtgatgattactttcactaatgaa

SEQ ID NO: 517127 - DNA, 25 bp, Homo sapien
gataatcctcctttatttccagtaa

SEQ ID NO: 517128 - DNA, 25 bp, Homo sapien
tagctgtgaaaactagtagccttgc

SEQ ID NO: 517129 - DNA, 25 bp, Homo sapien
tgcatccactggagagggaagaaca

SEQ ID NO: 517130 - DNA, 25 bp, Homo sapien
gctgtaaattgatatgggcttccaa

SEQ ID NO: 517131 - DNA, 25 bp, Homo sapien
gcatcaccgtcagagtagctgtgaa

SEQ ID NO: 517132 - DNA, 25 bp, Homo sapien
ctagggatcaaaggcaagtcaggga

SEQ ID NO: 517133 - DNA, 25 bp, Homo sapien
gatcaaaggcaagtcagggagcagc

SEQ ID NO: 517134 - DNA, 25 bp, Homo sapien
aaggtctccatgctggcggactgtt

SEQ ID NO: 517135 - DNA, 25 bp, Homo sapien
tgctggcggactgttggaaaatgca

SEQ ID NO: 517136 - DNA, 25 bp, Homo sapien
gagagcagagatggatatactaatg

SEQ ID NO: 517137 - DNA, 25 bp, Homo sapien
ctttcaacaatcacaggccatccac

SEQ ID NO: 517138 - DNA, 25 bp, Homo sapien
gagacaattctggtatgtaactcca

SEQ ID NO: 517139 - DNA, 25 bp, Homo sapien
tatactaatgccaaagagacaattc

SEQ ID NO: 517140 - DNA, 25 bp, Homo sapien
caatctcctccctgattttgtatct

SEQ ID NO: 517141 - DNA, 25 bp, Homo sapien
cctgaaagcttaggcatataaaagt

SEQ ID NO: 517142 - DNA, 25 bp, Homo sapien
acattgctaatgtttttaataatgc

SEQ ID NO: 517143 - DNA, 25 bp, Homo sapien
taacaagaatataaagtctctctct

SEQ ID NO: 517144 - DNA, 25 bp, Homo sapien
caaccccttactgctgtcttggcat

SEQ ID NO: 517145 - DNA, 25 bp, Homo sapien
acaaccccttactgctgtcttggca

SEQ ID NO: 517146 - DNA, 25 bp, Homo sapien
aattaaccactcatcaatctcaaag

SEQ ID NO: 517147 - DNA, 25 bp, Homo sapien
aaagtgctgccgttccccgcggact

SEQ ID NO: 517148 - DNA, 25 bp, Homo sapien
aatctcaaagttttaaaagtgctgc

SEQ ID NO: 517149 - DNA, 25 bp, Homo sapien
gagtggctgagggtctaattaacca

SEQ ID NO: 517150 - DNA, 25 bp, Homo sapien
tggaaaagcccataacgtagtcaag

SEQ ID NO: 517151 - DNA, 25 bp, Homo sapien
caaggcatctcagatcacatgcagc

SEQ ID NO: 517152 - DNA, 25 bp, Homo sapien
gttgttaaagcatagactttgatgg

SEQ ID NO: 517153 - DNA, 25 bp, Homo sapien
tccctatgatatgtctggaagatgc

SEQ ID NO: 517154 - DNA, 25 bp, Homo sapien
ccatgtaagcaagcccatagtatta

SEQ ID NO: 517155 - DNA, 25 bp, Homo sapien
tacgtgtctgaagattcagcaagcc

SEQ ID NO: 517156 - DNA, 25 bp, Homo sapien
agagtgactggtttgtgacacaaaa

SEQ ID NO: 517157 - DNA, 25 bp, Homo sapien
tgcgttgatcgctcctgtcttcata

SEQ ID NO: 517158 - DNA, 25 bp, Homo sapien
aaaatcatgatcattcttgacagcc

SEQ ID NO: 517159 - DNA, 25 bp, Homo sapien
aatcatgatcattcttgacagccac

SEQ ID NO: 517160 - DNA, 25 bp, Homo sapien
aagaaaatcatgatcattcttgaca

SEQ ID NO: 517161 - DNA, 25 bp, Homo sapien
catgatcattcttgacagccacaat

SEQ ID NO: 517162 - DNA, 25 bp, Homo sapien
agaggacatagccaaatgtaaccat

SEQ ID NO: 517163 - DNA, 25 bp, Homo sapien
gcagctcattggaatagaggacata

SEQ ID NO: 517164 - DNA, 25 bp, Homo sapien
ctcgttcatggaggtagcaatctgc

SEQ ID NO: 517165 - DNA, 25 bp, Homo sapien
gaggtagcaatctgcagctcattgg

SEQ ID NO: 517166 - DNA, 25 bp, Homo sapien
gctgtcttgctcggctagtgaggga

SEQ ID NO: 517167 - DNA, 25 bp, Homo sapien
tcctagggtctggtttgaggctcct

SEQ ID NO: 517168 - DNA, 25 bp, Homo sapien
tttttttcatggaaggctgcctctt

SEQ ID NO: 517169 - DNA, 25 bp, Homo sapien
tttttcatggaaggctgcctcttgc

SEQ ID NO: 517170 - DNA, 25 bp, Homo sapien
cgtattgcgggaacccggcagcacg

SEQ ID NO: 517171 - DNA, 25 bp, Homo sapien
agcgtattgcgggaacccggcagca

SEQ ID NO: 517172 - DNA, 25 bp, Homo sapien
taactgagcgtattgcgggaacccg

SEQ ID NO: 517173 - DNA, 25 bp, Homo sapien
cctcatataactgagcgtattgcgg

SEQ ID NO: 517174 - DNA, 25 bp, Homo sapien
actgacggtggagaaggctggaagt

SEQ ID NO: 517175 - DNA, 25 bp, Homo sapien
gtagactgacggtggagaaggctgg

SEQ ID NO: 517176 - DNA, 25 bp, Homo sapien
tagactgacggtggagaaggctgga

SEQ ID NO: 517177 - DNA, 25 bp, Homo sapien
cagtgtagactgacggtggagaagg

SEQ ID NO: 517178 - DNA, 25 bp, Homo sapien
gttttatgccactacaacttgaggg

SEQ ID NO: 517179 - DNA, 25 bp, Homo sapien
tgcttggccatatgacccactttgg

SEQ ID NO: 517180 - DNA, 25 bp, Homo sapien
cagcctaggtattggaatgatgaca

SEQ ID NO: 517181 - DNA, 25 bp, Homo sapien
tcctgcaactaggaggcataccctt

SEQ ID NO: 517182 - DNA, 25 bp, Homo sapien
ggaggctgcatgcatacatccccag

SEQ ID NO: 517183 - DNA, 25 bp, Homo sapien
tgtggtatttctcagggaggctgca

SEQ ID NO: 517184 - DNA, 25 bp, Homo sapien
gatgctctcccagccaaatagtttc

SEQ ID NO: 517185 - DNA, 25 bp, Homo sapien
gattgttccaatcaggcgcttgtgg

SEQ ID NO: 517186 - DNA, 25 bp, Homo sapien
catccagccagtccaagaaggcatt

SEQ ID NO: 517187 - DNA, 25 bp, Homo sapien
ctccaagggaatcatccagccagtc

SEQ ID NO: 517188 - DNA, 25 bp, Homo sapien
ccaagggaatcatccagccagtcca

SEQ ID NO: 517189 - DNA, 25 bp, Homo sapien
atcatccagccagtccaagaaggca

SEQ ID NO: 517190 - DNA, 25 bp, Homo sapien
ggcctggttaacgtttgcatggaga

SEQ ID NO: 517191 - DNA, 25 bp, Homo sapien
cccggcgctggaatgtgtggttcac

SEQ ID NO: 517192 - DNA, 25 bp, Homo sapien
aacgtttgcatggagaactgaggag

SEQ ID NO: 517193 - DNA, 25 bp, Homo sapien
agcaccaagcaccacaaaggggcct

SEQ ID NO: 517194 - DNA, 25 bp, Homo sapien
gagcaaggagcagatgatagtcctc

SEQ ID NO: 517195 - DNA, 25 bp, Homo sapien
attcagagcaaggagcagatgatag

SEQ ID NO: 517196 - DNA, 25 bp, Homo sapien
caaggagcagatgatagtcctctct

SEQ ID NO: 517197 - DNA, 25 bp, Homo sapien
gcagatgatagtcctctctcatgtt

SEQ ID NO: 517198 - DNA, 25 bp, Homo sapien
ttatactagataccctataatcacc

SEQ ID NO: 517199 - DNA, 25 bp, Homo sapien
tcacccaggaagttcacattaattg

SEQ ID NO: 517200 - DNA, 25 bp, Homo sapien
caaacttaactctagatttatgtta

SEQ ID NO: 517201 - DNA, 25 bp, Homo sapien
taattgatgactaaatatttggcta

SEQ ID NO: 517202 - DNA, 25 bp, Homo sapien
ttgtattttagcagagatggagttt

SEQ ID NO: 517203 - DNA, 25 bp, Homo sapien
ttttgtattttagcagagatggagt

SEQ ID NO: 517204 - DNA, 25 bp, Homo sapien
gtattttagcagagatggagtttta

SEQ ID NO: 517205 - DNA, 25 bp, Homo sapien
tttttgtattttagcagagatggag

SEQ ID NO: 517206 - DNA, 25 bp, Homo sapien
aatatgtcaacctaagccatccagg

SEQ ID NO: 517207 - DNA, 25 bp, Homo sapien
cagtcactaagggatgctttgtttc

SEQ ID NO: 517208 - DNA, 25 bp, Homo sapien
tttattaaccaagcccacagtcact

SEQ ID NO: 517209 - DNA, 25 bp, Homo sapien
tgcccaactcactagtcaacttgtg

SEQ ID NO: 517210 - DNA, 25 bp, Homo sapien
ctggtttggactagacagcctgcta

SEQ ID NO: 517211 - DNA, 25 bp, Homo sapien
tggcgagtttacagccagcgcttcc

SEQ ID NO: 517212 - DNA, 25 bp, Homo sapien
attccagacgttggcctgtggccat

SEQ ID NO: 517213 - DNA, 25 bp, Homo sapien
gctctgacatccatattgggccata

SEQ ID NO: 517214 - DNA, 25 bp, Homo sapien
taggctgtgctgtacctttcaaaca

SEQ ID NO: 517215 - DNA, 25 bp, Homo sapien
aggctgtgctgtacctttcaaacaa

SEQ ID NO: 517216 - DNA, 25 bp, Homo sapien
tctcttcgttatctctgccagctaa

SEQ ID NO: 517217 - DNA, 25 bp, Homo sapien
tgtgcttggctgttgtctgtgagac

SEQ ID NO: 517218 - DNA, 25 bp, Homo sapien
agaaactgacagatggtgcatctgt

SEQ ID NO: 517219 - DNA, 25 bp, Homo sapien
ggtgcatctgtcaccgagtgttttc

SEQ ID NO: 517220 - DNA, 25 bp, Homo sapien
tcagtcctgccatccttaagtgagg

SEQ ID NO: 517221 - DNA, 25 bp, Homo sapien
tgtagtggctcacgtgcactcccaa

SEQ ID NO: 517222 - DNA, 25 bp, Homo sapien
acagatctgctggtcgtcagtcctg

SEQ ID NO: 517223 - DNA, 25 bp, Homo sapien
catatacaagaagcggagtccaaga

SEQ ID NO: 517224 - DNA, 25 bp, Homo sapien
taagagtgtgctccctttacagtgc

SEQ ID NO: 517225 - DNA, 25 bp, Homo sapien
cagaacttactgcacatcaagggag

SEQ ID NO: 517226 - DNA, 25 bp, Homo sapien
gggaggagcccttacaaagtagcag

SEQ ID NO: 517227 - DNA, 25 bp, Homo sapien
gctctgacggtacaagctgtgtgaa

SEQ ID NO: 517228 - DNA, 25 bp, Homo sapien
gatatctgtgatatcagacaccaag

SEQ ID NO: 517229 - DNA, 25 bp, Homo sapien
tctccttggaagtagtcactattaa

SEQ ID NO: 517230 - DNA, 25 bp, Homo sapien
tgcagaagcatagcctaaaaaagta

SEQ ID NO: 517231 - DNA, 25 bp, Homo sapien
tgtatccttccaaacttattatgca

SEQ ID NO: 517232 - DNA, 25 bp, Homo sapien
tgcagtacgccacagttccagggca

SEQ ID NO: 517233 - DNA, 25 bp, Homo sapien
ggttatgctgaacaacacggcactg

SEQ ID NO: 517234 - DNA, 25 bp, Homo sapien
gatgactctacaaataagggccctg

SEQ ID NO: 517235 - DNA, 25 bp, Homo sapien
aaagtaactttccatggactgaggg

SEQ ID NO: 517236 - DNA, 25 bp, Homo sapien
gtaaaaagtctattaacttgactca

SEQ ID NO: 517237 - DNA, 25 bp, Homo sapien
aatattcaggctagtccaagcgatg

SEQ ID NO: 517238 - DNA, 25 bp, Homo sapien
acttgactcatactataaaacatct

SEQ ID NO: 517239 - DNA, 25 bp, Homo sapien
cagacaattggacaataaatgaaaa

SEQ ID NO: 517240 - DNA, 25 bp, Homo sapien
ccactacatgtccactagaggcctg

SEQ ID NO: 517241 - DNA, 25 bp, Homo sapien
ttacaccttcgaatacaagatttct

SEQ ID NO: 517242 - DNA, 25 bp, Homo sapien
tcacaccacagttttacaccttcga

SEQ ID NO: 517243 - DNA, 25 bp, Homo sapien
atttctgcagttccactacatgtcc

SEQ ID NO: 517244 - DNA, 25 bp, Homo sapien
aatggagcagagacaaaccctagtg

SEQ ID NO: 517245 - DNA, 25 bp, Homo sapien
cttaatgggttcacaatttgcaggc

SEQ ID NO: 517246 - DNA, 25 bp, Homo sapien
gaagcttgtaactttccctacgcat

SEQ ID NO: 517247 - DNA, 25 bp, Homo sapien
cagaaatggcctgtttttcactagc

SEQ ID NO: 517248 - DNA, 25 bp, Homo sapien
ctttccggtcaagggctgctttctg

SEQ ID NO: 517249 - DNA, 25 bp, Homo sapien
cctttccggtcaagggctgctttct

SEQ ID NO: 517250 - DNA, 25 bp, Homo sapien
tggcaggaatctgatttgcattctc

SEQ ID NO: 517251 - DNA, 25 bp, Homo sapien
tttggcaggaatctgatttgcattc

SEQ ID NO: 517252 - DNA, 25 bp, Homo sapien
ctggccagtaaggcatgatccaaaa

SEQ ID NO: 517253 - DNA, 25 bp, Homo sapien
gctggccagtaaggcatgatccaaa

SEQ ID NO: 517254 - DNA, 25 bp, Homo sapien
ggtagcaagcaggaccctcctcaaa

SEQ ID NO: 517255 - DNA, 25 bp, Homo sapien
tagcaagcaggaccctcctcaaacg

SEQ ID NO: 517256 - DNA, 25 bp, Homo sapien
caggaccctcctcaaacgccttgtt

SEQ ID NO: 517257 - DNA, 25 bp, Homo sapien
ctcctcaaacgccttgttagtgttt

SEQ ID NO: 517258 - DNA, 25 bp, Homo sapien
cacaatctctactgatgttctgaga

SEQ ID NO: 517259 - DNA, 25 bp, Homo sapien
ggcacaatctctactgatgttctga

SEQ ID NO: 517260 - DNA, 25 bp, Homo sapien
caatctctactgatgttctgagaaa

SEQ ID NO: 517261 - DNA, 25 bp, Homo sapien
atctctactgatgttctgagaaaca

SEQ ID NO: 517262 - DNA, 25 bp, Homo sapien
cagacataatcctcactcacttggg

SEQ ID NO: 517263 - DNA, 25 bp, Homo sapien
tctaggactctctttcagatagcac

SEQ ID NO: 517264 - DNA, 25 bp, Homo sapien
taatacagcaccacataaagccctg

SEQ ID NO: 517265 - DNA, 25 bp, Homo sapien
tataatggactaagaacggctgccc

SEQ ID NO: 517266 - DNA, 25 bp, Homo sapien
gccaatgaattgtaactgcacaaga

SEQ ID NO: 517267 - DNA, 25 bp, Homo sapien
tgaaaccaaccacgaggcatctgag

SEQ ID NO: 517268 - DNA, 25 bp, Homo sapien
tgagggagacactattaggccacaa

SEQ ID NO: 517269 - DNA, 25 bp, Homo sapien
agaaaccagcagaagaactcaacag

SEQ ID NO: 517270 - DNA, 25 bp, Homo sapien
ttggttctagcggaaaattttctca

SEQ ID NO: 517271 - DNA, 25 bp, Homo sapien
tggttctagcggaaaattttctcat

SEQ ID NO: 517272 - DNA, 25 bp, Homo sapien
tataatgttccctgcttgtgagaag

SEQ ID NO: 517273 - DNA, 25 bp, Homo sapien
tcatccgcacttacattctcgcagg

SEQ ID NO: 517274 - DNA, 25 bp, Homo sapien
tcctgtgaatgcaaaagactcgtgc

SEQ ID NO: 517275 - DNA, 25 bp, Homo sapien
tctgtgcagccaagataagtggaac

SEQ ID NO: 517276 - DNA, 25 bp, Homo sapien
tggtcttaaggcaatgactatggac

SEQ ID NO: 517277 - DNA, 25 bp, Homo sapien
catgtgtgttctttgcctaccatca

SEQ ID NO: 517278 - DNA, 25 bp, Homo sapien
tagacctcggtagaaagacaggtgc

SEQ ID NO: 517279 - DNA, 25 bp, Homo sapien
ggacagccagacttcctaaaagact

SEQ ID NO: 517280 - DNA, 25 bp, Homo sapien
gaggataatttgtacacctcaacag

SEQ ID NO: 517281 - DNA, 25 bp, Homo sapien
tcaagtcagcggcaaagaggataat

SEQ ID NO: 517282 - DNA, 25 bp, Homo sapien
gagaacacgtgcgtgtgacacaggt

SEQ ID NO: 517283 - DNA, 25 bp, Homo sapien
ggtagtcaggacaataggcttaaca

SEQ ID NO: 517284 - DNA, 25 bp, Homo sapien
tactacaaaggccatacctactgag

SEQ ID NO: 517285 - DNA, 25 bp, Homo sapien
tcctctcttcttactacaaaggcca

SEQ ID NO: 517286 - DNA, 25 bp, Homo sapien
tacaaaggccatacctactgaggct

SEQ ID NO: 517287 - DNA, 25 bp, Homo sapien
tcttcttactacaaaggccatacct

SEQ ID NO: 517288 - DNA, 25 bp, Homo sapien
ctggtgactaagaggctgctcctcc

SEQ ID NO: 517289 - DNA, 25 bp, Homo sapien
cactggctcggccttcctgagaggg

SEQ ID NO: 517290 - DNA, 25 bp, Homo sapien
cctggtgactaagaggctgctcctc

SEQ ID NO: 517291 - DNA, 25 bp, Homo sapien
tcctgagagggctcctgctggccct

SEQ ID NO: 517292 - DNA, 25 bp, Homo sapien
tgtgggtcatggctcataatacgca

SEQ ID NO: 517293 - DNA, 25 bp, Homo sapien
tgggtcatggctcataatacgcaat

SEQ ID NO: 517294 - DNA, 25 bp, Homo sapien
tcatggctcataatacgcaattcag

SEQ ID NO: 517295 - DNA, 25 bp, Homo sapien
ttattgtgggtcatggctcataata

SEQ ID NO: 517296 - DNA, 25 bp, Homo sapien
gaagatagggcccttaaagaggtca

SEQ ID NO: 517297 - DNA, 25 bp, Homo sapien
ccaggtgaagatagcaagaaggcag

SEQ ID NO: 517298 - DNA, 25 bp, Homo sapien
gcactttattactgcagccccagca

SEQ ID NO: 517299 - DNA, 25 bp, Homo sapien
aaagtagatcatatggatgggcccc

SEQ ID NO: 517300 - DNA, 25 bp, Homo sapien
gactcgtccaaggtcactctatggg

SEQ ID NO: 517301 - DNA, 25 bp, Homo sapien
gatcccacaggaatcaaggctatct

SEQ ID NO: 517302 - DNA, 25 bp, Homo sapien
tcacgtgtacatgactccaaagccc

SEQ ID NO: 517303 - DNA, 25 bp, Homo sapien
tagagctagagttcaaattcacgtg

SEQ ID NO: 517304 - DNA, 25 bp, Homo sapien
attctgccaacagagtaactcctgg

SEQ ID NO: 517305 - DNA, 25 bp, Homo sapien
taactcctggaagattggcacagaa

SEQ ID NO: 517306 - DNA, 25 bp, Homo sapien
gctgctccaggcaactccaatggat

SEQ ID NO: 517307 - DNA, 25 bp, Homo sapien
gtacaccccgtgctaccatgtcatg

SEQ ID NO: 517308 - DNA, 25 bp, Homo sapien
ttcagggaaggaggtcagtagactt

SEQ ID NO: 517309 - DNA, 25 bp, Homo sapien
gatattctgcaagactgatttccct

SEQ ID NO: 517310 - DNA, 25 bp, Homo sapien
gaattccttcgcaggcttcttcaag

SEQ ID NO: 517311 - DNA, 25 bp, Homo sapien
tatgaggatccaaattttcagggaa

SEQ ID NO: 517312 - DNA, 25 bp, Homo sapien
tggaactcaacgctgtaaaggagcg

SEQ ID NO: 517313 - DNA, 25 bp, Homo sapien
tatgttacgtttatgttcccctgct

SEQ ID NO: 517314 - DNA, 25 bp, Homo sapien
gattccagaacctgagacacagaat

SEQ ID NO: 517315 - DNA, 25 bp, Homo sapien
gaaggagcttctatacagagcctgg

SEQ ID NO: 517316 - DNA, 25 bp, Homo sapien
gctatgtggcagctaaggactgtcc

SEQ ID NO: 517317 - DNA, 25 bp, Homo sapien
tacgggtagtgtggcatagaaatcc

SEQ ID NO: 517318 - DNA, 25 bp, Homo sapien
catctgttctgtagacacacgtcag

SEQ ID NO: 517319 - DNA, 25 bp, Homo sapien
gaatttatgattcactgtcccaccg

SEQ ID NO: 517320 - DNA, 25 bp, Homo sapien
tagaatccggctcatcctgtaagga

SEQ ID NO: 517321 - DNA, 25 bp, Homo sapien
ggccctcaggtgtcatggaatttag

SEQ ID NO: 517322 - DNA, 25 bp, Homo sapien
cctgtaaggagagcgtcttgtagtc

SEQ ID NO: 517323 - DNA, 25 bp, Homo sapien
tcaaatcgcaagtacatctcctggc

SEQ ID NO: 517324 - DNA, 25 bp, Homo sapien
ctattgccacctcagtctgcctgtg

SEQ ID NO: 517325 - DNA, 25 bp, Homo sapien
gcctgtggctgttgccgtctgtctc

SEQ ID NO: 517326 - DNA, 25 bp, Homo sapien
ctcggcagatttcctattgccacct

SEQ ID NO: 517327 - DNA, 25 bp, Homo sapien
gccacctcagtctgcctgtggctgt

SEQ ID NO: 517328 - DNA, 25 bp, Homo sapien
cataggtgaggactagagactctcc

SEQ ID NO: 517329 - DNA, 25 bp, Homo sapien
gatagatgatcccagattagcgctc

SEQ ID NO: 517330 - DNA, 25 bp, Homo sapien
gtaagaagtacagatcccagagccc

SEQ ID NO: 517331 - DNA, 25 bp, Homo sapien
cttgtatacacagggcagaacgcta

SEQ ID NO: 517332 - DNA, 25 bp, Homo sapien
tctgtgagggtcttcgaaaaccgtg

SEQ ID NO: 517333 - DNA, 25 bp, Homo sapien
cgctcatggacctgtgtgttgctaa

SEQ ID NO: 517334 - DNA, 25 bp, Homo sapien
tcagaccatgtcagcactttccagc

SEQ ID NO: 517335 - DNA, 25 bp, Homo sapien
tattctagagttttccattgcaccg

SEQ ID NO: 517336 - DNA, 25 bp, Homo sapien
ttcatggtgtcaagcagcagttggg

SEQ ID NO: 517337 - DNA, 25 bp, Homo sapien
ggattctgtctccattcttatatac

SEQ ID NO: 517338 - DNA, 25 bp, Homo sapien
ttacccagtgagaggcacaccatta

SEQ ID NO: 517339 - DNA, 25 bp, Homo sapien
gattgtctgctgacctgttgccctg

SEQ ID NO: 517340 - DNA, 25 bp, Homo sapien
tgaatgtatataaacagaccaagtc

SEQ ID NO: 517341 - DNA, 25 bp, Homo sapien
ccacctttacggcttactatgtaag

SEQ ID NO: 517342 - DNA, 25 bp, Homo sapien
tacacacacgcatctcatatgaatg

SEQ ID NO: 517343 - DNA, 25 bp, Homo sapien
gagaccactgcagtcataccaccct

SEQ ID NO: 517344 - DNA, 25 bp, Homo sapien
ccgtggcgtgatcttggctcactgc

SEQ ID NO: 517345 - DNA, 25 bp, Homo sapien
tgaccaggctggagtaccgtggcgt

SEQ ID NO: 517346 - DNA, 25 bp, Homo sapien
aagctcagcctcccaggttcatgcc

SEQ ID NO: 517347 - DNA, 25 bp, Homo sapien
cctggctaatatttttgtatttttg

SEQ ID NO: 517348 - DNA, 25 bp, Homo sapien
catacctacctggaggaagagtgca

SEQ ID NO: 517349 - DNA, 25 bp, Homo sapien
gactgatacaagcaatgaggcaaca

SEQ ID NO: 517350 - DNA, 25 bp, Homo sapien
gatgctgagtaacttccatggcctg

SEQ ID NO: 517351 - DNA, 25 bp, Homo sapien
gcaaaggaaagtcattgtacccctg

SEQ ID NO: 517352 - DNA, 25 bp, Homo sapien
tgaaacttatttctggcatagtcat

SEQ ID NO: 517353 - DNA, 25 bp, Homo sapien
acttcttgaaacccacaatatccca

SEQ ID NO: 517354 - DNA, 25 bp, Homo sapien
ggcatagtcattgggcctttcactc

SEQ ID NO: 517355 - DNA, 25 bp, Homo sapien
ttcttgaaacccacaatatcccacg

SEQ ID NO: 517356 - DNA, 25 bp, Homo sapien
tcttggccttcaacacaaaggggct

SEQ ID NO: 517357 - DNA, 25 bp, Homo sapien
ggacacctggcaaaacactccactg

SEQ ID NO: 517358 - DNA, 25 bp, Homo sapien
gacaggagtcctgctccacgtggag

SEQ ID NO: 517359 - DNA, 25 bp, Homo sapien
tgtttcattccatcattggatttct

SEQ ID NO: 517360 - DNA, 25 bp, Homo sapien
cattgtctgcccacagtaagtgcat

SEQ ID NO: 517361 - DNA, 25 bp, Homo sapien
attgtctgcccacagtaagtgcatg

SEQ ID NO: 517362 - DNA, 25 bp, Homo sapien
ttgtctgcccacagtaagtgcatgc

SEQ ID NO: 517363 - DNA, 25 bp, Homo sapien
cagtaagtgcatgctatgagcttct

SEQ ID NO: 517364 - DNA, 25 bp, Homo sapien
cttcccagtgtttggatagttagga

SEQ ID NO: 517365 - DNA, 25 bp, Homo sapien
gacatcatgctctcctaagagaaga

SEQ ID NO: 517366 - DNA, 25 bp, Homo sapien
tcttttcaactgcaagttagacggc

SEQ ID NO: 517367 - DNA, 25 bp, Homo sapien
tatgtagggtctattgacatcatgc

SEQ ID NO: 517368 - DNA, 25 bp, Homo sapien
cttgggagaccacgttgctgacacc

SEQ ID NO: 517369 - DNA, 25 bp, Homo sapien
tgggagaccacgttgctgacaccct

SEQ ID NO: 517370 - DNA, 25 bp, Homo sapien
caaaggtgctggtggttcttccggc

SEQ ID NO: 517371 - DNA, 25 bp, Homo sapien
ttggttcttgggagaccacgttgct

SEQ ID NO: 517372 - DNA, 25 bp, Homo sapien
tcagtaagtcaaccctgccatcagt

SEQ ID NO: 517373 - DNA, 25 bp, Homo sapien
gccatctgtaactgccatcagtaag

SEQ ID NO: 517374 - DNA, 25 bp, Homo sapien
ggcatagttaactgtgacattagga

SEQ ID NO: 517375 - DNA, 25 bp, Homo sapien
gaatccttagagctagatgtggcat

SEQ ID NO: 517376 - DNA, 25 bp, Homo sapien
ttttccacttcatcaaattcatcaa

SEQ ID NO: 517377 - DNA, 25 bp, Homo sapien
tcatcaaattcatcaaatccttcca

SEQ ID NO: 517378 - DNA, 25 bp, Homo sapien
acttcatcaaattcatcaaatcctt

SEQ ID NO: 517379 - DNA, 25 bp, Homo sapien
tttccacttcatcaaattcatcaaa

SEQ ID NO: 517380 - DNA, 25 bp, Homo sapien
aaggtgcgcacaggggttactgtgt

SEQ ID NO: 517381 - DNA, 25 bp, Homo sapien
tttaaggtgcgcacaggggttactg

SEQ ID NO: 517382 - DNA, 25 bp, Homo sapien
ctttaaggtgcgcacaggggttact

SEQ ID NO: 517383 - DNA, 25 bp, Homo sapien
ttaaggtgcgcacaggggttactgt

SEQ ID NO: 517384 - DNA, 25 bp, Homo sapien
aaaactcagatctatggaagcattg

SEQ ID NO: 517385 - DNA, 25 bp, Homo sapien
ctcagatctatggaagcattgagct

SEQ ID NO: 517386 - DNA, 25 bp, Homo sapien
gtggttcttctagctggtaaattct

SEQ ID NO: 517387 - DNA, 25 bp, Homo sapien
gctggtaaattctaaaactcagatc

SEQ ID NO: 517388 - DNA, 25 bp, Homo sapien
aatggaaatcactgtcgtgatgtac

SEQ ID NO: 517389 - DNA, 25 bp, Homo sapien
tggaaatcactgtcgtgatgtacaa

SEQ ID NO: 517390 - DNA, 25 bp, Homo sapien
aaatcactgtcgtgatgtacaattt

SEQ ID NO: 517391 - DNA, 25 bp, Homo sapien
ggaaatcactgtcgtgatgtacaat

SEQ ID NO: 517392 - DNA, 25 bp, Homo sapien
taagcactccgtaagtttttccaga

SEQ ID NO: 517393 - DNA, 25 bp, Homo sapien
taccaaaaagtagtatcaccctcag

SEQ ID NO: 517394 - DNA, 25 bp, Homo sapien
gaatcaaagccctaagtgtaagagt

SEQ ID NO: 517395 - DNA, 25 bp, Homo sapien
ggtaatacgatctagccctctgcct

SEQ ID NO: 517396 - DNA, 25 bp, Homo sapien
taatcacagtgttgagattcgcata

SEQ ID NO: 517397 - DNA, 25 bp, Homo sapien
tcgcatatatgtaactgctaacaag

SEQ ID NO: 517398 - DNA, 25 bp, Homo sapien
gcagatactatcaattcacagctca

SEQ ID NO: 517399 - DNA, 25 bp, Homo sapien
gaataaagtagtgttcagcagatac

SEQ ID NO: 517400 - DNA, 25 bp, Homo sapien
agtcttactaacatgagccttccaa

SEQ ID NO: 517401 - DNA, 25 bp, Homo sapien
gatgtcctcagaacgtacacgatgt

SEQ ID NO: 517402 - DNA, 25 bp, Homo sapien
cagtaaatcttgtcctacaggctca

SEQ ID NO: 517403 - DNA, 25 bp, Homo sapien
tctgatgatgacaacaagaatggct

SEQ ID NO: 517404 - DNA, 25 bp, Homo sapien
cattaaaaaatgtatctgatatttt

SEQ ID NO: 517405 - DNA, 25 bp, Homo sapien
taaaaaatgtatctgatattttcat

SEQ ID NO: 517406 - DNA, 25 bp, Homo sapien
gtacattaaaaaatgtatctgatat

SEQ ID NO: 517407 - DNA, 25 bp, Homo sapien
aagtacattaaaaaatgtatctgat

SEQ ID NO: 517408 - DNA, 25 bp, Homo sapien
gttgcaggaatgacctaacagctgt

SEQ ID NO: 517409 - DNA, 25 bp, Homo sapien
taacagctgttgcacgcgcagtgac

SEQ ID NO: 517410 - DNA, 25 bp, Homo sapien
tgcagacgcattattcagctattca

SEQ ID NO: 517411 - DNA, 25 bp, Homo sapien
cagtgacgtaaaaagctgcagacgc

SEQ ID NO: 517412 - DNA, 25 bp, Homo sapien
caatgtccctgtggatgttgaatta

SEQ ID NO: 517413 - DNA, 25 bp, Homo sapien
gatacacaacctaaacaatgtccct

SEQ ID NO: 517414 - DNA, 25 bp, Homo sapien
aatgagtagcaacaaccagagccac

SEQ ID NO: 517415 - DNA, 25 bp, Homo sapien
tttcctccggccagaaaatgagtag

SEQ ID NO: 517416 - DNA, 25 bp, Homo sapien
tcaggtaagaaacgccaacttgctc

SEQ ID NO: 517417 - DNA, 25 bp, Homo sapien
tctgagtacatggaaggccgcaaca

SEQ ID NO: 517418 - DNA, 25 bp, Homo sapien
taatcgtgtatctttaggacccaac

SEQ ID NO: 517419 - DNA, 25 bp, Homo sapien
gaaacacaccgtcaggatcttgcgc

SEQ ID NO: 517420 - DNA, 25 bp, Homo sapien
caaatcctcactggcacaacggtgt

SEQ ID NO: 517421 - DNA, 25 bp, Homo sapien
ggaaacaggatgagggcctttctca

SEQ ID NO: 517422 - DNA, 25 bp, Homo sapien
gctgctcctccagactgtaccggaa

SEQ ID NO: 517423 - DNA, 25 bp, Homo sapien
tgtgaggcctcagtagctccaaaag

SEQ ID NO: 517424 - DNA, 25 bp, Homo sapien
tgtttatccccctttaagcagcaaa

SEQ ID NO: 517425 - DNA, 25 bp, Homo sapien
tagtaatccattcacactcaagtgg

SEQ ID NO: 517426 - DNA, 25 bp, Homo sapien
caagtggtgctcttataatttgttg

SEQ ID NO: 517427 - DNA, 25 bp, Homo sapien
taatttgttgtagatgtttatcccc

SEQ ID NO: 517428 - DNA, 25 bp, Homo sapien
ttggagtgaagacgcccccagagac

SEQ ID NO: 517429 - DNA, 25 bp, Homo sapien
caccgaggcttggagtgaagacgcc

SEQ ID NO: 517430 - DNA, 25 bp, Homo sapien
atccaagtaagggcaccgaggcttg

SEQ ID NO: 517431 - DNA, 25 bp, Homo sapien
tccaagtaagggcaccgaggcttgg

SEQ ID NO: 517432 - DNA, 25 bp, Homo sapien
tcagagacctcctctgtgacaagcc

SEQ ID NO: 517433 - DNA, 25 bp, Homo sapien
cagcaacatcaaataattcctcatg

SEQ ID NO: 517434 - DNA, 25 bp, Homo sapien
gctccgtgcatctgtttctttgcct

SEQ ID NO: 517435 - DNA, 25 bp, Homo sapien
gagacctcctctgtgacaagccact

SEQ ID NO: 517436 - DNA, 25 bp, Homo sapien
gaatgaatgtagctaatttctccca

SEQ ID NO: 517437 - DNA, 25 bp, Homo sapien
ggaggcctgtaaaaggtctcactgc

SEQ ID NO: 517438 - DNA, 25 bp, Homo sapien
gatggtctttacgtaattagcaact

SEQ ID NO: 517439 - DNA, 25 bp, Homo sapien
tgacacatgatgttcactcaataaa

SEQ ID NO: 517440 - DNA, 25 bp, Homo sapien
tttaaatttcagctatgctggctgg

SEQ ID NO: 517441 - DNA, 25 bp, Homo sapien
ttttaaatttcagctatgctggctg

SEQ ID NO: 517442 - DNA, 25 bp, Homo sapien
taaatttcagctatgctggctgggt

SEQ ID NO: 517443 - DNA, 25 bp, Homo sapien
ttaaatttcagctatgctggctggg

SEQ ID NO: 517444 - DNA, 25 bp, Homo sapien
tgaagttgggctgtaatctcaaact

SEQ ID NO: 517445 - DNA, 25 bp, Homo sapien
tcaaacttgtcactaaggagatagg

SEQ ID NO: 517446 - DNA, 25 bp, Homo sapien
ttcagaaacaggcatcttgctcagg

SEQ ID NO: 517447 - DNA, 25 bp, Homo sapien
tcactgagtcagttaggctgccaag

SEQ ID NO: 517448 - DNA, 25 bp, Homo sapien
cccttgtcatattaaaaagcttgaa

SEQ ID NO: 517449 - DNA, 25 bp, Homo sapien
tcatataatctatcaacaattcacc

SEQ ID NO: 517450 - DNA, 25 bp, Homo sapien
agaagtttgctaggcactgatttgc

SEQ ID NO: 517451 - DNA, 25 bp, Homo sapien
aaaatactggctggaattcccttgt

SEQ ID NO: 517452 - DNA, 25 bp, Homo sapien
tagagatcacggcaccagctttgtc

SEQ ID NO: 517453 - DNA, 25 bp, Homo sapien
gccctgggaagccacatgatgtttc

SEQ ID NO: 517454 - DNA, 25 bp, Homo sapien
aggatagagctcacactgggcagca

SEQ ID NO: 517455 - DNA, 25 bp, Homo sapien
cctgtgagggacttttgttacaatc

SEQ ID NO: 517456 - DNA, 25 bp, Homo sapien
cctgctggccatgttcggtggctca

SEQ ID NO: 517457 - DNA, 25 bp, Homo sapien
tacaacatggcctagaattggctga

SEQ ID NO: 517458 - DNA, 25 bp, Homo sapien
tccctatgttcagattagacacaca

SEQ ID NO: 517459 - DNA, 25 bp, Homo sapien
caaaacagcgtaatcaagccactgt

SEQ ID NO: 517460 - DNA, 25 bp, Homo sapien
caaggtcctttcagtgatttacaca

SEQ ID NO: 517461 - DNA, 25 bp, Homo sapien
gtagatactcaagggactgtttcca

SEQ ID NO: 517462 - DNA, 25 bp, Homo sapien
catggctgttgtcttacgtatataa

SEQ ID NO: 517463 - DNA, 25 bp, Homo sapien
aactggcttcccctgagtgcaggac

SEQ ID NO: 517464 - DNA, 25 bp, Homo sapien
tatgtgcctcaccaagatacagcca

SEQ ID NO: 517465 - DNA, 25 bp, Homo sapien
tactgcctgagagtgtaagatgtct

SEQ ID NO: 517466 - DNA, 25 bp, Homo sapien
tatggactaactacaaacgtgacaa

SEQ ID NO: 517467 - DNA, 25 bp, Homo sapien
tccagatgcagagagaataagaagc

SEQ ID NO: 517468 - DNA, 25 bp, Homo sapien
tggttttgtggcaggcatcccagct

SEQ ID NO: 517469 - DNA, 25 bp, Homo sapien
aaatcaatttgcatctaaaagcgcc

SEQ ID NO: 517470 - DNA, 25 bp, Homo sapien
tcacagaggattgtttggtcccagc

SEQ ID NO: 517471 - DNA, 25 bp, Homo sapien
taaaagcgccttcacggagttggcc

SEQ ID NO: 517472 - DNA, 25 bp, Homo sapien
tcttaggtgcacactaaatgtggcc

SEQ ID NO: 517473 - DNA, 25 bp, Homo sapien
tgcatgggtttaagggcagaacacc

SEQ ID NO: 517474 - DNA, 25 bp, Homo sapien
tagcttgctagtgaccttctctcaa

SEQ ID NO: 517475 - DNA, 25 bp, Homo sapien
tgaggtctacagtgcatgtacaggt

SEQ ID NO: 517476 - DNA, 25 bp, Homo sapien
tgtcccacgtggagaaggcgaagtt

SEQ ID NO: 517477 - DNA, 25 bp, Homo sapien
cgaagggccacttggtctgggcact

SEQ ID NO: 517478 - DNA, 25 bp, Homo sapien
ctccctcccgcgcattcagtggatg

SEQ ID NO: 517479 - DNA, 25 bp, Homo sapien
agccctcgcgaagggccacttggtc

SEQ ID NO: 517480 - DNA, 25 bp, Homo sapien
tggagtcccgcaactgctcactgat

SEQ ID NO: 517481 - DNA, 25 bp, Homo sapien
ttggcaaggtttccgtttgctggtc

SEQ ID NO: 517482 - DNA, 25 bp, Homo sapien
ggacgttcttccacagcagatccca

SEQ ID NO: 517483 - DNA, 25 bp, Homo sapien
gatctcctgagctgcgtttggcaag

SEQ ID NO: 517484 - DNA, 25 bp, Homo sapien
gtcctcataacgaccggcgggctct

SEQ ID NO: 517485 - DNA, 25 bp, Homo sapien
atccgtcctcataacgaccggcggg

SEQ ID NO: 517486 - DNA, 25 bp, Homo sapien
agatccgtcctcataacgaccggcg

SEQ ID NO: 517487 - DNA, 25 bp, Homo sapien
tttagatccgtcctcataacgaccg

SEQ ID NO: 517488 - DNA, 25 bp, Homo sapien
tcccgcgtggcccgcgactcagact

SEQ ID NO: 517489 - DNA, 25 bp, Homo sapien
ctcccgcgtggcccgcgactcagac

SEQ ID NO: 517490 - DNA, 25 bp, Homo sapien
ggcccgcgactcagactcccggcga

SEQ ID NO: 517491 - DNA, 25 bp, Homo sapien
cgtggcccgcgactcagactcccgg

SEQ ID NO: 517492 - DNA, 25 bp, Homo sapien
acatgggtcggtccggcgctgggag

SEQ ID NO: 517493 - DNA, 25 bp, Homo sapien
ctggaaaggacggacgcggcactcc

SEQ ID NO: 517494 - DNA, 25 bp, Homo sapien
ccgggacccaatgcgggcgcgacat

SEQ ID NO: 517495 - DNA, 25 bp, Homo sapien
gggaggctgcgccacgcgcgaggac

SEQ ID NO: 517496 - DNA, 25 bp, Homo sapien
tggagaagcacattccacggtctgc

SEQ ID NO: 517497 - DNA, 25 bp, Homo sapien
catcaccccgtatggaagagtggag

SEQ ID NO: 517498 - DNA, 25 bp, Homo sapien
ccctttgcttgagaatagagcccaa

SEQ ID NO: 517499 - DNA, 25 bp, Homo sapien
tgtaataagacccatcaccattgcc

SEQ ID NO: 517500 - DNA, 25 bp, Homo sapien
caggccaggaatcctttgccaagaa

SEQ ID NO: 517501 - DNA, 25 bp, Homo sapien
gcagctttgctgtggggaaatgcct

SEQ ID NO: 517502 - DNA, 25 bp, Homo sapien
caagaacccatagtcatggtgcatt

SEQ ID NO: 517503 - DNA, 25 bp, Homo sapien
cctttgccaagaacccatagtcatg

SEQ ID NO: 517504 - DNA, 25 bp, Homo sapien
ctcttcctttggtgtatccttcgct

SEQ ID NO: 517505 - DNA, 25 bp, Homo sapien
gatgggatgtagcaactcttccttt

SEQ ID NO: 517506 - DNA, 25 bp, Homo sapien
ggtgaagagctctcgcaactctctc

SEQ ID NO: 517507 - DNA, 25 bp, Homo sapien
cctttggtgtatccttcgctccatt

SEQ ID NO: 517508 - DNA, 25 bp, Homo sapien
ggccattggattgaagacgtttcca

SEQ ID NO: 517509 - DNA, 25 bp, Homo sapien
attcacaggccattggattgaagac

SEQ ID NO: 517510 - DNA, 25 bp, Homo sapien
gattgaagacgtttccagtgattga

SEQ ID NO: 517511 - DNA, 25 bp, Homo sapien
gaagacgtttccagtgattgaaatc

SEQ ID NO: 517512 - DNA, 25 bp, Homo sapien
ccaattccggacacaatggcgtaca

SEQ ID NO: 517513 - DNA, 25 bp, Homo sapien
caattccggacacaatggcgtacac

SEQ ID NO: 517514 - DNA, 25 bp, Homo sapien
tccacagctttgaggctcctaatag

SEQ ID NO: 517515 - DNA, 25 bp, Homo sapien
acatccacagctttgaggctcctaa

SEQ ID NO: 517516 - DNA, 25 bp, Homo sapien
gctttgaggctcctaatagagaaat

SEQ ID NO: 517517 - DNA, 25 bp, Homo sapien
tgagcctcaagcagtaaaggtcctg

SEQ ID NO: 517518 - DNA, 25 bp, Homo sapien
catttgggtaaaaacttcaagctga

SEQ ID NO: 517519 - DNA, 25 bp, Homo sapien
tcagtctgtgatatctgcgattcag

SEQ ID NO: 517520 - DNA, 25 bp, Homo sapien
tgcgattcagttaactgcagtaagg

SEQ ID NO: 517521 - DNA, 25 bp, Homo sapien
tcaatgacacatacaagctggcttc

SEQ ID NO: 517522 - DNA, 25 bp, Homo sapien
tcctccactacaccttgacttgctg

SEQ ID NO: 517523 - DNA, 25 bp, Homo sapien
cgtgttctacagaaatgtagtcctc

SEQ ID NO: 517524 - DNA, 25 bp, Homo sapien
ttctacagaaatgtagtcctcaaac

SEQ ID NO: 517525 - DNA, 25 bp, Homo sapien
gtgttctacagaaatgtagtcctca

SEQ ID NO: 517526 - DNA, 25 bp, Homo sapien
tgttctacagaaatgtagtcctcaa

SEQ ID NO: 517527 - DNA, 25 bp, Homo sapien
ccaacaggcaattctcaaggtgacc

SEQ ID NO: 517528 - DNA, 25 bp, Homo sapien
tggaactaagggacgtgtgcccact

SEQ ID NO: 517529 - DNA, 25 bp, Homo sapien
tgtgcccactgccattagtaggagg

SEQ ID NO: 517530 - DNA, 25 bp, Homo sapien
tccaggtatggtaaattcccaaggc

SEQ ID NO: 517531 - DNA, 25 bp, Homo sapien
acagaagtgcgccactgagaccagc

SEQ ID NO: 517532 - DNA, 25 bp, Homo sapien
tgagaccagctgtgcgtaatgtttt

SEQ ID NO: 517533 - DNA, 25 bp, Homo sapien
tctcaggtgaaactgactaaagtgg

SEQ ID NO: 517534 - DNA, 25 bp, Homo sapien
catctcaatagtagggaatctcagg

SEQ ID NO: 517535 - DNA, 25 bp, Homo sapien
taggacagctcaggaaatcagccgg

SEQ ID NO: 517536 - DNA, 25 bp, Homo sapien
gccaggccaggtgcaaattgcttct

SEQ ID NO: 517537 - DNA, 25 bp, Homo sapien
gaagaggcctcttgatgggatacca

SEQ ID NO: 517538 - DNA, 25 bp, Homo sapien
cataccgtcattggtgcctgtggaa

SEQ ID NO: 517539 - DNA, 25 bp, Homo sapien
gcagatggagctagtgcctctctca

SEQ ID NO: 517540 - DNA, 25 bp, Homo sapien
gggcctcatgggacaaataatgggt

SEQ ID NO: 517541 - DNA, 25 bp, Homo sapien
ctaacaatctggaagctgggcaatc

SEQ ID NO: 517542 - DNA, 25 bp, Homo sapien
acatcttgaagctatggcaggctaa

SEQ ID NO: 517543 - DNA, 25 bp, Homo sapien
tagacaattatcaagtgccgcaggc

SEQ ID NO: 517544 - DNA, 25 bp, Homo sapien
tagacttcaggatagtccagggtgc

SEQ ID NO: 517545 - DNA, 25 bp, Homo sapien
tcctgtgtaccttgagaatgcacct

SEQ ID NO: 517546 - DNA, 25 bp, Homo sapien
tacttgactattggccccagctgcc

SEQ ID NO: 517547 - DNA, 25 bp, Homo sapien
agcctgacagtacaaataaatctgt

SEQ ID NO: 517548 - DNA, 25 bp, Homo sapien
gcaatcaaggcctataataagcctg

SEQ ID NO: 517549 - DNA, 25 bp, Homo sapien
catctttatgacatcccaaaatgtg

SEQ ID NO: 517550 - DNA, 25 bp, Homo sapien
ccaaaatgtgatgagtagttattac

SEQ ID NO: 517551 - DNA, 25 bp, Homo sapien
ggctgagtgtgtagcccctcgtagc

SEQ ID NO: 517552 - DNA, 25 bp, Homo sapien
cccctctgtgctgctaagcgtgcat

SEQ ID NO: 517553 - DNA, 25 bp, Homo sapien
gctgagtgtgtagcccctcgtagcc

SEQ ID NO: 517554 - DNA, 25 bp, Homo sapien
gctaagcgtgcatcaggttctgctg

SEQ ID NO: 517555 - DNA, 25 bp, Homo sapien
aactcttctgccaaatcacttctca

SEQ ID NO: 517556 - DNA, 25 bp, Homo sapien
ctgtaactcttctgccaaatcactt

SEQ ID NO: 517557 - DNA, 25 bp, Homo sapien
tcttctgccaaatcacttctcatat

SEQ ID NO: 517558 - DNA, 25 bp, Homo sapien
gccaaatcacttctcatattcttac

SEQ ID NO: 517559 - DNA, 25 bp, Homo sapien
cctagtttgcagtgtggacggtcct

SEQ ID NO: 517560 - DNA, 25 bp, Homo sapien
gtagtgcctagtttgcagtgtggac

SEQ ID NO: 517561 - DNA, 25 bp, Homo sapien
ggaagtaaaggaggagaggtagtgc

SEQ ID NO: 517562 - DNA, 25 bp, Homo sapien
agaggtagtgcctagtttgcagtgt

SEQ ID NO: 517563 - DNA, 25 bp, Homo sapien
agaagaactgctcctatctcccaga

SEQ ID NO: 517564 - DNA, 25 bp, Homo sapien
ccttgcaggagtcaacagtgggtca

SEQ ID NO: 517565 - DNA, 25 bp, Homo sapien
gggccccttcagtatgactaccata

SEQ ID NO: 517566 - DNA, 25 bp, Homo sapien
gaatcaccaggaatcaccttgcagg

SEQ ID NO: 517567 - DNA, 25 bp, Homo sapien
ttttcccctgccaaatgaagccctg

SEQ ID NO: 517568 - DNA, 25 bp, Homo sapien
caaatgaagccctgaatgacagagt

SEQ ID NO: 517569 - DNA, 25 bp, Homo sapien
tagaccgaactctcatgcacgatac

SEQ ID NO: 517570 - DNA, 25 bp, Homo sapien
aaacagcgaaatattcaggctgtag

SEQ ID NO: 517571 - DNA, 25 bp, Homo sapien
ctgaagacccacaggtaagctccac

SEQ ID NO: 517572 - DNA, 25 bp, Homo sapien
atctaggactattaaaccacttcag

SEQ ID NO: 517573 - DNA, 25 bp, Homo sapien
gaagacccacaggtaagctccacat

SEQ ID NO: 517574 - DNA, 25 bp, Homo sapien
acatccaatctaggactattaaacc

SEQ ID NO: 517575 - DNA, 25 bp, Homo sapien
ctctttctttgggtctgttatcaga

SEQ ID NO: 517576 - DNA, 25 bp, Homo sapien
tcagccacaccttgagatggagtgc

SEQ ID NO: 517577 - DNA, 25 bp, Homo sapien
taaagctttgtccttgataccacag

SEQ ID NO: 517578 - DNA, 25 bp, Homo sapien
ccgtgactggccaagaacaaactgt

SEQ ID NO: 517579 - DNA, 25 bp, Homo sapien
aacacattaagaggatgtctcggcc

SEQ ID NO: 517580 - DNA, 25 bp, Homo sapien
tcaggccgagaaaaggccatactga

SEQ ID NO: 517581 - DNA, 25 bp, Homo sapien
caggccgagaaaaggccatactgac

SEQ ID NO: 517582 - DNA, 25 bp, Homo sapien
cgagcttgtgtgcaagccagcagct

SEQ ID NO: 517583 - DNA, 25 bp, Homo sapien
tagtccttctatccaaaacaggttc

SEQ ID NO: 517584 - DNA, 25 bp, Homo sapien
ggttcttccacgagcttgtgtgcaa

SEQ ID NO: 517585 - DNA, 25 bp, Homo sapien
caaaacaggttcttccacgagcttg

SEQ ID NO: 517586 - DNA, 25 bp, Homo sapien
ttgcctctggctagctcttttccaa

SEQ ID NO: 517587 - DNA, 25 bp, Homo sapien
tattgtagaacaagtcttctggtgc

SEQ ID NO: 517588 - DNA, 25 bp, Homo sapien
tccagcacccaagtgactaagcatg

SEQ ID NO: 517589 - DNA, 25 bp, Homo sapien
tgtctactcatttgtctgctgatgg

SEQ ID NO: 517590 - DNA, 25 bp, Homo sapien
caagctgtgcagattcgtgcttcca

SEQ ID NO: 517591 - DNA, 25 bp, Homo sapien
tttctgcataatgtaaaaccagctt

SEQ ID NO: 517592 - DNA, 25 bp, Homo sapien
catgtagccacatagagagtagcag

SEQ ID NO: 517593 - DNA, 25 bp, Homo sapien
ctttctgcataatgtaaaaccagct

SEQ ID NO: 517594 - DNA, 25 bp, Homo sapien
tagccatgtagccacatagagagta

SEQ ID NO: 517595 - DNA, 25 bp, Homo sapien
gaaatacaatggcttagaagcaggt

SEQ ID NO: 517596 - DNA, 25 bp, Homo sapien
gagctcagtgcggttttcttgttca

SEQ ID NO: 517597 - DNA, 25 bp, Homo sapien
ttcaccactgaacaccaaaacatgc

SEQ ID NO: 517598 - DNA, 25 bp, Homo sapien
cagcaaaaatgcacccaagaaatac

SEQ ID NO: 517599 - DNA, 25 bp, Homo sapien
tgctgcaagcaatgggacctagacc

SEQ ID NO: 517600 - DNA, 25 bp, Homo sapien
ccccagtttcaattgatcagagaga

SEQ ID NO: 517601 - DNA, 25 bp, Homo sapien
aatacggtgggttcaataacttgca

SEQ ID NO: 517602 - DNA, 25 bp, Homo sapien
tgatgtcacccgaataaaaagccct

SEQ ID NO: 517603 - DNA, 25 bp, Homo sapien
atggctcatgtcctccactattctg

SEQ ID NO: 517604 - DNA, 25 bp, Homo sapien
tctttgcctcatcacagccattcct

SEQ ID NO: 517605 - DNA, 25 bp, Homo sapien
tatgtgatttgcatggctcatgtcc

SEQ ID NO: 517606 - DNA, 25 bp, Homo sapien
tgtttactgacacacttctttgcct

SEQ ID NO: 517607 - DNA, 25 bp, Homo sapien
tccaaaacacaagctcttgcacttg

SEQ ID NO: 517608 - DNA, 25 bp, Homo sapien
ttgcacttgaacactgcctgccttt

SEQ ID NO: 517609 - DNA, 25 bp, Homo sapien
aacacaagctcttgcacttgaacac

SEQ ID NO: 517610 - DNA, 25 bp, Homo sapien
caaaacacaagctcttgcacttgaa

SEQ ID NO: 517611 - DNA, 25 bp, Homo sapien
ttacactcaagttgaacacaccctg

SEQ ID NO: 517612 - DNA, 25 bp, Homo sapien
tttaattccccaacaatcatctcca

SEQ ID NO: 517613 - DNA, 25 bp, Homo sapien
cctgcagtgtgctttctgctgggag

SEQ ID NO: 517614 - DNA, 25 bp, Homo sapien
gaatttcagactcatatttaattcc

SEQ ID NO: 517615 - DNA, 25 bp, Homo sapien
aggagctgtagagttctgaggaata

SEQ ID NO: 517616 - DNA, 25 bp, Homo sapien
gagttctgaggaataaggtttgaaa

SEQ ID NO: 517617 - DNA, 25 bp, Homo sapien
tctccattaaacctcacacaatgtg

SEQ ID NO: 517618 - DNA, 25 bp, Homo sapien
aacctcacacaatgtgatgaggagc

SEQ ID NO: 517619 - DNA, 25 bp, Homo sapien
gacacactgcatttggtcgttgtct

SEQ ID NO: 517620 - DNA, 25 bp, Homo sapien
tgacacactgcatttggtcgttgtc

SEQ ID NO: 517621 - DNA, 25 bp, Homo sapien
tttggtcgttgtctactaccagtga

SEQ ID NO: 517622 - DNA, 25 bp, Homo sapien
ttgtctactaccagtgagaagattg

SEQ ID NO: 517623 - DNA, 25 bp, Homo sapien
tcaagactctaccttaattacctcc

SEQ ID NO: 517624 - DNA, 25 bp, Homo sapien
ccataacaatggattgagaaaaatt

SEQ ID NO: 517625 - DNA, 25 bp, Homo sapien
tcatgaaagtcctaccctcaagact

SEQ ID NO: 517626 - DNA, 25 bp, Homo sapien
cattgtgggttggagcttcaacata

SEQ ID NO: 517627 - DNA, 25 bp, Homo sapien
agtttctaactcctcatgatatggg

SEQ ID NO: 517628 - DNA, 25 bp, Homo sapien
tcttcagacacaatcagttgagtgc

SEQ ID NO: 517629 - DNA, 25 bp, Homo sapien
caggaattctatcatgagggcagca

SEQ ID NO: 517630 - DNA, 25 bp, Homo sapien
agccttaatgcacctgaacagaatg

SEQ ID NO: 517631 - DNA, 25 bp, Homo sapien
caacttcaagtttagtaagcagaga

SEQ ID NO: 517632 - DNA, 25 bp, Homo sapien
ggagagcctgcccaataatgcagcc

SEQ ID NO: 517633 - DNA, 25 bp, Homo sapien
taaagctggactgataagccctggt

SEQ ID NO: 517634 - DNA, 25 bp, Homo sapien
aacataaactaggaactgctgctgg

SEQ ID NO: 517635 - DNA, 25 bp, Homo sapien
gatgacttgactagccaagagttgg

SEQ ID NO: 517636 - DNA, 25 bp, Homo sapien
acttgactagccaagagttggaggc

SEQ ID NO: 517637 - DNA, 25 bp, Homo sapien
gcggatgacttgactagccaagagt

SEQ ID NO: 517638 - DNA, 25 bp, Homo sapien
gggcggatgacttgactagccaaga

SEQ ID NO: 517639 - DNA, 25 bp, Homo sapien
gtaacatttcagtacaggaattgtt

SEQ ID NO: 517640 - DNA, 25 bp, Homo sapien
acaaatgtaacatttcagtacagga

SEQ ID NO: 517641 - DNA, 25 bp, Homo sapien
tttcagtacaggaattgttgattta

SEQ ID NO: 517642 - DNA, 25 bp, Homo sapien
atgtaacatttcagtacaggaattg

SEQ ID NO: 517643 - DNA, 25 bp, Homo sapien
aacagcctctagctggaccaggcaa

SEQ ID NO: 517644 - DNA, 25 bp, Homo sapien
acagagcaaaacacaggggcagcat

SEQ ID NO: 517645 - DNA, 25 bp, Homo sapien
tgcagctgcacgctagaacagcctc

SEQ ID NO: 517646 - DNA, 25 bp, Homo sapien
gctagaacagcctctagctggacca

SEQ ID NO: 517647 - DNA, 25 bp, Homo sapien
tgctgctatccattcaagacagagg

SEQ ID NO: 517648 - DNA, 25 bp, Homo sapien
tgcggagtggagaatttattgcaac

SEQ ID NO: 517649 - DNA, 25 bp, Homo sapien
tattgcaacagtcgatgctgctatc

SEQ ID NO: 517650 - DNA, 25 bp, Homo sapien
agaggaaacatgtgatcagtaaagg

SEQ ID NO: 517651 - DNA, 25 bp, Homo sapien
aaatccttggaacttccccactgtg

SEQ ID NO: 517652 - DNA, 25 bp, Homo sapien
gtcgtgaggatttgcttcacataca

SEQ ID NO: 517653 - DNA, 25 bp, Homo sapien
ttcacatacacttctgatccctttg

SEQ ID NO: 517654 - DNA, 25 bp, Homo sapien
cccactgtgcatcccaagcagggat

SEQ ID NO: 517655 - DNA, 25 bp, Homo sapien
agcccatgccctcagtatttgtcag

SEQ ID NO: 517656 - DNA, 25 bp, Homo sapien
cccatgggaacgactcgagctggga

SEQ ID NO: 517657 - DNA, 25 bp, Homo sapien
gcagtcaggcctagattcacaaatg

SEQ ID NO: 517658 - DNA, 25 bp, Homo sapien
tgtctcatctccaaccaacgcacag

SEQ ID NO: 517659 - DNA, 25 bp, Homo sapien
tagcattgtgcgtggaacatattcc

SEQ ID NO: 517660 - DNA, 25 bp, Homo sapien
gacttctccatggattcagccagca

SEQ ID NO: 517661 - DNA, 25 bp, Homo sapien
cagacttgagtactggttttgcccc

SEQ ID NO: 517662 - DNA, 25 bp, Homo sapien
gcataacatgaatagctaccctggt

SEQ ID NO: 517663 - DNA, 25 bp, Homo sapien
ttgagttccagttgacatttggctt

SEQ ID NO: 517664 - DNA, 25 bp, Homo sapien
tcttaggattactctccaggtttat

SEQ ID NO: 517665 - DNA, 25 bp, Homo sapien
tggatgtttgcagttttagttctac

SEQ ID NO: 517666 - DNA, 25 bp, Homo sapien
gcttggcacaccatcaagattctgg

SEQ ID NO: 517667 - DNA, 25 bp, Homo sapien
gaagaccgaattgcttatttccatg

SEQ ID NO: 517668 - DNA, 25 bp, Homo sapien
aaaccatccttatgcttgtgagagc

SEQ ID NO: 517669 - DNA, 25 bp, Homo sapien
cactgtggccggcaataattgtcac

SEQ ID NO: 517670 - DNA, 25 bp, Homo sapien
caaaagagtagttaggaatgccagc

SEQ ID NO: 517671 - DNA, 25 bp, Homo sapien
aaaggctaggaagtacatggtaaga

SEQ ID NO: 517672 - DNA, 25 bp, Homo sapien
ggatttatgcttatataaactgaaa

SEQ ID NO: 517673 - DNA, 25 bp, Homo sapien
acatctggtaagtaagtggatttat

SEQ ID NO: 517674 - DNA, 25 bp, Homo sapien
aactgaaaaaggctaggaagtacat

SEQ ID NO: 517675 - DNA, 25 bp, Homo sapien
catgactgtgaggactggatataaa

SEQ ID NO: 517676 - DNA, 25 bp, Homo sapien
cccagccactctgatcatgactgtg

SEQ ID NO: 517677 - DNA, 25 bp, Homo sapien
aacacctgagcacctcttccatgga

SEQ ID NO: 517678 - DNA, 25 bp, Homo sapien
actctgatcatgactgtgaggactg

SEQ ID NO: 517679 - DNA, 25 bp, Homo sapien
ctaggcacatgttcagcccttaaca

SEQ ID NO: 517680 - DNA, 25 bp, Homo sapien
cttattcatcaatttggaagttgtt

SEQ ID NO: 517681 - DNA, 25 bp, Homo sapien
ggctgagaagttacacagataatgg

SEQ ID NO: 517682 - DNA, 25 bp, Homo sapien
tgagaagttacacagataatggcaa

SEQ ID NO: 517683 - DNA, 25 bp, Homo sapien
gaagttgtttcagaggctgagaagt

SEQ ID NO: 517684 - DNA, 25 bp, Homo sapien
aacattgaaaaagacgcacacgcag

SEQ ID NO: 517685 - DNA, 25 bp, Homo sapien
ttgaaaaagacgcacacgcagaccg

SEQ ID NO: 517686 - DNA, 25 bp, Homo sapien
catttccgccttgcctgcctagcaa

SEQ ID NO: 517687 - DNA, 25 bp, Homo sapien
gcctagcaaacgtgcaaacattgaa

SEQ ID NO: 517688 - DNA, 25 bp, Homo sapien
agtgcgcaagcgcacggcgagaccc

SEQ ID NO: 517689 - DNA, 25 bp, Homo sapien
ctcgccctcccaccaagacgaggcg

SEQ ID NO: 517690 - DNA, 25 bp, Homo sapien
ctcccaccaagacgaggcgcgcgca

SEQ ID NO: 517691 - DNA, 25 bp, Homo sapien
cccaaagtgcgcaagcgcacggcga

SEQ ID NO: 517692 - DNA, 25 bp, Homo sapien
cttaatatccgggaccagaggctgg

SEQ ID NO: 517693 - DNA, 25 bp, Homo sapien
agaagtcttaatatccgggaccaga

SEQ ID NO: 517694 - DNA, 25 bp, Homo sapien
gccctcacgcgggaaccctccagaa

SEQ ID NO: 517695 - DNA, 25 bp, Homo sapien
taatatccgggaccagaggctggtt

SEQ ID NO: 517696 - DNA, 25 bp, Homo sapien
agggatccggtgacgcctcttcccg

SEQ ID NO: 517697 - DNA, 25 bp, Homo sapien
ggcagcgccatctggtgccgagtct

SEQ ID NO: 517698 - DNA, 25 bp, Homo sapien
ttccggcaacgagcgcaaaggaagg

SEQ ID NO: 517699 - DNA, 25 bp, Homo sapien
gcggaggtggcacgcgcccttctct

SEQ ID NO: 517700 - DNA, 25 bp, Homo sapien
cgcgcgggagggactttgtggcgac

SEQ ID NO: 517701 - DNA, 25 bp, Homo sapien
ttgtggcgactctgaagcggaagct

SEQ ID NO: 517702 - DNA, 25 bp, Homo sapien
ggagggactttgtggcgactctgaa

SEQ ID NO: 517703 - DNA, 25 bp, Homo sapien
gactttgtggcgactctgaagcgga

SEQ ID NO: 517704 - DNA, 25 bp, Homo sapien
aattgcctggtaggaagatgacacg

SEQ ID NO: 517705 - DNA, 25 bp, Homo sapien
cagtcttccccgtatcagttcttta

SEQ ID NO: 517706 - DNA, 25 bp, Homo sapien
ttaatctttgaggactgggaccctg

SEQ ID NO: 517707 - DNA, 25 bp, Homo sapien
caaacccaaaatggagcggaaactg

SEQ ID NO: 517708 - DNA, 25 bp, Homo sapien
taaagcgctgttgtaaaagcctgct

SEQ ID NO: 517709 - DNA, 25 bp, Homo sapien
ttcctttggcctattaaagcgctgt

SEQ ID NO: 517710 - DNA, 25 bp, Homo sapien
aagcctgctgtgtatgttaggaacc

SEQ ID NO: 517711 - DNA, 25 bp, Homo sapien
cccatcgagaagcagaatgtagtaa

SEQ ID NO: 517712 - DNA, 25 bp, Homo sapien
aatatactggtgatactaagcctgc

SEQ ID NO: 517713 - DNA, 25 bp, Homo sapien
ttctgatgctgttggtactaggacc

SEQ ID NO: 517714 - DNA, 25 bp, Homo sapien
taaaccctagaaccagtagagagct

SEQ ID NO: 517715 - DNA, 25 bp, Homo sapien
taagcctgcacaagttagtagtcct

SEQ ID NO: 517716 - DNA, 25 bp, Homo sapien
tttccttagtagagatcagttttct

SEQ ID NO: 517717 - DNA, 25 bp, Homo sapien
gtattttccttagtagagatcagtt

SEQ ID NO: 517718 - DNA, 25 bp, Homo sapien
tccttagtagagatcagttttctcc

SEQ ID NO: 517719 - DNA, 25 bp, Homo sapien
ttttccttagtagagatcagttttc

SEQ ID NO: 517720 - DNA, 25 bp, Homo sapien
gcaagagccactagtaccaaatgtt

SEQ ID NO: 517721 - DNA, 25 bp, Homo sapien
tagattccctacagcaagcaagagc

SEQ ID NO: 517722 - DNA, 25 bp, Homo sapien
tgagcagaatccttatcaagcagtg

SEQ ID NO: 517723 - DNA, 25 bp, Homo sapien
caagaacaccctagtcacatggatg

SEQ ID NO: 517724 - DNA, 25 bp, Homo sapien
tgcattaaagacttagggagggcct

SEQ ID NO: 517725 - DNA, 25 bp, Homo sapien
cattctggatttatggtggattacc

SEQ ID NO: 517726 - DNA, 25 bp, Homo sapien
ccttactcctacttttcacatttct

SEQ ID NO: 517727 - DNA, 25 bp, Homo sapien
tgactgagaccgcaggggcgccacc

SEQ ID NO: 517728 - DNA, 25 bp, Homo sapien
cctgcctatctgtacggtagagaga

SEQ ID NO: 517729 - DNA, 25 bp, Homo sapien
tacctggaaagtactagggacaata

SEQ ID NO: 517730 - DNA, 25 bp, Homo sapien
ttctgttatgctatcctagggcctg

SEQ ID NO: 517731 - DNA, 25 bp, Homo sapien
gcaaaaactttgacactgctcagaa

SEQ ID NO: 517732 - DNA, 25 bp, Homo sapien
tcctgactgaggttctttagatgcg

SEQ ID NO: 517733 - DNA, 25 bp, Homo sapien
aacctgtttactgagactgtcttgg

SEQ ID NO: 517734 - DNA, 25 bp, Homo sapien
gctcatttcggaagaaagctcctga

SEQ ID NO: 517735 - DNA, 25 bp, Homo sapien
tgttagtccacagacagtttgctca

SEQ ID NO: 517736 - DNA, 25 bp, Homo sapien
cagctcctcctgtgcacgttttgaa

SEQ ID NO: 517737 - DNA, 25 bp, Homo sapien
atgctgcaccttgggtatccttgag

SEQ ID NO: 517738 - DNA, 25 bp, Homo sapien
gtcctatggattggcagaaattccc

SEQ ID NO: 517739 - DNA, 25 bp, Homo sapien
tttggtaaagactctagtcctatgg

SEQ ID NO: 517740 - DNA, 25 bp, Homo sapien
tcatattgcttgcccaatttcggct

SEQ ID NO: 517741 - DNA, 25 bp, Homo sapien
ttgcttgcccaatttcggcttccac

SEQ ID NO: 517742 - DNA, 25 bp, Homo sapien
ccaatttcggcttccaccaattcat

SEQ ID NO: 517743 - DNA, 25 bp, Homo sapien
tattgcttgcccaatttcggcttcc

SEQ ID NO: 517744 - DNA, 25 bp, Homo sapien
cagtagggatgagcataggcacttt

SEQ ID NO: 517745 - DNA, 25 bp, Homo sapien
ctccaatccactgtcccaatcccaa

SEQ ID NO: 517746 - DNA, 25 bp, Homo sapien
cactgtcccaatcccaaaggttctc

SEQ ID NO: 517747 - DNA, 25 bp, Homo sapien
agacagtagggatgagcataggcac

SEQ ID NO: 517748 - DNA, 25 bp, Homo sapien
tctgactgacatactcatttaggac

SEQ ID NO: 517749 - DNA, 25 bp, Homo sapien
tatgcctatcatttcccacttcttc

SEQ ID NO: 517750 - DNA, 25 bp, Homo sapien
cgaaggaagtctgactgacatactc

SEQ ID NO: 517751 - DNA, 25 bp, Homo sapien
tactcatttaggaccaaaatatgcc

SEQ ID NO: 517752 - DNA, 25 bp, Homo sapien
tctgttggcaacctgctttttagca

SEQ ID NO: 517753 - DNA, 25 bp, Homo sapien
gctagtaattaaagatctgttggca

SEQ ID NO: 517754 - DNA, 25 bp, Homo sapien
cataggaagctgaaatctggcatac

SEQ ID NO: 517755 - DNA, 25 bp, Homo sapien
tgttagaggcttgtatgcccgcagc

SEQ ID NO: 517756 - DNA, 25 bp, Homo sapien
ccccacttcaagcagagcaattcta

SEQ ID NO: 517757 - DNA, 25 bp, Homo sapien
gttcacatcaaacccttacaaggtg

SEQ ID NO: 517758 - DNA, 25 bp, Homo sapien
gatcgtgtcaaactgcgctagccct

SEQ ID NO: 517759 - DNA, 25 bp, Homo sapien
gccaactcaaagaaggttcacatca

SEQ ID NO: 517760 - DNA, 25 bp, Homo sapien
ttcatttacactgggtgcacctgga

SEQ ID NO: 517761 - DNA, 25 bp, Homo sapien
cagatcaaaagtctaacactggtgt

SEQ ID NO: 517762 - DNA, 25 bp, Homo sapien
tttcaagcttctcgaggccctctgc

SEQ ID NO: 517763 - DNA, 25 bp, Homo sapien
gtttaaggtcagctcattagcagcc

SEQ ID NO: 517764 - DNA, 25 bp, Homo sapien
aaattcattcttgatattatcgtcc

SEQ ID NO: 517765 - DNA, 25 bp, Homo sapien
atggtgcaaattggaggcaggagag

SEQ ID NO: 517766 - DNA, 25 bp, Homo sapien
tatcgtccacacagttaatcctaga

SEQ ID NO: 517767 - DNA, 25 bp, Homo sapien
taatcctagaatttatgcaaactat

SEQ ID NO: 517768 - DNA, 25 bp, Homo sapien
cagcaccgcaggtggctttgccagt

SEQ ID NO: 517769 - DNA, 25 bp, Homo sapien
acttagcctagcctgggtatcacca

SEQ ID NO: 517770 - DNA, 25 bp, Homo sapien
caggaggagttagtaagagcttatc

SEQ ID NO: 517771 - DNA, 25 bp, Homo sapien
agaagaatcatggactccctgggca

SEQ ID NO: 517772 - DNA, 25 bp, Homo sapien
tcaggactgaagcagggacgcagtg

SEQ ID NO: 517773 - DNA, 25 bp, Homo sapien
aggactgaagcagggacgcagtgct

SEQ ID NO: 517774 - DNA, 25 bp, Homo sapien
actgaagcagggacgcagtgctcag

SEQ ID NO: 517775 - DNA, 25 bp, Homo sapien
gactgaagcagggacgcagtgctca

SEQ ID NO: 517776 - DNA, 25 bp, Homo sapien
acgtcccctaatccgctcctggcgc

SEQ ID NO: 517777 - DNA, 25 bp, Homo sapien
tcctggcgcgcgttcctgtcctcct

SEQ ID NO: 517778 - DNA, 25 bp, Homo sapien
ctctgccagggtcgcctgctcacgt

SEQ ID NO: 517779 - DNA, 25 bp, Homo sapien
gggccactgcgcggagaacctctgc

SEQ ID NO: 517780 - DNA, 25 bp, Homo sapien
tggcagaaagacttgtggcgagata

SEQ ID NO: 517781 - DNA, 25 bp, Homo sapien
ggcgagatatcaagatccacaggaa

SEQ ID NO: 517782 - DNA, 25 bp, Homo sapien
ctagtgtgcatggaagggcacagtg

SEQ ID NO: 517783 - DNA, 25 bp, Homo sapien
cattttgtttgaactccacccactg

SEQ ID NO: 517784 - DNA, 25 bp, Homo sapien
gagccaaatgccacaccgattgtgc

SEQ ID NO: 517785 - DNA, 25 bp, Homo sapien
gagacaccgcttccaaatataattg

SEQ ID NO: 517786 - DNA, 25 bp, Homo sapien
tttcggtgaaacagcaacatcctca

SEQ ID NO: 517787 - DNA, 25 bp, Homo sapien
tcagaaatcttagagacacggcttt

SEQ ID NO: 517788 - DNA, 25 bp, Homo sapien
gcagaaaggtcgacaaaattctttc

SEQ ID NO: 517789 - DNA, 25 bp, Homo sapien
atgaagcagaaaggtcgacaaaatt

SEQ ID NO: 517790 - DNA, 25 bp, Homo sapien
gaagcagaaaggtcgacaaaattct

SEQ ID NO: 517791 - DNA, 25 bp, Homo sapien
agcagaaaggtcgacaaaattcttt

SEQ ID NO: 517792 - DNA, 25 bp, Homo sapien
ggtccatattgtgcaaggcggccat

SEQ ID NO: 517793 - DNA, 25 bp, Homo sapien
ttagggccctagatttatggaagtc

SEQ ID NO: 517794 - DNA, 25 bp, Homo sapien
gcagtcctttgtaaagcccagcagg

SEQ ID NO: 517795 - DNA, 25 bp, Homo sapien
tgcccagagtcaaatgcagtccttt

SEQ ID NO: 517796 - DNA, 25 bp, Homo sapien
tttccagggtaaccatctggcatcc

SEQ ID NO: 517797 - DNA, 25 bp, Homo sapien
ttccagggtaaccatctggcatcct

SEQ ID NO: 517798 - DNA, 25 bp, Homo sapien
tccagggtaaccatctggcatcctc

SEQ ID NO: 517799 - DNA, 25 bp, Homo sapien
ccagggtaaccatctggcatcctct

SEQ ID NO: 517800 - DNA, 25 bp, Homo sapien
tgctgtgcaaatccagtgttagaga

SEQ ID NO: 517801 - DNA, 25 bp, Homo sapien
tgtgcaaatccagtgttagagatat

SEQ ID NO: 517802 - DNA, 25 bp, Homo sapien
aaatccagtgttagagatatcatca

SEQ ID NO: 517803 - DNA, 25 bp, Homo sapien
tgcaaatccagtgttagagatatca

SEQ ID NO: 517804 - DNA, 25 bp, Homo sapien
ggtttgtgtttaacctcagatggaa

SEQ ID NO: 517805 - DNA, 25 bp, Homo sapien
tggtttgtgtttaacctcagatgga

SEQ ID NO: 517806 - DNA, 25 bp, Homo sapien
gtttgtgtttaacctcagatggaaa

SEQ ID NO: 517807 - DNA, 25 bp, Homo sapien
agatagagcccaagcagtgcacagt

SEQ ID NO: 517808 - DNA, 25 bp, Homo sapien
gcatctctgaaaaccgtgggcattt

SEQ ID NO: 517809 - DNA, 25 bp, Homo sapien
ggcatttcgttcagaccccaaaagc

SEQ ID NO: 517810 - DNA, 25 bp, Homo sapien
tcatggccaagggatataccgtgca

SEQ ID NO: 517811 - DNA, 25 bp, Homo sapien
cagaaattgaactagggatgcccct

SEQ ID NO: 517812 - DNA, 25 bp, Homo sapien
ttggttgaacaaggtaatgagttgg

SEQ ID NO: 517813 - DNA, 25 bp, Homo sapien
tagtattaataacaagcctggtcac

SEQ ID NO: 517814 - DNA, 25 bp, Homo sapien
tgcatcatggacacatatacttcta

SEQ ID NO: 517815 - DNA, 25 bp, Homo sapien
gcaaatggtgctcaatgatacaagt

SEQ ID NO: 517816 - DNA, 25 bp, Homo sapien
tctggagtacaacaacaagatgcta

SEQ ID NO: 517817 - DNA, 25 bp, Homo sapien
cctgatcgtagtgttgtcaaaggaa

SEQ ID NO: 517818 - DNA, 25 bp, Homo sapien
caaaataccatattcagagatcagg

SEQ ID NO: 517819 - DNA, 25 bp, Homo sapien
cagtgtcactagaccaggctgttat

SEQ ID NO: 517820 - DNA, 25 bp, Homo sapien
caatggacttatcttgaaattctcc

SEQ ID NO: 517821 - DNA, 25 bp, Homo sapien
caatgaaatgataacccaagacctg

SEQ ID NO: 517822 - DNA, 25 bp, Homo sapien
gagcacagtgatcattcatggaact

SEQ ID NO: 517823 - DNA, 25 bp, Homo sapien
tgtccttcacagattgcatctgcag

SEQ ID NO: 517824 - DNA, 25 bp, Homo sapien
gctctacatgaatgattggcataac

SEQ ID NO: 517825 - DNA, 25 bp, Homo sapien
ccagtttagtggatattaaattgca

SEQ ID NO: 517826 - DNA, 25 bp, Homo sapien
tggaagaaaacgcacatttgccgct

SEQ ID NO: 517827 - DNA, 25 bp, Homo sapien
gagatgacaacaagaccacatttgt

SEQ ID NO: 517828 - DNA, 25 bp, Homo sapien
catcagacagtctagacactactct

SEQ ID NO: 517829 - DNA, 25 bp, Homo sapien
tgtgtgacctctgtacactgggctt

SEQ ID NO: 517830 - DNA, 25 bp, Homo sapien
tctatcagaggacaaaactacattt

SEQ ID NO: 517831 - DNA, 25 bp, Homo sapien
gttaaagtatgccttcatgatccaa

SEQ ID NO: 517832 - DNA, 25 bp, Homo sapien
acctcacagttaaagtatgccttca

SEQ ID NO: 517833 - DNA, 25 bp, Homo sapien
cagtaaatgcatagaatatttctca

SEQ ID NO: 517834 - DNA, 25 bp, Homo sapien
catcagggggtgtttcccagaactt

SEQ ID NO: 517835 - DNA, 25 bp, Homo sapien
ctgagccccaacaagcccatacttt

SEQ ID NO: 517836 - DNA, 25 bp, Homo sapien
gagccccaacaagcccatactttat

SEQ ID NO: 517837 - DNA, 25 bp, Homo sapien
ttgggaaagaatgggattgagagac

SEQ ID NO: 517838 - DNA, 25 bp, Homo sapien
taggttttatggctagctctgggaa

SEQ ID NO: 517839 - DNA, 25 bp, Homo sapien
tgatacagagtactggcaagagggt

SEQ ID NO: 517840 - DNA, 25 bp, Homo sapien
tacaactattatctaccaatggtgg

SEQ ID NO: 517841 - DNA, 25 bp, Homo sapien
caatggtggtgctcattctagactc

SEQ ID NO: 517842 - DNA, 25 bp, Homo sapien
tagactctaggctctttgaaaatag

SEQ ID NO: 517843 - DNA, 25 bp, Homo sapien
cagtttggacacctcttagcaaggg

SEQ ID NO: 517844 - DNA, 25 bp, Homo sapien
gatgggctaagattcaaaactccag

SEQ ID NO: 517845 - DNA, 25 bp, Homo sapien
caagggctgcaggtaggagatatct

SEQ ID NO: 517846 - DNA, 25 bp, Homo sapien
gactcttcctacttgttagcttcag

SEQ ID NO: 517847 - DNA, 25 bp, Homo sapien
tcaaaacacttgatgtcaaaacact

SEQ ID NO: 517848 - DNA, 25 bp, Homo sapien
ctttcctcaaaacacttgatgtcaa

SEQ ID NO: 517849 - DNA, 25 bp, Homo sapien
tcctcaaaacacttgatgtcaaaac

SEQ ID NO: 517850 - DNA, 25 bp, Homo sapien
ctcaaaacacttgatgtcaaaacac

SEQ ID NO: 517851 - DNA, 25 bp, Homo sapien
cacaggaattactctcagccacttg

SEQ ID NO: 517852 - DNA, 25 bp, Homo sapien
cacatgaaacaaaccgcagcctcaa

SEQ ID NO: 517853 - DNA, 25 bp, Homo sapien
cttttttcctggctcacaggaatta

SEQ ID NO: 517854 - DNA, 25 bp, Homo sapien
taaacatttggccagggaaatttca

SEQ ID NO: 517855 - DNA, 25 bp, Homo sapien
tcttctgccatggtgcagaagctgt

SEQ ID NO: 517856 - DNA, 25 bp, Homo sapien
catggaaagtcttggaaatacttct

SEQ ID NO: 517857 - DNA, 25 bp, Homo sapien
cagaagctgttaggttagttcctga

SEQ ID NO: 517858 - DNA, 25 bp, Homo sapien
tttaccttggttagtcagacatgga

SEQ ID NO: 517859 - DNA, 25 bp, Homo sapien
tcgttcctcattggtcatgtagaca

SEQ ID NO: 517860 - DNA, 25 bp, Homo sapien
ttaaactaggtctagctctcgttcc

SEQ ID NO: 517861 - DNA, 25 bp, Homo sapien
cattggtcatgtagacattaatggc

SEQ ID NO: 517862 - DNA, 25 bp, Homo sapien
ggtctagctctcgttcctcattggt

SEQ ID NO: 517863 - DNA, 25 bp, Homo sapien
ggacaactgtggctagacaaactct

SEQ ID NO: 517864 - DNA, 25 bp, Homo sapien
atccggctgccccaggtactgtcag

SEQ ID NO: 517865 - DNA, 25 bp, Homo sapien
tagagcaccctgaatcctgcagttc

SEQ ID NO: 517866 - DNA, 25 bp, Homo sapien
gcagttctctagaggatcttgagct

SEQ ID NO: 517867 - DNA, 25 bp, Homo sapien
cagaagcagacttcggtagtttacc

SEQ ID NO: 517868 - DNA, 25 bp, Homo sapien
gcagaagcagacttcggtagtttac

SEQ ID NO: 517869 - DNA, 25 bp, Homo sapien
agaagcagacttcggtagtttaccg

SEQ ID NO: 517870 - DNA, 25 bp, Homo sapien
agcagaagcagacttcggtagttta

SEQ ID NO: 517871 - DNA, 25 bp, Homo sapien
tagctgctagggtatagtttattca

SEQ ID NO: 517872 - DNA, 25 bp, Homo sapien
gaaacgcctttgtcatatatttagc

SEQ ID NO: 517873 - DNA, 25 bp, Homo sapien
tatttagctaataagagtagtgcaa

SEQ ID NO: 517874 - DNA, 25 bp, Homo sapien
tgcctggccaacgatattctttcaa

SEQ ID NO: 517875 - DNA, 25 bp, Homo sapien
tgatgctgtggcaccgttcctccga

SEQ ID NO: 517876 - DNA, 25 bp, Homo sapien
gttcctccgactctttccgtaatga

SEQ ID NO: 517877 - DNA, 25 bp, Homo sapien
gagagactggcaacttccaacggga

SEQ ID NO: 517878 - DNA, 25 bp, Homo sapien
gtaatgaccagttctgccctcatca

SEQ ID NO: 517879 - DNA, 25 bp, Homo sapien
ttttcctagatccaagtaaccacga

SEQ ID NO: 517880 - DNA, 25 bp, Homo sapien
gtaaccacgaatcctttccagttgc

SEQ ID NO: 517881 - DNA, 25 bp, Homo sapien
ggaacgcaagctgggttgtactaac

SEQ ID NO: 517882 - DNA, 25 bp, Homo sapien
gtgctttgtcttagtcccatcagag

SEQ ID NO: 517883 - DNA, 25 bp, Homo sapien
tagatggataaattttaggtcccaa

SEQ ID NO: 517884 - DNA, 25 bp, Homo sapien
ccaaactttgggacaaatgctgtga

SEQ ID NO: 517885 - DNA, 25 bp, Homo sapien
gctgtgaagacagaatttacttccg

SEQ ID NO: 517886 - DNA, 25 bp, Homo sapien
tgaagacagaatttacttccgttaa

SEQ ID NO: 517887 - DNA, 25 bp, Homo sapien
catcgccagtggtcctttgggactt

SEQ ID NO: 517888 - DNA, 25 bp, Homo sapien
tttgggacttccaccgcttgctcac

SEQ ID NO: 517889 - DNA, 25 bp, Homo sapien
gtcctttgggacttccaccgcttgc

SEQ ID NO: 517890 - DNA, 25 bp, Homo sapien
cagtggtcctttgggacttccaccg

SEQ ID NO: 517891 - DNA, 25 bp, Homo sapien
gcagcgctaatgcaactaggcagat

SEQ ID NO: 517892 - DNA, 25 bp, Homo sapien
gaatgtcaccaaagatcgcgttgca

SEQ ID NO: 517893 - DNA, 25 bp, Homo sapien
caagattaagaatatgggcagcgct

SEQ ID NO: 517894 - DNA, 25 bp, Homo sapien
gggatgagactacgatacaggctgt

SEQ ID NO: 517895 - DNA, 25 bp, Homo sapien
gtctcatctgtcatagcactccact

SEQ ID NO: 517896 - DNA, 25 bp, Homo sapien
cttgcatgaaagtctcatctgtcat

SEQ ID NO: 517897 - DNA, 25 bp, Homo sapien
cagtacatcaaatgtgcaggattta

SEQ ID NO: 517898 - DNA, 25 bp, Homo sapien
taaagcagtacatcaaatgtgcagg

SEQ ID NO: 517899 - DNA, 25 bp, Homo sapien
ctgccatgcacctatcccattttgg

SEQ ID NO: 517900 - DNA, 25 bp, Homo sapien
ccattttggtcctgcttagggctgt

SEQ ID NO: 517901 - DNA, 25 bp, Homo sapien
tgcacctatcccattttggtcctgc

SEQ ID NO: 517902 - DNA, 25 bp, Homo sapien
ctgcttagggctgtgaaatctctcc

SEQ ID NO: 517903 - DNA, 25 bp, Homo sapien
tctgacaccagaaaccattacatcc

SEQ ID NO: 517904 - DNA, 25 bp, Homo sapien
tatttctgggtcttacatacttgga

SEQ ID NO: 517905 - DNA, 25 bp, Homo sapien
caagaagtctccgttaaattgaagc

SEQ ID NO: 517906 - DNA, 25 bp, Homo sapien
tttcaggccattagctttcctgggc

SEQ ID NO: 517907 - DNA, 25 bp, Homo sapien
tgtgatttctatttgcaagggaaaa

SEQ ID NO: 517908 - DNA, 25 bp, Homo sapien
tatgcagctaattcaatgtctttga

SEQ ID NO: 517909 - DNA, 25 bp, Homo sapien
atgaatgtgatttctatttgcaagg

SEQ ID NO: 517910 - DNA, 25 bp, Homo sapien
ttcttatgcagctaattcaatgtct

SEQ ID NO: 517911 - DNA, 25 bp, Homo sapien
ttatctcctccttagttgagcattt

SEQ ID NO: 517912 - DNA, 25 bp, Homo sapien
tatctcctccttagttgagcatttt

SEQ ID NO: 517913 - DNA, 25 bp, Homo sapien
gacttgaaacacgatcttgtgcaaa

SEQ ID NO: 517914 - DNA, 25 bp, Homo sapien
cttgtgcaaaatccagagtagaatc

SEQ ID NO: 517915 - DNA, 25 bp, Homo sapien
aatccagagtagaatctgctgcagg

SEQ ID NO: 517916 - DNA, 25 bp, Homo sapien
cacgatcttgtgcaaaatccagagt

SEQ ID NO: 517917 - DNA, 25 bp, Homo sapien
gcaatgcccaatttccctggtactt

SEQ ID NO: 517918 - DNA, 25 bp, Homo sapien
caatgcccaatttccctggtacttg

SEQ ID NO: 517919 - DNA, 25 bp, Homo sapien
aatgcccaatttccctggtacttgg

SEQ ID NO: 517920 - DNA, 25 bp, Homo sapien
ttagattaagtccagtggaggaaca

SEQ ID NO: 517921 - DNA, 25 bp, Homo sapien
ttggatgcattagattaagtccagt

SEQ ID NO: 517922 - DNA, 25 bp, Homo sapien
tgcattagattaagtccagtggagg

SEQ ID NO: 517923 - DNA, 25 bp, Homo sapien
gctttggatgcattagattaagtcc

SEQ ID NO: 517924 - DNA, 25 bp, Homo sapien
gtccaagatcaaggtgccacttctt

SEQ ID NO: 517925 - DNA, 25 bp, Homo sapien
agatcaaggtgccacttcttggttc

SEQ ID NO: 517926 - DNA, 25 bp, Homo sapien
tccaagatcaaggtgccacttcttg

SEQ ID NO: 517927 - DNA, 25 bp, Homo sapien
caagatcaaggtgccacttcttggt

SEQ ID NO: 517928 - DNA, 25 bp, Homo sapien
tcacattgatactagacagtctcag

SEQ ID NO: 517929 - DNA, 25 bp, Homo sapien
gcaagagtcacatacacaggccaaa

SEQ ID NO: 517930 - DNA, 25 bp, Homo sapien
ggtgtaattacccatttgcaagagt

SEQ ID NO: 517931 - DNA, 25 bp, Homo sapien
tggaagtgacttcaagactggcttg

SEQ ID NO: 517932 - DNA, 25 bp, Homo sapien
tccaagttctgtggatttgcttcat

SEQ ID NO: 517933 - DNA, 25 bp, Homo sapien
gttctgtggatttgcttcatgactc

SEQ ID NO: 517934 - DNA, 25 bp, Homo sapien
caagttctgtggatttgcttcatga

SEQ ID NO: 517935 - DNA, 25 bp, Homo sapien
tgtggatttgcttcatgactctttc

SEQ ID NO: 517936 - DNA, 25 bp, Homo sapien
tccacaagtcttgttgtaaaaaatg

SEQ ID NO: 517937 - DNA, 25 bp, Homo sapien
gagtcaaaactttccacaagtcttg

SEQ ID NO: 517938 - DNA, 25 bp, Homo sapien
agtcaaaactttccacaagtcttgt

SEQ ID NO: 517939 - DNA, 25 bp, Homo sapien
agagtcaaaactttccacaagtctt

SEQ ID NO: 517940 - DNA, 25 bp, Homo sapien
ctctctatagaagtctttagtaaaa

SEQ ID NO: 517941 - DNA, 25 bp, Homo sapien
agccctgccaacgcaaggtctcaca

SEQ ID NO: 517942 - DNA, 25 bp, Homo sapien
ctagccctgccaacgcaaggtctca

SEQ ID NO: 517943 - DNA, 25 bp, Homo sapien
agagctgttcctctctatagaagtc

SEQ ID NO: 517944 - DNA, 25 bp, Homo sapien
tatcacttggaagcgtttgtggcca

SEQ ID NO: 517945 - DNA, 25 bp, Homo sapien
tacagctgggtagcaaagccattta

SEQ ID NO: 517946 - DNA, 25 bp, Homo sapien
actatgagcatcgtctacagctggg

SEQ ID NO: 517947 - DNA, 25 bp, Homo sapien
ggcactttataagaagttcatggag

SEQ ID NO: 517948 - DNA, 25 bp, Homo sapien
caaatttgtgtgacagactccgaac

SEQ ID NO: 517949 - DNA, 25 bp, Homo sapien
caaggtatagatgccgtcaccccaa

SEQ ID NO: 517950 - DNA, 25 bp, Homo sapien
ttttgaccagtgaaactatgatccc

SEQ ID NO: 517951 - DNA, 25 bp, Homo sapien
tttctgccacaggtaacatgattgt

SEQ ID NO: 517952 - DNA, 25 bp, Homo sapien
tgcagaattagggttcaagctctct

SEQ ID NO: 517953 - DNA, 25 bp, Homo sapien
tgactgtggcctgccttcaggctaa

SEQ ID NO: 517954 - DNA, 25 bp, Homo sapien
ggattgcctctatcattttgtagca

SEQ ID NO: 517955 - DNA, 25 bp, Homo sapien
tttagctgcccatgttagtgatgac

SEQ ID NO: 517956 - DNA, 25 bp, Homo sapien
cattgagagtatggtaaacaaaatc

SEQ ID NO: 517957 - DNA, 25 bp, Homo sapien
tctcttactatggtagacctcacag

SEQ ID NO: 517958 - DNA, 25 bp, Homo sapien
aaaatctgaacggtgaacagagagc

SEQ ID NO: 517959 - DNA, 25 bp, Homo sapien
ccatgtcattgagagtatggtaaac

SEQ ID NO: 517960 - DNA, 25 bp, Homo sapien
aatgtgacaatcgactccgcatgtg

SEQ ID NO: 517961 - DNA, 25 bp, Homo sapien
tgacaatcgactccgcatgtgtccc

SEQ ID NO: 517962 - DNA, 25 bp, Homo sapien
atcgactccgcatgtgtcccaggca

SEQ ID NO: 517963 - DNA, 25 bp, Homo sapien
ttaatgtgacaatcgactccgcatg

SEQ ID NO: 517964 - DNA, 25 bp, Homo sapien
aatgggaatgcatggattgagtgtg

SEQ ID NO: 517965 - DNA, 25 bp, Homo sapien
gctctaggtctggaatgggaatgca

SEQ ID NO: 517966 - DNA, 25 bp, Homo sapien
ggaatgggaatgcatggattgagtg

SEQ ID NO: 517967 - DNA, 25 bp, Homo sapien
tctaggtctggaatgggaatgcatg

SEQ ID NO: 517968 - DNA, 25 bp, Homo sapien
tcctcatctagttttgctactggat

SEQ ID NO: 517969 - DNA, 25 bp, Homo sapien
cctcatctagttttgctactggatg

SEQ ID NO: 517970 - DNA, 25 bp, Homo sapien
catctagttttgctactggatgggg

SEQ ID NO: 517971 - DNA, 25 bp, Homo sapien
tcatctagttttgctactggatggg

SEQ ID NO: 517972 - DNA, 25 bp, Homo sapien
tcgtcagcgtggagagttcagacac

SEQ ID NO: 517973 - DNA, 25 bp, Homo sapien
tacagtgtaaactcatcactcttgg

SEQ ID NO: 517974 - DNA, 25 bp, Homo sapien
tattagtgctggaaggtcgtcagcg

SEQ ID NO: 517975 - DNA, 25 bp, Homo sapien
gggagatgcccattaccaaaggcac

SEQ ID NO: 517976 - DNA, 25 bp, Homo sapien
ctctgaccgtcagaaatatgctgga

SEQ ID NO: 517977 - DNA, 25 bp, Homo sapien
gcaccgtcttctgaattgtctctga

SEQ ID NO: 517978 - DNA, 25 bp, Homo sapien
tactatgtcttcaaatgcaccgtct

SEQ ID NO: 517979 - DNA, 25 bp, Homo sapien
ctttgaaagccccagaatgaagtga

SEQ ID NO: 517980 - DNA, 25 bp, Homo sapien
cctggaacaaagactgccctattga

SEQ ID NO: 517981 - DNA, 25 bp, Homo sapien
gtgtgagagccaactcttttatttc

SEQ ID NO: 517982 - DNA, 25 bp, Homo sapien
gaactcctcgacctcttagtgtgag

SEQ ID NO: 517983 - DNA, 25 bp, Homo sapien
cctattgaacggagccacctttgag

SEQ ID NO: 517984 - DNA, 25 bp, Homo sapien
cctctcttcggaaaatctatgaatc

SEQ ID NO: 517985 - DNA, 25 bp, Homo sapien
taattgccctaaaatggtttagcag

SEQ ID NO: 517986 - DNA, 25 bp, Homo sapien
gaaatgagcaatcgtattgacccag

SEQ ID NO: 517987 - DNA, 25 bp, Homo sapien
tttggatgccatcgtattgacccag

SEQ ID NO: 517988 - DNA, 25 bp, Homo sapien
caaggtaagaatgttggtttgacca

SEQ ID NO: 517989 - DNA, 25 bp, Homo sapien
tgaccagttgtaggttcagtaacat

SEQ ID NO: 517990 - DNA, 25 bp, Homo sapien
ttggatccagctttccgggagatac

SEQ ID NO: 517991 - DNA, 25 bp, Homo sapien
gctttccgggagatacccagaatct

SEQ ID NO: 517992 - DNA, 25 bp, Homo sapien
ccttagttgctctctgtaggcctca

SEQ ID NO: 517993 - DNA, 25 bp, Homo sapien
gagttaagctaatgctgccagcagt

SEQ ID NO: 517994 - DNA, 25 bp, Homo sapien
ttaatattgcagcacacgctgctgt

SEQ ID NO: 517995 - DNA, 25 bp, Homo sapien
aattaggatctaaagagccctcctg

SEQ ID NO: 517996 - DNA, 25 bp, Homo sapien
gcacaacctggtggtcgtggctcag

SEQ ID NO: 517997 - DNA, 25 bp, Homo sapien
cctggtggtcgtggctcagacacca

SEQ ID NO: 517998 - DNA, 25 bp, Homo sapien
acaacctggtggtcgtggctcagac

SEQ ID NO: 517999 - DNA, 25 bp, Homo sapien
aacctggtggtcgtggctcagacac

SEQ ID NO: 518000 - DNA, 25 bp, Homo sapien
tacttggtgccacaagagattctga

SEQ ID NO: 518001 - DNA, 25 bp, Homo sapien
tttcgaaagctatccacaggcagcc

SEQ ID NO: 518002 - DNA, 25 bp, Homo sapien
gaacacgtaagtgcacaatcctcat

SEQ ID NO: 518003 - DNA, 25 bp, Homo sapien
gaggaatttgatccggagagcttaa

SEQ ID NO: 518004 - DNA, 25 bp, Homo sapien
tctctccagcatagtaattctggaa

SEQ ID NO: 518005 - DNA, 25 bp, Homo sapien
tctgattgtctctccagcatagtaa

SEQ ID NO: 518006 - DNA, 25 bp, Homo sapien
tgtctctccagcatagtaattctgg

SEQ ID NO: 518007 - DNA, 25 bp, Homo sapien
gattgtctctccagcatagtaattc

SEQ ID NO: 518008 - DNA, 25 bp, Homo sapien
tagcgcactaatgcaggtgtgataa

SEQ ID NO: 518009 - DNA, 25 bp, Homo sapien
cgcactaatgcaggtgtgataaagt

SEQ ID NO: 518010 - DNA, 25 bp, Homo sapien
ctagcgcactaatgcaggtgtgata

SEQ ID NO: 518011 - DNA, 25 bp, Homo sapien
gcgcactaatgcaggtgtgataaag

SEQ ID NO: 518012 - DNA, 25 bp, Homo sapien
caatgttccatagcagtcaccatgc

SEQ ID NO: 518013 - DNA, 25 bp, Homo sapien
gggagctggatcctatcacccttat

SEQ ID NO: 518014 - DNA, 25 bp, Homo sapien
aaactccataccaatgttccatagc

SEQ ID NO: 518015 - DNA, 25 bp, Homo sapien
gatcctatcacccttatttctcctg

SEQ ID NO: 518016 - DNA, 25 bp, Homo sapien
tagccttgataaaggtacatataga

SEQ ID NO: 518017 - DNA, 25 bp, Homo sapien
gtgacaggtgctatgttagccttga

SEQ ID NO: 518018 - DNA, 25 bp, Homo sapien
tgacaggtgctatgttagccttgat

SEQ ID NO: 518019 - DNA, 25 bp, Homo sapien
ggtacatatagaatcaactgaatca

SEQ ID NO: 518020 - DNA, 25 bp, Homo sapien
atcctactgggcctgcaaaatggac

SEQ ID NO: 518021 - DNA, 25 bp, Homo sapien
tctgaatcctactgggcctgcaaaa

SEQ ID NO: 518022 - DNA, 25 bp, Homo sapien
cttctactctgaatcctactgggcc

SEQ ID NO: 518023 - DNA, 25 bp, Homo sapien
actgggcctgcaaaatggactgaaa

SEQ ID NO: 518024 - DNA, 25 bp, Homo sapien
tgtagttctggcctacgtagcaagc

SEQ ID NO: 518025 - DNA, 25 bp, Homo sapien
agccaccttgtaccaaattctgctt

SEQ ID NO: 518026 - DNA, 25 bp, Homo sapien
tgcttcagcatcaaagcgtgttggt

SEQ ID NO: 518027 - DNA, 25 bp, Homo sapien
cagcatcaaagcgtgttggtgtagt

SEQ ID NO: 518028 - DNA, 25 bp, Homo sapien
gccctgagcatggccacgtgggact

SEQ ID NO: 518029 - DNA, 25 bp, Homo sapien
ccctgagcatggccacgtgggactg

SEQ ID NO: 518030 - DNA, 25 bp, Homo sapien
tctcaaacttgtgacctcaggtgac

SEQ ID NO: 518031 - DNA, 25 bp, Homo sapien
caaacttgtgacctcaggtgaccca

SEQ ID NO: 518032 - DNA, 25 bp, Homo sapien
attacagacacgtgccatcacaccc

SEQ ID NO: 518033 - DNA, 25 bp, Homo sapien
ttacagacacgtgccatcacaccca

SEQ ID NO: 518034 - DNA, 25 bp, Homo sapien
cagagcaccttgtaagtttgtcacc

SEQ ID NO: 518035 - DNA, 25 bp, Homo sapien
tatgaacaagtgacaggtgtacaca

SEQ ID NO: 518036 - DNA, 25 bp, Homo sapien
ctcatctggcttttgtatgaacaag

SEQ ID NO: 518037 - DNA, 25 bp, Homo sapien
cactacgcttggacttgtttttcct

SEQ ID NO: 518038 - DNA, 25 bp, Homo sapien
cagtgcactcccaattgtacaagcc

SEQ ID NO: 518039 - DNA, 25 bp, Homo sapien
cacagggatctgcttgcatagccaa

SEQ ID NO: 518040 - DNA, 25 bp, Homo sapien
aaaaagtctgctctctcaataaggg

SEQ ID NO: 518041 - DNA, 25 bp, Homo sapien
tgagcaaagcgagaaataacctggc

SEQ ID NO: 518042 - DNA, 25 bp, Homo sapien
caggacgaaccttcccattctacag

SEQ ID NO: 518043 - DNA, 25 bp, Homo sapien
tccgttgtggggactcggctgcacc

SEQ ID NO: 518044 - DNA, 25 bp, Homo sapien
aggacgaaccttcccattctacaga

SEQ ID NO: 518045 - DNA, 25 bp, Homo sapien
actcggctgcaccaggacgaacctt

SEQ ID NO: 518046 - DNA, 25 bp, Homo sapien
tcagaactcatctggtccaagagaa

SEQ ID NO: 518047 - DNA, 25 bp, Homo sapien
tgaatcaatggctacactagattgg

SEQ ID NO: 518048 - DNA, 25 bp, Homo sapien
tacactagattggatttcagaactc

SEQ ID NO: 518049 - DNA, 25 bp, Homo sapien
gagaaagacattgtccattggagtg

SEQ ID NO: 518050 - DNA, 25 bp, Homo sapien
atatctctccggcaggaactcatgc

SEQ ID NO: 518051 - DNA, 25 bp, Homo sapien
tgctgcacagctgttttgtctctgg

SEQ ID NO: 518052 - DNA, 25 bp, Homo sapien
taaagcacacggtgaattcaaagca

SEQ ID NO: 518053 - DNA, 25 bp, Homo sapien
actttggccgaaggcagactgtata

SEQ ID NO: 518054 - DNA, 25 bp, Homo sapien
atttcattctttgtggcctttagag

SEQ ID NO: 518055 - DNA, 25 bp, Homo sapien
tttcattctttgtggcctttagagg

SEQ ID NO: 518056 - DNA, 25 bp, Homo sapien
tgcagaatcacagcctgaataacca

SEQ ID NO: 518057 - DNA, 25 bp, Homo sapien
cattgttctgtaggtctgagttctt

SEQ ID NO: 518058 - DNA, 25 bp, Homo sapien
tgaataaccacccaggcaactcttc

SEQ ID NO: 518059 - DNA, 25 bp, Homo sapien
agttctttagtgtgcaagaagcaga

SEQ ID NO: 518060 - DNA, 25 bp, Homo sapien
gctgacaggccagacactgtaaaag

SEQ ID NO: 518061 - DNA, 25 bp, Homo sapien
gagctgacaggccagacactgtaaa

SEQ ID NO: 518062 - DNA, 25 bp, Homo sapien
tctggtgccaggacaaggtggacta

SEQ ID NO: 518063 - DNA, 25 bp, Homo sapien
gaagttgtgagtcactcgggtgtca

SEQ ID NO: 518064 - DNA, 25 bp, Homo sapien
acctatcagcttggtgtaaaagagg

SEQ ID NO: 518065 - DNA, 25 bp, Homo sapien
ttagggttgtgagtgtatcctacac

SEQ ID NO: 518066 - DNA, 25 bp, Homo sapien
cctacacctatcagcttggtgtaaa

SEQ ID NO: 518067 - DNA, 25 bp, Homo sapien
gttgtgagtgtatcctacacctatc

SEQ ID NO: 518068 - DNA, 25 bp, Homo sapien
ctggagtagaaacacctccaggttg

SEQ ID NO: 518069 - DNA, 25 bp, Homo sapien
gagtagaaacacctccaggttggat

SEQ ID NO: 518070 - DNA, 25 bp, Homo sapien
ggagtagaaacacctccaggttgga

SEQ ID NO: 518071 - DNA, 25 bp, Homo sapien
tggagtagaaacacctccaggttgg

SEQ ID NO: 518072 - DNA, 25 bp, Homo sapien
gagagattgacagcgctctccaatt

SEQ ID NO: 518073 - DNA, 25 bp, Homo sapien
gcagtcttcggagtcaatctgatac

SEQ ID NO: 518074 - DNA, 25 bp, Homo sapien
tgcaaagcagtcttcggagtcaatc

SEQ ID NO: 518075 - DNA, 25 bp, Homo sapien
gctgctattctgaaatgagtgttat

SEQ ID NO: 518076 - DNA, 25 bp, Homo sapien
aaaattcatttggttgccagccagc

SEQ ID NO: 518077 - DNA, 25 bp, Homo sapien
tccccagtgttaggtaagaaagatg

SEQ ID NO: 518078 - DNA, 25 bp, Homo sapien
catggcagtcttggtgcctcacatg

SEQ ID NO: 518079 - DNA, 25 bp, Homo sapien
ggctcccgatcgtaccctgtcttga

SEQ ID NO: 518080 - DNA, 25 bp, Homo sapien
tgaacccgaacttgtaaattccaga

SEQ ID NO: 518081 - DNA, 25 bp, Homo sapien
gtttcattacaccaagtccatagct

SEQ ID NO: 518082 - DNA, 25 bp, Homo sapien
tgccaagattgccatgtgcgagtgg

SEQ ID NO: 518083 - DNA, 25 bp, Homo sapien
tccatagcttcggtgaagggatccc

SEQ ID NO: 518084 - DNA, 25 bp, Homo sapien
tgactgccagaagcaagttttccct

SEQ ID NO: 518085 - DNA, 25 bp, Homo sapien
tgttcttcttgaactccctcttcct

SEQ ID NO: 518086 - DNA, 25 bp, Homo sapien
gcaagttttcccttgttcttcttga

SEQ ID NO: 518087 - DNA, 25 bp, Homo sapien
aaagaatgaggcagtgactgccaga

SEQ ID NO: 518088 - DNA, 25 bp, Homo sapien
tttattgatcctttcttccattgaa

SEQ ID NO: 518089 - DNA, 25 bp, Homo sapien
ttattgatcctttcttccattgaaa

SEQ ID NO: 518090 - DNA, 25 bp, Homo sapien
ttgggccaactctaagaaagccatc

SEQ ID NO: 518091 - DNA, 25 bp, Homo sapien
acctaatggaaattgggccaactct

SEQ ID NO: 518092 - DNA, 25 bp, Homo sapien
tcttggttttgcagctccgcaagcc

SEQ ID NO: 518093 - DNA, 25 bp, Homo sapien
gtgactatggcatcctacggagaac

SEQ ID NO: 518094 - DNA, 25 bp, Homo sapien
tcctacggagaacttcaatattcag

SEQ ID NO: 518095 - DNA, 25 bp, Homo sapien
taggaagatatagcactactgagtg

SEQ ID NO: 518096 - DNA, 25 bp, Homo sapien
ggtgctcaggcaggtttgtaagact

SEQ ID NO: 518097 - DNA, 25 bp, Homo sapien
tctggagagtgattccacacacggt

SEQ ID NO: 518098 - DNA, 25 bp, Homo sapien
ttccaggtgggtcagaacatatagg

SEQ ID NO: 518099 - DNA, 25 bp, Homo sapien
cacacacggtaaatactgcttttgc

SEQ ID NO: 518100 - DNA, 25 bp, Homo sapien
tctcattcacttacacataagatac

SEQ ID NO: 518101 - DNA, 25 bp, Homo sapien
acctcatccatagctataatctttg

SEQ ID NO: 518102 - DNA, 25 bp, Homo sapien
tattgatactcagttcacctcatcc

SEQ ID NO: 518103 - DNA, 25 bp, Homo sapien
tcagatacagacgattgtattgtct

SEQ ID NO: 518104 - DNA, 25 bp, Homo sapien
ctccaccttgacatcctggaacttg

SEQ ID NO: 518105 - DNA, 25 bp, Homo sapien
cctggaacttgtcagcagatacaaa

SEQ ID NO: 518106 - DNA, 25 bp, Homo sapien
caccttgacatcctggaacttgtca

SEQ ID NO: 518107 - DNA, 25 bp, Homo sapien
gaacttgtcagcagatacaaagggt

SEQ ID NO: 518108 - DNA, 25 bp, Homo sapien
gcgatatcagtaggtccacatgacc

SEQ ID NO: 518109 - DNA, 25 bp, Homo sapien
tatcagtaggtccacatgacctggg

SEQ ID NO: 518110 - DNA, 25 bp, Homo sapien
tcacagcgatatcagtaggtccaca

SEQ ID NO: 518111 - DNA, 25 bp, Homo sapien
tcagtaggtccacatgacctgggac

SEQ ID NO: 518112 - DNA, 25 bp, Homo sapien
ctgctgcaccccacactttcttccc

SEQ ID NO: 518113 - DNA, 25 bp, Homo sapien
tgctgctgcaccccacactttcttc

SEQ ID NO: 518114 - DNA, 25 bp, Homo sapien
cctctctgctgctgcaccccacact

SEQ ID NO: 518115 - DNA, 25 bp, Homo sapien
tctgctgctgcaccccacactttct

SEQ ID NO: 518116 - DNA, 25 bp, Homo sapien
gaagttgtgctcagactcatctccg

SEQ ID NO: 518117 - DNA, 25 bp, Homo sapien
atcatggagaagttgtgctcagact

SEQ ID NO: 518118 - DNA, 25 bp, Homo sapien
tgtgctcagactcatctccgttttc

SEQ ID NO: 518119 - DNA, 25 bp, Homo sapien
ggagaagttgtgctcagactcatct

SEQ ID NO: 518120 - DNA, 25 bp, Homo sapien
tgaagtttagtttggcaaatccact

SEQ ID NO: 518121 - DNA, 25 bp, Homo sapien
ctggggatctttgttgaagtttagt

SEQ ID NO: 518122 - DNA, 25 bp, Homo sapien
tccactttcttctctcagttttcct

SEQ ID NO: 518123 - DNA, 25 bp, Homo sapien
agtttggcaaatccactttcttctc

SEQ ID NO: 518124 - DNA, 25 bp, Homo sapien
tgatccaaagaacgtagtttttcat

SEQ ID NO: 518125 - DNA, 25 bp, Homo sapien
taaatttacaaactcccactcgctg

SEQ ID NO: 518126 - DNA, 25 bp, Homo sapien
aatttacaaactcccactcgctgct

SEQ ID NO: 518127 - DNA, 25 bp, Homo sapien
tcccactcgctgctcaagaggcttc

SEQ ID NO: 518128 - DNA, 25 bp, Homo sapien
ggcttccaaggattcccatgtgcat

SEQ ID NO: 518129 - DNA, 25 bp, Homo sapien
gcttagaagggagtagctctctgat

SEQ ID NO: 518130 - DNA, 25 bp, Homo sapien
tacagccaaatatgctgaaagtctc

SEQ ID NO: 518131 - DNA, 25 bp, Homo sapien
gagtgtagcgtgtaattaattgggc

SEQ ID NO: 518132 - DNA, 25 bp, Homo sapien
aatctaatgagcataacatacagcc

SEQ ID NO: 518133 - DNA, 25 bp, Homo sapien
accataatgggactgtaaaccgtct

SEQ ID NO: 518134 - DNA, 25 bp, Homo sapien
ttgaaaaccataatgggactgtaaa

SEQ ID NO: 518135 - DNA, 25 bp, Homo sapien
ataatgggactgtaaaccgtcttgc

SEQ ID NO: 518136 - DNA, 25 bp, Homo sapien
tgaaaaccataatgggactgtaaac

SEQ ID NO: 518137 - DNA, 25 bp, Homo sapien
actctgagggctgcttagttaccac

SEQ ID NO: 518138 - DNA, 25 bp, Homo sapien
tgagggctgcttagttaccacattc

SEQ ID NO: 518139 - DNA, 25 bp, Homo sapien
tctgagggctgcttagttaccacat

SEQ ID NO: 518140 - DNA, 25 bp, Homo sapien
agggctgcttagttaccacattcat

SEQ ID NO: 518141 - DNA, 25 bp, Homo sapien
ggcttgatctgtacggcatccagca

SEQ ID NO: 518142 - DNA, 25 bp, Homo sapien
tagagtgtcccatcgcagagaacag

SEQ ID NO: 518143 - DNA, 25 bp, Homo sapien
cgtcatggcagttaacttgaaaacc

SEQ ID NO: 518144 - DNA, 25 bp, Homo sapien
cagttgtccactgttgacaaaatgc

SEQ ID NO: 518145 - DNA, 25 bp, Homo sapien
cagagctagtaggtcccaggacggt

SEQ ID NO: 518146 - DNA, 25 bp, Homo sapien
cattgccaataaaagatcagtaagc

SEQ ID NO: 518147 - DNA, 25 bp, Homo sapien
aggacggtggagacagcgagcttct

SEQ ID NO: 518148 - DNA, 25 bp, Homo sapien
aagatcagtaagcccagttcctccc

SEQ ID NO: 518149 - DNA, 25 bp, Homo sapien
cagcaagtgtcaaaagactgccctt

SEQ ID NO: 518150 - DNA, 25 bp, Homo sapien
gcaaagtgcttccaacccaagacgt

SEQ ID NO: 518151 - DNA, 25 bp, Homo sapien
gaagttctcagcatggaccttgtag

SEQ ID NO: 518152 - DNA, 25 bp, Homo sapien
caagacgtcatttcagaagttctca

SEQ ID NO: 518153 - DNA, 25 bp, Homo sapien
gctactcaggatacttatttgctta

SEQ ID NO: 518154 - DNA, 25 bp, Homo sapien
ttattcctctaattaagcaaagcta

SEQ ID NO: 518155 - DNA, 25 bp, Homo sapien
tacgtgcaacttgttcacttataca

SEQ ID NO: 518156 - DNA, 25 bp, Homo sapien
gctatctatagcctagaatgctaat

SEQ ID NO: 518157 - DNA, 25 bp, Homo sapien
tcgccgcggaagtcaagctcatttg

SEQ ID NO: 518158 - DNA, 25 bp, Homo sapien
tgtttgtggacagtcacgtcgccgc

SEQ ID NO: 518159 - DNA, 25 bp, Homo sapien
agcacattccggcatttgcactgtg

SEQ ID NO: 518160 - DNA, 25 bp, Homo sapien
cgtggacgccgctgcattgtgcatg

SEQ ID NO: 518161 - DNA, 25 bp, Homo sapien
gtgacgaaggtaaagaagagactca

SEQ ID NO: 518162 - DNA, 25 bp, Homo sapien
tgacgaaggtaaagaagagactcag

SEQ ID NO: 518163 - DNA, 25 bp, Homo sapien
gaaagcaggcagtgacgaaggtaaa

SEQ ID NO: 518164 - DNA, 25 bp, Homo sapien
tggctctccgtatgtcttagacctc

SEQ ID NO: 518165 - DNA, 25 bp, Homo sapien
ggctctccgtatgtcttagacctca

SEQ ID NO: 518166 - DNA, 25 bp, Homo sapien
cttctggctctccgtatgtcttaga

SEQ ID NO: 518167 - DNA, 25 bp, Homo sapien
tctggctctccgtatgtcttagacc

SEQ ID NO: 518168 - DNA, 25 bp, Homo sapien
ggtaatgtacagcactgacatgcat

SEQ ID NO: 518169 - DNA, 25 bp, Homo sapien
gacatgcattggtatagcctattgg

SEQ ID NO: 518170 - DNA, 25 bp, Homo sapien
aaagtgactgttctgaccaaatggg

SEQ ID NO: 518171 - DNA, 25 bp, Homo sapien
gtgaatactgccctctggtaatgta

SEQ ID NO: 518172 - DNA, 25 bp, Homo sapien
tggttgtctcattcctctctgggct

SEQ ID NO: 518173 - DNA, 25 bp, Homo sapien
tctggttgtctcattcctctctggg

SEQ ID NO: 518174 - DNA, 25 bp, Homo sapien
cagagcagatctcctcctgatcttt

SEQ ID NO: 518175 - DNA, 25 bp, Homo sapien
ctcccttgcaaagaagatgccgcta

SEQ ID NO: 518176 - DNA, 25 bp, Homo sapien
gacaatgtaataggacactctagtc

SEQ ID NO: 518177 - DNA, 25 bp, Homo sapien
taataggacactctagtccaagaac

SEQ ID NO: 518178 - DNA, 25 bp, Homo sapien
tcactgagtctgagttagagagcat

SEQ ID NO: 518179 - DNA, 25 bp, Homo sapien
acatttcactgagtctgagttagag

SEQ ID NO: 518180 - DNA, 25 bp, Homo sapien
tagttggcttgctctctcctttctg

SEQ ID NO: 518181 - DNA, 25 bp, Homo sapien
ttagttggcttgctctctcctttct

SEQ ID NO: 518182 - DNA, 25 bp, Homo sapien
tgctctctcctttctgttttgtaaa

SEQ ID NO: 518183 - DNA, 25 bp, Homo sapien
ggcttgctctctcctttctgttttg

SEQ ID NO: 518184 - DNA, 25 bp, Homo sapien
cctgagaacccttcacgtggactca

SEQ ID NO: 518185 - DNA, 25 bp, Homo sapien
cacgtggactcacttgctcagatac

SEQ ID NO: 518186 - DNA, 25 bp, Homo sapien
tatttcttataaccatactgcctga

SEQ ID NO: 518187 - DNA, 25 bp, Homo sapien
tgcagcaggcaatggtgacacattc

SEQ ID NO: 518188 - DNA, 25 bp, Homo sapien
gtcctccaccaaaagttggtgctgc

SEQ ID NO: 518189 - DNA, 25 bp, Homo sapien
atgtgttgtatgcatcctttccagg

SEQ ID NO: 518190 - DNA, 25 bp, Homo sapien
tggtgttcccccagtaatcaacttc

SEQ ID NO: 518191 - DNA, 25 bp, Homo sapien
tatcgtcccatccttctctttttgg

SEQ ID NO: 518192 - DNA, 25 bp, Homo sapien
catataccatatcagaaaacctgag

SEQ ID NO: 518193 - DNA, 25 bp, Homo sapien
caaccaaagtgagacatataccata

SEQ ID NO: 518194 - DNA, 25 bp, Homo sapien
aagttgctggtattgacaagcaacc

SEQ ID NO: 518195 - DNA, 25 bp, Homo sapien
tgagaactgtagctttgctgccttt

SEQ ID NO: 518196 - DNA, 25 bp, Homo sapien
ttccagagagctaactatgccaatc

SEQ ID NO: 518197 - DNA, 25 bp, Homo sapien
ttttccagagagctaactatgccaa

SEQ ID NO: 518198 - DNA, 25 bp, Homo sapien
cagagagctaactatgccaatcttc

SEQ ID NO: 518199 - DNA, 25 bp, Homo sapien
gagagctaactatgccaatcttctt

SEQ ID NO: 518200 - DNA, 25 bp, Homo sapien
gatcaagtaggctcttatcacctct

SEQ ID NO: 518201 - DNA, 25 bp, Homo sapien
tatgcacgctttagtactgaagctg

SEQ ID NO: 518202 - DNA, 25 bp, Homo sapien
cagttgagaggaatgtgttatgcac

SEQ ID NO: 518203 - DNA, 25 bp, Homo sapien
gacctgtgaccataaatgatatcag

SEQ ID NO: 518204 - DNA, 25 bp, Homo sapien
gtcaccacactttgcttcatctaga

SEQ ID NO: 518205 - DNA, 25 bp, Homo sapien
gagtgtgataggaagcaaacggccc

SEQ ID NO: 518206 - DNA, 25 bp, Homo sapien
gagcattcagcgaagtgtcaccaca

SEQ ID NO: 518207 - DNA, 25 bp, Homo sapien
gaaactctatcaggagagggaccag

SEQ ID NO: 518208 - DNA, 25 bp, Homo sapien
ggaatttgtgcaacacatttttcat

SEQ ID NO: 518209 - DNA, 25 bp, Homo sapien
tgtctcagcaactggacatctgtgt

SEQ ID NO: 518210 - DNA, 25 bp, Homo sapien
tcagcaactggacatctgtgtccac

SEQ ID NO: 518211 - DNA, 25 bp, Homo sapien
tgatgaagtttggaatttgtgcaac

SEQ ID NO: 518212 - DNA, 25 bp, Homo sapien
ttctgccagctcggtgtctgggcat

SEQ ID NO: 518213 - DNA, 25 bp, Homo sapien
cttctgccagctcggtgtctgggca

SEQ ID NO: 518214 - DNA, 25 bp, Homo sapien
ctctaaagccggctgtcttctgcca

SEQ ID NO: 518215 - DNA, 25 bp, Homo sapien
tttctctaaagccggctgtcttctg

SEQ ID NO: 518216 - DNA, 25 bp, Homo sapien
aaccagcatctcctgatgtgttgtg

SEQ ID NO: 518217 - DNA, 25 bp, Homo sapien
catctcctgatgtgttgtgatgtag

SEQ ID NO: 518218 - DNA, 25 bp, Homo sapien
tgttgtgatgtagtttggagggtgg

SEQ ID NO: 518219 - DNA, 25 bp, Homo sapien
cccagggcgtgccacacaaaacgcc

SEQ ID NO: 518220 - DNA, 25 bp, Homo sapien
aaatggctaaagcacagtgcagaga

SEQ ID NO: 518221 - DNA, 25 bp, Homo sapien
cagcaattgacagaaggtccacaaa

SEQ ID NO: 518222 - DNA, 25 bp, Homo sapien
agcaattgacagaaggtccacaaac

SEQ ID NO: 518223 - DNA, 25 bp, Homo sapien
gaaatggctaaagcacagtgcagag

SEQ ID NO: 518224 - DNA, 25 bp, Homo sapien
gagggtctcatcctgaggaatatct

SEQ ID NO: 518225 - DNA, 25 bp, Homo sapien
ttgccatgaaagtgatgtgaaacac

SEQ ID NO: 518226 - DNA, 25 bp, Homo sapien
tgaggaatatctgaacaccagtaga

SEQ ID NO: 518227 - DNA, 25 bp, Homo sapien
catgaaagtgatgtgaaacacagcc

SEQ ID NO: 518228 - DNA, 25 bp, Homo sapien
aagctggtttccctactgttgacat

SEQ ID NO: 518229 - DNA, 25 bp, Homo sapien
ctggtttccctactgttgacatcat

SEQ ID NO: 518230 - DNA, 25 bp, Homo sapien
tgcaagctggtttccctactgttga

SEQ ID NO: 518231 - DNA, 25 bp, Homo sapien
gctggtttccctactgttgacatca

SEQ ID NO: 518232 - DNA, 25 bp, Homo sapien
gagccatgaataggcagtgaagaag

SEQ ID NO: 518233 - DNA, 25 bp, Homo sapien
tgagctggaacttattgctctctcc

SEQ ID NO: 518234 - DNA, 25 bp, Homo sapien
gatttctgcctatgttccctgagct

SEQ ID NO: 518235 - DNA, 25 bp, Homo sapien
gaagaagaatgcacagtcagccaat

SEQ ID NO: 518236 - DNA, 25 bp, Homo sapien
ttggagtctgactactgggattcat

SEQ ID NO: 518237 - DNA, 25 bp, Homo sapien
tttggagtctgactactgggattca

SEQ ID NO: 518238 - DNA, 25 bp, Homo sapien
cataaacctatggaccacagagtga

SEQ ID NO: 518239 - DNA, 25 bp, Homo sapien
tgtgaatgaaattagcgagcagtac

SEQ ID NO: 518240 - DNA, 25 bp, Homo sapien
cctaaactgctaatagtgacctgaa

SEQ ID NO: 518241 - DNA, 25 bp, Homo sapien
tgattatgcaaagaatgcccatgtt

SEQ ID NO: 518242 - DNA, 25 bp, Homo sapien
gagggaaagatagatgctgcagtca

SEQ ID NO: 518243 - DNA, 25 bp, Homo sapien
agagggaaagatagatgctgcagtc

SEQ ID NO: 518244 - DNA, 25 bp, Homo sapien
caggtcaagggacatcactccagaa

SEQ ID NO: 518245 - DNA, 25 bp, Homo sapien
cgttgtgagatcttgtaagtcttac

SEQ ID NO: 518246 - DNA, 25 bp, Homo sapien
gctggaaggcagctatggaaccaca

SEQ ID NO: 518247 - DNA, 25 bp, Homo sapien
cctgaatttggctttcgttgtgaga

SEQ ID NO: 518248 - DNA, 25 bp, Homo sapien
atgccagtactggagagacaccacg

SEQ ID NO: 518249 - DNA, 25 bp, Homo sapien
gacaggcaagtcaaatctctcacac

SEQ ID NO: 518250 - DNA, 25 bp, Homo sapien
gtcgagcgtgcacccactttaggcc

SEQ ID NO: 518251 - DNA, 25 bp, Homo sapien
gacaccacgtgtggagtcttcctgc

SEQ ID NO: 518252 - DNA, 25 bp, Homo sapien
gcaccaaggtggagacatgttggct

SEQ ID NO: 518253 - DNA, 25 bp, Homo sapien
cgagctgtgggagcaccaaggtgga

SEQ ID NO: 518254 - DNA, 25 bp, Homo sapien
ctgggtctggacgattgggtcacat

SEQ ID NO: 518255 - DNA, 25 bp, Homo sapien
gaaccaacggacatatggcaaagcg

SEQ ID NO: 518256 - DNA, 25 bp, Homo sapien
ctcaattaactcattgcagggagcc

SEQ ID NO: 518257 - DNA, 25 bp, Homo sapien
gaagagaatatgaaatccagccaca

SEQ ID NO: 518258 - DNA, 25 bp, Homo sapien
tgtagaacctctcccttgaacaagt

SEQ ID NO: 518259 - DNA, 25 bp, Homo sapien
tctgtgcaatgctcaaacactgacc

SEQ ID NO: 518260 - DNA, 25 bp, Homo sapien
gaatccagactctttctccacagct

SEQ ID NO: 518261 - DNA, 25 bp, Homo sapien
catcctgcaagtgggctgtgtgtga

SEQ ID NO: 518262 - DNA, 25 bp, Homo sapien
tgtgtgtgacacagcaacccagaat

SEQ ID NO: 518263 - DNA, 25 bp, Homo sapien
tcttgatgggcgcttgcagagatca

SEQ ID NO: 518264 - DNA, 25 bp, Homo sapien
acattcttctgctcacaaacatgca

SEQ ID NO: 518265 - DNA, 25 bp, Homo sapien
taatccccgagtggagacataccac

SEQ ID NO: 518266 - DNA, 25 bp, Homo sapien
tctcctgcattgagggcttgtttaa

SEQ ID NO: 518267 - DNA, 25 bp, Homo sapien
tctcagacacgttattgctttttcc

SEQ ID NO: 518268 - DNA, 25 bp, Homo sapien
gtcatgggtgtcaagcttgaacaag

SEQ ID NO: 518269 - DNA, 25 bp, Homo sapien
tgccaaagtcatgggtgtcaagctt

SEQ ID NO: 518270 - DNA, 25 bp, Homo sapien
ccaaagtcatgggtgtcaagcttga

SEQ ID NO: 518271 - DNA, 25 bp, Homo sapien
cagtttatcttgcacagaaagctgt

SEQ ID NO: 518272 - DNA, 25 bp, Homo sapien
taaaatgtcagtagtaaagaagtac

SEQ ID NO: 518273 - DNA, 25 bp, Homo sapien
ctaaaatgtcagtagtaaagaagta

SEQ ID NO: 518274 - DNA, 25 bp, Homo sapien
ccccaaaattccactaaaatgtcag

SEQ ID NO: 518275 - DNA, 25 bp, Homo sapien
aaatgtcagtagtaaagaagtacaa

SEQ ID NO: 518276 - DNA, 25 bp, Homo sapien
ctttcatgggaaactctggctgagg

SEQ ID NO: 518277 - DNA, 25 bp, Homo sapien
tcatgggaaactctggctgaggaga

SEQ ID NO: 518278 - DNA, 25 bp, Homo sapien
gaatttcttcgtagttaagctttca

SEQ ID NO: 518279 - DNA, 25 bp, Homo sapien
tctctgaatttcttcgtagttaagc

SEQ ID NO: 518280 - DNA, 25 bp, Homo sapien
tcttcaggtggatcctgtaaccatg

SEQ ID NO: 518281 - DNA, 25 bp, Homo sapien
ggcgtcttcaggtggatcctgtaac

SEQ ID NO: 518282 - DNA, 25 bp, Homo sapien
tcaggtggatcctgtaaccatgaac

SEQ ID NO: 518283 - DNA, 25 bp, Homo sapien
ggtggatcctgtaaccatgaactgc

SEQ ID NO: 518284 - DNA, 25 bp, Homo sapien
gacaaaaagcctgggattcagtggg

SEQ ID NO: 518285 - DNA, 25 bp, Homo sapien
aacaatgggatctttcaggtagtag

SEQ ID NO: 518286 - DNA, 25 bp, Homo sapien
ctttcaggtagtagacaaaaagcct

SEQ ID NO: 518287 - DNA, 25 bp, Homo sapien
gtagtagacaaaaagcctgggattc

SEQ ID NO: 518288 - DNA, 25 bp, Homo sapien
tattctgcttctggttgcctagagc

SEQ ID NO: 518289 - DNA, 25 bp, Homo sapien
gctggtccctagagctcacaggcta

SEQ ID NO: 518290 - DNA, 25 bp, Homo sapien
cactatctggcatttggctaaaagc

SEQ ID NO: 518291 - DNA, 25 bp, Homo sapien
ggtctcaattctggcacactatcat

SEQ ID NO: 518292 - DNA, 25 bp, Homo sapien
ccctgctgtcaaagtggtaggaaca

SEQ ID NO: 518293 - DNA, 25 bp, Homo sapien
gcctcttttccctgctgtcaaagtg

SEQ ID NO: 518294 - DNA, 25 bp, Homo sapien
tgcctcttttccctgctgtcaaagt

SEQ ID NO: 518295 - DNA, 25 bp, Homo sapien
ttttccctgctgtcaaagtggtagg

SEQ ID NO: 518296 - DNA, 25 bp, Homo sapien
aactcctacaaactcttctgtgtac

SEQ ID NO: 518297 - DNA, 25 bp, Homo sapien
aagctgcacgtggtcaaaataacaa

SEQ ID NO: 518298 - DNA, 25 bp, Homo sapien
gaagctgcacgtggtcaaaataaca

SEQ ID NO: 518299 - DNA, 25 bp, Homo sapien
tgacccgcacttgcatacagcttgg

SEQ ID NO: 518300 - DNA, 25 bp, Homo sapien
cagcttggggaagacatggctatcc

SEQ ID NO: 518301 - DNA, 25 bp, Homo sapien
gcagaagctgcggaccatttttgtt

SEQ ID NO: 518302 - DNA, 25 bp, Homo sapien
ctgcggaccatttttgttcaattgc

SEQ ID NO: 518303 - DNA, 25 bp, Homo sapien
atggagacaggtggtgaagaataaa

SEQ ID NO: 518304 - DNA, 25 bp, Homo sapien
catttgtggagatgcaacagatagg

SEQ ID NO: 518305 - DNA, 25 bp, Homo sapien
tggagatgcaacagataggaatgga

SEQ ID NO: 518306 - DNA, 25 bp, Homo sapien
acagagatttcatgggatggagatg

SEQ ID NO: 518307 - DNA, 25 bp, Homo sapien
cattcacaaggttgaggaatatact

SEQ ID NO: 518308 - DNA, 25 bp, Homo sapien
caaggttgaggaatatactcctcta

SEQ ID NO: 518309 - DNA, 25 bp, Homo sapien
ttcacaaggttgaggaatatactcc

SEQ ID NO: 518310 - DNA, 25 bp, Homo sapien
tggcacattcacaaggttgaggaat

SEQ ID NO: 518311 - DNA, 25 bp, Homo sapien
ttttgggttacttggtgagtccatc

SEQ ID NO: 518312 - DNA, 25 bp, Homo sapien
tctatctgattgtgtgtgtgaccat

SEQ ID NO: 518313 - DNA, 25 bp, Homo sapien
taatgctagacttccttctatctga

SEQ ID NO: 518314 - DNA, 25 bp, Homo sapien
ggtgagtccatcattgtgtaactta

SEQ ID NO: 518315 - DNA, 25 bp, Homo sapien
gacgtctgagtatttcccaatctta

SEQ ID NO: 518316 - DNA, 25 bp, Homo sapien
aacccaaattcttctgacgtctgag

SEQ ID NO: 518317 - DNA, 25 bp, Homo sapien
gaatcagcctcaccatgtgcttttt

SEQ ID NO: 518318 - DNA, 25 bp, Homo sapien
gaaaattaagtctctgcctacacgg

SEQ ID NO: 518319 - DNA, 25 bp, Homo sapien
tctagctcttgatataatgcatcct

SEQ ID NO: 518320 - DNA, 25 bp, Homo sapien
aacagttaatggtccccaccacatc

SEQ ID NO: 518321 - DNA, 25 bp, Homo sapien
tgatataatgcatccttaaaaggaa

SEQ ID NO: 518322 - DNA, 25 bp, Homo sapien
aaggaatccttccaacagttaatgg

SEQ ID NO: 518323 - DNA, 25 bp, Homo sapien
tctgtgggttttcgcttcactctgc

SEQ ID NO: 518324 - DNA, 25 bp, Homo sapien
ccccttgtcagtggtatagtttgca

SEQ ID NO: 518325 - DNA, 25 bp, Homo sapien
tgtccacaatggctatctaacttgc

SEQ ID NO: 518326 - DNA, 25 bp, Homo sapien
tctctggatatgtggtcagtagtag

SEQ ID NO: 518327 - DNA, 25 bp, Homo sapien
tgattagcatggattcctttctgat

SEQ ID NO: 518328 - DNA, 25 bp, Homo sapien
tggagttcaattccattgattagca

SEQ ID NO: 518329 - DNA, 25 bp, Homo sapien
cctgccagtgtagattcaatgtcaa

SEQ ID NO: 518330 - DNA, 25 bp, Homo sapien
gatcctcaagcactgatggagttca

SEQ ID NO: 518331 - DNA, 25 bp, Homo sapien
ccttcctccattcaactccttctcc

SEQ ID NO: 518332 - DNA, 25 bp, Homo sapien
gttgctgtaactaatggatcccttc

SEQ ID NO: 518333 - DNA, 25 bp, Homo sapien
tgtaactaatggatcccttcctcca

SEQ ID NO: 518334 - DNA, 25 bp, Homo sapien
gctgtaactaatggatcccttcctc

SEQ ID NO: 518335 - DNA, 25 bp, Homo sapien
tccaaaagtgggcatgtgtactacg

SEQ ID NO: 518336 - DNA, 25 bp, Homo sapien
gcttgatcatccatgggaagaccag

SEQ ID NO: 518337 - DNA, 25 bp, Homo sapien
tcaaacacggtggtgatgtccaaga

SEQ ID NO: 518338 - DNA, 25 bp, Homo sapien
catcaaagtgaacatccagcaaggg

SEQ ID NO: 518339 - DNA, 25 bp, Homo sapien
gaaaaggtatatttgagcagcatca

SEQ ID NO: 518340 - DNA, 25 bp, Homo sapien
cctcaagcaggtatagatccattaa

SEQ ID NO: 518341 - DNA, 25 bp, Homo sapien
gaagctcctgctttagaggttttac

SEQ ID NO: 518342 - DNA, 25 bp, Homo sapien
gaccatttctatattgaagctcctg

SEQ ID NO: 518343 - DNA, 25 bp, Homo sapien
agagttcacatagttggcagtagtt

SEQ ID NO: 518344 - DNA, 25 bp, Homo sapien
gttcacatagttggcagtagtttgg

SEQ ID NO: 518345 - DNA, 25 bp, Homo sapien
cacatagttggcagtagtttggagg

SEQ ID NO: 518346 - DNA, 25 bp, Homo sapien
gagggaacggatctcccagcaacac

SEQ ID NO: 518347 - DNA, 25 bp, Homo sapien
gctccaatctgtctagctcccaggg

SEQ ID NO: 518348 - DNA, 25 bp, Homo sapien
tgagtggtcaccctgcaattgcagc

SEQ ID NO: 518349 - DNA, 25 bp, Homo sapien
agtgaaagcctttatcctagaagcc

SEQ ID NO: 518350 - DNA, 25 bp, Homo sapien
tagcaaaatctaagaccaaggcaag

SEQ ID NO: 518351 - DNA, 25 bp, Homo sapien
ttagcattatcacatcagcatgcgc

SEQ ID NO: 518352 - DNA, 25 bp, Homo sapien
taatatacaggaccattcctaaggc

SEQ ID NO: 518353 - DNA, 25 bp, Homo sapien
cagcatgcgcattgacgtgtttata

SEQ ID NO: 518354 - DNA, 25 bp, Homo sapien
gactttctggaagctactgaaagcg

SEQ ID NO: 518355 - DNA, 25 bp, Homo sapien
gatgggcactatgcatggctactga

SEQ ID NO: 518356 - DNA, 25 bp, Homo sapien
tacagtcaggtgttagccaaagctg

SEQ ID NO: 518357 - DNA, 25 bp, Homo sapien
tatttgagtcacattagatgggcac

SEQ ID NO: 518358 - DNA, 25 bp, Homo sapien
gaaagtttaccctgacttgcctgat

SEQ ID NO: 518359 - DNA, 25 bp, Homo sapien
taaagagccttttactcattgaggg

SEQ ID NO: 518360 - DNA, 25 bp, Homo sapien
ggtaataggctcagattaaacggat

SEQ ID NO: 518361 - DNA, 25 bp, Homo sapien
tgatgagaatgaggtagacttcagc

SEQ ID NO: 518362 - DNA, 25 bp, Homo sapien
taaacggataaggtgcagccaaatg

SEQ ID NO: 518363 - DNA, 25 bp, Homo sapien
gaaagtcgcttaatgcaatcctgag

SEQ ID NO: 518364 - DNA, 25 bp, Homo sapien
gctccccctgattgcatttcttgta

SEQ ID NO: 518365 - DNA, 25 bp, Homo sapien
cgcttaatgcaatcctgagcttcca

SEQ ID NO: 518366 - DNA, 25 bp, Homo sapien
gtatgggaaagtcgcttaatgcaat

SEQ ID NO: 518367 - DNA, 25 bp, Homo sapien
ctgtgccaatatgggcacgaggtgc

SEQ ID NO: 518368 - DNA, 25 bp, Homo sapien
ccaatatgggcacgaggtgcatacc

SEQ ID NO: 518369 - DNA, 25 bp, Homo sapien
tatgggcacgaggtgcataccagat

SEQ ID NO: 518370 - DNA, 25 bp, Homo sapien
ctactgtgccaatatgggcacgagg

SEQ ID NO: 518371 - DNA, 25 bp, Homo sapien
ccatccttgttaggaactggggaga

SEQ ID NO: 518372 - DNA, 25 bp, Homo sapien
gctccaggaggagtcggcatgggtg

SEQ ID NO: 518373 - DNA, 25 bp, Homo sapien
gactgtgatcacgtggccatccttg

SEQ ID NO: 518374 - DNA, 25 bp, Homo sapien
tcaggagctaatgacataagcgtga

SEQ ID NO: 518375 - DNA, 25 bp, Homo sapien
caaagaacacgtcattagatatggt

SEQ ID NO: 518376 - DNA, 25 bp, Homo sapien
cccgtttctgagtgataagtcttct

SEQ ID NO: 518377 - DNA, 25 bp, Homo sapien
ttacatgatgaaaggaacccgtttc

SEQ ID NO: 518378 - DNA, 25 bp, Homo sapien
tatgacttggactgggtttttacaa

SEQ ID NO: 518379 - DNA, 25 bp, Homo sapien
ttctggatacactcatagacaacac

SEQ ID NO: 518380 - DNA, 25 bp, Homo sapien
atagacaacacctctacttataggg

SEQ ID NO: 518381 - DNA, 25 bp, Homo sapien
cacattcaggatccaattgcaaaat

SEQ ID NO: 518382 - DNA, 25 bp, Homo sapien
gcatccacattcaggatccaattgc

SEQ ID NO: 518383 - DNA, 25 bp, Homo sapien
cttgtacagggatgttaccatctct

SEQ ID NO: 518384 - DNA, 25 bp, Homo sapien
ttgtacagggatgttaccatctctt

SEQ ID NO: 518385 - DNA, 25 bp, Homo sapien
gttagtgcgttcttcaccctggctc

SEQ ID NO: 518386 - DNA, 25 bp, Homo sapien
ggatcccaaggctccataatggcac

SEQ ID NO: 518387 - DNA, 25 bp, Homo sapien
ggtgtctcctttttagcctgcccca

SEQ ID NO: 518388 - DNA, 25 bp, Homo sapien
tggcacacaactggccagttgaaat

SEQ ID NO: 518389 - DNA, 25 bp, Homo sapien
ggcatgagtgcacccatagcatggc

SEQ ID NO: 518390 - DNA, 25 bp, Homo sapien
agtctacttccactaatggcatgag

SEQ ID NO: 518391 - DNA, 25 bp, Homo sapien
acaggagaggggatgacaattgcat

SEQ ID NO: 518392 - DNA, 25 bp, Homo sapien
tgacaattgcattacaaaatgccac

SEQ ID NO: 518393 - DNA, 25 bp, Homo sapien
gttcatcatatttagaagatctgag

SEQ ID NO: 518394 - DNA, 25 bp, Homo sapien
ttcatcatatttagaagatctgaga

SEQ ID NO: 518395 - DNA, 25 bp, Homo sapien
ttattgaattgggctttgcccttcg

SEQ ID NO: 518396 - DNA, 25 bp, Homo sapien
tattattattgaattgggctttgcc

SEQ ID NO: 518397 - DNA, 25 bp, Homo sapien
ttattattgaattgggctttgccct

SEQ ID NO: 518398 - DNA, 25 bp, Homo sapien
attgctagtaaactggtgtgatttg

SEQ ID NO: 518399 - DNA, 25 bp, Homo sapien
tgtcttgtggtacatgagtacagct

SEQ ID NO: 518400 - DNA, 25 bp, Homo sapien
agttcataggaatcatcatgtcttg

SEQ ID NO: 518401 - DNA, 25 bp, Homo sapien
ttttcattcctagaaagttcatagg

SEQ ID NO: 518402 - DNA, 25 bp, Homo sapien
catagatatcaaagaagcagtgctg

SEQ ID NO: 518403 - DNA, 25 bp, Homo sapien
tctgtcctctagtgatttgcaatct

SEQ ID NO: 518404 - DNA, 25 bp, Homo sapien
gatttgcaatctaatgtcttcatga

SEQ ID NO: 518405 - DNA, 25 bp, Homo sapien
gtgaccaaggtactgaggcaccatt

SEQ ID NO: 518406 - DNA, 25 bp, Homo sapien
ccattccgagagaactatagaatct

SEQ ID NO: 518407 - DNA, 25 bp, Homo sapien
tctggcaattgtctgagcgctcctg

SEQ ID NO: 518408 - DNA, 25 bp, Homo sapien
tagcgtcccatcgttcctctcaggg

SEQ ID NO: 518409 - DNA, 25 bp, Homo sapien
tcccatgcacagtttgactgctgat

SEQ ID NO: 518410 - DNA, 25 bp, Homo sapien
agcgctcctgacaccgaagcaaagg

SEQ ID NO: 518411 - DNA, 25 bp, Homo sapien
ttttgtaggtacttctgccaccagc

SEQ ID NO: 518412 - DNA, 25 bp, Homo sapien
ttgtaggtacttctgccaccagcat

SEQ ID NO: 518413 - DNA, 25 bp, Homo sapien
tttgtaggtacttctgccaccagca

SEQ ID NO: 518414 - DNA, 25 bp, Homo sapien
tcaacataaactgatagacccatgg

SEQ ID NO: 518415 - DNA, 25 bp, Homo sapien
caatttggggtgagcaaggaattcc

SEQ ID NO: 518416 - DNA, 25 bp, Homo sapien
tccaagtaaaatgcgaatcaacata

SEQ ID NO: 518417 - DNA, 25 bp, Homo sapien
cacagctttgcctgagagagtacca

SEQ ID NO: 518418 - DNA, 25 bp, Homo sapien
tgctttcagatcacatgcaaccttt

SEQ ID NO: 518419 - DNA, 25 bp, Homo sapien
ggactgaggtctggccaatgtgttc

SEQ ID NO: 518420 - DNA, 25 bp, Homo sapien
catgtggcctcctagttaaactcag

SEQ ID NO: 518421 - DNA, 25 bp, Homo sapien
gtgagacagagctttaggagggact

SEQ ID NO: 518422 - DNA, 25 bp, Homo sapien
gaatacctgtacatgcctctgtgag

SEQ ID NO: 518423 - DNA, 25 bp, Homo sapien
caagagccactcaatacctgtcagt

SEQ ID NO: 518424 - DNA, 25 bp, Homo sapien
tcaactggttaaatatctcaccacc

SEQ ID NO: 518425 - DNA, 25 bp, Homo sapien
tcagtgaccactcagaagtttgggg

SEQ ID NO: 518426 - DNA, 25 bp, Homo sapien
tgttcctaacccatacatcttgggc

SEQ ID NO: 518427 - DNA, 25 bp, Homo sapien
ttcctaacccatacatcttgggcca

SEQ ID NO: 518428 - DNA, 25 bp, Homo sapien
gttcctaacccatacatcttgggcc

SEQ ID NO: 518429 - DNA, 25 bp, Homo sapien
ttgaatggagctccacaaagtgtcg

SEQ ID NO: 518430 - DNA, 25 bp, Homo sapien
gagctccacaaagtgtcgggatgta

SEQ ID NO: 518431 - DNA, 25 bp, Homo sapien
caaagaagggtatccacacggggca

SEQ ID NO: 518432 - DNA, 25 bp, Homo sapien
cacggggcagtttgaatggagctcc

SEQ ID NO: 518433 - DNA, 25 bp, Homo sapien
gatggctcggtattaaccttgatgg

SEQ ID NO: 518434 - DNA, 25 bp, Homo sapien
tcggtattaaccttgatggactcac

SEQ ID NO: 518435 - DNA, 25 bp, Homo sapien
gaagatggctcggtattaaccttga

SEQ ID NO: 518436 - DNA, 25 bp, Homo sapien
tgaagaagatggctcggtattaacc

SEQ ID NO: 518437 - DNA, 25 bp, Homo sapien
cagcagatcatgcaagggccagatt

SEQ ID NO: 518438 - DNA, 25 bp, Homo sapien
gataagcctctatctgggccactag

SEQ ID NO: 518439 - DNA, 25 bp, Homo sapien
gatattcaagatattcagcaggcag

SEQ ID NO: 518440 - DNA, 25 bp, Homo sapien
ggcttgagtcatgcacgtccttaaa

SEQ ID NO: 518441 - DNA, 25 bp, Homo sapien
ttggagatgtgacaagaagcatgtt

SEQ ID NO: 518442 - DNA, 25 bp, Homo sapien
cacttttaatgatctcacttgagac

SEQ ID NO: 518443 - DNA, 25 bp, Homo sapien
gtacctggcagtccctcacttttaa

SEQ ID NO: 518444 - DNA, 25 bp, Homo sapien
tctatttgaagtaccgcaaagcggg

SEQ ID NO: 518445 - DNA, 25 bp, Homo sapien
gatggtaataacaacaccaatagcc

SEQ ID NO: 518446 - DNA, 25 bp, Homo sapien
gacaaagctcagtaaagagatcctg

SEQ ID NO: 518447 - DNA, 25 bp, Homo sapien
ttcagcacttgaataggaaaggtct

SEQ ID NO: 518448 - DNA, 25 bp, Homo sapien
gtcctggtgacaatctttggagtaa

SEQ ID NO: 518449 - DNA, 25 bp, Homo sapien
gtcaccagggaaacaagcaacatca

SEQ ID NO: 518450 - DNA, 25 bp, Homo sapien
agtcaccagggaaacaagcaacatc

SEQ ID NO: 518451 - DNA, 25 bp, Homo sapien
aaatagaatagcattgagtgtttgt

SEQ ID NO: 518452 - DNA, 25 bp, Homo sapien
atagaatagcattgagtgtttgtag

SEQ ID NO: 518453 - DNA, 25 bp, Homo sapien
tagaatagcattgagtgtttgtaga

SEQ ID NO: 518454 - DNA, 25 bp, Homo sapien
aatagaatagcattgagtgtttgta

SEQ ID NO: 518455 - DNA, 25 bp, Homo sapien
tcctgtttggaagccctgttactca

SEQ ID NO: 518456 - DNA, 25 bp, Homo sapien
tctcctgtttggaagccctgttact

SEQ ID NO: 518457 - DNA, 25 bp, Homo sapien
tttctcctgtttggaagccctgtta

SEQ ID NO: 518458 - DNA, 25 bp, Homo sapien
cctgtttggaagccctgttactcac

SEQ ID NO: 518459 - DNA, 25 bp, Homo sapien
tccaagtggatacgcttccttccga

SEQ ID NO: 518460 - DNA, 25 bp, Homo sapien
tctctgcatagtaagatatttcttt

SEQ ID NO: 518461 - DNA, 25 bp, Homo sapien
tgaacatatcctccaagtggatacg

SEQ ID NO: 518462 - DNA, 25 bp, Homo sapien
tccttccgatttctatctctgtgct

SEQ ID NO: 518463 - DNA, 25 bp, Homo sapien
gaggtttgctggtaatcactacaca

SEQ ID NO: 518464 - DNA, 25 bp, Homo sapien
caggcaacatacaggtggataaacc

SEQ ID NO: 518465 - DNA, 25 bp, Homo sapien
gtgttaatgcccaccccaagaatga

SEQ ID NO: 518466 - DNA, 25 bp, Homo sapien
taacgatataatggttcccaggaac

SEQ ID NO: 518467 - DNA, 25 bp, Homo sapien
ttgttccgagcttgatccagagagg

SEQ ID NO: 518468 - DNA, 25 bp, Homo sapien
tattttaagtcgtgcctgagtgtgc

SEQ ID NO: 518469 - DNA, 25 bp, Homo sapien
gaaagtcctctgaattgtacgtgcc

SEQ ID NO: 518470 - DNA, 25 bp, Homo sapien
ttttctcacagacaaggctggcagt

SEQ ID NO: 518471 - DNA, 25 bp, Homo sapien
acagtggtggccgtagcagcggcgg

SEQ ID NO: 518472 - DNA, 25 bp, Homo sapien
gcagcagcgtcaatagcatcggcca

SEQ ID NO: 518473 - DNA, 25 bp, Homo sapien
gggcggcaacatggcggagtgagcg

SEQ ID NO: 518474 - DNA, 25 bp, Homo sapien
cgtcggggcttcacaacaacagtgg

SEQ ID NO: 518475 - DNA, 25 bp, Homo sapien
ggaaaaggcgtgctctcaatctgct

SEQ ID NO: 518476 - DNA, 25 bp, Homo sapien
ggatgattaacccttcggtgccgat

SEQ ID NO: 518477 - DNA, 25 bp, Homo sapien
gagacggtgctcaacctggtaagga

SEQ ID NO: 518478 - DNA, 25 bp, Homo sapien
tcatacaggtcggagaggtcagcaa

SEQ ID NO: 518479 - DNA, 25 bp, Homo sapien
ccggtatttagattgctactttgta

SEQ ID NO: 518480 - DNA, 25 bp, Homo sapien
tgttttgtgaagatttacttgactt

SEQ ID NO: 518481 - DNA, 25 bp, Homo sapien
gaacaagtctctcttccggtattta

SEQ ID NO: 518482 - DNA, 25 bp, Homo sapien
ttgtatattaactgtcaggggcacc

SEQ ID NO: 518483 - DNA, 25 bp, Homo sapien
tgaaaggaattagagccttgggttg

SEQ ID NO: 518484 - DNA, 25 bp, Homo sapien
ctctgacttaatgggcctgtgacta

SEQ ID NO: 518485 - DNA, 25 bp, Homo sapien
tttattcctctgacttaatgggcct

SEQ ID NO: 518486 - DNA, 25 bp, Homo sapien
tgtgactaggcaggttccacattct

SEQ ID NO: 518487 - DNA, 25 bp, Homo sapien
tccgtatttagttctggctgcccat

SEQ ID NO: 518488 - DNA, 25 bp, Homo sapien
gaagtcatagatactattcccagta

SEQ ID NO: 518489 - DNA, 25 bp, Homo sapien
tttcctccgtatttagttctggctg

SEQ ID NO: 518490 - DNA, 25 bp, Homo sapien
tcagtgcatagtgccagtgaagttg

SEQ ID NO: 518491 - DNA, 25 bp, Homo sapien
cccgctgccagcactgggagaggtt

SEQ ID NO: 518492 - DNA, 25 bp, Homo sapien
agcatgacctttggcttcaggctca

SEQ ID NO: 518493 - DNA, 25 bp, Homo sapien
ccactgggctcagtgaggttgccca

SEQ ID NO: 518494 - DNA, 25 bp, Homo sapien
aggttgaagagcacgagacaggcca

SEQ ID NO: 518495 - DNA, 25 bp, Homo sapien
gagcaggcaatgaagcccaggacac

SEQ ID NO: 518496 - DNA, 25 bp, Homo sapien
caagaagatggagcaggcaatgaag

SEQ ID NO: 518497 - DNA, 25 bp, Homo sapien
agaagatggagcaggcaatgaagcc

SEQ ID NO: 518498 - DNA, 25 bp, Homo sapien
tgcaagaagatggagcaggcaatga

SEQ ID NO: 518499 - DNA, 25 bp, Homo sapien
attcaatctcctttaaccaaatggg

SEQ ID NO: 518500 - DNA, 25 bp, Homo sapien
tttcaagggagtcctatattactcc

SEQ ID NO: 518501 - DNA, 25 bp, Homo sapien
cttgaagtcaggtgaaataatcagc

SEQ ID NO: 518502 - DNA, 25 bp, Homo sapien
tctgcttatgaatggatctgaatcc

SEQ ID NO: 518503 - DNA, 25 bp, Homo sapien
tctgtaagggttgaaagcttgataa

SEQ ID NO: 518504 - DNA, 25 bp, Homo sapien
cttaacaataagtacatcaaacatt

SEQ ID NO: 518505 - DNA, 25 bp, Homo sapien
actagaatgagttgatcaacctaac

SEQ ID NO: 518506 - DNA, 25 bp, Homo sapien
ctaacaatgtgttgatctgtaaggg

SEQ ID NO: 518507 - DNA, 25 bp, Homo sapien
gcttctacgtacttttagtggacag

SEQ ID NO: 518508 - DNA, 25 bp, Homo sapien
cagcagtaccttcaattccagtcca

SEQ ID NO: 518509 - DNA, 25 bp, Homo sapien
tgttttgatacacacggcataacct

SEQ ID NO: 518510 - DNA, 25 bp, Homo sapien
tagtggacagatctaggaaatgatg

SEQ ID NO: 518511 - DNA, 25 bp, Homo sapien
tgtgacccgagaatattatatcctg

SEQ ID NO: 518512 - DNA, 25 bp, Homo sapien
cctgccagattgttaagtatgtaga

SEQ ID NO: 518513 - DNA, 25 bp, Homo sapien
gaatggcatccccagtcaattgaga

SEQ ID NO: 518514 - DNA, 25 bp, Homo sapien
agttctgaaagaaggtgtgacccga

SEQ ID NO: 518515 - DNA, 25 bp, Homo sapien
ccaaataggttttcccaagcagttg

SEQ ID NO: 518516 - DNA, 25 bp, Homo sapien
tatttcatgttcacttaaaatccaa

SEQ ID NO: 518517 - DNA, 25 bp, Homo sapien
caggctagtagtttatttcatgttc

SEQ ID NO: 518518 - DNA, 25 bp, Homo sapien
tcttacagtgatttagagacccagg

SEQ ID NO: 518519 - DNA, 25 bp, Homo sapien
taaatgggtaggcataatagtcaac

SEQ ID NO: 518520 - DNA, 25 bp, Homo sapien
tagtcaacaaaaactcactgaatgc

SEQ ID NO: 518521 - DNA, 25 bp, Homo sapien
ctttttgaggttctgtgcctggtcc

SEQ ID NO: 518522 - DNA, 25 bp, Homo sapien
tcatatgcttaactggcccttggcg

SEQ ID NO: 518523 - DNA, 25 bp, Homo sapien
tcattcatatagtgatgttccctgg

SEQ ID NO: 518524 - DNA, 25 bp, Homo sapien
gtgtatttctataagcctataaggt

SEQ ID NO: 518525 - DNA, 25 bp, Homo sapien
gaagagcacaaagcatatttcagtt

SEQ ID NO: 518526 - DNA, 25 bp, Homo sapien
ggtttatgttttcacgatatgccta

SEQ ID NO: 518527 - DNA, 25 bp, Homo sapien
caaacttgagttttctccatggttt

SEQ ID NO: 518528 - DNA, 25 bp, Homo sapien
ttctccatggtttctcctttctcta

SEQ ID NO: 518529 - DNA, 25 bp, Homo sapien
tccatggtttctcctttctctagag

SEQ ID NO: 518530 - DNA, 25 bp, Homo sapien
tcaaacttgagttttctccatggtt

SEQ ID NO: 518531 - DNA, 25 bp, Homo sapien
tccctgtgaggaggtcgtctgcagg

SEQ ID NO: 518532 - DNA, 25 bp, Homo sapien
atccctgtgaggaggtcgtctgcag

SEQ ID NO: 518533 - DNA, 25 bp, Homo sapien
cctgtgaggaggtcgtctgcagggc

SEQ ID NO: 518534 - DNA, 25 bp, Homo sapien
taggaaaatcattaggcccattttc

SEQ ID NO: 518535 - DNA, 25 bp, Homo sapien
aactcttctacttgaagcagcgcct

SEQ ID NO: 518536 - DNA, 25 bp, Homo sapien
ctccaactcttctacttgaagcagc

SEQ ID NO: 518537 - DNA, 25 bp, Homo sapien
tcttctacttgaagcagcgcctcat

SEQ ID NO: 518538 - DNA, 25 bp, Homo sapien
tctacttgaagcagcgcctcatggg

SEQ ID NO: 518539 - DNA, 25 bp, Homo sapien
tcccagcatttagggcctgtctttt

SEQ ID NO: 518540 - DNA, 25 bp, Homo sapien
catagttatctattacatatttagc

SEQ ID NO: 518541 - DNA, 25 bp, Homo sapien
tagttatctattacatatttagcca

SEQ ID NO: 518542 - DNA, 25 bp, Homo sapien
aaattagcagagattacatagttat

SEQ ID NO: 518543 - DNA, 25 bp, Homo sapien
cagagattacatagttatctattac

SEQ ID NO: 518544 - DNA, 25 bp, Homo sapien
gaaagggcaatagttgaagctgttg

SEQ ID NO: 518545 - DNA, 25 bp, Homo sapien
tagtgtgaactctgataaatattcc

SEQ ID NO: 518546 - DNA, 25 bp, Homo sapien
tattcctaccaggactaaaacacag

SEQ ID NO: 518547 - DNA, 25 bp, Homo sapien
gctgttgggttttatatagtgtgaa

SEQ ID NO: 518548 - DNA, 25 bp, Homo sapien
taggagtccggtttcatgctgcaga

SEQ ID NO: 518549 - DNA, 25 bp, Homo sapien
gaaagtgtggctaacaagaatcctc

SEQ ID NO: 518550 - DNA, 25 bp, Homo sapien
catcagtgctccgaagtgtttgcct

SEQ ID NO: 518551 - DNA, 25 bp, Homo sapien
gatggatattctgttgtgccagcac

SEQ ID NO: 518552 - DNA, 25 bp, Homo sapien
ccccattctggattagactgtgagg

SEQ ID NO: 518553 - DNA, 25 bp, Homo sapien
ctacaattgctcaagagccaaggaa

SEQ ID NO: 518554 - DNA, 25 bp, Homo sapien
tattctctaggaggccggagtctta

SEQ ID NO: 518555 - DNA, 25 bp, Homo sapien
gaggaggaataggattcccccattc

SEQ ID NO: 518556 - DNA, 25 bp, Homo sapien
ctccttccatactggtaaaaggata

SEQ ID NO: 518557 - DNA, 25 bp, Homo sapien
cctccttccatactggtaaaaggat

SEQ ID NO: 518558 - DNA, 25 bp, Homo sapien
tgtagtcctatctttgtgacccctg

SEQ ID NO: 518559 - DNA, 25 bp, Homo sapien
gatactttctaccagtgtagtccta

SEQ ID NO: 518560 - DNA, 25 bp, Homo sapien
gcatttgactcttgccttccagtaa

SEQ ID NO: 518561 - DNA, 25 bp, Homo sapien
tgtgacccctgttatccctgtctct

SEQ ID NO: 518562 - DNA, 25 bp, Homo sapien
tttaaagtcaaagacgtgagcctct

SEQ ID NO: 518563 - DNA, 25 bp, Homo sapien
ggtgcagtttatggcaccctaaaac

SEQ ID NO: 518564 - DNA, 25 bp, Homo sapien
cattggcctaatgtcagtactgttg

SEQ ID NO: 518565 - DNA, 25 bp, Homo sapien
tgtagcagtcagaaagcacaatatt

SEQ ID NO: 518566 - DNA, 25 bp, Homo sapien
actctgttgcccagaatggagagca

SEQ ID NO: 518567 - DNA, 25 bp, Homo sapien
aggtggctgggagtacaggcacccg

SEQ ID NO: 518568 - DNA, 25 bp, Homo sapien
gcccagaatggagagcagtggtgca

SEQ ID NO: 518569 - DNA, 25 bp, Homo sapien
ccaggtggctgggagtacaggcacc

SEQ ID NO: 518570 - DNA, 25 bp, Homo sapien
aatcttgatagtcctctgtctttag

SEQ ID NO: 518571 - DNA, 25 bp, Homo sapien
ccaagggagcgtcctggttgcttaa

SEQ ID NO: 518572 - DNA, 25 bp, Homo sapien
taggaaaagtggcatccaagggagc

SEQ ID NO: 518573 - DNA, 25 bp, Homo sapien
ttgccccaagcaagagtaaaccgca

SEQ ID NO: 518574 - DNA, 25 bp, Homo sapien
tcttatggacctatacagaaagagc

SEQ ID NO: 518575 - DNA, 25 bp, Homo sapien
tagtcagatttttaactcagtcatc

SEQ ID NO: 518576 - DNA, 25 bp, Homo sapien
caagtaagttagagactgagagtag

SEQ ID NO: 518577 - DNA, 25 bp, Homo sapien
cagaaagagcttttctccaatgttt

SEQ ID NO: 518578 - DNA, 25 bp, Homo sapien
tagttaggcagagtgttcgtctcgg

SEQ ID NO: 518579 - DNA, 25 bp, Homo sapien
tcgtgtttactcacagacagatgca

SEQ ID NO: 518580 - DNA, 25 bp, Homo sapien
tctcggtctggcgttacagctgggc

SEQ ID NO: 518581 - DNA, 25 bp, Homo sapien
gacagatgcacctaaatcaccagga

SEQ ID NO: 518582 - DNA, 25 bp, Homo sapien
ggtaatgaattccacccagagggac

SEQ ID NO: 518583 - DNA, 25 bp, Homo sapien
ttgagagagctgatgaaccgcggct

SEQ ID NO: 518584 - DNA, 25 bp, Homo sapien
ttaaaggccggcgtgatctgcacca

SEQ ID NO: 518585 - DNA, 25 bp, Homo sapien
gtaattgttcaagggctggcccggc

SEQ ID NO: 518586 - DNA, 25 bp, Homo sapien
ggcagagatccggattgtacaccgg

SEQ ID NO: 518587 - DNA, 25 bp, Homo sapien
tacaccggagtctcgcagtaagctg

SEQ ID NO: 518588 - DNA, 25 bp, Homo sapien
gtctcgcagtaagctgtgggatcca

SEQ ID NO: 518589 - DNA, 25 bp, Homo sapien
tgtgggatccaatgcggctgctaga

SEQ ID NO: 518590 - DNA, 25 bp, Homo sapien
ttccagtagtcaaaataagcacccc

SEQ ID NO: 518591 - DNA, 25 bp, Homo sapien
aaaacaaaagttgcgctgagaccca

SEQ ID NO: 518592 - DNA, 25 bp, Homo sapien
gagaaccgcatggagagatcacctt

SEQ ID NO: 518593 - DNA, 25 bp, Homo sapien
agaatccttgtgtgagagaaccgca

SEQ ID NO: 518594 - DNA, 25 bp, Homo sapien
cggctaattaatccccactcatgga

SEQ ID NO: 518595 - DNA, 25 bp, Homo sapien
tcaggccacctagacagtttggaaa

SEQ ID NO: 518596 - DNA, 25 bp, Homo sapien
cgtgtggaaattataaaggcagggc

SEQ ID NO: 518597 - DNA, 25 bp, Homo sapien
cactcatggatataggcacacaaac

SEQ ID NO: 518598 - DNA, 25 bp, Homo sapien
gaggaatctctcagctttggtatta

SEQ ID NO: 518599 - DNA, 25 bp, Homo sapien
tcaagaggaatctctcagctttggt

SEQ ID NO: 518600 - DNA, 25 bp, Homo sapien
aagaggaatctctcagctttggtat

SEQ ID NO: 518601 - DNA, 25 bp, Homo sapien
aggaatctctcagctttggtattac

SEQ ID NO: 518602 - DNA, 25 bp, Homo sapien
ttggcaaagcggctctcttctgtgc

SEQ ID NO: 518603 - DNA, 25 bp, Homo sapien
aagcatattgacgttttgaaaagac

SEQ ID NO: 518604 - DNA, 25 bp, Homo sapien
ttgaaaagacttggcaaagcggctc

SEQ ID NO: 518605 - DNA, 25 bp, Homo sapien
tctgtgccgaaaacctgcttgtctt

SEQ ID NO: 518606 - DNA, 25 bp, Homo sapien
tccatcaattagtgatcttgacggg

SEQ ID NO: 518607 - DNA, 25 bp, Homo sapien
tacaggtgtattaatgggcatccat

SEQ ID NO: 518608 - DNA, 25 bp, Homo sapien
catttagagtaagataattaacgtc

SEQ ID NO: 518609 - DNA, 25 bp, Homo sapien
gactactggcatatggaagttggct

SEQ ID NO: 518610 - DNA, 25 bp, Homo sapien
gccgtcatcgcgggtgaatgcacca

SEQ ID NO: 518611 - DNA, 25 bp, Homo sapien
ttgccgtcatcgcgggtgaatgcac

SEQ ID NO: 518612 - DNA, 25 bp, Homo sapien
tgccgtcatcgcgggtgaatgcacc

SEQ ID NO: 518613 - DNA, 25 bp, Homo sapien
tttgccgtcatcgcgggtgaatgca

SEQ ID NO: 518614 - DNA, 25 bp, Homo sapien
gttggaggggagacccatcagagcc

SEQ ID NO: 518615 - DNA, 25 bp, Homo sapien
ggaggggagacccatcagagccgga

SEQ ID NO: 518616 - DNA, 25 bp, Homo sapien
gggagacccatcagagccggagaac

SEQ ID NO: 518617 - DNA, 25 bp, Homo sapien
aggggagacccatcagagccggaga

SEQ ID NO: 518618 - DNA, 25 bp, Homo sapien
aggtgtggtcgcagccaagccccag

SEQ ID NO: 518619 - DNA, 25 bp, Homo sapien
tcaaggacgtgagacagccgaggac

SEQ ID NO: 518620 - DNA, 25 bp, Homo sapien
gcttactctccacgtctgctccaga

SEQ ID NO: 518621 - DNA, 25 bp, Homo sapien
tgcagaacacccttggttgtcaagg

SEQ ID NO: 518622 - DNA, 25 bp, Homo sapien
ttctcttctggtagtctgttgtgat

SEQ ID NO: 518623 - DNA, 25 bp, Homo sapien
aacgactgggaagacatgaagttga

SEQ ID NO: 518624 - DNA, 25 bp, Homo sapien
tggacaaacgactgggaagacatga

SEQ ID NO: 518625 - DNA, 25 bp, Homo sapien
tctgttgtgattggacaaacgactg

SEQ ID NO: 518626 - DNA, 25 bp, Homo sapien
aaagctatgtaggaagtaagaaata

SEQ ID NO: 518627 - DNA, 25 bp, Homo sapien
tttgttaggcactcattttacagtg

SEQ ID NO: 518628 - DNA, 25 bp, Homo sapien
tgtccagaatgcttgccaccacaca

SEQ ID NO: 518629 - DNA, 25 bp, Homo sapien
acttatctaaaagctatgtaggaag

SEQ ID NO: 518630 - DNA, 25 bp, Homo sapien
ttaagtacagaacctattacagatt

SEQ ID NO: 518631 - DNA, 25 bp, Homo sapien
taacatacaactcagaacacgtaag

SEQ ID NO: 518632 - DNA, 25 bp, Homo sapien
taaagttgacttaaacctacaatga

SEQ ID NO: 518633 - DNA, 25 bp, Homo sapien
ggtgattatcaatatataacagtat

SEQ ID NO: 518634 - DNA, 25 bp, Homo sapien
cagataagtccgtgtaattccccat

SEQ ID NO: 518635 - DNA, 25 bp, Homo sapien
ttttggcaatgacagataagtccgt

SEQ ID NO: 518636 - DNA, 25 bp, Homo sapien
tgacagataagtccgtgtaattccc

SEQ ID NO: 518637 - DNA, 25 bp, Homo sapien
ggcaatgacagataagtccgtgtaa

SEQ ID NO: 518638 - DNA, 25 bp, Homo sapien
cgcatcctgaagatgtcactgacaa

SEQ ID NO: 518639 - DNA, 25 bp, Homo sapien
tcttcaaagaacgggcagtgaaagt

SEQ ID NO: 518640 - DNA, 25 bp, Homo sapien
tgggctgtatgtttgtaggatgata

SEQ ID NO: 518641 - DNA, 25 bp, Homo sapien
tccagattccaaacgcatcctgaag

SEQ ID NO: 518642 - DNA, 25 bp, Homo sapien
tgtctggatgtctccccttctgggc

SEQ ID NO: 518643 - DNA, 25 bp, Homo sapien
tttgtctggatgtctccccttctgg

SEQ ID NO: 518644 - DNA, 25 bp, Homo sapien
tgcttcatcgttgtttctcctcaca

SEQ ID NO: 518645 - DNA, 25 bp, Homo sapien
tgcttctgcttcatcgttgtttctc

SEQ ID NO: 518646 - DNA, 25 bp, Homo sapien
ctgagagtatgggaaagcttttttg

SEQ ID NO: 518647 - DNA, 25 bp, Homo sapien
gagagtatgggaaagcttttttgag

SEQ ID NO: 518648 - DNA, 25 bp, Homo sapien
tgagagtatgggaaagcttttttga

SEQ ID NO: 518649 - DNA, 25 bp, Homo sapien
agagtatgggaaagcttttttgaga

SEQ ID NO: 518650 - DNA, 25 bp, Homo sapien
gtctgtgactggcggcggcctgtcc

SEQ ID NO: 518651 - DNA, 25 bp, Homo sapien
ggcctgtctgtgactggcggcggcc

SEQ ID NO: 518652 - DNA, 25 bp, Homo sapien
tctgtgactggcggcggcctgtccc

SEQ ID NO: 518653 - DNA, 25 bp, Homo sapien
ggcttggaagtgatgtaagagaagt

SEQ ID NO: 518654 - DNA, 25 bp, Homo sapien
tttctaaatccgatatacccctgga

SEQ ID NO: 518655 - DNA, 25 bp, Homo sapien
cttttctaaatccgatatacccctg

SEQ ID NO: 518656 - DNA, 25 bp, Homo sapien
cctcacagcatgtggaaacttttct

SEQ ID NO: 518657 - DNA, 25 bp, Homo sapien
catctggagcaggagacctgttgtg

SEQ ID NO: 518658 - DNA, 25 bp, Homo sapien
tcttttgttgttggctctgcttcct

SEQ ID NO: 518659 - DNA, 25 bp, Homo sapien
tctgctgccttatgatttctgttga

SEQ ID NO: 518660 - DNA, 25 bp, Homo sapien
tgttgtgtgcaccactaaccccatc

SEQ ID NO: 518661 - DNA, 25 bp, Homo sapien
ttgttaaaaatcttatagcagctct

SEQ ID NO: 518662 - DNA, 25 bp, Homo sapien
ttaaaaatcttatagcagctctcca

SEQ ID NO: 518663 - DNA, 25 bp, Homo sapien
tgttaaaaatcttatagcagctctc

SEQ ID NO: 518664 - DNA, 25 bp, Homo sapien
gttaaaaatcttatagcagctctcc

SEQ ID NO: 518665 - DNA, 25 bp, Homo sapien
cagcctccttggttagtcactagtg

SEQ ID NO: 518666 - DNA, 25 bp, Homo sapien
cactagtgaactcttttgactgcag

SEQ ID NO: 518667 - DNA, 25 bp, Homo sapien
ggctgttgccgtataaacccctcag

SEQ ID NO: 518668 - DNA, 25 bp, Homo sapien
gaaaggtttgcaccaagctcaggct

SEQ ID NO: 518669 - DNA, 25 bp, Homo sapien
tagcttagaattgggaggatactta

SEQ ID NO: 518670 - DNA, 25 bp, Homo sapien
agttattcatcaccaggctgtaagc

SEQ ID NO: 518671 - DNA, 25 bp, Homo sapien
gatgtaaaatatgccagatgtgtgt

SEQ ID NO: 518672 - DNA, 25 bp, Homo sapien
tgttatccaccttgtactagtaagt

SEQ ID NO: 518673 - DNA, 25 bp, Homo sapien
tgcaatttgctgaaacctgagctgc

SEQ ID NO: 518674 - DNA, 25 bp, Homo sapien
tacaggtttccgaagtcatcatcat

SEQ ID NO: 518675 - DNA, 25 bp, Homo sapien
aatcgagtcctaatgaggttctgca

SEQ ID NO: 518676 - DNA, 25 bp, Homo sapien
tcatcatctgatgtagagcctacag

SEQ ID NO: 518677 - DNA, 25 bp, Homo sapien
tcacacagattggcatgggtggtag

SEQ ID NO: 518678 - DNA, 25 bp, Homo sapien
cacagattggcatgggtggtagcaa

SEQ ID NO: 518679 - DNA, 25 bp, Homo sapien
aactgcaggccgtgcttccatccgc

SEQ ID NO: 518680 - DNA, 25 bp, Homo sapien
cacaggcagggaccgaggacctgga

SEQ ID NO: 518681 - DNA, 25 bp, Homo sapien
gctccagggaaagatgggccacgtt

SEQ ID NO: 518682 - DNA, 25 bp, Homo sapien
agcggaatcgcttcatttctgcctc

SEQ ID NO: 518683 - DNA, 25 bp, Homo sapien
tcctctgacaccagcggaatcgctt

SEQ ID NO: 518684 - DNA, 25 bp, Homo sapien
gccatctggagactgtagtaattca

SEQ ID NO: 518685 - DNA, 25 bp, Homo sapien
ctgggtgatcgtaaaagacttccct

SEQ ID NO: 518686 - DNA, 25 bp, Homo sapien
tgatcgtaaaagacttccctcagct

SEQ ID NO: 518687 - DNA, 25 bp, Homo sapien
ggtgatcgtaaaagacttccctcag

SEQ ID NO: 518688 - DNA, 25 bp, Homo sapien
tcgtaaaagacttccctcagcttac

SEQ ID NO: 518689 - DNA, 25 bp, Homo sapien
ggagcagtgccacggggctcatgga

SEQ ID NO: 518690 - DNA, 25 bp, Homo sapien
tgccacggggctcatggattctcag

SEQ ID NO: 518691 - DNA, 25 bp, Homo sapien
catggattctcaggcaacacaaacg

SEQ ID NO: 518692 - DNA, 25 bp, Homo sapien
tcatggattctcaggcaacacaaac

SEQ ID NO: 518693 - DNA, 25 bp, Homo sapien
gggcggtttgggctgcttctcagag

SEQ ID NO: 518694 - DNA, 25 bp, Homo sapien
cagaggtgggcggtttgggctgctt

SEQ ID NO: 518695 - DNA, 25 bp, Homo sapien
ctgaacagaggtgggcggtttgggc

SEQ ID NO: 518696 - DNA, 25 bp, Homo sapien
aactctggcctgatggcacagtgtc

SEQ ID NO: 518697 - DNA, 25 bp, Homo sapien
gcactgatcttcgaagacactcagc

SEQ ID NO: 518698 - DNA, 25 bp, Homo sapien
tcttcgaagacactcagctcttgct

SEQ ID NO: 518699 - DNA, 25 bp, Homo sapien
ttcgaagacactcagctcttgcttg

SEQ ID NO: 518700 - DNA, 25 bp, Homo sapien
agacacagcactgatcttcgaagac

SEQ ID NO: 518701 - DNA, 25 bp, Homo sapien
ctcctttgaagtcctccatgtttcc

SEQ ID NO: 518702 - DNA, 25 bp, Homo sapien
tccatgtttccatgtgaggaggagg

SEQ ID NO: 518703 - DNA, 25 bp, Homo sapien
tcctttgaagtcctccatgtttcca

SEQ ID NO: 518704 - DNA, 25 bp, Homo sapien
agtcctccatgtttccatgtgagga

SEQ ID NO: 518705 - DNA, 25 bp, Homo sapien
tccagagacatcaccgatgcctgac

SEQ ID NO: 518706 - DNA, 25 bp, Homo sapien
gacatcaccgatgcctgaccccaca

SEQ ID NO: 518707 - DNA, 25 bp, Homo sapien
tggatcccttcattgctgaatggct

SEQ ID NO: 518708 - DNA, 25 bp, Homo sapien
ccttggatcccttcattgctgaatg

SEQ ID NO: 518709 - DNA, 25 bp, Homo sapien
caagacacgttacatatctccacca

SEQ ID NO: 518710 - DNA, 25 bp, Homo sapien
tacatatctccaccacagactgctg

SEQ ID NO: 518711 - DNA, 25 bp, Homo sapien
cagactgctgctcgttcacactcag

SEQ ID NO: 518712 - DNA, 25 bp, Homo sapien
cagaaacagttgttacttgccaaga

SEQ ID NO: 518713 - DNA, 25 bp, Homo sapien
tgagccctggtcttttgttgctcca

SEQ ID NO: 518714 - DNA, 25 bp, Homo sapien
actgagccctggtcttttgttgctc

SEQ ID NO: 518715 - DNA, 25 bp, Homo sapien
tggctgcagcgggggactgagccct

SEQ ID NO: 518716 - DNA, 25 bp, Homo sapien
gactgagccctggtcttttgttgct

SEQ ID NO: 518717 - DNA, 25 bp, Homo sapien
ggaggtagcaagctcactcaaaccc

SEQ ID NO: 518718 - DNA, 25 bp, Homo sapien
cgtacccggaggtagcaagctcact

SEQ ID NO: 518719 - DNA, 25 bp, Homo sapien
gcaggagcctggtgcgtacccggag

SEQ ID NO: 518720 - DNA, 25 bp, Homo sapien
gtgcgtacccggaggtagcaagctc

SEQ ID NO: 518721 - DNA, 25 bp, Homo sapien
tgagtccagcgccagcacgccaagc

SEQ ID NO: 518722 - DNA, 25 bp, Homo sapien
tccacctgagtccagcgccagcacg

SEQ ID NO: 518723 - DNA, 25 bp, Homo sapien
tggtccatctatacatttcatctcc

SEQ ID NO: 518724 - DNA, 25 bp, Homo sapien
gccaagccctgccggggtctcacag

SEQ ID NO: 518725 - DNA, 25 bp, Homo sapien
tgtcaccctttgtagatcattctta

SEQ ID NO: 518726 - DNA, 25 bp, Homo sapien
tcttattaagcattaacttggtgaa

SEQ ID NO: 518727 - DNA, 25 bp, Homo sapien
atttccctctcgtcatcttttggag

SEQ ID NO: 518728 - DNA, 25 bp, Homo sapien
tccattctccttgaaggctatttcc

SEQ ID NO: 518729 - DNA, 25 bp, Homo sapien
cagtcagtgcaaacatctgcaaaat

SEQ ID NO: 518730 - DNA, 25 bp, Homo sapien
aaagcagtcagtgcaaacatctgca

SEQ ID NO: 518731 - DNA, 25 bp, Homo sapien
aagcagtcagtgcaaacatctgcaa

SEQ ID NO: 518732 - DNA, 25 bp, Homo sapien
ctctgaggccaaccaacgctctggg

SEQ ID NO: 518733 - DNA, 25 bp, Homo sapien
cttctgaggcgactggccagcttgg

SEQ ID NO: 518734 - DNA, 25 bp, Homo sapien
tcccactctgcacaatcgagtgtct

SEQ ID NO: 518735 - DNA, 25 bp, Homo sapien
aggtgggaggccctgacgtacacca

SEQ ID NO: 518736 - DNA, 25 bp, Homo sapien
tcacatcctcgttcagcgcagggag

SEQ ID NO: 518737 - DNA, 25 bp, Homo sapien
acggacactcgcctgtttacagagc

SEQ ID NO: 518738 - DNA, 25 bp, Homo sapien
tgacatttcagcgagtgagccggct

SEQ ID NO: 518739 - DNA, 25 bp, Homo sapien
cacagtgatgctgcttgggtttcat

SEQ ID NO: 518740 - DNA, 25 bp, Homo sapien
ggttggaccttgagatattggatcc

SEQ ID NO: 518741 - DNA, 25 bp, Homo sapien
gaaggttggaccttgagatattgga

SEQ ID NO: 518742 - DNA, 25 bp, Homo sapien
ttcctctgaaggttggaccttgaga

SEQ ID NO: 518743 - DNA, 25 bp, Homo sapien
ggaccttgagatattggatccccat

SEQ ID NO: 518744 - DNA, 25 bp, Homo sapien
gcttgggttcgtgtctggtttatct

SEQ ID NO: 518745 - DNA, 25 bp, Homo sapien
tcttggatttggtcttgcagcctca

SEQ ID NO: 518746 - DNA, 25 bp, Homo sapien
tagaggctgcccgtattcttggatt

SEQ ID NO: 518747 - DNA, 25 bp, Homo sapien
tattccaattagcaatgtcccatgg

SEQ ID NO: 518748 - DNA, 25 bp, Homo sapien
caggctctgaatgcacgggggtctc

SEQ ID NO: 518749 - DNA, 25 bp, Homo sapien
cgttggtcttccggtccagtccctg

SEQ ID NO: 518750 - DNA, 25 bp, Homo sapien
actgggatgatgcacgggtgccctc

SEQ ID NO: 518751 - DNA, 25 bp, Homo sapien
ctggaagagggatcccgttggtctt

SEQ ID NO: 518752 - DNA, 25 bp, Homo sapien
tgtccacccagaggaccagcatcac

SEQ ID NO: 518753 - DNA, 25 bp, Homo sapien
ctgtccacccagaggaccagcatca

SEQ ID NO: 518754 - DNA, 25 bp, Homo sapien
tttccagatgtgtccggcagatgaa

SEQ ID NO: 518755 - DNA, 25 bp, Homo sapien
cccctctctcgagagtggagagatg

SEQ ID NO: 518756 - DNA, 25 bp, Homo sapien
ggtcgtcatgaattgtcagatccag

SEQ ID NO: 518757 - DNA, 25 bp, Homo sapien
catggacatttggagaccttgctga

SEQ ID NO: 518758 - DNA, 25 bp, Homo sapien
gcttggaagcgcttttcttctctcc

SEQ ID NO: 518759 - DNA, 25 bp, Homo sapien
aggcttccttgccagcttcaaaggt

SEQ ID NO: 518760 - DNA, 25 bp, Homo sapien
ttccttgccagcttcaaaggtttta

SEQ ID NO: 518761 - DNA, 25 bp, Homo sapien
ttggagcttggaagcgcttttcttc

SEQ ID NO: 518762 - DNA, 25 bp, Homo sapien
ccattgacaatggtaagaaagtacc

SEQ ID NO: 518763 - DNA, 25 bp, Homo sapien
ttgacaggattaggacccaacgcca

SEQ ID NO: 518764 - DNA, 25 bp, Homo sapien
caattgcattctagccttgacagga

SEQ ID NO: 518765 - DNA, 25 bp, Homo sapien
aagtaccaactggacaattgcattc

SEQ ID NO: 518766 - DNA, 25 bp, Homo sapien
tccctgtcaccatctactgctctca

SEQ ID NO: 518767 - DNA, 25 bp, Homo sapien
ctgctctcagagttaccctcttaac

SEQ ID NO: 518768 - DNA, 25 bp, Homo sapien
gctctcagagttaccctcttaactt

SEQ ID NO: 518769 - DNA, 25 bp, Homo sapien
cctggtggggtgaagcgggtttcat

SEQ ID NO: 518770 - DNA, 25 bp, Homo sapien
agagaatgtttatggccagccgctt

SEQ ID NO: 518771 - DNA, 25 bp, Homo sapien
gatgtatccatatcaacggataagg

SEQ ID NO: 518772 - DNA, 25 bp, Homo sapien
tatcaacggataaggggtgcagcag

SEQ ID NO: 518773 - DNA, 25 bp, Homo sapien
aggcgggcgaaagccttcccagcag

SEQ ID NO: 518774 - DNA, 25 bp, Homo sapien
tttcgctcccatgaccccattgatg

SEQ ID NO: 518775 - DNA, 25 bp, Homo sapien
aaacacaactgagtggaactatgcg

SEQ ID NO: 518776 - DNA, 25 bp, Homo sapien
ctggttttaggaggggccatagaag

SEQ ID NO: 518777 - DNA, 25 bp, Homo sapien
atcctgaagacagctaaagcccaac

SEQ ID NO: 518778 - DNA, 25 bp, Homo sapien
gaagctctgatccaccgatcctgaa

SEQ ID NO: 518779 - DNA, 25 bp, Homo sapien
tctgatccaccgatcctgaagacag

SEQ ID NO: 518780 - DNA, 25 bp, Homo sapien
actgtgctcctggatggaaaatgtg

SEQ ID NO: 518781 - DNA, 25 bp, Homo sapien
ctgtcacagggggactgtgctcctg

SEQ ID NO: 518782 - DNA, 25 bp, Homo sapien
ggaaaatgtggaggagaccaagacc

SEQ ID NO: 518783 - DNA, 25 bp, Homo sapien
aaatgtggaggagaccaagacccat

SEQ ID NO: 518784 - DNA, 25 bp, Homo sapien
caaaatgtgttccacgattcccaca

SEQ ID NO: 518785 - DNA, 25 bp, Homo sapien
aaaatgtgttccacgattcccacat

SEQ ID NO: 518786 - DNA, 25 bp, Homo sapien
ccaaaatgtgttccacgattcccac

SEQ ID NO: 518787 - DNA, 25 bp, Homo sapien
taccaaaatgtgttccacgattccc

SEQ ID NO: 518788 - DNA, 25 bp, Homo sapien
gggaaagctacactctgaccgcatg

SEQ ID NO: 518789 - DNA, 25 bp, Homo sapien
gaggagcgtacccttcagctaaggt

SEQ ID NO: 518790 - DNA, 25 bp, Homo sapien
tggcccaggcaggaacgtaatatat

SEQ ID NO: 518791 - DNA, 25 bp, Homo sapien
caatatggcaaatgaactgaggagc

SEQ ID NO: 518792 - DNA, 25 bp, Homo sapien
tcagcacgattgagcttcagcgcaa

SEQ ID NO: 518793 - DNA, 25 bp, Homo sapien
taaagattccttctgacgtcctagg

SEQ ID NO: 518794 - DNA, 25 bp, Homo sapien
gatagagttgtctagtggacgccct

SEQ ID NO: 518795 - DNA, 25 bp, Homo sapien
ggatatgactataaccttggaccag

SEQ ID NO: 518796 - DNA, 25 bp, Homo sapien
cacttttagagttgaggccaggctg

SEQ ID NO: 518797 - DNA, 25 bp, Homo sapien
gaatacatttgagttgggcacctgc

SEQ ID NO: 518798 - DNA, 25 bp, Homo sapien
cctagacgtcgatgggaaaaggcct

SEQ ID NO: 518799 - DNA, 25 bp, Homo sapien
taggtactgttcagccaccagatgc

SEQ ID NO: 518800 - DNA, 25 bp, Homo sapien
tcacaggatcttattccctctttct

SEQ ID NO: 518801 - DNA, 25 bp, Homo sapien
cagagcaccgggcaatttattgctc

SEQ ID NO: 518802 - DNA, 25 bp, Homo sapien
tagatgtctgacactgagtagagag

SEQ ID NO: 518803 - DNA, 25 bp, Homo sapien
tcatactagatgtagattgcacagt

SEQ ID NO: 518804 - DNA, 25 bp, Homo sapien
cacaagacaagctgtggtgactccc

SEQ ID NO: 518805 - DNA, 25 bp, Homo sapien
cgctggcgctagcagcagctgatat

SEQ ID NO: 518806 - DNA, 25 bp, Homo sapien
cagctgatatggaagcagcatttct

SEQ ID NO: 518807 - DNA, 25 bp, Homo sapien
tccctgagagtctgcgctggcgcta

SEQ ID NO: 518808 - DNA, 25 bp, Homo sapien
cgtgtgtcgaagttataaacctgcc

SEQ ID NO: 518809 - DNA, 25 bp, Homo sapien
tatttcctgggtcaagctctttgcc

SEQ ID NO: 518810 - DNA, 25 bp, Homo sapien
gaagaaagaaccgtgcgtgtgtcga

SEQ ID NO: 518811 - DNA, 25 bp, Homo sapien
tacatactgcagatcctagcttgac

SEQ ID NO: 518812 - DNA, 25 bp, Homo sapien
gagcttggggagtagtcttccgatt

SEQ ID NO: 518813 - DNA, 25 bp, Homo sapien
ggagcgaacagtctcggaggagctt

SEQ ID NO: 518814 - DNA, 25 bp, Homo sapien
agctggctgcgccttgtaccggctc

SEQ ID NO: 518815 - DNA, 25 bp, Homo sapien
tccgattccgagttgagttcgggag

SEQ ID NO: 518816 - DNA, 25 bp, Homo sapien
tcctggttgcgtcttcgtcggaaaa

SEQ ID NO: 518817 - DNA, 25 bp, Homo sapien
cgtcttcgtcggaaaacctgcctct

SEQ ID NO: 518818 - DNA, 25 bp, Homo sapien
tcacatcctggttgcgtcttcgtcg

SEQ ID NO: 518819 - DNA, 25 bp, Homo sapien
gcctctccttatcaagagcggtggt

SEQ ID NO: 518820 - DNA, 25 bp, Homo sapien
tctttaagggacctggtcatgacat

SEQ ID NO: 518821 - DNA, 25 bp, Homo sapien
gtccatcatggcacactttttgttg

SEQ ID NO: 518822 - DNA, 25 bp, Homo sapien
aggtctttaagggacctggtcatga

SEQ ID NO: 518823 - DNA, 25 bp, Homo sapien
tgtccatcatggcacactttttgtt

SEQ ID NO: 518824 - DNA, 25 bp, Homo sapien
tcaattaacatgcagctcagggtag

SEQ ID NO: 518825 - DNA, 25 bp, Homo sapien
ttcaattaacatgcagctcagggta

SEQ ID NO: 518826 - DNA, 25 bp, Homo sapien
gcctgagtcctgtgtgtaaaaatgc

SEQ ID NO: 518827 - DNA, 25 bp, Homo sapien
aagttacgacacatggtattttgct

SEQ ID NO: 518828 - DNA, 25 bp, Homo sapien
tagttcttagtcttaaacctattga

SEQ ID NO: 518829 - DNA, 25 bp, Homo sapien
ggtctgttgaaacgtctacctttga

SEQ ID NO: 518830 - DNA, 25 bp, Homo sapien
agacgtctatttagtctgtcttaca

SEQ ID NO: 518831 - DNA, 25 bp, Homo sapien
cagggattttgcgtcccactctgtc

SEQ ID NO: 518832 - DNA, 25 bp, Homo sapien
gcacatcaggtttgtggtcagggat

SEQ ID NO: 518833 - DNA, 25 bp, Homo sapien
aagtcattggcattggaatgaattc

SEQ ID NO: 518834 - DNA, 25 bp, Homo sapien
gggaagaaaagcacatcaggtttgt

SEQ ID NO: 518835 - DNA, 25 bp, Homo sapien
tatcaaagaccaaaagacagtggct

SEQ ID NO: 518836 - DNA, 25 bp, Homo sapien
tgctaactaggaacagaactcagtc

SEQ ID NO: 518837 - DNA, 25 bp, Homo sapien
gcagataggatccaccatgtacaca

SEQ ID NO: 518838 - DNA, 25 bp, Homo sapien
gaaactgagacctaggcatgtggag

SEQ ID NO: 518839 - DNA, 25 bp, Homo sapien
ccgcaatgcttgcaggattcacaag

SEQ ID NO: 518840 - DNA, 25 bp, Homo sapien
gcaggattcacaagagatgtactca

SEQ ID NO: 518841 - DNA, 25 bp, Homo sapien
ccaaacatgtttctgttccgcaatg

SEQ ID NO: 518842 - DNA, 25 bp, Homo sapien
tcacaagagatgtactcactttcat

SEQ ID NO: 518843 - DNA, 25 bp, Homo sapien
agtggttttgaagtttaaatctatg

SEQ ID NO: 518844 - DNA, 25 bp, Homo sapien
tctaatcacagtttgagtggttttg

SEQ ID NO: 518845 - DNA, 25 bp, Homo sapien
tctctctaatcacagtttgagtggt

SEQ ID NO: 518846 - DNA, 25 bp, Homo sapien
tctctaatcacagtttgagtggttt

SEQ ID NO: 518847 - DNA, 25 bp, Homo sapien
caaattctgtgttacagagggagcc

SEQ ID NO: 518848 - DNA, 25 bp, Homo sapien
ccaaattctgtgttacagagggagc

SEQ ID NO: 518849 - DNA, 25 bp, Homo sapien
cccaaattctgtgttacagagggag

SEQ ID NO: 518850 - DNA, 25 bp, Homo sapien
aaattctgtgttacagagggagcct

SEQ ID NO: 518851 - DNA, 25 bp, Homo sapien
ggtgacaggagcaaagtctcctgga

SEQ ID NO: 518852 - DNA, 25 bp, Homo sapien
ggggcagcgtcctccctggactctg

SEQ ID NO: 518853 - DNA, 25 bp, Homo sapien
gtgggtcaagtgaaggatgctgctc

SEQ ID NO: 518854 - DNA, 25 bp, Homo sapien
ccttggaagcagctctctggtatga

SEQ ID NO: 518855 - DNA, 25 bp, Homo sapien
cctgtaatgattgtttgtgttagaa

SEQ ID NO: 518856 - DNA, 25 bp, Homo sapien
gtaaaaacagccatgagcgctttaa

SEQ ID NO: 518857 - DNA, 25 bp, Homo sapien
agccatgagcgctttaaacacaaca

SEQ ID NO: 518858 - DNA, 25 bp, Homo sapien
gagcagggatgctcgcctgtaatga

SEQ ID NO: 518859 - DNA, 25 bp, Homo sapien
aaggaactggttaatggagactgcc

SEQ ID NO: 518860 - DNA, 25 bp, Homo sapien
gagactgccagcacgttgccatgga

SEQ ID NO: 518861 - DNA, 25 bp, Homo sapien
taaagcagcatatggactggataac

SEQ ID NO: 518862 - DNA, 25 bp, Homo sapien
caaaagcatgtttatccaccgaagg

SEQ ID NO: 518863 - DNA, 25 bp, Homo sapien
gaccctgatctcttgatggtaaacc

SEQ ID NO: 518864 - DNA, 25 bp, Homo sapien
tcttgatggtaaacccgtggtccag

SEQ ID NO: 518865 - DNA, 25 bp, Homo sapien
cattcctggttgctggtagtagtcc

SEQ ID NO: 518866 - DNA, 25 bp, Homo sapien
tccaatacattcctggttgctggta

SEQ ID NO: 518867 - DNA, 25 bp, Homo sapien
tctctgatgagcattggtgatctcc

SEQ ID NO: 518868 - DNA, 25 bp, Homo sapien
gggagagcgtatatacctaggaaaa

SEQ ID NO: 518869 - DNA, 25 bp, Homo sapien
ctccagcaggtagttaggtttctaa

SEQ ID NO: 518870 - DNA, 25 bp, Homo sapien
ccacaaactaacactatgtcctaaa

SEQ ID NO: 518871 - DNA, 25 bp, Homo sapien
tcaagatctatagtgttccaagctc

SEQ ID NO: 518872 - DNA, 25 bp, Homo sapien
taatctttgcctagagctgcgatca

SEQ ID NO: 518873 - DNA, 25 bp, Homo sapien
caagacatcgtgacttcgttgggtg

SEQ ID NO: 518874 - DNA, 25 bp, Homo sapien
tgtgcagacgcatcaataaaatagt

SEQ ID NO: 518875 - DNA, 25 bp, Homo sapien
ggtgttggataatgatgtgatgccc

SEQ ID NO: 518876 - DNA, 25 bp, Homo sapien
tataagtcccatacctcctctagtg

SEQ ID NO: 518877 - DNA, 25 bp, Homo sapien
cctgtctcttaggtgggttgcttta

SEQ ID NO: 518878 - DNA, 25 bp, Homo sapien
tatatactgcaagacaccctggagg

SEQ ID NO: 518879 - DNA, 25 bp, Homo sapien
ccagctgctgtgctattcggcttgg

SEQ ID NO: 518880 - DNA, 25 bp, Homo sapien
tatctttccagctactgacagctga

SEQ ID NO: 518881 - DNA, 25 bp, Homo sapien
ttctttatctttccagctactgaca

SEQ ID NO: 518882 - DNA, 25 bp, Homo sapien
tccagctgctgtgctattcggcttg

SEQ ID NO: 518883 - DNA, 25 bp, Homo sapien
gttccacagttactcatttggccat

SEQ ID NO: 518884 - DNA, 25 bp, Homo sapien
ccataaataaactcaggctgttcca

SEQ ID NO: 518885 - DNA, 25 bp, Homo sapien
ggcccataaataaactcaggctgtt

SEQ ID NO: 518886 - DNA, 25 bp, Homo sapien
tgcatggcccataaataaactcagg

SEQ ID NO: 518887 - DNA, 25 bp, Homo sapien
tcgggcaaaatgatcaaatgagctt

SEQ ID NO: 518888 - DNA, 25 bp, Homo sapien
tgatcaaatgagctttcaatgatga

SEQ ID NO: 518889 - DNA, 25 bp, Homo sapien
ggctacctcgggcaaaatgatcaaa

SEQ ID NO: 518890 - DNA, 25 bp, Homo sapien
tagagttccaggctacctcgggcaa

SEQ ID NO: 518891 - DNA, 25 bp, Homo sapien
catgattgtggagaaggttgaggaa

SEQ ID NO: 518892 - DNA, 25 bp, Homo sapien
aaacatgattgtggagaaggttgag

SEQ ID NO: 518893 - DNA, 25 bp, Homo sapien
gattgtggagaaggttgaggaaagg

SEQ ID NO: 518894 - DNA, 25 bp, Homo sapien
aaaaacatgattgtggagaaggttg

SEQ ID NO: 518895 - DNA, 25 bp, Homo sapien
ccgtatgatcggcacaggctgtgtt

SEQ ID NO: 518896 - DNA, 25 bp, Homo sapien
gacactgggcagcatagagttgcac

SEQ ID NO: 518897 - DNA, 25 bp, Homo sapien
tctaggatcctatgtgcagcaagca

SEQ ID NO: 518898 - DNA, 25 bp, Homo sapien
tagagttgcacggagccaacagggt

SEQ ID NO: 518899 - DNA, 25 bp, Homo sapien
tcttgctgaataaccccaccttctt

SEQ ID NO: 518900 - DNA, 25 bp, Homo sapien
gccacctcacaatggatttccttat

SEQ ID NO: 518901 - DNA, 25 bp, Homo sapien
gctaggagtttgctctccagccacc

SEQ ID NO: 518902 - DNA, 25 bp, Homo sapien
cactgccagttcttgagctaggagt

SEQ ID NO: 518903 - DNA, 25 bp, Homo sapien
tcaaggttcctagcaactctttcag

SEQ ID NO: 518904 - DNA, 25 bp, Homo sapien
tcctgtcaaggttcctagcaactct

SEQ ID NO: 518905 - DNA, 25 bp, Homo sapien
aggttcctagcaactctttcagata

SEQ ID NO: 518906 - DNA, 25 bp, Homo sapien
ctaatctcctgtcaaggttcctagc

SEQ ID NO: 518907 - DNA, 25 bp, Homo sapien
aatggaaaatgaactctcaccactg

SEQ ID NO: 518908 - DNA, 25 bp, Homo sapien
ccatacgttctggtttggtggtagt

SEQ ID NO: 518909 - DNA, 25 bp, Homo sapien
tctgaagttcgacacaggctggttg

SEQ ID NO: 518910 - DNA, 25 bp, Homo sapien
gagcattgcaactgacacgaacaaa

SEQ ID NO: 518911 - DNA, 25 bp, Homo sapien
gcacccccagtccccttgactctct

SEQ ID NO: 518912 - DNA, 25 bp, Homo sapien
cttttcaaaagagtatgtaggtggg

SEQ ID NO: 518913 - DNA, 25 bp, Homo sapien
ggaagccagtgcaaaccaattaaat

SEQ ID NO: 518914 - DNA, 25 bp, Homo sapien
tcagacctgtattagaggctccagt

SEQ ID NO: 518915 - DNA, 25 bp, Homo sapien
cagtctgttctgctagtaccaaagt

SEQ ID NO: 518916 - DNA, 25 bp, Homo sapien
acacaggtgagtaagctgatgctcc

SEQ ID NO: 518917 - DNA, 25 bp, Homo sapien
aggtcacacaggtgagtaagctgat

SEQ ID NO: 518918 - DNA, 25 bp, Homo sapien
tcctcccatgggtctacattcctct

SEQ ID NO: 518919 - DNA, 25 bp, Homo sapien
cattcctcttccagacgtggctgct

SEQ ID NO: 518920 - DNA, 25 bp, Homo sapien
gacgatggctttgttcatgtggctc

SEQ ID NO: 518921 - DNA, 25 bp, Homo sapien
cattggaaccatccatagagaggcc

SEQ ID NO: 518922 - DNA, 25 bp, Homo sapien
caaagggcaagaatacggcagagca

SEQ ID NO: 518923 - DNA, 25 bp, Homo sapien
gaggcctcgctcatgactctttcaa

SEQ ID NO: 518924 - DNA, 25 bp, Homo sapien
aataaaggtgaacttagaggaagct

SEQ ID NO: 518925 - DNA, 25 bp, Homo sapien
tggacccaggacgtgtgaaaaataa

SEQ ID NO: 518926 - DNA, 25 bp, Homo sapien
ggatttggacccaggacgtgtgaaa

SEQ ID NO: 518927 - DNA, 25 bp, Homo sapien
ggtgaacttagaggaagctcctgga

SEQ ID NO: 518928 - DNA, 25 bp, Homo sapien
actgctgagacacgtatatattgcc

SEQ ID NO: 518929 - DNA, 25 bp, Homo sapien
cagaagtctaaggtccagagggagc

SEQ ID NO: 518930 - DNA, 25 bp, Homo sapien
gaagattcatgtcgttcccaacagc

SEQ ID NO: 518931 - DNA, 25 bp, Homo sapien
taattatcagcaaagtgggaccatg

SEQ ID NO: 518932 - DNA, 25 bp, Homo sapien
aacatgcacattctgctggaactga

SEQ ID NO: 518933 - DNA, 25 bp, Homo sapien
ctagcaaacatgcacattctgctgg

SEQ ID NO: 518934 - DNA, 25 bp, Homo sapien
atgcacattctgctggaactgactg

SEQ ID NO: 518935 - DNA, 25 bp, Homo sapien
aaacatgcacattctgctggaactg

SEQ ID NO: 518936 - DNA, 25 bp, Homo sapien
aagtctccccacagagcagactggg

SEQ ID NO: 518937 - DNA, 25 bp, Homo sapien
ctggaactgtctggttgtatcagac

SEQ ID NO: 518938 - DNA, 25 bp, Homo sapien
ggaagctgttctcactaccctggaa

SEQ ID NO: 518939 - DNA, 25 bp, Homo sapien
tccaggattgagctctggcacctcc

SEQ ID NO: 518940 - DNA, 25 bp, Homo sapien
tcctctatggctcttcaggagcctt

SEQ ID NO: 518941 - DNA, 25 bp, Homo sapien
agattgtctagtttcttctgtgtgg

SEQ ID NO: 518942 - DNA, 25 bp, Homo sapien
gtttctccagagctaatatgcaatt

SEQ ID NO: 518943 - DNA, 25 bp, Homo sapien
gacaatttatggatggtaagctttt

SEQ ID NO: 518944 - DNA, 25 bp, Homo sapien
tcaatgtacagccagatgattcagt

SEQ ID NO: 518945 - DNA, 25 bp, Homo sapien
caatgtacagccagatgattcagtg

SEQ ID NO: 518946 - DNA, 25 bp, Homo sapien
cttggcttactaccacctctggttt

SEQ ID NO: 518947 - DNA, 25 bp, Homo sapien
cttactaccacctctggtttccagg

SEQ ID NO: 518948 - DNA, 25 bp, Homo sapien
aaggaatgttaggagagaacaaagg

SEQ ID NO: 518949 - DNA, 25 bp, Homo sapien
aacaaaggaaatggtgcgagtcact

SEQ ID NO: 518950 - DNA, 25 bp, Homo sapien
gcagaaaatcgctgatctacatcga

SEQ ID NO: 518951 - DNA, 25 bp, Homo sapien
tctacatcgaccaacagcatcatgg
